(19) United States
(12) Patent Application Publication
(10) Pub. No.: US 2016/0046990 A1
(43) Pub. Date: Feb. 18, 2016

(54) GENETIC MARKERS ASSOCIATED WITH ASD AND OTHER CHILDHOOD DEVELOPMENTAL DELAY DISORDERS

(71) Applicant: Lineagen, Inc., Slat Lake City, UT (US)

(72) Inventor: Charles Henry HENSEL, Salt Lake City, UT (US)

(21) Appl. No.: 14/433,572

(22) PCT Filed: Oct. 4, 2013
(86) PCT No.: PCT/US2013/063532

§ 371 Date: Apr. 3, 2015

Related U.S. Application Data
(60) Provisional application No. 61/709,427, filed on Oct. 4, 2012.
(60) Provisional application No. 61/717,313, filed on Oct. 23, 2012.
(60) Provisional application No. 61/799,848, filed on Mar. 15, 2013.

(51) Int. Cl. C12Q 1/68

(52) U.S. Cl. CPC C12Q 1/6883; C12Q 2600/156

(57) ABSTRACT

The present invention relates generally to genetic markers for autism spectrum disorders and other childhood developmental delay disorders, in particular to copy number variant genetic markers for autism spectrum disorders.

### CROSS-REFERENCE TO RELATED APPLICATIONS

[0001] This application claims the benefit under 35 U.S.C. §119(e) of U.S. Provisional Patent Application No. 61/799,848, filed Mar. 15, 2013, U.S. Provisional Patent Application No. 61/717,313, filed Oct. 23, 2012, and U.S. Provisional Patent Application No. 61/709,427, filed Oct. 4, 2012, each of which is incorporated by reference herein in its entirety.

### STATEMENT REGARDING SEQUENCE LISTING

[0002] The Sequence Listing associated with this application is provided in text format in lieu of a paper copy, and is hereby incorporated by reference into the specification. The name of the text file containing the Sequence Listing is LINE_{—}004_{—}03WO_ST25.txt. The text file is 12492.8 KB, was created on Oct. 4, 2013, and is being submitted electronically via EFS-Web.

### BACKGROUND

### Description of the Related Art

[0003] According to the National Institute of Mental Health (NIMH), autism is a group of developmental brain disorders, collectively referred to as autism spectrum disorder (ASD). As the term “spectrum” might suggest, ASD encompasses a wide range of symptoms, skills, and levels of impairment, or disability, that children with the disorder can have and is a complex, heterogeneous, behaviorally-defined disorder characterized by impairments in social interaction and communication as well as by repetitive and stereotyped behaviors and interests. The Diagnostic and Statistical Manual of Mental Disorders, Fourth Edition—Text Revision defines five disorders, sometimes called pervasive developmental disorders (PDDs), as ASD. These include: Autistic disorder (classic autism), Asperger's disorder (Asperger syndrome), Pervasive developmental disorder not otherwise specified (PDD-NOS), Rett's disorder (Rett syndrome), and Childhood disintegrative disorder (CDD). It is noted that the majority of Rett syndrome cases are known to be caused by mutations in either the MeCP2 gene or the CDKL5 gene and it is anticipated that updated revisions of the Diagnostic and Statistical Manual of Mental Disorders will classify Rett syndrome separately from ASD.

[0004] While environmental elements, such as peri- and post-natal stress, likely contribute to the development of ASD, evidence of chromosomal abnormalities, mutations in single genes, and multiple gene polymorphisms in autistic individuals show that autism is a genetic disorder.

[0005] Prevalence estimates for ASD have been reported to be approximately 1 in every 100 children in the general population. In families with an autistic child, the risk is estimated to be greater than 15% that an additional offspring will also have autism (Landa R J, Holman K C, Garrett-Mayer E. Social and communication development in toddlers with early and later diagnosis of autism spectrum disorders. Arch Gen Psychiatry 2007; 64:853-64; Landa R J. Diagnosis of autism spectrum disorders in the first 3 years of life. Nat Clin Pract Neurol 2008; 4:138-47).

[0006] The current state-of-the-art diagnosis of ASD is a series of various behavioral questionnaires. Because the ASD phenotype is so complicated, a molecular-based test would greatly improve the accuracy of diagnosis at an earlier age, when phenotypic/behavioral assessment is not possible, or integrated with phenotypic/behavioral assessment. Also, diagnosis at an earlier age would allow initiation of ASD treatment at an earlier age which may be beneficial to short and long-term outcomes.

[0007] Genetic factors play a substantial role in ASD (Abrahams B S, Geschwind D H. Advances in autism genetics: on the threshold of a new neurobiology. Nat Rev Genet 2008; 9:341-55). Previous genome-wide linkage and association studies have implicated multiple genetic regions that may be involved in autism and ASDs. Such heterogeneity increases the value of studies that include large extended pedigrees. Many autism studies have focused on small families (sibling pairs, or two parents and an affected offspring) to try to localize autism predisposition genes. These collections of small families may include cases with many different susceptibility loci. Subjects affected with ASD who are members of a large extended family may be more likely to share the same genetic causes through their common ancestors. Within such families, autism may be more genetically homogeneous.

[0008] While there is no known medical treatment for autism, some success has been reported for early intervention with behavioral therapies. Identification of biomarkers for ASD would allow identification of the disease, now typically diagnosed between ages three and five, in infancy or prenatal life. Thus, there is an urgent need for a method of reliably identifying subjects with ASD. In particular there is need for a more accurate test for polymorphisms causing autism spectrum disorders and other childhood developmental delay disorders. Families with affected members would benefit from knowing whether they carry a mutation which could affect future pregnancies. Clinicians need a test as an aid in diagnosis, and researchers would use the test to classify subjects according to the etiology of their disease. The present invention provides this and other advantages.

### BRIEF SUMMARY

[0009] One aspect of the present invention provides a diagnostic test for diagnosing or predicting ASD in a subject comprising: a reagent for detecting at least one CNV genetic marker associated with ASD, wherein the at least one CNV genetic marker associated with ASD comprises: at least one CNV genetic marker associated with ASD listed in Table 3; and 0 or more CNV genetic markers associated with ASD listed in Table 4; wherein detection in a genetic sample from the subject of the at least one CNV genetic marker associated with ASD indicates that the subject is affected with ASD, or is predisposed to ASD. In one embodiment of the diagnostic tests described herein, the at least one CNV genetic marker associated with ASD listed in Table 3 is selected from the group consisting of the CNV genetic markers associated with ASD 4-7, 9-12, 14-20 and 22-24 listed in Table 3. In another embodiment of the diagnostic tests described herein, the at least one CNV genetic marker associated with ASD listed in Table 3 is selected from the group consisting of the CNV genetic markers associated with ASD 1-20 and 22-24 listed in Table 3. In yet another embodiment of the diagnostic tests described herein, the at least one CNV genetic marker associated with ASD listed in Table 3 comprises one or more of the CNV genetic markers numbered 6, 8, 10, 16 and 22 in Table 3 and wherein the 0 or more CNV genetic markers associated with ASD listed in Table 4 comprises 0 or more of CNV genetic markers numbered 2-5, 8-10, 16, 20, 22, 24, 30 and 32 listed in Table 4. In a further embodiment of the diagnostic tests described herein, the at least one CNV genetic marker associated with ASD listed in Table 3 comprises one or more of the CNV genetic markers numbered 2, 8, 11-13, 21 and 24 listed in Table 3; and the 0 or more CNV genetic markers associated with ASD listed in Table 4 comprises 0 or more of CNV genetic markers numbered 4, 6, 7, 10, 18, 19, 21, 22, 23, 26, 29 and 30 listed in Table 4.

[0010] In one embodiment of the diagnostic tests described herein, the at least one CNV genetic marker associated with ASD comprises: at least 5 CNV genetic marker associated with ASD listed in Table 3; and at least 5 CNV genetic markers associated with ASD listed in Table 4. In another embodiment, the at least one CNV genetic marker associated with ASD comprises: at least 10 CNV genetic marker associated with ASD listed in Table 3; and at least 10 CNV genetic markers associated with ASD listed in Table 4. In certain embodiments, the at least one CNV genetic marker associated with ASD comprises: at least 20 CNV genetic marker associated with ASD listed in Table 3; and at least 20 CNV genetic markers associated with ASD listed in Table 4. In one embodiment, the diagnostic tests described herein comprises at least one CNV genetic marker associated with ASD, wherein the at least one CNV genetic marker associated with ASD comprises the CNV genetic markers associated with ASD listed in Table 3; and the CNV genetic markers associated with ASD listed in Table 4.

[0011] In one embodiment of the diagnostic tests described herein for diagnosing or predicting ASD in a subject, the ASD in the subject comprises autism, Asperger's disorder, pervasive developmental disorder not otherwise specified, or childhood disintegrative disorder.

[0012] In one embodiment of the diagnostic test for diagnosing or predicting ASD in a subject comprising a reagent for detecting at least one CNV genetic marker associated with ASD, the reagent for detecting comprises one or more sets of oligonucleotides, wherein each set of oligonucleotides specifically hybridizes to a CNV genetic marker associated with ASD. In one embodiment, the one or more sets of oligonucleotides each comprises from about 2 to about 30 oligonucleotides. In another embodiment, the one or more sets of oligonucleotides each comprises from about 10 to about 25 oligonucleotides. In certain embodiments, the one or more sets of oligonucleotides each comprises from about 15 to about 20 oligonucleotides, and in another embodiment the one or more sets of oligonucleotides each comprises about 20 oligonucleotides. In certain embodiments, the one or more sets of oligonucleotides are on an array which in certain embodiments may be a high density microarray.

[0013] In one embodiment of the diagnostic test for diagnosing or predicting ASD in a subject comprising a reagent for detecting at least one CNV genetic marker associated with ASD, the reagent for detecting comprises one or more sets of oligonucleotides, and in one embodiment the one or more sets of oligonucleotides comprise DNA probes. In one embodiment, the DNA probes are selected from the sequences set forth in SEQ ID NOs: 7410-7426; 12508-12563; 27988-28001; 31283-31314; 32494-32587; 33402-39860; 51803-52100; 61165-61290; 62966-62998; 64149-64167; 69319-69561. In certain embodiments, the one or more sets of oligonucleotides comprise amplification primers that amplify the CNV genetic marker associated with ASD.

[0014] In certain embodiments, the diagnostic tests of the present invention have a diagnostic yield for ASD of about 10% to about 12%.

[0015] Another aspect, the present invention provides a method of diagnosing or predicting ASD in a subject, comprising: detecting in a genetic sample isolated from the subject at least one CNV genetic marker associated with ASD, wherein the at least one CNV genetic marker associated with ASD comprises: at least one CNV genetic marker associated with ASD listed in Table 3; and 0 or more CNV genetic markers associated with ASD listed in Table 4; thereby diagnosing or predicting ASD in the subject. In one embodiment, the ASD in the subject comprises autism, Asperger's disorder, pervasive developmental disorder not otherwise specified, or childhood disintegrative disorder. In certain embodiments of the methods of diagnosing or predicting ASD in a subject, the at least one CNV genetic marker associated with ASD listed in Table is selected from the group consisting of the CNV genetic markers associated with ASD 1-20 and 22-24 listed in Table 3. In another embodiment, the at least one CNV genetic marker associated with ASD listed in Table 3 comprises one or more of the CNV genetic markers numbered 6, 8, 10, 16 and 22 in Table 3 and wherein the 0 or more CNV genetic markers associated with ASD listed in Table 4 comprises 0 or more of CNV genetic markers numbered 2-5, 8-10, 16, 20, 22, 24, 30 and 32 listed in Table 4. In a further embodiment, the at least one CNV genetic marker associated with ASD listed in Table 3 comprises one or more of the CNV genetic markers numbered 2, 8, 11-13, 21 and 24 listed in Table 3; and the 0 or more CNV genetic markers associated with ASD listed in Table 4 comprises 0 or more of the CNV genetic markers numbered 4, 6, 7, 10, 18, 19, 21, 22, 23, 26, 29 and 30 listed in Table 4.

[0016] In another embodiment of a method of diagnosing or predicting ASD in a subject which comprises detecting in a genetic sample isolated from the subject at least one CNV genetic marker associated with ASD, the at least one CNV genetic marker associated with ASD comprises: at least 5 CNV genetic marker associated with ASD listed in Table 3; and at least 5 CNV genetic markers associated with ASD listed in Table 4. In one embodiment, the at least one CNV genetic marker associated with ASD comprises: at least 10 CNV genetic marker associated with ASD listed in Table 3; and at least 10 CNV genetic markers associated with ASD listed in Table 4. In certain embodiments, the at least one CNV genetic marker associated with ASD comprises: at least 20 CNV genetic marker associated with ASD listed in Table 3; and at least 20 CNV genetic markers associated with ASD listed in Table 4. In another embodiment, the at least one CNV genetic marker associated with ASD comprises: the CNV genetic markers associated with ASD listed in Table 3; and the CNV genetic markers associated with ASD listed in Table 4.

[0017] In one embodiment of the methods of diagnosing or predicting ASD, the at least one CNV genetic marker associated with ASD is detected by hybridizing one or more sets of DNA probes to at least one CNV genetic marker associated with ASD using a microarray, which in certain embodiments comprises a glass, plastic, or silicon biochip microarray. In another embodiment the microarray comprises a bead array or a high density microarray. In yet another embodiment, the one or more sets of DNA probes on the microarray comprise DNA probes selected from the sequences set forth in SEQ ID NOs:1-83,443.

[0018] In one embodiment of the methods of diagnosing or predicting ASD, the at least one CNV genetic marker associated with ASD is detected by next-generation sequencing, and in another embodiment, the at least one CNV genetic marker associated with ASD is detected by amplifying one or more portions of the at least one CNV genetic marker associated with ASD using PCR.

[0019] Another aspect of the present invention provides a method of diagnosing or predicting ASD in a subject, comprising: hybridizing a genetic sample isolated from the subject with one or more sets of oligonucleotides, wherein each set of oligonucleotides specifically hybridizes to a CNV genetic marker associated with ASD; wherein the at least one CNV genetic marker associated with ASD comprises: at least one CNV genetic marker associated with ASD listed in Table 3; and 0 or more CNV genetic markers associated with ASD listed in Table 4; thereby diagnosing or predicting ASD in the subject. In one embodiment of the methods herein, the ASD in the subject comprises autism, Asperger's disorder, pervasive developmental disorder not otherwise specified, Rett's disorder, or childhood disintegrative disorder. In another embodiment of the methods of diagnosing or predicting ASD in a subject, the at least one CNV genetic marker associated with ASD listed in Table 3 comprises one or more of the CNV genetic markers numbered 6, 8, 10, 16 and 22 in Table 3 and wherein the 0 or more CNV genetic markers associated with ASD listed in Table 4 comprises 0 or more of CNV genetic markers numbered 2-5, 8-10, 16, 20, 22, 24, 30 and 32 listed in Table 4. In another embodiment, the at least one CNV genetic marker associated with ASD listed in Table 3 comprises one or more of the CNV genetic markers numbered 2, 8, 11-13, 21 and 24 listed in Table 3; and the 0 or more CNV genetic markers associated with ASD listed in Table 4 comprises 0 or more of the CNV genetic markers numbered 4, 6, 7, 10, 18, 19, 21, 22, 23, 26, 29 and 30 listed in Table 4.

[0020] In another embodiment of the methods of diagnosing or predicting ASD in a subject which comprises hybridizing a genetic sample isolated from the subject with one or more sets of oligonucleotides, wherein each set of oligonucleotides specifically hybridizes to a CNV genetic marker associated with ASD, the at least one CNV genetic marker associated with ASD comprises: at least 5 CNV genetic marker associated with ASD listed in Table 3; and at least 5 CNV genetic markers associated with ASD listed in Table 4. In certain embodiments, the at least one CNV genetic marker associated with ASD comprises: at least 10 CNV genetic marker associated with ASD listed in Table 3; and at least 10 CNV genetic markers associated with ASD listed in Table 4. In a further embodiment, the at least one CNV genetic marker associated with ASD comprises: at least 20 CNV genetic marker associated with ASD listed in Table 3; and at least 20 CNV genetic markers associated with ASD listed in Table 4. In another embodiment, the at least one CNV genetic marker associated with ASD comprises: the CNV genetic markers associated with ASD listed in Table 3; and the CNV genetic markers associated with ASD listed in Table 4.

[0021] In another embodiment of the methods of diagnosing or predicting ASD in a subject which comprises hybridizing a genetic sample isolated from the subject with one or more sets of oligonucleotides, wherein each set of oligonucleotides specifically hybridizes to a CNV genetic marker associated with ASD, the one or more sets of oligonucleotides each comprises from about 2 to about 30 oligonucleotides. In another embodiment, the one or more sets of oligonucleotides each comprises from about 10 to about 25 oligonucleotides. In a further embodiment, the one or more sets of oligonucleotides each comprises from about 15 to about 20 oligonucleotides. In certain embodiments, the one or more sets of oligonucleotides comprise DNA probes arrayed on a microarray. In this regard, the DNA probes arrayed on a microarray may comprise DNA probes selected from the sequences set forth in SEQ ID NOs:1-83,443. In one embodiment, the one or more sets of oligonucleotides comprise amplification primers that amplify the CNV genetic marker associated with ASD.

[0022] Another aspect of the present invention provides a DNA microarray for detecting the presence of a CNV associated with ASD in a subject comprising one or more of the DNA probe sets selected from those set forth in SEQ ID NOs: 7410-7426; 12508-12563; 27988-28001; 31283-31314; 32494-32587; 33402-39860; 51803-52100; 61165-61290; 62966-62998; 64149-64167; 69319-69561. As would be recognized by the skilled person, such a microarray may also include additional DNA probes, such as commercially available DNA probes (e.g., such as those available from Illumina or the Affymetrix CytoScan-HD array). In another embodiment, the DNA microarray comprises at least 100 DNA probes selected from the DNA probes set forth in SEQ ID NOs: 7410-7426; 12508-12563; 27988-28001; 31283-31314; 32494-32587; 33402-39860; 51803-52100; 61165-61290; 62966-62998; 64149-64167; 69319-69561. In a further embodiment, the DNA microarray comprises at least 1000, at least 10000, at least 15000, at least 20000, or at least 50000 DNA probes selected from the DNA probes set forth in SEQ ID NOs: 1-83,443.

[0023] Another aspect of the present invention provides a method for determining the genotype of an individual suspected of having an ASD or other childhood developmental delay disorder, comprising hybridizing a genetic sample isolated from the subject with one or more sets of DNA probes, wherein the one or more sets of DNA probes are selected from the DNA probes set forth in SEQ ID NOs: 1-83,443. Childhood developmental delay disorders include but are not limited to Rett syndrome, Noonan/Costello/CFC syndromes, Tuberous sclerosis, ADHD, developmental delay (DD), Tourette syndrome, and Dyslexia.

[0024] Another aspect of the present invention provides a diagnostic test for diagnosing or predicting ASD in a subject comprising: a reagent for detecting at least one CNV genetic marker associated with ASD, wherein the at least one CNV genetic marker associated with ASD comprises: at least one CNV genetic marker associated with ASD listed in Table 8; or at least one CNV genetic marker associated with ASD listed in Table 10; or both; and 0 or more CNV genetic markers associated with ASD listed in Table 9; wherein detection in a genetic sample from the subject of the at least one CNV genetic marker associated with ASD indicates that the subject is affected with ASD, or is predisposed to ASD.

### BRIEF DESCRIPTION OF THE DRAWINGS

[0025] FIG. 1: Workflow for CNV analysis for samples analyzed on the custom array. The same process was used for both CNAM and PennCNV analyses. All samples used for CNV analysis in this study had to meet the quality control measures described. Only unrelated cases and controls were used for the final statistical analysis.

[0026] FIG. 2: Manhattan plot of CNVs called both by PennCNV and CNAM. Association statistics across all regions covered on the Illumina custom array are shown. Since the array used was not a genome-wide array, the width of each chromosome on the plot is not proportional to the chromosome length. Adjacent chromosomes are separated by tick marks.

[0027] FIG. 3. UCSC Genome browser view of CNVs in the NRXN1 region. CNVs observed in the vicinity of the NRXN1-alpha transcription start site are shown. Note that most CNVs observed in ASD patients include exon 1 of NRXN1-alpha while only 1 control CNV extends into exon 1. Produced with custom tracks listing CNV calls and uploaded to the genome.ucsc.edu website.

[0028] FIG. 4. UCSC Genome Browser View of CNVs in the GABR Region on chromosome 15q12. Duplications were called by both PennCNV and by CNAM in this region, however the number of duplications called by each program differed, with many additional duplications called by CNAM. Produced with custom tracks listing CNV calls and uploaded to the genome.ucsc.edu website.

### DETAILED DESCRIPTION

[0029] The present invention relates generally to genetic markers for ASD, in particular to copy number variant genetic markers for ASD. In particular, the present CNV genetic markers associated with ASD provide a diagnostic yield (the percentage of individuals with the diagnosis of ASD that will have an abnormal genetic test result; equal to sensitivity) of about 10-12%, while generic chromosomal microarray technologies currently available are expected to remain in the 5%-7% diagnostic yield range for the autism-specific portion of these microarrays (that is, 5-7% of the individuals with ASD that are tested with current technologies will have an abnormal result). Thus, the present invention represents a 2× increase (5% to more than 10%) in autism—specific diagnostic yield over current diagnostic platforms.

[0030] The practice of the present invention will employ, unless indicated specifically to the contrary, conventional methods of microbiology, molecular biology, recombinant DNA technique, chemical syntheses, chemical analyses, pharmaceutical preparation, formulation, and delivery, and treatment of patients, within the skill of the art, many of which are described below for the purpose of illustration. Such techniques are explained fully in the literature. See, e.g., Current Protocols in Protein Science, Current Protocols in Molecular Biology or Current Protocols in Immunology, John Wiley & Sons, New York, N.Y. (2009); Ausubel et al., Short Protocols in Molecular Biology, 3^{rd} ed., Wiley & Sons, 1995; Sambrook and Russell, Molecular Cloning: A Laboratory Manual (3rd Edition, 2001); Maniatis et al. Molecular Cloning: A Laboratory Manual (1982); DNA Cloning: A Practical Approach, vol. I & II (D. Glover, ed.); Oligonucleotide Synthesis (N. Gait, ed., 1984); Nucleic Acid Hybridization (B. Hames & S. Higgins, eds., 1985); Transcription and Translation (B. Hames & S. Higgins, eds., 1984); Animal Cell Culture (R. Freshney, ed., 1986); Perbal, A Practical Guide to Molecular Cloning (1984) and other like references.

[0031] As used in this specification and the appended claims, the singular forms “a,” “an” and “the” include plural references unless the content clearly dictates otherwise.

[0032] Throughout this specification, unless the context requires otherwise, the word “comprise”, or variations such as “comprises” or “comprising”, will be understood to imply the inclusion of a stated element or integer or group of elements or integers but not the exclusion of any other element or integer or group of elements or integers.

[0033] Each embodiment in this specification is to be applied mutatis mutandis to every other embodiment unless expressly stated otherwise.

[0034] The Diagnostic and Statistical Manual of Mental Disorders, Fourth Edition—Text Revision currently defines five disorders, sometimes called pervasive developmental disorders (PDDs), as ASD. These include: Autistic disorder (classic autism), Asperger's disorder (Asperger syndrome (AS)), Pervasive developmental disorder not otherwise specified (PDD-NOS), Rett's disorder (Rett syndrome), and Childhood disintegrative disorder (CDD). It is noted that the majority of Rett syndrome cases are known to be caused by mutations in either the MeCP2 gene or the CDKL5 gene and it is anticipated that updated revisions of the Diagnostic and Statistical Manual of Mental Disorders will classify Rett syndrome separately from ASD. Therefore, in certain embodiments, ASD does not include Rett syndrome. Autism shall be understood as any condition of impaired social interaction and communication with restricted repetitive and stereotyped patterns of behavior, interests and activities present before the age of 3, to the extent that health may be impaired. AS is distinguished from autistic disorder by the lack of a clinically significant delay in language development in the presence of the impaired social interaction and restricted repetitive behaviors, interests, and activities that characterize ASD. PDD-NOS is used to categorize individuals who do not meet the strict criteria for autism but who come close, either by manifesting atypical autism or by nearly meeting the diagnostic criteria in two or three of the key areas.

[0035] Developmental delay disorders are an ever growing group of disorders. Any chromosomal deletion or duplication that results in symptoms such as hypotonia (muscle weakness), intellectual disability, dysmorphic physical features, repetitive behaviors, etc. is included under the umbrella of developmental delay conditions that can be detected using the present invention. Specific examples include, but are not limited to, chromosome 22q13.3 deletion syndrome, Prader-Willi syndrome and Angelman syndrome, and chromosome 1p36 deletion syndrome, just to name a few. Childhood developmental delay disorders may also include, but are not limited to, Rett syndrome, Noonan/Costello/CFC syndromes, Tuberous sclerosis, ADHD, developmental delay (DD), Tourette syndrome, and Dyslexia. The OMIM web site (internet address can be found at ncbi.nlm.nih.gov/omim) keeps an updated list of disorders and a description of the specific genotype identified, that can be accessed by the skilled person.

[0036] There are also a host of disorders that are associated with autism (Autism-associated disorders). These diseases or pathologies include, more specifically, any metabolic and immune disorders, epilepsy, anxiety, depression, attention deficit hyperactivity disorder, speech delay or language impairment, motor incoordination, mental retardation, schizophrenia and bipolar disorder. The various embodiments and examples disclosed herein may be used in various subjects, particularly human, including adults and children and at the prenatal stage.

[0037] As used herein, the term “subject” means any target of administration. The subject can be a vertebrate, for example, a mammal. Thus, the subject can be a human. The term does not denote a particular age or sex. Thus, adult and newborn subjects, as well as fetuses, whether male or female, are intended to be covered. A patient refers to a subject afflicted with a disease or disorder. Unless otherwise specified, the term “patient” includes human and veterinary subjects.

[0038] As used herein, the term “biomarker” or “biological marker” means an indicator of a biologic state and may include a characteristic that is objectively measured as an indicator of normal biological processes, pathologic processes, or pharmacologic responses to a therapeutic or other intervention. In one embodiment, a biomarker may indicate a change in expression or state of a protein that correlates with the risk or progression of a disease, or with the susceptibility of the disease in an individual. In certain embodiments, a biomarker may include one or more of the following: genes, proteins, glycoproteins, metabolites, cytokines, and antibodies.

[0039] The present invention centers on the discovery and validation of copy number variant (CNV) genetic markers associated with ASD. SNPs are known to be the primary source of human genetic variation. However, structural variations, including copy number variations (e.g., relatively large regions of the genome that have been deleted or duplicated on certain chromosomes), also contribute to genetic and phenotypic human variation (see e.g., Feuk, et al., 2006 Nature Reviews Genetics, 7, 85-97).

[0040] A CNV represents a copy number change involving a DNA fragment that is about 1 kilobases (kb) or larger (see e.g., Feuk, et al., 2006 Nature Reviews Genetics, 7, 85-97). CNVs described herein do not include those variants that arise from the insertion/deletion of transposable elements (e.g., .about.6-kb Kpnl repeats) to minimize the complexity of CNV analyses. The term CNV therefore encompasses previously introduced terms such as large-scale copy number variants (LCVs; Iafrate et al. 2004 Nat Genet. 36:949-951), copy number polymorphisms (CNPs; Sebat et al. 2004 Science. 305:525-528), and intermediate-sized variants (ISVs; Tuzun et al. 2005 Nat Genet. 37:727-732), but not retroposon insertions.

[0041] A single nucleotide polymorphism (SNP) refers to a change in which a single base in the DNA differs from the usual base at that position. These single base changes are called SNPs or “snips.” Millions of SNPs have been cataloged in the human genome. Some SNPs such as that which causes sickle cell are responsible for disease. Other SNPs are normal variations in the genome.

[0042] With regard to nucleic acids used in the invention, the term “isolated nucleic acid” is sometimes employed. This term, when applied to DNA, refers to a DNA molecule that is separated from sequences with which it is immediately contiguous (in the 5′ and 3′ directions) in the naturally occurring genome of the organism from which it was derived. For example, in one embodiment, the “isolated nucleic acid” may comprise a DNA molecule inserted into a vector, such as a plasmid or virus vector, or integrated into the genomic DNA of a prokaryote or eukaryote. An “isolated nucleic acid molecule” may also comprise a cDNA molecule. An isolated nucleic acid molecule inserted into a vector is also sometimes referred to herein as a recombinant nucleic acid molecule.

[0043] With respect to single stranded nucleic acids, particularly oligonucleotides, the term “specifically hybridize” refers to the association between two single-stranded nucleotide molecules of sufficient complementary sequence to permit such hybridization under pre-determined conditions generally used in the art (sometimes termed “substantially complementary”). In particular, in one embodiment the term refers to hybridization of an oligonucleotide with a substantially complementary sequence contained within a single-stranded DNA or RNA molecule, to the substantial exclusion of hybridization of the oligonucleotide with single-stranded nucleic acids of non-complementary sequence. For example, specific hybridization can refer to a sequence which hybridizes to an ASD associated marker gene or nucleic acid (e.g., the CNV genetic markers associated with ASD as described herein), but does not hybridize to other nucleotides. Appropriate conditions enabling specific hybridization of single stranded nucleic acid molecules of varying complementarity are well known in the art.

[0044] The term “genetic marker” as used herein refers to one or more inherited or de novo variations in DNA structure with a known physical location on a chromosome. Genetic markers include variations, or polymorphisms, in specific nucleotides or chromosome regions. Examples of genetic markers include, single nucleotide polymorphisms (SNPs), and copy number variations and copy number changes (CNVs). Genetic markers can be used to associate an inherited phenotype, such as a disease, with a responsible genotype. Genetic markers may be used to track the inheritance of a nearby gene that has not yet been identified, but whose approximate location is known. The genetic marker itself may be a part of a gene's coding region or regulatory region. For example, a genetic marker may be a functional polymorphism that may alter gene function or gene expression. Alternatively, a genetic marker may be a non-functional polymorphism.

[0045] A CNV genetic marker refers to a DNA sequence having a copy number variation, with a known location on a chromosome, which can be used to identify individuals, in particular subjects affected by or at risk of developing ASD. The CNV genetic markers associated with ASD described herein, were identified in an extensive replication/refinement study of CNV markers. In particular, a custom array was designed and used to genotype about 3000 individuals with autism and 6000 individuals with normal development. A combination of 2 different statistical and bioinformatics algorithms was used to make the CNV calls and proved to be highly accurate. In particular, 97% of the CNVs called using the combination of algorithms were subsequently validated by other laboratory methods, as compared to 30% using only the individual algorithms (see Example 1). The CNV genetic markers associated with ASD identified herein are provided in Tables 3 and 4. The CNV genetic markers shown in Tables 3 and 4 are those CNV genetic markers having an odds ratio (the likelihood that a given genetic marker is relevant to a diagnosis of ASD in an individual) of 2 or higher.

[0046] While certain of the CNV genetic markers associated with ASD shown in Table 4 overlap with previously identified CNV genetic markers, the markers had not been previously extensively refined and validated until the present study. Therefore, the present disclosure provides newly identified CNV genetic markers as well as refined and validated genetic markers, that greatly improve the diagnostic yield of ASD diagnostic tests over what was previously known. Thus, the present disclosure provides a more diagnostically comprehensive and accurate set of CNV genetic markers associated with ASD that can be used in the diagnosis of ASD. Illustrative DNA probes that can be used to genotype individuals for the presence of CNVs associated with ASD are provided in the sequence listing which includes SEQ ID NOs:1-83,433. These DNA probes also include custom probes to genotype other childhood developmental delay disorders, including for example, Rett syndrome, Noonan/Costello/CFC syndromes, Tuberous sclerosis, ADHD, DD, and Tourette syndrome. Particularly illustrative DNA probes for detecting the presence of CNVs associated with ASD are provided in SEQ ID NOs: 7410-7426; 12508-12563; 27988-28001; 31283-31314; 32494-32587; 33402-39860; 51803-52100; 61165-61290; 62966-62998; 64149-64167; 69319-69561.

[0047] The CNV genetic markers associated with ASD as described herein are generally defined by their chromosomal location and are referred to by the most recent human genome coordinates (e.g., hg19 chromosomal location coordinates). However, as would be understood by the skilled artisan, as the exact region of the CNV (e.g., the region of highest significance) is further characterized and refined, the CNV region boundaries may shift to the left or to the right while getting smaller, or may get smaller within the same region as originally defined. For example, the CNVs listed in Table 3 are referred to by the CNV region as defined in the discovery cohort as well as the CNV region as defined in the replication cohort. As shown in Table 3, the CNV region for the first listed marker has been reduced from the region spanning chr1:145714421-146101228 to the region spanning chr1: 145703115-145736438, with the left boundary shifting further to the left. The region boundaries for CNV marker number 6 listed in Table 3 have shifted to the right and have been reduced. Therefore, as would be understood by the skilled person, the CNV markers associated with ASD as described herein comprise the CNV region as described herein and include the surrounding region to the left and to the right of the CNV chromosomal region as described herein. Thus, in certain embodiments, the chromosomal region encompassing the CNV genetic markers associated with ASD described herein may comprise the chromosomal region 50, 100, 200, 300, 400, 500, 600, 700, 800, 900, 1000, 1500, 2000, 2500, 3000, 3500, 4000, 4500, 5000, 6000, 7000, 8000, 9000, 10000, 15,000, 20000, 30000, 40000, 50,000, 60,000, 70,000, 80,000, 90,000, 100,000, or more positions to the left and/or to the right of the chromosomal region as described herein.

[0048] Further, in related embodiments, reagents for detecting the CNV genetic markers as described herein include reagents which specifically hybridize to the chromosomal regions surrounding the region specifically described herein. In particular, a nucleic acid reagent for detecting the CNV genetic markers as described herein may specifically hybridize to the chromosomal region 50, 100, 200, 300, 400, 500, 600, 700, 800, 900, 1000, 1500, 2000, 2500, 3000, 3500, 4000, 4500, 5000, 6000, 7000, 8000, 9000, 10000, 15,000, 20000, 30000, 40000, 50,000, 60,000, 70,000, 80,000, 90,000, 100,000, or more positions to the left and/or to the right of the chromosomal region of the CNV genetic marker as described herein.

[0049] In certain embodiments, genes in or adjacent to the CNV genetic markers may also be detected using detection reagents in the tests and methods for diagnosing or predicting ASD described herein. In this regard, such genes include but are not limited to NRXN1, LINGO2, STXBP5, GABA receptor gene cluster (e.g., GABRA5, GABRA3, GABRG3), RGS20, TCEA1, UBE3A, E2F1, PLCB1, PMP22, AADAT, MAPK3, NRXN1, NRG3, DPP10, UQCRC2, USH2A, NECAB3, CNTN4, LINGO2, ILIRAPL1, STXBP5, DOC2A, SNRPN, CDRT15, CDH13, CD160, CALCR, and SPN.

[0050] Further genes contemplated for use in the tests and methods described herein include those listed in Tables 3, 4, 8 and 10. Reagents for detecting such genes may detect the DNA, RNA expression, protein activity or downstream biological functions of the protein encoded by such genes in or adjacent to the CNV genetic markers described herein. Thus, the present invention includes reagents for detecting such genes or the expression thereof, including nucleic acids, DNA probes, antibodies that bind to the encoded proteins, and the like.

[0051] In one embodiment, the detection of the presence of a genetic marker or functional polymorphism associated with a gene linked to ASD may indicate that the subject is affected with ASD or is at risk of developing ASD. A subject who is at increased risk of developing ASD is one who is predisposed to the disease, has genetic susceptibility for the disease and/or is more likely to develop the disease than subjects in which the genetic marker is present or is absent.

[0052] In one embodiment, the presence of one or more CNV genetic markers described herein indicates that an individual is affected with ASD or is predisposed to developing ASD (e.g., predisposed to developing autism, Asperger Disorder, PDD-NOS, or Childhood disintegrative disorder (CDD). In another embodiment, the presence of one or more CNV genetic markers described herein may be predictive of whether an individual is at risk for or susceptible to ASD. If certain genetic polymorphisms (e.g., CNVs) are detected more frequently in people with ASD, the variations are said to be “associated” with ASD. In this regard, variations may be associated with autism, asperger disorder or PDD-NOS, Rett's disorder (Rett syndrome), CDD, or a combination thereof. The polymorphisms associated with ASD may either directly cause the disease phenotype or they may be in linkage disequilibrium (LD) with nearby genetic mutations that influence the individual variation in the disease phenotype. As used herein, LD is the nonrandom association of alleles at 2 or more loci.

[0053] Accordingly, the present invention relates to diagnostic tests for diagnosing or predicting ASDs in subjects. In this regard, the present invention relates to diagnostic tests for diagnosing or predicting autism, asperger disorder and/or PDD-NOS in subjects. The diagnostic tests described herein may be in vitro diagnostic tests. Diagnostic tests include but are not limited to FDA approved, or cleared, In Vitro Diagnostic (IVD), Laboratory Developed Test (LDT), or Direct-to-Consumer (DTC) tests, that may be used to assay a sample and detect or indicate the presence of, the predisposition to, or the risk of, diseases, disorders, conditions, infections and/or therapeutic responses. In one embodiment, a diagnostic test may be used in a laboratory or other health professional setting. In another embodiment, a diagnostic test may be used by a consumer at home. Diagnostic tests comprise one or more reagents for detecting the CNV genetic markers associated with ASD as described herein and may comprise other reagents, instruments, and systems intended for use in the in vitro diagnosis of disease or other conditions, including a determination of the state of health, in order to cure, mitigate, treat, or prevent disease or its sequelae. In one embodiment, the diagnostic tests described herein may be intended for use in the collection, preparation, and examination of specimens taken from the human body. In certain embodiments, diagnostic tests and products may comprise one or more laboratory tests. As used herein, the term “laboratory test” means one or more medical or laboratory procedures that involve testing samples of blood, urine, or other tissues or substances in the body.

[0054] The diagnostic tests of the present invention comprise one or more reagents for detecting the CNV genetic markers associated with ASD as described herein, such as those provided in Tables 3 and 4. In this regard, the reagents for detecting may comprise any reagent known to the skilled person for detecting genetic markers.

[0055] Illustrative reagents for detecting genetic markers include nucleic acids, and in particular include oligonucleotides. A nucleic acid can be DNA or RNA, and may be single or double stranded. In one embodiment, the oligonucleotides are DNA probes, or primers for amplifying nucleic acids of genetic markers. In one embodiment, the oligonucleotides of the present invention are capable of specifically hybridizing (e.g, under stringent hybridization conditions), with complementary regions of a genetic marker associated with ASD containing a genetic polymorphism described herein, such as a copy number variation. Oligonucleotides can be naturally occurring or synthetic, but are typically prepared by synthetic means. Oligonucleotides, as described herein, may include segments of DNA, or their complements. The exact size of the oligonucleotide will depend on various factors and on the particular application and use of the oligonucleotide. Oligonucleotides, which include probes and primers, can be any length from 3 nucleotides to the full length of a target nucleic acid molecule of interest (e.g., a nucleic acid molecule of a CNV genetic marker associated with autism spectrum disorders, such as those provided in the tables herein), and explicitly include every possible number of contiguous nucleic acids from 3 through the full length of a target polynucleotide of interest. Thus, oligonucleotides can be between 5 and 100 contiguous bases, and often range from 5, 10, 12, 13, 14, 15, 16, 17, 18, 19, 20, 21, 22, 23, 24, or 25 nucleotides to 30, 35, 40, 45, 50, 55, 60, 65, 70, 75, 80, 85, 90, 95, or 100 nucleotides. Oligonucleotides between 5-10, 5-20, 10-20, 12-30, 15-30, 10-50, 20-50 or 20-100 bases in length are common.

[0056] Oligonucleotides of the present invention can be RNA, DNA, or derivatives of either. The minimum size of such oligonucleotides is the size required for formation of a stable hybrid between an oligonucleotide and a complementary sequence on a nucleic acid molecule of the present invention (i.e., the copy number variant genetic markers described herein). The present invention includes oligonucleotides that can be used as, for example, probes to identify nucleic acid molecules (e.g., DNA probes) or primers to amplify nucleic acid molecules.

[0057] In one embodiment, an oligonucleotide may be a probe which refers to an oligonucleotide, polynucleotide or nucleic acid, either RNA or DNA, whether occurring naturally as in a purified restriction enzyme digest or produced synthetically, which is capable of annealing with or specifically hybridizing to a nucleic acid with sequences complementary to the probe. A probe may be either single-stranded or double-stranded. The exact length of the probe will depend upon many factors, including temperature, source of probe and use of the method. For example, for diagnostic applications, depending on the complexity of the target sequence, the oligonucleotide probe typically contains 15-25 or more nucleotides, although it may contain fewer nucleotides. In certain embodiments, a probe can be between 5 and 100 contiguous bases, and is generally about 5, 10, 12, 13, 14, 15, 16, 17, 18, 19, 20, 21, 22, 23, 24, or 25 nucleotides in length, or may be about 30, 35, 40, 45, 50, 55, 60, 65, 70, 75, 80, 85, 90, 95, or 100 nucleotides in length. The probes herein are selected to be complementary to different strands of a particular target nucleic acid sequence. This means that the probes must be sufficiently complementary so as to be able to specifically hybridize or anneal with their respective target strands under a set of pre-determined conditions. Therefore, the probe sequence need not reflect the exact complementary sequence of the target. For example, a non-complementary nucleotide fragment may be attached to the 5′ or 3′ end of the probe, with the remainder of the probe sequence being complementary to the target strand. Alternatively, non-complementary bases or longer sequences can be interspersed into the probe, provided that the probe sequence has sufficient complementarity with the sequence of the target nucleic acid to anneal therewith specifically. Illustrative probes for detecting the genetic markers associated with ASD and other childhood developmental delay disorders are set forth in SEQ ID NOs:1-83,443. In particular, DNA probes for detecting CNVs associated with ASD are set forth in SEQ ID NOs: 7410-7426; 12508-12563; 27988-28001; 31283-31314; 32494-32587; 33402-39860; 51803-52100; 61165-61290; 62966-62998; 64149-64167; 69319-69561. (See also Table 11 for a description of the childhood developmental delay disorders and the custom DNA probes provided in the sequence listing and Table 14). As would be recognized by the skilled person, a specific probe or probe set disclosed herein for detecting a particular CNV associated with ASD (or other disorder), can be identified by using the hg19 chromosomal location start and end coordinates of a CNV of interest (e.g., a CNV listed in Table 3 or 4) to query Table 14 to find a corresponding overlapping chromosomal location in Table 14. Those probes that are listed in Table 14 for the overlapping hg19 chromosomal location are those probes that can be used to detect the particular CNV. Note that Table 14 discloses illustrative probes and does not include probes for all CNVs associated with ASD described herein. Additional probes may be designed by the skilled person using known techniques.

[0058] In one embodiment, an oligonucleotide may be a primer, which refers to an oligonucleotide, either RNA or DNA, either single-stranded or double-stranded, either derived from a biological system, generated by restriction enzyme digestion, or produced synthetically which, when placed in the proper environment, is able to functionally act as an initiator of template-dependent nucleic acid synthesis. When presented with an appropriate nucleic acid template, suitable nucleoside triphosphate precursors of nucleic acids, a polymerase enzyme, suitable cofactors and conditions such as a suitable temperature and pH, the primer may be extended at its 3′ terminus by the addition of nucleotides by the action of a polymerase or similar activity to yield a primer extension product. The primer may vary in length depending on the particular conditions and requirement of the application. For example, in certain applications, an oligonucleotide primer is about 15-25 or more nucleotides in length, but may in certain embodiments be between 5 and 100 contiguous bases, and often be about 5, 10, 12, 13, 14, 15, 16, 17, 18, 19, 20, 21, 22, 23, 24, or 25 nucleotides long or, in certain embodiments, may be about 30, 35, 40, 45, 50, 55, 60, 65, 70, 75, 80, 85, 90, 95, or 100 nucleotides in length for. The primer must be of sufficient complementarity to the desired template to prime the synthesis of the desired extension product, that is, to be able to anneal with the desired template strand in a manner sufficient to provide the 3′ hydroxyl moiety of the primer in appropriate juxtaposition for use in the initiation of synthesis by a polymerase or similar enzyme. It is not required that the primer sequence represent an exact complement of the desired template. For example, a non-complementary nucleotide sequence may be attached to the 5′ end of an otherwise complementary primer. Alternatively, non-complementary bases may be interspersed within the oligonucleotide primer sequence, provided that the primer sequence has sufficient complementarity with the sequence of the desired template strand to functionally provide a template-primer complex for the synthesis of the extension product.

[0059] Thus, in one embodiment, a CNV genetic marker associated with ASD as described herein may be detected by amplification of the region of interest according to amplification protocols well known in the art (e.g., polymerase chain reaction, 2D cluster PCR amplification (see, e.g., Illumina, Inc., San Diego, Calif.), ligase chain reaction, strand displacement amplification, transcription-based amplification, self-sustained sequence replication (3SR), Qβ replicase protocols, nucleic acid sequence-based amplification (NASBA), repair chain reaction (RCR) and boomerang DNA amplification (BDA)). The amplification product can then be visualized directly in a gel by staining, the product can be detected by hybridization with a detectable probe, and/or by using next generation sequencing. When amplification conditions allow for amplification of all allelic types of a genetic marker, the types can be distinguished by a variety of well-known methods, such as, but not limited to, hybridization with an allele-specific probe, secondary amplification with allele-specific primers, restriction endonuclease digestion, or electrophoresis. Thus, the present invention can further provide oligonucleotides for use as primers and/or probes for detecting and/or identifying genetic markers according to the methods of this invention.

[0060] “Sample” or “patient sample” or “biological sample” generally refers to a sample which may be tested for a particular molecule, preferably a CNV genetic marker associated with ASD, such as a marker shown in the tables provided herein. Samples may include but are not limited to cells, buccal swab sample, body fluids, including blood, serum, plasma, urine, saliva, cerebral spinal fluid, tears, pleural fluid and the like.

[0061] In certain embodiments, a reagent for detecting the CNV genetic markers associated with ASD comprises one or more sets of oligonucleotides, wherein each set of oligonucleotides specifically hybridizes to a CNV genetic marker associated with ASD. As used herein a set of oligonucleotides may comprise from about 2 to about 100 oligonucleotides, all of which specifically hybridize to a particular CNV genetic marker associated with ASD. In one embodiment, a set of oligonucleotides comprises from about 5 to about 30 oligonucleotides, from about 10 to about 20 oligonucleotides, and in one embodiment comprises about 20 oligonucleotides, all of which specifically hybridize to a particular CNV genetic marker associated with ASD. Thus, a set of oligonucleotides may comprise about 2, 3, 4, 5, 6, 7, 8, 9, 10, 11, 12, 13, 14, 15, 16, 17, 18, 19, 20, 21, 22, 23, 24, 25, 26, 27, 28, 29, 30, 31, 32, 33, 34, 35, 36, 37, 38, 39, 40, 41, 42, 43, 44, 45, 46, 47, 48, 49, 50, 55, 60, 65, 70, 75, 80, 85, 90, 95, 100, 110, 120, 130, 140, 150, 160, 170, 180, 190, 200 or more oligonucleotides, all of which specifically hybridize to a particular CNV genetic marker associated with ASD. In one embodiment, a set of oligonucleotides comprises DNA probes. In one embodiment, the DNA probes comprise overlapping DNA probes. In another embodiment, the DNA probes comprise nonoverlapping DNA probes. In one embodiment, the DNA probes provide detection coverage over the length of a CNV genetic marker associated with ASD. In another embodiment, a set of oligonucleotides comprises amplification primers that amplify a CNV genetic marker associated with ASD. In this regard, sets of oligonucleotides comprising amplification primers may comprise multiplex amplification primers. In another embodiment, the sets of oligonucleotides or DNA probes may be provided on an array, such as solid phase arrays, chromosomal/DNA microarrays, or micro-bead arrays. Array technology is well known in the art. Illustrative arrays contemplated for use in the present invention include, but are not limited to, arrays available from Affymetrix (Santa Clara, Calif.) and Illumina (San Diego, Calif.).

[0062] In one embodiment, an array comprises one or more DNA probes or sets of probes as set forth in SEQ ID NOs:1-83,443. In one embodiment, an array comprises at least 1, 2, 3, 4, 5, 6, 7, 8, 9, 10, 11, 12, 13, 14, 15, 16, 17, 18, 19, 20, or more DNA probes as set forth in SEQ ID NOs:1-83,443. In another embodiment, an array for identifying the genotype of a subject suspected of having ASD or other childhood developmental delay disorder, comprises at least about 25-2500, or at least 100, 1000, 10000, 15000, 16000, 17000, 18000, 19000, 20000, 25000, 30000, 35000, 40000, 45000, 50000, 55000, 60000, 65000 or more of the DNA probes forth in SEQ ID NOs:1-83,443. In another embodiment, an array for genotyping an individual for the presence of a CNV associated with ASD or other childhood developmental delay disorder, comprises the DNA probes set forth in the sequence listing and identified in Table 14 that are custom probes for the CNVs listed in Tables 8 and 9, which specifically hybridize to the CNVs identified in Table 3 and 4. In one embodiment, an array for genotyping an individual for the presence of a CNV associated with ASD, comprises the DNA probes set forth in SEQ ID NOs: 7410-7426; 12508-12563; 27988-28001; 31283-31314; 32494-32587; 33402-39860; 51803-52100; 61165-61290; 62966-62998; 64149-64167; 69319-69561.

[0063] As generally known in the art, a variety of arrays can be used for detection of polymorphisms that can be correlated to the phenotypes of interest. In one embodiment, DNA probe array chips or larger DNA probe array wafers (from which individual chips would otherwise be obtained by breaking up the wafer) may be used. In one such embodiment, DNA probe array wafers may comprise glass wafers on which high density arrays of DNA probes (short segments of DNA) have been placed. Each of these wafers can hold, for example, millions of DNA probes that are used to recognize sample DNA sequences (e.g., from individuals or populations that may comprise polymorphisms of interest). The recognition of sample DNA by the set of DNA probes on the glass wafer takes place through DNA hybridization. When a DNA sample hybridizes with an array of DNA probes, the sample binds to those probes that are complementary to the sample DNA sequence. By evaluating to which probes the sample DNA for an individual hybridizes more strongly, it is possible to determine whether a known sequence of nucleic acid is present or not in the sample, thereby determining whether a polymorphism found in the nucleic acid is present.

[0064] In one embodiment, the use of DNA probe arrays to obtain allele information typically involves the following general steps: design and manufacture of DNA probe arrays, preparation of the sample, hybridization of sample DNA to the array, detection of hybridization events, and data analysis to determine sequence. In one such embodiment, wafers may be manufactured using a process adapted from semiconductor manufacturing to achieve cost effectiveness and high quality, and are available, e.g., from Affymetrix, Inc. of Santa Clara, Calif.

[0065] Arrays of interest may further comprise sequences, including polymorphisms, of other genetic sequences, particularly other sequences of interest for pharmacogenetic screening and a variety of control sequences. As with other human polymorphisms, the polymorphisms of the invention also have more general applications, such as forensic, paternity testing, linkage analysis and positional cloning.

[0066] In certain embodiments, the oligonucleotides for detecting CNV genetic markers associated with ASD may be used in high throughput sequencing methods (often referred to as next-generation sequencing methods or next-gen sequencing methods). Accordingly, in one embodiment, the present disclosure provides methods of diagnosing or predicting ASD in a subject by detecting in a genetic sample from the subject at least one CNV genetic marker associated with ASD as described herein, wherein the at least one CNV genetic marker associated with ASD is detected by high throughput sequencing. High throughput sequencing, or next-generation sequencing, methods are known in the art (see e.g., Zhang et al., J Genet Genomics. 2011 Mar 20; 38(3):95-109; Metzker, Nat Rev Genet. 2010 January; 11(1):31-46) and include, but are not limited to, technologies such as ABI SOLiD sequencing technology (now owned by Life Technologies, Carlsbad, Calif.); Roche 454 FLX which uses sequencing by synthesis technology known as pyrosequencing (Roche, Basel Switzerland); Illumina Genome Analyzer (Illumina, San Diego, Calif.); Dover Systems Polonator G.007 (Salem, N.H.); Helicos (Helicos BioSciences Corporation, Cambridge Mass., USA), and Sanger. In one embodiment, DNA sequencing may be performed using methods well known in the art including mass spectrometry technology and whole genome sequencing technologies (e.g. those used by Pacific Biosciences, Menlo Park, Calif., USA), etc.

[0067] In another embodiment, the presence of or the absence of one or more genetic markers may be visualized by staining or marking the genetic markers with molecular dyes, probes, or other analytes and reagents specific to the genetic markers of interest. In one such embodiment, the genetic markers may be detected by automated methods comprising fluorescent probes, melting curve analysis, and other genetic marker detection methods known by those of skill in the art. In one embodiment, one or more genetic markers may be detected and the detected genetic markers may be visualized on a display showing the location of the genetic markers on a genetic sample. In one such embodiment, the detection of one or more genetic markers may be detected by an electronic device which generates a signal that may be shown on a display in order for a user to visualize the presence of or the absence of one or more genetic markers, and/or the location of one or more genetic markers.

[0068] In various embodiments, the oligonucleotides for detecting the CNV genetic markers associated with ASD described herein are conjugated to a detectable label that may be detected directly or indirectly. In the present invention, DNA probes, RNA probes, monoclonal antibodies, antigen-binding fragments thereof, and antibody derivatives thereof, may all be covalently linked to a detectable label.

[0069] A “detectable label” is a molecule or material that can produce a detectable (such as visually, electronically or otherwise) signal that indicates the presence and/or concentration of the label in a sample. When conjugated to a nucleic acid such as a DNA probe, the detectable label can be used to locate and/or quantify a target nucleic acid sequence to which the specific probe is directed. Thereby, the presence and/or amount of the target in a sample can be detected by detecting the signal produced by the detectable label. A detectable label can be detected directly or indirectly, and several different detectable labels conjugated to different probes can be used in combination to detect one or more targets.

[0070] Examples of detectable labels, which may be detected directly, include fluorescent dyes and radioactive substances and metal particles. In contrast, indirect detection requires the application of one or more additional probes or antibodies, i.e., secondary antibodies, after application of the primary probe or antibody. Thus, in certain embodiments, as would be understood by the skilled artisan, the detection is performed by the detection of the binding of the secondary probe or binding agent to the primary detectable probe. Examples of primary detectable binding agents or probes requiring addition of a secondary binding agent or antibody include enzymatic detectable binding agents and hapten detectable binding agents or antibodies.

[0071] In some embodiments, the detectable label is conjugated to a nucleic acid polymer which comprises the first binding agent (e.g., in an ISH, WISH, or FISH process). In other embodiments, the detectable label is conjugated to an antibody which comprises the first binding agent (e.g., in an IHC process).

[0072] Examples of detectable labels which may be conjugated to the oligonucleotides used in the methods of the present disclosure include fluorescent labels, enzyme labels, radioisotopes, chemiluminescent labels, electrochemiluminescent labels, bioluminescent labels, polymers, polymer particles, metal particles, haptens, and dyes.

[0073] Examples of fluorescent labels include 5-(and 6)-carboxyfluorescein, 5- or 6-carboxyfluorescein, 6-(fluorescein)-5-(and 6)-carboxamido hexanoic acid, fluorescein isothiocyanate, rhodamine, tetramethylrhodamine, and dyes such as Cy2, Cy3, and Cy5, optionally substituted coumarin including AMCA, PerCP, phycobiliproteins including R-phycoerythrin (RPE) and allophycoerythrin (APC), Texas Red, Princeton Red, green fluorescent protein (GFP) and analogues thereof, and conjugates of R-phycoerythrin or allophycoerythrin, inorganic fluorescent labels such as particles based on semiconductor material like coated CdSe nanocrystallites.

[0074] Examples of polymer particle labels include micro particles or latex particles of polystyrene, PMMA or silica, which can be embedded with fluorescent dyes, or polymer micelles or capsules which contain dyes, enzymes or substrates.

[0075] Examples of metal particle labels include gold particles and coated gold particles, which can be converted by silver stains. Examples of haptens include DNP, fluorescein isothiocyanate (FITC), biotin, and digoxigenin. Examples of enzymatic labels include horseradish peroxidase (HRP), alkaline phosphatase (ALP or AP), 3-galactosidase (GAL), glucose-6-phosphate dehydrogenase, 1-N-acetylglucosamimidase, β-glucuronidase, invertase, Xanthine Oxidase, firefly luciferase and glucose oxidase (GO). Examples of commonly used substrates for horseradishperoxidase include 3,3′-diaminobenzidine (DAB), diaminobenzidine with nickel enhancement, 3-amino-9-ethylcarbazole (AEC), Benzidine dihydrochloride (BDHC), Hanker-Yates reagent (HYR), Indophane blue (IB), tetramethylbenzidine (TMB), 4-chloro-1-naphtol (CN), .alpha.-naphtol pyronin (.alpha.-NP), o-dianisidine (OD), 5-bromo-4-chloro-3-indolylphosp-hate (BCIP), Nitro blue tetrazolium (NBT), 2-(p-iodophenyl)-3-p-nitropheny-1-5-phenyl tetrazolium chloride (INT), tetranitro blue tetrazolium (TNBT), 5-bromo-4-chloro-3-indoxyl-beta-D-galactoside/ferro-ferricyanide (BCIG/FF).

[0076] Examples of commonly used substrates for Alkaline Phosphatase include Naphthol-AS-B 1-phosphate/fast red TR (NABP/FR), Naphthol-AS-MX-phosphate/fast red TR (NAMP/FR), Naphthol-AS-B1-phosphate/-fast red TR (NABP/FR), Naphthol-AS-MX-phosphate/fast red TR (NAMP/FR), Naphthol-AS-B1-phosphate/new fuschin (NABP/NF), bromochloroindolyl phosphate/nitroblue tetrazolium (BCIP/NBT), 5-Bromo-4-chloro-3-indolyl-b--d-galactopyranoside (BCIG).

[0077] Examples of luminescent labels include luminol, isoluminol, acridinium esters, 1,2-dioxetanes and pyridopyridazines. Examples of electrochemiluminescent labels include ruthenium derivatives. Examples of radioactive labels include radioactive isotopes of iodide, cobalt, selenium, tritium, carbon, sulfur and phosphorous.

[0078] Detectable labels may be linked to any molecule that specifically binds to a biological marker of interest, e.g., an antibody, a nucleic acid probe, or a polymer. Furthermore, one of ordinary skill in the art would appreciate that detectable labels can also be conjugated to second, and/or third, and/or fourth, and/or fifth binding agents, nucleic acids, or antibodies, etc. Moreover, the skilled artisan would appreciate that each additional binding agent or nucleic acid used to characterize a biological marker of interest (e.g., the CNV genetic markers associated with ASD) may serve as a signal amplification step. The biological marker may be detected visually using, e.g., light microscopy, fluorescent microscopy, electron microscopy where the detectable substance is for example a dye, a colloidal gold particle, a luminescent reagent. Visually detectable substances bound to a biological marker may also be detected using a spectrophotometer. Where the detectable substance is a radioactive isotope detection can be visually by autoradiography, or non-visually using a scintillation counter. See, e.g., Larsson, 1988, Immunocytochemistry: Theory and Practice, (CRC Press, Boca Raton, Fla.); Methods in Molecular Biology, vol. 80 1998, John D. Pound (ed.) (Humana Press, Totowa, N.J.).

[0079] One aspect of the present invention comprises a diagnostic test for diagnosing or predicting ASD in an individual comprising a reagent for detecting at least one CNV genetic marker associated with ASD, wherein the at least one CNV genetic marker associated with ASD comprises: at least one CNV genetic marker associated with ASD listed in Table 3; and 0 or more CNV genetic markers associated with ASD listed in Table 4; wherein detection in a genetic sample from the individual of the at least one CNV genetic marker associated with ASD indicates that the individual is affected with ASD, or is predisposed to ASD. In one embodiment, the at least one CNV genetic marker associated with ASD listed in Table 3 is selected from the group consisting of the CNV genetic markers associated with ASD 1-20 and 22-24 listed in Table 3. In one embodiment the at least one CNV genetic marker associated with ASD listed in Table 3 comprises one or more of the CNV genetic markers numbered 6, 8, 10, 16 and 22 in Table 3 and wherein the 0 or more CNV genetic markers associated with ASD listed in Table 4 comprises 0 or more of CNV genetic markers numbered 2-5, 8-10, 16, 20, 22, 24, 30 and 32 listed in Table 4. In another embodiment, the at least one CNV genetic marker associated with ASD listed in Table 3 comprises one or more of the CNV genetic markers comprising a gene in or adjacent to said CNV genetic marker that is involved in neural function, development and disease, such as one or more of the CNV genetic markers numbered 2, 8, 11-13, 21 and 24 listed in Table 3; and the 0 or more CNV genetic markers associated with ASD listed in Table 4 comprises 0 or more of CNV genetic markers numbered 4, 6, 7, 10, 18, 19, 21, 22, 23, 26, 29 and 30 listed in Table 4 (e.g., CNV genetic markers comprising a gene in or adjacent to it that is involved in neural function, development and disease). In another embodiment, the at least one CNV genetic marker associated with ASD comprises at least 5, 6, 7, 8, 9, 10, 11, 12, 13, 14, 15, 16, 17, 18, 19, 20, 21, 22, 23 or all 24 of the CNV genetic markers associated with ASD listed in Table 3; and at least 5, 6, 7, 8, 9, 10, 11, 12, 13, 14, 15, 16, 17, 18, 19, 20, 25, 30 or all the CNV genetic markers associated with ASD listed in Table 4. In one embodiment, a diagnostic test for diagnosing or predicting ASD in a subject comprises a reagent for detecting at least one CNV genetic marker associated with ASD, wherein the at least one CNV genetic marker associated with ASD comprises at least 2, 3, 4, 5, 6, 7, 8, 9, 10, 11, 12, 13, 14, 15, 16, 17, 18, 19, 20, 25, 30, 35, 40, 45, 50, 55, 60, 65, 70, 75, 80, 90, 100, or more of the CNV genetic markers associated with ASD listed in Table 8; and at least 1, 2, 3, 4, 5, 6, 7, 8, 9, 10, 11, 12, 13, 14, 15, 16, 17, 18, 19, 20, 25, 30, 35, 40, 45, 50, 55, 60, 65, 70, 75, 80, 90, 100, or more of the CNV genetic markers associated with ASD listed in Table 9. In one embodiment, a diagnostic test for diagnosing or predicting ASD in a subject comprises a reagent for detecting at least one CNV genetic marker associated with ASD, wherein the at least one CNV genetic marker associated with ASD comprises all the CNV genetic markers associated with ASD listed in Table 3; and all the CNV genetic markers associated with ASD listed in Table 4.

[0080] In one embodiment, a diagnostic test as described herein has a diagnostic yield for ASD of about 8% to about 40%. Diagnostic yield refers to the percent of individuals with the diagnosis of ASD that will have an abnormal genetic test result and is equal to sensitivity. In this regard, the diagnostic test described herein may have a diagnostic yield for ASD of about 8% to about 14%, from about 9% to about 13%, or from about 10% to about 12%. In further embodiments, a diagnostic test as described herein has a diagnostic yield for ASD of about 12%, 13%, 14%, 15%, 16%, 17%, 18%, 19%, 20%, 21%, 22%, 23%, 24%, 25%, 26%, 27%, 28%, 29%, 30%, 31%, 32%, 33%, 34%, 35%, 36%, 37%, 38%, 39% or about 40%.

[0081] In certain embodiments, the CNV genetic markers associated with ASD as described herein may be isolated, amplified, and/or cloned into a vector. The term “vector” relates to a single or double stranded circular nucleic acid molecule that can be infected, transfected or transformed into cells and replicate independently or within the host cell genome. A circular double stranded nucleic acid molecule can be cut and thereby linearized upon treatment with restriction enzymes. An assortment of vectors, restriction enzymes, and the knowledge of the nucleotide sequences that are targeted by restriction enzymes are readily available to those skilled in the art, and include any replicon, such as a plasmid, cosmid, bacmid, phage or virus, to which another genetic sequence or element (either DNA or RNA) may be attached so as to bring about the replication of the attached sequence or element. A nucleic acid molecule of the invention (e.g., an isolated nucleic acid containing a CNV associated with ASD as described herein) can be inserted into a vector by cutting the vector with restriction enzymes and ligating the two pieces together.

[0082] Many techniques are available to those skilled in the art to facilitate transformation, transfection, or transduction of an expression construct into a prokaryotic or eukaryotic organism. The terms “transformation”, “transfection”, and “transduction” refer to methods of inserting a nucleic acid and/or expression construct into a cell or host organism. These methods involve a variety of techniques known to the skilled artisan, such as treating the cells with high concentrations of salt, an electric field, or detergent, to render the host cell outer membrane or wall permeable to nucleic acid molecules of interest, microinjection, PEG-fusion, and the like.

[0083] The term “promoter element” describes a nucleotide sequence that is incorporated into a vector that, once inside an appropriate cell, can facilitate transcription factor and/or polymerase binding and subsequent transcription of portions of the vector DNA into mRNA. In one embodiment, the promoter element of the present invention precedes the 5′ end of a nucleic acid molecule of a genetic marker associated with ASD such that the latter is transcribed into mRNA. Host cell machinery then translates mRNA into a polypeptide.

[0084] Those skilled in the art will recognize that a nucleic acid vector can contain nucleic acid elements other than the promoter element and the autism specific marker gene nucleic acid molecule. These other nucleic acid elements include, but are not limited to, origins of replication, ribosomal binding sites, nucleic acid sequences encoding drug resistance enzymes or amino acid metabolic enzymes, and nucleic acid sequences encoding secretion signals, localization signals, or signals useful for polypeptide purification.

[0085] In one embodiment, the methods and in vitro diagnostic tests and products described herein may be used for the diagnosis of autism in at-risk patients, patients with non-specific symptoms possibly associated with autism, and/or patients presenting with related disorders (e.g., asperger disorder, PDD-NOS, and CDD). In another embodiment, the methods and in vitro diagnostic tests described herein may be used for screening for risk of progressing from at-risk, non-specific symptoms possibly associated with ASD, and/or fully-diagnosed ASD. In certain embodiments, the methods and in vitro diagnostic tests described herein can be used to rule out screening of diseases and disorders that share symptoms with ASD. In yet another embodiment, the methods and in vitro diagnostic tests described herein may indicate diagnostic information to be included in the current diagnostic evaluation in patients suspected of having autism and other related disorder classified under ASD.

[0086] In one embodiment, a diagnostic test may comprise one or more devices, tools, and equipment configured to collect a genetic sample from an individual. In one embodiment of a diagnostic test, tools to collect a genetic sample may include one or more of a swab, a scalpel, a syringe, a scraper, a container, and other devices and reagents designed to facilitate the collection, storage, and transport of a genetic sample. In one embodiment, a diagnostic test may include reagents or solutions for collecting, stabilizing, storing, and processing a genetic sample. Such reagents and solutions for collecting, stabilizing, storing, and processing genetic material are well known by those of skill in the art. In another embodiment, a diagnostic test as disclosed herein, may comprise a microarray apparatus and associated reagents, a flow cell apparatus and associated reagents, a multiplex next generation nucleic acid sequencer and associated reagents, and additional hardware and software necessary to assay a genetic sample for the presence of certain genetic markers and to detect and visualize certain genetic markers.

[0087] In certain embodiments, the methods disclosed herein may comprise assaying the presence of one or more CNV genetic markers in an individual which may include methods generally known in the art. In one such embodiment, methods for detecting a genetic polymorphism such as a CNV genetic marker associated with ASD in an individual may include assaying an individual for the presence of or the absence of a CNV associated with ASD using one or more genotyping assays such as an array, PCR-based genotyping, next-generation sequencing-based methods, DNA hybridization, fluorescence microscopy, and other methods known by those of skill in the art. In another embodiment, methods for assaying the presence of or the absence of one or more CNV markers associated with ASD may include providing a nucleotide sample from an individual and assaying the nucleotide sample for the presence of or the absence of one or more CNV genetic markers. In one embodiment, the sample may be a biological fluid or tissue comprising nucleated cells including genomic material.

[0088] Described herein are methods for detecting the risk, diagnosing, and predicting ASD in an individual by detecting one or more CNV genetic markers associated with ASD. In one embodiment, the methods disclosed herein may be used to indicate if an individual is at risk of developing ASD. In one embodiment, the methods disclosed herein may be used to diagnose ASD in an individual. In one embodiment, the methods disclosed may be used to characterize the clinical course or status of ASD in a subject. In one embodiment, the methods as disclosed herein may be used to predict a response in a subject to an existing treatment for ASD, or a treatment for ASD that is in development or has yet to be developed. The methods described herein can be employed to screen for any type of disorder associated with autism, including, any metabolic and immune disorders, epilepsy, anxiety, depression, attention deficit hyperactivity disorder, speech delay or language impairment, motor incoordination, mental retardation, schizophrenia and bipolar disorder.

[0089] In certain embodiments, one or more CNV genetic markers described herein can be used in a method for selecting a patient for treatment of an ASD. For example, the presence or absence of the CNV genetic marker indicates that the patient will, e.g., be responsive to and/or benefit (e.g., reduce one or more symptoms of the ASD) from the treatment. In one embodiment, a patient may be selected for a particular treatment if the patient comprises a CNV genetic marker provided in Tables 3, 4, 8 and 9. In another embodiment, a patient that does not comprise a CNV genetic marker selected from the genetic markers provided in Tables 3, 4, 8 and 9 is selected for a particular treatment.

[0090] In one embodiment, a method of selecting a patient for treatment comprises detecting a CNV genetic marker associated with ASD. In certain embodiments, the CNV genetic marker is associated with at least one of autism, Asperger's disorder, PDD-NOS, Rett's disorder, and CDD.

[0091] In one embodiment, the patient is selected for the treatment of classic autism. Treatments include, e.g., gene therapy, RNA interference (RNAi), behavioral therapy (e.g., Applied Behavior Analysis (ABA), Discrete Trial Training (DTT), Early Intensive Behavioral Intervention (EIBI), Pivotal Response Training (PRT), Verbal Behavior Intervention (VBI), and Developmental Individual Differences Relationship-Based Approach (DIR)), physical therapy, occupational therapy, sensory integration therapy, speech therapy, the Picture Exchange Communication System (PECS), dietary treatment, and drugs (e.g., antipsychotics, anti-depressants, anticonvulsants, stimulants).

[0092] In another embodiment, the patient is selected for the treatment of Asperger's disorder. Treatments include, e.g., gene therapy, RNAi, occupational therapy, physical therapy, communication and social skills training, cognitive behavioral therapy, speech or language therapy, and drugs (e.g., aripiprazole, guanfacine, selective serotonin reuptake inhibitors (SSRIs), riseridone, olanzapine, naltrexone).

[0093] In one embodiment, the patient is selected for the treatment of Rett's disorder. Treatments include, e.g., gene therapy, RNAi, occupational therapy, physical therapy, speech or language therapy, nutritional supplements, and drugs (e.g., SSRIs, anti-psychotics, beta-blockers, anticonvulsants).

[0094] In one embodiment, the patient is selected for the treatment of CDD. Treatments include, e.g., gene therapy, RNAi, behavioral therapy (e.g., ABA, DTT, EIBI, PRT, VBI, and DIR), sensory enrichment therapy, occupational therapy, physical therapy, speech or language therapy, nutritional supplements, and drugs (e.g., anti-psychotics and anticonvulsants).

[0095] In another embodiment, the patient is selected for the treatment of PDD-NOS. Treatments include, e.g., gene therapy, RNAi, behavioral therapy (e.g., ABA, DTT, EIBI, PRT, VBI, and DIR), physical therapy, occupational therapy, sensory integration therapy, speech therapy, PECS, dietary treatment, and drugs (e.g., antipsychotics, anti-depressants, anticonvulsants, stimulants).

[0096] In one embodiment, the treatment the patient is selected for is gene therapy to correct, replace, or compensate for a target gene. Gene therapy may target an overexpressed gene or an underexpressed gene. In one embodiment, a patient comprises a CNV genetic marker in or adjacent to a gene to be modified by gene therapy. Examples of genes in or adjacent to the CNV genetic markers described herein include, but are not limited to, NRXN1, LINGO2, STXBP5, GABA receptor gene cluster (e.g., GABRA5, GABRA3, GABRG3), RGS20, TCEA1, UBE3A, E2F1, PLCB1, PMP22, AADAT, MAPK3, NRXN1, NRG3, DPP10, UQCRC2, USH2A, NECAB3, CNTN4, LINGO2, IL1RAPL1, STXBP5, DOC2A, SNRPN, CDRT15, CDH13, CD160, CALCR, and SPN. Examples of other genes that may be targeted by gene therapy include MECP2, CDKL5 and FOXG1.

### EXAMPLES

### Example 1

[0097] Genetics are known to play a major role in individuals with autism. However, the genetic underpinnings of autism are highly complex. The study described in this example used high-risk autism families to identify genetic variants that could predispose to autism in these families. This study also further evaluated these variants in a very large group of unrelated autism samples and controls to determine if these variants were relevant to children with autism in the broader population. This study identified 18 genetic variants that have not previously been observed in children with autism that are important not only in families but also in unrelated children with autism. By using a very large group of samples and controls this study also provides better frequency and significance estimates for many genetic variants previously associated with autism. This study sets the stage for using these genetic variants in the clinical analysis of children with autism.

[0098] Structural variation is thought to play a major etiological role in the development of ASDs, and numerous studies documenting the relevance of copy number variants in ASDs have been published since 2006. To determine if large ASD families harbor high-impact CNVs that may have broader impact in the general ASD population, the present experiments used the Affymetrix genome wide human SNP array 6.0 to identify 153 putative autism-specific CNVs present in 55 individuals with ASD from 9 multiplex ASD pedigrees. To evaluate the actual prevalence of these CNVs as well as 185 CNVs reportedly associated with ASD from published studies many of which are insufficiently powered, a custom Illumina array was designed and used to interrogate these CNVs in 3,000 ASD cases and 6,000 controls. Additional single nucleotide variants (SNVs) on the array identified 25 CNVs not detected in the family studies at the standard SNP array resolution. After molecular validation, the results demonstrated that 15 CNVs identified in high-risk ASD families also were found in two or more ASD cases with odds ratios greater than 2.0, strengthening their support as ASD risk variants. In addition, of the 25 CNVs identified using SNV probes on the custom array, 9 also had odds ratios greater than 2.0, suggesting that these CNVs also are ASD risk variants. Eighteen of the validated CNVs have not been reported previously in individuals with ASD and three have only been observed once. Finally, the results described here confirmed the association of 31 of 185 published ASD-associated CNVs in this dataset with odds ratios greater than 2.0, suggesting they may be of clinical relevance in the evaluation of children with ASDs. Taken together, these data provide strong support for the existence and application of high-impact CNVs in the clinical genetic evaluation of children with ASD.

### INTRODUCTION

[0099] Twin studies [1-3], (reviewed in [4]), family studies [5-7], and reports of chromosomal aberrations in individuals with ASD (reviewed in[8]) all have strongly suggested a role for genes in the development of ASD. Although the magnitude of the genetic effect observed in ASD varies from study to study, it is clear that genetics plays a significant role.

[0100] While a number of genes associated with ASD susceptibility have been observed in multiple studies, variants in a single gene cannot explain more than a small percentage of cases. Indeed, recent estimates suggest that there may be nearly 400 genes or chromosomal regions involved in ASD predisposition[9-12].

[0101] In the past few years, a number of studies have identified both de novo and inherited structural variants, CNVs, that are associated with ASD [13-23]. De novo CNVs may explain at least some of the “missing heritability” of ASD as understood to date. While it is clear that CNVs play an important role in susceptibility to ASD, it is also clear that the genetic penetrance of many of these CNVs is less than 100%. Although many of the duplications or deletions observed in children with ASD occur as de novo variants, duplications, for example on chromosome 16p11.2, often are inherited from an asymptomatic parent. Moreover, both deletions and duplications encompassing a portion of chromosome 16p11.2 have been associated with ASD [21, 24-26] and 16p11.2 gains have been associated with ADHD and schizophrenia [24, 27-29], indicating that the same genomic region can be involved in multiple developmental conditions. In addition, deletions on chromosome 7q11.23 are known to cause Williams syndrome and duplications of this same region have been observed and are thought to be causal in individuals with ASD [9,11]. While individuals with Williams syndrome tend to be outgoing and social, individuals with ASD are socially withdrawn, suggesting that deletions and duplications in this region result in individuals on opposite sides of the behavioral spectrum.

[0102] Although numerous studies regarding the role of CNVs in ASD have been published in the research literature, the findings of these studies have not been fully utilized for clinical evaluation of children with ASD. This is likely due to the rarity of individual variants, the lack of probe coverage on clinical microarrays that permits detection of smaller variants, and the difficulty in understanding the relevant biology of some variants even when they are significantly associated with ASD. Despite this, published clinical guidelines suggest that microarray-based testing should be the first step in the genetic analysis of children with syndromic and non-syndromic ASD as well as other conditions of childhood development [30], and there is a wealth of information demonstrating its utility in large samples of children who have undergone such testing [25,31].

[0103] This example describes efforts to discover high-impact CNVs in high-risk ASD families in Utah and to assess their potential role in unrelated ASD cases. These CNVs were interrogated, as well as CNVs from multiple published sources [18,32] in a large sample set of ASD cases and controls, to determine more precisely their potential disease relevance. To evaluate carefully these CNVs, a custom Illumina iSelect array was designed containing probes within and flanking CNV regions of interest. This custom array was used to obtain high-quality CNV results on 2,175 children with clinically diagnosed ASD and 5,801 children with normal development following removal of samples that did not meet stringent quality control parameters. The results of this study identify multiple rare recurrent CNVs from high-risk ASD families that also confer risk in unrelated ASD cases and delineate the prevalence and impact of CNVs reported in the literature in a large case control study of ASDs.

### Materials and Methods

[0104] DNA Samples.

[0105] DNA samples from high-risk ASD family members were collected after obtaining informed consent using a University of Utah IRB-approved protocol. Three independent sample cohorts, comprising 3,000 ASD patient samples (72% male), were collected for CNV replication. Of those, 857 were probands recruited and genotyped by the Center for Applied Genomics (CAG) at The Children's Hospital of Philadelphia (CHOP) from the greater Philadelphia area using a CHOP IRB-approved protocol; 2,143 ASD samples were from the AGRE and the AGP consortium (Rutgers, N.J. ASD repository), and genotyped at the CAG center at CHOP (Table 1). Only samples from affected individuals diagnosed using the Autism Diagnostic Interview-Revised (ADI-R) and the Autism Diagnostic Observation Schedule (ADOS) were used in the study. All control samples were from CHOP and were matched in a 2:1 ratio with the ASD cases.

TABLE 1
Case and control samples used in this study.

| | case | | control | |
|---|---|---|---|---|
| | male | female | male | female |
| AGRE/AGP | 1,517 | 626 | 0 | 0 |
| CHOP | 633 | 224 | 3,992 | 2,008 |
| sub-total | 2,150 | 850 | 3,992 | 2,008 |

| | | |
|---|---|---|
| grand-total | 3,000 | 6,000 |

[0106] CNV Discovery in High-Risk ASD Families.

[0107] DNA samples were genotyped on the Affymetrix Genome-Wide Human SNP Array 6.0 according to the manufacturer's protocol. Fifty-five autism subjects were chosen from 9 families with multiple affected first-degree relatives. The number of individuals with an autism diagnosis in these families ranged from 3 to 9. Affected individuals were diagnosed using ADI-R and ADOS. Control subjects (N=439) for the discovery phase of the project were selected from Utah CEPH/Genetics Reference Project (UGRP) families [70]. All microarray experiments were performed on blood DNA samples, except for two of the 55 case samples and three control subjects for which DNA from lymphoblastoid cell lines was used. CNVs were initially detected using the Copy Number Analysis Module (CNAM) of Golden Helix SNP & Variation Suite (SVS) (Golden Helix Inc.). Log ratios were calculated by quantile normalizing the A allele and B allele intensities using the entire population as a reference median for each SNP.

[0108] Batch effects in the log ratios were corrected via numeric principle component analysis (PCA) [71]. CNV segmentation analysis was carried out for each individual using the univariate CNAM segmentation procedure of Golden Helix SVS. We used a moving window of 5,000 markers, maximum number of segments per window of 20, minimum segment size 10 markers, and pairwise permutation p-value of 0.001.

[0109] iSelect Array Design.

[0110] Probes for each CNV to be characterized in this study were selected from the Illumina Omni2.5 array probe set. Probes were selected to be as uniformly spaced across each region and flanking each region as possible (using the hg19 genome build). For each CNV, we included 10 or more probes within the defined CNV region (CNVr) and five probes on each flank (except where not possible due to the telomeric location of a CNVr). Probes for an additional 185 CNVs described in the literature, including 104 identified by CHOP in samples that partially overlap those used in this study, also were included for further CNV validation. We attempted to increase probe coverage for CNVs identified with only a small number of probes. Probes for 2,799 putative functional candidate SNVs detected by targeted exome DNA sequencing on 26 representative individuals from 11 ASD families (unpublished data) were included. The genes that were targeted for exome sequencing included all known genes in regions of familial haplotype sharing and linkage as well as additional autism candidate genes. These SNVs, although included in a search for potential ASD point mutations, also were used to identify additional CNVs.

[0111] Array Processing.

[0112] High throughput SNP genotyping using the Illumina Infinium™ II BeadChip technology (Illumina, San Diego), at the Center for Applied Genomics at CHOP was performed. Detailed methods for array processing are described in the section entitled Supplemental Materials below.

[0113] CNV Calling and Statistical Analysis.

[0114] CNVs were called using both PennCNV [34,35] and CNAM (Golden Helix SNP & Variation Suite (SVS), Golden Helix, Inc.). CNV calling using PennCNV was performed as described [32]. For CNAM calls, each target region was separately analyzed, rather than whole chromosomes. Since our array targeted specific regions and did not have probe coverage over much of the genome, it was desirable to avoid calling segments that spanned large regions with no data, and prevent any CNV calls from being influenced by distant data points. To accomplish this, the markers in the data set were grouped into “pseudochromosomes”, one for each CNV covered by the array, that were then considered individually in the segmentation algorithm. After segmentation, segments were classified as losses, gains, or neutral. Fisher's exact test was used to test for association of copy number loss versus no loss, and copy number gain versus no gain. Similar tests were conducted for the X chromosome, stratified by gender. Odds ratios also were calculated as an indicator of potential clinical risk for each CNV.

[0115] Laboratory Confirmation of CNVs.

[0116] Array results were confirmed using pre-designed Applied Biosystems TaqMan copy number assays or custom-designed TaqMan copy number assays when necessary (Life Technologies, Inc.). All CNVs with odds ratios greater than 2.0 and present in at least two cases were selected for molecular validation. We did not select CNVs with odds ratios less than 2 were not selected for validation because these odds ratios were not thought to have high potential clinical utility. Six CNVs were also selected for validation because they were adjacent to, but not overlapping, literature CNVs that were covered by probes on the custom array. A maximum of 6 case samples were validated for each CNV. Five negative control samples, selected based on their lack of all of the CNVs under study also were included in each validation assay. A list of all of the TaqMan assays used in this work is found in Table 7, and detailed procedures of the TaqMan assays are described in the supplemental methods.

[0117] Pathway Analysis.

[0118] Analysis of biological pathways encompassing genes found in the CNV regions was performed using the bioinformatics tools DAVID Bioinformatics Resources 6.7 [72,73] and Ingenuity Pathways Analysis (IPA) (Ingenuity® Systems). Network and pathway analyses on genes contained within the CNVs or immediately flanking intergenic CNVs that were PCR validated was performed. Pathway analysis details are described in the supplemental methods.

### Results

[0119] CNV Discovery in Utah High Risk Autism Pedigrees.

[0120] Using CNAM (GoldenHelix Inc.) on Affymetrix Genome-Wide Human SNP array 6.0 data, a total of 153 CNVs in subjects with autism in Utah families that were not found in any CEPH/UGRP control samples were identified. This set included 131 novel CNVs and 22 CNVs present in the Autism Chromosomal Rearrangement Database[15]. Thirty-two autism-specific CNVs were detected in multiple (2 or more) autism subjects, and 121 CNVs were detected in only one person among the 55 autism subjects assayed. Of these, 153 CNVs, 112 were copy number losses (deletions) and 41 were copy number gains (duplications). The average size of the CNVs from high-risk families was 91 kb. The genomic locations of these CNVs are shown in Table 8.

[0121] CNV Regions on the Custom Array.

[0122] To better understand the frequency of the CNVs identified in Utah ASD families in a broader ASD population, we created a custom Illumina iSelect array containing probes covering all 153 of the Utah CNVs described in Table 8. CNV coordinate, copy number status, and probe content for each CNV are included. In addition, since the ultimate goal of this work is to understand the frequency and relevance of rare recurrent CNVs in the etiology of ASD, we included probes for 185 autism-associated CNVs identified in the literature [14-16, 18, 21, 32, 33](Table 9). The probe coverage for each literature CNV also is shown in Table 9. In total, 7134 probes, all selected from the Illumina 2.5M array, were used for this study. As part of a separate study we also included 2799 SNVs detected by next-generation sequencing of genes in regions of haplotype sharing among our high-risk ASD families and in published ASD candidate genes in these same individuals also were included. Intensity data for these SNVs were used to identify additional CNVs that were not observed in our Utah high-risk ASD families (Table 10). Following standard data QC steps (see supplemental results) this array was used to characterize which of these 363 CNVs were present in DNA from 2,175 children with autism and 5,801 age, gender, and ethnicity matched controls (Table 1). These 7976 samples were available for analysis following our strict quality control measures (supplemental methods).

[0123] Analysis of CNVs on the iSelect Array.

[0124] The workflow for CNV analysis of the custom array data is shown in FIG. 1. Following quality control analysis, including removal of samples that did not meet laboratory sample quality control measures, samples with excessive CNV calls, samples of uncertain ethnicity, and related samples, our final dataset included 1544 unrelated cases and 5762 unrelated controls. Because of the inherent noisiness of CNV analysis, we used two independent CNV calling algorithms, PennCNV [34] and CNAM (Golden Helix, Inc.), to increase our ability to detect CNVs. We identified 6,086 CNVs in cases and 14,387 CNVs in controls using PennCNV and 3,226 CNVs in cases and 8,234 CNVs in controls using CNAM. 1,537 CNVs from the 2175 cases including those from multiplex families (average 0.70 CNVs per individual) and 3,845 CNVs from the 5801 controls including related controls (average of 0.66 CNVs per individual) were called by both algorithms used for CNV detection.

[0125] All CNV regions harboring CNVs shared among subjects were defined from PennCNV calls, CNAM calls and the PennCNV/CNAM intersecting calls and their significance of association was calculated across the genome (FIG. 2). Of the 153 CNVs discovered in high-risk ASD families, 139 of them were seen in replication samples evaluated with the custom Illumina iSelect array. Seven of the CNVs not seen in this larger population study had poor probe coverage on the array either due to their small size or their genomic content, while the remainder that were not detected may represent false positive CNVs from our initial discovery work or may be rare CNVs that are private to the families or individuals in which they were identified.

[0126] Molecular Validation of CNV Calls.

[0127] We used TaqMan copy number assays to confirm the presence of CNVs in our population. A summary of the 195 TaqMan assays used is shown in Table 7 (Hs assay names refer to assays available from Applied Biosystems, now Life Technologies, Carlsbad, Calif.). Since our goal for this study was to understand the frequencies of these CNVs in a large case/control population, we chose to validate any CNVs that were likely to have clinical relevance. Our criteria for selection were as follows: 1) any CNV with an odds ratio>=2.0; 2) any rare CNV seen in at least two cases. These criteria for selecting CNVs were chosen to validate because the goal was to translate research CNV findings into potentially clinically useful markers. Since clinical testing of individuals with ASD is only performed on people who are symptomatic, CNVs with odds ratios<1.0 (CNVs that indicate lower than average risk of ASD) were not chosen for validation. Likewise, since CNVs with odds ratios>=1 but <=2 do are not of great diagnostic interest, we chose to validate only CNVs with odds ratios>=2.0. By using these criteria, we included rare recurrent CNVs that may be etiologically important despite the lack of statistical significance in cases versus controls. For previously published CNVs we considered our custom Illumina iSelect array as an independent test of their validity. We assumed therefore that these CNVs did not require additional testing. Since some of the CNVs from CHOP were not included in previous publications [18,32], we selected all CHOP CNVs for molecular validation. For CNVs that met our selection criteria we assayed a maximum of six case samples that contained the CNV, giving priority to those samples called both by PennCNV and CNAM. Results of these TaqMan experiments are summarized in Table 2. Interestingly, many of the most common CNVs detected by the array were not validated by the TaqMan assays. For example, when we tested samples from a statistically significant CNV duplication on chromosome 7q36.1 that was detected only by PennCNV and not by CNAM, all samples tested were shown to have two copies rather than the anticipated three copies, suggesting that in this sample set at least some of the CNV duplications observed are not true positives. Conversely all but one of the CNVs observed on chromosome 15, whether in the Prader-Willi/Angelman syndrome region or located more distally on chromosome 15, were confirmed by TaqMan assays. Results of these validation experiments demonstrated that CNVs called both by PennCNV and CNAM were much more likely to be confirmed (97% of tested samples) than CNVs called by either PennCNV alone (24%) or CNAM alone (30%). This observation demonstrates the care that must be taken during the CNV discovery process to insure that only valid calls are selected for further analysis.

[0128] False negative results also are possible with these microarray studies. However, the controls used for TaqMan assays were selected from the control sample set because they lacked CNV calls for any of the regions being evaluated. In none of these samples did the TaqMan results indicate the presence of any of the CNVs being validated, so no false negative results were detected. These data suggest that false negative results are not a common problem in this study.

TABLE 2
confirmation of CNV calls by quantitative PCR.

| TaqMan CNV | Utah | Utah Sequence | Literature | |
|---|---|---|---|---|
| Validation Status | Family CNVs | SNP CNVs | CNVs | Total |
| PASS | 24 (2 overlap | 15 | 25 | 64 |
| | with Lit. CNV) | | | |
| FAIL | 9 | 9 | 5 | 23 |
| NoCall | 0 | 1 | 0 | 1 |

A summary of the PCR validation result is shown. Sequence SNP CNVs were discovered in this work using SNVs present on this array for sequence variant confirmation in the same cohort.

[0129] CNVs from High-Risk Utah Families.

[0130] One hundred thirty-nine of the 153 CNVs identified in high-risk ASD families were observed in case and/or control samples in this large dataset. Of these, 33 were present in two or more cases and had odds ratios greater than 2 and thus were selected for molecular confirmation. Following TaqMan validation, fifteen of thirty-three CNVs were confirmed (Table 3). This set included 3 CNVs with mixed results (Table 3). A CNV that was validated in some samples but not in others was considered to have passed validation if the validated samples resulted in an odds ratio greater than 2.0 with at least two confirmed cases, even if other samples did not pass molecular validation. The remaining 18 CNVs did not pass validation experiments.

[0131] One hundred thirty-nine of the 153 CNVs identified in high-risk ASD families were observed in case and/or control samples in this large dataset. Of these, 33 were present in two or more cases and had odds ratios greater than 2 and thus were selected for molecular confirmation. Following TaqMan validation, fifteen of the thirty-three CNVs were validated (Table 3). Of the 15 validated CNVs identified in high-risk families, 4 were shown to be inherited CNVs while three were de novo CNVs in the discovery families. The remainder were of undetermined origin, in most cases due to lack of information for one or both parents. A CNV that was validated in some samples but not in others, for example if a CNV was validated in all calls made by both PennCNV and CNAM but was not validated in all calls made only by one program, was considered to have passed validation if the validated samples yielded an odds ratio greater than 2.0 with at least two cases confirmed by validation.

[0132] Notable among these CNVs is a deletion observed near the 5′-end of the NRXN1 gene. This deletion, observed in five cases and only in one control, includes at least a portion of the NRXN1-alpha promoter, and extends into the first exon of NLRXN1-α, as shown in the UCSC Genome Browser view [35](FIG. 3). CNVs impacting NRXN1 in ASD as well as other neurological conditions have been published by others [15, 32, 36-40], so the observation of NRXN1 CNVs both in our high-risk ASD family discovery work and in the large case/control replication study demonstrates our ability to detect biologically relevant CNVs that may also have clinical utility.

[0133] Other CNVs of interest included portions of the LINGO2 and STXBP5 genes. Single nucleotide variants in the LINGO2 gene have been associated with essential tremor and with Parkinson's disease, suggesting that the LINGO2 protein may have a neurological function[41]. However, CNVs in this gene have not previously been identified in individuals with ASD. We also observed deletions involving a portion of the STXBP5 gene, an interesting finding based on the potential role of STXBP5 in neurotransmitter release[42,43].

[0134] CNVs Identified by SNV Probes.

[0135] Twenty-five additional CNVs shown in Table 3 were discovered using SNVs identified in our high-risk ASD families. The SNVs that detected these twenty-five CNVs (Table 10) were identified by exon capture and DNA sequencing in regions of haplotype sharing and in published ASD candidate genes in our high-risk ASD families, and were selected for further study because they might alter the function of the proteins in which they were found (unpublished observations). The 9 validated CNVs derived from SNV intensity data are shown in Table 3 (CNVs not detected in discovery cohort). One of these CNVs, a chromosome 15q duplication, encompasses three duplication CNVs in Table 10. These three CNVs are thought to be contiguous since TaqMan data confirmed the same samples to be positive for each of them.

[0136] Interestingly, duplications involving the GABA receptor gene cluster, as well as many other genes, on chromosome 15q12 were observed in 11 unrelated cases in our study and only in a single control, shown in the UCSC Genome Browser view [35](FIG. 4). Contrary to our findings, a recent search for CNVs in GABA pathway genes [44] did not find an enrichment of duplications in this region. Rather, both deletions and duplications were observed at similar frequencies in cases and controls.

[0137] Published CNVs.

[0138] Additional CNVs from the literature and both published and unpublished CNVs identified at CHOP also were observed in our large dataset and met our criteria for potential clinical utility. Of those, 31 high-impact CNVs are shown in Table 4 (CNVs 20 and 21 in Table 4 are shown separately but are noted as likely being contiguous and thus likely are only a single entity). All CNVs not previously experimentally validated were validated in this study.

[0139] One of the previously unpublished CHOP CNVs is a duplication that encompasses the 3′-end RGS20 gene as well as the 3′-end of the TCEA1 gene. The RGS gene family encodes proteins that regulate G-protein signaling. These proteins function by increasing the inherent GTPase activity of their target G-proteins, and thus limit the signaling activity of their target G-proteins by keeping them in the inactive, GDP-bound state. RGS20 is expressed throughout the brain (reviewed in [45]), making it a likely candidate for involvement in neurological development. The TCEA1 gene, which also is partially encompassed by this CNV, is a transcription elongation factor involved in RNA polymerase II transcription. A role for TCEA1 in cell growth regulation has been suggested [46]. This potential role is consistent with the involvement of TCEA1 CNVs in ASD etiology as well.

TABLE 3
Validated CNVs discovered using affected children from Utah families.

| | | | CNV Region - | CNV Region - |
|---|---|---|---|---|
| No. | CNV Origin | Cytoband | Discovery Cohort | Replication Cohort |
| 1 | Utah CNV | 1q21.1 | chr1: 145714421-146101228 | chr1: 145703115-145736438 |
| 2 | Utah CNV | 1q41 | chr1: 215858193-215861879 | chr1: 215854466-215861792 |
| 3 | Utah CNV | 2p16.3 | chr2: 51272055-51336043 | chr2: 51266798-51339236 |
| 4 | Utah CNV^{#} | 3q26.31 | chr3:172596081-172617355 | chr3: 172591359-172604675 |
| 5 | Utah CNV^{#} | 4q35.2 | chr4: 189084983-189117429 | chr4: 189084240-189117031 |
| 6 | Utah CNV^{#} | 6p24.3 | chr6: 7425246-7464367 | chr6: 7461346-7470321 |
| 7 | Utah CNV^{#} | 6q11.1 | chr6: 62443739-62462295 | chr6: 62426827-62472074 |
| 8 | Utah CNV | 6q24.3 | chr6: 147588752-147664671 | chr6: 147577803-147684318 |
| 9 | Utah CNV^{#} | 7p22.1 | chr7: 6838712-6864071 | chr7: 6870635-6871412 |
| 10 | Sequence | 7q21.3 | Not found | chr7: 93070811-93116320 |
| | SNP CNV^{#} | | | |
| 11 | Utah CNV^{#} | 9p21.1 | chr9: 28190069-28347679 | chr9: 28207468-28348133 |
| 12 | Utah CNV^{#} | 9p21.1 | chr9: 28190069-28347679 | chr9: 28354180-28354967 |
| 13 | Utah CNV | 10q23.1 | chr10: 83893626-84175018 | chr10: 83886963-83888343 |
| 14 | Utah CNV^{#} | 10q23.31 | chr10: 92274764-92289762 | chr10: 92262627-92298079 |
| 15 | Utah CNV^{#} | 12q23.2 | chr12: 102097012-102106306 | chr12: 102095178-102108946 |
| 16 | Utah CNV^{#} | 13q13.3 | chr13: 40087689-40088007 | chr13: 40083105-40090197 |
| 17 | Sequence | 14q32.2 | Not found | chr14: 100705631-100828134 |
| | SNP CNV^{#} | | | |
| 18 | Sequence | 14q32.31 | Not found | chr14: 102018946-102026138 |
| | SNP CNV^{#} | | | |
| 19 | Sequence | 14q32.31 | Not found | chr14: 102729881-102749930 |
| | SNP CNV^{#} | | | |
| 20 | Sequence | 14q32.31 | Not found | chr14: 102973910-102975572 |
| | SNP CNV^{#} | | | |
| 21 | Sequence | 15q11.2-q13.1 | Not found | chr15: 25690465-28513763 |
| | SNP CNV | | | |
| 22 | Sequence | 15q13.2-15q13.3 | Not found | chr15: 31092983-31369123 |
| | SNP CNV^{#} | | | |
| 23 | Sequence | 15q13.3 | Not found | chr15: 31776648-31822910 |
| | SNP CNV^{#} | | | |
| 24 | Sequence | 20q11.22 | Not found | chr20: 32210931-32441302 |
| | SNP CNV^{#} | | | |

| No. | CNV Type | Odds Ratio | P Value | Cases | Controls | Gene/Region |
|---|---|---|---|---|---|---|
| 1 | Dup | 3.37 | 9.60E−03 | 9 | 10 | CD160, PDZK1 |
| 2 | Del | 2.12 | 5.02E−03 | 22 | 39 | USH2A |
| 3 | Del | 14.96 | 8.26E−03 | 4 | 1 | upstream of NRXN1 |
| 4 | Dup | 3.74 | 2.11E−01 | 1 | 1 | downstream of SPATA16 |
| 5 | Del | 3.74 | 1.98E−01 | 2 | 2 | downstream of TRIML1 |
| 6 | Del | ∞ | 2.11E−01 | 1 | 0 | between RIOK1 and DSP |
| 7 | Dup | 3.74 | 1.98E−01 | 2 | 2 | KHDRBS2 |
| 8 | Del | ∞ | 2.10E−01 | 1 | 0 | STXBP5 |
| 9 | Dup | 7.47 | 1.15E−01 | 2 | 1 | upstream of CCZ1B |
| 10 | Del | ∞ | 4.46E−02 | 2 | 0 | CALCR, MIR653, MIR489 |
| 11 | Del | 3.74 | 6.72E−02 | 4 | 4 | LINGO2 |
| 12 | Del | 3.73 | 3.78E−01 | 1 | 1 | LINGO2 (intron) |
| 13 | Del | 3.76 | 1.54E−02 | 7 | 7 | NRG3 (intron) |
| 14 | Dup | 7.47 | 1.15E−01 | 2 | 1 | downstream of |
| | | | | | | BC037970 |
| 15 | Dup | 7.47 | 1.15E−01 | 2 | 1 | CHPT1 |
| 16 | Del | ∞ | 2.11E−01 | 1 | 0 | LHFP (intron) |
| 17 | Dup | 9.36 | 5.99E−03 | 5 | 2 | SLC25A29, YY1, MIR345, |
| | | | | | | SLC25A47, WARS |
| 18 | Dup | 4.62 | 1.01E−14 | 60 | 50 | DIO3AS, DIO3OS |
| 19 | Del | 7.47 | 1.15E−01 | 2 | 1 | MOK |
| 20 | Dup | 3.82 | 8.29E−26 | 136 | 142 | ANKRD9 (RAGE) |
| 21 | Dup* | 41.05 | 1.82E−08 | 11 | 1 | ATP10A, GABRB3, |
| | | | | | | GABRA5, GABRG3, |
| 22 | Del | ∞ | 4.46E−02 | 2 | 0 | FAN1, MTMR10, MIR211, |
| | | | | | | TRPM1 |
| 23 | Dup | 4.40 | 6.91E−06 | 21 | 18 | OTUD7A |
| 24 | Dup | 2.72 | 3.16E−02 | 8 | 11 | NECAB3, CBFA2T2, |
| | | | | | | C20orf144, NECAB3, |

CNVs shown here were selected based on their p value, their case/control odds ratio, or both and were subject to molecular validation.
*This CNV is contiguous with the chromosome 15q11.2 CNV described in Table 4 based on TaqMan data.
^{#}Designates CNVs not previously seen in ASD, based on queries for genes included in or flanking the CNV.
**Denotes gene in or adjacent to the CNV that is involved in neural function, development and disease (see Table 5-6).

TABLE 4
Published CNVs observed in our sample population.

| | | | Region of Highest | | TaqMan | | | | | |
|---|---|---|---|---|---|---|---|---|---|---|
| No. | Cytoband | Literature CNVs | Significance | CNV Type | Validation | Odds Ratio | P Value | Cases | Ctrls | Gene/Region |
| 1 | 1q21.1 | chr1: 146555186-147779086 | chr1: 146656292-146707824 | Dup | NT | 7.48 | 1.15E−01 | 2 | 1 | FMO5 |
| 2 | 2p24.3 | chr2: 13202218-13248445 | chr2: 13203874-13209245 | Del | Validated | ∞ | 2.11E−01 | 1 | 0 | upstream of |
| | | | | | (chr2: 13203874-13209245) | | | | | LOC100506474 |
| 3 | 2p21 | chr2: 45455651-45984915 | chr2: 45489954-45492582 | Dup | NT | ∞ | 4.46E−02 | 2 | 0 | between UNQ6975 |
| | | | | | | | | | | and SRBD1 |
| 4 | 2p16.3 | chr2: 50145644-51259671 | chr2: 51237767-51245359 | Del | NT | ∞ | 1.99E−03 | 4 | 0 | NRXN1** |
| 5 | 2p15 | chr2: 62258231-63028717 | chr2: 62230970-62367720 | Dup | NT | ∞ | 2.11E−01 | 1 | 0 | COMMD1 |
| 6 | 2q14.1 | chr2: 115139568-115617934 | chr2: 115133493-115140263 | Del | NT | 7.47 | 1.15E−01 | 2 | 1 | between |
| | | | | | | | | | | LOC440900 and |
| | | | | | | | | | | DPP10** |
| 7 | 3p26.3 | chr3: 1940192-1940920 | chr3: 1937796-1941004 | Del | Validated | 5.60 | 6.70E−02 | 3 | 2 | between CNTN6 |
| | | | | | (chr3: 1937796-1942764) | | | | | and CNTN4** |
| 8 | 3p14.1 | chr3: 67656832-68957204 | chr3: 67657429-68962928 | Del | NT | ∞ | 2.11E−01 | 1 | 0 | SUCLG2, FAM19A4, |
| | | | | | | | | | | FAM19A1 |
| 9 | 4q13.3 | chr4: 73756500-73905356 | chr4: 73766964-73816870 | Dup | Validated | ∞ | 2.11E−01 | 1 | 0 | COX18, ANKRD17 |
| | | | | | (chr4: 73753294-74058988) | | | | | |
| 10 | 4q33 | chr4: 154087652-172339893 | chr4: 171366005-171471530 | Del | NT | ∞ | 4.46E−02 | 2 | 0 | between AADAT** |
| | | | | | | | | | | and HSP90AA6P |
| 11 | 5q23.1 | chr5: 118478541-118584821 | chr5: 118527524-118589485 | Dup | Validated | 3.74 | 1.98E−01 | 2 | 2 | DMXL1, TNFAIP8 |
| | | | | | (chr5: 118527524-118614781) | | | | | |
| 12 | 6p21.2 | chr6: 39071841-39082863 | chr6: 39069291-39072241 | Del | Validated | 2.37 | 1.93E−02 | 12 | 19 | SAYSD1 |
| | | | | | (chr6: 39069291-39072241) | | | | | |
| 13 | 8q11.23 | chr8: 54858496-54907579 | chr8: 54855680-54912001 | Dup | Validated | ∞ | 2.11E−01 | 1 | 0 | RGS20, TCEA1 |
| | | | | | (chr8: 54855680-54912001) | | | | | |
| 14 | 10q11.22 | chr10: 46269076-50892143 | chr10: 49370090-49471091 | Dup | NT | 3.77 | 1.96E−01 | 2 | 2 | FRMPD2P1, |
| | | | | | | | | | | FRMPD2 |
| 15 | 10q11.23 | chr10: 50892146-51450787 | chr10: 50884949-50943185 | Dup | NT | 3.74 | 1.98E−01 | 2 | 2 | OGDHL, C10orf53 |
| 16 | 12q13.13 | chr12: 53183470-53189890 | chr12: 53177144-53180552 | Del | Validated | ∞ | 4.46E−02 | 2 | 0 | between KRT76 and |
| | | | | | (chr12: 53177144-53182177) | | | | | KRT3 |
| 17 | 15q11.1 | chr15: 20266959-25480660 | chr15: 20192970-20197164 | Dup | Validated | 4.97 | 4.06E−02 | 4 | 3 | downstream of |
| | | | | | (chr15: 20192970-20212798) | | | | | HERC2P3 |
| 18 | 15q11.2 | chr15: 20266959-25480660 | chr15: 25099351-25102073 | Del | NT | 3.75 | 1.13E−01 | 3 | 3 | SNRPN** |
| 19 | 15q11.2 | chr15: 20266959-25480660 | chr15: 25099351-25102073 | Dup | NT | 45.19 | 7.93E−08 | 12 | 1 | SNRPN** |
| 20 | 15q11.2 | chr15: 25582397-25684125 | chr15: 25579767-25581658 | Dup* | Validated | ∞ | 3.86E−06 | 8 | 0 | between |
| | | | | | (chr15: 25576642-25581880) | | | | | SNORD109A and |
| | | | | | | | | | | UBE3A** |
| 21 | 15q11.2 | chr15: 25582397-25684125 | chr15: 25582882-25662988 | Dup* | NT | 30.08 | 2.82E−05 | 8 | 1 | UBE3A** |
| 22 | 16p12.2 | chr16: 21901310-22703860 | chr16: 21958486-22172866 | Dup | NT | ∞ | 4.47E−02 | 2 | 0 | C16orf52, UQCRC2**, PDZD9, |
| | | | | | | | | | | VWA3A |
| 23 | 16p11.2 | chr16: 29671216-30173786 | chr16: 29664753-30177298 | Del | NT | 7.47 | 1.15E−01 | 2 | 1 | DOC2A**, ASPHD1, |
| | | | | | | | | | | LOC440356, TBX6, |
| | | | | | | | | | | LOC100271831, |
| | | | | | | | | | | PRRT2 |
| | | | | | | | | | | CDIPT, QPRT, YPEL3, |
| | | | | | | | | | | PPP4C, MAPK3**, |
| | | | | | | | | | | SPN, MVP, FAM57B, |
| | | | | | | | | | | ZG16, ALDOA, |
| | | | | | | | | | | INO80E, SEZ6L2, |
| | | | | | | | | | | TAOK2, KCTD13, |
| | | | | | | | | | | MAZ, KIF22, GDPD3, |
| | | | | | | | | | | C16orf92, C16orf53, |
| | | | | | | | | | | TMEM219, |
| | | | | | | | | | | C16orf54, HIRIP3 |
| 24 | 16q23.3 | chr16: 82195236-82722082 | chr16: 82423855-82445055 | Dup | NT | ∞ | 4.46E−02 | 2 | 0 | between |
| | | | | | | | | | | MPHOSPH6 and |
| | | | | | | | | | | CDH13 |
| 25 | 17p12 | chr17: 14139846-15282723 | chr17: 14132271-14133349 | Dup | Validated | 1.60 | 3.57E−01 | 3 | 7 | between COX10 and |
| | | | | | (chr17: 14132271-14133568) | | | | | CDRT15 |
| 26 | 17p12 | chr17: 14139846-15282723 | chr17: 14132271-15282708 | Del | NT | 5.61 | 6.70E−02 | 3 | 2 | PMP22**, CDRT15, |
| | | | | | | | | | | TEKT3, MGC12916, |
| | | | | | | | | | | CDRT7, HS3ST381 |
| 27 | 17p12 | chr17: 14139846-15282723 | chr17: 14952999-15053648 | Dup | NT | 3.74 | 1.98E−01 | 2 | 2 | between CDRT7 and |
| | | | | | | | | | | PMP22 |
| 28 | 17p12 | chr17: 14139846-15282723 | chr17: 15283960-15287134 | Del | Validated | 3.74 | 1.13E−01 | 3 | 3 | between TEKT3 and |
| | | | | | (chr17: 15283960-15287134) | | | | | FAM18B2-CDRT4 |
| 29 | 20p12.3 | chr20: 8044044-8527513 | chr20: 8162278-8313229 | Dup | NT | 3.73 | 1.98E−01 | 2 | 2 | PLCB1** |
| 30 | Xp21.2 | chrX: 23605582-29974014 | chrX: 29944502-29987870 | Dup | NT | ∞ | 4.47E−02 | 2 | 0 | IL1RAPL1** |
| 31 | Xq27.2 | chrX: 139998330-140443613 | chrX: 140329633-140348506 | Del | Validated | 7.48 | 2.06E−02 | 4 | 2 | SPANXC |
| | | | | | (chrX: 140329633-140456325) | | | | | |
| 32 | Xq28 | chrX: 148858522-149097275 | chrX: 148882559-148886166 | Del | Validated | ∞ | 4.46E−02 | 2 | 0 | MAGEA8 |
| | | | | | (chrX: 148882559-149020410) | | | | | |

*Denotes CNVs contiguous with the chromosome 15q11.2-13.1 CNVs shown in Table 3.
**Denotes gene in or adjacent to the CNV that is involved in neural function, development and disease (see Table 5-6).

[0140] Pathway Analysis.

[0141] Analysis of 104 genes within or immediately flanking our PCR-validated CNVs yielded significant association of these genes to previously characterized functional networks. The five most statistically significant networks, along with their statistical scores, are shown in Table 5. The top ranking functional categories identified in this analysis, along with their P-values, are shown in Table 6.

TABLE 5
Top Significant Networks Identified by Pathway Analysis using
Ingenuity IPA.

| Network | Score |
|---|---|
| Cell-To-Cell Signaling and Interaction, Tissue Development, | 55 |
| Gene Expression | |
| Neurological Disease, Behavior, Cardiovascular Disease | 28 |
| Cell Death, Cellular Compromise, Neurological Disease | 26 |
| Cellular Development, Cell Morphology, Nervous System | 20 |
| Development and Function | |
| Behavior, Cardiovascular Disease, Neurological Disease | 18 |

Network scores are the −log P for the results of a right-tailed Fisher's Exact Test.

[0142] As expected for CNVs associated with a neurodevelopmental disorder, a significant number of genes in or adjacent to the CNVs described here are involved in neural function, development and disease (Tables 5-6). Examples of such genes include: GABRA5, GABRA3, GABRG3, UBE3A, E2F1, PLCB1, PMP22, AADAT, MAPK3, NRXN1, NRG3, DPP10, UQCRC2, USH2A, NECAB3, CNTN4, LINGO2, ILIRAPL1, STXBP5, DOC2A, and SNRPN. Of these genes, E2F1, AADAT, NECAB3, and IL1RAPL1 are not found in the Autism Chromosome Rearrangement Database (see website at projects.tcag.ca/autism/), suggesting that they may be novel ASD risk genes.

[0143] The novel ASD risk loci identified here have functions that suggest a significant role in brain function and architecture. As such, altering the function of each of these genes as a result of the CNV could impinge on the biochemical pathways that are relevant to ASD etiology.

[0144] For example, mutations in ILIRAPL1 have been observed in cases of X-linked intellectual disability [47], and the encoded protein has been shown to play a role in voltage-gated calcium channel regulation in cultured cells [48]. E2F1 encodes a transcription factor and DNA-binding protein that plays a significant role in regulating cell growth and differentiation, apoptosis and response to DNA damage (reviewed in Biswas and Johnson, 2012 [49]). Each of these genes thus could have detrimental impacts on normal brain function.

[0145] NECAB3 encodes a neuronal protein with two isoforms that regulate the production of beta-amyloid peptide in opposite directions, depending on whether exon 9 of NECAB3 is included in or excluded from the mature mRNA [50].

[0146] AADAT encodes an aminotransferase with multiple functions, one of which leads to the synthesis of kynurenic acid. This pathway has been proposed as a target for potential neuroprotective therapeutics, indicating the potential significance of this finding for ASD etiology (reviewed in Stone et al., 2012 [51]). The specific roles that any of these genes play in ASD etiology have yet to be determined, but the observed neurological functions of their encoded proteins strongly support a potential role in normal brain function.

[0147] Many of these genes also have been implicated in other nervous system disorders, including Huntington's, Parkinson's, and Alzheimer's diseases as well as schizophrenia and epilepsy [41, 52-61]. One of the features common to this group of disorders, which includes ASD, is synaptic dysfunction. There is a significant overlap in genes, and/or the molecular mechanisms by which these genes give rise to synaptopathies (reviewed in [62]). We therefore find it notable that many such genes involved in other synaptopathies were found within or flanking the validated CNVs we identified as associated with ASD.

[0148] In addition to neurogenic genes, validated CNVs were associated with genes with known roles in renal and cardiovascular diseases (Table 6). Several syndromic forms of autism, such as DiGeorge Syndrome and Charcot-Marie Tooth Disease are comorbid with renal and cardiovascular disease, and therefore it was not surprising to find that our study identified CNVs containing genes associated with these syndromes and functions, such as CDRT15, and CDH13.

TABLE 6
Top Significant Biological Functions Identified by Ingenuity IPA
and Literature Searches.

| Function | p-value range | # Genes |
|---|---|---|
| Neurological Disease | 2.71E−05-3.15E−02 | 14 (18) |
| Behavior | 5.93E−05-4.36E−02 | 10 |
| Cardiovascular Disease | 8.58E−05-4.30E−02 | 10 |
| Cellular Development | 1.39E−04-4.77E−02 | 9 |
| Inflammatory response | 4.84E−04-2.89E−02 | |

The right-tailed Fisher's exact test was used to calculate P-values representing the probability that selecting genes associated with that pathway or network is due to chance alone. Each functional category represents a collection of associated subcategories, each of which has an associated P-value. For example, within ‘Neurological Disease,’ are subcategories of genes associated with seizures, Huntington Disease, schizophrenia, etc. The P-value range range given represents the range of P-values generated for each subcategory. In the first line, 36 genes were associated with a function in Neurological Disease by Ingenuity software. An additional 11 genes were identified as having neurological functions in the literature, giving a total of 47 with known or suspected roles in neurological disease.

[0149] There is mounting evidence, as well, that inflammatory responses are involved with the development and progression of autism (reviewed in [63]). Maternal immune activation during pregnancy is believed to activate fetal inflammatory responses, in some cases with detrimental effects on neural development in the fetus, leading to autism. This environmental insult could be mediated or enhanced by genomic changes that predispose the fetus to elevated inflammatory responses, so it is significant that a number of genes from our validated CNVs play a role in inflammatory response. Examples of these include CD160, CALCR, and SPN.

[0150] Our findings are consistent with other studies that used pathway analysis to characterize the genes contained in ASD risk CNVs, and suggest that many different biological pathways, when disrupted, can lead to features observed in ASD. The wide variety of biological functions identified for these genes also is consistent with estimates of the number of independent genetic variants that may play a role in the etiology of ASD (8-11).

### Discussion

[0151] We used a custom microarray to characterize the frequency of CNVs identified in high-risk ASD families in a large ASD case/control population. We also evaluated further the frequency of CNVs discovered in several published studies in our sample cohort to obtain a clearer picture of the potential clinical utility of these CNVs in the genetic evaluation of children with ASD. We used multiple quality control measures to insure that all cases and controls a) had no unexpected familial relationships; b) represented a uniform ethnic group; c) were devoid of uncharacterized whole chromosome anomalies or other genomic abnormalities consistent with syndromic forms of ASD; d) had sufficient power to distinguish risk variants from CNVs with little or no impact on the ASD phenotype; and e) were validated using quantitative PCR even though the custom array used here represented at least a second evaluation for most of them. Parents of ASD cases tested were not available to determine state of inheritance.

[0152] The validity of this approach was confirmed by our observation of CNVs that had been previously identified as ASD risked markers, including CNVs encompassing parts of the NRXN1 gene. CNVs and point mutations in NRXN1 are thought to play a role in a subset of ASD cases as well as in other neuropsychiatric conditions [15,32, 36-40]. The data from our study demonstrate that NRXN1 CNVs also occur in high-risk ASD families. Further, our case/control data provide additional evidence that neurexin-1 plays an important role in unrelated ASD cases. While CNVs near NRXN1 occur in controls as well as in cases, the CVNs observed in our ASD cases typically disrupt a portion of the NRXN1 coding region while CNVs observed in our control population do not.

[0153] CNVs from High-Risk ASD Families.

[0154] In the high-risk ASD families, both novel and previously observed CNVs were identified that contain genes with potential relevance to neuropsychiatric conditions such as ASD. These include CNVs involving LINGO2, the GABR gene cluster on chromosome 15q12 and STXBP5. Each of these CNV regions has an odds ratio greater than 2 and most of the CNVs we identified in high-risk families have a significant p value associating them with the ASD phenotype in this case/control study. Some CNVs, although observed only in ASD cases and not in controls, were too rare even in this large dataset to generate statistically significant results. An example is a deletion involving STXBP5 that was observed two ASD samples and in no controls. A deletion including this gene was previously observed in a patient with an apparent syndromic form of ASD [64], lending further support to our observation of STXBP5 deletions in ASD cases. These data collectively suggest that CNVs observed in high-risk ASD families also are important contributors to the etiology of ASD in an ASD case/control population.

[0155] We detected rare duplications involving the GABA receptor gene cluster as well as additional genes in the Prader-Willi/Angelman syndrome region on chromosome 15 (11/1,544 unrelated cases, 1/5,762 unrelated controls, OR=40.05). All of these CNVs were confirmed using TaqMan assays spanning the region, and these results strongly suggest a role for duplications on chromosome 15q12 in ASD etiology. Deficiency of GABA_{A} receptors indeed is thought to play an important role in both autism and epilepsy, and duplications have been observed to result in decreased GABR expression through a potential epigenetic mechanism (reviewed in [65]). Further, differences in the expression of GABRB3 mRNA and protein in the brains of some children with autism have been reported along with loss of biallelic expression of the chromosome 15q GABR genes in some individuals, [66], suggesting that epigenetic regulation of the chromosome 15 GABR gene cluster could also contribute to ASD etiology. Consistent with many previous findings from family studies, case reports and modest case/control studies (see website at omim.org/entry/608636), our data provide additional support for the involvement of duplications in this region of the genome in ASD. Further, our large population study suggests that these duplications may explain as much as 0.7% of ASD cases.

[0156] A recent study searching for CNVs encompassing genes in the GABA pathway, including the chromosome 15 GABR gene cluster, also found CNVs in this region. In contrast to our findings, this study found GABR gene cluster duplications at similar frequencies in both cases and in controls (Table S2 in ref. [44]). In addition, deletions were more common in this study in both cases and controls, while duplications were more common in our data. The differences between the two studies may lie in the sample population being studied, the uniformity of our sample population, or the technology platform used for CNV discovery (custom Illumina array compared to a custom Agilent array). Previous results have demonstrated maternal inheritance of deletions in this region in children with autism [67]. However, in our family studies we did not observe CNVs involving chromosome 15q12, and our case/control data preclude us from determining the parent of origin.

[0157] Interestingly, the CNVs that we observed on chromosome 15q were detected primarily with probes for SNVs identified in the GABR genes. Further, these SNVs were identified in affected individuals from high-risk ASD families. We did not observe CNVs involving this region in our high-risk ASD families. The observation of frequent duplications in our case/control population in the region containing these genes, coupled with the detection of these CNVs using probes for potential detrimental single nucleotide variants, suggests that both SNVs and CNVs involving the GABR genes might be pathogenic.

[0158] Literature Supported CNVs.

[0159] In addition to the CNVs identified in our high-risk ASD families, we evaluated further ASD risk CNVs identified in previous studies. Our results (Table 4) clearly demonstrate a role for many of these CNVs in ASD pathogenesis. Consistent with previous results, our data demonstrate in a large ASD population that rare CNVs are likely to play a role in the genetics of ASD, and suggest that these CNVs should be included in the genetic evaluation of children with ASD.

[0160] Interestingly, recent publications have identified a recurrent duplication of the Williams syndrome region on chromosome 7q11.23 in children with ASD [9,11]. We included probes for this region on our custom array, and were not able to identify any 7q11.23 duplications in our datasets. The reason(s) we did not observe any duplications in this region is not obvious; we had adequate probe coverage to have seen such duplications if they were present. Similar to the simplex ASD families used in those published studies, most of our ASD samples also were from reported simplex families, so the lack of observation of these CNVs is unlikely to be due to differences in family structure.

[0161] A CNV discovered at CHOP and not previously published includes a portion of the LCE gene cluster on chromosome 1. Deletions in this region have been associated with psoriasis [68,69], but no variants in this region have been I inked to autism. Focusing solely on individuals of Caucasian ancestry, we observed this CNV deletion in a single case and also a single control. However, when we included samples of non-Caucasian or uncertain ancestry, we observed 27 additional case DNA samples that carried this deletion, while only a single additional CNV-positive control was observed. Interestingly, based on SNP genotype results from principal component analysis, all of the cases that were positive for this CNV were of Asian descent. Since our control cohort had few individuals of Asian descent, we suspected that this CNV might be common in the Asian population. Analysis of whole genome data for individuals of non-Caucasian ancestry genotyped at the Center for Applied Genomics did not demonstrate common CNVs in either cases or controls in this region in individuals with Asian ancestry. However, a common CNV including LCE3E was observed in individuals with African ancestry (unpublished observations). Further analysis will be necessary to determine if this CNV is an ASD risk variant in either Asian or African populations.

[0162] Effect of Analysis Method on CNV Validation.

[0163] Although some CNVs are described here for the first time, many of the CNVs that we evaluated in this study were described previously. It is interesting to note that individual CNV calls that were made with both of the software packages we used were much more likely to be validated by qPCR than were CNVs called by either program alone. In fact, 97% of the CNVs called by both PennCNV and CNAM validated using TaqMan qPCR assays, while only 24% of the CNVs called by PennCNV alone and 30% of the CNVs called by CNAM alone were validated using the same approach. The concordance between the two analysis methods is informative given that the final sample sets used by the two methods differed substantially. The CNAM analysis used 290 fewer case samples and 575 fewer control samples than the PennCNV analysis. These data clearly demonstrate the value of using multiple software packages to evaluate microarray data for CNV discovery work. Our data are consistent with the rarity of many CNVs detected in DNA from children with ASD, and with the suggestion that there may be hundreds of loci that contribute to the development of ASD [9,11].

[0164] Our data demonstrate that CNVs identified in high-risk ASD families play a role in the etiology of ASD in unrelated cases. Evaluation of these CNVs in the large sample set used in this study provides compelling evidence for extremely rare recurrent CNVs as well as additional common variants in the genetics of ASD. We suggest that the CNVs described here likely have a strong impact on the development of ASD. Given the extensive quality control measures we used to characterize our sample cohort, the frequency at which we observed these CNVs in our cohort, and the molecular validation that we used to verify the calls, these CNVs can be used to increase sensitivity in the genetic evaluation of children with ASD. Further work will help to determine if the CNVs reported here are important for specific clinical subsets of ASD cases.

### Supplemental Methods

[0165] Samples:

[0166] All high risk ASD family members and controls were of self-reported European ancestry. Among all cases in the replication study, 84% were of self-reported European ancestry, 6% were of self-reported African ancestry, 5% were self-reported as having multiple ethnic origins, and 5% were of unknown ethnicity. Among the cases, 1,577 were reported from unique families, 864 from 432 different families with 2 siblings, 369 from 123 different families with 3 siblings, 172 from 43 different families of 4 siblings, 5 siblings from a single family, 6 siblings from a single family, and 7 siblings from a single family. Among the DNA from cases used for genotyping, 1% came from cell pellets, 61% come from lymphoblastoid cell lines, 35% came from whole blood, and for 3% the source of DNA remained unknown. DNA was extracted from cell lines or lymphocytes, and quantitated using UV spectrophotometry. Six thousand controls were recruited by CHOP after obtaining informed consent under an IRB approved protocol. All DNA samples from controls were extracted from whole blood. Only individuals with self-reported Caucasian ancestry were used for this study. Pairwise identity by descent (IBD) was used to confirm known family assignments for cases, and to identify cryptic relatedness arising out of multiple subject enrollments across/within cohorts for all samples. Related individuals were removed so that only one family member remained in the study.

[0167] Array Processing:

[0168] We used 250 ng of genomic DNA to genotype each sample, according to the manufacturer's guidelines. On day one, genomic DNA was amplified 1000-1500-fold. Day two, amplified DNA was fragmented ˜300-600 bp, then precipitated and resuspended, followed by hybridization on to a BeadChip. Single base extension (SBE) utilizes a single probe sequence ˜50 bp long designed to hybridize immediately adjacent to the SNP query site. Following targeted hybridization to the bead array, the arrayed SNP locus-specific primers (attached to beads) were extended with a single hapten-labeled dideoxynucleotide in the SBE reaction. The haptens were subsequently detected by a multi-layer immunohistochemical sandwich assay, as recently described (Pastinen et al., 2000, Genome Res. 10, 1031, Erdogan et al., 2001, Nuc. Acids Res. 29, E36). The Illumina iScan was used to scan each BeadChip at two wavelengths and an image file was created. As BeadChip images were collected, intensity values were determined for all instances of each bead type, and data files were created that summarized intensity values for each bead type. These files were loaded directly into Illumina's genotype analysis software, BeadStudio. A bead pool manifest created from the LIMS database containing all the BeadChip data was loaded into BeadStudio along with the intensity data for the samples. BeadStudio used a normalization algorithm to minimize BeadChip to BeadChip variability. Once the normalization was complete, the clustering algorithm was run to evaluate cluster positions for each locus and assign individual genotypes. Each locus was given an overall score based on the quality of the clustering and each individual genotype call was given a GenCall score. GenCall scores provided a quality metric that ranges from 0 to 1 assigned to every genotype called. GenCall scores were then calculated using information from the clustering of the samples. The location of each genotype relative to its assigned cluster determined its GenCall score.

[0169] Sample Quality Control:

[0170] Quality control measures were intended to identify the samples with the greatest probability of successful CNV identification and to remove the samples with features making CNV identification problematic. Most of the QC metrics employed were originally designed for applications involving high-density genome-wide data. For this study, it was deemed possible that an otherwise high-quality sample with a few large CNVs might fail some QC metrics due to the sparse nature of the data from the custom array employed. The QC process was therefore approached with caution, and inclusion criteria were determined by manual review of the data for each metric in order to identify the outlier values.

[0171] Derivative Log Ratio Spread (DLRS):

[0172] Derivative Log Ratio Spread (DLRS) is a measurement of point-to-point consistency of LR data, and is a reflection of the signal-to-noise ratio. It is similar in nature to the standard deviation of LR values that is often used in CNV studies, but has the advantage of being robust against large CNVs, which may influence standard deviation. DLRS was calculated for each chromosome, and the median chromosome DLRS value was used as a quality test. The distribution of the median DLRS statistic can be seen below. The outlier threshold was set at 0.3. One hundred twenty-eight subjects fail at this threshold, including all of the 75 samples that failed the waviness factor QC metric (see below).

[0173] Waviness Factor:

[0174] The “waviness” of each sample in the study was measured using the method of Diskin, et al. [27] as employed within SVS. An absolute value of 0.2 was determined as the outlier threshold for this metric, and 75 subjects failed at this threshold.

[0175] Chromosomal Abnormalities and Cell-Line Artifacts:

[0176] Fifty-one samples (12 cases and 39 controls) were determined to have a chromosome 21 trisomy, consistent with a diagnosis of Down syndrome. These subjects were later confirmed to have Down syndrome based on clinical data review, and were removed from all further analyses. Additionally, 10 samples were removed based on other abnormalities that appeared to affect entire chromosomes.

[0177] Excessive CNVs:

[0178] During the course of our analysis, several subjects were noted, using heat map style plots, to have a high frequency of copy number variant regions, in particular copy number gains. To identify the problematic subjects, we estimated the proportion of autosomal CNV regions in the data for which each subject had any CNV gain or loss. After manual review of the distribution of this proportion, 17 subjects with CNV calls at more than 10% of the regions were dropped from further analysis.

[0179] Principle Component Analysis (PCA).

[0180] Substantial stratification was observed in the LR intensity data. The first two components were stratified by gender, and additional stratification and clustering was observed in the higher components as well. It was therefore considered prudent to apply a PCA correction to the intensity data prior to analysis in order to reduce the probability of data artifacts influencing CNV calls. The principal components were calculated based on all 9,000 samples in the QC process and the results were skewed by the presence of low quality samples. The principle components were therefore recalculated for the 8,777 samples passing preliminary QC, including samples that passed the tests for waviness, DLRS, PCA outliers, chromosome 21 trisomies, and the initial genotyping lab QC. After calculating the first 50 principal components and examining the distribution of eigenvalues, the LR values were corrected for 20 principal components, which were determined to be sufficient to explain the majority of variability in the data. The corrected LR data was then used for segmentation and CNV identification.

[0181] CNV Calling:

[0182] The segmentation covariates were reduced to a non-redundant spreadsheet, with columns for each marker position where at least one subject had an intensity shift. The distribution of values for each of these columns then was analyzed to determine if multiple copy number states were present, and if so, to estimate the threshold values that defined the different classes. The threshold values were first estimated by a simple algorithm that identified the mode of the distribution, and assuming this to be the neutral copy number state, set upper and lower thresholds based on the variance of the distribution. These thresholds were then manually reviewed, and gross errors were corrected as necessary. After threshold values were confirmed for each of the non-redundant regions, each subject's data for that region was classified accordingly as loss, gain, or neutral. These values were then used to populate a table of discrete copy number calls for use in association testing.

[0183] TaqMan Assays:

[0184] DNA samples and controls were transferred from stock tubes and diluted with molecular grade water to a final concentration of 5 ng/ul into 0.75 mL Thermo Scientific Matrix storage tubes. All pipetting steps were carried out using Beckman Coulter Biomek FXp automation (Beckman Coulter, Inc., Fullerton, Calif., USA) unless otherwise stated. For each assay, 14 ul of each sample were plated into rows of a 96-well full-skirted plate. The last well in each row was left blank as a non-template control. Each quadrant of the 384-well reaction plates was stamped with 2 ul of DNA from the 96-well sample plate, so that each sample was assayed in quadruplicate. The reaction plates were dried and stored at 4° C. The TaqMan® reaction mix for each assay was prepared according to Applied Biosystems' (Applied Biosystems, Foster City, Calif., USA) recommendations with RNaseP as the reference assay (reference gene) and transferred by hand to each row of a 96-well full-skirted plate. 10 ul of each assay mix was then stamped into the appropriate reaction plate containing 10 ng of dried down DNA per well. The reaction plates were sealed with optical adhesive film, mixed on a plate vortex mixer, and centrifuged prior to running on the Applied Biosystems 7900HT Real Time PCR instrument. Thermal cycling was performed according to the manufacturer's recommended protocol (Applied Biosystems. Data were analyzed with SDS v2.4 software (Applied Biosystems). The baseline was calculated automatically and the threshold was set manually based on the exponential phase of the amplification plot. Data were exported as a text file and imported into the Applied Biosystems CopyCaller v2.0 Program. Assays were analyzed by setting a negative control sample (selected from samples showing none of the CNVs under study by either PennCNV or CNAM) copy number to n=2 except for X chromosome assays, which were analyzed using n=1. For X chromosome CNVs both male and female control samples were used (3 male, 2 female). All other parameters were left as default.

[0185] Pathway Analysis.

[0186] Ninety of the genes analyzed were within CNV duplications and 63 genes were within CNV deletions. Eighty-seven genes were included since they were the gene nearest to a validated intergenic CNV. Gene abbreviations were batch converted to their Entrez Gene IDs using G:CONVERT [31,32]. Both DAVID and Ingenuity IPA use the right-tailed Fisher's Exact test to calculate P-values representing the probability that selecting genes associated with that pathway or network is due to chance alone.

[0187] Network Generation Using IPA:

[0188] Each gene in our list of 240 was mapped to its corresponding object in Ingenuity's Knowledge Base. These genes were overlaid onto a global molecular network developed from information contained in Ingenuity's Knowledge Base. Networks then were algorithmically generated based on their connectivity. Both direct and indirect interactions were searched. Network scores are the −log P for the results of a right-tailed Fisher's Exact Test.

[0189] Principle Component Analysis (PCA) Results.

[0190] Principal components analysis was used to assess the impact of population stratification within the study subjects. Principal components were calculated in SVS using default settings. All subjects were included in the calculation except those that failed data QC. Prior to calculating principal components, the SNPs were filtered so that only SNPs that met the following criteria were used: 1) autosomal SNPs only; 2) call rate>0.95; 3) MAF>0.05; 4) linkage disequilibrium R²<25% for all pairs of SNPs within a moving window of 50 SNPs. In total 2008 SNPs met these criteria. Self-reported ethnicity was used to group samples into “Caucasian” and “non-Caucasian” sets. A simple outlier detection algorithm was applied to stratify the subjects into the two groups. This was done by first calculating the Cartesian distance of each subject from the median centroid of the first two principal component vectors. After determining the third quartile (Q3) and inter-quartile range (IQR) of the distances, any subject with a distance exceeding Q3+1.5*IQR was determined to be outside of the main cluster, and therefore non-Caucasian. Five hundred sixty-four subjects were placed in the non-Caucasian category, including 207cases and 57 controls. A small number of samples were removed due to duplicate enrollment in the study, but no other unexpected relationships were identified.

TABLE 7
TaqMan Assays Used for CNV Validation
TaqMan Assays Used for CNV Validation

| | Start Coord. | End Coord. | |
|---|---|---|---|
| Chromosome | (hg19) | (hg19) | Assay Name |
| chr1 | 145608130 | 145608131 | Hs01960835_cn |
| chr1 | 145714157 | 145714158 | Hs03356306 |
| chr1 | 145727743 | 145727744 | Hs02151880 |
| chr1 | 145831706 | 145831707 | Hs03363224_cn |
| chr1 | 215857628 | 215857629 | Hs06533545_cn |
| chr1 | 215860518 | 215860519 | Hs05788384_cn |
| chr2 | 13206303 | 13206304 | Hs05832292_cn |
| chr2 | 51257082 | 51257083 | Hs04675592_cn |
| chr2 | 51273782 | 51273783 | Hs03406712_cn |
| chr2 | 51335043 | 51335044 | Hs03207855_cn |
| chr2 | 78417269 | 78417270 | Hs03210777 |
| chr2 | 78448009 | 78448010 | Hs03219183 |
| chr3 | 1940242 | 1940243 | Hs03449476_cn |
| chr3 | 74559838 | 74559839 | Hs06657187_cn |
| chr3 | 74570239 | 74570240 | Hs03006662_cn |
| chr3 | 74580064 | 74580065 | Hs06656853_cn |
| chr3 | 172593661 | 172593662 | Hs05888850_cn |
| chr3 | 172600469 | 172600470 | Hs04760981_cn |
| chr3 | 174853869 | 174853870 | Hs03492315_cn |
| chr3 | 174889051 | 174889052 | Hs03463132_cn |
| chr3 | 176765106 | 176765107 | Hs00705847 |
| chr3 | 176773900 | 176773901 | Hs06653638 |
| chr3 | 178962631 | 178962632 | Hs04718548_cn |
| chr3 | 178969356 | 178969357 | Hs00989875_cn |
| chr4 | 73785471 | 73785472 | Hs04844255_cn |
| chr4 | 73923259 | 73923260 | Hs02916212_cn |
| chr4 | 74027025 | 74027026 | Hs00308217_cn |
| chr4 | 189089063 | 189089064 | Hs03238737 |
| chr4 | 189109145 | 189109146 | Hs03244159 |
| chr5 | 99647650 | 99647651 | Hs03245981_cn |
| chr5 | 99665469 | 99665470 | Hs03248003_cn |
| chr5 | 118544341 | 118544342 | Hs06046822_cn |
| chr5 | 118567989 | 118567990 | Hs03578408_cn |
| chr5 | 118606921 | 118606922 | Hs03562094_cn |
| chr6 | 7464166 | 7464167 | Hs03258806_cn |
| chr6 | 7467367 | 7467368 | Hs03261355_cn |
| chr6 | 39070306 | 39070307 | Hs06797005_cn |
| chr6 | 44131202 | 44131203 | Hs06765368_cn |
| chr6 | 49257472 | 49257473 | Hs06135362_cn |
| chr6 | 62432331 | 62432332 | Hs06740361_cn |
| chr6 | 62468865 | 62468866 | Hs06752297_cn |
| chr6 | 127449047 | 127449048 | Hs04898996 |
| chr6 | 127467261 | 127467262 | Hs06149095 |
| chr6 | 147599263 | 147599264 | Hs00462911_cn |
| chr6 | 147649513 | 147649514 | Hs06799063_cn |
| chr6 | 147681914 | 147681915 | Hs04903013_cn |
| chr7 | 6870706 | 6870707 | Hs03632408_cn |
| chr7 | 15383278 | 15383279 | CusTaq1CX6RM14_cn |
| chr7 | 15405201 | 15405202 | ContR26CX0IV8W_cn |
| chr7 | 93080844 | 93080845 | Hs04974410_cn |
| chr7 | 93145475 | 93145476 | Hs04971099_cn |
| chr7 | 93152478 | 93152479 | Hs04944233_cn |
| chr7 | 100232257 | 100232258 | Hs03629609 |
| chr7 | 100304948 | 100304949 | Hs01981045 |
| chr7 | 100381692 | 100381693 | Hs05013769 |
| chr7 | 124527535 | 124527536 | Hs03620793_cn |
| chr7 | 124578724 | 124578725 | Hs03650226_cn |
| chr7 | 149504056 | 149504057 | Hs03630536 |
| chr7 | 149528561 | 149528562 | Hs03645125 |
| chr7 | 149550437 | 149550438 | Hs03640597 |
| chr8 | 3165293 | 3165294 | Hs02622320_cn |
| chr8 | 54865516 | 54865517 | Hs03668894_cn |
| chr8 | 54905347 | 54905348 | Hs03694907_cn |
| chr8 | 84323860 | 84323861 | Hs04360657 |
| chr8 | 84331501 | 84331502 | Hs03658852 |
| chr8 | 85298919 | 85298920 | Hs03668441_cn |
| chr8 | 85303238 | 85303239 | Hs03678663_cn |
| chr8 | 86467253 | 86467254 | Hs03673176_cn |
| chr9 | 28203352 | 28203353 | Hs03707922_cn |
| chr9 | 28266812 | 28266813 | Hs03714527_cn |
| chr9 | 28333835 | 28333836 | Hs03725541_cn |
| chr9 | 28354528 | 28354529 | Hs03723870_cn |
| chr9 | 136523906 | 136523907 | Hs01617069_cn |
| chr9 | 136527743 | 136527744 | Hs06869845_cn |
| chr9 | 139091261 | 139091262 | Hs06889516_cn |
| chr9 | 139101729 | 139101730 | Hs06847090 |
| chr9 | 139110612 | 139110613 | Hs00495475 |
| chr10 | 83887149 | 83887150 | Hs03726621_cn |
| chr10 | 89717970 | 89717971 | Hs05212456 |
| chr10 | 92274027 | 92274028 | Hs03746257 |
| chr10 | 92287873 | 92287874 | Hs03740287 |
| chr12 | 53178157 | 53178158 | Hs06965067_cn |
| chr12 | 53181253 | 53181254 | Hs06930722_cn |
| chr12 | 71934616 | 71934617 | Hs06933395_cn |
| chr12 | 71950419 | 71950420 | Hs01107784_cn |
| chr12 | 73071721 | 73071722 | Hs06996317_cn |
| chr12 | 73094916 | 73094917 | Hs03093848_cn |
| chr12 | 80898972 | 80898973 | Hs03825941_cn |
| chr1 2 | 80974071 | 80974072 | Hs03820308_cn |
| chr12 | 81007496 | 81007497 | Hs03818167_cn |
| chr12 | 81610738 | 81610739 | Hs00229436_cn |
| chr12 | 81693094 | 81693095 | Hs00586334_cn |
| chr12 | 81746602 | 81746603 | Hs06985491_cn |
| chr12 | 102097529 | 102097530 | Hs06981209_cn |
| chr12 | 102105668 | 102105669 | Hs04412303_cn |
| chr13 | 40089549 | 40089550 | Hs03853267_cn |
| chr13 | 93444276 | 93444277 | Hs04432382 |
| chr13 | 93460071 | 93460072 | Hs04432043 |
| chr14 | 24519089 | 24519090 | Hs03883350 |
| chr14 | 24534221 | 24534222 | Hs01939905 |
| chr14 | 28522635 | 28522636 | CusTaq2CXLJH4P_cn |
| chr14 | 37916895 | 37916896 | Hs07055190_cn |
| chr14 | 37977977 | 37977978 | Hs07044926_cn |
| chr14 | 38014166 | 38014167 | Hs07086625_cn |
| chr14 | 38021288 | 38021289 | Hs07075472_cn |
| chr14 | 96763309 | 96763310 | Hs05318569_cn |
| chr14 | 96772014 | 96772015 | Hs00982344_cn |
| chr14 | 99641385 | 99641386 | Hs00596122_cn |
| chr14 | 100734909 | 100734910 | Hs03875129 |
| chr14 | 100765197 | 100765198 | Hs01931607 |
| chr14 | 100795059 | 100795060 | Hs00201515 |
| chr14 | 101000582 | 101000583 | Hs03874127_cn |
| chr14 | 101005643 | 101005644 | Hs01983727_cn |
| chr14 | 102021598 | 102021599 | Hs03877829_cn |
| chr14 | 102025461 | 102025462 | Hs03890390_cn |
| chr14 | 102737644 | 102737645 | Hs04443274_cn |
| chr14 | 102744822 | 102744823 | Hs04436664_cn |
| chr14 | 102974514 | 102974515 | Hs03874565_cn |
| chr14 | 104035624 | 104035625 | Hs07076467 |
| chr14 | 104089093 | 104089094 | Hs07094555 |
| chr14 | 104134199 | 104134200 | Hs07101222 |
| chr15 | 20194087 | 20194088 | Hs04444017 |
| chr15 | 25578159 | 25578160 | Hs03899505_cn |
| chr15 | 25580751 | 25580752 | CusTaq3CX20SJR_cn |
| chr15 | 25739587 | 25739588 | Hs03895201_cn |
| chr15 | 26170697 | 26170698 | Hs03899220_cn |
| chr15 | 26218978 | 26218979 | Hs07535627_cn |
| chr15 | 26566910 | 26566911 | Hs05379477_cn |
| chr15 | 26758634 | 26758635 | Hs05357961_cn |
| chr15 | 27186676 | 27186677 | Hs05354636_cn |
| chr15 | 27215751 | 27215752 | Hs05352889_cn |
| chr15 | 28430324 | 28430325 | Hs03904620_cn |
| chr15 | 28464592 | 28464593 | Hs03900299_cn |
| chr15 | 28510861 | 28510862 | Hs00790698_cn |
| chr15 | 30008107 | 30008108 | Hs03905821_cn |
| chr15 | 30028029 | 30028030 | Hs03894282_cn |
| chr15 | 31233791 | 31233792 | Hs01761674_cn |
| chr15 | 31418708 | 31418709 | Hs03907602_cn |
| chr15 | 31523604 | 31523605 | Hs05345027_cn |
| chr15 | 31779480 | 31779481 | Hs01740084_cn |
| chr15 | 31792000 | 31792001 | Hs03903842 |
| chr15 | 31807369 | 31807370 | Hs03898720 |
| chr15 | 31819397 | 31819398 | Hs01183107_cn |
| chr15 | 40565562 | 40565563 | Hs01801490_cn |
| chr15 | 40569495 | 40569496 | Hs03050146_cn |
| chr15 | 40574016 | 40574017 | Hs03915257 |
| chr15 | 40600033 | 40600034 | Hs02747689 |
| chr15 | 40631492 | 40631493 | Hs05348776 |
| chr15 | 42140352 | 42140353 | Hs01736986_cn |
| chr15 | 42220283 | 42220284 | Hs05327333_cn |
| chr15 | 42278083 | 42278084 | Hs07457532_cn |
| chr15 | 56246674 | 56246675 | Hs05388304_cn |
| chr15 | 56258673 | 56258674 | Hs02776763_cn |
| chr16 | 2137638 | 2137639 | Hs03948922_cn |
| chr16 | 2139578 | 2139579 | Hs01690407_cn |
| chr16 | 83908973 | 83908974 | Hs03924139_cn |
| chr16 | 83927884 | 83927885 | Hs03920294_cn |
| chr17 | 14133533 | 14133534 | Hs05489546_cn |
| chr17 | 15285417 | 15285418 | Hs05479141_cn |
| chr19 | 23823676 | 23823677 | Hs07158898_cn |
| chr19 | 23847358 | 23847359 | Hs07130588_cn |
| chr19 | 43260846 | 43260847 | Hs04483050_cn |
| chr19 | 52919934 | 52919935 | Hs01762991_cn |
| chr19 | 52961357 | 52961358 | Hs04015789_cn |
| chr20 | 8654182 | 8654183 | Hs07182273_cn |
| chr20 | 8655323 | 8655324 | Hs07214628_cn |
| chr20 | 8656129 | 8656130 | Hs07196671 |
| chr20 | 8662295 | 8662296 | Hs07181996 |
| chr20 | 32267585 | 32267586 | Hs03035919 |
| chr20 | 32324773 | 32324774 | Hs04040566 |
| chr20 | 32380921 | 32380922 | Hs07167677 |
| chr20 | 35244629 | 35244630 | Hs07189989_cn |
| chr20 | 35286976 | 35286977 | Hs07187468 |
| chr20 | 35339976 | 35339977 | Hs07195828 |
| chr20 | 35392781 | 35392782 | Hs07216584 |
| chr20 | 57246270 | 57246271 | Hs00451592_cn |
| chr20 | 57276159 | 57276160 | Hs02247879_cn |
| chr20 | 57283659 | 57283660 | Hs07195366_cn |
| chrX | 140316814 | 140316815 | Hs04119700_cn |
| chrX | 140348402 | 140348403 | Hs04105155_cn |
| chrX | 140394910 | 140394911 | Hs04123806_cn |
| chrX | 140450224 | 140450225 | Hs04514589_cn |
| chrX | 140560608 | 140560609 | Hs04117605_cn |
| chrX | 140711967 | 140711968 | Hs04108237 |
| chrX | 140730389 | 140730390 | Hs04114029 |
| chrX | 147283785 | 147283786 | Hs05619718 |
| chrX | 147557625 | 147557626 | Hs05666138 |
| chrX | 147831902 | 147831903 | Hs05592380 |
| chrX | 148101715 | 148101716 | Hs05606186 |
| chrX | 148379988 | 148379989 | Hs05667154 |
| chrX | 148892085 | 148892086 | Hs04109160_cn |
| chrX | 148999489 | 148999490 | Hs04513800_cn |
| chrX | 149014384 | 149014385 | Hs02798232_cn |
| chrX | 153195418 | 153195419 | Hs02879994_cn |
| chrX | 153200970 | 153200971 | Hs01730847_cn |

TABLE 8
153 CNVs in subjects with autism in Utah families

| | | | | | | | | | Custom |
|---|---|---|---|---|---|---|---|---|---|
| | | | | | | | | | iSelect |
| | | | | ACRD | | Gain/ | | | Array |
| No. | Chrom | Start (hg19) | End (hg19) | Published? | Ref. No. | Loss | Size (bp) | Gene | Probes |
| 1 | chr1 | 4737693 | 4746636 | N | | Loss | 8943 | AJAP1 | 20 |
| 2 | chr1 | 10624023 | 10627542 | N | | Loss | 3519 | PEX14 | 14 |
| 3 | chr1 | 145714421 | 146101228 | N | | Gain | 386807 | more than 10 genes | 20 |
| 4 | chr1 | 169704308 | 169732211 | N | | Loss | 27903 | C1orf112 | 20 |
| 5 | chr1 | 179456385 | 179472635 | N | | Loss | 16250 | C1orf125/DKFZq434N1720 | 20 |
| 6 | chr1 | 204193679 | 204209979 | N | | Loss | 16300 | PLEKHA6 | 20 |
| 7 | chr1 | 215858193 | 215861879 | Y | 4 | Loss | 3686 | USH2A | 19 |
| 8 | chr1 | 225508461 | 225511454 | N | | Loss | 2993 | DNAH14 | 14 |
| 9 | chr1 | 228848896 | 228853665 | N | | Loss | 4769 | 5′ of RHOU | 11 |
| 10 | chr1 | 237993724 | 237995299 | N | | Loss | 1575 | RYR2 | 15 |
| 11 | chr1 | 243860912 | 243861049 | N | | Loss | 137 | AKT3 | 10 |
| 12 | chr2 | 12685369 | 12693172 | N | | Loss | 7803 | AK001558 | 16 |
| 13 | chr2 | 32982548 | 33050816 | Y | 2, 5 | Gain | 68268 | TTC27, AK095182 | 15 |
| 14 | chr2 | 37904904 | 37909117 | N | | Gain | 4213 | 5′ of CDC42EP3 | 19 |
| 15 | chr2 | 45997209 | 45997519 | N | | Loss | 310 | PRKCE | 11 |
| 16* | chr2 | 51272055 | 51336043 | Y | 2, 4 | Loss | 63988 | 5′ of NRXN1 (10 kb) | 83 |
| 17 | chr2 | 52420563 | 52584090 | N | | Loss | 163527 | 5′ of NRXN1 (1 Mb) | 20 |
| 18 | chr2 | 58346718 | 58349248 | Y | 2 | Loss | 2530 | VRK2 | 12 |
| 19 | chr2 | 62195814 | 62230970 | N | | Loss | 35156 | COMMD1, CR603473 | 20 |
| 20 | chr2 | 75014711 | 75044204 | N | | Loss | 29493 | 5′ of HK2 | 20 |
| 21 | chr2 | 79330766 | 79342811 | N | | Gain | 12045 | 5′ of REG1B, 5′ of | 17 |
| | | | | | | | | REG1A | |
| 22 | chr2 | 120130796 | 120145728 | N | | Loss | 14932 | 5′ of C2orf76, 5′ of | 20 |
| | | | | | | | | TMEM37 | |
| 23 | chr2 | 236424336 | 236465062 | N | | Loss | 40726 | AGAP1 | 20 |
| 24 | chr3 | 6724453 | 7046515 | N | | Gain | 322062 | AF279782, GRM7 | 20 |
| 25 | chr3 | 12387768 | 12393125 | N | | Loss | 5357 | PPARG | 20 |
| 26* | chr3 | 21731567 | 21734331 | N | | Gain | 2764 | ZNF385D | 14 |
| 27 | chr3 | 57051604 | 57053353 | N | | Gain | 1749 | ARHGEF3 | 13 |
| 28 | chr3 | 60774451 | 60777932 | Y | 3 | Gain | 3481 | FHIT | 16 |
| 29 | chr3 | 63962828 | 63964474 | N | | Loss | 1646 | ATXN7 | 13 |
| 30 | chr3 | 74566042 | 74584605 | N | | Loss | 18563 | CNTN3 | 20 |
| 31 | chr3 | 171090367 | 171092891 | N | | Gain | 2524 | TNIK | 16 |
| 32 | chr3 | 172596081 | 172617355 | N | | Gain | 21274 | SPATA16 | 20 |
| 33 | chr4 | 58811798 | 58816810 | N | | Loss | 5012 | 3′ of BC034799 (480 kb) | 14 |
| 34 | chr4 | 80865807 | 80887173 | N | | Loss | 21366 | ANTXR2/DKFZp667K1925 | 17 |
| 35 | chr4 | 101551216 | 101616281 | N | | Loss | 65065 | 5′ of EMCN (200 kb) | 20 |
| 36 | chr4 | 134924034 | 135188390 | N | | Loss | 264356 | PABPC4L | 20 |
| 37 | chr4 | 185734577 | 185740215 | N | | Loss | 5638 | ACSL1 | 18 |
| 38 | chr4 | 189084983 | 189117429 | N | | Loss | 32446 | 3′ of TRIML1 | 20 |
| 39 | chr5 | 20436884 | 20449034 | N | | Loss | 12150 | CDH18 | 20 |
| 40 | chr5 | 58469036 | 58470270 | N | | Loss | 1234 | PDE4D | 12 |
| 41 | chr5 | 99634772 | 99682698 | N | | Loss | 47926 | 5′ of FAM174A (190 kb) | 20 |
| 42 | chr5 | 132621489 | 132630849 | Y | 2, 4 | Gain | 9360 | FSTL4 | 20 |
| 43 | chr5 | 142599442 | 142602063 | N | | Loss | 2621 | ARHGAP26/KIAA0621 | 14 |
| 44 | chr5 | 151582812 | 151583410 | N | | Loss | 598 | AK001582 | 12 |
| 45 | chr6 | 7425246 | 7464367 | N | | Gain | 39121 | 3′ of RIOK1 | 20 |
| 46 | chr6 | 10856101 | 10872458 | N | | Loss | 16357 | 3′ of TMEM14B and | 20 |
| | | | | | | | | GCM2, 5′ of MAK and | |
| | | | | | | | | SYCP2L | |
| 47 | chr6 | 42126761 | 42128299 | N | | Loss | 1538 | GUCA1A | 16 |
| 48 | chr6 | 44113916 | 44180221 | N | | Loss | 66305 | CAPN11, TMEM63B | 20 |
| 49 | chr6 | 47864831 | 49244526 | N | | Loss | 1379695 | C6orf138 | 25 |
| 50 | chr6 | 53856580 | 53864523 | N | | Loss | 7943 | AK056584 | 19 |
| 51 | chr6 | 62443739 | 62462295 | N | | Loss | 18556 | KHDRBS2 | 17 |
| 52 | chr6 | 119419595 | 119427038 | Y | 2 | Loss | 7443 | FAM184A | 18 |
| 53 | chr6 | 123893763 | 123897553 | N | | Loss | 3790 | TRDN | 14 |
| 54 | chr6 | 139985775 | 140128887 | N | | Gain | 143112 | BC039503 | 20 |
| 55 | chr6 | 147588752 | 147664671 | Y | 2 | Gain | 75919 | STXBP5 | 20 |
| 56 | chr6 | 161189018 | 161218651 | N | | Loss | 29633 | 3′ of PLG | 20 |
| 57 | chr7 | 6838712 | 6864071 | N | | Loss | 25359 | C7orf28B | 15 |
| 58 | chr7 | 11782637 | 11783917 | Y | 4 | Loss | 1280 | THSD7A | 12 |
| 59 | chr7 | 13962113 | 13962620 | Y | 2 | Loss | 507 | ETV1 | 11 |
| 60 | chr7 | 71597328 | 71603027 | N | | Gain | 5699 | CALN1 | 14 |
| 61 | chr7 | 105285949 | 105321353 | N | | Loss | 35404 | ATXN7L1 | 20 |
| 62 | chr7 | 124546250 | 124580202 | Y | 4 | Loss | 33952 | POT1, hypothetical | 20 |
| | | | | | | | | proteins | |
| 63 | chr8 | 3160739 | 3160885 | N | | Loss | 146 | CSMD1/KIAA1890 | 10 |
| 64 | chr8 | 3169351 | 3169808 | N | | Loss | 457 | CSMD1/KIAA1890 | 11 |
| 65 | chr8 | 3479586 | 3480400 | N | | Loss | 814 | CSMD1 | 12 |
| 66 | chr8 | 4907673 | 4911422 | N | | Loss | 3749 | 5′ of CSMD1 60 kb) | 20 |
| 67 | chr8 | 31977229 | 31989597 | N | | Loss | 12368 | NRG1 | 20 |
| 68 | chr8 | 52261992 | 52265315 | N | | Loss | 3323 | PXDNL | 15 |
| 69 | chr8 | 84323466 | 84337983 | N | | Loss | 14517 | 3′ of BC038578 | 20 |
| 70 | chr8 | 85281895 | 85304198 | N | | Loss | 22303 | RALYL | 20 |
| 71 | chr8 | 86471729 | 86553130 | N | | Gain | 81401 | 3′ of REXO1L1 | 20 |
| 72 | chr8 | 100402969 | 100406592 | N | | Loss | 3623 | VPS13B | 10 |
| 73 | chr9 | 7036350 | 7051859 | N | | Loss | 15509 | JMJD2C | 20 |
| 74 | chr9 | 28027694 | 28039222 | N | | Gain | 11528 | LINGO2 | 20 |
| 75 | chr9 | 28190069 | 28347679 | N | | Loss | 157610 | LINGO2 | 20 |
| 76 | chr9 | 75206337 | 75207666 | N | | Gain | 1329 | TMC1 | 11 |
| 77 | chr9 | 116468123 | 116631674 | N | | Gain | 163551 | 5′ of ZNF618 (5 kb) | 12 |
| 78 | chr9 | 139083019 | 139113146 | N | | Gain | 30127 | LHX3, QSOX2 | 20 |
| 79 | chr10 | 27361202 | 27381349 | N | | Loss | 20147 | ANKRD26 | 20 |
| 80 | chr10 | 33217225 | 33222978 | N | | Loss | 5753 | ITGB1 | 11 |
| 81 | chr10 | 38914665 | 42953131 | N | | Loss | 4038466 | AK131313, BC039000 | 20 |
| 82 | chr10 | 52133698 | 52232708 | Y | 3 | Gain | 99010 | SGMS1/SMS1 | 20 |
| 83 | chr10 | 60793303 | 60857532 | Y | 3 | Gain | 64229 | 5′ of PHYHIPL (80 kb) | 20 |
| 84 | chr10 | 68350062 | 68375800 | N | | Loss | 25738 | CTNNA3 | 20 |
| 85 | chr10 | 81032555 | 81037800 | N | | Loss | 5245 | ZMIZ1 | 14 |
| 86 | chr10 | 83893626 | 84175018 | N | | Loss | 281392 | NRG3 | 13 |
| 87 | chr10 | 86939018 | 86970632 | N | | Loss | 31614 | AK097624 | 20 |
| 88 | chr10 | 89720106 | 89723874 | N | | Loss | 3768 | PTEN | 12 |
| 89 | chr10 | 91210650 | 91217984 | N | | Loss | 7334 | SLC16A12 | 19 |
| 90 | chr10 | 92274764 | 92289762 | Y | 2 | Loss | 14998 | 3′ of BC037970 | 15 |
| 91 | chr11 | 7488341 | 7489819 | N | | Gain | 1478 | SYT9, AK128569 | 16 |
| 92 | chr11 | 12002139 | 12007077 | N | | Gain | 4938 | DKK3 | 20 |
| 93 | chr11 | 12374189 | 12374712 | N | | Loss | 523 | MICALCL | 11 |
| 94 | chr11 | 16569019 | 16576640 | N | | Loss | 7621 | SOX6/DKFZp434N1217 | 12 |
| 95 | chr11 | 31000774 | 31000929 | N | | Gain | 155 | DCDC5/KIAA1493 | 10 |
| 96 | chr11 | 60228735 | 60229382 | N | | Loss | 647 | MS4A1 | 11 |
| 97 | chr11 | 98148399 | 98212796 | N | | Gain | 64397 | 5′ of CNTN5 (700 kb) | 20 |
| 98 | chr11 | 100817655 | 100820663 | N | | Loss | 3008 | FLJ32810 | 14 |
| 99 | chr11 | 131405729 | 131406206 | N | | Gain | 477 | NTM, AK128059 | 11 |
| 100 | chr12 | 60173356 | 60173878 | Y | 4 | Gain | 522 | SLC16A7/MCT2 | 13 |
| 101 | chr12 | 73062598 | 73088289 | Y | 2 | Loss | 25691 | 3′ of TRHDE | 20 |
| 102 | chr12 | 75547922 | 75572356 | N | | Loss | 24434 | KCNC2 | 20 |
| 103 | chr12 | 80880491 | 80895554 | N | | Loss | 15063 | PTPRQ | 20 |
| 104 | chr12 | 80988331 | 81019079 | N | | Loss | 30748 | PTPRQ | 20 |
| 105 | chr12 | 81618586 | 81626675 | N | | Loss | 8089 | ACSS3 | 17 |
| 106 | chr12 | 97870273 | 97875696 | N | | Loss | 5423 | NCRMS/AK056164 | 20 |
| 107 | chr12 | 102097012 | 102106306 | N | | Loss | 9294 | CHPT1 | 13 |
| 108 | chr12 | 127308503 | 127315005 | Y, small | 4 | Loss | 6502 | between BC069215 | 19 |
| | | | | overlap | | | | and BC037858 | |
| 109 | chr13 | 40087689 | 40088007 | N | | Loss | 318 | LHFP | 12 |
| 110 | chr13 | 49284461 | 49343043 | N | | Gain | 58582 | 3′ of CYSLTR2 | 20 |
| 111 | chr13 | 50163809 | 50179454 | N | | Loss | 15645 | 5′ of RCBTB1 | 17 |
| 112 | chr13 | 93448487 | 93461603 | N | | Loss | 13116 | GPC5 | 17 |
| 113 | chr13 | 94357235 | 94369759 | N | | Loss | 12524 | GPC6 | 20 |
| 114 | chr14 | 23862374 | 23888040 | N | | Loss | 25666 | MYH6, MYH7, | 20 |
| | | | | | | | | MIR208B | |
| 115 | chr14 | 28506099 | 28520243 | N | | Loss | 14144 | between BC148262 | 20 |
| | | | | | | | | and CR597916 | |
| 116 | chr14 | 32904231 | 32909169 | N | | Gain | 4938 | AKAP6 | 20 |
| 117 | chr14 | 33859159 | 33860185 | N | | Gain | 1026 | NPAS3 | 11 |
| 118 | chr14 | 37928753 | 37948391 | N | | Loss | 19638 | MIPOL1 | 15 |
| 119 | chr14 | 68068610 | 68071772 | N | | Loss | 3162 | 5′ of PIGH | 15 |
| 120 | chr15 | 33605301 | 33617521 | N | | Gain | 12220 | RYR3 | 20 |
| 121 | chr15 | 47518807 | 47527672 | N | | Loss | 8865 | SEMA6D | 16 |
| 122 | chr15 | 58851369 | 58853307 | N | | Gain | 1938 | LIPC | 14 |
| 123 | chr15 | 60074956 | 60103803 | Y | 5 | Loss | 28847 | 5′ of BNIP2 (90 kb) | 20 |
| 124 | chr15 | 66521832 | 66524433 | N | | Loss | 2601 | MEGF11 | 17 |
| 125 | chr15 | 87830530 | 87870489 | N | | Loss | 39959 | between AGBL1, and | 20 |
| | | | | | | | | TMEM83, NTRK3 | |
| 126 | chr16 | 16245729 | 16256767 | N | | Loss | 11038 | ABCC6, MRP6 | 34 |
| 127 | chr16 | 21363810 | 21602618 | N | | Loss | 238808 | More than 10 genes | 25 |
| 128 | chr16 | 82446255 | 82711504 | Y | 5 | Gain | 265249 | CDH13 | 24 |
| 129 | chr16 | 83909041 | 83926368 | N | | Loss | 17327 | 5′ of MLYCD, 3′ of | 20 |
| | | | | | | | | HSBP1 | |
| 130 | chr17 | 4007594 | 4324408 | Y | 4 | Gain | 316814 | ZZEF1, KIAA0399, | 20 |
| | | | | | | | | CYB5D2, ANKFY1, | |
| | | | | | | | | UBE2G1, SPNS3 | |
| 131** | chr17 | 21556170 | 25363654 | N | | Loss | 3807484 | BC070367, FAM27L, | 20 |
| | | | | | | | | BC039120, CR592140, | |
| | | | | | | | | CR592128 | |
| 132 | chr17 | 39211908 | 39221312 | N | | Loss | 9404 | KRTAP2-4 | 15 |
| 133 | chr17 | 64258845 | 64259329 | N | | Loss | 484 | 5′ of APOH and 5′ of | 11 |
| | | | | | | | | PRKCA | |
| 134 | chr18 | 30037470 | 30037675 | N | | Loss | 205 | FAM59A | 10 |
| 135 | chr20 | 4234781 | 4238447 | N | | Gain | 3666 | 5′ of ADRA1D | 16 |
| 136 | chr20 | 6013320 | 6017259 | N | | Loss | 3939 | CRLS1/DKFZp762C112 | 14 |
| 137 | chr20 | 15755244 | 15765167 | N | | Loss | 9923 | MACROD2 | 20 |
| 138 | chr20 | 47337049 | 47341312 | N | | Gain | 4263 | PREX1 | 14 |
| 139 | chr20 | 49132410 | 49132637 | N | | Loss | 227 | PTPN1 | 10 |
| 140 | chr20 | 56248075 | 56252910 | N | | Loss | 4835 | PMEPA1 | 20 |
| 141 | chr21 | 17311697 | 17435462 | N | | Loss | 123765 | 5′ of C21orf34, 3′ of | 20 |
| | | | | | | | | USP25 | |
| 142 | chr21 | 42855515 | 42855647 | Y | 1 | Gain | 132 | TMPRSS2 | 10 |
| 143 | chr22 | 30731066 | 30731540 | N | | Gain | 474 | SF3A1 | 10 |
| 144 | chr22 | 33459104 | 33470309 | N | | Loss | 11205 | 5′ of SYN3 | 20 |
| 145 | chr22 | 39515118 | 39525791 | N | | Loss | 10673 | 3′ of APOBEC3H, 3′ of | 20 |
| | | | | | | | | CBX7 | |
| 146 | chr22 | 44251958 | 44257056 | N | | Loss | 5098 | SULT4A1/SULTX3 | 19 |
| 147 | chr22 | 44641315 | 44641594 | N | | Gain | 279 | KIAA1644 | 10 |
| 148 | chr22 | 51055900 | 51234443 | Y | 4 | Gain | 178543 | ARSA, SHANK3, | 10 |
| | | | | | | | | BC050343, ACR, | |
| | | | | | | | | MGC70863, RABL2B | |
| 149 | chrX | 3206732 | 3216695 | N | | Loss | 9963 | 3′ of MXRA5, ARSF | 19 |
| 150 | chrX | 57285994 | 57291268 | N | | Gain | 5274 | 5′ of FAAH2 | 11 |
| 151 | chrX | 133460586 | 133466162 | N | | Loss | 5576 | 5′ of PHF6 | 11 |
| 152 | chrX | 142769032 | 142781735 | N | | Loss | 12703 | 5′ of SLITRK4, 3′ of | 15 |
| | | | | | | | | SPANXN2 | |
| 153 | chrX | 151041009 | 151042244 | N | | Loss | 1235 | 5′ of MAGEA4 | 12 |
| | | | | | | | | | Total = |
| | | | | | | | | | 2,642 |
| | | | | | | | | | Probes |

References:
1. Jacquemont et al., 2006
2. AGP, 2007
3. Sebat et al., 2007
4. Marshall et al., 2008
5. Christian et al., 2008
*Nos 16 & 26: includes overlapping literature CNVs
**No. 131: Much of this region spans the centromere and is heterochromatic

TABLE 9
185 CNVs reportedly associated with ASD from published studies

| | | | Custom |
|---|---|---|---|
| | | CNV Origin | iSelect |
| | | CHOP | Array |
| No. | CNV Regions (hg19, GRCh37) | Literature | Probes |
| 1 | chr1: 146626687-146641912 | CHOP_CNV | 208 |
| 2 | chr1: 146644352-146646782 | CHOP_CNV | 208 |
| 3 | chr1: 146649431-146651526 | CHOP_CNV | 208 |
| 4 | chr1: 146655885-146661221 | CHOP_CNV | 208 |
| 5 | chr1: 146714336-146767441 | CHOP_CNV | 208 |
| 6 | chr1: 147013183-147042947 | CHOP_CNV | 208 |
| 7 | chr1: 147119170-147142612 | CHOP_CNV | 208 |
| 8 | chr1: 147191843-147211176 | CHOP_CNV | 208 |
| 9 | chr1: 147228333-147245482 | CHOP_CNV | 208 |
| 10 | chr1: 152538131-152539246 | CHOP_CNV | 22 |
| 11 | chr1: 152551861-152552978 | CHOP_CNV | 22 |
| 12 | chr1: 176233934-176277050 | CHOP_CNV | 20 |
| 13 | chr2: 13202218-13248445 | CHOP_CNV | 20 |
| 14 | chr2: 37208154-37311483 | CHOP_CNV | 20 |
| 15 | chr2: 50147489-51240182 | CHOP_CNV | 84 |
| 16 | chr2: 51267143-51294094 | CHOP_CNV | 62 |
| 17 | chr2: 78414693-78457739 | CHOP_CNV | 20 |
| 18 | chr2: 99858712-99871568 | CHOP_CNV | 17 |
| 19 | chr2: 237821591-237832364 | CHOP_CNV | 94 |
| 20 | chr3: 1940192-1940920 | CHOP_CNV | 10 |
| 21 | chr3: 2573150-2573529 | CHOP_CNV | 11 |
| 22 | chr3: 4224733-4261302 | CHOP_CNV | 20 |
| 23 | chr3: 31702318-32023236 | CHOP_CNV | 20 |
| 24 | chr3: 37903670-38025958 | CHOP_CNV | 20 |
| 25 | chr3: 121343502-121387782 | CHOP_CNV | 20 |
| 26 | chr3: 172231370-173116242 | CHOP_CNV | 116 |
| 27 | chr3: 173116245-173254086 | CHOP_CNV | 100 |
| 28 | chr3: 173271686-173289279 | CHOP_CNV | 100 |
| 29 | chr3: 174001117-174885989 | CHOP_CNV | 100 |
| 30 | chr4: 13656804-13932850 | CHOP_CNV | 20 |
| 31 | chr4: 73756500-73905356 | CHOP_CNV | 60 |
| 32 | chr4: 73920417-73935470 | CHOP_CNV | 60 |
| 33 | chr4: 73940504-74124500 | CHOP_CNV | 60 |
| 34 | chr4: 144627954-144635127 | CHOP_CNV | 11 |
| 35 | chr5: 118229547-118343923 | CHOP_CNV | 100 |
| 36 | chr5: 118407187-118469872 | CHOP_CNV | 100 |
| 37 | chr5: 118478541-118584821 | CHOP_CNV | 100 |
| 38 | chr5: 118604420-118730292 | CHOP_CNV | 100 |
| 39 | chr5: 118730295-118856171 | CHOP_CNV | 100 |
| 40 | chr6: 39071841-39082863 | CHOP_CNV | 20 |
| 41 | chr6: 69235102-69237305 | CHOP_CNV | 10 |
| 42 | chr6: 122793063-123047516 | CHOP_CNV | 34 |
| 43 | chr6: 127440049-127518908 | CHOP_CNV | 20 |
| 44 | chr6: 135818945-136037191 | CHOP_CNV | 20 |
| 45 | chr6: 162664588-162667009 | CHOP_CNV | 31 |
| 46 | chr6: 168349013-168596249 | CHOP_CNV | 20 |
| 47 | chr7: 2649899-2654358 | CHOP_CNV | 20 |
| 48 | chr7: 32700564-32804186 | CHOP_CNV | 20 |
| 49 | chr7: 69064321-70257852 | CHOP_CNV | 23 |
| 50 | chr7: 111502940-111846460 | CHOP_CNV | 20 |
| 51 | chr7: 141695680-141806545 | CHOP_CNV | 20 |
| 52 | chr8: 43646415-43657436 | CHOP_CNV | 20 |
| 53 | chr8: 54858496-54907579 | CHOP_CNV | 20 |
| 54 | chr9: 116111824-116132133 | CHOP_CNV | 86 |
| 55 | chr9: 116135700-116139257 | CHOP_CNV | 85 |
| 56 | chr9: 119187508-120177315 | CHOP_CNV | 58 |
| 57 | chr9: 136501486-136524464 | CHOP_CNV | 37 |
| 58 | chr10: 87359313-87944322 | CHOP_CNV | 105 |
| 59 | chr10: 87951688-87959047 | CHOP_CNV | 79 |
| 60 | chr10: 88126251-88893189 | CHOP_CNV | 104 |
| 61 | chr10: 105353785-105615162 | CHOP_CNV | 20 |
| 62 | chr10: 118350491-118368684 | CHOP_CNV | 20 |
| 63 | chr12: 31409581-31410819 | CHOP_CNV | 13 |
| 64 | chr12: 53183470-53189890 | CHOP_CNV | 20 |
| 65 | chr12: 57345220-57352101 | CHOP_CNV | 20 |
| 66 | chr12: 71833814-71980084 | CHOP_CNV | 20 |
| 67 | chr13: 20977807-21100010 | CHOP_CNV | 20 |
| 68 | chr14: 94184645-94254764 | CHOP_CNV | 20 |
| 69 | chr15: 23686020-23692388 | CHOP_CNV | 19 |
| 70 | chr15: 24842742-24979665 | CHOP_CNV | 47 |
| 71 | chr15: 25101701-25223727 | CHOP_CNV | 53 |
| 72 | chr16: 16243423-16317335 | CHOP_CNV | 40 |
| 73 | chr16: 47276822-47330242 | CHOP_CNV | 20 |
| 74 | chr16: 70954495-71007921 | CHOP_CNV | 20 |
| 75 | chr16: 75572016-75590168 | CHOP_CNV | 20 |
| 76 | chr16: 84599210-84610700 | CHOP_CNV | 40 |
| 77 | chr17: 30819629-31203900 | CHOP_CNV | 20 |
| 78 | chr17: 64298927-64806860 | CHOP_CNV | 31 |
| 79 | chr18: 3498838-3880133 | CHOP_CNV | 20 |
| 80 | chr19: 22639351-22639555 | CHOP_CNV | 10 |
| 81 | chr19: 23835709-23870015 | CHOP_CNV | 38 |
| 82 | chr19: 23926161-23941637 | CHOP_CNV | 38 |
| 83 | chr19: 43225795-43440224 | CHOP_CNV | 20 |
| 84 | chr19: 52880583-52901119 | CHOP_CNV | 108 |
| 85 | chr19: 52901122-52909308 | CHOP_CNV | 108 |
| 86 | chr19: 52909311-52921656 | CHOP_CNV | 108 |
| 87 | chr19: 52932442-52934660 | CHOP_CNV | 108 |
| 88 | chr19: 52934663-52942694 | CHOP_CNV | 108 |
| 89 | chr19: 52956761-52961405 | CHOP_CNV | 108 |
| 90 | chr20: 8113297-8865545 | CHOP_CNV | 40 |
| 91 | chr20: 55993557-55997466 | CHOP_CNV | 33 |
| 92 | chr22: 21021266-21028944 | CHOP_CNV | 19 |
| 93 | chr22: 29999566-30094583 | CHOP_CNV | 20 |
| 94 | chrX: 6966962-7066187 | CHOP_CNV | 20 |
| 95 | chrX: 139998330-140335594 | CHOP_CNV | 71 |
| 96 | chrX: 140335597-140443613 | CHOP_CNV | 71 |
| 97 | chrX: 140590844-140672859 | CHOP_CNV | 71 |
| 98 | chrX: 140677836-140678897 | CHOP_CNV | 71 |
| 99 | chrX: 140713997-140714859 | CHOP_CNV | 71 |
| 100 | chrX: 148663310-148669114 | CHOP_CNV | 60 |
| 101 | chrX: 148676928-148678215 | CHOP_CNV | 60 |
| 102 | chrX: 148678218-148713566 | CHOP_CNV | 60 |
| 103 | chrX: 148858522-149097275 | CHOP_CNV | 60 |
| 104 | chrX: 154719774-154842595 | CHOP_CNV | 40 |
| 105 | chr1: 110230419-110236364 | Literature_CNV | 0 |
| 106 | chr1: 146555186-147779086 | Literature_CNV | 152 |
| 107 | chr1: 162573378-167543374 | Literature_CNV | 61 |
| 108 | chr1: 230111830-232145817 | Literature_CNV | 43 |
| 109 | chr2: 54076-1198908 | Literature_CNV | 23 |
| 110 | chr2: 17406571-18378433 | Literature_CNV | 21 |
| 111 | chr2: 32678416-33378738 | Literature_CNV | 40 |
| 112 | chr2: 45455651-45984915 | Literature_CNV | 31 |
| 113 | chr2: 50145644-51259671 | Literature_CNV | 84 |
| 114 | chr2: 51979551-52401447 | Literature_CNV | 40 |
| 115 | chr2: 57200002-61699998 | Literature_CNV | 98 |
| 116 | chr2: 62258231-63028717 | Literature_CNV | 48 |
| 117 | chr2: 115139568-115617934 | Literature_CNV | 20 |
| 118 | chr2: 162387215-162840241 | Literature_CNV | 20 |
| 119 | chr2: 198797484-209741388 | Literature_CNV | 119 |
| 120 | chr2: 236632457-238435065 | Literature_CNV | 101 |
| 121 | chr2: 238435068-242985349 | Literature_CNV | 125 |
| 122 | chr3: 2028902-2884398 | Literature_CNV | 31 |
| 123 | chr3: 11034422-11080933 | Literature_CNV | 20 |
| 124 | chr3: 67656832-68957204 | Literature_CNV | 24 |
| 125 | chr3: 100203669-100487283 | Literature_CNV | 20 |
| 126 | chr3: 143608410-144494785 | Literature_CNV | 20 |
| 127 | chr3: 195674002-197284998 | Literature_CNV | 27 |
| 128 | chr4: 154087652-172339893 | Literature_CNV | 191 |
| 129 | chr5: 176990003-180905258 | Literature_CNV | 42 |
| 130 | chr6: 13889303-15153950 | Literature_CNV | 24 |
| 131 | chr7: 23876-1297908 | Literature_CNV | 16 |
| 132 | chr7: 15386880-15538756 | Literature_CNV | 20 |
| 133 | chr7: 72576596-75922729 | Literature_CNV | 42 |
| 134 | chr7: 83144216-86082367 | Literature_CNV | 40 |
| 135 | chr7: 87999366-89294562 | Literature_CNV | 24 |
| 136 | chr7: 121210655-121381762 | Literature_CNV | 40 |
| 137 | chr7: 121755766-122152424 | Literature_CNV | 40 |
| 138 | chr7: 128907065-128998138 | Literature_CNV | 20 |
| 139 | chr7: 152589804-152616097 | Literature_CNV | 20 |
| 140 | chr8: 6264122-6506023 | Literature_CNV | 20 |
| 141 | chr8: 53271330-53555369 | Literature_CNV | 20 |
| 142 | chr9: 7735282-7770231 | Literature_CNV | 20 |
| 143 | chr9: 38027602-38298598 | Literature_CNV | 20 |
| 144 | chr9: 102472181-136065177 | Literature_CNV | 464 |
| 145 | chr10: 13049365-13367445 | Literature_CNV | 20 |
| 146 | chr10: 46269076-50892143 | Literature_CNV | 64 |
| 147 | chr10: 50892146-51450787 | Literature_CNV | 32 |
| 148 | chr10: 84158614-89685463 | Literature_CNV | 178 |
| 149 | chr11: 40329226-40653822 | Literature_CNV | 20 |
| 150 | chr13: 23604102-24794298 | Literature_CNV | 23 |
| 151 | chr13: 35516457-36246870 | Literature_CNV | 20 |
| 152 | chr13: 48083039-48475962 | Literature_CNV | 20 |
| 153 | chr13: 67572852-67762297 | Literature_CNV | 20 |
| 154 | chr15: 20266959-25480660 | Literature_CNV | 123 |
| 155 | chr15: 25582397-25684125 | Literature_CNV | 28 |
| 156 | chr15: 73090002-76507998 | Literature_CNV | 44 |
| 157 | chr15: 85105976-85708062 | Literature_CNV | 20 |
| 158 | chr16: 2097991-2138710 | Literature_CNV | 20 |
| 159 | chr16: 6052837-6260813 | Literature_CNV | 20 |
| 160 | chr16: 14982501-16482497 | Literature_CNV | 64 |
| 161 | chr16: 21534307-21901307 | Literature_CNV | 48 |
| 162 | chr16: 21901310-22703860 | Literature_CNV | 34 |
| 163 | chr16: 29671216-30173786 | Literature_CNV | 20 |
| 164 | chr16: 82195236-82722082 | Literature_CNV | 40 |
| 165 | chr17: 9964035-10361280 | Literature_CNV | 20 |
| 166 | chr17: 14139846-15282723 | Literature_CNV | 23 |
| 167 | chr17: 48646233-48704540 | Literature_CNV | 20 |
| 168 | chr18: 32073255-35145997 | Literature_CNV | 42 |
| 169 | chr19: 27896698-28805250 | Literature_CNV | 20 |
| 170 | chr20: 127914-419869 | Literature_CNV | 20 |
| 171 | chr20: 2837196-4006397 | Literature_CNV | 23 |
| 172 | chr20: 8044044-8527513 | Literature_CNV | 30 |
| 173 | chr20: 41602847-41867105 | Literature_CNV | 20 |
| 174 | chr21: 37412682-37622182 | Literature_CNV | 20 |
| 175 | chr22: 18640348-21461644 | Literature_CNV | 51 |
| 176 | chr22: 38368320-38380536 | Literature_CNV | 20 |
| 175 | chr22: 47956883-49122331 | Literature_CNV | 36 |
| 178 | chr22: 49405478-49971756 | Literature_CNV | 29 |
| 179 | chr22: 51113071-51171638 | Literature_CNV | 36 |
| 180 | chrX: 94421-5469456 | Literature_CNV | 78 |
| 181 | chrX: 5808084-5999993 | Literature_CNV | 20 |
| 182 | chrX: 28605682-29974014 | Literature_CNV | 25 |
| 183 | chrX: 53300002-53699998 | Literature_CNV | 20 |
| 184 | chrX: 70364712-70391048 | Literature_CNV | 20 |
| 185 | chrX: 153213010-153399998 | Literature_CNV | 40 |
| | | | Total = |
| | | | 4,492 |
| | | | probes* |

*Note
that there is significant redundancy in this probe set, as many of the literature CNVs included on the array overlapped.

TABLE 10
25 CNVs identified from single nucleotide variants (SNVs) on custom array

| | | | | | Start | | |
|---|---|---|---|---|---|---|---|
| | | Gain or | Validation | | Coord. | End Coord. | |
| No. | CNV Source | Loss | Status | Chromosome | (hg19) | (hg19) | Gene(s) |
| 1 | SequenceSNP | Loss | PASS | chr7 | 93070811 | 93116320 | CALCR MIR653 MIR489 |
| 2 | SequenceSNP | Gain | PASS | chr14 | 100705631 | 100828134 | SLC25A29 YY1 MIR345 |
| | | | | | | | SLC25A47 WARS |
| 3 | SequenceSNP | Gain | PASS | chr14 | 102018946 | 102026138 | DIO3AS DIO3OS |
| 4 | SequenceSNP | Loss | PASS | chr14 | 102729881 | 102749930 | MOK/RAGE |
| 5 | SequenceSNP | Gain | PASS | chr14 | 102973910 | 102975572 | ANKRD9 |
| 6 | SequenceSNP | Gain | PASS | chr15 | 25690465 | 26793077 | ATP10A MIR4715 |
| | | | | | | | GABRB3 LOC503519 |
| | | | | | | | LOC100128714 |
| 7 | SequenceSNP | Gain | PASS | chr15 | 27184517 | 27216737 | GABRA5 GABRG3 |
| 8 | SequenceSNP | Gain | PASS | chr15 | 28408312 | 28513763 | HERC2 |
| 9 | SequenceSNP | Loss | PASS | chr15 | 31092983 | 31369123 | FAN1 TRPM1 MTMR10 |
| | | | | | | | MIR211 TRPM1 |
| 10 | SequenceSNP | Gain/Loss | PASS | chr15 | 31776648 | 31822910 | OTUD7A |
| 11 | SequenceSNP | Gain | PASS | chr20 | 32210931 | 32441302 | NECAB3 CBFA2T2 E2F1 |
| | | | | | | | C20orf134 ZNF341 |
| | | | | | | | C20orf144 PXMP4 ZNF341 |
| | | | | | | | CHMP4B |
| 12 | SequenceSNP | Gain | No data | chr14 | 99640708 | 99642376 | BCL11B |
| 13 | SequenceSNP | Loss | FAIL | chr3 | 176755900 | 176782811 | TBL1XR1 |
| 14 | SequenceSNP | Gain | FAIL | chr7 | 100159979 | 100456457 | MOSPD3 TFR2 |
| | | | | | | | LOC100129845 GIGYF1 |
| | | | | | | | GNB2 LRCH4 ACTL6B |
| | | | | | | | FBXO24 PCOLCE AGFG2 |
| | | | | | | | SAP25 POP7 GIGF1 ZAN |
| | | | | | | | SLC12A9 EPHB4 |
| 15 | SequenceSNP | Gain/Loss | FAIL | chr7 | 149481075 | 149576256 | SSPO ATP6V0E2 ZNF862 |
| | | | | | | | LOC401431 |
| 16 | SequenceSNP | Gain | FAIL | chr14 | 24507010 | 24550497 | DHRS4L1 LRRC16B NRL |
| | | | | | | | CPNE6 |
| 17 | SequenceSNP | Loss | FAIL | chr14 | 96758018 | 96777946 | ATG2B |
| 18 | SequenceSNP | Gain | FAIL | chr14 | 100995537 | 101010301 | BEGAIN WDR25 |
| 19 | SequenceSNP | Gain | FAIL | chr14 | 103986349 | 104182224 | TRMT61A CKB TRMT61A |
| | | | | | | | BAG5 APOPT1 C14orf153 |
| | | | | | | | XRCC3 KLC1 ZFYVE21 |
| 20 | SequenceSNP | Gain | FAIL | chr15 | 30000877 | 30033536 | TJP1 |
| 21 | SequenceSNP | Gain | FAIL | chr15 | 40544493 | 40661306 | C15orf56 PAK6 PLCB2 |
| | | | | | | | C15orf52 DISP2 |
| 22 | SequenceSNP | Gain | FAIL | chr15 | 42139583 | 42302433 | JMJD7-PLA2G4B |
| | | | | | | | PLA2G4B SPTBN5 EHD4 |
| | | | | | | | PLA2G4E |
| 23 | SequenceSNP | Loss | FAIL | chr15 | 56243611 | 56258744 | NEDD4 |
| 24 | SequenceSNP | Gain | FAIL | chr20 | 35234192 | 35444437 | NDRG3 TGIF2-C20ORF24 |
| | | | | | | | C20orf24 SLA2 DSN1 |
| | | | | | | | KIAA0889 |
| 25 | SequenceSNP | Gain | FAIL | chr20 | 57268867 | 57290347 | NPEPL1 STX16-NPEPL1 |

### Example 2

### Design of a Custom Clinical Array

[0191] A custom clinical array was designed based on the results of the study described in Example 1. The study array used in Example 1 included about 10,000 probes for the regions being studied. Therefore, a custom array was specifically designed for clinical use to enhance coverage for the CNVs identified as associated with ASD. Custom probes for detection of other childhood developmental delay disorders were also included on the array as outlined in Table 11 below.

[0192] Table 11 below summarizes the custom probes designed for and included on the clinical array. The clinical array is based on the Affymetrix CytoScan-HD array and includes the 83,443 custom probes provided in the sequence listing and also described in Table 14. The 83,443 probes were added to the Affymetrix array to ensure sufficient coverage of all of the regions described in Tables 8 and 9, as well as to detect CNVs for the other disorders listed in Table 11.

TABLE 11
Summary of Custom Probes

| | | Custom CNV |
|---|---|---|
| Disorder | CNV source | Probes |
| Autism | Literature CNVs | 58950 |
| | Utah CNVs | 3691 |
| | CHOP CNVs | 2619 |
| Utah familial sequence | | |
| variants | | |
| Rett syndrome | | 28 |
| Noonan/Costello/CFC | | 0 |
| syndromes | | |
| Tuberous sclerosis | | 0 |
| ADHD | | 8764 |
| DD | | 9364 |
| Tourette syndrome | | 27 |
| Dyslexia | | 0 |
| | Total | 83443 |

[0193] A description of the custom probes as summarized in Table 11 is provided in Table 14. Table 14 provides the following information: The third column, labeled “hg19 Coordinates/Gene Name”, displays the genome coordinates (hg19) of the CNV for which each probe was designed. The second column, labeled “EXPOS” displays the nucleotide position within the chromosomal region shown in the third column that represents the center of the oligonucleotide probe. The oligonucleotides themselves are 25 nucleotides in length, so the center is nucleotide 13. The first column lists the SEQ ID NO for the oligonucleotide (DNA probe) which is provided in the sequence listing.

[0194] Tables 12 and 13 below list the CNVs identified in the study described in Example 1 (from Tables 3 and 4), and further include the SEQ ID NOs for the custom probes, where applicable. Since custom probes were only included on the array for some CNVs identified in Example 1, N/A is used to denote that no custom probes were used. Sequences of the custom probes are set forth in the sequence listing as SEQ ID NOs:1-83,443. As noted above, the positions of the probes are described in Table 14.

Lengthy table referenced here
US20160046990A1-20160218-T00001
Please refer to the end of the specification for access instructions.

Lengthy table referenced here
US20160046990A1-20160218-T00002
Please refer to the end of the specification for access instructions.

Lengthy table referenced here
US20160046990A1-20160218-T00003
Please refer to the end of the specification for access instructions.

### REFERENCES CITED

[0195] 1. Rosenberg R E, Law J K, Yenokyan G, McGready J, Kaufmann W E, et al. (2009)
[0196] Characteristics and Concordance of Autism Spectrum Disorders Among 277 Twin PairsAutism Characteristics and Discordance in Twins. Arch Pediatr Adolesc Med 163: 907-914. doi:10.1001/archpediatrics.2009.98.
[0197] 2. Hallmayer J, Cleveland S, Torres A, Phillips J, Cohen B, et al. (2011) Genetic Heritability and Shared Environmental Factors Among Twin Pairs With Autism. Arch Gen Psychiatry 68: 1095-1102. doi:10.1001/archgenpsychiatry.2011.76.
[0198] 3. Lichtenstein P, Carlstrom E, Råstam M, Gillberg C, Anckarsater H (2010) The Genetics of Autism Spectrum Disorders and Related Neuropsychiatric Disorders in Childhood. Am J Psychiatry 167: 1357-1363. doi:10.1176/appi.ajp.2010. Ser. No. 10/020,223.
[0199] 4. Ronald A, Hoekstra R A (2011) Autism spectrum disorders and autistic traits: A decade of new twin studies. Am J Med Genet B Neuropsychiatr Genet 156B: 255-274. doi:10.1002/ajmg.b.31159.
[0200] 5. International Molecular Genetic Study of Autism Consortium (IMGSAC) (1998) A Full Genome Screen for Autism with Evidence for Linkage to a Region on Chromosome 7q. Hum Mol Genet 7: 571-578. doi:10.1093/hmg/7.3.571.
[0201] 6. International Molecular Genetic Study of Autism Consortium (IMGSAC) (2001) A Genomewide Screen for Autism: Strong Evidence for Linkage to Chromosomes 2q, 7q, and 16p. Am J Hum Genet 69: 570-581. doi:10.1086/323264.
[0202] 7. Buxbaum J D, Silverman J, Keddache M, Smith C J, Hollander E, et al. (2003) Linkage analysis for autism in a subset families with obsessive-compulsive behaviors: Evidence for an autism susceptibility gene on chromosome 1 and further support for susceptibility genes on chromosome 6 and 19. Mol Psychiatry 9: 144-150. doi:10.1038/sj.mp.4001465.
[0203] 8. Martin C L, Ledbetter D H (2007) Autism and cytogenetic abnormalities: solving autism one chromosome at a time. Curr Psychiatry Rep 9: 141-147.
[0204] 9. Levy D, Ronemus M, Yamrom B, Lee Y, Leotta A, et al. (2011) Rare De Novo and Transmitted Copy-Number Variation in Autistic Spectrum Disorders. Neuron 70: 886-897. doi:10.1016/j.neuron.2011.05.015.
[0205] 10. Betancur C (2011) Etiological heterogeneity in autism spectrum disorders: More than 100 genetic and genomic disorders and still counting. Brain Res 1380: 42-77. doi: 10.1016/j.brainres.2010.11.078.
[0206] 11. Sanders S J, Murtha M T, Gupta A R, Murdoch J D, Raubeson M J, et al. (2012) De novo mutations revealed by whole-exome sequencing are strongly associated with autism. Nature 485(7397):237-241. doi:10.1038/naturel0945
[0207] 12. Iossifov I, Ronemus M, Levy D, Wang Z, Hakker I, et al. (2012) De Novo Gene Disruptions in Children on the Autistic Spectrum. Neuron 74: 285-299. doi: 10.1016/j.neuron.2012.04.009.
[0208] 13. Girirajan S, Brkanac Z, Coe B P, Baker C, Vives L, et al. (2011) Relative burden of large CNVs on a range of neurodevelopmental phenotypes. PLoS Genet 7: e1002334. doi:10.1371/journal.pgen. 1002334.
[0209] 14. Sebat J, Lakshmi B, Malhotra D, Troge J, Lese-Martin C, et al. (2007) Strong Association of De Novo Copy Number Mutations with Autism. Science 316: 445-449. doi:10.1126/science.1138659.
[0210] 15. Marshall C R, Noor A, Vincent J B, Lionel A C, Feuk L, et al. (2008) Structural Variation of Chromosomes in Autism Spectrum Disorder. Am J Hum Genet 82: 477-488. doi:10.1016/j.ajhg.2007.12.009.
[0211] 16. Christian S L, Brune C W, Sudi J, Kumar R A, Liu S, et al. (2008) Novel Submicroscopic Chromosomal Abnormalities Detected in Autism Spectrum Disorder. Biol Psychiatry 63: 1111-1117. doi:10.1016/j.biopsych.2008.01.009.
[0212] 17. Glessner J T, Wang K, Cai G, Korvatska O, Kim C E, et al. (2009) Autism genome-wide copy number variation reveals ubiquitin and neuronal genes. Nature 459: 569-573. doi:10.1038/nature07953.
[0213] 18. Bucan M, Abrahams B S, Wang K, Glessner J T, Herman E I, et al. (2009) Genome-Wide Analyses of Exonic Copy Number Variants in a Family-Based Study Point to Novel Autism Susceptibility Genes. PLoS Genet 5: e1000536. doi:10.1371/journal.pgen.1000536.
[0214] 19. Pinto D, Pagnamenta A T, Klei L, Anney R, Merico D, et al. (2010) Functional impact of global rare copy number variation in autism spectrum disorders. Nature 466: 368-372. doi:10.1038/nature09146.
[0215] 20. Szatmari P, Paterson A D, Zwaigenbaum L, Roberts W, Brian J (2007) Mapping autism risk loci using genetic linkage and chromosomal rearrangements. Nat Genet 39: 319-328. doi:10.1038/ng 1985.
[0216] 21. Weiss L A, Shen Y, Kom J M, Arking D E, Miller D T, et al. (2008) Association between Microdeletion and Microduplication at 16p11.2 and Autism. N Engl J Med 358: 667-675. doi:10.1056/NEJMoa075974.
[0217] 22. Morrow E M, Yoo S-Y, Flavell S W, Kim T-K, Lin Y, et al. (2008) Identifying Autism Loci and Genes by Tracing Recent Shared Ancestry. Science 321: 218-223. doi:10.1 126/science. 1157657.
[0218] 23. Jacquemont M-L, Sanlaville D, Redon R, Raoul O, Cormier-Daire V, et al. (2006) Array-based comparative genomic hybridisation identifies high frequency of cryptic chromosomal rearrangements in patients with syndromic autism spectrum disorders. J Med Genet 43: 843-849. doi:10.1136/jmg.2006.043166.
[0219] 24. Shinawi M, Liu P, Kang S-H L, Shen J, Belmont J W, et al. (2010) Recurrent reciprocal 16p11.2 rearrangements associated with global developmental delay, behavioural problems, dysmorphism, epilepsy, and abnormal head size. J Med Genet 47: 332-341.doi:10.1136/jmg.2009.073015.
[0220] 25. Shen Y, Dies K A, Holm I A, Bridgemohan C, Sobeih M M, et al. (2010) Clinical Genetic Testing for Patients With Autism Spectrum Disorders. Pediatrics 125: e727-e735. doi: 10.1542/peds.2009-1684.
[0221] 26. Fernandez B A, Roberts W, Chung B, Weksberg R, Meyn S, et al. (2010) Phenotypic spectrum associated with de novo and inherited deletions and duplications at 16p 1.2 in individuals ascertained for diagnosis of autism spectrum disorder. J Med Genet 47: 195-203. doi: 10.1136/jmg.2009.069369.
[0222] 27. Lionel A C, Crosbie J, Barbosa N, Goodale T, Thiruvahindrapuram B, et al. (2011) Rare copy number variation discovery and cross-disorder comparisons identify risk genes for ADHD. Sci Transl Med 3: 95ra75. doi:10.1126/scitranslmed.3002464.
[0223] 28. Sahoo T, Theisen A, Rosenfeld J A, Lamb A N, Ravnan J B, et al. (2011) Copy number variants of schizophrenia susceptibility loci are associated with a spectrum of speech and developmental delays and behavior problems. Genet Med 13: 868-880. doi:10.1097/GIM.0b013e3182217a06.
[0224] 29. Kirov G, Pocklington A J, Holmans P, Ivanov D, Ikeda M, et al. (2012) De novo CNV analysis implicates specific abnormalities of postsynaptic signalling complexes in the pathogenesis of schizophrenia. Mol Psychiatry 17: 142-153. doi:10.1038/mp.2011.154.
[0225] 30. Manning M, Hudgins L (2010) Array-based technology and recommendations for utilization in medical genetics practice for detection of chromosomal abnormalities. Genet Med 12: 742-745. doi: 10.1097/GIM.0b013e3181f8baad.
[0226] 31. Miller D T, Adam M P, Aradhya S, Biesecker L G, Brothman A R, et al. (2010) Consensus Statement: Chromosomal Microarray Is a First-Tier Clinical Diagnostic Test for Individuals with Developmental Disabilities or Congenital Anomalies. Am J Hum Genet 86: 749-764. doi: 10.1016/j.ajhg.2010.04.006.
[0227] 32. Glessner J T, Wang K, Cai G, Korvatska O, Kim C E, et al. (2009) Autism genome-wide copy number variation reveals ubiquitin and neuronal genes. Nature 459: 569-573. doi:10.1038/nature07953.
[0228] 33. Qiao Y, Riendeau N, Koochek M, Liu X, Harvard C, et al. (2009) Phenomic determinants of genomic variation in autism spectrum disorders. J Med Genet 46: 680-688. doi:10.1136/jrmg.2009.066795.
[0229] 34. Wang K, Li M, Hadley D, Liu R, Glessner J, et al. (2007) PennCNV: An integrated hidden Markov model designed for high-resolution copy number variation detection in whole-genome SNP genotyping data. Genome Res 17: 1665-1674. doi:10.1101/gr.6861907.
[0230] 35. Kent W J, Sugnet C W, Furey T S, Roskin K M, Pringle T H, et al. (2002) The human genome browser at UCSC. Genome Res 12: 996-1006. dol:10.1101/gr.229102.
[0231] 36. Feng J, Schroer R, Yan J, Song W, Yang C, et al. (2006) High frequency of neurexin 1β signal peptide structural variants in patients with autism. Neurosci Lett 409: 10-13. doi:10.1016/j.neulet.2006.08.017.
[0232] 37. Kim H-G, Kishikawa S, Higgins A W, Seong I-S, Donovan D J, et al. (2008) Disruption of Neurexin 1 Associated with Autism Spectrum Disorder. Am J Hum Genet 82: 199-207.
[0233] 38. Ching M S L, Shen Y, Tan W-H, Jeste S S, Morrow E M, et al. (2010) Deletions of NRXN1 (neurexin-1) predispose to a wide spectrum of developmental disorders. Am J Med Genet B Neuropsychiatr Genet 153B: 937-947. doi:10.1002/ajmg.b.31063.
[0234] 39. Schaaf C P, Boone P M, Sampath S, Williams C, Bader P I, et al. (2012) Phenotypic spectrum and genotype-phenotype correlations of NRXN1 exon deletions. Eur J Hum Genet. Available:http://dx.doi.org/10.1038/ejhg.2012.95.
[0235] 40. Camacho-Garcia R J, Planelles M I, Margalef M, Pecero M L, Martinez-Leal R, et al. (2012) Mutations affecting synaptic levels of neurexin-113 in autism and mental retardation. Neurobiol Dis 47: 135-143. doi:10.1016/j.nbd.2012.03.031.
[0236] 41. Wu Y-W, Prakash K, Rong T-Y, Li H-H, Xiao Q, et al. (2011) Lingo2 variants associated with essential tremor and Parkinson's disease. Hum Genet 129: 611-615. doi: 10.1007/s00439-011-0955-3.
[0237] 42. Yamamoto Y, Mochida S, Miyazaki N, Kawai K, Fujikura K, et al. (2010) Tomosyn Inhibits Synaptotagmin-1-mediated Step of Ca2+-dependent Neurotransmitter Release through Its N-terminal WD40 Repeats. J Biol Chem 285: 40943-40955. doi: 10.1074/jbc.M 110.156893.
[0238] 43. Williams A L, Bielopolski N, Meroz D, Lam A D, Passmore D R, et al. (2011) Structural and Functional Analysis of Tomosyn Identifies Domains Important in Exocytotic Regulation. J Biol Chem 286: 14542-14553. doi:10.1074/jbc.M110.215624.
[0239] 44. Hedges D, Hamilton-Nelson K, Sacharow S, Nations L, Beecham G, et al. (2012) Evidence of novel fine-scale structural variation at autism spectrum disorder candidate loci. Mol Autism 3:2. doi: 10.1186/2040-2392-3-2.
[0240] 45. Nunn C, Mao H, Chidiac P, Albert P R (2006) RGS17/RGSZ2 and the R Z/A family of regulators of G-protein signaling. Semin Cell Dev Biol 17: 390-399. doi:10.1016/j.semcdb.2006.04.001.
[0241] 46. Shema E, Kim J, Roeder R G, Oren M (2011) RNF20 inhibits TFIIS-facilitated transcriptional elongation to suppress pro-oncogenic gene expression. Mol Cell 42: 477-488. doi:10.1016/j.molcel.2011.03.011.
[0242] 47. Carrié A, Jun L, Bienvenu T, Vinet M C, McDonell N, et al. (1999) A new member of the IL-1 receptor family highly expressed in hippocampus and involved in X-linked mental retardation. Nat Genet 23: 25-31. doi:10.1038/12623.
[0243] 48. Gambino F, Pavlowsky A, Bgld A, Dupont J-L, Bahi N, et al. (2007) IL1-receptor accessory protein-like 1 (IL1 RAPL1), a protein involved in cognitive functions, regulates N-type Ca2+-channel and neurite elongation. Proc Natl Acad Sci USA 104: 9063-9068. doi: 10.1073/pnas.0701133104.
[0244] 49. Biswas A K, Johnson D G (2012) Transcriptional and nontranscriptional functions of E2F1 in response to DNA damage. Cancer Res 72: 13-17. doi:10.1158/0008-5472.CAN-11-2196.
[0245] 50. Sumioka A, Imoto S, Martins R N, Kirino Y, Suzuki T (2003) XB51 isoforms mediate Alzheimer's beta-amyloid peptide production by X11 L (X11-like protein)-dependent and -independent mechanisms. Biochem J 374: 261-268. doi:10.1042/BJ20030489.
[0246] 51. Stone T W, Forrest C M, Darlington L G (2012) Kynurenine pathway inhibition as a therapeutic strategy for neuroprotection. FEBS J 279: 1386-1397. doi:10.1111/j.1742-4658.2012.08487.x.
[0247] 52. Sun J, Jayathilake K, Zhao Z, Meltzer H Y (n.d.) Investigating association of four gene regions (GABRB3, MAOB, PAH, and SLC6A4) with five symptoms in schizophrenia. Psychiatry Res. Available:http://www.sciencedirect.com/sciencearticle/pii/S0165178111008195.
[0248] 53. Yalgin Ö (2012) Genes and molecular mechanisms involved in the epileptogenesis of idiopathic absence epilepsies. Seizure 21: 79-86. doi: 10.1016/j.seizure.2011.12.002.
[0249] 54. Kirov G, Rujescu D, Ingason A, Collier D A, O'Donovan M C, et al. (2009) Neurexin 1 (NRXN1) Deletions in Schizophrenia. Schizophr Bull 35: 851-854. doi: 10.1093/schbul/sbp079.
[0250] 55. Harrison V, Connell L, Hayesmoore J. McParland J, Pike M G, et al. (2011) Compound heterozygous deletion of NRXN1 causing severe developmental delay with early onset epilepsy in two sisters. Am J Med Genet A. 155A: 2826-2831. doi: 10.1002/ajmg.a.34255.
[0251] 56. Kalia L V, Kalia S K, Chau H, Lozano A M, Hyman B T, et al. (2011) Ubiquitinylation of α-Synuclein by Carboxyl Terminus Hsp70-Interacting Protein (CHIP) Is Regulated by Bcl-2-Associated Athanogene 5 (BAG5). PLoS ONE 6: e14695. doi:10.1371/journal.pone.0014695.
[0252] 57. Swaminathan S, Kim S, Shen L, Risacher S L, Foroud T (2011) Genomic Copy Number Analysis in Alzheimer's Disease and Mild Cognitive Impairment: An ADNI Study. Int J Alzheimers Dis 2011: 10. doi:10.4061/2011/729478.
[0253] 58. Hävik B, Le Hellard S, Rietschel M, Lybaek H, Djurovic S, et al. (2011) The Complement Control-Related Genes CSMD1 and CSMD2 Associate to Schizophrenia. Biol Psychiatry 70: 35-42. doi: 10.1016/j.biopsych.2011.01.030.
[0254] 59. Vilariño-Güell C, Wider C, Ross O, Jasinska-Myga B, Kachergus J, et al. (2010) LINGO1 and LINGO2 variants are associated with essential tremor and Parkinson disease. Neurogenetics 11: 401-408. doi:10.1007/s10048-010-0241-x.
[0255] 60. Punia S, Das M, Behari M, Mishra B K, Sahani A K, et al. (2010) Role of polymorphisms in dopamine synthesis and metabolism genes and association of DBH haplotypes with Parkinson's disease among North Indians. Pharmacogenet Genomics 20:435-441. doi: 10.1097/FPC.0b013e32833ad3bb
[0256] 61. Kao W-T, Wang Y, Kleinman J E, Lipska B K, Hyde T M, et al. (2010) Common genetic variation in Neuregulin 3 (NRG3) influences risk for schizophrenia and impacts NRG3 expression in human brain. Proc Natl Acad Sci USA 107: 15619-15624. doi:10.1073/pnas. 1005410107.
[0257] 62. Grant S G (2012) Synaptopathies: diseases of the synaptome. Curr Opin Neurobiol 22:522-529. Available:http://www.sciencedirect.com/science/article/pii/S0959438812000244.
[0258] 63. Michel M, Schmidt M J, Mimics K (2012) Immune system gene dysregulation in autism & schizophrenia. Dev Neurobiol. Available:http://www.ncbi.nlm.nih.gov/pubmed/22753382. Accessed 20 Jul. 2012.
[0259] 64. Davis L K, Meyer K J, Rudd D S, Librant A L, Epping E A, et al. (2009) Novel copy number variants in children with autism and additional developmental anomalies. J Neurodev Disord 1: 292-301. doi:10.1007/s11689-009-9013-z.
[0260] 65. Kang J-Q, Barnes G (n.d.) A Common Susceptibility Factor of Both Autism and Epilepsy: Functional Deficiency of GABA_{A} Receptors. J Autism Dev Disord: 1-12. doi: 10.1007/s10803-012-1543-7.
[0261] 66. Hogart A, Nagarajan R P, Patzel K A, Yasui D H, Lasalle J M (2007) 15q11-13 GABAA receptor genes are normally biallelically expressed in brain yet are subject to epigenetic dysregulation in autism-spectrum disorders. Hum Mol Genet 16: 691-703. doi:10.1093/hmg/ddm014.
[0262] 67. Cook E H Jr, Lindgren V, Leventhal B L, Courchesne R, Lincoln A, et al. (1997) Autism or atypical autism in maternally but not paternally derived proximal 15q duplication. Am J Hum Genet 60: 928-934.
[0263] 68. Xu L, Li Y, Zhang X, Sun H, Sun D, et al. (2011) Deletion of LCE3C and LCE3B genes is associated with psoriasis in a northern Chinese population. Br J Dermatol 165: 882-887. doi:10.111 l/j.1365-2133.2011.10485.x.
[0264] 69. Bergboer J G M, Zeeuwen P L J M, Schalkwijk J (2012) Genetics of Psoriasis: Evidence for Epistatic Interaction between Skin Barrier Abnormalities and Immune Deviation. The J Invest Dermatol. Available:http://www.ncbi.nlm.nih.gov/pubmed/22622420. Accessed 20 Jul. 2012.
[0265] 70. Prescott S M, Lalouel J M, Leppert M (2008) From Linkage Maps to Quantitative Trait Loci: The History and Science of the Utah Genetic Reference Project. Annu Rev Genom Human Genet 9: 347-358. doi:10.1146/annurev.genom.9.081307.164441.
[0266] 71. Price A L, Patterson N J, Plenge R M, Weinblatt M E, Shadick N A, et al. (2006) Principal components analysis corrects for stratification in genome-wide association studies. Nat Genet 38: 904-909. doi:10.1038/ng1847.
[0267] 72. Huang D W, Sherman B T, Lempicki R A (2008) Systematic and integrative analysis of large gene lists using DAVID bioinformatics resources. Nat Protocols 4: 44-57. doi:110.1038/nprot.2008.211.
[0268] 73. Huang D W, Sherman B T, Lempicki R A (2009) Bioinformatics enrichment tools: paths toward the comprehensive functional analysis of large gene lists. Nucleic Acids Res 37: 1-13. doi:10.1093/nar/gkn923.

[0269] The various embodiments described above can be combined to provide further embodiments. All of the U.S. patents, U.S. patent application publications, U.S. patent application, foreign patents, foreign patent application and non-patent publications referred to in this specification and/or listed in the Application Data Sheet are incorporated herein by reference, in their entirety. Aspects of the embodiments can be modified, if necessary to employ concepts of the various patents, application and publications to provide yet further embodiments.

[0270] These and other changes can be made to the embodiments in light of the above-detailed description. In general, in the following claims, the terms used should not be construed to limit the claims to the specific embodiments disclosed in the specification and the claims, but should be construed to include all possible embodiments along with the full scope of equivalents to which such claims are entitled. Accordingly, the claims are not limited by the disclosure.

LENGTHY TABLES
The patent application contains a lengthy table section. A copy of the table is available in electronic form from the USPTO web site (http://seqdata.uspto.gov/?pageRequest=docDetail&DocID=US20160046990A1). An electronic copy of the table will also be available from the USPTO upon request and payment of the fee set forth in 37 CFR 1.19(b)(3).

What is claimed is:

1. A diagnostic test for diagnosing or predicting ASD in a subject comprising: a reagent for detecting at least one CNV genetic marker associated with ASD, wherein the at least one CNV genetic marker associated with ASD comprises:
(a) at least one CNV genetic marker associated with ASD listed in Table 3; and
(b) 0 or more CNV genetic markers associated with ASD listed in Table 4;
wherein detection in a genetic sample from the subject of the at least one CNV genetic marker associated with ASD indicates that the subject is affected with ASD, or is predisposed to ASD.

2. The diagnostic test of claim 1, wherein the at least one CNV genetic marker associated with ASD listed in Table 3 is selected from the group consisting of the CNV genetic markers associated with ASD 4-7, 9-12, 14-20 and 22-24 listed in Table 3.

3. The diagnostic test of claim 1, wherein the at least one CNV genetic marker associated with ASD listed in Table 3 is selected from the group consisting of the CNV genetic markers associated with ASD 1-20 and 22-24 listed in Table 3.

4. The diagnostic test of claim 1, wherein the at least one CNV genetic marker associated with ASD listed in Table 3 comprises one or more of the CNV genetic markers numbered 6, 8, 10, 16 and 22 in Table 3 and wherein the 0 or more CNV genetic markers associated with ASD listed in Table 4 comprises 0 or more of CNV genetic markers numbered 2-5, 8-10, 16, 20, 22, 24, 30 and 32 listed in Table 4.

5. The diagnostic test of claim 1, wherein the at least one CNV genetic marker associated with ASD listed in Table 3 comprises one or more of the CNV genetic markers numbered 2, 8, 11-13, 21 and 24 listed in Table 3; and the 0 or more CNV genetic markers associated with ASD listed in Table 4 comprises 0 or more of CNV genetic markers numbered 4, 6, 7, 10, 18, 19, 21, 22, 23, 26, 29 and 30 listed in Table 4.

6. The diagnostic test of claim 1, wherein the at least one CNV genetic marker associated with ASD comprises:
(a) at least 5 CNV genetic marker associated with ASD listed in Table 3; and
(b) at least 5 CNV genetic markers associated with ASD listed in Table 4.

7. The diagnostic test of claim 1, wherein the at least one CNV genetic marker associated with ASD comprises:
(a) at least 10 CNV genetic marker associated with ASD listed in Table 3; and
(b) at least 10 CNV genetic markers associated with ASD listed in Table 4.

8. The diagnostic test of claim 1, wherein the at least one CNV genetic marker associated with ASD comprises:
(a) at least 20 CNV genetic marker associated with ASD listed in Table 3; and
(b) at least 20 CNV genetic markers associated with ASD listed in Table 4.

9. The diagnostic test of claim 1, wherein the at least one CNV genetic marker associated with ASD comprises:
(a) the CNV genetic markers associated with ASD listed in Table 3; and
(b) the CNV genetic markers associated with ASD listed in Table 4.

10. The diagnostic test of claim 1, wherein the ASD in the subject comprises autism, Asperger's disorder, pervasive developmental disorder not otherwise specified, or childhood disintegrative disorder.

11. The diagnostic test of claim 1, wherein the reagent for detecting comprises one or more sets of oligonucleotides, wherein each set of oligonucleotides specifically hybridizes to a CNV genetic marker associated with ASD.

12. The diagnostic test of claim 11, wherein the one or more sets of oligonucleotides each comprises from about 2 to about 30 oligonucleotides.

13. The diagnostic test of claim 11, wherein the one or more sets of oligonucleotides each comprises from about 10 to about 25 oligonucleotides.

14. The diagnostic test of claim 11, wherein the one or more sets of oligonucleotides each comprises from about 15 to about 20 oligonucleotides.

15. The diagnostic test of claim 11, wherein the one or more sets of oligonucleotides each comprises about 20 oligonucleotides.

16. The diagnostic test of claim 11 wherein the one or more sets of oligonucleotides are on an array.

17. The diagnostic test of claim 16, wherein the array is a high density microarray.

18. The diagnostic test of claim 11, wherein the one or more sets of oligonucleotides comprise DNA probes.

19. The diagnostic test of claim 18, wherein the DNA probes are selected from the sequences set forth in SEQ ID NOs: 7410-7426; 12508-12563; 27988-28001; 31283-31314; 32494-32587; 33402-39860; 51803-52100; 61165-61290; 62966-62998; 64149-64167; 69319-69561.

20. The diagnostic test of claim 11, wherein the one or more sets of oligonucleotides comprise amplification primers that amplify the CNV genetic marker associated with ASD.

21. The diagnostic test of claim 1, wherein the diagnostic test has a diagnostic yield for ASD of about 8% to about 14%.

22. A method of diagnosing or predicting ASD in a subject, comprising: detecting in a genetic sample isolated from the subject at least one CNV genetic marker associated with ASD, wherein the at least one CNV genetic marker associated with ASD comprises:
(a) at least one CNV genetic marker associated with ASD listed in Table 3; and
(b) 0 or more CNV genetic markers associated with ASD listed in Table 4; thereby diagnosing or predicting ASD in the subject.

23. The method of claim 22, wherein the ASD in the subject comprises autism, Asperger's disorder, pervasive developmental disorder not otherwise specified, or childhood disintegrative disorder.

24. The method of claim 22, wherein the at least one CNV genetic marker associated with ASD listed in Table is selected from the group consisting of the CNV genetic markers associated with ASD 1-20 and 22-24 listed in Table 3.

25. The method of claim 22, wherein the at least one CNV genetic marker associated with ASD listed in Table 3 comprises one or more of the CNV genetic markers numbered 6, 8, 10, 16 and 22 in Table 3 and wherein the 0 or more CNV genetic markers associated with ASD listed in Table 4 comprises 0 or more of CNV genetic markers numbered 2-5, 8-10, 16, 20, 22, 24, 30 and 32 listed in Table 4.

26. The method of claim 22, wherein the at least one CNV genetic marker associated with ASD listed in Table 3 comprises one or more of the CNV genetic markers numbered 2, 8, 11-13, 21 and 24 listed in Table 3; and the 0 or more CNV genetic markers associated with ASD listed in Table 4 comprises 0 or more of the CNV genetic markers numbered 4, 6, 7, 10, 18, 19, 21, 22, 23, 26, 29 and 30 listed in Table 4.

27. The method of claim 22, wherein the at least one CNV genetic marker associated with ASD comprises:
(a) at least 5 CNV genetic marker associated with ASD listed in Table 3; and
(b) at least 5 CNV genetic markers associated with ASD listed in Table 4.

28. The method of claim 22, wherein the at least one CNV genetic marker associated with ASD comprises:
(a) at least 10 CNV genetic marker associated with ASD listed in Table 3; and
(b) at least 10 CNV genetic markers associated with ASD listed in Table 4.

29. The method of claim 22, wherein the at least one CNV genetic marker associated with ASD comprises:
(a) at least 20 CNV genetic marker associated with ASD listed in Table 3; and
(b) at least 20 CNV genetic markers associated with ASD listed in Table 4.

30. The method of claim 22, wherein the at least one CNV genetic marker associated with ASD comprises:
(a) the CNV genetic markers associated with ASD listed in Table 3; and
(b) the CNV genetic markers associated with ASD listed in Table 4.

31. The method of claim 22, wherein the at least one CNV genetic marker associated with ASD is detected by hybridizing one or more sets of DNA probes to at least one CNV genetic marker associated with ASD using a microarray.

32. The method of claim 31, wherein the microarray comprises a glass, plastic, or silicon biochip microarray.

33. The method of claim 31, wherein the microarray comprises a bead array.

34. The method of claim 31, wherein the microarray is a high density microarray.

35. The method of claim 31, wherein the one or more sets of DNA probes on the microarray comprise DNA probes selected from the sequences set forth in SEQ ID NOs:1-83,443.

36. The method of claim 22, wherein the at least one CNV genetic marker associated with ASD is detected by next-generation sequencing.

37. The method of claim 22, wherein the at least one CNV genetic marker associated with ASD is detected by amplifying one or more portions of the at least one CNV genetic marker associated with ASD using PCR.

38. A method of diagnosing or predicting ASD in a subject, comprising: hybridizing a genetic sample isolated from the subject with one or more sets of oligonucleotides, wherein each set of oligonucleotides specifically hybridizes to a CNV genetic marker associated with ASD; wherein the at least one CNV genetic marker associated with ASD comprises:
(a) at least one CNV genetic marker associated with ASD listed in Table 3; and
(b) 0 or more CNV genetic markers associated with ASD listed in Table 4; thereby diagnosing or predicting ASD in the subject.

39. The method of claim 38, wherein the ASD in the subject comprises autism, Asperger's disorder, pervasive developmental disorder not otherwise specified, or childhood disintegrative disorder.

40. The method of claim 38, wherein the at least one CNV genetic marker associated with ASD listed in Table 3 comprises one or more of the CNV genetic markers numbered 6, 8, 10, 16 and 22 in Table 3 and wherein the 0 or more CNV genetic markers associated with ASD listed in Table 4 comprises 0 or more of CNV genetic markers numbered 2-5, 8-10, 16, 20, 22, 24, 30 and 32 listed in Table 4.

41. The method of claim 38, wherein the at least one CNV genetic marker associated with ASD listed in Table 3 comprises one or more of the CNV genetic markers numbered 2, 8, 11-13, 21 and 24 listed in Table 3; and the 0 or more CNV genetic markers associated with ASD listed in Table 4 comprises 0 or more of the CNV genetic markers numbered 4, 6, 7, 10, 18, 19, 21, 22, 23, 26, 29 and 30 listed in Table 4.

42. The method of claim 38, wherein the at least one CNV genetic marker associated with ASD comprises:
(a) at least 5 CNV genetic marker associated with ASD listed in Table 3; and
(b) at least 5 CNV genetic markers associated with ASD listed in Table 4.

43. The method of claim 38, wherein the at least one CNV genetic marker associated with ASD comprises:
(a) at least 10 CNV genetic marker associated with ASD listed in Table 3; and
(b) at least 10 CNV genetic markers associated with ASD listed in Table 4.

44. The method of claim 38, wherein the at least one CNV genetic marker associated with ASD comprises:
(a) at least 20 CNV genetic marker associated with ASD listed in Table 3; and
(b) at least 20 CNV genetic markers associated with ASD listed in Table 4.

45. The method of claim 38, wherein the at least one CNV genetic marker associated with ASD comprises: the CNV genetic markers associated with ASD listed in Table 3; and the CNV genetic markers associated with ASD listed in Table 4.

46. The method of claim 38, wherein the one or more sets of oligonucleotides each comprises from about 2 to about 30 oligonucleotides.

47. The method of claim 38, wherein the one or more sets of oligonucleotides each comprises from about 10 to about 25 oligonucleotides.

48. The method of claim 38, wherein the one or more sets of oligonucleotides each comprises from about 15 to about 20 oligonucleotides.

49. The method of claim 38, wherein the one or more sets of oligonucleotides comprise DNA probes arrayed on a microarray.

50. The method of claim 49, wherein the DNA probes on the microarray comprise DNA probes selected from the sequences set forth in SEQ ID NOs:1-83,443.

51. The method of claim 38, wherein the one or more sets of oligonucleotides comprise amplification primers that amplify the CNV genetic marker associated with ASD.

52. A DNA microarray for detecting the presence of a CNV associated with ASD in a subject comprising one or more of the DNA probe sets selected from those set forth in SEQ ID NOs: 7410-7426; 12508-12563; 27988-28001; 31283-31314; 32494-32587; 33402-39860; 51803-52100; 61165-61290; 62966-62998; 64149-64167; 69319-69561.

53. The DNA microarray of claim 52 comprising at least 100 DNA probes selected from the DNA probes set forth in SEQ ID NOs: 7410-7426; 12508-12563; 27988-28001; 31283-31314; 32494-32587; 33402-39860; 51803-52100; 61165-61290; 62966-62998; 64149-64167; 69319-69561.

54. The DNA microarray of claim 52 comprising at least 1000 DNA probes selected from the DNA probes set forth in SEQ ID NOs: 1-83,443.

55. The DNA microarray of claim 52 comprising at least 10000 DNA probes selected from the DNA probes set forth in SEQ ID NOs: 1-83,443.

56. The DNA microarray of claim 52 comprising at least 15000 DNA probes selected from the DNA probes set forth in SEQ ID NOs: 1-83,443.

57. The DNA microarray of claim 52 comprising at least 20000 DNA probes selected from the DNA probes set forth in SEQ ID NOs: 1-83,443.

58. The DNA microarray of claim 52 comprising at least 50000 DNA probes selected from the DNA probes set forth in SEQ ID NOs: 1-83,443.

59. A method for determining the genotype of an individual suspected of having an ASD comprising hybridizing a genetic sample isolated from the subject with one or more sets of DNA probes, wherein the one or more sets of DNA probes are selected from the DNA probes set forth in SEQ ID NOs: 1-83,443.

60. A method for determining the genotype of an individual suspected of having a childhood developmental delay disorder comprising hybridizing a genetic sample isolated from the subject with one or more sets of DNA probes, wherein the one or more sets of DNA probes are selected from the DNA probes set forth in SEQ ID NOs:1-83,433.

61. The method of claim 60, wherein the childhood developmental delay disorder is selected from the group consisting of Rett syndrome, Noonan/Costello/CFC syndromes, Tuberous sclerosis, ADHD, DD, Tourette syndrome, and Dyslexia.

62. A diagnostic test for diagnosing or predicting ASD in a subject comprising: a reagent for detecting at least one CNV genetic marker associated with ASD, wherein the at least one CNV genetic marker associated with ASD comprises:
(a) at least one CNV genetic marker associated with ASD listed in Table 8; or at least one CNV genetic marker associated with ASD listed in Table 10; or both; and
(b) 0 or more CNV genetic markers associated with ASD listed in Table 9;
wherein detection in a genetic sample from the subject of the at least one CNV genetic marker associated with ASD indicates that the subject is affected with ASD, or is predisposed to ASD.

The application's sequence listing, which the Patent Office published only in electronic form, follows.

SEQUENCE LISTING (83443 sequences)

SEQ ID NO: 1 - DNA, 25 bp, Homo sapiens
tggcagcacagcacacagggccttc

SEQ ID NO: 2 - DNA, 25 bp, Homo sapiens
gtttcttctcacctacgaaaattaa

SEQ ID NO: 3 - DNA, 25 bp, Homo sapiens
ggaggcactccctaaagtcttatta

SEQ ID NO: 4 - DNA, 25 bp, Homo sapiens
tctcagcctcttgggaatgctcttc

SEQ ID NO: 5 - DNA, 25 bp, Homo sapiens
gggactcgcaactgaaaccttctga

SEQ ID NO: 6 - DNA, 25 bp, Homo sapiens
cgtttaagtgtgcacctgggatcta

SEQ ID NO: 7 - DNA, 25 bp, Homo sapiens
ttcaggagggaaaggtcaaaaaatc

SEQ ID NO: 8 - DNA, 25 bp, Homo sapiens
ggattacaattacaggccagttatg

SEQ ID NO: 9 - DNA, 25 bp, Homo sapiens
acagcccttttgctcctccagatgg

SEQ ID NO: 10 - DNA, 25 bp, Homo sapiens
cccaccgcccaccccccagcaaaga

SEQ ID NO: 11 - DNA, 25 bp, Homo sapiens
agggctgagaatgagccttcccagc

SEQ ID NO: 12 - DNA, 25 bp, Homo sapiens
ggcctgtatctctgatgctgaacta

SEQ ID NO: 13 - DNA, 25 bp, Homo sapiens
tgcgccttaacagcgaccacagtaa

SEQ ID NO: 14 - DNA, 25 bp, Homo sapiens
catgcaactgggttaaggctgatta

SEQ ID NO: 15 - DNA, 25 bp, Homo sapiens
tgacagcgtgaagaagcaactattg

SEQ ID NO: 16 - DNA, 25 bp, Homo sapiens
gccagtgttctatccgtggtttaaa

SEQ ID NO: 17 - DNA, 25 bp, Homo sapiens
tggggcttggccttttcaactatga

SEQ ID NO: 18 - DNA, 25 bp, Homo sapiens
ccgtaatctcagtggccctccttta

SEQ ID NO: 19 - DNA, 25 bp, Homo sapiens
ggctacaacgtttgcaacaccaagg

SEQ ID NO: 20 - DNA, 25 bp, Homo sapiens
tctaggtctcctaaccagggcaatg

SEQ ID NO: 21 - DNA, 25 bp, Homo sapiens
gccactccttggctggtaacatcta

SEQ ID NO: 22 - DNA, 25 bp, Homo sapiens
agaagctgttttctctgcccagata

SEQ ID NO: 23 - DNA, 25 bp, Homo sapiens
aaaggcctcacgcatactgtttata

SEQ ID NO: 24 - DNA, 25 bp, Homo sapiens
acgctccttcccgttcgcatgagaa

SEQ ID NO: 25 - DNA, 25 bp, Homo sapiens
ttcgggcccacgttgcaacgagtca

SEQ ID NO: 26 - DNA, 25 bp, Homo sapiens
cctggttcctttacctccacggata

SEQ ID NO: 27 - DNA, 25 bp, Homo sapiens
ggttggtctctgctacagtccatta

SEQ ID NO: 28 - DNA, 25 bp, Homo sapiens
ttctctagcagaggcctacatttca

SEQ ID NO: 29 - DNA, 25 bp, Homo sapiens
tggagtatctccagccacaaaagcc

SEQ ID NO: 30 - DNA, 25 bp, Homo sapiens
tgtgtgtctgtatgtatatgtctat

SEQ ID NO: 31 - DNA, 25 bp, Homo sapiens
caccttgatgacttgcctggcctta

SEQ ID NO: 32 - DNA, 25 bp, Homo sapiens
ggaggccactgcgagactttgaaaa

SEQ ID NO: 33 - DNA, 25 bp, Homo sapiens
ctggggttccatggcctgtttacca

SEQ ID NO: 34 - DNA, 25 bp, Homo sapiens
ccacagtcccatgctagaagtgtca

SEQ ID NO: 35 - DNA, 25 bp, Homo sapiens
ttcgcagctttcttggtggtgtcca

SEQ ID NO: 36 - DNA, 25 bp, Homo sapiens
agtccctaaatggttggctcaagtc

SEQ ID NO: 37 - DNA, 25 bp, Homo sapiens
gcggtgtgtctatgagccttcttta

SEQ ID NO: 38 - DNA, 25 bp, Homo sapiens
gtgcctggccatgagaacttccata

SEQ ID NO: 39 - DNA, 25 bp, Homo sapiens
ggggcccaaggcatgcattcattca

SEQ ID NO: 40 - DNA, 25 bp, Homo sapiens
tttcccaggcggctctaccatctaa

SEQ ID NO: 41 - DNA, 25 bp, Homo sapiens
gtccactctgcagagatggctgaat

SEQ ID NO: 42 - DNA, 25 bp, Homo sapiens
ggaagaaatcgcaccagcccagaac

SEQ ID NO: 43 - DNA, 25 bp, Homo sapiens
gcagcagcccagaaccaagtgcata

SEQ ID NO: 44 - DNA, 25 bp, Homo sapiens
tcgctcactgctggtgcgacacatg

SEQ ID NO: 45 - DNA, 25 bp, Homo sapiens
ccgggctgcctgacttcaaaatctg

SEQ ID NO: 46 - DNA, 25 bp, Homo sapiens
ggaaagtccctccaggcccaaggta

SEQ ID NO: 47 - DNA, 25 bp, Homo sapiens
tggccttttgaatcacgcttagaga

SEQ ID NO: 48 - DNA, 25 bp, Homo sapiens
cgggtgaatccgtttagccgctttc

SEQ ID NO: 49 - DNA, 25 bp, Homo sapiens
gcaggcattcctgctggttcagcaa

SEQ ID NO: 50 - DNA, 25 bp, Homo sapiens
cccacacatgggcattcttcattgt

SEQ ID NO: 51 - DNA, 25 bp, Homo sapiens
acctacctaagttctgtgtccagtg

SEQ ID NO: 52 - DNA, 25 bp, Homo sapiens
cgtttcccagacttgccatttcctt

SEQ ID NO: 53 - DNA, 25 bp, Homo sapiens
cccatttataaacctggctgtgagt

SEQ ID NO: 54 - DNA, 25 bp, Homo sapiens
tttccttgggagaatgggtccttcc

SEQ ID NO: 55 - DNA, 25 bp, Homo sapiens
agaggcctcatggtggactcactca

SEQ ID NO: 56 - DNA, 25 bp, Homo sapiens
tggaccacacagagagatatcgctc

SEQ ID NO: 57 - DNA, 25 bp, Homo sapiens
cgtgggcacaccatcttcattaagc

SEQ ID NO: 58 - DNA, 25 bp, Homo sapiens
cgccttcgcgtatgatggcttcctg

SEQ ID NO: 59 - DNA, 25 bp, Homo sapiens
gttcgtgacctgcatgcccacatgg

SEQ ID NO: 60 - DNA, 25 bp, Homo sapiens
cccagcccagctgagcgttttatga

SEQ ID NO: 61 - DNA, 25 bp, Homo sapiens
tgccaatgttctgagcgcggagtct

SEQ ID NO: 62 - DNA, 25 bp, Homo sapiens
gcccagcaggtcttggcattacaga

SEQ ID NO: 63 - DNA, 25 bp, Homo sapiens
gagcttccagaggttacatgcacta

SEQ ID NO: 64 - DNA, 25 bp, Homo sapiens
cctgggctgcttgtctcagaacaca

SEQ ID NO: 65 - DNA, 25 bp, Homo sapiens
tgtggacccagcctagtagaacgta

SEQ ID NO: 66 - DNA, 25 bp, Homo sapiens
tcatgtaatgtgtggacccggccta

SEQ ID NO: 67 - DNA, 25 bp, Homo sapiens
ggtgtgccagatgaactaccctatc

SEQ ID NO: 68 - DNA, 25 bp, Homo sapiens
tttgctctcaatcctaccggtcttc

SEQ ID NO: 69 - DNA, 25 bp, Homo sapiens
ctaagtaatatttagataactttaa

SEQ ID NO: 70 - DNA, 25 bp, Homo sapiens
gaccacattttctcatggcagagtg

SEQ ID NO: 71 - DNA, 25 bp, Homo sapiens
ggagtctgctccctcaatgaccatc

SEQ ID NO: 72 - DNA, 25 bp, Homo sapiens
cgagtatctttttgggtacagcaca

SEQ ID NO: 73 - DNA, 25 bp, Homo sapiens
ccctgcattgcagttgttaaggttc

SEQ ID NO: 74 - DNA, 25 bp, Homo sapiens
agagtacccttgagagcatccttta

SEQ ID NO: 75 - DNA, 25 bp, Homo sapiens
ctcggaaatggtggccagaactgtc

SEQ ID NO: 76 - DNA, 25 bp, Homo sapiens
tctccgcccgttttgggatttaaca

SEQ ID NO: 77 - DNA, 25 bp, Homo sapiens
tggccgcgtactcgggatcatttcc

SEQ ID NO: 78 - DNA, 25 bp, Homo sapiens
ccttggaaagctttgtgggagtctc

SEQ ID NO: 79 - DNA, 25 bp, Homo sapiens
gcagactgttgtgaccacccgttta

SEQ ID NO: 80 - DNA, 25 bp, Homo sapiens
cttagccatgtgtttcaagatgaac

SEQ ID NO: 81 - DNA, 25 bp, Homo sapiens
gctcactggttgtctgggctttatc

SEQ ID NO: 82 - DNA, 25 bp, Homo sapiens
attcttgctagaggacggacactta

SEQ ID NO: 83 - DNA, 25 bp, Homo sapiens
gtcgagtttatatgcactggtgaga

SEQ ID NO: 84 - DNA, 25 bp, Homo sapiens
tggcgactctctctaccgctgcaaa

SEQ ID NO: 85 - DNA, 25 bp, Homo sapiens
tcaccataggcctggactgtaacta

SEQ ID NO: 86 - DNA, 25 bp, Homo sapiens
agggactcggtcatttgttgcttca

SEQ ID NO: 87 - DNA, 25 bp, Homo sapiens
caggctcctattcgatgcagtttta

SEQ ID NO: 88 - DNA, 25 bp, Homo sapiens
ttcctaagacatgggagggttctca

SEQ ID NO: 89 - DNA, 25 bp, Homo sapiens
gggtgctcacaggtgttacttcata

SEQ ID NO: 90 - DNA, 25 bp, Homo sapiens
tgtgttttcttgatcatagaagaat

SEQ ID NO: 91 - DNA, 25 bp, Homo sapiens
gccatggtcgcactcaggatttaaa

SEQ ID NO: 92 - DNA, 25 bp, Homo sapiens
tcaccatgtggtgttgacaacgttc

SEQ ID NO: 93 - DNA, 25 bp, Homo sapiens
ctcctggtctctgtgctcaaagtga

SEQ ID NO: 94 - DNA, 25 bp, Homo sapiens
gggccagagtgtgatcattattata

SEQ ID NO: 95 - DNA, 25 bp, Homo sapiens
tccagccatcatgaaggtttgtgtc

SEQ ID NO: 96 - DNA, 25 bp, Homo sapiens
ctcagctgagctctctggaacattc

SEQ ID NO: 97 - DNA, 25 bp, Homo sapiens
agggcaatcgctctcctctgagtca

SEQ ID NO: 98 - DNA, 25 bp, Homo sapiens
tggttcacagacgttcaaggctatc

SEQ ID NO: 99 - DNA, 25 bp, Homo sapiens
tcacctctgatggagacggtcactc

SEQ ID NO: 100 - DNA, 25 bp, Homo sapiens
ggctgcagaccctgtcctctagatg

SEQ ID NO: 101 - DNA, 25 bp, Homo sapiens
ggttcagggcaaacaccagcagttg

SEQ ID NO: 102 - DNA, 25 bp, Homo sapiens
taacagggtctcttcgctgagcaga

SEQ ID NO: 103 - DNA, 25 bp, Homo sapiens
tggcccgtccctgaagttacatgtt

SEQ ID NO: 104 - DNA, 25 bp, Homo sapiens
gtcgagtcacttggctgagaccata

SEQ ID NO: 105 - DNA, 25 bp, Homo sapiens
accggctagcgttgtcaggagaaca

SEQ ID NO: 106 - DNA, 25 bp, Homo sapiens
tgtcccgtggcactatcccagtatg

SEQ ID NO: 107 - DNA, 25 bp, Homo sapiens
tcgctttaatggctcaggcaaggtc

SEQ ID NO: 108 - DNA, 25 bp, Homo sapiens
catgcctggagtctgtacgattgtc

SEQ ID NO: 109 - DNA, 25 bp, Homo sapiens
cgtcatccaggtgctgctccccgag

SEQ ID NO: 110 - DNA, 25 bp, Homo sapiens
ctcttcagagccaagcagattctta

SEQ ID NO: 111 - DNA, 25 bp, Homo sapiens
tgcaagttgaaccagggccctttta

SEQ ID NO: 112 - DNA, 25 bp, Homo sapiens
tggacgcatgactccgctgactttg

SEQ ID NO: 113 - DNA, 25 bp, Homo sapiens
aggctatatgcggagaattttctta

SEQ ID NO: 114 - DNA, 25 bp, Homo sapiens
gagctgttcaaattttcaactcctg

SEQ ID NO: 115 - DNA, 25 bp, Homo sapiens
gtgcactttcccacaaggagttgta

SEQ ID NO: 116 - DNA, 25 bp, Homo sapiens
aaatagttactgtgtggcttggcca

SEQ ID NO: 117 - DNA, 25 bp, Homo sapiens
gccttagctgggtaatacaaagatg

SEQ ID NO: 118 - DNA, 25 bp, Homo sapiens
tccacgtgaataggggtcagtctca

SEQ ID NO: 119 - DNA, 25 bp, Homo sapiens
tcacgtcttgggcttcctgggacaa

SEQ ID NO: 120 - DNA, 25 bp, Homo sapiens
ggctggccctaaattcctcttccta

SEQ ID NO: 121 - DNA, 25 bp, Homo sapiens
gctctgacttcatgctggtgattca

SEQ ID NO: 122 - DNA, 25 bp, Homo sapiens
ccctgggatagagactggacatgta

SEQ ID NO: 123 - DNA, 25 bp, Homo sapiens
tgaggaactcccaaccctagtgagg

SEQ ID NO: 124 - DNA, 25 bp, Homo sapiens
ctttggggtcagaagcagctatatc

SEQ ID NO: 125 - DNA, 25 bp, Homo sapiens
tctgcaagtgctccggaaatgttta

SEQ ID NO: 126 - DNA, 25 bp, Homo sapiens
ggggcagtcactcaaactagaaatg

SEQ ID NO: 127 - DNA, 25 bp, Homo sapiens
agggcgtcactttcctcaagctcgg

SEQ ID NO: 128 - DNA, 25 bp, Homo sapiens
tccggcagtcaagttccctatcaag

SEQ ID NO: 129 - DNA, 25 bp, Homo sapiens
tgtgctcccattgccatcctgaatt

SEQ ID NO: 130 - DNA, 25 bp, Homo sapiens
ggcacctttacatagtctgaccttg

SEQ ID NO: 131 - DNA, 25 bp, Homo sapiens
ggaagtcaacttcagagttagcctc

SEQ ID NO: 132 - DNA, 25 bp, Homo sapiens
gctgctccactgtctactgtctaca

SEQ ID NO: 133 - DNA, 25 bp, Homo sapiens
cggtttccagttccacgagttccta

SEQ ID NO: 134 - DNA, 25 bp, Homo sapiens
cacggggagttctcgtatgtctaga

SEQ ID NO: 135 - DNA, 25 bp, Homo sapiens
ataagaaaatctggcctcccgcatg

SEQ ID NO: 136 - DNA, 25 bp, Homo sapiens
ttacatgacatatatacacacatat

SEQ ID NO: 137 - DNA, 25 bp, Homo sapiens
acctgactgtggtgcggtccagaaa

SEQ ID NO: 138 - DNA, 25 bp, Homo sapiens
ccagccaatggtgatcaaaagcttc

SEQ ID NO: 139 - DNA, 25 bp, Homo sapiens
ccttcagagaggagaatggcctttc

SEQ ID NO: 140 - DNA, 25 bp, Homo sapiens
atcttgagtgagtgtgtttccctcc

SEQ ID NO: 141 - DNA, 25 bp, Homo sapiens
ggttatgttatctgccttcctcaaa

SEQ ID NO: 142 - DNA, 25 bp, Homo sapiens
gtgtgcctgttgttctgactgctta

SEQ ID NO: 143 - DNA, 25 bp, Homo sapiens
ttgggaactctgtctcatagggatg

SEQ ID NO: 144 - DNA, 25 bp, Homo sapiens
gccggcggtattgactattttgtga

SEQ ID NO: 145 - DNA, 25 bp, Homo sapiens
ttgggaacttcataactcacatgac

SEQ ID NO: 146 - DNA, 25 bp, Homo sapiens
gtcctgctttgcctttgactgcata

SEQ ID NO: 147 - DNA, 25 bp, Homo sapiens
tgcccacagaaagcgcaagttgttc

SEQ ID NO: 148 - DNA, 25 bp, Homo sapiens
ggccgggacctctacactgaataca

SEQ ID NO: 149 - DNA, 25 bp, Homo sapiens
tccctagacggagctcatttgttca

SEQ ID NO: 150 - DNA, 25 bp, Homo sapiens
ccacagggcagggaaaatactaata

SEQ ID NO: 151 - DNA, 25 bp, Homo sapiens
tcctgttgactggtgggtccaagca

SEQ ID NO: 152 - DNA, 25 bp, Homo sapiens
cctcggttcgcagtacacttctgga

SEQ ID NO: 153 - DNA, 25 bp, Homo sapiens
atctacaggttgattccaaaggttg

SEQ ID NO: 154 - DNA, 25 bp, Homo sapiens
aggtgaatcccatgaaagtcttgtc

SEQ ID NO: 155 - DNA, 25 bp, Homo sapiens
ctcgtgctgaccttcttaaagtgga

SEQ ID NO: 156 - DNA, 25 bp, Homo sapiens
cccttcctgggtggctaatgagatt

SEQ ID NO: 157 - DNA, 25 bp, Homo sapiens
ctctgaccagttgcagtggaagttc

SEQ ID NO: 158 - DNA, 25 bp, Homo sapiens
acgcagggcgtttcagctcacactt

SEQ ID NO: 159 - DNA, 25 bp, Homo sapiens
ccagcagatgtttgcccacagaatc

SEQ ID NO: 160 - DNA, 25 bp, Homo sapiens
gccgttgccttctccagtgtgtttt

SEQ ID NO: 161 - DNA, 25 bp, Homo sapiens
tgccacagtgtcacctgcagttttc

SEQ ID NO: 162 - DNA, 25 bp, Homo sapiens
catccacacatagacgtgtacatac

SEQ ID NO: 163 - DNA, 25 bp, Homo sapiens
ggctttccgttcttcacgcaggtta

SEQ ID NO: 164 - DNA, 25 bp, Homo sapiens
agtttcactgtgtctgcgcctctca

SEQ ID NO: 165 - DNA, 25 bp, Homo sapiens
tcctgtcgtttgctttgggaacatc

SEQ ID NO: 166 - DNA, 25 bp, Homo sapiens
tggcgtctctactagtcacagaaca

SEQ ID NO: 167 - DNA, 25 bp, Homo sapiens
ctcagctcaggtagcagtttccttt

SEQ ID NO: 168 - DNA, 25 bp, Homo sapiens
ttgttgggtcatgtaagatcatgtt

SEQ ID NO: 169 - DNA, 25 bp, Homo sapiens
ctctcaaccgagttacttacaagtg

SEQ ID NO: 170 - DNA, 25 bp, Homo sapiens
agcctgatctctgcctgttgttcca

SEQ ID NO: 171 - DNA, 25 bp, Homo sapiens
tccctgacaagcttgcggacttcaa

SEQ ID NO: 172 - DNA, 25 bp, Homo sapiens
gctgtctcatgtgctcccaaggaaa

SEQ ID NO: 173 - DNA, 25 bp, Homo sapiens
gtgaccatgtatctgaccctgaacc

SEQ ID NO: 174 - DNA, 25 bp, Homo sapiens
tgaaatcgctcattgcaacctggtg

SEQ ID NO: 175 - DNA, 25 bp, Homo sapiens
gggccctgcagtgctcgaccaataa

SEQ ID NO: 176 - DNA, 25 bp, Homo sapiens
ggttcccataccaagagccaagagc

SEQ ID NO: 177 - DNA, 25 bp, Homo sapiens
gtgttgaatcctccatgcctggctg

SEQ ID NO: 178 - DNA, 25 bp, Homo sapiens
gctttctttcaccaggcagatgatc

SEQ ID NO: 179 - DNA, 25 bp, Homo sapiens
aggcactgttggtagcccattttta

SEQ ID NO: 180 - DNA, 25 bp, Homo sapiens
caggtgggttatacaagatagtgca

SEQ ID NO: 181 - DNA, 25 bp, Homo sapiens
actcagcaatgtgggtttctttctc

SEQ ID NO: 182 - DNA, 25 bp, Homo sapiens
aggatgtatcctcccagccaccata

SEQ ID NO: 183 - DNA, 25 bp, Homo sapiens
gagatgcctgctcttgacttgactg

SEQ ID NO: 184 - DNA, 25 bp, Homo sapiens
tggtaaagtctctgcggaaaaagtc

SEQ ID NO: 185 - DNA, 25 bp, Homo sapiens
tatactttgaaaatttatctctggt

SEQ ID NO: 186 - DNA, 25 bp, Homo sapiens
gcctattcaaaaaatgtaagccaca

SEQ ID NO: 187 - DNA, 25 bp, Homo sapiens
gctgcagtgttagacaccaatttcc

SEQ ID NO: 188 - DNA, 25 bp, Homo sapiens
gacggtatgccaaagatcgatgtta

SEQ ID NO: 189 - DNA, 25 bp, Homo sapiens
tgttagccctgtttcctgccatgcg

SEQ ID NO: 190 - DNA, 25 bp, Homo sapiens
gtgcagggccttacgtacaaaagtc

SEQ ID NO: 191 - DNA, 25 bp, Homo sapiens
cctggccctgtgcaatttgtaaatc

SEQ ID NO: 192 - DNA, 25 bp, Homo sapiens
tcctcagggagctgcctataacttg

SEQ ID NO: 193 - DNA, 25 bp, Homo sapiens
gggcgatgatgcctttgttctcata

SEQ ID NO: 194 - DNA, 25 bp, Homo sapiens
ggccaacgctttttattcaacagta

SEQ ID NO: 195 - DNA, 25 bp, Homo sapiens
ccttgagctcacatccctgcagata

SEQ ID NO: 196 - DNA, 25 bp, Homo sapiens
gggaagccatctcttttagtgaaca

SEQ ID NO: 197 - DNA, 25 bp, Homo sapiens
tgtgctatgctgagtgccaagttta

SEQ ID NO: 198 - DNA, 25 bp, Homo sapiens
ccctgtaggggtgacctgatttata

SEQ ID NO: 199 - DNA, 25 bp, Homo sapiens
gtacctcccactgattaacattttg

SEQ ID NO: 200 - DNA, 25 bp, Homo sapiens
ggacactgtgatggcctttttattc

SEQ ID NO: 201 - DNA, 25 bp, Homo sapiens
ggggatcacgctctttcagatttca

SEQ ID NO: 202 - DNA, 25 bp, Homo sapiens
ctcgtgggtcctggcatcaaaatga

SEQ ID NO: 203 - DNA, 25 bp, Homo sapiens
tgggccctgaaactactggaaaatc

SEQ ID NO: 204 - DNA, 25 bp, Homo sapiens
gtttggcatggtctcgagatactcc

SEQ ID NO: 205 - DNA, 25 bp, Homo sapiens
gtgtctgccacccaaaaccaatgtt

SEQ ID NO: 206 - DNA, 25 bp, Homo sapiens
gtttagaggccatactcccattttg

SEQ ID NO: 207 - DNA, 25 bp, Homo sapiens
ccacagggaccattgctgacattca

SEQ ID NO: 208 - DNA, 25 bp, Homo sapiens
gatctctctccctatgttgtccatg

SEQ ID NO: 209 - DNA, 25 bp, Homo sapiens
cagggcatcagcaacaataactttt

SEQ ID NO: 210 - DNA, 25 bp, Homo sapiens
agctggctcactgtgcacactattc

SEQ ID NO: 211 - DNA, 25 bp, Homo sapiens
gggcctctgaagatccatccttttc

SEQ ID NO: 212 - DNA, 25 bp, Homo sapiens
ggggaaccttcatcagcctggagca

SEQ ID NO: 213 - DNA, 25 bp, Homo sapiens
ctgagtgcattttctgtaccgattc

SEQ ID NO: 214 - DNA, 25 bp, Homo sapiens
tgaaatcttcggtggagcactgctg

SEQ ID NO: 215 - DNA, 25 bp, Homo sapiens
tgccagcgccgtaagtccaacaagc

SEQ ID NO: 216 - DNA, 25 bp, Homo sapiens
agttgttccgtctttagccacaggg

SEQ ID NO: 217 - DNA, 25 bp, Homo sapiens
ggctctctgcaggacaactcatttc

SEQ ID NO: 218 - DNA, 25 bp, Homo sapiens
cacacttggggaactgcggatagtc

SEQ ID NO: 219 - DNA, 25 bp, Homo sapiens
gctcagcgctgcacaacttggtaaa

SEQ ID NO: 220 - DNA, 25 bp, Homo sapiens
gtagtgcgggcctagatttagaata

SEQ ID NO: 221 - DNA, 25 bp, Homo sapiens
catctgggacctatcgcctattttc

SEQ ID NO: 222 - DNA, 25 bp, Homo sapiens
ggtgaaagctctcccatacgcattt

SEQ ID NO: 223 - DNA, 25 bp, Homo sapiens
gagcacagttgcagggacatttcca

SEQ ID NO: 224 - DNA, 25 bp, Homo sapiens
gaccgagttctgctgatcccttttg

SEQ ID NO: 225 - DNA, 25 bp, Homo sapiens
tagccctgtgagagatcagactgtc

SEQ ID NO: 226 - DNA, 25 bp, Homo sapiens
aacctccgtaggtgttcagacatga

SEQ ID NO: 227 - DNA, 25 bp, Homo sapiens
tcactggacatgctcgaggacactc

SEQ ID NO: 228 - DNA, 25 bp, Homo sapiens
gcttccgactgcctgaggtcagatc

SEQ ID NO: 229 - DNA, 25 bp, Homo sapiens
ctcagggctggagaacttttctatc

SEQ ID NO: 230 - DNA, 25 bp, Homo sapiens
gggtgcgaatcctacgtttttcatt

SEQ ID NO: 231 - DNA, 25 bp, Homo sapiens
tcccgctggagcatgtgaaaactaa

SEQ ID NO: 232 - DNA, 25 bp, Homo sapiens
ctgtcttcagggactcaagttccta

SEQ ID NO: 233 - DNA, 25 bp, Homo sapiens
ggacagtgacacctctaggatctta

SEQ ID NO: 234 - DNA, 25 bp, Homo sapiens
gtgggccctacctatgagcaaaatc

SEQ ID NO: 235 - DNA, 25 bp, Homo sapiens
gcacaccgtcctcttctttggcaaa

SEQ ID NO: 236 - DNA, 25 bp, Homo sapiens
cccagctccagcattgttgtcttag

SEQ ID NO: 237 - DNA, 25 bp, Homo sapiens
ccactctgtgggaagctttgactca

SEQ ID NO: 238 - DNA, 25 bp, Homo sapiens
atacggaattccctggtcgagtctc

SEQ ID NO: 239 - DNA, 25 bp, Homo sapiens
cttgcttgacatgaagggcttcttg

SEQ ID NO: 240 - DNA, 25 bp, Homo sapiens
ggctggctcagctaacaaagcttta

SEQ ID NO: 241 - DNA, 25 bp, Homo sapiens
gactggtcttggatccttgagagca

SEQ ID NO: 242 - DNA, 25 bp, Homo sapiens
gggagctttcctacaaacttcatga

SEQ ID NO: 243 - DNA, 25 bp, Homo sapiens
agaatggctcaatgcctgaagtcac

SEQ ID NO: 244 - DNA, 25 bp, Homo sapiens
agcctgaggaccatgacctgaatta

SEQ ID NO: 245 - DNA, 25 bp, Homo sapiens
tagtagcccgctgatctgtagaaga

SEQ ID NO: 246 - DNA, 25 bp, Homo sapiens
aggcctgggtaacaaatagtatttc

SEQ ID NO: 247 - DNA, 25 bp, Homo sapiens
ctccgtgcctggtgcttcattgaaa

SEQ ID NO: 248 - DNA, 25 bp, Homo sapiens
gtggcctgtgatctgttctccgaca

SEQ ID NO: 249 - DNA, 25 bp, Homo sapiens
ctctggctcacccacgaagtgtgtg

SEQ ID NO: 250 - DNA, 25 bp, Homo sapiens
tggacctcagaagtgccgtagcttg

SEQ ID NO: 251 - DNA, 25 bp, Homo sapiens
ggcccttggtgctcaattacatgtg

SEQ ID NO: 252 - DNA, 25 bp, Homo sapiens
acctcctgtttgcagctgagctaga

SEQ ID NO: 253 - DNA, 25 bp, Homo sapiens
ctgaccttgtgtatggcctgagata

SEQ ID NO: 254 - DNA, 25 bp, Homo sapiens
ggtgcctctcctctctgcatgctga

SEQ ID NO: 255 - DNA, 25 bp, Homo sapiens
cccagcggagtcacagagcagttaa

SEQ ID NO: 256 - DNA, 25 bp, Homo sapiens
cttcatgtcaagctactcaggtgga

SEQ ID NO: 257 - DNA, 25 bp, Homo sapiens
ggccacccattctttgtcccagtta

SEQ ID NO: 258 - DNA, 25 bp, Homo sapiens
tcaaggaatctggatgctgtctaca

SEQ ID NO: 259 - DNA, 25 bp, Homo sapiens
acacagggccatgtcttgagaccta

SEQ ID NO: 260 - DNA, 25 bp, Homo sapiens
ctgtgggctccaatggacttttgtc

SEQ ID NO: 261 - DNA, 25 bp, Homo sapiens
tggactccctgctagccgggtttta

SEQ ID NO: 262 - DNA, 25 bp, Homo sapiens
tgccgatagagttggttcacacagc

SEQ ID NO: 263 - DNA, 25 bp, Homo sapiens
ctcccaaagagctggctggaaatta

SEQ ID NO: 264 - DNA, 25 bp, Homo sapiens
tgaaggcttacgcagggaatattcc

SEQ ID NO: 265 - DNA, 25 bp, Homo sapiens
gggtgctgggattatagctgtgagt

SEQ ID NO: 266 - DNA, 25 bp, Homo sapiens
ggtggttggtaatccctcctataaa

SEQ ID NO: 267 - DNA, 25 bp, Homo sapiens
cttggaacagaatgccgtgggcttc

SEQ ID NO: 268 - DNA, 25 bp, Homo sapiens
ggaaccctggactatgccctgaagc

SEQ ID NO: 269 - DNA, 25 bp, Homo sapiens
ccatctgctgagctgcgttttaata

SEQ ID NO: 270 - DNA, 25 bp, Homo sapiens
gccctggactaaagaaaacccatgt

SEQ ID NO: 271 - DNA, 25 bp, Homo sapiens
gcctctcctatgaggtgggcactca

SEQ ID NO: 272 - DNA, 25 bp, Homo sapiens
accctgtaaaggtgaaggctgcttc

SEQ ID NO: 273 - DNA, 25 bp, Homo sapiens
tgggctcaaggtctgcatatttttc

SEQ ID NO: 274 - DNA, 25 bp, Homo sapiens
aggtgctccctggtaatttgtgttc

SEQ ID NO: 275 - DNA, 25 bp, Homo sapiens
ccactgtgtcgggtttccatagctc

SEQ ID NO: 276 - DNA, 25 bp, Homo sapiens
ggaggtcccaggcaatgcactctga

SEQ ID NO: 277 - DNA, 25 bp, Homo sapiens
gcctcgtggagataaagacccattt

SEQ ID NO: 278 - DNA, 25 bp, Homo sapiens
tcccttcagcgtctaatgtcaaatg

SEQ ID NO: 279 - DNA, 25 bp, Homo sapiens
gtcacctaaggtgggctcgacatca

SEQ ID NO: 280 - DNA, 25 bp, Homo sapiens
tcaggaccaggggagttagactttc

SEQ ID NO: 281 - DNA, 25 bp, Homo sapiens
tgatgttccacagcatgcaccattg

SEQ ID NO: 282 - DNA, 25 bp, Homo sapiens
ctggaccttggttcgtgactttgac

SEQ ID NO: 283 - DNA, 25 bp, Homo sapiens
cttctttgggtggtaaaactacgta

SEQ ID NO: 284 - DNA, 25 bp, Homo sapiens
accatctgttaggagtctatgctgc

SEQ ID NO: 285 - DNA, 25 bp, Homo sapiens
tgcaacgtgctttgacctcattgtg

SEQ ID NO: 286 - DNA, 25 bp, Homo sapiens
gtgtgtacacacatgggcctgtttg

SEQ ID NO: 287 - DNA, 25 bp, Homo sapiens
gtgttgcctccgcttgatcattgta

SEQ ID NO: 288 - DNA, 25 bp, Homo sapiens
gtctgcccatggtgagtagccaata

SEQ ID NO: 289 - DNA, 25 bp, Homo sapiens
ggctggttttaatcacaaccttctg

SEQ ID NO: 290 - DNA, 25 bp, Homo sapiens
aatttcggaaaagcacagtggtctc

SEQ ID NO: 291 - DNA, 25 bp, Homo sapiens
atgtgctgctttttgctggactcta

SEQ ID NO: 292 - DNA, 25 bp, Homo sapiens
aaattctggtaactgggctgccctg

SEQ ID NO: 293 - DNA, 25 bp, Homo sapiens
gccctgttgtttgaccactccttcg

SEQ ID NO: 294 - DNA, 25 bp, Homo sapiens
ccatgaggcagtaggttttccattc

SEQ ID NO: 295 - DNA, 25 bp, Homo sapiens
cacgatcagtgtttgcctctcttca

SEQ ID NO: 296 - DNA, 25 bp, Homo sapiens
tctgctgctcccaaatgatgacata

SEQ ID NO: 297 - DNA, 25 bp, Homo sapiens
agagcccgtggctatctgttttgta

SEQ ID NO: 298 - DNA, 25 bp, Homo sapiens
caaacattcgtgcagggcctacttc

SEQ ID NO: 299 - DNA, 25 bp, Homo sapiens
taccagaattcagtgcagagccatc

SEQ ID NO: 300 - DNA, 25 bp, Homo sapiens
gactctgagtgggtggctatttttc

SEQ ID NO: 301 - DNA, 25 bp, Homo sapiens
cgcaacaggtgcatcttagggcttt

SEQ ID NO: 302 - DNA, 25 bp, Homo sapiens
gctgcctcccagatacgatgataaa

SEQ ID NO: 303 - DNA, 25 bp, Homo sapiens
tggccttcgatttcagtacacatga

SEQ ID NO: 304 - DNA, 25 bp, Homo sapiens
gaaagattccctcaaaatgtcactg

SEQ ID NO: 305 - DNA, 25 bp, Homo sapiens
cctcttgagttggtaagtatttttc

SEQ ID NO: 306 - DNA, 25 bp, Homo sapiens
cagcagccagagctgatattctatc

SEQ ID NO: 307 - DNA, 25 bp, Homo sapiens
cccatctgtgctgtgacaatgaaca

SEQ ID NO: 308 - DNA, 25 bp, Homo sapiens
tgggcacgcgcaaaagctgttcaga

SEQ ID NO: 309 - DNA, 25 bp, Homo sapiens
tggaggccactcttgataataatga

SEQ ID NO: 310 - DNA, 25 bp, Homo sapiens
ctgagcgtccagagcattttaattc

SEQ ID NO: 311 - DNA, 25 bp, Homo sapiens
acttgactccatcgactggccctta

SEQ ID NO: 312 - DNA, 25 bp, Homo sapiens
gccttgagctaagccgttgggtgca

SEQ ID NO: 313 - DNA, 25 bp, Homo sapiens
ggtcaccagcagtcattgctacatg

SEQ ID NO: 314 - DNA, 25 bp, Homo sapiens
agccaccctgtgtctccttgaggca

SEQ ID NO: 315 - DNA, 25 bp, Homo sapiens
ggtagtttctaacaggcagctatta

SEQ ID NO: 316 - DNA, 25 bp, Homo sapiens
caaaaagttgttggtagaaaatatg

SEQ ID NO: 317 - DNA, 25 bp, Homo sapiens
gtctagcctagtgaactgaccattc

SEQ ID NO: 318 - DNA, 25 bp, Homo sapiens
ccaggcctcatccatgttcaagatc

SEQ ID NO: 319 - DNA, 25 bp, Homo sapiens
agtgatcatctatgcacagtgctca

SEQ ID NO: 320 - DNA, 25 bp, Homo sapiens
gtcctgcagtccttctcttgtctga

SEQ ID NO: 321 - DNA, 25 bp, Homo sapiens
cagcagtcgggagttcttaattttc

SEQ ID NO: 322 - DNA, 25 bp, Homo sapiens
gcagctcattatttattgaattgga

SEQ ID NO: 323 - DNA, 25 bp, Homo sapiens
tccacaggcctcaagaaggggtttc

SEQ ID NO: 324 - DNA, 25 bp, Homo sapiens
caaagagctaggttcccacaggttc

SEQ ID NO: 325 - DNA, 25 bp, Homo sapiens
catcctgtgtgctgagttctatcta

SEQ ID NO: 326 - DNA, 25 bp, Homo sapiens
tgtagctgcgctaagtaacctttgc

SEQ ID NO: 327 - DNA, 25 bp, Homo sapiens
tgaggatctttgaggtccacgcttg

SEQ ID NO: 328 - DNA, 25 bp, Homo sapiens
ctgggcacctgaccttggaatgttc

SEQ ID NO: 329 - DNA, 25 bp, Homo sapiens
ctgagatgagcaatccacctttatc

SEQ ID NO: 330 - DNA, 25 bp, Homo sapiens
ccttttggatggcagtggtttcact

SEQ ID NO: 331 - DNA, 25 bp, Homo sapiens
ttctgaaggctgcagtctctggcta

SEQ ID NO: 332 - DNA, 25 bp, Homo sapiens
aaccagcggccatattgaaaacgtc

SEQ ID NO: 333 - DNA, 25 bp, Homo sapiens
ggccatccagtaataggaagtattt

SEQ ID NO: 334 - DNA, 25 bp, Homo sapiens
cactgtggaaaactgtgagaataca

SEQ ID NO: 335 - DNA, 25 bp, Homo sapiens
atgccattgcttgttcctcagagga

SEQ ID NO: 336 - DNA, 25 bp, Homo sapiens
ctctaggcattgacatgggttcttc

SEQ ID NO: 337 - DNA, 25 bp, Homo sapiens
cctgtgtgtgttcaatacctctctg

SEQ ID NO: 338 - DNA, 25 bp, Homo sapiens
gctaacaattgtctctgggttctga

SEQ ID NO: 339 - DNA, 25 bp, Homo sapiens
aggctcctgcctctgttcttgaaga

SEQ ID NO: 340 - DNA, 25 bp, Homo sapiens
ggcccttttcttgagcctctgcaga

SEQ ID NO: 341 - DNA, 25 bp, Homo sapiens
gcagcagtaggctctgtccttgtga

SEQ ID NO: 342 - DNA, 25 bp, Homo sapiens
ctgtcgaaactaatgctggaatctc

SEQ ID NO: 343 - DNA, 25 bp, Homo sapiens
cgtgtatgtgtctactcactctata

SEQ ID NO: 344 - DNA, 25 bp, Homo sapiens
ccattcagggctatgtacagttgca

SEQ ID NO: 345 - DNA, 25 bp, Homo sapiens
atgggctttttccacgagctgctga

SEQ ID NO: 346 - DNA, 25 bp, Homo sapiens
tccaggaggtagcttagacagttta

SEQ ID NO: 347 - DNA, 25 bp, Homo sapiens
gggctggcaaacctgctccttctta

SEQ ID NO: 348 - DNA, 25 bp, Homo sapiens
tttcacaggccagaaacttgtagtg

SEQ ID NO: 349 - DNA, 25 bp, Homo sapiens
gggttacaccactccagctgaaaga

SEQ ID NO: 350 - DNA, 25 bp, Homo sapiens
gccacagtgtgccatctcaaatttc

SEQ ID NO: 351 - DNA, 25 bp, Homo sapiens
cctcttgggcttgtctatgtgaatc

SEQ ID NO: 352 - DNA, 25 bp, Homo sapiens
cgccagttccgcaaggatgtgatta

SEQ ID NO: 353 - DNA, 25 bp, Homo sapiens
ctggcaccttggtgagaggtaactc

SEQ ID NO: 354 - DNA, 25 bp, Homo sapiens
cttggtaccagaaagaggactgctc

SEQ ID NO: 355 - DNA, 25 bp, Homo sapiens
gcacctcattgctggcggactcatg

SEQ ID NO: 356 - DNA, 25 bp, Homo sapiens
gcttggatgaaggaactttgccctc

SEQ ID NO: 357 - DNA, 25 bp, Homo sapiens
ccaacccactaactttaagttttta

SEQ ID NO: 358 - DNA, 25 bp, Homo sapiens
ggaagctcttgccttgggttcttta

SEQ ID NO: 359 - DNA, 25 bp, Homo sapiens
ctggagctttcttcttctggtgaca

SEQ ID NO: 360 - DNA, 25 bp, Homo sapiens
tgccctctgtagtgccttaaggata

SEQ ID NO: 361 - DNA, 25 bp, Homo sapiens
ggtcaggcagccttcatgataagtg

SEQ ID NO: 362 - DNA, 25 bp, Homo sapiens
caaaattaccaaaatgttgtgtaca

SEQ ID NO: 363 - DNA, 25 bp, Homo sapiens
acgcagttgtatacctagctccaga

SEQ ID NO: 364 - DNA, 25 bp, Homo sapiens
tgaaaacccgctccagtgtctgaaa

SEQ ID NO: 365 - DNA, 25 bp, Homo sapiens
ttttccaggagaggccaagtggctc

SEQ ID NO: 366 - DNA, 25 bp, Homo sapiens
ttcttagggagtatcagagcagccc

SEQ ID NO: 367 - DNA, 25 bp, Homo sapiens
ttgccctgattcctgtcctttctga

SEQ ID NO: 368 - DNA, 25 bp, Homo sapiens
ttctgtgtgcaagatcctgtcagtg

SEQ ID NO: 369 - DNA, 25 bp, Homo sapiens
ctctgcctcctctgctaggtaaata

SEQ ID NO: 370 - DNA, 25 bp, Homo sapiens
cccttggggttttgtgaccatagaa

SEQ ID NO: 371 - DNA, 25 bp, Homo sapiens
cacttagagagttttgcagaccaga

SEQ ID NO: 372 - DNA, 25 bp, Homo sapiens
cagatggaaatgtactaagccctta

SEQ ID NO: 373 - DNA, 25 bp, Homo sapiens
ctgctctggcttgttgagaaatttc

SEQ ID NO: 374 - DNA, 25 bp, Homo sapiens
cactatggagaatttgcctacaaca

SEQ ID NO: 375 - DNA, 25 bp, Homo sapiens
tataaaaaggtgaaaggaacaggca

SEQ ID NO: 376 - DNA, 25 bp, Homo sapiens
ggcagctacttcctgaggttgtaaa

SEQ ID NO: 377 - DNA, 25 bp, Homo sapiens
tttcagcaggttatgggtcaccatt

SEQ ID NO: 378 - DNA, 25 bp, Homo sapiens
cacctggtctgatgctgtttacaac

SEQ ID NO: 379 - DNA, 25 bp, Homo sapiens
ttcctgggaatgataattaagtctc

SEQ ID NO: 380 - DNA, 25 bp, Homo sapiens
taagtcacgttgctccaggaatgtc

SEQ ID NO: 381 - DNA, 25 bp, Homo sapiens
ttctccctgaaagccctgtgtccta

SEQ ID NO: 382 - DNA, 25 bp, Homo sapiens
tgaggtattcttctatgcacactgg

SEQ ID NO: 383 - DNA, 25 bp, Homo sapiens
aactccgggctgttgcaattgatgg

SEQ ID NO: 384 - DNA, 25 bp, Homo sapiens
tgtatccagattaggcagtgattcc

SEQ ID NO: 385 - DNA, 25 bp, Homo sapiens
cccagctatggtgtttcttgatgta

SEQ ID NO: 386 - DNA, 25 bp, Homo sapiens
tagtgagttctcatacccagtatgc

SEQ ID NO: 387 - DNA, 25 bp, Homo sapiens
ggagcttccctgtacgtgatttaca

SEQ ID NO: 388 - DNA, 25 bp, Homo sapiens
actccctgcttcgattgtgacacta

SEQ ID NO: 389 - DNA, 25 bp, Homo sapiens
ctaccaacctggcaacatgaatgtg

SEQ ID NO: 390 - DNA, 25 bp, Homo sapiens
tgtaatctagattcttaaggcgtgc

SEQ ID NO: 391 - DNA, 25 bp, Homo sapiens
cctctagcgtttggaagcacgattt

SEQ ID NO: 392 - DNA, 25 bp, Homo sapiens
ccagagtctagatgggacttcgtta

SEQ ID NO: 393 - DNA, 25 bp, Homo sapiens
gagtttgtctcacctagacctgata

SEQ ID NO: 394 - DNA, 25 bp, Homo sapiens
cccagctggtgattcatgatgtaaa

SEQ ID NO: 395 - DNA, 25 bp, Homo sapiens
gctgttttctgactaggtggcccta

SEQ ID NO: 396 - DNA, 25 bp, Homo sapiens
gaaaaccgatggatgcactgctcta

SEQ ID NO: 397 - DNA, 25 bp, Homo sapiens
ctgaagttcaaaacagcacatattg

SEQ ID NO: 398 - DNA, 25 bp, Homo sapiens
tttcttcagtataagaggaagactg

SEQ ID NO: 399 - DNA, 25 bp, Homo sapiens
agtctgtcagttccttgggtcataa

SEQ ID NO: 400 - DNA, 25 bp, Homo sapiens
gggttcactttcctcctttttgcta

SEQ ID NO: 401 - DNA, 25 bp, Homo sapiens
tcgatattttggagttgtagaattt

SEQ ID NO: 402 - DNA, 25 bp, Homo sapiens
cttggggtcctcaaatggttacatc

SEQ ID NO: 403 - DNA, 25 bp, Homo sapiens
cggcaggatgtttgcaaaatgacta

SEQ ID NO: 404 - DNA, 25 bp, Homo sapiens
ctgctgctctaaatgatccggccta

SEQ ID NO: 405 - DNA, 25 bp, Homo sapiens
tctaggctttcattgccatgtaagc

SEQ ID NO: 406 - DNA, 25 bp, Homo sapiens
ggtgattggccagttcctaattttc

SEQ ID NO: 407 - DNA, 25 bp, Homo sapiens
gccaagattttgactacagagtttc

SEQ ID NO: 408 - DNA, 25 bp, Homo sapiens
cagtttggtgtctcacagtgtgata

SEQ ID NO: 409 - DNA, 25 bp, Homo sapiens
acatctgggtagtcatgccttttga

SEQ ID NO: 410 - DNA, 25 bp, Homo sapiens
gaggagccactgcacgtgcctttta

SEQ ID NO: 411 - DNA, 25 bp, Homo sapiens
tccagttgcctgagatcggagcttc

SEQ ID NO: 412 - DNA, 25 bp, Homo sapiens
ccagcgctctagttcagcatgttta

SEQ ID NO: 413 - DNA, 25 bp, Homo sapiens
tttgcacggaatatcaggttactta

SEQ ID NO: 414 - DNA, 25 bp, Homo sapiens
ccagagattagttttagttgcagca

SEQ ID NO: 415 - DNA, 25 bp, Homo sapiens
gccttcagctgaaccaccgtttgtg

SEQ ID NO: 416 - DNA, 25 bp, Homo sapiens
gggcctgactacaccgacactaatt

SEQ ID NO: 417 - DNA, 25 bp, Homo sapiens
ccgcagcgccctttgttgagaggta

SEQ ID NO: 418 - DNA, 25 bp, Homo sapiens
gaccgatcagaaatccctgggattg

SEQ ID NO: 419 - DNA, 25 bp, Homo sapiens
cctccactgaggtttgattgttctc

SEQ ID NO: 420 - DNA, 25 bp, Homo sapiens
ggctttgccctctcctcttcttgta

SEQ ID NO: 421 - DNA, 25 bp, Homo sapiens
aattgttttccctgcgcgtcgcgta

SEQ ID NO: 422 - DNA, 25 bp, Homo sapiens
acctggagaccagcaagtattgtcc

SEQ ID NO: 423 - DNA, 25 bp, Homo sapiens
gctgccaatggctctaatgaagata

SEQ ID NO: 424 - DNA, 25 bp, Homo sapiens
cctggagaagggtaagtagcatatc

SEQ ID NO: 425 - DNA, 25 bp, Homo sapiens
tctgtatgcctaaaagcgggtacta

SEQ ID NO: 426 - DNA, 25 bp, Homo sapiens
acagtcccattgtaagtgttgtttc

SEQ ID NO: 427 - DNA, 25 bp, Homo sapiens
gccggccgttaattgcactgcattg

SEQ ID NO: 428 - DNA, 25 bp, Homo sapiens
ccagccttgcagagaatcagatttg

SEQ ID NO: 429 - DNA, 25 bp, Homo sapiens
cttaggttctagtgcccggtggaaa

SEQ ID NO: 430 - DNA, 25 bp, Homo sapiens
ctcccgctgggctcgtttaatagaa

SEQ ID NO: 431 - DNA, 25 bp, Homo sapiens
gccgaggcttcgaggttttcatgaa

SEQ ID NO: 432 - DNA, 25 bp, Homo sapiens
gcgcttggtaacagtggctttcctc

SEQ ID NO: 433 - DNA, 25 bp, Homo sapiens
ctttacagctggacaggaatgctta

SEQ ID NO: 434 - DNA, 25 bp, Homo sapiens
ggggttttcctcaaactgtcccatc

SEQ ID NO: 435 - DNA, 25 bp, Homo sapiens
gtgccaccgtgtcctcgaatttagc

SEQ ID NO: 436 - DNA, 25 bp, Homo sapiens
agacaccgcgaagctgctctttgga

SEQ ID NO: 437 - DNA, 25 bp, Homo sapiens
gaggcgcgatgcaccatttaagata

SEQ ID NO: 438 - DNA, 25 bp, Homo sapiens
ttgcaagttgttcagctaatggttc

SEQ ID NO: 439 - DNA, 25 bp, Homo sapiens
gggacccgactaaacacacttattc

SEQ ID NO: 440 - DNA, 25 bp, Homo sapiens
taccacggcaatctggggtcgcttt

SEQ ID NO: 441 - DNA, 25 bp, Homo sapiens
atggcgcgttccttctactcctcag

SEQ ID NO: 442 - DNA, 25 bp, Homo sapiens
gtgtgtgtatgcacccgtactcctc

SEQ ID NO: 443 - DNA, 25 bp, Homo sapiens
gcccggccagttttctttcttaata

SEQ ID NO: 444 - DNA, 25 bp, Homo sapiens
tgtttgaaccattacctcttgcagc

SEQ ID NO: 445 - DNA, 25 bp, Homo sapiens
gccaaggagctatacacattctgtc

SEQ ID NO: 446 - DNA, 25 bp, Homo sapiens
gactgctctcctgggcttttgaaaa

SEQ ID NO: 447 - DNA, 25 bp, Homo sapiens
taggtgctagatatgaaatttcagg

SEQ ID NO: 448 - DNA, 25 bp, Homo sapiens
ctggacttctggttgcttggacaca

SEQ ID NO: 449 - DNA, 25 bp, Homo sapiens
accggagagcatagacgcgagccat

SEQ ID NO: 450 - DNA, 25 bp, Homo sapiens
agctctggcctagagaggtttatta

SEQ ID NO: 451 - DNA, 25 bp, Homo sapiens
aaagcctctaactatgggaccattg

SEQ ID NO: 452 - DNA, 25 bp, Homo sapiens
agaactgatttctttagcattttta

SEQ ID NO: 453 - DNA, 25 bp, Homo sapiens
ctgaaggcccagtttgcagaaactt

SEQ ID NO: 454 - DNA, 25 bp, Homo sapiens
gtgatgtcgtttgctccttactaga

SEQ ID NO: 455 - DNA, 25 bp, Homo sapiens
ttcccttgggtatatggaatagtta

SEQ ID NO: 456 - DNA, 25 bp, Homo sapiens
gctcgacgataatgacaatacaatg

SEQ ID NO: 457 - DNA, 25 bp, Homo sapiens
atggcttctcgacctttggctaaga

SEQ ID NO: 458 - DNA, 25 bp, Homo sapiens
tgtcttggccagttaggtacttcta

SEQ ID NO: 459 - DNA, 25 bp, Homo sapiens
acctagggatagagctttcttgaca

SEQ ID NO: 460 - DNA, 25 bp, Homo sapiens
gggctttcttcctcttggactctta

SEQ ID NO: 461 - DNA, 25 bp, Homo sapiens
gtgagtgtcacagccacatatttcc

SEQ ID NO: 462 - DNA, 25 bp, Homo sapiens
gcagcctgggcacttagatatattg

SEQ ID NO: 463 - DNA, 25 bp, Homo sapiens
tggacgatatgacgtgtgcacattg

SEQ ID NO: 464 - DNA, 25 bp, Homo sapiens
tagatactctctcaggcaggtgccc

SEQ ID NO: 465 - DNA, 25 bp, Homo sapiens
gccgatgggcattacctgacttttc

SEQ ID NO: 466 - DNA, 25 bp, Homo sapiens
tgcttccaatgaatggccgtctgtg

SEQ ID NO: 467 - DNA, 25 bp, Homo sapiens
aaggccctgcagacagccgtcttta

SEQ ID NO: 468 - DNA, 25 bp, Homo sapiens
agacctcgtgtgtgggactttataa

SEQ ID NO: 469 - DNA, 25 bp, Homo sapiens
ggggaggagcccacttttatttaca

SEQ ID NO: 470 - DNA, 25 bp, Homo sapiens
acctctagcgtttttggtgtcactg

SEQ ID NO: 471 - DNA, 25 bp, Homo sapiens
atgtgctagtaattctgtggtctta

SEQ ID NO: 472 - DNA, 25 bp, Homo sapiens
ctgctgaccagggaccacgtttata

SEQ ID NO: 473 - DNA, 25 bp, Homo sapiens
cgttactcgattcagcttggtctca

SEQ ID NO: 474 - DNA, 25 bp, Homo sapiens
cagttgtaaacagctgggttagacc

SEQ ID NO: 475 - DNA, 25 bp, Homo sapiens
gggccacctaactgcaaagaaatga

SEQ ID NO: 476 - DNA, 25 bp, Homo sapiens
aggggcattcctgtctgctctcttc

SEQ ID NO: 477 - DNA, 25 bp, Homo sapiens
aggcccagcagtagctatatgtatg

SEQ ID NO: 478 - DNA, 25 bp, Homo sapiens
tcctggctctgctctgtacttgtag

SEQ ID NO: 479 - DNA, 25 bp, Homo sapiens
gctaggcccactttaggtccttgga

SEQ ID NO: 480 - DNA, 25 bp, Homo sapiens
gcttgcctgtctcccattatctgta

SEQ ID NO: 481 - DNA, 25 bp, Homo sapiens
tcggccctcagtgatattgcaaagc

SEQ ID NO: 482 - DNA, 25 bp, Homo sapiens
cagctctcagtcaggtttcaaaaca

SEQ ID NO: 483 - DNA, 25 bp, Homo sapiens
cagccctaggcttagagtctacatg

SEQ ID NO: 484 - DNA, 25 bp, Homo sapiens
ctctggacgaatgcttcaaagcctg

SEQ ID NO: 485 - DNA, 25 bp, Homo sapiens
tcattatgaggattgttggggcagg

SEQ ID NO: 486 - DNA, 25 bp, Homo sapiens
gcatgaccattcgagtgtgagctta

SEQ ID NO: 487 - DNA, 25 bp, Homo sapiens
cacccggtttgccagaaagccttta

SEQ ID NO: 488 - DNA, 25 bp, Homo sapiens
gtgtcactcaaaaatggcagtcttg

SEQ ID NO: 489 - DNA, 25 bp, Homo sapiens
tccgctgggttcactagatccactc

SEQ ID NO: 490 - DNA, 25 bp, Homo sapiens
ccgcacaggtctctatcaatctatg

SEQ ID NO: 491 - DNA, 25 bp, Homo sapiens
caccatggatggtgagaacctcata

SEQ ID NO: 492 - DNA, 25 bp, Homo sapiens
ggtgtcacatccaggtagcatagta

SEQ ID NO: 493 - DNA, 25 bp, Homo sapiens
ccattttttataacaagtctagttc

SEQ ID NO: 494 - DNA, 25 bp, Homo sapiens
gggcagtggagctcagcaaattaac

SEQ ID NO: 495 - DNA, 25 bp, Homo sapiens
gggtgccacccttttgctttgactc

SEQ ID NO: 496 - DNA, 25 bp, Homo sapiens
tcactctgtgtgtggctaaagcttc

SEQ ID NO: 497 - DNA, 25 bp, Homo sapiens
tctggctgatgaagtaggctaattc

SEQ ID NO: 498 - DNA, 25 bp, Homo sapiens
ggcctcttgtctcactggggtatta

SEQ ID NO: 499 - DNA, 25 bp, Homo sapiens
gctgtctttcttccctttgcccata

SEQ ID NO: 500 - DNA, 25 bp, Homo sapiens
agcaactgcttttcttcctaactga

SEQ ID NO: 501 - DNA, 25 bp, Homo sapiens
gtgccatgatttagagcaactggta

SEQ ID NO: 502 - DNA, 25 bp, Homo sapiens
aagatattaagaactatctattttg

SEQ ID NO: 503 - DNA, 25 bp, Homo sapiens
gcactgcttggctcttctacagaca

SEQ ID NO: 504 - DNA, 25 bp, Homo sapiens
gcttgcaacctttagactcaatcaa

SEQ ID NO: 505 - DNA, 25 bp, Homo sapiens
gcacctaataggtaggaaataaatg

SEQ ID NO: 506 - DNA, 25 bp, Homo sapiens
ctgcagtggtaatcaagagaggaat

SEQ ID NO: 507 - DNA, 25 bp, Homo sapiens
acggctgagtgaggagttatacaac

SEQ ID NO: 508 - DNA, 25 bp, Homo sapiens
agcattcctccacgatctgattttt

SEQ ID NO: 509 - DNA, 25 bp, Homo sapiens
ccatggatatactggagaagcaccc

SEQ ID NO: 510 - DNA, 25 bp, Homo sapiens
agcttagggttgttgctgccatttc

SEQ ID NO: 511 - DNA, 25 bp, Homo sapiens
cccgagggattttccggaaggcact

SEQ ID NO: 512 - DNA, 25 bp, Homo sapiens
agaattagaagcaatctatagtttc

SEQ ID NO: 513 - DNA, 25 bp, Homo sapiens
tgtaatccatccacagattagaata

SEQ ID NO: 514 - DNA, 25 bp, Homo sapiens
atatacatataatccataaagacag

SEQ ID NO: 515 - DNA, 25 bp, Homo sapiens
tgaaattaaaaatattacatgccta

SEQ ID NO: 516 - DNA, 25 bp, Homo sapiens
ccaacagagggcataaaatctttta

SEQ ID NO: 517 - DNA, 25 bp, Homo sapiens
cctgttggcaatcaaacgcaaacga

SEQ ID NO: 518 - DNA, 25 bp, Homo sapiens
gcagaacacgtgatagggtacaact

SEQ ID NO: 519 - DNA, 25 bp, Homo sapiens
cttaggaaatacaggagagaggttt

SEQ ID NO: 520 - DNA, 25 bp, Homo sapiens
tcattgatcaaggacagagcatttc

SEQ ID NO: 521 - DNA, 25 bp, Homo sapiens
gggcttgttttttccttcatgttta

SEQ ID NO: 522 - DNA, 25 bp, Homo sapiens
ccacatttttgagtgccagtccaca

SEQ ID NO: 523 - DNA, 25 bp, Homo sapiens
tatgtcatctggagggcaacccttc

SEQ ID NO: 524 - DNA, 25 bp, Homo sapiens
ctttcccagaactgacccaagtgta

SEQ ID NO: 525 - DNA, 25 bp, Homo sapiens
tgggggaaacagtgacattatatat

SEQ ID NO: 526 - DNA, 25 bp, Homo sapiens
gcacaagatcctagtgaattacaca

SEQ ID NO: 527 - DNA, 25 bp, Homo sapiens
acaaactcacaacactccatatttc

SEQ ID NO: 528 - DNA, 25 bp, Homo sapiens
gacttctccttaccttctcttttga

SEQ ID NO: 529 - DNA, 25 bp, Homo sapiens
tgaaggttctcccataaaaatctaa

SEQ ID NO: 530 - DNA, 25 bp, Homo sapiens
cttctgaaggatacagcactgagcc

SEQ ID NO: 531 - DNA, 25 bp, Homo sapiens
cccaaagagagcaggattttttaat

SEQ ID NO: 532 - DNA, 25 bp, Homo sapiens
ggaccgtgattttggatcaccttga

SEQ ID NO: 533 - DNA, 25 bp, Homo sapiens
tctcaggctctatgttcaaagtatg

SEQ ID NO: 534 - DNA, 25 bp, Homo sapiens
ggaggatttaatctactgctatctt

SEQ ID NO: 535 - DNA, 25 bp, Homo sapiens
tctctctcagggatgcttgtgtctc

SEQ ID NO: 536 - DNA, 25 bp, Homo sapiens
tatgcagtgactctatccttttttg

SEQ ID NO: 537 - DNA, 25 bp, Homo sapiens
agccttcagtgtaaattgagggtcc

SEQ ID NO: 538 - DNA, 25 bp, Homo sapiens
cgggtccaatcgattctgtgccatt

SEQ ID NO: 539 - DNA, 25 bp, Homo sapiens
tactagagtcaattcctttcgagtg

SEQ ID NO: 540 - DNA, 25 bp, Homo sapiens
tttgaatcatttcaattcaactgcg

SEQ ID NO: 541 - DNA, 25 bp, Homo sapiens
gtcgtgataattccaacccttttca

SEQ ID NO: 542 - DNA, 25 bp, Homo sapiens
tattctatcccatcccattcgagtc

SEQ ID NO: 543 - DNA, 25 bp, Homo sapiens
ttttagagtccattccattaaatcc

SEQ ID NO: 544 - DNA, 25 bp, Homo sapiens
aagtccatttcttttcattcaattc

SEQ ID NO: 545 - DNA, 25 bp, Homo sapiens
cattctattccattcgagtcccttc

SEQ ID NO: 546 - DNA, 25 bp, Homo sapiens
tatcgagtccattgcatttaactgc

SEQ ID NO: 547 - DNA, 25 bp, Homo sapiens
agtccataccattccatttcttttg

SEQ ID NO: 548 - DNA, 25 bp, Homo sapiens
attgggcacattccattaaatttca

SEQ ID NO: 549 - DNA, 25 bp, Homo sapiens
tgtacattcccttccattgaattgg

SEQ ID NO: 550 - DNA, 25 bp, Homo sapiens
gaatccattgcattcctttccatta

SEQ ID NO: 551 - DNA, 25 bp, Homo sapiens
gggtacttccattctattccattgg

SEQ ID NO: 552 - DNA, 25 bp, Homo sapiens
agagtaaattccattaaattcccta

SEQ ID NO: 553 - DNA, 25 bp, Homo sapiens
aagtacattcaaatccattcctttc

SEQ ID NO: 554 - DNA, 25 bp, Homo sapiens
acatttgaaaccattctttgcattc

SEQ ID NO: 555 - DNA, 25 bp, Homo sapiens
caactttactctttattctcaaact

SEQ ID NO: 556 - DNA, 25 bp, Homo sapiens
cccaatgtcgtgctgaccaatttga

SEQ ID NO: 557 - DNA, 25 bp, Homo sapiens
ccagtgcccttctagggagaatata

SEQ ID NO: 558 - DNA, 25 bp, Homo sapiens
gctgcacactcaaaactaaggccga

SEQ ID NO: 559 - DNA, 25 bp, Homo sapiens
aactattaaaaatgacaaaggttca

SEQ ID NO: 560 - DNA, 25 bp, Homo sapiens
ctgtgaacaccggatgccttttatc

SEQ ID NO: 561 - DNA, 25 bp, Homo sapiens
gtctaccatgagtaccaggcaaatg

SEQ ID NO: 562 - DNA, 25 bp, Homo sapiens
agtgccagtgccttagttctcccta

SEQ ID NO: 563 - DNA, 25 bp, Homo sapiens
agctttgccgcatgcttcacatttg

SEQ ID NO: 564 - DNA, 25 bp, Homo sapiens
cagggtttctctcccgtatgaattc

SEQ ID NO: 565 - DNA, 25 bp, Homo sapiens
tgctctgagtaaccgacaaacattg

SEQ ID NO: 566 - DNA, 25 bp, Homo sapiens
gataggctcccagaatctctagttg

SEQ ID NO: 567 - DNA, 25 bp, Homo sapiens
aatcctgtagcattatcataatacc

SEQ ID NO: 568 - DNA, 25 bp, Homo sapiens
ttaatattcagcatgatcaaagggt

SEQ ID NO: 569 - DNA, 25 bp, Homo sapiens
tttctcccacacaaaaatagattcc

SEQ ID NO: 570 - DNA, 25 bp, Homo sapiens
tgctgaacagccttaaaaaactaca

SEQ ID NO: 571 - DNA, 25 bp, Homo sapiens
gaacttggtgtactctgttaggaca

SEQ ID NO: 572 - DNA, 25 bp, Homo sapiens
gtaatatattcttgctcaaggtcca

SEQ ID NO: 573 - DNA, 25 bp, Homo sapiens
ttcaaagaacctggaagatatattt

SEQ ID NO: 574 - DNA, 25 bp, Homo sapiens
cacctggtgaatataccactatttc

SEQ ID NO: 575 - DNA, 25 bp, Homo sapiens
aaaatccacaatacacacctacata

SEQ ID NO: 576 - DNA, 25 bp, Homo sapiens
tttgctccagacaggtgaccaggtc

SEQ ID NO: 577 - DNA, 25 bp, Homo sapiens
taaaataagattgtcttgaaaacag

SEQ ID NO: 578 - DNA, 25 bp, Homo sapiens
ccgcatggagttgatggagcacaca

SEQ ID NO: 579 - DNA, 25 bp, Homo sapiens
ggccctgtgacctccctttggaata

SEQ ID NO: 580 - DNA, 25 bp, Homo sapiens
tggaatgtctctacaagcactggtt

SEQ ID NO: 581 - DNA, 25 bp, Homo sapiens
ccagaacctggatctacgtgtgata

SEQ ID NO: 582 - DNA, 25 bp, Homo sapiens
cctttgccaaatcaaaagcaaaagc

SEQ ID NO: 583 - DNA, 25 bp, Homo sapiens
tcaccctgggagaactggaatcaca

SEQ ID NO: 584 - DNA, 25 bp, Homo sapiens
ctgggctctgtagcttctctcagta

SEQ ID NO: 585 - DNA, 25 bp, Homo sapiens
aacctttctacactcactctgggga

SEQ ID NO: 586 - DNA, 25 bp, Homo sapiens
cctgctcccttgagaggctacattc

SEQ ID NO: 587 - DNA, 25 bp, Homo sapiens
ctgtgcttttttctcacgtgaaatg

SEQ ID NO: 588 - DNA, 25 bp, Homo sapiens
tgctcaccgagtcgagattctcccg

SEQ ID NO: 589 - DNA, 25 bp, Homo sapiens
ctggccctagtcttttgagcaagca

SEQ ID NO: 590 - DNA, 25 bp, Homo sapiens
tgtttttgaatcctaccaggctgtc

SEQ ID NO: 591 - DNA, 25 bp, Homo sapiens
cacttccgtaatagaggtcagactc

SEQ ID NO: 592 - DNA, 25 bp, Homo sapiens
caaagtgctcccaaagtgcttgcat

SEQ ID NO: 593 - DNA, 25 bp, Homo sapiens
gagaaaggaaccaatcaattaagca

SEQ ID NO: 594 - DNA, 25 bp, Homo sapiens
gaactctcacactgacatagctaat

SEQ ID NO: 595 - DNA, 25 bp, Homo sapiens
tggtgacttctaaaggggcaatttc

SEQ ID NO: 596 - DNA, 25 bp, Homo sapiens
gcctgatgaggcataaatgaccaac

SEQ ID NO: 597 - DNA, 25 bp, Homo sapiens
aggcggggaaaaaatggggtgggta

SEQ ID NO: 598 - DNA, 25 bp, Homo sapiens
aacgggctcatgtctctgatttcca

SEQ ID NO: 599 - DNA, 25 bp, Homo sapiens
agcctcttcactgtggccctgaatg

SEQ ID NO: 600 - DNA, 25 bp, Homo sapiens
agagatacactgcttcctaaggata

SEQ ID NO: 601 - DNA, 25 bp, Homo sapiens
ttccgcgtgcaggactgtcatcagc

SEQ ID NO: 602 - DNA, 25 bp, Homo sapiens
ccgttacaggaatgacgcaaaattg

SEQ ID NO: 603 - DNA, 25 bp, Homo sapiens
caggcttctgaagggctcctagatc

SEQ ID NO: 604 - DNA, 25 bp, Homo sapiens
acctgcccagtttcagtgacattta

SEQ ID NO: 605 - DNA, 25 bp, Homo sapiens
tgtggtttaagtcaccctctgtaca

SEQ ID NO: 606 - DNA, 25 bp, Homo sapiens
cctgcatccaggctaacatgtggga

SEQ ID NO: 607 - DNA, 25 bp, Homo sapiens
tgctgcttggcactatgaaaacatc

SEQ ID NO: 608 - DNA, 25 bp, Homo sapiens
gagacccattcttggcagcactgta

SEQ ID NO: 609 - DNA, 25 bp, Homo sapiens
cagtatttgagacgcgcacacctta

SEQ ID NO: 610 - DNA, 25 bp, Homo sapiens
cgcgattatctcacgtgctttcaaa

SEQ ID NO: 611 - DNA, 25 bp, Homo sapiens
cggggcaggaatactctttacattt

SEQ ID NO: 612 - DNA, 25 bp, Homo sapiens
tttaccggcgcagcaaattttctga

SEQ ID NO: 613 - DNA, 25 bp, Homo sapiens
cccaccggattagctgcaggttttg

SEQ ID NO: 614 - DNA, 25 bp, Homo sapiens
tgtgaatgcatacattctgaaagac

SEQ ID NO: 615 - DNA, 25 bp, Homo sapiens
agcttgcagtagtcctcattccaca

SEQ ID NO: 616 - DNA, 25 bp, Homo sapiens
tgggattcctctacacctgccaggc

SEQ ID NO: 617 - DNA, 25 bp, Homo sapiens
tgttggggccaaatacctgcatttc

SEQ ID NO: 618 - DNA, 25 bp, Homo sapiens
ggggcttgtcccttaaatgataata

SEQ ID NO: 619 - DNA, 25 bp, Homo sapiens
tgcagcttctcgagaggactgtatc

SEQ ID NO: 620 - DNA, 25 bp, Homo sapiens
ttgtgcccatgtgtcacttacgata

SEQ ID NO: 621 - DNA, 25 bp, Homo sapiens
tgcgggcacgaaacagatacaaatc

SEQ ID NO: 622 - DNA, 25 bp, Homo sapiens
tgcctgtaagtattgaccctcccta

SEQ ID NO: 623 - DNA, 25 bp, Homo sapiens
tgaagctgtcactcattcacaagga

SEQ ID NO: 624 - DNA, 25 bp, Homo sapiens
tcctagcggctctgaaattcaaatc

SEQ ID NO: 625 - DNA, 25 bp, Homo sapiens
tgcagtgctgacaaggcagtatacc

SEQ ID NO: 626 - DNA, 25 bp, Homo sapiens
tgcaaaagtgatcccaatgagttcc

SEQ ID NO: 627 - DNA, 25 bp, Homo sapiens
tgagcgtaaacttgcctctttgttg

SEQ ID NO: 628 - DNA, 25 bp, Homo sapiens
cttcatctcagggtgctctcaaaga

SEQ ID NO: 629 - DNA, 25 bp, Homo sapiens
gggctgctaggccaccaacaagtga

SEQ ID NO: 630 - DNA, 25 bp, Homo sapiens
gctgtacctgctgcctctcatttta

SEQ ID NO: 631 - DNA, 25 bp, Homo sapiens
taaataaataaactacggcattcct

SEQ ID NO: 632 - DNA, 25 bp, Homo sapiens
ggccacctgtcgacccatctgataa

SEQ ID NO: 633 - DNA, 25 bp, Homo sapiens
agccaggggctacttactgcatttg

SEQ ID NO: 634 - DNA, 25 bp, Homo sapiens
gaactactttctggccaggcaccta

SEQ ID NO: 635 - DNA, 25 bp, Homo sapiens
aaattctaaccagaaataacttact

SEQ ID NO: 636 - DNA, 25 bp, Homo sapiens
gttgggctccaaaggtatatctata

SEQ ID NO: 637 - DNA, 25 bp, Homo sapiens
ggctttccttacaccaccaagtgga

SEQ ID NO: 638 - DNA, 25 bp, Homo sapiens
tctgcagccctagccatgacatttc

SEQ ID NO: 639 - DNA, 25 bp, Homo sapiens
cctaggctgaggctatgctgcactt

SEQ ID NO: 640 - DNA, 25 bp, Homo sapiens
tggggccctagctctactctcaata

SEQ ID NO: 641 - DNA, 25 bp, Homo sapiens
tgatgtggattttaaaatgcctccc

SEQ ID NO: 642 - DNA, 25 bp, Homo sapiens
agcagtgccttcctcctggcagaga

SEQ ID NO: 643 - DNA, 25 bp, Homo sapiens
gaccatgtcattccagagatatttc

SEQ ID NO: 644 - DNA, 25 bp, Homo sapiens
ccctcaggacctagtggctacaatc

SEQ ID NO: 645 - DNA, 25 bp, Homo sapiens
tggaaaggaaactagcatgccattc

SEQ ID NO: 646 - DNA, 25 bp, Homo sapiens
gtcgggctttccagacatgatgata

SEQ ID NO: 647 - DNA, 25 bp, Homo sapiens
gccaccaggtatggagaagtcctta

SEQ ID NO: 648 - DNA, 25 bp, Homo sapiens
tcccattaggcaagagccgatcatc

SEQ ID NO: 649 - DNA, 25 bp, Homo sapiens
cctccttcatgggactgattctcag

SEQ ID NO: 650 - DNA, 25 bp, Homo sapiens
tgcctggggcaccaatctgaatctg

SEQ ID NO: 651 - DNA, 25 bp, Homo sapiens
gagctggcttccctacctgaaattc

SEQ ID NO: 652 - DNA, 25 bp, Homo sapiens
cagcactgttttatcctggtccagc

SEQ ID NO: 653 - DNA, 25 bp, Homo sapiens
ataagatgtaactattttgtatgta

SEQ ID NO: 654 - DNA, 25 bp, Homo sapiens
aggagtgctccttccttctgggttc

SEQ ID NO: 655 - DNA, 25 bp, Homo sapiens
gggacttgggccataccagtgttta

SEQ ID NO: 656 - DNA, 25 bp, Homo sapiens
tggagctggcactgatgtcatcacc

SEQ ID NO: 657 - DNA, 25 bp, Homo sapiens
tgaaactgtttgctatcacagcatg

SEQ ID NO: 658 - DNA, 25 bp, Homo sapiens
taaaaattgattctatttcttctta

SEQ ID NO: 659 - DNA, 25 bp, Homo sapiens
gtgtccttgaatgcccacgagttta

SEQ ID NO: 660 - DNA, 25 bp, Homo sapiens
ctcatttcagtctggggccacattc

SEQ ID NO: 661 - DNA, 25 bp, Homo sapiens
caggagcccgtttctttcttgaatc

SEQ ID NO: 662 - DNA, 25 bp, Homo sapiens
ggcgactttggagcggcctcatata

SEQ ID NO: 663 - DNA, 25 bp, Homo sapiens
gccaggtttccatgaactcccagtt

SEQ ID NO: 664 - DNA, 25 bp, Homo sapiens
ggggagtaacacaccacatgaattc

SEQ ID NO: 665 - DNA, 25 bp, Homo sapiens
gccctttgtggtgcatctaataaaa

SEQ ID NO: 666 - DNA, 25 bp, Homo sapiens
gcagcctgcaacatgcgggagctca

SEQ ID NO: 667 - DNA, 25 bp, Homo sapiens
ttctggtgctcatcacaaggctgca

SEQ ID NO: 668 - DNA, 25 bp, Homo sapiens
tgagtttgtcccatcccagagcaga

SEQ ID NO: 669 - DNA, 25 bp, Homo sapiens
cacagcagttgcatcctattgaata

SEQ ID NO: 670 - DNA, 25 bp, Homo sapiens
ggtgcagttccaagtcccaattcca

SEQ ID NO: 671 - DNA, 25 bp, Homo sapiens
tgggctaacacaacaggctccagtg

SEQ ID NO: 672 - DNA, 25 bp, Homo sapiens
tcaaatgtggaaactgcccatacgg

SEQ ID NO: 673 - DNA, 25 bp, Homo sapiens
agggcttaatttatccctaagtcca

SEQ ID NO: 674 - DNA, 25 bp, Homo sapiens
cagcctctcttagtcggtacggtga

SEQ ID NO: 675 - DNA, 25 bp, Homo sapiens
gctggcacagcattagacaactata

SEQ ID NO: 676 - DNA, 25 bp, Homo sapiens
aagggctccttcctgacagttcata

SEQ ID NO: 677 - DNA, 25 bp, Homo sapiens
tgtatcctagatccacagtgccggc

SEQ ID NO: 678 - DNA, 25 bp, Homo sapiens
cccatcatataccagcagtgcactt

SEQ ID NO: 679 - DNA, 25 bp, Homo sapiens
gcgaactgtcatctgggtgatcaca

SEQ ID NO: 680 - DNA, 25 bp, Homo sapiens
cagcaggggcatgttgcaaatcaca

SEQ ID NO: 681 - DNA, 25 bp, Homo sapiens
tttcatcaacgcccatatttctgcc

SEQ ID NO: 682 - DNA, 25 bp, Homo sapiens
cagtttgtccattaacttgctgagc

SEQ ID NO: 683 - DNA, 25 bp, Homo sapiens
ccctcttggtgccagcagacacata

SEQ ID NO: 684 - DNA, 25 bp, Homo sapiens
cccactggcacttcctaaggtctaa

SEQ ID NO: 685 - DNA, 25 bp, Homo sapiens
ttcaaaaatcctgctggtgggctcc

SEQ ID NO: 686 - DNA, 25 bp, Homo sapiens
acttacggatgttgagccaggtttc

SEQ ID NO: 687 - DNA, 25 bp, Homo sapiens
acgaggttttcccacattcatgaca

SEQ ID NO: 688 - DNA, 25 bp, Homo sapiens
atccaggctccaattgtgtgtgttg

SEQ ID NO: 689 - DNA, 25 bp, Homo sapiens
ccaactatgttcctggcagccatta

SEQ ID NO: 690 - DNA, 25 bp, Homo sapiens
ggctccttgcctgtctccaatttga

SEQ ID NO: 691 - DNA, 25 bp, Homo sapiens
agcatgtcttacctgtgatgagata

SEQ ID NO: 692 - DNA, 25 bp, Homo sapiens
caggccatgcagctcttggaatgtc

SEQ ID NO: 693 - DNA, 25 bp, Homo sapiens
ggagataaattccattctacaatga

SEQ ID NO: 694 - DNA, 25 bp, Homo sapiens
tcagtccagttgactaagatgaagt

SEQ ID NO: 695 - DNA, 25 bp, Homo sapiens
attggcagagtggacaaatttcttc

SEQ ID NO: 696 - DNA, 25 bp, Homo sapiens
caaagtagtggcttcacaacctgga

SEQ ID NO: 697 - DNA, 25 bp, Homo sapiens
ttgctgatgcctgtgccaaagtgga

SEQ ID NO: 698 - DNA, 25 bp, Homo sapiens
tttttttaggtagaatccctcgaaa

SEQ ID NO: 699 - DNA, 25 bp, Homo sapiens
accgagagggtgtagcttacaaaca

SEQ ID NO: 700 - DNA, 25 bp, Homo sapiens
tgcggctgcacctctgattctgtaa

SEQ ID NO: 701 - DNA, 25 bp, Homo sapiens
ttacttatcacaggcgcgggaccta

SEQ ID NO: 702 - DNA, 25 bp, Homo sapiens
gctcaccctgagaaaacacgctgga

SEQ ID NO: 703 - DNA, 25 bp, Homo sapiens
ccatccacgtaaaagagtcagttta

SEQ ID NO: 704 - DNA, 25 bp, Homo sapiens
gctgtggtcctcttctccattggga

SEQ ID NO: 705 - DNA, 25 bp, Homo sapiens
ctgcccttggggaatgtagccctta

SEQ ID NO: 706 - DNA, 25 bp, Homo sapiens
ccatggctctgctgtaaataggtga

SEQ ID NO: 707 - DNA, 25 bp, Homo sapiens
tgccttagcgtgtctgtcactcata

SEQ ID NO: 708 - DNA, 25 bp, Homo sapiens
gttggcatcagaagcaaattttttt

SEQ ID NO: 709 - DNA, 25 bp, Homo sapiens
ctataaggctacaggatgatgctgc

SEQ ID NO: 710 - DNA, 25 bp, Homo sapiens
taaatcttgtgatttttaaattcaa

SEQ ID NO: 711 - DNA, 25 bp, Homo sapiens
tcaggttctgcctctggaagtaata

SEQ ID NO: 712 - DNA, 25 bp, Homo sapiens
tgtctcagtgaatagccagcctttt

SEQ ID NO: 713 - DNA, 25 bp, Homo sapiens
ttcatggtgggaaacataattttgc

SEQ ID NO: 714 - DNA, 25 bp, Homo sapiens
tgtcgcctgtagtgcccaactatga

SEQ ID NO: 715 - DNA, 25 bp, Homo sapiens
tccaggttgttcagatagttgctca

SEQ ID NO: 716 - DNA, 25 bp, Homo sapiens
ggggccaagcagaccatggtccctt

SEQ ID NO: 717 - DNA, 25 bp, Homo sapiens
ctccagggtatgacagtagatcttc

SEQ ID NO: 718 - DNA, 25 bp, Homo sapiens
ggggcctgcaaccattcacatacta

SEQ ID NO: 719 - DNA, 25 bp, Homo sapiens
tctctcctgaggctgatgacatctg

SEQ ID NO: 720 - DNA, 25 bp, Homo sapiens
tttccctggtcgtgaagacattata

SEQ ID NO: 721 - DNA, 25 bp, Homo sapiens
tgcctggcatctcctgctcaagata

SEQ ID NO: 722 - DNA, 25 bp, Homo sapiens
ggtgcctcctccagtctttgacaga

SEQ ID NO: 723 - DNA, 25 bp, Homo sapiens
ggctcctgtttctccacggtctgga

SEQ ID NO: 724 - DNA, 25 bp, Homo sapiens
tgggaaccagtttgctacacagatc

SEQ ID NO: 725 - DNA, 25 bp, Homo sapiens
aaattgggcctttctcctggtagga

SEQ ID NO: 726 - DNA, 25 bp, Homo sapiens
ccagtccaggtgtcagagtgctaca

SEQ ID NO: 727 - DNA, 25 bp, Homo sapiens
gcagccacagggtttgattatgaca

SEQ ID NO: 728 - DNA, 25 bp, Homo sapiens
ttccagcactgcaagggtttaatcc

SEQ ID NO: 729 - DNA, 25 bp, Homo sapiens
ctgagttgtgccaggagatctctcc

SEQ ID NO: 730 - DNA, 25 bp, Homo sapiens
gagcatcttttctctgccttgtgga

SEQ ID NO: 731 - DNA, 25 bp, Homo sapiens
ctttacggtttctctagggtgtgca

SEQ ID NO: 732 - DNA, 25 bp, Homo sapiens
tgctgcgatttgttgagccactgca

SEQ ID NO: 733 - DNA, 25 bp, Homo sapiens
attggactagacgaccctggctttg

SEQ ID NO: 734 - DNA, 25 bp, Homo sapiens
cctcagggttggttggttatttact

SEQ ID NO: 735 - DNA, 25 bp, Homo sapiens
tgtgtaatctagggtcaccagactg

SEQ ID NO: 736 - DNA, 25 bp, Homo sapiens
gtgcttaatgctgttgccctgatta

SEQ ID NO: 737 - DNA, 25 bp, Homo sapiens
aggctgacttgtggctggaaatttc

SEQ ID NO: 738 - DNA, 25 bp, Homo sapiens
ccctgtgtgtgttctctgatgttta

SEQ ID NO: 739 - DNA, 25 bp, Homo sapiens
tcaggtgatcagctgtccagacttc

SEQ ID NO: 740 - DNA, 25 bp, Homo sapiens
tcagccagagactgtggtgatcaca

SEQ ID NO: 741 - DNA, 25 bp, Homo sapiens
aatgcatacacatgaaattccctct

SEQ ID NO: 742 - DNA, 25 bp, Homo sapiens
ttttccacttaaaatgggaacacat

SEQ ID NO: 743 - DNA, 25 bp, Homo sapiens
ttctccagaaaattgtttcttatat

SEQ ID NO: 744 - DNA, 25 bp, Homo sapiens
gctgaattatttatagttggtaagc

SEQ ID NO: 745 - DNA, 25 bp, Homo sapiens
tttataaggcaggtcaaataagagc

SEQ ID NO: 746 - DNA, 25 bp, Homo sapiens
tgcgtatgaatacagatacaaagct

SEQ ID NO: 747 - DNA, 25 bp, Homo sapiens
atgttgttcactatgagtttcctaa

SEQ ID NO: 748 - DNA, 25 bp, Homo sapiens
aatctaaacttgctttaatttcttt

SEQ ID NO: 749 - DNA, 25 bp, Homo sapiens
agcagtctagacttcaggcctttga

SEQ ID NO: 750 - DNA, 25 bp, Homo sapiens
tggcctgctgctgtcttgagaagaa

SEQ ID NO: 751 - DNA, 25 bp, Homo sapiens
ctgctcagatactagggccacaatg

SEQ ID NO: 752 - DNA, 25 bp, Homo sapiens
tggggaaagaaaataatcaagaatg

SEQ ID NO: 753 - DNA, 25 bp, Homo sapiens
ggggtttttccatctatctgctaca

SEQ ID NO: 754 - DNA, 25 bp, Homo sapiens
ggctgcactcatttcagggctaaca

SEQ ID NO: 755 - DNA, 25 bp, Homo sapiens
ctccgtctgggagaatatcaatgtc

SEQ ID NO: 756 - DNA, 25 bp, Homo sapiens
ccttcctgagtgcaagatcaagtta

SEQ ID NO: 757 - DNA, 25 bp, Homo sapiens
ggtgccacaggaaagctacttcatc

SEQ ID NO: 758 - DNA, 25 bp, Homo sapiens
gcagctccattccagcaaaactttt

SEQ ID NO: 759 - DNA, 25 bp, Homo sapiens
cacctatggtatgggcttggggaaa

SEQ ID NO: 760 - DNA, 25 bp, Homo sapiens
tgaatttgattaactctggaggctc

SEQ ID NO: 761 - DNA, 25 bp, Homo sapiens
aattaaacgttaaaggacttataat

SEQ ID NO: 762 - DNA, 25 bp, Homo sapiens
ttctgggagagctaaaagaagctgg

SEQ ID NO: 763 - DNA, 25 bp, Homo sapiens
caaatacttttttaaaagaagaagc

SEQ ID NO: 764 - DNA, 25 bp, Homo sapiens
ggcaacactgggaacgctggtcaaa

SEQ ID NO: 765 - DNA, 25 bp, Homo sapiens
ggggcttttgctgtttttctttggg

SEQ ID NO: 766 - DNA, 25 bp, Homo sapiens
tattcaatttcagaccacttgagcc

SEQ ID NO: 767 - DNA, 25 bp, Homo sapiens
gcttccactggactttgacccaaca

SEQ ID NO: 768 - DNA, 25 bp, Homo sapiens
ctgctgtcaatagatttgcccagta

SEQ ID NO: 769 - DNA, 25 bp, Homo sapiens
ctggacacctattttagccttggga

SEQ ID NO: 770 - DNA, 25 bp, Homo sapiens
atgggacctcagaagcctatttgta

SEQ ID NO: 771 - DNA, 25 bp, Homo sapiens
ctcaccgttgagctccaggatggta

SEQ ID NO: 772 - DNA, 25 bp, Homo sapiens
cactgctgtcacatcactggaatta

SEQ ID NO: 773 - DNA, 25 bp, Homo sapiens
gctgggactcactggttgctttcta

SEQ ID NO: 774 - DNA, 25 bp, Homo sapiens
aagtgtcttcacagcagttgatcta

SEQ ID NO: 775 - DNA, 25 bp, Homo sapiens
tcagctgccctgctaactttgcatg

SEQ ID NO: 776 - DNA, 25 bp, Homo sapiens
tgtgcctcagtgttcctcatcagga

SEQ ID NO: 777 - DNA, 25 bp, Homo sapiens
cctagcaggcagtactcaagaattc

SEQ ID NO: 778 - DNA, 25 bp, Homo sapiens
cacagatggtctatgaacagggttc

SEQ ID NO: 779 - DNA, 25 bp, Homo sapiens
acctctgactttagtgggcatttaa

SEQ ID NO: 780 - DNA, 25 bp, Homo sapiens
aagacgtgaattgtcccagacctcc

SEQ ID NO: 781 - DNA, 25 bp, Homo sapiens
atcatatgataacaaaggtctcaaa

SEQ ID NO: 782 - DNA, 25 bp, Homo sapiens
ggacatgttcccaaatgacatatta

SEQ ID NO: 783 - DNA, 25 bp, Homo sapiens
cccttcagtggaatggccatgtcta

SEQ ID NO: 784 - DNA, 25 bp, Homo sapiens
gccctcactggtggcattctcagaa

SEQ ID NO: 785 - DNA, 25 bp, Homo sapiens
aggtcccttcttcccactcttgagg

SEQ ID NO: 786 - DNA, 25 bp, Homo sapiens
gcacgtcggtctggcattcggaaaa

SEQ ID NO: 787 - DNA, 25 bp, Homo sapiens
gtaactctcttatctcaactagctg

SEQ ID NO: 788 - DNA, 25 bp, Homo sapiens
accgttctttctcttccctcgtgga

SEQ ID NO: 789 - DNA, 25 bp, Homo sapiens
tgggtcactccctttctcagatgta

SEQ ID NO: 790 - DNA, 25 bp, Homo sapiens
ggcctgtaccgtgaagtcttttata

SEQ ID NO: 791 - DNA, 25 bp, Homo sapiens
ctaattaaacctgagaaagctgatg

SEQ ID NO: 792 - DNA, 25 bp, Homo sapiens
aaatacaaataatttgcttcgatat

SEQ ID NO: 793 - DNA, 25 bp, Homo sapiens
gtgcttcaagtagttttcatctctg

SEQ ID NO: 794 - DNA, 25 bp, Homo sapiens
ttcatctcagggtgctctcaaagcg

SEQ ID NO: 795 - DNA, 25 bp, Homo sapiens
tgctgcccttaatatggtacctgtc

SEQ ID NO: 796 - DNA, 25 bp, Homo sapiens
gggctgctaggccaccaacaagtga

SEQ ID NO: 797 - DNA, 25 bp, Homo sapiens
gctgtacctgctgcctctcatttta

SEQ ID NO: 798 - DNA, 25 bp, Homo sapiens
atttttctcagcaaacataaaataa

SEQ ID NO: 799 - DNA, 25 bp, Homo sapiens
tctggctcagagataccatggctta

SEQ ID NO: 800 - DNA, 25 bp, Homo sapiens
cccagaggctacttaacgatatttg

SEQ ID NO: 801 - DNA, 25 bp, Homo sapiens
agaggtccatgctaccaccaccagg

SEQ ID NO: 802 - DNA, 25 bp, Homo sapiens
gacttgggccatgctttgtttccta

SEQ ID NO: 803 - DNA, 25 bp, Homo sapiens
cccgtgttttactgtgctgcattac

SEQ ID NO: 804 - DNA, 25 bp, Homo sapiens
tgaggccagcatgagtaacacaatg

SEQ ID NO: 805 - DNA, 25 bp, Homo sapiens
gcctctgccagcagtgtagagacta

SEQ ID NO: 806 - DNA, 25 bp, Homo sapiens
tcctctggaatattgtgcttgcctc

SEQ ID NO: 807 - DNA, 25 bp, Homo sapiens
cccaccctgtggcttatgatgctgc

SEQ ID NO: 808 - DNA, 25 bp, Homo sapiens
ggcagggactttcaggttttctttc

SEQ ID NO: 809 - DNA, 25 bp, Homo sapiens
tcaagcttggatgggaaatgacatt

SEQ ID NO: 810 - DNA, 25 bp, Homo sapiens
tgccttcctcctggccgagaatgta

SEQ ID NO: 811 - DNA, 25 bp, Homo sapiens
tccggatcagggacagattagcttt

SEQ ID NO: 812 - DNA, 25 bp, Homo sapiens
ggacctagaggctacaatctgcatt

SEQ ID NO: 813 - DNA, 25 bp, Homo sapiens
tcccaggcagcagtagttgttatca

SEQ ID NO: 814 - DNA, 25 bp, Homo sapiens
tttcttcagaaacccaacgtgtata

SEQ ID NO: 815 - DNA, 25 bp, Homo sapiens
tgcctggggcaccaatctgaatctg

SEQ ID NO: 816 - DNA, 25 bp, Homo sapiens
tggccacttcaccagaacctctgtg

SEQ ID NO: 817 - DNA, 25 bp, Homo sapiens
atgcatgccgctatggtctaaacca

SEQ ID NO: 818 - DNA, 25 bp, Homo sapiens
caatgaatggcgctaccttagaaca

SEQ ID NO: 819 - DNA, 25 bp, Homo sapiens
ctgcccttcaaaactgaatcagata

SEQ ID NO: 820 - DNA, 25 bp, Homo sapiens
aggctgaggcatccctaaatgattc

SEQ ID NO: 821 - DNA, 25 bp, Homo sapiens
ggcacttccgcattcacaagccatg

SEQ ID NO: 822 - DNA, 25 bp, Homo sapiens
ctgcctaggcctgattctgatgatc

SEQ ID NO: 823 - DNA, 25 bp, Homo sapiens
aactgaggcatggttccctaacacc

SEQ ID NO: 824 - DNA, 25 bp, Homo sapiens
ctctgctctagtgtttcggccatca

SEQ ID NO: 825 - DNA, 25 bp, Homo sapiens
aggactcttctgcttggtacaatga

SEQ ID NO: 826 - DNA, 25 bp, Homo sapiens
gaagcaccgttcaccatccagaaga

SEQ ID NO: 827 - DNA, 25 bp, Homo sapiens
aagccggggcatccatctaagtatg

SEQ ID NO: 828 - DNA, 25 bp, Homo sapiens
tgggtctaacctggcccttacctaa

SEQ ID NO: 829 - DNA, 25 bp, Homo sapiens
tctgatgccagagtgccaagggaca

SEQ ID NO: 830 - DNA, 25 bp, Homo sapiens
aggagtcttcctaggccaaagtata

SEQ ID NO: 831 - DNA, 25 bp, Homo sapiens
ggtgagtctgcgctttttacctata

SEQ ID NO: 832 - DNA, 25 bp, Homo sapiens
cataggaggtacgtgctgtctgtta

SEQ ID NO: 833 - DNA, 25 bp, Homo sapiens
tggcaagtcctctcacgttttagta

SEQ ID NO: 834 - DNA, 25 bp, Homo sapiens
ggcagggtgccatttcattcagtta

SEQ ID NO: 835 - DNA, 25 bp, Homo sapiens
cgcgggttacttgatgccgtgcaaa

SEQ ID NO: 836 - DNA, 25 bp, Homo sapiens
caccggtgcatgcaaggctcaattc

SEQ ID NO: 837 - DNA, 25 bp, Homo sapiens
cccaacaggtaggatttacaggatg

SEQ ID NO: 838 - DNA, 25 bp, Homo sapiens
tacgggtggtcattaatagttcctc

SEQ ID NO: 839 - DNA, 25 bp, Homo sapiens
gccgtggactcctgctctttgttaa

SEQ ID NO: 840 - DNA, 25 bp, Homo sapiens
ctggctttttctctgtgtgggtaca

SEQ ID NO: 841 - DNA, 25 bp, Homo sapiens
tttgaccacttgcagggcaccgtgc

SEQ ID NO: 842 - DNA, 25 bp, Homo sapiens
ctgagtcctttcatgatatgtatgg

SEQ ID NO: 843 - DNA, 25 bp, Homo sapiens
cctgctcagactttcctccttggga

SEQ ID NO: 844 - DNA, 25 bp, Homo sapiens
tgatcgcttttcttgctacctaatg

SEQ ID NO: 845 - DNA, 25 bp, Homo sapiens
agcaagctggatggctgcttccaca

SEQ ID NO: 846 - DNA, 25 bp, Homo sapiens
tctctctggacatcaagtcggccta

SEQ ID NO: 847 - DNA, 25 bp, Homo sapiens
ggcggtcctcgagctctatttttac

SEQ ID NO: 848 - DNA, 25 bp, Homo sapiens
gggcgccctctttctagacagcatt

SEQ ID NO: 849 - DNA, 25 bp, Homo sapiens
cttgaaattactgggcttctctgta

SEQ ID NO: 850 - DNA, 25 bp, Homo sapiens
cacaaggaggttcaccatggagcta

SEQ ID NO: 851 - DNA, 25 bp, Homo sapiens
gtgcatcattacacggagcctgtta

SEQ ID NO: 852 - DNA, 25 bp, Homo sapiens
tgcctcagaccgtgctctctatata

SEQ ID NO: 853 - DNA, 25 bp, Homo sapiens
ggagagcaccagagagcccttttgt

SEQ ID NO: 854 - DNA, 25 bp, Homo sapiens
aggagtatttctgcacctttacgga

SEQ ID NO: 855 - DNA, 25 bp, Homo sapiens
tctgtggatattgtacaaaagattg

SEQ ID NO: 856 - DNA, 25 bp, Homo sapiens
gtactgaggagcaaaacactttatg

SEQ ID NO: 857 - DNA, 25 bp, Homo sapiens
gttgctgcacagtctaccatagcac

SEQ ID NO: 858 - DNA, 25 bp, Homo sapiens
gcccatatcgtgctcataatcagtg

SEQ ID NO: 859 - DNA, 25 bp, Homo sapiens
aggccgcccgaaagcagctaattga

SEQ ID NO: 860 - DNA, 25 bp, Homo sapiens
tgggcactgccttagaaacaatctc

SEQ ID NO: 861 - DNA, 25 bp, Homo sapiens
ggcaggtgggacagttctcaataac

SEQ ID NO: 862 - DNA, 25 bp, Homo sapiens
gctccgagtccagtttgccacacaa

SEQ ID NO: 863 - DNA, 25 bp, Homo sapiens
ggccctttccacatagacttgattt

SEQ ID NO: 864 - DNA, 25 bp, Homo sapiens
cttgattggaaagaccacctgcttc

SEQ ID NO: 865 - DNA, 25 bp, Homo sapiens
gtggggacctttccagctccctttg

SEQ ID NO: 866 - DNA, 25 bp, Homo sapiens
ggtccctcttgccatttccagtttc

SEQ ID NO: 867 - DNA, 25 bp, Homo sapiens
ctttcagtctagcacaggcgggtca

SEQ ID NO: 868 - DNA, 25 bp, Homo sapiens
tgtcagagtacatatcagtgttgga

SEQ ID NO: 869 - DNA, 25 bp, Homo sapiens
taatcaaataaaatgatttccatga

SEQ ID NO: 870 - DNA, 25 bp, Homo sapiens
cctggcaggggacacaatatttgta

SEQ ID NO: 871 - DNA, 25 bp, Homo sapiens
taatcactgggcagacgctgggaca

SEQ ID NO: 872 - DNA, 25 bp, Homo sapiens
tcacttggtgtgcaggtataatctc

SEQ ID NO: 873 - DNA, 25 bp, Homo sapiens
actgtaaagatgtaggtcctcctcc

SEQ ID NO: 874 - DNA, 25 bp, Homo sapiens
ctgctccatgtttgtattccgaaaa

SEQ ID NO: 875 - DNA, 25 bp, Homo sapiens
tcttgcagtgcatagggcatctcta

SEQ ID NO: 876 - DNA, 25 bp, Homo sapiens
gtcccagaagggtgaacataaacca

SEQ ID NO: 877 - DNA, 25 bp, Homo sapiens
gaagcctgtcagaaccacccattta

SEQ ID NO: 878 - DNA, 25 bp, Homo sapiens
ggcctattgaaaaatgaccaacgtg

SEQ ID NO: 879 - DNA, 25 bp, Homo sapiens
ggattcctgttccaccttatgaaag

SEQ ID NO: 880 - DNA, 25 bp, Homo sapiens
gcagccttgtcttgtggagcttgta

SEQ ID NO: 881 - DNA, 25 bp, Homo sapiens
accctggctggagtttgcatctaaa

SEQ ID NO: 882 - DNA, 25 bp, Homo sapiens
ttagggcagcagagaactccaattc

SEQ ID NO: 883 - DNA, 25 bp, Homo sapiens
ccctatctttgggagaggaaacatc

SEQ ID NO: 884 - DNA, 25 bp, Homo sapiens
ttgtcgcagcagtccaaagccatgg

SEQ ID NO: 885 - DNA, 25 bp, Homo sapiens
ctagccctggaagagatcaacttta

SEQ ID NO: 886 - DNA, 25 bp, Homo sapiens
attgcaatcgtcatgtgtagctaca

SEQ ID NO: 887 - DNA, 25 bp, Homo sapiens
ccttcggattgtaacggggaaaaca

SEQ ID NO: 888 - DNA, 25 bp, Homo sapiens
gcatagctgtctgttccattaccga

SEQ ID NO: 889 - DNA, 25 bp, Homo sapiens
gggcagggtcaagtattttcaaata

SEQ ID NO: 890 - DNA, 25 bp, Homo sapiens
cccgcaatgagaatgtccacgagtc

SEQ ID NO: 891 - DNA, 25 bp, Homo sapiens
tgccacttttggagggacagtcttc

SEQ ID NO: 892 - DNA, 25 bp, Homo sapiens
gggtagtgactccttggtttccatt

SEQ ID NO: 893 - DNA, 25 bp, Homo sapiens
gtgagcttactatttgccagggatg

SEQ ID NO: 894 - DNA, 25 bp, Homo sapiens
ccatgcagctggtgtctattattta

SEQ ID NO: 895 - DNA, 25 bp, Homo sapiens
gcaccactgttgattccatttttta

SEQ ID NO: 896 - DNA, 25 bp, Homo sapiens
ctggtactgaggcaatgcaagctta

SEQ ID NO: 897 - DNA, 25 bp, Homo sapiens
tgcatgctgactgtactcctctgta

SEQ ID NO: 898 - DNA, 25 bp, Homo sapiens
gcattgagtacataggcatcccttt

SEQ ID NO: 899 - DNA, 25 bp, Homo sapiens
ctcactgctcttgttgcctataata

SEQ ID NO: 900 - DNA, 25 bp, Homo sapiens
agagcgcttgtgtcctaaactgaaa

SEQ ID NO: 901 - DNA, 25 bp, Homo sapiens
tgttgggaactagctgccttactta

SEQ ID NO: 902 - DNA, 25 bp, Homo sapiens
cggacacctagggatggagtcttaa

SEQ ID NO: 903 - DNA, 25 bp, Homo sapiens
agttttcgggatgctgccacttacc

SEQ ID NO: 904 - DNA, 25 bp, Homo sapiens
gcggccatacgataaacccaagcta

SEQ ID NO: 905 - DNA, 25 bp, Homo sapiens
gtggacacctattttagccttggga

SEQ ID NO: 906 - DNA, 25 bp, Homo sapiens
tgcctcgaacttgtgaaaacctttg

SEQ ID NO: 907 - DNA, 25 bp, Homo sapiens
ctcaccgttgagctccaggatggta

SEQ ID NO: 908 - DNA, 25 bp, Homo sapiens
cactgctgtcagatcactgggatta

SEQ ID NO: 909 - DNA, 25 bp, Homo sapiens
gcccttcagatgctggcactcactg

SEQ ID NO: 910 - DNA, 25 bp, Homo sapiens
tgctgctacttcttgatcaggagta

SEQ ID NO: 911 - DNA, 25 bp, Homo sapiens
ggttactcatcatgtccttccagga

SEQ ID NO: 912 - DNA, 25 bp, Homo sapiens
gaattcagttccctgacggtcagta

SEQ ID NO: 913 - DNA, 25 bp, Homo sapiens
cccagtggttgctttgtggagctca

SEQ ID NO: 914 - DNA, 25 bp, Homo sapiens
gcctcattgtcaatgtgactatgtc

SEQ ID NO: 915 - DNA, 25 bp, Homo sapiens
acctctgactttagtgggcatttaa

SEQ ID NO: 916 - DNA, 25 bp, Homo sapiens
cacttgccagcttaccatgattata

SEQ ID NO: 917 - DNA, 25 bp, Homo sapiens
gacattgttcaattcacacccaggg

SEQ ID NO: 918 - DNA, 25 bp, Homo sapiens
tagcagtacgtagcaggatcccact

SEQ ID NO: 919 - DNA, 25 bp, Homo sapiens
gttattgccctcatcatactgtagc

SEQ ID NO: 920 - DNA, 25 bp, Homo sapiens
ttatggtatttgctttggaattaaa

SEQ ID NO: 921 - DNA, 25 bp, Homo sapiens
tgccaaatttcacatgtacaggtta

SEQ ID NO: 922 - DNA, 25 bp, Homo sapiens
ttgaatgggaggagcagttgctggg

SEQ ID NO: 923 - DNA, 25 bp, Homo sapiens
agagattagtcagttgtccacggca

SEQ ID NO: 924 - DNA, 25 bp, Homo sapiens
tgcctgggcaaacatagacctattt

SEQ ID NO: 925 - DNA, 25 bp, Homo sapiens
ctactggatgcctgtttggttttca

SEQ ID NO: 926 - DNA, 25 bp, Homo sapiens
gaaaatatttcctttgcagcccaca

SEQ ID NO: 927 - DNA, 25 bp, Homo sapiens
cccgttaagagcaggcaggaacatt

SEQ ID NO: 928 - DNA, 25 bp, Homo sapiens
gccctggcagactaagcattggaaa

SEQ ID NO: 929 - DNA, 25 bp, Homo sapiens
gctcctgctttgctcttccttagta

SEQ ID NO: 930 - DNA, 25 bp, Homo sapiens
ctgctgtcgctcactggtgattatc

SEQ ID NO: 931 - DNA, 25 bp, Homo sapiens
tgaagtgaactctggctctctagga

SEQ ID NO: 932 - DNA, 25 bp, Homo sapiens
tagctgcattcgagccagaggaata

SEQ ID NO: 933 - DNA, 25 bp, Homo sapiens
ccgtggaatagctgcgtacacttta

SEQ ID NO: 934 - DNA, 25 bp, Homo sapiens
gcttgtcctagcattactgagttaa

SEQ ID NO: 935 - DNA, 25 bp, Homo sapiens
tgtatcctttccatggacgctaatg

SEQ ID NO: 936 - DNA, 25 bp, Homo sapiens
atgttccatcttctctttacccaga

SEQ ID NO: 937 - DNA, 25 bp, Homo sapiens
tgtggtcccagcagaagtgaagtta

SEQ ID NO: 938 - DNA, 25 bp, Homo sapiens
gcttgtgctttaggcctcttgatta

SEQ ID NO: 939 - DNA, 25 bp, Homo sapiens
cagaggctctccaggctttcagttc

SEQ ID NO: 940 - DNA, 25 bp, Homo sapiens
aggtactcccacagttttaaaaact

SEQ ID NO: 941 - DNA, 25 bp, Homo sapiens
tggcaacatgggttatggctattcc

SEQ ID NO: 942 - DNA, 25 bp, Homo sapiens
ttgattggacactcatctgcacatg

SEQ ID NO: 943 - DNA, 25 bp, Homo sapiens
gtggtgaatcatgcctacagacttg

SEQ ID NO: 944 - DNA, 25 bp, Homo sapiens
taataacacataaaccaatgttaca

SEQ ID NO: 945 - DNA, 25 bp, Homo sapiens
cctggggcaagttccttttgtaaac

SEQ ID NO: 946 - DNA, 25 bp, Homo sapiens
tagcttcattacacagacctggcgg

SEQ ID NO: 947 - DNA, 25 bp, Homo sapiens
tcccgttgtattgcaagccagaata

SEQ ID NO: 948 - DNA, 25 bp, Homo sapiens
ggatgattttctttaaccaccagca

SEQ ID NO: 949 - DNA, 25 bp, Homo sapiens
gggtagggtaacagttccacactta

SEQ ID NO: 950 - DNA, 25 bp, Homo sapiens
ttgccctgggagatcctctgaattc

SEQ ID NO: 951 - DNA, 25 bp, Homo sapiens
ctcttctagagatgctgtcccttcc

SEQ ID NO: 952 - DNA, 25 bp, Homo sapiens
ccaaagatctgatggaggagaattc

SEQ ID NO: 953 - DNA, 25 bp, Homo sapiens
aaggttattctttctatgaggatta

SEQ ID NO: 954 - DNA, 25 bp, Homo sapiens
tggggcaagtttttacaacataaga

SEQ ID NO: 955 - DNA, 25 bp, Homo sapiens
tggggtgctccagttgcttcactga

SEQ ID NO: 956 - DNA, 25 bp, Homo sapiens
tctgaagatgaactgccaccaaatg

SEQ ID NO: 957 - DNA, 25 bp, Homo sapiens
cgagagtgttgccttccagttattt

SEQ ID NO: 958 - DNA, 25 bp, Homo sapiens
ccttagctaatgtacttggtgttcc

SEQ ID NO: 959 - DNA, 25 bp, Homo sapiens
tcctaggtaggtgtaaactcaactc

SEQ ID NO: 960 - DNA, 25 bp, Homo sapiens
cagatgtattccagaccttgttgaa

SEQ ID NO: 961 - DNA, 25 bp, Homo sapiens
tcctgccttagagatagctcccttc

SEQ ID NO: 962 - DNA, 25 bp, Homo sapiens
ttgggtctcatgtttcgttttctta

SEQ ID NO: 963 - DNA, 25 bp, Homo sapiens
atatggaagatagagcatggaattc

SEQ ID NO: 964 - DNA, 25 bp, Homo sapiens
gaattccgtggaagatgcccatggg

SEQ ID NO: 965 - DNA, 25 bp, Homo sapiens
ggagagactccactttgtcctgtta

SEQ ID NO: 966 - DNA, 25 bp, Homo sapiens
tgctagtccagacaggcacattttc

SEQ ID NO: 967 - DNA, 25 bp, Homo sapiens
acacttgcttgggttgcgacatcta

SEQ ID NO: 968 - DNA, 25 bp, Homo sapiens
ccagccaagggcgactttacatttc

SEQ ID NO: 969 - DNA, 25 bp, Homo sapiens
gctggggcacctacatctgagcttc

SEQ ID NO: 970 - DNA, 25 bp, Homo sapiens
ggcggcacagccaccttatacagca

SEQ ID NO: 971 - DNA, 25 bp, Homo sapiens
agggtcctcccttagcatgtcttga

SEQ ID NO: 972 - DNA, 25 bp, Homo sapiens
ggtgcactcactgtccaagtttgtc

SEQ ID NO: 973 - DNA, 25 bp, Homo sapiens
aggaatgagatatacacatgctttg

SEQ ID NO: 974 - DNA, 25 bp, Homo sapiens
tcctccacggcatgaactgaacaga

SEQ ID NO: 975 - DNA, 25 bp, Homo sapiens
ggtccacaccagctgcagagtcaaa

SEQ ID NO: 976 - DNA, 25 bp, Homo sapiens
aggactggcccaacatgcttttata

SEQ ID NO: 977 - DNA, 25 bp, Homo sapiens
gctgtgtccctaatcatccctgaga

SEQ ID NO: 978 - DNA, 25 bp, Homo sapiens
tccgcgctttcaggagctcaccaga

SEQ ID NO: 979 - DNA, 25 bp, Homo sapiens
ccaagagttttgtggcggtccatcc

SEQ ID NO: 980 - DNA, 25 bp, Homo sapiens
ctccttctggaaactatatggggca

SEQ ID NO: 981 - DNA, 25 bp, Homo sapiens
acctcgcgctgacatctgggaaatg

SEQ ID NO: 982 - DNA, 25 bp, Homo sapiens
gtcactgcttggcagaattcagcac

SEQ ID NO: 983 - DNA, 25 bp, Homo sapiens
acctcagtctggcattcggaaaacc

SEQ ID NO: 984 - DNA, 25 bp, Homo sapiens
gtaaccctcttatctcaactagctg

SEQ ID NO: 985 - DNA, 25 bp, Homo sapiens
agcgttccttctcttccctcgtgga

SEQ ID NO: 986 - DNA, 25 bp, Homo sapiens
tgggtcactccctttctcagatgta

SEQ ID NO: 987 - DNA, 25 bp, Homo sapiens
ggtctgtaccgtgaagccttttata

SEQ ID NO: 988 - DNA, 25 bp, Homo sapiens
ctaattaaacctgagaaagctgatg

SEQ ID NO: 989 - DNA, 25 bp, Homo sapiens
atagattttgaaaaaatttcaattg

SEQ ID NO: 990 - DNA, 25 bp, Homo sapiens
gtgcttcaagtagttttcatctctg

SEQ ID NO: 991 - DNA, 25 bp, Homo sapiens
tctcagggtgctctcaaagcgcatc

SEQ ID NO: 992 - DNA, 25 bp, Homo sapiens
tgctgcccttaatatggtacctgtc

SEQ ID NO: 993 - DNA, 25 bp, Homo sapiens
gggctgctaggccaccaacaagtga

SEQ ID NO: 994 - DNA, 25 bp, Homo sapiens
gctgtacctgctgcctctcatttta

SEQ ID NO: 995 - DNA, 25 bp, Homo sapiens
taaataaataaagtacagcattttt

SEQ ID NO: 996 - DNA, 25 bp, Homo sapiens
ggaccagtcaaaatcaggagcaaaa

SEQ ID NO: 997 - DNA, 25 bp, Homo sapiens
gaagatacgcttttacccgctgtga

SEQ ID NO: 998 - DNA, 25 bp, Homo sapiens
ctgttgcatatatgagccatgatcc

SEQ ID NO: 999 - DNA, 25 bp, Homo sapiens
actgcttccatgctctctaggtgtg

SEQ ID NO: 1000 - DNA, 25 bp, Homo sapiens
cccgtgttttactgtgctgcattac

SEQ ID NO: 1001 - DNA, 25 bp, Homo sapiens
cggctgctgcatttaggctatttca

SEQ ID NO: 1002 - DNA, 25 bp, Homo sapiens
gttttctgttttctaccggctccca

SEQ ID NO: 1003 - DNA, 25 bp, Homo sapiens
gcagccctggctgtgacattttata

SEQ ID NO: 1004 - DNA, 25 bp, Homo sapiens
gccgaggctatgctgcacttgcaga

SEQ ID NO: 1005 - DNA, 25 bp, Homo sapiens
ccatggcagggactttcagattttc

SEQ ID NO: 1006 - DNA, 25 bp, Homo sapiens
tcaagcttggatgggaaatgacatt

SEQ ID NO: 1007 - DNA, 25 bp, Homo sapiens
tgccttcctcctggccgagaatgta

SEQ ID NO: 1008 - DNA, 25 bp, Homo sapiens
ggaccatgtgacactagagctattt

SEQ ID NO: 1009 - DNA, 25 bp, Homo sapiens
agtgcccgtatttctgtattcatta

SEQ ID NO: 1010 - DNA, 25 bp, Homo sapiens
tcccaggcagcagtagttgttatca

SEQ ID NO: 1011 - DNA, 25 bp, Homo sapiens
gcctcatcatgtcagaaaaagtacc

SEQ ID NO: 1012 - DNA, 25 bp, Homo sapiens
tgcctggggcaccaatctgaatctg

SEQ ID NO: 1013 - DNA, 25 bp, Homo sapiens
tcaccctgtgatgtgggagctagcc

SEQ ID NO: 1014 - DNA, 25 bp, Homo sapiens
ccagggcgcacacatgtccagaata

SEQ ID NO: 1015 - DNA, 25 bp, Homo sapiens
caatgaatggcggtaccttagaaca

SEQ ID NO: 1016 - DNA, 25 bp, Homo sapiens
ccgcccttcaaaactgaatcagata

SEQ ID NO: 1017 - DNA, 25 bp, Homo sapiens
cgactggccatggttcaaactgaca

SEQ ID NO: 1018 - DNA, 25 bp, Homo sapiens
ggcacttccgcattcacaagccatg

SEQ ID NO: 1019 - DNA, 25 bp, Homo sapiens
ctgcctaggcctgattctgatgatc

SEQ ID NO: 1020 - DNA, 25 bp, Homo sapiens
aactgaggcatggttccctaacacc

SEQ ID NO: 1021 - DNA, 25 bp, Homo sapiens
acactcattacgtcaggcactgtgg

SEQ ID NO: 1022 - DNA, 25 bp, Homo sapiens
cagttccagtgctacaacagtgcta

SEQ ID NO: 1023 - DNA, 25 bp, Homo sapiens
tgacacctgccggtcacatttgatg

SEQ ID NO: 1024 - DNA, 25 bp, Homo sapiens
ccaagccggtgcatctgtctaagta

SEQ ID NO: 1025 - DNA, 25 bp, Homo sapiens
tgggtctaacctggcccttacctaa

SEQ ID NO: 1026 - DNA, 25 bp, Homo sapiens
gctctaattatttcagggcctcata

SEQ ID NO: 1027 - DNA, 25 bp, Homo sapiens
ataaataaaaaagaattcagaattg

SEQ ID NO: 1028 - DNA, 25 bp, Homo sapiens
ctgccttggtaattagggactttca

SEQ ID NO: 1029 - DNA, 25 bp, Homo sapiens
cctaccagtatgcaaggagtgacta

SEQ ID NO: 1030 - DNA, 25 bp, Homo sapiens
gtgggagacctagaacctgctttta

SEQ ID NO: 1031 - DNA, 25 bp, Homo sapiens
cacaagatgttgctagactcctata

SEQ ID NO: 1032 - DNA, 25 bp, Homo sapiens
acaaaaagaataaaagtaaggatgt

SEQ ID NO: 1033 - DNA, 25 bp, Homo sapiens
gcctcccatgagacaagttggaata

SEQ ID NO: 1034 - DNA, 25 bp, Homo sapiens
tgccatttttcgtcacagtcttttg

SEQ ID NO: 1035 - DNA, 25 bp, Homo sapiens
ggtcttgggactgaaacaccttcta

SEQ ID NO: 1036 - DNA, 25 bp, Homo sapiens
catgagactctcttgtagcattgac

SEQ ID NO: 1037 - DNA, 25 bp, Homo sapiens
cactgagctgggttggtaatataca

SEQ ID NO: 1038 - DNA, 25 bp, Homo sapiens
tcctggtaaggagtagttcattctc

SEQ ID NO: 1039 - DNA, 25 bp, Homo sapiens
tgagtctactctctactggcccaaa

SEQ ID NO: 1040 - DNA, 25 bp, Homo sapiens
gtgtggcctttgctaccatctttaa

SEQ ID NO: 1041 - DNA, 25 bp, Homo sapiens
agcccagtgcttcatgacctagtta

SEQ ID NO: 1042 - DNA, 25 bp, Homo sapiens
cttttttggtacgaaggctcacaca

SEQ ID NO: 1043 - DNA, 25 bp, Homo sapiens
ctatccaagtagagtagccatcact

SEQ ID NO: 1044 - DNA, 25 bp, Homo sapiens
cagctccagtgtctccttataccta

SEQ ID NO: 1045 - DNA, 25 bp, Homo sapiens
ttcatgccaaagttcccgggaattg

SEQ ID NO: 1046 - DNA, 25 bp, Homo sapiens
gcacagctatcctttcttctcgggg

SEQ ID NO: 1047 - DNA, 25 bp, Homo sapiens
ggaagcaattgctgactggctattc

SEQ ID NO: 1048 - DNA, 25 bp, Homo sapiens
ctgctgttgagcatctgccttgtaa

SEQ ID NO: 1049 - DNA, 25 bp, Homo sapiens
gagctacctgttacctctctcagtg

SEQ ID NO: 1050 - DNA, 25 bp, Homo sapiens
agcctcagtggatttctatttcttg

SEQ ID NO: 1051 - DNA, 25 bp, Homo sapiens
ggcagaagtctacaatcctagtagg

SEQ ID NO: 1052 - DNA, 25 bp, Homo sapiens
agtatgcctttgagacttgagtgtg

SEQ ID NO: 1053 - DNA, 25 bp, Homo sapiens
cgtctccagaaatgcttcaggctta

SEQ ID NO: 1054 - DNA, 25 bp, Homo sapiens
tatggggcccgtgaataattactgc

SEQ ID NO: 1055 - DNA, 25 bp, Homo sapiens
ttgccctgtctaaaatgagaggtca

SEQ ID NO: 1056 - DNA, 25 bp, Homo sapiens
taccagtgtagttgagccctctccg

SEQ ID NO: 1057 - DNA, 25 bp, Homo sapiens
cacagcttggttcaggatgattttc

SEQ ID NO: 1058 - DNA, 25 bp, Homo sapiens
ggcctgcacgttaccttgacccata

SEQ ID NO: 1059 - DNA, 25 bp, Homo sapiens
ggattagatgccctcccacatgata

SEQ ID NO: 1060 - DNA, 25 bp, Homo sapiens
acagtttaaactgctggatcagccc

SEQ ID NO: 1061 - DNA, 25 bp, Homo sapiens
cgtcttgtggaagcatgcagtcatc

SEQ ID NO: 1062 - DNA, 25 bp, Homo sapiens
tcatgacgtgtgtgcttataagttc

SEQ ID NO: 1063 - DNA, 25 bp, Homo sapiens
gggcccgacggcttccttttatatg

SEQ ID NO: 1064 - DNA, 25 bp, Homo sapiens
caccagtgtctatcagatgtcagca

SEQ ID NO: 1065 - DNA, 25 bp, Homo sapiens
ctcccgcttatctgaaatccaatgg

SEQ ID NO: 1066 - DNA, 25 bp, Homo sapiens
gccattgtaggaacctccttcgaga

SEQ ID NO: 1067 - DNA, 25 bp, Homo sapiens
tagctgtcttctggggctcatttta

SEQ ID NO: 1068 - DNA, 25 bp, Homo sapiens
tgtcctcacaggttgctaaacagta

SEQ ID NO: 1069 - DNA, 25 bp, Homo sapiens
gcagcctcgtatgatcagtataaca

SEQ ID NO: 1070 - DNA, 25 bp, Homo sapiens
aaccctgttgtggatctgactacta

SEQ ID NO: 1071 - DNA, 25 bp, Homo sapiens
ttgcccggagctaccagaaacattc

SEQ ID NO: 1072 - DNA, 25 bp, Homo sapiens
cgtctggcatcgaaacgctgacttg

SEQ ID NO: 1073 - DNA, 25 bp, Homo sapiens
cattgccctggttggagatttattc

SEQ ID NO: 1074 - DNA, 25 bp, Homo sapiens
cttgcagggaaaggccacaatattc

SEQ ID NO: 1075 - DNA, 25 bp, Homo sapiens
tgctgtttcccttgccagtatgtta

SEQ ID NO: 1076 - DNA, 25 bp, Homo sapiens
ggtcaagtatttgtccctacccatt

SEQ ID NO: 1077 - DNA, 25 bp, Homo sapiens
gctaagtttacgcagggacagttca

SEQ ID NO: 1078 - DNA, 25 bp, Homo sapiens
ggctaccagaatcctgactctaata

SEQ ID NO: 1079 - DNA, 25 bp, Homo sapiens
gtcatggaacactgctgctacttta

SEQ ID NO: 1080 - DNA, 25 bp, Homo sapiens
ccagcatggcctcagatattatgta

SEQ ID NO: 1081 - DNA, 25 bp, Homo sapiens
cagcccttattggagaacagaatta

SEQ ID NO: 1082 - DNA, 25 bp, Homo sapiens
ccctcgtgcctttacagactaagaa

SEQ ID NO: 1083 - DNA, 25 bp, Homo sapiens
taagtgctcttcctggcctgactgg

SEQ ID NO: 1084 - DNA, 25 bp, Homo sapiens
aaggataaaatttataaaagttgtc

SEQ ID NO: 1085 - DNA, 25 bp, Homo sapiens
ttccataatagtttttaacctaaaa

SEQ ID NO: 1086 - DNA, 25 bp, Homo sapiens
tctggggcacaatctcataagcaca

SEQ ID NO: 1087 - DNA, 25 bp, Homo sapiens
gccgttagtacattagcagaacata

SEQ ID NO: 1088 - DNA, 25 bp, Homo sapiens
aggcagtacttagcttcctaatgta

SEQ ID NO: 1089 - DNA, 25 bp, Homo sapiens
cctgcttttacccatgaagttttaa

SEQ ID NO: 1090 - DNA, 25 bp, Homo sapiens
gaacaattattgatcctattctcaa

SEQ ID NO: 1091 - DNA, 25 bp, Homo sapiens
ccattctgatggaggagtgactacc

SEQ ID NO: 1092 - DNA, 25 bp, Homo sapiens
atttatagaattacaaaatagagtg

SEQ ID NO: 1093 - DNA, 25 bp, Homo sapiens
gtgagatatatatgtagcataaact

SEQ ID NO: 1094 - DNA, 25 bp, Homo sapiens
agcagaaatcccatcaaccagaaga

SEQ ID NO: 1095 - DNA, 25 bp, Homo sapiens
ttcgagttggcttggcttacttttc

SEQ ID NO: 1096 - DNA, 25 bp, Homo sapiens
ggcaccatgtgtctgatatctcctg

SEQ ID NO: 1097 - DNA, 25 bp, Homo sapiens
gttgcatctctcaccatgtctcatt

SEQ ID NO: 1098 - DNA, 25 bp, Homo sapiens
ttctgacatctttgggcaacccatg

SEQ ID NO: 1099 - DNA, 25 bp, Homo sapiens
tcccacttgcaggtctttgtaacta

SEQ ID NO: 1100 - DNA, 25 bp, Homo sapiens
ttctaggtttcagagtgggactatc

SEQ ID NO: 1101 - DNA, 25 bp, Homo sapiens
catctcaagaaatgcaccatagaaa

SEQ ID NO: 1102 - DNA, 25 bp, Homo sapiens
ctgcaggatgtcagaagtagtttta

SEQ ID NO: 1103 - DNA, 25 bp, Homo sapiens
ccacagtcttctcagcagggccaga

SEQ ID NO: 1104 - DNA, 25 bp, Homo sapiens
ggcagttccctctcttattctttaa

SEQ ID NO: 1105 - DNA, 25 bp, Homo sapiens
gccttgtggccactgctatccttta

SEQ ID NO: 1106 - DNA, 25 bp, Homo sapiens
ttccactggagaaaaatctacgttc

SEQ ID NO: 1107 - DNA, 25 bp, Homo sapiens
aagctgattcttctgtcgacctacc

SEQ ID NO: 1108 - DNA, 25 bp, Homo sapiens
gtgggtcctagagcattattcaata

SEQ ID NO: 1109 - DNA, 25 bp, Homo sapiens
tcagtgtcagcgttgaaactctatc

SEQ ID NO: 1110 - DNA, 25 bp, Homo sapiens
ccctggaggtcttcggaatggaaac

SEQ ID NO: 1111 - DNA, 25 bp, Homo sapiens
ttaatattctttttttttaaggtgg

SEQ ID NO: 1112 - DNA, 25 bp, Homo sapiens
ctcagggtgggtatgtttggttccc

SEQ ID NO: 1113 - DNA, 25 bp, Homo sapiens
taaatgactattattaagaagtccc

SEQ ID NO: 1114 - DNA, 25 bp, Homo sapiens
gacagtttcctggtttcctagatta

SEQ ID NO: 1115 - DNA, 25 bp, Homo sapiens
tggctcaaaagcatagacgtttcta

SEQ ID NO: 1116 - DNA, 25 bp, Homo sapiens
ttgtgcagctatgagccagcccttg

SEQ ID NO: 1117 - DNA, 25 bp, Homo sapiens
tctccactctggtaagctctgaatc

SEQ ID NO: 1118 - DNA, 25 bp, Homo sapiens
gaggactgtcctagggtctttcaca

SEQ ID NO: 1119 - DNA, 25 bp, Homo sapiens
agcccttcctgtagaaatttctgga

SEQ ID NO: 1120 - DNA, 25 bp, Homo sapiens
agagctcaactttcaaccctgggtg

SEQ ID NO: 1121 - DNA, 25 bp, Homo sapiens
tcttataggtccacagccttggcta

SEQ ID NO: 1122 - DNA, 25 bp, Homo sapiens
ggcactcgcttaggaattatgaaac

SEQ ID NO: 1123 - DNA, 25 bp, Homo sapiens
tggagaggagctacccaatagtctg

SEQ ID NO: 1124 - DNA, 25 bp, Homo sapiens
gcgtgagcccttaacaagtcttgaa

SEQ ID NO: 1125 - DNA, 25 bp, Homo sapiens
gggcttctgaaacaaataattactg

SEQ ID NO: 1126 - DNA, 25 bp, Homo sapiens
gctgcagtaatccaaccagatagta

SEQ ID NO: 1127 - DNA, 25 bp, Homo sapiens
ggccagggttatgttcaactcatca

SEQ ID NO: 1128 - DNA, 25 bp, Homo sapiens
gtgcatgcagtgaaggagtgacctc

SEQ ID NO: 1129 - DNA, 25 bp, Homo sapiens
gaagctctcttgtgtgactggatca

SEQ ID NO: 1130 - DNA, 25 bp, Homo sapiens
gcgtagggtctgagcaaactgatcc

SEQ ID NO: 1131 - DNA, 25 bp, Homo sapiens
tctgcctctacctctgcatgttata

SEQ ID NO: 1132 - DNA, 25 bp, Homo sapiens
ccaaggcgtataaactttgtaggtc

SEQ ID NO: 1133 - DNA, 25 bp, Homo sapiens
gcacacaggttttgttcagcttaca

SEQ ID NO: 1134 - DNA, 25 bp, Homo sapiens
cctcctgtgaatatccagactgttc

SEQ ID NO: 1135 - DNA, 25 bp, Homo sapiens
gctgacaacttgaaaaacccacgta

SEQ ID NO: 1136 - DNA, 25 bp, Homo sapiens
cccttgtagggataatatggaaata

SEQ ID NO: 1137 - DNA, 25 bp, Homo sapiens
tccctgtgtgtactgtgtttctgtg

SEQ ID NO: 1138 - DNA, 25 bp, Homo sapiens
ctagagtactgaaaatctgaatgtg

SEQ ID NO: 1139 - DNA, 25 bp, Homo sapiens
gggcttaaccaatcaagagacaata

SEQ ID NO: 1140 - DNA, 25 bp, Homo sapiens
caagggctaccatgtttcatcagga

SEQ ID NO: 1141 - DNA, 25 bp, Homo sapiens
gctcagagccttatattacccaaga

SEQ ID NO: 1142 - DNA, 25 bp, Homo sapiens
ggcggtctttcctttggcttatatt

SEQ ID NO: 1143 - DNA, 25 bp, Homo sapiens
ggtccatgccgatcgtaactgagtg

SEQ ID NO: 1144 - DNA, 25 bp, Homo sapiens
accggttgtcacctgtttaggacca

SEQ ID NO: 1145 - DNA, 25 bp, Homo sapiens
gggcagtctactcttttaaaaattg

SEQ ID NO: 1146 - DNA, 25 bp, Homo sapiens
tggaggctggattattctgcacatc

SEQ ID NO: 1147 - DNA, 25 bp, Homo sapiens
gttaccgcagaacacagtgcacctg

SEQ ID NO: 1148 - DNA, 25 bp, Homo sapiens
tggtttcccaccagacagtagttta

SEQ ID NO: 1149 - DNA, 25 bp, Homo sapiens
aggattttcctctcttctgacattg

SEQ ID NO: 1150 - DNA, 25 bp, Homo sapiens
cagggctttctagtttgctacagtc

SEQ ID NO: 1151 - DNA, 25 bp, Homo sapiens
cgccctattgtgatgcttttgagta

SEQ ID NO: 1152 - DNA, 25 bp, Homo sapiens
gttccctaaggatgcttctatattt

SEQ ID NO: 1153 - DNA, 25 bp, Homo sapiens
acggtgagtcacagacctttggacc

SEQ ID NO: 1154 - DNA, 25 bp, Homo sapiens
ctagcctctggaactgcgaaaaata

SEQ ID NO: 1155 - DNA, 25 bp, Homo sapiens
ggctcttccttggttcagtccttaa

SEQ ID NO: 1156 - DNA, 25 bp, Homo sapiens
actccaattttctcattttatcatg

SEQ ID NO: 1157 - DNA, 25 bp, Homo sapiens
tcggatttttttggtatgatgcaga

SEQ ID NO: 1158 - DNA, 25 bp, Homo sapiens
tgttgcgctgaattttatttctaaa

SEQ ID NO: 1159 - DNA, 25 bp, Homo sapiens
gagttaattttcatattaagagaaa

SEQ ID NO: 1160 - DNA, 25 bp, Homo sapiens
ccttcgggtgacagggatattaagc

SEQ ID NO: 1161 - DNA, 25 bp, Homo sapiens
tgaattggccattgcatacctgagc

SEQ ID NO: 1162 - DNA, 25 bp, Homo sapiens
ctggtggcctagagcttctgtttta

SEQ ID NO: 1163 - DNA, 25 bp, Homo sapiens
cagcctcagatggttgctaaatcta

SEQ ID NO: 1164 - DNA, 25 bp, Homo sapiens
cttgagtttactgggtttccacaca

SEQ ID NO: 1165 - DNA, 25 bp, Homo sapiens
accttgaccagggaaacatagttgg

SEQ ID NO: 1166 - DNA, 25 bp, Homo sapiens
cctggttgcccagatatgtattagg

SEQ ID NO: 1167 - DNA, 25 bp, Homo sapiens
ctctttggcttttaagacaacatgc

SEQ ID NO: 1168 - DNA, 25 bp, Homo sapiens
tttgtttttatcgtgtgtatttgtg

SEQ ID NO: 1169 - DNA, 25 bp, Homo sapiens
gatcccttggtctctgcagcattgc

SEQ ID NO: 1170 - DNA, 25 bp, Homo sapiens
cctcctctctgtgactgcatttcta

SEQ ID NO: 1171 - DNA, 25 bp, Homo sapiens
acctctttacatttctaataatatt

SEQ ID NO: 1172 - DNA, 25 bp, Homo sapiens
gtcattttctgacagcatatttatt

SEQ ID NO: 1173 - DNA, 25 bp, Homo sapiens
tatggcttcctcactagaggacaat

SEQ ID NO: 1174 - DNA, 25 bp, Homo sapiens
ggtagctgtagttttgcccatttta

SEQ ID NO: 1175 - DNA, 25 bp, Homo sapiens
gagtgagactcttttgcctttatga

SEQ ID NO: 1176 - DNA, 25 bp, Homo sapiens
gcccgggatttcatgaggcattaca

SEQ ID NO: 1177 - DNA, 25 bp, Homo sapiens
tccactggagtctggcagaaatcca

SEQ ID NO: 1178 - DNA, 25 bp, Homo sapiens
gaaaaattcaactatataaaatatg

SEQ ID NO: 1179 - DNA, 25 bp, Homo sapiens
tgccaccaatgaagataggagttaa

SEQ ID NO: 1180 - DNA, 25 bp, Homo sapiens
cttgcccaataaactcagagactgt

SEQ ID NO: 1181 - DNA, 25 bp, Homo sapiens
gtctctgtcttgtggattctgctta

SEQ ID NO: 1182 - DNA, 25 bp, Homo sapiens
tactgtgaaggctgttagaaactga

SEQ ID NO: 1183 - DNA, 25 bp, Homo sapiens
gggtattgtaaatcccactgtatta

SEQ ID NO: 1184 - DNA, 25 bp, Homo sapiens
ttgtattcccaaaagctctactgtg

SEQ ID NO: 1185 - DNA, 25 bp, Homo sapiens
gctatgtttctgagcttctaaaaga

SEQ ID NO: 1186 - DNA, 25 bp, Homo sapiens
tttttctctttgagaaatactgagc

SEQ ID NO: 1187 - DNA, 25 bp, Homo sapiens
taggccaagtaccaaagagtttatc

SEQ ID NO: 1188 - DNA, 25 bp, Homo sapiens
gtgggctcgccaatgttacagaata

SEQ ID NO: 1189 - DNA, 25 bp, Homo sapiens
ccctcactaattgtttggccatgga

SEQ ID NO: 1190 - DNA, 25 bp, Homo sapiens
ccttaagtttgtctcccagtggtta

SEQ ID NO: 1191 - DNA, 25 bp, Homo sapiens
tgtgacttcccagcataaccttttg

SEQ ID NO: 1192 - DNA, 25 bp, Homo sapiens
ggggtactttgcacatgcccatagg

SEQ ID NO: 1193 - DNA, 25 bp, Homo sapiens
aggacagtctcagcttcagaacttc

SEQ ID NO: 1194 - DNA, 25 bp, Homo sapiens
ttcctttggagggtaagtcaacatc

SEQ ID NO: 1195 - DNA, 25 bp, Homo sapiens
ggggtctgctagcaccttaatgata

SEQ ID NO: 1196 - DNA, 25 bp, Homo sapiens
aacgaggcctttatgtggcatatta

SEQ ID NO: 1197 - DNA, 25 bp, Homo sapiens
acctggtcagtgttgttgctcttga

SEQ ID NO: 1198 - DNA, 25 bp, Homo sapiens
ttccttgggtggtgattgtagtcta

SEQ ID NO: 1199 - DNA, 25 bp, Homo sapiens
tggccacatgtactaggtcttaaaa

SEQ ID NO: 1200 - DNA, 25 bp, Homo sapiens
acacagctgggttgtcttttctttc

SEQ ID NO: 1201 - DNA, 25 bp, Homo sapiens
ccagagttgtcacgggcatacaata

SEQ ID NO: 1202 - DNA, 25 bp, Homo sapiens
cttgtttttggaggaatagtgtatc

SEQ ID NO: 1203 - DNA, 25 bp, Homo sapiens
gtcatctgaattatttgtgcccata

SEQ ID NO: 1204 - DNA, 25 bp, Homo sapiens
agataggcactcaacaccaatgttc

SEQ ID NO: 1205 - DNA, 25 bp, Homo sapiens
catgggcaagtaaaacaagtatgtc

SEQ ID NO: 1206 - DNA, 25 bp, Homo sapiens
gtttcctcaaggcaggctgtgatca

SEQ ID NO: 1207 - DNA, 25 bp, Homo sapiens
agcacaggcatctctccaaagcaga

SEQ ID NO: 1208 - DNA, 25 bp, Homo sapiens
gatgcctactctgtctctggtttca

SEQ ID NO: 1209 - DNA, 25 bp, Homo sapiens
tggagctgccagtctaaattaatta

SEQ ID NO: 1210 - DNA, 25 bp, Homo sapiens
atagctgtctcatgtgctgtatgcc

SEQ ID NO: 1211 - DNA, 25 bp, Homo sapiens
ggtgtgtccacaagcataaaattta

SEQ ID NO: 1212 - DNA, 25 bp, Homo sapiens
caggacctgtcctacctggaacaga

SEQ ID NO: 1213 - DNA, 25 bp, Homo sapiens
catgggctgaaagtctggtaactta

SEQ ID NO: 1214 - DNA, 25 bp, Homo sapiens
aaaatgaaaagacaatcaacaagca

SEQ ID NO: 1215 - DNA, 25 bp, Homo sapiens
gtctcagttacggatctcactttga

SEQ ID NO: 1216 - DNA, 25 bp, Homo sapiens
gtttattgaccgaacagctagggta

SEQ ID NO: 1217 - DNA, 25 bp, Homo sapiens
gtaaataaatgaattaatgtaagta

SEQ ID NO: 1218 - DNA, 25 bp, Homo sapiens
ctttgtgtgcataggttgtaactcc

SEQ ID NO: 1219 - DNA, 25 bp, Homo sapiens
tcactcttttgctggagactgaata

SEQ ID NO: 1220 - DNA, 25 bp, Homo sapiens
acccaggtcggaacagagctttaga

SEQ ID NO: 1221 - DNA, 25 bp, Homo sapiens
agcagtaaattatgagggatatccc

SEQ ID NO: 1222 - DNA, 25 bp, Homo sapiens
ccagggcagagagttgtcataattc

SEQ ID NO: 1223 - DNA, 25 bp, Homo sapiens
ctgcagtgataacaacataggcctt

SEQ ID NO: 1224 - DNA, 25 bp, Homo sapiens
tggcaggcataatctcttgaaagta

SEQ ID NO: 1225 - DNA, 25 bp, Homo sapiens
gctcctattgacagtaaggttaata

SEQ ID NO: 1226 - DNA, 25 bp, Homo sapiens
actgcttgcaatgatgataccctga

SEQ ID NO: 1227 - DNA, 25 bp, Homo sapiens
tggtagaacacttaggcagtgggat

SEQ ID NO: 1228 - DNA, 25 bp, Homo sapiens
ctttaacctgggtgggtcattctta

SEQ ID NO: 1229 - DNA, 25 bp, Homo sapiens
tggtcagttaacacatgctagggtc

SEQ ID NO: 1230 - DNA, 25 bp, Homo sapiens
tctccttgtaatgctgtaggtctca

SEQ ID NO: 1231 - DNA, 25 bp, Homo sapiens
agtcctgatcctatgggaagttaca

SEQ ID NO: 1232 - DNA, 25 bp, Homo sapiens
acttctctgagtgctgcgctttctc

SEQ ID NO: 1233 - DNA, 25 bp, Homo sapiens
ctgtgacaacccagctcccttgatt

SEQ ID NO: 1234 - DNA, 25 bp, Homo sapiens
ctgtctggccattgctttttaaatc

SEQ ID NO: 1235 - DNA, 25 bp, Homo sapiens
cctgcctgtgaaaagaaggtgactg

SEQ ID NO: 1236 - DNA, 25 bp, Homo sapiens
tatatattacaagattaacatatga

SEQ ID NO: 1237 - DNA, 25 bp, Homo sapiens
gggaactttgtctactctggggtaa

SEQ ID NO: 1238 - DNA, 25 bp, Homo sapiens
tgggcaagcagagtgttttttcttc

SEQ ID NO: 1239 - DNA, 25 bp, Homo sapiens
ggaactctctatagcaccaggcatg

SEQ ID NO: 1240 - DNA, 25 bp, Homo sapiens
cttcaggatgtatagaggccattta

SEQ ID NO: 1241 - DNA, 25 bp, Homo sapiens
gtctcccaggtttggccagaaatta

SEQ ID NO: 1242 - DNA, 25 bp, Homo sapiens
ctagcctgtctctcttgatcaaaaa

SEQ ID NO: 1243 - DNA, 25 bp, Homo sapiens
gtgccccactctgcaaaaaactaga

SEQ ID NO: 1244 - DNA, 25 bp, Homo sapiens
ggaaaatctaatcaattgaatgggt

SEQ ID NO: 1245 - DNA, 25 bp, Homo sapiens
gctcagcagcagttttcctcaaaaa

SEQ ID NO: 1246 - DNA, 25 bp, Homo sapiens
ccagtggcactagttgatttttata

SEQ ID NO: 1247 - DNA, 25 bp, Homo sapiens
tgccagtgagtttgatgccttataa

SEQ ID NO: 1248 - DNA, 25 bp, Homo sapiens
ccagacacatgagagcttatcagtg

SEQ ID NO: 1249 - DNA, 25 bp, Homo sapiens
ccatatgctgcctacttagggtaca

SEQ ID NO: 1250 - DNA, 25 bp, Homo sapiens
tctacctgttgtgttgtcctccttg

SEQ ID NO: 1251 - DNA, 25 bp, Homo sapiens
gatgtgacattgaaaattgtatacc

SEQ ID NO: 1252 - DNA, 25 bp, Homo sapiens
accggcatgcttctgcaatctgttc

SEQ ID NO: 1253 - DNA, 25 bp, Homo sapiens
ccctaatcagggcattgtcacattt

SEQ ID NO: 1254 - DNA, 25 bp, Homo sapiens
ttaaaaattgtattaagaaaagttg

SEQ ID NO: 1255 - DNA, 25 bp, Homo sapiens
tgccactagctctttttgatgtaca

SEQ ID NO: 1256 - DNA, 25 bp, Homo sapiens
ataagtagaatttctgcttatctga

SEQ ID NO: 1257 - DNA, 25 bp, Homo sapiens
ttccagggcagactatgcactttta

SEQ ID NO: 1258 - DNA, 25 bp, Homo sapiens
ctgtgtggtcacttaccaatctgga

SEQ ID NO: 1259 - DNA, 25 bp, Homo sapiens
gtgtgaatatctatgtatgtaaata

SEQ ID NO: 1260 - DNA, 25 bp, Homo sapiens
aatggcatagttgtatattgactta

SEQ ID NO: 1261 - DNA, 25 bp, Homo sapiens
tccagggagggaatttgaaccaatc

SEQ ID NO: 1262 - DNA, 25 bp, Homo sapiens
catgtacaggggcttcttggaaacc

SEQ ID NO: 1263 - DNA, 25 bp, Homo sapiens
agcaggcagtttacaaagcattttc

SEQ ID NO: 1264 - DNA, 25 bp, Homo sapiens
cgtcctattgccatctttcagtaaa

SEQ ID NO: 1265 - DNA, 25 bp, Homo sapiens
gctcccactgccctcaatgaaatgg

SEQ ID NO: 1266 - DNA, 25 bp, Homo sapiens
gtcgctgcatagttcctggtcattc

SEQ ID NO: 1267 - DNA, 25 bp, Homo sapiens
gaccctgtgtttgtttctatgtacg

SEQ ID NO: 1268 - DNA, 25 bp, Homo sapiens
gcagcccgcagccaaacctaagttt

SEQ ID NO: 1269 - DNA, 25 bp, Homo sapiens
ctcccttacagcatggtcaatagtg

SEQ ID NO: 1270 - DNA, 25 bp, Homo sapiens
tcctgttcagggcagtaatgaccaa

SEQ ID NO: 1271 - DNA, 25 bp, Homo sapiens
catttcatgtggcttggctttttat

SEQ ID NO: 1272 - DNA, 25 bp, Homo sapiens
ccatttggactcaagttgcttacta

SEQ ID NO: 1273 - DNA, 25 bp, Homo sapiens
ggctccctatatcctgggaaattta

SEQ ID NO: 1274 - DNA, 25 bp, Homo sapiens
gcctcggctcatttaagagttaaca

SEQ ID NO: 1275 - DNA, 25 bp, Homo sapiens
gagcctttccgactcctttctaatg

SEQ ID NO: 1276 - DNA, 25 bp, Homo sapiens
ctgactcttgcaacactagctagtg

SEQ ID NO: 1277 - DNA, 25 bp, Homo sapiens
ttggcatctttaggggttcacagta

SEQ ID NO: 1278 - DNA, 25 bp, Homo sapiens
tacggttcttcaggatcagtaactc

SEQ ID NO: 1279 - DNA, 25 bp, Homo sapiens
atccatggggctacagtttacactg

SEQ ID NO: 1280 - DNA, 25 bp, Homo sapiens
gctggtacagtatgattttgctctc

SEQ ID NO: 1281 - DNA, 25 bp, Homo sapiens
tacgcttttggagtcagatttcatg

SEQ ID NO: 1282 - DNA, 25 bp, Homo sapiens
ggcatggttagttttctagaaaata

SEQ ID NO: 1283 - DNA, 25 bp, Homo sapiens
ggggcaactgcaaaacacacactta

SEQ ID NO: 1284 - DNA, 25 bp, Homo sapiens
caggtatgcagaagttgggtttaaa

SEQ ID NO: 1285 - DNA, 25 bp, Homo sapiens
cagattgtcactgtttgtataacat

SEQ ID NO: 1286 - DNA, 25 bp, Homo sapiens
gccggttgcctgacatgtctgttta

SEQ ID NO: 1287 - DNA, 25 bp, Homo sapiens
tctccctccggtagaactattgttg

SEQ ID NO: 1288 - DNA, 25 bp, Homo sapiens
gtaatgataatgtcatctctatcca

SEQ ID NO: 1289 - DNA, 25 bp, Homo sapiens
gaggtaccactgtccatcattttta

SEQ ID NO: 1290 - DNA, 25 bp, Homo sapiens
tgccctcatcagcacatagaatatg

SEQ ID NO: 1291 - DNA, 25 bp, Homo sapiens
ctcccacgtggaataagagtgcctc

SEQ ID NO: 1292 - DNA, 25 bp, Homo sapiens
ctgggtgtacgtgtgtgtaactctc

SEQ ID NO: 1293 - DNA, 25 bp, Homo sapiens
ctagttcctcattaccagctggtgt

SEQ ID NO: 1294 - DNA, 25 bp, Homo sapiens
gtgtgccttttacctcgcctactta

SEQ ID NO: 1295 - DNA, 25 bp, Homo sapiens
gtgccactgttgctaaactctttta

SEQ ID NO: 1296 - DNA, 25 bp, Homo sapiens
catgttcagagaaagtgacccattc

SEQ ID NO: 1297 - DNA, 25 bp, Homo sapiens
cagactttataaggcctatggacaa

SEQ ID NO: 1298 - DNA, 25 bp, Homo sapiens
attgccatgactggacaggacactc

SEQ ID NO: 1299 - DNA, 25 bp, Homo sapiens
tcattacttacacaatactgggcta

SEQ ID NO: 1300 - DNA, 25 bp, Homo sapiens
actgggatcccaagaaggctaaaga

SEQ ID NO: 1301 - DNA, 25 bp, Homo sapiens
tggcagcatctctcctagttaaagg

SEQ ID NO: 1302 - DNA, 25 bp, Homo sapiens
gcacagagtctcatgggcataaaca

SEQ ID NO: 1303 - DNA, 25 bp, Homo sapiens
tgtacatggaaaattacagctatta

SEQ ID NO: 1304 - DNA, 25 bp, Homo sapiens
gccctaaaaaagagagcacatgttg

SEQ ID NO: 1305 - DNA, 25 bp, Homo sapiens
ggagaatcctgcaccactttgtaag

SEQ ID NO: 1306 - DNA, 25 bp, Homo sapiens
gcagtcagttgtctccacattagta

SEQ ID NO: 1307 - DNA, 25 bp, Homo sapiens
gagcctaccagtgtgaagtccattg

SEQ ID NO: 1308 - DNA, 25 bp, Homo sapiens
gttgtcatgcatttccctcataggg

SEQ ID NO: 1309 - DNA, 25 bp, Homo sapiens
acacaattgaccttgattccctgga

SEQ ID NO: 1310 - DNA, 25 bp, Homo sapiens
aaattgagtcttcaagtgcagcaga

SEQ ID NO: 1311 - DNA, 25 bp, Homo sapiens
accctggtgtctggactgtaaagca

SEQ ID NO: 1312 - DNA, 25 bp, Homo sapiens
agttcaaaaatgaatattgtaattt

SEQ ID NO: 1313 - DNA, 25 bp, Homo sapiens
ccatgatctggggaaaatattctca

SEQ ID NO: 1314 - DNA, 25 bp, Homo sapiens
ggctccagtaggcacttccaccaga

SEQ ID NO: 1315 - DNA, 25 bp, Homo sapiens
ggccctgcccacagacagatacata

SEQ ID NO: 1316 - DNA, 25 bp, Homo sapiens
gactccctggggttcttgttgacca

SEQ ID NO: 1317 - DNA, 25 bp, Homo sapiens
aggggctttcccattcagttagtca

SEQ ID NO: 1318 - DNA, 25 bp, Homo sapiens
atttatactttcctatacacgataa

SEQ ID NO: 1319 - DNA, 25 bp, Homo sapiens
aggtggtaccatctgcatctttttg

SEQ ID NO: 1320 - DNA, 25 bp, Homo sapiens
ctctctctgcattagggactctgga

SEQ ID NO: 1321 - DNA, 25 bp, Homo sapiens
ctccccatttagaaagtagtgactt

SEQ ID NO: 1322 - DNA, 25 bp, Homo sapiens
ggtacatggtctactccaaggcaaa

SEQ ID NO: 1323 - DNA, 25 bp, Homo sapiens
cttggctggtgacctcaggcaatta

SEQ ID NO: 1324 - DNA, 25 bp, Homo sapiens
acagaaggtatctaagaggcatcca

SEQ ID NO: 1325 - DNA, 25 bp, Homo sapiens
aaggtggcctgagtacatatatcta

SEQ ID NO: 1326 - DNA, 25 bp, Homo sapiens
tgcctgttgatatgccctgccactc

SEQ ID NO: 1327 - DNA, 25 bp, Homo sapiens
ccagctgcctggtacttttctttca

SEQ ID NO: 1328 - DNA, 25 bp, Homo sapiens
ttattccttaacctgggagccagtc

SEQ ID NO: 1329 - DNA, 25 bp, Homo sapiens
aacaaaaacaacaaatcaagcagat

SEQ ID NO: 1330 - DNA, 25 bp, Homo sapiens
cttgtcttggtgcatgtaggcattc

SEQ ID NO: 1331 - DNA, 25 bp, Homo sapiens
cttgcaagtgccagcagtagcaaca

SEQ ID NO: 1332 - DNA, 25 bp, Homo sapiens
agagtctgcctttccttccaatgtc

SEQ ID NO: 1333 - DNA, 25 bp, Homo sapiens
ctctgcattccctagcttgtactta

SEQ ID NO: 1334 - DNA, 25 bp, Homo sapiens
ggctgctactaaccaagctctcata

SEQ ID NO: 1335 - DNA, 25 bp, Homo sapiens
gaaccctgccttgcaatttggtaga

SEQ ID NO: 1336 - DNA, 25 bp, Homo sapiens
cgggacagccttcctgcttgcttta

SEQ ID NO: 1337 - DNA, 25 bp, Homo sapiens
ggaccatgtcatgttggcacaactc

SEQ ID NO: 1338 - DNA, 25 bp, Homo sapiens
atcctctgggactactaagcacatg

SEQ ID NO: 1339 - DNA, 25 bp, Homo sapiens
gccttgctgctgaaataagcctctt

SEQ ID NO: 1340 - DNA, 25 bp, Homo sapiens
aggcttgcttaactccacctgcatg

SEQ ID NO: 1341 - DNA, 25 bp, Homo sapiens
cctcaaggtgcttctgctttcatca

SEQ ID NO: 1342 - DNA, 25 bp, Homo sapiens
ttagggcttcacaaatgcatgcata

SEQ ID NO: 1343 - DNA, 25 bp, Homo sapiens
acagagtttctagcttgagccaagc

SEQ ID NO: 1344 - DNA, 25 bp, Homo sapiens
gtgactcctgactttgcctgtaatc

SEQ ID NO: 1345 - DNA, 25 bp, Homo sapiens
accagtgtcagcttccaattttttg

SEQ ID NO: 1346 - DNA, 25 bp, Homo sapiens
cggaggttatgccacctgtacaaca

SEQ ID NO: 1347 - DNA, 25 bp, Homo sapiens
tgtctcactggcatgacagtctgtc

SEQ ID NO: 1348 - DNA, 25 bp, Homo sapiens
gcgttgccaccatggtcctgtctga

SEQ ID NO: 1349 - DNA, 25 bp, Homo sapiens
tgcctcctggcacaaaggtactttg

SEQ ID NO: 1350 - DNA, 25 bp, Homo sapiens
ggtggggtctttttctctttaaatg

SEQ ID NO: 1351 - DNA, 25 bp, Homo sapiens
tgctgtgtcactattccagagcctg

SEQ ID NO: 1352 - DNA, 25 bp, Homo sapiens
gcgtatgtcaggacaccagcgtgac

SEQ ID NO: 1353 - DNA, 25 bp, Homo sapiens
ttgacgctactttcctctctgctta

SEQ ID NO: 1354 - DNA, 25 bp, Homo sapiens
ctcctgggaggcgatttcctttgtt

SEQ ID NO: 1355 - DNA, 25 bp, Homo sapiens
aatggcaactgtagggcaaacacta

SEQ ID NO: 1356 - DNA, 25 bp, Homo sapiens
tactgttcagacacagccttgtttg

SEQ ID NO: 1357 - DNA, 25 bp, Homo sapiens
ttactagatacaatcaacgtgttta

SEQ ID NO: 1358 - DNA, 25 bp, Homo sapiens
tgtcctggatgccacttatctatta

SEQ ID NO: 1359 - DNA, 25 bp, Homo sapiens
cactggctgggtacctttctattta

SEQ ID NO: 1360 - DNA, 25 bp, Homo sapiens
ccgcttggttgttgcatctcactta

SEQ ID NO: 1361 - DNA, 25 bp, Homo sapiens
ctggtgtgccagagaacttcttttt

SEQ ID NO: 1362 - DNA, 25 bp, Homo sapiens
tgctgtgccttctgagcctcttata

SEQ ID NO: 1363 - DNA, 25 bp, Homo sapiens
ggctaaatgctgaagttcccttgga

SEQ ID NO: 1364 - DNA, 25 bp, Homo sapiens
cctagtatcttattggcccagagga

SEQ ID NO: 1365 - DNA, 25 bp, Homo sapiens
tccctgggtaaagaggccatttatc

SEQ ID NO: 1366 - DNA, 25 bp, Homo sapiens
ccagcctgctgtttgagaggagtca

SEQ ID NO: 1367 - DNA, 25 bp, Homo sapiens
tcagcttgggaggaagacagattta

SEQ ID NO: 1368 - DNA, 25 bp, Homo sapiens
ccctagtgcatcgaggcataatcca

SEQ ID NO: 1369 - DNA, 25 bp, Homo sapiens
ggcaaactctggtaaatgttctata

SEQ ID NO: 1370 - DNA, 25 bp, Homo sapiens
ccaaccaactaaacaagcaaaattc

SEQ ID NO: 1371 - DNA, 25 bp, Homo sapiens
ggggtcccactctttttggcatata

SEQ ID NO: 1372 - DNA, 25 bp, Homo sapiens
caggggctttgtttggcatctgaga

SEQ ID NO: 1373 - DNA, 25 bp, Homo sapiens
ggccttgtatactcacctgggaatc

SEQ ID NO: 1374 - DNA, 25 bp, Homo sapiens
gggttgccatcctgccatttagaga

SEQ ID NO: 1375 - DNA, 25 bp, Homo sapiens
tccagccctgggtagtacacatttg

SEQ ID NO: 1376 - DNA, 25 bp, Homo sapiens
cgggctaactgattgcaaggctttc

SEQ ID NO: 1377 - DNA, 25 bp, Homo sapiens
atttttctaaagaaaaaaatgttgc

SEQ ID NO: 1378 - DNA, 25 bp, Homo sapiens
tcagggcagccacaaccagatcttc

SEQ ID NO: 1379 - DNA, 25 bp, Homo sapiens
gcccattaagcttgggaccatggta

SEQ ID NO: 1380 - DNA, 25 bp, Homo sapiens
gcaaagtttgtactgagctcccaca

SEQ ID NO: 1381 - DNA, 25 bp, Homo sapiens
ccgagtaccatttccgctgcataga

SEQ ID NO: 1382 - DNA, 25 bp, Homo sapiens
cagtggataagcttaaattttctag

SEQ ID NO: 1383 - DNA, 25 bp, Homo sapiens
gctgccttttactcctgccctgaga

SEQ ID NO: 1384 - DNA, 25 bp, Homo sapiens
ttttcccctccggaaatactgtatc

SEQ ID NO: 1385 - DNA, 25 bp, Homo sapiens
agtggcatggcctttttggacaaaa

SEQ ID NO: 1386 - DNA, 25 bp, Homo sapiens
cttcgtagctggtatatattggcca

SEQ ID NO: 1387 - DNA, 25 bp, Homo sapiens
aagcagtcggtcttggccctagata

SEQ ID NO: 1388 - DNA, 25 bp, Homo sapiens
gggatgttccttacaagcacgttta

SEQ ID NO: 1389 - DNA, 25 bp, Homo sapiens
cctgggcaagagaaatacggtatca

SEQ ID NO: 1390 - DNA, 25 bp, Homo sapiens
ccaggctcctgctttatatcacaga

SEQ ID NO: 1391 - DNA, 25 bp, Homo sapiens
ctcagcaggatctcgaaaatgtcgc

SEQ ID NO: 1392 - DNA, 25 bp, Homo sapiens
ccatttcctgctacgggttttctca

SEQ ID NO: 1393 - DNA, 25 bp, Homo sapiens
gaatatcatcactctggtactccta

SEQ ID NO: 1394 - DNA, 25 bp, Homo sapiens
actggtactggatagcctgcactca

SEQ ID NO: 1395 - DNA, 25 bp, Homo sapiens
tggatcccagcttttgccgctaaga

SEQ ID NO: 1396 - DNA, 25 bp, Homo sapiens
gcatgtcatgcccaagaaccatgta

SEQ ID NO: 1397 - DNA, 25 bp, Homo sapiens
ctgtcctcagagtgaactgttgcta

SEQ ID NO: 1398 - DNA, 25 bp, Homo sapiens
caggctccctcgttggtaccaatca

SEQ ID NO: 1399 - DNA, 25 bp, Homo sapiens
agagcttgctgtttggctgccatga

SEQ ID NO: 1400 - DNA, 25 bp, Homo sapiens
taaacacagtgttataaaatgaact

SEQ ID NO: 1401 - DNA, 25 bp, Homo sapiens
ctctctgcaggtgaaagggctatac

SEQ ID NO: 1402 - DNA, 25 bp, Homo sapiens
cccagcattaatgaaaacctctttc

SEQ ID NO: 1403 - DNA, 25 bp, Homo sapiens
gaaagtttctttctctccaggttgg

SEQ ID NO: 1404 - DNA, 25 bp, Homo sapiens
tcctaggtggttgattgctcactca

SEQ ID NO: 1405 - DNA, 25 bp, Homo sapiens
ccgagctttgctgagaaaatatttc

SEQ ID NO: 1406 - DNA, 25 bp, Homo sapiens
gagcaccctgcatttgtctcaaaga

SEQ ID NO: 1407 - DNA, 25 bp, Homo sapiens
gtagttccacaccacagacacgttg

SEQ ID NO: 1408 - DNA, 25 bp, Homo sapiens
tgcccgcttcagcagagatagaata

SEQ ID NO: 1409 - DNA, 25 bp, Homo sapiens
tctcagtgacccttagcaagatagc

SEQ ID NO: 1410 - DNA, 25 bp, Homo sapiens
tgtctctgtggcctagcaaaacttg

SEQ ID NO: 1411 - DNA, 25 bp, Homo sapiens
gtctatgtctccagccagtctcttg

SEQ ID NO: 1412 - DNA, 25 bp, Homo sapiens
cctggctctgctgctttgtgaatta

SEQ ID NO: 1413 - DNA, 25 bp, Homo sapiens
ggggtggctctgagtcaacctaatc

SEQ ID NO: 1414 - DNA, 25 bp, Homo sapiens
cagccgagactgttggtgttcatca

SEQ ID NO: 1415 - DNA, 25 bp, Homo sapiens
tgcccattggcctgtctttgacttc

SEQ ID NO: 1416 - DNA, 25 bp, Homo sapiens
tgctttgcagaatgagggcccagta

SEQ ID NO: 1417 - DNA, 25 bp, Homo sapiens
tcctggttcataaaagtgccctaca

SEQ ID NO: 1418 - DNA, 25 bp, Homo sapiens
gtgggcagagacattcactttccta

SEQ ID NO: 1419 - DNA, 25 bp, Homo sapiens
tggccctaatcagactccaatttta

SEQ ID NO: 1420 - DNA, 25 bp, Homo sapiens
tcccaggatttcagacacaggctta

SEQ ID NO: 1421 - DNA, 25 bp, Homo sapiens
tctttagccagagtgagcagttaca

SEQ ID NO: 1422 - DNA, 25 bp, Homo sapiens
atggatccgtgtttccctctatgca

SEQ ID NO: 1423 - DNA, 25 bp, Homo sapiens
gctgtgttctctcaataggtctgga

SEQ ID NO: 1424 - DNA, 25 bp, Homo sapiens
gccttctgacgtcaatttgcattta

SEQ ID NO: 1425 - DNA, 25 bp, Homo sapiens
ccggcactgtgctgagcaatgttta

SEQ ID NO: 1426 - DNA, 25 bp, Homo sapiens
gttagggtctaaaaacacgtcattg

SEQ ID NO: 1427 - DNA, 25 bp, Homo sapiens
tcttgctgggagtagatactgcttc

SEQ ID NO: 1428 - DNA, 25 bp, Homo sapiens
cccaattgagtaggcggttgttttc

SEQ ID NO: 1429 - DNA, 25 bp, Homo sapiens
gatccatgccctttgacatcaagtg

SEQ ID NO: 1430 - DNA, 25 bp, Homo sapiens
gtgctcagctaaaagactgctagtc

SEQ ID NO: 1431 - DNA, 25 bp, Homo sapiens
gtctgggtacgttctacaaagtgca

SEQ ID NO: 1432 - DNA, 25 bp, Homo sapiens
gaattaataaagtatctatttttcc

SEQ ID NO: 1433 - DNA, 25 bp, Homo sapiens
cttgtgaactccctggactcatgga

SEQ ID NO: 1434 - DNA, 25 bp, Homo sapiens
cggggagtccttccaattcataaaa

SEQ ID NO: 1435 - DNA, 25 bp, Homo sapiens
atgtgcccacttcatatctgataga

SEQ ID NO: 1436 - DNA, 25 bp, Homo sapiens
agcagctctaccttgaccagtgtta

SEQ ID NO: 1437 - DNA, 25 bp, Homo sapiens
tcggtcaccttgatacaccagatgg

SEQ ID NO: 1438 - DNA, 25 bp, Homo sapiens
ctgctcttgaggctactacattgtc

SEQ ID NO: 1439 - DNA, 25 bp, Homo sapiens
ttccttcagggtgcctaaaactgca

SEQ ID NO: 1440 - DNA, 25 bp, Homo sapiens
ggaatggccctgaatctctctcttt

SEQ ID NO: 1441 - DNA, 25 bp, Homo sapiens
agggactttctcttccactgggaga

SEQ ID NO: 1442 - DNA, 25 bp, Homo sapiens
ggcagccacttacacccattttatg

SEQ ID NO: 1443 - DNA, 25 bp, Homo sapiens
ctgttcactgttcactgtttaagag

SEQ ID NO: 1444 - DNA, 25 bp, Homo sapiens
gtcaagttcagttcaccagggtagg

SEQ ID NO: 1445 - DNA, 25 bp, Homo sapiens
tggccagaaccacatttgcattgca

SEQ ID NO: 1446 - DNA, 25 bp, Homo sapiens
ggggccacagttcttcaggaacata

SEQ ID NO: 1447 - DNA, 25 bp, Homo sapiens
agaccaggtgcccttaagtggaata

SEQ ID NO: 1448 - DNA, 25 bp, Homo sapiens
cacagactgagaacaaggcacggta

SEQ ID NO: 1449 - DNA, 25 bp, Homo sapiens
cactgtgtcctcagcctggtgaata

SEQ ID NO: 1450 - DNA, 25 bp, Homo sapiens
tggcccagtggctctgagttacaga

SEQ ID NO: 1451 - DNA, 25 bp, Homo sapiens
acttggcactctctaactcagggga

SEQ ID NO: 1452 - DNA, 25 bp, Homo sapiens
ccgacttggacatggaagtaagtta

SEQ ID NO: 1453 - DNA, 25 bp, Homo sapiens
tcacaacatctgtttagtaagatta

SEQ ID NO: 1454 - DNA, 25 bp, Homo sapiens
ggagctgccggacaaccaccattag

SEQ ID NO: 1455 - DNA, 25 bp, Homo sapiens
tgccctcctggatgctattaaagct

SEQ ID NO: 1456 - DNA, 25 bp, Homo sapiens
gtgcatctgctccaaacacaaaaga

SEQ ID NO: 1457 - DNA, 25 bp, Homo sapiens
cgataggaatgctaggatcttcaca

SEQ ID NO: 1458 - DNA, 25 bp, Homo sapiens
actttgtttctaatgtaatgggata

SEQ ID NO: 1459 - DNA, 25 bp, Homo sapiens
ggaagtccaaagtagttcttatttg

SEQ ID NO: 1460 - DNA, 25 bp, Homo sapiens
tgctcagtgctgtaggcaaattgcc

SEQ ID NO: 1461 - DNA, 25 bp, Homo sapiens
tgtacctgtgccaaaaactgatttc

SEQ ID NO: 1462 - DNA, 25 bp, Homo sapiens
tttactgcagtcaacttaataaggt

SEQ ID NO: 1463 - DNA, 25 bp, Homo sapiens
gcctacaggagacttctaccagaga

SEQ ID NO: 1464 - DNA, 25 bp, Homo sapiens
tgaatttatactgcaggccctcatg

SEQ ID NO: 1465 - DNA, 25 bp, Homo sapiens
ccaaccaggacagataaggacaact

SEQ ID NO: 1466 - DNA, 25 bp, Homo sapiens
aggagtttcctatcttcggttcaca

SEQ ID NO: 1467 - DNA, 25 bp, Homo sapiens
gccagtggccacatagttctagttt

SEQ ID NO: 1468 - DNA, 25 bp, Homo sapiens
tggcctttcatagttcagcagcacc

SEQ ID NO: 1469 - DNA, 25 bp, Homo sapiens
ttttgagaacctaaatagtagaaaa

SEQ ID NO: 1470 - DNA, 25 bp, Homo sapiens
cccgtggcagtcttaagagtcaata

SEQ ID NO: 1471 - DNA, 25 bp, Homo sapiens
tacccgcaattggatacaatgcatc

SEQ ID NO: 1472 - DNA, 25 bp, Homo sapiens
ctgagctccacttatgcattgggga

SEQ ID NO: 1473 - DNA, 25 bp, Homo sapiens
taaaataaatacccatatgtaaaac

SEQ ID NO: 1474 - DNA, 25 bp, Homo sapiens
atgctctgcaatggtaatgtggtcc

SEQ ID NO: 1475 - DNA, 25 bp, Homo sapiens
ggaacctcagtgacatccagttgtg

SEQ ID NO: 1476 - DNA, 25 bp, Homo sapiens
ttccaaaggtggcttacagatgtcc

SEQ ID NO: 1477 - DNA, 25 bp, Homo sapiens
cacacatgctgagagagagattacc

SEQ ID NO: 1478 - DNA, 25 bp, Homo sapiens
ttctccctctgaatgcatctcttta

SEQ ID NO: 1479 - DNA, 25 bp, Homo sapiens
ttggggacttggtttgcattgcata

SEQ ID NO: 1480 - DNA, 25 bp, Homo sapiens
ctcttgaagttcacagggcactatc

SEQ ID NO: 1481 - DNA, 25 bp, Homo sapiens
agtggcttgcagttcccattaataa

SEQ ID NO: 1482 - DNA, 25 bp, Homo sapiens
gacaaaaataagtacaacaaaaaag

SEQ ID NO: 1483 - DNA, 25 bp, Homo sapiens
tccaggaactcttgatgtacattgc

SEQ ID NO: 1484 - DNA, 25 bp, Homo sapiens
tgatccctccaaagctatgcacctg

SEQ ID NO: 1485 - DNA, 25 bp, Homo sapiens
tctttgatgatcatgcctggactga

SEQ ID NO: 1486 - DNA, 25 bp, Homo sapiens
gctctcccgtgcatttcagtgtctg

SEQ ID NO: 1487 - DNA, 25 bp, Homo sapiens
ctggagactcttatatggaaccctg

SEQ ID NO: 1488 - DNA, 25 bp, Homo sapiens
ttcctgggccacttagagctacaga

SEQ ID NO: 1489 - DNA, 25 bp, Homo sapiens
gccggctgacaaatcacctggagta

SEQ ID NO: 1490 - DNA, 25 bp, Homo sapiens
tgtgggaatttatcagcaagcctca

SEQ ID NO: 1491 - DNA, 25 bp, Homo sapiens
tgcagtatcctggtcagactctata

SEQ ID NO: 1492 - DNA, 25 bp, Homo sapiens
acactttcttttatttatccaataa

SEQ ID NO: 1493 - DNA, 25 bp, Homo sapiens
gagggctatttggtgtgcatgctta

SEQ ID NO: 1494 - DNA, 25 bp, Homo sapiens
ccatggccctgtagtaaattcttta

SEQ ID NO: 1495 - DNA, 25 bp, Homo sapiens
ttggtggtatgcacactgaagtttc

SEQ ID NO: 1496 - DNA, 25 bp, Homo sapiens
gctggctgaggatttgagactctcc

SEQ ID NO: 1497 - DNA, 25 bp, Homo sapiens
ctttgggcaggtaactccggatttc

SEQ ID NO: 1498 - DNA, 25 bp, Homo sapiens
gaaggcagagcctagagacatctta

SEQ ID NO: 1499 - DNA, 25 bp, Homo sapiens
gtggctcaatctcacttcaggtgta

SEQ ID NO: 1500 - DNA, 25 bp, Homo sapiens
ggcctaataaaagctcgacaatgtt

SEQ ID NO: 1501 - DNA, 25 bp, Homo sapiens
taaggttgcccagaagttactgtca

SEQ ID NO: 1502 - DNA, 25 bp, Homo sapiens
ctctgagcatatagtatacagtatt

SEQ ID NO: 1503 - DNA, 25 bp, Homo sapiens
ccaaatttgccctcatggtagagta

SEQ ID NO: 1504 - DNA, 25 bp, Homo sapiens
cctcagccagacacaagtggtactg

SEQ ID NO: 1505 - DNA, 25 bp, Homo sapiens
cctgacggggcaaaagataactgtc

SEQ ID NO: 1506 - DNA, 25 bp, Homo sapiens
tctatatttgcgacagggaaaaacc

SEQ ID NO: 1507 - DNA, 25 bp, Homo sapiens
aggactgccctcttagccctatgag

SEQ ID NO: 1508 - DNA, 25 bp, Homo sapiens
cagtggaggcttcagcattctctta

SEQ ID NO: 1509 - DNA, 25 bp, Homo sapiens
gctgctcctgtagcatatgtcttta

SEQ ID NO: 1510 - DNA, 25 bp, Homo sapiens
gttgctcacctatttcacttccata

SEQ ID NO: 1511 - DNA, 25 bp, Homo sapiens
tgcgggctcagcaacttacctggca

SEQ ID NO: 1512 - DNA, 25 bp, Homo sapiens
agctatgtcacaccaaggctatatg

SEQ ID NO: 1513 - DNA, 25 bp, Homo sapiens
atcaggtgggttagatcaactttca

SEQ ID NO: 1514 - DNA, 25 bp, Homo sapiens
cccagtaaatgcaggagactccatg

SEQ ID NO: 1515 - DNA, 25 bp, Homo sapiens
ctgccctggctgagaaacatttaac

SEQ ID NO: 1516 - DNA, 25 bp, Homo sapiens
atggcggaccctctttccctacaga

SEQ ID NO: 1517 - DNA, 25 bp, Homo sapiens
gggaacccacaagctattttttaga

SEQ ID NO: 1518 - DNA, 25 bp, Homo sapiens
gctccgcattctaggcctaaggttt

SEQ ID NO: 1519 - DNA, 25 bp, Homo sapiens
tctactcttcgaggaccaggggttc

SEQ ID NO: 1520 - DNA, 25 bp, Homo sapiens
agctgcctttgtttgatctctgaga

SEQ ID NO: 1521 - DNA, 25 bp, Homo sapiens
acggtgcccggtttccaaaggcttc

SEQ ID NO: 1522 - DNA, 25 bp, Homo sapiens
ggcaatgaccttgatttcccacttc

SEQ ID NO: 1523 - DNA, 25 bp, Homo sapiens
aggcaggcaccaactcccactgatg

SEQ ID NO: 1524 - DNA, 25 bp, Homo sapiens
cctcttaggagggaaactgaatctg

SEQ ID NO: 1525 - DNA, 25 bp, Homo sapiens
ccacagacagtatcctcagggtatg

SEQ ID NO: 1526 - DNA, 25 bp, Homo sapiens
ctgtggtgacaaaggaaattatctc

SEQ ID NO: 1527 - DNA, 25 bp, Homo sapiens
gccactcctcagatgactataggta

SEQ ID NO: 1528 - DNA, 25 bp, Homo sapiens
ggtagccactggaacctcctgaagg

SEQ ID NO: 1529 - DNA, 25 bp, Homo sapiens
cccataacaaaagttaattttttat

SEQ ID NO: 1530 - DNA, 25 bp, Homo sapiens
ggcattttccttcatctacttccca

SEQ ID NO: 1531 - DNA, 25 bp, Homo sapiens
tcttcaaagctaactggccagtatg

SEQ ID NO: 1532 - DNA, 25 bp, Homo sapiens
ttatttgtgtattcttgcttcctta

SEQ ID NO: 1533 - DNA, 25 bp, Homo sapiens
acctggaggctgaatcttgggattc

SEQ ID NO: 1534 - DNA, 25 bp, Homo sapiens
ctctcacttgggacagcttctcttg

SEQ ID NO: 1535 - DNA, 25 bp, Homo sapiens
gggcctcttggcttaacaatacttg

SEQ ID NO: 1536 - DNA, 25 bp, Homo sapiens
ttgaggatatagtcacccagtcacc

SEQ ID NO: 1537 - DNA, 25 bp, Homo sapiens
aactactcagaattattaacggtcc

SEQ ID NO: 1538 - DNA, 25 bp, Homo sapiens
ctggattccgtgctagcttgtttga

SEQ ID NO: 1539 - DNA, 25 bp, Homo sapiens
ggactctggagggaaaccattcatt

SEQ ID NO: 1540 - DNA, 25 bp, Homo sapiens
acacacatttttatacctttggaaa

SEQ ID NO: 1541 - DNA, 25 bp, Homo sapiens
gcaagctagtaaagaagaatccctg

SEQ ID NO: 1542 - DNA, 25 bp, Homo sapiens
tctggaagcgccatgaagtgtccta

SEQ ID NO: 1543 - DNA, 25 bp, Homo sapiens
tgtgccggcctccagaacaaacttc

SEQ ID NO: 1544 - DNA, 25 bp, Homo sapiens
ccctggctctcaccctgttgtgatg

SEQ ID NO: 1545 - DNA, 25 bp, Homo sapiens
ggggccctgctcttcactgttacct

SEQ ID NO: 1546 - DNA, 25 bp, Homo sapiens
tcatcagggccaattttacagtcta

SEQ ID NO: 1547 - DNA, 25 bp, Homo sapiens
gcacagtggcctggttatgctctca

SEQ ID NO: 1548 - DNA, 25 bp, Homo sapiens
cacatggatattgggtgggcactca

SEQ ID NO: 1549 - DNA, 25 bp, Homo sapiens
cctggttttcaaggggagcctcaac

SEQ ID NO: 1550 - DNA, 25 bp, Homo sapiens
tccttgttccttggctgagcacatg

SEQ ID NO: 1551 - DNA, 25 bp, Homo sapiens
tctcctagttgcttgctgacatttg

SEQ ID NO: 1552 - DNA, 25 bp, Homo sapiens
ctggcccactggactttgctcatac

SEQ ID NO: 1553 - DNA, 25 bp, Homo sapiens
tcttggtaaatgacttgctgaagta

SEQ ID NO: 1554 - DNA, 25 bp, Homo sapiens
accgtgggcttcttcctctgcaaaa

SEQ ID NO: 1555 - DNA, 25 bp, Homo sapiens
agactgctgcctgatacctggggtc

SEQ ID NO: 1556 - DNA, 25 bp, Homo sapiens
tacccgaactcgctggggcactttg

SEQ ID NO: 1557 - DNA, 25 bp, Homo sapiens
gagcccatgaggagcagagattttc

SEQ ID NO: 1558 - DNA, 25 bp, Homo sapiens
cctcctccaggagttgagtttctca

SEQ ID NO: 1559 - DNA, 25 bp, Homo sapiens
ggccagagagatgcaagcttaaaca

SEQ ID NO: 1560 - DNA, 25 bp, Homo sapiens
agaggttcccagagctgtgcccaca

SEQ ID NO: 1561 - DNA, 25 bp, Homo sapiens
actgcctcctgccatgggaagcatg

SEQ ID NO: 1562 - DNA, 25 bp, Homo sapiens
ggccatttcatcagagtgctactca

SEQ ID NO: 1563 - DNA, 25 bp, Homo sapiens
tcccgagtgtttttggagggcaagc

SEQ ID NO: 1564 - DNA, 25 bp, Homo sapiens
gccatgggccatcttcttttgaatc

SEQ ID NO: 1565 - DNA, 25 bp, Homo sapiens
ggggctgtctcctgccttaatctta

SEQ ID NO: 1566 - DNA, 25 bp, Homo sapiens
ccggtggccctagacaagatcatgc

SEQ ID NO: 1567 - DNA, 25 bp, Homo sapiens
gagcagtgctccttcttccctgaaa

SEQ ID NO: 1568 - DNA, 25 bp, Homo sapiens
agaggcacgtaattttgtgtgtggg

SEQ ID NO: 1569 - DNA, 25 bp, Homo sapiens
ctgcccttgagatgctgacaatgta

SEQ ID NO: 1570 - DNA, 25 bp, Homo sapiens
cgctcctctggcatttcagtcctga

SEQ ID NO: 1571 - DNA, 25 bp, Homo sapiens
tcctgcaggctctgtggagcagcca

SEQ ID NO: 1572 - DNA, 25 bp, Homo sapiens
tgtccctggccggtaacaaaaatcc

SEQ ID NO: 1573 - DNA, 25 bp, Homo sapiens
agtggaccaggatcttctagccttc

SEQ ID NO: 1574 - DNA, 25 bp, Homo sapiens
tccctggttctgcaatgactgatga

SEQ ID NO: 1575 - DNA, 25 bp, Homo sapiens
ccctggctcctcctggcagaattta

SEQ ID NO: 1576 - DNA, 25 bp, Homo sapiens
ctagggccaatgcttagaactcaga

SEQ ID NO: 1577 - DNA, 25 bp, Homo sapiens
cccatgggagcctttgagagccttt

SEQ ID NO: 1578 - DNA, 25 bp, Homo sapiens
gcgtcacttcttcctggtcccgtta

SEQ ID NO: 1579 - DNA, 25 bp, Homo sapiens
gtgggctggcctctaattctctaaa

SEQ ID NO: 1580 - DNA, 25 bp, Homo sapiens
ttcctcaggagacgtggcatcatca

SEQ ID NO: 1581 - DNA, 25 bp, Homo sapiens
gcctgcctgctctgtgtgtcttaca

SEQ ID NO: 1582 - DNA, 25 bp, Homo sapiens
ccgtgttcacaggagctcagcattt

SEQ ID NO: 1583 - DNA, 25 bp, Homo sapiens
cccacgcagtggaatggagttatta

SEQ ID NO: 1584 - DNA, 25 bp, Homo sapiens
tggtcatcccatagacagcctgctg

SEQ ID NO: 1585 - DNA, 25 bp, Homo sapiens
gggactctggcgtgacattttaaaa

SEQ ID NO: 1586 - DNA, 25 bp, Homo sapiens
gtgagcctggagcaaccatgtattc

SEQ ID NO: 1587 - DNA, 25 bp, Homo sapiens
agcagcctcctcttggtggtaatca

SEQ ID NO: 1588 - DNA, 25 bp, Homo sapiens
ccttctggggtctatcaactgcatg

SEQ ID NO: 1589 - DNA, 25 bp, Homo sapiens
gctggcgggtcacctatttatttta

SEQ ID NO: 1590 - DNA, 25 bp, Homo sapiens
agccggccctctggatgtagcaaag

SEQ ID NO: 1591 - DNA, 25 bp, Homo sapiens
acaggccctctgagctgggatttta

SEQ ID NO: 1592 - DNA, 25 bp, Homo sapiens
acacgttggctttgcgcagctatga

SEQ ID NO: 1593 - DNA, 25 bp, Homo sapiens
tgctgctggagagatgagctcactc

SEQ ID NO: 1594 - DNA, 25 bp, Homo sapiens
ggaggagtctccacacagttgcagc

SEQ ID NO: 1595 - DNA, 25 bp, Homo sapiens
gtgtcccaatcttctgaggtgtcta

SEQ ID NO: 1596 - DNA, 25 bp, Homo sapiens
agggccatgcctctactttctaaga

SEQ ID NO: 1597 - DNA, 25 bp, Homo sapiens
actcggttgctactgtctggtgcta

SEQ ID NO: 1598 - DNA, 25 bp, Homo sapiens
ggagctgttgtcctcttcaaggtca

SEQ ID NO: 1599 - DNA, 25 bp, Homo sapiens
acattggcctctctccagggagtga

SEQ ID NO: 1600 - DNA, 25 bp, Homo sapiens
tctcacctgtctcccagtggagatg

SEQ ID NO: 1601 - DNA, 25 bp, Homo sapiens
gggcctgttccagaatggttcgaca

SEQ ID NO: 1602 - DNA, 25 bp, Homo sapiens
cgaccctctggcactgggattgcta

SEQ ID NO: 1603 - DNA, 25 bp, Homo sapiens
ctgtcgccagcagagaacacctttc

SEQ ID NO: 1604 - DNA, 25 bp, Homo sapiens
tctgccatgtttttagaggacccta

SEQ ID NO: 1605 - DNA, 25 bp, Homo sapiens
cttctggtgctcttgaacagggccc

SEQ ID NO: 1606 - DNA, 25 bp, Homo sapiens
gggaaatctctgtatctggcacctg

SEQ ID NO: 1607 - DNA, 25 bp, Homo sapiens
gtgatgttcacttgcacagcccatg

SEQ ID NO: 1608 - DNA, 25 bp, Homo sapiens
ctggtcctgcatacatggcactgtg

SEQ ID NO: 1609 - DNA, 25 bp, Homo sapiens
cctccgtgagatggtttgctgttta

SEQ ID NO: 1610 - DNA, 25 bp, Homo sapiens
tgtggcggtaccatcccaggattac

SEQ ID NO: 1611 - DNA, 25 bp, Homo sapiens
cttttactggagcacctactgggca

SEQ ID NO: 1612 - DNA, 25 bp, Homo sapiens
gaatcctggtctggccgttcctaac

SEQ ID NO: 1613 - DNA, 25 bp, Homo sapiens
ttcctgcttgacctggatggacgtc

SEQ ID NO: 1614 - DNA, 25 bp, Homo sapiens
ctattggaagggctgtcactggaca

SEQ ID NO: 1615 - DNA, 25 bp, Homo sapiens
ttagggacttcagggtttgcatttc

SEQ ID NO: 1616 - DNA, 25 bp, Homo sapiens
ggtcctcattttttcacttggctgg

SEQ ID NO: 1617 - DNA, 25 bp, Homo sapiens
ttatgcacactaggagcatcctagc

SEQ ID NO: 1618 - DNA, 25 bp, Homo sapiens
aaaccctggacgagagcccttgcta

SEQ ID NO: 1619 - DNA, 25 bp, Homo sapiens
tgattcgtatgcctctgacagactg

SEQ ID NO: 1620 - DNA, 25 bp, Homo sapiens
ccagggccttgtgtgataagaatca

SEQ ID NO: 1621 - DNA, 25 bp, Homo sapiens
tccgttggcctgaagcctgaccttt

SEQ ID NO: 1622 - DNA, 25 bp, Homo sapiens
gttccaatgccaatgagtgcctctc

SEQ ID NO: 1623 - DNA, 25 bp, Homo sapiens
gggccttgcctcttctttattcatg

SEQ ID NO: 1624 - DNA, 25 bp, Homo sapiens
accgcccgagtaagcatatgtcttc

SEQ ID NO: 1625 - DNA, 25 bp, Homo sapiens
tctctgtctccaaagggtgactcca

SEQ ID NO: 1626 - DNA, 25 bp, Homo sapiens
cccagtggcagctctagaaaatatc

SEQ ID NO: 1627 - DNA, 25 bp, Homo sapiens
tggctggcaaagctacctcatgctg

SEQ ID NO: 1628 - DNA, 25 bp, Homo sapiens
ggtctcagcccaggacaacctttta

SEQ ID NO: 1629 - DNA, 25 bp, Homo sapiens
acacatccgttctcaggggctctga

SEQ ID NO: 1630 - DNA, 25 bp, Homo sapiens
gggccctgtatactacccagcttga

SEQ ID NO: 1631 - DNA, 25 bp, Homo sapiens
cctgggcgaggatcatgcttaattt

SEQ ID NO: 1632 - DNA, 25 bp, Homo sapiens
gggcaggacagctgaccagacatca

SEQ ID NO: 1633 - DNA, 25 bp, Homo sapiens
gtggttccaggacaaatctccatgc

SEQ ID NO: 1634 - DNA, 25 bp, Homo sapiens
gtctgtgaaggcaacgccgtcattc

SEQ ID NO: 1635 - DNA, 25 bp, Homo sapiens
tggtaactctaggaatgcaccctcg

SEQ ID NO: 1636 - DNA, 25 bp, Homo sapiens
agggagtgcctgacttcatccatta

SEQ ID NO: 1637 - DNA, 25 bp, Homo sapiens
gcggcatgcccagtgaaaactacta

SEQ ID NO: 1638 - DNA, 25 bp, Homo sapiens
ctgttgtactttggggcactgtgca

SEQ ID NO: 1639 - DNA, 25 bp, Homo sapiens
tccctctcaggtggacatgctaaca

SEQ ID NO: 1640 - DNA, 25 bp, Homo sapiens
ggggtcccaaataacatgtccaggt

SEQ ID NO: 1641 - DNA, 25 bp, Homo sapiens
tttcaacagacaacggaccgggctc

SEQ ID NO: 1642 - DNA, 25 bp, Homo sapiens
atccatccagcagaggggtctccta

SEQ ID NO: 1643 - DNA, 25 bp, Homo sapiens
gagcctgctctaccctttctgaaaa

SEQ ID NO: 1644 - DNA, 25 bp, Homo sapiens
atcaaagctttttcccttggctggg

SEQ ID NO: 1645 - DNA, 25 bp, Homo sapiens
ttgtcatgcacaccagactatgtgg

SEQ ID NO: 1646 - DNA, 25 bp, Homo sapiens
tagaggcaaatgcgagtgaaatttc

SEQ ID NO: 1647 - DNA, 25 bp, Homo sapiens
ccgccagtggagcacattcaagtta

SEQ ID NO: 1648 - DNA, 25 bp, Homo sapiens
ggggaagaaacgctgcaaactattg

SEQ ID NO: 1649 - DNA, 25 bp, Homo sapiens
ggggcagcatttaccagatcagcca

SEQ ID NO: 1650 - DNA, 25 bp, Homo sapiens
ggctggttctccgatatctgacata

SEQ ID NO: 1651 - DNA, 25 bp, Homo sapiens
gttgcctgccagcatcacgaagatg

SEQ ID NO: 1652 - DNA, 25 bp, Homo sapiens
cctcctgggcccgatagaaatctca

SEQ ID NO: 1653 - DNA, 25 bp, Homo sapiens
tgcagttctgcagcgtccaacaata

SEQ ID NO: 1654 - DNA, 25 bp, Homo sapiens
tccggcttcacaggaggaacatttc

SEQ ID NO: 1655 - DNA, 25 bp, Homo sapiens
ggcctgtcttctgcatttccctaca

SEQ ID NO: 1656 - DNA, 25 bp, Homo sapiens
agcagactgcttgtttggatccaca

SEQ ID NO: 1657 - DNA, 25 bp, Homo sapiens
caggtatacactcttcatgggcttc

SEQ ID NO: 1658 - DNA, 25 bp, Homo sapiens
agtggacttgaagccgtaaatcatc

SEQ ID NO: 1659 - DNA, 25 bp, Homo sapiens
gccagggcccacatatgtttctatt

SEQ ID NO: 1660 - DNA, 25 bp, Homo sapiens
tccgccctgtgattttccaaaagtg

SEQ ID NO: 1661 - DNA, 25 bp, Homo sapiens
ccaggcacctttgcacgagagctca

SEQ ID NO: 1662 - DNA, 25 bp, Homo sapiens
ccctgcctctggatattagaactca

SEQ ID NO: 1663 - DNA, 25 bp, Homo sapiens
ggtcatcaccattctagagcgagta

SEQ ID NO: 1664 - DNA, 25 bp, Homo sapiens
gctggagacccatgcacttgtttta

SEQ ID NO: 1665 - DNA, 25 bp, Homo sapiens
ggtcaggcatgcactccaccttcta

SEQ ID NO: 1666 - DNA, 25 bp, Homo sapiens
cctcctttgctttggaagggtaaca

SEQ ID NO: 1667 - DNA, 25 bp, Homo sapiens
tcctgcacaaagtgggagatccgcc

SEQ ID NO: 1668 - DNA, 25 bp, Homo sapiens
gcttcatcaggtctccagggctcta

SEQ ID NO: 1669 - DNA, 25 bp, Homo sapiens
tcccagagggtctccagcagatttg

SEQ ID NO: 1670 - DNA, 25 bp, Homo sapiens
cagacctccgggctctttaggaata

SEQ ID NO: 1671 - DNA, 25 bp, Homo sapiens
tgtgctgcacaccagagcctcatgg

SEQ ID NO: 1672 - DNA, 25 bp, Homo sapiens
cctcttctttgtagtgggcagtttc

SEQ ID NO: 1673 - DNA, 25 bp, Homo sapiens
ccacggacatccagttcaaagtttc

SEQ ID NO: 1674 - DNA, 25 bp, Homo sapiens
tatggcctcttttcagccctggaga

SEQ ID NO: 1675 - DNA, 25 bp, Homo sapiens
tgggtttctcctccagcgaagtttg

SEQ ID NO: 1676 - DNA, 25 bp, Homo sapiens
tcaggcacctgcttgcaaaacagtg

SEQ ID NO: 1677 - DNA, 25 bp, Homo sapiens
accagcccagtgttcagctctgaga

SEQ ID NO: 1678 - DNA, 25 bp, Homo sapiens
ttcctgatctgtgagccaagccatt

SEQ ID NO: 1679 - DNA, 25 bp, Homo sapiens
ggccacccagtgtctatggaccttg

SEQ ID NO: 1680 - DNA, 25 bp, Homo sapiens
ggctactggaacctgaccatccttt

SEQ ID NO: 1681 - DNA, 25 bp, Homo sapiens
gaagtttgatgtgtctttggggcac

SEQ ID NO: 1682 - DNA, 25 bp, Homo sapiens
gctacgggctgatatgcaagttctc

SEQ ID NO: 1683 - DNA, 25 bp, Homo sapiens
cccgtgctcgccaataaagtgtgtg

SEQ ID NO: 1684 - DNA, 25 bp, Homo sapiens
tccaggaggcgatccacaaatcatc

SEQ ID NO: 1685 - DNA, 25 bp, Homo sapiens
gctgtagtgagacatggaccctttc

SEQ ID NO: 1686 - DNA, 25 bp, Homo sapiens
ttgcttcccgaacatagcctgtgca

SEQ ID NO: 1687 - DNA, 25 bp, Homo sapiens
agcctgtgcatttttaatgccacat

SEQ ID NO: 1688 - DNA, 25 bp, Homo sapiens
tggcatgcccatgcactgttgttta

SEQ ID NO: 1689 - DNA, 25 bp, Homo sapiens
ggagctccttcctgggcttatgttc

SEQ ID NO: 1690 - DNA, 25 bp, Homo sapiens
tgcccactctgaacctgaaagccgg

SEQ ID NO: 1691 - DNA, 25 bp, Homo sapiens
tatgcatggcctttgggagactctg

SEQ ID NO: 1692 - DNA, 25 bp, Homo sapiens
tgtggcagtacctccaattccatga

SEQ ID NO: 1693 - DNA, 25 bp, Homo sapiens
aggtgcctccatctttctgcaaagc

SEQ ID NO: 1694 - DNA, 25 bp, Homo sapiens
caggactcctcgcagagagcctcta

SEQ ID NO: 1695 - DNA, 25 bp, Homo sapiens
cacgttcagatcaggctcaggcttc

SEQ ID NO: 1696 - DNA, 25 bp, Homo sapiens
tggggccagaacagctctcagtatc

SEQ ID NO: 1697 - DNA, 25 bp, Homo sapiens
ggggctacaccacactctacaatgt

SEQ ID NO: 1698 - DNA, 25 bp, Homo sapiens
agttccctggacacctgaggctgca

SEQ ID NO: 1699 - DNA, 25 bp, Homo sapiens
gtggggctgtggcaatatccatacc

SEQ ID NO: 1700 - DNA, 25 bp, Homo sapiens
cctggatgatgcaaaggaatgcttg

SEQ ID NO: 1701 - DNA, 25 bp, Homo sapiens
gagtctactgatttttgggatgcac

SEQ ID NO: 1702 - DNA, 25 bp, Homo sapiens
ggctgctggccattactatgtatta

SEQ ID NO: 1703 - DNA, 25 bp, Homo sapiens
aggtttctgctttacacctggtccc

SEQ ID NO: 1704 - DNA, 25 bp, Homo sapiens
gctggggccttgagtaaacttatta

SEQ ID NO: 1705 - DNA, 25 bp, Homo sapiens
accgtagttggtctttttcttatta

SEQ ID NO: 1706 - DNA, 25 bp, Homo sapiens
agcttgtggccagaacgagagattg

SEQ ID NO: 1707 - DNA, 25 bp, Homo sapiens
ttacgctgagacatttgaggagtgc

SEQ ID NO: 1708 - DNA, 25 bp, Homo sapiens
ctgcttgataagaacctggtgcctt

SEQ ID NO: 1709 - DNA, 25 bp, Homo sapiens
cctttctgtggctgaacctctgctc

SEQ ID NO: 1710 - DNA, 25 bp, Homo sapiens
cctgcttcttggtttctgacaggca

SEQ ID NO: 1711 - DNA, 25 bp, Homo sapiens
aggaggccaatcgtcacccgtctgt

SEQ ID NO: 1712 - DNA, 25 bp, Homo sapiens
cttaggcagtagaaggcactcttga

SEQ ID NO: 1713 - DNA, 25 bp, Homo sapiens
cttcccagtccagatgtgtgagtga

SEQ ID NO: 1714 - DNA, 25 bp, Homo sapiens
ggagaacacgcacaacatccactgc

SEQ ID NO: 1715 - DNA, 25 bp, Homo sapiens
cccgtgacattggaggaaagccctg

SEQ ID NO: 1716 - DNA, 25 bp, Homo sapiens
atgagtttccagatgcccagtgccc

SEQ ID NO: 1717 - DNA, 25 bp, Homo sapiens
ggggcaggacacatcttttaagact

SEQ ID NO: 1718 - DNA, 25 bp, Homo sapiens
tcactgtgcctatgggtgtcttcca

SEQ ID NO: 1719 - DNA, 25 bp, Homo sapiens
tggtccagcctcaggctctaccacc

SEQ ID NO: 1720 - DNA, 25 bp, Homo sapiens
ccaagtggctgagcagttatgattc

SEQ ID NO: 1721 - DNA, 25 bp, Homo sapiens
caggccagctgagacacgatggaca

SEQ ID NO: 1722 - DNA, 25 bp, Homo sapiens
ctttgtcttcctaggcatttgtgcc

SEQ ID NO: 1723 - DNA, 25 bp, Homo sapiens
agctgctaagcttgccctgactcaa

SEQ ID NO: 1724 - DNA, 25 bp, Homo sapiens
gagcatgatgaacaagcacccactg

SEQ ID NO: 1725 - DNA, 25 bp, Homo sapiens
ggtctcagatctccttggacatgtc

SEQ ID NO: 1726 - DNA, 25 bp, Homo sapiens
tcttgaccagggtattgggcaaacc

SEQ ID NO: 1727 - DNA, 25 bp, Homo sapiens
gtccacctgtgccagcctcagaagg

SEQ ID NO: 1728 - DNA, 25 bp, Homo sapiens
ctgtgtgtgtctccgctaatgatca

SEQ ID NO: 1729 - DNA, 25 bp, Homo sapiens
gtgcaacagatggagcttcttattt

SEQ ID NO: 1730 - DNA, 25 bp, Homo sapiens
actccacggagctgctgcttgtgta

SEQ ID NO: 1731 - DNA, 25 bp, Homo sapiens
gctcgtggggatatctcatgaccta

SEQ ID NO: 1732 - DNA, 25 bp, Homo sapiens
ttcagggacacagacaaccagcatg

SEQ ID NO: 1733 - DNA, 25 bp, Homo sapiens
acaaaagaagaatggaatatctttg

SEQ ID NO: 1734 - DNA, 25 bp, Homo sapiens
agccctcactgagctgaaatccttg

SEQ ID NO: 1735 - DNA, 25 bp, Homo sapiens
tctgtagttggctgagaggcaatcc

SEQ ID NO: 1736 - DNA, 25 bp, Homo sapiens
agtcaccttcagcagcctatgtttg

SEQ ID NO: 1737 - DNA, 25 bp, Homo sapiens
ggcccagagaggcacatttttctaa

SEQ ID NO: 1738 - DNA, 25 bp, Homo sapiens
gtaataaacgttacaataaagatac

SEQ ID NO: 1739 - DNA, 25 bp, Homo sapiens
acagcggcttcctgagagcatttca

SEQ ID NO: 1740 - DNA, 25 bp, Homo sapiens
ctcaggcctcttctcaccttgggta

SEQ ID NO: 1741 - DNA, 25 bp, Homo sapiens
gggacagcccttgaccttatgaata

SEQ ID NO: 1742 - DNA, 25 bp, Homo sapiens
ctcctcactcaggacagattccaga

SEQ ID NO: 1743 - DNA, 25 bp, Homo sapiens
cagctgctgaattgctttttagtta

SEQ ID NO: 1744 - DNA, 25 bp, Homo sapiens
tggccttctggaagatccaccacta

SEQ ID NO: 1745 - DNA, 25 bp, Homo sapiens
ggaacgatttactttacccgatggc

SEQ ID NO: 1746 - DNA, 25 bp, Homo sapiens
aatccctgggctgttgttcctgtca

SEQ ID NO: 1747 - DNA, 25 bp, Homo sapiens
tccttgggaagcacagggattgacc

SEQ ID NO: 1748 - DNA, 25 bp, Homo sapiens
ccgcggtgagaattctggcagcttt

SEQ ID NO: 1749 - DNA, 25 bp, Homo sapiens
cccagtcttagtgagtacgctttcc

SEQ ID NO: 1750 - DNA, 25 bp, Homo sapiens
tctcagccatgagccaagggttttg

SEQ ID NO: 1751 - DNA, 25 bp, Homo sapiens
gagtccctgagcaaatgggccattg

SEQ ID NO: 1752 - DNA, 25 bp, Homo sapiens
cggcgagcttagtcctatggtgatt

SEQ ID NO: 1753 - DNA, 25 bp, Homo sapiens
ggtctcctcagaacatcagttaatg

SEQ ID NO: 1754 - DNA, 25 bp, Homo sapiens
gggcctctgcattggtgtattttaa

SEQ ID NO: 1755 - DNA, 25 bp, Homo sapiens
tggagggtctctttctatcccaaga

SEQ ID NO: 1756 - DNA, 25 bp, Homo sapiens
tgtgtgttctctgcgtgtatctgta

SEQ ID NO: 1757 - DNA, 25 bp, Homo sapiens
agcaggttgctactggacaggttcc

SEQ ID NO: 1758 - DNA, 25 bp, Homo sapiens
ctctgtgtgtatctctgtctgtgta

SEQ ID NO: 1759 - DNA, 25 bp, Homo sapiens
gcacgactgatcatggtgacctaca

SEQ ID NO: 1760 - DNA, 25 bp, Homo sapiens
tttgcccttgctgctactgacacgg

SEQ ID NO: 1761 - DNA, 25 bp, Homo sapiens
tggccgccagtacagaaggatcgta

SEQ ID NO: 1762 - DNA, 25 bp, Homo sapiens
ggaacctttcctttgccctctagtg

SEQ ID NO: 1763 - DNA, 25 bp, Homo sapiens
gtcctaggagaacgctctctactta

SEQ ID NO: 1764 - DNA, 25 bp, Homo sapiens
tgccaggctttgactttacccagga

SEQ ID NO: 1765 - DNA, 25 bp, Homo sapiens
gctccagcaaatgggtgtcaccctc

SEQ ID NO: 1766 - DNA, 25 bp, Homo sapiens
ttacaaagctgctggctggtccttg

SEQ ID NO: 1767 - DNA, 25 bp, Homo sapiens
ttgttctgagaccttgccatccttg

SEQ ID NO: 1768 - DNA, 25 bp, Homo sapiens
gcctcctgagatgctctagaaaatc

SEQ ID NO: 1769 - DNA, 25 bp, Homo sapiens
gcctgtctgcaggaccaagtcttga

SEQ ID NO: 1770 - DNA, 25 bp, Homo sapiens
gtccatctgactctaaggcgctttc

SEQ ID NO: 1771 - DNA, 25 bp, Homo sapiens
ccaggctcatgtgcaagctgtctta

SEQ ID NO: 1772 - DNA, 25 bp, Homo sapiens
tattctcttctcatggggcctgggc

SEQ ID NO: 1773 - DNA, 25 bp, Homo sapiens
gggttcctccagctgtgactacatg

SEQ ID NO: 1774 - DNA, 25 bp, Homo sapiens
ccgggttccctgttcatgaagcttc

SEQ ID NO: 1775 - DNA, 25 bp, Homo sapiens
tgatactgtgatctgattggaacta

SEQ ID NO: 1776 - DNA, 25 bp, Homo sapiens
aaacagggcactacattgtcagata

SEQ ID NO: 1777 - DNA, 25 bp, Homo sapiens
ctggtgcatgaccattgcttcctgg

SEQ ID NO: 1778 - DNA, 25 bp, Homo sapiens
ggccttctgaaagagcacacatttt

SEQ ID NO: 1779 - DNA, 25 bp, Homo sapiens
gcctcagggtaccatgtctcacttg

SEQ ID NO: 1780 - DNA, 25 bp, Homo sapiens
ggatgctgccttttcagaacccttt

SEQ ID NO: 1781 - DNA, 25 bp, Homo sapiens
ggggcattcctgtgctccctaatga

SEQ ID NO: 1782 - DNA, 25 bp, Homo sapiens
cttcccatgagaaagcaccactttg

SEQ ID NO: 1783 - DNA, 25 bp, Homo sapiens
ggcaccctttgctgctcactattta

SEQ ID NO: 1784 - DNA, 25 bp, Homo sapiens
ccttttgacagatgcctgagcccta

SEQ ID NO: 1785 - DNA, 25 bp, Homo sapiens
cggggctattctaacaggctcttta

SEQ ID NO: 1786 - DNA, 25 bp, Homo sapiens
cacagtgcccttccagtcagtcaga

SEQ ID NO: 1787 - DNA, 25 bp, Homo sapiens
ttccgccagcttcagacgtcatttg

SEQ ID NO: 1788 - DNA, 25 bp, Homo sapiens
aggagcatttcccatctgacttgca

SEQ ID NO: 1789 - DNA, 25 bp, Homo sapiens
tcccaaacggggagctgcattttca

SEQ ID NO: 1790 - DNA, 25 bp, Homo sapiens
ggcaccgtctctgttcctgggtcaa

SEQ ID NO: 1791 - DNA, 25 bp, Homo sapiens
ccagactgtgcaatgtagacgattc

SEQ ID NO: 1792 - DNA, 25 bp, Homo sapiens
ggtcggcactttctcttgttcataa

SEQ ID NO: 1793 - DNA, 25 bp, Homo sapiens
tttgtacggtagcatgtcagccata

SEQ ID NO: 1794 - DNA, 25 bp, Homo sapiens
ttccaccctgtagtcacctgatttg

SEQ ID NO: 1795 - DNA, 25 bp, Homo sapiens
ggcggccttgcttcagatggaaata

SEQ ID NO: 1796 - DNA, 25 bp, Homo sapiens
cccgggtagctccattctcaaagac

SEQ ID NO: 1797 - DNA, 25 bp, Homo sapiens
acactgtgagatctcctggttcatc

SEQ ID NO: 1798 - DNA, 25 bp, Homo sapiens
ggcgacttaacctctttccagttca

SEQ ID NO: 1799 - DNA, 25 bp, Homo sapiens
ttgctaccattctctgcgagctaca

SEQ ID NO: 1800 - DNA, 25 bp, Homo sapiens
cctggccatgcctgagaagagacaa

SEQ ID NO: 1801 - DNA, 25 bp, Homo sapiens
catgatcagtgttgtaaaggtttcc

SEQ ID NO: 1802 - DNA, 25 bp, Homo sapiens
gcttgctgcctgtgagagcatccta

SEQ ID NO: 1803 - DNA, 25 bp, Homo sapiens
ttgaagttcctttgttcctcacaga

SEQ ID NO: 1804 - DNA, 25 bp, Homo sapiens
atccgtaggagagacatactgtttc

SEQ ID NO: 1805 - DNA, 25 bp, Homo sapiens
ggggaaatcatcttgcctcagtacc

SEQ ID NO: 1806 - DNA, 25 bp, Homo sapiens
gacaggcgtctcattccacattgga

SEQ ID NO: 1807 - DNA, 25 bp, Homo sapiens
tggttcgttcccacatggcctgtta

SEQ ID NO: 1808 - DNA, 25 bp, Homo sapiens
acagcctttgtctttcctcagtggg

SEQ ID NO: 1809 - DNA, 25 bp, Homo sapiens
ccctggagatgctggacttgaactt

SEQ ID NO: 1810 - DNA, 25 bp, Homo sapiens
gactatccttgtgctggtcctcaga

SEQ ID NO: 1811 - DNA, 25 bp, Homo sapiens
ggtcttcctctgcaccaaggggata

SEQ ID NO: 1812 - DNA, 25 bp, Homo sapiens
tttccttcagggcaaaactagcgtg

SEQ ID NO: 1813 - DNA, 25 bp, Homo sapiens
ggcttcgaactcacccaactcagta

SEQ ID NO: 1814 - DNA, 25 bp, Homo sapiens
acagcctcttggtgtttgggagaca

SEQ ID NO: 1815 - DNA, 25 bp, Homo sapiens
aggctgaattcttcatcggagaact

SEQ ID NO: 1816 - DNA, 25 bp, Homo sapiens
ggccagtaccacaggcgtgtcatta

SEQ ID NO: 1817 - DNA, 25 bp, Homo sapiens
ggcccttgggctgttgtccacacaa

SEQ ID NO: 1818 - DNA, 25 bp, Homo sapiens
tggttctgtccactgtcctctctga

SEQ ID NO: 1819 - DNA, 25 bp, Homo sapiens
gccattttggttcatcagagcagta

SEQ ID NO: 1820 - DNA, 25 bp, Homo sapiens
agctgtgcatccagttgttggcata

SEQ ID NO: 1821 - DNA, 25 bp, Homo sapiens
ggtctacttttgtaaacatttaaaa

SEQ ID NO: 1822 - DNA, 25 bp, Homo sapiens
ggcagctggctcacactcaccatta

SEQ ID NO: 1823 - DNA, 25 bp, Homo sapiens
cgcctggtgtttatgttgatggata

SEQ ID NO: 1824 - DNA, 25 bp, Homo sapiens
gggtcccatttcaggtccctgccct

SEQ ID NO: 1825 - DNA, 25 bp, Homo sapiens
ggtctatatttttagtatgaaaatc

SEQ ID NO: 1826 - DNA, 25 bp, Homo sapiens
ttacagcctgacttgggaacatcca

SEQ ID NO: 1827 - DNA, 25 bp, Homo sapiens
ggcaggacttgttctccagaccaga

SEQ ID NO: 1828 - DNA, 25 bp, Homo sapiens
tcctgattgcaaaccggtgatattc

SEQ ID NO: 1829 - DNA, 25 bp, Homo sapiens
ctccctcccagaagtgctgttgttg

SEQ ID NO: 1830 - DNA, 25 bp, Homo sapiens
tcctgggaggacaattgaacacttt

SEQ ID NO: 1831 - DNA, 25 bp, Homo sapiens
ctgctccttgttggaaggtccttga

SEQ ID NO: 1832 - DNA, 25 bp, Homo sapiens
gctggcacagatcattttagaatta

SEQ ID NO: 1833 - DNA, 25 bp, Homo sapiens
ggcccttagtgcttttcccatgaga

SEQ ID NO: 1834 - DNA, 25 bp, Homo sapiens
cctgcttgctgccttctttcagaga

SEQ ID NO: 1835 - DNA, 25 bp, Homo sapiens
tccgtgtagccaaaaagtgcatgta

SEQ ID NO: 1836 - DNA, 25 bp, Homo sapiens
ggccaccctgatcacaatgcttttg

SEQ ID NO: 1837 - DNA, 25 bp, Homo sapiens
tctggctgtggacctcctgtctatt

SEQ ID NO: 1838 - DNA, 25 bp, Homo sapiens
gaaggcccttgtgactgtctccaga

SEQ ID NO: 1839 - DNA, 25 bp, Homo sapiens
gagggccattgcactttgtctatta

SEQ ID NO: 1840 - DNA, 25 bp, Homo sapiens
tggtggcagtttcccatgctaataa

SEQ ID NO: 1841 - DNA, 25 bp, Homo sapiens
gccctgagtgccataagctcatcga

SEQ ID NO: 1842 - DNA, 25 bp, Homo sapiens
gggcagagccctttcctaattttga

SEQ ID NO: 1843 - DNA, 25 bp, Homo sapiens
tgagtcattgctcattaattaactt

SEQ ID NO: 1844 - DNA, 25 bp, Homo sapiens
tgggaagtagcctaactgtaacact

SEQ ID NO: 1845 - DNA, 25 bp, Homo sapiens
tggctctttttcatgggacagtttc

SEQ ID NO: 1846 - DNA, 25 bp, Homo sapiens
gggagccctcagctctctgtgcagg

SEQ ID NO: 1847 - DNA, 25 bp, Homo sapiens
tggtcccacagctagcagtttttga

SEQ ID NO: 1848 - DNA, 25 bp, Homo sapiens
ttgttttgtttttgactttactaaa

SEQ ID NO: 1849 - DNA, 25 bp, Homo sapiens
ccattgccgatgactttggacttca

SEQ ID NO: 1850 - DNA, 25 bp, Homo sapiens
tcttcatcagtgtaggcctggccca

SEQ ID NO: 1851 - DNA, 25 bp, Homo sapiens
ttagcaaggatcacagcacaccatg

SEQ ID NO: 1852 - DNA, 25 bp, Homo sapiens
tgtcagcccagttgcacccaagtga

SEQ ID NO: 1853 - DNA, 25 bp, Homo sapiens
cacgtaactgcattccctcaaaata

SEQ ID NO: 1854 - DNA, 25 bp, Homo sapiens
ctcttatagggatcacacagctttt

SEQ ID NO: 1855 - DNA, 25 bp, Homo sapiens
gaatactcctatatttcaatgtggg

SEQ ID NO: 1856 - DNA, 25 bp, Homo sapiens
tctgggctacctttcatgatcttta

SEQ ID NO: 1857 - DNA, 25 bp, Homo sapiens
tgtgctgagatggtaccttcctttc

SEQ ID NO: 1858 - DNA, 25 bp, Homo sapiens
agccctggtgggtagtgataaccta

SEQ ID NO: 1859 - DNA, 25 bp, Homo sapiens
tcacatctatggtggggaggcccta

SEQ ID NO: 1860 - DNA, 25 bp, Homo sapiens
ctccaaggcagaggaactggtttct

SEQ ID NO: 1861 - DNA, 25 bp, Homo sapiens
ctccagtggatcactactgattaca

SEQ ID NO: 1862 - DNA, 25 bp, Homo sapiens
aagattttcacaatttaccctcaat

SEQ ID NO: 1863 - DNA, 25 bp, Homo sapiens
cagcaatgcagtctctccttatgtc

SEQ ID NO: 1864 - DNA, 25 bp, Homo sapiens
gaatgggccacttcagttctgagta

SEQ ID NO: 1865 - DNA, 25 bp, Homo sapiens
ccctggggcaaatctgctgtaatga

SEQ ID NO: 1866 - DNA, 25 bp, Homo sapiens
ctgcctgatgggctcctgactgata

SEQ ID NO: 1867 - DNA, 25 bp, Homo sapiens
gtgggcccgatgtcataaattattg

SEQ ID NO: 1868 - DNA, 25 bp, Homo sapiens
ctgtgctactccatgacccgattca

SEQ ID NO: 1869 - DNA, 25 bp, Homo sapiens
tttttccaggacacagcctcagctg

SEQ ID NO: 1870 - DNA, 25 bp, Homo sapiens
ccatggcctggtagttcttgattta

SEQ ID NO: 1871 - DNA, 25 bp, Homo sapiens
gacctcgctgtgtaggccagaaaga

SEQ ID NO: 1872 - DNA, 25 bp, Homo sapiens
actgcactcttaacaacattggatg

SEQ ID NO: 1873 - DNA, 25 bp, Homo sapiens
tgtggctattgacatgtgtacactc

SEQ ID NO: 1874 - DNA, 25 bp, Homo sapiens
cttattcccaacaatatgggagaaa

SEQ ID NO: 1875 - DNA, 25 bp, Homo sapiens
tatgggaaaatatgtatttaaaagg

SEQ ID NO: 1876 - DNA, 25 bp, Homo sapiens
cctcaaaatggcttcacaatgggtg

SEQ ID NO: 1877 - DNA, 25 bp, Homo sapiens
cttttgggtggagtccagttacttc

SEQ ID NO: 1878 - DNA, 25 bp, Homo sapiens
ggttcacttaagatttgcacggatt

SEQ ID NO: 1879 - DNA, 25 bp, Homo sapiens
aaaacagaagttgttgggggtgtat

SEQ ID NO: 1880 - DNA, 25 bp, Homo sapiens
agtgcctaagtctgtctactcatgg

SEQ ID NO: 1881 - DNA, 25 bp, Homo sapiens
gaagcatgtgtgaggaaacattgag

SEQ ID NO: 1882 - DNA, 25 bp, Homo sapiens
ctctaggggactgcaaagacttatc

SEQ ID NO: 1883 - DNA, 25 bp, Homo sapiens
atgtctacctttactgggattccag

SEQ ID NO: 1884 - DNA, 25 bp, Homo sapiens
gtggggccttgatggaaaggctatt

SEQ ID NO: 1885 - DNA, 25 bp, Homo sapiens
tggggacctatcttacctgtgcaga

SEQ ID NO: 1886 - DNA, 25 bp, Homo sapiens
aacaaaacaaatacatgttacaact

SEQ ID NO: 1887 - DNA, 25 bp, Homo sapiens
tgtaggaaaacagcctgttatatgg

SEQ ID NO: 1888 - DNA, 25 bp, Homo sapiens
tgggcaaccatgactggtgtttgac

SEQ ID NO: 1889 - DNA, 25 bp, Homo sapiens
ggaaagctaaatataaatattgata

SEQ ID NO: 1890 - DNA, 25 bp, Homo sapiens
aaaaattctgaggcatgaatagctg

SEQ ID NO: 1891 - DNA, 25 bp, Homo sapiens
aaatgtttaccttataattgttcaa

SEQ ID NO: 1892 - DNA, 25 bp, Homo sapiens
ggagtgtcagtttcctcaaaaggta

SEQ ID NO: 1893 - DNA, 25 bp, Homo sapiens
ttctctgcagtgtgttgcctcctta

SEQ ID NO: 1894 - DNA, 25 bp, Homo sapiens
gccctcagtgcacaggaaactcatt

SEQ ID NO: 1895 - DNA, 25 bp, Homo sapiens
atccctctggggaagcatctctctg

SEQ ID NO: 1896 - DNA, 25 bp, Homo sapiens
tgcctttgcagagagcaacctagtg

SEQ ID NO: 1897 - DNA, 25 bp, Homo sapiens
tccaatcaggtgaaaagggcttatc

SEQ ID NO: 1898 - DNA, 25 bp, Homo sapiens
acttgttattgtgggtttgtatgcc

SEQ ID NO: 1899 - DNA, 25 bp, Homo sapiens
ctctggtcgtcacagctagtgctga

SEQ ID NO: 1900 - DNA, 25 bp, Homo sapiens
gagtcccaggcatctttaccctttg

SEQ ID NO: 1901 - DNA, 25 bp, Homo sapiens
cagggcatcagaacacggtggaatc

SEQ ID NO: 1902 - DNA, 25 bp, Homo sapiens
gctgagcctggtgatattttcatta

SEQ ID NO: 1903 - DNA, 25 bp, Homo sapiens
cctgtctctgctctccgtatgtatt

SEQ ID NO: 1904 - DNA, 25 bp, Homo sapiens
taaaaattttcttgaacaaaaactg

SEQ ID NO: 1905 - DNA, 25 bp, Homo sapiens
cacaatgactcaactttcttaacac

SEQ ID NO: 1906 - DNA, 25 bp, Homo sapiens
ctttaaatcacattttatcgcagtt

SEQ ID NO: 1907 - DNA, 25 bp, Homo sapiens
ggggaaagggtcacctgataccatc

SEQ ID NO: 1908 - DNA, 25 bp, Homo sapiens
gtgctgcatgaagccagaagcctca

SEQ ID NO: 1909 - DNA, 25 bp, Homo sapiens
tggaagcaacgctcacctacacttg

SEQ ID NO: 1910 - DNA, 25 bp, Homo sapiens
tttagggaggcaccatgaacctttc

SEQ ID NO: 1911 - DNA, 25 bp, Homo sapiens
gtactgtactttggacacacacaca

SEQ ID NO: 1912 - DNA, 25 bp, Homo sapiens
agcgcctttgaatcctgctttaaga

SEQ ID NO: 1913 - DNA, 25 bp, Homo sapiens
ggtgcactctctcctgccttttggg

SEQ ID NO: 1914 - DNA, 25 bp, Homo sapiens
tttgactaaactatgaggctgctcc

SEQ ID NO: 1915 - DNA, 25 bp, Homo sapiens
ggtctgttattctgccctttggaaa

SEQ ID NO: 1916 - DNA, 25 bp, Homo sapiens
gctgggctcacaaaagaatgtcttc

SEQ ID NO: 1917 - DNA, 25 bp, Homo sapiens
tcgaagtgattcaaactcggtttcc

SEQ ID NO: 1918 - DNA, 25 bp, Homo sapiens
ggaagccatctctacctctgtactg

SEQ ID NO: 1919 - DNA, 25 bp, Homo sapiens
ttcctgagatcactgctggcctgta

SEQ ID NO: 1920 - DNA, 25 bp, Homo sapiens
cctagctaagtggcccataagtaat

SEQ ID NO: 1921 - DNA, 25 bp, Homo sapiens
actgaatttgcaagtcactggtaca

SEQ ID NO: 1922 - DNA, 25 bp, Homo sapiens
gagggatattctcccattttgagta

SEQ ID NO: 1923 - DNA, 25 bp, Homo sapiens
ggcatttgtttcagcttacgccaca

SEQ ID NO: 1924 - DNA, 25 bp, Homo sapiens
ggtgattactttcctagcctacaga

SEQ ID NO: 1925 - DNA, 25 bp, Homo sapiens
ccaaatgtcctcttggctgagttca

SEQ ID NO: 1926 - DNA, 25 bp, Homo sapiens
tggtgtctgcagcaaaagcagtatc

SEQ ID NO: 1927 - DNA, 25 bp, Homo sapiens
tggccagctctgcaggaaatatgta

SEQ ID NO: 1928 - DNA, 25 bp, Homo sapiens
ccactggaggtcattctatgccaca

SEQ ID NO: 1929 - DNA, 25 bp, Homo sapiens
tctgagggtctcaggctagacaatc

SEQ ID NO: 1930 - DNA, 25 bp, Homo sapiens
gtcctagcttcctttcactgggaga

SEQ ID NO: 1931 - DNA, 25 bp, Homo sapiens
gccgtcggttaatgcacacagtttg

SEQ ID NO: 1932 - DNA, 25 bp, Homo sapiens
ttgctccaaagggtctgaagctctg

SEQ ID NO: 1933 - DNA, 25 bp, Homo sapiens
ggcctttcctagcaaccattaactg

SEQ ID NO: 1934 - DNA, 25 bp, Homo sapiens
tgttacaagaccccaacacttaccc

SEQ ID NO: 1935 - DNA, 25 bp, Homo sapiens
atggggattccctactgacaccagg

SEQ ID NO: 1936 - DNA, 25 bp, Homo sapiens
tggacttgctccttctggcttcaga

SEQ ID NO: 1937 - DNA, 25 bp, Homo sapiens
ggaaagtctgcgctctccacaactg

SEQ ID NO: 1938 - DNA, 25 bp, Homo sapiens
ggatgaacttctgccacttgacctg

SEQ ID NO: 1939 - DNA, 25 bp, Homo sapiens
ccctgcctgggctatgattgattta

SEQ ID NO: 1940 - DNA, 25 bp, Homo sapiens
caccagggctttatagcagcagaca

SEQ ID NO: 1941 - DNA, 25 bp, Homo sapiens
gcagccctttgtgatacttgtgata

SEQ ID NO: 1942 - DNA, 25 bp, Homo sapiens
ggctgctgttcaatcccacctggaa

SEQ ID NO: 1943 - DNA, 25 bp, Homo sapiens
gctgtgattcatatgcccttctgtg

SEQ ID NO: 1944 - DNA, 25 bp, Homo sapiens
aggctctgatttgaacgcaagtttc

SEQ ID NO: 1945 - DNA, 25 bp, Homo sapiens
gaggactcccagcatgttcttatta

SEQ ID NO: 1946 - DNA, 25 bp, Homo sapiens
aggtcttcagagttccctgctgcta

SEQ ID NO: 1947 - DNA, 25 bp, Homo sapiens
cagcagcagcatttggacccaggga

SEQ ID NO: 1948 - DNA, 25 bp, Homo sapiens
cgctggtcgtggctaattgcttttc

SEQ ID NO: 1949 - DNA, 25 bp, Homo sapiens
aggggagtttcaattcagtctgaca

SEQ ID NO: 1950 - DNA, 25 bp, Homo sapiens
tgttggcttcctcagcatctctgtg

SEQ ID NO: 1951 - DNA, 25 bp, Homo sapiens
ggatcacaccttatctacattgctg

SEQ ID NO: 1952 - DNA, 25 bp, Homo sapiens
tgtgagcatcactccttaagaacta

SEQ ID NO: 1953 - DNA, 25 bp, Homo sapiens
ctgggcttccctttattacttgtta

SEQ ID NO: 1954 - DNA, 25 bp, Homo sapiens
cagtatgtgtgtagacctttgccca

SEQ ID NO: 1955 - DNA, 25 bp, Homo sapiens
ctggagcttctcatgtttgtattgc

SEQ ID NO: 1956 - DNA, 25 bp, Homo sapiens
aggcaaaagtagtttatcttagatc

SEQ ID NO: 1957 - DNA, 25 bp, Homo sapiens
tgtttaacataggtgacagattttc

SEQ ID NO: 1958 - DNA, 25 bp, Homo sapiens
tcataccaggaccagaggaaacctc

SEQ ID NO: 1959 - DNA, 25 bp, Homo sapiens
gccaaccgatacttttctccaaatt

SEQ ID NO: 1960 - DNA, 25 bp, Homo sapiens
tcgaagcagtgtttacgtagcagta

SEQ ID NO: 1961 - DNA, 25 bp, Homo sapiens
atgggaactcagtcatttgggaatg

SEQ ID NO: 1962 - DNA, 25 bp, Homo sapiens
taccttttcatctcagccttttccc

SEQ ID NO: 1963 - DNA, 25 bp, Homo sapiens
tgcctatgtgtgatatatgtatttc

SEQ ID NO: 1964 - DNA, 25 bp, Homo sapiens
ctgtagcgtctgagtattaagaata

SEQ ID NO: 1965 - DNA, 25 bp, Homo sapiens
attggtagtaatagtaatacttggg

SEQ ID NO: 1966 - DNA, 25 bp, Homo sapiens
agacattctctttagaatccacagg

SEQ ID NO: 1967 - DNA, 25 bp, Homo sapiens
gcaagatgttttatatttgtgatta

SEQ ID NO: 1968 - DNA, 25 bp, Homo sapiens
gtttagttgtgtacttgtttgtagt

SEQ ID NO: 1969 - DNA, 25 bp, Homo sapiens
cactctgtattttggcctggaacgc

SEQ ID NO: 1970 - DNA, 25 bp, Homo sapiens
ttaggcccatgcttgccattctggc

SEQ ID NO: 1971 - DNA, 25 bp, Homo sapiens
agacttccagctgttcaatgccttg

SEQ ID NO: 1972 - DNA, 25 bp, Homo sapiens
tataaagtttaacaatcacttgatt

SEQ ID NO: 1973 - DNA, 25 bp, Homo sapiens
ccagctaggctgtaattgttaattc

SEQ ID NO: 1974 - DNA, 25 bp, Homo sapiens
ccctgtgctgaattggcatgtttta

SEQ ID NO: 1975 - DNA, 25 bp, Homo sapiens
ccctcgggactttattgattgcttc

SEQ ID NO: 1976 - DNA, 25 bp, Homo sapiens
aacctaggtgggtttcctgcattcc

SEQ ID NO: 1977 - DNA, 25 bp, Homo sapiens
ttcctcttttgcaagggtctggttt

SEQ ID NO: 1978 - DNA, 25 bp, Homo sapiens
cctgagatgggtcttctaggtctga

SEQ ID NO: 1979 - DNA, 25 bp, Homo sapiens
tatggtattctttattctttagcaa

SEQ ID NO: 1980 - DNA, 25 bp, Homo sapiens
ctgtgcggactagctgcaattaaaa

SEQ ID NO: 1981 - DNA, 25 bp, Homo sapiens
tatcattaataagataggatatact

SEQ ID NO: 1982 - DNA, 25 bp, Homo sapiens
ttgggccagttggtctacagcatcc

SEQ ID NO: 1983 - DNA, 25 bp, Homo sapiens
ttttttctagtactatactttacag

SEQ ID NO: 1984 - DNA, 25 bp, Homo sapiens
gtgaggctgcctgaaaaaattccta

SEQ ID NO: 1985 - DNA, 25 bp, Homo sapiens
ctgtttgagccctttaagctatgta

SEQ ID NO: 1986 - DNA, 25 bp, Homo sapiens
tagaaagtcctgagctccagcaatc

SEQ ID NO: 1987 - DNA, 25 bp, Homo sapiens
gcacagctgcacaaatacacagtta

SEQ ID NO: 1988 - DNA, 25 bp, Homo sapiens
ctaacgtatatgtacatacagattt

SEQ ID NO: 1989 - DNA, 25 bp, Homo sapiens
tatgttacccatcccaccaccactg

SEQ ID NO: 1990 - DNA, 25 bp, Homo sapiens
cagaacatgtgacttggctcccaaa

SEQ ID NO: 1991 - DNA, 25 bp, Homo sapiens
tcacatagtgcggaggccaaggtta

SEQ ID NO: 1992 - DNA, 25 bp, Homo sapiens
ttgcccaacccagcatttgtttttg

SEQ ID NO: 1993 - DNA, 25 bp, Homo sapiens
tgccctgggagaagatgcccttgtt

SEQ ID NO: 1994 - DNA, 25 bp, Homo sapiens
cccctcctttaaaattgttagcatt

SEQ ID NO: 1995 - DNA, 25 bp, Homo sapiens
tcctcctgccttgggtttgctgtct

SEQ ID NO: 1996 - DNA, 25 bp, Homo sapiens
cttctggtcattctaacttatctta

SEQ ID NO: 1997 - DNA, 25 bp, Homo sapiens
gctgtgccttgccatttcccatata

SEQ ID NO: 1998 - DNA, 25 bp, Homo sapiens
cctccattaacatcccctagaaatt

SEQ ID NO: 1999 - DNA, 25 bp, Homo sapiens
tttatatacaatgtagaagcagttc

SEQ ID NO: 2000 - DNA, 25 bp, Homo sapiens
cagaaacaatttggggatagctgat

SEQ ID NO: 2001 - DNA, 25 bp, Homo sapiens
agaatttgaattgaaccctttttaa

SEQ ID NO: 2002 - DNA, 25 bp, Homo sapiens
ggatttcctaccctgcgcattagtg

SEQ ID NO: 2003 - DNA, 25 bp, Homo sapiens
agggatgcctctctgcttttacata

SEQ ID NO: 2004 - DNA, 25 bp, Homo sapiens
tagactgtgaccctttgaacatatg

SEQ ID NO: 2005 - DNA, 25 bp, Homo sapiens
ccatgaagttttctctgtggctgca

SEQ ID NO: 2006 - DNA, 25 bp, Homo sapiens
cggaccatctcttggggtgataatg

SEQ ID NO: 2007 - DNA, 25 bp, Homo sapiens
agggccactgctgtagattaatttg

SEQ ID NO: 2008 - DNA, 25 bp, Homo sapiens
gaccactttgaatgtgcccagtatg

SEQ ID NO: 2009 - DNA, 25 bp, Homo sapiens
tgcttgggctgaagcactcctcatc

SEQ ID NO: 2010 - DNA, 25 bp, Homo sapiens
accgggcattacatagctgattaga

SEQ ID NO: 2011 - DNA, 25 bp, Homo sapiens
agagggaactctgtggtgactacca

SEQ ID NO: 2012 - DNA, 25 bp, Homo sapiens
cctagtaatcttttctaatgacagt

SEQ ID NO: 2013 - DNA, 25 bp, Homo sapiens
ggccctctgggctcatctttacagg

SEQ ID NO: 2014 - DNA, 25 bp, Homo sapiens
ccgggtctgcagtctaatgaaaatg

SEQ ID NO: 2015 - DNA, 25 bp, Homo sapiens
cctgggtgttttcctaccaagttga

SEQ ID NO: 2016 - DNA, 25 bp, Homo sapiens
ttggccaccagcatgtaacttctgc

SEQ ID NO: 2017 - DNA, 25 bp, Homo sapiens
ggccttttatgggaagctcacctcg

SEQ ID NO: 2018 - DNA, 25 bp, Homo sapiens
gagccagggctcttaacacagtgta

SEQ ID NO: 2019 - DNA, 25 bp, Homo sapiens
gagctcctgtacatccgctagaaca

SEQ ID NO: 2020 - DNA, 25 bp, Homo sapiens
tgtcgctctgttctgactccagtta

SEQ ID NO: 2021 - DNA, 25 bp, Homo sapiens
aatcatccgggaagcgttgtacctc

SEQ ID NO: 2022 - DNA, 25 bp, Homo sapiens
ttggcctgaacactctgactcggtc

SEQ ID NO: 2023 - DNA, 25 bp, Homo sapiens
tgccttccaaatagtcttcagtctg

SEQ ID NO: 2024 - DNA, 25 bp, Homo sapiens
actggggcttcagaaactggttttc

SEQ ID NO: 2025 - DNA, 25 bp, Homo sapiens
gcagcaggcttgttgagcagactta

SEQ ID NO: 2026 - DNA, 25 bp, Homo sapiens
ttggaccctttaaacctagtgatgg

SEQ ID NO: 2027 - DNA, 25 bp, Homo sapiens
tgaccctctgtgatggcaaaccgcc

SEQ ID NO: 2028 - DNA, 25 bp, Homo sapiens
ttcctgggtggtagaaaaacaagca

SEQ ID NO: 2029 - DNA, 25 bp, Homo sapiens
tgtaatgtatatatattatacacac

SEQ ID NO: 2030 - DNA, 25 bp, Homo sapiens
aaatgaaaatttagcatatacaatt

SEQ ID NO: 2031 - DNA, 25 bp, Homo sapiens
gctgactgtcatctcacatcatgga

SEQ ID NO: 2032 - DNA, 25 bp, Homo sapiens
tattttcttatagtaatgtgtttga

SEQ ID NO: 2033 - DNA, 25 bp, Homo sapiens
atgtctctcatcttggcactgtagg

SEQ ID NO: 2034 - DNA, 25 bp, Homo sapiens
aggccaatgtagacctgagtttctc

SEQ ID NO: 2035 - DNA, 25 bp, Homo sapiens
gggcatccagcactagaaacatttt

SEQ ID NO: 2036 - DNA, 25 bp, Homo sapiens
gggtctctggccacctgatcaaatg

SEQ ID NO: 2037 - DNA, 25 bp, Homo sapiens
ccaaggcagtggtgtctattcagca

SEQ ID NO: 2038 - DNA, 25 bp, Homo sapiens
ccaggggaactctaagccatgctct

SEQ ID NO: 2039 - DNA, 25 bp, Homo sapiens
cctcactttgtggaaacctcttatc

SEQ ID NO: 2040 - DNA, 25 bp, Homo sapiens
ccctccaggacagtcttgtgattta

SEQ ID NO: 2041 - DNA, 25 bp, Homo sapiens
accactactgcagggtgtgacacca

SEQ ID NO: 2042 - DNA, 25 bp, Homo sapiens
ggggtcttctttcagggattccata

SEQ ID NO: 2043 - DNA, 25 bp, Homo sapiens
tccctgagcctgaattttgtgaatg

SEQ ID NO: 2044 - DNA, 25 bp, Homo sapiens
gcctcggtttgtgacccagatttta

SEQ ID NO: 2045 - DNA, 25 bp, Homo sapiens
ccctggagttatatgctgtttcata

SEQ ID NO: 2046 - DNA, 25 bp, Homo sapiens
catcctgggtatctcagtggaaata

SEQ ID NO: 2047 - DNA, 25 bp, Homo sapiens
cagaattctgaagcactatgggata

SEQ ID NO: 2048 - DNA, 25 bp, Homo sapiens
gtttcttgtaagattttccctatca

SEQ ID NO: 2049 - DNA, 25 bp, Homo sapiens
tttctaatgccaaggggaaatttaa

SEQ ID NO: 2050 - DNA, 25 bp, Homo sapiens
tcagtacgcattccataacattgtg

SEQ ID NO: 2051 - DNA, 25 bp, Homo sapiens
cctgttgctgggagaagaataaatc

SEQ ID NO: 2052 - DNA, 25 bp, Homo sapiens
cccaagcttgtttccatggcaaaga

SEQ ID NO: 2053 - DNA, 25 bp, Homo sapiens
ctggaggggttttctggcctttaaa

SEQ ID NO: 2054 - DNA, 25 bp, Homo sapiens
ctctgtctcctatggtttcccaagg

SEQ ID NO: 2055 - DNA, 25 bp, Homo sapiens
cctccaagagaaataagctgtaata

SEQ ID NO: 2056 - DNA, 25 bp, Homo sapiens
tcccatctgggaataaagccatctc

SEQ ID NO: 2057 - DNA, 25 bp, Homo sapiens
agctacctccaagttctgcttgttg

SEQ ID NO: 2058 - DNA, 25 bp, Homo sapiens
tcatacttcattttctattttcact

SEQ ID NO: 2059 - DNA, 25 bp, Homo sapiens
cccttctctgagttgcaagttgaca

SEQ ID NO: 2060 - DNA, 25 bp, Homo sapiens
tttaaattggaaatattgagagtgg

SEQ ID NO: 2061 - DNA, 25 bp, Homo sapiens
tgccgaaaagtgatacccttggttc

SEQ ID NO: 2062 - DNA, 25 bp, Homo sapiens
aatgctggcaactacacatatgtcc

SEQ ID NO: 2063 - DNA, 25 bp, Homo sapiens
agggttgggctactcttttctaaca

SEQ ID NO: 2064 - DNA, 25 bp, Homo sapiens
tatttatgttctcttcttccaagct

SEQ ID NO: 2065 - DNA, 25 bp, Homo sapiens
ttggaccgttaatcacagagggagc

SEQ ID NO: 2066 - DNA, 25 bp, Homo sapiens
atctcaaggggtctgcagctcagta

SEQ ID NO: 2067 - DNA, 25 bp, Homo sapiens
aggatggatgggtcacaacttgtgc

SEQ ID NO: 2068 - DNA, 25 bp, Homo sapiens
gccttggctcctgctaagactaaca

SEQ ID NO: 2069 - DNA, 25 bp, Homo sapiens
ttggcatcctgcacactctgcttta

SEQ ID NO: 2070 - DNA, 25 bp, Homo sapiens
aggcctcttctttgctcaccatcta

SEQ ID NO: 2071 - DNA, 25 bp, Homo sapiens
tccaaggctggaaaggcattttatc

SEQ ID NO: 2072 - DNA, 25 bp, Homo sapiens
gagtagtcctttccagtccatctga

SEQ ID NO: 2073 - DNA, 25 bp, Homo sapiens
ctttctgttctctgctccatggtta

SEQ ID NO: 2074 - DNA, 25 bp, Homo sapiens
tcagctttttgttaggtgtccctcc

SEQ ID NO: 2075 - DNA, 25 bp, Homo sapiens
catggcatggtggaacttagaaagc

SEQ ID NO: 2076 - DNA, 25 bp, Homo sapiens
tggtcactctgctcacacactggta

SEQ ID NO: 2077 - DNA, 25 bp, Homo sapiens
gggccttccttttgctgtctcttga

SEQ ID NO: 2078 - DNA, 25 bp, Homo sapiens
ggccgataagttttccctgaatctt

SEQ ID NO: 2079 - DNA, 25 bp, Homo sapiens
ggctacttcacattcagggctgatc

SEQ ID NO: 2080 - DNA, 25 bp, Homo sapiens
gggcacccggccaaactaatattta

SEQ ID NO: 2081 - DNA, 25 bp, Homo sapiens
ctgcccatgaggtgttagaacatta

SEQ ID NO: 2082 - DNA, 25 bp, Homo sapiens
actgaaatctgattttttttcttat

SEQ ID NO: 2083 - DNA, 25 bp, Homo sapiens
acttgcctttgagtttcatgaagca

SEQ ID NO: 2084 - DNA, 25 bp, Homo sapiens
aatcaggtccattttaaaggtgatc

SEQ ID NO: 2085 - DNA, 25 bp, Homo sapiens
tgcctgcttcttttctgacctcggg

SEQ ID NO: 2086 - DNA, 25 bp, Homo sapiens
ctggcttgggctgttccattgattc

SEQ ID NO: 2087 - DNA, 25 bp, Homo sapiens
ctctaggtgcccattgtaaaacagc

SEQ ID NO: 2088 - DNA, 25 bp, Homo sapiens
cggtcattgttaacacctgagggta

SEQ ID NO: 2089 - DNA, 25 bp, Homo sapiens
acagtctgggtcttggtcttccaca

SEQ ID NO: 2090 - DNA, 25 bp, Homo sapiens
agcctactcctctgcaatcctgggg

SEQ ID NO: 2091 - DNA, 25 bp, Homo sapiens
ggcgtggcacctctatcattcttta

SEQ ID NO: 2092 - DNA, 25 bp, Homo sapiens
ggcttgggagacaaagaaccttcta

SEQ ID NO: 2093 - DNA, 25 bp, Homo sapiens
tgtgccgctacaaccatgagtcagg

SEQ ID NO: 2094 - DNA, 25 bp, Homo sapiens
tagctgccttgagacctagactgcc

SEQ ID NO: 2095 - DNA, 25 bp, Homo sapiens
gcgtctccattatgctctaccaata

SEQ ID NO: 2096 - DNA, 25 bp, Homo sapiens
ttctctctctcaagacaatggtggc

SEQ ID NO: 2097 - DNA, 25 bp, Homo sapiens
ctgactggtctcaataaaggcctga

SEQ ID NO: 2098 - DNA, 25 bp, Homo sapiens
ctgaagccagttgtttgtcccatta

SEQ ID NO: 2099 - DNA, 25 bp, Homo sapiens
ttgccgctaggacagatgaacttac

SEQ ID NO: 2100 - DNA, 25 bp, Homo sapiens
tctgtgcactttgtccttgaactca

SEQ ID NO: 2101 - DNA, 25 bp, Homo sapiens
gtgatgccagacttacttccaaatg

SEQ ID NO: 2102 - DNA, 25 bp, Homo sapiens
tgtcacctgtctcattcccgttgta

SEQ ID NO: 2103 - DNA, 25 bp, Homo sapiens
tgaccctcttagatgacatattgtg

SEQ ID NO: 2104 - DNA, 25 bp, Homo sapiens
tcctgaccttgcagtccagaaagtg

SEQ ID NO: 2105 - DNA, 25 bp, Homo sapiens
gtggcaactgagatcaccctcaatg

SEQ ID NO: 2106 - DNA, 25 bp, Homo sapiens
tccctagagagagaaagcaccatca

SEQ ID NO: 2107 - DNA, 25 bp, Homo sapiens
gagcttcctttcctgtggactgtta

SEQ ID NO: 2108 - DNA, 25 bp, Homo sapiens
ctgggactgccaaccatagttctga

SEQ ID NO: 2109 - DNA, 25 bp, Homo sapiens
ttgtgtcagacatagacctctagtc

SEQ ID NO: 2110 - DNA, 25 bp, Homo sapiens
catcagactttcctgcaggtgtgaa

SEQ ID NO: 2111 - DNA, 25 bp, Homo sapiens
ctgtgctgagccatattaaagagtt

SEQ ID NO: 2112 - DNA, 25 bp, Homo sapiens
ttgtccctcgagtaaacctaatttg

SEQ ID NO: 2113 - DNA, 25 bp, Homo sapiens
gtgcccatcctctgcctattggctg

SEQ ID NO: 2114 - DNA, 25 bp, Homo sapiens
gggctgttcctctgtgtccagaata

SEQ ID NO: 2115 - DNA, 25 bp, Homo sapiens
aaagtctgctctccttgtcacctgg

SEQ ID NO: 2116 - DNA, 25 bp, Homo sapiens
cccggataagaggaacttgaaatta

SEQ ID NO: 2117 - DNA, 25 bp, Homo sapiens
agcaggcttgctctttgaataccca

SEQ ID NO: 2118 - DNA, 25 bp, Homo sapiens
tgttgtgaaaaagcccttgggtcta

SEQ ID NO: 2119 - DNA, 25 bp, Homo sapiens
tgtccaactacataggttccaatta

SEQ ID NO: 2120 - DNA, 25 bp, Homo sapiens
ggccatgacagctaggcgaactata

SEQ ID NO: 2121 - DNA, 25 bp, Homo sapiens
ctctggggtgttttgctctgagaac

SEQ ID NO: 2122 - DNA, 25 bp, Homo sapiens
gctctggcagttttcattccaaatg

SEQ ID NO: 2123 - DNA, 25 bp, Homo sapiens
tcagtgcatcttgagttagttaggc

SEQ ID NO: 2124 - DNA, 25 bp, Homo sapiens
gccagactaggtattccgaacaatt

SEQ ID NO: 2125 - DNA, 25 bp, Homo sapiens
tacagaagttaagatcctcaagtag

SEQ ID NO: 2126 - DNA, 25 bp, Homo sapiens
taaaaatcagaaatgatttttgctg

SEQ ID NO: 2127 - DNA, 25 bp, Homo sapiens
gccaaaaataaaaatgccttttaca

SEQ ID NO: 2128 - DNA, 25 bp, Homo sapiens
attcataattaacaaactattaaga

SEQ ID NO: 2129 - DNA, 25 bp, Homo sapiens
cttgggagtgcattaacaacttaca

SEQ ID NO: 2130 - DNA, 25 bp, Homo sapiens
cagccctgcttccttcatggatttc

SEQ ID NO: 2131 - DNA, 25 bp, Homo sapiens
cctcagaacttggaaatgggagcta

SEQ ID NO: 2132 - DNA, 25 bp, Homo sapiens
gaaaaaaatctatgtattaaaagca

SEQ ID NO: 2133 - DNA, 25 bp, Homo sapiens
gacccatgtcaggaagggctttatg

SEQ ID NO: 2134 - DNA, 25 bp, Homo sapiens
gactttgggaacctgcactactgca

SEQ ID NO: 2135 - DNA, 25 bp, Homo sapiens
cagggagactcttggactacttgca

SEQ ID NO: 2136 - DNA, 25 bp, Homo sapiens
agagctggcatgtacctgtcacttc

SEQ ID NO: 2137 - DNA, 25 bp, Homo sapiens
ctgccaggagtcatgtttgattatc

SEQ ID NO: 2138 - DNA, 25 bp, Homo sapiens
gttcccaggccacaaaccaggaatg

SEQ ID NO: 2139 - DNA, 25 bp, Homo sapiens
caagtgaattcccagctgtgcagcc

SEQ ID NO: 2140 - DNA, 25 bp, Homo sapiens
tccctgtgatagagtggatgccatc

SEQ ID NO: 2141 - DNA, 25 bp, Homo sapiens
acgggacctatctacagagggcttc

SEQ ID NO: 2142 - DNA, 25 bp, Homo sapiens
taaaataaaaatagagatgggagtc

SEQ ID NO: 2143 - DNA, 25 bp, Homo sapiens
gggtatctgcttcctatttccaaca

SEQ ID NO: 2144 - DNA, 25 bp, Homo sapiens
gctgtgaacactaccatgaatgaga

SEQ ID NO: 2145 - DNA, 25 bp, Homo sapiens
ttactaaagggatccaagttggcac

SEQ ID NO: 2146 - DNA, 25 bp, Homo sapiens
tccatatattatagttctaaccaga

SEQ ID NO: 2147 - DNA, 25 bp, Homo sapiens
gttgagtttgtaacattaatagatg

SEQ ID NO: 2148 - DNA, 25 bp, Homo sapiens
atactcctgcatgttgttagaccta

SEQ ID NO: 2149 - DNA, 25 bp, Homo sapiens
ttcccgattcatgactgaggctata

SEQ ID NO: 2150 - DNA, 25 bp, Homo sapiens
aaaactccctggtggctgggcaaca

SEQ ID NO: 2151 - DNA, 25 bp, Homo sapiens
tcatacccattcagctgagagcttc

SEQ ID NO: 2152 - DNA, 25 bp, Homo sapiens
tggggaaacacttatcttgcacaga

SEQ ID NO: 2153 - DNA, 25 bp, Homo sapiens
agatgcactggctcctcatgtttca

SEQ ID NO: 2154 - DNA, 25 bp, Homo sapiens
caccttgatacctgattacttgaca

SEQ ID NO: 2155 - DNA, 25 bp, Homo sapiens
gatacactaaaattttgaaaaagaa

SEQ ID NO: 2156 - DNA, 25 bp, Homo sapiens
ggctccttcagtccttagatcattg

SEQ ID NO: 2157 - DNA, 25 bp, Homo sapiens
cctggactctgcttctgctcgaata

SEQ ID NO: 2158 - DNA, 25 bp, Homo sapiens
gccctgacctgaaacatatgatgga

SEQ ID NO: 2159 - DNA, 25 bp, Homo sapiens
gggtgtccattaatagcttcctcca

SEQ ID NO: 2160 - DNA, 25 bp, Homo sapiens
ggggtgttccctgccaaatactgtc

SEQ ID NO: 2161 - DNA, 25 bp, Homo sapiens
acgccaggcactgatatcacattta

SEQ ID NO: 2162 - DNA, 25 bp, Homo sapiens
gttatgcctttattaactatagtcc

SEQ ID NO: 2163 - DNA, 25 bp, Homo sapiens
acatgttcggagtattcaggggcta

SEQ ID NO: 2164 - DNA, 25 bp, Homo sapiens
actgctgctatagggctgtcactga

SEQ ID NO: 2165 - DNA, 25 bp, Homo sapiens
gtcagggacaacaaactaactcttg

SEQ ID NO: 2166 - DNA, 25 bp, Homo sapiens
ctccaggcactatcagggcatcatg

SEQ ID NO: 2167 - DNA, 25 bp, Homo sapiens
tgcaatgctcactaggcctgctttg

SEQ ID NO: 2168 - DNA, 25 bp, Homo sapiens
agttccatacagaggctgagtttca

SEQ ID NO: 2169 - DNA, 25 bp, Homo sapiens
gctgcaggccgagaagcataaacca

SEQ ID NO: 2170 - DNA, 25 bp, Homo sapiens
tgctcccagaagtctgcatcagttc

SEQ ID NO: 2171 - DNA, 25 bp, Homo sapiens
agggagtccctgaacctaattaagc

SEQ ID NO: 2172 - DNA, 25 bp, Homo sapiens
tctacatgaatcagggcactatccc

SEQ ID NO: 2173 - DNA, 25 bp, Homo sapiens
ctggttgtagtgttcatagtattat

SEQ ID NO: 2174 - DNA, 25 bp, Homo sapiens
gtgctgtgtgatccaagttacttga

SEQ ID NO: 2175 - DNA, 25 bp, Homo sapiens
ggaacaagtaaaagagaaagggtaa

SEQ ID NO: 2176 - DNA, 25 bp, Homo sapiens
gagccattttattggagaaacctga

SEQ ID NO: 2177 - DNA, 25 bp, Homo sapiens
ccattccattagacgtgtagggttc

SEQ ID NO: 2178 - DNA, 25 bp, Homo sapiens
cctcgctaatagaggcaggccattg

SEQ ID NO: 2179 - DNA, 25 bp, Homo sapiens
gacatagttcttccttgcctggcca

SEQ ID NO: 2180 - DNA, 25 bp, Homo sapiens
gacctttgccctgtgagttacctga

SEQ ID NO: 2181 - DNA, 25 bp, Homo sapiens
taggctttatgtcccagagcaggtc

SEQ ID NO: 2182 - DNA, 25 bp, Homo sapiens
tgcaggcaagcactctcaatctttg

SEQ ID NO: 2183 - DNA, 25 bp, Homo sapiens
ctgtaggtgtcataccaaggccgta

SEQ ID NO: 2184 - DNA, 25 bp, Homo sapiens
gtgtgctctacaaatacgctgggta

SEQ ID NO: 2185 - DNA, 25 bp, Homo sapiens
cccaatctttggtctttactgtacg

SEQ ID NO: 2186 - DNA, 25 bp, Homo sapiens
gcaaccagttggatagctctcccta

SEQ ID NO: 2187 - DNA, 25 bp, Homo sapiens
ctccagatctcagctgtaaaaggtg

SEQ ID NO: 2188 - DNA, 25 bp, Homo sapiens
tcctcagctctggtcttctctaata

SEQ ID NO: 2189 - DNA, 25 bp, Homo sapiens
tcctataaagggatgaggccactca

SEQ ID NO: 2190 - DNA, 25 bp, Homo sapiens
gcacaccgcatgatagacccagtta

SEQ ID NO: 2191 - DNA, 25 bp, Homo sapiens
acactctgttctgtgctctttcagc

SEQ ID NO: 2192 - DNA, 25 bp, Homo sapiens
caataaacgcatttactgaacaaat

SEQ ID NO: 2193 - DNA, 25 bp, Homo sapiens
ccagtagttggagataggtattatt

SEQ ID NO: 2194 - DNA, 25 bp, Homo sapiens
tccgccctttgggaagaattttaca

SEQ ID NO: 2195 - DNA, 25 bp, Homo sapiens
cttgttgccttccaaatgtcggatg

SEQ ID NO: 2196 - DNA, 25 bp, Homo sapiens
gcggcagagagcacatccatcaatc

SEQ ID NO: 2197 - DNA, 25 bp, Homo sapiens
agccctccttattgttctgacagca

SEQ ID NO: 2198 - DNA, 25 bp, Homo sapiens
agccttggtttccttactctgacta

SEQ ID NO: 2199 - DNA, 25 bp, Homo sapiens
tggcctcccagcaaaacagttggtc

SEQ ID NO: 2200 - DNA, 25 bp, Homo sapiens
ccaaacctggggctgcaaactgtca

SEQ ID NO: 2201 - DNA, 25 bp, Homo sapiens
ggtccgatctccacaggctttttta

SEQ ID NO: 2202 - DNA, 25 bp, Homo sapiens
cggtgagcttccctaggttttcata

SEQ ID NO: 2203 - DNA, 25 bp, Homo sapiens
gtgtctcgcatagcctacattcttg

SEQ ID NO: 2204 - DNA, 25 bp, Homo sapiens
cacagagcggtgtgccatggcttaa

SEQ ID NO: 2205 - DNA, 25 bp, Homo sapiens
tgtgcactctaggacaggccacata

SEQ ID NO: 2206 - DNA, 25 bp, Homo sapiens
cttggtccacggcagaatcaatgtc

SEQ ID NO: 2207 - DNA, 25 bp, Homo sapiens
ttccagagtttgcaatcctagtgtc

SEQ ID NO: 2208 - DNA, 25 bp, Homo sapiens
cacttctggttgagggaaataggca

SEQ ID NO: 2209 - DNA, 25 bp, Homo sapiens
atgtgtcccagtgcccaagaagtga

SEQ ID NO: 2210 - DNA, 25 bp, Homo sapiens
tgctggatttccctaaaagcatgga

SEQ ID NO: 2211 - DNA, 25 bp, Homo sapiens
gaagcactgccgtgaatagttttta

SEQ ID NO: 2212 - DNA, 25 bp, Homo sapiens
cttgaagaatcttttccactgggaa

SEQ ID NO: 2213 - DNA, 25 bp, Homo sapiens
gttatggttttttaattatccacag

SEQ ID NO: 2214 - DNA, 25 bp, Homo sapiens
gtgccactcttgcaaagggtatcta

SEQ ID NO: 2215 - DNA, 25 bp, Homo sapiens
cctctcactggagcaaccttatttc

SEQ ID NO: 2216 - DNA, 25 bp, Homo sapiens
tggcactctgccctcatctgaaatg

SEQ ID NO: 2217 - DNA, 25 bp, Homo sapiens
ttcagagtcaaggtggcaacatgtc

SEQ ID NO: 2218 - DNA, 25 bp, Homo sapiens
gcctggggtcatatgtttcctagta

SEQ ID NO: 2219 - DNA, 25 bp, Homo sapiens
caggggtcccaatagctcgtatata

SEQ ID NO: 2220 - DNA, 25 bp, Homo sapiens
cacagccttggtgtgggttatagcc

SEQ ID NO: 2221 - DNA, 25 bp, Homo sapiens
agacattcctgccttgggttttacc

SEQ ID NO: 2222 - DNA, 25 bp, Homo sapiens
cacttgaaagtgaggttctgacaca

SEQ ID NO: 2223 - DNA, 25 bp, Homo sapiens
ggggtacttcctctctttcatatca

SEQ ID NO: 2224 - DNA, 25 bp, Homo sapiens
ggagagccaacggaagcattacttg

SEQ ID NO: 2225 - DNA, 25 bp, Homo sapiens
ttgcctgactcgtgttctactctga

SEQ ID NO: 2226 - DNA, 25 bp, Homo sapiens
tccagagaggccacagtttattccc

SEQ ID NO: 2227 - DNA, 25 bp, Homo sapiens
atggtacttttctcagcctgctatc

SEQ ID NO: 2228 - DNA, 25 bp, Homo sapiens
tcacctaaattatctttcttttgag

SEQ ID NO: 2229 - DNA, 25 bp, Homo sapiens
ttcccttgggaagcatacatggttg

SEQ ID NO: 2230 - DNA, 25 bp, Homo sapiens
gcgccgaaattggagtagcactgga

SEQ ID NO: 2231 - DNA, 25 bp, Homo sapiens
agtctctttgtcacctcagcctgta

SEQ ID NO: 2232 - DNA, 25 bp, Homo sapiens
tcctcaggacgatgggaatgacttt

SEQ ID NO: 2233 - DNA, 25 bp, Homo sapiens
ggagcctcacttcgggtaccctaga

SEQ ID NO: 2234 - DNA, 25 bp, Homo sapiens
ttgtggtaccaaataggggaccttc

SEQ ID NO: 2235 - DNA, 25 bp, Homo sapiens
ctaatgggactctgctgtgacagca

SEQ ID NO: 2236 - DNA, 25 bp, Homo sapiens
ctggtgtcaccaattttaaaaaagt

SEQ ID NO: 2237 - DNA, 25 bp, Homo sapiens
gcaacttgaactgcaccccaaaatc

SEQ ID NO: 2238 - DNA, 25 bp, Homo sapiens
atgcgaactggtaaggacgcccttc

SEQ ID NO: 2239 - DNA, 25 bp, Homo sapiens
tcagggccctgctagtggaaattca

SEQ ID NO: 2240 - DNA, 25 bp, Homo sapiens
ccgattttctgggactgatgcctga

SEQ ID NO: 2241 - DNA, 25 bp, Homo sapiens
attgctgctgccacctgtaccaagg

SEQ ID NO: 2242 - DNA, 25 bp, Homo sapiens
agcaaccagctgtgactcgcgcatt

SEQ ID NO: 2243 - DNA, 25 bp, Homo sapiens
ctcctgtgcaggtttggaactgatt

SEQ ID NO: 2244 - DNA, 25 bp, Homo sapiens
gggttactcagcaattccagggaca

SEQ ID NO: 2245 - DNA, 25 bp, Homo sapiens
cctcagctgtgccaaagtcctggta

SEQ ID NO: 2246 - DNA, 25 bp, Homo sapiens
tctgggccgctaaccaagacgatgc

SEQ ID NO: 2247 - DNA, 25 bp, Homo sapiens
actcctgggtgccatgcatcactca

SEQ ID NO: 2248 - DNA, 25 bp, Homo sapiens
gccacctacatgagggctgccattt

SEQ ID NO: 2249 - DNA, 25 bp, Homo sapiens
ctcaacatttttggaagcctccctg

SEQ ID NO: 2250 - DNA, 25 bp, Homo sapiens
cttgtcccagcccagtgtttccaga

SEQ ID NO: 2251 - DNA, 25 bp, Homo sapiens
tgggaatccctagagtgcacagctg

SEQ ID NO: 2252 - DNA, 25 bp, Homo sapiens
ccagcaatgggatgtgtctgccaca

SEQ ID NO: 2253 - DNA, 25 bp, Homo sapiens
tctcaggggcatgaacaaaataagc

SEQ ID NO: 2254 - DNA, 25 bp, Homo sapiens
tttcaatgaaggagggacccaccca

SEQ ID NO: 2255 - DNA, 25 bp, Homo sapiens
tctcccttagggaaagacacatatg

SEQ ID NO: 2256 - DNA, 25 bp, Homo sapiens
cacagagaggtgctttcacaaggtt

SEQ ID NO: 2257 - DNA, 25 bp, Homo sapiens
gctccatgcacaagaagttcagatt

SEQ ID NO: 2258 - DNA, 25 bp, Homo sapiens
ccagggcactttcacggagattatg

SEQ ID NO: 2259 - DNA, 25 bp, Homo sapiens
tgtgcatattgcatagcatcgatca

SEQ ID NO: 2260 - DNA, 25 bp, Homo sapiens
ctctgtgccacgtatttcaggggaa

SEQ ID NO: 2261 - DNA, 25 bp, Homo sapiens
ctgccgtgcacaagagaagtccctg

SEQ ID NO: 2262 - DNA, 25 bp, Homo sapiens
gtcagtatcgctcttcacccagtta

SEQ ID NO: 2263 - DNA, 25 bp, Homo sapiens
tgagagccatattcagccagatgcc

SEQ ID NO: 2264 - DNA, 25 bp, Homo sapiens
gagccctaatgtccaagcactgagc

SEQ ID NO: 2265 - DNA, 25 bp, Homo sapiens
ggatgcctggccctttcatgaggtc

SEQ ID NO: 2266 - DNA, 25 bp, Homo sapiens
tttttcactgttcaaggtttattgg

SEQ ID NO: 2267 - DNA, 25 bp, Homo sapiens
ggacccacccatgacagcttaatag

SEQ ID NO: 2268 - DNA, 25 bp, Homo sapiens
aagaaaacacagagagctctcctct

SEQ ID NO: 2269 - DNA, 25 bp, Homo sapiens
gcggcacgaggagattgtttcaata

SEQ ID NO: 2270 - DNA, 25 bp, Homo sapiens
gtggccattgctcttttgaaaattg

SEQ ID NO: 2271 - DNA, 25 bp, Homo sapiens
ttaggtgacatctcccagacaggcg

SEQ ID NO: 2272 - DNA, 25 bp, Homo sapiens
tagtttattcgacagcagggccagg

SEQ ID NO: 2273 - DNA, 25 bp, Homo sapiens
cccggttagagtcaaaggacactca

SEQ ID NO: 2274 - DNA, 25 bp, Homo sapiens
tagtgtgacagagtaaactgccttc

SEQ ID NO: 2275 - DNA, 25 bp, Homo sapiens
tgcccagaccctgaataagaggatc

SEQ ID NO: 2276 - DNA, 25 bp, Homo sapiens
cctggcatcgagctcacattggata

SEQ ID NO: 2277 - DNA, 25 bp, Homo sapiens
ccttggctctgtctgctggttttaa

SEQ ID NO: 2278 - DNA, 25 bp, Homo sapiens
tcatctgggctatatggggctcaca

SEQ ID NO: 2279 - DNA, 25 bp, Homo sapiens
cgccgactggtacttttgagcacta

SEQ ID NO: 2280 - DNA, 25 bp, Homo sapiens
ggcacacctcaaaagaagccttgtt

SEQ ID NO: 2281 - DNA, 25 bp, Homo sapiens
tcagagtccctcattgccaagaagc

SEQ ID NO: 2282 - DNA, 25 bp, Homo sapiens
ggcttgtgccttcctatctcgattg

SEQ ID NO: 2283 - DNA, 25 bp, Homo sapiens
tgctgcgacatctgtggaccgtatc

SEQ ID NO: 2284 - DNA, 25 bp, Homo sapiens
aaaccatgcgccagccacttttgtg

SEQ ID NO: 2285 - DNA, 25 bp, Homo sapiens
tctcagagcctctggtgggatttgc

SEQ ID NO: 2286 - DNA, 25 bp, Homo sapiens
gtgtgccttgtgaatacccatgaga

SEQ ID NO: 2287 - DNA, 25 bp, Homo sapiens
cgccgtggggacatcatttctcatt

SEQ ID NO: 2288 - DNA, 25 bp, Homo sapiens
acacccggttctcaggtcctgtagg

SEQ ID NO: 2289 - DNA, 25 bp, Homo sapiens
ggccatttgtggaataaaaaaaata

SEQ ID NO: 2290 - DNA, 25 bp, Homo sapiens
gaaaactatcatggtgccctgcgca

SEQ ID NO: 2291 - DNA, 25 bp, Homo sapiens
ccagcctgccatgctgcagaatttc

SEQ ID NO: 2292 - DNA, 25 bp, Homo sapiens
ctgggcctggcacattttctgatta

SEQ ID NO: 2293 - DNA, 25 bp, Homo sapiens
aggggcttctgacctagacctgaca

SEQ ID NO: 2294 - DNA, 25 bp, Homo sapiens
cgctattgctctggaagggacctca

SEQ ID NO: 2295 - DNA, 25 bp, Homo sapiens
cggccaggcagccccgtggccactg

SEQ ID NO: 2296 - DNA, 25 bp, Homo sapiens
gtcacagtctaggtacagtcaagtc

SEQ ID NO: 2297 - DNA, 25 bp, Homo sapiens
ccataaagctgcaggatgaagaaaa

SEQ ID NO: 2298 - DNA, 25 bp, Homo sapiens
tggtcactcatttcctttttaagtt

SEQ ID NO: 2299 - DNA, 25 bp, Homo sapiens
ggttttgtcgccttcattatttttg

SEQ ID NO: 2300 - DNA, 25 bp, Homo sapiens
caatagtattcgtttcagctctgca

SEQ ID NO: 2301 - DNA, 25 bp, Homo sapiens
agctcctctctcttgttgacccatg

SEQ ID NO: 2302 - DNA, 25 bp, Homo sapiens
gaggtctattttcttagctctttta

SEQ ID NO: 2303 - DNA, 25 bp, Homo sapiens
tgagggtcttgttttcagaccatga

SEQ ID NO: 2304 - DNA, 25 bp, Homo sapiens
tatgccaggaagaggaggcactctc

SEQ ID NO: 2305 - DNA, 25 bp, Homo sapiens
gacaggaatcctgctgggaagacta

SEQ ID NO: 2306 - DNA, 25 bp, Homo sapiens
tgcactgggagaagctgaaagatga

SEQ ID NO: 2307 - DNA, 25 bp, Homo sapiens
cggcaaggacactaggctccagatc

SEQ ID NO: 2308 - DNA, 25 bp, Homo sapiens
aaggagtgcacgcacctgtatggcc

SEQ ID NO: 2309 - DNA, 25 bp, Homo sapiens
ggaggcagtctccactttagcttgc

SEQ ID NO: 2310 - DNA, 25 bp, Homo sapiens
gctcactgaacaagcatcattatta

SEQ ID NO: 2311 - DNA, 25 bp, Homo sapiens
gggaccatttctgcccttgcaggtg

SEQ ID NO: 2312 - DNA, 25 bp, Homo sapiens
ccctaagggagatccatgctgcaac

SEQ ID NO: 2313 - DNA, 25 bp, Homo sapiens
ttcaggactggtgaacaagcaaccc

SEQ ID NO: 2314 - DNA, 25 bp, Homo sapiens
tgcaaagccacacacgtcggtgaga

SEQ ID NO: 2315 - DNA, 25 bp, Homo sapiens
agatgtcagaatggatttcctctcc

SEQ ID NO: 2316 - DNA, 25 bp, Homo sapiens
ctgttcagctgaattggccggagca

SEQ ID NO: 2317 - DNA, 25 bp, Homo sapiens
cgccgtgagctggacaaatgaggtt

SEQ ID NO: 2318 - DNA, 25 bp, Homo sapiens
tctggagagacactgaaactggaca

SEQ ID NO: 2319 - DNA, 25 bp, Homo sapiens
tcaaagtggcctctctacagaactc

SEQ ID NO: 2320 - DNA, 25 bp, Homo sapiens
aggttgttcttctccctggtgtggg

SEQ ID NO: 2321 - DNA, 25 bp, Homo sapiens
aggagccctgcactgcctgtcttct

SEQ ID NO: 2322 - DNA, 25 bp, Homo sapiens
gtcctcttaaatgggtaggcacata

SEQ ID NO: 2323 - DNA, 25 bp, Homo sapiens
tggtgcctgtggggcagtggcatgg

SEQ ID NO: 2324 - DNA, 25 bp, Homo sapiens
accagcaaagcagggtcggaagccc

SEQ ID NO: 2325 - DNA, 25 bp, Homo sapiens
accagatagagggaaaagacagcca

SEQ ID NO: 2326 - DNA, 25 bp, Homo sapiens
gcaggccacagttggggtataaacc

SEQ ID NO: 2327 - DNA, 25 bp, Homo sapiens
ttatgacccagttagcacagtttta

SEQ ID NO: 2328 - DNA, 25 bp, Homo sapiens
ctcaccagggcaacgatttgtctca

SEQ ID NO: 2329 - DNA, 25 bp, Homo sapiens
aggggtcccccaaaagccccagggc

SEQ ID NO: 2330 - DNA, 25 bp, Homo sapiens
cgatctggccactatgccaatccca

SEQ ID NO: 2331 - DNA, 25 bp, Homo sapiens
tctcacatatgtttgtaaagtaatg

SEQ ID NO: 2332 - DNA, 25 bp, Homo sapiens
agacaagatgcttatcctctccttc

SEQ ID NO: 2333 - DNA, 25 bp, Homo sapiens
gcaggttggtcatcttcctcacagg

SEQ ID NO: 2334 - DNA, 25 bp, Homo sapiens
tgctgagacaccagcgttcactgtg

SEQ ID NO: 2335 - DNA, 25 bp, Homo sapiens
cctaggttggctgacagatccctta

SEQ ID NO: 2336 - DNA, 25 bp, Homo sapiens
cagctatagagctgttcaacaggca

SEQ ID NO: 2337 - DNA, 25 bp, Homo sapiens
cctgagcacagcaatggacactata

SEQ ID NO: 2338 - DNA, 25 bp, Homo sapiens
cagcatactgctcttaaggtcaaca

SEQ ID NO: 2339 - DNA, 25 bp, Homo sapiens
ctccacaggggacttgttaaaattc

SEQ ID NO: 2340 - DNA, 25 bp, Homo sapiens
tggccctactctaggcagggattta

SEQ ID NO: 2341 - DNA, 25 bp, Homo sapiens
atttttgaaagaattatgaatcatg

SEQ ID NO: 2342 - DNA, 25 bp, Homo sapiens
gctctctcaagggtcagaacacata

SEQ ID NO: 2343 - DNA, 25 bp, Homo sapiens
ttaactccatatgtagcagggcctc

SEQ ID NO: 2344 - DNA, 25 bp, Homo sapiens
gcgagagctcattttccttcaggtg

SEQ ID NO: 2345 - DNA, 25 bp, Homo sapiens
ggtcctggtgtctgcccttgcaaaa

SEQ ID NO: 2346 - DNA, 25 bp, Homo sapiens
tggtgctgcctcttcctttgagata

SEQ ID NO: 2347 - DNA, 25 bp, Homo sapiens
ctcccagatggtactgaaatgttgc

SEQ ID NO: 2348 - DNA, 25 bp, Homo sapiens
gtccttcccactcctggattcaatg

SEQ ID NO: 2349 - DNA, 25 bp, Homo sapiens
agggtttgcattccgtgccagcaca

SEQ ID NO: 2350 - DNA, 25 bp, Homo sapiens
aagcctgtggcctgtagtgaatgtc

SEQ ID NO: 2351 - DNA, 25 bp, Homo sapiens
aaggggcccactcttgccaactgga

SEQ ID NO: 2352 - DNA, 25 bp, Homo sapiens
gccaggtatttgcacgtcagaactt

SEQ ID NO: 2353 - DNA, 25 bp, Homo sapiens
cttctctgacattcggggcactaca

SEQ ID NO: 2354 - DNA, 25 bp, Homo sapiens
gggcattgcccaccttgttcacagt

SEQ ID NO: 2355 - DNA, 25 bp, Homo sapiens
cctctctgactttctggtggcctaa

SEQ ID NO: 2356 - DNA, 25 bp, Homo sapiens
ccaaggatggcctcctggtgacatc

SEQ ID NO: 2357 - DNA, 25 bp, Homo sapiens
ggaggtcctctgatagccagaaaca

SEQ ID NO: 2358 - DNA, 25 bp, Homo sapiens
catggcttctctgtcctaatgggtc

SEQ ID NO: 2359 - DNA, 25 bp, Homo sapiens
acccaattccgaggcagtgtttttt

SEQ ID NO: 2360 - DNA, 25 bp, Homo sapiens
ttgccaggaagccaggaagtgtttc

SEQ ID NO: 2361 - DNA, 25 bp, Homo sapiens
aaagatctggttctggccttgcctc

SEQ ID NO: 2362 - DNA, 25 bp, Homo sapiens
aggtcccaaggatgcaggtgctagc

SEQ ID NO: 2363 - DNA, 25 bp, Homo sapiens
tggactagacttacccagagcactg

SEQ ID NO: 2364 - DNA, 25 bp, Homo sapiens
ccctaaacatttaagaaccgctaaa

SEQ ID NO: 2365 - DNA, 25 bp, Homo sapiens
agcgctccttggttactgtgaagtc

SEQ ID NO: 2366 - DNA, 25 bp, Homo sapiens
tcatcattggggcagaatcctttcc

SEQ ID NO: 2367 - DNA, 25 bp, Homo sapiens
ccacttttgaactgagccttttata

SEQ ID NO: 2368 - DNA, 25 bp, Homo sapiens
gccctctctggtggtggacttttat

SEQ ID NO: 2369 - DNA, 25 bp, Homo sapiens
ttcaggcagggattaaaggactttc

SEQ ID NO: 2370 - DNA, 25 bp, Homo sapiens
caaattcttccgtgggcagtgcgca

SEQ ID NO: 2371 - DNA, 25 bp, Homo sapiens
ctcaatatcaaaaagaaaatttacc

SEQ ID NO: 2372 - DNA, 25 bp, Homo sapiens
tgcacctgtttctgatctgaccttg

SEQ ID NO: 2373 - DNA, 25 bp, Homo sapiens
tggggccctctctatggcacacaga

SEQ ID NO: 2374 - DNA, 25 bp, Homo sapiens
tcggtatctgaccacagccctctgg

SEQ ID NO: 2375 - DNA, 25 bp, Homo sapiens
tttcacaaaaggtctggcaggattc

SEQ ID NO: 2376 - DNA, 25 bp, Homo sapiens
tgccgccacggaagattgactccta

SEQ ID NO: 2377 - DNA, 25 bp, Homo sapiens
agggccacacacctcccagggttta

SEQ ID NO: 2378 - DNA, 25 bp, Homo sapiens
gggacctggccacaattccacatta

SEQ ID NO: 2379 - DNA, 25 bp, Homo sapiens
tattcctcttggtgggtcttggctc

SEQ ID NO: 2380 - DNA, 25 bp, Homo sapiens
tgccctttggtgtcagctgatgctc

SEQ ID NO: 2381 - DNA, 25 bp, Homo sapiens
gccctcgttgcttcttgccaagtga

SEQ ID NO: 2382 - DNA, 25 bp, Homo sapiens
gccaaacatggaaggctctcacttg

SEQ ID NO: 2383 - DNA, 25 bp, Homo sapiens
ggggttgaacccactccttagaagc

SEQ ID NO: 2384 - DNA, 25 bp, Homo sapiens
cttgggccacacatttacaatgagc

SEQ ID NO: 2385 - DNA, 25 bp, Homo sapiens
tcgggcatctgctacctctaactgg

SEQ ID NO: 2386 - DNA, 25 bp, Homo sapiens
agcatgccaggaagatgtgaccaca

SEQ ID NO: 2387 - DNA, 25 bp, Homo sapiens
attttaaatgtaagactataatatg

SEQ ID NO: 2388 - DNA, 25 bp, Homo sapiens
agggctccctggctcaaattgatga

SEQ ID NO: 2389 - DNA, 25 bp, Homo sapiens
tgaggatcctcccacacaggcagta

SEQ ID NO: 2390 - DNA, 25 bp, Homo sapiens
cacagatatgctgcaacacacagca

SEQ ID NO: 2391 - DNA, 25 bp, Homo sapiens
atctgctctgcaacgggctcttttc

SEQ ID NO: 2392 - DNA, 25 bp, Homo sapiens
tggccacgtcctccttatctgatta

SEQ ID NO: 2393 - DNA, 25 bp, Homo sapiens
ctttcttcgggtagtcaggccttta

SEQ ID NO: 2394 - DNA, 25 bp, Homo sapiens
agggcacttgggcttgtatctctcc

SEQ ID NO: 2395 - DNA, 25 bp, Homo sapiens
ctgcagcagctgtggtttgaacctt

SEQ ID NO: 2396 - DNA, 25 bp, Homo sapiens
agagtgtcttgttccttcaggtcca

SEQ ID NO: 2397 - DNA, 25 bp, Homo sapiens
tgagtgctcccaaccagagatagga

SEQ ID NO: 2398 - DNA, 25 bp, Homo sapiens
gtcttcaacacatttgtttctatga

SEQ ID NO: 2399 - DNA, 25 bp, Homo sapiens
actcatagacccatatctagactga

SEQ ID NO: 2400 - DNA, 25 bp, Homo sapiens
ggtacctccaccaggcaagattttg

SEQ ID NO: 2401 - DNA, 25 bp, Homo sapiens
tgcagtcatgtctcctcttataatc

SEQ ID NO: 2402 - DNA, 25 bp, Homo sapiens
atttaatctgcattctgggtggccc

SEQ ID NO: 2403 - DNA, 25 bp, Homo sapiens
agccacgtgctcaggaggacccttt

SEQ ID NO: 2404 - DNA, 25 bp, Homo sapiens
cttggatgaacttgcgtcccgcgtc

SEQ ID NO: 2405 - DNA, 25 bp, Homo sapiens
gcacgggccttcagtctgcatcaga

SEQ ID NO: 2406 - DNA, 25 bp, Homo sapiens
tccatcggcatccagaggcacttta

SEQ ID NO: 2407 - DNA, 25 bp, Homo sapiens
taggcagttttatgtcccgacgtca

SEQ ID NO: 2408 - DNA, 25 bp, Homo sapiens
gcctgacttgcgtgccttcacatta

SEQ ID NO: 2409 - DNA, 25 bp, Homo sapiens
tttcatttgggagccagcgtgcagc

SEQ ID NO: 2410 - DNA, 25 bp, Homo sapiens
ctttggagctgacgttgaaatcaca

SEQ ID NO: 2411 - DNA, 25 bp, Homo sapiens
ccctctgtctttagtggcctttgaa

SEQ ID NO: 2412 - DNA, 25 bp, Homo sapiens
cttgggccgtcagaaaagcgcttta

SEQ ID NO: 2413 - DNA, 25 bp, Homo sapiens
ccaacctcagggatagggaaccctg

SEQ ID NO: 2414 - DNA, 25 bp, Homo sapiens
tggcagagcctgtgtatacccagca

SEQ ID NO: 2415 - DNA, 25 bp, Homo sapiens
gagccctacttccaaggtccacaga

SEQ ID NO: 2416 - DNA, 25 bp, Homo sapiens
cgccctcctagttggtagaagcaca

SEQ ID NO: 2417 - DNA, 25 bp, Homo sapiens
gtgatcccatctgtgcccgacaagg

SEQ ID NO: 2418 - DNA, 25 bp, Homo sapiens
ggcacctccatgtcctgagcttgtg

SEQ ID NO: 2419 - DNA, 25 bp, Homo sapiens
ggcatcctccactccctgggaaagg

SEQ ID NO: 2420 - DNA, 25 bp, Homo sapiens
tccaggtctggccagggtttgacca

SEQ ID NO: 2421 - DNA, 25 bp, Homo sapiens
ccgtcccgggagacttacagcgcga

SEQ ID NO: 2422 - DNA, 25 bp, Homo sapiens
tgcgtgcagccaggtcacacttgtt

SEQ ID NO: 2423 - DNA, 25 bp, Homo sapiens
ctggtggatgtcctcaaaagacttg

SEQ ID NO: 2424 - DNA, 25 bp, Homo sapiens
ggggagttcacacagccagcctctc

SEQ ID NO: 2425 - DNA, 25 bp, Homo sapiens
ggggtcgtattcgtccacaaaatgg

SEQ ID NO: 2426 - DNA, 25 bp, Homo sapiens
agcgtgcctacctgtgcagctgcaa

SEQ ID NO: 2427 - DNA, 25 bp, Homo sapiens
agggctgaggttaccgtcctccaga

SEQ ID NO: 2428 - DNA, 25 bp, Homo sapiens
gtccgcgacctgtgatgctgaatcg

SEQ ID NO: 2429 - DNA, 25 bp, Homo sapiens
gatccctgcccgcactcaccgttca

SEQ ID NO: 2430 - DNA, 25 bp, Homo sapiens
ctaccattggctgcgcgccatcggg

SEQ ID NO: 2431 - DNA, 25 bp, Homo sapiens
cgagagaacccgactcagcggtgcc

SEQ ID NO: 2432 - DNA, 25 bp, Homo sapiens
tctcctctttctcgggcctgcgtgg

SEQ ID NO: 2433 - DNA, 25 bp, Homo sapiens
ttgcaaaggaatcagaaatacatcc

SEQ ID NO: 2434 - DNA, 25 bp, Homo sapiens
gcctcctggggctacatgaagtcca

SEQ ID NO: 2435 - DNA, 25 bp, Homo sapiens
ggaccagtgtaccttctcgtgcaga

SEQ ID NO: 2436 - DNA, 25 bp, Homo sapiens
cgggccctttaatgccacgggagga

SEQ ID NO: 2437 - DNA, 25 bp, Homo sapiens
tgcgcactagtactgggaaggtccc

SEQ ID NO: 2438 - DNA, 25 bp, Homo sapiens
tgtgtgggacaccttgagagactcc

SEQ ID NO: 2439 - DNA, 25 bp, Homo sapiens
gtgtagctgccatcatcctgtgtta

SEQ ID NO: 2440 - DNA, 25 bp, Homo sapiens
ggggcgttacataccctaatacata

SEQ ID NO: 2441 - DNA, 25 bp, Homo sapiens
tgaggccctgagctatctgtcttca

SEQ ID NO: 2442 - DNA, 25 bp, Homo sapiens
gctccgattacagggactgccttgt

SEQ ID NO: 2443 - DNA, 25 bp, Homo sapiens
caggccttgagggagactgtatttc

SEQ ID NO: 2444 - DNA, 25 bp, Homo sapiens
cgggcaggagcgcatttttcacaaa

SEQ ID NO: 2445 - DNA, 25 bp, Homo sapiens
cacagcggccttcctcttgaggatg

SEQ ID NO: 2446 - DNA, 25 bp, Homo sapiens
cgcatgctgactgctggggatttta

SEQ ID NO: 2447 - DNA, 25 bp, Homo sapiens
agacgtacaggcaaggggaccattc

SEQ ID NO: 2448 - DNA, 25 bp, Homo sapiens
ccgttcggaggcacatctcttcctg

SEQ ID NO: 2449 - DNA, 25 bp, Homo sapiens
agcgcattcagagtccagttctaga

SEQ ID NO: 2450 - DNA, 25 bp, Homo sapiens
aggtcacccttcagtcctctgcaga

SEQ ID NO: 2451 - DNA, 25 bp, Homo sapiens
gaagctggcctcctctcattcggga

SEQ ID NO: 2452 - DNA, 25 bp, Homo sapiens
cggccagtggtgactattcttgaaa

SEQ ID NO: 2453 - DNA, 25 bp, Homo sapiens
tcccacggtgacttggaatggctta

SEQ ID NO: 2454 - DNA, 25 bp, Homo sapiens
ggtccctgttgcaagtcatctcccg

SEQ ID NO: 2455 - DNA, 25 bp, Homo sapiens
gcagtgctgtcctctcttgcaggca

SEQ ID NO: 2456 - DNA, 25 bp, Homo sapiens
gcccttcctgtgtttgcttctggga

SEQ ID NO: 2457 - DNA, 25 bp, Homo sapiens
tcactccagtgggaggcctgccaaa

SEQ ID NO: 2458 - DNA, 25 bp, Homo sapiens
caggcttggggatgagaaactcagc

SEQ ID NO: 2459 - DNA, 25 bp, Homo sapiens
agagggctttcccatcctcgaggga

SEQ ID NO: 2460 - DNA, 25 bp, Homo sapiens
ttagagaccacaacaggcttccgcc

SEQ ID NO: 2461 - DNA, 25 bp, Homo sapiens
ttacacggagttggtctttgccctg

SEQ ID NO: 2462 - DNA, 25 bp, Homo sapiens
tggcctcggtttcctcttttgctcg

SEQ ID NO: 2463 - DNA, 25 bp, Homo sapiens
gcctctaccgctggtggccaaggaa

SEQ ID NO: 2464 - DNA, 25 bp, Homo sapiens
gtgggactccctcaggttcctcata

SEQ ID NO: 2465 - DNA, 25 bp, Homo sapiens
gccaggtgactcagctactgcctta

SEQ ID NO: 2466 - DNA, 25 bp, Homo sapiens
cttcctggtcgtggctccactgata

SEQ ID NO: 2467 - DNA, 25 bp, Homo sapiens
gtcctagtcagtgtggctccaagtc

SEQ ID NO: 2468 - DNA, 25 bp, Homo sapiens
tcccagggacatgcacaccaggctt

SEQ ID NO: 2469 - DNA, 25 bp, Homo sapiens
gcaggaggctgtcatggaattaacc

SEQ ID NO: 2470 - DNA, 25 bp, Homo sapiens
ggcgtcacggaccacagataggata

SEQ ID NO: 2471 - DNA, 25 bp, Homo sapiens
ctcagggctcttcatggtcatgttc

SEQ ID NO: 2472 - DNA, 25 bp, Homo sapiens
tgatgatttgccaccacccaggatg

SEQ ID NO: 2473 - DNA, 25 bp, Homo sapiens
ctgagtcctggatctgaagtccttc

SEQ ID NO: 2474 - DNA, 25 bp, Homo sapiens
gggcctttccttcctcccttgtgga

SEQ ID NO: 2475 - DNA, 25 bp, Homo sapiens
cttggccctgagaagcacctgagga

SEQ ID NO: 2476 - DNA, 25 bp, Homo sapiens
atctggttcccagcagcagcttgga

SEQ ID NO: 2477 - DNA, 25 bp, Homo sapiens
ggccacgtgcaggttgctatcaata

SEQ ID NO: 2478 - DNA, 25 bp, Homo sapiens
cccaaaccctggtcgcagaactgta

SEQ ID NO: 2479 - DNA, 25 bp, Homo sapiens
gctgtgaccgattgacccatctgga

SEQ ID NO: 2480 - DNA, 25 bp, Homo sapiens
gccgtggtcagctatctcagaaaga

SEQ ID NO: 2481 - DNA, 25 bp, Homo sapiens
ttgaagtggtttttcccaaaggccc

SEQ ID NO: 2482 - DNA, 25 bp, Homo sapiens
agcggaccgagctcctatcttgcca

SEQ ID NO: 2483 - DNA, 25 bp, Homo sapiens
ggtgtcccttcttttgcttccagag

SEQ ID NO: 2484 - DNA, 25 bp, Homo sapiens
ccctcatggacactgtgaagacctg

SEQ ID NO: 2485 - DNA, 25 bp, Homo sapiens
gcagcatcagtccaaaccgggttta

SEQ ID NO: 2486 - DNA, 25 bp, Homo sapiens
gcaggtcctacctcacaagatgttg

SEQ ID NO: 2487 - DNA, 25 bp, Homo sapiens
ggaaagggccctcccagcagtcact

SEQ ID NO: 2488 - DNA, 25 bp, Homo sapiens
attgagtgttcatctctcatgtccc

SEQ ID NO: 2489 - DNA, 25 bp, Homo sapiens
gcatttacatttcctttaacaattg

SEQ ID NO: 2490 - DNA, 25 bp, Homo sapiens
aatacgctcggtgtgaatacgctcg

SEQ ID NO: 2491 - DNA, 25 bp, Homo sapiens
gggtccctgttgctgtcatcttaca

SEQ ID NO: 2492 - DNA, 25 bp, Homo sapiens
cacataaggtctggtgttctggtcc

SEQ ID NO: 2493 - DNA, 25 bp, Homo sapiens
gactcgggtctgcatctcttaaatg

SEQ ID NO: 2494 - DNA, 25 bp, Homo sapiens
agccatcaggttctagggagccata

SEQ ID NO: 2495 - DNA, 25 bp, Homo sapiens
gtggctctgggcaaacctctcaacc

SEQ ID NO: 2496 - DNA, 25 bp, Homo sapiens
tgacagcgtttcattcaccaggcgg

SEQ ID NO: 2497 - DNA, 25 bp, Homo sapiens
cgcctgctaggaagtggcacatctt

SEQ ID NO: 2498 - DNA, 25 bp, Homo sapiens
ttggcgctcatggaaagcacatctc

SEQ ID NO: 2499 - DNA, 25 bp, Homo sapiens
tggtgacaaggtgacagactccatc

SEQ ID NO: 2500 - DNA, 25 bp, Homo sapiens
cctggccctggaaaacaaaatcgtt

SEQ ID NO: 2501 - DNA, 25 bp, Homo sapiens
acacagtgagtgtacctggacagca

SEQ ID NO: 2502 - DNA, 25 bp, Homo sapiens
ggcagcatttattcacccaacgttg

SEQ ID NO: 2503 - DNA, 25 bp, Homo sapiens
ctgcctcaaagtggggaacattttt

SEQ ID NO: 2504 - DNA, 25 bp, Homo sapiens
ctggctgttctcacaccgaggagca

SEQ ID NO: 2505 - DNA, 25 bp, Homo sapiens
ccacgcagcagccaggatgagatgt

SEQ ID NO: 2506 - DNA, 25 bp, Homo sapiens
tgtagcttctgcttatccacaagtg

SEQ ID NO: 2507 - DNA, 25 bp, Homo sapiens
tggcatgggcctagttagtacaatc

SEQ ID NO: 2508 - DNA, 25 bp, Homo sapiens
ttgggccaacagagaccactttgtc

SEQ ID NO: 2509 - DNA, 25 bp, Homo sapiens
gaggggccaacactttctgagacca

SEQ ID NO: 2510 - DNA, 25 bp, Homo sapiens
tactgaggctgggactaaatatttc

SEQ ID NO: 2511 - DNA, 25 bp, Homo sapiens
ctcgaggtgcctagaagccagaata

SEQ ID NO: 2512 - DNA, 25 bp, Homo sapiens
tcctgttcattctctatgcccgaag

SEQ ID NO: 2513 - DNA, 25 bp, Homo sapiens
gatacattttgtcactgcgccaggg

SEQ ID NO: 2514 - DNA, 25 bp, Homo sapiens
ctgtgcctccacattagctcgtttg

SEQ ID NO: 2515 - DNA, 25 bp, Homo sapiens
ttctactgaacatctgggctggctt

SEQ ID NO: 2516 - DNA, 25 bp, Homo sapiens
ggggatgcatttcaagccactaagc

SEQ ID NO: 2517 - DNA, 25 bp, Homo sapiens
acctgctgatggtgtaaggcatgta

SEQ ID NO: 2518 - DNA, 25 bp, Homo sapiens
attctctctgctgaacacgcgtgcc

SEQ ID NO: 2519 - DNA, 25 bp, Homo sapiens
gaagaagaaggagaatgagaagatt

SEQ ID NO: 2520 - DNA, 25 bp, Homo sapiens
agtcagatacgcgaggtcaccatta

SEQ ID NO: 2521 - DNA, 25 bp, Homo sapiens
aacctctcctctgtgaactactgta

SEQ ID NO: 2522 - DNA, 25 bp, Homo sapiens
catgtggcttagtggtgtgaaatcc

SEQ ID NO: 2523 - DNA, 25 bp, Homo sapiens
ctgctgcaggcactggcaaatctca

SEQ ID NO: 2524 - DNA, 25 bp, Homo sapiens
cccaggtcttccaaatgagctaata

SEQ ID NO: 2525 - DNA, 25 bp, Homo sapiens
ccctggtgcagtgacaaaatgtatc

SEQ ID NO: 2526 - DNA, 25 bp, Homo sapiens
ctgcttcgggcatagagaatgaaca

SEQ ID NO: 2527 - DNA, 25 bp, Homo sapiens
tgcgctttctctgccttcctgatta

SEQ ID NO: 2528 - DNA, 25 bp, Homo sapiens
ctgctgggcctgctaacacagaatc

SEQ ID NO: 2529 - DNA, 25 bp, Homo sapiens
tccctttggcttcttgggtccatga

SEQ ID NO: 2530 - DNA, 25 bp, Homo sapiens
cccagcaaggggattgtactaacta

SEQ ID NO: 2531 - DNA, 25 bp, Homo sapiens
tcccttggggctttgggacacttgt

SEQ ID NO: 2532 - DNA, 25 bp, Homo sapiens
tgttcagggcaagattctcagcacc

SEQ ID NO: 2533 - DNA, 25 bp, Homo sapiens
taccaactgtgagctgggaggactc

SEQ ID NO: 2534 - DNA, 25 bp, Homo sapiens
atttatttacttgaataaatcatgg

SEQ ID NO: 2535 - DNA, 25 bp, Homo sapiens
catgctcttggccaggtagaatata

SEQ ID NO: 2536 - DNA, 25 bp, Homo sapiens
ggcctgtgatgtcgttcttttatga

SEQ ID NO: 2537 - DNA, 25 bp, Homo sapiens
cttcaggagaagcaacgaaattgtt

SEQ ID NO: 2538 - DNA, 25 bp, Homo sapiens
aaagcaaaaatcaaataataacacc

SEQ ID NO: 2539 - DNA, 25 bp, Homo sapiens
atgtggggcactttaacagtcatgc

SEQ ID NO: 2540 - DNA, 25 bp, Homo sapiens
ttgggctccctggaataatagcagc

SEQ ID NO: 2541 - DNA, 25 bp, Homo sapiens
ggtgaacgttctcacaggcacattg

SEQ ID NO: 2542 - DNA, 25 bp, Homo sapiens
gcctctattgggctcttgtcgcata

SEQ ID NO: 2543 - DNA, 25 bp, Homo sapiens
gactagagtgaagagaaataagaaa

SEQ ID NO: 2544 - DNA, 25 bp, Homo sapiens
tgtgaacctgaacaacaattcatgg

SEQ ID NO: 2545 - DNA, 25 bp, Homo sapiens
tatttgccatgtaagaatcacctta

SEQ ID NO: 2546 - DNA, 25 bp, Homo sapiens
tgcagccttgcacatcgtgaacatg

SEQ ID NO: 2547 - DNA, 25 bp, Homo sapiens
ttctactgaacatctgggctggctt

SEQ ID NO: 2548 - DNA, 25 bp, Homo sapiens
cgtaatcctgggtagtggcactaaa

SEQ ID NO: 2549 - DNA, 25 bp, Homo sapiens
agtaggattactgtggtcaaagaga

SEQ ID NO: 2550 - DNA, 25 bp, Homo sapiens
ggagctgtggctcacaccagtaatc

SEQ ID NO: 2551 - DNA, 25 bp, Homo sapiens
ttacaaataaagctattaacatact

SEQ ID NO: 2552 - DNA, 25 bp, Homo sapiens
atgggacagtctcacttttatcttc

SEQ ID NO: 2553 - DNA, 25 bp, Homo sapiens
tttagtgccactaccaaggattatg

SEQ ID NO: 2554 - DNA, 25 bp, Homo sapiens
ggggacaaagccagcccagatgttc

SEQ ID NO: 2555 - DNA, 25 bp, Homo sapiens
gactctccagtgacctccagacatg

SEQ ID NO: 2556 - DNA, 25 bp, Homo sapiens
ccttgatgcagggacaaaatctatc

SEQ ID NO: 2557 - DNA, 25 bp, Homo sapiens
ctttcctttacatttccatgaattg

SEQ ID NO: 2558 - DNA, 25 bp, Homo sapiens
cagaagttcagggatccaggaaata

SEQ ID NO: 2559 - DNA, 25 bp, Homo sapiens
ctctccaatgtgtcagcaatgtgcc

SEQ ID NO: 2560 - DNA, 25 bp, Homo sapiens
agcctgaggggctgctattattcca

SEQ ID NO: 2561 - DNA, 25 bp, Homo sapiens
tgggccatgtctctttctctgatca

SEQ ID NO: 2562 - DNA, 25 bp, Homo sapiens
ggtgttattatttgatttttgcttt

SEQ ID NO: 2563 - DNA, 25 bp, Homo sapiens
tgattttaaagaatatcagaaattt

SEQ ID NO: 2564 - DNA, 25 bp, Homo sapiens
gggagtttagccacccattctcaga

SEQ ID NO: 2565 - DNA, 25 bp, Homo sapiens
cctggccaagagcatgtcaaatgta

SEQ ID NO: 2566 - DNA, 25 bp, Homo sapiens
ctgtattggctattcttaaagagtc

SEQ ID NO: 2567 - DNA, 25 bp, Homo sapiens
ctctaacttctagttcaagtccaag

SEQ ID NO: 2568 - DNA, 25 bp, Homo sapiens
tgctgagaatcttgccctgaacatg

SEQ ID NO: 2569 - DNA, 25 bp, Homo sapiens
tttttcgggggcggtcgcagtccaa

SEQ ID NO: 2570 - DNA, 25 bp, Homo sapiens
ttgctcagatgttggatgtagtttc

SEQ ID NO: 2571 - DNA, 25 bp, Homo sapiens
tggcatgggcctagttagtacaatc

SEQ ID NO: 2572 - DNA, 25 bp, Homo sapiens
ttgggccaacagagaccactttgtc

SEQ ID NO: 2573 - DNA, 25 bp, Homo sapiens
gaggggccaacactttctgagacca

SEQ ID NO: 2574 - DNA, 25 bp, Homo sapiens
tactgaggctgggactaaatatttc

SEQ ID NO: 2575 - DNA, 25 bp, Homo sapiens
ccttcacttggaggcagaacatagt

SEQ ID NO: 2576 - DNA, 25 bp, Homo sapiens
cttgaaggtgtttactgatttaaaa

SEQ ID NO: 2577 - DNA, 25 bp, Homo sapiens
gatacattttgtcactgcaccaggg

SEQ ID NO: 2578 - DNA, 25 bp, Homo sapiens
tgtgcctccacattagctcatttgg

SEQ ID NO: 2579 - DNA, 25 bp, Homo sapiens
ttctactgaacatctgggctggctt

SEQ ID NO: 2580 - DNA, 25 bp, Homo sapiens
ggatttcacaccactaagccacatg

SEQ ID NO: 2581 - DNA, 25 bp, Homo sapiens
cccagctggtacagtagttcgcaga

SEQ ID NO: 2582 - DNA, 25 bp, Homo sapiens
tggtgacctcgcgtatctgactata

SEQ ID NO: 2583 - DNA, 25 bp, Homo sapiens
ggattactggtgtgagccacagctc

SEQ ID NO: 2584 - DNA, 25 bp, Homo sapiens
catctctttgaccacagtaatccta

SEQ ID NO: 2585 - DNA, 25 bp, Homo sapiens
tgctcattctgcatggccacacata

SEQ ID NO: 2586 - DNA, 25 bp, Homo sapiens
ccagcccaggtgttcagtagaagca

SEQ ID NO: 2587 - DNA, 25 bp, Homo sapiens
gttcacgatgtgcaaggctgtaccc

SEQ ID NO: 2588 - DNA, 25 bp, Homo sapiens
ccttgatgcagggacaaaatctatc

SEQ ID NO: 2589 - DNA, 25 bp, Homo sapiens
ctttcctttacatttccatgaattg

SEQ ID NO: 2590 - DNA, 25 bp, Homo sapiens
cagaagttcagggatccaggaaata

SEQ ID NO: 2591 - DNA, 25 bp, Homo sapiens
ctctcgaatgtgtcagcaatgtgcc

SEQ ID NO: 2592 - DNA, 25 bp, Homo sapiens
agcctgaggggctgctattattcca

SEQ ID NO: 2593 - DNA, 25 bp, Homo sapiens
tgggccatgtctctttctctgatca

SEQ ID NO: 2594 - DNA, 25 bp, Homo sapiens
ggtgttattatttgatttttgcttt

SEQ ID NO: 2595 - DNA, 25 bp, Homo sapiens
tgattttaaagaatatcagaaattt

SEQ ID NO: 2596 - DNA, 25 bp, Homo sapiens
accctgaatttgttgcatgacatgc

SEQ ID NO: 2597 - DNA, 25 bp, Homo sapiens
tgatactgggaaatcatctgaaata

SEQ ID NO: 2598 - DNA, 25 bp, Homo sapiens
cccttggtgatgaggacatagcatc

SEQ ID NO: 2599 - DNA, 25 bp, Homo sapiens
atgccctggaaggacagaatattta

SEQ ID NO: 2600 - DNA, 25 bp, Homo sapiens
atgactacctttgagctaatgactg

SEQ ID NO: 2601 - DNA, 25 bp, Homo sapiens
tgctccagatttgcaaggaatagcc

SEQ ID NO: 2602 - DNA, 25 bp, Homo sapiens
aggagggctagttcacagcaaattc

SEQ ID NO: 2603 - DNA, 25 bp, Homo sapiens
ggccctgttttctgctaaaaccaga

SEQ ID NO: 2604 - DNA, 25 bp, Homo sapiens
cccttcctttcaactgggagtgtta

SEQ ID NO: 2605 - DNA, 25 bp, Homo sapiens
catgagcattgtggaatatcctttc

SEQ ID NO: 2606 - DNA, 25 bp, Homo sapiens
gtacagcaatgggtgagatgagatc

SEQ ID NO: 2607 - DNA, 25 bp, Homo sapiens
gcctgaatgccttctggggtatttc

SEQ ID NO: 2608 - DNA, 25 bp, Homo sapiens
agaggtttccttctcacttcagaca

SEQ ID NO: 2609 - DNA, 25 bp, Homo sapiens
caagagtgaaggtcaagggccctcc

SEQ ID NO: 2610 - DNA, 25 bp, Homo sapiens
gtctgccaaccaatggccagctatg

SEQ ID NO: 2611 - DNA, 25 bp, Homo sapiens
gcctcagcatatcctgggaggactg

SEQ ID NO: 2612 - DNA, 25 bp, Homo sapiens
tgtcccattataggtgcaaggcacc

SEQ ID NO: 2613 - DNA, 25 bp, Homo sapiens
tctttacagcagaatccagagttgg

SEQ ID NO: 2614 - DNA, 25 bp, Homo sapiens
tttcagcatggaactaactgggcgg

SEQ ID NO: 2615 - DNA, 25 bp, Homo sapiens
cccagctgcctagtactatacaaga

SEQ ID NO: 2616 - DNA, 25 bp, Homo sapiens
ggaagcagtgtcattacattcaagc

SEQ ID NO: 2617 - DNA, 25 bp, Homo sapiens
ccaaggttctgcctatgtctgatga

SEQ ID NO: 2618 - DNA, 25 bp, Homo sapiens
gacatcctccaccataccagtgttt

SEQ ID NO: 2619 - DNA, 25 bp, Homo sapiens
gcgccaccaggatagttagcagaaa

SEQ ID NO: 2620 - DNA, 25 bp, Homo sapiens
gagtacccaccccagttgggtactc

SEQ ID NO: 2621 - DNA, 25 bp, Homo sapiens
ctgcactgaaatcactggcctcttc

SEQ ID NO: 2622 - DNA, 25 bp, Homo sapiens
taacagatgcccagaacacggtgca

SEQ ID NO: 2623 - DNA, 25 bp, Homo sapiens
gccgtctagagaaaaaaggcctgtc

SEQ ID NO: 2624 - DNA, 25 bp, Homo sapiens
cccagcagagttagcattcctatga

SEQ ID NO: 2625 - DNA, 25 bp, Homo sapiens
ggggctccctaatcaccatgtgtca

SEQ ID NO: 2626 - DNA, 25 bp, Homo sapiens
tccttttctggcttcagggtgcaaa

SEQ ID NO: 2627 - DNA, 25 bp, Homo sapiens
cgatgtcccgccacaaccatggtga

SEQ ID NO: 2628 - DNA, 25 bp, Homo sapiens
ttcacgggattggttgtgctattcc

SEQ ID NO: 2629 - DNA, 25 bp, Homo sapiens
ggcctagctcagtctcttaaatttg

SEQ ID NO: 2630 - DNA, 25 bp, Homo sapiens
ggctgtgacctgtaatccctcctga

SEQ ID NO: 2631 - DNA, 25 bp, Homo sapiens
acgctgctgtcaaatggtccatctg

SEQ ID NO: 2632 - DNA, 25 bp, Homo sapiens
agctggcatgattcgaggaacctca

SEQ ID NO: 2633 - DNA, 25 bp, Homo sapiens
agtgtggacactggcctttttaaaa

SEQ ID NO: 2634 - DNA, 25 bp, Homo sapiens
gagttgtatccagattaagaaaata

SEQ ID NO: 2635 - DNA, 25 bp, Homo sapiens
gggattccctgctgagcctctaagg

SEQ ID NO: 2636 - DNA, 25 bp, Homo sapiens
attttgctcacaagaggccacgtca

SEQ ID NO: 2637 - DNA, 25 bp, Homo sapiens
ggctctccaagccaagactcagaca

SEQ ID NO: 2638 - DNA, 25 bp, Homo sapiens
tctccaatctacaagtcacacattt

SEQ ID NO: 2639 - DNA, 25 bp, Homo sapiens
caaaatgttttatgcatgtcttaga

SEQ ID NO: 2640 - DNA, 25 bp, Homo sapiens
tgcatgctgtatagccgacatttta

SEQ ID NO: 2641 - DNA, 25 bp, Homo sapiens
gaggttcaggtctcacagcataata

SEQ ID NO: 2642 - DNA, 25 bp, Homo sapiens
aggaccgaaacatggactttaaacc

SEQ ID NO: 2643 - DNA, 25 bp, Homo sapiens
cggtgtatataaatggctacaaatc

SEQ ID NO: 2644 - DNA, 25 bp, Homo sapiens
ggggtactcagtccattcaaaaaga

SEQ ID NO: 2645 - DNA, 25 bp, Homo sapiens
tattagtctgggagggcaatgcatc

SEQ ID NO: 2646 - DNA, 25 bp, Homo sapiens
gttccttttgtccttctgctatttc

SEQ ID NO: 2647 - DNA, 25 bp, Homo sapiens
gtacaagactacttctctaaatgtt

SEQ ID NO: 2648 - DNA, 25 bp, Homo sapiens
ttcaactggggacgatacacacatc

SEQ ID NO: 2649 - DNA, 25 bp, Homo sapiens
ctgaactgctccctcctgagtgtta

SEQ ID NO: 2650 - DNA, 25 bp, Homo sapiens
tgaggtcacacccagttccagaaag

SEQ ID NO: 2651 - DNA, 25 bp, Homo sapiens
tccatctctagagggagtcaagtcc

SEQ ID NO: 2652 - DNA, 25 bp, Homo sapiens
gctcctcagacacatgcggcttttg

SEQ ID NO: 2653 - DNA, 25 bp, Homo sapiens
ctgcctgcaggatctctaagtggtc

SEQ ID NO: 2654 - DNA, 25 bp, Homo sapiens
ttctctctggttggacacagccaca

SEQ ID NO: 2655 - DNA, 25 bp, Homo sapiens
cttccgagacgaggacaagctcatc

SEQ ID NO: 2656 - DNA, 25 bp, Homo sapiens
tgtcctttagtggtcagagccgata

SEQ ID NO: 2657 - DNA, 25 bp, Homo sapiens
cctagctgtgctttgggcttcaaca

SEQ ID NO: 2658 - DNA, 25 bp, Homo sapiens
ctccgtgtttttccctctgccaata

SEQ ID NO: 2659 - DNA, 25 bp, Homo sapiens
ttgccaagctgggaaaacctttctt

SEQ ID NO: 2660 - DNA, 25 bp, Homo sapiens
tctaggcctggtgtctacaaaatcc

SEQ ID NO: 2661 - DNA, 25 bp, Homo sapiens
gagtctagctgtcctcacttgggga

SEQ ID NO: 2662 - DNA, 25 bp, Homo sapiens
ccttcaagatgcatggcctggggta

SEQ ID NO: 2663 - DNA, 25 bp, Homo sapiens
ggggttatcaacatcacttagtcta

SEQ ID NO: 2664 - DNA, 25 bp, Homo sapiens
tgcacctggtactttgggacacttg

SEQ ID NO: 2665 - DNA, 25 bp, Homo sapiens
attgtaataacatcaactgatgcag

SEQ ID NO: 2666 - DNA, 25 bp, Homo sapiens
gcaggcccacaccaggacagaactt

SEQ ID NO: 2667 - DNA, 25 bp, Homo sapiens
gggaactccgcttgtgtgtgaacca

SEQ ID NO: 2668 - DNA, 25 bp, Homo sapiens
cttctcgggacataggctctgattg

SEQ ID NO: 2669 - DNA, 25 bp, Homo sapiens
tgttaacatacagatatagtcccta

SEQ ID NO: 2670 - DNA, 25 bp, Homo sapiens
tgtgttagaaaattacaaataacca

SEQ ID NO: 2671 - DNA, 25 bp, Homo sapiens
acctgcgatggtggttgtaaaacta

SEQ ID NO: 2672 - DNA, 25 bp, Homo sapiens
ccacaaggtcagctaaggtttcttc

SEQ ID NO: 2673 - DNA, 25 bp, Homo sapiens
ctgcccatgagccttctgccttgta

SEQ ID NO: 2674 - DNA, 25 bp, Homo sapiens
ttgggtgccttcctcatgcagatgc

SEQ ID NO: 2675 - DNA, 25 bp, Homo sapiens
agccaggctcagtcagcttcccaga

SEQ ID NO: 2676 - DNA, 25 bp, Homo sapiens
ggactgacatcaccctgcttgagaa

SEQ ID NO: 2677 - DNA, 25 bp, Homo sapiens
gagatctgcctcctccctcttgtga

SEQ ID NO: 2678 - DNA, 25 bp, Homo sapiens
ataataataatgctttttcaaaaag

SEQ ID NO: 2679 - DNA, 25 bp, Homo sapiens
atgctgtgtgtttatctgttgtctg

SEQ ID NO: 2680 - DNA, 25 bp, Homo sapiens
catggtatattttaccataataaaa

SEQ ID NO: 2681 - DNA, 25 bp, Homo sapiens
caggctctgagctctgtggtctata

SEQ ID NO: 2682 - DNA, 25 bp, Homo sapiens
tgcctgctccgtgatctctatgtga

SEQ ID NO: 2683 - DNA, 25 bp, Homo sapiens
ccacctaagctaaggacaggagtta

SEQ ID NO: 2684 - DNA, 25 bp, Homo sapiens
cttctatctgtccaaactgggaccg

SEQ ID NO: 2685 - DNA, 25 bp, Homo sapiens
cggggatccttttctcttactataa

SEQ ID NO: 2686 - DNA, 25 bp, Homo sapiens
tgaaccctctcctcagtgagtgatt

SEQ ID NO: 2687 - DNA, 25 bp, Homo sapiens
ttgtcctctacccaaacatttgctg

SEQ ID NO: 2688 - DNA, 25 bp, Homo sapiens
gggtcccaatcctagatgcctttta

SEQ ID NO: 2689 - DNA, 25 bp, Homo sapiens
tcactatttttaaaagtcttctggg

SEQ ID NO: 2690 - DNA, 25 bp, Homo sapiens
cctccagcagccgtaggaccataga

SEQ ID NO: 2691 - DNA, 25 bp, Homo sapiens
gtggacccaggcacaccatttactg

SEQ ID NO: 2692 - DNA, 25 bp, Homo sapiens
cggaacaaggatgaactctgaactc

SEQ ID NO: 2693 - DNA, 25 bp, Homo sapiens
ccaggaaaggggcataaaaatgtta

SEQ ID NO: 2694 - DNA, 25 bp, Homo sapiens
gtggttgccctcatcttcaggaagg

SEQ ID NO: 2695 - DNA, 25 bp, Homo sapiens
tctaggtgctcacacggatagatta

SEQ ID NO: 2696 - DNA, 25 bp, Homo sapiens
gccagggatctgtctcagtctttta

SEQ ID NO: 2697 - DNA, 25 bp, Homo sapiens
ggaggactcgcttggtcttataata

SEQ ID NO: 2698 - DNA, 25 bp, Homo sapiens
gctccaggagtacagatattttgca

SEQ ID NO: 2699 - DNA, 25 bp, Homo sapiens
gcccttcttggccagtttgtaaatc

SEQ ID NO: 2700 - DNA, 25 bp, Homo sapiens
cggccctgcgcctaataaattaaca

SEQ ID NO: 2701 - DNA, 25 bp, Homo sapiens
gactcagtgccggtacacaacaatg

SEQ ID NO: 2702 - DNA, 25 bp, Homo sapiens
tcccaaagcattaggaattttagtc

SEQ ID NO: 2703 - DNA, 25 bp, Homo sapiens
agtcccagattacaggatgtctgtg

SEQ ID NO: 2704 - DNA, 25 bp, Homo sapiens
gctgcttttgcaaattggaaacttc

SEQ ID NO: 2705 - DNA, 25 bp, Homo sapiens
aaccacaactttttttctttaaatg

SEQ ID NO: 2706 - DNA, 25 bp, Homo sapiens
gattaaagacttgcataatgaagtt

SEQ ID NO: 2707 - DNA, 25 bp, Homo sapiens
tgagctcattgcaaagtctggaacc

SEQ ID NO: 2708 - DNA, 25 bp, Homo sapiens
acgacctctaccaagacagtttttg

SEQ ID NO: 2709 - DNA, 25 bp, Homo sapiens
gtcctgtcccttatgattctgaatc

SEQ ID NO: 2710 - DNA, 25 bp, Homo sapiens
tgccgcagtcagctgataccattta

SEQ ID NO: 2711 - DNA, 25 bp, Homo sapiens
ctattggactgttattggtgtacac

SEQ ID NO: 2712 - DNA, 25 bp, Homo sapiens
ctgaaggaacctgcatctgaaaata

SEQ ID NO: 2713 - DNA, 25 bp, Homo sapiens
gatgacatcgttcagtcacccatta

SEQ ID NO: 2714 - DNA, 25 bp, Homo sapiens
gaggagctcagtatggcccatgata

SEQ ID NO: 2715 - DNA, 25 bp, Homo sapiens
ggttcaatctgtccttccctcaaaa

SEQ ID NO: 2716 - DNA, 25 bp, Homo sapiens
gagtgatcataaccatcctaagata

SEQ ID NO: 2717 - DNA, 25 bp, Homo sapiens
actggtgccaagtaggatctatcta

SEQ ID NO: 2718 - DNA, 25 bp, Homo sapiens
tgttctacaggccaaaggtttgtta

SEQ ID NO: 2719 - DNA, 25 bp, Homo sapiens
ttgcccaggggagccaatgaatctc

SEQ ID NO: 2720 - DNA, 25 bp, Homo sapiens
tggcacatggcactgtagaaaaata

SEQ ID NO: 2721 - DNA, 25 bp, Homo sapiens
tcataataatcatagtgggttcgtg

SEQ ID NO: 2722 - DNA, 25 bp, Homo sapiens
ggagcccgatccctatttaaaatga

SEQ ID NO: 2723 - DNA, 25 bp, Homo sapiens
gccgcgaggcaaaacacaaagcttg

SEQ ID NO: 2724 - DNA, 25 bp, Homo sapiens
tggtacattcacttggcctgacttg

SEQ ID NO: 2725 - DNA, 25 bp, Homo sapiens
cctctgttttgctggcctctaagta

SEQ ID NO: 2726 - DNA, 25 bp, Homo sapiens
tctttgacataggaaaccagctagc

SEQ ID NO: 2727 - DNA, 25 bp, Homo sapiens
caagaagacactgacctagctggta

SEQ ID NO: 2728 - DNA, 25 bp, Homo sapiens
acagagctctgctttggacaaagga

SEQ ID NO: 2729 - DNA, 25 bp, Homo sapiens
gtgtgacactatgcccacccttttg

SEQ ID NO: 2730 - DNA, 25 bp, Homo sapiens
tggacacctctgattactgcaaagc

SEQ ID NO: 2731 - DNA, 25 bp, Homo sapiens
ttgccgaagatcttcaccaaccttg

SEQ ID NO: 2732 - DNA, 25 bp, Homo sapiens
atatatcaaaagtggttcaagtaga

SEQ ID NO: 2733 - DNA, 25 bp, Homo sapiens
gaattgcttttctagactctctgga

SEQ ID NO: 2734 - DNA, 25 bp, Homo sapiens
tgccttaagcatacctgcccatttg

SEQ ID NO: 2735 - DNA, 25 bp, Homo sapiens
caggtaaacaatgtatatagaggta

SEQ ID NO: 2736 - DNA, 25 bp, Homo sapiens
aaaggaattcaagaaaacaattttc

SEQ ID NO: 2737 - DNA, 25 bp, Homo sapiens
cttctaagaactaggtgaacctctc

SEQ ID NO: 2738 - DNA, 25 bp, Homo sapiens
ggggatcccttagcaagttcccata

SEQ ID NO: 2739 - DNA, 25 bp, Homo sapiens
gggacagctacttcttcataaaatc

SEQ ID NO: 2740 - DNA, 25 bp, Homo sapiens
agaggcaaccacctaagcttgtatg

SEQ ID NO: 2741 - DNA, 25 bp, Homo sapiens
gctggccctcgagacaaaagttttg

SEQ ID NO: 2742 - DNA, 25 bp, Homo sapiens
ggattcactctccacattgtactga

SEQ ID NO: 2743 - DNA, 25 bp, Homo sapiens
gtatgctgacccttgccctagacta

SEQ ID NO: 2744 - DNA, 25 bp, Homo sapiens
tctagtgccatcagtttaagccatc

SEQ ID NO: 2745 - DNA, 25 bp, Homo sapiens
taacgggctagctaaagattttcta

SEQ ID NO: 2746 - DNA, 25 bp, Homo sapiens
tggcagtctcaagcttaatacaatc

SEQ ID NO: 2747 - DNA, 25 bp, Homo sapiens
gtcccaagggacacaaggtttcaaa

SEQ ID NO: 2748 - DNA, 25 bp, Homo sapiens
ggctgctgcttttctccatggaaca

SEQ ID NO: 2749 - DNA, 25 bp, Homo sapiens
gtaggcactctgatagcaaatgttg

SEQ ID NO: 2750 - DNA, 25 bp, Homo sapiens
gagccagaattgttatatagtgtta

SEQ ID NO: 2751 - DNA, 25 bp, Homo sapiens
ttcctaggtcccagtttaaagcatg

SEQ ID NO: 2752 - DNA, 25 bp, Homo sapiens
cttctactgggtatttgttcacctc

SEQ ID NO: 2753 - DNA, 25 bp, Homo sapiens
tggaagtgcttcaaatacctctgta

SEQ ID NO: 2754 - DNA, 25 bp, Homo sapiens
taggactcctaccagaatttgcatg

SEQ ID NO: 2755 - DNA, 25 bp, Homo sapiens
ggggcacaccatcaacgtaactttt

SEQ ID NO: 2756 - DNA, 25 bp, Homo sapiens
aggccgggttaattttcacttcgtc

SEQ ID NO: 2757 - DNA, 25 bp, Homo sapiens
tcccatctgggttcctgccttctaa

SEQ ID NO: 2758 - DNA, 25 bp, Homo sapiens
agcctagaggtgacagctgctttta

SEQ ID NO: 2759 - DNA, 25 bp, Homo sapiens
gctggcccacgctgatacatcttac

SEQ ID NO: 2760 - DNA, 25 bp, Homo sapiens
aggccaggagtaatcaaaacctctg

SEQ ID NO: 2761 - DNA, 25 bp, Homo sapiens
ccaccttctgcctttgattttctct

SEQ ID NO: 2762 - DNA, 25 bp, Homo sapiens
tgtaaatgacaagaaagaatatgtt

SEQ ID NO: 2763 - DNA, 25 bp, Homo sapiens
ggttcttcttggcaacagagctgaa

SEQ ID NO: 2764 - DNA, 25 bp, Homo sapiens
gagccagttctacttggttgtgata

SEQ ID NO: 2765 - DNA, 25 bp, Homo sapiens
gttcatcaagggttcacgcagtaaa

SEQ ID NO: 2766 - DNA, 25 bp, Homo sapiens
atcgggacagggcatttctagcagc

SEQ ID NO: 2767 - DNA, 25 bp, Homo sapiens
caagtcatcatgtacccagcaaagg

SEQ ID NO: 2768 - DNA, 25 bp, Homo sapiens
ccttggttggaatcccgttaagata

SEQ ID NO: 2769 - DNA, 25 bp, Homo sapiens
tgaggtcctctgcttaaaaatcttt

SEQ ID NO: 2770 - DNA, 25 bp, Homo sapiens
gaggctcacatcaaatcacgaaatt

SEQ ID NO: 2771 - DNA, 25 bp, Homo sapiens
tgtggctctacagttcaggaaattc

SEQ ID NO: 2772 - DNA, 25 bp, Homo sapiens
tccatggtcaccacaggggaagttc

SEQ ID NO: 2773 - DNA, 25 bp, Homo sapiens
tcaagatgggtttctagcactcgta

SEQ ID NO: 2774 - DNA, 25 bp, Homo sapiens
accggtcagtaagaatggaatgcta

SEQ ID NO: 2775 - DNA, 25 bp, Homo sapiens
tccttcctttaaaacatgtcagagc

SEQ ID NO: 2776 - DNA, 25 bp, Homo sapiens
tctggtttcacactccaaatctgcc

SEQ ID NO: 2777 - DNA, 25 bp, Homo sapiens
tgctgtgtctctcgtgaattaggtc

SEQ ID NO: 2778 - DNA, 25 bp, Homo sapiens
gggaactcactctctctgttaactg

SEQ ID NO: 2779 - DNA, 25 bp, Homo sapiens
ggcagtgagtacaaattccttttta

SEQ ID NO: 2780 - DNA, 25 bp, Homo sapiens
gaactttgcaaagccacctctatga

SEQ ID NO: 2781 - DNA, 25 bp, Homo sapiens
ggtgcatgccaagcctctaagtcaa

SEQ ID NO: 2782 - DNA, 25 bp, Homo sapiens
tttcagcccttactatcagttattc

SEQ ID NO: 2783 - DNA, 25 bp, Homo sapiens
gtagcctaagccatgtcagttcaga

SEQ ID NO: 2784 - DNA, 25 bp, Homo sapiens
gttcccagggtactctattttcaca

SEQ ID NO: 2785 - DNA, 25 bp, Homo sapiens
agagtcctttggctttggcaacata

SEQ ID NO: 2786 - DNA, 25 bp, Homo sapiens
cagctggggagtcatctgcctatta

SEQ ID NO: 2787 - DNA, 25 bp, Homo sapiens
tgaggcttaaacattcccaggatac

SEQ ID NO: 2788 - DNA, 25 bp, Homo sapiens
tgctgtcgatctctcttcaagaaga

SEQ ID NO: 2789 - DNA, 25 bp, Homo sapiens
tccgctgttgctagatatctgagcc

SEQ ID NO: 2790 - DNA, 25 bp, Homo sapiens
ccctgtgaagcaatacgaccaactg

SEQ ID NO: 2791 - DNA, 25 bp, Homo sapiens
ttcccttctgtggtagactacaaag

SEQ ID NO: 2792 - DNA, 25 bp, Homo sapiens
tatcctcagggaacaaacggttttc

SEQ ID NO: 2793 - DNA, 25 bp, Homo sapiens
gaatctgtgaacctatgtgtctacc

SEQ ID NO: 2794 - DNA, 25 bp, Homo sapiens
gtattctccttgttgccacatctgg

SEQ ID NO: 2795 - DNA, 25 bp, Homo sapiens
ggtgctgctacccatctaaatgttt

SEQ ID NO: 2796 - DNA, 25 bp, Homo sapiens
ctgcagtcaaccatggaaagtatct

SEQ ID NO: 2797 - DNA, 25 bp, Homo sapiens
ccaagtactctggtgttaggaacta

SEQ ID NO: 2798 - DNA, 25 bp, Homo sapiens
tctgggtggtaaggaaaaatttatc

SEQ ID NO: 2799 - DNA, 25 bp, Homo sapiens
cctacagcctttaaatgaggtctta

SEQ ID NO: 2800 - DNA, 25 bp, Homo sapiens
ttgctattcctatcacaaagagcta

SEQ ID NO: 2801 - DNA, 25 bp, Homo sapiens
caaatggatccactagagttgtaca

SEQ ID NO: 2802 - DNA, 25 bp, Homo sapiens
aggagactgctgtcactcattaaga

SEQ ID NO: 2803 - DNA, 25 bp, Homo sapiens
cagagatgaaaaactcctagtaata

SEQ ID NO: 2804 - DNA, 25 bp, Homo sapiens
ctcatcattgtatgcataggtagta

SEQ ID NO: 2805 - DNA, 25 bp, Homo sapiens
agccacatggccctttttagtcaga

SEQ ID NO: 2806 - DNA, 25 bp, Homo sapiens
ctcattggcagggtttcacatttcc

SEQ ID NO: 2807 - DNA, 25 bp, Homo sapiens
atctgaagtatgtaggcctccctga

SEQ ID NO: 2808 - DNA, 25 bp, Homo sapiens
cctttgttttatagaagctgtctgg

SEQ ID NO: 2809 - DNA, 25 bp, Homo sapiens
aatatactagaggattcacccaatg

SEQ ID NO: 2810 - DNA, 25 bp, Homo sapiens
ctctttggggaatattgctgataca

SEQ ID NO: 2811 - DNA, 25 bp, Homo sapiens
ataagagatttttccgccgcagtta

SEQ ID NO: 2812 - DNA, 25 bp, Homo sapiens
ttccagctcaggttcgcaaaggtgc

SEQ ID NO: 2813 - DNA, 25 bp, Homo sapiens
ccctgtggatttcttgtgatgtatt

SEQ ID NO: 2814 - DNA, 25 bp, Homo sapiens
cacattgtggattaagaaaagaaac

SEQ ID NO: 2815 - DNA, 25 bp, Homo sapiens
gagtcttcccaagcttcgtcacaag

SEQ ID NO: 2816 - DNA, 25 bp, Homo sapiens
ctgagttgcaactgagaaaccctga

SEQ ID NO: 2817 - DNA, 25 bp, Homo sapiens
caccctgccttgaccattgttgaaa

SEQ ID NO: 2818 - DNA, 25 bp, Homo sapiens
ggcattagaaagtcatcgtcttgat

SEQ ID NO: 2819 - DNA, 25 bp, Homo sapiens
cccttaagttgttctctgtgcattg

SEQ ID NO: 2820 - DNA, 25 bp, Homo sapiens
gtgttttttaaccaagctcagtgca

SEQ ID NO: 2821 - DNA, 25 bp, Homo sapiens
gaatagcctctagatcttttttgtg

SEQ ID NO: 2822 - DNA, 25 bp, Homo sapiens
tatccctgggaacctttgaagtacc

SEQ ID NO: 2823 - DNA, 25 bp, Homo sapiens
actgctgctctgatgctctataaga

SEQ ID NO: 2824 - DNA, 25 bp, Homo sapiens
ggcaggcctccttcgtttcacttaa

SEQ ID NO: 2825 - DNA, 25 bp, Homo sapiens
agccgccacagtccgagccattttt

SEQ ID NO: 2826 - DNA, 25 bp, Homo sapiens
ggggtccacaccatccagacgttca

SEQ ID NO: 2827 - DNA, 25 bp, Homo sapiens
taggctctgatcaaccaaaaggttc

SEQ ID NO: 2828 - DNA, 25 bp, Homo sapiens
ccgccagcgggccaagattttaaca

SEQ ID NO: 2829 - DNA, 25 bp, Homo sapiens
tgttggccattctgtgaccaggcga

SEQ ID NO: 2830 - DNA, 25 bp, Homo sapiens
ggaatgtgttgtaatagcataggat

SEQ ID NO: 2831 - DNA, 25 bp, Homo sapiens
tgtctatgttttctcttctcgaagc

SEQ ID NO: 2832 - DNA, 25 bp, Homo sapiens
attcttggcatgatttgaaatggta

SEQ ID NO: 2833 - DNA, 25 bp, Homo sapiens
agccaagactttcctcttgtataga

SEQ ID NO: 2834 - DNA, 25 bp, Homo sapiens
ctgaatgtttgtcgccactttagtc

SEQ ID NO: 2835 - DNA, 25 bp, Homo sapiens
agcctgggagcagtttctggatata

SEQ ID NO: 2836 - DNA, 25 bp, Homo sapiens
gggcaggatcagcacactcatggta

SEQ ID NO: 2837 - DNA, 25 bp, Homo sapiens
gcatcactctgaggtttcttgcacc

SEQ ID NO: 2838 - DNA, 25 bp, Homo sapiens
gtcatcataacagttggttttagct

SEQ ID NO: 2839 - DNA, 25 bp, Homo sapiens
cagccctagctgctctgtcagaatg

SEQ ID NO: 2840 - DNA, 25 bp, Homo sapiens
ggtgcgcgaacctttatgctaactc

SEQ ID NO: 2841 - DNA, 25 bp, Homo sapiens
aaacctatttgtccttcccatggga

SEQ ID NO: 2842 - DNA, 25 bp, Homo sapiens
ccacttagattaggcaaaacacgtc

SEQ ID NO: 2843 - DNA, 25 bp, Homo sapiens
tcctggcggcttctctcaaggatga

SEQ ID NO: 2844 - DNA, 25 bp, Homo sapiens
ggggccctgagtattgctatacaca

SEQ ID NO: 2845 - DNA, 25 bp, Homo sapiens
ttcctttgaaatccctgagcagctc

SEQ ID NO: 2846 - DNA, 25 bp, Homo sapiens
tgtaactttgacaaattctaagcaa

SEQ ID NO: 2847 - DNA, 25 bp, Homo sapiens
cttcaaggatgcatactcagagact

SEQ ID NO: 2848 - DNA, 25 bp, Homo sapiens
gggctggaatcctccttgtgtaaaa

SEQ ID NO: 2849 - DNA, 25 bp, Homo sapiens
gtaagagcttcagtcagcctgactc

SEQ ID NO: 2850 - DNA, 25 bp, Homo sapiens
tccatgatctgaagattaggcagca

SEQ ID NO: 2851 - DNA, 25 bp, Homo sapiens
cgtgcaggagcaggaaaacaagtca

SEQ ID NO: 2852 - DNA, 25 bp, Homo sapiens
ttgggcagcccaagtctatcatctc

SEQ ID NO: 2853 - DNA, 25 bp, Homo sapiens
tgcaaacaaccatcaacacttccag

SEQ ID NO: 2854 - DNA, 25 bp, Homo sapiens
ccctgaactggcagctagcataatg

SEQ ID NO: 2855 - DNA, 25 bp, Homo sapiens
ggggcctagcaagcaacaaagaata

SEQ ID NO: 2856 - DNA, 25 bp, Homo sapiens
ttccctgggtggcttaatataagtc

SEQ ID NO: 2857 - DNA, 25 bp, Homo sapiens
gtgggcatttctccctttgctgctc

SEQ ID NO: 2858 - DNA, 25 bp, Homo sapiens
gcagacctttgttgagagatgaccc

SEQ ID NO: 2859 - DNA, 25 bp, Homo sapiens
ttcacccttaggagcaactgttctc

SEQ ID NO: 2860 - DNA, 25 bp, Homo sapiens
cagcactaagggagagagagtttca

SEQ ID NO: 2861 - DNA, 25 bp, Homo sapiens
tcgggtcctatggtttgctcaagtg

SEQ ID NO: 2862 - DNA, 25 bp, Homo sapiens
ccggccttgcacttgggagtcaact

SEQ ID NO: 2863 - DNA, 25 bp, Homo sapiens
acccttctggggatcatgcctttga

SEQ ID NO: 2864 - DNA, 25 bp, Homo sapiens
agcttgcctctttccttgtcagatg

SEQ ID NO: 2865 - DNA, 25 bp, Homo sapiens
tgctgccaaggacccgagaaggata

SEQ ID NO: 2866 - DNA, 25 bp, Homo sapiens
ttgggtttctaattccagggatgaa

SEQ ID NO: 2867 - DNA, 25 bp, Homo sapiens
ttcaaatgtatagtgtggtaaatag

SEQ ID NO: 2868 - DNA, 25 bp, Homo sapiens
cctgatttaggatggcttagagccc

SEQ ID NO: 2869 - DNA, 25 bp, Homo sapiens
tgacccaaggatatttgacaccagg

SEQ ID NO: 2870 - DNA, 25 bp, Homo sapiens
cccagaagtcaagggtggcaggatc

SEQ ID NO: 2871 - DNA, 25 bp, Homo sapiens
cacttttgagggttgcttggccaca

SEQ ID NO: 2872 - DNA, 25 bp, Homo sapiens
actgctcactgtatgtattccttgg

SEQ ID NO: 2873 - DNA, 25 bp, Homo sapiens
tccctttgtcaaaacactatgagga

SEQ ID NO: 2874 - DNA, 25 bp, Homo sapiens
gtgaacaacaggcatgagaagatca

SEQ ID NO: 2875 - DNA, 25 bp, Homo sapiens
tcttcacttggagaagtgttacttc

SEQ ID NO: 2876 - DNA, 25 bp, Homo sapiens
ctggtgggtgggagtggggtggtgt

SEQ ID NO: 2877 - DNA, 25 bp, Homo sapiens
gcaaaaactgcctcctacaggtgta

SEQ ID NO: 2878 - DNA, 25 bp, Homo sapiens
ccagttgttgttctgcaggatccta

SEQ ID NO: 2879 - DNA, 25 bp, Homo sapiens
ccagattcactctttccagacttga

SEQ ID NO: 2880 - DNA, 25 bp, Homo sapiens
gcatccgttgttcctagcagcaaga

SEQ ID NO: 2881 - DNA, 25 bp, Homo sapiens
cccagctaatttataaaaagctctt

SEQ ID NO: 2882 - DNA, 25 bp, Homo sapiens
ggagcctaaccttgaggtactgatc

SEQ ID NO: 2883 - DNA, 25 bp, Homo sapiens
gcctgtggctccaaaagcttctgga

SEQ ID NO: 2884 - DNA, 25 bp, Homo sapiens
atcctgctcttctccggtctggtta

SEQ ID NO: 2885 - DNA, 25 bp, Homo sapiens
ctccgtgtgtttactcatgctcttc

SEQ ID NO: 2886 - DNA, 25 bp, Homo sapiens
cccttttgaaggctgggttctacaa

SEQ ID NO: 2887 - DNA, 25 bp, Homo sapiens
acttgattttatttttggcagagca

SEQ ID NO: 2888 - DNA, 25 bp, Homo sapiens
gcaatccacgtttcctagctcaagg

SEQ ID NO: 2889 - DNA, 25 bp, Homo sapiens
taccactttgggtgtttacagaaca

SEQ ID NO: 2890 - DNA, 25 bp, Homo sapiens
agttgccctatatcttgaagtctca

SEQ ID NO: 2891 - DNA, 25 bp, Homo sapiens
ttggttgcaaagaaacatgactatc

SEQ ID NO: 2892 - DNA, 25 bp, Homo sapiens
gaacacttgccttccttgctagcta

SEQ ID NO: 2893 - DNA, 25 bp, Homo sapiens
tcacctgactgagaatgtctgtttg

SEQ ID NO: 2894 - DNA, 25 bp, Homo sapiens
ttccaggatatcttgcccaacaatc

SEQ ID NO: 2895 - DNA, 25 bp, Homo sapiens
ggttcagcccagtgtctcctcttta

SEQ ID NO: 2896 - DNA, 25 bp, Homo sapiens
gccctatagaaggtggtagatttaa

SEQ ID NO: 2897 - DNA, 25 bp, Homo sapiens
ccaatggaatcttaaagcctattta

SEQ ID NO: 2898 - DNA, 25 bp, Homo sapiens
atactaatatggttgggatataaag

SEQ ID NO: 2899 - DNA, 25 bp, Homo sapiens
ggagctttgtttctgcttccacaga

SEQ ID NO: 2900 - DNA, 25 bp, Homo sapiens
gtgactttgtcacttcaagatgttg

SEQ ID NO: 2901 - DNA, 25 bp, Homo sapiens
cctatgtatgtgtggacaagaagca

SEQ ID NO: 2902 - DNA, 25 bp, Homo sapiens
ggaggaccatcctgctacagtattg

SEQ ID NO: 2903 - DNA, 25 bp, Homo sapiens
tgtgctggaaacagataaacacttc

SEQ ID NO: 2904 - DNA, 25 bp, Homo sapiens
gactctgtcctgagaaccctatttg

SEQ ID NO: 2905 - DNA, 25 bp, Homo sapiens
ctggattggtgcagggaatactttt

SEQ ID NO: 2906 - DNA, 25 bp, Homo sapiens
gccaagcaaagacttctgtttcata

SEQ ID NO: 2907 - DNA, 25 bp, Homo sapiens
cctttatttctctcaatagttttta

SEQ ID NO: 2908 - DNA, 25 bp, Homo sapiens
tgccctattgacagttgagtctttg

SEQ ID NO: 2909 - DNA, 25 bp, Homo sapiens
tatcattcagagttaccaaataaat

SEQ ID NO: 2910 - DNA, 25 bp, Homo sapiens
tgaccacagacaccataggccattt

SEQ ID NO: 2911 - DNA, 25 bp, Homo sapiens
agttttctgtgtttctgtgtaagcc

SEQ ID NO: 2912 - DNA, 25 bp, Homo sapiens
gcttgaattgccaccattttaatca

SEQ ID NO: 2913 - DNA, 25 bp, Homo sapiens
tgccagggagttgcactaataagcc

SEQ ID NO: 2914 - DNA, 25 bp, Homo sapiens
ggccttttagctatatggtcactaa

SEQ ID NO: 2915 - DNA, 25 bp, Homo sapiens
cggagctcattgtgcccactgcttt

SEQ ID NO: 2916 - DNA, 25 bp, Homo sapiens
cataggggcctataacctggtgatc

SEQ ID NO: 2917 - DNA, 25 bp, Homo sapiens
gtgggcttcttcttcagctgacata

SEQ ID NO: 2918 - DNA, 25 bp, Homo sapiens
cctgtaacattagggctcccaagta

SEQ ID NO: 2919 - DNA, 25 bp, Homo sapiens
ggataaacttctttcagctattctg

SEQ ID NO: 2920 - DNA, 25 bp, Homo sapiens
agtccatttgactccactccattga

SEQ ID NO: 2921 - DNA, 25 bp, Homo sapiens
ttctcagttggcagtctctaaattg

SEQ ID NO: 2922 - DNA, 25 bp, Homo sapiens
gacgctaaaccctagtgaacctatt

SEQ ID NO: 2923 - DNA, 25 bp, Homo sapiens
aggccctttaacctgaaaatgaaaa

SEQ ID NO: 2924 - DNA, 25 bp, Homo sapiens
cttgacctgagagaatccacattgc

SEQ ID NO: 2925 - DNA, 25 bp, Homo sapiens
tcctcagcagttacagaataaagtc

SEQ ID NO: 2926 - DNA, 25 bp, Homo sapiens
gatggcgtactgagcctggaaaaca

SEQ ID NO: 2927 - DNA, 25 bp, Homo sapiens
aaaggccagggcaagcacatactca

SEQ ID NO: 2928 - DNA, 25 bp, Homo sapiens
agccctttctccctgtgaagacaca

SEQ ID NO: 2929 - DNA, 25 bp, Homo sapiens
ttggggactgctatatgaaacattc

SEQ ID NO: 2930 - DNA, 25 bp, Homo sapiens
agtggaagagcttcgggataaatcc

SEQ ID NO: 2931 - DNA, 25 bp, Homo sapiens
ctgcccaatttcgtagcttgagaca

SEQ ID NO: 2932 - DNA, 25 bp, Homo sapiens
gggctcagtatctttccatctgtga

SEQ ID NO: 2933 - DNA, 25 bp, Homo sapiens
ttgacattgggatgagactagactc

SEQ ID NO: 2934 - DNA, 25 bp, Homo sapiens
ccttcaggccatgcaagctcagttc

SEQ ID NO: 2935 - DNA, 25 bp, Homo sapiens
tgtccagggccataagaaactctag

SEQ ID NO: 2936 - DNA, 25 bp, Homo sapiens
ccagtgaccactgacctatttcttt

SEQ ID NO: 2937 - DNA, 25 bp, Homo sapiens
tttagaggccttagaatacaatata

SEQ ID NO: 2938 - DNA, 25 bp, Homo sapiens
gcaaaagccatttgactggggcttg

SEQ ID NO: 2939 - DNA, 25 bp, Homo sapiens
gaaggcagcatgcacactagtgaat

SEQ ID NO: 2940 - DNA, 25 bp, Homo sapiens
cgcctcctggatctgacttgaaatc

SEQ ID NO: 2941 - DNA, 25 bp, Homo sapiens
tccggagcaggagactgaaggtatc

SEQ ID NO: 2942 - DNA, 25 bp, Homo sapiens
gtgacttctaaatccactgatgctg

SEQ ID NO: 2943 - DNA, 25 bp, Homo sapiens
agctcttagctctcacgtgatctta

SEQ ID NO: 2944 - DNA, 25 bp, Homo sapiens
tgaaaacttagtacatgccaggtcg

SEQ ID NO: 2945 - DNA, 25 bp, Homo sapiens
gcttcctactcccttccctggctgc

SEQ ID NO: 2946 - DNA, 25 bp, Homo sapiens
ttgaccttgtacatcggcacctgca

SEQ ID NO: 2947 - DNA, 25 bp, Homo sapiens
tcgccacttgctggtattcacaata

SEQ ID NO: 2948 - DNA, 25 bp, Homo sapiens
tgtttgctcccacggcttccttatg

SEQ ID NO: 2949 - DNA, 25 bp, Homo sapiens
tgattattgctgttttaactgacca

SEQ ID NO: 2950 - DNA, 25 bp, Homo sapiens
gtctctggaagcaaggcacactata

SEQ ID NO: 2951 - DNA, 25 bp, Homo sapiens
tgtggccagtgttactcagcagaaa

SEQ ID NO: 2952 - DNA, 25 bp, Homo sapiens
ttacgctgttttggagctcagtatc

SEQ ID NO: 2953 - DNA, 25 bp, Homo sapiens
tctggggaaccctgctgaaaaccta

SEQ ID NO: 2954 - DNA, 25 bp, Homo sapiens
ccacaatgccaagtttgactgaaac

SEQ ID NO: 2955 - DNA, 25 bp, Homo sapiens
gtggtttttgcagttatttttaatt

SEQ ID NO: 2956 - DNA, 25 bp, Homo sapiens
tggcattctaatcggcctgacctca

SEQ ID NO: 2957 - DNA, 25 bp, Homo sapiens
tgaggtcaatctggaaatcggcatt

SEQ ID NO: 2958 - DNA, 25 bp, Homo sapiens
aggtgggccatttgagtactttttc

SEQ ID NO: 2959 - DNA, 25 bp, Homo sapiens
taaaaaaaaattctcaattgagttt

SEQ ID NO: 2960 - DNA, 25 bp, Homo sapiens
tctcataccaacagttcgttccttg

SEQ ID NO: 2961 - DNA, 25 bp, Homo sapiens
tcctattgtgtaagagaaaccttcg

SEQ ID NO: 2962 - DNA, 25 bp, Homo sapiens
gggtgcctctttgggtacccatgta

SEQ ID NO: 2963 - DNA, 25 bp, Homo sapiens
ttcctgttagggcaagcaatactca

SEQ ID NO: 2964 - DNA, 25 bp, Homo sapiens
tggctcctgccatctgtactttatc

SEQ ID NO: 2965 - DNA, 25 bp, Homo sapiens
gctgtcagatgtgctatcgcatata

SEQ ID NO: 2966 - DNA, 25 bp, Homo sapiens
ttcttgagagtggaattacagcttc

SEQ ID NO: 2967 - DNA, 25 bp, Homo sapiens
ttaagccctggagccatttgcaatg

SEQ ID NO: 2968 - DNA, 25 bp, Homo sapiens
taagcaaactttctgaaaaggagtt

SEQ ID NO: 2969 - DNA, 25 bp, Homo sapiens
ttagggcaagaggtgtttatgtgtc

SEQ ID NO: 2970 - DNA, 25 bp, Homo sapiens
tgagttcctgtagttgcttcgcaaa

SEQ ID NO: 2971 - DNA, 25 bp, Homo sapiens
ctcagccattggatacctggtaata

SEQ ID NO: 2972 - DNA, 25 bp, Homo sapiens
aggacggtaggcagcactcatttta

SEQ ID NO: 2973 - DNA, 25 bp, Homo sapiens
tcagctagctaggtactcggtctta

SEQ ID NO: 2974 - DNA, 25 bp, Homo sapiens
gtgacaagctcaatccaaggtggtt

SEQ ID NO: 2975 - DNA, 25 bp, Homo sapiens
catatgtaccatcatcagtgtgaat

SEQ ID NO: 2976 - DNA, 25 bp, Homo sapiens
tgactgattgcactctcctatatac

SEQ ID NO: 2977 - DNA, 25 bp, Homo sapiens
tactactgggttcgctataagcatc

SEQ ID NO: 2978 - DNA, 25 bp, Homo sapiens
gggccaattttcagagccaggttga

SEQ ID NO: 2979 - DNA, 25 bp, Homo sapiens
tgcttcagctggcaggggcaattct

SEQ ID NO: 2980 - DNA, 25 bp, Homo sapiens
tgcttaacttgggtgcaggcataca

SEQ ID NO: 2981 - DNA, 25 bp, Homo sapiens
ggtacacgtaatcctatgcccatca

SEQ ID NO: 2982 - DNA, 25 bp, Homo sapiens
ctgtaacatcaaaagggccagcatg

SEQ ID NO: 2983 - DNA, 25 bp, Homo sapiens
ggggattggcataccacaacatgca

SEQ ID NO: 2984 - DNA, 25 bp, Homo sapiens
ctaccaaatttcttttgcagaaggg

SEQ ID NO: 2985 - DNA, 25 bp, Homo sapiens
cccaagttcttctggtctggggcat

SEQ ID NO: 2986 - DNA, 25 bp, Homo sapiens
tatagaggggaggaataacatgagt

SEQ ID NO: 2987 - DNA, 25 bp, Homo sapiens
caatgatcactttaccattacctcc

SEQ ID NO: 2988 - DNA, 25 bp, Homo sapiens
ctgcagagctgggactctataattc

SEQ ID NO: 2989 - DNA, 25 bp, Homo sapiens
ggtgaagctctcaaggtaaagggta

SEQ ID NO: 2990 - DNA, 25 bp, Homo sapiens
aaacttcatttataagttctgaaat

SEQ ID NO: 2991 - DNA, 25 bp, Homo sapiens
tcatggctgccaaagataatgctta

SEQ ID NO: 2992 - DNA, 25 bp, Homo sapiens
aaataaagaaaaaggctgtcaatct

SEQ ID NO: 2993 - DNA, 25 bp, Homo sapiens
tgaaaacacaccagagcttgccttg

SEQ ID NO: 2994 - DNA, 25 bp, Homo sapiens
tgccgttggggatgatgcacttcag

SEQ ID NO: 2995 - DNA, 25 bp, Homo sapiens
gggaaatctttctcaggccttgtta

SEQ ID NO: 2996 - DNA, 25 bp, Homo sapiens
tcagcctgtgcttttcatagagtca

SEQ ID NO: 2997 - DNA, 25 bp, Homo sapiens
cgtctaaacttggtgctccctattg

SEQ ID NO: 2998 - DNA, 25 bp, Homo sapiens
ccctgggtgagtgaggttaaagcta

SEQ ID NO: 2999 - DNA, 25 bp, Homo sapiens
agctttaggtaggtccctgtccata

SEQ ID NO: 3000 - DNA, 25 bp, Homo sapiens
ccaggggagcaccttggcttatatt

SEQ ID NO: 3001 - DNA, 25 bp, Homo sapiens
agaggttcactctacaaatcgtttc

SEQ ID NO: 3002 - DNA, 25 bp, Homo sapiens
ctgggttcttaacagtggggtatta

SEQ ID NO: 3003 - DNA, 25 bp, Homo sapiens
ctttctgtgggtatctggagcaatc

SEQ ID NO: 3004 - DNA, 25 bp, Homo sapiens
tggtagcagcttctccagtggctta

SEQ ID NO: 3005 - DNA, 25 bp, Homo sapiens
tgagggtgacctggcagatcccaag

SEQ ID NO: 3006 - DNA, 25 bp, Homo sapiens
tgtcaggaagctttccagctatgta

SEQ ID NO: 3007 - DNA, 25 bp, Homo sapiens
gctgaccctgagtatttgaagagtt

SEQ ID NO: 3008 - DNA, 25 bp, Homo sapiens
ctggaggttccatgctattttcttg

SEQ ID NO: 3009 - DNA, 25 bp, Homo sapiens
tctaggcaggattatgtgtctttca

SEQ ID NO: 3010 - DNA, 25 bp, Homo sapiens
cagaagtcagcattcctgggcatca

SEQ ID NO: 3011 - DNA, 25 bp, Homo sapiens
tgtgtgcaacaaacagcatagcatc

SEQ ID NO: 3012 - DNA, 25 bp, Homo sapiens
actggcactggttacatttacattc

SEQ ID NO: 3013 - DNA, 25 bp, Homo sapiens
ggtgcgctgcctcaaaactctctgc

SEQ ID NO: 3014 - DNA, 25 bp, Homo sapiens
tggctgacggcacactatatgaaca

SEQ ID NO: 3015 - DNA, 25 bp, Homo sapiens
gagagaggcctctacatttcagcca

SEQ ID NO: 3016 - DNA, 25 bp, Homo sapiens
tggttgctgctacccagtatgtaca

SEQ ID NO: 3017 - DNA, 25 bp, Homo sapiens
gacctgtcctgtaagatgatatttg

SEQ ID NO: 3018 - DNA, 25 bp, Homo sapiens
tgcgcattcacagaagggttttgta

SEQ ID NO: 3019 - DNA, 25 bp, Homo sapiens
gaaaaacaagtaatatggactaatg

SEQ ID NO: 3020 - DNA, 25 bp, Homo sapiens
aaatagattggataaagcaaacaaa

SEQ ID NO: 3021 - DNA, 25 bp, Homo sapiens
aggaactggtctcctacagactgta

SEQ ID NO: 3022 - DNA, 25 bp, Homo sapiens
gcaggccctacactcaaaaacaaag

SEQ ID NO: 3023 - DNA, 25 bp, Homo sapiens
gactcagagtggtcttaccttctta

SEQ ID NO: 3024 - DNA, 25 bp, Homo sapiens
tttgcagggacagacaagaacattc

SEQ ID NO: 3025 - DNA, 25 bp, Homo sapiens
ttgttggcagaatcatttatgataa

SEQ ID NO: 3026 - DNA, 25 bp, Homo sapiens
ccctgatgtctggaaatattgtttg

SEQ ID NO: 3027 - DNA, 25 bp, Homo sapiens
ctctcaatgaaattttttattttca

SEQ ID NO: 3028 - DNA, 25 bp, Homo sapiens
tcgtttactgttctcctgtgtcatc

SEQ ID NO: 3029 - DNA, 25 bp, Homo sapiens
ctatttctggcccacttaattaaac

SEQ ID NO: 3030 - DNA, 25 bp, Homo sapiens
tgcctatcttcctgtgtcactcttg

SEQ ID NO: 3031 - DNA, 25 bp, Homo sapiens
ctgggctctgagaacacttcctata

SEQ ID NO: 3032 - DNA, 25 bp, Homo sapiens
gtgttcagtttccatttgcccagga

SEQ ID NO: 3033 - DNA, 25 bp, Homo sapiens
acgggctgggtatttgacaatttta

SEQ ID NO: 3034 - DNA, 25 bp, Homo sapiens
ccttgttatgtcaaagcactgcttg

SEQ ID NO: 3035 - DNA, 25 bp, Homo sapiens
ccacaattctgggtggaaactgaga

SEQ ID NO: 3036 - DNA, 25 bp, Homo sapiens
cacagggccttgtacatggtggtca

SEQ ID NO: 3037 - DNA, 25 bp, Homo sapiens
cttggtctctttctccttgatagtg

SEQ ID NO: 3038 - DNA, 25 bp, Homo sapiens
gctcagctctgttccatcataaatg

SEQ ID NO: 3039 - DNA, 25 bp, Homo sapiens
gccgttactgtacatctgttgattg

SEQ ID NO: 3040 - DNA, 25 bp, Homo sapiens
ggctgaatgatctttcaacatagtg

SEQ ID NO: 3041 - DNA, 25 bp, Homo sapiens
ctgctttactagaggtggagacttc

SEQ ID NO: 3042 - DNA, 25 bp, Homo sapiens
atgcctctggactgttaaatctctg

SEQ ID NO: 3043 - DNA, 25 bp, Homo sapiens
tttggcccaacatgatcagtctatc

SEQ ID NO: 3044 - DNA, 25 bp, Homo sapiens
ctactgttctgtgttcctggagcta

SEQ ID NO: 3045 - DNA, 25 bp, Homo sapiens
ctctgaataattggccatctgtgta

SEQ ID NO: 3046 - DNA, 25 bp, Homo sapiens
catgttggtgaatctgcagctctta

SEQ ID NO: 3047 - DNA, 25 bp, Homo sapiens
gagaacagactaacatatgccagtg

SEQ ID NO: 3048 - DNA, 25 bp, Homo sapiens
ggctagcaaatttctttcaaacagg

SEQ ID NO: 3049 - DNA, 25 bp, Homo sapiens
gctgccagtgcctccctagaattta

SEQ ID NO: 3050 - DNA, 25 bp, Homo sapiens
ccaggggccttaggtgcttgtcaaa

SEQ ID NO: 3051 - DNA, 25 bp, Homo sapiens
gtgggatttcatatctcgctctaga

SEQ ID NO: 3052 - DNA, 25 bp, Homo sapiens
ggtctgggcctaggttctaactcta

SEQ ID NO: 3053 - DNA, 25 bp, Homo sapiens
gtttcaaggggtgtatatctgctca

SEQ ID NO: 3054 - DNA, 25 bp, Homo sapiens
ccagcacgcttgttgagatttcaaa

SEQ ID NO: 3055 - DNA, 25 bp, Homo sapiens
ccagttattgggcttgtcatattta

SEQ ID NO: 3056 - DNA, 25 bp, Homo sapiens
ctggtgatcaagtaaagtcctatta

SEQ ID NO: 3057 - DNA, 25 bp, Homo sapiens
tgacaaatgtccctactaagtgccc

SEQ ID NO: 3058 - DNA, 25 bp, Homo sapiens
ctccacagtggagccttctgaatgc

SEQ ID NO: 3059 - DNA, 25 bp, Homo sapiens
aagaaaactttatcaattacaaaag

SEQ ID NO: 3060 - DNA, 25 bp, Homo sapiens
atctcccagagagcagttgcgaatg

SEQ ID NO: 3061 - DNA, 25 bp, Homo sapiens
catcaggggtccattgttctatttc

SEQ ID NO: 3062 - DNA, 25 bp, Homo sapiens
atggtttcccattctacgcaaataa

SEQ ID NO: 3063 - DNA, 25 bp, Homo sapiens
cttgaaggaaggttgtgtgacgcca

SEQ ID NO: 3064 - DNA, 25 bp, Homo sapiens
taacaaagcctgctaggttgcttta

SEQ ID NO: 3065 - DNA, 25 bp, Homo sapiens
tgcccaatttcgtctgcacttaatg

SEQ ID NO: 3066 - DNA, 25 bp, Homo sapiens
agaacctagttcaagtgccatttac

SEQ ID NO: 3067 - DNA, 25 bp, Homo sapiens
gggttaaattaactaagatgatgca

SEQ ID NO: 3068 - DNA, 25 bp, Homo sapiens
ctcagcatcacacaatctacccatt

SEQ ID NO: 3069 - DNA, 25 bp, Homo sapiens
gggactcctttctggctttgtctta

SEQ ID NO: 3070 - DNA, 25 bp, Homo sapiens
ttcactatggaatgtgggaacccta

SEQ ID NO: 3071 - DNA, 25 bp, Homo sapiens
accttcagggagagcataatcctgc

SEQ ID NO: 3072 - DNA, 25 bp, Homo sapiens
ttgctgtcatgggaatagccgtcta

SEQ ID NO: 3073 - DNA, 25 bp, Homo sapiens
ctcctctggcacaatattgagattc

SEQ ID NO: 3074 - DNA, 25 bp, Homo sapiens
cctgggttaagtgagcagaaattta

SEQ ID NO: 3075 - DNA, 25 bp, Homo sapiens
ctctagtacttagcacaaaacactg

SEQ ID NO: 3076 - DNA, 25 bp, Homo sapiens
tgtgtatggctatcttcagggacta

SEQ ID NO: 3077 - DNA, 25 bp, Homo sapiens
gtgaggaattgcctaacttatttgg

SEQ ID NO: 3078 - DNA, 25 bp, Homo sapiens
aggcagcctgtgttttcctggatcc

SEQ ID NO: 3079 - DNA, 25 bp, Homo sapiens
tgctcttctgtgtacaaagcccatg

SEQ ID NO: 3080 - DNA, 25 bp, Homo sapiens
tggggtagtacagcaagtcctcaga

SEQ ID NO: 3081 - DNA, 25 bp, Homo sapiens
agatctaactctgacctgaggggca

SEQ ID NO: 3082 - DNA, 25 bp, Homo sapiens
cagactgcttctaccaggacagata

SEQ ID NO: 3083 - DNA, 25 bp, Homo sapiens
agggttccatctgccatcaccttta

SEQ ID NO: 3084 - DNA, 25 bp, Homo sapiens
atgtccaagtttacagtgcctgtta

SEQ ID NO: 3085 - DNA, 25 bp, Homo sapiens
cgtgcttgccaaaacactaggaata

SEQ ID NO: 3086 - DNA, 25 bp, Homo sapiens
ctgccttagttgttttgtattcttc

SEQ ID NO: 3087 - DNA, 25 bp, Homo sapiens
tgccttagtcatggagcctgtttta

SEQ ID NO: 3088 - DNA, 25 bp, Homo sapiens
ccacttttgatttttagcccaggca

SEQ ID NO: 3089 - DNA, 25 bp, Homo sapiens
aaggctctttctattctgtctccaa

SEQ ID NO: 3090 - DNA, 25 bp, Homo sapiens
aatagaattcaataatagaactgag

SEQ ID NO: 3091 - DNA, 25 bp, Homo sapiens
cgttgtatgtgctcactccagaata

SEQ ID NO: 3092 - DNA, 25 bp, Homo sapiens
ggcagttcccgggtttcaatattta

SEQ ID NO: 3093 - DNA, 25 bp, Homo sapiens
ggcaagagccacacttcgagatgta

SEQ ID NO: 3094 - DNA, 25 bp, Homo sapiens
tagtgagctcctatcgtaagaaatc

SEQ ID NO: 3095 - DNA, 25 bp, Homo sapiens
ctgggacctgtccaatcactgcaca

SEQ ID NO: 3096 - DNA, 25 bp, Homo sapiens
gtgttctcagtctcaattcagtgct

SEQ ID NO: 3097 - DNA, 25 bp, Homo sapiens
caggttatgcttcttgcccagggaa

SEQ ID NO: 3098 - DNA, 25 bp, Homo sapiens
cctgtgattggagcttgaagacttg

SEQ ID NO: 3099 - DNA, 25 bp, Homo sapiens
tgcctcctggatgcctagctagatt

SEQ ID NO: 3100 - DNA, 25 bp, Homo sapiens
cccatgatttctggaggaatagacc

SEQ ID NO: 3101 - DNA, 25 bp, Homo sapiens
agcctgcattcttcatgggtagatg

SEQ ID NO: 3102 - DNA, 25 bp, Homo sapiens
ggccaacttcctgatctaacctttg

SEQ ID NO: 3103 - DNA, 25 bp, Homo sapiens
tgtgaaccaagtccagtgccaaata

SEQ ID NO: 3104 - DNA, 25 bp, Homo sapiens
gcagtttcaatccagaagctcacta

SEQ ID NO: 3105 - DNA, 25 bp, Homo sapiens
actctactagtttgtctgaatagtt

SEQ ID NO: 3106 - DNA, 25 bp, Homo sapiens
actcagtgggtctataaataaagcc

SEQ ID NO: 3107 - DNA, 25 bp, Homo sapiens
tgacttagctgaaccacctgaattg

SEQ ID NO: 3108 - DNA, 25 bp, Homo sapiens
cttgcaaagtgaagccacctctgtg

SEQ ID NO: 3109 - DNA, 25 bp, Homo sapiens
cactctgcaagttactgtggaggaa

SEQ ID NO: 3110 - DNA, 25 bp, Homo sapiens
ctctcaagggcctaaatgccaaatt

SEQ ID NO: 3111 - DNA, 25 bp, Homo sapiens
ccttccaaattaaatcataatgaaa

SEQ ID NO: 3112 - DNA, 25 bp, Homo sapiens
tctgcccaacgctgagtcgcaactg

SEQ ID NO: 3113 - DNA, 25 bp, Homo sapiens
aagtaacatgactatgggagatggg

SEQ ID NO: 3114 - DNA, 25 bp, Homo sapiens
agctattggcttttaaacttctttt

SEQ ID NO: 3115 - DNA, 25 bp, Homo sapiens
gaggggcttttgataaccaacatta

SEQ ID NO: 3116 - DNA, 25 bp, Homo sapiens
gctgaggacttattaggcaaatcta

SEQ ID NO: 3117 - DNA, 25 bp, Homo sapiens
cccaggctgctgttgaatagtgtca

SEQ ID NO: 3118 - DNA, 25 bp, Homo sapiens
tccgtaagtcttcatcattgcagtg

SEQ ID NO: 3119 - DNA, 25 bp, Homo sapiens
taacctgtggctccagaagctcttg

SEQ ID NO: 3120 - DNA, 25 bp, Homo sapiens
gtgtctaagtataatggaagcattc

SEQ ID NO: 3121 - DNA, 25 bp, Homo sapiens
tgggtcacactcaaaattagggata

SEQ ID NO: 3122 - DNA, 25 bp, Homo sapiens
accttagattttccggatgtgccac

SEQ ID NO: 3123 - DNA, 25 bp, Homo sapiens
cctctttgggaggtagccattctct

SEQ ID NO: 3124 - DNA, 25 bp, Homo sapiens
ccaggaagccttttgcagaacagtg

SEQ ID NO: 3125 - DNA, 25 bp, Homo sapiens
cacagagtccgggttgatacagttc

SEQ ID NO: 3126 - DNA, 25 bp, Homo sapiens
caggattcctgattgtcacaagcta

SEQ ID NO: 3127 - DNA, 25 bp, Homo sapiens
ccttggcctaggcataagagctgta

SEQ ID NO: 3128 - DNA, 25 bp, Homo sapiens
cctccatttcagagtctgatcccaa

SEQ ID NO: 3129 - DNA, 25 bp, Homo sapiens
catctagatatctggggagtcttcc

SEQ ID NO: 3130 - DNA, 25 bp, Homo sapiens
ggactattcatttgtgcctcaggtg

SEQ ID NO: 3131 - DNA, 25 bp, Homo sapiens
tgagaaccacagttttaatgaaaat

SEQ ID NO: 3132 - DNA, 25 bp, Homo sapiens
ctcttggatgttctgtagcctattc

SEQ ID NO: 3133 - DNA, 25 bp, Homo sapiens
gggcagctctgccatgagtactctg

SEQ ID NO: 3134 - DNA, 25 bp, Homo sapiens
ccataaggtatgaagtatgatagta

SEQ ID NO: 3135 - DNA, 25 bp, Homo sapiens
ccacaccctccccccaaaagaaatg

SEQ ID NO: 3136 - DNA, 25 bp, Homo sapiens
aagaaaagtttaaaataagaatagg

SEQ ID NO: 3137 - DNA, 25 bp, Homo sapiens
ctgtagtcccagtcaagaaagtctg

SEQ ID NO: 3138 - DNA, 25 bp, Homo sapiens
gatttagcttttaaaaggacccctc

SEQ ID NO: 3139 - DNA, 25 bp, Homo sapiens
ggtaaatgctcaataatgtgaactg

SEQ ID NO: 3140 - DNA, 25 bp, Homo sapiens
cccatagatgttcttagctaggcta

SEQ ID NO: 3141 - DNA, 25 bp, Homo sapiens
ccctggcctaggttagctattcaaa

SEQ ID NO: 3142 - DNA, 25 bp, Homo sapiens
caccctgagacaaccagattcttgg

SEQ ID NO: 3143 - DNA, 25 bp, Homo sapiens
taggtgacccttcatactagttaga

SEQ ID NO: 3144 - DNA, 25 bp, Homo sapiens
gtcctgattccctgaggctcctata

SEQ ID NO: 3145 - DNA, 25 bp, Homo sapiens
agcacagtatccctgacataaagta

SEQ ID NO: 3146 - DNA, 25 bp, Homo sapiens
cctcagcgtggatatgcctttcttc

SEQ ID NO: 3147 - DNA, 25 bp, Homo sapiens
ggccctcctggagcaccatttgatg

SEQ ID NO: 3148 - DNA, 25 bp, Homo sapiens
tgctaggccttgctacgtcttgcta

SEQ ID NO: 3149 - DNA, 25 bp, Homo sapiens
tcttggctttatcgctgttatgaca

SEQ ID NO: 3150 - DNA, 25 bp, Homo sapiens
gggtgtttctcatctgacgtctata

SEQ ID NO: 3151 - DNA, 25 bp, Homo sapiens
agacttcattgttctccgtgattga

SEQ ID NO: 3152 - DNA, 25 bp, Homo sapiens
cactacagatgagaggatgcatttc

SEQ ID NO: 3153 - DNA, 25 bp, Homo sapiens
tttcctggagagagcaccgttactg

SEQ ID NO: 3154 - DNA, 25 bp, Homo sapiens
gtctttttcctgaatgtgggcctta

SEQ ID NO: 3155 - DNA, 25 bp, Homo sapiens
aactctccactacactcagtgttta

SEQ ID NO: 3156 - DNA, 25 bp, Homo sapiens
tctcctttggccactgattaactta

SEQ ID NO: 3157 - DNA, 25 bp, Homo sapiens
cctagaaccggtcctggtccagtta

SEQ ID NO: 3158 - DNA, 25 bp, Homo sapiens
ccgaaggagtaaaggtgctgcaatc

SEQ ID NO: 3159 - DNA, 25 bp, Homo sapiens
catttctgaaattacttcttggtta

SEQ ID NO: 3160 - DNA, 25 bp, Homo sapiens
acagacactgtgcttagactttaca

SEQ ID NO: 3161 - DNA, 25 bp, Homo sapiens
ttttaccctacattttctaattgca

SEQ ID NO: 3162 - DNA, 25 bp, Homo sapiens
ggcgcagtgactcacgccaaaaata

SEQ ID NO: 3163 - DNA, 25 bp, Homo sapiens
atctctggctcagggatcgtccacc

SEQ ID NO: 3164 - DNA, 25 bp, Homo sapiens
caagtatgtaagaaaattaacaagg

SEQ ID NO: 3165 - DNA, 25 bp, Homo sapiens
actgaggattctccttctcttgtca

SEQ ID NO: 3166 - DNA, 25 bp, Homo sapiens
aggatctctgcatacctggtgggaa

SEQ ID NO: 3167 - DNA, 25 bp, Homo sapiens
tcctattttgggactacagacagtc

SEQ ID NO: 3168 - DNA, 25 bp, Homo sapiens
ggacaaggttcttaatctctctgta

SEQ ID NO: 3169 - DNA, 25 bp, Homo sapiens
atgggatccaactgtaatgtgcctc

SEQ ID NO: 3170 - DNA, 25 bp, Homo sapiens
ccttcctgaggctcgggtatacaaa

SEQ ID NO: 3171 - DNA, 25 bp, Homo sapiens
ggagggccatctcttcacaggaaca

SEQ ID NO: 3172 - DNA, 25 bp, Homo sapiens
ttgagttccttgtgggctagttctg

SEQ ID NO: 3173 - DNA, 25 bp, Homo sapiens
acattaggggctttgggagattatc

SEQ ID NO: 3174 - DNA, 25 bp, Homo sapiens
gatggcctccttaaatgtctgcaaa

SEQ ID NO: 3175 - DNA, 25 bp, Homo sapiens
tccgggatctcgaaaggcctgtaaa

SEQ ID NO: 3176 - DNA, 25 bp, Homo sapiens
gaagttttgtttagtcccacgggga

SEQ ID NO: 3177 - DNA, 25 bp, Homo sapiens
cggtggttactgcttacccaactaa

SEQ ID NO: 3178 - DNA, 25 bp, Homo sapiens
taatgcaagatatggagagcctccc

SEQ ID NO: 3179 - DNA, 25 bp, Homo sapiens
agctgtcctggttttctgatgtcca

SEQ ID NO: 3180 - DNA, 25 bp, Homo sapiens
ctggttctggatccagctgcttaaa

SEQ ID NO: 3181 - DNA, 25 bp, Homo sapiens
gagacctttcccattctgtaggaga

SEQ ID NO: 3182 - DNA, 25 bp, Homo sapiens
gccaaggctggtgagatagaatttc

SEQ ID NO: 3183 - DNA, 25 bp, Homo sapiens
tttgtagctgatcacagactgtggc

SEQ ID NO: 3184 - DNA, 25 bp, Homo sapiens
acgtggtcccagctttgagcaagta

SEQ ID NO: 3185 - DNA, 25 bp, Homo sapiens
cctgagggaattctattaggcttgc

SEQ ID NO: 3186 - DNA, 25 bp, Homo sapiens
cttggagtccttaaaagcagagatg

SEQ ID NO: 3187 - DNA, 25 bp, Homo sapiens
gggaccatgctcttacctgttttta

SEQ ID NO: 3188 - DNA, 25 bp, Homo sapiens
ctggcctctacttggatttctgttc

SEQ ID NO: 3189 - DNA, 25 bp, Homo sapiens
tgcacataggatagaacattacgct

SEQ ID NO: 3190 - DNA, 25 bp, Homo sapiens
ttgcagccattttcagtctaatgag

SEQ ID NO: 3191 - DNA, 25 bp, Homo sapiens
cctaaggagacctgttgcaagtttc

SEQ ID NO: 3192 - DNA, 25 bp, Homo sapiens
atgtctggcaactacagcctgagta

SEQ ID NO: 3193 - DNA, 25 bp, Homo sapiens
gggaacttcaggtaaactttttgtc

SEQ ID NO: 3194 - DNA, 25 bp, Homo sapiens
gggactcttcatatgcctggcaatt

SEQ ID NO: 3195 - DNA, 25 bp, Homo sapiens
tacggactgaacaggtgactgcttc

SEQ ID NO: 3196 - DNA, 25 bp, Homo sapiens
agccacacttgtactgcatgctttg

SEQ ID NO: 3197 - DNA, 25 bp, Homo sapiens
gttggtcaagaagcacctacttgtg

SEQ ID NO: 3198 - DNA, 25 bp, Homo sapiens
ccctcccttttcagatgggctaata

SEQ ID NO: 3199 - DNA, 25 bp, Homo sapiens
agccctgggttgattgattgccttc

SEQ ID NO: 3200 - DNA, 25 bp, Homo sapiens
cagtattgttactcttcaccaaggc

SEQ ID NO: 3201 - DNA, 25 bp, Homo sapiens
ttctgagtctatgggtatgggttac

SEQ ID NO: 3202 - DNA, 25 bp, Homo sapiens
ctatgggccagttacctagtcttgg

SEQ ID NO: 3203 - DNA, 25 bp, Homo sapiens
aagttcctgtatctggcttctcagc

SEQ ID NO: 3204 - DNA, 25 bp, Homo sapiens
ctcctgaggcaattcttgggcttta

SEQ ID NO: 3205 - DNA, 25 bp, Homo sapiens
cactgcaggtgctacaaaggtcata

SEQ ID NO: 3206 - DNA, 25 bp, Homo sapiens
gggtcggccagtcatgtatcaaaga

SEQ ID NO: 3207 - DNA, 25 bp, Homo sapiens
tttggctcccgtgactctttaggtc

SEQ ID NO: 3208 - DNA, 25 bp, Homo sapiens
ccctaccagtaggttatcagaaaga

SEQ ID NO: 3209 - DNA, 25 bp, Homo sapiens
gcagggtagtagctcttgcttagta

SEQ ID NO: 3210 - DNA, 25 bp, Homo sapiens
tttgtactttatttgggaccctgcc

SEQ ID NO: 3211 - DNA, 25 bp, Homo sapiens
gcctgcgattctaagtcatttcaga

SEQ ID NO: 3212 - DNA, 25 bp, Homo sapiens
ccatacctgtggctgcaaatgtgta

SEQ ID NO: 3213 - DNA, 25 bp, Homo sapiens
ctctgcttttatggtgtttgcaatc

SEQ ID NO: 3214 - DNA, 25 bp, Homo sapiens
ccgggtaccacctgagacttgaaac

SEQ ID NO: 3215 - DNA, 25 bp, Homo sapiens
tatgttgatatatttgtgggtgttt

SEQ ID NO: 3216 - DNA, 25 bp, Homo sapiens
ccttgggctctgtgccatgagaata

SEQ ID NO: 3217 - DNA, 25 bp, Homo sapiens
tcctctttccttaggtgtgacatta

SEQ ID NO: 3218 - DNA, 25 bp, Homo sapiens
tgccaccatgaaagagtgccagttc

SEQ ID NO: 3219 - DNA, 25 bp, Homo sapiens
ggacatgaagtagggacaatttctc

SEQ ID NO: 3220 - DNA, 25 bp, Homo sapiens
ggacctttatcattcagcacagtta

SEQ ID NO: 3221 - DNA, 25 bp, Homo sapiens
tagggagtctcccatagttgtttcc

SEQ ID NO: 3222 - DNA, 25 bp, Homo sapiens
tccttatgaaacttttgggaaaata

SEQ ID NO: 3223 - DNA, 25 bp, Homo sapiens
tcctcttctcaccaatattttactg

SEQ ID NO: 3224 - DNA, 25 bp, Homo sapiens
ggtccttgggtatgaaaaattcttg

SEQ ID NO: 3225 - DNA, 25 bp, Homo sapiens
cttcctccagagaaaatgcagtttt

SEQ ID NO: 3226 - DNA, 25 bp, Homo sapiens
tggctcctggcagttctctagactg

SEQ ID NO: 3227 - DNA, 25 bp, Homo sapiens
atgcttttgggtttaagggagacta

SEQ ID NO: 3228 - DNA, 25 bp, Homo sapiens
cccggtcttatggttaaataatgtg

SEQ ID NO: 3229 - DNA, 25 bp, Homo sapiens
tggtcccttagcttctctctcttga

SEQ ID NO: 3230 - DNA, 25 bp, Homo sapiens
ccacttgtggaaatgctgttctgta

SEQ ID NO: 3231 - DNA, 25 bp, Homo sapiens
ccttgccaggttgattcctcattga

SEQ ID NO: 3232 - DNA, 25 bp, Homo sapiens
tctgggccaatttctaggttttctg

SEQ ID NO: 3233 - DNA, 25 bp, Homo sapiens
cagctcttattggtgatgtttaaca

SEQ ID NO: 3234 - DNA, 25 bp, Homo sapiens
ctcgctattagggggagagctgtgt

SEQ ID NO: 3235 - DNA, 25 bp, Homo sapiens
aatgaaaattgtttttcaacttaac

SEQ ID NO: 3236 - DNA, 25 bp, Homo sapiens
aactggctggtagaactgtcatgtc

SEQ ID NO: 3237 - DNA, 25 bp, Homo sapiens
agtggctatgtgcaattcctgatca

SEQ ID NO: 3238 - DNA, 25 bp, Homo sapiens
gggtggtcctcccattggtctaact

SEQ ID NO: 3239 - DNA, 25 bp, Homo sapiens
cacatgcacactaatctaggataac

SEQ ID NO: 3240 - DNA, 25 bp, Homo sapiens
cacatggctgcaggtgtacaataca

SEQ ID NO: 3241 - DNA, 25 bp, Homo sapiens
tgctagaaatacacccttggctttg

SEQ ID NO: 3242 - DNA, 25 bp, Homo sapiens
gccctaatctgggactttaagctca

SEQ ID NO: 3243 - DNA, 25 bp, Homo sapiens
ccttacagtggcagtgcagtgggca

SEQ ID NO: 3244 - DNA, 25 bp, Homo sapiens
gctggcccaaataaggggacattta

SEQ ID NO: 3245 - DNA, 25 bp, Homo sapiens
gcagcatctaggcaccaaactctta

SEQ ID NO: 3246 - DNA, 25 bp, Homo sapiens
ggtgccgaagtaccaggagaatata

SEQ ID NO: 3247 - DNA, 25 bp, Homo sapiens
ttctcaaatacaggttaggggagtc

SEQ ID NO: 3248 - DNA, 25 bp, Homo sapiens
catttctcagactcaaggtttgcca

SEQ ID NO: 3249 - DNA, 25 bp, Homo sapiens
tatcccaagtgtgctaggatctttg

SEQ ID NO: 3250 - DNA, 25 bp, Homo sapiens
gctgagaccctgaaccatccttttg

SEQ ID NO: 3251 - DNA, 25 bp, Homo sapiens
tacgtttttctacagcccagttaca

SEQ ID NO: 3252 - DNA, 25 bp, Homo sapiens
tgctcgttgtttcaggcattgacca

SEQ ID NO: 3253 - DNA, 25 bp, Homo sapiens
tcctcaagcggaatgggtgacagaa

SEQ ID NO: 3254 - DNA, 25 bp, Homo sapiens
ctgttgttctatcggggtagcttta

SEQ ID NO: 3255 - DNA, 25 bp, Homo sapiens
gccaggcaggctctgtaagtatgtt

SEQ ID NO: 3256 - DNA, 25 bp, Homo sapiens
actgcctgggtgtgcttatattcca

SEQ ID NO: 3257 - DNA, 25 bp, Homo sapiens
cttcacctgctaggttgtcagcata

SEQ ID NO: 3258 - DNA, 25 bp, Homo sapiens
gcagccactacagatccgaccagga

SEQ ID NO: 3259 - DNA, 25 bp, Homo sapiens
ccgagtcctgcagtgagtgtcatca

SEQ ID NO: 3260 - DNA, 25 bp, Homo sapiens
cctgccagtttaccacagtgacttc

SEQ ID NO: 3261 - DNA, 25 bp, Homo sapiens
tacccatcctttggccagcgacatg

SEQ ID NO: 3262 - DNA, 25 bp, Homo sapiens
tgtggggatacctttcagatacctg

SEQ ID NO: 3263 - DNA, 25 bp, Homo sapiens
agccttctgcagtgggtactcgtca

SEQ ID NO: 3264 - DNA, 25 bp, Homo sapiens
tggaagtcccaatcacacagcagtg

SEQ ID NO: 3265 - DNA, 25 bp, Homo sapiens
tctcagctgcattgtaaaccgttcc

SEQ ID NO: 3266 - DNA, 25 bp, Homo sapiens
gctgctatataacgattgccacttc

SEQ ID NO: 3267 - DNA, 25 bp, Homo sapiens
gggccatgtttactaccctgaaatg

SEQ ID NO: 3268 - DNA, 25 bp, Homo sapiens
agcgggttttccaggtgactatttt

SEQ ID NO: 3269 - DNA, 25 bp, Homo sapiens
ggtcaaagcactgatcgtacataga

SEQ ID NO: 3270 - DNA, 25 bp, Homo sapiens
ggttacaatatgcttggctaattca

SEQ ID NO: 3271 - DNA, 25 bp, Homo sapiens
cggtgttcatgtgcaaaggtaatta

SEQ ID NO: 3272 - DNA, 25 bp, Homo sapiens
ccctagggtttgaggacattattta

SEQ ID NO: 3273 - DNA, 25 bp, Homo sapiens
ggctatgtcggagtgtctaattttg

SEQ ID NO: 3274 - DNA, 25 bp, Homo sapiens
atccattcgtttctctgctgtcagg

SEQ ID NO: 3275 - DNA, 25 bp, Homo sapiens
cagctgtgaaagtcccacctaatta

SEQ ID NO: 3276 - DNA, 25 bp, Homo sapiens
cagaacctcatgaagcatctggtat

SEQ ID NO: 3277 - DNA, 25 bp, Homo sapiens
atcatcagggaagaagggcactgca

SEQ ID NO: 3278 - DNA, 25 bp, Homo sapiens
tgcctagtcatctccagggaagtga

SEQ ID NO: 3279 - DNA, 25 bp, Homo sapiens
tgggcctaatggacagctttacctg

SEQ ID NO: 3280 - DNA, 25 bp, Homo sapiens
tggaggacttttcggaggacttttc

SEQ ID NO: 3281 - DNA, 25 bp, Homo sapiens
tctctgctctgctattggatgaatc

SEQ ID NO: 3282 - DNA, 25 bp, Homo sapiens
cgacccatcgttgttatatccagtg

SEQ ID NO: 3283 - DNA, 25 bp, Homo sapiens
ccttgcttgctgtgggaatcctaga

SEQ ID NO: 3284 - DNA, 25 bp, Homo sapiens
ctgtgcctggcaaactccgacttta

SEQ ID NO: 3285 - DNA, 25 bp, Homo sapiens
acctgtgtgttctccggagctctta

SEQ ID NO: 3286 - DNA, 25 bp, Homo sapiens
ctgcagatgctcaataactagaacc

SEQ ID NO: 3287 - DNA, 25 bp, Homo sapiens
gaagagctttcctgccgcttgggca

SEQ ID NO: 3288 - DNA, 25 bp, Homo sapiens
gtcccgcaggcacgctttatttaga

SEQ ID NO: 3289 - DNA, 25 bp, Homo sapiens
ggcctgagaaagacccacgtaaata

SEQ ID NO: 3290 - DNA, 25 bp, Homo sapiens
catggctgctctcccttgttgttta

SEQ ID NO: 3291 - DNA, 25 bp, Homo sapiens
gtgtgcttctccctccaacttatta

SEQ ID NO: 3292 - DNA, 25 bp, Homo sapiens
ttgcagtcgagtctagaacaggttc

SEQ ID NO: 3293 - DNA, 25 bp, Homo sapiens
taattatatgtgttcacactttctc

SEQ ID NO: 3294 - DNA, 25 bp, Homo sapiens
actctctttggggacttcaggacca

SEQ ID NO: 3295 - DNA, 25 bp, Homo sapiens
ggcccgtgagcttacagatgatatt

SEQ ID NO: 3296 - DNA, 25 bp, Homo sapiens
atagttccagtgtgaggcccagata

SEQ ID NO: 3297 - DNA, 25 bp, Homo sapiens
tcagacgtggctttgcccaagtgtc

SEQ ID NO: 3298 - DNA, 25 bp, Homo sapiens
ccaggccacgtggatgctataatta

SEQ ID NO: 3299 - DNA, 25 bp, Homo sapiens
ttccacagtaggtgcacgatgtctc

SEQ ID NO: 3300 - DNA, 25 bp, Homo sapiens
gctgcttaagatgctgccgacattc

SEQ ID NO: 3301 - DNA, 25 bp, Homo sapiens
tgtcggctcttcataactcagtttg

SEQ ID NO: 3302 - DNA, 25 bp, Homo sapiens
ggtactaacttctctccacagatgg

SEQ ID NO: 3303 - DNA, 25 bp, Homo sapiens
cataacgcgcttaactctgtgagta

SEQ ID NO: 3304 - DNA, 25 bp, Homo sapiens
tccgggcagcaggaagtgaattacc

SEQ ID NO: 3305 - DNA, 25 bp, Homo sapiens
aatgtttgttttaagctctcctctg

SEQ ID NO: 3306 - DNA, 25 bp, Homo sapiens
ggcctgcatccactctataccaatg

SEQ ID NO: 3307 - DNA, 25 bp, Homo sapiens
gggaacgcttttctcctctattcta

SEQ ID NO: 3308 - DNA, 25 bp, Homo sapiens
ctgctggtgtccctaatggtaagaa

SEQ ID NO: 3309 - DNA, 25 bp, Homo sapiens
ggctcttctgaatgagtctccttga

SEQ ID NO: 3310 - DNA, 25 bp, Homo sapiens
ctaaggcttgaaatctgtgtccatc

SEQ ID NO: 3311 - DNA, 25 bp, Homo sapiens
ggtcaccaggttcatgcacccatag

SEQ ID NO: 3312 - DNA, 25 bp, Homo sapiens
tgccctcaggatgttccaatccaga

SEQ ID NO: 3313 - DNA, 25 bp, Homo sapiens
cccgctgtttgcattcctgttagga

SEQ ID NO: 3314 - DNA, 25 bp, Homo sapiens
ctttgctgctgcttcgtattcttca

SEQ ID NO: 3315 - DNA, 25 bp, Homo sapiens
tccgctttctggaggaaaaaacctc

SEQ ID NO: 3316 - DNA, 25 bp, Homo sapiens
caactgcttgtgtggggaaatattc

SEQ ID NO: 3317 - DNA, 25 bp, Homo sapiens
tctctaggtcctcagggcattttga

SEQ ID NO: 3318 - DNA, 25 bp, Homo sapiens
ggattccctgtagacccatgcatgg

SEQ ID NO: 3319 - DNA, 25 bp, Homo sapiens
ggacccagctgtaggtagcttttta

SEQ ID NO: 3320 - DNA, 25 bp, Homo sapiens
ggcaggctgatcacccatgattaga

SEQ ID NO: 3321 - DNA, 25 bp, Homo sapiens
ccgtctctgcatacctgtcctttta

SEQ ID NO: 3322 - DNA, 25 bp, Homo sapiens
ggtgatttctttcctctgtgcatta

SEQ ID NO: 3323 - DNA, 25 bp, Homo sapiens
cgcgtcctgaaaaccctccatgtga

SEQ ID NO: 3324 - DNA, 25 bp, Homo sapiens
gcacaggcacacagcatgcgcatga

SEQ ID NO: 3325 - DNA, 25 bp, Homo sapiens
aggccctgtcctcttggaaagttta

SEQ ID NO: 3326 - DNA, 25 bp, Homo sapiens
agcctggtggatagctctctaatta

SEQ ID NO: 3327 - DNA, 25 bp, Homo sapiens
ggcaaagctacttcccacacatcga

SEQ ID NO: 3328 - DNA, 25 bp, Homo sapiens
cccagctgggattttgactattctc

SEQ ID NO: 3329 - DNA, 25 bp, Homo sapiens
agtccatgtcctatagccaagcttg

SEQ ID NO: 3330 - DNA, 25 bp, Homo sapiens
ctgtgtgtggtgctgaaacaatttc

SEQ ID NO: 3331 - DNA, 25 bp, Homo sapiens
atacatgctctactctgggtactga

SEQ ID NO: 3332 - DNA, 25 bp, Homo sapiens
gccctgggctcataagagtgatttg

SEQ ID NO: 3333 - DNA, 25 bp, Homo sapiens
ggctgtatcatctttcacctggtca

SEQ ID NO: 3334 - DNA, 25 bp, Homo sapiens
acctataggacctatttttcccaac

SEQ ID NO: 3335 - DNA, 25 bp, Homo sapiens
gcactagggaaatctcactttactt

SEQ ID NO: 3336 - DNA, 25 bp, Homo sapiens
aaaaagaatatggtattcttagaag

SEQ ID NO: 3337 - DNA, 25 bp, Homo sapiens
atgatgtgtgccctttcctattaga

SEQ ID NO: 3338 - DNA, 25 bp, Homo sapiens
gtgtgtgtgtgtataaaatattaga

SEQ ID NO: 3339 - DNA, 25 bp, Homo sapiens
accaacgtggggtgttctctgtata

SEQ ID NO: 3340 - DNA, 25 bp, Homo sapiens
ccagaccagataaggggaccgcttt

SEQ ID NO: 3341 - DNA, 25 bp, Homo sapiens
ccctgggactctcaagcttagaatc

SEQ ID NO: 3342 - DNA, 25 bp, Homo sapiens
tcaaagtacttgattttttttggtg

SEQ ID NO: 3343 - DNA, 25 bp, Homo sapiens
agatgaactgtccttgcttttagca

SEQ ID NO: 3344 - DNA, 25 bp, Homo sapiens
taggtcctctctgtctccaagtagc

SEQ ID NO: 3345 - DNA, 25 bp, Homo sapiens
ctgtctttaaagaactctgtggttg

SEQ ID NO: 3346 - DNA, 25 bp, Homo sapiens
gcacaccctgaacgcttgaagtaca

SEQ ID NO: 3347 - DNA, 25 bp, Homo sapiens
tccttccgatgagtgagccttattc

SEQ ID NO: 3348 - DNA, 25 bp, Homo sapiens
aagccctgttttgcgctggtacatg

SEQ ID NO: 3349 - DNA, 25 bp, Homo sapiens
tggagtcacagcatacagttctttg

SEQ ID NO: 3350 - DNA, 25 bp, Homo sapiens
cacacactggggcaaatttatcatc

SEQ ID NO: 3351 - DNA, 25 bp, Homo sapiens
ggttttgcctcctgctccatagttc

SEQ ID NO: 3352 - DNA, 25 bp, Homo sapiens
ctgggtcacctttctgggctcaaaa

SEQ ID NO: 3353 - DNA, 25 bp, Homo sapiens
agtcattttagagaggcatccatcc

SEQ ID NO: 3354 - DNA, 25 bp, Homo sapiens
ttatctgaaaacatgggccctctga

SEQ ID NO: 3355 - DNA, 25 bp, Homo sapiens
cgaccttcagggtggcagatgcaca

SEQ ID NO: 3356 - DNA, 25 bp, Homo sapiens
ggccacggcccacaagtatctaagt

SEQ ID NO: 3357 - DNA, 25 bp, Homo sapiens
gctgtgtcaaagctggcctgtctta

SEQ ID NO: 3358 - DNA, 25 bp, Homo sapiens
ctgtcccttgtttggcttgtagaaa

SEQ ID NO: 3359 - DNA, 25 bp, Homo sapiens
ggccttgggatagtacgtttaatta

SEQ ID NO: 3360 - DNA, 25 bp, Homo sapiens
aggcctctcccatgctgtagtcaaa

SEQ ID NO: 3361 - DNA, 25 bp, Homo sapiens
atttgcctcgtttgggttactgtga

SEQ ID NO: 3362 - DNA, 25 bp, Homo sapiens
catccattctttcagggactcaatc

SEQ ID NO: 3363 - DNA, 25 bp, Homo sapiens
caggggaccttcttgtcttccttca

SEQ ID NO: 3364 - DNA, 25 bp, Homo sapiens
tatggttaacttttttcttattttc

SEQ ID NO: 3365 - DNA, 25 bp, Homo sapiens
ctcggctcttcaaagggaactgctg

SEQ ID NO: 3366 - DNA, 25 bp, Homo sapiens
aatggactcaggacttcgttggctc

SEQ ID NO: 3367 - DNA, 25 bp, Homo sapiens
gagagagaagcttttaatgctagtg

SEQ ID NO: 3368 - DNA, 25 bp, Homo sapiens
tcctgggttgtacattctgcgagtc

SEQ ID NO: 3369 - DNA, 25 bp, Homo sapiens
tggtgctccagcttccaatgtgtga

SEQ ID NO: 3370 - DNA, 25 bp, Homo sapiens
tgcacgttcccttcgagtcatatta

SEQ ID NO: 3371 - DNA, 25 bp, Homo sapiens
gagctctttctctcgctgtcttaga

SEQ ID NO: 3372 - DNA, 25 bp, Homo sapiens
agcctgtttcttctccgtttaatgg

SEQ ID NO: 3373 - DNA, 25 bp, Homo sapiens
ccacgggtcaaattcaaagaggtta

SEQ ID NO: 3374 - DNA, 25 bp, Homo sapiens
ctctgaccttctgcccaatgggatg

SEQ ID NO: 3375 - DNA, 25 bp, Homo sapiens
cttggggaaaacacagattggcctg

SEQ ID NO: 3376 - DNA, 25 bp, Homo sapiens
cctggccttccttcatctgtgattg

SEQ ID NO: 3377 - DNA, 25 bp, Homo sapiens
tggcttcaagcctccatgtatcaga

SEQ ID NO: 3378 - DNA, 25 bp, Homo sapiens
ggaccattcttctgtggcccactta

SEQ ID NO: 3379 - DNA, 25 bp, Homo sapiens
tttgcccttggagcagaaagcatca

SEQ ID NO: 3380 - DNA, 25 bp, Homo sapiens
aaatctacgttctgggcgccctttg

SEQ ID NO: 3381 - DNA, 25 bp, Homo sapiens
tctatttctgagagttgtctttccc

SEQ ID NO: 3382 - DNA, 25 bp, Homo sapiens
gcgtctggcagatcactacatactg

SEQ ID NO: 3383 - DNA, 25 bp, Homo sapiens
cctgaagctggagtggaatactgcc

SEQ ID NO: 3384 - DNA, 25 bp, Homo sapiens
gggcagggaagctcatataacagtc

SEQ ID NO: 3385 - DNA, 25 bp, Homo sapiens
gttctgccattctccatcttgtagg

SEQ ID NO: 3386 - DNA, 25 bp, Homo sapiens
aggcacgggtgcacttcacatcata

SEQ ID NO: 3387 - DNA, 25 bp, Homo sapiens
gtctccaggtggcataaaatacttc

SEQ ID NO: 3388 - DNA, 25 bp, Homo sapiens
ctttaattcttgatgggcagcctga

SEQ ID NO: 3389 - DNA, 25 bp, Homo sapiens
tgcattttggacacaggatatctgg

SEQ ID NO: 3390 - DNA, 25 bp, Homo sapiens
gtgcctagcctgtagtccatagaaa

SEQ ID NO: 3391 - DNA, 25 bp, Homo sapiens
actgaacgttgggaggtttatttca

SEQ ID NO: 3392 - DNA, 25 bp, Homo sapiens
agaaaacagcatggtagccacaata

SEQ ID NO: 3393 - DNA, 25 bp, Homo sapiens
tgtatttgtgatatgtgacattgca

SEQ ID NO: 3394 - DNA, 25 bp, Homo sapiens
tgtaacctgagtggccaaatgtgtg

SEQ ID NO: 3395 - DNA, 25 bp, Homo sapiens
tttgaacttttctaccctgaggagg

SEQ ID NO: 3396 - DNA, 25 bp, Homo sapiens
ccagggatggttttagcttcttttc

SEQ ID NO: 3397 - DNA, 25 bp, Homo sapiens
gtcagcctaggcatctcgttagata

SEQ ID NO: 3398 - DNA, 25 bp, Homo sapiens
tggagcctgctatgtctcataaatg

SEQ ID NO: 3399 - DNA, 25 bp, Homo sapiens
acccgtgtgtgtggatgctcattag

SEQ ID NO: 3400 - DNA, 25 bp, Homo sapiens
caagaatctgtgtctgttgtgacca

SEQ ID NO: 3401 - DNA, 25 bp, Homo sapiens
ccggatgacctccatgctaccttta

SEQ ID NO: 3402 - DNA, 25 bp, Homo sapiens
ggccctgcttctgtagtctccaata

SEQ ID NO: 3403 - DNA, 25 bp, Homo sapiens
ttttaaaaaatttgagttacttata

SEQ ID NO: 3404 - DNA, 25 bp, Homo sapiens
tcctctccttggctgttagttggtg

SEQ ID NO: 3405 - DNA, 25 bp, Homo sapiens
tgtctgatgagaccctggaactttt

SEQ ID NO: 3406 - DNA, 25 bp, Homo sapiens
agcgtgcatatcctggcctgatttc

SEQ ID NO: 3407 - DNA, 25 bp, Homo sapiens
caaggctgtctttcaggagatatga

SEQ ID NO: 3408 - DNA, 25 bp, Homo sapiens
gttatgcatctccatgcaaaaaaaa

SEQ ID NO: 3409 - DNA, 25 bp, Homo sapiens
cagacttaggtgttttcttgtaggc

SEQ ID NO: 3410 - DNA, 25 bp, Homo sapiens
ggtccagggtccacactcttatttg

SEQ ID NO: 3411 - DNA, 25 bp, Homo sapiens
agcccatctatggtagcttagcaga

SEQ ID NO: 3412 - DNA, 25 bp, Homo sapiens
tggcctcagtgtggctttctgtttc

SEQ ID NO: 3413 - DNA, 25 bp, Homo sapiens
tggatatataaatgcacttcctgaa

SEQ ID NO: 3414 - DNA, 25 bp, Homo sapiens
tgggtcttggctccttttcatggta

SEQ ID NO: 3415 - DNA, 25 bp, Homo sapiens
tacctcctgggctgactttgacatc

SEQ ID NO: 3416 - DNA, 25 bp, Homo sapiens
gttctgtctccactgcaagatctga

SEQ ID NO: 3417 - DNA, 25 bp, Homo sapiens
tggagctgcccttttcccaagatga

SEQ ID NO: 3418 - DNA, 25 bp, Homo sapiens
ggtgccaccctgtgagcagtgaata

SEQ ID NO: 3419 - DNA, 25 bp, Homo sapiens
gtctagcctgaacgtgtaaactgtc

SEQ ID NO: 3420 - DNA, 25 bp, Homo sapiens
ggtgctggccaataatccctgaatc

SEQ ID NO: 3421 - DNA, 25 bp, Homo sapiens
cctggctcaggcagtgaaattcata

SEQ ID NO: 3422 - DNA, 25 bp, Homo sapiens
gtggtatccctacacagatgtctta

SEQ ID NO: 3423 - DNA, 25 bp, Homo sapiens
gtatccttcttggaggcacacagta

SEQ ID NO: 3424 - DNA, 25 bp, Homo sapiens
tgggacatcgctggaaaaaggtatt

SEQ ID NO: 3425 - DNA, 25 bp, Homo sapiens
ttgcccaagatactgctgctacttc

SEQ ID NO: 3426 - DNA, 25 bp, Homo sapiens
caccacgtggcacataacatgttta

SEQ ID NO: 3427 - DNA, 25 bp, Homo sapiens
gctggtccttcatctgtcatcaata

SEQ ID NO: 3428 - DNA, 25 bp, Homo sapiens
tacctcactctgtgctacctagatg

SEQ ID NO: 3429 - DNA, 25 bp, Homo sapiens
ttcaccagggatatagtaacgcagc

SEQ ID NO: 3430 - DNA, 25 bp, Homo sapiens
gcctctgtccttttggcaatctaga

SEQ ID NO: 3431 - DNA, 25 bp, Homo sapiens
cgggactgcagttggctagtttatt

SEQ ID NO: 3432 - DNA, 25 bp, Homo sapiens
gggtgatgttcctgctccttgattc

SEQ ID NO: 3433 - DNA, 25 bp, Homo sapiens
ctagggacagtgagcaattcagttc

SEQ ID NO: 3434 - DNA, 25 bp, Homo sapiens
ttcccaatcctgtagactgtgttcc

SEQ ID NO: 3435 - DNA, 25 bp, Homo sapiens
tgcacacgtttaccagtctaggttc

SEQ ID NO: 3436 - DNA, 25 bp, Homo sapiens
cattgaatgatgtagccctgtagtc

SEQ ID NO: 3437 - DNA, 25 bp, Homo sapiens
aggatgaagtccttcttaactaaat

SEQ ID NO: 3438 - DNA, 25 bp, Homo sapiens
tttgcctctgaaagtcttccatgta

SEQ ID NO: 3439 - DNA, 25 bp, Homo sapiens
tttggctcatatctgacaagaactg

SEQ ID NO: 3440 - DNA, 25 bp, Homo sapiens
gtttgcacattcactcacagagata

SEQ ID NO: 3441 - DNA, 25 bp, Homo sapiens
ttggcggaaatcagactaggaaata

SEQ ID NO: 3442 - DNA, 25 bp, Homo sapiens
ttctagctaccacctttcaagatgg

SEQ ID NO: 3443 - DNA, 25 bp, Homo sapiens
tctagccattttgtttccactcttc

SEQ ID NO: 3444 - DNA, 25 bp, Homo sapiens
ctcagcaaagctgaatgttttctca

SEQ ID NO: 3445 - DNA, 25 bp, Homo sapiens
atcagtgctttgctcatagaccatc

SEQ ID NO: 3446 - DNA, 25 bp, Homo sapiens
cactgttggattgcttctgatgata

SEQ ID NO: 3447 - DNA, 25 bp, Homo sapiens
ttgggctccactacttgaaggtatc

SEQ ID NO: 3448 - DNA, 25 bp, Homo sapiens
atagacacactagtatcaatagcag

SEQ ID NO: 3449 - DNA, 25 bp, Homo sapiens
tacttaagctgctgataaactaaat

SEQ ID NO: 3450 - DNA, 25 bp, Homo sapiens
accatgagtggttccaggcaaatcc

SEQ ID NO: 3451 - DNA, 25 bp, Homo sapiens
aaagccatttcacaaacaccatatt

SEQ ID NO: 3452 - DNA, 25 bp, Homo sapiens
tccattaatggtgagcctgcaggtc

SEQ ID NO: 3453 - DNA, 25 bp, Homo sapiens
tgtgcttgcctctactcacctataa

SEQ ID NO: 3454 - DNA, 25 bp, Homo sapiens
tgagggaaaccatatgccttcattg

SEQ ID NO: 3455 - DNA, 25 bp, Homo sapiens
tgtgcatatatgctggagtcccata

SEQ ID NO: 3456 - DNA, 25 bp, Homo sapiens
ttgacctctggcaacatgagcattc

SEQ ID NO: 3457 - DNA, 25 bp, Homo sapiens
tttgtacttgcactatcaatttgtc

SEQ ID NO: 3458 - DNA, 25 bp, Homo sapiens
taggcatgttcttcaccaaattatg

SEQ ID NO: 3459 - DNA, 25 bp, Homo sapiens
attgaatattgatatccattcaatt

SEQ ID NO: 3460 - DNA, 25 bp, Homo sapiens
taggctaggatgaccacatgtatta

SEQ ID NO: 3461 - DNA, 25 bp, Homo sapiens
acttcattgcttggcggttttccag

SEQ ID NO: 3462 - DNA, 25 bp, Homo sapiens
gccagttagtgtgcatccaccatta

SEQ ID NO: 3463 - DNA, 25 bp, Homo sapiens
ccaagtttttgtcccagttctgcta

SEQ ID NO: 3464 - DNA, 25 bp, Homo sapiens
ctgtgcgcacgctcacgtatatata

SEQ ID NO: 3465 - DNA, 25 bp, Homo sapiens
ctgggtgtcagattatacttcatga

SEQ ID NO: 3466 - DNA, 25 bp, Homo sapiens
tccttagccctagcaccaaatattg

SEQ ID NO: 3467 - DNA, 25 bp, Homo sapiens
gccgatagactctctcatgcattta

SEQ ID NO: 3468 - DNA, 25 bp, Homo sapiens
tgatgaccttatatagtaagcaaga

SEQ ID NO: 3469 - DNA, 25 bp, Homo sapiens
ctccatgagtttttagtggcttaac

SEQ ID NO: 3470 - DNA, 25 bp, Homo sapiens
ctgccatgtggtatatagccagcta

SEQ ID NO: 3471 - DNA, 25 bp, Homo sapiens
tgccgtttcaatctccactcagtag

SEQ ID NO: 3472 - DNA, 25 bp, Homo sapiens
gaggcccttctgaatgctatgtgca

SEQ ID NO: 3473 - DNA, 25 bp, Homo sapiens
cagggtctcctagcctcactactta

SEQ ID NO: 3474 - DNA, 25 bp, Homo sapiens
tgattttcaagtgcacgacccggta

SEQ ID NO: 3475 - DNA, 25 bp, Homo sapiens
ggcatccctggactttaaccttata

SEQ ID NO: 3476 - DNA, 25 bp, Homo sapiens
cgggtacttattgctttgtctctaa

SEQ ID NO: 3477 - DNA, 25 bp, Homo sapiens
agaggtcttccttggcttcctatca

SEQ ID NO: 3478 - DNA, 25 bp, Homo sapiens
agagcatttttaggccattctgaca

SEQ ID NO: 3479 - DNA, 25 bp, Homo sapiens
taacctgttgactgcctaatactgg

SEQ ID NO: 3480 - DNA, 25 bp, Homo sapiens
tgcaagctgcttttcctacccagga

SEQ ID NO: 3481 - DNA, 25 bp, Homo sapiens
ggcccagcccagacatcaaagaata

SEQ ID NO: 3482 - DNA, 25 bp, Homo sapiens
acctccttggatgttctgtttcaga

SEQ ID NO: 3483 - DNA, 25 bp, Homo sapiens
aggtgattgagaaaaagagagataa

SEQ ID NO: 3484 - DNA, 25 bp, Homo sapiens
gaatggctttataaaaacgtggaga

SEQ ID NO: 3485 - DNA, 25 bp, Homo sapiens
gtcagccaagttttagcaacaagtg

SEQ ID NO: 3486 - DNA, 25 bp, Homo sapiens
cctaagccttcagggtgtgtaactc

SEQ ID NO: 3487 - DNA, 25 bp, Homo sapiens
cccaggagactgttgcaatgaaaaa

SEQ ID NO: 3488 - DNA, 25 bp, Homo sapiens
tgtacctggcttagaatagtgctta

SEQ ID NO: 3489 - DNA, 25 bp, Homo sapiens
ttgccacgtgttcccacaggattca

SEQ ID NO: 3490 - DNA, 25 bp, Homo sapiens
gtcaggacccaagcttcaagagtta

SEQ ID NO: 3491 - DNA, 25 bp, Homo sapiens
tttcagcccttgcagatgtttccca

SEQ ID NO: 3492 - DNA, 25 bp, Homo sapiens
agctgtgtaggtgagaaaaatcttc

SEQ ID NO: 3493 - DNA, 25 bp, Homo sapiens
gttgtccattctattctgcagtgta

SEQ ID NO: 3494 - DNA, 25 bp, Homo sapiens
tctcggatggcttagacaacaatta

SEQ ID NO: 3495 - DNA, 25 bp, Homo sapiens
ggctacatataccttcagcatgatg

SEQ ID NO: 3496 - DNA, 25 bp, Homo sapiens
ggaagtaccttgatccattcacatc

SEQ ID NO: 3497 - DNA, 25 bp, Homo sapiens
ctggctcagctgaggattctactta

SEQ ID NO: 3498 - DNA, 25 bp, Homo sapiens
cataggtattcatcacgtgtgcacg

SEQ ID NO: 3499 - DNA, 25 bp, Homo sapiens
ggtatgcaggaagtatttcacgttt

SEQ ID NO: 3500 - DNA, 25 bp, Homo sapiens
gttggagccttttgtctatagcttc

SEQ ID NO: 3501 - DNA, 25 bp, Homo sapiens
ctcactgtattccaagccttctctg

SEQ ID NO: 3502 - DNA, 25 bp, Homo sapiens
tcagcatcatcacttaatagcaagg

SEQ ID NO: 3503 - DNA, 25 bp, Homo sapiens
cacattttctttatctattcattat

SEQ ID NO: 3504 - DNA, 25 bp, Homo sapiens
gggtgcctttgctcgatttacttta

SEQ ID NO: 3505 - DNA, 25 bp, Homo sapiens
tggcataatggcaaggtcatcactt

SEQ ID NO: 3506 - DNA, 25 bp, Homo sapiens
ggatggctcaactttcacttttaga

SEQ ID NO: 3507 - DNA, 25 bp, Homo sapiens
tgcagaactggtttatggctatgtc

SEQ ID NO: 3508 - DNA, 25 bp, Homo sapiens
gcctgtctgaccttacacatatata

SEQ ID NO: 3509 - DNA, 25 bp, Homo sapiens
cttatggcagaggaaaacaggtatt

SEQ ID NO: 3510 - DNA, 25 bp, Homo sapiens
actggctaacactatcagggactta

SEQ ID NO: 3511 - DNA, 25 bp, Homo sapiens
tatgtattttaatatttactgctat

SEQ ID NO: 3512 - DNA, 25 bp, Homo sapiens
gccacgtatttttgggctacaggca

SEQ ID NO: 3513 - DNA, 25 bp, Homo sapiens
ccctgtgttgtaaaactgtctgata

SEQ ID NO: 3514 - DNA, 25 bp, Homo sapiens
tttttttctaatcacctttgagaat

SEQ ID NO: 3515 - DNA, 25 bp, Homo sapiens
gcactctaggttctgaattgtaaga

SEQ ID NO: 3516 - DNA, 25 bp, Homo sapiens
ggaatttacaaatccaccattaata

SEQ ID NO: 3517 - DNA, 25 bp, Homo sapiens
aaaagaataaaaaggtctagtatta

SEQ ID NO: 3518 - DNA, 25 bp, Homo sapiens
tggtgcacctccactgccctacagg

SEQ ID NO: 3519 - DNA, 25 bp, Homo sapiens
ctcctcatcttagggtcagttgaaa

SEQ ID NO: 3520 - DNA, 25 bp, Homo sapiens
tccgctctttgcaaggactgatctg

SEQ ID NO: 3521 - DNA, 25 bp, Homo sapiens
tcatgatgcaatatttaagcaacca

SEQ ID NO: 3522 - DNA, 25 bp, Homo sapiens
tgtcctcctttacttgtgctatagc

SEQ ID NO: 3523 - DNA, 25 bp, Homo sapiens
cccaggcccatttgctccagtttta

SEQ ID NO: 3524 - DNA, 25 bp, Homo sapiens
ggtgtccctgactttccagagcgga

SEQ ID NO: 3525 - DNA, 25 bp, Homo sapiens
ccagggtgattctctgtgagctgtc

SEQ ID NO: 3526 - DNA, 25 bp, Homo sapiens
ctgctgctaagtgaaggatggaccc

SEQ ID NO: 3527 - DNA, 25 bp, Homo sapiens
cttgactcccacatgaggatatttc

SEQ ID NO: 3528 - DNA, 25 bp, Homo sapiens
cagaaacattttcttccaaattctc

SEQ ID NO: 3529 - DNA, 25 bp, Homo sapiens
gagcaccagaagctacccagaattg

SEQ ID NO: 3530 - DNA, 25 bp, Homo sapiens
cacaggtgttgtatggcgttctcta

SEQ ID NO: 3531 - DNA, 25 bp, Homo sapiens
cacaagctgcactggactcttcata

SEQ ID NO: 3532 - DNA, 25 bp, Homo sapiens
gcctcgctgagcaaggaaactgttg

SEQ ID NO: 3533 - DNA, 25 bp, Homo sapiens
tctctacatgctgcaaggtaatata

SEQ ID NO: 3534 - DNA, 25 bp, Homo sapiens
ccaagctgctccaccaatctgttag

SEQ ID NO: 3535 - DNA, 25 bp, Homo sapiens
ggccaaggatgtccacaacgccata

SEQ ID NO: 3536 - DNA, 25 bp, Homo sapiens
tgtacccatgtcagaggcacacaca

SEQ ID NO: 3537 - DNA, 25 bp, Homo sapiens
acctttttagcatcgtggcaaacaa

SEQ ID NO: 3538 - DNA, 25 bp, Homo sapiens
tgcaggcctctagattcaatagcta

SEQ ID NO: 3539 - DNA, 25 bp, Homo sapiens
ctgggttccatctccaagaaaggca

SEQ ID NO: 3540 - DNA, 25 bp, Homo sapiens
gctggcttccttttgtgtccaaaca

SEQ ID NO: 3541 - DNA, 25 bp, Homo sapiens
acaccacttaatttgatcctcccaa

SEQ ID NO: 3542 - DNA, 25 bp, Homo sapiens
ttcgggccagacaagactctcttta

SEQ ID NO: 3543 - DNA, 25 bp, Homo sapiens
gcccaggggtggcattctccatata

SEQ ID NO: 3544 - DNA, 25 bp, Homo sapiens
tcctcactgcccaggggaatgaata

SEQ ID NO: 3545 - DNA, 25 bp, Homo sapiens
agcctcatttggagaatcagaattc

SEQ ID NO: 3546 - DNA, 25 bp, Homo sapiens
tcccagggcagtataagagaattct

SEQ ID NO: 3547 - DNA, 25 bp, Homo sapiens
gcctagctttccttgtagcaaagta

SEQ ID NO: 3548 - DNA, 25 bp, Homo sapiens
tcccccactttttgaatgagggggt

SEQ ID NO: 3549 - DNA, 25 bp, Homo sapiens
gccaattgttaagggaaggactctc

SEQ ID NO: 3550 - DNA, 25 bp, Homo sapiens
gccaggcttataacctcaaagtaaa

SEQ ID NO: 3551 - DNA, 25 bp, Homo sapiens
tcccagattgaaatgaccctgtgtc

SEQ ID NO: 3552 - DNA, 25 bp, Homo sapiens
tggattcttcctcttgccaagttga

SEQ ID NO: 3553 - DNA, 25 bp, Homo sapiens
gagctccagcttttgaactcgttca

SEQ ID NO: 3554 - DNA, 25 bp, Homo sapiens
tggggcttaaaccactaatgtagga

SEQ ID NO: 3555 - DNA, 25 bp, Homo sapiens
gctgctggactggaaaggcttatcc

SEQ ID NO: 3556 - DNA, 25 bp, Homo sapiens
cactggcctgtgtttctaaattata

SEQ ID NO: 3557 - DNA, 25 bp, Homo sapiens
ttttctcttctgattcaagcctctt

SEQ ID NO: 3558 - DNA, 25 bp, Homo sapiens
ttagggagctagagtggcacaatta

SEQ ID NO: 3559 - DNA, 25 bp, Homo sapiens
ccagactcagcaggataggcattca

SEQ ID NO: 3560 - DNA, 25 bp, Homo sapiens
gtccacagtgcgcagagaagccatg

SEQ ID NO: 3561 - DNA, 25 bp, Homo sapiens
ctacttctctacacttttcgtatat

SEQ ID NO: 3562 - DNA, 25 bp, Homo sapiens
ttcttcaccaaataacagtttcatc

SEQ ID NO: 3563 - DNA, 25 bp, Homo sapiens
ccagaagggtgtcacagacatgata

SEQ ID NO: 3564 - DNA, 25 bp, Homo sapiens
cctagttttagtttggttcagaaga

SEQ ID NO: 3565 - DNA, 25 bp, Homo sapiens
tcccttcctatgctggcctatgata

SEQ ID NO: 3566 - DNA, 25 bp, Homo sapiens
agagttccctgcttcaattagtttg

SEQ ID NO: 3567 - DNA, 25 bp, Homo sapiens
tttatgggaaaaagtctgtaatatc

SEQ ID NO: 3568 - DNA, 25 bp, Homo sapiens
agattacctgtatatgcctgtcaca

SEQ ID NO: 3569 - DNA, 25 bp, Homo sapiens
gaagcagtgagttcccatgtcccta

SEQ ID NO: 3570 - DNA, 25 bp, Homo sapiens
tgcctggtgcacacaggtaatgata

SEQ ID NO: 3571 - DNA, 25 bp, Homo sapiens
ttcctgactttcgagggccagttcc

SEQ ID NO: 3572 - DNA, 25 bp, Homo sapiens
ttcctttaaggtgggtgctattaca

SEQ ID NO: 3573 - DNA, 25 bp, Homo sapiens
ggtaagggctctgtctccaaagtca

SEQ ID NO: 3574 - DNA, 25 bp, Homo sapiens
gagtggcttcatccctacagtataa

SEQ ID NO: 3575 - DNA, 25 bp, Homo sapiens
gctgcatctaggaagtatgactata

SEQ ID NO: 3576 - DNA, 25 bp, Homo sapiens
tcaactatctttgcagagactttta

SEQ ID NO: 3577 - DNA, 25 bp, Homo sapiens
gacttcagtaggaatggcaaaaaaa

SEQ ID NO: 3578 - DNA, 25 bp, Homo sapiens
gcccactctgaaagaagacatttta

SEQ ID NO: 3579 - DNA, 25 bp, Homo sapiens
gagtagccactgatgaattccaaga

SEQ ID NO: 3580 - DNA, 25 bp, Homo sapiens
agtgaattaccacagcattaacttg

SEQ ID NO: 3581 - DNA, 25 bp, Homo sapiens
ctcaatgttctatggttgcccaagc

SEQ ID NO: 3582 - DNA, 25 bp, Homo sapiens
tgctatgccctctctccaaaaaatg

SEQ ID NO: 3583 - DNA, 25 bp, Homo sapiens
cctgcagtggcctcttggtagacaa

SEQ ID NO: 3584 - DNA, 25 bp, Homo sapiens
agggtccttcagtgctcatcaggca

SEQ ID NO: 3585 - DNA, 25 bp, Homo sapiens
gtggtgctcatatgaaaaggctttc

SEQ ID NO: 3586 - DNA, 25 bp, Homo sapiens
caatattgtattttacggttttcag

SEQ ID NO: 3587 - DNA, 25 bp, Homo sapiens
gcagggtgtctggtatcaaatcatc

SEQ ID NO: 3588 - DNA, 25 bp, Homo sapiens
gaagttcttgactttgtatggaaag

SEQ ID NO: 3589 - DNA, 25 bp, Homo sapiens
agaggaaaaagtatttatttgtcaa

SEQ ID NO: 3590 - DNA, 25 bp, Homo sapiens
ggcggccaccgcacttaagtacaga

SEQ ID NO: 3591 - DNA, 25 bp, Homo sapiens
ccatctgggactagaagcctgtttg

SEQ ID NO: 3592 - DNA, 25 bp, Homo sapiens
cagggagtcctctacagaagtgtta

SEQ ID NO: 3593 - DNA, 25 bp, Homo sapiens
agcccacaggagttatgattcttca

SEQ ID NO: 3594 - DNA, 25 bp, Homo sapiens
tgtggtgtgctctctcattaacttc

SEQ ID NO: 3595 - DNA, 25 bp, Homo sapiens
atgtgtttgttttggcttgtgtaca

SEQ ID NO: 3596 - DNA, 25 bp, Homo sapiens
cccatgaagtttgtggcttgccaga

SEQ ID NO: 3597 - DNA, 25 bp, Homo sapiens
tggctttcttcccaggtcttcaaga

SEQ ID NO: 3598 - DNA, 25 bp, Homo sapiens
cctttgaggccacgtgtaagtacca

SEQ ID NO: 3599 - DNA, 25 bp, Homo sapiens
tggggcctctgctatggaaataaca

SEQ ID NO: 3600 - DNA, 25 bp, Homo sapiens
gcatctcaaagctcctcagagggta

SEQ ID NO: 3601 - DNA, 25 bp, Homo sapiens
gtcccgttaagtatcctaaggaaga

SEQ ID NO: 3602 - DNA, 25 bp, Homo sapiens
tcctgggcttgcttcctgaaagatc

SEQ ID NO: 3603 - DNA, 25 bp, Homo sapiens
ttgccctctccgaaggactcttgtg

SEQ ID NO: 3604 - DNA, 25 bp, Homo sapiens
ctccgggtttttggcaaggtgacac

SEQ ID NO: 3605 - DNA, 25 bp, Homo sapiens
tgtgactcatttgtggcacccatta

SEQ ID NO: 3606 - DNA, 25 bp, Homo sapiens
taagtatatagccaaaatcaataca

SEQ ID NO: 3607 - DNA, 25 bp, Homo sapiens
ttcactccaaggtgccaaggcagta

SEQ ID NO: 3608 - DNA, 25 bp, Homo sapiens
gccagccactatttcagcttattta

SEQ ID NO: 3609 - DNA, 25 bp, Homo sapiens
agggagtatgccaagaaagtgttca

SEQ ID NO: 3610 - DNA, 25 bp, Homo sapiens
gtgagtgctcattccaagggttttc

SEQ ID NO: 3611 - DNA, 25 bp, Homo sapiens
cctctggttgtctaaagtggagcaa

SEQ ID NO: 3612 - DNA, 25 bp, Homo sapiens
cacactgtggatagctgagagacca

SEQ ID NO: 3613 - DNA, 25 bp, Homo sapiens
cctactctgcacccacaaaaattat

SEQ ID NO: 3614 - DNA, 25 bp, Homo sapiens
gtgccaagagctctcacgtgagata

SEQ ID NO: 3615 - DNA, 25 bp, Homo sapiens
gtgggctctgacacctttttaaaaa

SEQ ID NO: 3616 - DNA, 25 bp, Homo sapiens
atggcggtgggaagctagctgcagc

SEQ ID NO: 3617 - DNA, 25 bp, Homo sapiens
gtggctccacaagtaccttctagtg

SEQ ID NO: 3618 - DNA, 25 bp, Homo sapiens
tgcctttggtgtgagatgttcccta

SEQ ID NO: 3619 - DNA, 25 bp, Homo sapiens
aattaaggacattaatatgaacgaa

SEQ ID NO: 3620 - DNA, 25 bp, Homo sapiens
ccacagatgggagaggaagctattc

SEQ ID NO: 3621 - DNA, 25 bp, Homo sapiens
acattctccatccagaaaagactgc

SEQ ID NO: 3622 - DNA, 25 bp, Homo sapiens
cacatttgtaagaattccaagtgtt

SEQ ID NO: 3623 - DNA, 25 bp, Homo sapiens
gctgctggccctattcaaatcttta

SEQ ID NO: 3624 - DNA, 25 bp, Homo sapiens
acactcacagattaagggccctttg

SEQ ID NO: 3625 - DNA, 25 bp, Homo sapiens
tgagcctaacaccttcccagggatg

SEQ ID NO: 3626 - DNA, 25 bp, Homo sapiens
ccctttggggtaatcagtgtccttg

SEQ ID NO: 3627 - DNA, 25 bp, Homo sapiens
cttttcatcttttaccaaacaatac

SEQ ID NO: 3628 - DNA, 25 bp, Homo sapiens
actgaggtgttgtgttttggccata

SEQ ID NO: 3629 - DNA, 25 bp, Homo sapiens
gccatcgtgggctggtgttaaaatt

SEQ ID NO: 3630 - DNA, 25 bp, Homo sapiens
ttctgggctggtaaatgacaactgg

SEQ ID NO: 3631 - DNA, 25 bp, Homo sapiens
tgcggcctctgctatggaaatgaca

SEQ ID NO: 3632 - DNA, 25 bp, Homo sapiens
tgcctattcaaaatggtgcctcggg

SEQ ID NO: 3633 - DNA, 25 bp, Homo sapiens
gtgctgcggagggaaacactccatc

SEQ ID NO: 3634 - DNA, 25 bp, Homo sapiens
gctgccaccatgctgcttaggataa

SEQ ID NO: 3635 - DNA, 25 bp, Homo sapiens
ggccagatcagcacgcttcttatta

SEQ ID NO: 3636 - DNA, 25 bp, Homo sapiens
cccaaccgtttctcaggcagtgaca

SEQ ID NO: 3637 - DNA, 25 bp, Homo sapiens
tgagggacgcttcacacctgttatc

SEQ ID NO: 3638 - DNA, 25 bp, Homo sapiens
agcgtgaggctctaaggttaaaatc

SEQ ID NO: 3639 - DNA, 25 bp, Homo sapiens
cctactattagggttcaagagcatc

SEQ ID NO: 3640 - DNA, 25 bp, Homo sapiens
gcttccctgtcttcctgtcatcatg

SEQ ID NO: 3641 - DNA, 25 bp, Homo sapiens
gccaggcacgtgtactgctttcaga

SEQ ID NO: 3642 - DNA, 25 bp, Homo sapiens
ccgggaagggtcatccagacaaata

SEQ ID NO: 3643 - DNA, 25 bp, Homo sapiens
tagcaagctgcatttctcccgtagg

SEQ ID NO: 3644 - DNA, 25 bp, Homo sapiens
aatattagttatattctcttcgaat

SEQ ID NO: 3645 - DNA, 25 bp, Homo sapiens
ggtgccaagatcacagtaggcttta

SEQ ID NO: 3646 - DNA, 25 bp, Homo sapiens
tagaggagacgcgtttgccgacttt

SEQ ID NO: 3647 - DNA, 25 bp, Homo sapiens
acgcaaaacacgctacacccaatta

SEQ ID NO: 3648 - DNA, 25 bp, Homo sapiens
aatgggactggtgcacaactctctc

SEQ ID NO: 3649 - DNA, 25 bp, Homo sapiens
gtggctccacaagtacctcctagtg

SEQ ID NO: 3650 - DNA, 25 bp, Homo sapiens
tgcctttggtgtgagatattcccta

SEQ ID NO: 3651 - DNA, 25 bp, Homo sapiens
tagttgtgtggcatctcatcagatt

SEQ ID NO: 3652 - DNA, 25 bp, Homo sapiens
ggcaggtgctcagatcaactttttc

SEQ ID NO: 3653 - DNA, 25 bp, Homo sapiens
agtgcccacctgtcatcttagaagc

SEQ ID NO: 3654 - DNA, 25 bp, Homo sapiens
gcttagtcaccttcctcaggctacc

SEQ ID NO: 3655 - DNA, 25 bp, Homo sapiens
atccggatcaggcaggctttgaagc

SEQ ID NO: 3656 - DNA, 25 bp, Homo sapiens
tggtcaccgttatcccttaggtctg

SEQ ID NO: 3657 - DNA, 25 bp, Homo sapiens
ggtctcaaggtgcacagctcaaata

SEQ ID NO: 3658 - DNA, 25 bp, Homo sapiens
ccgctggaaatcctgttctttctga

SEQ ID NO: 3659 - DNA, 25 bp, Homo sapiens
gagcctgagtcgcattgtgagttta

SEQ ID NO: 3660 - DNA, 25 bp, Homo sapiens
aagttgctgcttcatacattgggtc

SEQ ID NO: 3661 - DNA, 25 bp, Homo sapiens
tgtaggacaagttttataaccccag

SEQ ID NO: 3662 - DNA, 25 bp, Homo sapiens
ttttgtttttcccaaataaagatcc

SEQ ID NO: 3663 - DNA, 25 bp, Homo sapiens
ctccgcctggaagccatcatgaatg

SEQ ID NO: 3664 - DNA, 25 bp, Homo sapiens
aggctgacaccacacatattgcttc

SEQ ID NO: 3665 - DNA, 25 bp, Homo sapiens
agcctcatgttggtgggtttccaga

SEQ ID NO: 3666 - DNA, 25 bp, Homo sapiens
ttgttagcttttttccagtgggcca

SEQ ID NO: 3667 - DNA, 25 bp, Homo sapiens
ttttttttttggtcatttattttag

SEQ ID NO: 3668 - DNA, 25 bp, Homo sapiens
ctgagtcttgccattgagccgagta

SEQ ID NO: 3669 - DNA, 25 bp, Homo sapiens
aaaaaaaagacggtgagcatctttt

SEQ ID NO: 3670 - DNA, 25 bp, Homo sapiens
aaacaaaccaaaaaatgccttttaa

SEQ ID NO: 3671 - DNA, 25 bp, Homo sapiens
ccatcttctttctccacccccactc

SEQ ID NO: 3672 - DNA, 25 bp, Homo sapiens
taccaaagtcacccattctttccca

SEQ ID NO: 3673 - DNA, 25 bp, Homo sapiens
aggcatggccttgttttctgagcaa

SEQ ID NO: 3674 - DNA, 25 bp, Homo sapiens
agagagacgtcatttccagcctagg

SEQ ID NO: 3675 - DNA, 25 bp, Homo sapiens
ggcagaccctaaaggcccagagtag

SEQ ID NO: 3676 - DNA, 25 bp, Homo sapiens
gcaggcctcttagtccgcagttcaa

SEQ ID NO: 3677 - DNA, 25 bp, Homo sapiens
ctggacctccagattccggcatttt

SEQ ID NO: 3678 - DNA, 25 bp, Homo sapiens
ggcccacatggcttgcagaacttta

SEQ ID NO: 3679 - DNA, 25 bp, Homo sapiens
gtaacctttgccttcctggaacaga

SEQ ID NO: 3680 - DNA, 25 bp, Homo sapiens
ggtgccagctttttctgtcccatga

SEQ ID NO: 3681 - DNA, 25 bp, Homo sapiens
tctgcccaggccaatgtagtccagg

SEQ ID NO: 3682 - DNA, 25 bp, Homo sapiens
aaagagcctcagatctaacccctgc

SEQ ID NO: 3683 - DNA, 25 bp, Homo sapiens
ccctggccaaggtgtagcagtcatc

SEQ ID NO: 3684 - DNA, 25 bp, Homo sapiens
ggggtaaggccaatactcgctcttc

SEQ ID NO: 3685 - DNA, 25 bp, Homo sapiens
ccctgggtggatgctctcaataaca

SEQ ID NO: 3686 - DNA, 25 bp, Homo sapiens
atgactgctggctgccctttcttat

SEQ ID NO: 3687 - DNA, 25 bp, Homo sapiens
tttcccagacggatgattcattccc

SEQ ID NO: 3688 - DNA, 25 bp, Homo sapiens
caagttccttgttctgctgcctaga

SEQ ID NO: 3689 - DNA, 25 bp, Homo sapiens
cagcacagtctcctgggaagcagtc

SEQ ID NO: 3690 - DNA, 25 bp, Homo sapiens
tcctgtggttctcggacatttctca

SEQ ID NO: 3691 - DNA, 25 bp, Homo sapiens
tcgcataggggcctaaagacacatg

SEQ ID NO: 3692 - DNA, 25 bp, Homo sapiens
accaggagaagacactttgattttc

SEQ ID NO: 3693 - DNA, 25 bp, Homo sapiens
gactcaacctctaattcttgctgtg

SEQ ID NO: 3694 - DNA, 25 bp, Homo sapiens
tgtggtaagtgctccctaagtgtca

SEQ ID NO: 3695 - DNA, 25 bp, Homo sapiens
cttgctcacggaggacttagtcttc

SEQ ID NO: 3696 - DNA, 25 bp, Homo sapiens
ccaagggccttcagactcaacagta

SEQ ID NO: 3697 - DNA, 25 bp, Homo sapiens
catctggcagcttgataacaatatc

SEQ ID NO: 3698 - DNA, 25 bp, Homo sapiens
gctgtatcatcttgacggttacata

SEQ ID NO: 3699 - DNA, 25 bp, Homo sapiens
aggcaaaccaacaatagagccaacc

SEQ ID NO: 3700 - DNA, 25 bp, Homo sapiens
gtaatactacagagtgtttgaaatc

SEQ ID NO: 3701 - DNA, 25 bp, Homo sapiens
accctgtctgtgtgctgtatccttc

SEQ ID NO: 3702 - DNA, 25 bp, Homo sapiens
tctgggcccagaatgagcacacatg

SEQ ID NO: 3703 - DNA, 25 bp, Homo sapiens
catagagttgaatgcataaaacctc

SEQ ID NO: 3704 - DNA, 25 bp, Homo sapiens
gtacatatatgcatctctaaatttg

SEQ ID NO: 3705 - DNA, 25 bp, Homo sapiens
agacacagtgtaagtattacagtcc

SEQ ID NO: 3706 - DNA, 25 bp, Homo sapiens
tgcacgtcttttgcctcactggatg

SEQ ID NO: 3707 - DNA, 25 bp, Homo sapiens
ctctgtagacaattaggtgaccctg

SEQ ID NO: 3708 - DNA, 25 bp, Homo sapiens
ggcacgtgacatcctcgaaagagta

SEQ ID NO: 3709 - DNA, 25 bp, Homo sapiens
agtccaatttggggaggtgtggggg

SEQ ID NO: 3710 - DNA, 25 bp, Homo sapiens
atgccaatcaacaaggtgagcagtt

SEQ ID NO: 3711 - DNA, 25 bp, Homo sapiens
gtccctccttagctgggtcaacata

SEQ ID NO: 3712 - DNA, 25 bp, Homo sapiens
cagggtctcctgtttccagacaata

SEQ ID NO: 3713 - DNA, 25 bp, Homo sapiens
tggccctgacttttcttccgcatgt

SEQ ID NO: 3714 - DNA, 25 bp, Homo sapiens
gccagtgataccagagtgctcagtc

SEQ ID NO: 3715 - DNA, 25 bp, Homo sapiens
ggtcaggatggttgcaggggtcctg

SEQ ID NO: 3716 - DNA, 25 bp, Homo sapiens
ggctacattttgatctgggacctca

SEQ ID NO: 3717 - DNA, 25 bp, Homo sapiens
tgggctctgccctagagaaactgta

SEQ ID NO: 3718 - DNA, 25 bp, Homo sapiens
cagttctttaaaatgtaccctgggg

SEQ ID NO: 3719 - DNA, 25 bp, Homo sapiens
cccatagctggagtttaaggaaatc

SEQ ID NO: 3720 - DNA, 25 bp, Homo sapiens
agtctgtgtctacgctcatcctgaa

SEQ ID NO: 3721 - DNA, 25 bp, Homo sapiens
gcaggggtcctgtaatcatctctca

SEQ ID NO: 3722 - DNA, 25 bp, Homo sapiens
ccaactaaccagctctgaagttttc

SEQ ID NO: 3723 - DNA, 25 bp, Homo sapiens
cagttgatgcatgccagaggagttc

SEQ ID NO: 3724 - DNA, 25 bp, Homo sapiens
ctcagctaaaaaagatcacatttcc

SEQ ID NO: 3725 - DNA, 25 bp, Homo sapiens
agatcttgcatccttgacccttgag

SEQ ID NO: 3726 - DNA, 25 bp, Homo sapiens
gggaaatgtgctttgatttgtcacc

SEQ ID NO: 3727 - DNA, 25 bp, Homo sapiens
cagaagccagcaaataagtttctgt

SEQ ID NO: 3728 - DNA, 25 bp, Homo sapiens
agagaccctggcttttcactgttgc

SEQ ID NO: 3729 - DNA, 25 bp, Homo sapiens
ggacgaaactgcatgggccatccta

SEQ ID NO: 3730 - DNA, 25 bp, Homo sapiens
aggccttgaactgtctttttaatct

SEQ ID NO: 3731 - DNA, 25 bp, Homo sapiens
cggccaggccaaagcttcataattt

SEQ ID NO: 3732 - DNA, 25 bp, Homo sapiens
tcttactttgggaagctagtgccta

SEQ ID NO: 3733 - DNA, 25 bp, Homo sapiens
gcgaagtctgctgctacaatccctg

SEQ ID NO: 3734 - DNA, 25 bp, Homo sapiens
ttgagacaggatctctgtgctagaa

SEQ ID NO: 3735 - DNA, 25 bp, Homo sapiens
aggctgagcaccatcattcaaaatg

SEQ ID NO: 3736 - DNA, 25 bp, Homo sapiens
acattaaattggaggagctgataga

SEQ ID NO: 3737 - DNA, 25 bp, Homo sapiens
taaacccggtgtctttcctgctgtg

SEQ ID NO: 3738 - DNA, 25 bp, Homo sapiens
atgcctccaaaagacactgggttta

SEQ ID NO: 3739 - DNA, 25 bp, Homo sapiens
ctttatctgtatgggtgactttctc

SEQ ID NO: 3740 - DNA, 25 bp, Homo sapiens
tatggtcctcaagtaggagaatttc

SEQ ID NO: 3741 - DNA, 25 bp, Homo sapiens
ctggcaattcatgtatggccttgta

SEQ ID NO: 3742 - DNA, 25 bp, Homo sapiens
ttatatggatttcctaccagtgcaa

SEQ ID NO: 3743 - DNA, 25 bp, Homo sapiens
tagccctggttggagatcagtatca

SEQ ID NO: 3744 - DNA, 25 bp, Homo sapiens
agagggcttcttgccatgacgtgtc

SEQ ID NO: 3745 - DNA, 25 bp, Homo sapiens
tcccagtgaaatgcgtggagctatc

SEQ ID NO: 3746 - DNA, 25 bp, Homo sapiens
gtaggcttcttcactcaggcgcatg

SEQ ID NO: 3747 - DNA, 25 bp, Homo sapiens
ccatgcgcctgagtgaagaagccta

SEQ ID NO: 3748 - DNA, 25 bp, Homo sapiens
ctgctatttcatctgcctggccatc

SEQ ID NO: 3749 - DNA, 25 bp, Homo sapiens
gcctcgttcagccacctacaatttt

SEQ ID NO: 3750 - DNA, 25 bp, Homo sapiens
ccagtgtgctccctgacaaaatgta

SEQ ID NO: 3751 - DNA, 25 bp, Homo sapiens
actagtgggatctcttcaaattgga

SEQ ID NO: 3752 - DNA, 25 bp, Homo sapiens
ggtgactactcacatgtggcaaatg

SEQ ID NO: 3753 - DNA, 25 bp, Homo sapiens
tggagagtccacacaattcagtctg

SEQ ID NO: 3754 - DNA, 25 bp, Homo sapiens
ggcattcacaggcagcagagctctt

SEQ ID NO: 3755 - DNA, 25 bp, Homo sapiens
gcaaagggtcccttcaggtctgaaa

SEQ ID NO: 3756 - DNA, 25 bp, Homo sapiens
ctgcctcttgctttcctaataaagg

SEQ ID NO: 3757 - DNA, 25 bp, Homo sapiens
ctgagttccaggctttgaaggtaca

SEQ ID NO: 3758 - DNA, 25 bp, Homo sapiens
tcggcagcactttccctctaggaga

SEQ ID NO: 3759 - DNA, 25 bp, Homo sapiens
ggggccagagatttcctcctaaata

SEQ ID NO: 3760 - DNA, 25 bp, Homo sapiens
ttgactgtctacacctgcaggctga

SEQ ID NO: 3761 - DNA, 25 bp, Homo sapiens
ttcttccttatagcctggggacctg

SEQ ID NO: 3762 - DNA, 25 bp, Homo sapiens
ctgtgtcccgactgctttcatatga

SEQ ID NO: 3763 - DNA, 25 bp, Homo sapiens
gtcgcaccctgtttatggcccatag

SEQ ID NO: 3764 - DNA, 25 bp, Homo sapiens
tcttgtggcctctgacatgtgaatc

SEQ ID NO: 3765 - DNA, 25 bp, Homo sapiens
atgatccagaatgctgccctccctt

SEQ ID NO: 3766 - DNA, 25 bp, Homo sapiens
ccttcgagatcgtgtcgggctcatt

SEQ ID NO: 3767 - DNA, 25 bp, Homo sapiens
atggcgcctttgtttgtactatgtc

SEQ ID NO: 3768 - DNA, 25 bp, Homo sapiens
gaccaagggcctcacagattatgta

SEQ ID NO: 3769 - DNA, 25 bp, Homo sapiens
agcgtcgcatttggttgtctcttta

SEQ ID NO: 3770 - DNA, 25 bp, Homo sapiens
tgtttttacatttcagaccctggcc

SEQ ID NO: 3771 - DNA, 25 bp, Homo sapiens
gcgctgttctttacttcctgggata

SEQ ID NO: 3772 - DNA, 25 bp, Homo sapiens
gatgtccttactccctcttgcaaaa

SEQ ID NO: 3773 - DNA, 25 bp, Homo sapiens
gcacaggtttgccacggttgaatcg

SEQ ID NO: 3774 - DNA, 25 bp, Homo sapiens
ccacctgcctgggtactgatttctc

SEQ ID NO: 3775 - DNA, 25 bp, Homo sapiens
ttacaggaaggcactcaaaatttac

SEQ ID NO: 3776 - DNA, 25 bp, Homo sapiens
tggccctgggctatttctaaccatc

SEQ ID NO: 3777 - DNA, 25 bp, Homo sapiens
gagcagtcatttcgccatcccagga

SEQ ID NO: 3778 - DNA, 25 bp, Homo sapiens
tcggtctctcgggaaatatggcatc

SEQ ID NO: 3779 - DNA, 25 bp, Homo sapiens
ggggatcatttagcccaagaaacta

SEQ ID NO: 3780 - DNA, 25 bp, Homo sapiens
tgtcagctgtctcgcctggaaaatg

SEQ ID NO: 3781 - DNA, 25 bp, Homo sapiens
gccaccgagactatgcgttctgatg

SEQ ID NO: 3782 - DNA, 25 bp, Homo sapiens
ggttgtactgctatgctattgccta

SEQ ID NO: 3783 - DNA, 25 bp, Homo sapiens
tcagggcattcttcgtactagttgg

SEQ ID NO: 3784 - DNA, 25 bp, Homo sapiens
cttgcttgtaaagaatgggtgacca

SEQ ID NO: 3785 - DNA, 25 bp, Homo sapiens
tgtgcccaaaagcatcctcaagttg

SEQ ID NO: 3786 - DNA, 25 bp, Homo sapiens
caccgatagagattttttgtttgtt

SEQ ID NO: 3787 - DNA, 25 bp, Homo sapiens
tggtgaaactatttcatctgcttca

SEQ ID NO: 3788 - DNA, 25 bp, Homo sapiens
agtgggcagaatctttccttatggt

SEQ ID NO: 3789 - DNA, 25 bp, Homo sapiens
gggaacctccctatacctggcgttg

SEQ ID NO: 3790 - DNA, 25 bp, Homo sapiens
tcggtttaccatgaggcatcgaact

SEQ ID NO: 3791 - DNA, 25 bp, Homo sapiens
ggctgcactgcagaccaactggtaa

SEQ ID NO: 3792 - DNA, 25 bp, Homo sapiens
ggcctgggcagtttcttgactctta

SEQ ID NO: 3793 - DNA, 25 bp, Homo sapiens
gcattaggaatgaacgcccaaggtc

SEQ ID NO: 3794 - DNA, 25 bp, Homo sapiens
tctctccctaattcgttcactcatg

SEQ ID NO: 3795 - DNA, 25 bp, Homo sapiens
cttgcttttatatttttttgaattt

SEQ ID NO: 3796 - DNA, 25 bp, Homo sapiens
tccaggcaagtagggcttccaaatt

SEQ ID NO: 3797 - DNA, 25 bp, Homo sapiens
ccgttggctgtatcagatggctttc

SEQ ID NO: 3798 - DNA, 25 bp, Homo sapiens
ttttaaatatactaacaataattga

SEQ ID NO: 3799 - DNA, 25 bp, Homo sapiens
tgtcaggctaaccatatccagtgtc

SEQ ID NO: 3800 - DNA, 25 bp, Homo sapiens
ctaggttgctcagccaaagaggtga

SEQ ID NO: 3801 - DNA, 25 bp, Homo sapiens
aagggtattttgttgccttgaacca

SEQ ID NO: 3802 - DNA, 25 bp, Homo sapiens
taaagagtcaagtgtacagatgcgt

SEQ ID NO: 3803 - DNA, 25 bp, Homo sapiens
cttccctgaggctctgacagcatta

SEQ ID NO: 3804 - DNA, 25 bp, Homo sapiens
gcagaggaccaaattccctaggcta

SEQ ID NO: 3805 - DNA, 25 bp, Homo sapiens
tcagtttgcccaggtccagtgtagc

SEQ ID NO: 3806 - DNA, 25 bp, Homo sapiens
ggactggtcttttgggatctctcta

SEQ ID NO: 3807 - DNA, 25 bp, Homo sapiens
gtacctacaatgtgccagacactgc

SEQ ID NO: 3808 - DNA, 25 bp, Homo sapiens
gggaatcacttgctgccagtcttta

SEQ ID NO: 3809 - DNA, 25 bp, Homo sapiens
ccatgtgtttggctttcagggtcga

SEQ ID NO: 3810 - DNA, 25 bp, Homo sapiens
cccttggcatttctgtgcttatatg

SEQ ID NO: 3811 - DNA, 25 bp, Homo sapiens
ctgtgacttaatgaggccagttgta

SEQ ID NO: 3812 - DNA, 25 bp, Homo sapiens
atcaaattgaattacccacaagagg

SEQ ID NO: 3813 - DNA, 25 bp, Homo sapiens
gtgttttttaaataacatgtttata

SEQ ID NO: 3814 - DNA, 25 bp, Homo sapiens
ggatggcccatcttgctgttcctga

SEQ ID NO: 3815 - DNA, 25 bp, Homo sapiens
ggttttgaaaccacaaaagtagttt

SEQ ID NO: 3816 - DNA, 25 bp, Homo sapiens
tagtaataaaagagaatcaggaaga

SEQ ID NO: 3817 - DNA, 25 bp, Homo sapiens
tgagcagtatgccagcccactgaga

SEQ ID NO: 3818 - DNA, 25 bp, Homo sapiens
ccctactgacaaggaagaggccaaa

SEQ ID NO: 3819 - DNA, 25 bp, Homo sapiens
tggcttctgcgtagctcagttttca

SEQ ID NO: 3820 - DNA, 25 bp, Homo sapiens
ccgtgtttctgccttgtagagtgtc

SEQ ID NO: 3821 - DNA, 25 bp, Homo sapiens
agggtgatccctagcttacaacatg

SEQ ID NO: 3822 - DNA, 25 bp, Homo sapiens
tgggtccttccaccagcagctgctt

SEQ ID NO: 3823 - DNA, 25 bp, Homo sapiens
ggtgaacactgcctctactctccta

SEQ ID NO: 3824 - DNA, 25 bp, Homo sapiens
gaccagcagccagtaccctcgggta

SEQ ID NO: 3825 - DNA, 25 bp, Homo sapiens
aatgccaggaaactagccgctcttt

SEQ ID NO: 3826 - DNA, 25 bp, Homo sapiens
cctgatggggacaacctgacttaaa

SEQ ID NO: 3827 - DNA, 25 bp, Homo sapiens
gggcctctctaaaacaagctgattg

SEQ ID NO: 3828 - DNA, 25 bp, Homo sapiens
caagcacccttggtctgggcgaagg

SEQ ID NO: 3829 - DNA, 25 bp, Homo sapiens
ccctggcacagagcggatcacagtc

SEQ ID NO: 3830 - DNA, 25 bp, Homo sapiens
atcatcgacgtttccaggctgccca

SEQ ID NO: 3831 - DNA, 25 bp, Homo sapiens
ccactgggccaagatctgagctttg

SEQ ID NO: 3832 - DNA, 25 bp, Homo sapiens
ggcttccataatcccaggcaggtga

SEQ ID NO: 3833 - DNA, 25 bp, Homo sapiens
tgtgtctcctgaagagcccttgctc

SEQ ID NO: 3834 - DNA, 25 bp, Homo sapiens
ccatgcctgggctttggcctacaca

SEQ ID NO: 3835 - DNA, 25 bp, Homo sapiens
tggcgcccagcaggtaagacaatgt

SEQ ID NO: 3836 - DNA, 25 bp, Homo sapiens
tgttccctgttcctctcttgcaatg

SEQ ID NO: 3837 - DNA, 25 bp, Homo sapiens
ggggtttctactccacaattcctga

SEQ ID NO: 3838 - DNA, 25 bp, Homo sapiens
tccagcagggaaaacagcactcttg

SEQ ID NO: 3839 - DNA, 25 bp, Homo sapiens
aaccactgcttctgtttcggggcca

SEQ ID NO: 3840 - DNA, 25 bp, Homo sapiens
tgccagctgggtttatgtttcaaga

SEQ ID NO: 3841 - DNA, 25 bp, Homo sapiens
cttgcagacatagcgctccacggta

SEQ ID NO: 3842 - DNA, 25 bp, Homo sapiens
agcaggggctgcatttcttcccaaa

SEQ ID NO: 3843 - DNA, 25 bp, Homo sapiens
tgtctgcagattaggccttggtttc

SEQ ID NO: 3844 - DNA, 25 bp, Homo sapiens
ctgcagccctccatgttctagaatc

SEQ ID NO: 3845 - DNA, 25 bp, Homo sapiens
tagcgtcattgtctcttcccatctg

SEQ ID NO: 3846 - DNA, 25 bp, Homo sapiens
cttcatttccagagaggcgcgcaga

SEQ ID NO: 3847 - DNA, 25 bp, Homo sapiens
ttgccctggcttcaaaaaggactcg

SEQ ID NO: 3848 - DNA, 25 bp, Homo sapiens
cccttgagaacaggtgaggccactg

SEQ ID NO: 3849 - DNA, 25 bp, Homo sapiens
cccgtagctgaggttgtccgcacat

SEQ ID NO: 3850 - DNA, 25 bp, Homo sapiens
gagattacacctactggggcgcttc

SEQ ID NO: 3851 - DNA, 25 bp, Homo sapiens
ggtttcctggctccttccaaaaaag

SEQ ID NO: 3852 - DNA, 25 bp, Homo sapiens
tgccgttctcctaggccttctctga

SEQ ID NO: 3853 - DNA, 25 bp, Homo sapiens
cccaggaagagcacaagccttggac

SEQ ID NO: 3854 - DNA, 25 bp, Homo sapiens
gactcgccctgtgtaagatcaactg

SEQ ID NO: 3855 - DNA, 25 bp, Homo sapiens
gggccatgcggtcatctggtaatta

SEQ ID NO: 3856 - DNA, 25 bp, Homo sapiens
tgagagagaccctgatgcccacatc

SEQ ID NO: 3857 - DNA, 25 bp, Homo sapiens
tcctgcctggaaatgacactgggtc

SEQ ID NO: 3858 - DNA, 25 bp, Homo sapiens
ggctttcagttcctgtgccaagtgc

SEQ ID NO: 3859 - DNA, 25 bp, Homo sapiens
ggggttccctcctcgaatcgtcaat

SEQ ID NO: 3860 - DNA, 25 bp, Homo sapiens
ggggtccctactcacagccacttga

SEQ ID NO: 3861 - DNA, 25 bp, Homo sapiens
tcggcaattctccttcccaaacgtg

SEQ ID NO: 3862 - DNA, 25 bp, Homo sapiens
cactgttttctggagcctgtcggca

SEQ ID NO: 3863 - DNA, 25 bp, Homo sapiens
ccagcgccgccaacagatggtcata

SEQ ID NO: 3864 - DNA, 25 bp, Homo sapiens
ttcgctccgcaaaggggaactcttc

SEQ ID NO: 3865 - DNA, 25 bp, Homo sapiens
aagcccgctgtaaaccttaggtgtg

SEQ ID NO: 3866 - DNA, 25 bp, Homo sapiens
atgcgcaccctctgcccgtttaaga

SEQ ID NO: 3867 - DNA, 25 bp, Homo sapiens
cccaggcgattctggtgatctgatc

SEQ ID NO: 3868 - DNA, 25 bp, Homo sapiens
tgctccacttttgctgtgtacagtc

SEQ ID NO: 3869 - DNA, 25 bp, Homo sapiens
catgccctgtgaggccagatcttcc

SEQ ID NO: 3870 - DNA, 25 bp, Homo sapiens
ggacatctgttattgccacgggaaa

SEQ ID NO: 3871 - DNA, 25 bp, Homo sapiens
cttagaatcttaccgttgggccacc

SEQ ID NO: 3872 - DNA, 25 bp, Homo sapiens
gccctgttgggaagagcactttttc

SEQ ID NO: 3873 - DNA, 25 bp, Homo sapiens
gggctgctcgatccctttaaaaaac

SEQ ID NO: 3874 - DNA, 25 bp, Homo sapiens
ctaccctgtattctctgccatgtga

SEQ ID NO: 3875 - DNA, 25 bp, Homo sapiens
gacacaattacttgttaagtgatat

SEQ ID NO: 3876 - DNA, 25 bp, Homo sapiens
cggaaaccggctcaccaaacctgga

SEQ ID NO: 3877 - DNA, 25 bp, Homo sapiens
gggccagtgttctctcaagctattc

SEQ ID NO: 3878 - DNA, 25 bp, Homo sapiens
ccctggggtgttgtaggcacacaaa

SEQ ID NO: 3879 - DNA, 25 bp, Homo sapiens
ttttagggcccagaaaccagagcta

SEQ ID NO: 3880 - DNA, 25 bp, Homo sapiens
gccgcccagcattttcatgatgtta

SEQ ID NO: 3881 - DNA, 25 bp, Homo sapiens
cagagcctctgggagaccatacgtc

SEQ ID NO: 3882 - DNA, 25 bp, Homo sapiens
tggccacatgggtttcagacactca

SEQ ID NO: 3883 - DNA, 25 bp, Homo sapiens
tgcgcccagtggttttctatttcag

SEQ ID NO: 3884 - DNA, 25 bp, Homo sapiens
cactgtgttacacttggtgaaaaaa

SEQ ID NO: 3885 - DNA, 25 bp, Homo sapiens
ttgcaggttacagccaaagtggtac

SEQ ID NO: 3886 - DNA, 25 bp, Homo sapiens
gcccgcctggtttacgtatagtgtt

SEQ ID NO: 3887 - DNA, 25 bp, Homo sapiens
ctctgtggtgcccaaagcatatagg

SEQ ID NO: 3888 - DNA, 25 bp, Homo sapiens
caatgctggcttgattccctttttc

SEQ ID NO: 3889 - DNA, 25 bp, Homo sapiens
ggcatcctgtaattgggcccacata

SEQ ID NO: 3890 - DNA, 25 bp, Homo sapiens
aggctttctgcaaggctgttctgta

SEQ ID NO: 3891 - DNA, 25 bp, Homo sapiens
gcaggatccttcagcagtagctttc

SEQ ID NO: 3892 - DNA, 25 bp, Homo sapiens
acatgggatcggctggttaaaatac

SEQ ID NO: 3893 - DNA, 25 bp, Homo sapiens
accctggccctgttgggatgaaaca

SEQ ID NO: 3894 - DNA, 25 bp, Homo sapiens
cgtctgcattgaacttgaacctata

SEQ ID NO: 3895 - DNA, 25 bp, Homo sapiens
tgctcgcccaaggttctgactcttc

SEQ ID NO: 3896 - DNA, 25 bp, Homo sapiens
ccaggaagtactatgtggaccttta

SEQ ID NO: 3897 - DNA, 25 bp, Homo sapiens
tgcctcctctgcctcttgataaatg

SEQ ID NO: 3898 - DNA, 25 bp, Homo sapiens
agtgttctctaaggccttgctattc

SEQ ID NO: 3899 - DNA, 25 bp, Homo sapiens
gaccttatattctagatgcaaaatt

SEQ ID NO: 3900 - DNA, 25 bp, Homo sapiens
gcacaatatactcctatggcataga

SEQ ID NO: 3901 - DNA, 25 bp, Homo sapiens
tataaccttggttctaatttccaac

SEQ ID NO: 3902 - DNA, 25 bp, Homo sapiens
tggcaggctcatgaaagaaggtaca

SEQ ID NO: 3903 - DNA, 25 bp, Homo sapiens
gggctgtcacctcccagtgattcta

SEQ ID NO: 3904 - DNA, 25 bp, Homo sapiens
gggtcatgcttcgatggctcacttg

SEQ ID NO: 3905 - DNA, 25 bp, Homo sapiens
cagctcctggccaaatattcataga

SEQ ID NO: 3906 - DNA, 25 bp, Homo sapiens
ggctcatattgctgctgctcccatc

SEQ ID NO: 3907 - DNA, 25 bp, Homo sapiens
ggtgtctccctctttgcattacatg

SEQ ID NO: 3908 - DNA, 25 bp, Homo sapiens
ggtatcttctgttcccaaggtggtg

SEQ ID NO: 3909 - DNA, 25 bp, Homo sapiens
ggccgagagcatatgtgatactttc

SEQ ID NO: 3910 - DNA, 25 bp, Homo sapiens
ggacctatcgggctactctaagtga

SEQ ID NO: 3911 - DNA, 25 bp, Homo sapiens
ggggactttcaggatacagcttata

SEQ ID NO: 3912 - DNA, 25 bp, Homo sapiens
gggaacccaggagctcacatttgca

SEQ ID NO: 3913 - DNA, 25 bp, Homo sapiens
actgaatcagatgctccttggtgcc

SEQ ID NO: 3914 - DNA, 25 bp, Homo sapiens
cagacctttgggagttcctgaaaca

SEQ ID NO: 3915 - DNA, 25 bp, Homo sapiens
ccttcttagtgctttccatggatta

SEQ ID NO: 3916 - DNA, 25 bp, Homo sapiens
ctatcggattggagacatcaccttc

SEQ ID NO: 3917 - DNA, 25 bp, Homo sapiens
ttttcctgttccaagccctaagctg

SEQ ID NO: 3918 - DNA, 25 bp, Homo sapiens
gagtttagccctgagccatgtttta

SEQ ID NO: 3919 - DNA, 25 bp, Homo sapiens
tgttgaggtccatatcagctagccc

SEQ ID NO: 3920 - DNA, 25 bp, Homo sapiens
ttaccatttactttcatatagctgc

SEQ ID NO: 3921 - DNA, 25 bp, Homo sapiens
agccgtatagtcctctgacagtata

SEQ ID NO: 3922 - DNA, 25 bp, Homo sapiens
gcatcccaatgtcaggcctcagcaa

SEQ ID NO: 3923 - DNA, 25 bp, Homo sapiens
agctgagctgttgtctttctgattc

SEQ ID NO: 3924 - DNA, 25 bp, Homo sapiens
aagaactctaaagttctcatctgca

SEQ ID NO: 3925 - DNA, 25 bp, Homo sapiens
gccttgctgctggttccctaattga

SEQ ID NO: 3926 - DNA, 25 bp, Homo sapiens
ctctcctgggtagagtggtttcata

SEQ ID NO: 3927 - DNA, 25 bp, Homo sapiens
gccttgttgtcctgttcccacttga

SEQ ID NO: 3928 - DNA, 25 bp, Homo sapiens
ctgtcggggataagtgtctccttta

SEQ ID NO: 3929 - DNA, 25 bp, Homo sapiens
tgctctgtgacttgggttaagttcc

SEQ ID NO: 3930 - DNA, 25 bp, Homo sapiens
caactgtggctgcattggactctta

SEQ ID NO: 3931 - DNA, 25 bp, Homo sapiens
tgcctctgggctcctagaaatgtta

SEQ ID NO: 3932 - DNA, 25 bp, Homo sapiens
ttcctggggcacaacactctgattc

SEQ ID NO: 3933 - DNA, 25 bp, Homo sapiens
ccctgagattgtccacctgctgaat

SEQ ID NO: 3934 - DNA, 25 bp, Homo sapiens
ggcagcactaccacccagatgtcag

SEQ ID NO: 3935 - DNA, 25 bp, Homo sapiens
tgcagagcagctgtatctcagcaga

SEQ ID NO: 3936 - DNA, 25 bp, Homo sapiens
ctgccgtcacagatttcatcatggg

SEQ ID NO: 3937 - DNA, 25 bp, Homo sapiens
atcacggctggttggcttaaagctc

SEQ ID NO: 3938 - DNA, 25 bp, Homo sapiens
ctgccatttggggttggttcataca

SEQ ID NO: 3939 - DNA, 25 bp, Homo sapiens
acctgacccttttctgcagatttca

SEQ ID NO: 3940 - DNA, 25 bp, Homo sapiens
ggggcctacctcactctatttcaga

SEQ ID NO: 3941 - DNA, 25 bp, Homo sapiens
ctctttgagcttgcagggcatttca

SEQ ID NO: 3942 - DNA, 25 bp, Homo sapiens
taatgattcctctacccagccgttc

SEQ ID NO: 3943 - DNA, 25 bp, Homo sapiens
tggcacttacagtcactctctcttg

SEQ ID NO: 3944 - DNA, 25 bp, Homo sapiens
tccaggctaggacagtaaaggagcc

SEQ ID NO: 3945 - DNA, 25 bp, Homo sapiens
tgtcgaacttccagaaataaaatag

SEQ ID NO: 3946 - DNA, 25 bp, Homo sapiens
gccaattactatacctgtgtgtgaa

SEQ ID NO: 3947 - DNA, 25 bp, Homo sapiens
agcttcctattctgaggcccggttc

SEQ ID NO: 3948 - DNA, 25 bp, Homo sapiens
cttgcctctgcagtgtcattcattc

SEQ ID NO: 3949 - DNA, 25 bp, Homo sapiens
cactgtgttttctgccaaggcttta

SEQ ID NO: 3950 - DNA, 25 bp, Homo sapiens
tctgctacctggaggcacttctcta

SEQ ID NO: 3951 - DNA, 25 bp, Homo sapiens
actggtgctaccttctgttcaaatg

SEQ ID NO: 3952 - DNA, 25 bp, Homo sapiens
gctactgctgtctctgcttccaagg

SEQ ID NO: 3953 - DNA, 25 bp, Homo sapiens
gttacttctattgttccattctgtc

SEQ ID NO: 3954 - DNA, 25 bp, Homo sapiens
atattcaaaatacacgtcattacaa

SEQ ID NO: 3955 - DNA, 25 bp, Homo sapiens
gccatcgcccaaagatgcttagaga

SEQ ID NO: 3956 - DNA, 25 bp, Homo sapiens
ggccatttctttcttggctagaaca

SEQ ID NO: 3957 - DNA, 25 bp, Homo sapiens
agtcccatgtcctgtctgattagcc

SEQ ID NO: 3958 - DNA, 25 bp, Homo sapiens
ctctacctgggctccatgaacaata

SEQ ID NO: 3959 - DNA, 25 bp, Homo sapiens
gcatatgagccatggtacttaagaa

SEQ ID NO: 3960 - DNA, 25 bp, Homo sapiens
gttggacaacctgggctagattctg

SEQ ID NO: 3961 - DNA, 25 bp, Homo sapiens
cctaaggatttaaagaatgaagatc

SEQ ID NO: 3962 - DNA, 25 bp, Homo sapiens
tttctaatactgtactattattatt

SEQ ID NO: 3963 - DNA, 25 bp, Homo sapiens
tgtgggtctcagctcaattgtttta

SEQ ID NO: 3964 - DNA, 25 bp, Homo sapiens
acccagggagtatttcttacatata

SEQ ID NO: 3965 - DNA, 25 bp, Homo sapiens
cttgagtgtgtccttgagctgaatt

SEQ ID NO: 3966 - DNA, 25 bp, Homo sapiens
tgagtgtttcactgagatgattgaa

SEQ ID NO: 3967 - DNA, 25 bp, Homo sapiens
aggaccttttcactgaccttcagta

SEQ ID NO: 3968 - DNA, 25 bp, Homo sapiens
gggttttctcttcccacaccagtta

SEQ ID NO: 3969 - DNA, 25 bp, Homo sapiens
gcaccatgaaggtctttgaacttta

SEQ ID NO: 3970 - DNA, 25 bp, Homo sapiens
ttcagtgtaaagacttaagtgatgc

SEQ ID NO: 3971 - DNA, 25 bp, Homo sapiens
tgggcagacgtccaatcaatctagc

SEQ ID NO: 3972 - DNA, 25 bp, Homo sapiens
ccttaggaggcagagcacaacatta

SEQ ID NO: 3973 - DNA, 25 bp, Homo sapiens
tttatcaagaaaataatacattggg

SEQ ID NO: 3974 - DNA, 25 bp, Homo sapiens
acacagaaataaagattattgtgtt

SEQ ID NO: 3975 - DNA, 25 bp, Homo sapiens
aactttgtggtttttgttcttattg

SEQ ID NO: 3976 - DNA, 25 bp, Homo sapiens
aggacctattgccttgccaggaatg

SEQ ID NO: 3977 - DNA, 25 bp, Homo sapiens
cccagggcctcctatgagagacagc

SEQ ID NO: 3978 - DNA, 25 bp, Homo sapiens
tgtccagggttgatgagaatagctc

SEQ ID NO: 3979 - DNA, 25 bp, Homo sapiens
tcaggctcttggatgtacatacaca

SEQ ID NO: 3980 - DNA, 25 bp, Homo sapiens
ccctagtgttgaaccagtcatttta

SEQ ID NO: 3981 - DNA, 25 bp, Homo sapiens
cacagcctggcttctacattggaga

SEQ ID NO: 3982 - DNA, 25 bp, Homo sapiens
gtaagccctcgcctacctgctgata

SEQ ID NO: 3983 - DNA, 25 bp, Homo sapiens
gcatcctatcccttcaaaatgtgtc

SEQ ID NO: 3984 - DNA, 25 bp, Homo sapiens
gaaatgttcacccagcttttgctca

SEQ ID NO: 3985 - DNA, 25 bp, Homo sapiens
gcctgagtactttttggccctttca

SEQ ID NO: 3986 - DNA, 25 bp, Homo sapiens
gctgcacctttgacattatctatga

SEQ ID NO: 3987 - DNA, 25 bp, Homo sapiens
tgcaacaagctgaactcctggactc

SEQ ID NO: 3988 - DNA, 25 bp, Homo sapiens
tcctctacaggtccaagttattttc

SEQ ID NO: 3989 - DNA, 25 bp, Homo sapiens
tgtttccaaggtgctctcagacaga

SEQ ID NO: 3990 - DNA, 25 bp, Homo sapiens
cccaggctgccttcctttaatgaca

SEQ ID NO: 3991 - DNA, 25 bp, Homo sapiens
gtgtctgtttatggagaacctctca

SEQ ID NO: 3992 - DNA, 25 bp, Homo sapiens
ggcgcttctgctttgtacatatgta

SEQ ID NO: 3993 - DNA, 25 bp, Homo sapiens
gggtgtgaccaccactttcagccta

SEQ ID NO: 3994 - DNA, 25 bp, Homo sapiens
actctggctggcaagtgtattttga

SEQ ID NO: 3995 - DNA, 25 bp, Homo sapiens
gcgcatactttggactgaccttttc

SEQ ID NO: 3996 - DNA, 25 bp, Homo sapiens
agacccttggtgctactccctgata

SEQ ID NO: 3997 - DNA, 25 bp, Homo sapiens
ccatgctggaagtatataatgtggc

SEQ ID NO: 3998 - DNA, 25 bp, Homo sapiens
ctgggctgcttgaatcttatgatac

SEQ ID NO: 3999 - DNA, 25 bp, Homo sapiens
ggtgtgtgtcatgcctctgttttaa

SEQ ID NO: 4000 - DNA, 25 bp, Homo sapiens
gatgcatccctgaactgcttatatg

SEQ ID NO: 4001 - DNA, 25 bp, Homo sapiens
ctttaacatacattaaaagcaactg

SEQ ID NO: 4002 - DNA, 25 bp, Homo sapiens
gctttccaactgagtgccaatactg

SEQ ID NO: 4003 - DNA, 25 bp, Homo sapiens
aagggccctgtctccagattttgac

SEQ ID NO: 4004 - DNA, 25 bp, Homo sapiens
atcgattgtacagtgattcccattc

SEQ ID NO: 4005 - DNA, 25 bp, Homo sapiens
atgtactcatcaactggccttaaga

SEQ ID NO: 4006 - DNA, 25 bp, Homo sapiens
actactacttttgaaaacatggtgg

SEQ ID NO: 4007 - DNA, 25 bp, Homo sapiens
ctctcaatatcacacaatttacagg

SEQ ID NO: 4008 - DNA, 25 bp, Homo sapiens
tcctgctaggtgacaacaaaagttc

SEQ ID NO: 4009 - DNA, 25 bp, Homo sapiens
caggtcctcttcctcaatgtggaga

SEQ ID NO: 4010 - DNA, 25 bp, Homo sapiens
tgggtggagcacaaacatatgattt

SEQ ID NO: 4011 - DNA, 25 bp, Homo sapiens
cttgggcaccaaagtctagctatta

SEQ ID NO: 4012 - DNA, 25 bp, Homo sapiens
gggctcaattcccatctgctatttg

SEQ ID NO: 4013 - DNA, 25 bp, Homo sapiens
ggaacctgatttccacatcctcagt

SEQ ID NO: 4014 - DNA, 25 bp, Homo sapiens
attggagtggacatgtaggtgctta

SEQ ID NO: 4015 - DNA, 25 bp, Homo sapiens
ctgtgacttcttttcctgcagtata

SEQ ID NO: 4016 - DNA, 25 bp, Homo sapiens
gctccttgctactaggaaaatccta

SEQ ID NO: 4017 - DNA, 25 bp, Homo sapiens
ctagctcttgttcatcatgtcagtc

SEQ ID NO: 4018 - DNA, 25 bp, Homo sapiens
aagggagttgatctggctacgttta

SEQ ID NO: 4019 - DNA, 25 bp, Homo sapiens
tcttttagagggaaatagcctgtcc

SEQ ID NO: 4020 - DNA, 25 bp, Homo sapiens
gcatacttcctctctcacctggtga

SEQ ID NO: 4021 - DNA, 25 bp, Homo sapiens
gccaatgcttggaaacggggaaaca

SEQ ID NO: 4022 - DNA, 25 bp, Homo sapiens
cgtgggtgaatactccatcctatta

SEQ ID NO: 4023 - DNA, 25 bp, Homo sapiens
gtatacctgtcctgaactggccaca

SEQ ID NO: 4024 - DNA, 25 bp, Homo sapiens
gttgggcactttctggctctaatga

SEQ ID NO: 4025 - DNA, 25 bp, Homo sapiens
ctcccatcaggaagggtacttctca

SEQ ID NO: 4026 - DNA, 25 bp, Homo sapiens
catggacgcacacagtttattgcta

SEQ ID NO: 4027 - DNA, 25 bp, Homo sapiens
ggccctcatcctgttttgctgtcta

SEQ ID NO: 4028 - DNA, 25 bp, Homo sapiens
aggcctgacatttggtaagacttta

SEQ ID NO: 4029 - DNA, 25 bp, Homo sapiens
tgtttcccatgagccaaagactgtc

SEQ ID NO: 4030 - DNA, 25 bp, Homo sapiens
tagtctttctgtgcataccctcagc

SEQ ID NO: 4031 - DNA, 25 bp, Homo sapiens
tatagatgcttcccttactccacaa

SEQ ID NO: 4032 - DNA, 25 bp, Homo sapiens
gtcccttttgtctgatttagctatc

SEQ ID NO: 4033 - DNA, 25 bp, Homo sapiens
tcctttcagaggcaggctggacttc

SEQ ID NO: 4034 - DNA, 25 bp, Homo sapiens
tttcttctttctctctttatgcttg

SEQ ID NO: 4035 - DNA, 25 bp, Homo sapiens
ctgccgggtaccctattgtgaaata

SEQ ID NO: 4036 - DNA, 25 bp, Homo sapiens
tgaatgatcttcagaccctactgta

SEQ ID NO: 4037 - DNA, 25 bp, Homo sapiens
tattaccccatattgttccattgag

SEQ ID NO: 4038 - DNA, 25 bp, Homo sapiens
tctctattcgctagggcagagaaca

SEQ ID NO: 4039 - DNA, 25 bp, Homo sapiens
tgccaggccctatacatttcaaatg

SEQ ID NO: 4040 - DNA, 25 bp, Homo sapiens
ctatgacagaccagcaggagatttc

SEQ ID NO: 4041 - DNA, 25 bp, Homo sapiens
gtgtatctgcctagctcctgcctta

SEQ ID NO: 4042 - DNA, 25 bp, Homo sapiens
gtactacccttgtgacaagcaatgg

SEQ ID NO: 4043 - DNA, 25 bp, Homo sapiens
cttgcacctgctgaatattagagtc

SEQ ID NO: 4044 - DNA, 25 bp, Homo sapiens
gggaggttacacatggtctatttta

SEQ ID NO: 4045 - DNA, 25 bp, Homo sapiens
gggacctaaaaggatttgccttact

SEQ ID NO: 4046 - DNA, 25 bp, Homo sapiens
gccaacgtgctttctgctgtactta

SEQ ID NO: 4047 - DNA, 25 bp, Homo sapiens
ccaatattctggtgtttctgcaaac

SEQ ID NO: 4048 - DNA, 25 bp, Homo sapiens
gtctgacctcagcattttctataca

SEQ ID NO: 4049 - DNA, 25 bp, Homo sapiens
ctgggaatgccagctgccaattatc

SEQ ID NO: 4050 - DNA, 25 bp, Homo sapiens
cttcattctgatgggaggactcatg

SEQ ID NO: 4051 - DNA, 25 bp, Homo sapiens
cgaagacctgctgagaaagacctta

SEQ ID NO: 4052 - DNA, 25 bp, Homo sapiens
ttgttgtccacaaaaggcagtcagg

SEQ ID NO: 4053 - DNA, 25 bp, Homo sapiens
agctgcactggttgtatctgaaata

SEQ ID NO: 4054 - DNA, 25 bp, Homo sapiens
aagcaatgccttcctctgagaatta

SEQ ID NO: 4055 - DNA, 25 bp, Homo sapiens
cccaactggctgtggaattctaatc

SEQ ID NO: 4056 - DNA, 25 bp, Homo sapiens
tttgatatttcccacccgcaatgga

SEQ ID NO: 4057 - DNA, 25 bp, Homo sapiens
tgcctaaattgccacgagagctgtt

SEQ ID NO: 4058 - DNA, 25 bp, Homo sapiens
aatgggtccttcttattctagctgg

SEQ ID NO: 4059 - DNA, 25 bp, Homo sapiens
ataaagaagcctgccattgtatcta

SEQ ID NO: 4060 - DNA, 25 bp, Homo sapiens
tccatgctagacaccttggagttga

SEQ ID NO: 4061 - DNA, 25 bp, Homo sapiens
atcatatctaactcggtttttacag

SEQ ID NO: 4062 - DNA, 25 bp, Homo sapiens
ctgctctggggaaaacggacatata

SEQ ID NO: 4063 - DNA, 25 bp, Homo sapiens
caggcgcttgcagtagttcttatta

SEQ ID NO: 4064 - DNA, 25 bp, Homo sapiens
gagaatgttttttgcagaatccaga

SEQ ID NO: 4065 - DNA, 25 bp, Homo sapiens
tcctgtgtctttactccttgaaatc

SEQ ID NO: 4066 - DNA, 25 bp, Homo sapiens
cactgggtgtgttcctgatagcttc

SEQ ID NO: 4067 - DNA, 25 bp, Homo sapiens
taccaactctagattccagtaacga

SEQ ID NO: 4068 - DNA, 25 bp, Homo sapiens
agggctctgagctcatcacaaaagg

SEQ ID NO: 4069 - DNA, 25 bp, Homo sapiens
tgtgtgcctctagcttggtattacc

SEQ ID NO: 4070 - DNA, 25 bp, Homo sapiens
tgggactctacacttagctgatttg

SEQ ID NO: 4071 - DNA, 25 bp, Homo sapiens
ttcatcgagggtggtaactgcaata

SEQ ID NO: 4072 - DNA, 25 bp, Homo sapiens
aggctggagcttgagtagtaaatga

SEQ ID NO: 4073 - DNA, 25 bp, Homo sapiens
cgtgtgttaccaaagatgtgttatc

SEQ ID NO: 4074 - DNA, 25 bp, Homo sapiens
tgcctgcagcatggattctatattc

SEQ ID NO: 4075 - DNA, 25 bp, Homo sapiens
gcctcctggttctgtgcctttctac

SEQ ID NO: 4076 - DNA, 25 bp, Homo sapiens
tggaaaggagcccaacacctgtgtc

SEQ ID NO: 4077 - DNA, 25 bp, Homo sapiens
tgagataaacaaaatgtaccccctg

SEQ ID NO: 4078 - DNA, 25 bp, Homo sapiens
gagggacagcctaatgaaattatcc

SEQ ID NO: 4079 - DNA, 25 bp, Homo sapiens
gaggcttttccattgttgatcttga

SEQ ID NO: 4080 - DNA, 25 bp, Homo sapiens
ccctctttagttagaatgcacagga

SEQ ID NO: 4081 - DNA, 25 bp, Homo sapiens
gaaagaaacccagttgttaaaaaat

SEQ ID NO: 4082 - DNA, 25 bp, Homo sapiens
caatcttgggtaggcagttcagcta

SEQ ID NO: 4083 - DNA, 25 bp, Homo sapiens
agagtttccacagttcacattttga

SEQ ID NO: 4084 - DNA, 25 bp, Homo sapiens
actggcgctctctgccctaggaaca

SEQ ID NO: 4085 - DNA, 25 bp, Homo sapiens
cattcatttcgagttgggttaggac

SEQ ID NO: 4086 - DNA, 25 bp, Homo sapiens
cccatttttagctgtgtagtatttt

SEQ ID NO: 4087 - DNA, 25 bp, Homo sapiens
gccagtctgagcaaatgaaggttta

SEQ ID NO: 4088 - DNA, 25 bp, Homo sapiens
tggagagctcttgtacccaaaactc

SEQ ID NO: 4089 - DNA, 25 bp, Homo sapiens
aaagacctggtatgtggatgtcaca

SEQ ID NO: 4090 - DNA, 25 bp, Homo sapiens
gtgaaaagcacctagtgagcactca

SEQ ID NO: 4091 - DNA, 25 bp, Homo sapiens
gcacagtgacttagttgccacaaga

SEQ ID NO: 4092 - DNA, 25 bp, Homo sapiens
gggctcagctctaaacgccaagtta

SEQ ID NO: 4093 - DNA, 25 bp, Homo sapiens
cggctacagcctccacaggaaactg

SEQ ID NO: 4094 - DNA, 25 bp, Homo sapiens
tgtggattttcaggggccaacattg

SEQ ID NO: 4095 - DNA, 25 bp, Homo sapiens
ctttcactgaaagctgatggccttg

SEQ ID NO: 4096 - DNA, 25 bp, Homo sapiens
ggggaagtttcccaatgcttgctaa

SEQ ID NO: 4097 - DNA, 25 bp, Homo sapiens
ggtacttcaagctccctggtaaaga

SEQ ID NO: 4098 - DNA, 25 bp, Homo sapiens
ccaggaatggcgatggtgcttaatt

SEQ ID NO: 4099 - DNA, 25 bp, Homo sapiens
ttgcaggattgtccaactgagtctg

SEQ ID NO: 4100 - DNA, 25 bp, Homo sapiens
agtgccagccctaaaacttagtttg

SEQ ID NO: 4101 - DNA, 25 bp, Homo sapiens
ggtgctttctttactcccaggtgtt

SEQ ID NO: 4102 - DNA, 25 bp, Homo sapiens
ggctctgagctttatcctataggca

SEQ ID NO: 4103 - DNA, 25 bp, Homo sapiens
ctggggcttgtgtcatggcattaaa

SEQ ID NO: 4104 - DNA, 25 bp, Homo sapiens
gctaatttatgtcagtcaggccaga

SEQ ID NO: 4105 - DNA, 25 bp, Homo sapiens
agccaccgtctgtgctctacatata

SEQ ID NO: 4106 - DNA, 25 bp, Homo sapiens
ggctcagcagtttctgtctccatta

SEQ ID NO: 4107 - DNA, 25 bp, Homo sapiens
acgtccgtcctctttcttatccata

SEQ ID NO: 4108 - DNA, 25 bp, Homo sapiens
cgagggcaatttaaagcagcactga

SEQ ID NO: 4109 - DNA, 25 bp, Homo sapiens
tctgctgatttagctggccctcttc

SEQ ID NO: 4110 - DNA, 25 bp, Homo sapiens
cctcaaaaatgttaaaagcataaac

SEQ ID NO: 4111 - DNA, 25 bp, Homo sapiens
ttgcacctggtgtacttgaaaagtc

SEQ ID NO: 4112 - DNA, 25 bp, Homo sapiens
ctctggccctcgtttgtcatatttg

SEQ ID NO: 4113 - DNA, 25 bp, Homo sapiens
aatctgtgtgttaggcgaggcaacc

SEQ ID NO: 4114 - DNA, 25 bp, Homo sapiens
ctgtacctaccttggggaaatttcc

SEQ ID NO: 4115 - DNA, 25 bp, Homo sapiens
gtgcaaaaactaaatgaaccctaca

SEQ ID NO: 4116 - DNA, 25 bp, Homo sapiens
ctctgtctatgattgtggatatttc

SEQ ID NO: 4117 - DNA, 25 bp, Homo sapiens
tatatcatccaccttcagtctttca

SEQ ID NO: 4118 - DNA, 25 bp, Homo sapiens
aacggatctctgcttgggctgaata

SEQ ID NO: 4119 - DNA, 25 bp, Homo sapiens
cactagcagggaggactataataca

SEQ ID NO: 4120 - DNA, 25 bp, Homo sapiens
gcctgctggtctcctctctctaaga

SEQ ID NO: 4121 - DNA, 25 bp, Homo sapiens
taagaacatgcaacggcctggggcc

SEQ ID NO: 4122 - DNA, 25 bp, Homo sapiens
tggagctaccacaaggccatgcctt

SEQ ID NO: 4123 - DNA, 25 bp, Homo sapiens
ttgtaccaatgtgatgctgctctgc

SEQ ID NO: 4124 - DNA, 25 bp, Homo sapiens
caccggttcagtgcctaatgatgca

SEQ ID NO: 4125 - DNA, 25 bp, Homo sapiens
aatctattgttctctgggtggctca

SEQ ID NO: 4126 - DNA, 25 bp, Homo sapiens
tcctctgtttctggcttcattgttc

SEQ ID NO: 4127 - DNA, 25 bp, Homo sapiens
tggcttctgtttatctttctgaaac

SEQ ID NO: 4128 - DNA, 25 bp, Homo sapiens
gcagccactctttgttctgtgagaa

SEQ ID NO: 4129 - DNA, 25 bp, Homo sapiens
gaagggccttttttctcataagaca

SEQ ID NO: 4130 - DNA, 25 bp, Homo sapiens
cttgtgacccgtgaaacctaatctc

SEQ ID NO: 4131 - DNA, 25 bp, Homo sapiens
ggttcccttttgcttcctgctttga

SEQ ID NO: 4132 - DNA, 25 bp, Homo sapiens
cttgagtctcccagcttaccgggta

SEQ ID NO: 4133 - DNA, 25 bp, Homo sapiens
cattcctttatggattgcacatttg

SEQ ID NO: 4134 - DNA, 25 bp, Homo sapiens
tttcatgttttatataattttccct

SEQ ID NO: 4135 - DNA, 25 bp, Homo sapiens
gtatgttttattcactagtactttt

SEQ ID NO: 4136 - DNA, 25 bp, Homo sapiens
cccattggtctcatttcattaagta

SEQ ID NO: 4137 - DNA, 25 bp, Homo sapiens
tcaggtagtgagaagccacattttc

SEQ ID NO: 4138 - DNA, 25 bp, Homo sapiens
gagctcggcttgctttcacctgcta

SEQ ID NO: 4139 - DNA, 25 bp, Homo sapiens
gtgttaatattatcttacgtatcat

SEQ ID NO: 4140 - DNA, 25 bp, Homo sapiens
aactcatatgggtacctcgctaata

SEQ ID NO: 4141 - DNA, 25 bp, Homo sapiens
tcagggacatcatgaagtgtttaca

SEQ ID NO: 4142 - DNA, 25 bp, Homo sapiens
cctgatgactacctccaaattgcta

SEQ ID NO: 4143 - DNA, 25 bp, Homo sapiens
ctgcagtctgctagcaagaaatttc

SEQ ID NO: 4144 - DNA, 25 bp, Homo sapiens
tctggagaccagcacatactagttc

SEQ ID NO: 4145 - DNA, 25 bp, Homo sapiens
gtggtagtctcactcaccaaggaat

SEQ ID NO: 4146 - DNA, 25 bp, Homo sapiens
tactgggctcagaggtagaaacacc

SEQ ID NO: 4147 - DNA, 25 bp, Homo sapiens
ttccagccagcctgaaataatggtc

SEQ ID NO: 4148 - DNA, 25 bp, Homo sapiens
gacctctaggggctgtttgactttc

SEQ ID NO: 4149 - DNA, 25 bp, Homo sapiens
gaatcctctaatgggctgcagtata

SEQ ID NO: 4150 - DNA, 25 bp, Homo sapiens
tccttcggcgtgtcatgaaaacctc

SEQ ID NO: 4151 - DNA, 25 bp, Homo sapiens
tgtatagaccacactaggaccctga

SEQ ID NO: 4152 - DNA, 25 bp, Homo sapiens
gtcagctccttcctcacagtggttt

SEQ ID NO: 4153 - DNA, 25 bp, Homo sapiens
attccagagaaagtggcatcatccc

SEQ ID NO: 4154 - DNA, 25 bp, Homo sapiens
ttcaagtgtcccagctagactcaga

SEQ ID NO: 4155 - DNA, 25 bp, Homo sapiens
ggagagaggaagctcatccaactta

SEQ ID NO: 4156 - DNA, 25 bp, Homo sapiens
tgccatatcgccatgtcagcctaaa

SEQ ID NO: 4157 - DNA, 25 bp, Homo sapiens
ctacttcttcatttttattacaaat

SEQ ID NO: 4158 - DNA, 25 bp, Homo sapiens
tcctttgggcatagaagttattatc

SEQ ID NO: 4159 - DNA, 25 bp, Homo sapiens
tttttcaagggaaattgaaaaataa

SEQ ID NO: 4160 - DNA, 25 bp, Homo sapiens
cgcagctctgtctttccaggttaga

SEQ ID NO: 4161 - DNA, 25 bp, Homo sapiens
ccagggactcttgcaacacagctga

SEQ ID NO: 4162 - DNA, 25 bp, Homo sapiens
acagtcttccaaaatacgggattga

SEQ ID NO: 4163 - DNA, 25 bp, Homo sapiens
aagagaaatctgtacttgcctagtg

SEQ ID NO: 4164 - DNA, 25 bp, Homo sapiens
ttgggacacctttcatgactttgca

SEQ ID NO: 4165 - DNA, 25 bp, Homo sapiens
ctcctgggcatgtgggaacctcaaa

SEQ ID NO: 4166 - DNA, 25 bp, Homo sapiens
ctgcgtggtagttattgtaagcctc

SEQ ID NO: 4167 - DNA, 25 bp, Homo sapiens
tggaacttccggagtcagcttatga

SEQ ID NO: 4168 - DNA, 25 bp, Homo sapiens
cccaggttaaatgtgttaaagcaga

SEQ ID NO: 4169 - DNA, 25 bp, Homo sapiens
tctgggctggaatttctttaacata

SEQ ID NO: 4170 - DNA, 25 bp, Homo sapiens
ttccaaccttgactggcagatctga

SEQ ID NO: 4171 - DNA, 25 bp, Homo sapiens
ggcaggcattttggattctcactta

SEQ ID NO: 4172 - DNA, 25 bp, Homo sapiens
cccaaatgatctgtaggtgaaaact

SEQ ID NO: 4173 - DNA, 25 bp, Homo sapiens
cttccttaattttgtttatttctgt

SEQ ID NO: 4174 - DNA, 25 bp, Homo sapiens
gttccagtcatcagcaagcaatgtc

SEQ ID NO: 4175 - DNA, 25 bp, Homo sapiens
tcacgtctgtgccatgctgtcatgt

SEQ ID NO: 4176 - DNA, 25 bp, Homo sapiens
taagataggcttctgctcaccatgg

SEQ ID NO: 4177 - DNA, 25 bp, Homo sapiens
tatttagaatcaaggcactcatccc

SEQ ID NO: 4178 - DNA, 25 bp, Homo sapiens
cccagcagggtctttgtggttactc

SEQ ID NO: 4179 - DNA, 25 bp, Homo sapiens
tgctaggtcttatcaggaatcagta

SEQ ID NO: 4180 - DNA, 25 bp, Homo sapiens
gtaacgcttagaagacctggccatg

SEQ ID NO: 4181 - DNA, 25 bp, Homo sapiens
tctcctgaagctggaatagaggttc

SEQ ID NO: 4182 - DNA, 25 bp, Homo sapiens
tggtaccacgatcaggttgactgtc

SEQ ID NO: 4183 - DNA, 25 bp, Homo sapiens
tggaagcttgacctgatagtattta

SEQ ID NO: 4184 - DNA, 25 bp, Homo sapiens
ctgggttccagggagttgacaaacc

SEQ ID NO: 4185 - DNA, 25 bp, Homo sapiens
tgttccttggacacaccattagcta

SEQ ID NO: 4186 - DNA, 25 bp, Homo sapiens
gcagcactcactgggcaatcttttg

SEQ ID NO: 4187 - DNA, 25 bp, Homo sapiens
cacgattgaggagggagcatttata

SEQ ID NO: 4188 - DNA, 25 bp, Homo sapiens
agttttatataaatatacatacaga

SEQ ID NO: 4189 - DNA, 25 bp, Homo sapiens
tgagcatctgcagtgtatttttatc

SEQ ID NO: 4190 - DNA, 25 bp, Homo sapiens
ttcaaggttctactcatatggctca

SEQ ID NO: 4191 - DNA, 25 bp, Homo sapiens
cccgacatgatgcttaaggaaactg

SEQ ID NO: 4192 - DNA, 25 bp, Homo sapiens
caaaaagctctaaaagcttgtagtc

SEQ ID NO: 4193 - DNA, 25 bp, Homo sapiens
ttgtgactcaaatgcctgccctctg

SEQ ID NO: 4194 - DNA, 25 bp, Homo sapiens
gtgctttgcctaggtgttttctcag

SEQ ID NO: 4195 - DNA, 25 bp, Homo sapiens
tctccctataggtctttgtgcaagc

SEQ ID NO: 4196 - DNA, 25 bp, Homo sapiens
tacactggccatagcagaagcttgc

SEQ ID NO: 4197 - DNA, 25 bp, Homo sapiens
ctgggctctgatctcatatatttga

SEQ ID NO: 4198 - DNA, 25 bp, Homo sapiens
ggaggcggccttatagatccattca

SEQ ID NO: 4199 - DNA, 25 bp, Homo sapiens
actggcttgagcattaactccttga

SEQ ID NO: 4200 - DNA, 25 bp, Homo sapiens
accatagccattttgaactgagaga

SEQ ID NO: 4201 - DNA, 25 bp, Homo sapiens
gacactgaccttttctagagccata

SEQ ID NO: 4202 - DNA, 25 bp, Homo sapiens
cctgaccatgaattcaaggggcctg

SEQ ID NO: 4203 - DNA, 25 bp, Homo sapiens
ccctctgcttgtatggctgtaactc

SEQ ID NO: 4204 - DNA, 25 bp, Homo sapiens
gctcaaaggttctgggagatgcttc

SEQ ID NO: 4205 - DNA, 25 bp, Homo sapiens
cagagactagtctttgccatacata

SEQ ID NO: 4206 - DNA, 25 bp, Homo sapiens
ccacccggaggtttgtgcagcaata

SEQ ID NO: 4207 - DNA, 25 bp, Homo sapiens
ctagggtgggtattcatccaatttc

SEQ ID NO: 4208 - DNA, 25 bp, Homo sapiens
cacagtgctccaggatactaccaga

SEQ ID NO: 4209 - DNA, 25 bp, Homo sapiens
aggacctcaggtgcctcaaactcag

SEQ ID NO: 4210 - DNA, 25 bp, Homo sapiens
agtctccagatacagcacgcaattg

SEQ ID NO: 4211 - DNA, 25 bp, Homo sapiens
tgggccactgtgcacatttgtataa

SEQ ID NO: 4212 - DNA, 25 bp, Homo sapiens
gaagttgaatacaggagaaacccat

SEQ ID NO: 4213 - DNA, 25 bp, Homo sapiens
ttcttcagggaacatcaaacggatc

SEQ ID NO: 4214 - DNA, 25 bp, Homo sapiens
cccaccagtcatggaggaggtctta

SEQ ID NO: 4215 - DNA, 25 bp, Homo sapiens
gtgagagggtggtacataaaggtgg

SEQ ID NO: 4216 - DNA, 25 bp, Homo sapiens
ggtccaggtcttacctcagtttcta

SEQ ID NO: 4217 - DNA, 25 bp, Homo sapiens
ccagggtctcttttcagcaagctga

SEQ ID NO: 4218 - DNA, 25 bp, Homo sapiens
acatggactgtctgctctcggtacc

SEQ ID NO: 4219 - DNA, 25 bp, Homo sapiens
gtctgaggtaaagctgcatagtgca

SEQ ID NO: 4220 - DNA, 25 bp, Homo sapiens
gttttccaatgctgccaccaagaga

SEQ ID NO: 4221 - DNA, 25 bp, Homo sapiens
tgtctagctgccctgtactcaaact

SEQ ID NO: 4222 - DNA, 25 bp, Homo sapiens
cactctgtcttttgctgggaaaata

SEQ ID NO: 4223 - DNA, 25 bp, Homo sapiens
gttatgtatactttggaaattataa

SEQ ID NO: 4224 - DNA, 25 bp, Homo sapiens
tagagtaccctatagttgcattgca

SEQ ID NO: 4225 - DNA, 25 bp, Homo sapiens
tgctctaaagcacagaaccaggtta

SEQ ID NO: 4226 - DNA, 25 bp, Homo sapiens
gcacctccaggaagtacaacagtta

SEQ ID NO: 4227 - DNA, 25 bp, Homo sapiens
agtagctgggtcttgatctcttctc

SEQ ID NO: 4228 - DNA, 25 bp, Homo sapiens
tggggaatatctacttgatgccttg

SEQ ID NO: 4229 - DNA, 25 bp, Homo sapiens
tgggaatccaggaaccgataagatc

SEQ ID NO: 4230 - DNA, 25 bp, Homo sapiens
cagactcttagtttttgggcagcca

SEQ ID NO: 4231 - DNA, 25 bp, Homo sapiens
aaccatttgtacttcctattcgggg

SEQ ID NO: 4232 - DNA, 25 bp, Homo sapiens
gggtcactcttttgaacctacgtgc

SEQ ID NO: 4233 - DNA, 25 bp, Homo sapiens
gcatgtgagtagaagcttgacagta

SEQ ID NO: 4234 - DNA, 25 bp, Homo sapiens
tcctcttagtaatggtgcctccata

SEQ ID NO: 4235 - DNA, 25 bp, Homo sapiens
gaacaccctggttatgcagctcaga

SEQ ID NO: 4236 - DNA, 25 bp, Homo sapiens
gggaccgcctacttttcaacatgtg

SEQ ID NO: 4237 - DNA, 25 bp, Homo sapiens
tgtatatcccttcgagtcctggcca

SEQ ID NO: 4238 - DNA, 25 bp, Homo sapiens
gccctcatgttcagagcccaggata

SEQ ID NO: 4239 - DNA, 25 bp, Homo sapiens
cttttgcatagaggggtgttaattc

SEQ ID NO: 4240 - DNA, 25 bp, Homo sapiens
ggcagcccgttgtgtatttggataa

SEQ ID NO: 4241 - DNA, 25 bp, Homo sapiens
tgtgccctgtcctgaagaaagaatg

SEQ ID NO: 4242 - DNA, 25 bp, Homo sapiens
tgcaatgcctgacactggaaccctg

SEQ ID NO: 4243 - DNA, 25 bp, Homo sapiens
agtatcctgattctacccgtggcta

SEQ ID NO: 4244 - DNA, 25 bp, Homo sapiens
tggccagaccttgctctttgaaaca

SEQ ID NO: 4245 - DNA, 25 bp, Homo sapiens
ctcacacacgtagcccaatggattg

SEQ ID NO: 4246 - DNA, 25 bp, Homo sapiens
gctggactactttttcctgtgtgta

SEQ ID NO: 4247 - DNA, 25 bp, Homo sapiens
ggttcatccctcacctgccagagtg

SEQ ID NO: 4248 - DNA, 25 bp, Homo sapiens
ggctgcccagtagttcaaatgaatt

SEQ ID NO: 4249 - DNA, 25 bp, Homo sapiens
tgtattctcttcactgggattagcc

SEQ ID NO: 4250 - DNA, 25 bp, Homo sapiens
tcaagagcccactgctggaccaatc

SEQ ID NO: 4251 - DNA, 25 bp, Homo sapiens
cctgggagcagttccgacatacttt

SEQ ID NO: 4252 - DNA, 25 bp, Homo sapiens
gctgcactatctctgctttgggata

SEQ ID NO: 4253 - DNA, 25 bp, Homo sapiens
tttcgaatttgggtgcagacacatc

SEQ ID NO: 4254 - DNA, 25 bp, Homo sapiens
ggtgccaaagtcctacctgctgata

SEQ ID NO: 4255 - DNA, 25 bp, Homo sapiens
atgtcctcaccaaccacagagcgtg

SEQ ID NO: 4256 - DNA, 25 bp, Homo sapiens
cggcactgtctggtactagtctaaa

SEQ ID NO: 4257 - DNA, 25 bp, Homo sapiens
aggctttccaatacctctcaggtgg

SEQ ID NO: 4258 - DNA, 25 bp, Homo sapiens
gttgtcctggtgtatgcctccttta

SEQ ID NO: 4259 - DNA, 25 bp, Homo sapiens
tcaccggagctgtgcttacactaca

SEQ ID NO: 4260 - DNA, 25 bp, Homo sapiens
gtaaggcactgctatattttctaga

SEQ ID NO: 4261 - DNA, 25 bp, Homo sapiens
tgttaaaatgctttttaaagttatt

SEQ ID NO: 4262 - DNA, 25 bp, Homo sapiens
tggttgtgttctgaaaatatatttt

SEQ ID NO: 4263 - DNA, 25 bp, Homo sapiens
gccatggctgtacaaacctcagttt

SEQ ID NO: 4264 - DNA, 25 bp, Homo sapiens
tcctgggagcctttacaaattttac

SEQ ID NO: 4265 - DNA, 25 bp, Homo sapiens
ggtgagctttttcttatcctgaatg

SEQ ID NO: 4266 - DNA, 25 bp, Homo sapiens
aagggcattcctcatctgtgacgca

SEQ ID NO: 4267 - DNA, 25 bp, Homo sapiens
aggtgtcacgaactctaatgggtac

SEQ ID NO: 4268 - DNA, 25 bp, Homo sapiens
tgctcagtattaacaggaagcctca

SEQ ID NO: 4269 - DNA, 25 bp, Homo sapiens
caacaccttgttcctaccagagctg

SEQ ID NO: 4270 - DNA, 25 bp, Homo sapiens
ctggaataaactattaaactgacaa

SEQ ID NO: 4271 - DNA, 25 bp, Homo sapiens
cggggacgtttaacacctacttttc

SEQ ID NO: 4272 - DNA, 25 bp, Homo sapiens
catggtgctgtccttcagaagatta

SEQ ID NO: 4273 - DNA, 25 bp, Homo sapiens
ttccacggcaaagcagagcatagta

SEQ ID NO: 4274 - DNA, 25 bp, Homo sapiens
ttctggtcaacagggcagtctgcta

SEQ ID NO: 4275 - DNA, 25 bp, Homo sapiens
ctgcacgagttaggccagaaacttc

SEQ ID NO: 4276 - DNA, 25 bp, Homo sapiens
gggatccattcttgggtgtaaaaca

SEQ ID NO: 4277 - DNA, 25 bp, Homo sapiens
agcgcccgcgggaatttttctctta

SEQ ID NO: 4278 - DNA, 25 bp, Homo sapiens
gggtgagtcccagaacctcgctatg

SEQ ID NO: 4279 - DNA, 25 bp, Homo sapiens
atcgtgcaggtcttctccagaacaa

SEQ ID NO: 4280 - DNA, 25 bp, Homo sapiens
cttctgtaacagtggcattccctta

SEQ ID NO: 4281 - DNA, 25 bp, Homo sapiens
tcctcagtgtagagtgtgaaaaacc

SEQ ID NO: 4282 - DNA, 25 bp, Homo sapiens
accctgtctggctctatgatttata

SEQ ID NO: 4283 - DNA, 25 bp, Homo sapiens
ccaatagcagtttcttccacagtga

SEQ ID NO: 4284 - DNA, 25 bp, Homo sapiens
ctgttgatttgggtaactgtagctg

SEQ ID NO: 4285 - DNA, 25 bp, Homo sapiens
tttcagggcaaacaaagtagacgta

SEQ ID NO: 4286 - DNA, 25 bp, Homo sapiens
atatgcaaataagcatgtgcatatt

SEQ ID NO: 4287 - DNA, 25 bp, Homo sapiens
ctgaatctttctgctagggctctta

SEQ ID NO: 4288 - DNA, 25 bp, Homo sapiens
aacaaataaaatgaggataataata

SEQ ID NO: 4289 - DNA, 25 bp, Homo sapiens
ggcactccttgttgtataagacata

SEQ ID NO: 4290 - DNA, 25 bp, Homo sapiens
aaatctccttttttcttatcttaat

SEQ ID NO: 4291 - DNA, 25 bp, Homo sapiens
ctgggttgaccaagactcctgcata

SEQ ID NO: 4292 - DNA, 25 bp, Homo sapiens
tataatagaagttgaaataaaaatg

SEQ ID NO: 4293 - DNA, 25 bp, Homo sapiens
ggccatttctgcacttgggacaaca

SEQ ID NO: 4294 - DNA, 25 bp, Homo sapiens
cgattattgaagttctaaaacaaaa

SEQ ID NO: 4295 - DNA, 25 bp, Homo sapiens
tacaggtgttcaagccaatgttacc

SEQ ID NO: 4296 - DNA, 25 bp, Homo sapiens
agaatggtgatagaatcagattctc

SEQ ID NO: 4297 - DNA, 25 bp, Homo sapiens
gagcactccattcgtctgtctattg

SEQ ID NO: 4298 - DNA, 25 bp, Homo sapiens
accactgcaagtgttgttcaaagca

SEQ ID NO: 4299 - DNA, 25 bp, Homo sapiens
ttttaaaaaggatttctttcatcag

SEQ ID NO: 4300 - DNA, 25 bp, Homo sapiens
ctctacttgaactaggggccctgtg

SEQ ID NO: 4301 - DNA, 25 bp, Homo sapiens
cccagcacgatatacagaggaggtg

SEQ ID NO: 4302 - DNA, 25 bp, Homo sapiens
gggctgctctgtaacattccatgta

SEQ ID NO: 4303 - DNA, 25 bp, Homo sapiens
tgccactttgtgctgctcttatctc

SEQ ID NO: 4304 - DNA, 25 bp, Homo sapiens
gcctgaatctgctctgcccacttga

SEQ ID NO: 4305 - DNA, 25 bp, Homo sapiens
ttcccagttgaagtagttgacatta

SEQ ID NO: 4306 - DNA, 25 bp, Homo sapiens
ccaaattttattaactctttttgaa

SEQ ID NO: 4307 - DNA, 25 bp, Homo sapiens
ggcctgggtggtattcttactacta

SEQ ID NO: 4308 - DNA, 25 bp, Homo sapiens
ctggagctgcctctgcaagcaatta

SEQ ID NO: 4309 - DNA, 25 bp, Homo sapiens
cctgcaggctgtaaatagtgtgttc

SEQ ID NO: 4310 - DNA, 25 bp, Homo sapiens
ataccttaaactacagttttagttt

SEQ ID NO: 4311 - DNA, 25 bp, Homo sapiens
ttatggtattatttttaactttgtt

SEQ ID NO: 4312 - DNA, 25 bp, Homo sapiens
gggagtgtcctctttcctatcacaa

SEQ ID NO: 4313 - DNA, 25 bp, Homo sapiens
tgggctctgccagcaacgtatactc

SEQ ID NO: 4314 - DNA, 25 bp, Homo sapiens
gcactcttttgcaggacattttcca

SEQ ID NO: 4315 - DNA, 25 bp, Homo sapiens
ccagaaacaaggcagggtaccatta

SEQ ID NO: 4316 - DNA, 25 bp, Homo sapiens
agtgcctttaagaaacagtgatgta

SEQ ID NO: 4317 - DNA, 25 bp, Homo sapiens
tcacttccagtattttccctatgat

SEQ ID NO: 4318 - DNA, 25 bp, Homo sapiens
ccttctaagggaatcttgtgggtta

SEQ ID NO: 4319 - DNA, 25 bp, Homo sapiens
gaggactagggcctcactggaggaa

SEQ ID NO: 4320 - DNA, 25 bp, Homo sapiens
ggttgagactctccaaagtagtgtc

SEQ ID NO: 4321 - DNA, 25 bp, Homo sapiens
ttggcagactagaggtgagtatttc

SEQ ID NO: 4322 - DNA, 25 bp, Homo sapiens
ttgcagctgctgtgttccattgtta

SEQ ID NO: 4323 - DNA, 25 bp, Homo sapiens
tctgagaagtgctgtcctaatgata

SEQ ID NO: 4324 - DNA, 25 bp, Homo sapiens
tggattatccaaccctctagcctgt

SEQ ID NO: 4325 - DNA, 25 bp, Homo sapiens
caccaatgccttttgtggataccta

SEQ ID NO: 4326 - DNA, 25 bp, Homo sapiens
tcaacagatgtattcggtaagcata

SEQ ID NO: 4327 - DNA, 25 bp, Homo sapiens
gattatgtagaaagagtgctactct

SEQ ID NO: 4328 - DNA, 25 bp, Homo sapiens
aggctccatttgtgccaaggttaaa

SEQ ID NO: 4329 - DNA, 25 bp, Homo sapiens
ctagtgcctagaagatgctgctgta

SEQ ID NO: 4330 - DNA, 25 bp, Homo sapiens
tggggcagttccagtaacccttttc

SEQ ID NO: 4331 - DNA, 25 bp, Homo sapiens
ttaaattgatataatcctgcaatat

SEQ ID NO: 4332 - DNA, 25 bp, Homo sapiens
gcacagttggtttcagcaaagatca

SEQ ID NO: 4333 - DNA, 25 bp, Homo sapiens
tctggtccagatccacagccttagg

SEQ ID NO: 4334 - DNA, 25 bp, Homo sapiens
tctaagctgttctggggcagtactc

SEQ ID NO: 4335 - DNA, 25 bp, Homo sapiens
caactgcagttggtggaaaccttca

SEQ ID NO: 4336 - DNA, 25 bp, Homo sapiens
cttactaaagagattctcttcaaag

SEQ ID NO: 4337 - DNA, 25 bp, Homo sapiens
tgctgaatgcccaagaatgtacctc

SEQ ID NO: 4338 - DNA, 25 bp, Homo sapiens
tccaagtgtgttgacagaagttcca

SEQ ID NO: 4339 - DNA, 25 bp, Homo sapiens
gtgtgtgccacatgaatagtcccta

SEQ ID NO: 4340 - DNA, 25 bp, Homo sapiens
cagtgctttgatctctgtgtgtgtg

SEQ ID NO: 4341 - DNA, 25 bp, Homo sapiens
aggccaactttgaccttgagaatgc

SEQ ID NO: 4342 - DNA, 25 bp, Homo sapiens
ttattgttgagaaacgtattttaca

SEQ ID NO: 4343 - DNA, 25 bp, Homo sapiens
gttttattcgagctccacacatgtg

SEQ ID NO: 4344 - DNA, 25 bp, Homo sapiens
ttttttttttcacatgtgggataag

SEQ ID NO: 4345 - DNA, 25 bp, Homo sapiens
tgagctcctgtcctgcattgaattt

SEQ ID NO: 4346 - DNA, 25 bp, Homo sapiens
cccgggatgtggtatctgaaacttt

SEQ ID NO: 4347 - DNA, 25 bp, Homo sapiens
agccttatcatgagccattcccttg

SEQ ID NO: 4348 - DNA, 25 bp, Homo sapiens
ggcatttttagaaccacctggaata

SEQ ID NO: 4349 - DNA, 25 bp, Homo sapiens
agtgcggcctcctgtgaaaatgacc

SEQ ID NO: 4350 - DNA, 25 bp, Homo sapiens
tatgcactcccacatcaggatggtg

SEQ ID NO: 4351 - DNA, 25 bp, Homo sapiens
gttccctgagaacacacctgttaag

SEQ ID NO: 4352 - DNA, 25 bp, Homo sapiens
agcactggcatatgggcacttttga

SEQ ID NO: 4353 - DNA, 25 bp, Homo sapiens
agaaaaaaagaaaagtcagaaagca

SEQ ID NO: 4354 - DNA, 25 bp, Homo sapiens
tgtgcccttaggtcaaatgcttaaa

SEQ ID NO: 4355 - DNA, 25 bp, Homo sapiens
caaaatgacctattgatttgaagaa

SEQ ID NO: 4356 - DNA, 25 bp, Homo sapiens
agttgtgcccactctgtacaaagtc

SEQ ID NO: 4357 - DNA, 25 bp, Homo sapiens
gccttggcatatctaaaattgttga

SEQ ID NO: 4358 - DNA, 25 bp, Homo sapiens
gggctacttgctctacatctgtcta

SEQ ID NO: 4359 - DNA, 25 bp, Homo sapiens
tctggaacatcactgcgcacatacc

SEQ ID NO: 4360 - DNA, 25 bp, Homo sapiens
agggtgtccttagattctgagattc

SEQ ID NO: 4361 - DNA, 25 bp, Homo sapiens
tcagcccagggacaattattttttc

SEQ ID NO: 4362 - DNA, 25 bp, Homo sapiens
actcacattttttcactcagtacat

SEQ ID NO: 4363 - DNA, 25 bp, Homo sapiens
cctgaacactggcacatagaatctg

SEQ ID NO: 4364 - DNA, 25 bp, Homo sapiens
tgagcttcgttaacttcttgcatgg

SEQ ID NO: 4365 - DNA, 25 bp, Homo sapiens
gtgatttctttcctctttgacttgc

SEQ ID NO: 4366 - DNA, 25 bp, Homo sapiens
ccactcccagtgatggtcttcctta

SEQ ID NO: 4367 - DNA, 25 bp, Homo sapiens
ctatatgctacttttccttctgtct

SEQ ID NO: 4368 - DNA, 25 bp, Homo sapiens
gcaggctcacgtcccaaaactagta

SEQ ID NO: 4369 - DNA, 25 bp, Homo sapiens
ctttgacttgtagctcagggactta

SEQ ID NO: 4370 - DNA, 25 bp, Homo sapiens
gccctgagggatacatgttcattta

SEQ ID NO: 4371 - DNA, 25 bp, Homo sapiens
gatgtgcccttcttcttgagggcat

SEQ ID NO: 4372 - DNA, 25 bp, Homo sapiens
tggctttagcaatggcaatctcttc

SEQ ID NO: 4373 - DNA, 25 bp, Homo sapiens
agaaaactcctccatatgctgccga

SEQ ID NO: 4374 - DNA, 25 bp, Homo sapiens
tggagtccaatgtgatcaaccaatc

SEQ ID NO: 4375 - DNA, 25 bp, Homo sapiens
ggtcaactcccagcaggccaatttt

SEQ ID NO: 4376 - DNA, 25 bp, Homo sapiens
gcctctctattaacaaccttaggga

SEQ ID NO: 4377 - DNA, 25 bp, Homo sapiens
agaacaggtattattattctactcc

SEQ ID NO: 4378 - DNA, 25 bp, Homo sapiens
tacttatgaaattctccctgacccg

SEQ ID NO: 4379 - DNA, 25 bp, Homo sapiens
atcctccatgatacaacttgcagtg

SEQ ID NO: 4380 - DNA, 25 bp, Homo sapiens
ctgtgtaagcagtagatcgggaata

SEQ ID NO: 4381 - DNA, 25 bp, Homo sapiens
gcatctgtctcactagggtctttta

SEQ ID NO: 4382 - DNA, 25 bp, Homo sapiens
gggatcccagggtacatgtctttca

SEQ ID NO: 4383 - DNA, 25 bp, Homo sapiens
ttccaggatggcctcttgtacatga

SEQ ID NO: 4384 - DNA, 25 bp, Homo sapiens
tatacctggccatagatagtgctcc

SEQ ID NO: 4385 - DNA, 25 bp, Homo sapiens
tcacaagggaaaggccaagctcatc

SEQ ID NO: 4386 - DNA, 25 bp, Homo sapiens
gggttacagtggtatcgctctttca

SEQ ID NO: 4387 - DNA, 25 bp, Homo sapiens
gagctgcacgtcaacctagggttta

SEQ ID NO: 4388 - DNA, 25 bp, Homo sapiens
ggggaatatgctacacctcactgaa

SEQ ID NO: 4389 - DNA, 25 bp, Homo sapiens
cctgatgcttgtttatggtggtaca

SEQ ID NO: 4390 - DNA, 25 bp, Homo sapiens
ttctgcccctggccccttctcatgt

SEQ ID NO: 4391 - DNA, 25 bp, Homo sapiens
tgcatttataactagtccactactc

SEQ ID NO: 4392 - DNA, 25 bp, Homo sapiens
gccaaggttcccaaagatagcagta

SEQ ID NO: 4393 - DNA, 25 bp, Homo sapiens
tcacggtgaagccaacttgtattgc

SEQ ID NO: 4394 - DNA, 25 bp, Homo sapiens
aggagttgggttttacacgtttata

SEQ ID NO: 4395 - DNA, 25 bp, Homo sapiens
taatatttgtaggaaaaatgacaga

SEQ ID NO: 4396 - DNA, 25 bp, Homo sapiens
gggagtgtctcctttctgcattaaa

SEQ ID NO: 4397 - DNA, 25 bp, Homo sapiens
ccttgtatcagtaggcatgcaattc

SEQ ID NO: 4398 - DNA, 25 bp, Homo sapiens
ctcagaagtgctataggactattta

SEQ ID NO: 4399 - DNA, 25 bp, Homo sapiens
ggggcttagtgctacttgataaata

SEQ ID NO: 4400 - DNA, 25 bp, Homo sapiens
ttctgaaagaccgtgccacaatctg

SEQ ID NO: 4401 - DNA, 25 bp, Homo sapiens
gcccaggtgccttattatttccaga

SEQ ID NO: 4402 - DNA, 25 bp, Homo sapiens
ggtaggacccttgcagcctctaatc

SEQ ID NO: 4403 - DNA, 25 bp, Homo sapiens
cctctcccaggcaaagacgatggta

SEQ ID NO: 4404 - DNA, 25 bp, Homo sapiens
gggctaaccacagtaataacactta

SEQ ID NO: 4405 - DNA, 25 bp, Homo sapiens
ttcgggccttcttgatccagttttc

SEQ ID NO: 4406 - DNA, 25 bp, Homo sapiens
tggaggcccagagactaatttattt

SEQ ID NO: 4407 - DNA, 25 bp, Homo sapiens
ccagttgtgcctatggttcctagta

SEQ ID NO: 4408 - DNA, 25 bp, Homo sapiens
gagtctcagtttagcccttcacagg

SEQ ID NO: 4409 - DNA, 25 bp, Homo sapiens
cctgttgtctctatcacggtacttg

SEQ ID NO: 4410 - DNA, 25 bp, Homo sapiens
tatatgtatgtatattctaatatct

SEQ ID NO: 4411 - DNA, 25 bp, Homo sapiens
cagtcagttttttctctagtcagga

SEQ ID NO: 4412 - DNA, 25 bp, Homo sapiens
gctgccgttgttaggagaaaaagta

SEQ ID NO: 4413 - DNA, 25 bp, Homo sapiens
gctcacaaattctggggtttaaacc

SEQ ID NO: 4414 - DNA, 25 bp, Homo sapiens
gcctggtcccataggatactaaatt

SEQ ID NO: 4415 - DNA, 25 bp, Homo sapiens
ttccgaaaggcagaggcaccacatg

SEQ ID NO: 4416 - DNA, 25 bp, Homo sapiens
tgtcggctggcttttgtactacacc

SEQ ID NO: 4417 - DNA, 25 bp, Homo sapiens
tactttggctggctcatggtgatcc

SEQ ID NO: 4418 - DNA, 25 bp, Homo sapiens
ggcgatgccttttcagtagttttta

SEQ ID NO: 4419 - DNA, 25 bp, Homo sapiens
gatagcgccatgcatactctcagta

SEQ ID NO: 4420 - DNA, 25 bp, Homo sapiens
ccctgctctacagtactgaggaagc

SEQ ID NO: 4421 - DNA, 25 bp, Homo sapiens
agctgcctgtatctcttatttgtta

SEQ ID NO: 4422 - DNA, 25 bp, Homo sapiens
tgtcttcaagcaaggcatgattttc

SEQ ID NO: 4423 - DNA, 25 bp, Homo sapiens
gggttaggcaagtctcacatcagtg

SEQ ID NO: 4424 - DNA, 25 bp, Homo sapiens
gactgaatcattccctagaggcata

SEQ ID NO: 4425 - DNA, 25 bp, Homo sapiens
agggcttttgaggattgactttcta

SEQ ID NO: 4426 - DNA, 25 bp, Homo sapiens
ttatagaggccaaaaaagaaaaaca

SEQ ID NO: 4427 - DNA, 25 bp, Homo sapiens
tagggcctggagtttctttcacttt

SEQ ID NO: 4428 - DNA, 25 bp, Homo sapiens
ttgcgaggcctatactgtgtccgtc

SEQ ID NO: 4429 - DNA, 25 bp, Homo sapiens
ctctggcagtcgttatgcctcaaca

SEQ ID NO: 4430 - DNA, 25 bp, Homo sapiens
ggggtagtctgaatacttaaccttg

SEQ ID NO: 4431 - DNA, 25 bp, Homo sapiens
cctggagtgactaaagagagcaatt

SEQ ID NO: 4432 - DNA, 25 bp, Homo sapiens
tttgagtctttctagggtgcccttg

SEQ ID NO: 4433 - DNA, 25 bp, Homo sapiens
ccctagctgctatggaagttgactg

SEQ ID NO: 4434 - DNA, 25 bp, Homo sapiens
attactccagaacactgctccctaa

SEQ ID NO: 4435 - DNA, 25 bp, Homo sapiens
ttcgaggggatctgtctgttacttc

SEQ ID NO: 4436 - DNA, 25 bp, Homo sapiens
aggctgcctggcttttctataagtg

SEQ ID NO: 4437 - DNA, 25 bp, Homo sapiens
aggtctatatctgctttggtctatg

SEQ ID NO: 4438 - DNA, 25 bp, Homo sapiens
gagactgcatggcttcacatttttg

SEQ ID NO: 4439 - DNA, 25 bp, Homo sapiens
tttggaattcagtgtcaggtacctc

SEQ ID NO: 4440 - DNA, 25 bp, Homo sapiens
tcctgcgcaagtagaaggttaacta

SEQ ID NO: 4441 - DNA, 25 bp, Homo sapiens
ggagcaatatcttccgcaagctaga

SEQ ID NO: 4442 - DNA, 25 bp, Homo sapiens
tgtatctccctttcagcccttttgg

SEQ ID NO: 4443 - DNA, 25 bp, Homo sapiens
catggcttagcctcaactgggatta

SEQ ID NO: 4444 - DNA, 25 bp, Homo sapiens
cccagagctgcttatgcttgtaaca

SEQ ID NO: 4445 - DNA, 25 bp, Homo sapiens
gcctctggagttagactgctgttta

SEQ ID NO: 4446 - DNA, 25 bp, Homo sapiens
gggtctcttcacgactgcttgctca

SEQ ID NO: 4447 - DNA, 25 bp, Homo sapiens
ttcagccatacaggaaaagttcagg

SEQ ID NO: 4448 - DNA, 25 bp, Homo sapiens
atgaaaatacgttatctactacttg

SEQ ID NO: 4449 - DNA, 25 bp, Homo sapiens
attgaaaggaaactagagatttagt

SEQ ID NO: 4450 - DNA, 25 bp, Homo sapiens
tttgtttaagctggaagaaaaaata

SEQ ID NO: 4451 - DNA, 25 bp, Homo sapiens
ttagagttgtctaaggcacctttga

SEQ ID NO: 4452 - DNA, 25 bp, Homo sapiens
ctcaatagcagatcagggaaggctt

SEQ ID NO: 4453 - DNA, 25 bp, Homo sapiens
tgagacttgttatttgcacctagca

SEQ ID NO: 4454 - DNA, 25 bp, Homo sapiens
tctaactaaatatagctggttattg

SEQ ID NO: 4455 - DNA, 25 bp, Homo sapiens
ttatttctatcaaattgcaaagctg

SEQ ID NO: 4456 - DNA, 25 bp, Homo sapiens
ttaccaaggccttcatactctcttg

SEQ ID NO: 4457 - DNA, 25 bp, Homo sapiens
gaaagagattgtgcccccctttcca

SEQ ID NO: 4458 - DNA, 25 bp, Homo sapiens
atctgcagtattaaaggggcactta

SEQ ID NO: 4459 - DNA, 25 bp, Homo sapiens
atatcagttttactggtttgatatt

SEQ ID NO: 4460 - DNA, 25 bp, Homo sapiens
tcttcagtgagggaacatatacttc

SEQ ID NO: 4461 - DNA, 25 bp, Homo sapiens
actgacagcctcttatacacattgc

SEQ ID NO: 4462 - DNA, 25 bp, Homo sapiens
tttgcaggaagaagagctccaattc

SEQ ID NO: 4463 - DNA, 25 bp, Homo sapiens
ggtatgaccggttattgccctttta

SEQ ID NO: 4464 - DNA, 25 bp, Homo sapiens
tagattcagggaacataacagcttc

SEQ ID NO: 4465 - DNA, 25 bp, Homo sapiens
gaccttagcttcctttgtctgtgaa

SEQ ID NO: 4466 - DNA, 25 bp, Homo sapiens
gctttccaagatctagtgaggtatt

SEQ ID NO: 4467 - DNA, 25 bp, Homo sapiens
caggcagagatcagtccagaatgtc

SEQ ID NO: 4468 - DNA, 25 bp, Homo sapiens
gccacggccactgaatgcaacttta

SEQ ID NO: 4469 - DNA, 25 bp, Homo sapiens
agggcagcgtgtcttgaatttctca

SEQ ID NO: 4470 - DNA, 25 bp, Homo sapiens
aggctgtgtacccatgaatattaga

SEQ ID NO: 4471 - DNA, 25 bp, Homo sapiens
ccaggtggataactgatatcgttta

SEQ ID NO: 4472 - DNA, 25 bp, Homo sapiens
tccagtcctgttctccttttgaagg

SEQ ID NO: 4473 - DNA, 25 bp, Homo sapiens
tgtcttgtcacacccagtgggagtt

SEQ ID NO: 4474 - DNA, 25 bp, Homo sapiens
gaccagggtctagttgctacagtaa

SEQ ID NO: 4475 - DNA, 25 bp, Homo sapiens
accacgggtccttattttgaaaaga

SEQ ID NO: 4476 - DNA, 25 bp, Homo sapiens
tacgggagctcactggagttcaatg

SEQ ID NO: 4477 - DNA, 25 bp, Homo sapiens
tgcaagcaggtcactaattggcctc

SEQ ID NO: 4478 - DNA, 25 bp, Homo sapiens
taaactaattttaaatatcatttgg

SEQ ID NO: 4479 - DNA, 25 bp, Homo sapiens
ctgcaggactgtgtatggtgacttt

SEQ ID NO: 4480 - DNA, 25 bp, Homo sapiens
gtgcagtactagagcattggttttt

SEQ ID NO: 4481 - DNA, 25 bp, Homo sapiens
tctgtagttcttcccatctgtttaa

SEQ ID NO: 4482 - DNA, 25 bp, Homo sapiens
aaaaaaaaaatctgataatcagttc

SEQ ID NO: 4483 - DNA, 25 bp, Homo sapiens
gcaggatactttttgcacccaaaga

SEQ ID NO: 4484 - DNA, 25 bp, Homo sapiens
tcgctaacctactgtgagaccactg

SEQ ID NO: 4485 - DNA, 25 bp, Homo sapiens
acaactgtacaggtttggccctcta

SEQ ID NO: 4486 - DNA, 25 bp, Homo sapiens
ggcatgtgggaactatcatctacta

SEQ ID NO: 4487 - DNA, 25 bp, Homo sapiens
aacctaggagtggaaatacttaacc

SEQ ID NO: 4488 - DNA, 25 bp, Homo sapiens
ggagtcttcattcccagctagttga

SEQ ID NO: 4489 - DNA, 25 bp, Homo sapiens
actgtatgtatgaaaacttaccgtg

SEQ ID NO: 4490 - DNA, 25 bp, Homo sapiens
cttgctggaccatggccttaaatca

SEQ ID NO: 4491 - DNA, 25 bp, Homo sapiens
ttggccttctacatgagatacctgg

SEQ ID NO: 4492 - DNA, 25 bp, Homo sapiens
ggatttattaggcattttacttata

SEQ ID NO: 4493 - DNA, 25 bp, Homo sapiens
acagttcaatctcgaggtgttttta

SEQ ID NO: 4494 - DNA, 25 bp, Homo sapiens
aggccctgtttctgtgttgatgtca

SEQ ID NO: 4495 - DNA, 25 bp, Homo sapiens
tgcatatggcaacaggatttatctc

SEQ ID NO: 4496 - DNA, 25 bp, Homo sapiens
ctccctgtttggtttcttgaggata

SEQ ID NO: 4497 - DNA, 25 bp, Homo sapiens
agtctcagtgatcgttccagctatc

SEQ ID NO: 4498 - DNA, 25 bp, Homo sapiens
accgtgaaagcatagtgagtgtaca

SEQ ID NO: 4499 - DNA, 25 bp, Homo sapiens
tgcttagttgatagaccacttgtga

SEQ ID NO: 4500 - DNA, 25 bp, Homo sapiens
agctggcctggaaatgccctgctca

SEQ ID NO: 4501 - DNA, 25 bp, Homo sapiens
cctgccaggagaggattgttcccta

SEQ ID NO: 4502 - DNA, 25 bp, Homo sapiens
ccttgcggagcatgaactggctgta

SEQ ID NO: 4503 - DNA, 25 bp, Homo sapiens
atctctatattttgtggaattgagc

SEQ ID NO: 4504 - DNA, 25 bp, Homo sapiens
gaattgtactatttctgagaaatgt

SEQ ID NO: 4505 - DNA, 25 bp, Homo sapiens
tgtgcacgtcgaatatttccaaacc

SEQ ID NO: 4506 - DNA, 25 bp, Homo sapiens
caggaggtatggatctcattctaca

SEQ ID NO: 4507 - DNA, 25 bp, Homo sapiens
cgggagacttattctgcctgggtta

SEQ ID NO: 4508 - DNA, 25 bp, Homo sapiens
tggactctgcttctctatatatgta

SEQ ID NO: 4509 - DNA, 25 bp, Homo sapiens
agagagctctagttatgccatcacc

SEQ ID NO: 4510 - DNA, 25 bp, Homo sapiens
tgaactgtagaaccttgatcctgtg

SEQ ID NO: 4511 - DNA, 25 bp, Homo sapiens
ccttggagggtgtcttccatgtaca

SEQ ID NO: 4512 - DNA, 25 bp, Homo sapiens
cctggattttggcttgctctgctga

SEQ ID NO: 4513 - DNA, 25 bp, Homo sapiens
gttccctttctaaccagtatgagca

SEQ ID NO: 4514 - DNA, 25 bp, Homo sapiens
ttcgtccgtagtgaacatctcaagg

SEQ ID NO: 4515 - DNA, 25 bp, Homo sapiens
gtgtagggcctcagacaaaatcctg

SEQ ID NO: 4516 - DNA, 25 bp, Homo sapiens
cccagagcaatttcccaggtagatg

SEQ ID NO: 4517 - DNA, 25 bp, Homo sapiens
tggcctcttgttagcgatgtacttt

SEQ ID NO: 4518 - DNA, 25 bp, Homo sapiens
ctcaagtttactttgtgtacaggga

SEQ ID NO: 4519 - DNA, 25 bp, Homo sapiens
gggagttgtctagtcacctctgtga

SEQ ID NO: 4520 - DNA, 25 bp, Homo sapiens
tgtagctcagtgttcccatttcaat

SEQ ID NO: 4521 - DNA, 25 bp, Homo sapiens
ttgtgcctagaaagattaatccctg

SEQ ID NO: 4522 - DNA, 25 bp, Homo sapiens
tcccttgtgaccgagagcaaacatg

SEQ ID NO: 4523 - DNA, 25 bp, Homo sapiens
tgcacatgccttcacaacgtttttc

SEQ ID NO: 4524 - DNA, 25 bp, Homo sapiens
tgtgtaccacatgcctcaaactgtg

SEQ ID NO: 4525 - DNA, 25 bp, Homo sapiens
tgctcttaaagaccttaaacattct

SEQ ID NO: 4526 - DNA, 25 bp, Homo sapiens
ccaaaaatgtgaaattgctaggcta

SEQ ID NO: 4527 - DNA, 25 bp, Homo sapiens
cctggtctaagagtggttctatatc

SEQ ID NO: 4528 - DNA, 25 bp, Homo sapiens
tcatggttggtctcacagaaacttc

SEQ ID NO: 4529 - DNA, 25 bp, Homo sapiens
acgtgttatagttcctgccttctgg

SEQ ID NO: 4530 - DNA, 25 bp, Homo sapiens
tgtggacactttaggcttgcattta

SEQ ID NO: 4531 - DNA, 25 bp, Homo sapiens
agaatgctgtgtcctcaagtgaatg

SEQ ID NO: 4532 - DNA, 25 bp, Homo sapiens
atatttgtttgacagtcatacgata

SEQ ID NO: 4533 - DNA, 25 bp, Homo sapiens
ggactataccttgagcattcctaga

SEQ ID NO: 4534 - DNA, 25 bp, Homo sapiens
cacatgtaagttagaaattcttttc

SEQ ID NO: 4535 - DNA, 25 bp, Homo sapiens
taaataaccatgaataccaatatat

SEQ ID NO: 4536 - DNA, 25 bp, Homo sapiens
tgcctcatctgaaaaccctcctgta

SEQ ID NO: 4537 - DNA, 25 bp, Homo sapiens
caaagctgtgggtgtgttaacaacc

SEQ ID NO: 4538 - DNA, 25 bp, Homo sapiens
tcccgggtcgatgctataaccctta

SEQ ID NO: 4539 - DNA, 25 bp, Homo sapiens
gcctctatgcatgtgggtgcacaca

SEQ ID NO: 4540 - DNA, 25 bp, Homo sapiens
agtttcctagcatcccagccctgtg

SEQ ID NO: 4541 - DNA, 25 bp, Homo sapiens
ggcctggattcctaatagtctttca

SEQ ID NO: 4542 - DNA, 25 bp, Homo sapiens
tctccctcctggtctgtcagcaaga

SEQ ID NO: 4543 - DNA, 25 bp, Homo sapiens
agtacccttccatttgctgccagtg

SEQ ID NO: 4544 - DNA, 25 bp, Homo sapiens
gttttttcagtccaatcctagtgtg

SEQ ID NO: 4545 - DNA, 25 bp, Homo sapiens
tattacaatgtaggttggtatcaaa

SEQ ID NO: 4546 - DNA, 25 bp, Homo sapiens
ctatgctctattttggggtggatga

SEQ ID NO: 4547 - DNA, 25 bp, Homo sapiens
ctcttgcactctcaagctgatacac

SEQ ID NO: 4548 - DNA, 25 bp, Homo sapiens
ttccttctggaagacctaatgatct

SEQ ID NO: 4549 - DNA, 25 bp, Homo sapiens
tggtgctataccaaaaacagattta

SEQ ID NO: 4550 - DNA, 25 bp, Homo sapiens
tacaggtgatccaggcaatagtccc

SEQ ID NO: 4551 - DNA, 25 bp, Homo sapiens
gtgggtctaccatggctaatgaata

SEQ ID NO: 4552 - DNA, 25 bp, Homo sapiens
gtgatactttgcctctccagctgga

SEQ ID NO: 4553 - DNA, 25 bp, Homo sapiens
ggggctctcatgaagcctgttacta

SEQ ID NO: 4554 - DNA, 25 bp, Homo sapiens
cagctgtggaacttttgagaatata

SEQ ID NO: 4555 - DNA, 25 bp, Homo sapiens
acgcagatatctggtccctgttata

SEQ ID NO: 4556 - DNA, 25 bp, Homo sapiens
tgtcctggcgagtgttcaaccttga

SEQ ID NO: 4557 - DNA, 25 bp, Homo sapiens
tgctcttcagaagggaaccattcca

SEQ ID NO: 4558 - DNA, 25 bp, Homo sapiens
tatcccacattcttaattttgtatg

SEQ ID NO: 4559 - DNA, 25 bp, Homo sapiens
gagtttttctcagtccctacatgta

SEQ ID NO: 4560 - DNA, 25 bp, Homo sapiens
cccctagattattgaaagtagtgat

SEQ ID NO: 4561 - DNA, 25 bp, Homo sapiens
ctcctccatgagtaggctggggaca

SEQ ID NO: 4562 - DNA, 25 bp, Homo sapiens
tgcccagtgaagagagacataagta

SEQ ID NO: 4563 - DNA, 25 bp, Homo sapiens
gagatccttatttctgcaaaccaga

SEQ ID NO: 4564 - DNA, 25 bp, Homo sapiens
ccctaggtgggcagttgaaattaaa

SEQ ID NO: 4565 - DNA, 25 bp, Homo sapiens
gtatatgtttacatagctctataaa

SEQ ID NO: 4566 - DNA, 25 bp, Homo sapiens
catatgtgtgtctgtggcactccca

SEQ ID NO: 4567 - DNA, 25 bp, Homo sapiens
ctgagctgtgaactgccttctgtta

SEQ ID NO: 4568 - DNA, 25 bp, Homo sapiens
tcatgatgggcacaagcggctttca

SEQ ID NO: 4569 - DNA, 25 bp, Homo sapiens
atctggtccagccaagcccaagtga

SEQ ID NO: 4570 - DNA, 25 bp, Homo sapiens
ctgtggccaggcaagaaaatactta

SEQ ID NO: 4571 - DNA, 25 bp, Homo sapiens
aggctgtcttcacactgtatgtttg

SEQ ID NO: 4572 - DNA, 25 bp, Homo sapiens
gagatttgtcttaccgcaagcctga

SEQ ID NO: 4573 - DNA, 25 bp, Homo sapiens
gcgccaatagcttcaaatcaccata

SEQ ID NO: 4574 - DNA, 25 bp, Homo sapiens
cttactctctggtgggaggtgtcca

SEQ ID NO: 4575 - DNA, 25 bp, Homo sapiens
gccgagttcagttcatcttttcatg

SEQ ID NO: 4576 - DNA, 25 bp, Homo sapiens
tccagctgtggagtgtgatttgaca

SEQ ID NO: 4577 - DNA, 25 bp, Homo sapiens
atgccgatctgaaaggagttttaca

SEQ ID NO: 4578 - DNA, 25 bp, Homo sapiens
tagcttatgatgtactctgggattc

SEQ ID NO: 4579 - DNA, 25 bp, Homo sapiens
ggaccagactccctttaccaagtga

SEQ ID NO: 4580 - DNA, 25 bp, Homo sapiens
tatgggcacccgaaaacctcagttg

SEQ ID NO: 4581 - DNA, 25 bp, Homo sapiens
gactgagttcccagcacatcctgtg

SEQ ID NO: 4582 - DNA, 25 bp, Homo sapiens
taaaagaaataaaagtctccctgat

SEQ ID NO: 4583 - DNA, 25 bp, Homo sapiens
caggctactatttatgggacataca

SEQ ID NO: 4584 - DNA, 25 bp, Homo sapiens
tgtccagatcagcagaaggtccctc

SEQ ID NO: 4585 - DNA, 25 bp, Homo sapiens
ctgccttgtgcataccactttggta

SEQ ID NO: 4586 - DNA, 25 bp, Homo sapiens
aggtgctctgaaggaaaactactgc

SEQ ID NO: 4587 - DNA, 25 bp, Homo sapiens
ataaatctctgctttagtagtggca

SEQ ID NO: 4588 - DNA, 25 bp, Homo sapiens
gcaggaagccttgtaggtaaacaca

SEQ ID NO: 4589 - DNA, 25 bp, Homo sapiens
ccacgagtgagcagatcataatttc

SEQ ID NO: 4590 - DNA, 25 bp, Homo sapiens
accagccttggttagtgtttcttca

SEQ ID NO: 4591 - DNA, 25 bp, Homo sapiens
tcacttcacatatggtacatgtctg

SEQ ID NO: 4592 - DNA, 25 bp, Homo sapiens
gctgaaggttaggttgcctctgttt

SEQ ID NO: 4593 - DNA, 25 bp, Homo sapiens
atgcaacctgcctcatagatatttg

SEQ ID NO: 4594 - DNA, 25 bp, Homo sapiens
gctcgatttttgtggcaggatacta

SEQ ID NO: 4595 - DNA, 25 bp, Homo sapiens
tcactgatcgctattggggaggaca

SEQ ID NO: 4596 - DNA, 25 bp, Homo sapiens
ttcacaggtaactttgagaacagtg

SEQ ID NO: 4597 - DNA, 25 bp, Homo sapiens
gcagctttatctctatgtttccaga

SEQ ID NO: 4598 - DNA, 25 bp, Homo sapiens
ctcgcgcctgatcaaggacagatta

SEQ ID NO: 4599 - DNA, 25 bp, Homo sapiens
taggtccaggttcagacacattttc

SEQ ID NO: 4600 - DNA, 25 bp, Homo sapiens
ccacgtttagagcaagagagagata

SEQ ID NO: 4601 - DNA, 25 bp, Homo sapiens
tggctttatgttccactaacttctc

SEQ ID NO: 4602 - DNA, 25 bp, Homo sapiens
aaatacagtatcatcctcagtgatt

SEQ ID NO: 4603 - DNA, 25 bp, Homo sapiens
ccaaacccgagcttaagagagaata

SEQ ID NO: 4604 - DNA, 25 bp, Homo sapiens
tggccctggacctttagaataaatc

SEQ ID NO: 4605 - DNA, 25 bp, Homo sapiens
tcccatggaatctagtgtgcactta

SEQ ID NO: 4606 - DNA, 25 bp, Homo sapiens
ggagctccctaaacataaactggta

SEQ ID NO: 4607 - DNA, 25 bp, Homo sapiens
tgcagcctctccatagtgacacagc

SEQ ID NO: 4608 - DNA, 25 bp, Homo sapiens
tttaattcctgtaataccactaggt

SEQ ID NO: 4609 - DNA, 25 bp, Homo sapiens
ttctaggcaaaatcagcgtactgtc

SEQ ID NO: 4610 - DNA, 25 bp, Homo sapiens
tgccctgatggaaagctgtgacctc

SEQ ID NO: 4611 - DNA, 25 bp, Homo sapiens
ctaatgatcacaaagggcttcctgg

SEQ ID NO: 4612 - DNA, 25 bp, Homo sapiens
gggaaccctgttctagcttatatag

SEQ ID NO: 4613 - DNA, 25 bp, Homo sapiens
gctcataggcttatagattagtacc

SEQ ID NO: 4614 - DNA, 25 bp, Homo sapiens
tggcaattctgctctttaaaacaag

SEQ ID NO: 4615 - DNA, 25 bp, Homo sapiens
tatatcctgatctatatcactaggg

SEQ ID NO: 4616 - DNA, 25 bp, Homo sapiens
agcccaattctgtcttctacgtagt

SEQ ID NO: 4617 - DNA, 25 bp, Homo sapiens
ggacctttccaagcctttggaaagg

SEQ ID NO: 4618 - DNA, 25 bp, Homo sapiens
catggggtcacggagaaatatcaca

SEQ ID NO: 4619 - DNA, 25 bp, Homo sapiens
ccctgggctaaggtaccaataacta

SEQ ID NO: 4620 - DNA, 25 bp, Homo sapiens
gtctaggcctctgcatttgaactta

SEQ ID NO: 4621 - DNA, 25 bp, Homo sapiens
tgctccatacctgcaggcctgattg

SEQ ID NO: 4622 - DNA, 25 bp, Homo sapiens
gttctctttctcagggcaaccattg

SEQ ID NO: 4623 - DNA, 25 bp, Homo sapiens
aggccatttgcgtcacactattgtg

SEQ ID NO: 4624 - DNA, 25 bp, Homo sapiens
gctggagccatcacaaacttcattg

SEQ ID NO: 4625 - DNA, 25 bp, Homo sapiens
aggcgatatttccacagtagctgtc

SEQ ID NO: 4626 - DNA, 25 bp, Homo sapiens
tgccagggacttgctctgaaatata

SEQ ID NO: 4627 - DNA, 25 bp, Homo sapiens
cctcaccctgctggttagtaaaatc

SEQ ID NO: 4628 - DNA, 25 bp, Homo sapiens
cctaatgtatccgttggcagaaatc

SEQ ID NO: 4629 - DNA, 25 bp, Homo sapiens
aggattgtcactgccactggatttg

SEQ ID NO: 4630 - DNA, 25 bp, Homo sapiens
aggaggaaggttatatgatcttgtc

SEQ ID NO: 4631 - DNA, 25 bp, Homo sapiens
ctaagggtaagagaaggtgtgcctt

SEQ ID NO: 4632 - DNA, 25 bp, Homo sapiens
caactgctgtactgtggactgccta

SEQ ID NO: 4633 - DNA, 25 bp, Homo sapiens
tgttccctaatcacggactggttga

SEQ ID NO: 4634 - DNA, 25 bp, Homo sapiens
tgggagtacctttgaccgcctatta

SEQ ID NO: 4635 - DNA, 25 bp, Homo sapiens
ccagccagagatatagtgagcactt

SEQ ID NO: 4636 - DNA, 25 bp, Homo sapiens
attgctccttgaacactccatgtgc

SEQ ID NO: 4637 - DNA, 25 bp, Homo sapiens
cgttgcctgcatacatccgatgttt

SEQ ID NO: 4638 - DNA, 25 bp, Homo sapiens
ggcagtttctatgtctcacagtttc

SEQ ID NO: 4639 - DNA, 25 bp, Homo sapiens
cttctcacagctatgggccacgatc

SEQ ID NO: 4640 - DNA, 25 bp, Homo sapiens
tatgggccacaggtcagatagagcg

SEQ ID NO: 4641 - DNA, 25 bp, Homo sapiens
tgaagatctgatttgatcatgtctt

SEQ ID NO: 4642 - DNA, 25 bp, Homo sapiens
ggacgcgatctgacctgatgtaata

SEQ ID NO: 4643 - DNA, 25 bp, Homo sapiens
ccacatgtgtttggattgtacctca

SEQ ID NO: 4644 - DNA, 25 bp, Homo sapiens
gctctgcctgcaggaaaattgctga

SEQ ID NO: 4645 - DNA, 25 bp, Homo sapiens
ggaagagcttgcctgtaaggaatct

SEQ ID NO: 4646 - DNA, 25 bp, Homo sapiens
agttgttctggtgctttcctctggg

SEQ ID NO: 4647 - DNA, 25 bp, Homo sapiens
ggcaaattgcttcctcttcgggtca

SEQ ID NO: 4648 - DNA, 25 bp, Homo sapiens
ctggagggaggcaagcttattattc

SEQ ID NO: 4649 - DNA, 25 bp, Homo sapiens
aaaaaaaaaaaatccttgctttgcc

SEQ ID NO: 4650 - DNA, 25 bp, Homo sapiens
ttctagcatgcagtatagggactca

SEQ ID NO: 4651 - DNA, 25 bp, Homo sapiens
cccttcagcaggagttcagcataag

SEQ ID NO: 4652 - DNA, 25 bp, Homo sapiens
ggaggcccttatatttgtaaatgtg

SEQ ID NO: 4653 - DNA, 25 bp, Homo sapiens
cagactatgtgccttacacgtggta

SEQ ID NO: 4654 - DNA, 25 bp, Homo sapiens
atgctatcatgttctgggctcttta

SEQ ID NO: 4655 - DNA, 25 bp, Homo sapiens
gagtatcactgtcaccggtgcttta

SEQ ID NO: 4656 - DNA, 25 bp, Homo sapiens
cagggatcattctccttgaaacaga

SEQ ID NO: 4657 - DNA, 25 bp, Homo sapiens
tcatgtgctgtactacctgtgatta

SEQ ID NO: 4658 - DNA, 25 bp, Homo sapiens
acaacacagtgatgaggcattattc

SEQ ID NO: 4659 - DNA, 25 bp, Homo sapiens
gatctggtgttttccgtatagacta

SEQ ID NO: 4660 - DNA, 25 bp, Homo sapiens
tcctgatttctactttgaatatcat

SEQ ID NO: 4661 - DNA, 25 bp, Homo sapiens
tttacacaataatgcaagaactaca

SEQ ID NO: 4662 - DNA, 25 bp, Homo sapiens
tataacttgttaaatgttataaatg

SEQ ID NO: 4663 - DNA, 25 bp, Homo sapiens
ggcgtcatatgttgctacaatagta

SEQ ID NO: 4664 - DNA, 25 bp, Homo sapiens
taaaaaaatatattaaaggctgtct

SEQ ID NO: 4665 - DNA, 25 bp, Homo sapiens
gcagatatgtttttgccctatcaaa

SEQ ID NO: 4666 - DNA, 25 bp, Homo sapiens
gctttcagagctacctttcaacagg

SEQ ID NO: 4667 - DNA, 25 bp, Homo sapiens
cctctaatgggttgtcttatgccta

SEQ ID NO: 4668 - DNA, 25 bp, Homo sapiens
tggtcacttggttctcccttataga

SEQ ID NO: 4669 - DNA, 25 bp, Homo sapiens
caggatggtccttcacttgatgaca

SEQ ID NO: 4670 - DNA, 25 bp, Homo sapiens
ctgacacggaaccacttgaacttta

SEQ ID NO: 4671 - DNA, 25 bp, Homo sapiens
aggcatcaagcttaactctcccacg

SEQ ID NO: 4672 - DNA, 25 bp, Homo sapiens
ggcaacgtattcctgctccttgata

SEQ ID NO: 4673 - DNA, 25 bp, Homo sapiens
gcccatgtgagcagtctattgtttc

SEQ ID NO: 4674 - DNA, 25 bp, Homo sapiens
ggctgacaaaatatatgttgttata

SEQ ID NO: 4675 - DNA, 25 bp, Homo sapiens
tccttgcctttgattattgccactt

SEQ ID NO: 4676 - DNA, 25 bp, Homo sapiens
ctttcctacagcatcttagacaata

SEQ ID NO: 4677 - DNA, 25 bp, Homo sapiens
ttgtgtagtcttcccgatgagtata

SEQ ID NO: 4678 - DNA, 25 bp, Homo sapiens
ctgggtacctggaagtcacacaaaa

SEQ ID NO: 4679 - DNA, 25 bp, Homo sapiens
taataataatacaccaaaaaaactc

SEQ ID NO: 4680 - DNA, 25 bp, Homo sapiens
ttaggtgcatacattataattgtat

SEQ ID NO: 4681 - DNA, 25 bp, Homo sapiens
taagtgcatggatataaatacaaaa

SEQ ID NO: 4682 - DNA, 25 bp, Homo sapiens
gtccagtacactttccaggcatatc

SEQ ID NO: 4683 - DNA, 25 bp, Homo sapiens
agctgctgtttaccttctctaaata

SEQ ID NO: 4684 - DNA, 25 bp, Homo sapiens
gcctcttccatagcccaattttgtc

SEQ ID NO: 4685 - DNA, 25 bp, Homo sapiens
aggctgagccacatatttgagaaca

SEQ ID NO: 4686 - DNA, 25 bp, Homo sapiens
agggaacttggtcacacagcttttg

SEQ ID NO: 4687 - DNA, 25 bp, Homo sapiens
tcccagtattctgtgcttaccaagg

SEQ ID NO: 4688 - DNA, 25 bp, Homo sapiens
agcaaataattcagcaaatcaaaag

SEQ ID NO: 4689 - DNA, 25 bp, Homo sapiens
ctttggacctcctctgggtgacatc

SEQ ID NO: 4690 - DNA, 25 bp, Homo sapiens
gctgtgatacgcattgctgccatta

SEQ ID NO: 4691 - DNA, 25 bp, Homo sapiens
agaacttctaataaaaacaaccact

SEQ ID NO: 4692 - DNA, 25 bp, Homo sapiens
tgtgttatctgcttccacttcagta

SEQ ID NO: 4693 - DNA, 25 bp, Homo sapiens
caatgctttgtgacatatttacaga

SEQ ID NO: 4694 - DNA, 25 bp, Homo sapiens
tcagaattaggagaaataaggcact

SEQ ID NO: 4695 - DNA, 25 bp, Homo sapiens
cacagtgatatatatcacattgatt

SEQ ID NO: 4696 - DNA, 25 bp, Homo sapiens
cccaaatctataaaagtaaagtagc

SEQ ID NO: 4697 - DNA, 25 bp, Homo sapiens
gaggtagcctcatttttcaaataat

SEQ ID NO: 4698 - DNA, 25 bp, Homo sapiens
ctgccaagtattcaagtgtctagga

SEQ ID NO: 4699 - DNA, 25 bp, Homo sapiens
cccataattctcatgagggccctgg

SEQ ID NO: 4700 - DNA, 25 bp, Homo sapiens
ccttggaggcagtggtagttttaac

SEQ ID NO: 4701 - DNA, 25 bp, Homo sapiens
acatttgccttgctggagtggttgc

SEQ ID NO: 4702 - DNA, 25 bp, Homo sapiens
ttaggaggcaaacccaaagagcttg

SEQ ID NO: 4703 - DNA, 25 bp, Homo sapiens
cctcagggtttcaggagactgatct

SEQ ID NO: 4704 - DNA, 25 bp, Homo sapiens
tgcctccattctttatttacagacg

SEQ ID NO: 4705 - DNA, 25 bp, Homo sapiens
tcggaaagttggacaactctttcag

SEQ ID NO: 4706 - DNA, 25 bp, Homo sapiens
acgccatgtttcaggcttattacag

SEQ ID NO: 4707 - DNA, 25 bp, Homo sapiens
cgccgaagccctacgtcatttttta

SEQ ID NO: 4708 - DNA, 25 bp, Homo sapiens
ccctgtgactggctatgatgtatta

SEQ ID NO: 4709 - DNA, 25 bp, Homo sapiens
gccctatgccagtctttaaagttga

SEQ ID NO: 4710 - DNA, 25 bp, Homo sapiens
ctatcagactacctctttttgggga

SEQ ID NO: 4711 - DNA, 25 bp, Homo sapiens
gggcatttcccagttgctattaatc

SEQ ID NO: 4712 - DNA, 25 bp, Homo sapiens
ggtgcagtcctgcttcttagctaaa

SEQ ID NO: 4713 - DNA, 25 bp, Homo sapiens
cccataatgggcaaacatctttatc

SEQ ID NO: 4714 - DNA, 25 bp, Homo sapiens
tccaaccatgtcataactgttcgtt

SEQ ID NO: 4715 - DNA, 25 bp, Homo sapiens
agtacacttaaccttaggcatcacc

SEQ ID NO: 4716 - DNA, 25 bp, Homo sapiens
aaaatctttacatttttgtgtatat

SEQ ID NO: 4717 - DNA, 25 bp, Homo sapiens
ctgaccttccagagagatctagata

SEQ ID NO: 4718 - DNA, 25 bp, Homo sapiens
tttttcctgaccttgccatgatgca

SEQ ID NO: 4719 - DNA, 25 bp, Homo sapiens
tagccacttgttgtgtaacagcaca

SEQ ID NO: 4720 - DNA, 25 bp, Homo sapiens
ccctgcatttgcctggaacagtttt

SEQ ID NO: 4721 - DNA, 25 bp, Homo sapiens
ggccaatgagttatgctgatactta

SEQ ID NO: 4722 - DNA, 25 bp, Homo sapiens
cagtggagatggacaaagaagctta

SEQ ID NO: 4723 - DNA, 25 bp, Homo sapiens
tcccagacatacaacagtgcaggtg

SEQ ID NO: 4724 - DNA, 25 bp, Homo sapiens
cgtcatggctcatttcttcaaagtg

SEQ ID NO: 4725 - DNA, 25 bp, Homo sapiens
tgacagattcatatgcccaggctgg

SEQ ID NO: 4726 - DNA, 25 bp, Homo sapiens
ccttggctagggtcagtgtaaaata

SEQ ID NO: 4727 - DNA, 25 bp, Homo sapiens
ccactgtagtgctgaagatgctgac

SEQ ID NO: 4728 - DNA, 25 bp, Homo sapiens
tatccagttcttcccttataaaagc

SEQ ID NO: 4729 - DNA, 25 bp, Homo sapiens
ctaccttgtgttgatgctcatgatc

SEQ ID NO: 4730 - DNA, 25 bp, Homo sapiens
tcacaggggtacatttcgaagcaga

SEQ ID NO: 4731 - DNA, 25 bp, Homo sapiens
cctccatatgggaagagccaacttt

SEQ ID NO: 4732 - DNA, 25 bp, Homo sapiens
ctgagtactgggcacatagctttta

SEQ ID NO: 4733 - DNA, 25 bp, Homo sapiens
ctgtccatggagaaggctgactgcc

SEQ ID NO: 4734 - DNA, 25 bp, Homo sapiens
agcactccagtgtagataaaatttg

SEQ ID NO: 4735 - DNA, 25 bp, Homo sapiens
ccttattgaaggaccagtggtatcc

SEQ ID NO: 4736 - DNA, 25 bp, Homo sapiens
ctgccttcaagggatttatagtata

SEQ ID NO: 4737 - DNA, 25 bp, Homo sapiens
ggcatctgatggtcttcgtaaatta

SEQ ID NO: 4738 - DNA, 25 bp, Homo sapiens
cactggcaagtgtatggtaaatctc

SEQ ID NO: 4739 - DNA, 25 bp, Homo sapiens
tgcccgatttcagatccatgtgatc

SEQ ID NO: 4740 - DNA, 25 bp, Homo sapiens
tgccttgccacatctctttaacttg

SEQ ID NO: 4741 - DNA, 25 bp, Homo sapiens
aaatgtgaggttctgtgcctttcta

SEQ ID NO: 4742 - DNA, 25 bp, Homo sapiens
gcattgcagacccagacacagtgtg

SEQ ID NO: 4743 - DNA, 25 bp, Homo sapiens
tcacggatcaagctctaaaacatta

SEQ ID NO: 4744 - DNA, 25 bp, Homo sapiens
ttttgcattgagtcgtcttcgtccc

SEQ ID NO: 4745 - DNA, 25 bp, Homo sapiens
gaaaattgcctcttaaaatatttct

SEQ ID NO: 4746 - DNA, 25 bp, Homo sapiens
gacttgatcgggtaaagaacgtaca

SEQ ID NO: 4747 - DNA, 25 bp, Homo sapiens
ttaggacaaactagactccacaata

SEQ ID NO: 4748 - DNA, 25 bp, Homo sapiens
tgaacttgcgaaacatttaaggaga

SEQ ID NO: 4749 - DNA, 25 bp, Homo sapiens
actgaattaaaggtggtcattgccc

SEQ ID NO: 4750 - DNA, 25 bp, Homo sapiens
gtagccaggctaccaactatttgta

SEQ ID NO: 4751 - DNA, 25 bp, Homo sapiens
gatgtgcactggactttttaattaa

SEQ ID NO: 4752 - DNA, 25 bp, Homo sapiens
tcagtcttcactggggtcttgcata

SEQ ID NO: 4753 - DNA, 25 bp, Homo sapiens
ttctcagtcctgttaatgaaatggg

SEQ ID NO: 4754 - DNA, 25 bp, Homo sapiens
gaatactttttcctgcaacctcata

SEQ ID NO: 4755 - DNA, 25 bp, Homo sapiens
accgtgagtctctttcgtgagaata

SEQ ID NO: 4756 - DNA, 25 bp, Homo sapiens
tgctggatgtattcgactgtcacta

SEQ ID NO: 4757 - DNA, 25 bp, Homo sapiens
ggccatactcctactaatgtttaga

SEQ ID NO: 4758 - DNA, 25 bp, Homo sapiens
aggacactggtctgttcatttaagg

SEQ ID NO: 4759 - DNA, 25 bp, Homo sapiens
ttggctccagtctctcattctagtc

SEQ ID NO: 4760 - DNA, 25 bp, Homo sapiens
cctgccatatagtagggtagtccta

SEQ ID NO: 4761 - DNA, 25 bp, Homo sapiens
cctccaggggagcaaatagaattcg

SEQ ID NO: 4762 - DNA, 25 bp, Homo sapiens
gtctacttttccaccaccttaaggg

SEQ ID NO: 4763 - DNA, 25 bp, Homo sapiens
gtggatgtctactctacagaccttg

SEQ ID NO: 4764 - DNA, 25 bp, Homo sapiens
ggctcatttcagaggacacaatttg

SEQ ID NO: 4765 - DNA, 25 bp, Homo sapiens
agtgttgaggctgattttcttgaga

SEQ ID NO: 4766 - DNA, 25 bp, Homo sapiens
gtgggatttattctcacacaatgtg

SEQ ID NO: 4767 - DNA, 25 bp, Homo sapiens
cgttgtcatactctctctcagtgta

SEQ ID NO: 4768 - DNA, 25 bp, Homo sapiens
gatcctcagcagatcgcatcttgat

SEQ ID NO: 4769 - DNA, 25 bp, Homo sapiens
cttattatgacattccaaagtcttc

SEQ ID NO: 4770 - DNA, 25 bp, Homo sapiens
agattttgaaactctcctttgctgg

SEQ ID NO: 4771 - DNA, 25 bp, Homo sapiens
tgaccttctgtggtgacagcctatg

SEQ ID NO: 4772 - DNA, 25 bp, Homo sapiens
tgctgggacacacttttactttttc

SEQ ID NO: 4773 - DNA, 25 bp, Homo sapiens
cagcagtttgcctctctaccatata

SEQ ID NO: 4774 - DNA, 25 bp, Homo sapiens
tgcagagatagaccagcagattttc

SEQ ID NO: 4775 - DNA, 25 bp, Homo sapiens
actcggctatttccttcccactgta

SEQ ID NO: 4776 - DNA, 25 bp, Homo sapiens
acaaggttcccatgctgagagtata

SEQ ID NO: 4777 - DNA, 25 bp, Homo sapiens
ggttcccagcaactcccttttcatg

SEQ ID NO: 4778 - DNA, 25 bp, Homo sapiens
caccacgtttggatatgcttgagaa

SEQ ID NO: 4779 - DNA, 25 bp, Homo sapiens
acggagtgatgcctcagatttacta

SEQ ID NO: 4780 - DNA, 25 bp, Homo sapiens
gatttcagccctcacctctcagtta

SEQ ID NO: 4781 - DNA, 25 bp, Homo sapiens
ggctagcaccatttcctgttgatga

SEQ ID NO: 4782 - DNA, 25 bp, Homo sapiens
cctgtccatcatcggttgagagtta

SEQ ID NO: 4783 - DNA, 25 bp, Homo sapiens
ttgattcctggagatggacaattcc

SEQ ID NO: 4784 - DNA, 25 bp, Homo sapiens
gcccgaggtgcaggtagtaaaattt

SEQ ID NO: 4785 - DNA, 25 bp, Homo sapiens
ggtgactccctcttttacccagttc

SEQ ID NO: 4786 - DNA, 25 bp, Homo sapiens
tgctttggcacctgagacatctttc

SEQ ID NO: 4787 - DNA, 25 bp, Homo sapiens
ggcagctgccatgtttcttacagga

SEQ ID NO: 4788 - DNA, 25 bp, Homo sapiens
gtgtaccttctcatcagctgccata

SEQ ID NO: 4789 - DNA, 25 bp, Homo sapiens
ctgtgcactgatgttgaccactgta

SEQ ID NO: 4790 - DNA, 25 bp, Homo sapiens
actaggtttaaattttcagaaagag

SEQ ID NO: 4791 - DNA, 25 bp, Homo sapiens
gagctcctgtataaccttcatctag

SEQ ID NO: 4792 - DNA, 25 bp, Homo sapiens
ccatgcacagctggagtggactctc

SEQ ID NO: 4793 - DNA, 25 bp, Homo sapiens
tgacggacttgcaataaatgttttc

SEQ ID NO: 4794 - DNA, 25 bp, Homo sapiens
agggcctgctccacttgaaatactg

SEQ ID NO: 4795 - DNA, 25 bp, Homo sapiens
ggacagcaagcagcacaaggttttc

SEQ ID NO: 4796 - DNA, 25 bp, Homo sapiens
cctaagtgtctactgggtatatccc

SEQ ID NO: 4797 - DNA, 25 bp, Homo sapiens
ggggctgaaatttaggatccaatgc

SEQ ID NO: 4798 - DNA, 25 bp, Homo sapiens
atagacattagcattacttgtgaaa

SEQ ID NO: 4799 - DNA, 25 bp, Homo sapiens
ctggccaaggggatagatctgcaca

SEQ ID NO: 4800 - DNA, 25 bp, Homo sapiens
tgggttctccagtaggcctttagta

SEQ ID NO: 4801 - DNA, 25 bp, Homo sapiens
gagcactcttctcctctggtgtcaa

SEQ ID NO: 4802 - DNA, 25 bp, Homo sapiens
ctcctcctacgtgggtctattcata

SEQ ID NO: 4803 - DNA, 25 bp, Homo sapiens
tggttcctggtagcaaagatttctg

SEQ ID NO: 4804 - DNA, 25 bp, Homo sapiens
gcagtctctgagcatgttgattgtc

SEQ ID NO: 4805 - DNA, 25 bp, Homo sapiens
atttgcatttctgtggtggctccca

SEQ ID NO: 4806 - DNA, 25 bp, Homo sapiens
ggctaagctgctctcaaaaactatt

SEQ ID NO: 4807 - DNA, 25 bp, Homo sapiens
gcttccgagtacctgaggctcaata

SEQ ID NO: 4808 - DNA, 25 bp, Homo sapiens
gcgagggaactaacagcatctgcta

SEQ ID NO: 4809 - DNA, 25 bp, Homo sapiens
ctttcttatgttgcctgtcgtggta

SEQ ID NO: 4810 - DNA, 25 bp, Homo sapiens
tggatcctgataagcgaaaaagtta

SEQ ID NO: 4811 - DNA, 25 bp, Homo sapiens
gggagccctctgtcttctaatactg

SEQ ID NO: 4812 - DNA, 25 bp, Homo sapiens
accgggcttatttattctgactgtc

SEQ ID NO: 4813 - DNA, 25 bp, Homo sapiens
gatttgaatttgagttactttatac

SEQ ID NO: 4814 - DNA, 25 bp, Homo sapiens
gacagatttggccttgacttattaa

SEQ ID NO: 4815 - DNA, 25 bp, Homo sapiens
tgccgccagaagctcattttgaact

SEQ ID NO: 4816 - DNA, 25 bp, Homo sapiens
cagccgtgggaagagaatgttatta

SEQ ID NO: 4817 - DNA, 25 bp, Homo sapiens
ggctccggattcctcttcacatatg

SEQ ID NO: 4818 - DNA, 25 bp, Homo sapiens
ggcagtcacgtacaatccaaatttg

SEQ ID NO: 4819 - DNA, 25 bp, Homo sapiens
cctgagtgaattagagcatgctttg

SEQ ID NO: 4820 - DNA, 25 bp, Homo sapiens
agtggcatgaaaaatggccttcaca

SEQ ID NO: 4821 - DNA, 25 bp, Homo sapiens
actggcttctctcctggtcctttca

SEQ ID NO: 4822 - DNA, 25 bp, Homo sapiens
caggttcttcttctgctgttacaca

SEQ ID NO: 4823 - DNA, 25 bp, Homo sapiens
atccttctgtggtcatagtttcaac

SEQ ID NO: 4824 - DNA, 25 bp, Homo sapiens
tgccatggatgttgtcagctgtaaa

SEQ ID NO: 4825 - DNA, 25 bp, Homo sapiens
cagcgttcctgtggtgtttcaatga

SEQ ID NO: 4826 - DNA, 25 bp, Homo sapiens
tacccaggcctctttacagttagtg

SEQ ID NO: 4827 - DNA, 25 bp, Homo sapiens
ggcccaggacccagtgaatttcaag

SEQ ID NO: 4828 - DNA, 25 bp, Homo sapiens
gggaaacatcctttcagctgtacta

SEQ ID NO: 4829 - DNA, 25 bp, Homo sapiens
gctgatgtcaggattccacaccttg

SEQ ID NO: 4830 - DNA, 25 bp, Homo sapiens
tgtgacatattagaataagccactg

SEQ ID NO: 4831 - DNA, 25 bp, Homo sapiens
actcttggctatcagggtgctacta

SEQ ID NO: 4832 - DNA, 25 bp, Homo sapiens
ctctgaaggtttctgggtcttactg

SEQ ID NO: 4833 - DNA, 25 bp, Homo sapiens
gcggtgatttctagtgctttccata

SEQ ID NO: 4834 - DNA, 25 bp, Homo sapiens
ggggaactctggtatacacacaatg

SEQ ID NO: 4835 - DNA, 25 bp, Homo sapiens
ctggccttggttcactgcattttgg

SEQ ID NO: 4836 - DNA, 25 bp, Homo sapiens
tgccttccagaaacaaacgatttga

SEQ ID NO: 4837 - DNA, 25 bp, Homo sapiens
ttaaaatttttatgtcaaatctata

SEQ ID NO: 4838 - DNA, 25 bp, Homo sapiens
aaaaaagtatagcttataaattcgg

SEQ ID NO: 4839 - DNA, 25 bp, Homo sapiens
ctggctgctctgcttccattcagta

SEQ ID NO: 4840 - DNA, 25 bp, Homo sapiens
cattgaggctgcatttaaagtttcc

SEQ ID NO: 4841 - DNA, 25 bp, Homo sapiens
ctactcggtacatttcagatttagg

SEQ ID NO: 4842 - DNA, 25 bp, Homo sapiens
taaccactgcagctctgaacagatc

SEQ ID NO: 4843 - DNA, 25 bp, Homo sapiens
atagagaccagaagcatcatgttgg

SEQ ID NO: 4844 - DNA, 25 bp, Homo sapiens
gatctgtgccaacccaacttctgtg

SEQ ID NO: 4845 - DNA, 25 bp, Homo sapiens
agataagtattttataagtatacta

SEQ ID NO: 4846 - DNA, 25 bp, Homo sapiens
gggaatccttcctctatgctttgca

SEQ ID NO: 4847 - DNA, 25 bp, Homo sapiens
ctgggtcattcttcctagcaatttg

SEQ ID NO: 4848 - DNA, 25 bp, Homo sapiens
actttggtgtgtaatctgatcttga

SEQ ID NO: 4849 - DNA, 25 bp, Homo sapiens
tgctcaagtgcaatcttcaggactg

SEQ ID NO: 4850 - DNA, 25 bp, Homo sapiens
ggcccaggtgcactgaggtcaacta

SEQ ID NO: 4851 - DNA, 25 bp, Homo sapiens
agcttctgttttgccacgactcata

SEQ ID NO: 4852 - DNA, 25 bp, Homo sapiens
ctgtgttgggaacctacatgtgtac

SEQ ID NO: 4853 - DNA, 25 bp, Homo sapiens
accagttgtgtttctctgtggaacc

SEQ ID NO: 4854 - DNA, 25 bp, Homo sapiens
ttggtggcagtagtgaaaggactga

SEQ ID NO: 4855 - DNA, 25 bp, Homo sapiens
accctaagggtcaggctttgtcagc

SEQ ID NO: 4856 - DNA, 25 bp, Homo sapiens
cgggagccctctctagatcattcta

SEQ ID NO: 4857 - DNA, 25 bp, Homo sapiens
gtgtttttccactgtacctgattca

SEQ ID NO: 4858 - DNA, 25 bp, Homo sapiens
aagcaacaccctcctccccagaaat

SEQ ID NO: 4859 - DNA, 25 bp, Homo sapiens
cccagcagctgttcatgagtagaga

SEQ ID NO: 4860 - DNA, 25 bp, Homo sapiens
tcctgaggcaggtcttctgaagctg

SEQ ID NO: 4861 - DNA, 25 bp, Homo sapiens
aatacttgatggtgtccctggacta

SEQ ID NO: 4862 - DNA, 25 bp, Homo sapiens
agggtcccttataacatcttgcatg

SEQ ID NO: 4863 - DNA, 25 bp, Homo sapiens
cttcagagaggcttccaggtgtttc

SEQ ID NO: 4864 - DNA, 25 bp, Homo sapiens
gttaaacactttataaaaaatggat

SEQ ID NO: 4865 - DNA, 25 bp, Homo sapiens
ccaggccctgttttaaacttcttaa

SEQ ID NO: 4866 - DNA, 25 bp, Homo sapiens
gggaccaagatcctagaactgtttg

SEQ ID NO: 4867 - DNA, 25 bp, Homo sapiens
cctttgggaggtgctatgattcatc

SEQ ID NO: 4868 - DNA, 25 bp, Homo sapiens
tgcagaggctagctggactaaaatc

SEQ ID NO: 4869 - DNA, 25 bp, Homo sapiens
aggcactgcatcacatccaaggtca

SEQ ID NO: 4870 - DNA, 25 bp, Homo sapiens
tggtcagctttgcaaatcaggcatc

SEQ ID NO: 4871 - DNA, 25 bp, Homo sapiens
gtcagcctccttatgcctttctaga

SEQ ID NO: 4872 - DNA, 25 bp, Homo sapiens
gtggtaacctctcatcatgccctca

SEQ ID NO: 4873 - DNA, 25 bp, Homo sapiens
gggaggctttttcttggtcaactta

SEQ ID NO: 4874 - DNA, 25 bp, Homo sapiens
gcccgcaaggctctacatcgcatag

SEQ ID NO: 4875 - DNA, 25 bp, Homo sapiens
gcaaagcttggggaaattttttacc

SEQ ID NO: 4876 - DNA, 25 bp, Homo sapiens
aagcagaggttttcctatcaaacta

SEQ ID NO: 4877 - DNA, 25 bp, Homo sapiens
gagaaatttgtttcttcacaataaa

SEQ ID NO: 4878 - DNA, 25 bp, Homo sapiens
agcttgccatgtactgctcatatga

SEQ ID NO: 4879 - DNA, 25 bp, Homo sapiens
agtgagtctcctttgccctcagatc

SEQ ID NO: 4880 - DNA, 25 bp, Homo sapiens
gaacactcctgcacatccgtattta

SEQ ID NO: 4881 - DNA, 25 bp, Homo sapiens
taggcaccaggcttatcagtttata

SEQ ID NO: 4882 - DNA, 25 bp, Homo sapiens
caatggctggtggtatttttcagac

SEQ ID NO: 4883 - DNA, 25 bp, Homo sapiens
ctcgggctgtattctacttaggata

SEQ ID NO: 4884 - DNA, 25 bp, Homo sapiens
atggagtctggtatggtttcccaca

SEQ ID NO: 4885 - DNA, 25 bp, Homo sapiens
cctcagacaaatacaatccagtgga

SEQ ID NO: 4886 - DNA, 25 bp, Homo sapiens
aatagcccattggaggtcccgcttg

SEQ ID NO: 4887 - DNA, 25 bp, Homo sapiens
ttgctacacatagggtggctaaggc

SEQ ID NO: 4888 - DNA, 25 bp, Homo sapiens
tcctcaggagaccaaagcaattttg

SEQ ID NO: 4889 - DNA, 25 bp, Homo sapiens
cctctggcatctgttcctgggaaaa

SEQ ID NO: 4890 - DNA, 25 bp, Homo sapiens
cccagggctggaaaatgtcaaagtc

SEQ ID NO: 4891 - DNA, 25 bp, Homo sapiens
ggcagcctccgtgtttttgagaaaa

SEQ ID NO: 4892 - DNA, 25 bp, Homo sapiens
agttcctgaggaagagctacttacc

SEQ ID NO: 4893 - DNA, 25 bp, Homo sapiens
cttccctctggatggagattaaacc

SEQ ID NO: 4894 - DNA, 25 bp, Homo sapiens
ctgagatacgtttttggtgcctata

SEQ ID NO: 4895 - DNA, 25 bp, Homo sapiens
caaggactttgtgccttcaactata

SEQ ID NO: 4896 - DNA, 25 bp, Homo sapiens
gtgtgccaacagcaaagatcaacat

SEQ ID NO: 4897 - DNA, 25 bp, Homo sapiens
gccatttttgggtaacttgaacgta

SEQ ID NO: 4898 - DNA, 25 bp, Homo sapiens
cttagctatcgactatctgtgggga

SEQ ID NO: 4899 - DNA, 25 bp, Homo sapiens
gggtgtttacaaacgaggcttatta

SEQ ID NO: 4900 - DNA, 25 bp, Homo sapiens
ataaaataaagaattaccaaggtgt

SEQ ID NO: 4901 - DNA, 25 bp, Homo sapiens
caggaccatgctaccagaaccattg

SEQ ID NO: 4902 - DNA, 25 bp, Homo sapiens
agacccaccggactaatgttcagca

SEQ ID NO: 4903 - DNA, 25 bp, Homo sapiens
ttttttaaaaagcatttggtgacac

SEQ ID NO: 4904 - DNA, 25 bp, Homo sapiens
ctatatctgtatctatatccataac

SEQ ID NO: 4905 - DNA, 25 bp, Homo sapiens
aaagcatttgataaacattaaaaaa

SEQ ID NO: 4906 - DNA, 25 bp, Homo sapiens
tatggtgagctggatttttaaatta

SEQ ID NO: 4907 - DNA, 25 bp, Homo sapiens
gggtcgtttggctattaatcttttc

SEQ ID NO: 4908 - DNA, 25 bp, Homo sapiens
gtcttactatgtcacaatcttttag

SEQ ID NO: 4909 - DNA, 25 bp, Homo sapiens
ggtcacagccctatccgttttcata

SEQ ID NO: 4910 - DNA, 25 bp, Homo sapiens
cacatttttcctaattatttatttt

SEQ ID NO: 4911 - DNA, 25 bp, Homo sapiens
tccctgcccaggtctaaggacaatg

SEQ ID NO: 4912 - DNA, 25 bp, Homo sapiens
cccttgggcgttgagaaaatgcaca

SEQ ID NO: 4913 - DNA, 25 bp, Homo sapiens
tgcctttggtcccactgtcagttag

SEQ ID NO: 4914 - DNA, 25 bp, Homo sapiens
atgcagggcaacatgggtctcaatg

SEQ ID NO: 4915 - DNA, 25 bp, Homo sapiens
agccctgttgtttctgtgtttttaa

SEQ ID NO: 4916 - DNA, 25 bp, Homo sapiens
ggctactccctcacctgtttatatg

SEQ ID NO: 4917 - DNA, 25 bp, Homo sapiens
ccagttatgatcaagcttaaagctc

SEQ ID NO: 4918 - DNA, 25 bp, Homo sapiens
gctgatgtgttaatgtgttctccca

SEQ ID NO: 4919 - DNA, 25 bp, Homo sapiens
agctctgatcctgtacgacggttta

SEQ ID NO: 4920 - DNA, 25 bp, Homo sapiens
acacggtgtttttctcctcagtata

SEQ ID NO: 4921 - DNA, 25 bp, Homo sapiens
ccctggaaatagaggtatcagtttt

SEQ ID NO: 4922 - DNA, 25 bp, Homo sapiens
taccagggcactcgagatttcagca

SEQ ID NO: 4923 - DNA, 25 bp, Homo sapiens
gtaaaagatcaaacataatgtcagc

SEQ ID NO: 4924 - DNA, 25 bp, Homo sapiens
acaggaatgtatggcagttaagatc

SEQ ID NO: 4925 - DNA, 25 bp, Homo sapiens
cgggcaagcccaaacatggccttta

SEQ ID NO: 4926 - DNA, 25 bp, Homo sapiens
cagggccagtgttacaaactatatc

SEQ ID NO: 4927 - DNA, 25 bp, Homo sapiens
ggtggtctagcttcctgaatttcca

SEQ ID NO: 4928 - DNA, 25 bp, Homo sapiens
ttaattaaagtatgcccacatttag

SEQ ID NO: 4929 - DNA, 25 bp, Homo sapiens
cttctgcacagtggaaacattctta

SEQ ID NO: 4930 - DNA, 25 bp, Homo sapiens
cgaacaaatgctgtctcctttttta

SEQ ID NO: 4931 - DNA, 25 bp, Homo sapiens
gcagtgagacaccttggcttccatg

SEQ ID NO: 4932 - DNA, 25 bp, Homo sapiens
gaagcccagctgtctttcaaggtaa

SEQ ID NO: 4933 - DNA, 25 bp, Homo sapiens
tgggaagtttgagccaccattcgtg

SEQ ID NO: 4934 - DNA, 25 bp, Homo sapiens
tcgtgccagggaaacagaacaattg

SEQ ID NO: 4935 - DNA, 25 bp, Homo sapiens
cagctcctgtgcatcacgatgtgta

SEQ ID NO: 4936 - DNA, 25 bp, Homo sapiens
taaatatacctaagttgattctgat

SEQ ID NO: 4937 - DNA, 25 bp, Homo sapiens
gttcctcataccacaaatgcatttg

SEQ ID NO: 4938 - DNA, 25 bp, Homo sapiens
gcctaaaccagcaggtgaacacttg

SEQ ID NO: 4939 - DNA, 25 bp, Homo sapiens
tcacggcttgcttatagtttggggc

SEQ ID NO: 4940 - DNA, 25 bp, Homo sapiens
cccttcgtaatcctgggaggtatta

SEQ ID NO: 4941 - DNA, 25 bp, Homo sapiens
gcgagatgaccacctgggcccatta

SEQ ID NO: 4942 - DNA, 25 bp, Homo sapiens
gtggtctccagcctccagaagaaga

SEQ ID NO: 4943 - DNA, 25 bp, Homo sapiens
taccctgccacgatgatgttttttg

SEQ ID NO: 4944 - DNA, 25 bp, Homo sapiens
ccgatggtgtccctgatcttactga

SEQ ID NO: 4945 - DNA, 25 bp, Homo sapiens
gggcactggggttccaaactctgtt

SEQ ID NO: 4946 - DNA, 25 bp, Homo sapiens
tggctctgttctctatgggacctgg

SEQ ID NO: 4947 - DNA, 25 bp, Homo sapiens
cttggccctgggtcacttatattta

SEQ ID NO: 4948 - DNA, 25 bp, Homo sapiens
ataaccatttataatgtgcaaggca

SEQ ID NO: 4949 - DNA, 25 bp, Homo sapiens
cacgaccctgtcattgctctgctta

SEQ ID NO: 4950 - DNA, 25 bp, Homo sapiens
cctgtgctgaatggtccggaatata

SEQ ID NO: 4951 - DNA, 25 bp, Homo sapiens
ctgtatgtgacagaagggccctctc

SEQ ID NO: 4952 - DNA, 25 bp, Homo sapiens
cctttattgtggattctggagctca

SEQ ID NO: 4953 - DNA, 25 bp, Homo sapiens
gtctttgcccttgagctcttgtttg

SEQ ID NO: 4954 - DNA, 25 bp, Homo sapiens
gctgcctgccttcttccatctgaga

SEQ ID NO: 4955 - DNA, 25 bp, Homo sapiens
gggttgcccttgcttctctgacaca

SEQ ID NO: 4956 - DNA, 25 bp, Homo sapiens
ggctctgctgtgttagcatctccta

SEQ ID NO: 4957 - DNA, 25 bp, Homo sapiens
tccctggtcacaagctctaagcctg

SEQ ID NO: 4958 - DNA, 25 bp, Homo sapiens
gcacgcttagctccattgtgggtta

SEQ ID NO: 4959 - DNA, 25 bp, Homo sapiens
ctgctgaagagaaggatacccgttc

SEQ ID NO: 4960 - DNA, 25 bp, Homo sapiens
atttggattctcacagggcctctta

SEQ ID NO: 4961 - DNA, 25 bp, Homo sapiens
tggcattgcagaccctacccttttc

SEQ ID NO: 4962 - DNA, 25 bp, Homo sapiens
ttctctagggcagcaagggaccttc

SEQ ID NO: 4963 - DNA, 25 bp, Homo sapiens
gtgtcacttacatctgctcttcgga

SEQ ID NO: 4964 - DNA, 25 bp, Homo sapiens
tccttcggcctagagtattgttgtc

SEQ ID NO: 4965 - DNA, 25 bp, Homo sapiens
ctttgagcgcaggaagagacccaca

SEQ ID NO: 4966 - DNA, 25 bp, Homo sapiens
aggggtaatctctctgaaggtcttc

SEQ ID NO: 4967 - DNA, 25 bp, Homo sapiens
gggtcacctgcctcaactgtttttc

SEQ ID NO: 4968 - DNA, 25 bp, Homo sapiens
gccgacccgggaatctagttattca

SEQ ID NO: 4969 - DNA, 25 bp, Homo sapiens
acggcgctgggtcttttttcataga

SEQ ID NO: 4970 - DNA, 25 bp, Homo sapiens
tagccctctggaagcagctcgttca

SEQ ID NO: 4971 - DNA, 25 bp, Homo sapiens
ccaggtcactgcctactgagaggta

SEQ ID NO: 4972 - DNA, 25 bp, Homo sapiens
tttggctcatgaagggcagaacacc

SEQ ID NO: 4973 - DNA, 25 bp, Homo sapiens
tctccctggggataatgcgtactgg

SEQ ID NO: 4974 - DNA, 25 bp, Homo sapiens
tcacaggggtgtcaaagcttctatt

SEQ ID NO: 4975 - DNA, 25 bp, Homo sapiens
ccctgatacctgagaatgagctgtc

SEQ ID NO: 4976 - DNA, 25 bp, Homo sapiens
ctccttcaaggggacacaggcactc

SEQ ID NO: 4977 - DNA, 25 bp, Homo sapiens
ccttttctgtggatcctggagtctc

SEQ ID NO: 4978 - DNA, 25 bp, Homo sapiens
gtggctccaggagaatacatgtttg

SEQ ID NO: 4979 - DNA, 25 bp, Homo sapiens
cacaaggggtcctgtctagatcttc

SEQ ID NO: 4980 - DNA, 25 bp, Homo sapiens
tgcacgtgtagtagccagagtcctc

SEQ ID NO: 4981 - DNA, 25 bp, Homo sapiens
ggccaggagactggactccctctta

SEQ ID NO: 4982 - DNA, 25 bp, Homo sapiens
aagtgcccaagtgcctcagagagta

SEQ ID NO: 4983 - DNA, 25 bp, Homo sapiens
tccacagctctctaggaccgtgttt

SEQ ID NO: 4984 - DNA, 25 bp, Homo sapiens
ccacctctggaggagctgagcattg

SEQ ID NO: 4985 - DNA, 25 bp, Homo sapiens
taagcgctagtttgcagacctcctg

SEQ ID NO: 4986 - DNA, 25 bp, Homo sapiens
ctgggcgctttccttttaacctgga

SEQ ID NO: 4987 - DNA, 25 bp, Homo sapiens
ttatattattagtaaaatgtctacc

SEQ ID NO: 4988 - DNA, 25 bp, Homo sapiens
gtcctgagagcctagaatgtgtgtg

SEQ ID NO: 4989 - DNA, 25 bp, Homo sapiens
tgggcacatcttcctgacagtactc

SEQ ID NO: 4990 - DNA, 25 bp, Homo sapiens
ccggctgatgtacaaggtccctttt

SEQ ID NO: 4991 - DNA, 25 bp, Homo sapiens
tgggcctgtctctcctaactgggac

SEQ ID NO: 4992 - DNA, 25 bp, Homo sapiens
tgatggcacctacctcaatgttttc

SEQ ID NO: 4993 - DNA, 25 bp, Homo sapiens
ctcctctggtatgtttctctgaact

SEQ ID NO: 4994 - DNA, 25 bp, Homo sapiens
acgtcatctgacactgggttctttg

SEQ ID NO: 4995 - DNA, 25 bp, Homo sapiens
ccagccgagtcgttccttttcaaca

SEQ ID NO: 4996 - DNA, 25 bp, Homo sapiens
caccgtcctccttggtctggatgta

SEQ ID NO: 4997 - DNA, 25 bp, Homo sapiens
ccactaggactgctgggctttcaga

SEQ ID NO: 4998 - DNA, 25 bp, Homo sapiens
gcgggaagctactcaaacctgtttg

SEQ ID NO: 4999 - DNA, 25 bp, Homo sapiens
ggacctcctgacttgagcatcctga

SEQ ID NO: 5000 - DNA, 25 bp, Homo sapiens
ctgtgctgatctctccctgttggaa

SEQ ID NO: 5001 - DNA, 25 bp, Homo sapiens
tctgatggtgaaacgcttggtctcc

SEQ ID NO: 5002 - DNA, 25 bp, Homo sapiens
ccggggctgttctctctgtagccaa

SEQ ID NO: 5003 - DNA, 25 bp, Homo sapiens
atcatttggcatgggttcaggggcc

SEQ ID NO: 5004 - DNA, 25 bp, Homo sapiens
gtctggggctggaaaactctcatcc

SEQ ID NO: 5005 - DNA, 25 bp, Homo sapiens
tgtcataaagcaggggcgatccatc

SEQ ID NO: 5006 - DNA, 25 bp, Homo sapiens
gattgccagcccttctatgcccatg

SEQ ID NO: 5007 - DNA, 25 bp, Homo sapiens
gctcctggggagaagactaagctca

SEQ ID NO: 5008 - DNA, 25 bp, Homo sapiens
atccaggccctagtaccctatcttg

SEQ ID NO: 5009 - DNA, 25 bp, Homo sapiens
catctgtttgctatccctgagggtc

SEQ ID NO: 5010 - DNA, 25 bp, Homo sapiens
tgttcccagggcaagtccagatgtc

SEQ ID NO: 5011 - DNA, 25 bp, Homo sapiens
ctggcgccagctcataagtcacatc

SEQ ID NO: 5012 - DNA, 25 bp, Homo sapiens
atttagagcccctcctcagtccaca

SEQ ID NO: 5013 - DNA, 25 bp, Homo sapiens
gaagaggcctcctgcgtcacaacga

SEQ ID NO: 5014 - DNA, 25 bp, Homo sapiens
agctccaagggcaacattctgtctc

SEQ ID NO: 5015 - DNA, 25 bp, Homo sapiens
ggcctcttttcttttctcctggata

SEQ ID NO: 5016 - DNA, 25 bp, Homo sapiens
cttctcaaggggtgaatgcagctca

SEQ ID NO: 5017 - DNA, 25 bp, Homo sapiens
ccgaaaacatggttgaacgagtgct

SEQ ID NO: 5018 - DNA, 25 bp, Homo sapiens
ctgctaagagtggacaatgttttgc

SEQ ID NO: 5019 - DNA, 25 bp, Homo sapiens
tgggtagtagcactcaccttatttc

SEQ ID NO: 5020 - DNA, 25 bp, Homo sapiens
gttccaataggcaaatgggtacttg

SEQ ID NO: 5021 - DNA, 25 bp, Homo sapiens
acaaggtggtaaagtgcaaggtact

SEQ ID NO: 5022 - DNA, 25 bp, Homo sapiens
gtggatgcccaggagagagcaaacc

SEQ ID NO: 5023 - DNA, 25 bp, Homo sapiens
ccctgtcctgggagttgaggtccca

SEQ ID NO: 5024 - DNA, 25 bp, Homo sapiens
ggcctgatactgaccaacttttaag

SEQ ID NO: 5025 - DNA, 25 bp, Homo sapiens
gggcctcaagactgcaggatacata

SEQ ID NO: 5026 - DNA, 25 bp, Homo sapiens
ccagcctgtggcttttggatgcata

SEQ ID NO: 5027 - DNA, 25 bp, Homo sapiens
tgggaagcgatagcctctcactctg

SEQ ID NO: 5028 - DNA, 25 bp, Homo sapiens
cgtcccaggtgaatgacttccgata

SEQ ID NO: 5029 - DNA, 25 bp, Homo sapiens
aaggaagtcctctggcttgaatttc

SEQ ID NO: 5030 - DNA, 25 bp, Homo sapiens
cccaggaacttgtgactgtaggttg

SEQ ID NO: 5031 - DNA, 25 bp, Homo sapiens
ggagttttctaccaggagtgcttga

SEQ ID NO: 5032 - DNA, 25 bp, Homo sapiens
tgcctgaagctttacccagtgcctg

SEQ ID NO: 5033 - DNA, 25 bp, Homo sapiens
gcgcctagtatgtgcccagaattga

SEQ ID NO: 5034 - DNA, 25 bp, Homo sapiens
agccctttggtagacagattcatga

SEQ ID NO: 5035 - DNA, 25 bp, Homo sapiens
tgaacactttctccagccggcaggg

SEQ ID NO: 5036 - DNA, 25 bp, Homo sapiens
acaccgtgtccaactgaggccttta

SEQ ID NO: 5037 - DNA, 25 bp, Homo sapiens
ggtgacctcgccttctcgttcaagc

SEQ ID NO: 5038 - DNA, 25 bp, Homo sapiens
gctgccttctcctaaccctgtgttg

SEQ ID NO: 5039 - DNA, 25 bp, Homo sapiens
tatcgtccgtcagtggcttgccaca

SEQ ID NO: 5040 - DNA, 25 bp, Homo sapiens
acaagtagctttgctgttacaaggc

SEQ ID NO: 5041 - DNA, 25 bp, Homo sapiens
gccacggttatctctggggccatca

SEQ ID NO: 5042 - DNA, 25 bp, Homo sapiens
cttacagtccaagggcagcaaagtt

SEQ ID NO: 5043 - DNA, 25 bp, Homo sapiens
ttattccttattgtaaggaactaag

SEQ ID NO: 5044 - DNA, 25 bp, Homo sapiens
ggccagcacccaggtataacttgta

SEQ ID NO: 5045 - DNA, 25 bp, Homo sapiens
ctggcccttgggtagctttcttatc

SEQ ID NO: 5046 - DNA, 25 bp, Homo sapiens
ggctccctggatgtcttcatttact

SEQ ID NO: 5047 - DNA, 25 bp, Homo sapiens
ggtggtcacttttcctcatgcttga

SEQ ID NO: 5048 - DNA, 25 bp, Homo sapiens
ggatgttcccgcgtctgtctttaag

SEQ ID NO: 5049 - DNA, 25 bp, Homo sapiens
ggagcccgtgctctcactatctaga

SEQ ID NO: 5050 - DNA, 25 bp, Homo sapiens
gctgagcctagtcctgcatgtaaca

SEQ ID NO: 5051 - DNA, 25 bp, Homo sapiens
tcccaaaagtcggtggtgcccagtt

SEQ ID NO: 5052 - DNA, 25 bp, Homo sapiens
agctgcgctcattgcctcctaatta

SEQ ID NO: 5053 - DNA, 25 bp, Homo sapiens
actgcaaccatggttagggtccctg

SEQ ID NO: 5054 - DNA, 25 bp, Homo sapiens
ggctctgacgctgttctctcatgca

SEQ ID NO: 5055 - DNA, 25 bp, Homo sapiens
gggcaccattgactgctcagccttg

SEQ ID NO: 5056 - DNA, 25 bp, Homo sapiens
ctttttgtttttaaggtctagagaa

SEQ ID NO: 5057 - DNA, 25 bp, Homo sapiens
tgtgacctggcctctgtaggacttc

SEQ ID NO: 5058 - DNA, 25 bp, Homo sapiens
cagcgtcttggcctgtgaatcacaa

SEQ ID NO: 5059 - DNA, 25 bp, Homo sapiens
gagaaggtaagccaaagcccagtta

SEQ ID NO: 5060 - DNA, 25 bp, Homo sapiens
ccagtgcttccaggcctcaattcta

SEQ ID NO: 5061 - DNA, 25 bp, Homo sapiens
tctgggatcctacggtctataattc

SEQ ID NO: 5062 - DNA, 25 bp, Homo sapiens
agagagggcccaagataatggcttg

SEQ ID NO: 5063 - DNA, 25 bp, Homo sapiens
tgtctgtcccacatcaccatgaagc

SEQ ID NO: 5064 - DNA, 25 bp, Homo sapiens
ctgcttacaaaggagccacggtatg

SEQ ID NO: 5065 - DNA, 25 bp, Homo sapiens
tagacacttagaaacataagacata

SEQ ID NO: 5066 - DNA, 25 bp, Homo sapiens
gggaagcccagcagccagccctcac

SEQ ID NO: 5067 - DNA, 25 bp, Homo sapiens
gggaatctaagagaggttggtcatg

SEQ ID NO: 5068 - DNA, 25 bp, Homo sapiens
tcaggtttgtctagctgaagcagtc

SEQ ID NO: 5069 - DNA, 25 bp, Homo sapiens
caggtctgcaaggttgactccagca

SEQ ID NO: 5070 - DNA, 25 bp, Homo sapiens
cgttgagaccagagtaccagctttc

SEQ ID NO: 5071 - DNA, 25 bp, Homo sapiens
ccaagtgcccttagaatagagttcc

SEQ ID NO: 5072 - DNA, 25 bp, Homo sapiens
aatgccaggcttctcacgttcagtg

SEQ ID NO: 5073 - DNA, 25 bp, Homo sapiens
cttcctctgggacatgtgatggctc

SEQ ID NO: 5074 - DNA, 25 bp, Homo sapiens
ttcactcagggctgcgaactaactg

SEQ ID NO: 5075 - DNA, 25 bp, Homo sapiens
gtgcccaagctagaaatgccctatg

SEQ ID NO: 5076 - DNA, 25 bp, Homo sapiens
tttcttttatatttacatgttttta

SEQ ID NO: 5077 - DNA, 25 bp, Homo sapiens
cataattcttgcgttctgtcccaga

SEQ ID NO: 5078 - DNA, 25 bp, Homo sapiens
ccgttgggaattggaaaggatttgc

SEQ ID NO: 5079 - DNA, 25 bp, Homo sapiens
agaggccctggagataactttgtca

SEQ ID NO: 5080 - DNA, 25 bp, Homo sapiens
ccctgtacttggacggaacccttta

SEQ ID NO: 5081 - DNA, 25 bp, Homo sapiens
gcctgagtcctctgtgcattgcaac

SEQ ID NO: 5082 - DNA, 25 bp, Homo sapiens
cccaggtgcagatgacatgttcttc

SEQ ID NO: 5083 - DNA, 25 bp, Homo sapiens
ggcaggttcctaagcacactgtgta

SEQ ID NO: 5084 - DNA, 25 bp, Homo sapiens
ccggctgttacctctgggagcagaa

SEQ ID NO: 5085 - DNA, 25 bp, Homo sapiens
tgcacgtttagatcgcctttcactt

SEQ ID NO: 5086 - DNA, 25 bp, Homo sapiens
ttgagctctctctaggtgacgaata

SEQ ID NO: 5087 - DNA, 25 bp, Homo sapiens
ctcctggcctgcattctgacatata

SEQ ID NO: 5088 - DNA, 25 bp, Homo sapiens
ggcatccttcctcctgtcatctgta

SEQ ID NO: 5089 - DNA, 25 bp, Homo sapiens
agagtacctgatgccaccttatgtg

SEQ ID NO: 5090 - DNA, 25 bp, Homo sapiens
agggccctccatgcatctctgttta

SEQ ID NO: 5091 - DNA, 25 bp, Homo sapiens
tatcctcctctctctactgaagtca

SEQ ID NO: 5092 - DNA, 25 bp, Homo sapiens
cacattcctggccagtggagtcttc

SEQ ID NO: 5093 - DNA, 25 bp, Homo sapiens
acacgcacacacacgtcacatcaca

SEQ ID NO: 5094 - DNA, 25 bp, Homo sapiens
gtgttctaggccgggaagcctagga

SEQ ID NO: 5095 - DNA, 25 bp, Homo sapiens
cctgactctcaatactgactcagca

SEQ ID NO: 5096 - DNA, 25 bp, Homo sapiens
gggacccagtcaccagctgagtttt

SEQ ID NO: 5097 - DNA, 25 bp, Homo sapiens
cccttcagatgggtggttctgctta

SEQ ID NO: 5098 - DNA, 25 bp, Homo sapiens
tgggacttttcttctcctcagctga

SEQ ID NO: 5099 - DNA, 25 bp, Homo sapiens
tttatcctgctcctctccctgaatg

SEQ ID NO: 5100 - DNA, 25 bp, Homo sapiens
ctatttgtcatgtgagaaccttcat

SEQ ID NO: 5101 - DNA, 25 bp, Homo sapiens
ttgggtcccactgcttcagaaaaca

SEQ ID NO: 5102 - DNA, 25 bp, Homo sapiens
ccataacattgaacaaaatatttat

SEQ ID NO: 5103 - DNA, 25 bp, Homo sapiens
cactcaataaatcatatatacatat

SEQ ID NO: 5104 - DNA, 25 bp, Homo sapiens
gtgtgtgtgtgcacgcgtgtgcaca

SEQ ID NO: 5105 - DNA, 25 bp, Homo sapiens
ggggcaggtgttccataaatactaa

SEQ ID NO: 5106 - DNA, 25 bp, Homo sapiens
cagcgggtacccttcagcaagtttc

SEQ ID NO: 5107 - DNA, 25 bp, Homo sapiens
cacccagtagttagtagcccttttg

SEQ ID NO: 5108 - DNA, 25 bp, Homo sapiens
gctcctctgctggatcacactcatg

SEQ ID NO: 5109 - DNA, 25 bp, Homo sapiens
caaatgtctagcataggtctcatcc

SEQ ID NO: 5110 - DNA, 25 bp, Homo sapiens
cgggccctaagtgcctctatagatt

SEQ ID NO: 5111 - DNA, 25 bp, Homo sapiens
ggtacgaacccatcttgtgctaaga

SEQ ID NO: 5112 - DNA, 25 bp, Homo sapiens
ggcgttcatcccaaaacttcagttg

SEQ ID NO: 5113 - DNA, 25 bp, Homo sapiens
tgcccattgctaaggtagtaacttc

SEQ ID NO: 5114 - DNA, 25 bp, Homo sapiens
cctggatatttactgcagacctcta

SEQ ID NO: 5115 - DNA, 25 bp, Homo sapiens
tagactacctttttcccactgaggg

SEQ ID NO: 5116 - DNA, 25 bp, Homo sapiens
cgacgttctgtcttccacattgtta

SEQ ID NO: 5117 - DNA, 25 bp, Homo sapiens
cctggcccactaacggttttctgga

SEQ ID NO: 5118 - DNA, 25 bp, Homo sapiens
ggggctccataactcaagcatgatg

SEQ ID NO: 5119 - DNA, 25 bp, Homo sapiens
tgcccgtgggtcaactacgtaaaca

SEQ ID NO: 5120 - DNA, 25 bp, Homo sapiens
cttcttgaaagacgaggggccttac

SEQ ID NO: 5121 - DNA, 25 bp, Homo sapiens
agctgtgctccgtcaggtctttttc

SEQ ID NO: 5122 - DNA, 25 bp, Homo sapiens
caggcagcccgcaaataattatgta

SEQ ID NO: 5123 - DNA, 25 bp, Homo sapiens
ccgcaagtggggtacatatgagtta

SEQ ID NO: 5124 - DNA, 25 bp, Homo sapiens
gagccatggtatgctgcctctcaca

SEQ ID NO: 5125 - DNA, 25 bp, Homo sapiens
gagagactcttcaccatcacatggg

SEQ ID NO: 5126 - DNA, 25 bp, Homo sapiens
aagcttccttgaccaccgagatttg

SEQ ID NO: 5127 - DNA, 25 bp, Homo sapiens
ccgatggcctacagggattctttta

SEQ ID NO: 5128 - DNA, 25 bp, Homo sapiens
tctcctggggctcaaattggacctg

SEQ ID NO: 5129 - DNA, 25 bp, Homo sapiens
cccggcttctgatagctctttaatg

SEQ ID NO: 5130 - DNA, 25 bp, Homo sapiens
ggcgcatttgttccctttataaaaa

SEQ ID NO: 5131 - DNA, 25 bp, Homo sapiens
tccagggcctcatgaactttagtta

SEQ ID NO: 5132 - DNA, 25 bp, Homo sapiens
cactctggttcaatccaactcaact

SEQ ID NO: 5133 - DNA, 25 bp, Homo sapiens
tgtacgcaggccatattaactagtc

SEQ ID NO: 5134 - DNA, 25 bp, Homo sapiens
ggatggcctcgttttcacagatgta

SEQ ID NO: 5135 - DNA, 25 bp, Homo sapiens
cagtccctggtatgtccaagtctca

SEQ ID NO: 5136 - DNA, 25 bp, Homo sapiens
ccttgccaacaggaagcatgtatta

SEQ ID NO: 5137 - DNA, 25 bp, Homo sapiens
gctctgagagagtacgtccaagtta

SEQ ID NO: 5138 - DNA, 25 bp, Homo sapiens
gcagctagctatgtaccacgttgtg

SEQ ID NO: 5139 - DNA, 25 bp, Homo sapiens
ggtctggtgtctgtgcatatcattc

SEQ ID NO: 5140 - DNA, 25 bp, Homo sapiens
acggtgttttgtgttccttagaaga

SEQ ID NO: 5141 - DNA, 25 bp, Homo sapiens
ccaaacttggagttgctcagatgta

SEQ ID NO: 5142 - DNA, 25 bp, Homo sapiens
actcctgtgaacgtgcctgtatctg

SEQ ID NO: 5143 - DNA, 25 bp, Homo sapiens
gccttctggtttaggacccactatt

SEQ ID NO: 5144 - DNA, 25 bp, Homo sapiens
ggctctaggctaggacacatttata

SEQ ID NO: 5145 - DNA, 25 bp, Homo sapiens
cagtggaactggcaaaactacattt

SEQ ID NO: 5146 - DNA, 25 bp, Homo sapiens
gaggagtcagaaaggcagtataaaa

SEQ ID NO: 5147 - DNA, 25 bp, Homo sapiens
tctctctatagtacaacttgttgaa

SEQ ID NO: 5148 - DNA, 25 bp, Homo sapiens
ggccgcgtctttcttttttggtttc

SEQ ID NO: 5149 - DNA, 25 bp, Homo sapiens
tgggaactctactagcctgcctttg

SEQ ID NO: 5150 - DNA, 25 bp, Homo sapiens
gccagcctggccaagtgaacctaca

SEQ ID NO: 5151 - DNA, 25 bp, Homo sapiens
tggcttccatccctcctgtagcaga

SEQ ID NO: 5152 - DNA, 25 bp, Homo sapiens
cccaaaggcctttcatctcgatatc

SEQ ID NO: 5153 - DNA, 25 bp, Homo sapiens
gagggtcctccactttcagcttatg

SEQ ID NO: 5154 - DNA, 25 bp, Homo sapiens
tgctggcatctgtgtagtcctcata

SEQ ID NO: 5155 - DNA, 25 bp, Homo sapiens
ccctacatggtgtgatgctgcatta

SEQ ID NO: 5156 - DNA, 25 bp, Homo sapiens
gtggaccgccccagcaggacaactg

SEQ ID NO: 5157 - DNA, 25 bp, Homo sapiens
ttaagatttgaaaaagatttttctc

SEQ ID NO: 5158 - DNA, 25 bp, Homo sapiens
ctacacactatgtttatttcttcag

SEQ ID NO: 5159 - DNA, 25 bp, Homo sapiens
atcagccatagttagcatttactta

SEQ ID NO: 5160 - DNA, 25 bp, Homo sapiens
atttctaaaatactgttttattggg

SEQ ID NO: 5161 - DNA, 25 bp, Homo sapiens
aaataaactaacaaattactagaga

SEQ ID NO: 5162 - DNA, 25 bp, Homo sapiens
ccaacagactagtttctactggata

SEQ ID NO: 5163 - DNA, 25 bp, Homo sapiens
tccagatcactttgtccaccgaacg

SEQ ID NO: 5164 - DNA, 25 bp, Homo sapiens
cccgacgttggccagtcagatctgt

SEQ ID NO: 5165 - DNA, 25 bp, Homo sapiens
gtggctatccttccattccattaag

SEQ ID NO: 5166 - DNA, 25 bp, Homo sapiens
gatctgcatcagcatctgtaaaaaa

SEQ ID NO: 5167 - DNA, 25 bp, Homo sapiens
gagccaggtcctcaatcttttgtga

SEQ ID NO: 5168 - DNA, 25 bp, Homo sapiens
gcccaaactcttgtggtctttagca

SEQ ID NO: 5169 - DNA, 25 bp, Homo sapiens
tactctctgtgtgcaaggcctgcaa

SEQ ID NO: 5170 - DNA, 25 bp, Homo sapiens
tcgctgctccgggaaattatctacg

SEQ ID NO: 5171 - DNA, 25 bp, Homo sapiens
tgcagattgaacagggcgtggtata

SEQ ID NO: 5172 - DNA, 25 bp, Homo sapiens
actccagggattacagcagtatgcc

SEQ ID NO: 5173 - DNA, 25 bp, Homo sapiens
cgccctttgggccaggataacttga

SEQ ID NO: 5174 - DNA, 25 bp, Homo sapiens
ggtccctcacagatcgcccaaaatg

SEQ ID NO: 5175 - DNA, 25 bp, Homo sapiens
cttgtttgcacttatttgaggatta

SEQ ID NO: 5176 - DNA, 25 bp, Homo sapiens
agttgatgggttaaagtggtgaaat

SEQ ID NO: 5177 - DNA, 25 bp, Homo sapiens
ggccacgtctctcagtcagattcta

SEQ ID NO: 5178 - DNA, 25 bp, Homo sapiens
ttggaggccaggtttacattttatc

SEQ ID NO: 5179 - DNA, 25 bp, Homo sapiens
gatcttatttcctgggcggcatgcc

SEQ ID NO: 5180 - DNA, 25 bp, Homo sapiens
agacccgaagtcatcagctccaaga

SEQ ID NO: 5181 - DNA, 25 bp, Homo sapiens
ccctgatggcaactcccagtctttg

SEQ ID NO: 5182 - DNA, 25 bp, Homo sapiens
cccatttttggcttgttgaggagac

SEQ ID NO: 5183 - DNA, 25 bp, Homo sapiens
gaatggatggatctctcccttcaaa

SEQ ID NO: 5184 - DNA, 25 bp, Homo sapiens
ggcagatcgccactactccacttgg

SEQ ID NO: 5185 - DNA, 25 bp, Homo sapiens
tgaatacctgggctctctaaataag

SEQ ID NO: 5186 - DNA, 25 bp, Homo sapiens
gcatgagggcttattcctggtacca

SEQ ID NO: 5187 - DNA, 25 bp, Homo sapiens
cacacgtctgtgtacttggccttgg

SEQ ID NO: 5188 - DNA, 25 bp, Homo sapiens
gagtggtgcacatttcagaatcttg

SEQ ID NO: 5189 - DNA, 25 bp, Homo sapiens
tctggagagaaacacccttggtaca

SEQ ID NO: 5190 - DNA, 25 bp, Homo sapiens
gctacatgtctcactaggggtccta

SEQ ID NO: 5191 - DNA, 25 bp, Homo sapiens
gaaaggctttggtctctctcaggaa

SEQ ID NO: 5192 - DNA, 25 bp, Homo sapiens
agtccttggcatcctaccttatatg

SEQ ID NO: 5193 - DNA, 25 bp, Homo sapiens
ttcccactctggacattaggcattc

SEQ ID NO: 5194 - DNA, 25 bp, Homo sapiens
tgcaccagcctcacaacatgaagta

SEQ ID NO: 5195 - DNA, 25 bp, Homo sapiens
gatgattaaacggagcaccacccta

SEQ ID NO: 5196 - DNA, 25 bp, Homo sapiens
cagcttgagaggatagaacagtacc

SEQ ID NO: 5197 - DNA, 25 bp, Homo sapiens
tcctgatggcatgcactgaaaagaa

SEQ ID NO: 5198 - DNA, 25 bp, Homo sapiens
tgagtcaggaattgaggctgctccc

SEQ ID NO: 5199 - DNA, 25 bp, Homo sapiens
agtttcagcccttcacttgtcccga

SEQ ID NO: 5200 - DNA, 25 bp, Homo sapiens
aacttatctccctatatcaaccatc

SEQ ID NO: 5201 - DNA, 25 bp, Homo sapiens
ttccttctctatcagggtagtcata

SEQ ID NO: 5202 - DNA, 25 bp, Homo sapiens
cggaggcctgtttgcaattacaatg

SEQ ID NO: 5203 - DNA, 25 bp, Homo sapiens
ccagctctgctgacttggactgata

SEQ ID NO: 5204 - DNA, 25 bp, Homo sapiens
ggtggagttcacctgcatcctcata

SEQ ID NO: 5205 - DNA, 25 bp, Homo sapiens
tctccaaggctccaaggctagtttc

SEQ ID NO: 5206 - DNA, 25 bp, Homo sapiens
agactctctaggttttcggctttgg

SEQ ID NO: 5207 - DNA, 25 bp, Homo sapiens
ctggcctttgcaatcagtattttaa

SEQ ID NO: 5208 - DNA, 25 bp, Homo sapiens
tagcttagccaacttaatgggacct

SEQ ID NO: 5209 - DNA, 25 bp, Homo sapiens
tttaaagatttttagatggttaaag

SEQ ID NO: 5210 - DNA, 25 bp, Homo sapiens
ttaatcaatattgataacagaattc

SEQ ID NO: 5211 - DNA, 25 bp, Homo sapiens
tttgcttgagacttgttcaccactt

SEQ ID NO: 5212 - DNA, 25 bp, Homo sapiens
aggctgggacctcttgctccttctt

SEQ ID NO: 5213 - DNA, 25 bp, Homo sapiens
caccgtagtctgagcagtgcttctc

SEQ ID NO: 5214 - DNA, 25 bp, Homo sapiens
ggtgttcatctttccatcattggta

SEQ ID NO: 5215 - DNA, 25 bp, Homo sapiens
tgttacctgtgttgcctggccaaag

SEQ ID NO: 5216 - DNA, 25 bp, Homo sapiens
actgcagcttcggttggcacacatg

SEQ ID NO: 5217 - DNA, 25 bp, Homo sapiens
caggccttgggctagatataattaa

SEQ ID NO: 5218 - DNA, 25 bp, Homo sapiens
ccctgcctttgagtcctgctaaaca

SEQ ID NO: 5219 - DNA, 25 bp, Homo sapiens
cgacatggactacctgccttgaagc

SEQ ID NO: 5220 - DNA, 25 bp, Homo sapiens
tgctggaacccaactctaaaaactt

SEQ ID NO: 5221 - DNA, 25 bp, Homo sapiens
tggcacctgccctttgaactatatc

SEQ ID NO: 5222 - DNA, 25 bp, Homo sapiens
ccaggccctatgctggaccatttta

SEQ ID NO: 5223 - DNA, 25 bp, Homo sapiens
tgcttattacttagatctggggttg

SEQ ID NO: 5224 - DNA, 25 bp, Homo sapiens
tagccagagacagcttctatcaatg

SEQ ID NO: 5225 - DNA, 25 bp, Homo sapiens
tgccagcagcctccagcttcttttg

SEQ ID NO: 5226 - DNA, 25 bp, Homo sapiens
ctggtgaacccgactgggaaccttc

SEQ ID NO: 5227 - DNA, 25 bp, Homo sapiens
catcagtactacttcggctggttta

SEQ ID NO: 5228 - DNA, 25 bp, Homo sapiens
ttcagggccttggtggcagttaaca

SEQ ID NO: 5229 - DNA, 25 bp, Homo sapiens
gaatcatggcttttggttgcaagtc

SEQ ID NO: 5230 - DNA, 25 bp, Homo sapiens
tatcatagataactttctatacact

SEQ ID NO: 5231 - DNA, 25 bp, Homo sapiens
ttcctgctcacttcatggctaaatg

SEQ ID NO: 5232 - DNA, 25 bp, Homo sapiens
cctggcttctgggtagttggtataa

SEQ ID NO: 5233 - DNA, 25 bp, Homo sapiens
gtaggttctttcagtgcagtccaca

SEQ ID NO: 5234 - DNA, 25 bp, Homo sapiens
tactctgcctcttacgtcacttaca

SEQ ID NO: 5235 - DNA, 25 bp, Homo sapiens
actctgaggttaactgccatttgtg

SEQ ID NO: 5236 - DNA, 25 bp, Homo sapiens
gtttttctttacgtagtctgttttt

SEQ ID NO: 5237 - DNA, 25 bp, Homo sapiens
ctagactttatcttgggcctccaca

SEQ ID NO: 5238 - DNA, 25 bp, Homo sapiens
tatcactccggaaactatgcttatc

SEQ ID NO: 5239 - DNA, 25 bp, Homo sapiens
ttaatgtaatccctgaaatgtatcc

SEQ ID NO: 5240 - DNA, 25 bp, Homo sapiens
cctcaaccatctggggccacttgga

SEQ ID NO: 5241 - DNA, 25 bp, Homo sapiens
tgcatataacaagatgtgaaattgg

SEQ ID NO: 5242 - DNA, 25 bp, Homo sapiens
agggtctcatacaagtctcaaagtc

SEQ ID NO: 5243 - DNA, 25 bp, Homo sapiens
tcccagagctgaggttacaaattcc

SEQ ID NO: 5244 - DNA, 25 bp, Homo sapiens
agcggccaatccctcctgaaatgaa

SEQ ID NO: 5245 - DNA, 25 bp, Homo sapiens
gatgcttccaaatgtctactgagta

SEQ ID NO: 5246 - DNA, 25 bp, Homo sapiens
atggggcctggtccaatttcaaaga

SEQ ID NO: 5247 - DNA, 25 bp, Homo sapiens
gttctctgacgacccatgtttctta

SEQ ID NO: 5248 - DNA, 25 bp, Homo sapiens
ccatcccatatttgcttgaagagtg

SEQ ID NO: 5249 - DNA, 25 bp, Homo sapiens
gcctaggcccttttgaagtgtttta

SEQ ID NO: 5250 - DNA, 25 bp, Homo sapiens
tgggagccagcttagtccaacaata

SEQ ID NO: 5251 - DNA, 25 bp, Homo sapiens
ggaggctttttctaactactgtgta

SEQ ID NO: 5252 - DNA, 25 bp, Homo sapiens
acggtgacttgcttttcttgtgaca

SEQ ID NO: 5253 - DNA, 25 bp, Homo sapiens
gtagcagcggccatagctcttcaga

SEQ ID NO: 5254 - DNA, 25 bp, Homo sapiens
gacccaggatcagcatttcaaccga

SEQ ID NO: 5255 - DNA, 25 bp, Homo sapiens
cctagctggactgcaaaggccaatc

SEQ ID NO: 5256 - DNA, 25 bp, Homo sapiens
ggcactcaccttctcaggagcattg

SEQ ID NO: 5257 - DNA, 25 bp, Homo sapiens
gccctgccagtgcaatgctctgtta

SEQ ID NO: 5258 - DNA, 25 bp, Homo sapiens
ggctctgagacccacacttgtaatc

SEQ ID NO: 5259 - DNA, 25 bp, Homo sapiens
ctcgcatctgcttgggattaaaaca

SEQ ID NO: 5260 - DNA, 25 bp, Homo sapiens
ggcatttgccatatcacccattctg

SEQ ID NO: 5261 - DNA, 25 bp, Homo sapiens
tgctggacccgagaaaactagatta

SEQ ID NO: 5262 - DNA, 25 bp, Homo sapiens
ttcagccgagtcttgagaatctaca

SEQ ID NO: 5263 - DNA, 25 bp, Homo sapiens
tcagggaacacaaggctttaaacgc

SEQ ID NO: 5264 - DNA, 25 bp, Homo sapiens
tccgtcactcctgttggccctgaag

SEQ ID NO: 5265 - DNA, 25 bp, Homo sapiens
ggtcccattccctgcctcatagttt

SEQ ID NO: 5266 - DNA, 25 bp, Homo sapiens
agtgaaaaacctgatgaagaccttc

SEQ ID NO: 5267 - DNA, 25 bp, Homo sapiens
aggcacactccatgctcctcagagt

SEQ ID NO: 5268 - DNA, 25 bp, Homo sapiens
ctagacggggtctttctatgtcacc

SEQ ID NO: 5269 - DNA, 25 bp, Homo sapiens
ccttggaaaatctgggcatctggtc

SEQ ID NO: 5270 - DNA, 25 bp, Homo sapiens
caccatgttactggagattcactcc

SEQ ID NO: 5271 - DNA, 25 bp, Homo sapiens
ttatttcccatgcattgttttcgtc

SEQ ID NO: 5272 - DNA, 25 bp, Homo sapiens
ccaggttactaagaggcggaagtga

SEQ ID NO: 5273 - DNA, 25 bp, Homo sapiens
tgtgaagcccagctctggagcatga

SEQ ID NO: 5274 - DNA, 25 bp, Homo sapiens
catctacatttcagtacggaagata

SEQ ID NO: 5275 - DNA, 25 bp, Homo sapiens
cacacacgtatgcaccctattggtt

SEQ ID NO: 5276 - DNA, 25 bp, Homo sapiens
agtctgtgttacttggttacagcag

SEQ ID NO: 5277 - DNA, 25 bp, Homo sapiens
ggaaaagtgttcttctatacaagtg

SEQ ID NO: 5278 - DNA, 25 bp, Homo sapiens
gcggtgaggtgcaaactctcttatc

SEQ ID NO: 5279 - DNA, 25 bp, Homo sapiens
ggcgggcccagaaaccaaagaattt

SEQ ID NO: 5280 - DNA, 25 bp, Homo sapiens
ggctgtggaccttaccttgatattc

SEQ ID NO: 5281 - DNA, 25 bp, Homo sapiens
ttacgcctagaaatggagcctgttc

SEQ ID NO: 5282 - DNA, 25 bp, Homo sapiens
ctgaggacttcttgttaggggatgc

SEQ ID NO: 5283 - DNA, 25 bp, Homo sapiens
tggccgctttgaacatagtgctacc

SEQ ID NO: 5284 - DNA, 25 bp, Homo sapiens
tgactgttatcatggatagatcctg

SEQ ID NO: 5285 - DNA, 25 bp, Homo sapiens
tatggatgcctgtagcctctgtctc

SEQ ID NO: 5286 - DNA, 25 bp, Homo sapiens
ccgtagtagtccaggcaattatgtc

SEQ ID NO: 5287 - DNA, 25 bp, Homo sapiens
ttccattttcacagtgccttggaga

SEQ ID NO: 5288 - DNA, 25 bp, Homo sapiens
tgatgacacttggataccctagatg

SEQ ID NO: 5289 - DNA, 25 bp, Homo sapiens
tcagctgctgtgatacctggctaca

SEQ ID NO: 5290 - DNA, 25 bp, Homo sapiens
caaaatttgtgctataggcagtccc

SEQ ID NO: 5291 - DNA, 25 bp, Homo sapiens
tataaggtaatcaacatatcttcaa

SEQ ID NO: 5292 - DNA, 25 bp, Homo sapiens
ggtggcccttcatggtaataatcta

SEQ ID NO: 5293 - DNA, 25 bp, Homo sapiens
tttgctttggggataatgtctcaca

SEQ ID NO: 5294 - DNA, 25 bp, Homo sapiens
tcctggagctgtcataattacttta

SEQ ID NO: 5295 - DNA, 25 bp, Homo sapiens
actgcattgacttttctagggttta

SEQ ID NO: 5296 - DNA, 25 bp, Homo sapiens
cactgtctgtgtctctgggttttta

SEQ ID NO: 5297 - DNA, 25 bp, Homo sapiens
tctcactgatgtcctgctaagcttc

SEQ ID NO: 5298 - DNA, 25 bp, Homo sapiens
gtagcagattcattccacaagggca

SEQ ID NO: 5299 - DNA, 25 bp, Homo sapiens
gggtggtggacttcctccatgaata

SEQ ID NO: 5300 - DNA, 25 bp, Homo sapiens
ctttgtggcatttagggatccctcc

SEQ ID NO: 5301 - DNA, 25 bp, Homo sapiens
taggctataacagttttccagaatg

SEQ ID NO: 5302 - DNA, 25 bp, Homo sapiens
gcatcagggcaacgagtccttgtta

SEQ ID NO: 5303 - DNA, 25 bp, Homo sapiens
gccttgatgttgtggtcttcgctta

SEQ ID NO: 5304 - DNA, 25 bp, Homo sapiens
gacaagttacatgggagagagcaaa

SEQ ID NO: 5305 - DNA, 25 bp, Homo sapiens
agtagacatacagggttgccgtttg

SEQ ID NO: 5306 - DNA, 25 bp, Homo sapiens
ccattcagagaaacatcgggttaga

SEQ ID NO: 5307 - DNA, 25 bp, Homo sapiens
gcatgagattttaccgcagcccaca

SEQ ID NO: 5308 - DNA, 25 bp, Homo sapiens
gccctgtgtgattgaagttgccata

SEQ ID NO: 5309 - DNA, 25 bp, Homo sapiens
ccgccatctggtacacactttgtta

SEQ ID NO: 5310 - DNA, 25 bp, Homo sapiens
gttctagttagttcaccaaaagctg

SEQ ID NO: 5311 - DNA, 25 bp, Homo sapiens
catacctatatagtatttaaaatgt

SEQ ID NO: 5312 - DNA, 25 bp, Homo sapiens
tctttatagcaatgcaaaaaaagtg

SEQ ID NO: 5313 - DNA, 25 bp, Homo sapiens
gcagcttttgcaacagagatcttta

SEQ ID NO: 5314 - DNA, 25 bp, Homo sapiens
agcaacgcaaaacacggataactga

SEQ ID NO: 5315 - DNA, 25 bp, Homo sapiens
cttcctctggaaagggaaatacatc

SEQ ID NO: 5316 - DNA, 25 bp, Homo sapiens
tgtatgtagcacctcagaattgaac

SEQ ID NO: 5317 - DNA, 25 bp, Homo sapiens
gtcaacctgtgatgcttctagctca

SEQ ID NO: 5318 - DNA, 25 bp, Homo sapiens
tcctgagatgccaccctggggaata

SEQ ID NO: 5319 - DNA, 25 bp, Homo sapiens
actactgactctctgggaactttta

SEQ ID NO: 5320 - DNA, 25 bp, Homo sapiens
aaggacccttcatgacgtgttgaga

SEQ ID NO: 5321 - DNA, 25 bp, Homo sapiens
ctccttgtagttactgtttgagaga

SEQ ID NO: 5322 - DNA, 25 bp, Homo sapiens
ggatgtctgttctacactctaagta

SEQ ID NO: 5323 - DNA, 25 bp, Homo sapiens
agcttgacttatctcctaggtgaca

SEQ ID NO: 5324 - DNA, 25 bp, Homo sapiens
ttgcggctttctctcatctcaggta

SEQ ID NO: 5325 - DNA, 25 bp, Homo sapiens
tgtgtcattcgcttcttccctggtg

SEQ ID NO: 5326 - DNA, 25 bp, Homo sapiens
gctgctacatgcaaagaaccaggta

SEQ ID NO: 5327 - DNA, 25 bp, Homo sapiens
ggtcttctgcaagagcctgaacttg

SEQ ID NO: 5328 - DNA, 25 bp, Homo sapiens
gggaccacagacttccgacctaaga

SEQ ID NO: 5329 - DNA, 25 bp, Homo sapiens
cctgtggatctgtgtgcacctaaca

SEQ ID NO: 5330 - DNA, 25 bp, Homo sapiens
caatcaatatgaaatttgaacccat

SEQ ID NO: 5331 - DNA, 25 bp, Homo sapiens
gctgcagtggcaggagacatttccc

SEQ ID NO: 5332 - DNA, 25 bp, Homo sapiens
tgcttcctcacaatcttctctctta

SEQ ID NO: 5333 - DNA, 25 bp, Homo sapiens
cacaaaaaaaatgtatggatggctg

SEQ ID NO: 5334 - DNA, 25 bp, Homo sapiens
ggtggtgtctgttccaagaatcaca

SEQ ID NO: 5335 - DNA, 25 bp, Homo sapiens
tgcctggaggcagagccgtaatatc

SEQ ID NO: 5336 - DNA, 25 bp, Homo sapiens
tctggaccagttaggattcgtcttc

SEQ ID NO: 5337 - DNA, 25 bp, Homo sapiens
gacccaggctagaaatcataaagga

SEQ ID NO: 5338 - DNA, 25 bp, Homo sapiens
tttttaatttctctggacctttttt

SEQ ID NO: 5339 - DNA, 25 bp, Homo sapiens
gttttttctctttttgaatcctgtt

SEQ ID NO: 5340 - DNA, 25 bp, Homo sapiens
tccccacattcttgcctgcctcctg

SEQ ID NO: 5341 - DNA, 25 bp, Homo sapiens
ccactttccaaagaaggttttgaga

SEQ ID NO: 5342 - DNA, 25 bp, Homo sapiens
catgtctggcaagacaattaagcag

SEQ ID NO: 5343 - DNA, 25 bp, Homo sapiens
acggaatttctctgcagcctgtatc

SEQ ID NO: 5344 - DNA, 25 bp, Homo sapiens
ggaagtaactcctacgcatctgttt

SEQ ID NO: 5345 - DNA, 25 bp, Homo sapiens
gaagcaatggtaaagaactccctgg

SEQ ID NO: 5346 - DNA, 25 bp, Homo sapiens
cccaccattttcttcctttaggagg

SEQ ID NO: 5347 - DNA, 25 bp, Homo sapiens
gggccggcgatcagccttttatgca

SEQ ID NO: 5348 - DNA, 25 bp, Homo sapiens
ggctcttgcacgtagaccttcagtt

SEQ ID NO: 5349 - DNA, 25 bp, Homo sapiens
cctttcaggggtcattgtttgcata

SEQ ID NO: 5350 - DNA, 25 bp, Homo sapiens
ttcagagcacatatccattaaaggc

SEQ ID NO: 5351 - DNA, 25 bp, Homo sapiens
ttattaactaataaaaacaaccatc

SEQ ID NO: 5352 - DNA, 25 bp, Homo sapiens
tgctacctcaggttaggtgccatta

SEQ ID NO: 5353 - DNA, 25 bp, Homo sapiens
agcgggttacttagatttaaactta

SEQ ID NO: 5354 - DNA, 25 bp, Homo sapiens
gtgacttgccagtgtacttcccatt

SEQ ID NO: 5355 - DNA, 25 bp, Homo sapiens
tgcagagcccgttatactcacttgc

SEQ ID NO: 5356 - DNA, 25 bp, Homo sapiens
gtccgctggcatcaggcaatctgtc

SEQ ID NO: 5357 - DNA, 25 bp, Homo sapiens
ggtcgcaatttcgactcttttcaca

SEQ ID NO: 5358 - DNA, 25 bp, Homo sapiens
aaatgaaacaagaatacttttctta

SEQ ID NO: 5359 - DNA, 25 bp, Homo sapiens
ggctcagatagtttcattcagtgtc

SEQ ID NO: 5360 - DNA, 25 bp, Homo sapiens
ttcaactttggccacaccgggtttc

SEQ ID NO: 5361 - DNA, 25 bp, Homo sapiens
tctggccatagaagacccgtggttc

SEQ ID NO: 5362 - DNA, 25 bp, Homo sapiens
tcaagttataatattgagcaagtgc

SEQ ID NO: 5363 - DNA, 25 bp, Homo sapiens
gtgttttatttatcaatcttaattt

SEQ ID NO: 5364 - DNA, 25 bp, Homo sapiens
cctcacctcaaaaaggggcataatt

SEQ ID NO: 5365 - DNA, 25 bp, Homo sapiens
ccagtttccggcactatacagaatg

SEQ ID NO: 5366 - DNA, 25 bp, Homo sapiens
tgtgcagattttcggctcccagata

SEQ ID NO: 5367 - DNA, 25 bp, Homo sapiens
caacccgatgtagcttttacgtcta

SEQ ID NO: 5368 - DNA, 25 bp, Homo sapiens
catgtgctttcttgacagggcttga

SEQ ID NO: 5369 - DNA, 25 bp, Homo sapiens
ccctcaagtggcatacagtctaata

SEQ ID NO: 5370 - DNA, 25 bp, Homo sapiens
ggctctgccctccaggaatttaaaa

SEQ ID NO: 5371 - DNA, 25 bp, Homo sapiens
agtttaactttttgatacttaactg

SEQ ID NO: 5372 - DNA, 25 bp, Homo sapiens
aaacatcgtttggtagcctcaaggc

SEQ ID NO: 5373 - DNA, 25 bp, Homo sapiens
tcctggtgtggcctatgtttaaagc

SEQ ID NO: 5374 - DNA, 25 bp, Homo sapiens
aataaataaaaagagacagattgta

SEQ ID NO: 5375 - DNA, 25 bp, Homo sapiens
ggccatcttttgtgtctggacaatt

SEQ ID NO: 5376 - DNA, 25 bp, Homo sapiens
tgtagaatatgtctcctccaggttc

SEQ ID NO: 5377 - DNA, 25 bp, Homo sapiens
tgtcactgaacgtcatgaagttgcc

SEQ ID NO: 5378 - DNA, 25 bp, Homo sapiens
tcgacactggtctagcctcagagta

SEQ ID NO: 5379 - DNA, 25 bp, Homo sapiens
tttgaggagtttggaaagaatttag

SEQ ID NO: 5380 - DNA, 25 bp, Homo sapiens
cccagtgtgagtacatcatgcccta

SEQ ID NO: 5381 - DNA, 25 bp, Homo sapiens
gctgttgctgcaccatcatcgctga

SEQ ID NO: 5382 - DNA, 25 bp, Homo sapiens
ttgccatcttcagtccaatccagtg

SEQ ID NO: 5383 - DNA, 25 bp, Homo sapiens
ggtaggccagatcacaccactatgg

SEQ ID NO: 5384 - DNA, 25 bp, Homo sapiens
cgttattgactacagaagcccttcc

SEQ ID NO: 5385 - DNA, 25 bp, Homo sapiens
ggccttccaggagccaacagaatta

SEQ ID NO: 5386 - DNA, 25 bp, Homo sapiens
tctggtgccttcaggaagatatatc

SEQ ID NO: 5387 - DNA, 25 bp, Homo sapiens
tgatacatagcagtgaatgcactat

SEQ ID NO: 5388 - DNA, 25 bp, Homo sapiens
tggtatctctgatgccttacatagg

SEQ ID NO: 5389 - DNA, 25 bp, Homo sapiens
atcaagctctttctgatgaggtttc

SEQ ID NO: 5390 - DNA, 25 bp, Homo sapiens
cgtgaaccctgaaatctagcttttt

SEQ ID NO: 5391 - DNA, 25 bp, Homo sapiens
taagtttatgacaaacaaaacatca

SEQ ID NO: 5392 - DNA, 25 bp, Homo sapiens
cctcctaaatagcaggcatggattc

SEQ ID NO: 5393 - DNA, 25 bp, Homo sapiens
gattcattgtcctcagtgtagtttt

SEQ ID NO: 5394 - DNA, 25 bp, Homo sapiens
taggaggtaccttgactaaatagtc

SEQ ID NO: 5395 - DNA, 25 bp, Homo sapiens
ggaggaccttccttccaaatggaga

SEQ ID NO: 5396 - DNA, 25 bp, Homo sapiens
cctaaatgcttctgtgggaaacatc

SEQ ID NO: 5397 - DNA, 25 bp, Homo sapiens
cctgaacttctctggggagggaatc

SEQ ID NO: 5398 - DNA, 25 bp, Homo sapiens
cagctgcagctctggttatatggta

SEQ ID NO: 5399 - DNA, 25 bp, Homo sapiens
gcaaagttcaacagcaaggggtaaa

SEQ ID NO: 5400 - DNA, 25 bp, Homo sapiens
acaaaaaaatcacgaaacatttttc

SEQ ID NO: 5401 - DNA, 25 bp, Homo sapiens
ctctggtgaaaactccctggatcta

SEQ ID NO: 5402 - DNA, 25 bp, Homo sapiens
gggcagttcatttgccagttaatac

SEQ ID NO: 5403 - DNA, 25 bp, Homo sapiens
caaaggaaggctagagacagctggg

SEQ ID NO: 5404 - DNA, 25 bp, Homo sapiens
cctcccattaagatcctgcagaaga

SEQ ID NO: 5405 - DNA, 25 bp, Homo sapiens
gagcaacatctctacttagtgaatg

SEQ ID NO: 5406 - DNA, 25 bp, Homo sapiens
ggctgttattgatgtccctcctagg

SEQ ID NO: 5407 - DNA, 25 bp, Homo sapiens
gaggttttttaggttcttaaagaca

SEQ ID NO: 5408 - DNA, 25 bp, Homo sapiens
tgtacagcatgttctctaattctga

SEQ ID NO: 5409 - DNA, 25 bp, Homo sapiens
ccgtggacttttggtatatatcttt

SEQ ID NO: 5410 - DNA, 25 bp, Homo sapiens
ttttcaccaggtagatgacacttcc

SEQ ID NO: 5411 - DNA, 25 bp, Homo sapiens
gccggcaatccgaggtagatgtatc

SEQ ID NO: 5412 - DNA, 25 bp, Homo sapiens
ttacatagtgtggttagtgcaaact

SEQ ID NO: 5413 - DNA, 25 bp, Homo sapiens
ttctcgggtggcacaattggctgac

SEQ ID NO: 5414 - DNA, 25 bp, Homo sapiens
tcccagcagttctgaggatacagca

SEQ ID NO: 5415 - DNA, 25 bp, Homo sapiens
tggttcctttttcctattgagtctg

SEQ ID NO: 5416 - DNA, 25 bp, Homo sapiens
tggaaatacgccctccctttagcta

SEQ ID NO: 5417 - DNA, 25 bp, Homo sapiens
gtttttcacttctggcaatctagca

SEQ ID NO: 5418 - DNA, 25 bp, Homo sapiens
gggtggtctgctacctcaacaaaca

SEQ ID NO: 5419 - DNA, 25 bp, Homo sapiens
actacaaggcttggaggcatactca

SEQ ID NO: 5420 - DNA, 25 bp, Homo sapiens
gatggacactctctgtctatttgta

SEQ ID NO: 5421 - DNA, 25 bp, Homo sapiens
taaaagtgataggaggtataattaa

SEQ ID NO: 5422 - DNA, 25 bp, Homo sapiens
ggagagccctccctgagaagttttg

SEQ ID NO: 5423 - DNA, 25 bp, Homo sapiens
tagccagaccagcagagagaatctc

SEQ ID NO: 5424 - DNA, 25 bp, Homo sapiens
tctgtgacttggttactgcccttta

SEQ ID NO: 5425 - DNA, 25 bp, Homo sapiens
ttggattgacacactttggagtttg

SEQ ID NO: 5426 - DNA, 25 bp, Homo sapiens
gttctgacactatcctccaaccttg

SEQ ID NO: 5427 - DNA, 25 bp, Homo sapiens
gcccttgtcactattaacctcattg

SEQ ID NO: 5428 - DNA, 25 bp, Homo sapiens
gtgcctcaagagctccaaaaatgcc

SEQ ID NO: 5429 - DNA, 25 bp, Homo sapiens
tagccaagagggaatctactcaaga

SEQ ID NO: 5430 - DNA, 25 bp, Homo sapiens
actgctgttccctccacttgacatg

SEQ ID NO: 5431 - DNA, 25 bp, Homo sapiens
gcaggactatcctaggccacgaatg

SEQ ID NO: 5432 - DNA, 25 bp, Homo sapiens
gcggcatgtctaggaacccactcta

SEQ ID NO: 5433 - DNA, 25 bp, Homo sapiens
cccgtgtttagcagttggccgttaa

SEQ ID NO: 5434 - DNA, 25 bp, Homo sapiens
tccctggctctttcttgtctagatg

SEQ ID NO: 5435 - DNA, 25 bp, Homo sapiens
ggcaggaccctagaactggttacta

SEQ ID NO: 5436 - DNA, 25 bp, Homo sapiens
tcgctgctgggaagtcagatcaatc

SEQ ID NO: 5437 - DNA, 25 bp, Homo sapiens
agggcttttcgcatgatctctaata

SEQ ID NO: 5438 - DNA, 25 bp, Homo sapiens
tggaacgtctagaacacctggcatg

SEQ ID NO: 5439 - DNA, 25 bp, Homo sapiens
caggggtaaacaggccagcactctc

SEQ ID NO: 5440 - DNA, 25 bp, Homo sapiens
ggcccattttcccagttaatagtcc

SEQ ID NO: 5441 - DNA, 25 bp, Homo sapiens
tgggactttgaagcttctcttatcc

SEQ ID NO: 5442 - DNA, 25 bp, Homo sapiens
ttaaatagctctattttaatctata

SEQ ID NO: 5443 - DNA, 25 bp, Homo sapiens
gaagctgttcaggatgcccatttta

SEQ ID NO: 5444 - DNA, 25 bp, Homo sapiens
ccttggaactcctacttattgactc

SEQ ID NO: 5445 - DNA, 25 bp, Homo sapiens
tggcaatcagtcttcatgaacagga

SEQ ID NO: 5446 - DNA, 25 bp, Homo sapiens
ggtctctgagtgtgctaacatcatt

SEQ ID NO: 5447 - DNA, 25 bp, Homo sapiens
tctagcaaggccaaatgtaagggtg

SEQ ID NO: 5448 - DNA, 25 bp, Homo sapiens
ccaacttaagagcatggcatgtctc

SEQ ID NO: 5449 - DNA, 25 bp, Homo sapiens
taagtgataatccttttaaaagaga

SEQ ID NO: 5450 - DNA, 25 bp, Homo sapiens
accatgcatcaactgaaagtggaag

SEQ ID NO: 5451 - DNA, 25 bp, Homo sapiens
tgcattttatagctggaagaccaca

SEQ ID NO: 5452 - DNA, 25 bp, Homo sapiens
tggagagctggaactcccactgctg

SEQ ID NO: 5453 - DNA, 25 bp, Homo sapiens
ttttttgtttttgaaaggaaaggtc

SEQ ID NO: 5454 - DNA, 25 bp, Homo sapiens
ggtcagtgcacctagtacttctctc

SEQ ID NO: 5455 - DNA, 25 bp, Homo sapiens
aggctctttctctaggcccttcata

SEQ ID NO: 5456 - DNA, 25 bp, Homo sapiens
ggcctggttagcatggtatttccta

SEQ ID NO: 5457 - DNA, 25 bp, Homo sapiens
gacatggaacattgggctcttctta

SEQ ID NO: 5458 - DNA, 25 bp, Homo sapiens
cagactctagtagttacaatttttg

SEQ ID NO: 5459 - DNA, 25 bp, Homo sapiens
gatctttagttgagttgtgaccgta

SEQ ID NO: 5460 - DNA, 25 bp, Homo sapiens
ttttttcgtatgtttttaccatgaa

SEQ ID NO: 5461 - DNA, 25 bp, Homo sapiens
accctggggtgaccgtatttttaga

SEQ ID NO: 5462 - DNA, 25 bp, Homo sapiens
tcagtacacttgagacttacatttg

SEQ ID NO: 5463 - DNA, 25 bp, Homo sapiens
agtaggtttttatcgcttgcaccca

SEQ ID NO: 5464 - DNA, 25 bp, Homo sapiens
ctccaggctttctttgggacactta

SEQ ID NO: 5465 - DNA, 25 bp, Homo sapiens
tataacactgtacttggcacttggg

SEQ ID NO: 5466 - DNA, 25 bp, Homo sapiens
tctgagcttgagaagtcccacactt

SEQ ID NO: 5467 - DNA, 25 bp, Homo sapiens
ttacttaaagcattattgttattaa

SEQ ID NO: 5468 - DNA, 25 bp, Homo sapiens
tgtgagtttcttaaggactagagtt

SEQ ID NO: 5469 - DNA, 25 bp, Homo sapiens
gtggccattcagtcttcctaaagga

SEQ ID NO: 5470 - DNA, 25 bp, Homo sapiens
ccaggcttgctactcaacttgttta

SEQ ID NO: 5471 - DNA, 25 bp, Homo sapiens
ggcccttgcacacagcggcatttga

SEQ ID NO: 5472 - DNA, 25 bp, Homo sapiens
aatcctggattgttggcccttaaga

SEQ ID NO: 5473 - DNA, 25 bp, Homo sapiens
tgggtaactggacacctgagatctg

SEQ ID NO: 5474 - DNA, 25 bp, Homo sapiens
tgggcgagggcaccacactaaacgt

SEQ ID NO: 5475 - DNA, 25 bp, Homo sapiens
aaagatttattgaaacaatgcctta

SEQ ID NO: 5476 - DNA, 25 bp, Homo sapiens
gtggtttcagttctcacctattttc

SEQ ID NO: 5477 - DNA, 25 bp, Homo sapiens
tctgcctcccagatactactggtta

SEQ ID NO: 5478 - DNA, 25 bp, Homo sapiens
ctagcccttccacccgaaatggatt

SEQ ID NO: 5479 - DNA, 25 bp, Homo sapiens
ccatgaccccactgcaccttcccaa

SEQ ID NO: 5480 - DNA, 25 bp, Homo sapiens
aaaaaattgttaatagagtgtctct

SEQ ID NO: 5481 - DNA, 25 bp, Homo sapiens
tgtggaccctcagcttttaaagtgc

SEQ ID NO: 5482 - DNA, 25 bp, Homo sapiens
gagctatacctttttgcctgaagag

SEQ ID NO: 5483 - DNA, 25 bp, Homo sapiens
tgaccaggcagcagactaggtcttc

SEQ ID NO: 5484 - DNA, 25 bp, Homo sapiens
gttctttctgtttaggtgcccaata

SEQ ID NO: 5485 - DNA, 25 bp, Homo sapiens
aggagcctgttgcattctgtctgtc

SEQ ID NO: 5486 - DNA, 25 bp, Homo sapiens
gagacatccaaagcaccatccattg

SEQ ID NO: 5487 - DNA, 25 bp, Homo sapiens
ggtgaatgtctatactttcatgtga

SEQ ID NO: 5488 - DNA, 25 bp, Homo sapiens
gccgctcccagtctttcagttctta

SEQ ID NO: 5489 - DNA, 25 bp, Homo sapiens
tctcagctggcaaagatcttctttc

SEQ ID NO: 5490 - DNA, 25 bp, Homo sapiens
ccggagttctcaccattatcatgta

SEQ ID NO: 5491 - DNA, 25 bp, Homo sapiens
gacctcgtgatttcttggcatgtga

SEQ ID NO: 5492 - DNA, 25 bp, Homo sapiens
aggccctttcttcacctcaagcatg

SEQ ID NO: 5493 - DNA, 25 bp, Homo sapiens
attccaaggtcaagagaggttttca

SEQ ID NO: 5494 - DNA, 25 bp, Homo sapiens
cacaggagccaggtgattttcattc

SEQ ID NO: 5495 - DNA, 25 bp, Homo sapiens
ttcttagaactaggagccacattac

SEQ ID NO: 5496 - DNA, 25 bp, Homo sapiens
tctccgtgtctcagggttaagctca

SEQ ID NO: 5497 - DNA, 25 bp, Homo sapiens
tctctaaactggcttgggaattctg

SEQ ID NO: 5498 - DNA, 25 bp, Homo sapiens
tcctgactgaaagcagccctggata

SEQ ID NO: 5499 - DNA, 25 bp, Homo sapiens
aaagctgtcttgagggatgccacca

SEQ ID NO: 5500 - DNA, 25 bp, Homo sapiens
ctcagattaaatagttcctatccag

SEQ ID NO: 5501 - DNA, 25 bp, Homo sapiens
gggcctgtctagcttgctgtccaaa

SEQ ID NO: 5502 - DNA, 25 bp, Homo sapiens
gagcactcaggttctttcaaatcgc

SEQ ID NO: 5503 - DNA, 25 bp, Homo sapiens
cagaagcctctcttgtgtgtccaga

SEQ ID NO: 5504 - DNA, 25 bp, Homo sapiens
tgacggttaaagcttaagttccttg

SEQ ID NO: 5505 - DNA, 25 bp, Homo sapiens
ccctaggtgaatgggtgagtacatt

SEQ ID NO: 5506 - DNA, 25 bp, Homo sapiens
tctcagtccccaatagccattttaa

SEQ ID NO: 5507 - DNA, 25 bp, Homo sapiens
ctgcttctggaaatatagggtcatc

SEQ ID NO: 5508 - DNA, 25 bp, Homo sapiens
acgtgcctgtatggggagaaagtcc

SEQ ID NO: 5509 - DNA, 25 bp, Homo sapiens
ttcctgagacagctccttgcacatg

SEQ ID NO: 5510 - DNA, 25 bp, Homo sapiens
gcccttcacagtatatctccagcta

SEQ ID NO: 5511 - DNA, 25 bp, Homo sapiens
gaggctccttgttttctgcatagta

SEQ ID NO: 5512 - DNA, 25 bp, Homo sapiens
tcataggaccagtgcttaccatttc

SEQ ID NO: 5513 - DNA, 25 bp, Homo sapiens
ggccatagtcaccagagcccttttg

SEQ ID NO: 5514 - DNA, 25 bp, Homo sapiens
gctcttggtgcttgggtgtaataaa

SEQ ID NO: 5515 - DNA, 25 bp, Homo sapiens
ctgctggcttcctctcctgtgtgat

SEQ ID NO: 5516 - DNA, 25 bp, Homo sapiens
ccgctacgtttgctcaggcatttga

SEQ ID NO: 5517 - DNA, 25 bp, Homo sapiens
ttggcatcgcccacagacactgttc

SEQ ID NO: 5518 - DNA, 25 bp, Homo sapiens
attttgctcccagtaaggcttcaga

SEQ ID NO: 5519 - DNA, 25 bp, Homo sapiens
ggttcacgtggctgtagttttcatc

SEQ ID NO: 5520 - DNA, 25 bp, Homo sapiens
agggcaagagttcagtccagtattc

SEQ ID NO: 5521 - DNA, 25 bp, Homo sapiens
tcaggatgctgtttggcacatcaca

SEQ ID NO: 5522 - DNA, 25 bp, Homo sapiens
caggacccgttagtattttgcaatg

SEQ ID NO: 5523 - DNA, 25 bp, Homo sapiens
agggccttgcctttgtgctctaaca

SEQ ID NO: 5524 - DNA, 25 bp, Homo sapiens
cctggacctgtgaatcttgtgtata

SEQ ID NO: 5525 - DNA, 25 bp, Homo sapiens
agatttggggatattttgtattcca

SEQ ID NO: 5526 - DNA, 25 bp, Homo sapiens
aaatccaattgttgcctcgtcagta

SEQ ID NO: 5527 - DNA, 25 bp, Homo sapiens
ctcttggggccagttgaaaggattc

SEQ ID NO: 5528 - DNA, 25 bp, Homo sapiens
tacacaattacacaatacagagggg

SEQ ID NO: 5529 - DNA, 25 bp, Homo sapiens
tattatgagatagggaaagattttt

SEQ ID NO: 5530 - DNA, 25 bp, Homo sapiens
aggctcctctgtagcatatttgaga

SEQ ID NO: 5531 - DNA, 25 bp, Homo sapiens
tcacacacatgcacagagtttattg

SEQ ID NO: 5532 - DNA, 25 bp, Homo sapiens
gccatttcccagtgatgtgctagca

SEQ ID NO: 5533 - DNA, 25 bp, Homo sapiens
ggtgggatttccttctctctgtaaa

SEQ ID NO: 5534 - DNA, 25 bp, Homo sapiens
gggtgtaccacgcaatggcctaatg

SEQ ID NO: 5535 - DNA, 25 bp, Homo sapiens
catttacctgtgtgtgcggcttagc

SEQ ID NO: 5536 - DNA, 25 bp, Homo sapiens
cctcagctctagaatgtcggccaca

SEQ ID NO: 5537 - DNA, 25 bp, Homo sapiens
cctggcggttgcagatagtaatatc

SEQ ID NO: 5538 - DNA, 25 bp, Homo sapiens
tgggtgctctcctcatctaacaaca

SEQ ID NO: 5539 - DNA, 25 bp, Homo sapiens
ccgttcggtttgcacaggattgtta

SEQ ID NO: 5540 - DNA, 25 bp, Homo sapiens
ctgccttcagataggagtgtctttg

SEQ ID NO: 5541 - DNA, 25 bp, Homo sapiens
acaccatggtggttgaactctgcta

SEQ ID NO: 5542 - DNA, 25 bp, Homo sapiens
ttccttgcaagagcatgattcatgc

SEQ ID NO: 5543 - DNA, 25 bp, Homo sapiens
ggcctgcagtttcagtcccaatgtt

SEQ ID NO: 5544 - DNA, 25 bp, Homo sapiens
ttgacatccctggaactcctttgtg

SEQ ID NO: 5545 - DNA, 25 bp, Homo sapiens
gagccctcacgcctgaaagttttga

SEQ ID NO: 5546 - DNA, 25 bp, Homo sapiens
caacagctttgattgaaaacaacca

SEQ ID NO: 5547 - DNA, 25 bp, Homo sapiens
gattgcattttaacagaagctttga

SEQ ID NO: 5548 - DNA, 25 bp, Homo sapiens
aaggggctggcatctttcaagtaga

SEQ ID NO: 5549 - DNA, 25 bp, Homo sapiens
actctcggtccaaaatcctcaaagg

SEQ ID NO: 5550 - DNA, 25 bp, Homo sapiens
ggactatttgtgctaccagttttga

SEQ ID NO: 5551 - DNA, 25 bp, Homo sapiens
gtggcaactgaacccaacatctttg

SEQ ID NO: 5552 - DNA, 25 bp, Homo sapiens
ggggtccacatatctatccactata

SEQ ID NO: 5553 - DNA, 25 bp, Homo sapiens
cctgtcctggagctatagggtgttc

SEQ ID NO: 5554 - DNA, 25 bp, Homo sapiens
ctggaatctcagctaggtcttatac

SEQ ID NO: 5555 - DNA, 25 bp, Homo sapiens
tttgagcacatggaaacagctaggc

SEQ ID NO: 5556 - DNA, 25 bp, Homo sapiens
gagagcctgctcatattttccaaca

SEQ ID NO: 5557 - DNA, 25 bp, Homo sapiens
tctgatgaatcctctgctttacatg

SEQ ID NO: 5558 - DNA, 25 bp, Homo sapiens
tctgtggtatctgcctaaatgcttg

SEQ ID NO: 5559 - DNA, 25 bp, Homo sapiens
atctgcatttctgaggctgagtctc

SEQ ID NO: 5560 - DNA, 25 bp, Homo sapiens
ttttaacctatgagaggagcactca

SEQ ID NO: 5561 - DNA, 25 bp, Homo sapiens
cactatacttcctgcataattatta

SEQ ID NO: 5562 - DNA, 25 bp, Homo sapiens
tgagctctatcaatggctttaggcg

SEQ ID NO: 5563 - DNA, 25 bp, Homo sapiens
ccctatggtcagatatggactagtc

SEQ ID NO: 5564 - DNA, 25 bp, Homo sapiens
cattccctgcaaaatactgagcgcc

SEQ ID NO: 5565 - DNA, 25 bp, Homo sapiens
tagcttcagtcaccatggggatttc

SEQ ID NO: 5566 - DNA, 25 bp, Homo sapiens
cctgttggggaaacctatgtgtgta

SEQ ID NO: 5567 - DNA, 25 bp, Homo sapiens
gcccaggtccgtgatgcctattttg

SEQ ID NO: 5568 - DNA, 25 bp, Homo sapiens
caccgcttctgactccaaagttgta

SEQ ID NO: 5569 - DNA, 25 bp, Homo sapiens
aactctggcatgaagctgggacacc

SEQ ID NO: 5570 - DNA, 25 bp, Homo sapiens
cccagctctattttctaagttcagt

SEQ ID NO: 5571 - DNA, 25 bp, Homo sapiens
cctgtctcagcgatctttgcaaatc

SEQ ID NO: 5572 - DNA, 25 bp, Homo sapiens
aatagggcaggtgctatcagttatc

SEQ ID NO: 5573 - DNA, 25 bp, Homo sapiens
cctctagtttgggtaatttcatgac

SEQ ID NO: 5574 - DNA, 25 bp, Homo sapiens
cccgcgcagtgctttatttgtcaaa

SEQ ID NO: 5575 - DNA, 25 bp, Homo sapiens
atgggtcccacagccaacaggtctg

SEQ ID NO: 5576 - DNA, 25 bp, Homo sapiens
ggcttctcatgaaaccatacatctg

SEQ ID NO: 5577 - DNA, 25 bp, Homo sapiens
ccttgtaatcttgtacctgggttaa

SEQ ID NO: 5578 - DNA, 25 bp, Homo sapiens
ccaggttgccagctctagtccagaa

SEQ ID NO: 5579 - DNA, 25 bp, Homo sapiens
gctgctgcgattaccttactctgtg

SEQ ID NO: 5580 - DNA, 25 bp, Homo sapiens
ggggctgacatgacaaccaacaata

SEQ ID NO: 5581 - DNA, 25 bp, Homo sapiens
tggcaacatccttgggccctaatta

SEQ ID NO: 5582 - DNA, 25 bp, Homo sapiens
ttcaagatgagctatgaaatcatgc

SEQ ID NO: 5583 - DNA, 25 bp, Homo sapiens
cagaccagccaaatttccaggaagg

SEQ ID NO: 5584 - DNA, 25 bp, Homo sapiens
tttaatcccagagaagattccattc

SEQ ID NO: 5585 - DNA, 25 bp, Homo sapiens
tcctgatctgatacaactgccttta

SEQ ID NO: 5586 - DNA, 25 bp, Homo sapiens
ctgcagttttggaatagaacctgtc

SEQ ID NO: 5587 - DNA, 25 bp, Homo sapiens
ttaaacattttaaaaatcatggttc

SEQ ID NO: 5588 - DNA, 25 bp, Homo sapiens
ccccgcaccttcatttagatttaat

SEQ ID NO: 5589 - DNA, 25 bp, Homo sapiens
ctggaatcctcgactatgtagctga

SEQ ID NO: 5590 - DNA, 25 bp, Homo sapiens
tagcatggtgcctgaatccctttgg

SEQ ID NO: 5591 - DNA, 25 bp, Homo sapiens
catgacttacttctttggacctagg

SEQ ID NO: 5592 - DNA, 25 bp, Homo sapiens
ttggggtgttttcctcctaaagtta

SEQ ID NO: 5593 - DNA, 25 bp, Homo sapiens
tccctttgcagtaattggaagcacc

SEQ ID NO: 5594 - DNA, 25 bp, Homo sapiens
tgcctaaagttatatgtggaagatc

SEQ ID NO: 5595 - DNA, 25 bp, Homo sapiens
tccctgtgcagtcttgggtactatc

SEQ ID NO: 5596 - DNA, 25 bp, Homo sapiens
gcaataccattgcttcgggttaaga

SEQ ID NO: 5597 - DNA, 25 bp, Homo sapiens
gcctgcatttgctctgtgaagtttg

SEQ ID NO: 5598 - DNA, 25 bp, Homo sapiens
ttctcacagagcagggccagttttc

SEQ ID NO: 5599 - DNA, 25 bp, Homo sapiens
catgttaatacattggcaggggtaa

SEQ ID NO: 5600 - DNA, 25 bp, Homo sapiens
tgattctattagctcctcaggggcc

SEQ ID NO: 5601 - DNA, 25 bp, Homo sapiens
agggctggtcatctagtaaagctta

SEQ ID NO: 5602 - DNA, 25 bp, Homo sapiens
tgcctcagagcccaacctatctttg

SEQ ID NO: 5603 - DNA, 25 bp, Homo sapiens
gcgaggtccttttcgttttcaccta

SEQ ID NO: 5604 - DNA, 25 bp, Homo sapiens
tagcatggggctgtactttttcatc

SEQ ID NO: 5605 - DNA, 25 bp, Homo sapiens
gcagcgtattctagccctttcaagg

SEQ ID NO: 5606 - DNA, 25 bp, Homo sapiens
aaaccaatctgtgcctccataattc

SEQ ID NO: 5607 - DNA, 25 bp, Homo sapiens
ttcattaagcacaccaacttcatta

SEQ ID NO: 5608 - DNA, 25 bp, Homo sapiens
tttaaaaatttattagttatccatg

SEQ ID NO: 5609 - DNA, 25 bp, Homo sapiens
aacaactgctgaaaacctggtctta

SEQ ID NO: 5610 - DNA, 25 bp, Homo sapiens
gctgatgctcagtggattaacttca

SEQ ID NO: 5611 - DNA, 25 bp, Homo sapiens
gtgccagagaagtcaatgtttgtta

SEQ ID NO: 5612 - DNA, 25 bp, Homo sapiens
acatatttccactttgaaaggttac

SEQ ID NO: 5613 - DNA, 25 bp, Homo sapiens
ttcctcttgagggactgccagtatc

SEQ ID NO: 5614 - DNA, 25 bp, Homo sapiens
cttgaaactgggtaatctgtctcta

SEQ ID NO: 5615 - DNA, 25 bp, Homo sapiens
ccctggcagggatctaacaagcttt

SEQ ID NO: 5616 - DNA, 25 bp, Homo sapiens
gctcattgtctaggcaggtctccaa

SEQ ID NO: 5617 - DNA, 25 bp, Homo sapiens
tgtgtctgtgcctctcctccataaa

SEQ ID NO: 5618 - DNA, 25 bp, Homo sapiens
gagcacaccctctccatgctgattg

SEQ ID NO: 5619 - DNA, 25 bp, Homo sapiens
gcgagattggcagaggcttactttc

SEQ ID NO: 5620 - DNA, 25 bp, Homo sapiens
tctggcctcccagcaagaaagtggc

SEQ ID NO: 5621 - DNA, 25 bp, Homo sapiens
acacagtcgtacagaaggggccagt

SEQ ID NO: 5622 - DNA, 25 bp, Homo sapiens
ctgttggttcactaggtcgctcctc

SEQ ID NO: 5623 - DNA, 25 bp, Homo sapiens
gttccaccaccaagggctcatgcta

SEQ ID NO: 5624 - DNA, 25 bp, Homo sapiens
tctcttagtctcatggcagggcctc

SEQ ID NO: 5625 - DNA, 25 bp, Homo sapiens
tccagtgaggccaaccaagaggtct

SEQ ID NO: 5626 - DNA, 25 bp, Homo sapiens
ggaggctcaacatagacgcctatta

SEQ ID NO: 5627 - DNA, 25 bp, Homo sapiens
gatcccctgaatgctattttgaaaa

SEQ ID NO: 5628 - DNA, 25 bp, Homo sapiens
ttgcctgaagctgtactctgaagta

SEQ ID NO: 5629 - DNA, 25 bp, Homo sapiens
gcccttttgcttccggctactggta

SEQ ID NO: 5630 - DNA, 25 bp, Homo sapiens
gcattgtatacagctagattcctta

SEQ ID NO: 5631 - DNA, 25 bp, Homo sapiens
actggattttatctggaggccaata

SEQ ID NO: 5632 - DNA, 25 bp, Homo sapiens
gttctctatggcctccagcgtttga

SEQ ID NO: 5633 - DNA, 25 bp, Homo sapiens
agacttcccttatgactggcccaga

SEQ ID NO: 5634 - DNA, 25 bp, Homo sapiens
ggacactagctggattttggcccta

SEQ ID NO: 5635 - DNA, 25 bp, Homo sapiens
tgggatcctactgcagctcttttga

SEQ ID NO: 5636 - DNA, 25 bp, Homo sapiens
agcctgaggtctgctatgaatttca

SEQ ID NO: 5637 - DNA, 25 bp, Homo sapiens
ctttcttaaagttgctggcttctta

SEQ ID NO: 5638 - DNA, 25 bp, Homo sapiens
tgagtcctcttacagttttcaaagc

SEQ ID NO: 5639 - DNA, 25 bp, Homo sapiens
tggagttcaccacaagtgctctctg

SEQ ID NO: 5640 - DNA, 25 bp, Homo sapiens
gctgacagagcttctaccacagtga

SEQ ID NO: 5641 - DNA, 25 bp, Homo sapiens
tccagagcctggagcagtctttgtc

SEQ ID NO: 5642 - DNA, 25 bp, Homo sapiens
ggtgacacttacctgtctgggaaca

SEQ ID NO: 5643 - DNA, 25 bp, Homo sapiens
tgctggcattgattcttaaacttga

SEQ ID NO: 5644 - DNA, 25 bp, Homo sapiens
tgcatgcagtttggtagctatcctc

SEQ ID NO: 5645 - DNA, 25 bp, Homo sapiens
tgaaacgttctataagatgcccttg

SEQ ID NO: 5646 - DNA, 25 bp, Homo sapiens
tgcatttcaattcagggccaaggtc

SEQ ID NO: 5647 - DNA, 25 bp, Homo sapiens
ctggaggcagctacaaccttgaatc

SEQ ID NO: 5648 - DNA, 25 bp, Homo sapiens
tacacagtatttccagctaaatggg

SEQ ID NO: 5649 - DNA, 25 bp, Homo sapiens
atgtttcctcttttgtatagcaagt

SEQ ID NO: 5650 - DNA, 25 bp, Homo sapiens
gagctaggcctgcaatgtatcattg

SEQ ID NO: 5651 - DNA, 25 bp, Homo sapiens
ccaaagcctggggaactctggttta

SEQ ID NO: 5652 - DNA, 25 bp, Homo sapiens
accttggtagaacagtgcccgtatc

SEQ ID NO: 5653 - DNA, 25 bp, Homo sapiens
gcttgtacgtggtaggccctcaata

SEQ ID NO: 5654 - DNA, 25 bp, Homo sapiens
ccagggcctcctatttgctcttgta

SEQ ID NO: 5655 - DNA, 25 bp, Homo sapiens
tcagctgtaacgttgagtgctcaca

SEQ ID NO: 5656 - DNA, 25 bp, Homo sapiens
cctgtttattgctggttcggtgatg

SEQ ID NO: 5657 - DNA, 25 bp, Homo sapiens
cctgagctctttagtgcatggatac

SEQ ID NO: 5658 - DNA, 25 bp, Homo sapiens
tgtcccatagggtagctgcttttca

SEQ ID NO: 5659 - DNA, 25 bp, Homo sapiens
cactgggaccttggcaacaatattc

SEQ ID NO: 5660 - DNA, 25 bp, Homo sapiens
ggttgtatctgcctcctggaatatg

SEQ ID NO: 5661 - DNA, 25 bp, Homo sapiens
catggacctgacaagacttctttta

SEQ ID NO: 5662 - DNA, 25 bp, Homo sapiens
ggtggcaatgcccagaacattctta

SEQ ID NO: 5663 - DNA, 25 bp, Homo sapiens
taacagacatctgcaattggcttca

SEQ ID NO: 5664 - DNA, 25 bp, Homo sapiens
ccgtactagacagagaagctcactg

SEQ ID NO: 5665 - DNA, 25 bp, Homo sapiens
acatgtttttgcctctggggtaaga

SEQ ID NO: 5666 - DNA, 25 bp, Homo sapiens
ttagtttctctttccaacctcatga

SEQ ID NO: 5667 - DNA, 25 bp, Homo sapiens
aggacatgaagtttagggagcagtg

SEQ ID NO: 5668 - DNA, 25 bp, Homo sapiens
gtgtgcatatgtcaaaacctcagtg

SEQ ID NO: 5669 - DNA, 25 bp, Homo sapiens
gaacttaccctttctgtgatgcata

SEQ ID NO: 5670 - DNA, 25 bp, Homo sapiens
aggccgttgtattgctctgacttca

SEQ ID NO: 5671 - DNA, 25 bp, Homo sapiens
ctctactcttgattcttatactggg

SEQ ID NO: 5672 - DNA, 25 bp, Homo sapiens
gctaaatatgcttcctctgacagaa

SEQ ID NO: 5673 - DNA, 25 bp, Homo sapiens
tcacaccactgctgctttaacggga

SEQ ID NO: 5674 - DNA, 25 bp, Homo sapiens
ataaaagaaaaaagaagtattatcc

SEQ ID NO: 5675 - DNA, 25 bp, Homo sapiens
gccaaacccacctgatgttgacatg

SEQ ID NO: 5676 - DNA, 25 bp, Homo sapiens
ggccaggttttctgatgcaagttca

SEQ ID NO: 5677 - DNA, 25 bp, Homo sapiens
cagccctttaaactggtgaagcaaa

SEQ ID NO: 5678 - DNA, 25 bp, Homo sapiens
ctgcaaggcctgatttctagttcta

SEQ ID NO: 5679 - DNA, 25 bp, Homo sapiens
agtcactgtcctcctccttttgttg

SEQ ID NO: 5680 - DNA, 25 bp, Homo sapiens
tgttgtgtcttaacttcttggttcc

SEQ ID NO: 5681 - DNA, 25 bp, Homo sapiens
gtcctgtctgtagagcacctgtata

SEQ ID NO: 5682 - DNA, 25 bp, Homo sapiens
aggctccatgtttttagttattttc

SEQ ID NO: 5683 - DNA, 25 bp, Homo sapiens
gtggccctcttcctatgatgattaa

SEQ ID NO: 5684 - DNA, 25 bp, Homo sapiens
gggtggatcctcttgtcatttgctc

SEQ ID NO: 5685 - DNA, 25 bp, Homo sapiens
atcggggcatctaaccttggaactg

SEQ ID NO: 5686 - DNA, 25 bp, Homo sapiens
ctccctcctggcatgtggaaaagta

SEQ ID NO: 5687 - DNA, 25 bp, Homo sapiens
ccagagactgaaacgaagggcatgc

SEQ ID NO: 5688 - DNA, 25 bp, Homo sapiens
ctctgtagtatgcaaagggtttacc

SEQ ID NO: 5689 - DNA, 25 bp, Homo sapiens
ggtgggtgcctgaactcacatttga

SEQ ID NO: 5690 - DNA, 25 bp, Homo sapiens
aactataaaaacagagaagagacac

SEQ ID NO: 5691 - DNA, 25 bp, Homo sapiens
aggtcagctataatggccagtctta

SEQ ID NO: 5692 - DNA, 25 bp, Homo sapiens
cgacgggaccacttctgatttatta

SEQ ID NO: 5693 - DNA, 25 bp, Homo sapiens
cctggaatatgagagccaatccttc

SEQ ID NO: 5694 - DNA, 25 bp, Homo sapiens
gaagtgcctcgcctcttgattcagc

SEQ ID NO: 5695 - DNA, 25 bp, Homo sapiens
ctggctcttacctgcacgtttggga

SEQ ID NO: 5696 - DNA, 25 bp, Homo sapiens
ctgctgtttctatctggcctccggc

SEQ ID NO: 5697 - DNA, 25 bp, Homo sapiens
accagcacagggtcatgtttccaga

SEQ ID NO: 5698 - DNA, 25 bp, Homo sapiens
ccatcattttcagaatgattataaa

SEQ ID NO: 5699 - DNA, 25 bp, Homo sapiens
agagtctccactgctgaccacaaag

SEQ ID NO: 5700 - DNA, 25 bp, Homo sapiens
ggtaacaatccatgaagcatttctg

SEQ ID NO: 5701 - DNA, 25 bp, Homo sapiens
ttttgtggctggaagttactaccta

SEQ ID NO: 5702 - DNA, 25 bp, Homo sapiens
gctcccagagagttataggcacttc

SEQ ID NO: 5703 - DNA, 25 bp, Homo sapiens
gcgatccagtttccaattgtccatg

SEQ ID NO: 5704 - DNA, 25 bp, Homo sapiens
ttttttttttacttattctcaatta

SEQ ID NO: 5705 - DNA, 25 bp, Homo sapiens
ggacagctcttttgccttcacccag

SEQ ID NO: 5706 - DNA, 25 bp, Homo sapiens
ccctggcagtgcctatgagcaaagc

SEQ ID NO: 5707 - DNA, 25 bp, Homo sapiens
tggagacagacgtgaagagccctta

SEQ ID NO: 5708 - DNA, 25 bp, Homo sapiens
cctgtgactgttctacaagatggca

SEQ ID NO: 5709 - DNA, 25 bp, Homo sapiens
agcacaagcactaactgtaggactg

SEQ ID NO: 5710 - DNA, 25 bp, Homo sapiens
gttcagtcttcccttgctctttcag

SEQ ID NO: 5711 - DNA, 25 bp, Homo sapiens
gaagctgcctcttgcctttctagta

SEQ ID NO: 5712 - DNA, 25 bp, Homo sapiens
acctctggtcgcatgttctactgga

SEQ ID NO: 5713 - DNA, 25 bp, Homo sapiens
ccagcctgagccatgttgcccaaaa

SEQ ID NO: 5714 - DNA, 25 bp, Homo sapiens
cttggcggcaaggaaagagactccc

SEQ ID NO: 5715 - DNA, 25 bp, Homo sapiens
gtgtctgcaaacataacatcccatg

SEQ ID NO: 5716 - DNA, 25 bp, Homo sapiens
actcacttgggtggctttgggaaca

SEQ ID NO: 5717 - DNA, 25 bp, Homo sapiens
accgagcttccttcaggctttaaga

SEQ ID NO: 5718 - DNA, 25 bp, Homo sapiens
tgagaattacccaaatgtaacacag

SEQ ID NO: 5719 - DNA, 25 bp, Homo sapiens
gggtcaggccttctcctatggtcta

SEQ ID NO: 5720 - DNA, 25 bp, Homo sapiens
ttctaatgtgttttttttcctgatt

SEQ ID NO: 5721 - DNA, 25 bp, Homo sapiens
tcccaaaagggctcagactaagtcc

SEQ ID NO: 5722 - DNA, 25 bp, Homo sapiens
cagccttcggtacacaggaggtcta

SEQ ID NO: 5723 - DNA, 25 bp, Homo sapiens
gccctgtcatgctgagatgtccttg

SEQ ID NO: 5724 - DNA, 25 bp, Homo sapiens
ttacggtgcagctcacatgccaata

SEQ ID NO: 5725 - DNA, 25 bp, Homo sapiens
cacaatcttggggaaatagtctggc

SEQ ID NO: 5726 - DNA, 25 bp, Homo sapiens
ccctgggcctattgagtgtaagctc

SEQ ID NO: 5727 - DNA, 25 bp, Homo sapiens
ccggggctcagcaaagtcagagtca

SEQ ID NO: 5728 - DNA, 25 bp, Homo sapiens
gcagaggcctcctgttgatggaaaa

SEQ ID NO: 5729 - DNA, 25 bp, Homo sapiens
gggctcacactgctaatggcttttg

SEQ ID NO: 5730 - DNA, 25 bp, Homo sapiens
cctgtaccctgatgctgaataatta

SEQ ID NO: 5731 - DNA, 25 bp, Homo sapiens
atagtgctgtgctgtcttcccatca

SEQ ID NO: 5732 - DNA, 25 bp, Homo sapiens
cctctgaagcggtgtgccctttata

SEQ ID NO: 5733 - DNA, 25 bp, Homo sapiens
gggtcctgttgtgcactaatttgta

SEQ ID NO: 5734 - DNA, 25 bp, Homo sapiens
ggcccggaaatagcaagtctcctta

SEQ ID NO: 5735 - DNA, 25 bp, Homo sapiens
agcgtgtcacagtacccatattggc

SEQ ID NO: 5736 - DNA, 25 bp, Homo sapiens
ggagtctccctataaaccaattttc

SEQ ID NO: 5737 - DNA, 25 bp, Homo sapiens
ctctgccatattgtctgtgtgaaaa

SEQ ID NO: 5738 - DNA, 25 bp, Homo sapiens
tgatctctggaaacaagttgctctg

SEQ ID NO: 5739 - DNA, 25 bp, Homo sapiens
caataggacttctcagggccaggta

SEQ ID NO: 5740 - DNA, 25 bp, Homo sapiens
cgacctccctctgtactgtcatgga

SEQ ID NO: 5741 - DNA, 25 bp, Homo sapiens
aaacagctgtattgggaccagtaca

SEQ ID NO: 5742 - DNA, 25 bp, Homo sapiens
ttttaattcaccacatctttcaaag

SEQ ID NO: 5743 - DNA, 25 bp, Homo sapiens
ggcaccttaggcctgcaaatgacaa

SEQ ID NO: 5744 - DNA, 25 bp, Homo sapiens
gggctatcatcaccaccttccaggg

SEQ ID NO: 5745 - DNA, 25 bp, Homo sapiens
ggctgcaatttgtggtacctccttc

SEQ ID NO: 5746 - DNA, 25 bp, Homo sapiens
ccctgctgctggcatttagcctttg

SEQ ID NO: 5747 - DNA, 25 bp, Homo sapiens
ggcctccgctgtgacaacatgattc

SEQ ID NO: 5748 - DNA, 25 bp, Homo sapiens
ggtgccaatccaacgtccttcctgt

SEQ ID NO: 5749 - DNA, 25 bp, Homo sapiens
acactgaagttatgaggttgttgat

SEQ ID NO: 5750 - DNA, 25 bp, Homo sapiens
tggagcttcttacccagcaaactga

SEQ ID NO: 5751 - DNA, 25 bp, Homo sapiens
cctccttttgttttaagaccacata

SEQ ID NO: 5752 - DNA, 25 bp, Homo sapiens
tgggccagcatgtcctgcagcataa

SEQ ID NO: 5753 - DNA, 25 bp, Homo sapiens
ccgcagcatttctcaggtgtacagt

SEQ ID NO: 5754 - DNA, 25 bp, Homo sapiens
cgcctggccgagagaagagttttaa

SEQ ID NO: 5755 - DNA, 25 bp, Homo sapiens
ccgatgctatgcgtggtttgcccaa

SEQ ID NO: 5756 - DNA, 25 bp, Homo sapiens
ccagggtgaaggaaccatctgatac

SEQ ID NO: 5757 - DNA, 25 bp, Homo sapiens
gtctgctgtctgctgggaatattca

SEQ ID NO: 5758 - DNA, 25 bp, Homo sapiens
gcacagctgtgcctcggattcaaga

SEQ ID NO: 5759 - DNA, 25 bp, Homo sapiens
ccgttgttcttgtgcactgctgcca

SEQ ID NO: 5760 - DNA, 25 bp, Homo sapiens
ctctgctccctgcaatggcattcta

SEQ ID NO: 5761 - DNA, 25 bp, Homo sapiens
ctcattcggtaagtcaaggggccta

SEQ ID NO: 5762 - DNA, 25 bp, Homo sapiens
ttgctaaagtattttgcacaaatta

SEQ ID NO: 5763 - DNA, 25 bp, Homo sapiens
aaaaaattccaatataacttgcttt

SEQ ID NO: 5764 - DNA, 25 bp, Homo sapiens
tccacctggtgcaagtatcagaaca

SEQ ID NO: 5765 - DNA, 25 bp, Homo sapiens
agtgacattataacccatgaataca

SEQ ID NO: 5766 - DNA, 25 bp, Homo sapiens
tctgatgggtgccaggtttgaaacc

SEQ ID NO: 5767 - DNA, 25 bp, Homo sapiens
gggacgccactctgctatgtttttc

SEQ ID NO: 5768 - DNA, 25 bp, Homo sapiens
tccgaggtaactagagctgtgatgc

SEQ ID NO: 5769 - DNA, 25 bp, Homo sapiens
ggatcactacagaccagcccacatg

SEQ ID NO: 5770 - DNA, 25 bp, Homo sapiens
ccatgctagacttcttttgctgtca

SEQ ID NO: 5771 - DNA, 25 bp, Homo sapiens
ggctgattaggtccatggttcccac

SEQ ID NO: 5772 - DNA, 25 bp, Homo sapiens
catgttgggcagacattcttcatcc

SEQ ID NO: 5773 - DNA, 25 bp, Homo sapiens
ggctacctagccatggcattacatg

SEQ ID NO: 5774 - DNA, 25 bp, Homo sapiens
cctggtgagatctacatttaactga

SEQ ID NO: 5775 - DNA, 25 bp, Homo sapiens
aacactattacatatacataagggt

SEQ ID NO: 5776 - DNA, 25 bp, Homo sapiens
gcctgggataaaacatgagctcttg

SEQ ID NO: 5777 - DNA, 25 bp, Homo sapiens
tcgcagccctgatgctccagtgaca

SEQ ID NO: 5778 - DNA, 25 bp, Homo sapiens
ccaccttactcggtatccctttaga

SEQ ID NO: 5779 - DNA, 25 bp, Homo sapiens
ttggccctgaccttgaagaacctta

SEQ ID NO: 5780 - DNA, 25 bp, Homo sapiens
ggggcctccctttctggagatctaa

SEQ ID NO: 5781 - DNA, 25 bp, Homo sapiens
gccaatgttgtctcctttaccactg

SEQ ID NO: 5782 - DNA, 25 bp, Homo sapiens
ggctcatgttttgccctccttcata

SEQ ID NO: 5783 - DNA, 25 bp, Homo sapiens
cctagctaagggattttatgccatg

SEQ ID NO: 5784 - DNA, 25 bp, Homo sapiens
aggcttgcaaaagtccagcctgctc

SEQ ID NO: 5785 - DNA, 25 bp, Homo sapiens
cttgtacccaggattgacccttgta

SEQ ID NO: 5786 - DNA, 25 bp, Homo sapiens
cagagtttttgactcaagcttctag

SEQ ID NO: 5787 - DNA, 25 bp, Homo sapiens
ataggcatatatttacacatctgtg

SEQ ID NO: 5788 - DNA, 25 bp, Homo sapiens
gcatgtgtatatacaatatatgtgg

SEQ ID NO: 5789 - DNA, 25 bp, Homo sapiens
ggggggaaaaggccaaataccagag

SEQ ID NO: 5790 - DNA, 25 bp, Homo sapiens
atcagctgatatttacccaacagac

SEQ ID NO: 5791 - DNA, 25 bp, Homo sapiens
tctcatgcctgaaaatcctgtctta

SEQ ID NO: 5792 - DNA, 25 bp, Homo sapiens
caggggtgcctggttttaaagttca

SEQ ID NO: 5793 - DNA, 25 bp, Homo sapiens
ttggcaggaaccctctggcactttg

SEQ ID NO: 5794 - DNA, 25 bp, Homo sapiens
gccagtaaagccgacctgaatatta

SEQ ID NO: 5795 - DNA, 25 bp, Homo sapiens
ccgctgtgctcttgtgttatcctga

SEQ ID NO: 5796 - DNA, 25 bp, Homo sapiens
cagtgctaggggtttactcagtaaa

SEQ ID NO: 5797 - DNA, 25 bp, Homo sapiens
ctccatcccgaggtggcagaaacta

SEQ ID NO: 5798 - DNA, 25 bp, Homo sapiens
ccatttgactggctgcttgtgatca

SEQ ID NO: 5799 - DNA, 25 bp, Homo sapiens
aggctcccagatccctgaggtgttc

SEQ ID NO: 5800 - DNA, 25 bp, Homo sapiens
cccagaagtcctgtggattttccca

SEQ ID NO: 5801 - DNA, 25 bp, Homo sapiens
aggggttactgccatcttcaggaca

SEQ ID NO: 5802 - DNA, 25 bp, Homo sapiens
gactgtgcatccaaaacctctggtg

SEQ ID NO: 5803 - DNA, 25 bp, Homo sapiens
gtcacccgctgtggtttatatttta

SEQ ID NO: 5804 - DNA, 25 bp, Homo sapiens
tggtatttcccatgatcccttagta

SEQ ID NO: 5805 - DNA, 25 bp, Homo sapiens
agccctgctccaaaaacaaaatgtg

SEQ ID NO: 5806 - DNA, 25 bp, Homo sapiens
gtgcttacaccatgcccaaaaattt

SEQ ID NO: 5807 - DNA, 25 bp, Homo sapiens
cctgacttgtctatgtgattaaata

SEQ ID NO: 5808 - DNA, 25 bp, Homo sapiens
gatcggtcgacactcaacattagga

SEQ ID NO: 5809 - DNA, 25 bp, Homo sapiens
tttcagggatttcaaggaacatttc

SEQ ID NO: 5810 - DNA, 25 bp, Homo sapiens
aggatttctcaaaacggactcttta

SEQ ID NO: 5811 - DNA, 25 bp, Homo sapiens
ccctggatacctgtattttaaatgc

SEQ ID NO: 5812 - DNA, 25 bp, Homo sapiens
tacaggaactgcatgataatcactc

SEQ ID NO: 5813 - DNA, 25 bp, Homo sapiens
gggcagctaacctatccaccttttg

SEQ ID NO: 5814 - DNA, 25 bp, Homo sapiens
gtgcctgtggctgctattacatttg

SEQ ID NO: 5815 - DNA, 25 bp, Homo sapiens
gctattgttacaccaagggcattga

SEQ ID NO: 5816 - DNA, 25 bp, Homo sapiens
ttcacttattaccactctcagggga

SEQ ID NO: 5817 - DNA, 25 bp, Homo sapiens
agtgacgtctaacaaaggccttctg

SEQ ID NO: 5818 - DNA, 25 bp, Homo sapiens
gggtgtttatcccaacttcagaaaa

SEQ ID NO: 5819 - DNA, 25 bp, Homo sapiens
gtttattaatacaatagttggtttc

SEQ ID NO: 5820 - DNA, 25 bp, Homo sapiens
ttccctacctgctgataaaaccaca

SEQ ID NO: 5821 - DNA, 25 bp, Homo sapiens
tttaacttgggcactcatcaggatg

SEQ ID NO: 5822 - DNA, 25 bp, Homo sapiens
tggatgtcatcttgccctcaaaaca

SEQ ID NO: 5823 - DNA, 25 bp, Homo sapiens
acgtctcctgtgcactccatttgta

SEQ ID NO: 5824 - DNA, 25 bp, Homo sapiens
cccgcacactggtaggtaagactga

SEQ ID NO: 5825 - DNA, 25 bp, Homo sapiens
ggtattccctatccacacttgcttg

SEQ ID NO: 5826 - DNA, 25 bp, Homo sapiens
gaggtgctcctcttcctgctggaaa

SEQ ID NO: 5827 - DNA, 25 bp, Homo sapiens
ctcttctaggctcagtgtatgctta

SEQ ID NO: 5828 - DNA, 25 bp, Homo sapiens
gggctgagctcctgtattcccactc

SEQ ID NO: 5829 - DNA, 25 bp, Homo sapiens
cagaatgggttcttcctgcagggca

SEQ ID NO: 5830 - DNA, 25 bp, Homo sapiens
gggccctttcagaggcacttttaaa

SEQ ID NO: 5831 - DNA, 25 bp, Homo sapiens
catacacagggtatggtgggtccta

SEQ ID NO: 5832 - DNA, 25 bp, Homo sapiens
tgaagactttgccagagcagcctcc

SEQ ID NO: 5833 - DNA, 25 bp, Homo sapiens
ctactcctatgtggggtgggaatca

SEQ ID NO: 5834 - DNA, 25 bp, Homo sapiens
tggcaccattggatcaggaagcaca

SEQ ID NO: 5835 - DNA, 25 bp, Homo sapiens
cttcgtctcagtgcccagtggtaga

SEQ ID NO: 5836 - DNA, 25 bp, Homo sapiens
gccagcctgtctgaggccaagttca

SEQ ID NO: 5837 - DNA, 25 bp, Homo sapiens
cagtcctcctctgtgcagtcctgag

SEQ ID NO: 5838 - DNA, 25 bp, Homo sapiens
ggtcctctccagttcccattctaga

SEQ ID NO: 5839 - DNA, 25 bp, Homo sapiens
gcaggctgttctctggttccaacta

SEQ ID NO: 5840 - DNA, 25 bp, Homo sapiens
ggttccagagccttagagattcata

SEQ ID NO: 5841 - DNA, 25 bp, Homo sapiens
ctctcaaccctggtcaggaagcctg

SEQ ID NO: 5842 - DNA, 25 bp, Homo sapiens
ttcagccaggatgcccacagagagg

SEQ ID NO: 5843 - DNA, 25 bp, Homo sapiens
cactgcgtcctagaccggatattga

SEQ ID NO: 5844 - DNA, 25 bp, Homo sapiens
ctgacagggtacacagagtgggttc

SEQ ID NO: 5845 - DNA, 25 bp, Homo sapiens
cctgcttgcctgcagacagggtctg

SEQ ID NO: 5846 - DNA, 25 bp, Homo sapiens
tgggagaactgaccatcaccacggc

SEQ ID NO: 5847 - DNA, 25 bp, Homo sapiens
cccgtagccagttttaggatccaag

SEQ ID NO: 5848 - DNA, 25 bp, Homo sapiens
cccatctgagaacacgtgagccatc

SEQ ID NO: 5849 - DNA, 25 bp, Homo sapiens
agtggtcctaaaagcatagcctgtc

SEQ ID NO: 5850 - DNA, 25 bp, Homo sapiens
gggccagaactttcacacacacatg

SEQ ID NO: 5851 - DNA, 25 bp, Homo sapiens
tctggcggtcctactgcaagtaata

SEQ ID NO: 5852 - DNA, 25 bp, Homo sapiens
tcctgactggcctctctgtttaaca

SEQ ID NO: 5853 - DNA, 25 bp, Homo sapiens
ctcccgtctgccttggatgccaatg

SEQ ID NO: 5854 - DNA, 25 bp, Homo sapiens
agcatgcgaatctctgtgtagaaca

SEQ ID NO: 5855 - DNA, 25 bp, Homo sapiens
agtggcgctcaccatcctggagccg

SEQ ID NO: 5856 - DNA, 25 bp, Homo sapiens
agggatgaatcccagacctctagtc

SEQ ID NO: 5857 - DNA, 25 bp, Homo sapiens
ggtgcctcagccagcaggattagtg

SEQ ID NO: 5858 - DNA, 25 bp, Homo sapiens
ccagagacctgcaacaagggctttc

SEQ ID NO: 5859 - DNA, 25 bp, Homo sapiens
gggcttcttcgctccctaaagttta

SEQ ID NO: 5860 - DNA, 25 bp, Homo sapiens
ccagggctccaggtttgaatgttca

SEQ ID NO: 5861 - DNA, 25 bp, Homo sapiens
ccattttggagtcagctagatatta

SEQ ID NO: 5862 - DNA, 25 bp, Homo sapiens
gacctccagggttgagtacatctcc

SEQ ID NO: 5863 - DNA, 25 bp, Homo sapiens
ggcacctgatatccctgacgaagca

SEQ ID NO: 5864 - DNA, 25 bp, Homo sapiens
ggacccattcacaaagttacctctg

SEQ ID NO: 5865 - DNA, 25 bp, Homo sapiens
tatgtcaagggggaggagaggcatc

SEQ ID NO: 5866 - DNA, 25 bp, Homo sapiens
cctgctgagcctctgcactagaata

SEQ ID NO: 5867 - DNA, 25 bp, Homo sapiens
ccctgggagcgctatgcaaatgaga

SEQ ID NO: 5868 - DNA, 25 bp, Homo sapiens
acgcggcagctctagtcctcagaca

SEQ ID NO: 5869 - DNA, 25 bp, Homo sapiens
ggcctctccacccactagatgatga

SEQ ID NO: 5870 - DNA, 25 bp, Homo sapiens
cccagatgagtgaatggccttttta

SEQ ID NO: 5871 - DNA, 25 bp, Homo sapiens
ggtgctctctgctaccctgtgagta

SEQ ID NO: 5872 - DNA, 25 bp, Homo sapiens
agctccgggcctttaggtcctcaaa

SEQ ID NO: 5873 - DNA, 25 bp, Homo sapiens
gtggggccagctacaaacacctgta

SEQ ID NO: 5874 - DNA, 25 bp, Homo sapiens
acctggcctggtgctcatctagaac

SEQ ID NO: 5875 - DNA, 25 bp, Homo sapiens
cggcccactagttgttgacggaatc

SEQ ID NO: 5876 - DNA, 25 bp, Homo sapiens
cgcacggcagtcagagagcaagtta

SEQ ID NO: 5877 - DNA, 25 bp, Homo sapiens
tggcctcgcagtaacaagacccttg

SEQ ID NO: 5878 - DNA, 25 bp, Homo sapiens
taccaccaagggatgacgaactctg

SEQ ID NO: 5879 - DNA, 25 bp, Homo sapiens
tccagctctttctatgcatttacaa

SEQ ID NO: 5880 - DNA, 25 bp, Homo sapiens
aaacagacaaaggaatccttcttta

SEQ ID NO: 5881 - DNA, 25 bp, Homo sapiens
ccggggctatgtcagggaaatcatg

SEQ ID NO: 5882 - DNA, 25 bp, Homo sapiens
aagaaaaaaagtggtgcactctaca

SEQ ID NO: 5883 - DNA, 25 bp, Homo sapiens
agaggtttagcagccatcttgtgcc

SEQ ID NO: 5884 - DNA, 25 bp, Homo sapiens
gagcccgtctattatggacaacata

SEQ ID NO: 5885 - DNA, 25 bp, Homo sapiens
gcccacctgcactagacacataatg

SEQ ID NO: 5886 - DNA, 25 bp, Homo sapiens
ccgaggtgtttgcagcagctcttta

SEQ ID NO: 5887 - DNA, 25 bp, Homo sapiens
gtcgcatgctaccacggcttccaga

SEQ ID NO: 5888 - DNA, 25 bp, Homo sapiens
tgcggtgaagtccacattgtccatg

SEQ ID NO: 5889 - DNA, 25 bp, Homo sapiens
cttcagtggctacaacccagggata

SEQ ID NO: 5890 - DNA, 25 bp, Homo sapiens
tccctgggaagaacacagtagtgtt

SEQ ID NO: 5891 - DNA, 25 bp, Homo sapiens
ccactctttgaatagggaaaataca

SEQ ID NO: 5892 - DNA, 25 bp, Homo sapiens
cagtgcactttattggcgacagacc

SEQ ID NO: 5893 - DNA, 25 bp, Homo sapiens
tgctgatgcgtgctctttatctgga

SEQ ID NO: 5894 - DNA, 25 bp, Homo sapiens
gcccaggccagctgctatgttattg

SEQ ID NO: 5895 - DNA, 25 bp, Homo sapiens
gccgtcgaagcctattaaaagtgcc

SEQ ID NO: 5896 - DNA, 25 bp, Homo sapiens
tccacggaccaagggcatgaatagc

SEQ ID NO: 5897 - DNA, 25 bp, Homo sapiens
tccagggccagcttgacattcatca

SEQ ID NO: 5898 - DNA, 25 bp, Homo sapiens
agtgcctccatcttgtctccatttg

SEQ ID NO: 5899 - DNA, 25 bp, Homo sapiens
tggggtattcctgcagctttgcttg

SEQ ID NO: 5900 - DNA, 25 bp, Homo sapiens
tggcctctctgaaacctccagtgga

SEQ ID NO: 5901 - DNA, 25 bp, Homo sapiens
actgattccttgctccacatgtgta

SEQ ID NO: 5902 - DNA, 25 bp, Homo sapiens
gcactgtccacatcctgagaaaaga

SEQ ID NO: 5903 - DNA, 25 bp, Homo sapiens
ttattgctccaaaggcctgaacttg

SEQ ID NO: 5904 - DNA, 25 bp, Homo sapiens
ctctcagatgagcacatcctcttta

SEQ ID NO: 5905 - DNA, 25 bp, Homo sapiens
ggctcatgaggaaatgcttccccaa

SEQ ID NO: 5906 - DNA, 25 bp, Homo sapiens
ggggaactgaatgaaccaagctgtc

SEQ ID NO: 5907 - DNA, 25 bp, Homo sapiens
agcaggttccacttggtctccagga

SEQ ID NO: 5908 - DNA, 25 bp, Homo sapiens
ctgggaacttcatgaccctatctta

SEQ ID NO: 5909 - DNA, 25 bp, Homo sapiens
cgctcccttgggactaactaaggtt

SEQ ID NO: 5910 - DNA, 25 bp, Homo sapiens
ggggactgttttctttctacacctc

SEQ ID NO: 5911 - DNA, 25 bp, Homo sapiens
atctccacattgaggggctgcagga

SEQ ID NO: 5912 - DNA, 25 bp, Homo sapiens
tgccacgctgatggagatgctcttg

SEQ ID NO: 5913 - DNA, 25 bp, Homo sapiens
ttaagcagggacactgagagtcaga

SEQ ID NO: 5914 - DNA, 25 bp, Homo sapiens
gccactgcttctgggatgactcctg

SEQ ID NO: 5915 - DNA, 25 bp, Homo sapiens
ttggtccctgtttctcagctgcgta

SEQ ID NO: 5916 - DNA, 25 bp, Homo sapiens
gcttggcatcccagccagctgagta

SEQ ID NO: 5917 - DNA, 25 bp, Homo sapiens
ctgtctctctttgggaatatctgga

SEQ ID NO: 5918 - DNA, 25 bp, Homo sapiens
aggattccacacgagggtttgcttc

SEQ ID NO: 5919 - DNA, 25 bp, Homo sapiens
tccagcaatcaaggggtcataatta

SEQ ID NO: 5920 - DNA, 25 bp, Homo sapiens
gcttcctgcagtcagtgggagtcta

SEQ ID NO: 5921 - DNA, 25 bp, Homo sapiens
ggactctcctcaactcaggtgggta

SEQ ID NO: 5922 - DNA, 25 bp, Homo sapiens
ttgatacacagtgttcccctgtcct

SEQ ID NO: 5923 - DNA, 25 bp, Homo sapiens
ttacaggctgggattcaaggaactc

SEQ ID NO: 5924 - DNA, 25 bp, Homo sapiens
cgtgggcaaggagatgccagcatta

SEQ ID NO: 5925 - DNA, 25 bp, Homo sapiens
atggaccagcctactgcctgaaaga

SEQ ID NO: 5926 - DNA, 25 bp, Homo sapiens
ctcagggcactggtcttgaaacatc

SEQ ID NO: 5927 - DNA, 25 bp, Homo sapiens
gttggcccaggcatatgaacctgtc

SEQ ID NO: 5928 - DNA, 25 bp, Homo sapiens
gaaaagtgttcatcttctccagaga

SEQ ID NO: 5929 - DNA, 25 bp, Homo sapiens
cgctgatgggccctagcaaaaacaa

SEQ ID NO: 5930 - DNA, 25 bp, Homo sapiens
caggcagcctgttaagtgagaaata

SEQ ID NO: 5931 - DNA, 25 bp, Homo sapiens
cagcagtttcccgaagccagagtca

SEQ ID NO: 5932 - DNA, 25 bp, Homo sapiens
ctctctgctctttgaactgcttttg

SEQ ID NO: 5933 - DNA, 25 bp, Homo sapiens
ggtagctacccatggtttccaggca

SEQ ID NO: 5934 - DNA, 25 bp, Homo sapiens
acctcagaggtaaagaaagcaggga

SEQ ID NO: 5935 - DNA, 25 bp, Homo sapiens
ccagagaatctgaacccttgagcaa

SEQ ID NO: 5936 - DNA, 25 bp, Homo sapiens
tttcaaatgcacagagtgtaacctc

SEQ ID NO: 5937 - DNA, 25 bp, Homo sapiens
cacatctctgatttcagtgtttatg

SEQ ID NO: 5938 - DNA, 25 bp, Homo sapiens
ttaaagtattagaaaaggttttagc

SEQ ID NO: 5939 - DNA, 25 bp, Homo sapiens
aggtgatattttcctcaatggcaaa

SEQ ID NO: 5940 - DNA, 25 bp, Homo sapiens
acttatttgggtagttaaattttga

SEQ ID NO: 5941 - DNA, 25 bp, Homo sapiens
gtttatttccatacctgactctggg

SEQ ID NO: 5942 - DNA, 25 bp, Homo sapiens
gtcttccagtgactttcggtcttgg

SEQ ID NO: 5943 - DNA, 25 bp, Homo sapiens
ccctggtttaagtaggtagaaggag

SEQ ID NO: 5944 - DNA, 25 bp, Homo sapiens
aagtgaccctttatacatttcattt

SEQ ID NO: 5945 - DNA, 25 bp, Homo sapiens
ccctggacctgaaatagcatgttta

SEQ ID NO: 5946 - DNA, 25 bp, Homo sapiens
ttgcattttacaaaggcggctaatc

SEQ ID NO: 5947 - DNA, 25 bp, Homo sapiens
agggctaacactttttctgatcaga

SEQ ID NO: 5948 - DNA, 25 bp, Homo sapiens
tccgcatctctctctctgaaaggtg

SEQ ID NO: 5949 - DNA, 25 bp, Homo sapiens
tgctctggcccttttctggacagta

SEQ ID NO: 5950 - DNA, 25 bp, Homo sapiens
ggtagctgcagcaagagtcatctta

SEQ ID NO: 5951 - DNA, 25 bp, Homo sapiens
ctgacactcagataagcacttggtg

SEQ ID NO: 5952 - DNA, 25 bp, Homo sapiens
accatttgttttgctctgttatttc

SEQ ID NO: 5953 - DNA, 25 bp, Homo sapiens
gtggtcaagttgctactctcattta

SEQ ID NO: 5954 - DNA, 25 bp, Homo sapiens
tggctcagagcgaagggcacaattc

SEQ ID NO: 5955 - DNA, 25 bp, Homo sapiens
ggagcctcttttggatcatacatca

SEQ ID NO: 5956 - DNA, 25 bp, Homo sapiens
tccctggtcctggtagatcttaata

SEQ ID NO: 5957 - DNA, 25 bp, Homo sapiens
tacccacagggatctgccttgaaga

SEQ ID NO: 5958 - DNA, 25 bp, Homo sapiens
tcttctaccagaagggcaggtttcc

SEQ ID NO: 5959 - DNA, 25 bp, Homo sapiens
ggtcagtccgcctacacacattttc

SEQ ID NO: 5960 - DNA, 25 bp, Homo sapiens
cgtcctccttgggaacctttaatta

SEQ ID NO: 5961 - DNA, 25 bp, Homo sapiens
ctgggttggtaccacagaactttgc

SEQ ID NO: 5962 - DNA, 25 bp, Homo sapiens
tgctctaccagaggcctattggatc

SEQ ID NO: 5963 - DNA, 25 bp, Homo sapiens
tgctcctacagtactgacttgcata

SEQ ID NO: 5964 - DNA, 25 bp, Homo sapiens
tccacggtcctgctgccaaatatga

SEQ ID NO: 5965 - DNA, 25 bp, Homo sapiens
gaaacaggcctcatttacaatagta

SEQ ID NO: 5966 - DNA, 25 bp, Homo sapiens
ctgaggcctaggatagacccatata

SEQ ID NO: 5967 - DNA, 25 bp, Homo sapiens
ttggcaaggccatctgaccagtatc

SEQ ID NO: 5968 - DNA, 25 bp, Homo sapiens
ctgttatagtccttccaaaaatgag

SEQ ID NO: 5969 - DNA, 25 bp, Homo sapiens
tcggaggcccattcgagagtttttt

SEQ ID NO: 5970 - DNA, 25 bp, Homo sapiens
tgccattgtggaaactcactcactg

SEQ ID NO: 5971 - DNA, 25 bp, Homo sapiens
tctggtgggccaaagtcagcatatg

SEQ ID NO: 5972 - DNA, 25 bp, Homo sapiens
tggttgtgcctcaaaatctgcttta

SEQ ID NO: 5973 - DNA, 25 bp, Homo sapiens
cccagggctgactgtgtttatacca

SEQ ID NO: 5974 - DNA, 25 bp, Homo sapiens
gccctgcacctcactagataatatg

SEQ ID NO: 5975 - DNA, 25 bp, Homo sapiens
tggacttcatgctctcctgaacata

SEQ ID NO: 5976 - DNA, 25 bp, Homo sapiens
gcctcagttcataaatggggtcatg

SEQ ID NO: 5977 - DNA, 25 bp, Homo sapiens
gcctggtccagctaagtcaatctga

SEQ ID NO: 5978 - DNA, 25 bp, Homo sapiens
gccctcagtgtccagtgtgaaagta

SEQ ID NO: 5979 - DNA, 25 bp, Homo sapiens
cctttttgggagacggaaactctta

SEQ ID NO: 5980 - DNA, 25 bp, Homo sapiens
ggcaaggcagcagcaattccatata

SEQ ID NO: 5981 - DNA, 25 bp, Homo sapiens
attcacttttgtacactggagtttg

SEQ ID NO: 5982 - DNA, 25 bp, Homo sapiens
ccacactatggtcttttgcgcagta

SEQ ID NO: 5983 - DNA, 25 bp, Homo sapiens
tgcctctgtgaatgtaaattgtttc

SEQ ID NO: 5984 - DNA, 25 bp, Homo sapiens
accccactcccaaagatgtattaca

SEQ ID NO: 5985 - DNA, 25 bp, Homo sapiens
gagggtaccctctcattagtgcaga

SEQ ID NO: 5986 - DNA, 25 bp, Homo sapiens
gggctgtttcacttccttgcgcttg

SEQ ID NO: 5987 - DNA, 25 bp, Homo sapiens
tgtgcctctgctgtttcttctcatg

SEQ ID NO: 5988 - DNA, 25 bp, Homo sapiens
atgggtcccaaccaccaggagagta

SEQ ID NO: 5989 - DNA, 25 bp, Homo sapiens
tagttaaattttaaatgagagtaaa

SEQ ID NO: 5990 - DNA, 25 bp, Homo sapiens
gttgctcagcttctacttataaaga

SEQ ID NO: 5991 - DNA, 25 bp, Homo sapiens
tttttttaaaaatagggcaaactat

SEQ ID NO: 5992 - DNA, 25 bp, Homo sapiens
gaaggtcgacttctaggctccaatc

SEQ ID NO: 5993 - DNA, 25 bp, Homo sapiens
actgaggcctgagatttccaaattc

SEQ ID NO: 5994 - DNA, 25 bp, Homo sapiens
atttcggcgacagcagcctatgtga

SEQ ID NO: 5995 - DNA, 25 bp, Homo sapiens
aggcggcaggtaagttcttttttca

SEQ ID NO: 5996 - DNA, 25 bp, Homo sapiens
tcttgcattagacctgtgaccgttg

SEQ ID NO: 5997 - DNA, 25 bp, Homo sapiens
gtgcctgcctgtataacacctgtta

SEQ ID NO: 5998 - DNA, 25 bp, Homo sapiens
ctctctgacattagtaggctctgca

SEQ ID NO: 5999 - DNA, 25 bp, Homo sapiens
tgggcacaggccaccaaacgtattg

SEQ ID NO: 6000 - DNA, 25 bp, Homo sapiens
gggctcttcattctgacctaagtga

SEQ ID NO: 6001 - DNA, 25 bp, Homo sapiens
cttgggttatcactacatgagctgc

SEQ ID NO: 6002 - DNA, 25 bp, Homo sapiens
gccctcttgaagctgataatgcctg

SEQ ID NO: 6003 - DNA, 25 bp, Homo sapiens
gcctacttggcagtctatgataatg

SEQ ID NO: 6004 - DNA, 25 bp, Homo sapiens
catagtatgtgacaagtgtcagaga

SEQ ID NO: 6005 - DNA, 25 bp, Homo sapiens
tgctctcttgttgctactgacccga

SEQ ID NO: 6006 - DNA, 25 bp, Homo sapiens
taattaattaaaaaaagatttggtc

SEQ ID NO: 6007 - DNA, 25 bp, Homo sapiens
cccatctaattgtttaaacttgaaa

SEQ ID NO: 6008 - DNA, 25 bp, Homo sapiens
tgccatgccaccatgcaagtcttga

SEQ ID NO: 6009 - DNA, 25 bp, Homo sapiens
cgctgagccttggtttcttggtcta

SEQ ID NO: 6010 - DNA, 25 bp, Homo sapiens
gaggagtcatcaccagcaactgtta

SEQ ID NO: 6011 - DNA, 25 bp, Homo sapiens
cttctggaggtccttgcaatatatc

SEQ ID NO: 6012 - DNA, 25 bp, Homo sapiens
tcgggcagtgataatggcaagtttg

SEQ ID NO: 6013 - DNA, 25 bp, Homo sapiens
aggacagtgctcatacggctttatc

SEQ ID NO: 6014 - DNA, 25 bp, Homo sapiens
ttagcctcagctgataacgccattc

SEQ ID NO: 6015 - DNA, 25 bp, Homo sapiens
ttcagcagcagacaggagactcctc

SEQ ID NO: 6016 - DNA, 25 bp, Homo sapiens
acgtgtgcacaccttaggaatcaga

SEQ ID NO: 6017 - DNA, 25 bp, Homo sapiens
ggtcgccctatagcagcactgtaaa

SEQ ID NO: 6018 - DNA, 25 bp, Homo sapiens
aaggacttatgctgggatcacaata

SEQ ID NO: 6019 - DNA, 25 bp, Homo sapiens
tgtggactccacctgatagatattc

SEQ ID NO: 6020 - DNA, 25 bp, Homo sapiens
aggccacagtttccaggtttcagta

SEQ ID NO: 6021 - DNA, 25 bp, Homo sapiens
gcgacctgtcactatttggccactg

SEQ ID NO: 6022 - DNA, 25 bp, Homo sapiens
tggtgcgcaagttgcatcaagatgc

SEQ ID NO: 6023 - DNA, 25 bp, Homo sapiens
ccagatgtgcctgctttccagatta

SEQ ID NO: 6024 - DNA, 25 bp, Homo sapiens
gggccttagtatagatccgtcattc

SEQ ID NO: 6025 - DNA, 25 bp, Homo sapiens
aacccggagactaggacgctttgca

SEQ ID NO: 6026 - DNA, 25 bp, Homo sapiens
tttttcctcaaatggggtgaacctc

SEQ ID NO: 6027 - DNA, 25 bp, Homo sapiens
tgcacatgtccaagcttcataattg

SEQ ID NO: 6028 - DNA, 25 bp, Homo sapiens
cagttctctgaggttggataaagcc

SEQ ID NO: 6029 - DNA, 25 bp, Homo sapiens
cagccctggagtatgatcagcttcc

SEQ ID NO: 6030 - DNA, 25 bp, Homo sapiens
tctagtataaacaaatcttatattt

SEQ ID NO: 6031 - DNA, 25 bp, Homo sapiens
ccacttatggtatcaggagactcta

SEQ ID NO: 6032 - DNA, 25 bp, Homo sapiens
acctcaggagaggtcagcaacctta

SEQ ID NO: 6033 - DNA, 25 bp, Homo sapiens
atcagattatacaatcaaaaatatc

SEQ ID NO: 6034 - DNA, 25 bp, Homo sapiens
ctgtgaaatacatggaggcgaaatc

SEQ ID NO: 6035 - DNA, 25 bp, Homo sapiens
gctgttcagctaggcttaccttata

SEQ ID NO: 6036 - DNA, 25 bp, Homo sapiens
ccaatatgccttgaatagatgtcta

SEQ ID NO: 6037 - DNA, 25 bp, Homo sapiens
tctccagtgggaattagctagtagg

SEQ ID NO: 6038 - DNA, 25 bp, Homo sapiens
ggcctgctttcaactttcacgatca

SEQ ID NO: 6039 - DNA, 25 bp, Homo sapiens
ttagatatttggaagctcttaccca

SEQ ID NO: 6040 - DNA, 25 bp, Homo sapiens
aattttttttaaaagcccttatata

SEQ ID NO: 6041 - DNA, 25 bp, Homo sapiens
ggctgcagtgttaatgtatcatata

SEQ ID NO: 6042 - DNA, 25 bp, Homo sapiens
gcagtacatatttccttgtcagata

SEQ ID NO: 6043 - DNA, 25 bp, Homo sapiens
agtcactgccatgttccttgtattc

SEQ ID NO: 6044 - DNA, 25 bp, Homo sapiens
ccatgtcctggaatgtgaatcacca

SEQ ID NO: 6045 - DNA, 25 bp, Homo sapiens
ttccaactttaaatagatcggtctt

SEQ ID NO: 6046 - DNA, 25 bp, Homo sapiens
ttctgggctacatggctacatagga

SEQ ID NO: 6047 - DNA, 25 bp, Homo sapiens
taactggaaccaagctctaagtttg

SEQ ID NO: 6048 - DNA, 25 bp, Homo sapiens
ggttgtgcacataaagggctctcta

SEQ ID NO: 6049 - DNA, 25 bp, Homo sapiens
ctggggtcatgggttaacatctttg

SEQ ID NO: 6050 - DNA, 25 bp, Homo sapiens
actctaccctgtttggaggagggca

SEQ ID NO: 6051 - DNA, 25 bp, Homo sapiens
ggtatctataatgcaactctgccca

SEQ ID NO: 6052 - DNA, 25 bp, Homo sapiens
atctacattaatctgcacacaatgt

SEQ ID NO: 6053 - DNA, 25 bp, Homo sapiens
tttaaaaaggaaaaaaatgtaatgg

SEQ ID NO: 6054 - DNA, 25 bp, Homo sapiens
agatcaaaatcctatgggtcacttt

SEQ ID NO: 6055 - DNA, 25 bp, Homo sapiens
tatgcttacatacccagtctagaga

SEQ ID NO: 6056 - DNA, 25 bp, Homo sapiens
tctcactgtgtaagaaggggaactc

SEQ ID NO: 6057 - DNA, 25 bp, Homo sapiens
gtctgcagcatgtgtcctgatgaca

SEQ ID NO: 6058 - DNA, 25 bp, Homo sapiens
ggatttgacagccaaccatgagatt

SEQ ID NO: 6059 - DNA, 25 bp, Homo sapiens
cagggcctgttcacttttacataaa

SEQ ID NO: 6060 - DNA, 25 bp, Homo sapiens
tctggtcactcaaagcctaaaatgc

SEQ ID NO: 6061 - DNA, 25 bp, Homo sapiens
cctttagctagaagaacttggccta

SEQ ID NO: 6062 - DNA, 25 bp, Homo sapiens
tgtatgcctccacttcttacaaact

SEQ ID NO: 6063 - DNA, 25 bp, Homo sapiens
ctggccctgttatggaatctaaatt

SEQ ID NO: 6064 - DNA, 25 bp, Homo sapiens
gagtataccctagttccttgagaca

SEQ ID NO: 6065 - DNA, 25 bp, Homo sapiens
tttggtcaccaagatagagctgtta

SEQ ID NO: 6066 - DNA, 25 bp, Homo sapiens
tgggtctccgtcctaggcaaaaaga

SEQ ID NO: 6067 - DNA, 25 bp, Homo sapiens
cagccagggttaagaacactccttc

SEQ ID NO: 6068 - DNA, 25 bp, Homo sapiens
tgggtccactggaagcaagtcctta

SEQ ID NO: 6069 - DNA, 25 bp, Homo sapiens
ttctctcctgaaagaaatgggtggg

SEQ ID NO: 6070 - DNA, 25 bp, Homo sapiens
tcctcgtcttctctgcatgtgtgtg

SEQ ID NO: 6071 - DNA, 25 bp, Homo sapiens
tttcccttggcagcacaatttattg

SEQ ID NO: 6072 - DNA, 25 bp, Homo sapiens
ttgactgctcattttgctttaaaag

SEQ ID NO: 6073 - DNA, 25 bp, Homo sapiens
agtcttctaaaacattacctttgcc

SEQ ID NO: 6074 - DNA, 25 bp, Homo sapiens
ccttgaacaagggagaaaagctttc

SEQ ID NO: 6075 - DNA, 25 bp, Homo sapiens
gtccaggctccattgcccagctatg

SEQ ID NO: 6076 - DNA, 25 bp, Homo sapiens
tgcctttgattgattgcgtgatttc

SEQ ID NO: 6077 - DNA, 25 bp, Homo sapiens
acctccttggaagatgcctggcaga

SEQ ID NO: 6078 - DNA, 25 bp, Homo sapiens
gtacagaaatctggaggtctattca

SEQ ID NO: 6079 - DNA, 25 bp, Homo sapiens
gtttataaaagaggaataagtctga

SEQ ID NO: 6080 - DNA, 25 bp, Homo sapiens
tggagccttcattaccggtgtactg

SEQ ID NO: 6081 - DNA, 25 bp, Homo sapiens
gccggggttaccagctagtctaaaa

SEQ ID NO: 6082 - DNA, 25 bp, Homo sapiens
aagcctggttttcaagaggtcaaga

SEQ ID NO: 6083 - DNA, 25 bp, Homo sapiens
tgcttcagggaagagaactaatacc

SEQ ID NO: 6084 - DNA, 25 bp, Homo sapiens
ctgtcatttgtattatttaacttat

SEQ ID NO: 6085 - DNA, 25 bp, Homo sapiens
acgcccattcaggaactcaggttta

SEQ ID NO: 6086 - DNA, 25 bp, Homo sapiens
acctggcttccagtagcataaagca

SEQ ID NO: 6087 - DNA, 25 bp, Homo sapiens
aggccaagtgtacccaatttatttc

SEQ ID NO: 6088 - DNA, 25 bp, Homo sapiens
gcaagcagtcctttcactagtcacg

SEQ ID NO: 6089 - DNA, 25 bp, Homo sapiens
ctcatgtggcatgcaggtgtttcta

SEQ ID NO: 6090 - DNA, 25 bp, Homo sapiens
cttgatccataggtgcagacagtac

SEQ ID NO: 6091 - DNA, 25 bp, Homo sapiens
gacatggttcccgactctactagta

SEQ ID NO: 6092 - DNA, 25 bp, Homo sapiens
gggcacttctcatccacactcatga

SEQ ID NO: 6093 - DNA, 25 bp, Homo sapiens
ggccttctttccttctcttgagtta

SEQ ID NO: 6094 - DNA, 25 bp, Homo sapiens
cctaggctctcctcgaaataaaagc

SEQ ID NO: 6095 - DNA, 25 bp, Homo sapiens
gggctgcttatgaaactgatctcta

SEQ ID NO: 6096 - DNA, 25 bp, Homo sapiens
aatcagagactagaggaagcattta

SEQ ID NO: 6097 - DNA, 25 bp, Homo sapiens
ttctaaaccagaaacattgtacatc

SEQ ID NO: 6098 - DNA, 25 bp, Homo sapiens
tcaggctttcagctgaggccatttc

SEQ ID NO: 6099 - DNA, 25 bp, Homo sapiens
aactttgttgttgttcaggcaatga

SEQ ID NO: 6100 - DNA, 25 bp, Homo sapiens
gttgcctcccccctttattacattt

SEQ ID NO: 6101 - DNA, 25 bp, Homo sapiens
ctggggtctttctagagtgcgaaca

SEQ ID NO: 6102 - DNA, 25 bp, Homo sapiens
gcatagcctatctcgtcctgtggaa

SEQ ID NO: 6103 - DNA, 25 bp, Homo sapiens
ttggattttaagtctgccgcctgga

SEQ ID NO: 6104 - DNA, 25 bp, Homo sapiens
gtccactgatggcttttgtcaatca

SEQ ID NO: 6105 - DNA, 25 bp, Homo sapiens
gttgccacatacagagatacacaga

SEQ ID NO: 6106 - DNA, 25 bp, Homo sapiens
gagcacttgtgggatgcttcaaccc

SEQ ID NO: 6107 - DNA, 25 bp, Homo sapiens
tgagaaaaaatatatttggccacat

SEQ ID NO: 6108 - DNA, 25 bp, Homo sapiens
ggccacacctctgcatccttgaata

SEQ ID NO: 6109 - DNA, 25 bp, Homo sapiens
agaagcacttatttcctggatgcca

SEQ ID NO: 6110 - DNA, 25 bp, Homo sapiens
gtctggattctggtcatacttactc

SEQ ID NO: 6111 - DNA, 25 bp, Homo sapiens
cccttggtggtgaaaaagccattct

SEQ ID NO: 6112 - DNA, 25 bp, Homo sapiens
agcatcttacaataggggcccagtg

SEQ ID NO: 6113 - DNA, 25 bp, Homo sapiens
tctcagtgctaaccaaggccaaggc

SEQ ID NO: 6114 - DNA, 25 bp, Homo sapiens
ctctagctctggcacatggaattaa

SEQ ID NO: 6115 - DNA, 25 bp, Homo sapiens
tgggacattcttttctcaggataaa

SEQ ID NO: 6116 - DNA, 25 bp, Homo sapiens
cctgaggatggataggtacagcttc

SEQ ID NO: 6117 - DNA, 25 bp, Homo sapiens
acttggctaaacaccatgaagagtg

SEQ ID NO: 6118 - DNA, 25 bp, Homo sapiens
tggtagtcttatgaggggccactta

SEQ ID NO: 6119 - DNA, 25 bp, Homo sapiens
gcccaaattgactgtactaccactg

SEQ ID NO: 6120 - DNA, 25 bp, Homo sapiens
tggcctcagtatgcaaacaattaac

SEQ ID NO: 6121 - DNA, 25 bp, Homo sapiens
gtcgtcccagctagttgtcatgtta

SEQ ID NO: 6122 - DNA, 25 bp, Homo sapiens
ttgtagagcactccagttagaatta

SEQ ID NO: 6123 - DNA, 25 bp, Homo sapiens
cctgtcactggcaagattgcttttc

SEQ ID NO: 6124 - DNA, 25 bp, Homo sapiens
cctgcccggagaattgacacatata

SEQ ID NO: 6125 - DNA, 25 bp, Homo sapiens
gggacccaggttgtatttgttaatc

SEQ ID NO: 6126 - DNA, 25 bp, Homo sapiens
tgtgccctagctgtgaccattctga

SEQ ID NO: 6127 - DNA, 25 bp, Homo sapiens
tgtaggaatgtttgcaggactctgc

SEQ ID NO: 6128 - DNA, 25 bp, Homo sapiens
ctgtgcccggcaacctaaggattta

SEQ ID NO: 6129 - DNA, 25 bp, Homo sapiens
ggactctgaagctcatctgccacta

SEQ ID NO: 6130 - DNA, 25 bp, Homo sapiens
gagaggtcactgaaggatattaagc

SEQ ID NO: 6131 - DNA, 25 bp, Homo sapiens
gagaaccaccttgaacagagctatg

SEQ ID NO: 6132 - DNA, 25 bp, Homo sapiens
tcatggtatacagcagaggtctaac

SEQ ID NO: 6133 - DNA, 25 bp, Homo sapiens
gtgtaccctggctgtcctcctgaaa

SEQ ID NO: 6134 - DNA, 25 bp, Homo sapiens
gtccctggataacatggtctcagtt

SEQ ID NO: 6135 - DNA, 25 bp, Homo sapiens
accattagtgtttgggtggtcacca

SEQ ID NO: 6136 - DNA, 25 bp, Homo sapiens
tcctctttgtagcatggatccaatt

SEQ ID NO: 6137 - DNA, 25 bp, Homo sapiens
gccaatagctcttactgtgcagttt

SEQ ID NO: 6138 - DNA, 25 bp, Homo sapiens
ggtggtttgttttttaatctctttt

SEQ ID NO: 6139 - DNA, 25 bp, Homo sapiens
gctgtgggccttgtccttaatctga

SEQ ID NO: 6140 - DNA, 25 bp, Homo sapiens
ggtcttgcaaccctcctttaaaata

SEQ ID NO: 6141 - DNA, 25 bp, Homo sapiens
cccagattctttaaccaggtgttca

SEQ ID NO: 6142 - DNA, 25 bp, Homo sapiens
gttttccctctgatcccaagttttc

SEQ ID NO: 6143 - DNA, 25 bp, Homo sapiens
cagtctggcacttttcagtagttta

SEQ ID NO: 6144 - DNA, 25 bp, Homo sapiens
agtgtacctgcctttcatttcatga

SEQ ID NO: 6145 - DNA, 25 bp, Homo sapiens
tggggactggaagctatgtattctt

SEQ ID NO: 6146 - DNA, 25 bp, Homo sapiens
ctataagaataactacattctttct

SEQ ID NO: 6147 - DNA, 25 bp, Homo sapiens
atagtatattctggtaagcattcca

SEQ ID NO: 6148 - DNA, 25 bp, Homo sapiens
tgtactatacacacatgcagagata

SEQ ID NO: 6149 - DNA, 25 bp, Homo sapiens
ctgagctaggggtcatctttactta

SEQ ID NO: 6150 - DNA, 25 bp, Homo sapiens
tatcttatttcttcttcacatctta

SEQ ID NO: 6151 - DNA, 25 bp, Homo sapiens
aaatgcctatgttgtgctgaagcaa

SEQ ID NO: 6152 - DNA, 25 bp, Homo sapiens
tgtgcccttgtctttaaagcatacg

SEQ ID NO: 6153 - DNA, 25 bp, Homo sapiens
tttagagccacataggggatatcca

SEQ ID NO: 6154 - DNA, 25 bp, Homo sapiens
tggacaccagccagttattgtaatt

SEQ ID NO: 6155 - DNA, 25 bp, Homo sapiens
atgaaccttggcactttagaatagc

SEQ ID NO: 6156 - DNA, 25 bp, Homo sapiens
catggtctgagctttcctttttgaa

SEQ ID NO: 6157 - DNA, 25 bp, Homo sapiens
tccctgctgagaatgccataatttc

SEQ ID NO: 6158 - DNA, 25 bp, Homo sapiens
tttgcatgacttgacccaggctctg

SEQ ID NO: 6159 - DNA, 25 bp, Homo sapiens
tatttcttacagtacatggagtggc

SEQ ID NO: 6160 - DNA, 25 bp, Homo sapiens
tgcctaacccattgtgctgaaacta

SEQ ID NO: 6161 - DNA, 25 bp, Homo sapiens
ggcaggtcattgcacttacagttta

SEQ ID NO: 6162 - DNA, 25 bp, Homo sapiens
ctctcttgagtgttgaggtgctaca

SEQ ID NO: 6163 - DNA, 25 bp, Homo sapiens
agagggcatttttcttctaacaggc

SEQ ID NO: 6164 - DNA, 25 bp, Homo sapiens
ctttccttaagtgcaacctgtgtta

SEQ ID NO: 6165 - DNA, 25 bp, Homo sapiens
ggggtatgcttttccatctggctta

SEQ ID NO: 6166 - DNA, 25 bp, Homo sapiens
tcgggagaatctctggcttgaacac

SEQ ID NO: 6167 - DNA, 25 bp, Homo sapiens
agagcctggttttgagggttacaac

SEQ ID NO: 6168 - DNA, 25 bp, Homo sapiens
gcgccacctggactaaagcttatat

SEQ ID NO: 6169 - DNA, 25 bp, Homo sapiens
gcttcacatatcgatacaggcatgg

SEQ ID NO: 6170 - DNA, 25 bp, Homo sapiens
ttacatgttcagcagaggagactca

SEQ ID NO: 6171 - DNA, 25 bp, Homo sapiens
ctactcatcccaggtagggctgtcc

SEQ ID NO: 6172 - DNA, 25 bp, Homo sapiens
agacaaaacaataccacccgcaccc

SEQ ID NO: 6173 - DNA, 25 bp, Homo sapiens
acaatatctagaacacctaaaaaaa

SEQ ID NO: 6174 - DNA, 25 bp, Homo sapiens
ctgtaagcatcgtgtaagagtcata

SEQ ID NO: 6175 - DNA, 25 bp, Homo sapiens
agtctctgtcctctaccggctgtta

SEQ ID NO: 6176 - DNA, 25 bp, Homo sapiens
cagagttcgttgtactggcacttta

SEQ ID NO: 6177 - DNA, 25 bp, Homo sapiens
attctgggcacatgggaacttctgg

SEQ ID NO: 6178 - DNA, 25 bp, Homo sapiens
cagccttcagcattgtttgacctca

SEQ ID NO: 6179 - DNA, 25 bp, Homo sapiens
ggtaccctagaagaagcccagtgtg

SEQ ID NO: 6180 - DNA, 25 bp, Homo sapiens
tccactgagggaggtcatagctaca

SEQ ID NO: 6181 - DNA, 25 bp, Homo sapiens
catgccggtacccagtttggactta

SEQ ID NO: 6182 - DNA, 25 bp, Homo sapiens
tctgtaattattattttggatcaag

SEQ ID NO: 6183 - DNA, 25 bp, Homo sapiens
cccatgtttgggctaggtgctgtaa

SEQ ID NO: 6184 - DNA, 25 bp, Homo sapiens
tttcctcctgagaatctggccttta

SEQ ID NO: 6185 - DNA, 25 bp, Homo sapiens
agagctgtgtgtcttctctggcaca

SEQ ID NO: 6186 - DNA, 25 bp, Homo sapiens
ccacacagggcaggactgagccaca

SEQ ID NO: 6187 - DNA, 25 bp, Homo sapiens
atgtatcagttcagggctcacattc

SEQ ID NO: 6188 - DNA, 25 bp, Homo sapiens
ggtgaccactactggggcgtttata

SEQ ID NO: 6189 - DNA, 25 bp, Homo sapiens
tgaaccctgatttaagtccctttgg

SEQ ID NO: 6190 - DNA, 25 bp, Homo sapiens
ccctgatgcattatgggtaaacaca

SEQ ID NO: 6191 - DNA, 25 bp, Homo sapiens
gtgtatgtcattctctcagcccaga

SEQ ID NO: 6192 - DNA, 25 bp, Homo sapiens
ctccaagtgcttcttccctgttata

SEQ ID NO: 6193 - DNA, 25 bp, Homo sapiens
gcactgccctgccatgttcacataa

SEQ ID NO: 6194 - DNA, 25 bp, Homo sapiens
tccaagcagagtgtccagtgtcatc

SEQ ID NO: 6195 - DNA, 25 bp, Homo sapiens
gccagtggtactcatagtcaagatg

SEQ ID NO: 6196 - DNA, 25 bp, Homo sapiens
tatatgggcctctatcctggaaacc

SEQ ID NO: 6197 - DNA, 25 bp, Homo sapiens
gtaggctttctgagctccaagatta

SEQ ID NO: 6198 - DNA, 25 bp, Homo sapiens
agcccttggggattggttccataaa

SEQ ID NO: 6199 - DNA, 25 bp, Homo sapiens
ggtctgctagcactcccaaggaagg

SEQ ID NO: 6200 - DNA, 25 bp, Homo sapiens
ttcggcatcaagagctctgtattta

SEQ ID NO: 6201 - DNA, 25 bp, Homo sapiens
ggaacaccctgatatgcaagatttg

SEQ ID NO: 6202 - DNA, 25 bp, Homo sapiens
agtcctgctgactaggttatccgca

SEQ ID NO: 6203 - DNA, 25 bp, Homo sapiens
gtaggctgcctgttttcaatgctca

SEQ ID NO: 6204 - DNA, 25 bp, Homo sapiens
ctgcagtagcaggttttctcattta

SEQ ID NO: 6205 - DNA, 25 bp, Homo sapiens
tgtgcctgccatgaactattctatg

SEQ ID NO: 6206 - DNA, 25 bp, Homo sapiens
ttttcgcagcctagagagcattttc

SEQ ID NO: 6207 - DNA, 25 bp, Homo sapiens
ccattttctgaaggatagggcaaca

SEQ ID NO: 6208 - DNA, 25 bp, Homo sapiens
gtcaggcactccactgtttaacaga

SEQ ID NO: 6209 - DNA, 25 bp, Homo sapiens
ccttttccaaagtactccagcgata

SEQ ID NO: 6210 - DNA, 25 bp, Homo sapiens
tcctaggacttgatgtgcccattca

SEQ ID NO: 6211 - DNA, 25 bp, Homo sapiens
gatggctgacctctctcctgcttta

SEQ ID NO: 6212 - DNA, 25 bp, Homo sapiens
ttttttttagaaaaagcaagtcaca

SEQ ID NO: 6213 - DNA, 25 bp, Homo sapiens
agcagttaatttttgcttagcagaa

SEQ ID NO: 6214 - DNA, 25 bp, Homo sapiens
gtttccggtaacacacatgactttg

SEQ ID NO: 6215 - DNA, 25 bp, Homo sapiens
acatgccatgtcttggcttttaggg

SEQ ID NO: 6216 - DNA, 25 bp, Homo sapiens
aaaaaactaaactaatatttgaagc

SEQ ID NO: 6217 - DNA, 25 bp, Homo sapiens
cagcagttctgcagcttaataattc

SEQ ID NO: 6218 - DNA, 25 bp, Homo sapiens
caggctgtgaatgaatgactctcta

SEQ ID NO: 6219 - DNA, 25 bp, Homo sapiens
ggagatgtcacaagcactgagcctg

SEQ ID NO: 6220 - DNA, 25 bp, Homo sapiens
tgtgatattgtgagccctggacata

SEQ ID NO: 6221 - DNA, 25 bp, Homo sapiens
cccattgcaggaggttatgatccta

SEQ ID NO: 6222 - DNA, 25 bp, Homo sapiens
ttttttcaaagaaatggctaatttt

SEQ ID NO: 6223 - DNA, 25 bp, Homo sapiens
cacctgttcgggatttggattccta

SEQ ID NO: 6224 - DNA, 25 bp, Homo sapiens
cctcttttacatccagggaagcttt

SEQ ID NO: 6225 - DNA, 25 bp, Homo sapiens
gccctttataaagcagcagtgtgtg

SEQ ID NO: 6226 - DNA, 25 bp, Homo sapiens
tgtgggaaacctatctaaatgtggc

SEQ ID NO: 6227 - DNA, 25 bp, Homo sapiens
tggaaccctggcttctaattaaatg

SEQ ID NO: 6228 - DNA, 25 bp, Homo sapiens
atccagatgtctgatcccatatgca

SEQ ID NO: 6229 - DNA, 25 bp, Homo sapiens
aaaccgctgtactctctggactgca

SEQ ID NO: 6230 - DNA, 25 bp, Homo sapiens
agtgcccatcttgacacacatgtga

SEQ ID NO: 6231 - DNA, 25 bp, Homo sapiens
tgtgtccttcccagtgcgtatgttc

SEQ ID NO: 6232 - DNA, 25 bp, Homo sapiens
cgtgtctagatttcgccacaatatt

SEQ ID NO: 6233 - DNA, 25 bp, Homo sapiens
tgaactcgaggcttcccagggaata

SEQ ID NO: 6234 - DNA, 25 bp, Homo sapiens
ctactgggatagaagccatgatctc

SEQ ID NO: 6235 - DNA, 25 bp, Homo sapiens
ctggacaggatgtttgccctctttt

SEQ ID NO: 6236 - DNA, 25 bp, Homo sapiens
gtcctccagggattaagggaacaga

SEQ ID NO: 6237 - DNA, 25 bp, Homo sapiens
agcaaccggagagcttgtgtgttta

SEQ ID NO: 6238 - DNA, 25 bp, Homo sapiens
gaactcattgcaaactttaaaaacc

SEQ ID NO: 6239 - DNA, 25 bp, Homo sapiens
cagtggaataagttgaaaatacctc

SEQ ID NO: 6240 - DNA, 25 bp, Homo sapiens
ccagcaaatagacaaatggtattct

SEQ ID NO: 6241 - DNA, 25 bp, Homo sapiens
gggtggtctcctttacacagccaga

SEQ ID NO: 6242 - DNA, 25 bp, Homo sapiens
cagagcagcgatcctggcattattc

SEQ ID NO: 6243 - DNA, 25 bp, Homo sapiens
ttggcctgcttagttacctcataca

SEQ ID NO: 6244 - DNA, 25 bp, Homo sapiens
tacctacggggagcttaactatttg

SEQ ID NO: 6245 - DNA, 25 bp, Homo sapiens
attttccaagaagcacatctgtttc

SEQ ID NO: 6246 - DNA, 25 bp, Homo sapiens
accatcatcattatcatcactatat

SEQ ID NO: 6247 - DNA, 25 bp, Homo sapiens
gggctgcccagcttcttgagtgcta

SEQ ID NO: 6248 - DNA, 25 bp, Homo sapiens
gcgaactgacctaagccactatgga

SEQ ID NO: 6249 - DNA, 25 bp, Homo sapiens
ttttgcataaagatacaagcacctc

SEQ ID NO: 6250 - DNA, 25 bp, Homo sapiens
tgaatccttctacccaccagtctga

SEQ ID NO: 6251 - DNA, 25 bp, Homo sapiens
tgtccagcaggatgtgaacttactc

SEQ ID NO: 6252 - DNA, 25 bp, Homo sapiens
cctggctataagaggatactgttcc

SEQ ID NO: 6253 - DNA, 25 bp, Homo sapiens
gacatgtgccttccctccttgtgaa

SEQ ID NO: 6254 - DNA, 25 bp, Homo sapiens
agtggtgacatttggtatttctaca

SEQ ID NO: 6255 - DNA, 25 bp, Homo sapiens
attcctctgagtacttgctgcttga

SEQ ID NO: 6256 - DNA, 25 bp, Homo sapiens
tttccctgatgccactgacttccta

SEQ ID NO: 6257 - DNA, 25 bp, Homo sapiens
catggtactatggaaaggaaacttt

SEQ ID NO: 6258 - DNA, 25 bp, Homo sapiens
tgcaaactctaccatatgcttaggc

SEQ ID NO: 6259 - DNA, 25 bp, Homo sapiens
tgaagacggacattttacagtgctt

SEQ ID NO: 6260 - DNA, 25 bp, Homo sapiens
gctcctatttttcaggcacttgaga

SEQ ID NO: 6261 - DNA, 25 bp, Homo sapiens
ttcccatttgtggtatgaagacaga

SEQ ID NO: 6262 - DNA, 25 bp, Homo sapiens
agccctgcaaaagtagtagcgatca

SEQ ID NO: 6263 - DNA, 25 bp, Homo sapiens
ggctttgggcaagtctttcactttc

SEQ ID NO: 6264 - DNA, 25 bp, Homo sapiens
ctatgcaataggcaacagctttgtc

SEQ ID NO: 6265 - DNA, 25 bp, Homo sapiens
ctggtgatgcgaagagcctattgcc

SEQ ID NO: 6266 - DNA, 25 bp, Homo sapiens
ccataagtgatactcttgaagacta

SEQ ID NO: 6267 - DNA, 25 bp, Homo sapiens
ggtgcagttactctagcctgtataa

SEQ ID NO: 6268 - DNA, 25 bp, Homo sapiens
gtcagcttttctaccagtgattttg

SEQ ID NO: 6269 - DNA, 25 bp, Homo sapiens
atcccaatggggtcatagttagtgc

SEQ ID NO: 6270 - DNA, 25 bp, Homo sapiens
ggcaggagagtgcatatgcctttta

SEQ ID NO: 6271 - DNA, 25 bp, Homo sapiens
ccaagcctttggtttccagggttta

SEQ ID NO: 6272 - DNA, 25 bp, Homo sapiens
ctaggttgggggaggataaatgatc

SEQ ID NO: 6273 - DNA, 25 bp, Homo sapiens
ttcttataaggcctccacatggatg

SEQ ID NO: 6274 - DNA, 25 bp, Homo sapiens
gggctccatcagtagacaaaatttt

SEQ ID NO: 6275 - DNA, 25 bp, Homo sapiens
cagaactttcccagtccagagcaga

SEQ ID NO: 6276 - DNA, 25 bp, Homo sapiens
cctttaggagtctgaggcccatatc

SEQ ID NO: 6277 - DNA, 25 bp, Homo sapiens
tcctagacccgtaagaacgatgtgc

SEQ ID NO: 6278 - DNA, 25 bp, Homo sapiens
tgcctcccacgtggaaagtgttgtc

SEQ ID NO: 6279 - DNA, 25 bp, Homo sapiens
atccttgggtgctgtgcttcataca

SEQ ID NO: 6280 - DNA, 25 bp, Homo sapiens
tgatacccaggtaagatgtcttagc

SEQ ID NO: 6281 - DNA, 25 bp, Homo sapiens
tgaaagtatttccagttcgccatga

SEQ ID NO: 6282 - DNA, 25 bp, Homo sapiens
gccttgtaggccacgtcgattaata

SEQ ID NO: 6283 - DNA, 25 bp, Homo sapiens
cggccatgtgactccgaagtaatta

SEQ ID NO: 6284 - DNA, 25 bp, Homo sapiens
cctgacctggcttccttcaaagata

SEQ ID NO: 6285 - DNA, 25 bp, Homo sapiens
cccaccatgtcatgtatttatatag

SEQ ID NO: 6286 - DNA, 25 bp, Homo sapiens
caagaagtagaaaatcatataaaat

SEQ ID NO: 6287 - DNA, 25 bp, Homo sapiens
gcctcaggttaatctcaaggaaatc

SEQ ID NO: 6288 - DNA, 25 bp, Homo sapiens
tgcctcagagactagccaccatatt

SEQ ID NO: 6289 - DNA, 25 bp, Homo sapiens
tggtgcctattcaaaacacggcttc

SEQ ID NO: 6290 - DNA, 25 bp, Homo sapiens
acctgctggttatgctttgatgtcc

SEQ ID NO: 6291 - DNA, 25 bp, Homo sapiens
tctttggaaatactggctgcctcgc

SEQ ID NO: 6292 - DNA, 25 bp, Homo sapiens
tacgaaagggttgaccaaagattcc

SEQ ID NO: 6293 - DNA, 25 bp, Homo sapiens
gctgggccacctctgtctttgaagg

SEQ ID NO: 6294 - DNA, 25 bp, Homo sapiens
gggcatcacacacaaacactcagtt

SEQ ID NO: 6295 - DNA, 25 bp, Homo sapiens
tgcctgagagcctacccttgaattc

SEQ ID NO: 6296 - DNA, 25 bp, Homo sapiens
tccatggttgatctagaaagctgca

SEQ ID NO: 6297 - DNA, 25 bp, Homo sapiens
tcaagagttttttggaagtgcagta

SEQ ID NO: 6298 - DNA, 25 bp, Homo sapiens
gtagataacacatactccgattatg

SEQ ID NO: 6299 - DNA, 25 bp, Homo sapiens
ggcaacattctcctctgtcagatga

SEQ ID NO: 6300 - DNA, 25 bp, Homo sapiens
acatgagtaggtatacttacattga

SEQ ID NO: 6301 - DNA, 25 bp, Homo sapiens
cacagttgtactgctactgctagta

SEQ ID NO: 6302 - DNA, 25 bp, Homo sapiens
ggatttgcctacgactctaggtttc

SEQ ID NO: 6303 - DNA, 25 bp, Homo sapiens
ctggagtgccttactttgttttttt

SEQ ID NO: 6304 - DNA, 25 bp, Homo sapiens
ccgcgaggaccttgttgttaaaaca

SEQ ID NO: 6305 - DNA, 25 bp, Homo sapiens
agtgcctaggcttgtttctatttca

SEQ ID NO: 6306 - DNA, 25 bp, Homo sapiens
tcaggtacaagtgcatcagctatgt

SEQ ID NO: 6307 - DNA, 25 bp, Homo sapiens
ctgcctagcattcactatgtagttg

SEQ ID NO: 6308 - DNA, 25 bp, Homo sapiens
aaatgtgttttggtctgtagtagtc

SEQ ID NO: 6309 - DNA, 25 bp, Homo sapiens
ccgctgaggcctttgaacacactta

SEQ ID NO: 6310 - DNA, 25 bp, Homo sapiens
ccctgctcagcctttgtcttaagta

SEQ ID NO: 6311 - DNA, 25 bp, Homo sapiens
agctgctgtcttcacgaacccgtca

SEQ ID NO: 6312 - DNA, 25 bp, Homo sapiens
tctggtaccacgcactaagtctgtt

SEQ ID NO: 6313 - DNA, 25 bp, Homo sapiens
ttggccatgcagtagagcaatcttc

SEQ ID NO: 6314 - DNA, 25 bp, Homo sapiens
tcactctctgagatagcaatggcta

SEQ ID NO: 6315 - DNA, 25 bp, Homo sapiens
cagctttggctggagcagttttctc

SEQ ID NO: 6316 - DNA, 25 bp, Homo sapiens
cccgggagaagcaaagccacactta

SEQ ID NO: 6317 - DNA, 25 bp, Homo sapiens
ttctctagtgtgctcagtcaaagta

SEQ ID NO: 6318 - DNA, 25 bp, Homo sapiens
gcactgccactcaggttttcaaaga

SEQ ID NO: 6319 - DNA, 25 bp, Homo sapiens
ccgttggacaaatacaggattcagc

SEQ ID NO: 6320 - DNA, 25 bp, Homo sapiens
tgctttcaggaatgcccggtcaaca

SEQ ID NO: 6321 - DNA, 25 bp, Homo sapiens
atcggctaacatgcaaaactctttg

SEQ ID NO: 6322 - DNA, 25 bp, Homo sapiens
gctgacggcaccaaaacctttaatg

SEQ ID NO: 6323 - DNA, 25 bp, Homo sapiens
catacaacagtctaggagggaggtc

SEQ ID NO: 6324 - DNA, 25 bp, Homo sapiens
gagacacggcttcatttgcaaattc

SEQ ID NO: 6325 - DNA, 25 bp, Homo sapiens
tgcgaactaacaatttgaaactctt

SEQ ID NO: 6326 - DNA, 25 bp, Homo sapiens
ccggacctggtgagttctacattta

SEQ ID NO: 6327 - DNA, 25 bp, Homo sapiens
ggtctgatcacaactcctggctatg

SEQ ID NO: 6328 - DNA, 25 bp, Homo sapiens
gagcatttgagcctaagtgccctta

SEQ ID NO: 6329 - DNA, 25 bp, Homo sapiens
ccacattcaggagctcaaagatttc

SEQ ID NO: 6330 - DNA, 25 bp, Homo sapiens
gactgtctgaacctgtgcttttgta

SEQ ID NO: 6331 - DNA, 25 bp, Homo sapiens
tgcacccagttgtaaatccagagaa

SEQ ID NO: 6332 - DNA, 25 bp, Homo sapiens
ctgcccagcagcaccttggattttc

SEQ ID NO: 6333 - DNA, 25 bp, Homo sapiens
gccggttactcactagctttcaatt

SEQ ID NO: 6334 - DNA, 25 bp, Homo sapiens
ggtaacatcttccagccatcacaga

SEQ ID NO: 6335 - DNA, 25 bp, Homo sapiens
ggctgctaggcaccaacattaaaca

SEQ ID NO: 6336 - DNA, 25 bp, Homo sapiens
actccgtaccagtgttcaatatgta

SEQ ID NO: 6337 - DNA, 25 bp, Homo sapiens
cccgttcatgctcaaagtacagtta

SEQ ID NO: 6338 - DNA, 25 bp, Homo sapiens
acaacctgttaatcctcatccaaga

SEQ ID NO: 6339 - DNA, 25 bp, Homo sapiens
tgtgttcacttcctcattgtagcta

SEQ ID NO: 6340 - DNA, 25 bp, Homo sapiens
tctgtggatcaataagtacaagctg

SEQ ID NO: 6341 - DNA, 25 bp, Homo sapiens
agctggttgccaagtctcctacaga

SEQ ID NO: 6342 - DNA, 25 bp, Homo sapiens
cctagtgaacagcagaaagaatctc

SEQ ID NO: 6343 - DNA, 25 bp, Homo sapiens
tggccctgctggttaatgacaagtc

SEQ ID NO: 6344 - DNA, 25 bp, Homo sapiens
tcagtgctggtgcttctgtcttcca

SEQ ID NO: 6345 - DNA, 25 bp, Homo sapiens
aaagtctgggcccaagactgtttcc

SEQ ID NO: 6346 - DNA, 25 bp, Homo sapiens
ctggccctgactgcacagaactgta

SEQ ID NO: 6347 - DNA, 25 bp, Homo sapiens
ggtccttcggcatttgcatcatttt

SEQ ID NO: 6348 - DNA, 25 bp, Homo sapiens
gcagtggaatccaaaacttccactc

SEQ ID NO: 6349 - DNA, 25 bp, Homo sapiens
tggccgtttactggacctatttgta

SEQ ID NO: 6350 - DNA, 25 bp, Homo sapiens
cgtgcattacagagtcagtcctttc

SEQ ID NO: 6351 - DNA, 25 bp, Homo sapiens
ctgatggcctgtttagctgactgta

SEQ ID NO: 6352 - DNA, 25 bp, Homo sapiens
tggcacccacactgagagcaacctg

SEQ ID NO: 6353 - DNA, 25 bp, Homo sapiens
ttcagccaaagggactgtctccatc

SEQ ID NO: 6354 - DNA, 25 bp, Homo sapiens
ggggaatccctgtggtaactgtata

SEQ ID NO: 6355 - DNA, 25 bp, Homo sapiens
gctagtcatgttgatggaaacctta

SEQ ID NO: 6356 - DNA, 25 bp, Homo sapiens
ttagggtggcagctcttagattctc

SEQ ID NO: 6357 - DNA, 25 bp, Homo sapiens
aggggctttctccacctctttatta

SEQ ID NO: 6358 - DNA, 25 bp, Homo sapiens
ttccagaaaggatgtgtagtcactc

SEQ ID NO: 6359 - DNA, 25 bp, Homo sapiens
ccctaggtcacacatcacagaagta

SEQ ID NO: 6360 - DNA, 25 bp, Homo sapiens
tgctggagggcacatgtcaatctta

SEQ ID NO: 6361 - DNA, 25 bp, Homo sapiens
cgtgtttcctccatgcagttccata

SEQ ID NO: 6362 - DNA, 25 bp, Homo sapiens
gtagccgagtttgcatttcacgata

SEQ ID NO: 6363 - DNA, 25 bp, Homo sapiens
tcttgaagcatgaaaaacccgtgtg

SEQ ID NO: 6364 - DNA, 25 bp, Homo sapiens
tgggacattaacctagactacagtg

SEQ ID NO: 6365 - DNA, 25 bp, Homo sapiens
aggcatctgcccattccatctgagc

SEQ ID NO: 6366 - DNA, 25 bp, Homo sapiens
tggacctccgttgtggcatatttta

SEQ ID NO: 6367 - DNA, 25 bp, Homo sapiens
catgggtcacctaatttgtcgttta

SEQ ID NO: 6368 - DNA, 25 bp, Homo sapiens
gagtgggtgatcctcagcaaaatca

SEQ ID NO: 6369 - DNA, 25 bp, Homo sapiens
gccaggcattctttttcttaacttg

SEQ ID NO: 6370 - DNA, 25 bp, Homo sapiens
tcacagttggggcatcatcatcatc

SEQ ID NO: 6371 - DNA, 25 bp, Homo sapiens
tccctggggaaactactcaaacatt

SEQ ID NO: 6372 - DNA, 25 bp, Homo sapiens
cttgcacactgtcttggcctgagga

SEQ ID NO: 6373 - DNA, 25 bp, Homo sapiens
gctgggctttttgctctactagtaa

SEQ ID NO: 6374 - DNA, 25 bp, Homo sapiens
tcatggttgcttggatataagttcc

SEQ ID NO: 6375 - DNA, 25 bp, Homo sapiens
cttgggcccacagaacacactgttc

SEQ ID NO: 6376 - DNA, 25 bp, Homo sapiens
caagggcatttttggtgcaagacta

SEQ ID NO: 6377 - DNA, 25 bp, Homo sapiens
gaaaggatttcaggtggctcatata

SEQ ID NO: 6378 - DNA, 25 bp, Homo sapiens
tgcccttaaggcattgctgaaaact

SEQ ID NO: 6379 - DNA, 25 bp, Homo sapiens
tttattaatatatatgtgtacatta

SEQ ID NO: 6380 - DNA, 25 bp, Homo sapiens
atatccagaccgtataagcaggccc

SEQ ID NO: 6381 - DNA, 25 bp, Homo sapiens
gccaagtaggccattgcaactctaa

SEQ ID NO: 6382 - DNA, 25 bp, Homo sapiens
gaatagactttatcttccggccatg

SEQ ID NO: 6383 - DNA, 25 bp, Homo sapiens
ggacctcaggtagcgtaacagtgta

SEQ ID NO: 6384 - DNA, 25 bp, Homo sapiens
agctttctgctgataggtgccatga

SEQ ID NO: 6385 - DNA, 25 bp, Homo sapiens
ggtccttcgacctcataatactgtg

SEQ ID NO: 6386 - DNA, 25 bp, Homo sapiens
attttctctggtgggcaaagtctca

SEQ ID NO: 6387 - DNA, 25 bp, Homo sapiens
tggcccatagttgtgtcttccatca

SEQ ID NO: 6388 - DNA, 25 bp, Homo sapiens
gagcaacctgatgatatgtcactga

SEQ ID NO: 6389 - DNA, 25 bp, Homo sapiens
taccggattggttatcattagcttc

SEQ ID NO: 6390 - DNA, 25 bp, Homo sapiens
ttaggtcctccttatccatggtttc

SEQ ID NO: 6391 - DNA, 25 bp, Homo sapiens
ttcttactatgcaaataagtaatgc

SEQ ID NO: 6392 - DNA, 25 bp, Homo sapiens
actcgacaccgttgattgtggctga

SEQ ID NO: 6393 - DNA, 25 bp, Homo sapiens
atgtatatatttatgtatgtgggct

SEQ ID NO: 6394 - DNA, 25 bp, Homo sapiens
cagcaggggttcatcacaggtcatg

SEQ ID NO: 6395 - DNA, 25 bp, Homo sapiens
gggatgggagcttatatattttttc

SEQ ID NO: 6396 - DNA, 25 bp, Homo sapiens
tattgaattgtgttttatggcctac

SEQ ID NO: 6397 - DNA, 25 bp, Homo sapiens
tagcagtattagagttggtaaactc

SEQ ID NO: 6398 - DNA, 25 bp, Homo sapiens
catttatgaaggctttaaaaaataa

SEQ ID NO: 6399 - DNA, 25 bp, Homo sapiens
aggactcctacttgacactgttcca

SEQ ID NO: 6400 - DNA, 25 bp, Homo sapiens
gcagcagtagcagtgaccatttaaa

SEQ ID NO: 6401 - DNA, 25 bp, Homo sapiens
ctgctgtcctttctgcacacttgaa

SEQ ID NO: 6402 - DNA, 25 bp, Homo sapiens
gttcttctcagggtgtttccacaca

SEQ ID NO: 6403 - DNA, 25 bp, Homo sapiens
tgctctgaatatgccggatccactc

SEQ ID NO: 6404 - DNA, 25 bp, Homo sapiens
ctcggctgctgaatgtgaattcctc

SEQ ID NO: 6405 - DNA, 25 bp, Homo sapiens
gcgtaggcagcacttatattccatc

SEQ ID NO: 6406 - DNA, 25 bp, Homo sapiens
tcggtcctggagcacatttgtcata

SEQ ID NO: 6407 - DNA, 25 bp, Homo sapiens
gcatggctaccactggcaatcaatt

SEQ ID NO: 6408 - DNA, 25 bp, Homo sapiens
acagcaattaatgatataaagatgt

SEQ ID NO: 6409 - DNA, 25 bp, Homo sapiens
tgcaggtgcaccatgttcagaatag

SEQ ID NO: 6410 - DNA, 25 bp, Homo sapiens
gcctcctggtgcaaattttagcttc

SEQ ID NO: 6411 - DNA, 25 bp, Homo sapiens
aaagggcttgagtttcaatctttgc

SEQ ID NO: 6412 - DNA, 25 bp, Homo sapiens
tgccagtgaacaaagcctagaattc

SEQ ID NO: 6413 - DNA, 25 bp, Homo sapiens
ttgcctcccgcatgccagtatacag

SEQ ID NO: 6414 - DNA, 25 bp, Homo sapiens
tgggttctatctgcattgtcattca

SEQ ID NO: 6415 - DNA, 25 bp, Homo sapiens
gggcatgcatatgttcccacatgga

SEQ ID NO: 6416 - DNA, 25 bp, Homo sapiens
tactgaggtcagaacatgtgttatg

SEQ ID NO: 6417 - DNA, 25 bp, Homo sapiens
gcatatctgatgcatagtcccttca

SEQ ID NO: 6418 - DNA, 25 bp, Homo sapiens
cttctttgcttttgacatttgaata

SEQ ID NO: 6419 - DNA, 25 bp, Homo sapiens
actggattcacacatgctgctagga

SEQ ID NO: 6420 - DNA, 25 bp, Homo sapiens
aagacatttctttgggagttagcta

SEQ ID NO: 6421 - DNA, 25 bp, Homo sapiens
gtgcctcaaaattatttaagatttc

SEQ ID NO: 6422 - DNA, 25 bp, Homo sapiens
atatcatttaaatccatcaaaatta

SEQ ID NO: 6423 - DNA, 25 bp, Homo sapiens
tggctcatgcttggctcattgagct

SEQ ID NO: 6424 - DNA, 25 bp, Homo sapiens
tatgcaagaagagataaaactggat

SEQ ID NO: 6425 - DNA, 25 bp, Homo sapiens
gagccatgagcaacccagaagtaaa

SEQ ID NO: 6426 - DNA, 25 bp, Homo sapiens
gaaagttaaaaacataaaatcatgg

SEQ ID NO: 6427 - DNA, 25 bp, Homo sapiens
tgacaatacactgcaggttataatt

SEQ ID NO: 6428 - DNA, 25 bp, Homo sapiens
cccagaattcaggttccagagaaca

SEQ ID NO: 6429 - DNA, 25 bp, Homo sapiens
tctgttttatcttcttggatcgtgg

SEQ ID NO: 6430 - DNA, 25 bp, Homo sapiens
gaaatgaataaaatgtctagaatgt

SEQ ID NO: 6431 - DNA, 25 bp, Homo sapiens
tcaagtttaaaacttaaactcatac

SEQ ID NO: 6432 - DNA, 25 bp, Homo sapiens
ttgcctggtaggaaacatcataata

SEQ ID NO: 6433 - DNA, 25 bp, Homo sapiens
ttttggctggaaaagcaccatcctg

SEQ ID NO: 6434 - DNA, 25 bp, Homo sapiens
ctcctgttgcaggaaaaacgtgctc

SEQ ID NO: 6435 - DNA, 25 bp, Homo sapiens
ccactcactggtagggaaagtcttt

SEQ ID NO: 6436 - DNA, 25 bp, Homo sapiens
gtgctaagagcgtcaaatcctgttg

SEQ ID NO: 6437 - DNA, 25 bp, Homo sapiens
tgacaatgatgttgtttcatatatg

SEQ ID NO: 6438 - DNA, 25 bp, Homo sapiens
ctttcatctgatagaggttctttgc

SEQ ID NO: 6439 - DNA, 25 bp, Homo sapiens
ttacagattctccacacagcccagg

SEQ ID NO: 6440 - DNA, 25 bp, Homo sapiens
ctgtgtaccagggaaagctttgatc

SEQ ID NO: 6441 - DNA, 25 bp, Homo sapiens
ttcagcagagccctggtaacattta

SEQ ID NO: 6442 - DNA, 25 bp, Homo sapiens
tcaaggagttcatgcaaggattttc

SEQ ID NO: 6443 - DNA, 25 bp, Homo sapiens
agatttgagtgtttcccgccatttc

SEQ ID NO: 6444 - DNA, 25 bp, Homo sapiens
tgcaatgttggactctgctaatcta

SEQ ID NO: 6445 - DNA, 25 bp, Homo sapiens
tccacagccagtttacgaggacatg

SEQ ID NO: 6446 - DNA, 25 bp, Homo sapiens
tgagacttcagctccataaggaaag

SEQ ID NO: 6447 - DNA, 25 bp, Homo sapiens
agatggccacctaccattttgatgc

SEQ ID NO: 6448 - DNA, 25 bp, Homo sapiens
acatggaaatctggccttgtggcta

SEQ ID NO: 6449 - DNA, 25 bp, Homo sapiens
actctggttgtaaatagacttgacc

SEQ ID NO: 6450 - DNA, 25 bp, Homo sapiens
ggtggcctctgcctcaatcttttta

SEQ ID NO: 6451 - DNA, 25 bp, Homo sapiens
agtctaagttcacatgcggcatttt

SEQ ID NO: 6452 - DNA, 25 bp, Homo sapiens
tttccacatggtaagttagactctg

SEQ ID NO: 6453 - DNA, 25 bp, Homo sapiens
ccttgctgaggataaaatcgtgaca

SEQ ID NO: 6454 - DNA, 25 bp, Homo sapiens
cccatcctttatttgttagacatga

SEQ ID NO: 6455 - DNA, 25 bp, Homo sapiens
tgttgccaacctataagacaagtga

SEQ ID NO: 6456 - DNA, 25 bp, Homo sapiens
ggtggctcctaggttttatcaatta

SEQ ID NO: 6457 - DNA, 25 bp, Homo sapiens
attcccagggttgttccattacagc

SEQ ID NO: 6458 - DNA, 25 bp, Homo sapiens
agctctgggcctctttgttataata

SEQ ID NO: 6459 - DNA, 25 bp, Homo sapiens
ggtatcctcttgaccatgcatagtc

SEQ ID NO: 6460 - DNA, 25 bp, Homo sapiens
cacatcttctggagtgctgctgtta

SEQ ID NO: 6461 - DNA, 25 bp, Homo sapiens
aaataaatagaaattagcttttttc

SEQ ID NO: 6462 - DNA, 25 bp, Homo sapiens
tgaaaaaagtgttatggacccatcc

SEQ ID NO: 6463 - DNA, 25 bp, Homo sapiens
gtccaccttttctgttgatgccttg

SEQ ID NO: 6464 - DNA, 25 bp, Homo sapiens
gacatgctttgctcattctggatga

SEQ ID NO: 6465 - DNA, 25 bp, Homo sapiens
ggcctggatgacagagaaaacctta

SEQ ID NO: 6466 - DNA, 25 bp, Homo sapiens
gcagggactactaacctacatgttg

SEQ ID NO: 6467 - DNA, 25 bp, Homo sapiens
actgccttgggatcatgaataattg

SEQ ID NO: 6468 - DNA, 25 bp, Homo sapiens
tactctggtagctctttcaaagatg

SEQ ID NO: 6469 - DNA, 25 bp, Homo sapiens
tgttccaggtaccatgccaggatta

SEQ ID NO: 6470 - DNA, 25 bp, Homo sapiens
tgagccatggatacctttacctagg

SEQ ID NO: 6471 - DNA, 25 bp, Homo sapiens
tttctaataccctcaactaagtgtc

SEQ ID NO: 6472 - DNA, 25 bp, Homo sapiens
gggacagtcaaacattagcaggttc

SEQ ID NO: 6473 - DNA, 25 bp, Homo sapiens
ttgcatgctaaaagaccctggtata

SEQ ID NO: 6474 - DNA, 25 bp, Homo sapiens
gagatcctaagaccaaacctatttg

SEQ ID NO: 6475 - DNA, 25 bp, Homo sapiens
ttgcagtcctttccaccaggttggg

SEQ ID NO: 6476 - DNA, 25 bp, Homo sapiens
ctggcttcttctctaatctctggtg

SEQ ID NO: 6477 - DNA, 25 bp, Homo sapiens
gcagtacattgtgctctttcaggta

SEQ ID NO: 6478 - DNA, 25 bp, Homo sapiens
aggctacctgccctttgctgagaaa

SEQ ID NO: 6479 - DNA, 25 bp, Homo sapiens
tcagggtgatcaataaggtgcattc

SEQ ID NO: 6480 - DNA, 25 bp, Homo sapiens
gtggattagacaactatctttgctg

SEQ ID NO: 6481 - DNA, 25 bp, Homo sapiens
ccttttctggggatcagtagccatc

SEQ ID NO: 6482 - DNA, 25 bp, Homo sapiens
gggacacattaactgagacaagata

SEQ ID NO: 6483 - DNA, 25 bp, Homo sapiens
gacagatacggttttgccttcaaag

SEQ ID NO: 6484 - DNA, 25 bp, Homo sapiens
gccctgagctccgtaccatctattt

SEQ ID NO: 6485 - DNA, 25 bp, Homo sapiens
tgcttgtttcttcatcggcccttaa

SEQ ID NO: 6486 - DNA, 25 bp, Homo sapiens
gcaactttatcattatacaatgata

SEQ ID NO: 6487 - DNA, 25 bp, Homo sapiens
gagggcttcatattgcagtcagatc

SEQ ID NO: 6488 - DNA, 25 bp, Homo sapiens
ggatgccaatttttctcacaagacc

SEQ ID NO: 6489 - DNA, 25 bp, Homo sapiens
agtgtactcctctgtgtctgcccaa

SEQ ID NO: 6490 - DNA, 25 bp, Homo sapiens
gctctcctgggagtaaggcacatta

SEQ ID NO: 6491 - DNA, 25 bp, Homo sapiens
gctggctgctttttgccttcacata

SEQ ID NO: 6492 - DNA, 25 bp, Homo sapiens
tcacaggggctgatgcaaggccaca

SEQ ID NO: 6493 - DNA, 25 bp, Homo sapiens
cccttgccagggaatctagttcatg

SEQ ID NO: 6494 - DNA, 25 bp, Homo sapiens
acagtttttgggaggagtcttcaca

SEQ ID NO: 6495 - DNA, 25 bp, Homo sapiens
gcaccttttgcccaagatttgaaga

SEQ ID NO: 6496 - DNA, 25 bp, Homo sapiens
cagaagggcttcagtcacaaatgtc

SEQ ID NO: 6497 - DNA, 25 bp, Homo sapiens
cctgccttgtatgccaggacatatg

SEQ ID NO: 6498 - DNA, 25 bp, Homo sapiens
acctgagcctgctgggaataatctc

SEQ ID NO: 6499 - DNA, 25 bp, Homo sapiens
aatgaagtgaatttagcactttcca

SEQ ID NO: 6500 - DNA, 25 bp, Homo sapiens
tccaccatgggttaagagggccttc

SEQ ID NO: 6501 - DNA, 25 bp, Homo sapiens
atatataactagtttttgtttttgt

SEQ ID NO: 6502 - DNA, 25 bp, Homo sapiens
cccacttggttcagggagcaaaaac

SEQ ID NO: 6503 - DNA, 25 bp, Homo sapiens
ggaatgcatggggtaatgaaaacaa

SEQ ID NO: 6504 - DNA, 25 bp, Homo sapiens
aatacaaatgttagttgccaatata

SEQ ID NO: 6505 - DNA, 25 bp, Homo sapiens
tccctcagatattggtctaaaagcc

SEQ ID NO: 6506 - DNA, 25 bp, Homo sapiens
tcccatccgtagttgtgatcatcac

SEQ ID NO: 6507 - DNA, 25 bp, Homo sapiens
gtgctctgccaacctttttagtaaa

SEQ ID NO: 6508 - DNA, 25 bp, Homo sapiens
ttacaaaatacagaataaaacaacc

SEQ ID NO: 6509 - DNA, 25 bp, Homo sapiens
ttgcctaatgaaaatcctagtggtg

SEQ ID NO: 6510 - DNA, 25 bp, Homo sapiens
tgcacttgggaattttctaggcttc

SEQ ID NO: 6511 - DNA, 25 bp, Homo sapiens
actgagacctagagcaattattttc

SEQ ID NO: 6512 - DNA, 25 bp, Homo sapiens
ggtacttcgttgtgtgcatctatga

SEQ ID NO: 6513 - DNA, 25 bp, Homo sapiens
gaggctgacttgagacactggttta

SEQ ID NO: 6514 - DNA, 25 bp, Homo sapiens
ggctccattctcctgctgtgacaaa

SEQ ID NO: 6515 - DNA, 25 bp, Homo sapiens
gaaaggggttcagctattggtatta

SEQ ID NO: 6516 - DNA, 25 bp, Homo sapiens
atatcgtgtcagccaactccttata

SEQ ID NO: 6517 - DNA, 25 bp, Homo sapiens
tacatctaaggaaaagtgcatatgc

SEQ ID NO: 6518 - DNA, 25 bp, Homo sapiens
tagtgagtgtgatctttaactctgt

SEQ ID NO: 6519 - DNA, 25 bp, Homo sapiens
cctctcttctgagtgaaaaaggaca

SEQ ID NO: 6520 - DNA, 25 bp, Homo sapiens
ttaaagaaaaatatttaccaactag

SEQ ID NO: 6521 - DNA, 25 bp, Homo sapiens
cagtcattggggctattatttttta

SEQ ID NO: 6522 - DNA, 25 bp, Homo sapiens
ggaggtgtctctaaggcaaaataac

SEQ ID NO: 6523 - DNA, 25 bp, Homo sapiens
gcctggggccttcttcatttaagtg

SEQ ID NO: 6524 - DNA, 25 bp, Homo sapiens
tggcctctgcttcatccatctggga

SEQ ID NO: 6525 - DNA, 25 bp, Homo sapiens
tgcctggacattaagagacaccttg

SEQ ID NO: 6526 - DNA, 25 bp, Homo sapiens
ggcaagtctcagtggcctctttttc

SEQ ID NO: 6527 - DNA, 25 bp, Homo sapiens
ggtgcgattcctacccttagaagta

SEQ ID NO: 6528 - DNA, 25 bp, Homo sapiens
ccctccgtgagcagtactaattttg

SEQ ID NO: 6529 - DNA, 25 bp, Homo sapiens
ctccctctggccttggatatttaga

SEQ ID NO: 6530 - DNA, 25 bp, Homo sapiens
ggcctgatctttcccttaacatgga

SEQ ID NO: 6531 - DNA, 25 bp, Homo sapiens
ttcttaacaagaaaaataaatgaag

SEQ ID NO: 6532 - DNA, 25 bp, Homo sapiens
tacgacttttgttcaggcttctgga

SEQ ID NO: 6533 - DNA, 25 bp, Homo sapiens
ctcaattaggatggaagcaggcctc

SEQ ID NO: 6534 - DNA, 25 bp, Homo sapiens
caaaaaggcttgtgttgcagcattc

SEQ ID NO: 6535 - DNA, 25 bp, Homo sapiens
ttatactacgaggtaggaatccttc

SEQ ID NO: 6536 - DNA, 25 bp, Homo sapiens
ggcctgcttccatcctaagtaatta

SEQ ID NO: 6537 - DNA, 25 bp, Homo sapiens
cacttaatgtggtgggtctgttata

SEQ ID NO: 6538 - DNA, 25 bp, Homo sapiens
ggagcccttcatttccctggtctta

SEQ ID NO: 6539 - DNA, 25 bp, Homo sapiens
ctcctatgatgaaagatgaggattt

SEQ ID NO: 6540 - DNA, 25 bp, Homo sapiens
tgtgtgtgcgtgttttgttttcttg

SEQ ID NO: 6541 - DNA, 25 bp, Homo sapiens
cggcatgacatttgcatagtgtgtt

SEQ ID NO: 6542 - DNA, 25 bp, Homo sapiens
ttatagcagagcagtgagacacctc

SEQ ID NO: 6543 - DNA, 25 bp, Homo sapiens
cctggctactgaggtccaaatttcc

SEQ ID NO: 6544 - DNA, 25 bp, Homo sapiens
atatgattactgaaaactacccctt

SEQ ID NO: 6545 - DNA, 25 bp, Homo sapiens
ttggggcctgaaacaccttcatttg

SEQ ID NO: 6546 - DNA, 25 bp, Homo sapiens
tgcccatgcgggcagcaataccgtt

SEQ ID NO: 6547 - DNA, 25 bp, Homo sapiens
gtctctggggacttcatctgattta

SEQ ID NO: 6548 - DNA, 25 bp, Homo sapiens
tgagctacccaacatttcagttttg

SEQ ID NO: 6549 - DNA, 25 bp, Homo sapiens
ggacagagctaggacacggtaaata

SEQ ID NO: 6550 - DNA, 25 bp, Homo sapiens
caggccagccgagaagtgtaatagt

SEQ ID NO: 6551 - DNA, 25 bp, Homo sapiens
gctacatgtctgtgcaccatgctga

SEQ ID NO: 6552 - DNA, 25 bp, Homo sapiens
agtgccacacttttattcgggaaga

SEQ ID NO: 6553 - DNA, 25 bp, Homo sapiens
tgctccacaagggttcaattcactg

SEQ ID NO: 6554 - DNA, 25 bp, Homo sapiens
acctagagtttctatataattacaa

SEQ ID NO: 6555 - DNA, 25 bp, Homo sapiens
ccctttcggccggaaccgccatctt

SEQ ID NO: 6556 - DNA, 25 bp, Homo sapiens
ggggtggggtcctatctaaatcaca

SEQ ID NO: 6557 - DNA, 25 bp, Homo sapiens
tggtccttcagggtccaacagcttc

SEQ ID NO: 6558 - DNA, 25 bp, Homo sapiens
ttcccattatcccttgtccagagca

SEQ ID NO: 6559 - DNA, 25 bp, Homo sapiens
ggggtgccagtgataagagcttatt

SEQ ID NO: 6560 - DNA, 25 bp, Homo sapiens
gctgtgcctgctggactcttctaac

SEQ ID NO: 6561 - DNA, 25 bp, Homo sapiens
tccgctgagatgattgcctgttgtc

SEQ ID NO: 6562 - DNA, 25 bp, Homo sapiens
cccaggctgggtttctatcctttta

SEQ ID NO: 6563 - DNA, 25 bp, Homo sapiens
ccttttcctagcattggttcaagca

SEQ ID NO: 6564 - DNA, 25 bp, Homo sapiens
actctcctcccaggtgttctactga

SEQ ID NO: 6565 - DNA, 25 bp, Homo sapiens
ttccttctggcattaggggagacta

SEQ ID NO: 6566 - DNA, 25 bp, Homo sapiens
cagggactgagttgccattagaatg

SEQ ID NO: 6567 - DNA, 25 bp, Homo sapiens
cccattgagagatagggtctctgtc

SEQ ID NO: 6568 - DNA, 25 bp, Homo sapiens
ctggtaaatctaaacagacatggtc

SEQ ID NO: 6569 - DNA, 25 bp, Homo sapiens
ggtccaatgtatgtgtggtttctga

SEQ ID NO: 6570 - DNA, 25 bp, Homo sapiens
caggtgttacatcaggttctctaga

SEQ ID NO: 6571 - DNA, 25 bp, Homo sapiens
tgggtgatcagagcaaacacgactg

SEQ ID NO: 6572 - DNA, 25 bp, Homo sapiens
cacggagactatccaggctgacctc

SEQ ID NO: 6573 - DNA, 25 bp, Homo sapiens
ccagagttgttgtggagactgaaaa

SEQ ID NO: 6574 - DNA, 25 bp, Homo sapiens
ggattttacacctgtgctcccagca

SEQ ID NO: 6575 - DNA, 25 bp, Homo sapiens
ctggttagcacattgtcttctttag

SEQ ID NO: 6576 - DNA, 25 bp, Homo sapiens
ccagtggcgactgaaagagtctttt

SEQ ID NO: 6577 - DNA, 25 bp, Homo sapiens
cctgactggaaaggagattcacttg

SEQ ID NO: 6578 - DNA, 25 bp, Homo sapiens
gatcacgttttgcttggtaccaata

SEQ ID NO: 6579 - DNA, 25 bp, Homo sapiens
tttgggcccggatttggatggtgac

SEQ ID NO: 6580 - DNA, 25 bp, Homo sapiens
ggagggcgtgacttttcatatttaa

SEQ ID NO: 6581 - DNA, 25 bp, Homo sapiens
ccctctcaagtaaagtggcctatag

SEQ ID NO: 6582 - DNA, 25 bp, Homo sapiens
gaggtcttcattttatcttcagtga

SEQ ID NO: 6583 - DNA, 25 bp, Homo sapiens
aagcccttcggctgctggtcaaata

SEQ ID NO: 6584 - DNA, 25 bp, Homo sapiens
tgtactgagtgtgtaacgccaaagg

SEQ ID NO: 6585 - DNA, 25 bp, Homo sapiens
agtgtgtcaagggaaatacaagtga

SEQ ID NO: 6586 - DNA, 25 bp, Homo sapiens
ggggccatcctgtctattttgaata

SEQ ID NO: 6587 - DNA, 25 bp, Homo sapiens
ccctaagtgggtcagttctcagtca

SEQ ID NO: 6588 - DNA, 25 bp, Homo sapiens
tgctagcattaaaccaggtctcatc

SEQ ID NO: 6589 - DNA, 25 bp, Homo sapiens
gtcgcctggtgtaactattcaattc

SEQ ID NO: 6590 - DNA, 25 bp, Homo sapiens
agaccgtgttaaccttcctttaagg

SEQ ID NO: 6591 - DNA, 25 bp, Homo sapiens
gctggtccttagatcaagtggcttc

SEQ ID NO: 6592 - DNA, 25 bp, Homo sapiens
tcctgctgactgtatggtgccaaaa

SEQ ID NO: 6593 - DNA, 25 bp, Homo sapiens
tgggtttgcaggtagagatcatatc

SEQ ID NO: 6594 - DNA, 25 bp, Homo sapiens
tcctgccttatggatactttgaaag

SEQ ID NO: 6595 - DNA, 25 bp, Homo sapiens
cggtgtacccaccacacagaattgg

SEQ ID NO: 6596 - DNA, 25 bp, Homo sapiens
cataatgggatgtcagatttttcta

SEQ ID NO: 6597 - DNA, 25 bp, Homo sapiens
tagtcttactagaggaacccaagtc

SEQ ID NO: 6598 - DNA, 25 bp, Homo sapiens
cccggattgactgagttttgaccta

SEQ ID NO: 6599 - DNA, 25 bp, Homo sapiens
ccatttggctggaaaacctactgtg

SEQ ID NO: 6600 - DNA, 25 bp, Homo sapiens
gatctccagtccaaagcagggcttt

SEQ ID NO: 6601 - DNA, 25 bp, Homo sapiens
tgcagacctgtgagttggatatatc

SEQ ID NO: 6602 - DNA, 25 bp, Homo sapiens
atcttgtgattagcctctgaattta

SEQ ID NO: 6603 - DNA, 25 bp, Homo sapiens
ggccttttagacagttgcatccaag

SEQ ID NO: 6604 - DNA, 25 bp, Homo sapiens
tttggctgtgtccacataacactga

SEQ ID NO: 6605 - DNA, 25 bp, Homo sapiens
ttgggacatttaacctagactcatc

SEQ ID NO: 6606 - DNA, 25 bp, Homo sapiens
ccaagtttgcattgcctggcatatc

SEQ ID NO: 6607 - DNA, 25 bp, Homo sapiens
acattctctagggttgggcagtcta

SEQ ID NO: 6608 - DNA, 25 bp, Homo sapiens
taccaactggggatgctcagaactc

SEQ ID NO: 6609 - DNA, 25 bp, Homo sapiens
ctgtgaatggtaacccacattaagg

SEQ ID NO: 6610 - DNA, 25 bp, Homo sapiens
tgccacctttttgacagtactctga

SEQ ID NO: 6611 - DNA, 25 bp, Homo sapiens
tgtcccatgtagtagcaaagctttt

SEQ ID NO: 6612 - DNA, 25 bp, Homo sapiens
aatggctttcgcacaggcaattata

SEQ ID NO: 6613 - DNA, 25 bp, Homo sapiens
cctctgagcctggagctttagcata

SEQ ID NO: 6614 - DNA, 25 bp, Homo sapiens
cttccgattgagtggtttggcatta

SEQ ID NO: 6615 - DNA, 25 bp, Homo sapiens
gaagaacatattgcaagggttttta

SEQ ID NO: 6616 - DNA, 25 bp, Homo sapiens
tgaaagaaataggcatataaggtac

SEQ ID NO: 6617 - DNA, 25 bp, Homo sapiens
ctgccatatggccagaatgttctta

SEQ ID NO: 6618 - DNA, 25 bp, Homo sapiens
ggccctatgccgagttcaagtattt

SEQ ID NO: 6619 - DNA, 25 bp, Homo sapiens
cccttgaaaggtcgtgtgcatgtct

SEQ ID NO: 6620 - DNA, 25 bp, Homo sapiens
ggcctctatcttcacccatttgcta

SEQ ID NO: 6621 - DNA, 25 bp, Homo sapiens
cgtgtctcctagagtcccagttcta

SEQ ID NO: 6622 - DNA, 25 bp, Homo sapiens
gagaggtctaccctatccaatattg

SEQ ID NO: 6623 - DNA, 25 bp, Homo sapiens
tcaggtactaagacttcaacttttc

SEQ ID NO: 6624 - DNA, 25 bp, Homo sapiens
aagagctcaaactatacgtgttcta

SEQ ID NO: 6625 - DNA, 25 bp, Homo sapiens
accctttagaaagtatgagaaattg

SEQ ID NO: 6626 - DNA, 25 bp, Homo sapiens
agcctggtcatctaatctgttacga

SEQ ID NO: 6627 - DNA, 25 bp, Homo sapiens
ccatgtgttcacaggccagtttatg

SEQ ID NO: 6628 - DNA, 25 bp, Homo sapiens
ctgtgctgactaaatttgggatctc

SEQ ID NO: 6629 - DNA, 25 bp, Homo sapiens
gctttgctgcttcaaactcctgtga

SEQ ID NO: 6630 - DNA, 25 bp, Homo sapiens
gccacttgccactgatgtttattta

SEQ ID NO: 6631 - DNA, 25 bp, Homo sapiens
ttgccctagagcacaacttttatta

SEQ ID NO: 6632 - DNA, 25 bp, Homo sapiens
ttttagaaaagttgtggccagcctc

SEQ ID NO: 6633 - DNA, 25 bp, Homo sapiens
cctctgtagtgtggaaagtagaatc

SEQ ID NO: 6634 - DNA, 25 bp, Homo sapiens
ggtccctgaatcctgccctcatttg

SEQ ID NO: 6635 - DNA, 25 bp, Homo sapiens
gggtggcaacccttctccaaagagg

SEQ ID NO: 6636 - DNA, 25 bp, Homo sapiens
cactgtgttttaactgtttttttca

SEQ ID NO: 6637 - DNA, 25 bp, Homo sapiens
cacttggtaacctagaaaaattaag

SEQ ID NO: 6638 - DNA, 25 bp, Homo sapiens
ccaggggcaatgcacaaggtgatca

SEQ ID NO: 6639 - DNA, 25 bp, Homo sapiens
ggcatcacttgccaccactttatgg

SEQ ID NO: 6640 - DNA, 25 bp, Homo sapiens
ctacctggggttggaattaattttc

SEQ ID NO: 6641 - DNA, 25 bp, Homo sapiens
ggtctgagtttcctcctccatgata

SEQ ID NO: 6642 - DNA, 25 bp, Homo sapiens
cttcacaaaaaagggaatgtctggc

SEQ ID NO: 6643 - DNA, 25 bp, Homo sapiens
tgcccttaggttacgtgaggtatcc

SEQ ID NO: 6644 - DNA, 25 bp, Homo sapiens
cccaaaacccaaaatgagaacattt

SEQ ID NO: 6645 - DNA, 25 bp, Homo sapiens
ttcctccttccccaaacacaaccta

SEQ ID NO: 6646 - DNA, 25 bp, Homo sapiens
accatttactggcacagggactgtg

SEQ ID NO: 6647 - DNA, 25 bp, Homo sapiens
gtgactttggaattattctttacct

SEQ ID NO: 6648 - DNA, 25 bp, Homo sapiens
gtgtcctccactgtatgctgaaata

SEQ ID NO: 6649 - DNA, 25 bp, Homo sapiens
actggggctaatttctgcaggcacc

SEQ ID NO: 6650 - DNA, 25 bp, Homo sapiens
gttctggctgtcatgagtgctttca

SEQ ID NO: 6651 - DNA, 25 bp, Homo sapiens
ttaaagcccagaagcatcacagttc

SEQ ID NO: 6652 - DNA, 25 bp, Homo sapiens
gcttgccttctagacccacatattg

SEQ ID NO: 6653 - DNA, 25 bp, Homo sapiens
tttggcctgtgatctaaattgacta

SEQ ID NO: 6654 - DNA, 25 bp, Homo sapiens
aggtgcttatccagggacattttta

SEQ ID NO: 6655 - DNA, 25 bp, Homo sapiens
caggcctgattcttccatctggaac

SEQ ID NO: 6656 - DNA, 25 bp, Homo sapiens
accaggtggggaagcatctaagttc

SEQ ID NO: 6657 - DNA, 25 bp, Homo sapiens
gtcatctgcatggtcaaaggaacta

SEQ ID NO: 6658 - DNA, 25 bp, Homo sapiens
ggataccctttaaagaccgtcagtg

SEQ ID NO: 6659 - DNA, 25 bp, Homo sapiens
gcccgcagggtctttgtttagctaa

SEQ ID NO: 6660 - DNA, 25 bp, Homo sapiens
cagggacccatcctgttgttcagca

SEQ ID NO: 6661 - DNA, 25 bp, Homo sapiens
ctgcactcctgcaaagatatagtta

SEQ ID NO: 6662 - DNA, 25 bp, Homo sapiens
tggacagtttcccacatctttaaga

SEQ ID NO: 6663 - DNA, 25 bp, Homo sapiens
gctctggatgcaagctcagctcaaa

SEQ ID NO: 6664 - DNA, 25 bp, Homo sapiens
caggacttggttctctttgacagga

SEQ ID NO: 6665 - DNA, 25 bp, Homo sapiens
tggttctcaggtttgcattacagta

SEQ ID NO: 6666 - DNA, 25 bp, Homo sapiens
ccctgagccctgtaatggtgtatta

SEQ ID NO: 6667 - DNA, 25 bp, Homo sapiens
ggggacagtgctattctagaaaaat

SEQ ID NO: 6668 - DNA, 25 bp, Homo sapiens
tgtcatcagccagcctttcccaagg

SEQ ID NO: 6669 - DNA, 25 bp, Homo sapiens
tcctagtgtagcagggcatttatca

SEQ ID NO: 6670 - DNA, 25 bp, Homo sapiens
cgctggggtgtgattattttattta

SEQ ID NO: 6671 - DNA, 25 bp, Homo sapiens
tggaaacctccctctcttgtactgg

SEQ ID NO: 6672 - DNA, 25 bp, Homo sapiens
gggttcaaattcttcctagctcatg

SEQ ID NO: 6673 - DNA, 25 bp, Homo sapiens
ccctggccctgcactaacagttgaa

SEQ ID NO: 6674 - DNA, 25 bp, Homo sapiens
cccatccttggtgacatatttagaa

SEQ ID NO: 6675 - DNA, 25 bp, Homo sapiens
atgtgagctggttcagatttagacc

SEQ ID NO: 6676 - DNA, 25 bp, Homo sapiens
gacccatcctaatgaacctttgata

SEQ ID NO: 6677 - DNA, 25 bp, Homo sapiens
tctcccagtgagttgttatacattg

SEQ ID NO: 6678 - DNA, 25 bp, Homo sapiens
ggccaaggtcttcgtctacttgtaa

SEQ ID NO: 6679 - DNA, 25 bp, Homo sapiens
cgagttcacgagactaaatgatttc

SEQ ID NO: 6680 - DNA, 25 bp, Homo sapiens
ggccctctggagatgctatatattg

SEQ ID NO: 6681 - DNA, 25 bp, Homo sapiens
cccagtgggttgatttgtatacatc

SEQ ID NO: 6682 - DNA, 25 bp, Homo sapiens
tcagctgtcaaaggggctcacattg

SEQ ID NO: 6683 - DNA, 25 bp, Homo sapiens
gcacttctggggtttgcattgtatc

SEQ ID NO: 6684 - DNA, 25 bp, Homo sapiens
atacagtgctgagaacctgatttag

SEQ ID NO: 6685 - DNA, 25 bp, Homo sapiens
cctggtgcttactggagacatacta

SEQ ID NO: 6686 - DNA, 25 bp, Homo sapiens
tgtgtatgtgtgtatgtataatata

SEQ ID NO: 6687 - DNA, 25 bp, Homo sapiens
ctcggcagttgtgcaatatgattta

SEQ ID NO: 6688 - DNA, 25 bp, Homo sapiens
gcctgatctgaacatgcgttattga

SEQ ID NO: 6689 - DNA, 25 bp, Homo sapiens
ccctgacagattaaagccctagttt

SEQ ID NO: 6690 - DNA, 25 bp, Homo sapiens
tgacacttccaaggagcagaacttg

SEQ ID NO: 6691 - DNA, 25 bp, Homo sapiens
ctctgccagtggttttgagggccta

SEQ ID NO: 6692 - DNA, 25 bp, Homo sapiens
agggtgttcttaagccaaaatgatc

SEQ ID NO: 6693 - DNA, 25 bp, Homo sapiens
cccaacagagaaggtccagccatca

SEQ ID NO: 6694 - DNA, 25 bp, Homo sapiens
cctttagtcttttgcagtgtcctca

SEQ ID NO: 6695 - DNA, 25 bp, Homo sapiens
cctattcaaattcaaaaagttaagt

SEQ ID NO: 6696 - DNA, 25 bp, Homo sapiens
ccctccctggttataattttctgtg

SEQ ID NO: 6697 - DNA, 25 bp, Homo sapiens
accatgtgatctggcacctttctca

SEQ ID NO: 6698 - DNA, 25 bp, Homo sapiens
ctcatcaggcaaggaataaaacagg

SEQ ID NO: 6699 - DNA, 25 bp, Homo sapiens
gccactgtcaccgagcaatctttta

SEQ ID NO: 6700 - DNA, 25 bp, Homo sapiens
tgtgggtgccaacttacagacatgc

SEQ ID NO: 6701 - DNA, 25 bp, Homo sapiens
gaggtctcttttctctacaccatgg

SEQ ID NO: 6702 - DNA, 25 bp, Homo sapiens
tggcccacatgtagatcaggaatta

SEQ ID NO: 6703 - DNA, 25 bp, Homo sapiens
ccaggcattgcctcatatattaagc

SEQ ID NO: 6704 - DNA, 25 bp, Homo sapiens
ggaaaatctgcttatcttaggcaca

SEQ ID NO: 6705 - DNA, 25 bp, Homo sapiens
gacgcatgcaggtttagagagattc

SEQ ID NO: 6706 - DNA, 25 bp, Homo sapiens
tcaggccgggagtagaaaagttctc

SEQ ID NO: 6707 - DNA, 25 bp, Homo sapiens
aacctgtttggcaagttttcactga

SEQ ID NO: 6708 - DNA, 25 bp, Homo sapiens
ggcctgtgattgagcctcacctctg

SEQ ID NO: 6709 - DNA, 25 bp, Homo sapiens
tccagtccttttgtatagtgccacc

SEQ ID NO: 6710 - DNA, 25 bp, Homo sapiens
tagtggcctcctgacagcaccttta

SEQ ID NO: 6711 - DNA, 25 bp, Homo sapiens
gccagtctctctataggtttgcaga

SEQ ID NO: 6712 - DNA, 25 bp, Homo sapiens
tcggctggacacaaagggaacttca

SEQ ID NO: 6713 - DNA, 25 bp, Homo sapiens
agagggcaatcctttcctatggtgc

SEQ ID NO: 6714 - DNA, 25 bp, Homo sapiens
gaaatatcaatcagaaaaaagaaac

SEQ ID NO: 6715 - DNA, 25 bp, Homo sapiens
gaggtagtgcatcctgaaactcatc

SEQ ID NO: 6716 - DNA, 25 bp, Homo sapiens
attgcagaggcagtttcttcattca

SEQ ID NO: 6717 - DNA, 25 bp, Homo sapiens
gagcgatatattcctacccttaaga

SEQ ID NO: 6718 - DNA, 25 bp, Homo sapiens
agctgggccatgcaaagttccctga

SEQ ID NO: 6719 - DNA, 25 bp, Homo sapiens
actgtcagagattcaaagaggcttc

SEQ ID NO: 6720 - DNA, 25 bp, Homo sapiens
tgctcctccagctgggaataaatta

SEQ ID NO: 6721 - DNA, 25 bp, Homo sapiens
tttggacctgcctgaactttctttg

SEQ ID NO: 6722 - DNA, 25 bp, Homo sapiens
ccctagagttgaacagacacatttc

SEQ ID NO: 6723 - DNA, 25 bp, Homo sapiens
cagagacagagatgacagctactta

SEQ ID NO: 6724 - DNA, 25 bp, Homo sapiens
ccagtgggtatttagccagtcctga

SEQ ID NO: 6725 - DNA, 25 bp, Homo sapiens
gctgtcactctgttccatagccata

SEQ ID NO: 6726 - DNA, 25 bp, Homo sapiens
cctgaaggcttcaaatggcatgttt

SEQ ID NO: 6727 - DNA, 25 bp, Homo sapiens
tcaggagtcacttcttggcagcttc

SEQ ID NO: 6728 - DNA, 25 bp, Homo sapiens
tgctgctgcattcaagtgggaccta

SEQ ID NO: 6729 - DNA, 25 bp, Homo sapiens
tgggtggcaaactcacaatctgttg

SEQ ID NO: 6730 - DNA, 25 bp, Homo sapiens
tcagctcagtgcacaagcctctgtc

SEQ ID NO: 6731 - DNA, 25 bp, Homo sapiens
ccactgctcttgcatggaatccaga

SEQ ID NO: 6732 - DNA, 25 bp, Homo sapiens
gaggacccaaatttcttcttatgtg

SEQ ID NO: 6733 - DNA, 25 bp, Homo sapiens
tgccctgaaggcctcaaaagaaatg

SEQ ID NO: 6734 - DNA, 25 bp, Homo sapiens
cttcgatcagtcctcttcagtcaga

SEQ ID NO: 6735 - DNA, 25 bp, Homo sapiens
cctatatggccctgacacagtggtg

SEQ ID NO: 6736 - DNA, 25 bp, Homo sapiens
caagtctttcttgcttcatggagta

SEQ ID NO: 6737 - DNA, 25 bp, Homo sapiens
acaactgcaagtgaatctcaaagga

SEQ ID NO: 6738 - DNA, 25 bp, Homo sapiens
cggaaaagcttattggtgccaccta

SEQ ID NO: 6739 - DNA, 25 bp, Homo sapiens
ctggtctgtaaaaggaacctgaata

SEQ ID NO: 6740 - DNA, 25 bp, Homo sapiens
agtccactttcaagggcaaggatca

SEQ ID NO: 6741 - DNA, 25 bp, Homo sapiens
tctggagccaacatggaacttctta

SEQ ID NO: 6742 - DNA, 25 bp, Homo sapiens
tgtgcacatattccagccaaggctg

SEQ ID NO: 6743 - DNA, 25 bp, Homo sapiens
gacctggtacagtgcttggcttata

SEQ ID NO: 6744 - DNA, 25 bp, Homo sapiens
gaaaaggaaaggagagagcaagggg

SEQ ID NO: 6745 - DNA, 25 bp, Homo sapiens
tgaaggtgcctacatgtccacaaga

SEQ ID NO: 6746 - DNA, 25 bp, Homo sapiens
actgcagttagaaggggaatctccc

SEQ ID NO: 6747 - DNA, 25 bp, Homo sapiens
tgccttcactgcagcccacagagta

SEQ ID NO: 6748 - DNA, 25 bp, Homo sapiens
taaaagtaataaagtaatacagagg

SEQ ID NO: 6749 - DNA, 25 bp, Homo sapiens
tggctgcctgctagaatgaaaatca

SEQ ID NO: 6750 - DNA, 25 bp, Homo sapiens
cattaaagcacattataaccaatat

SEQ ID NO: 6751 - DNA, 25 bp, Homo sapiens
ggactggatccataatagtttcttt

SEQ ID NO: 6752 - DNA, 25 bp, Homo sapiens
tgctgctgggaactctaaggattta

SEQ ID NO: 6753 - DNA, 25 bp, Homo sapiens
agttatatcccttgtggaaattcca

SEQ ID NO: 6754 - DNA, 25 bp, Homo sapiens
aacagttgtactgtcaccttggaca

SEQ ID NO: 6755 - DNA, 25 bp, Homo sapiens
tttgaataactcatcaattttcaat

SEQ ID NO: 6756 - DNA, 25 bp, Homo sapiens
cttagttctacttcagcccaggtga

SEQ ID NO: 6757 - DNA, 25 bp, Homo sapiens
ctcgtgttacccaaggtttgatatc

SEQ ID NO: 6758 - DNA, 25 bp, Homo sapiens
tttttgagggagcaagtctagcata

SEQ ID NO: 6759 - DNA, 25 bp, Homo sapiens
ccctctggtttttctactactagtc

SEQ ID NO: 6760 - DNA, 25 bp, Homo sapiens
ccaggttatctttgtgtgaggcttc

SEQ ID NO: 6761 - DNA, 25 bp, Homo sapiens
ccaggctttggatgctgaacaaata

SEQ ID NO: 6762 - DNA, 25 bp, Homo sapiens
tgtctcagattagccagggaagatt

SEQ ID NO: 6763 - DNA, 25 bp, Homo sapiens
catgcctggctaaaagtgcctctta

SEQ ID NO: 6764 - DNA, 25 bp, Homo sapiens
tcctgagcttggtagtaagagcata

SEQ ID NO: 6765 - DNA, 25 bp, Homo sapiens
tccaggtgggagacaacacagcatt

SEQ ID NO: 6766 - DNA, 25 bp, Homo sapiens
ccagcagccaagacaagcctgtttt

SEQ ID NO: 6767 - DNA, 25 bp, Homo sapiens
ttgcctatagaaccctgagcgcttg

SEQ ID NO: 6768 - DNA, 25 bp, Homo sapiens
ttctggctcactaaaacctggattc

SEQ ID NO: 6769 - DNA, 25 bp, Homo sapiens
tggttaggtcataccgcccagaaga

SEQ ID NO: 6770 - DNA, 25 bp, Homo sapiens
atgcctttcatctcaaccgttagta

SEQ ID NO: 6771 - DNA, 25 bp, Homo sapiens
taaaacgttttaggtacaggccata

SEQ ID NO: 6772 - DNA, 25 bp, Homo sapiens
ggtcttggctcacactctaggtttc

SEQ ID NO: 6773 - DNA, 25 bp, Homo sapiens
ggctgatacaccacgtgaggattta

SEQ ID NO: 6774 - DNA, 25 bp, Homo sapiens
acaggctgctccatactgggtagta

SEQ ID NO: 6775 - DNA, 25 bp, Homo sapiens
gctaccgtgcacagacaatcgcttt

SEQ ID NO: 6776 - DNA, 25 bp, Homo sapiens
cctgggtggccttttccaactgtaa

SEQ ID NO: 6777 - DNA, 25 bp, Homo sapiens
agacggagtaccagctgtatttatc

SEQ ID NO: 6778 - DNA, 25 bp, Homo sapiens
gtttggctgcttcctagtaacaaga

SEQ ID NO: 6779 - DNA, 25 bp, Homo sapiens
cttttctgaaagatgccattggctc

SEQ ID NO: 6780 - DNA, 25 bp, Homo sapiens
ggggccaaagtagtctttttcagta

SEQ ID NO: 6781 - DNA, 25 bp, Homo sapiens
cacatggcccatgttggtagcaaaa

SEQ ID NO: 6782 - DNA, 25 bp, Homo sapiens
ttcatgctagacagtgccaggttta

SEQ ID NO: 6783 - DNA, 25 bp, Homo sapiens
tggatccctcttctgtgtctgattg

SEQ ID NO: 6784 - DNA, 25 bp, Homo sapiens
gtcaggcctacaatcaaggaccagg

SEQ ID NO: 6785 - DNA, 25 bp, Homo sapiens
tcgtcgtcgttctctgattgattta

SEQ ID NO: 6786 - DNA, 25 bp, Homo sapiens
tactggcctataacgctggtaagtc

SEQ ID NO: 6787 - DNA, 25 bp, Homo sapiens
tctggactgtggagcttcttaactg

SEQ ID NO: 6788 - DNA, 25 bp, Homo sapiens
ggaaggtcctcttctccagccctga

SEQ ID NO: 6789 - DNA, 25 bp, Homo sapiens
agagaacacttatagaaccagagta

SEQ ID NO: 6790 - DNA, 25 bp, Homo sapiens
ccaggcaatgatctagtgagttttc

SEQ ID NO: 6791 - DNA, 25 bp, Homo sapiens
tgagtttcctgggacaagtaattca

SEQ ID NO: 6792 - DNA, 25 bp, Homo sapiens
tcctcctttggggtacctatctaga

SEQ ID NO: 6793 - DNA, 25 bp, Homo sapiens
aatttctgttggctctgtggtctta

SEQ ID NO: 6794 - DNA, 25 bp, Homo sapiens
cctaagtgtgtggtgttttcagttc

SEQ ID NO: 6795 - DNA, 25 bp, Homo sapiens
gcctgctgaggaagaacccgttgta

SEQ ID NO: 6796 - DNA, 25 bp, Homo sapiens
ggcatttccatagctctgagttcta

SEQ ID NO: 6797 - DNA, 25 bp, Homo sapiens
taggggagatgcttactttaaccgc

SEQ ID NO: 6798 - DNA, 25 bp, Homo sapiens
actggctagtcgtcttggtattgta

SEQ ID NO: 6799 - DNA, 25 bp, Homo sapiens
tcctttaacggagtatagtcccata

SEQ ID NO: 6800 - DNA, 25 bp, Homo sapiens
tgcctccatgatgcaggatctactg

SEQ ID NO: 6801 - DNA, 25 bp, Homo sapiens
catgatgatgcttgagggccacttc

SEQ ID NO: 6802 - DNA, 25 bp, Homo sapiens
gccagagtcagtcagtcagataaca

SEQ ID NO: 6803 - DNA, 25 bp, Homo sapiens
agcccttcttctctcaggtggagta

SEQ ID NO: 6804 - DNA, 25 bp, Homo sapiens
tggagtcatgactgggaacctaaaa

SEQ ID NO: 6805 - DNA, 25 bp, Homo sapiens
tggcccactatactaacagaggtta

SEQ ID NO: 6806 - DNA, 25 bp, Homo sapiens
gaagccctcagttttggaatatata

SEQ ID NO: 6807 - DNA, 25 bp, Homo sapiens
actggccaggctatctcaaccaatc

SEQ ID NO: 6808 - DNA, 25 bp, Homo sapiens
gccaggggttttgtcttatctatta

SEQ ID NO: 6809 - DNA, 25 bp, Homo sapiens
gctctacagggaaatggctgctttc

SEQ ID NO: 6810 - DNA, 25 bp, Homo sapiens
tcccagggaggagattaactgcata

SEQ ID NO: 6811 - DNA, 25 bp, Homo sapiens
cggcatcctggacgtttggacctca

SEQ ID NO: 6812 - DNA, 25 bp, Homo sapiens
ctgtggccactatgccaactcatta

SEQ ID NO: 6813 - DNA, 25 bp, Homo sapiens
tcttctgaaaaagtagcctcattcc

SEQ ID NO: 6814 - DNA, 25 bp, Homo sapiens
tgactggacataacacaaatctctg

SEQ ID NO: 6815 - DNA, 25 bp, Homo sapiens
ctcccccagcctactattttatatt

SEQ ID NO: 6816 - DNA, 25 bp, Homo sapiens
ggttttaggcactctgttaggtaca

SEQ ID NO: 6817 - DNA, 25 bp, Homo sapiens
tatcaacgtttgtcactggtgaatg

SEQ ID NO: 6818 - DNA, 25 bp, Homo sapiens
ttaggtgttgcaatggacttttttc

SEQ ID NO: 6819 - DNA, 25 bp, Homo sapiens
gggaaacctgttgcttttcatgaca

SEQ ID NO: 6820 - DNA, 25 bp, Homo sapiens
tcacatcctatgttgattaggtatg

SEQ ID NO: 6821 - DNA, 25 bp, Homo sapiens
tcagggtattagtagccggagaatg

SEQ ID NO: 6822 - DNA, 25 bp, Homo sapiens
ggcctcacattctctacagcttttg

SEQ ID NO: 6823 - DNA, 25 bp, Homo sapiens
actcttctactaaatcctggtattg

SEQ ID NO: 6824 - DNA, 25 bp, Homo sapiens
ggatcctccagaatatcccaatgga

SEQ ID NO: 6825 - DNA, 25 bp, Homo sapiens
tggcagcctcaacccacgttggaga

SEQ ID NO: 6826 - DNA, 25 bp, Homo sapiens
ggctacttgctttcgagttaggtaa

SEQ ID NO: 6827 - DNA, 25 bp, Homo sapiens
gagaggatatcccatctaaaggaag

SEQ ID NO: 6828 - DNA, 25 bp, Homo sapiens
acgggccctgttgataggtttcaca

SEQ ID NO: 6829 - DNA, 25 bp, Homo sapiens
aggcagggacaataaactttaagtg

SEQ ID NO: 6830 - DNA, 25 bp, Homo sapiens
tgcttggaagtaaaacacccttgtg

SEQ ID NO: 6831 - DNA, 25 bp, Homo sapiens
gccttgggtcaggaatacatattta

SEQ ID NO: 6832 - DNA, 25 bp, Homo sapiens
ctattaaaaacacatgattccaatt

SEQ ID NO: 6833 - DNA, 25 bp, Homo sapiens
ccttggatggggataaaaacttctc

SEQ ID NO: 6834 - DNA, 25 bp, Homo sapiens
ctggtgttttcttctctactgttca

SEQ ID NO: 6835 - DNA, 25 bp, Homo sapiens
acaaatcccaaaatgccacctctcc

SEQ ID NO: 6836 - DNA, 25 bp, Homo sapiens
cctattcataatgttgaggactatt

SEQ ID NO: 6837 - DNA, 25 bp, Homo sapiens
tgcctctacaggacgatttgaatga

SEQ ID NO: 6838 - DNA, 25 bp, Homo sapiens
ggatgacctatttttaccactgaag

SEQ ID NO: 6839 - DNA, 25 bp, Homo sapiens
ctgggagacgacgtatgctttcatc

SEQ ID NO: 6840 - DNA, 25 bp, Homo sapiens
tgcatagctctcatcatgggcaata

SEQ ID NO: 6841 - DNA, 25 bp, Homo sapiens
gtccatattgacatgtgatttgcca

SEQ ID NO: 6842 - DNA, 25 bp, Homo sapiens
atcactactgggaggctggacatta

SEQ ID NO: 6843 - DNA, 25 bp, Homo sapiens
gttgtctttgttagtaggcacttcc

SEQ ID NO: 6844 - DNA, 25 bp, Homo sapiens
cactgggtgcttaattagaatattc

SEQ ID NO: 6845 - DNA, 25 bp, Homo sapiens
ctggggctttttcaggactctggaa

SEQ ID NO: 6846 - DNA, 25 bp, Homo sapiens
ttaaatctcattttaaaaatacaga

SEQ ID NO: 6847 - DNA, 25 bp, Homo sapiens
tgaatgtcctcaatagccaagatta

SEQ ID NO: 6848 - DNA, 25 bp, Homo sapiens
cctctctaatattaataaaagtatt

SEQ ID NO: 6849 - DNA, 25 bp, Homo sapiens
ctactgtcatttctagaccagcaaa

SEQ ID NO: 6850 - DNA, 25 bp, Homo sapiens
aaccgtgttgctgttgccctgtcta

SEQ ID NO: 6851 - DNA, 25 bp, Homo sapiens
agtctctgtctaggctcaaattgta

SEQ ID NO: 6852 - DNA, 25 bp, Homo sapiens
ctttctctagagttcagcttcagcc

SEQ ID NO: 6853 - DNA, 25 bp, Homo sapiens
ttttttttttaaatagcatccccat

SEQ ID NO: 6854 - DNA, 25 bp, Homo sapiens
ggccatttttgcttaacttggaatt

SEQ ID NO: 6855 - DNA, 25 bp, Homo sapiens
ggagggcattcatcttcacaactga

SEQ ID NO: 6856 - DNA, 25 bp, Homo sapiens
tgcagcagcataggccaaagctttc

SEQ ID NO: 6857 - DNA, 25 bp, Homo sapiens
ttggagggtaattggatctgttcaa

SEQ ID NO: 6858 - DNA, 25 bp, Homo sapiens
tcctgctgacctcgtgttgtacttc

SEQ ID NO: 6859 - DNA, 25 bp, Homo sapiens
gaaggggcttaaaagaatttattcc

SEQ ID NO: 6860 - DNA, 25 bp, Homo sapiens
caaccactctattgaccagtggttc

SEQ ID NO: 6861 - DNA, 25 bp, Homo sapiens
ctcgtgacggacattctctcgctta

SEQ ID NO: 6862 - DNA, 25 bp, Homo sapiens
gatttcatgcagctggggtgtcaca

SEQ ID NO: 6863 - DNA, 25 bp, Homo sapiens
tgcgtacaaaacaatcgggaatctt

SEQ ID NO: 6864 - DNA, 25 bp, Homo sapiens
gtgtctagttgtttgcctgccatta

SEQ ID NO: 6865 - DNA, 25 bp, Homo sapiens
tggcctggatgactctgatttctga

SEQ ID NO: 6866 - DNA, 25 bp, Homo sapiens
ggctacttctgcattccaagggaga

SEQ ID NO: 6867 - DNA, 25 bp, Homo sapiens
ctgaccctgtgaactcctctatata

SEQ ID NO: 6868 - DNA, 25 bp, Homo sapiens
aaccctggcagctacatatagatga

SEQ ID NO: 6869 - DNA, 25 bp, Homo sapiens
cttcattgcagtcttgggaggtgtc

SEQ ID NO: 6870 - DNA, 25 bp, Homo sapiens
tcatggagctttggatagcaacacc

SEQ ID NO: 6871 - DNA, 25 bp, Homo sapiens
acggccatggtgagtgcaaagatta

SEQ ID NO: 6872 - DNA, 25 bp, Homo sapiens
gcatcagtgggcagtgtatacatta

SEQ ID NO: 6873 - DNA, 25 bp, Homo sapiens
gggctggcaagttctaattctagta

SEQ ID NO: 6874 - DNA, 25 bp, Homo sapiens
tctgaacttgtctcggatattagat

SEQ ID NO: 6875 - DNA, 25 bp, Homo sapiens
gctttcctagcaatcacacagttgg

SEQ ID NO: 6876 - DNA, 25 bp, Homo sapiens
gcaggagttttattgcatgccacta

SEQ ID NO: 6877 - DNA, 25 bp, Homo sapiens
aggactctggaactggctctgttta

SEQ ID NO: 6878 - DNA, 25 bp, Homo sapiens
ggggtctcttctttctctgatttta

SEQ ID NO: 6879 - DNA, 25 bp, Homo sapiens
tccctgctatgcgaagtgtttctcc

SEQ ID NO: 6880 - DNA, 25 bp, Homo sapiens
gtcctccttgatatttgcctctctg

SEQ ID NO: 6881 - DNA, 25 bp, Homo sapiens
gcagccctcaatatttggacatgta

SEQ ID NO: 6882 - DNA, 25 bp, Homo sapiens
tggtgcttggctacctcagtatctg

SEQ ID NO: 6883 - DNA, 25 bp, Homo sapiens
gcacatccaatgtatcagggtctga

SEQ ID NO: 6884 - DNA, 25 bp, Homo sapiens
ttggtcacttatccacctcttctga

SEQ ID NO: 6885 - DNA, 25 bp, Homo sapiens
agccacctgctactttgagagatta

SEQ ID NO: 6886 - DNA, 25 bp, Homo sapiens
tgtggcttcttgagtgccatagctc

SEQ ID NO: 6887 - DNA, 25 bp, Homo sapiens
ggtattcactacacgagagctcatg

SEQ ID NO: 6888 - DNA, 25 bp, Homo sapiens
ctccagagatgtccaaactagaaga

SEQ ID NO: 6889 - DNA, 25 bp, Homo sapiens
ctggacaaggtcagagccacagatg

SEQ ID NO: 6890 - DNA, 25 bp, Homo sapiens
caggactggcagctgggctacaatt

SEQ ID NO: 6891 - DNA, 25 bp, Homo sapiens
ggggcaagtcaccaaccctgattaa

SEQ ID NO: 6892 - DNA, 25 bp, Homo sapiens
ttaaccatgttgacctacttccagc

SEQ ID NO: 6893 - DNA, 25 bp, Homo sapiens
atatctatagattgtctggatgatg

SEQ ID NO: 6894 - DNA, 25 bp, Homo sapiens
gatggctttttcctgttggcccaaa

SEQ ID NO: 6895 - DNA, 25 bp, Homo sapiens
cagagccctttatttgagtatcaca

SEQ ID NO: 6896 - DNA, 25 bp, Homo sapiens
tgagtccacaggctcaagcagctta

SEQ ID NO: 6897 - DNA, 25 bp, Homo sapiens
acccttttgagctggaatgaacata

SEQ ID NO: 6898 - DNA, 25 bp, Homo sapiens
atttcctgactccttttgttagttg

SEQ ID NO: 6899 - DNA, 25 bp, Homo sapiens
gtgggattttgctttttgttcatgc

SEQ ID NO: 6900 - DNA, 25 bp, Homo sapiens
acttgtactcagcagggatttgggc

SEQ ID NO: 6901 - DNA, 25 bp, Homo sapiens
atcagatgtcatttggtgcacagta

SEQ ID NO: 6902 - DNA, 25 bp, Homo sapiens
ggatgccgctatatgttgacaaaca

SEQ ID NO: 6903 - DNA, 25 bp, Homo sapiens
cacccaggctcttgagtctattcta

SEQ ID NO: 6904 - DNA, 25 bp, Homo sapiens
gaagtgccctgtctcctgttttttg

SEQ ID NO: 6905 - DNA, 25 bp, Homo sapiens
ccactccaggttttagatgaactca

SEQ ID NO: 6906 - DNA, 25 bp, Homo sapiens
aataccatatttatatcagacatta

SEQ ID NO: 6907 - DNA, 25 bp, Homo sapiens
accatgttggctgctgtgatcttgc

SEQ ID NO: 6908 - DNA, 25 bp, Homo sapiens
actcattgcagggtgtgtcgccaca

SEQ ID NO: 6909 - DNA, 25 bp, Homo sapiens
gagtattcctgaactgctgagccca

SEQ ID NO: 6910 - DNA, 25 bp, Homo sapiens
gttccaaagggtatatagcacagtg

SEQ ID NO: 6911 - DNA, 25 bp, Homo sapiens
cccaagtacatatcctttactgtat

SEQ ID NO: 6912 - DNA, 25 bp, Homo sapiens
cctgaagtcaccttgatggaagctc

SEQ ID NO: 6913 - DNA, 25 bp, Homo sapiens
attcgaggcccagtcaggatccata

SEQ ID NO: 6914 - DNA, 25 bp, Homo sapiens
cttagtcctacttgtgagagaattc

SEQ ID NO: 6915 - DNA, 25 bp, Homo sapiens
taactgttccatgtcatgttcatga

SEQ ID NO: 6916 - DNA, 25 bp, Homo sapiens
agctgcttattgcttgcaccatcta

SEQ ID NO: 6917 - DNA, 25 bp, Homo sapiens
tcttagtatatttggtttttgcatg

SEQ ID NO: 6918 - DNA, 25 bp, Homo sapiens
aactgacctgccctttggatgaccc

SEQ ID NO: 6919 - DNA, 25 bp, Homo sapiens
tctgatatatgcatgtgaaaccctg

SEQ ID NO: 6920 - DNA, 25 bp, Homo sapiens
ccgctgttcagcctgtatcaaagta

SEQ ID NO: 6921 - DNA, 25 bp, Homo sapiens
attttccctagacccactgcttgag

SEQ ID NO: 6922 - DNA, 25 bp, Homo sapiens
ggcacaagggtttcagttttactta

SEQ ID NO: 6923 - DNA, 25 bp, Homo sapiens
accatggtgctgtttggggcaaatc

SEQ ID NO: 6924 - DNA, 25 bp, Homo sapiens
ttagttttaaaagaacttaatgcca

SEQ ID NO: 6925 - DNA, 25 bp, Homo sapiens
cttttttagaacagaggctttggga

SEQ ID NO: 6926 - DNA, 25 bp, Homo sapiens
attaattctctctcaatcattttta

SEQ ID NO: 6927 - DNA, 25 bp, Homo sapiens
ggcagcctaagttttccagtgatga

SEQ ID NO: 6928 - DNA, 25 bp, Homo sapiens
tgaaggacctagacctgcaacaatg

SEQ ID NO: 6929 - DNA, 25 bp, Homo sapiens
cagagcctgcctgtatgcctgccta

SEQ ID NO: 6930 - DNA, 25 bp, Homo sapiens
cagcagtttgtactcttggtttcca

SEQ ID NO: 6931 - DNA, 25 bp, Homo sapiens
gttagcaatataccctatacacttc

SEQ ID NO: 6932 - DNA, 25 bp, Homo sapiens
gtggttgcccttgcatcactatata

SEQ ID NO: 6933 - DNA, 25 bp, Homo sapiens
tggctaggatacacattagtcattc

SEQ ID NO: 6934 - DNA, 25 bp, Homo sapiens
aaaaaacaacaaaagagtattcatt

SEQ ID NO: 6935 - DNA, 25 bp, Homo sapiens
gctacctgcttgtgccgccacttta

SEQ ID NO: 6936 - DNA, 25 bp, Homo sapiens
caggtgagtcagttcttatattgcc

SEQ ID NO: 6937 - DNA, 25 bp, Homo sapiens
tgctctgctgctcaaaatatgctgc

SEQ ID NO: 6938 - DNA, 25 bp, Homo sapiens
tgaccacgccaactggaaaattttg

SEQ ID NO: 6939 - DNA, 25 bp, Homo sapiens
acgttcgcagttggctttgtgagca

SEQ ID NO: 6940 - DNA, 25 bp, Homo sapiens
ctctgggactgactaagggaatctc

SEQ ID NO: 6941 - DNA, 25 bp, Homo sapiens
aggcatctgcttctcaaaattgtta

SEQ ID NO: 6942 - DNA, 25 bp, Homo sapiens
ggggctttcacaatataggcttcta

SEQ ID NO: 6943 - DNA, 25 bp, Homo sapiens
tccaggtgtttcatgagctccagta

SEQ ID NO: 6944 - DNA, 25 bp, Homo sapiens
cgccctttaaaatgctacctgtagt

SEQ ID NO: 6945 - DNA, 25 bp, Homo sapiens
gtccttgcagttgtgataaatagtc

SEQ ID NO: 6946 - DNA, 25 bp, Homo sapiens
cccagactgctataaggtgaccaaa

SEQ ID NO: 6947 - DNA, 25 bp, Homo sapiens
cctgcccaggtatcttagcttgcta

SEQ ID NO: 6948 - DNA, 25 bp, Homo sapiens
gatggtaatacttgccctctcgtta

SEQ ID NO: 6949 - DNA, 25 bp, Homo sapiens
aaacctgttgtcttccttttgcctg

SEQ ID NO: 6950 - DNA, 25 bp, Homo sapiens
tggtctttgatcagtgccagtttta

SEQ ID NO: 6951 - DNA, 25 bp, Homo sapiens
tgggtttgccgttgcctttttgaaa

SEQ ID NO: 6952 - DNA, 25 bp, Homo sapiens
tagccaggctgtcttcccttccaaa

SEQ ID NO: 6953 - DNA, 25 bp, Homo sapiens
atctgactgtgccatttgctttctc

SEQ ID NO: 6954 - DNA, 25 bp, Homo sapiens
tccctaataaatgcaacactggttc

SEQ ID NO: 6955 - DNA, 25 bp, Homo sapiens
gggtctttctagcttcctttcctaa

SEQ ID NO: 6956 - DNA, 25 bp, Homo sapiens
tttcagcaatattctcagagaactg

SEQ ID NO: 6957 - DNA, 25 bp, Homo sapiens
atttgagtctatgtggggtgttccc

SEQ ID NO: 6958 - DNA, 25 bp, Homo sapiens
cgagttcatttttctgggcagcagc

SEQ ID NO: 6959 - DNA, 25 bp, Homo sapiens
cccttttcctttccagctaagatgg

SEQ ID NO: 6960 - DNA, 25 bp, Homo sapiens
accctgctgctgtctacatttctga

SEQ ID NO: 6961 - DNA, 25 bp, Homo sapiens
gaggcctgcttggatttgacaaata

SEQ ID NO: 6962 - DNA, 25 bp, Homo sapiens
actcaaaatgagactggcacggttc

SEQ ID NO: 6963 - DNA, 25 bp, Homo sapiens
agcagtgcttcctcaagaatgttga

SEQ ID NO: 6964 - DNA, 25 bp, Homo sapiens
ctcaaaactgtggtggctacttgga

SEQ ID NO: 6965 - DNA, 25 bp, Homo sapiens
ggtctcctatgaccactccaattta

SEQ ID NO: 6966 - DNA, 25 bp, Homo sapiens
ctctgtagaatatctttacatttaa

SEQ ID NO: 6967 - DNA, 25 bp, Homo sapiens
cctctcccagggcatttcttaatgc

SEQ ID NO: 6968 - DNA, 25 bp, Homo sapiens
gcagccagcagactccacatcttta

SEQ ID NO: 6969 - DNA, 25 bp, Homo sapiens
gttgtgttgtaacctgccagcattg

SEQ ID NO: 6970 - DNA, 25 bp, Homo sapiens
gctgggaagttccatgaccatctga

SEQ ID NO: 6971 - DNA, 25 bp, Homo sapiens
ggtcggcgttattgcttactgttta

SEQ ID NO: 6972 - DNA, 25 bp, Homo sapiens
gctgcctagggaacgttggatacaa

SEQ ID NO: 6973 - DNA, 25 bp, Homo sapiens
cccacaggctctactgtctgattta

SEQ ID NO: 6974 - DNA, 25 bp, Homo sapiens
ccatgattatggaggcaccgtctta

SEQ ID NO: 6975 - DNA, 25 bp, Homo sapiens
tcgccctgtggagaactgtttaaaa

SEQ ID NO: 6976 - DNA, 25 bp, Homo sapiens
tctaactatctctgtggcaggagcc

SEQ ID NO: 6977 - DNA, 25 bp, Homo sapiens
atgaaatttcaatttgtttggcttt

SEQ ID NO: 6978 - DNA, 25 bp, Homo sapiens
tgtggccacaactgagacttagatt

SEQ ID NO: 6979 - DNA, 25 bp, Homo sapiens
tcggaggctattttctctacacata

SEQ ID NO: 6980 - DNA, 25 bp, Homo sapiens
aatgtaccagccaactagttttagg

SEQ ID NO: 6981 - DNA, 25 bp, Homo sapiens
tttttgaacatttatcatggcccaa

SEQ ID NO: 6982 - DNA, 25 bp, Homo sapiens
ttgtccactgacaggctagactttc

SEQ ID NO: 6983 - DNA, 25 bp, Homo sapiens
tgtatttttctagcagcaagttttg

SEQ ID NO: 6984 - DNA, 25 bp, Homo sapiens
caactcatgctctgtgggtaacaaa

SEQ ID NO: 6985 - DNA, 25 bp, Homo sapiens
tgggcatctacctaaaggcagttta

SEQ ID NO: 6986 - DNA, 25 bp, Homo sapiens
tgaaagggttctgggacaatgcatc

SEQ ID NO: 6987 - DNA, 25 bp, Homo sapiens
aattgggaccactctagctaaaggg

SEQ ID NO: 6988 - DNA, 25 bp, Homo sapiens
gtgtcctcctgtcttgctgcacata

SEQ ID NO: 6989 - DNA, 25 bp, Homo sapiens
ctggggttgcacacacatacttttt

SEQ ID NO: 6990 - DNA, 25 bp, Homo sapiens
cagctctcagttggacgataaagta

SEQ ID NO: 6991 - DNA, 25 bp, Homo sapiens
cctctcagcgcagatggatataata

SEQ ID NO: 6992 - DNA, 25 bp, Homo sapiens
tgctgagtatgttccgtttatttta

SEQ ID NO: 6993 - DNA, 25 bp, Homo sapiens
cagttcttctggaccaacagctata

SEQ ID NO: 6994 - DNA, 25 bp, Homo sapiens
gacaaatgtggttatgtcataacaa

SEQ ID NO: 6995 - DNA, 25 bp, Homo sapiens
tctatagctgctttttggccaaaca

SEQ ID NO: 6996 - DNA, 25 bp, Homo sapiens
gggctatagcccactcaaaaaagag

SEQ ID NO: 6997 - DNA, 25 bp, Homo sapiens
cactgccacagatctttaagggtca

SEQ ID NO: 6998 - DNA, 25 bp, Homo sapiens
tgctgcatcggcatgccacatgtta

SEQ ID NO: 6999 - DNA, 25 bp, Homo sapiens
ggaggcttctgtttcctctctaata

SEQ ID NO: 7000 - DNA, 25 bp, Homo sapiens
gtatgggtccacaatttcttcttta

SEQ ID NO: 7001 - DNA, 25 bp, Homo sapiens
agtggtatattttaagatgtgatgc

SEQ ID NO: 7002 - DNA, 25 bp, Homo sapiens
tcaaattacgcatgttaggggccta

SEQ ID NO: 7003 - DNA, 25 bp, Homo sapiens
aggcgccttgagttacagcatagta

SEQ ID NO: 7004 - DNA, 25 bp, Homo sapiens
agggatttccctcagcacctggtga

SEQ ID NO: 7005 - DNA, 25 bp, Homo sapiens
actgtagcttcatgacccgagtgtc

SEQ ID NO: 7006 - DNA, 25 bp, Homo sapiens
cttgcatcacactaaaggcaggatc

SEQ ID NO: 7007 - DNA, 25 bp, Homo sapiens
gactggctctatgatctctcattta

SEQ ID NO: 7008 - DNA, 25 bp, Homo sapiens
ttagccatagttgccctaaggaggc

SEQ ID NO: 7009 - DNA, 25 bp, Homo sapiens
agcctgtccctcttgttctgtcatg

SEQ ID NO: 7010 - DNA, 25 bp, Homo sapiens
ggccctgatgagacaaactatattc

SEQ ID NO: 7011 - DNA, 25 bp, Homo sapiens
cacatttgtggttttgtagggctac

SEQ ID NO: 7012 - DNA, 25 bp, Homo sapiens
gccgcattggaaaagaagttactct

SEQ ID NO: 7013 - DNA, 25 bp, Homo sapiens
tctgctagccaaagtaggtcatata

SEQ ID NO: 7014 - DNA, 25 bp, Homo sapiens
ggggaaatgttccagacctctccta

SEQ ID NO: 7015 - DNA, 25 bp, Homo sapiens
ggtggacatttcaaaaagcattttc

SEQ ID NO: 7016 - DNA, 25 bp, Homo sapiens
tgtggctggaatacagtcaactaga

SEQ ID NO: 7017 - DNA, 25 bp, Homo sapiens
gggacttttttagcaactcttgaca

SEQ ID NO: 7018 - DNA, 25 bp, Homo sapiens
taatggacttttaatctcaaaataa

SEQ ID NO: 7019 - DNA, 25 bp, Homo sapiens
caccagatatgtgaatgaggccatc

SEQ ID NO: 7020 - DNA, 25 bp, Homo sapiens
ccagaaggtctatcaggtgactgca

SEQ ID NO: 7021 - DNA, 25 bp, Homo sapiens
tgcagcacaatttccagcccatctg

SEQ ID NO: 7022 - DNA, 25 bp, Homo sapiens
aagagggcagatttcatgacatatg

SEQ ID NO: 7023 - DNA, 25 bp, Homo sapiens
ctatataataaaaaattactagctg

SEQ ID NO: 7024 - DNA, 25 bp, Homo sapiens
taaggtcgtgacatgtgcatttttc

SEQ ID NO: 7025 - DNA, 25 bp, Homo sapiens
tctgaaccctgtctgaactaactta

SEQ ID NO: 7026 - DNA, 25 bp, Homo sapiens
actcctacggatttgtgcctcttta

SEQ ID NO: 7027 - DNA, 25 bp, Homo sapiens
tggggtttaactgaacatcttactc

SEQ ID NO: 7028 - DNA, 25 bp, Homo sapiens
ttggtatttccaagactttcaggtg

SEQ ID NO: 7029 - DNA, 25 bp, Homo sapiens
gctcctttcagttggttgcctattc

SEQ ID NO: 7030 - DNA, 25 bp, Homo sapiens
aggtgccttgttttctcccgaccaa

SEQ ID NO: 7031 - DNA, 25 bp, Homo sapiens
agctactttagtcaagcactgattg

SEQ ID NO: 7032 - DNA, 25 bp, Homo sapiens
gagagctgtcctgcccaaatttatg

SEQ ID NO: 7033 - DNA, 25 bp, Homo sapiens
catctgggaccttcacagttgatta

SEQ ID NO: 7034 - DNA, 25 bp, Homo sapiens
agccctttctgtttgctttctcagc

SEQ ID NO: 7035 - DNA, 25 bp, Homo sapiens
tattttagaatgtactcctcctcca

SEQ ID NO: 7036 - DNA, 25 bp, Homo sapiens
ggcacagtttatgaaattatctctc

SEQ ID NO: 7037 - DNA, 25 bp, Homo sapiens
ggctcccgaaaaccgcaatcaagtg

SEQ ID NO: 7038 - DNA, 25 bp, Homo sapiens
gtgttcttccgtaagagtcatagtg

SEQ ID NO: 7039 - DNA, 25 bp, Homo sapiens
ggatccagcctataccctctatgtg

SEQ ID NO: 7040 - DNA, 25 bp, Homo sapiens
actagacgtttactgcaatgtgttc

SEQ ID NO: 7041 - DNA, 25 bp, Homo sapiens
ccagggttttttagcatgagtgtta

SEQ ID NO: 7042 - DNA, 25 bp, Homo sapiens
cctgcttaatggctggaatctattc

SEQ ID NO: 7043 - DNA, 25 bp, Homo sapiens
gtgacttcaggcttcccaactctta

SEQ ID NO: 7044 - DNA, 25 bp, Homo sapiens
tgcatccctggagccatttaacaga

SEQ ID NO: 7045 - DNA, 25 bp, Homo sapiens
tagggtttttccaacagatcaaagc

SEQ ID NO: 7046 - DNA, 25 bp, Homo sapiens
agcagcctggatctatgataaatgc

SEQ ID NO: 7047 - DNA, 25 bp, Homo sapiens
ctgccaattaaaatcaatcattagc

SEQ ID NO: 7048 - DNA, 25 bp, Homo sapiens
aggttccagtcaccaagccagaaga

SEQ ID NO: 7049 - DNA, 25 bp, Homo sapiens
cccacctaaagaaggactgctgtta

SEQ ID NO: 7050 - DNA, 25 bp, Homo sapiens
ctgctcaggcaggtggtaaaagtaa

SEQ ID NO: 7051 - DNA, 25 bp, Homo sapiens
ctcgggcaatttcctacacactttc

SEQ ID NO: 7052 - DNA, 25 bp, Homo sapiens
gggctctgctcaagaccctaagctg

SEQ ID NO: 7053 - DNA, 25 bp, Homo sapiens
ttcagttctgatctcatgaggaatc

SEQ ID NO: 7054 - DNA, 25 bp, Homo sapiens
ccattcccagtatcaggaggagaga

SEQ ID NO: 7055 - DNA, 25 bp, Homo sapiens
tggctacggccttcatacaactgta

SEQ ID NO: 7056 - DNA, 25 bp, Homo sapiens
gcaagagccagcctatacatacgta

SEQ ID NO: 7057 - DNA, 25 bp, Homo sapiens
cggtctttttgttccctgccattta

SEQ ID NO: 7058 - DNA, 25 bp, Homo sapiens
cctccgtgattttgtgacttcaatc

SEQ ID NO: 7059 - DNA, 25 bp, Homo sapiens
gcctggtctactgtgctatgaattc

SEQ ID NO: 7060 - DNA, 25 bp, Homo sapiens
cagcagtttacttgggtttttcaga

SEQ ID NO: 7061 - DNA, 25 bp, Homo sapiens
agtaccaggtgcttgtcagttaaca

SEQ ID NO: 7062 - DNA, 25 bp, Homo sapiens
tcctggccagtgatccagacacaca

SEQ ID NO: 7063 - DNA, 25 bp, Homo sapiens
atggacacattttaggcagagccta

SEQ ID NO: 7064 - DNA, 25 bp, Homo sapiens
ggccagggaagtatcttgcttcata

SEQ ID NO: 7065 - DNA, 25 bp, Homo sapiens
gctggccttatcaagctaaaaagta

SEQ ID NO: 7066 - DNA, 25 bp, Homo sapiens
cgacatagcttatcttccttaggta

SEQ ID NO: 7067 - DNA, 25 bp, Homo sapiens
ttctaccctggaatgcttctgcagc

SEQ ID NO: 7068 - DNA, 25 bp, Homo sapiens
cccaaatgggagaggcttaggtcta

SEQ ID NO: 7069 - DNA, 25 bp, Homo sapiens
ggggcctgactgaagaagtataatt

SEQ ID NO: 7070 - DNA, 25 bp, Homo sapiens
gcacctgtgtgtcatggtaaactta

SEQ ID NO: 7071 - DNA, 25 bp, Homo sapiens
catttcctaggctgtagtctgcatc

SEQ ID NO: 7072 - DNA, 25 bp, Homo sapiens
tctgttgctgaaaggcctctaagtg

SEQ ID NO: 7073 - DNA, 25 bp, Homo sapiens
tcactagtaactgatggtggcctaa

SEQ ID NO: 7074 - DNA, 25 bp, Homo sapiens
gtgcagcttcaggatacttaccatg

SEQ ID NO: 7075 - DNA, 25 bp, Homo sapiens
tccctcatgatttaaaccctgagtg

SEQ ID NO: 7076 - DNA, 25 bp, Homo sapiens
tcccactggggcaatctgacatgta

SEQ ID NO: 7077 - DNA, 25 bp, Homo sapiens
tttcgagggcaatcttaactaagtc

SEQ ID NO: 7078 - DNA, 25 bp, Homo sapiens
ccctggcacctacacatcctatctt

SEQ ID NO: 7079 - DNA, 25 bp, Homo sapiens
cttcagtgagcgaacattggcaacc

SEQ ID NO: 7080 - DNA, 25 bp, Homo sapiens
tggaaatattgataagccctctggc

SEQ ID NO: 7081 - DNA, 25 bp, Homo sapiens
agatgtcttgccctgagattgttca

SEQ ID NO: 7082 - DNA, 25 bp, Homo sapiens
ttttttttttagagaaaaaggcact

SEQ ID NO: 7083 - DNA, 25 bp, Homo sapiens
ccgggtttcccagtcacagagattg

SEQ ID NO: 7084 - DNA, 25 bp, Homo sapiens
tctgaatagagtgtggcttaaaatc

SEQ ID NO: 7085 - DNA, 25 bp, Homo sapiens
atgaccaggagaatacactgctttc

SEQ ID NO: 7086 - DNA, 25 bp, Homo sapiens
gggagtccaggacagctaaggatta

SEQ ID NO: 7087 - DNA, 25 bp, Homo sapiens
ggggaccttccagaccttccagtta

SEQ ID NO: 7088 - DNA, 25 bp, Homo sapiens
tttgtagtcttgtgtcccaaacttc

SEQ ID NO: 7089 - DNA, 25 bp, Homo sapiens
tacatttttcacacatgcatacaca

SEQ ID NO: 7090 - DNA, 25 bp, Homo sapiens
catatgggtctagttctttgtctta

SEQ ID NO: 7091 - DNA, 25 bp, Homo sapiens
tgcagcccaatgaggacccatgttt

SEQ ID NO: 7092 - DNA, 25 bp, Homo sapiens
atggatttcaagtagttgctcaagc

SEQ ID NO: 7093 - DNA, 25 bp, Homo sapiens
aagcaatgctccatatcctggaaga

SEQ ID NO: 7094 - DNA, 25 bp, Homo sapiens
cgtggctccacaaaggcttgaaata

SEQ ID NO: 7095 - DNA, 25 bp, Homo sapiens
atatcatggtggaatatagaattat

SEQ ID NO: 7096 - DNA, 25 bp, Homo sapiens
tattctatgcagggctcaagaaaag

SEQ ID NO: 7097 - DNA, 25 bp, Homo sapiens
gttctgctactccaaaaatgttatg

SEQ ID NO: 7098 - DNA, 25 bp, Homo sapiens
ttctggctagggaagagaccacttc

SEQ ID NO: 7099 - DNA, 25 bp, Homo sapiens
gggcgcgggcattaagattcctaaa

SEQ ID NO: 7100 - DNA, 25 bp, Homo sapiens
ctctaagctctttggatactcagtc

SEQ ID NO: 7101 - DNA, 25 bp, Homo sapiens
tgggtctgttttccaccattctaca

SEQ ID NO: 7102 - DNA, 25 bp, Homo sapiens
tgtagatctaccttctgagcacaag

SEQ ID NO: 7103 - DNA, 25 bp, Homo sapiens
ttggcctcctgacttatgacaaaga

SEQ ID NO: 7104 - DNA, 25 bp, Homo sapiens
tgagtactgcatccttgtttgacta

SEQ ID NO: 7105 - DNA, 25 bp, Homo sapiens
tgcctagaccaagccactcaaaata

SEQ ID NO: 7106 - DNA, 25 bp, Homo sapiens
agatgataaccacaacctttatgca

SEQ ID NO: 7107 - DNA, 25 bp, Homo sapiens
actgtctgctagatgcctactctta

SEQ ID NO: 7108 - DNA, 25 bp, Homo sapiens
ccaaagctgctcaaaggataccaga

SEQ ID NO: 7109 - DNA, 25 bp, Homo sapiens
ccaggtcgtgtcttgtgttctgata

SEQ ID NO: 7110 - DNA, 25 bp, Homo sapiens
ccctgaccaggaatgatcaatcatg

SEQ ID NO: 7111 - DNA, 25 bp, Homo sapiens
gtaagctcctctgacccacacattg

SEQ ID NO: 7112 - DNA, 25 bp, Homo sapiens
ttcagtttgcaatgagctaagtaca

SEQ ID NO: 7113 - DNA, 25 bp, Homo sapiens
cctcacagattgtataaacaaatgc

SEQ ID NO: 7114 - DNA, 25 bp, Homo sapiens
attgttaaatgtagccttccagata

SEQ ID NO: 7115 - DNA, 25 bp, Homo sapiens
agacaaaaggtcactgtgctttata

SEQ ID NO: 7116 - DNA, 25 bp, Homo sapiens
gacaggcgtatctgctctgactgaa

SEQ ID NO: 7117 - DNA, 25 bp, Homo sapiens
gttcctccctttctcaggccaagta

SEQ ID NO: 7118 - DNA, 25 bp, Homo sapiens
cctgctctgggatctttccggaaac

SEQ ID NO: 7119 - DNA, 25 bp, Homo sapiens
gagtttctcatgagttcagccaaca

SEQ ID NO: 7120 - DNA, 25 bp, Homo sapiens
ttcaggtatgaactagttttttttt

SEQ ID NO: 7121 - DNA, 25 bp, Homo sapiens
ccactgaggcttctgtcttcttgtc

SEQ ID NO: 7122 - DNA, 25 bp, Homo sapiens
gagctttattctagagggaccctga

SEQ ID NO: 7123 - DNA, 25 bp, Homo sapiens
actgcctggctgttttcactttcta

SEQ ID NO: 7124 - DNA, 25 bp, Homo sapiens
gccagcccagctaccacttattaga

SEQ ID NO: 7125 - DNA, 25 bp, Homo sapiens
atgtgagtactgaattctgtttcct

SEQ ID NO: 7126 - DNA, 25 bp, Homo sapiens
ggagctggaagccatatgttatttt

SEQ ID NO: 7127 - DNA, 25 bp, Homo sapiens
accctctgctgtacttgatattgaa

SEQ ID NO: 7128 - DNA, 25 bp, Homo sapiens
agcgactgttgtaaaggatgttccc

SEQ ID NO: 7129 - DNA, 25 bp, Homo sapiens
gctcacaggagcatcatacccagtc

SEQ ID NO: 7130 - DNA, 25 bp, Homo sapiens
gactcttcacaccacgatgttatta

SEQ ID NO: 7131 - DNA, 25 bp, Homo sapiens
atccacttcagggtgatgccacaga

SEQ ID NO: 7132 - DNA, 25 bp, Homo sapiens
tccatggggagaaactttcacgttc

SEQ ID NO: 7133 - DNA, 25 bp, Homo sapiens
cttacgtgaatgacccaatgagata

SEQ ID NO: 7134 - DNA, 25 bp, Homo sapiens
gcctggtggtcatgtgagagatatc

SEQ ID NO: 7135 - DNA, 25 bp, Homo sapiens
aggccaggctcatgaaattccatca

SEQ ID NO: 7136 - DNA, 25 bp, Homo sapiens
aatatgctcacgcttttccaggtta

SEQ ID NO: 7137 - DNA, 25 bp, Homo sapiens
cagtgccctgttagagaattttttg

SEQ ID NO: 7138 - DNA, 25 bp, Homo sapiens
gcctgctggaggaagtcaacaactc

SEQ ID NO: 7139 - DNA, 25 bp, Homo sapiens
gcgcccagagttgtgcattacatta

SEQ ID NO: 7140 - DNA, 25 bp, Homo sapiens
cacaagggtctggttctgcactatc

SEQ ID NO: 7141 - DNA, 25 bp, Homo sapiens
ggaccaatttgctctatggatcaga

SEQ ID NO: 7142 - DNA, 25 bp, Homo sapiens
taggcgatagatacatgggagtttc

SEQ ID NO: 7143 - DNA, 25 bp, Homo sapiens
ctctcagctcttttgggataatggc

SEQ ID NO: 7144 - DNA, 25 bp, Homo sapiens
ggaatgccaaactagctcacctatt

SEQ ID NO: 7145 - DNA, 25 bp, Homo sapiens
gcggttgcacccatactcctctttg

SEQ ID NO: 7146 - DNA, 25 bp, Homo sapiens
ctcaaggcaggtactactgtgtttc

SEQ ID NO: 7147 - DNA, 25 bp, Homo sapiens
ctcaggggctgaacatcattagata

SEQ ID NO: 7148 - DNA, 25 bp, Homo sapiens
tgtcccagaacaggcagctatagtc

SEQ ID NO: 7149 - DNA, 25 bp, Homo sapiens
tggccttggcgctcagttatcttga

SEQ ID NO: 7150 - DNA, 25 bp, Homo sapiens
agcagtttccttccaggttgaggga

SEQ ID NO: 7151 - DNA, 25 bp, Homo sapiens
gcacacctcaatctggactaatgta

SEQ ID NO: 7152 - DNA, 25 bp, Homo sapiens
tcttgttgagcagttagaagccttg

SEQ ID NO: 7153 - DNA, 25 bp, Homo sapiens
gcacgctctctgtttgtgtattaca

SEQ ID NO: 7154 - DNA, 25 bp, Homo sapiens
gaggattgcctgtcatttttccaga

SEQ ID NO: 7155 - DNA, 25 bp, Homo sapiens
gactgccctgccatgacatttatta

SEQ ID NO: 7156 - DNA, 25 bp, Homo sapiens
cctctctgaagatgtggtttgcctc

SEQ ID NO: 7157 - DNA, 25 bp, Homo sapiens
ctgcctttagtggtctgaggtccca

SEQ ID NO: 7158 - DNA, 25 bp, Homo sapiens
gtgtgctcactctgctggtctactg

SEQ ID NO: 7159 - DNA, 25 bp, Homo sapiens
gtacccaaggcaatcttctgcaatg

SEQ ID NO: 7160 - DNA, 25 bp, Homo sapiens
tgccctcatgggctttgattcctta

SEQ ID NO: 7161 - DNA, 25 bp, Homo sapiens
aatgccttgtctacaagagatctat

SEQ ID NO: 7162 - DNA, 25 bp, Homo sapiens
ggacccaggatcatctccactgata

SEQ ID NO: 7163 - DNA, 25 bp, Homo sapiens
ggtctccgggctctatatcacttta

SEQ ID NO: 7164 - DNA, 25 bp, Homo sapiens
tgaaggtcactctggtctattgata

SEQ ID NO: 7165 - DNA, 25 bp, Homo sapiens
tcatggccttagagacagctgtatg

SEQ ID NO: 7166 - DNA, 25 bp, Homo sapiens
gcaattcctcattggactccagaga

SEQ ID NO: 7167 - DNA, 25 bp, Homo sapiens
acaaagcttttgacactcagggaga

SEQ ID NO: 7168 - DNA, 25 bp, Homo sapiens
atgactctgtctcccaacctttgtg

SEQ ID NO: 7169 - DNA, 25 bp, Homo sapiens
ggttgtcattctactgtctccaaga

SEQ ID NO: 7170 - DNA, 25 bp, Homo sapiens
ccagcttctgataattggcttcata

SEQ ID NO: 7171 - DNA, 25 bp, Homo sapiens
gatggcttcttgcagagggaaacta

SEQ ID NO: 7172 - DNA, 25 bp, Homo sapiens
cttctggctatctggcttggtctta

SEQ ID NO: 7173 - DNA, 25 bp, Homo sapiens
gaataaactctcgtgtacatgtttt

SEQ ID NO: 7174 - DNA, 25 bp, Homo sapiens
atcagttctacccttgtctcaagtg

SEQ ID NO: 7175 - DNA, 25 bp, Homo sapiens
tgaatctctggttcttgctgctatg

SEQ ID NO: 7176 - DNA, 25 bp, Homo sapiens
tggtcagaaccagaacttgaaaggc

SEQ ID NO: 7177 - DNA, 25 bp, Homo sapiens
gggtatgtctcttagctctttgatg

SEQ ID NO: 7178 - DNA, 25 bp, Homo sapiens
tttttgttcttgggcatactttttt

SEQ ID NO: 7179 - DNA, 25 bp, Homo sapiens
ggggatatcaccacttctactctgt

SEQ ID NO: 7180 - DNA, 25 bp, Homo sapiens
caggcatgatttcctcagtctaacc

SEQ ID NO: 7181 - DNA, 25 bp, Homo sapiens
cagttgaacttttgccctgcagttg

SEQ ID NO: 7182 - DNA, 25 bp, Homo sapiens
atggctgcttgtctccagatagatc

SEQ ID NO: 7183 - DNA, 25 bp, Homo sapiens
gcttccattggctttgctaaacttc

SEQ ID NO: 7184 - DNA, 25 bp, Homo sapiens
agctccactgggtactgtgataaca

SEQ ID NO: 7185 - DNA, 25 bp, Homo sapiens
ccgcaaggggcttttatgagcaaca

SEQ ID NO: 7186 - DNA, 25 bp, Homo sapiens
gagcagggctttcatctgcctatga

SEQ ID NO: 7187 - DNA, 25 bp, Homo sapiens
ccgccagtttttcaggattcttagc

SEQ ID NO: 7188 - DNA, 25 bp, Homo sapiens
tttctggccactgtaatgagcactg

SEQ ID NO: 7189 - DNA, 25 bp, Homo sapiens
cccaaggttcttttgattagtgacc

SEQ ID NO: 7190 - DNA, 25 bp, Homo sapiens
tacttggacaatagggcttctcttc

SEQ ID NO: 7191 - DNA, 25 bp, Homo sapiens
cctggggaggtcattcatcttgatt

SEQ ID NO: 7192 - DNA, 25 bp, Homo sapiens
tcaaggtgctctaggttattatata

SEQ ID NO: 7193 - DNA, 25 bp, Homo sapiens
aaagaataaaagacagcatggagca

SEQ ID NO: 7194 - DNA, 25 bp, Homo sapiens
ggcaatcgatgtacagtttctttta

SEQ ID NO: 7195 - DNA, 25 bp, Homo sapiens
ccgcccacgctgatacgcaattaga

SEQ ID NO: 7196 - DNA, 25 bp, Homo sapiens
tgctggtgagtccttgtttcaatta

SEQ ID NO: 7197 - DNA, 25 bp, Homo sapiens
ttgctgaactgcaggcagtgggagt

SEQ ID NO: 7198 - DNA, 25 bp, Homo sapiens
gactgatttcttatattacagcttt

SEQ ID NO: 7199 - DNA, 25 bp, Homo sapiens
cattactgtgaaaacaatctactca

SEQ ID NO: 7200 - DNA, 25 bp, Homo sapiens
aggcaatagcttccagagtcaagtc

SEQ ID NO: 7201 - DNA, 25 bp, Homo sapiens
tcatggtttccaaatgcattccttc

SEQ ID NO: 7202 - DNA, 25 bp, Homo sapiens
ccattcagttgtgagctggataacc

SEQ ID NO: 7203 - DNA, 25 bp, Homo sapiens
aattgtgccctcatccctttggata

SEQ ID NO: 7204 - DNA, 25 bp, Homo sapiens
ccaacgtttctccttgaatggaaga

SEQ ID NO: 7205 - DNA, 25 bp, Homo sapiens
ggtaggggccatcattcatcccatt

SEQ ID NO: 7206 - DNA, 25 bp, Homo sapiens
atgataacaagatgtatacaattgt

SEQ ID NO: 7207 - DNA, 25 bp, Homo sapiens
ctctatttaatttggattgccttgc

SEQ ID NO: 7208 - DNA, 25 bp, Homo sapiens
ttatgacccagccaacttaggattc

SEQ ID NO: 7209 - DNA, 25 bp, Homo sapiens
agcctaactcttctttgccatggga

SEQ ID NO: 7210 - DNA, 25 bp, Homo sapiens
agccaggtagctatctcaaggttta

SEQ ID NO: 7211 - DNA, 25 bp, Homo sapiens
tctctgcgcaagtgctgctgtgata

SEQ ID NO: 7212 - DNA, 25 bp, Homo sapiens
tgggaatgcatccacccagtgttcc

SEQ ID NO: 7213 - DNA, 25 bp, Homo sapiens
cacaggggtctagtttcaggttgca

SEQ ID NO: 7214 - DNA, 25 bp, Homo sapiens
cacatttaagaaaaaaacacattta

SEQ ID NO: 7215 - DNA, 25 bp, Homo sapiens
ctgtacactataaaagtggataagg

SEQ ID NO: 7216 - DNA, 25 bp, Homo sapiens
ttcctaagtgtttccgaattttagc

SEQ ID NO: 7217 - DNA, 25 bp, Homo sapiens
tcctaagcacactgatgggtaacta

SEQ ID NO: 7218 - DNA, 25 bp, Homo sapiens
gaatggtttctcatatgacatccta

SEQ ID NO: 7219 - DNA, 25 bp, Homo sapiens
tgggcctctgaaacatgaagcaaca

SEQ ID NO: 7220 - DNA, 25 bp, Homo sapiens
gttgctttgcttatcccttgatgta

SEQ ID NO: 7221 - DNA, 25 bp, Homo sapiens
gtagaataattataccatagacaag

SEQ ID NO: 7222 - DNA, 25 bp, Homo sapiens
catcttgaattaccagctcaggtta

SEQ ID NO: 7223 - DNA, 25 bp, Homo sapiens
gggacctcaagtttggacatcctga

SEQ ID NO: 7224 - DNA, 25 bp, Homo sapiens
gggccatgtgtcctccacccatatg

SEQ ID NO: 7225 - DNA, 25 bp, Homo sapiens
tcccaggggttctcatggacttaca

SEQ ID NO: 7226 - DNA, 25 bp, Homo sapiens
ttccatgaacaattatgtccctctg

SEQ ID NO: 7227 - DNA, 25 bp, Homo sapiens
tggccctagtgaaagataaaaattg

SEQ ID NO: 7228 - DNA, 25 bp, Homo sapiens
ctgcggaaaagtcttgacatccttc

SEQ ID NO: 7229 - DNA, 25 bp, Homo sapiens
tccgtaagttatccagcactgtgtc

SEQ ID NO: 7230 - DNA, 25 bp, Homo sapiens
cccaggttggtgcagaaacactttt

SEQ ID NO: 7231 - DNA, 25 bp, Homo sapiens
ccctagataggcagatgtcatttta

SEQ ID NO: 7232 - DNA, 25 bp, Homo sapiens
cagttgccaggctatcttgaaaata

SEQ ID NO: 7233 - DNA, 25 bp, Homo sapiens
gtcagtgctgactctctggttgtta

SEQ ID NO: 7234 - DNA, 25 bp, Homo sapiens
ccatcttgagaaggcagaaattttt

SEQ ID NO: 7235 - DNA, 25 bp, Homo sapiens
gcctttagtggcctgatctgactca

SEQ ID NO: 7236 - DNA, 25 bp, Homo sapiens
ccattgctctctttcaccagtttga

SEQ ID NO: 7237 - DNA, 25 bp, Homo sapiens
tccagtgtgctaaggtggagcatta

SEQ ID NO: 7238 - DNA, 25 bp, Homo sapiens
tgggcctcatcctgggagtaatttg

SEQ ID NO: 7239 - DNA, 25 bp, Homo sapiens
actcctaggatgaatgctgagcttc

SEQ ID NO: 7240 - DNA, 25 bp, Homo sapiens
cctggggtttcgttcttctaccgta

SEQ ID NO: 7241 - DNA, 25 bp, Homo sapiens
tgcaaaattttgaaagtcgatctaa

SEQ ID NO: 7242 - DNA, 25 bp, Homo sapiens
gctcctttggaagagtaaaatggta

SEQ ID NO: 7243 - DNA, 25 bp, Homo sapiens
ggttccacgctttctttcttctagg

SEQ ID NO: 7244 - DNA, 25 bp, Homo sapiens
atggactttcattctggactctgta

SEQ ID NO: 7245 - DNA, 25 bp, Homo sapiens
cgtcctgtgaattacaaaagttctc

SEQ ID NO: 7246 - DNA, 25 bp, Homo sapiens
ggaacatacctgtatagttcaggcc

SEQ ID NO: 7247 - DNA, 25 bp, Homo sapiens
ttgggtacccatcataaagttcaga

SEQ ID NO: 7248 - DNA, 25 bp, Homo sapiens
cctctttgccaagggagtgttctga

SEQ ID NO: 7249 - DNA, 25 bp, Homo sapiens
tggatcattcccaggaggacttttc

SEQ ID NO: 7250 - DNA, 25 bp, Homo sapiens
aagccaaagaacattctcagcattt

SEQ ID NO: 7251 - DNA, 25 bp, Homo sapiens
gacccttctgtccttgttctatgta

SEQ ID NO: 7252 - DNA, 25 bp, Homo sapiens
cctctagggagttgcagggatcaaa

SEQ ID NO: 7253 - DNA, 25 bp, Homo sapiens
tgcggacacctgctttcagaatgca

SEQ ID NO: 7254 - DNA, 25 bp, Homo sapiens
ctccactggagtgatagaacctttg

SEQ ID NO: 7255 - DNA, 25 bp, Homo sapiens
tttccatgggtcaaggctgaaactc

SEQ ID NO: 7256 - DNA, 25 bp, Homo sapiens
tctggccctctgagaaatctgttta

SEQ ID NO: 7257 - DNA, 25 bp, Homo sapiens
ccttgtctctttttgggaggaattt

SEQ ID NO: 7258 - DNA, 25 bp, Homo sapiens
ccctcagctgataggtgctaaggta

SEQ ID NO: 7259 - DNA, 25 bp, Homo sapiens
tggtggcatcaaaattccttctttc

SEQ ID NO: 7260 - DNA, 25 bp, Homo sapiens
gatattatggtagacgctgatgaca

SEQ ID NO: 7261 - DNA, 25 bp, Homo sapiens
acggccactcctcatgttttcattg

SEQ ID NO: 7262 - DNA, 25 bp, Homo sapiens
cctttagtcataggccgaagtttta

SEQ ID NO: 7263 - DNA, 25 bp, Homo sapiens
caagtctatggttggattagctcca

SEQ ID NO: 7264 - DNA, 25 bp, Homo sapiens
acctgcacttgaggggttgaagatc

SEQ ID NO: 7265 - DNA, 25 bp, Homo sapiens
gttgctagcaaagatgggcttctta

SEQ ID NO: 7266 - DNA, 25 bp, Homo sapiens
aggtgcccacatgcgctttgaagtt

SEQ ID NO: 7267 - DNA, 25 bp, Homo sapiens
tccaggtgacagtgcaacagatcca

SEQ ID NO: 7268 - DNA, 25 bp, Homo sapiens
tggtttttcctctgtctctgcaatg

SEQ ID NO: 7269 - DNA, 25 bp, Homo sapiens
tccgtagacttggtatgactgaatg

SEQ ID NO: 7270 - DNA, 25 bp, Homo sapiens
aggctctttgtatagctatcgttcc

SEQ ID NO: 7271 - DNA, 25 bp, Homo sapiens
cccttctcagtgtaggagattctga

SEQ ID NO: 7272 - DNA, 25 bp, Homo sapiens
tttgcttgctgtagagcctgccatc

SEQ ID NO: 7273 - DNA, 25 bp, Homo sapiens
agctatacagttcattgatagctgt

SEQ ID NO: 7274 - DNA, 25 bp, Homo sapiens
ggcttgcatggagcatcatagtgtc

SEQ ID NO: 7275 - DNA, 25 bp, Homo sapiens
tacacatgctattttctcaggaaga

SEQ ID NO: 7276 - DNA, 25 bp, Homo sapiens
attcaggctgctctttccacatcca

SEQ ID NO: 7277 - DNA, 25 bp, Homo sapiens
tactaattttctcctgttcacattt

SEQ ID NO: 7278 - DNA, 25 bp, Homo sapiens
taagggcctcccaagttcaagaatg

SEQ ID NO: 7279 - DNA, 25 bp, Homo sapiens
cctgcccaggagacaggtatattta

SEQ ID NO: 7280 - DNA, 25 bp, Homo sapiens
gaaattttcagaggccaaatgtagt

SEQ ID NO: 7281 - DNA, 25 bp, Homo sapiens
ccacagctgacctcatagcccaagt

SEQ ID NO: 7282 - DNA, 25 bp, Homo sapiens
ttttttaaaagtcttatcctcgaat

SEQ ID NO: 7283 - DNA, 25 bp, Homo sapiens
ccagtgactggaaacaccttcttta

SEQ ID NO: 7284 - DNA, 25 bp, Homo sapiens
acccattgtgttgctagtctctatc

SEQ ID NO: 7285 - DNA, 25 bp, Homo sapiens
tgctctggactgtgaatatctcttg

SEQ ID NO: 7286 - DNA, 25 bp, Homo sapiens
tggccagtgagccataagcccttta

SEQ ID NO: 7287 - DNA, 25 bp, Homo sapiens
tctcttggaatgctgaaaggccctg

SEQ ID NO: 7288 - DNA, 25 bp, Homo sapiens
tcctatttcaacatggccgctgctg

SEQ ID NO: 7289 - DNA, 25 bp, Homo sapiens
agctcctagtgcaaacggcttcttg

SEQ ID NO: 7290 - DNA, 25 bp, Homo sapiens
gggcaaaggttattctacacagatc

SEQ ID NO: 7291 - DNA, 25 bp, Homo sapiens
gcctctcaggttgtctggaatctta

SEQ ID NO: 7292 - DNA, 25 bp, Homo sapiens
cccacaggtatgtgctgaaggaata

SEQ ID NO: 7293 - DNA, 25 bp, Homo sapiens
tggcactcgtgtttctcagctattg

SEQ ID NO: 7294 - DNA, 25 bp, Homo sapiens
tctggccagtgtctatcccatgctg

SEQ ID NO: 7295 - DNA, 25 bp, Homo sapiens
agctggtaaaaatagtctctggtga

SEQ ID NO: 7296 - DNA, 25 bp, Homo sapiens
cctgcaggatgttttgggaatcttt

SEQ ID NO: 7297 - DNA, 25 bp, Homo sapiens
gggccttgcaattgaaaccagtctc

SEQ ID NO: 7298 - DNA, 25 bp, Homo sapiens
acggtccggatttcatcgtttcaca

SEQ ID NO: 7299 - DNA, 25 bp, Homo sapiens
ggcccggccctattatcttgtatta

SEQ ID NO: 7300 - DNA, 25 bp, Homo sapiens
gcaccctttgcctgcaggatcctta

SEQ ID NO: 7301 - DNA, 25 bp, Homo sapiens
aggggtggcctgtataaatatccgc

SEQ ID NO: 7302 - DNA, 25 bp, Homo sapiens
cctgcaggattcttattggaccaca

SEQ ID NO: 7303 - DNA, 25 bp, Homo sapiens
tggccctggacccaattgtctgtga

SEQ ID NO: 7304 - DNA, 25 bp, Homo sapiens
ggctggcctgcccatattagagaca

SEQ ID NO: 7305 - DNA, 25 bp, Homo sapiens
tccagggcctggtacatagtaaaca

SEQ ID NO: 7306 - DNA, 25 bp, Homo sapiens
tgacagtcgcagttccagggccatt

SEQ ID NO: 7307 - DNA, 25 bp, Homo sapiens
tgtcctgggattacaagtagctgtg

SEQ ID NO: 7308 - DNA, 25 bp, Homo sapiens
ttcctatcttgacaggcaaagcctg

SEQ ID NO: 7309 - DNA, 25 bp, Homo sapiens
tcttttcaaggatgagcgaggcttc

SEQ ID NO: 7310 - DNA, 25 bp, Homo sapiens
gctgcaggtagggaattcacccgta

SEQ ID NO: 7311 - DNA, 25 bp, Homo sapiens
ggaacctcatggacttgcctcaata

SEQ ID NO: 7312 - DNA, 25 bp, Homo sapiens
agcagagaagcttccctttccatgg

SEQ ID NO: 7313 - DNA, 25 bp, Homo sapiens
agcacctttgtgtgggcctgtgaaa

SEQ ID NO: 7314 - DNA, 25 bp, Homo sapiens
ggcccttgagatcagctctgtcttt

SEQ ID NO: 7315 - DNA, 25 bp, Homo sapiens
atgagtccacgatggcccttaaagc

SEQ ID NO: 7316 - DNA, 25 bp, Homo sapiens
acaatcttgtctatggctgggcaca

SEQ ID NO: 7317 - DNA, 25 bp, Homo sapiens
gtgcagcctgcccattctataacaa

SEQ ID NO: 7318 - DNA, 25 bp, Homo sapiens
gttctcccaagatagaaggaccatc

SEQ ID NO: 7319 - DNA, 25 bp, Homo sapiens
tgtgagtgccgctggtcttgaaaac

SEQ ID NO: 7320 - DNA, 25 bp, Homo sapiens
tagggcctgcttctcccaattgcta

SEQ ID NO: 7321 - DNA, 25 bp, Homo sapiens
gaggccctatcctggggcataggtc

SEQ ID NO: 7322 - DNA, 25 bp, Homo sapiens
gcttgtggcttcagggaaaccttga

SEQ ID NO: 7323 - DNA, 25 bp, Homo sapiens
tttggactgttaaaacctttcatca

SEQ ID NO: 7324 - DNA, 25 bp, Homo sapiens
gctgacctgttccatttctttctga

SEQ ID NO: 7325 - DNA, 25 bp, Homo sapiens
cagcacctgaccaattgtaagtata

SEQ ID NO: 7326 - DNA, 25 bp, Homo sapiens
ggcagccatggtgcacttccttttc

SEQ ID NO: 7327 - DNA, 25 bp, Homo sapiens
ggctcagctgctgaagagtccatta

SEQ ID NO: 7328 - DNA, 25 bp, Homo sapiens
atgggagtacacctggctcactgtc

SEQ ID NO: 7329 - DNA, 25 bp, Homo sapiens
tgtcctgcctcagttttttgaaaga

SEQ ID NO: 7330 - DNA, 25 bp, Homo sapiens
atttgaagaggtctttttaacaaaa

SEQ ID NO: 7331 - DNA, 25 bp, Homo sapiens
gggatgttcctcctctcattagttt

SEQ ID NO: 7332 - DNA, 25 bp, Homo sapiens
tatactgtcctaatctctgaaaccc

SEQ ID NO: 7333 - DNA, 25 bp, Homo sapiens
tgggtcccagtgttgccacaatagc

SEQ ID NO: 7334 - DNA, 25 bp, Homo sapiens
aaaacctgcggggacatagctgagc

SEQ ID NO: 7335 - DNA, 25 bp, Homo sapiens
atttgactgacatgcccagcactga

SEQ ID NO: 7336 - DNA, 25 bp, Homo sapiens
ttgtgattggggcagggaataaagg

SEQ ID NO: 7337 - DNA, 25 bp, Homo sapiens
gccaagtgaactcctgctcatcaga

SEQ ID NO: 7338 - DNA, 25 bp, Homo sapiens
cccacaggatttcaagctgactttg

SEQ ID NO: 7339 - DNA, 25 bp, Homo sapiens
ggagctgccgttgtctgaatttcta

SEQ ID NO: 7340 - DNA, 25 bp, Homo sapiens
agtggccatcaactccagggatatg

SEQ ID NO: 7341 - DNA, 25 bp, Homo sapiens
ttgaagaaatccctccacttggtgg

SEQ ID NO: 7342 - DNA, 25 bp, Homo sapiens
ctcctcccctgttagcaactggaaa

SEQ ID NO: 7343 - DNA, 25 bp, Homo sapiens
aggacttcctcgaggtctagatgga

SEQ ID NO: 7344 - DNA, 25 bp, Homo sapiens
cctgtcgtatctgagcctgggaatt

SEQ ID NO: 7345 - DNA, 25 bp, Homo sapiens
tggcagtccttcagcaacctccttg

SEQ ID NO: 7346 - DNA, 25 bp, Homo sapiens
ctgcggcagaatagccatgtttatt

SEQ ID NO: 7347 - DNA, 25 bp, Homo sapiens
gctgtgtacagggaagccttttcta

SEQ ID NO: 7348 - DNA, 25 bp, Homo sapiens
cttcacagggttaggcagacaaatt

SEQ ID NO: 7349 - DNA, 25 bp, Homo sapiens
tgttgttttcccagaagagcgatta

SEQ ID NO: 7350 - DNA, 25 bp, Homo sapiens
tacactatcagttaatccctcaatg

SEQ ID NO: 7351 - DNA, 25 bp, Homo sapiens
gagtgcttccactgacctccagcac

SEQ ID NO: 7352 - DNA, 25 bp, Homo sapiens
tcctaggtaaagtgcttagagaata

SEQ ID NO: 7353 - DNA, 25 bp, Homo sapiens
cctaaggctgcgtttctcatatttg

SEQ ID NO: 7354 - DNA, 25 bp, Homo sapiens
accaaatgcaggacttcagggcttg

SEQ ID NO: 7355 - DNA, 25 bp, Homo sapiens
ggcctccattactcctgctgctgtg

SEQ ID NO: 7356 - DNA, 25 bp, Homo sapiens
actcttgagacagcacgggcctatg

SEQ ID NO: 7357 - DNA, 25 bp, Homo sapiens
tgctcctggaagtcaccatgttttc

SEQ ID NO: 7358 - DNA, 25 bp, Homo sapiens
ttgctgtttcctactgcacactatg

SEQ ID NO: 7359 - DNA, 25 bp, Homo sapiens
caaatgggatctaaaaaagttaaag

SEQ ID NO: 7360 - DNA, 25 bp, Homo sapiens
ctgcatgtggggactactttatctc

SEQ ID NO: 7361 - DNA, 25 bp, Homo sapiens
tgtagtctttttctgcatcattctg

SEQ ID NO: 7362 - DNA, 25 bp, Homo sapiens
agaaaaaaaagatttacctcatgtc

SEQ ID NO: 7363 - DNA, 25 bp, Homo sapiens
cccacctggtctagttcaaaatatc

SEQ ID NO: 7364 - DNA, 25 bp, Homo sapiens
ccctgcatggggcaaaatttgtttt

SEQ ID NO: 7365 - DNA, 25 bp, Homo sapiens
ggggtctcccacaaacacaacgtta

SEQ ID NO: 7366 - DNA, 25 bp, Homo sapiens
gctcagtcacttgcccagatgattt

SEQ ID NO: 7367 - DNA, 25 bp, Homo sapiens
gggaatactaccatacccatttgga

SEQ ID NO: 7368 - DNA, 25 bp, Homo sapiens
gtgcactcgacctctgtgctgtttg

SEQ ID NO: 7369 - DNA, 25 bp, Homo sapiens
gttcccagccagtgccctgaaaatg

SEQ ID NO: 7370 - DNA, 25 bp, Homo sapiens
ccctgaaggtttcatgaacttaatc

SEQ ID NO: 7371 - DNA, 25 bp, Homo sapiens
attgttaccgagcacagacctgtta

SEQ ID NO: 7372 - DNA, 25 bp, Homo sapiens
gggttctgtacctatctggctttga

SEQ ID NO: 7373 - DNA, 25 bp, Homo sapiens
ctgcagcccactctgatggaatttt

SEQ ID NO: 7374 - DNA, 25 bp, Homo sapiens
ggcacaccaccctggggtattaata

SEQ ID NO: 7375 - DNA, 25 bp, Homo sapiens
agtaacttttataggatagatgaag

SEQ ID NO: 7376 - DNA, 25 bp, Homo sapiens
taccaagcaagatatcactcacatg

SEQ ID NO: 7377 - DNA, 25 bp, Homo sapiens
atattcccaaaataacaaatgcctc

SEQ ID NO: 7378 - DNA, 25 bp, Homo sapiens
atcctctacttcctcatcttcaatg

SEQ ID NO: 7379 - DNA, 25 bp, Homo sapiens
gaaagtacattggtatccagcatac

SEQ ID NO: 7380 - DNA, 25 bp, Homo sapiens
tcagactatggatggacttaccctc

SEQ ID NO: 7381 - DNA, 25 bp, Homo sapiens
acgtagtggtagtcatcagtgctca

SEQ ID NO: 7382 - DNA, 25 bp, Homo sapiens
atggttcgttgttcatctcatgata

SEQ ID NO: 7383 - DNA, 25 bp, Homo sapiens
tctataagcaaaaatgtatgcatac

SEQ ID NO: 7384 - DNA, 25 bp, Homo sapiens
tgtgccagtgagtctcccaagttcc

SEQ ID NO: 7385 - DNA, 25 bp, Homo sapiens
cagggtttactcagccaagtgcttg

SEQ ID NO: 7386 - DNA, 25 bp, Homo sapiens
tcctgacaccagttgagacactttg

SEQ ID NO: 7387 - DNA, 25 bp, Homo sapiens
ttgcaatttagatttcattctcttt

SEQ ID NO: 7388 - DNA, 25 bp, Homo sapiens
accagtaacgtgatttgggccttta

SEQ ID NO: 7389 - DNA, 25 bp, Homo sapiens
aggtgctgcatctgacatttcttca

SEQ ID NO: 7390 - DNA, 25 bp, Homo sapiens
gacaattcaagtaaaatcctctaaa

SEQ ID NO: 7391 - DNA, 25 bp, Homo sapiens
gggctacgtcatccagaagtcataa

SEQ ID NO: 7392 - DNA, 25 bp, Homo sapiens
cagccttgccatctagactattttg

SEQ ID NO: 7393 - DNA, 25 bp, Homo sapiens
actatgggtgctggaatgtacttca

SEQ ID NO: 7394 - DNA, 25 bp, Homo sapiens
gggtccatgcctccaaggataatta

SEQ ID NO: 7395 - DNA, 25 bp, Homo sapiens
gcagccaaagcccagtccaacagaa

SEQ ID NO: 7396 - DNA, 25 bp, Homo sapiens
caagaccttggggatgcagacaaaa

SEQ ID NO: 7397 - DNA, 25 bp, Homo sapiens
aagttttggagtaatgaagtagttt

SEQ ID NO: 7398 - DNA, 25 bp, Homo sapiens
taatttttttaaaaaggtcaataga

SEQ ID NO: 7399 - DNA, 25 bp, Homo sapiens
agtacgctgccttgactccattaca

SEQ ID NO: 7400 - DNA, 25 bp, Homo sapiens
tgctcttataatctctcagttggac

SEQ ID NO: 7401 - DNA, 25 bp, Homo sapiens
tgcaaacttaatcaagtaatggctt

SEQ ID NO: 7402 - DNA, 25 bp, Homo sapiens
gggtcactaagccacattctatgtc

SEQ ID NO: 7403 - DNA, 25 bp, Homo sapiens
gcggcccataatgtcccagatgaaa

SEQ ID NO: 7404 - DNA, 25 bp, Homo sapiens
tgcagcattgttcctggcttacaca

SEQ ID NO: 7405 - DNA, 25 bp, Homo sapiens
agtggaggcaattgcaaagacaata

SEQ ID NO: 7406 - DNA, 25 bp, Homo sapiens
gacctttcagttcctatggctattg

SEQ ID NO: 7407 - DNA, 25 bp, Homo sapiens
ccatgggttccacgtctgcagacaa

SEQ ID NO: 7408 - DNA, 25 bp, Homo sapiens
tcagtagtatctttaggagcccaag

SEQ ID NO: 7409 - DNA, 25 bp, Homo sapiens
gctcttagataagcctgattattcc

SEQ ID NO: 7410 - DNA, 25 bp, Homo sapiens
tggcctcaggggaattctcttcaca

SEQ ID NO: 7411 - DNA, 25 bp, Homo sapiens
gggaaccctccctccgtaaacaaag

SEQ ID NO: 7412 - DNA, 25 bp, Homo sapiens
ttcccttctgcatagatgtcaattc

SEQ ID NO: 7413 - DNA, 25 bp, Homo sapiens
aagaaaaacctggggcatgtattct

SEQ ID NO: 7414 - DNA, 25 bp, Homo sapiens
gaaaagtttacctacagatcaccta

SEQ ID NO: 7415 - DNA, 25 bp, Homo sapiens
tgattttcatcatctacgtatttag

SEQ ID NO: 7416 - DNA, 25 bp, Homo sapiens
tcatgcccatgagaggatcacattc

SEQ ID NO: 7417 - DNA, 25 bp, Homo sapiens
gttctgctacctgtgaaatcattta

SEQ ID NO: 7418 - DNA, 25 bp, Homo sapiens
gttatgctgcaaagagactcttatc

SEQ ID NO: 7419 - DNA, 25 bp, Homo sapiens
cactgcgtagttccgtctcttaata

SEQ ID NO: 7420 - DNA, 25 bp, Homo sapiens
cagctctttttcagtgtataattga

SEQ ID NO: 7421 - DNA, 25 bp, Homo sapiens
ttaaatgttagaatggaatattacc

SEQ ID NO: 7422 - DNA, 25 bp, Homo sapiens
aagttgttctgctgtgcctggccaa

SEQ ID NO: 7423 - DNA, 25 bp, Homo sapiens
ggcctgtggtaggataaatctcatc

SEQ ID NO: 7424 - DNA, 25 bp, Homo sapiens
gccctttgttgtactgttgaagatc

SEQ ID NO: 7425 - DNA, 25 bp, Homo sapiens
tggaagatccctctgacattttgtc

SEQ ID NO: 7426 - DNA, 25 bp, Homo sapiens
tatctttaaaaaagaatttactagt

SEQ ID NO: 7427 - DNA, 25 bp, Homo sapiens
aggcatatcttggtttctggggaaa

SEQ ID NO: 7428 - DNA, 25 bp, Homo sapiens
tagttgctcaaactttttaaaatag

SEQ ID NO: 7429 - DNA, 25 bp, Homo sapiens
agcttcctcttagtatcttagagcc

SEQ ID NO: 7430 - DNA, 25 bp, Homo sapiens
cctacttctatgtatgtggcagatc

SEQ ID NO: 7431 - DNA, 25 bp, Homo sapiens
aagctaatgcctaggcagtaatcta

SEQ ID NO: 7432 - DNA, 25 bp, Homo sapiens
acacattcagcctccagccaaatgg

SEQ ID NO: 7433 - DNA, 25 bp, Homo sapiens
gaatgaagcaagatggattatatca

SEQ ID NO: 7434 - DNA, 25 bp, Homo sapiens
ctgagggaacagaaaaatcaagtcc

SEQ ID NO: 7435 - DNA, 25 bp, Homo sapiens
tcctggaacatagctgcatctctgc

SEQ ID NO: 7436 - DNA, 25 bp, Homo sapiens
gagcctgggccagataatcttttca

SEQ ID NO: 7437 - DNA, 25 bp, Homo sapiens
ctcatgcaaggaggccacacaaatt

SEQ ID NO: 7438 - DNA, 25 bp, Homo sapiens
ggacacctgtgtttgttaggcaatc

SEQ ID NO: 7439 - DNA, 25 bp, Homo sapiens
gtgtggtccctcactaactcatctg

SEQ ID NO: 7440 - DNA, 25 bp, Homo sapiens
ttttggggatgtgtaatttacttcc

SEQ ID NO: 7441 - DNA, 25 bp, Homo sapiens
tggcctcaggtactttcacacagaa

SEQ ID NO: 7442 - DNA, 25 bp, Homo sapiens
tggcagacctgttagtcaaccatta

SEQ ID NO: 7443 - DNA, 25 bp, Homo sapiens
ctcagcagttattttgtccaaggta

SEQ ID NO: 7444 - DNA, 25 bp, Homo sapiens
aaagagaacaaagaggaaggcaact

SEQ ID NO: 7445 - DNA, 25 bp, Homo sapiens
gtgggaccacagcagagagttaaca

SEQ ID NO: 7446 - DNA, 25 bp, Homo sapiens
ttaatggggaaaaatatgtttgtaa

SEQ ID NO: 7447 - DNA, 25 bp, Homo sapiens
gcaacgtgtgtaccctgcagagcca

SEQ ID NO: 7448 - DNA, 25 bp, Homo sapiens
cccttagaggctgatcccgagaaaa

SEQ ID NO: 7449 - DNA, 25 bp, Homo sapiens
cccgctcctgttttgctatgaccga

SEQ ID NO: 7450 - DNA, 25 bp, Homo sapiens
gagctctgtctgcttccttactgtg

SEQ ID NO: 7451 - DNA, 25 bp, Homo sapiens
ctcacagtgatcgtttgggtctttc

SEQ ID NO: 7452 - DNA, 25 bp, Homo sapiens
cagggagatcccatgttgcttgttt

SEQ ID NO: 7453 - DNA, 25 bp, Homo sapiens
gttctgaaaacaggtagtttttctg

SEQ ID NO: 7454 - DNA, 25 bp, Homo sapiens
tgtgtcgacaggtgaagtcccgctt

SEQ ID NO: 7455 - DNA, 25 bp, Homo sapiens
cagatcactgtagctcggtttccca

SEQ ID NO: 7456 - DNA, 25 bp, Homo sapiens
cccgagtgattgatcgtgcgattca

SEQ ID NO: 7457 - DNA, 25 bp, Homo sapiens
ctctctgcctgtgggaatctggaca

SEQ ID NO: 7458 - DNA, 25 bp, Homo sapiens
tctcatgggcctaagaatgtctttc

SEQ ID NO: 7459 - DNA, 25 bp, Homo sapiens
tggggcccacacctgcaagtaacct

SEQ ID NO: 7460 - DNA, 25 bp, Homo sapiens
ctgaggactagcctggaccacataa

SEQ ID NO: 7461 - DNA, 25 bp, Homo sapiens
gggctcagggctgaccatatttttc

SEQ ID NO: 7462 - DNA, 25 bp, Homo sapiens
agcgtttcagcacatccaggtgatc

SEQ ID NO: 7463 - DNA, 25 bp, Homo sapiens
gaggaatccctcgaaggcacatgtg

SEQ ID NO: 7464 - DNA, 25 bp, Homo sapiens
gcaaggcgccattgggaaggggaag

SEQ ID NO: 7465 - DNA, 25 bp, Homo sapiens
cgggcctgttcacattggggtcaaa

SEQ ID NO: 7466 - DNA, 25 bp, Homo sapiens
tcggctgcttccattgctgggagta

SEQ ID NO: 7467 - DNA, 25 bp, Homo sapiens
tggcagcctgtgcaagttcatgctt

SEQ ID NO: 7468 - DNA, 25 bp, Homo sapiens
gctcgccgtctcactgaacaatgta

SEQ ID NO: 7469 - DNA, 25 bp, Homo sapiens
cactggtgcctccatattgactgca

SEQ ID NO: 7470 - DNA, 25 bp, Homo sapiens
caggcaattaaggatggatttccca

SEQ ID NO: 7471 - DNA, 25 bp, Homo sapiens
cgaggactctggcttcatttaaatg

SEQ ID NO: 7472 - DNA, 25 bp, Homo sapiens
gcatggcagctcatgccctggcata

SEQ ID NO: 7473 - DNA, 25 bp, Homo sapiens
gtgaacttgacctccctgaataatg

SEQ ID NO: 7474 - DNA, 25 bp, Homo sapiens
cctttcattggagaccctgggcaga

SEQ ID NO: 7475 - DNA, 25 bp, Homo sapiens
cgcccaagagcgtttacgtgtgtta

SEQ ID NO: 7476 - DNA, 25 bp, Homo sapiens
tggccctcgctcctaagaatcttta

SEQ ID NO: 7477 - DNA, 25 bp, Homo sapiens
cctccttgaaggcagacctgggcta

SEQ ID NO: 7478 - DNA, 25 bp, Homo sapiens
caagagcctttcctgtgggtgcaca

SEQ ID NO: 7479 - DNA, 25 bp, Homo sapiens
gattcttgtcttgaacctctgctcc

SEQ ID NO: 7480 - DNA, 25 bp, Homo sapiens
agggcgaactctggcactttatgta

SEQ ID NO: 7481 - DNA, 25 bp, Homo sapiens
acaacaaatttgtgtgggagtggaa

SEQ ID NO: 7482 - DNA, 25 bp, Homo sapiens
ccgtccactggagaggtcatctgtc

SEQ ID NO: 7483 - DNA, 25 bp, Homo sapiens
ctgccgggctaggagcattgtttac

SEQ ID NO: 7484 - DNA, 25 bp, Homo sapiens
ggccttctccctggctgcaagagga

SEQ ID NO: 7485 - DNA, 25 bp, Homo sapiens
ctttgctctgtaagctccacgctgg

SEQ ID NO: 7486 - DNA, 25 bp, Homo sapiens
actccagctcatgggaaaatccttc

SEQ ID NO: 7487 - DNA, 25 bp, Homo sapiens
agcccatgtgttggagctgccagaa

SEQ ID NO: 7488 - DNA, 25 bp, Homo sapiens
tggctgcctccctatgacatgtaaa

SEQ ID NO: 7489 - DNA, 25 bp, Homo sapiens
ggggccacatgctttcctgaatttt

SEQ ID NO: 7490 - DNA, 25 bp, Homo sapiens
gcagtcacttgtctctctctgaata

SEQ ID NO: 7491 - DNA, 25 bp, Homo sapiens
tgcgtggcttatcctggtcttaacc

SEQ ID NO: 7492 - DNA, 25 bp, Homo sapiens
agcccttcgtggtctggttgccaca

SEQ ID NO: 7493 - DNA, 25 bp, Homo sapiens
accttcgtgcaggaggacatctatg

SEQ ID NO: 7494 - DNA, 25 bp, Homo sapiens
cacttcatgttttgagctgtttgat

SEQ ID NO: 7495 - DNA, 25 bp, Homo sapiens
gggacagggttatgtgcccaacatc

SEQ ID NO: 7496 - DNA, 25 bp, Homo sapiens
gtctcatttctctttgtggctaatt

SEQ ID NO: 7497 - DNA, 25 bp, Homo sapiens
ttgggccatctttctgtgtcagtta

SEQ ID NO: 7498 - DNA, 25 bp, Homo sapiens
tggggccagtgctctggaaacattc

SEQ ID NO: 7499 - DNA, 25 bp, Homo sapiens
gctccattccctctgtgttctgctg

SEQ ID NO: 7500 - DNA, 25 bp, Homo sapiens
gagggacccatgattgtgacactga

SEQ ID NO: 7501 - DNA, 25 bp, Homo sapiens
gactttggggcaatacagggggtcc

SEQ ID NO: 7502 - DNA, 25 bp, Homo sapiens
ttttcagattttcaccaggcgcggt

SEQ ID NO: 7503 - DNA, 25 bp, Homo sapiens
ttgagcaggcctttccaggattgga

SEQ ID NO: 7504 - DNA, 25 bp, Homo sapiens
caaacgggactcattcagggccaca

SEQ ID NO: 7505 - DNA, 25 bp, Homo sapiens
ctgggctttgagttatgacatcgga

SEQ ID NO: 7506 - DNA, 25 bp, Homo sapiens
aaaagccctttctgctcacacttag

SEQ ID NO: 7507 - DNA, 25 bp, Homo sapiens
acttctggcctgtttacctgtagca

SEQ ID NO: 7508 - DNA, 25 bp, Homo sapiens
agggcaatcagcagtctctaccatc

SEQ ID NO: 7509 - DNA, 25 bp, Homo sapiens
gggtgatgccctacttatgcctaac

SEQ ID NO: 7510 - DNA, 25 bp, Homo sapiens
accggtgtccttccaacgatgttgc

SEQ ID NO: 7511 - DNA, 25 bp, Homo sapiens
caatctctgcagtcacttccaactc

SEQ ID NO: 7512 - DNA, 25 bp, Homo sapiens
gtcatgcacctgaacatttgaagta

SEQ ID NO: 7513 - DNA, 25 bp, Homo sapiens
ctgtctttttttctcagctgtaaag

SEQ ID NO: 7514 - DNA, 25 bp, Homo sapiens
agggcatgctctcatactactagga

SEQ ID NO: 7515 - DNA, 25 bp, Homo sapiens
tcagcctgggacaaaacgacctctc

SEQ ID NO: 7516 - DNA, 25 bp, Homo sapiens
gtagcccacatattgatcctgtctg

SEQ ID NO: 7517 - DNA, 25 bp, Homo sapiens
tgtgaaccagggctgccacaccagc

SEQ ID NO: 7518 - DNA, 25 bp, Homo sapiens
atcgcgggatcattgctcttattca

SEQ ID NO: 7519 - DNA, 25 bp, Homo sapiens
gaaccattgacagacgattagtcaa

SEQ ID NO: 7520 - DNA, 25 bp, Homo sapiens
tggggcccagcacaaagacctgtcc

SEQ ID NO: 7521 - DNA, 25 bp, Homo sapiens
ttgtagtgttaagtcagcccagtgc

SEQ ID NO: 7522 - DNA, 25 bp, Homo sapiens
agcgtatgtggccagtttttaaaca

SEQ ID NO: 7523 - DNA, 25 bp, Homo sapiens
ttgactcttgcccagcccaattttc

SEQ ID NO: 7524 - DNA, 25 bp, Homo sapiens
caaatggctgtaagtggaggctcta

SEQ ID NO: 7525 - DNA, 25 bp, Homo sapiens
cagctgggctcagtgtcctacgcct

SEQ ID NO: 7526 - DNA, 25 bp, Homo sapiens
ccatgttgggaaaactagcattgtc

SEQ ID NO: 7527 - DNA, 25 bp, Homo sapiens
gcccaggccacttctcaaacaagta

SEQ ID NO: 7528 - DNA, 25 bp, Homo sapiens
ccagccgtgggcaatctagttgaaa

SEQ ID NO: 7529 - DNA, 25 bp, Homo sapiens
ggcctgggcagttacccttaataga

SEQ ID NO: 7530 - DNA, 25 bp, Homo sapiens
cctattttacctgtggaagcctgca

SEQ ID NO: 7531 - DNA, 25 bp, Homo sapiens
ggcctctacagcttggcagcatata

SEQ ID NO: 7532 - DNA, 25 bp, Homo sapiens
gccagctgaggccattattttttca

SEQ ID NO: 7533 - DNA, 25 bp, Homo sapiens
tacaggaggactctgaggatgtttc

SEQ ID NO: 7534 - DNA, 25 bp, Homo sapiens
cccatgagtccagccctaggtaaga

SEQ ID NO: 7535 - DNA, 25 bp, Homo sapiens
cagggcccgactcttaattgtaatg

SEQ ID NO: 7536 - DNA, 25 bp, Homo sapiens
tgccattcttgtctgagccctgctg

SEQ ID NO: 7537 - DNA, 25 bp, Homo sapiens
ccagacctggggacatgttattttc

SEQ ID NO: 7538 - DNA, 25 bp, Homo sapiens
ttgacactttccagctttctatatc

SEQ ID NO: 7539 - DNA, 25 bp, Homo sapiens
ttctggcctacaaatgactccattt

SEQ ID NO: 7540 - DNA, 25 bp, Homo sapiens
aactcactttgttgttcttgtgtaa

SEQ ID NO: 7541 - DNA, 25 bp, Homo sapiens
gacctgagtatttccctggctgatg

SEQ ID NO: 7542 - DNA, 25 bp, Homo sapiens
gtagcccacatattgatcctgtctg

SEQ ID NO: 7543 - DNA, 25 bp, Homo sapiens
cagcctttatgcagagcaccgcaca

SEQ ID NO: 7544 - DNA, 25 bp, Homo sapiens
gcttctgctgtgagtgaccattttc

SEQ ID NO: 7545 - DNA, 25 bp, Homo sapiens
agcagtgtctcccttgttggtctca

SEQ ID NO: 7546 - DNA, 25 bp, Homo sapiens
ggcgttttctccacaggctcctgaa

SEQ ID NO: 7547 - DNA, 25 bp, Homo sapiens
tcagacttggcgacttgcagacttg

SEQ ID NO: 7548 - DNA, 25 bp, Homo sapiens
cgtctgcccgtagtgagattataca

SEQ ID NO: 7549 - DNA, 25 bp, Homo sapiens
gttgccttggaaaaactccgagatg

SEQ ID NO: 7550 - DNA, 25 bp, Homo sapiens
agcccttgtctggtgaagttttgca

SEQ ID NO: 7551 - DNA, 25 bp, Homo sapiens
cccgctgatctgcttggcttagaga

SEQ ID NO: 7552 - DNA, 25 bp, Homo sapiens
cccattcttggaggagattcacttc

SEQ ID NO: 7553 - DNA, 25 bp, Homo sapiens
gtctgccacctctcaaagaatttga

SEQ ID NO: 7554 - DNA, 25 bp, Homo sapiens
ttggggagccaacttccatgatgga

SEQ ID NO: 7555 - DNA, 25 bp, Homo sapiens
ggctgccctgtttctctgtaatatg

SEQ ID NO: 7556 - DNA, 25 bp, Homo sapiens
ttcatgatggcaaaatctcaccggc

SEQ ID NO: 7557 - DNA, 25 bp, Homo sapiens
ggttatgctctcctgtttgcctaca

SEQ ID NO: 7558 - DNA, 25 bp, Homo sapiens
gcgctgcctattttggttaagaaac

SEQ ID NO: 7559 - DNA, 25 bp, Homo sapiens
actcccatggtgaaacttgagccca

SEQ ID NO: 7560 - DNA, 25 bp, Homo sapiens
caagcatgtactgtcacctgggatc

SEQ ID NO: 7561 - DNA, 25 bp, Homo sapiens
acagttatgtctttgtagaagggtt

SEQ ID NO: 7562 - DNA, 25 bp, Homo sapiens
cacgtaggcatgttggtttagaccc

SEQ ID NO: 7563 - DNA, 25 bp, Homo sapiens
ggtctgaattccatgctctgctgca

SEQ ID NO: 7564 - DNA, 25 bp, Homo sapiens
ttccatcaggataaatgaacgtaga

SEQ ID NO: 7565 - DNA, 25 bp, Homo sapiens
catagatcgcaaaacaatagagctg

SEQ ID NO: 7566 - DNA, 25 bp, Homo sapiens
agctctgctctaacaccactgtgtg

SEQ ID NO: 7567 - DNA, 25 bp, Homo sapiens
gtctttcaaaaccagtgtcctcatc

SEQ ID NO: 7568 - DNA, 25 bp, Homo sapiens
ggaagctgcttacctgcctaggaca

SEQ ID NO: 7569 - DNA, 25 bp, Homo sapiens
attttcctggaacaaatatggggta

SEQ ID NO: 7570 - DNA, 25 bp, Homo sapiens
ctggggtgacctctctatcatgaaa

SEQ ID NO: 7571 - DNA, 25 bp, Homo sapiens
tcccaggcatggctcttctgcattg

SEQ ID NO: 7572 - DNA, 25 bp, Homo sapiens
tctgccatttttgaccctataagcc

SEQ ID NO: 7573 - DNA, 25 bp, Homo sapiens
cctacctgcagtttaagatcctatg

SEQ ID NO: 7574 - DNA, 25 bp, Homo sapiens
ctgggccttggaagctgcatttagc

SEQ ID NO: 7575 - DNA, 25 bp, Homo sapiens
tggaactcttcaggctacttatata

SEQ ID NO: 7576 - DNA, 25 bp, Homo sapiens
ggccagcgtctaccttgcgaaatga

SEQ ID NO: 7577 - DNA, 25 bp, Homo sapiens
gccacgtggggcttattaccctttc

SEQ ID NO: 7578 - DNA, 25 bp, Homo sapiens
ctatatattgctgtggttggacctc

SEQ ID NO: 7579 - DNA, 25 bp, Homo sapiens
atttgtgacatgtgcttgaccctga

SEQ ID NO: 7580 - DNA, 25 bp, Homo sapiens
gtggggaacccatctcttttgctag

SEQ ID NO: 7581 - DNA, 25 bp, Homo sapiens
cacctggggcatttgttggctaatc

SEQ ID NO: 7582 - DNA, 25 bp, Homo sapiens
accatatggtaacatggtaccttga

SEQ ID NO: 7583 - DNA, 25 bp, Homo sapiens
gccagggccaggagttttctatatc

SEQ ID NO: 7584 - DNA, 25 bp, Homo sapiens
ggctttgtctttctccacccatggg

SEQ ID NO: 7585 - DNA, 25 bp, Homo sapiens
cttcaggacgcattattcagtgttc

SEQ ID NO: 7586 - DNA, 25 bp, Homo sapiens
gccttggggctatatgctgcaatca

SEQ ID NO: 7587 - DNA, 25 bp, Homo sapiens
ctctagtctaatgtatgccagcgtc

SEQ ID NO: 7588 - DNA, 25 bp, Homo sapiens
cgggccctgcattttagactctata

SEQ ID NO: 7589 - DNA, 25 bp, Homo sapiens
ggcggctaggaacccatcacctata

SEQ ID NO: 7590 - DNA, 25 bp, Homo sapiens
gaggatcacctttcttcagctggtc

SEQ ID NO: 7591 - DNA, 25 bp, Homo sapiens
ggccctcagacagctacataatttg

SEQ ID NO: 7592 - DNA, 25 bp, Homo sapiens
gtagtgacacttctggcatccatta

SEQ ID NO: 7593 - DNA, 25 bp, Homo sapiens
ggccagaggttgcatgctcagtctc

SEQ ID NO: 7594 - DNA, 25 bp, Homo sapiens
gaacaaactattccttctgaacttc

SEQ ID NO: 7595 - DNA, 25 bp, Homo sapiens
gccatgctcagtgtgtaaaccaaga

SEQ ID NO: 7596 - DNA, 25 bp, Homo sapiens
gagccttcttcttcagctatactgg

SEQ ID NO: 7597 - DNA, 25 bp, Homo sapiens
ggagctttctccctactgttattgg

SEQ ID NO: 7598 - DNA, 25 bp, Homo sapiens
cgacacctgcagttttggagtttta

SEQ ID NO: 7599 - DNA, 25 bp, Homo sapiens
cgcccgcctctaggttcagacgtga

SEQ ID NO: 7600 - DNA, 25 bp, Homo sapiens
gggagactgacagccacaccttata

SEQ ID NO: 7601 - DNA, 25 bp, Homo sapiens
agctgctgatacctggccctgtacc

SEQ ID NO: 7602 - DNA, 25 bp, Homo sapiens
cccaactctgtgcatgaagactgta

SEQ ID NO: 7603 - DNA, 25 bp, Homo sapiens
gcctgacgtggagttcttcttaatg

SEQ ID NO: 7604 - DNA, 25 bp, Homo sapiens
cagcagccgatctccgcacagtttt

SEQ ID NO: 7605 - DNA, 25 bp, Homo sapiens
ttctcgttgttctccaggtaggttc

SEQ ID NO: 7606 - DNA, 25 bp, Homo sapiens
ggttcctgtacctcccatcatagta

SEQ ID NO: 7607 - DNA, 25 bp, Homo sapiens
tcccgtgctgcagtcgacctgattt

SEQ ID NO: 7608 - DNA, 25 bp, Homo sapiens
gagggtcctacagtttctctgcaca

SEQ ID NO: 7609 - DNA, 25 bp, Homo sapiens
tgcagcccacagagtttattcagtg

SEQ ID NO: 7610 - DNA, 25 bp, Homo sapiens
gggcaggtatttctacactgtaaaa

SEQ ID NO: 7611 - DNA, 25 bp, Homo sapiens
cttgtctctgggatcactgtctgtc

SEQ ID NO: 7612 - DNA, 25 bp, Homo sapiens
atgtctcccagcctctcaaaggtta

SEQ ID NO: 7613 - DNA, 25 bp, Homo sapiens
gggtcttgtcttgccctgtcaccaa

SEQ ID NO: 7614 - DNA, 25 bp, Homo sapiens
gggcagcgctctcattcactgtgtc

SEQ ID NO: 7615 - DNA, 25 bp, Homo sapiens
ggagcacttgcaaagcgtcacacta

SEQ ID NO: 7616 - DNA, 25 bp, Homo sapiens
tggacccgttgccagttttagaatc

SEQ ID NO: 7617 - DNA, 25 bp, Homo sapiens
ggtcctcctacctgctttctaaagc

SEQ ID NO: 7618 - DNA, 25 bp, Homo sapiens
agcatctgccctccgaaaattttag

SEQ ID NO: 7619 - DNA, 25 bp, Homo sapiens
tccaggtagtatttgggctaagatc

SEQ ID NO: 7620 - DNA, 25 bp, Homo sapiens
ccaccacctggactgctgttattga

SEQ ID NO: 7621 - DNA, 25 bp, Homo sapiens
aagctgttgttaagtcccagtcaca

SEQ ID NO: 7622 - DNA, 25 bp, Homo sapiens
ccacctgtgtagagagagtttcatc

SEQ ID NO: 7623 - DNA, 25 bp, Homo sapiens
tactctggcactggagcatttcctg

SEQ ID NO: 7624 - DNA, 25 bp, Homo sapiens
ggggagtcactgcttcatcactgta

SEQ ID NO: 7625 - DNA, 25 bp, Homo sapiens
aggaatgctccctatcattattgga

SEQ ID NO: 7626 - DNA, 25 bp, Homo sapiens
gtcgtaagacactctcgttttttaa

SEQ ID NO: 7627 - DNA, 25 bp, Homo sapiens
ggttggctacccttaactgtacatt

SEQ ID NO: 7628 - DNA, 25 bp, Homo sapiens
ggtttgtattatgccactcgaagtg

SEQ ID NO: 7629 - DNA, 25 bp, Homo sapiens
ttccctcagcagaaggcaacctatg

SEQ ID NO: 7630 - DNA, 25 bp, Homo sapiens
gggcgtcttctctgcaactctatat

SEQ ID NO: 7631 - DNA, 25 bp, Homo sapiens
acccaggtttgctttgctgtggaca

SEQ ID NO: 7632 - DNA, 25 bp, Homo sapiens
gatttatatcttttcttcaggcagg

SEQ ID NO: 7633 - DNA, 25 bp, Homo sapiens
cagtaggcttttatccagtgctcca

SEQ ID NO: 7634 - DNA, 25 bp, Homo sapiens
attgccctgggcagaaatttccttc

SEQ ID NO: 7635 - DNA, 25 bp, Homo sapiens
ctggtccgccagctccagttcagga

SEQ ID NO: 7636 - DNA, 25 bp, Homo sapiens
ctctggaagtgctggaaagtgtaca

SEQ ID NO: 7637 - DNA, 25 bp, Homo sapiens
agctgccttcaactggtgatgttaa

SEQ ID NO: 7638 - DNA, 25 bp, Homo sapiens
ttcaccctggtattttaagaatgca

SEQ ID NO: 7639 - DNA, 25 bp, Homo sapiens
gctgtgtgaaaataccttgaaggaa

SEQ ID NO: 7640 - DNA, 25 bp, Homo sapiens
cctgcctataagacactggagtaca

SEQ ID NO: 7641 - DNA, 25 bp, Homo sapiens
ggtcctgattcctctaggccttgga

SEQ ID NO: 7642 - DNA, 25 bp, Homo sapiens
ctcggtcccaataacaggatttttg

SEQ ID NO: 7643 - DNA, 25 bp, Homo sapiens
gcccgttctgttgtgcgtaaatgcc

SEQ ID NO: 7644 - DNA, 25 bp, Homo sapiens
cagctcgagtccttccttgagatta

SEQ ID NO: 7645 - DNA, 25 bp, Homo sapiens
ggccacgccgagttctcatgtttta

SEQ ID NO: 7646 - DNA, 25 bp, Homo sapiens
gggaaagccttgactctgagcactc

SEQ ID NO: 7647 - DNA, 25 bp, Homo sapiens
tcccacgagtgtcccaagagtcatt

SEQ ID NO: 7648 - DNA, 25 bp, Homo sapiens
acccattgacttttgacatcaagca

SEQ ID NO: 7649 - DNA, 25 bp, Homo sapiens
ttgctgctgagacaggacctcttgc

SEQ ID NO: 7650 - DNA, 25 bp, Homo sapiens
agccgccctctgctgagctttgatc

SEQ ID NO: 7651 - DNA, 25 bp, Homo sapiens
ggagcccagcgctgctttaacctgc

SEQ ID NO: 7652 - DNA, 25 bp, Homo sapiens
ccttttaagtcactgcgcgcgggtc

SEQ ID NO: 7653 - DNA, 25 bp, Homo sapiens
tcagcacagctctgcacctcggagg

SEQ ID NO: 7654 - DNA, 25 bp, Homo sapiens
gtgatccctctagaagccctccttg

SEQ ID NO: 7655 - DNA, 25 bp, Homo sapiens
gcaggcctgctattaagttttatta

SEQ ID NO: 7656 - DNA, 25 bp, Homo sapiens
ggttggatcccacctgatacaattg

SEQ ID NO: 7657 - DNA, 25 bp, Homo sapiens
catgcctgttgaagagtctcctgtc

SEQ ID NO: 7658 - DNA, 25 bp, Homo sapiens
tcggagcctggacttgccaaatttg

SEQ ID NO: 7659 - DNA, 25 bp, Homo sapiens
ggctcccaggaagacacacacagtg

SEQ ID NO: 7660 - DNA, 25 bp, Homo sapiens
cttcagtggagcttcgaggatttcc

SEQ ID NO: 7661 - DNA, 25 bp, Homo sapiens
ggggttagaaacgtccagctcctta

SEQ ID NO: 7662 - DNA, 25 bp, Homo sapiens
tccctggtccagacagtaggcactg

SEQ ID NO: 7663 - DNA, 25 bp, Homo sapiens
agcaccttctcgctggctttacgga

SEQ ID NO: 7664 - DNA, 25 bp, Homo sapiens
tctccgggtacacgttctccaggta

SEQ ID NO: 7665 - DNA, 25 bp, Homo sapiens
gggaggtcatcaccctgcacgtttt

SEQ ID NO: 7666 - DNA, 25 bp, Homo sapiens
ttcccagtgtgaggaaggctccttc

SEQ ID NO: 7667 - DNA, 25 bp, Homo sapiens
acgtgctctttcactccggtttgtc

SEQ ID NO: 7668 - DNA, 25 bp, Homo sapiens
tgccttcaggaagccgagtcccagg

SEQ ID NO: 7669 - DNA, 25 bp, Homo sapiens
ctgggttcgaagcaccttggccttc

SEQ ID NO: 7670 - DNA, 25 bp, Homo sapiens
catcaagtcttcagggtgagtcctc

SEQ ID NO: 7671 - DNA, 25 bp, Homo sapiens
cccgggagattgatgcttatgcaga

SEQ ID NO: 7672 - DNA, 25 bp, Homo sapiens
gtggcttccttgcatgcagcacata

SEQ ID NO: 7673 - DNA, 25 bp, Homo sapiens
gccgtcactaactgcagaggccaga

SEQ ID NO: 7674 - DNA, 25 bp, Homo sapiens
cgctggccagaaacagccgtgtatc

SEQ ID NO: 7675 - DNA, 25 bp, Homo sapiens
tgcagccctcagaccgtgacatgga

SEQ ID NO: 7676 - DNA, 25 bp, Homo sapiens
tcattctgtgagcacctaggggttc

SEQ ID NO: 7677 - DNA, 25 bp, Homo sapiens
ggcccatctcactgttctacgcgga

SEQ ID NO: 7678 - DNA, 25 bp, Homo sapiens
ggggcttgtccatgcccatctaatg

SEQ ID NO: 7679 - DNA, 25 bp, Homo sapiens
tggggataacttggctctttcttga

SEQ ID NO: 7680 - DNA, 25 bp, Homo sapiens
ggcgctgtgcaaagctgtgtcatca

SEQ ID NO: 7681 - DNA, 25 bp, Homo sapiens
gaagccctgtcccttgatcggcaga

SEQ ID NO: 7682 - DNA, 25 bp, Homo sapiens
caggaggagacgctctgaaactttc

SEQ ID NO: 7683 - DNA, 25 bp, Homo sapiens
cgcactgagaaactaaggactgtcc

SEQ ID NO: 7684 - DNA, 25 bp, Homo sapiens
aatccgcaaacgtcagggctctgtg

SEQ ID NO: 7685 - DNA, 25 bp, Homo sapiens
ggtcaaacaggcttccctaagaacg

SEQ ID NO: 7686 - DNA, 25 bp, Homo sapiens
gatcccctgggctggagttcaaggt

SEQ ID NO: 7687 - DNA, 25 bp, Homo sapiens
ggagctcctgtatctgccgtgtacc

SEQ ID NO: 7688 - DNA, 25 bp, Homo sapiens
ctcggtggcttgaaggacatagtca

SEQ ID NO: 7689 - DNA, 25 bp, Homo sapiens
tctgtcagaacccaggagctgtgtg

SEQ ID NO: 7690 - DNA, 25 bp, Homo sapiens
atcatttcttgtgaggggcctggcc

SEQ ID NO: 7691 - DNA, 25 bp, Homo sapiens
tcatcaccaaaattagcacactagc

SEQ ID NO: 7692 - DNA, 25 bp, Homo sapiens
gcccaatgataaataagacagttta

SEQ ID NO: 7693 - DNA, 25 bp, Homo sapiens
gcagtttcaggtctttaaatatttc

SEQ ID NO: 7694 - DNA, 25 bp, Homo sapiens
tttcatattgaaaagaatatcagca

SEQ ID NO: 7695 - DNA, 25 bp, Homo sapiens
aaaaaaaatagcctggaaaaataac

SEQ ID NO: 7696 - DNA, 25 bp, Homo sapiens
cctggagaatatcttctggaatttt

SEQ ID NO: 7697 - DNA, 25 bp, Homo sapiens
tggttagcgtgaacatcaatatgtc

SEQ ID NO: 7698 - DNA, 25 bp, Homo sapiens
ccattccaggtgcagaacttctttc

SEQ ID NO: 7699 - DNA, 25 bp, Homo sapiens
ccaggccctgtttataggctgctta

SEQ ID NO: 7700 - DNA, 25 bp, Homo sapiens
acgtgcagctgaatccctttgttgc

SEQ ID NO: 7701 - DNA, 25 bp, Homo sapiens
tctcacttcagtttcaggggcaata

SEQ ID NO: 7702 - DNA, 25 bp, Homo sapiens
gagccttgggtactggaccttccta

SEQ ID NO: 7703 - DNA, 25 bp, Homo sapiens
ctttgggcagaagctaccgaaaata

SEQ ID NO: 7704 - DNA, 25 bp, Homo sapiens
ggcaaggctctttggagaatttatc

SEQ ID NO: 7705 - DNA, 25 bp, Homo sapiens
ccatagttccggttcttcctagaaa

SEQ ID NO: 7706 - DNA, 25 bp, Homo sapiens
aaattataccaaaaatctaagctca

SEQ ID NO: 7707 - DNA, 25 bp, Homo sapiens
aatagaaaaaaagagattccatttt

SEQ ID NO: 7708 - DNA, 25 bp, Homo sapiens
tactactggtaacctgcaggcagca

SEQ ID NO: 7709 - DNA, 25 bp, Homo sapiens
gcctaaacctgaatgagagaaaacc

SEQ ID NO: 7710 - DNA, 25 bp, Homo sapiens
gttgctcagctctaggaatctaata

SEQ ID NO: 7711 - DNA, 25 bp, Homo sapiens
gcaccgtctgcaggatcttttaata

SEQ ID NO: 7712 - DNA, 25 bp, Homo sapiens
tctcaggtctgatgcccacacaagg

SEQ ID NO: 7713 - DNA, 25 bp, Homo sapiens
ctcagcttctggcttccctgggaaa

SEQ ID NO: 7714 - DNA, 25 bp, Homo sapiens
gggaatctcactgtcctagagtctc

SEQ ID NO: 7715 - DNA, 25 bp, Homo sapiens
accaccagcgtgcacagagttaatg

SEQ ID NO: 7716 - DNA, 25 bp, Homo sapiens
ccagctggctccttctggaagtttc

SEQ ID NO: 7717 - DNA, 25 bp, Homo sapiens
ccgctcattttccagccatttagga

SEQ ID NO: 7718 - DNA, 25 bp, Homo sapiens
aaaatggcctacctagtctggatga

SEQ ID NO: 7719 - DNA, 25 bp, Homo sapiens
ttcccagggtgaagagaataactcc

SEQ ID NO: 7720 - DNA, 25 bp, Homo sapiens
ctcccgctcttttttgtgacaggtg

SEQ ID NO: 7721 - DNA, 25 bp, Homo sapiens
tgtcaagattaatgctaaagttatt

SEQ ID NO: 7722 - DNA, 25 bp, Homo sapiens
cataaattactttaaaaatagtacc

SEQ ID NO: 7723 - DNA, 25 bp, Homo sapiens
ggcagagctctcagtcattggtcta

SEQ ID NO: 7724 - DNA, 25 bp, Homo sapiens
gccaggaggctcgagaaaagatttc

SEQ ID NO: 7725 - DNA, 25 bp, Homo sapiens
cagccttgatttttggggagccacc

SEQ ID NO: 7726 - DNA, 25 bp, Homo sapiens
aacaggtggctttctgctggaaata

SEQ ID NO: 7727 - DNA, 25 bp, Homo sapiens
aattccgggtccagtcaggttcttc

SEQ ID NO: 7728 - DNA, 25 bp, Homo sapiens
cctgcaggaattctggcctattttg

SEQ ID NO: 7729 - DNA, 25 bp, Homo sapiens
tacaacttatggcaacattaatgga

SEQ ID NO: 7730 - DNA, 25 bp, Homo sapiens
gattggcaggttttaactggacgtt

SEQ ID NO: 7731 - DNA, 25 bp, Homo sapiens
tcaggcttcagcaggatcagtatca

SEQ ID NO: 7732 - DNA, 25 bp, Homo sapiens
gtggtcacattattgctcttgccta

SEQ ID NO: 7733 - DNA, 25 bp, Homo sapiens
gtgtggtcagtccaggcaatgcttc

SEQ ID NO: 7734 - DNA, 25 bp, Homo sapiens
actcaagggctctgggacacttctc

SEQ ID NO: 7735 - DNA, 25 bp, Homo sapiens
gccagtgctgggtggtatacttcaa

SEQ ID NO: 7736 - DNA, 25 bp, Homo sapiens
tacccttggctgtttttcacacttc

SEQ ID NO: 7737 - DNA, 25 bp, Homo sapiens
ggcgggtgggggggcatgtactcca

SEQ ID NO: 7738 - DNA, 25 bp, Homo sapiens
aactctcatggtcctctgccaggca

SEQ ID NO: 7739 - DNA, 25 bp, Homo sapiens
gtggaggcaactaaactaaccttgg

SEQ ID NO: 7740 - DNA, 25 bp, Homo sapiens
tcctgctggggacactttatacctg

SEQ ID NO: 7741 - DNA, 25 bp, Homo sapiens
cccgcaggctgactttgttcaggta

SEQ ID NO: 7742 - DNA, 25 bp, Homo sapiens
cccgcgcctgctatgaaagtaaagg

SEQ ID NO: 7743 - DNA, 25 bp, Homo sapiens
tttccgggccctaaaagagacaatg

SEQ ID NO: 7744 - DNA, 25 bp, Homo sapiens
cctcctctaggagaagggaccaagc

SEQ ID NO: 7745 - DNA, 25 bp, Homo sapiens
gtccggcaaacctaggatctttttc

SEQ ID NO: 7746 - DNA, 25 bp, Homo sapiens
cccaggtcacttctcttcttagatg

SEQ ID NO: 7747 - DNA, 25 bp, Homo sapiens
agcctctgcttaccttggctgccga

SEQ ID NO: 7748 - DNA, 25 bp, Homo sapiens
gtaaccgccgtagtccgggtactgc

SEQ ID NO: 7749 - DNA, 25 bp, Homo sapiens
cggcggccttccgtgattaacgagt

SEQ ID NO: 7750 - DNA, 25 bp, Homo sapiens
gagaacgtttctgaccaacctggta

SEQ ID NO: 7751 - DNA, 25 bp, Homo sapiens
gaatttctgctaatgcttacctagg

SEQ ID NO: 7752 - DNA, 25 bp, Homo sapiens
acagcgctgccagattcgggaatga

SEQ ID NO: 7753 - DNA, 25 bp, Homo sapiens
ccacccttcgtgtttgtaaggaaga

SEQ ID NO: 7754 - DNA, 25 bp, Homo sapiens
ctgcacccaaggtcaaaggtaggtc

SEQ ID NO: 7755 - DNA, 25 bp, Homo sapiens
ttagggttcccacgacaagtcttcc

SEQ ID NO: 7756 - DNA, 25 bp, Homo sapiens
ctctctgttttccatgcctctttta

SEQ ID NO: 7757 - DNA, 25 bp, Homo sapiens
tggctatgtgataagctgctctctg

SEQ ID NO: 7758 - DNA, 25 bp, Homo sapiens
agcgtcctggcatatacaacccttg

SEQ ID NO: 7759 - DNA, 25 bp, Homo sapiens
tgcagtgggtcatgaattcgacttt

SEQ ID NO: 7760 - DNA, 25 bp, Homo sapiens
atggattgagaaaaatttagagtga

SEQ ID NO: 7761 - DNA, 25 bp, Homo sapiens
actcctcatgatatggggacattga

SEQ ID NO: 7762 - DNA, 25 bp, Homo sapiens
aaaaaataaattacaccacgaagat

SEQ ID NO: 7763 - DNA, 25 bp, Homo sapiens
ggtgggtcctccacaaatatattta

SEQ ID NO: 7764 - DNA, 25 bp, Homo sapiens
gtgactgtgctatagaaagaatgtg

SEQ ID NO: 7765 - DNA, 25 bp, Homo sapiens
gccgccagatgaaagatgcttaatg

SEQ ID NO: 7766 - DNA, 25 bp, Homo sapiens
gggccatgactccacaaaagctctg

SEQ ID NO: 7767 - DNA, 25 bp, Homo sapiens
tgcaagggccactttgagaatttta

SEQ ID NO: 7768 - DNA, 25 bp, Homo sapiens
tgctgtatttctgcagtccaagata

SEQ ID NO: 7769 - DNA, 25 bp, Homo sapiens
tccttagagcaaagacaggtgcttt

SEQ ID NO: 7770 - DNA, 25 bp, Homo sapiens
cctggccatatcctctctgaagatg

SEQ ID NO: 7771 - DNA, 25 bp, Homo sapiens
agggcatgttcctactctgctgtta

SEQ ID NO: 7772 - DNA, 25 bp, Homo sapiens
gcgtgtccaagaagaaccatttatc

SEQ ID NO: 7773 - DNA, 25 bp, Homo sapiens
tgggttaccacctagagcttctctg

SEQ ID NO: 7774 - DNA, 25 bp, Homo sapiens
tggccctgaaggcagaattgacttt

SEQ ID NO: 7775 - DNA, 25 bp, Homo sapiens
atggtcctgcggtcttaactgtaga

SEQ ID NO: 7776 - DNA, 25 bp, Homo sapiens
agcatcgttgatggttaatccctta

SEQ ID NO: 7777 - DNA, 25 bp, Homo sapiens
ctcagcctggtggtcaaagtcattc

SEQ ID NO: 7778 - DNA, 25 bp, Homo sapiens
aaatgggttcctctgccacatgggc

SEQ ID NO: 7779 - DNA, 25 bp, Homo sapiens
agctctcttgtgtattggtagtgac

SEQ ID NO: 7780 - DNA, 25 bp, Homo sapiens
cccgacagggagacttttaaacata

SEQ ID NO: 7781 - DNA, 25 bp, Homo sapiens
catttttggttagtgagatcagccc

SEQ ID NO: 7782 - DNA, 25 bp, Homo sapiens
tcctcccattgcttggaagtcttcc

SEQ ID NO: 7783 - DNA, 25 bp, Homo sapiens
tgcgtgcttcttccctaggacccta

SEQ ID NO: 7784 - DNA, 25 bp, Homo sapiens
tggactgtccaagccaggagaaata

SEQ ID NO: 7785 - DNA, 25 bp, Homo sapiens
tgggctgctgcctaagttcatatca

SEQ ID NO: 7786 - DNA, 25 bp, Homo sapiens
tgggagccctgtgaaattttttatt

SEQ ID NO: 7787 - DNA, 25 bp, Homo sapiens
tatgtcttttgtgttttcatctgta

SEQ ID NO: 7788 - DNA, 25 bp, Homo sapiens
taaaaggttttgcatgtgctgtccc

SEQ ID NO: 7789 - DNA, 25 bp, Homo sapiens
cccaggtgaggcaaacatatcagtc

SEQ ID NO: 7790 - DNA, 25 bp, Homo sapiens
cagaacgttgtgcttaggacttttc

SEQ ID NO: 7791 - DNA, 25 bp, Homo sapiens
agaacatttcagtggcctttggata

SEQ ID NO: 7792 - DNA, 25 bp, Homo sapiens
taacaaaggcctgctccaaaggagg

SEQ ID NO: 7793 - DNA, 25 bp, Homo sapiens
ctctctctgggctagcacaatctga

SEQ ID NO: 7794 - DNA, 25 bp, Homo sapiens
cttggccgggaagtgtatatttctt

SEQ ID NO: 7795 - DNA, 25 bp, Homo sapiens
actagagacgtagaatctatgcata

SEQ ID NO: 7796 - DNA, 25 bp, Homo sapiens
tttgataaaaagacctgtcaccctt

SEQ ID NO: 7797 - DNA, 25 bp, Homo sapiens
cacagcagcgttttttccagtacca

SEQ ID NO: 7798 - DNA, 25 bp, Homo sapiens
cccgtgggcgggatttaaaacaaaa

SEQ ID NO: 7799 - DNA, 25 bp, Homo sapiens
ctgctgtgtatgttaggaacccatc

SEQ ID NO: 7800 - DNA, 25 bp, Homo sapiens
gactgtgccactgcctttattgaca

SEQ ID NO: 7801 - DNA, 25 bp, Homo sapiens
tacctgctgtattttgggagcatta

SEQ ID NO: 7802 - DNA, 25 bp, Homo sapiens
actgccctatttttggtttgccaca

SEQ ID NO: 7803 - DNA, 25 bp, Homo sapiens
tcagccttgatggtttggttacaca

SEQ ID NO: 7804 - DNA, 25 bp, Homo sapiens
caagggccatcagttcttaaaagtg

SEQ ID NO: 7805 - DNA, 25 bp, Homo sapiens
ttcatacagttcagcaaaggacatc

SEQ ID NO: 7806 - DNA, 25 bp, Homo sapiens
agaaatgaatgaaaggagaagcaca

SEQ ID NO: 7807 - DNA, 25 bp, Homo sapiens
tcaccattgggtatctggcctaatc

SEQ ID NO: 7808 - DNA, 25 bp, Homo sapiens
ccgcactaggtcatgttctgagata

SEQ ID NO: 7809 - DNA, 25 bp, Homo sapiens
cagagccatggctgtggagctttca

SEQ ID NO: 7810 - DNA, 25 bp, Homo sapiens
ttcacccgggcgatgtaatgacttg

SEQ ID NO: 7811 - DNA, 25 bp, Homo sapiens
aggtgtttttcccagcttgctttga

SEQ ID NO: 7812 - DNA, 25 bp, Homo sapiens
cggtttcttcctttgccctgtctca

SEQ ID NO: 7813 - DNA, 25 bp, Homo sapiens
cccgtgggtcacaataaaggagctg

SEQ ID NO: 7814 - DNA, 25 bp, Homo sapiens
tgcctctgccagtgtatcaagttta

SEQ ID NO: 7815 - DNA, 25 bp, Homo sapiens
gcataagctgttggaggatctaaga

SEQ ID NO: 7816 - DNA, 25 bp, Homo sapiens
tgtattttgataaaatgtgtaatat

SEQ ID NO: 7817 - DNA, 25 bp, Homo sapiens
agccagcttcccatgcctcttgaaa

SEQ ID NO: 7818 - DNA, 25 bp, Homo sapiens
gtggcccagggaaaatcagatctta

SEQ ID NO: 7819 - DNA, 25 bp, Homo sapiens
tgctcacgatgcttgggtaccctga

SEQ ID NO: 7820 - DNA, 25 bp, Homo sapiens
ccttgcctgggctaaatgctctatt

SEQ ID NO: 7821 - DNA, 25 bp, Homo sapiens
ctgggcttccatgtgccactgtgta

SEQ ID NO: 7822 - DNA, 25 bp, Homo sapiens
cagctcctcctgtgcacgttttgaa

SEQ ID NO: 7823 - DNA, 25 bp, Homo sapiens
ccagggaatttgctaggccaatgtc

SEQ ID NO: 7824 - DNA, 25 bp, Homo sapiens
ggtggcctctgatctctttcacaag

SEQ ID NO: 7825 - DNA, 25 bp, Homo sapiens
cgtctcgctgggtgttacctttatc

SEQ ID NO: 7826 - DNA, 25 bp, Homo sapiens
cttactagggatgcagacttaaata

SEQ ID NO: 7827 - DNA, 25 bp, Homo sapiens
tatgccagacacttgcctaataatg

SEQ ID NO: 7828 - DNA, 25 bp, Homo sapiens
ccggtttaaagccaccagctgtcta

SEQ ID NO: 7829 - DNA, 25 bp, Homo sapiens
taatgctatgaggtaaaagctactc

SEQ ID NO: 7830 - DNA, 25 bp, Homo sapiens
caaaaatctacatgattcaaggcca

SEQ ID NO: 7831 - DNA, 25 bp, Homo sapiens
cagtgggcccaagatcaactctata

SEQ ID NO: 7832 - DNA, 25 bp, Homo sapiens
acctttgccttggagtactttgaca

SEQ ID NO: 7833 - DNA, 25 bp, Homo sapiens
agctgctggcagtcttaagttatta

SEQ ID NO: 7834 - DNA, 25 bp, Homo sapiens
atgggcaccgttcacaagtacctta

SEQ ID NO: 7835 - DNA, 25 bp, Homo sapiens
gggttatcgccctttcctgctaagt

SEQ ID NO: 7836 - DNA, 25 bp, Homo sapiens
ggcccatcagtagtggaattatgta

SEQ ID NO: 7837 - DNA, 25 bp, Homo sapiens
gggtcagttccagccaacttcagtg

SEQ ID NO: 7838 - DNA, 25 bp, Homo sapiens
gggagttttcagaccatcctctttg

SEQ ID NO: 7839 - DNA, 25 bp, Homo sapiens
atttaagttttttttaacatatcta

SEQ ID NO: 7840 - DNA, 25 bp, Homo sapiens
agaggcttgtatgcccgcagcacta

SEQ ID NO: 7841 - DNA, 25 bp, Homo sapiens
gctccatgggtgcactaggtcaata

SEQ ID NO: 7842 - DNA, 25 bp, Homo sapiens
ggcagttgcctaagctcttccaata

SEQ ID NO: 7843 - DNA, 25 bp, Homo sapiens
ggactaccttttagacctgacattg

SEQ ID NO: 7844 - DNA, 25 bp, Homo sapiens
agctggtggctattgtcattaagga

SEQ ID NO: 7845 - DNA, 25 bp, Homo sapiens
ggttaacagaattatccagactttt

SEQ ID NO: 7846 - DNA, 25 bp, Homo sapiens
ctcatggttgtgctcttaggctgta

SEQ ID NO: 7847 - DNA, 25 bp, Homo sapiens
gcctaaattaccgtgcctgccaaca

SEQ ID NO: 7848 - DNA, 25 bp, Homo sapiens
gggatgtacactttttaccagaaac

SEQ ID NO: 7849 - DNA, 25 bp, Homo sapiens
tttcaccatgttccggagatccctg

SEQ ID NO: 7850 - DNA, 25 bp, Homo sapiens
gggcagtttattaacccaattcagg

SEQ ID NO: 7851 - DNA, 25 bp, Homo sapiens
aaggctggaactgaacaagctccta

SEQ ID NO: 7852 - DNA, 25 bp, Homo sapiens
tgttttattttttatctagtatttc

SEQ ID NO: 7853 - DNA, 25 bp, Homo sapiens
tttttttttttgcctaccgcaactg

SEQ ID NO: 7854 - DNA, 25 bp, Homo sapiens
ttttctgatggtgcaaattggaggc

SEQ ID NO: 7855 - DNA, 25 bp, Homo sapiens
tgtgtagaaaccacatataaattgc

SEQ ID NO: 7856 - DNA, 25 bp, Homo sapiens
accgcaggtggctttgccagttctc

SEQ ID NO: 7857 - DNA, 25 bp, Homo sapiens
gtccatattgtgcaaggcggccatg

SEQ ID NO: 7858 - DNA, 25 bp, Homo sapiens
cctggccatcagacagccctgtata

SEQ ID NO: 7859 - DNA, 25 bp, Homo sapiens
ggcttgcaggctgtcaaactcttga

SEQ ID NO: 7860 - DNA, 25 bp, Homo sapiens
ttgagaccaatgttgaccctacttg

SEQ ID NO: 7861 - DNA, 25 bp, Homo sapiens
gtgcttggcaccactgatttacata

SEQ ID NO: 7862 - DNA, 25 bp, Homo sapiens
gccatccatggcaaacactgtctta

SEQ ID NO: 7863 - DNA, 25 bp, Homo sapiens
agaggcatttgacttagcccttata

SEQ ID NO: 7864 - DNA, 25 bp, Homo sapiens
cccttcagtaatccaaatgtgcata

SEQ ID NO: 7865 - DNA, 25 bp, Homo sapiens
cccatgtttgtcctagcttcttaag

SEQ ID NO: 7866 - DNA, 25 bp, Homo sapiens
tgggtggaatattcttcatcaaatc

SEQ ID NO: 7867 - DNA, 25 bp, Homo sapiens
ataaattgaccaaatggattttatc

SEQ ID NO: 7868 - DNA, 25 bp, Homo sapiens
ggcaatggtcttcctcacatcttta

SEQ ID NO: 7869 - DNA, 25 bp, Homo sapiens
caaaacctgggtgtctggccttcca

SEQ ID NO: 7870 - DNA, 25 bp, Homo sapiens
gccagcaggctgagcattgtcatta

SEQ ID NO: 7871 - DNA, 25 bp, Homo sapiens
gggctcctgccttttctgacgtaca

SEQ ID NO: 7872 - DNA, 25 bp, Homo sapiens
agggtcgccagcagcttcttagcta

SEQ ID NO: 7873 - DNA, 25 bp, Homo sapiens
tgagaccctcttttggccagctttc

SEQ ID NO: 7874 - DNA, 25 bp, Homo sapiens
ctttgggctcaacagtgcgaaacta

SEQ ID NO: 7875 - DNA, 25 bp, Homo sapiens
gccttctgatttgtgggttttactc

SEQ ID NO: 7876 - DNA, 25 bp, Homo sapiens
tgcccagggcggtgttattaaatga

SEQ ID NO: 7877 - DNA, 25 bp, Homo sapiens
aaaggctctggctctgtcatttccc

SEQ ID NO: 7878 - DNA, 25 bp, Homo sapiens
ggctcagcagcttttctcgccatga

SEQ ID NO: 7879 - DNA, 25 bp, Homo sapiens
ttgcatggcccataccctcaaagtg

SEQ ID NO: 7880 - DNA, 25 bp, Homo sapiens
gaggctcagcagcttctctccatga

SEQ ID NO: 7881 - DNA, 25 bp, Homo sapiens
cctgcctccaaggaagtcctgattg

SEQ ID NO: 7882 - DNA, 25 bp, Homo sapiens
tgcccgtatctgcaagctgcccata

SEQ ID NO: 7883 - DNA, 25 bp, Homo sapiens
agaatctcctggttgggactgatcc

SEQ ID NO: 7884 - DNA, 25 bp, Homo sapiens
gagcagctggatcgtgtaacttttg

SEQ ID NO: 7885 - DNA, 25 bp, Homo sapiens
ttccaaacattccaaggggtgactc

SEQ ID NO: 7886 - DNA, 25 bp, Homo sapiens
cgcacacccggttcagtttggtttt

SEQ ID NO: 7887 - DNA, 25 bp, Homo sapiens
ccctgggagtttctctggacagatc

SEQ ID NO: 7888 - DNA, 25 bp, Homo sapiens
ggggtcaacttctccttaagccagg

SEQ ID NO: 7889 - DNA, 25 bp, Homo sapiens
ggccctgcctgtagctgtcttagaa

SEQ ID NO: 7890 - DNA, 25 bp, Homo sapiens
aaggtctgtttctatgtgctgtgca

SEQ ID NO: 7891 - DNA, 25 bp, Homo sapiens
gcccaggttagctaacacacgttta

SEQ ID NO: 7892 - DNA, 25 bp, Homo sapiens
ggagcctatttggtcccacacctga

SEQ ID NO: 7893 - DNA, 25 bp, Homo sapiens
tcccacaggtatctcacagttattg

SEQ ID NO: 7894 - DNA, 25 bp, Homo sapiens
cccagcatttgggaatttttggtta

SEQ ID NO: 7895 - DNA, 25 bp, Homo sapiens
tctagtaggtagtgatatctgtttc

SEQ ID NO: 7896 - DNA, 25 bp, Homo sapiens
aactcaaatagagtaagataaaaag

SEQ ID NO: 7897 - DNA, 25 bp, Homo sapiens
tctctccaggtatgagtgatcactc

SEQ ID NO: 7898 - DNA, 25 bp, Homo sapiens
catgggccagagtcacctaatttgc

SEQ ID NO: 7899 - DNA, 25 bp, Homo sapiens
ggcagtcttgcctcctctctttgta

SEQ ID NO: 7900 - DNA, 25 bp, Homo sapiens
tagggacagtttctgactcttagtc

SEQ ID NO: 7901 - DNA, 25 bp, Homo sapiens
aggcatcagttgcagctgttttttc

SEQ ID NO: 7902 - DNA, 25 bp, Homo sapiens
ggccttcccttgctggtactgatca

SEQ ID NO: 7903 - DNA, 25 bp, Homo sapiens
gaggacttgcctttcactgcggttc

SEQ ID NO: 7904 - DNA, 25 bp, Homo sapiens
gggtttcccaatcagtttagagtta

SEQ ID NO: 7905 - DNA, 25 bp, Homo sapiens
tctcagatcgggttaggacactctc

SEQ ID NO: 7906 - DNA, 25 bp, Homo sapiens
accctgttactgtggcgagcatttc

SEQ ID NO: 7907 - DNA, 25 bp, Homo sapiens
cactgggaagtctttgccttgcctc

SEQ ID NO: 7908 - DNA, 25 bp, Homo sapiens
ttgtaggacctcacagccatgctga

SEQ ID NO: 7909 - DNA, 25 bp, Homo sapiens
ttgctcctgcgtacaaatttgatcc

SEQ ID NO: 7910 - DNA, 25 bp, Homo sapiens
ccatcaagccttgggacaacatgtc

SEQ ID NO: 7911 - DNA, 25 bp, Homo sapiens
ttcctccatggggatcatgctacta

SEQ ID NO: 7912 - DNA, 25 bp, Homo sapiens
gcctctatcgccaaaactctgttta

SEQ ID NO: 7913 - DNA, 25 bp, Homo sapiens
agtgcatttgctaacgtctttttaa

SEQ ID NO: 7914 - DNA, 25 bp, Homo sapiens
ggtatctatctttccattcttttat

SEQ ID NO: 7915 - DNA, 25 bp, Homo sapiens
ccttagagtatgtgcaggcaacttg

SEQ ID NO: 7916 - DNA, 25 bp, Homo sapiens
aggggaggggacatatttcttaaca

SEQ ID NO: 7917 - DNA, 25 bp, Homo sapiens
tggagtcagccattgccatgatttg

SEQ ID NO: 7918 - DNA, 25 bp, Homo sapiens
tccagaccctcggagaagcaagtgc

SEQ ID NO: 7919 - DNA, 25 bp, Homo sapiens
tctggtgagatgaccctgaatggtc

SEQ ID NO: 7920 - DNA, 25 bp, Homo sapiens
ggagactctgtgactgactgactga

SEQ ID NO: 7921 - DNA, 25 bp, Homo sapiens
ttctgctagaacctggagatttttc

SEQ ID NO: 7922 - DNA, 25 bp, Homo sapiens
cagcagctgtgcttgctaagataca

SEQ ID NO: 7923 - DNA, 25 bp, Homo sapiens
tgggacccttctcagtactaacttt

SEQ ID NO: 7924 - DNA, 25 bp, Homo sapiens
ggagcattgcccttttatgtcatgg

SEQ ID NO: 7925 - DNA, 25 bp, Homo sapiens
acaaagtgaaaatgagagttacttc

SEQ ID NO: 7926 - DNA, 25 bp, Homo sapiens
gcctgaatctgtagcctgtccctga

SEQ ID NO: 7927 - DNA, 25 bp, Homo sapiens
aggaggtctgcttttcacttgctca

SEQ ID NO: 7928 - DNA, 25 bp, Homo sapiens
accctggggccatgtttctaagaca

SEQ ID NO: 7929 - DNA, 25 bp, Homo sapiens
gctctgcctgggatacctttctttg

SEQ ID NO: 7930 - DNA, 25 bp, Homo sapiens
cctgcagtgttccttcctgagtcaa

SEQ ID NO: 7931 - DNA, 25 bp, Homo sapiens
ccagaggtgtgtcaatgccattcca

SEQ ID NO: 7932 - DNA, 25 bp, Homo sapiens
tgatgccaatcccagtttaagagta

SEQ ID NO: 7933 - DNA, 25 bp, Homo sapiens
taaaaccaaataagcttcaattgaa

SEQ ID NO: 7934 - DNA, 25 bp, Homo sapiens
ttgggtcttctccagcaaaggttta

SEQ ID NO: 7935 - DNA, 25 bp, Homo sapiens
agggagcgaccttttcatggccata

SEQ ID NO: 7936 - DNA, 25 bp, Homo sapiens
cggccgtcttctatctgtttggtca

SEQ ID NO: 7937 - DNA, 25 bp, Homo sapiens
gaaccttactgagggcagcttgata

SEQ ID NO: 7938 - DNA, 25 bp, Homo sapiens
gtgtgcctttgcatgtacctttcca

SEQ ID NO: 7939 - DNA, 25 bp, Homo sapiens
gcaggcctagtctgtttttaacata

SEQ ID NO: 7940 - DNA, 25 bp, Homo sapiens
tggcctaaccttgaccctatgcttc

SEQ ID NO: 7941 - DNA, 25 bp, Homo sapiens
tgccacataaggtagggaccagctg

SEQ ID NO: 7942 - DNA, 25 bp, Homo sapiens
tcctaacatgtttggcctctgattt

SEQ ID NO: 7943 - DNA, 25 bp, Homo sapiens
acctggtccagggtattttgaagca

SEQ ID NO: 7944 - DNA, 25 bp, Homo sapiens
atgggaaatagccttcaagtgcctg

SEQ ID NO: 7945 - DNA, 25 bp, Homo sapiens
ccaacatggaatgtctgtgacgttc

SEQ ID NO: 7946 - DNA, 25 bp, Homo sapiens
ccatggtgaccatgacagattatta

SEQ ID NO: 7947 - DNA, 25 bp, Homo sapiens
caggagttctgtgttgagttactta

SEQ ID NO: 7948 - DNA, 25 bp, Homo sapiens
gtttactgtcaattgttcatgctca

SEQ ID NO: 7949 - DNA, 25 bp, Homo sapiens
ttttgttgtttttaaaggttacaag

SEQ ID NO: 7950 - DNA, 25 bp, Homo sapiens
aggataaaaagcaagatctttagga

SEQ ID NO: 7951 - DNA, 25 bp, Homo sapiens
ttggaggcaactatttcatcttttg

SEQ ID NO: 7952 - DNA, 25 bp, Homo sapiens
tcgctcctctgccagggaatgaatc

SEQ ID NO: 7953 - DNA, 25 bp, Homo sapiens
tgacattctgaattttggaccctta

SEQ ID NO: 7954 - DNA, 25 bp, Homo sapiens
agctgtcagttctttctcatgagca

SEQ ID NO: 7955 - DNA, 25 bp, Homo sapiens
aggcagagctgcattccattttggc

SEQ ID NO: 7956 - DNA, 25 bp, Homo sapiens
tggcatcctgtctttcactgtaaca

SEQ ID NO: 7957 - DNA, 25 bp, Homo sapiens
tttaggtcgctacgcatttcggatc

SEQ ID NO: 7958 - DNA, 25 bp, Homo sapiens
tgaggccctgcagcgtaaacattgg

SEQ ID NO: 7959 - DNA, 25 bp, Homo sapiens
cagcaagtgattttacagtcctata

SEQ ID NO: 7960 - DNA, 25 bp, Homo sapiens
gagcctggtacctgcgtttcttaaa

SEQ ID NO: 7961 - DNA, 25 bp, Homo sapiens
gccttagtgcctgaactcccgcatt

SEQ ID NO: 7962 - DNA, 25 bp, Homo sapiens
acctccctaggcttctgggttctga

SEQ ID NO: 7963 - DNA, 25 bp, Homo sapiens
ctgcagtggcttatacctgtaagtc

SEQ ID NO: 7964 - DNA, 25 bp, Homo sapiens
gtctacctgggcaaaactgaaagtg

SEQ ID NO: 7965 - DNA, 25 bp, Homo sapiens
ggacagtccttgatctctcatttga

SEQ ID NO: 7966 - DNA, 25 bp, Homo sapiens
aaaccttttaatccagcttcccagc

SEQ ID NO: 7967 - DNA, 25 bp, Homo sapiens
tctgcttctgcagtgtgacatcaag

SEQ ID NO: 7968 - DNA, 25 bp, Homo sapiens
gcagggcacttacgttgttaggaca

SEQ ID NO: 7969 - DNA, 25 bp, Homo sapiens
gcgctgccctgtatgatcttggtca

SEQ ID NO: 7970 - DNA, 25 bp, Homo sapiens
aagctgcccaggaaaattgttttta

SEQ ID NO: 7971 - DNA, 25 bp, Homo sapiens
gctccatttgccagaaggtccaaga

SEQ ID NO: 7972 - DNA, 25 bp, Homo sapiens
gagggccacatggtgatgaaattta

SEQ ID NO: 7973 - DNA, 25 bp, Homo sapiens
gctgtgagccatccaagaaatgtta

SEQ ID NO: 7974 - DNA, 25 bp, Homo sapiens
cagcagtatgcctctggaatccaaa

SEQ ID NO: 7975 - DNA, 25 bp, Homo sapiens
cttgagagggaaagcccatatgttc

SEQ ID NO: 7976 - DNA, 25 bp, Homo sapiens
tgcctcattgcctttggtaagcgaa

SEQ ID NO: 7977 - DNA, 25 bp, Homo sapiens
cgccacgatacccaaatgtgtgata

SEQ ID NO: 7978 - DNA, 25 bp, Homo sapiens
ggcaaacacttggtaggtaaaacag

SEQ ID NO: 7979 - DNA, 25 bp, Homo sapiens
ctttcatcgtcaatctctatttttg

SEQ ID NO: 7980 - DNA, 25 bp, Homo sapiens
tatacacacacacatgtgtgtgtgt

SEQ ID NO: 7981 - DNA, 25 bp, Homo sapiens
acagaaagttacttttgagacagta

SEQ ID NO: 7982 - DNA, 25 bp, Homo sapiens
tagcaggtttgtttgtcagtggaaa

SEQ ID NO: 7983 - DNA, 25 bp, Homo sapiens
gtgatgtgcagatagaggcagcaaa

SEQ ID NO: 7984 - DNA, 25 bp, Homo sapiens
attagttttttagagaactaatctt

SEQ ID NO: 7985 - DNA, 25 bp, Homo sapiens
ctggccatatttagtggtagaagta

SEQ ID NO: 7986 - DNA, 25 bp, Homo sapiens
agactctctatcatctgtgcctttg

SEQ ID NO: 7987 - DNA, 25 bp, Homo sapiens
cactgggtagtatatagttgccttt

SEQ ID NO: 7988 - DNA, 25 bp, Homo sapiens
cactggctgatacctcttggagata

SEQ ID NO: 7989 - DNA, 25 bp, Homo sapiens
gtgccagcattgtttcccagtattc

SEQ ID NO: 7990 - DNA, 25 bp, Homo sapiens
ggggcaccctcagatgcacctttta

SEQ ID NO: 7991 - DNA, 25 bp, Homo sapiens
cttgagtctgtgaaggcattactta

SEQ ID NO: 7992 - DNA, 25 bp, Homo sapiens
gttgtcctggggaaccttgaacaca

SEQ ID NO: 7993 - DNA, 25 bp, Homo sapiens
tcacacgggtggaatatgatcactc

SEQ ID NO: 7994 - DNA, 25 bp, Homo sapiens
aacagggttatttgtccatgccata

SEQ ID NO: 7995 - DNA, 25 bp, Homo sapiens
gtccctcaggacacagtatcgattg

SEQ ID NO: 7996 - DNA, 25 bp, Homo sapiens
cccacagcgagcgtgttctatttga

SEQ ID NO: 7997 - DNA, 25 bp, Homo sapiens
cgtttcttgttcttgaggctgctta

SEQ ID NO: 7998 - DNA, 25 bp, Homo sapiens
acctacgtgtgtggccaatttgatc

SEQ ID NO: 7999 - DNA, 25 bp, Homo sapiens
ctggggtctcttctagtacatattc

SEQ ID NO: 8000 - DNA, 25 bp, Homo sapiens
aggtgcagcctgatggatttccaga

SEQ ID NO: 8001 - DNA, 25 bp, Homo sapiens
acatctgactgtgaaggctctctga

SEQ ID NO: 8002 - DNA, 25 bp, Homo sapiens
gccctccctgcctggaaagttgttg

SEQ ID NO: 8003 - DNA, 25 bp, Homo sapiens
acacagttcctgtcctggggttctg

SEQ ID NO: 8004 - DNA, 25 bp, Homo sapiens
cctaagtgagtgaacaggccttttc

SEQ ID NO: 8005 - DNA, 25 bp, Homo sapiens
ctcgcttgcctcagtggagacttga

SEQ ID NO: 8006 - DNA, 25 bp, Homo sapiens
gtctgctcgcagagttcctgtgata

SEQ ID NO: 8007 - DNA, 25 bp, Homo sapiens
gaaccttgacattccaggctgagtg

SEQ ID NO: 8008 - DNA, 25 bp, Homo sapiens
gactcttggcgtccctgtcattttg

SEQ ID NO: 8009 - DNA, 25 bp, Homo sapiens
aaaatactgttcatggggtcctgcc

SEQ ID NO: 8010 - DNA, 25 bp, Homo sapiens
ttgcagctgcccgttttatctcttg

SEQ ID NO: 8011 - DNA, 25 bp, Homo sapiens
gcctctgaaatagcctcctgcattg

SEQ ID NO: 8012 - DNA, 25 bp, Homo sapiens
caccatggcttattaggaggtcacc

SEQ ID NO: 8013 - DNA, 25 bp, Homo sapiens
ttaaaattgaaaaattagggggtta

SEQ ID NO: 8014 - DNA, 25 bp, Homo sapiens
aactttgaaattttcatagcaaaat

SEQ ID NO: 8015 - DNA, 25 bp, Homo sapiens
aaaaatgactagtcaatgtcagaat

SEQ ID NO: 8016 - DNA, 25 bp, Homo sapiens
ctatgctatcacgtgctgtggactg

SEQ ID NO: 8017 - DNA, 25 bp, Homo sapiens
ccattaagaaggttatttgcagggt

SEQ ID NO: 8018 - DNA, 25 bp, Homo sapiens
ttactgatttttagaggataagcac

SEQ ID NO: 8019 - DNA, 25 bp, Homo sapiens
ggctataaaatactaccacctctgc

SEQ ID NO: 8020 - DNA, 25 bp, Homo sapiens
ggacatatcctaatctgtcatggga

SEQ ID NO: 8021 - DNA, 25 bp, Homo sapiens
cagtttgcctttactttccaggata

SEQ ID NO: 8022 - DNA, 25 bp, Homo sapiens
ggctgttagaaatgtggcgaattcc

SEQ ID NO: 8023 - DNA, 25 bp, Homo sapiens
gaccactgtgagttagtcataataa

SEQ ID NO: 8024 - DNA, 25 bp, Homo sapiens
cgtgtatctgtctgtgtgtcttttc

SEQ ID NO: 8025 - DNA, 25 bp, Homo sapiens
agcaatgttccctctgtgcaagtca

SEQ ID NO: 8026 - DNA, 25 bp, Homo sapiens
gctaccagctatgcttcacagtgta

SEQ ID NO: 8027 - DNA, 25 bp, Homo sapiens
tcatcccatgggtttttccagctag

SEQ ID NO: 8028 - DNA, 25 bp, Homo sapiens
cagggtattgatgagatgctgctta

SEQ ID NO: 8029 - DNA, 25 bp, Homo sapiens
ccaatggaccctagtatgcatgcaa

SEQ ID NO: 8030 - DNA, 25 bp, Homo sapiens
gtctgccagatcagtctctgtttca

SEQ ID NO: 8031 - DNA, 25 bp, Homo sapiens
gggtgtttccctcttccaattttct

SEQ ID NO: 8032 - DNA, 25 bp, Homo sapiens
gtctggaggcactggttaaatactc

SEQ ID NO: 8033 - DNA, 25 bp, Homo sapiens
agcacgtggtcagtttctactccca

SEQ ID NO: 8034 - DNA, 25 bp, Homo sapiens
tgtcctcagccacagtaacatcttg

SEQ ID NO: 8035 - DNA, 25 bp, Homo sapiens
tgtgccaggctagccacataaaagc

SEQ ID NO: 8036 - DNA, 25 bp, Homo sapiens
ggcgtacattttctcagccttcttc

SEQ ID NO: 8037 - DNA, 25 bp, Homo sapiens
gtccggtttccaagaatccaataca

SEQ ID NO: 8038 - DNA, 25 bp, Homo sapiens
ccggccttatgggaatctaacattg

SEQ ID NO: 8039 - DNA, 25 bp, Homo sapiens
tcacctcgtgaactctggcatatta

SEQ ID NO: 8040 - DNA, 25 bp, Homo sapiens
ctcaaatatcagcacccataggggt

SEQ ID NO: 8041 - DNA, 25 bp, Homo sapiens
ggagtgcctggactacaaaaatttc

SEQ ID NO: 8042 - DNA, 25 bp, Homo sapiens
accaagagtgtatgcaacttttaga

SEQ ID NO: 8043 - DNA, 25 bp, Homo sapiens
gcttctctgatttgagcttgcacta

SEQ ID NO: 8044 - DNA, 25 bp, Homo sapiens
attccgttccctgaggtagtcactg

SEQ ID NO: 8045 - DNA, 25 bp, Homo sapiens
agatatgagtttttgcctgtagata

SEQ ID NO: 8046 - DNA, 25 bp, Homo sapiens
ttcctatttttacagtcgacatata

SEQ ID NO: 8047 - DNA, 25 bp, Homo sapiens
actgggtgttgcgtacttaatattc

SEQ ID NO: 8048 - DNA, 25 bp, Homo sapiens
gcaagccttggtctcttccagttga

SEQ ID NO: 8049 - DNA, 25 bp, Homo sapiens
gaccctggagcagtcataattttta

SEQ ID NO: 8050 - DNA, 25 bp, Homo sapiens
gtaaagtataaagtctaatctgttg

SEQ ID NO: 8051 - DNA, 25 bp, Homo sapiens
gggagaatgtgattccctctcttaa

SEQ ID NO: 8052 - DNA, 25 bp, Homo sapiens
cttctacgtacttcaactgggctca

SEQ ID NO: 8053 - DNA, 25 bp, Homo sapiens
aggcagttctcctcttacaccgtga

SEQ ID NO: 8054 - DNA, 25 bp, Homo sapiens
tcttggccacaaggaaaatttctac

SEQ ID NO: 8055 - DNA, 25 bp, Homo sapiens
ggctgccctgaaagaccacccagtt

SEQ ID NO: 8056 - DNA, 25 bp, Homo sapiens
aggccatatacatttcggggacaga

SEQ ID NO: 8057 - DNA, 25 bp, Homo sapiens
taactccttgttatactcttaattc

SEQ ID NO: 8058 - DNA, 25 bp, Homo sapiens
catcttatctacatagtcacaggca

SEQ ID NO: 8059 - DNA, 25 bp, Homo sapiens
tcatcccattgactgtaggcttttc

SEQ ID NO: 8060 - DNA, 25 bp, Homo sapiens
tggggactctgcttcacagtctaga

SEQ ID NO: 8061 - DNA, 25 bp, Homo sapiens
tgcgcaaaagactgctacacctcta

SEQ ID NO: 8062 - DNA, 25 bp, Homo sapiens
gcggtctctatcgaatgcttgaggt

SEQ ID NO: 8063 - DNA, 25 bp, Homo sapiens
cctggcagagttacactatatggca

SEQ ID NO: 8064 - DNA, 25 bp, Homo sapiens
tccaaaatttaactctccatttctg

SEQ ID NO: 8065 - DNA, 25 bp, Homo sapiens
cctggtctacaggagataaattcta

SEQ ID NO: 8066 - DNA, 25 bp, Homo sapiens
tgctgagtgctttctgccacccaga

SEQ ID NO: 8067 - DNA, 25 bp, Homo sapiens
agctgtatctcttcttgcccttata

SEQ ID NO: 8068 - DNA, 25 bp, Homo sapiens
gccgtcatgtttccaaggtaagttc

SEQ ID NO: 8069 - DNA, 25 bp, Homo sapiens
ggcttgtgctctaacctggatctta

SEQ ID NO: 8070 - DNA, 25 bp, Homo sapiens
tagtaccagcaacttgaggaatgtc

SEQ ID NO: 8071 - DNA, 25 bp, Homo sapiens
cacaggctgtggctatgaagagtca

SEQ ID NO: 8072 - DNA, 25 bp, Homo sapiens
cctgttggatctgcctaagggaata

SEQ ID NO: 8073 - DNA, 25 bp, Homo sapiens
ggacccgagagtggaaactgcttga

SEQ ID NO: 8074 - DNA, 25 bp, Homo sapiens
tctgtgcaatattcttcacattcca

SEQ ID NO: 8075 - DNA, 25 bp, Homo sapiens
tggcaatagcaaggtcactgccctg

SEQ ID NO: 8076 - DNA, 25 bp, Homo sapiens
cctttgacttgaggaaacatgccca

SEQ ID NO: 8077 - DNA, 25 bp, Homo sapiens
tcaaggcctgcctgtcaaagcattc

SEQ ID NO: 8078 - DNA, 25 bp, Homo sapiens
tgattccaggcatcccaaaaaggta

SEQ ID NO: 8079 - DNA, 25 bp, Homo sapiens
aacaacttgctggttccctgaaaga

SEQ ID NO: 8080 - DNA, 25 bp, Homo sapiens
ttctggttaataataacacataaaa

SEQ ID NO: 8081 - DNA, 25 bp, Homo sapiens
tctgggcccagaagtatcactcaca

SEQ ID NO: 8082 - DNA, 25 bp, Homo sapiens
attgtggacatctcttctgggctta

SEQ ID NO: 8083 - DNA, 25 bp, Homo sapiens
ccgtatcacgtgtatttggaccaca

SEQ ID NO: 8084 - DNA, 25 bp, Homo sapiens
ggttttcacattccctccaaggtca

SEQ ID NO: 8085 - DNA, 25 bp, Homo sapiens
ctggccctatgtcacagaaatcata

SEQ ID NO: 8086 - DNA, 25 bp, Homo sapiens
cctgccatgtcaggcgcattaattt

SEQ ID NO: 8087 - DNA, 25 bp, Homo sapiens
agcagcctgcagtttcaaatgtttc

SEQ ID NO: 8088 - DNA, 25 bp, Homo sapiens
ggccaggggactctcagttttctct

SEQ ID NO: 8089 - DNA, 25 bp, Homo sapiens
gactcctggcaatatactgattttt

SEQ ID NO: 8090 - DNA, 25 bp, Homo sapiens
cttggggaccactcgatttggaata

SEQ ID NO: 8091 - DNA, 25 bp, Homo sapiens
gactggcaatgtcctcccttgatta

SEQ ID NO: 8092 - DNA, 25 bp, Homo sapiens
ttccgctggttttcaaagacaatcc

SEQ ID NO: 8093 - DNA, 25 bp, Homo sapiens
ccagtgtgttagcatgattgatttc

SEQ ID NO: 8094 - DNA, 25 bp, Homo sapiens
ttgtcagcatgatgcatccagcttt

SEQ ID NO: 8095 - DNA, 25 bp, Homo sapiens
tttctagtaattgcatcattttgag

SEQ ID NO: 8096 - DNA, 25 bp, Homo sapiens
atatcagctctcattggcccaggta

SEQ ID NO: 8097 - DNA, 25 bp, Homo sapiens
atcaggaatgggcaaaagaggcttc

SEQ ID NO: 8098 - DNA, 25 bp, Homo sapiens
attcttaggacagagcacgcttttc

SEQ ID NO: 8099 - DNA, 25 bp, Homo sapiens
ctgtgaccttccaggactaaagttg

SEQ ID NO: 8100 - DNA, 25 bp, Homo sapiens
tcccaccctgcctcaatttaaaagg

SEQ ID NO: 8101 - DNA, 25 bp, Homo sapiens
tggccagcctctgtgtttatatata

SEQ ID NO: 8102 - DNA, 25 bp, Homo sapiens
cagcgtggactactggggaaacaca

SEQ ID NO: 8103 - DNA, 25 bp, Homo sapiens
cggcacgcatcgtcaagttgataca

SEQ ID NO: 8104 - DNA, 25 bp, Homo sapiens
agtctgcgattcttaagtaacggta

SEQ ID NO: 8105 - DNA, 25 bp, Homo sapiens
cttggcggcagtgaaatcttaatta

SEQ ID NO: 8106 - DNA, 25 bp, Homo sapiens
atcagggccacattctctttgagca

SEQ ID NO: 8107 - DNA, 25 bp, Homo sapiens
acgcagtctcttttaggtacagtga

SEQ ID NO: 8108 - DNA, 25 bp, Homo sapiens
gccttggcaactggggaaatttcta

SEQ ID NO: 8109 - DNA, 25 bp, Homo sapiens
gctctcgaagggctcagttaacatg

SEQ ID NO: 8110 - DNA, 25 bp, Homo sapiens
gcccatacgtgccttcatgtgtaaa

SEQ ID NO: 8111 - DNA, 25 bp, Homo sapiens
ctttatgcacccattaggagatgtc

SEQ ID NO: 8112 - DNA, 25 bp, Homo sapiens
ggccatcactgagcctaggtctttt

SEQ ID NO: 8113 - DNA, 25 bp, Homo sapiens
ggggctggcacatttacctattaaa

SEQ ID NO: 8114 - DNA, 25 bp, Homo sapiens
ggctacctaatttgtgcagtcactg

SEQ ID NO: 8115 - DNA, 25 bp, Homo sapiens
atggctcctcttgtgttaggtctta

SEQ ID NO: 8116 - DNA, 25 bp, Homo sapiens
acctgtaggagtaggggctcttttc

SEQ ID NO: 8117 - DNA, 25 bp, Homo sapiens
ctctgcctctagaaaacagtggata

SEQ ID NO: 8118 - DNA, 25 bp, Homo sapiens
tgatagatgtctttaggtagatttt

SEQ ID NO: 8119 - DNA, 25 bp, Homo sapiens
ttgtagctttttgttctatgctgga

SEQ ID NO: 8120 - DNA, 25 bp, Homo sapiens
gttgatccattacagccagaaattg

SEQ ID NO: 8121 - DNA, 25 bp, Homo sapiens
tgaaacccgctatcccagcatgttg

SEQ ID NO: 8122 - DNA, 25 bp, Homo sapiens
taaggtattagaagtaatatcaagc

SEQ ID NO: 8123 - DNA, 25 bp, Homo sapiens
tcctcttgttgatggcagaaagccc

SEQ ID NO: 8124 - DNA, 25 bp, Homo sapiens
gccctgcgggcaacatctgtttttg

SEQ ID NO: 8125 - DNA, 25 bp, Homo sapiens
tgacagcatcgtgtggttcatcaga

SEQ ID NO: 8126 - DNA, 25 bp, Homo sapiens
ctctggtgtcttgcacaaaatctta

SEQ ID NO: 8127 - DNA, 25 bp, Homo sapiens
cgtgtctatgtttcagtctgcaata

SEQ ID NO: 8128 - DNA, 25 bp, Homo sapiens
gttctggggaggcaatctacacatc

SEQ ID NO: 8129 - DNA, 25 bp, Homo sapiens
acctgtaaatggctgagtctgcgta

SEQ ID NO: 8130 - DNA, 25 bp, Homo sapiens
cccgtgttgttcaggctagcttctg

SEQ ID NO: 8131 - DNA, 25 bp, Homo sapiens
tgtcagtctccagctgtcatgtata

SEQ ID NO: 8132 - DNA, 25 bp, Homo sapiens
atcatggcatgagtacagtttcttg

SEQ ID NO: 8133 - DNA, 25 bp, Homo sapiens
catggcctggtaccggatgaccttt

SEQ ID NO: 8134 - DNA, 25 bp, Homo sapiens
ctagccatgtcagtgcacagggatt

SEQ ID NO: 8135 - DNA, 25 bp, Homo sapiens
tggaggttcaggtacatttcatatc

SEQ ID NO: 8136 - DNA, 25 bp, Homo sapiens
gcaatgctgaggagagagtccttta

SEQ ID NO: 8137 - DNA, 25 bp, Homo sapiens
actgtcactgtatgagagctcctga

SEQ ID NO: 8138 - DNA, 25 bp, Homo sapiens
tcccatgggaaacttggagttaatc

SEQ ID NO: 8139 - DNA, 25 bp, Homo sapiens
cagcagcgcatgagagggcaatttg

SEQ ID NO: 8140 - DNA, 25 bp, Homo sapiens
ctctgctgcctccatgtgtaatttc

SEQ ID NO: 8141 - DNA, 25 bp, Homo sapiens
accgacgataggtgtcaatgtcatc

SEQ ID NO: 8142 - DNA, 25 bp, Homo sapiens
gggcttaacaggtctcaatttattc

SEQ ID NO: 8143 - DNA, 25 bp, Homo sapiens
tattctgtcccattgctgtgaaaca

SEQ ID NO: 8144 - DNA, 25 bp, Homo sapiens
gggctttgcctaatctactctgtta

SEQ ID NO: 8145 - DNA, 25 bp, Homo sapiens
cacatgagggaagccatactgttta

SEQ ID NO: 8146 - DNA, 25 bp, Homo sapiens
tcagaggttcgtcttgttcagagaa

SEQ ID NO: 8147 - DNA, 25 bp, Homo sapiens
ccctccagaggcttgctgaaagatc

SEQ ID NO: 8148 - DNA, 25 bp, Homo sapiens
gccagcgtgtagtgttgtcatttgc

SEQ ID NO: 8149 - DNA, 25 bp, Homo sapiens
tggctgggtggtgaattatccttca

SEQ ID NO: 8150 - DNA, 25 bp, Homo sapiens
cctgtgatgttttttgcagctgatc

SEQ ID NO: 8151 - DNA, 25 bp, Homo sapiens
ttggctagttccttgatttcagatg

SEQ ID NO: 8152 - DNA, 25 bp, Homo sapiens
tggttttagttcagctcctagcatc

SEQ ID NO: 8153 - DNA, 25 bp, Homo sapiens
acactgagtgtggttcttcaaagtc

SEQ ID NO: 8154 - DNA, 25 bp, Homo sapiens
gctggctaacctactgtcttatcta

SEQ ID NO: 8155 - DNA, 25 bp, Homo sapiens
tacagataggtagatgcacagattc

SEQ ID NO: 8156 - DNA, 25 bp, Homo sapiens
ccctgattagatggctggtgataca

SEQ ID NO: 8157 - DNA, 25 bp, Homo sapiens
cgtgcaacacttacagaggagaatt

SEQ ID NO: 8158 - DNA, 25 bp, Homo sapiens
tcaagccttggtattgcaaagccta

SEQ ID NO: 8159 - DNA, 25 bp, Homo sapiens
accaatgggtttgcatcagaaaatt

SEQ ID NO: 8160 - DNA, 25 bp, Homo sapiens
ctaggacatttgaaggaatattttc

SEQ ID NO: 8161 - DNA, 25 bp, Homo sapiens
gtcaactcggggaacactcactata

SEQ ID NO: 8162 - DNA, 25 bp, Homo sapiens
ccttagattagaagctgaaccgtta

SEQ ID NO: 8163 - DNA, 25 bp, Homo sapiens
ctggatatgatcaacttttactcat

SEQ ID NO: 8164 - DNA, 25 bp, Homo sapiens
tgtgctccaaagatacctaagagtg

SEQ ID NO: 8165 - DNA, 25 bp, Homo sapiens
ctctatggcagtgacaagaacatta

SEQ ID NO: 8166 - DNA, 25 bp, Homo sapiens
ttgcatctgttctcactcttcctgg

SEQ ID NO: 8167 - DNA, 25 bp, Homo sapiens
gggcaacatgcacctatttctttta

SEQ ID NO: 8168 - DNA, 25 bp, Homo sapiens
gccagcctcataatgtgactaacta

SEQ ID NO: 8169 - DNA, 25 bp, Homo sapiens
agaaagtcaatacgcagatgtccta

SEQ ID NO: 8170 - DNA, 25 bp, Homo sapiens
ccagttctaaaatcagtgaggctca

SEQ ID NO: 8171 - DNA, 25 bp, Homo sapiens
ctcagtacagagtagaaggccttta

SEQ ID NO: 8172 - DNA, 25 bp, Homo sapiens
ccgccttaatttgggagacttgtca

SEQ ID NO: 8173 - DNA, 25 bp, Homo sapiens
agtgtaagtgccaaatcaggtgtta

SEQ ID NO: 8174 - DNA, 25 bp, Homo sapiens
ttttttttaaaagactctatccagt

SEQ ID NO: 8175 - DNA, 25 bp, Homo sapiens
tcttgtgcatatcgttgtggccttc

SEQ ID NO: 8176 - DNA, 25 bp, Homo sapiens
aaatcagggaaaatattttttacaa

SEQ ID NO: 8177 - DNA, 25 bp, Homo sapiens
ggcacatttcccactcttgttcatg

SEQ ID NO: 8178 - DNA, 25 bp, Homo sapiens
cctacatttaatggaaagcagctta

SEQ ID NO: 8179 - DNA, 25 bp, Homo sapiens
tgtgttgactcctaatgggccattg

SEQ ID NO: 8180 - DNA, 25 bp, Homo sapiens
ccaagcctgagtgacattacatttc

SEQ ID NO: 8181 - DNA, 25 bp, Homo sapiens
ccagttagtaatcccagcgagaaga

SEQ ID NO: 8182 - DNA, 25 bp, Homo sapiens
tcagtgcctgaatagccagttattg

SEQ ID NO: 8183 - DNA, 25 bp, Homo sapiens
cactatttttgtgggtaaggtttca

SEQ ID NO: 8184 - DNA, 25 bp, Homo sapiens
gctgagggcccactgaagttctaga

SEQ ID NO: 8185 - DNA, 25 bp, Homo sapiens
aggccctgccacagttttcatatca

SEQ ID NO: 8186 - DNA, 25 bp, Homo sapiens
tgcccatctattctaggactgttaa

SEQ ID NO: 8187 - DNA, 25 bp, Homo sapiens
gaggcttccttgtgttaatcagtta

SEQ ID NO: 8188 - DNA, 25 bp, Homo sapiens
ttctagttgctcaaattcaaatctc

SEQ ID NO: 8189 - DNA, 25 bp, Homo sapiens
catccatattgatgtattgagcttc

SEQ ID NO: 8190 - DNA, 25 bp, Homo sapiens
ttgggttaacccttggcttcatgtc

SEQ ID NO: 8191 - DNA, 25 bp, Homo sapiens
ctcggagccatcaagaactagtatg

SEQ ID NO: 8192 - DNA, 25 bp, Homo sapiens
cctttaggaacttatctggagaacc

SEQ ID NO: 8193 - DNA, 25 bp, Homo sapiens
gcagtggctacatcttgtttctaga

SEQ ID NO: 8194 - DNA, 25 bp, Homo sapiens
cgcctagacttcctgagcagtttcc

SEQ ID NO: 8195 - DNA, 25 bp, Homo sapiens
catctaaggtgtgtcgtctgtttca

SEQ ID NO: 8196 - DNA, 25 bp, Homo sapiens
gtagattttactgcacgacacggtg

SEQ ID NO: 8197 - DNA, 25 bp, Homo sapiens
ccctgacaggatacattggctaatg

SEQ ID NO: 8198 - DNA, 25 bp, Homo sapiens
agggtgcaggtatctatcttaagtc

SEQ ID NO: 8199 - DNA, 25 bp, Homo sapiens
tggctgcttgtattctcccagaaaa

SEQ ID NO: 8200 - DNA, 25 bp, Homo sapiens
tataagaatttgaattgttttatac

SEQ ID NO: 8201 - DNA, 25 bp, Homo sapiens
gtcttcctagtactgccaagctgtc

SEQ ID NO: 8202 - DNA, 25 bp, Homo sapiens
tgtagatcctcagtaaccgcatttt

SEQ ID NO: 8203 - DNA, 25 bp, Homo sapiens
tatcgagcctatcagtggaacaatc

SEQ ID NO: 8204 - DNA, 25 bp, Homo sapiens
gacaaggcaactagttcaaggtata

SEQ ID NO: 8205 - DNA, 25 bp, Homo sapiens
ggacttggccaccaattggtttata

SEQ ID NO: 8206 - DNA, 25 bp, Homo sapiens
tgttcccaaactgggtgcttccctg

SEQ ID NO: 8207 - DNA, 25 bp, Homo sapiens
cctctcctggtgtgcataaccctga

SEQ ID NO: 8208 - DNA, 25 bp, Homo sapiens
tccatcaggcaatattgaagtcctc

SEQ ID NO: 8209 - DNA, 25 bp, Homo sapiens
gctctggagcctgtggatacatcta

SEQ ID NO: 8210 - DNA, 25 bp, Homo sapiens
tctcctgatgagatgaatacatgtc

SEQ ID NO: 8211 - DNA, 25 bp, Homo sapiens
tcaggcaatatctaagtctcagagc

SEQ ID NO: 8212 - DNA, 25 bp, Homo sapiens
tatgcccagcacctcgatgtttttg

SEQ ID NO: 8213 - DNA, 25 bp, Homo sapiens
agccgtctcttatggggaatctttg

SEQ ID NO: 8214 - DNA, 25 bp, Homo sapiens
ttcaggattagcctattgatgtcca

SEQ ID NO: 8215 - DNA, 25 bp, Homo sapiens
gcccaattgggaagggtgcttaatc

SEQ ID NO: 8216 - DNA, 25 bp, Homo sapiens
gcctcgtgaaccttatcctgttatg

SEQ ID NO: 8217 - DNA, 25 bp, Homo sapiens
agcccactgactgatgccttgtttc

SEQ ID NO: 8218 - DNA, 25 bp, Homo sapiens
gccacggacaccatttagaagtttc

SEQ ID NO: 8219 - DNA, 25 bp, Homo sapiens
atggctctgttgatcctggaataca

SEQ ID NO: 8220 - DNA, 25 bp, Homo sapiens
gatgaatctcacaccacagtctttg

SEQ ID NO: 8221 - DNA, 25 bp, Homo sapiens
atacttactgccactttgtgacctg

SEQ ID NO: 8222 - DNA, 25 bp, Homo sapiens
aagtgattttcttcagcagtcccga

SEQ ID NO: 8223 - DNA, 25 bp, Homo sapiens
gtcagttccacctatgcagattcca

SEQ ID NO: 8224 - DNA, 25 bp, Homo sapiens
catactctctggatctggggtgacc

SEQ ID NO: 8225 - DNA, 25 bp, Homo sapiens
tcgacctgctgggagtttctcatta

SEQ ID NO: 8226 - DNA, 25 bp, Homo sapiens
acttctgatggtatttctctttgtg

SEQ ID NO: 8227 - DNA, 25 bp, Homo sapiens
catagatcgcaggtacaaattgtca

SEQ ID NO: 8228 - DNA, 25 bp, Homo sapiens
ggggacactcatttcattcatttta

SEQ ID NO: 8229 - DNA, 25 bp, Homo sapiens
cgcaaagccgtatgctcccattata

SEQ ID NO: 8230 - DNA, 25 bp, Homo sapiens
atgttcggacagataccagtttgcc

SEQ ID NO: 8231 - DNA, 25 bp, Homo sapiens
ctgctgaaactagaatgcgcccttg

SEQ ID NO: 8232 - DNA, 25 bp, Homo sapiens
tgcgcctgtggtatcatagccattc

SEQ ID NO: 8233 - DNA, 25 bp, Homo sapiens
aaagtctgctgctcagaggaaacca

SEQ ID NO: 8234 - DNA, 25 bp, Homo sapiens
cgataccactgtgctgagacaaata

SEQ ID NO: 8235 - DNA, 25 bp, Homo sapiens
accctttccactgtcatgatcatga

SEQ ID NO: 8236 - DNA, 25 bp, Homo sapiens
tggccaggaccaccacagtattcta

SEQ ID NO: 8237 - DNA, 25 bp, Homo sapiens
tgtgggccatacttcgcactaattg

SEQ ID NO: 8238 - DNA, 25 bp, Homo sapiens
ctggggtccatttgcaaaaagaact

SEQ ID NO: 8239 - DNA, 25 bp, Homo sapiens
aggagcactggaattactcaccatg

SEQ ID NO: 8240 - DNA, 25 bp, Homo sapiens
tgggtgaactcactctcagtttttg

SEQ ID NO: 8241 - DNA, 25 bp, Homo sapiens
acttggggcccataatcatcgtgta

SEQ ID NO: 8242 - DNA, 25 bp, Homo sapiens
tcctgggtctcttctgatctgcatt

SEQ ID NO: 8243 - DNA, 25 bp, Homo sapiens
agccatggattttatctgcactatg

SEQ ID NO: 8244 - DNA, 25 bp, Homo sapiens
tagtgctggcaaccttatgaaagga

SEQ ID NO: 8245 - DNA, 25 bp, Homo sapiens
cgaatttttcttgtgccctctgata

SEQ ID NO: 8246 - DNA, 25 bp, Homo sapiens
actgtttgaacctatgggctgcatc

SEQ ID NO: 8247 - DNA, 25 bp, Homo sapiens
ggtgtttccaagcatgtagtccata

SEQ ID NO: 8248 - DNA, 25 bp, Homo sapiens
gcagtggcttcccttttcctaagta

SEQ ID NO: 8249 - DNA, 25 bp, Homo sapiens
tctgagcttgctgatacctgaaatg

SEQ ID NO: 8250 - DNA, 25 bp, Homo sapiens
aggtgctatcatctttgagattgtc

SEQ ID NO: 8251 - DNA, 25 bp, Homo sapiens
aactcttttcctttctatggaagtt

SEQ ID NO: 8252 - DNA, 25 bp, Homo sapiens
ccttggccaggttcagcatattttg

SEQ ID NO: 8253 - DNA, 25 bp, Homo sapiens
ttgtgatgactatgcagatccaagc

SEQ ID NO: 8254 - DNA, 25 bp, Homo sapiens
aagatgggctctactggtttgctca

SEQ ID NO: 8255 - DNA, 25 bp, Homo sapiens
ggatttctaactgacttctgacatg

SEQ ID NO: 8256 - DNA, 25 bp, Homo sapiens
catgaggttacaccagtttgctttg

SEQ ID NO: 8257 - DNA, 25 bp, Homo sapiens
gagaacacgtacaaacttctgaatt

SEQ ID NO: 8258 - DNA, 25 bp, Homo sapiens
acacgtttatatacatcatttatat

SEQ ID NO: 8259 - DNA, 25 bp, Homo sapiens
tatgtttttagaaatgtgatgtgtg

SEQ ID NO: 8260 - DNA, 25 bp, Homo sapiens
ctcagcaatgttggagtagataaaa

SEQ ID NO: 8261 - DNA, 25 bp, Homo sapiens
aacccgtggtttcgtgcattgcata

SEQ ID NO: 8262 - DNA, 25 bp, Homo sapiens
ccatcatgaaaaattagccagtagt

SEQ ID NO: 8263 - DNA, 25 bp, Homo sapiens
ctgtctcctgcatttccaccgttta

SEQ ID NO: 8264 - DNA, 25 bp, Homo sapiens
agctctttggcagcgcatttcactg

SEQ ID NO: 8265 - DNA, 25 bp, Homo sapiens
ccctactgttgtgagtgttacttta

SEQ ID NO: 8266 - DNA, 25 bp, Homo sapiens
tccctgtggtggtagtctctttcca

SEQ ID NO: 8267 - DNA, 25 bp, Homo sapiens
ggaggaggacttcgctaccaattta

SEQ ID NO: 8268 - DNA, 25 bp, Homo sapiens
accctcatgaggtaggtcttattta

SEQ ID NO: 8269 - DNA, 25 bp, Homo sapiens
caggcacctggagacagagtgaatc

SEQ ID NO: 8270 - DNA, 25 bp, Homo sapiens
ccatcaataaaactgaaagaatttt

SEQ ID NO: 8271 - DNA, 25 bp, Homo sapiens
cttttcaaggatacaggtggcagtg

SEQ ID NO: 8272 - DNA, 25 bp, Homo sapiens
aattattatttttatcttctaaatg

SEQ ID NO: 8273 - DNA, 25 bp, Homo sapiens
aggctctagcatttactcactttga

SEQ ID NO: 8274 - DNA, 25 bp, Homo sapiens
cccaacagtcatatttttaggcaga

SEQ ID NO: 8275 - DNA, 25 bp, Homo sapiens
tgtatcagtctcagcttcagccaaa

SEQ ID NO: 8276 - DNA, 25 bp, Homo sapiens
ctggcgtgctggctatagttttaaa

SEQ ID NO: 8277 - DNA, 25 bp, Homo sapiens
ccctataagtgatgctgctgaattg

SEQ ID NO: 8278 - DNA, 25 bp, Homo sapiens
cagatcgttatgttgacagcacagc

SEQ ID NO: 8279 - DNA, 25 bp, Homo sapiens
agggtacctgttttatgctttcata

SEQ ID NO: 8280 - DNA, 25 bp, Homo sapiens
cccgatagtcctaacagaagtatta

SEQ ID NO: 8281 - DNA, 25 bp, Homo sapiens
tgccaggaaatggaattatgcttta

SEQ ID NO: 8282 - DNA, 25 bp, Homo sapiens
catggaatttatgtgtgcctgaaca

SEQ ID NO: 8283 - DNA, 25 bp, Homo sapiens
cccttggtaaatgtaagcacctctg

SEQ ID NO: 8284 - DNA, 25 bp, Homo sapiens
tacatggtatttagaataaattata

SEQ ID NO: 8285 - DNA, 25 bp, Homo sapiens
ttacaagttctgattcctgggtcta

SEQ ID NO: 8286 - DNA, 25 bp, Homo sapiens
gccatttttagatgagctaccagta

SEQ ID NO: 8287 - DNA, 25 bp, Homo sapiens
ggaatgcttctcttctattcaagta

SEQ ID NO: 8288 - DNA, 25 bp, Homo sapiens
cctgtcaaggctcttaaaaagtgtg

SEQ ID NO: 8289 - DNA, 25 bp, Homo sapiens
ggcccgactcaggactcaatcattc

SEQ ID NO: 8290 - DNA, 25 bp, Homo sapiens
ctgccctaagcctacctttgctgta

SEQ ID NO: 8291 - DNA, 25 bp, Homo sapiens
ttccaggaataagaatgaagtgctc

SEQ ID NO: 8292 - DNA, 25 bp, Homo sapiens
agagcctttttatttgcactagtta

SEQ ID NO: 8293 - DNA, 25 bp, Homo sapiens
ttgcctactccgcaaaagtaatttg

SEQ ID NO: 8294 - DNA, 25 bp, Homo sapiens
cagtattatatatgtaatatgtatc

SEQ ID NO: 8295 - DNA, 25 bp, Homo sapiens
gatcatactgaaatatgctgaggca

SEQ ID NO: 8296 - DNA, 25 bp, Homo sapiens
gtactctttccagtgtgccaatttg

SEQ ID NO: 8297 - DNA, 25 bp, Homo sapiens
agccttgacatatgaccttgacctg

SEQ ID NO: 8298 - DNA, 25 bp, Homo sapiens
atcaaattgtttccaggggccgggc

SEQ ID NO: 8299 - DNA, 25 bp, Homo sapiens
acacctcgttgctttaattggcttc

SEQ ID NO: 8300 - DNA, 25 bp, Homo sapiens
catgtcaaacaaacacagaaatgtg

SEQ ID NO: 8301 - DNA, 25 bp, Homo sapiens
tgtaaaactgaagaagaatgtgcaa

SEQ ID NO: 8302 - DNA, 25 bp, Homo sapiens
tgaacaatcttagggagcaacaatg

SEQ ID NO: 8303 - DNA, 25 bp, Homo sapiens
ctcgctgtctacttgggtcctcaaa

SEQ ID NO: 8304 - DNA, 25 bp, Homo sapiens
ctggagaaaccatatcgtgcattgc

SEQ ID NO: 8305 - DNA, 25 bp, Homo sapiens
tgccaagagcaacatgttaaaagtg

SEQ ID NO: 8306 - DNA, 25 bp, Homo sapiens
gtttccaataaaggataccaatttg

SEQ ID NO: 8307 - DNA, 25 bp, Homo sapiens
cggtggccttcttcatttactcaaa

SEQ ID NO: 8308 - DNA, 25 bp, Homo sapiens
tcatgatttgttttgcctgctttcc

SEQ ID NO: 8309 - DNA, 25 bp, Homo sapiens
tggattcatgggctcactttattca

SEQ ID NO: 8310 - DNA, 25 bp, Homo sapiens
catacctgcatgttggaaatttaga

SEQ ID NO: 8311 - DNA, 25 bp, Homo sapiens
gagttatatagatttcattttgttc

SEQ ID NO: 8312 - DNA, 25 bp, Homo sapiens
tgttctgaacttccaggtccgtata

SEQ ID NO: 8313 - DNA, 25 bp, Homo sapiens
gggaagatttctaccctatttcata

SEQ ID NO: 8314 - DNA, 25 bp, Homo sapiens
aggccaaatctggtgcattcagtta

SEQ ID NO: 8315 - DNA, 25 bp, Homo sapiens
tttgccctaggaggatcagcttaga

SEQ ID NO: 8316 - DNA, 25 bp, Homo sapiens
tgactctgctgtgattactattatg

SEQ ID NO: 8317 - DNA, 25 bp, Homo sapiens
ccagctggtatccaaggaaaaattc

SEQ ID NO: 8318 - DNA, 25 bp, Homo sapiens
ccttacgaagcaatgtgaaaatgtc

SEQ ID NO: 8319 - DNA, 25 bp, Homo sapiens
gtgccaaggatgcattgatcaaatg

SEQ ID NO: 8320 - DNA, 25 bp, Homo sapiens
agtggtatactatgacccattgatc

SEQ ID NO: 8321 - DNA, 25 bp, Homo sapiens
tgtcctgagctgcaaacaactttta

SEQ ID NO: 8322 - DNA, 25 bp, Homo sapiens
atggtctctccggtgctgtttacaa

SEQ ID NO: 8323 - DNA, 25 bp, Homo sapiens
ggcactctgatatgacctgctagta

SEQ ID NO: 8324 - DNA, 25 bp, Homo sapiens
cttattttgtggatgagcaagcttc

SEQ ID NO: 8325 - DNA, 25 bp, Homo sapiens
tgtcccaggagcaaagtaaatcagg

SEQ ID NO: 8326 - DNA, 25 bp, Homo sapiens
gctcatgtgctcttctctattcctg

SEQ ID NO: 8327 - DNA, 25 bp, Homo sapiens
tagtctttgaatactctggaggaag

SEQ ID NO: 8328 - DNA, 25 bp, Homo sapiens
gcctgtggcagggttacttatgtaa

SEQ ID NO: 8329 - DNA, 25 bp, Homo sapiens
gttaacatctccctctgcagctctg

SEQ ID NO: 8330 - DNA, 25 bp, Homo sapiens
tgctcatgatatggccttagatttc

SEQ ID NO: 8331 - DNA, 25 bp, Homo sapiens
cattatcagatggaaagtgctatta

SEQ ID NO: 8332 - DNA, 25 bp, Homo sapiens
aaaagtattacttccgcgtggtgca

SEQ ID NO: 8333 - DNA, 25 bp, Homo sapiens
accaatttatcatgtgcagagcacc

SEQ ID NO: 8334 - DNA, 25 bp, Homo sapiens
cagcctagagctgacggcattaatt

SEQ ID NO: 8335 - DNA, 25 bp, Homo sapiens
cgaacttttcttctgtgctctatgg

SEQ ID NO: 8336 - DNA, 25 bp, Homo sapiens
agcccttccaataagcccatttgta

SEQ ID NO: 8337 - DNA, 25 bp, Homo sapiens
cctggggagtaaaatcggtagcatc

SEQ ID NO: 8338 - DNA, 25 bp, Homo sapiens
atgatgccgagaaaactggtgctta

SEQ ID NO: 8339 - DNA, 25 bp, Homo sapiens
ttctgggagcctgacaagacttttg

SEQ ID NO: 8340 - DNA, 25 bp, Homo sapiens
tgacttgcaaggtactctcattgtg

SEQ ID NO: 8341 - DNA, 25 bp, Homo sapiens
aatcatggtgtctaggttttgctcc

SEQ ID NO: 8342 - DNA, 25 bp, Homo sapiens
aacagccttattcatggccaagtga

SEQ ID NO: 8343 - DNA, 25 bp, Homo sapiens
ttactgagttcaggtgtcacattta

SEQ ID NO: 8344 - DNA, 25 bp, Homo sapiens
acaggggatctgagttggaataact

SEQ ID NO: 8345 - DNA, 25 bp, Homo sapiens
ccctacgatggtggttccaagagtc

SEQ ID NO: 8346 - DNA, 25 bp, Homo sapiens
cctaaagatcttgggatccgcgatg

SEQ ID NO: 8347 - DNA, 25 bp, Homo sapiens
cttctgcgatggtggtcctaagagc

SEQ ID NO: 8348 - DNA, 25 bp, Homo sapiens
cctaaggatcttaggatctgcgatg

SEQ ID NO: 8349 - DNA, 25 bp, Homo sapiens
gggcttgctctcagtccctgtctca

SEQ ID NO: 8350 - DNA, 25 bp, Homo sapiens
gacgcccagctgcacaacttgattg

SEQ ID NO: 8351 - DNA, 25 bp, Homo sapiens
gtgggttaacaaaggcagcaaggtc

SEQ ID NO: 8352 - DNA, 25 bp, Homo sapiens
cctaagagccggggggcggagaggg

SEQ ID NO: 8353 - DNA, 25 bp, Homo sapiens
gttcctgaaatgaaactcgagtctc

SEQ ID NO: 8354 - DNA, 25 bp, Homo sapiens
tggccataggatccacggtgtcatc

SEQ ID NO: 8355 - DNA, 25 bp, Homo sapiens
ctgcctaatgaaacagcctgggatt

SEQ ID NO: 8356 - DNA, 25 bp, Homo sapiens
cctataatctcaaggaggggcggca

SEQ ID NO: 8357 - DNA, 25 bp, Homo sapiens
tggcctgtggcctgcttgcagttaa

SEQ ID NO: 8358 - DNA, 25 bp, Homo sapiens
aattcccttgcttaagcctaatgta

SEQ ID NO: 8359 - DNA, 25 bp, Homo sapiens
gtgagcctggcttacaataacatta

SEQ ID NO: 8360 - DNA, 25 bp, Homo sapiens
gctcagtggtggataaaggacaata

SEQ ID NO: 8361 - DNA, 25 bp, Homo sapiens
tatgtatgaataaacagcacttaag

SEQ ID NO: 8362 - DNA, 25 bp, Homo sapiens
tatgttatctagagcccacagtttg

SEQ ID NO: 8363 - DNA, 25 bp, Homo sapiens
ctcagatgccagtatgtaattccca

SEQ ID NO: 8364 - DNA, 25 bp, Homo sapiens
atggggtacctgatgaatagcttta

SEQ ID NO: 8365 - DNA, 25 bp, Homo sapiens
gaggcaggcttttcacctctaaata

SEQ ID NO: 8366 - DNA, 25 bp, Homo sapiens
gtgccctggagaccaaaggaaccta

SEQ ID NO: 8367 - DNA, 25 bp, Homo sapiens
gtgctctgcacatgataaattggtc

SEQ ID NO: 8368 - DNA, 25 bp, Homo sapiens
tgcaccacgcggaagtaatactttt

SEQ ID NO: 8369 - DNA, 25 bp, Homo sapiens
taatagcactttccatctgataatg

SEQ ID NO: 8370 - DNA, 25 bp, Homo sapiens
ggcccatataaaacttagtgctgta

SEQ ID NO: 8371 - DNA, 25 bp, Homo sapiens
tctcagtatgatcccagacaagtta

SEQ ID NO: 8372 - DNA, 25 bp, Homo sapiens
ggctcagggagcataacttattttc

SEQ ID NO: 8373 - DNA, 25 bp, Homo sapiens
agaatatttaagagaaatttagtag

SEQ ID NO: 8374 - DNA, 25 bp, Homo sapiens
cgctgccatataaaagtgttctgtt

SEQ ID NO: 8375 - DNA, 25 bp, Homo sapiens
acggggaattttatctgacttatac

SEQ ID NO: 8376 - DNA, 25 bp, Homo sapiens
tagtgagattctgctgacatatttg

SEQ ID NO: 8377 - DNA, 25 bp, Homo sapiens
gcagtgcctgtatgaacatgatata

SEQ ID NO: 8378 - DNA, 25 bp, Homo sapiens
ggaaaacactgctgccttcagatgg

SEQ ID NO: 8379 - DNA, 25 bp, Homo sapiens
tgttcctgtaggaggtaatctctta

SEQ ID NO: 8380 - DNA, 25 bp, Homo sapiens
gaagtctggcatttgaccctctata

SEQ ID NO: 8381 - DNA, 25 bp, Homo sapiens
aagctcttctataacatagttttag

SEQ ID NO: 8382 - DNA, 25 bp, Homo sapiens
tagcttcataattctggagtcagta

SEQ ID NO: 8383 - DNA, 25 bp, Homo sapiens
atgtaacctaattaaatttaaattg

SEQ ID NO: 8384 - DNA, 25 bp, Homo sapiens
tccaccaggagaaatgcacttaaag

SEQ ID NO: 8385 - DNA, 25 bp, Homo sapiens
ctaggtcattgtctgcaggctcttc

SEQ ID NO: 8386 - DNA, 25 bp, Homo sapiens
ggcagttgccttccatacaagacta

SEQ ID NO: 8387 - DNA, 25 bp, Homo sapiens
gcactactaggctgagggtctctaa

SEQ ID NO: 8388 - DNA, 25 bp, Homo sapiens
ggagcaatattgtagtcttagttca

SEQ ID NO: 8389 - DNA, 25 bp, Homo sapiens
gggatggatcccatagtgaaccaga

SEQ ID NO: 8390 - DNA, 25 bp, Homo sapiens
tttaatttatatattctgaagatgt

SEQ ID NO: 8391 - DNA, 25 bp, Homo sapiens
tgggaagccagaacgtatgtcaacc

SEQ ID NO: 8392 - DNA, 25 bp, Homo sapiens
tgcagcttctaaccaccagtatatg

SEQ ID NO: 8393 - DNA, 25 bp, Homo sapiens
tttatcatattttagcctctataac

SEQ ID NO: 8394 - DNA, 25 bp, Homo sapiens
gcggccaaggttaacaagcagatga

SEQ ID NO: 8395 - DNA, 25 bp, Homo sapiens
gggcaagcttgccacacagcatgtt

SEQ ID NO: 8396 - DNA, 25 bp, Homo sapiens
accggttttcttgatcttttggaca

SEQ ID NO: 8397 - DNA, 25 bp, Homo sapiens
agtcagactgctcctgtcaagtaga

SEQ ID NO: 8398 - DNA, 25 bp, Homo sapiens
gtaggctctttttcaggcagattca

SEQ ID NO: 8399 - DNA, 25 bp, Homo sapiens
gccaaaatactgtagggcttcatta

SEQ ID NO: 8400 - DNA, 25 bp, Homo sapiens
tgacacgtggtgatctattacaacc

SEQ ID NO: 8401 - DNA, 25 bp, Homo sapiens
aagagacctacttttgactggatgg

SEQ ID NO: 8402 - DNA, 25 bp, Homo sapiens
agctcacccaaatgtcctcatgtta

SEQ ID NO: 8403 - DNA, 25 bp, Homo sapiens
tgaccctttgcccaggtggaattta

SEQ ID NO: 8404 - DNA, 25 bp, Homo sapiens
gtgaccacagtttgcttacatttga

SEQ ID NO: 8405 - DNA, 25 bp, Homo sapiens
acagagtcactgttgtggcccacac

SEQ ID NO: 8406 - DNA, 25 bp, Homo sapiens
cacttggatgtgactgggaatattt

SEQ ID NO: 8407 - DNA, 25 bp, Homo sapiens
tgcagctagctgaaaaccaaccggc

SEQ ID NO: 8408 - DNA, 25 bp, Homo sapiens
acactgagagctggggttaatattc

SEQ ID NO: 8409 - DNA, 25 bp, Homo sapiens
ttacatctgcgtcgtgcatccacta

SEQ ID NO: 8410 - DNA, 25 bp, Homo sapiens
cctgtgaaggctattctgtatctcc

SEQ ID NO: 8411 - DNA, 25 bp, Homo sapiens
cagggctggaaatcttggaatcttc

SEQ ID NO: 8412 - DNA, 25 bp, Homo sapiens
ttcattctgacacatctggggcata

SEQ ID NO: 8413 - DNA, 25 bp, Homo sapiens
gggctccagtggaaatagctaatcc

SEQ ID NO: 8414 - DNA, 25 bp, Homo sapiens
ctttcctttgtgttgggtacgtaga

SEQ ID NO: 8415 - DNA, 25 bp, Homo sapiens
agaatcttaagtgaatgttctaatc

SEQ ID NO: 8416 - DNA, 25 bp, Homo sapiens
cgctgggttctgatctctattaaaa

SEQ ID NO: 8417 - DNA, 25 bp, Homo sapiens
ggtgctcaacctcaagacatatgcc

SEQ ID NO: 8418 - DNA, 25 bp, Homo sapiens
cctggctgaagtgagaacaagaatc

SEQ ID NO: 8419 - DNA, 25 bp, Homo sapiens
tcagtacgcctgtgacttcagaata

SEQ ID NO: 8420 - DNA, 25 bp, Homo sapiens
cccgcatgttagatgtaagcacttc

SEQ ID NO: 8421 - DNA, 25 bp, Homo sapiens
gtgtatccaagaccttaattgagaa

SEQ ID NO: 8422 - DNA, 25 bp, Homo sapiens
gggtgattttccatatcctaagcta

SEQ ID NO: 8423 - DNA, 25 bp, Homo sapiens
atggcaaagtccaggccaaggcttt

SEQ ID NO: 8424 - DNA, 25 bp, Homo sapiens
aactttggtccacataggaattttg

SEQ ID NO: 8425 - DNA, 25 bp, Homo sapiens
acagaaccatcgtagtgttagtata

SEQ ID NO: 8426 - DNA, 25 bp, Homo sapiens
cggctgtggaaacattcgtcggaca

SEQ ID NO: 8427 - DNA, 25 bp, Homo sapiens
tgctttgtgctgtataaggaatcca

SEQ ID NO: 8428 - DNA, 25 bp, Homo sapiens
cccgggcacgcatgcatattgaact

SEQ ID NO: 8429 - DNA, 25 bp, Homo sapiens
gttgatccaagctgaggcacacata

SEQ ID NO: 8430 - DNA, 25 bp, Homo sapiens
cgtacatagtggttaattatgtatg

SEQ ID NO: 8431 - DNA, 25 bp, Homo sapiens
ttactcaggaaatcagccaaagttg

SEQ ID NO: 8432 - DNA, 25 bp, Homo sapiens
gggtgcaccggcatcctaaattgct

SEQ ID NO: 8433 - DNA, 25 bp, Homo sapiens
tgggctgctagtctccagataactg

SEQ ID NO: 8434 - DNA, 25 bp, Homo sapiens
gctctggagttgatttaagtgcaca

SEQ ID NO: 8435 - DNA, 25 bp, Homo sapiens
ttcacctggctgcacacctttgctg

SEQ ID NO: 8436 - DNA, 25 bp, Homo sapiens
agtggccgtgatgcataaatgattc

SEQ ID NO: 8437 - DNA, 25 bp, Homo sapiens
tctgcagtattggagaagacacttc

SEQ ID NO: 8438 - DNA, 25 bp, Homo sapiens
ggaccctagtctgttgttttttgaa

SEQ ID NO: 8439 - DNA, 25 bp, Homo sapiens
tctgggtattctaacgtcaacattc

SEQ ID NO: 8440 - DNA, 25 bp, Homo sapiens
acccttccgggtgatgatttatata

SEQ ID NO: 8441 - DNA, 25 bp, Homo sapiens
ggctcttcacctggatctttacata

SEQ ID NO: 8442 - DNA, 25 bp, Homo sapiens
accagtttctgagtcgattgccacc

SEQ ID NO: 8443 - DNA, 25 bp, Homo sapiens
gattcaccttgtctagagcaaggcc

SEQ ID NO: 8444 - DNA, 25 bp, Homo sapiens
ggctgctcaacaggctgccaaagtc

SEQ ID NO: 8445 - DNA, 25 bp, Homo sapiens
cactattgctggtcattggtcctcc

SEQ ID NO: 8446 - DNA, 25 bp, Homo sapiens
tacccagcctgataaggagagcaga

SEQ ID NO: 8447 - DNA, 25 bp, Homo sapiens
cttcatatttgattggcccaggcta

SEQ ID NO: 8448 - DNA, 25 bp, Homo sapiens
ctggaatctgccttcgaaatgtcta

SEQ ID NO: 8449 - DNA, 25 bp, Homo sapiens
ggacactctggccttgatactatac

SEQ ID NO: 8450 - DNA, 25 bp, Homo sapiens
tgggaatgtcagtatgtaaaagagc

SEQ ID NO: 8451 - DNA, 25 bp, Homo sapiens
ggccttgtggctgctgccaatttta

SEQ ID NO: 8452 - DNA, 25 bp, Homo sapiens
agtctctgattctttgcttccttga

SEQ ID NO: 8453 - DNA, 25 bp, Homo sapiens
cctcgggagaaaaatcatgcatatg

SEQ ID NO: 8454 - DNA, 25 bp, Homo sapiens
atgcctattgtttcagatgcctgtg

SEQ ID NO: 8455 - DNA, 25 bp, Homo sapiens
tggggcagagcctccatctttaatc

SEQ ID NO: 8456 - DNA, 25 bp, Homo sapiens
actctgtcagggtgaatctgtcctc

SEQ ID NO: 8457 - DNA, 25 bp, Homo sapiens
gccacgtacattctcaggggctatc

SEQ ID NO: 8458 - DNA, 25 bp, Homo sapiens
gtctgtctgagggattttccacaca

SEQ ID NO: 8459 - DNA, 25 bp, Homo sapiens
gatcttaatggaactcttgggtgta

SEQ ID NO: 8460 - DNA, 25 bp, Homo sapiens
ccctgggacattaaatggcaaatta

SEQ ID NO: 8461 - DNA, 25 bp, Homo sapiens
gccctgacttgaatagacccacatg

SEQ ID NO: 8462 - DNA, 25 bp, Homo sapiens
agcttagttcacaaatgggttggcc

SEQ ID NO: 8463 - DNA, 25 bp, Homo sapiens
ctcattgtgagcagaccttggagga

SEQ ID NO: 8464 - DNA, 25 bp, Homo sapiens
ctaacaacctgggggctagttggag

SEQ ID NO: 8465 - DNA, 25 bp, Homo sapiens
gtcggttctctgctctctttcatga

SEQ ID NO: 8466 - DNA, 25 bp, Homo sapiens
cgctgagcctcagacctaagggatt

SEQ ID NO: 8467 - DNA, 25 bp, Homo sapiens
gctccctaggaaactggttaaactg

SEQ ID NO: 8468 - DNA, 25 bp, Homo sapiens
accctagctcagagaatggtcatga

SEQ ID NO: 8469 - DNA, 25 bp, Homo sapiens
caggctgactttcttctagctaaca

SEQ ID NO: 8470 - DNA, 25 bp, Homo sapiens
gagtaacatttccttcccaagacta

SEQ ID NO: 8471 - DNA, 25 bp, Homo sapiens
ttggccattggctctgtcgtactta

SEQ ID NO: 8472 - DNA, 25 bp, Homo sapiens
tcttcagggtgcttaggcagctttc

SEQ ID NO: 8473 - DNA, 25 bp, Homo sapiens
cagtgactatttcctctgagcaata

SEQ ID NO: 8474 - DNA, 25 bp, Homo sapiens
aggctctagccctatgtatatatta

SEQ ID NO: 8475 - DNA, 25 bp, Homo sapiens
agacttctgcctttgtgagccattc

SEQ ID NO: 8476 - DNA, 25 bp, Homo sapiens
ccaatgggtttcctatgactctcta

SEQ ID NO: 8477 - DNA, 25 bp, Homo sapiens
gttggggacttctattggctaaata

SEQ ID NO: 8478 - DNA, 25 bp, Homo sapiens
gctctgccatatggtcgatttccta

SEQ ID NO: 8479 - DNA, 25 bp, Homo sapiens
tgcattgcttctccacctgtaattg

SEQ ID NO: 8480 - DNA, 25 bp, Homo sapiens
ctcccttcctgtgtgagaatccttc

SEQ ID NO: 8481 - DNA, 25 bp, Homo sapiens
tttcctcaggaaagggagctctgtc

SEQ ID NO: 8482 - DNA, 25 bp, Homo sapiens
tctgtcatgtttgtacgttctctta

SEQ ID NO: 8483 - DNA, 25 bp, Homo sapiens
ctgttgggtttcactttctgagagc

SEQ ID NO: 8484 - DNA, 25 bp, Homo sapiens
tcctcactcatgtgtcagttcaatg

SEQ ID NO: 8485 - DNA, 25 bp, Homo sapiens
cctgcctcctctgcaagtcgtttta

SEQ ID NO: 8486 - DNA, 25 bp, Homo sapiens
gtggtgactacccaaatctacattt

SEQ ID NO: 8487 - DNA, 25 bp, Homo sapiens
catccaggaggctgcagattagctc

SEQ ID NO: 8488 - DNA, 25 bp, Homo sapiens
gccttgagggataagttgacatcta

SEQ ID NO: 8489 - DNA, 25 bp, Homo sapiens
cggagccacttttcagttctgtgtc

SEQ ID NO: 8490 - DNA, 25 bp, Homo sapiens
ttcagcttgaccacccatgtgtgta

SEQ ID NO: 8491 - DNA, 25 bp, Homo sapiens
caatttgtggttcctgtgactatta

SEQ ID NO: 8492 - DNA, 25 bp, Homo sapiens
aaacccttgctatcgtcttaactgg

SEQ ID NO: 8493 - DNA, 25 bp, Homo sapiens
ttcggatcctggagtcctaactata

SEQ ID NO: 8494 - DNA, 25 bp, Homo sapiens
tgtatcttcacttgcacattaatgc

SEQ ID NO: 8495 - DNA, 25 bp, Homo sapiens
ctgtaattatttcaccatgtgtatc

SEQ ID NO: 8496 - DNA, 25 bp, Homo sapiens
gtgcatgcgcacacacatttatttc

SEQ ID NO: 8497 - DNA, 25 bp, Homo sapiens
gttgaaagtgctccacaaggctctg

SEQ ID NO: 8498 - DNA, 25 bp, Homo sapiens
caatgctggatgggagctccatcct

SEQ ID NO: 8499 - DNA, 25 bp, Homo sapiens
ttaagtggtcttagcatcagatgcc

SEQ ID NO: 8500 - DNA, 25 bp, Homo sapiens
tgtggaatccctcaacttatctgga

SEQ ID NO: 8501 - DNA, 25 bp, Homo sapiens
actaatcattgaggctgtaagagac

SEQ ID NO: 8502 - DNA, 25 bp, Homo sapiens
cgtaacagttaatgctaagggtctc

SEQ ID NO: 8503 - DNA, 25 bp, Homo sapiens
ttctattgatatctggactttggta

SEQ ID NO: 8504 - DNA, 25 bp, Homo sapiens
tttaagctatcttctgtctatctat

SEQ ID NO: 8505 - DNA, 25 bp, Homo sapiens
tcaaggtctcctatacatgcagtgg

SEQ ID NO: 8506 - DNA, 25 bp, Homo sapiens
ttgcctctggcctgatcatcgaatc

SEQ ID NO: 8507 - DNA, 25 bp, Homo sapiens
gcagttgctgtaccaagaccgtatc

SEQ ID NO: 8508 - DNA, 25 bp, Homo sapiens
gatgctcacatattcgttccaaaga

SEQ ID NO: 8509 - DNA, 25 bp, Homo sapiens
gttgcagtgatctttatctccagga

SEQ ID NO: 8510 - DNA, 25 bp, Homo sapiens
caccttcagcatcgttgttggctta

SEQ ID NO: 8511 - DNA, 25 bp, Homo sapiens
agagggacttctgcagctttaaatg

SEQ ID NO: 8512 - DNA, 25 bp, Homo sapiens
accagcacacttagcatctgttttg

SEQ ID NO: 8513 - DNA, 25 bp, Homo sapiens
gcccagcttgcttggtccataatta

SEQ ID NO: 8514 - DNA, 25 bp, Homo sapiens
gatagatgcctctggatgtccaaca

SEQ ID NO: 8515 - DNA, 25 bp, Homo sapiens
tgtcaaaaaagatattcactgggtg

SEQ ID NO: 8516 - DNA, 25 bp, Homo sapiens
tggaaccaatgtccctttgggccta

SEQ ID NO: 8517 - DNA, 25 bp, Homo sapiens
ggtgcttcacgactaacaacctgtg

SEQ ID NO: 8518 - DNA, 25 bp, Homo sapiens
cctgggagcctgaaggaaacaattc

SEQ ID NO: 8519 - DNA, 25 bp, Homo sapiens
tgataaatgtttcctagtgccatat

SEQ ID NO: 8520 - DNA, 25 bp, Homo sapiens
aaaaggcatttatggatacacctaa

SEQ ID NO: 8521 - DNA, 25 bp, Homo sapiens
caggttgacccttagagcatttatc

SEQ ID NO: 8522 - DNA, 25 bp, Homo sapiens
tgaccctacagagctttgaaaattt

SEQ ID NO: 8523 - DNA, 25 bp, Homo sapiens
ggccactctatgtcctgttcttaaa

SEQ ID NO: 8524 - DNA, 25 bp, Homo sapiens
ttagagaagccgaaagtgcagactg

SEQ ID NO: 8525 - DNA, 25 bp, Homo sapiens
tagactccagcccacgctactggtg

SEQ ID NO: 8526 - DNA, 25 bp, Homo sapiens
gcctggttttacttttccctggata

SEQ ID NO: 8527 - DNA, 25 bp, Homo sapiens
cattgccctcgctctgtcagtttgg

SEQ ID NO: 8528 - DNA, 25 bp, Homo sapiens
gcagggaggacataagtggctatta

SEQ ID NO: 8529 - DNA, 25 bp, Homo sapiens
aggcatatatagaattagaagggat

SEQ ID NO: 8530 - DNA, 25 bp, Homo sapiens
ttgtttcgttgactgcgtgcacttt

SEQ ID NO: 8531 - DNA, 25 bp, Homo sapiens
ttgccctcatgtagacacagtcctg

SEQ ID NO: 8532 - DNA, 25 bp, Homo sapiens
gctatagtcatctgggaagcctccc

SEQ ID NO: 8533 - DNA, 25 bp, Homo sapiens
actggctagggatgtagaatgatca

SEQ ID NO: 8534 - DNA, 25 bp, Homo sapiens
gcatgcatctttcttcagggactta

SEQ ID NO: 8535 - DNA, 25 bp, Homo sapiens
gtcgctttcatgctccacgtccaaa

SEQ ID NO: 8536 - DNA, 25 bp, Homo sapiens
tggtgtctgtgcttttgggtcaaaa

SEQ ID NO: 8537 - DNA, 25 bp, Homo sapiens
ttggtatgaccactcagcaactcta

SEQ ID NO: 8538 - DNA, 25 bp, Homo sapiens
tcagtcccgtaacacccagagatgt

SEQ ID NO: 8539 - DNA, 25 bp, Homo sapiens
gcgctgtttatccatttgcatgatg

SEQ ID NO: 8540 - DNA, 25 bp, Homo sapiens
tcttgaggagttctcgcaggcttca

SEQ ID NO: 8541 - DNA, 25 bp, Homo sapiens
tggtagtagctgtcaaaactcaaaa

SEQ ID NO: 8542 - DNA, 25 bp, Homo sapiens
gcatcatgtcagaactgtaagagtc

SEQ ID NO: 8543 - DNA, 25 bp, Homo sapiens
ccagaagcccaggttgttagtaatc

SEQ ID NO: 8544 - DNA, 25 bp, Homo sapiens
cccaggcttactttcctagggaaaa

SEQ ID NO: 8545 - DNA, 25 bp, Homo sapiens
tgccatgcagctgaagccttgtctt

SEQ ID NO: 8546 - DNA, 25 bp, Homo sapiens
ctgcagcttgaatatgtgaccttta

SEQ ID NO: 8547 - DNA, 25 bp, Homo sapiens
tggagttcctcaccagccctgtttg

SEQ ID NO: 8548 - DNA, 25 bp, Homo sapiens
ttccagtttgtagaagcgtcacttc

SEQ ID NO: 8549 - DNA, 25 bp, Homo sapiens
gcacctagtgtttcttgaatcagtc

SEQ ID NO: 8550 - DNA, 25 bp, Homo sapiens
cttcagcctggtctagcagtctttc

SEQ ID NO: 8551 - DNA, 25 bp, Homo sapiens
ggccagctctggttttcaacaaaga

SEQ ID NO: 8552 - DNA, 25 bp, Homo sapiens
ggagcattccctctagtgttatgta

SEQ ID NO: 8553 - DNA, 25 bp, Homo sapiens
ctccctctgttcttgagccataata

SEQ ID NO: 8554 - DNA, 25 bp, Homo sapiens
atctgctgttgctggagtcatcttc

SEQ ID NO: 8555 - DNA, 25 bp, Homo sapiens
ttgcaaatttgctgcttccttgttc

SEQ ID NO: 8556 - DNA, 25 bp, Homo sapiens
gcagtagctctcttttggtatcaaa

SEQ ID NO: 8557 - DNA, 25 bp, Homo sapiens
tgtgcctcaagggagctccacgtaa

SEQ ID NO: 8558 - DNA, 25 bp, Homo sapiens
agttggtctacctgcagctctgtga

SEQ ID NO: 8559 - DNA, 25 bp, Homo sapiens
agcccagatattgtatttctattaa

SEQ ID NO: 8560 - DNA, 25 bp, Homo sapiens
gagacaactctccagcatcggctta

SEQ ID NO: 8561 - DNA, 25 bp, Homo sapiens
tggccaggcttgatctcctaaacta

SEQ ID NO: 8562 - DNA, 25 bp, Homo sapiens
agcctgtcctgctccagatcgatta

SEQ ID NO: 8563 - DNA, 25 bp, Homo sapiens
ccgtgacagagtggtgtagctatta

SEQ ID NO: 8564 - DNA, 25 bp, Homo sapiens
ccaggcagtgtttcggtgccacata

SEQ ID NO: 8565 - DNA, 25 bp, Homo sapiens
tttaggaataatattggaaattttt

SEQ ID NO: 8566 - DNA, 25 bp, Homo sapiens
cacaggagccctaggaagagacttc

SEQ ID NO: 8567 - DNA, 25 bp, Homo sapiens
ggactgcatcttttctacctgagca

SEQ ID NO: 8568 - DNA, 25 bp, Homo sapiens
cccagggattcttctggaagtggaa

SEQ ID NO: 8569 - DNA, 25 bp, Homo sapiens
tttgggccatggaagtacacaacta

SEQ ID NO: 8570 - DNA, 25 bp, Homo sapiens
taggtgacccaccacgtcatggctc

SEQ ID NO: 8571 - DNA, 25 bp, Homo sapiens
tctgggtctatgcaaggaaagtgtc

SEQ ID NO: 8572 - DNA, 25 bp, Homo sapiens
cccatatagcatgttggtgtcaata

SEQ ID NO: 8573 - DNA, 25 bp, Homo sapiens
atcaaaaattctccattaaatggca

SEQ ID NO: 8574 - DNA, 25 bp, Homo sapiens
gccagccttccagatggggtcagta

SEQ ID NO: 8575 - DNA, 25 bp, Homo sapiens
cagggcatggggcaaaaacttctta

SEQ ID NO: 8576 - DNA, 25 bp, Homo sapiens
tggagctgcctcattttctttaaag

SEQ ID NO: 8577 - DNA, 25 bp, Homo sapiens
gaccaccctggaactcatgcaacta

SEQ ID NO: 8578 - DNA, 25 bp, Homo sapiens
atggcttcacggcaactaactaggg

SEQ ID NO: 8579 - DNA, 25 bp, Homo sapiens
tgctgactcctgattctccaaggta

SEQ ID NO: 8580 - DNA, 25 bp, Homo sapiens
tcacatcgtggctcaaggctttcta

SEQ ID NO: 8581 - DNA, 25 bp, Homo sapiens
gatttccaagtgtgacctccagttg

SEQ ID NO: 8582 - DNA, 25 bp, Homo sapiens
cccagtgtttcatgtaggtatattc

SEQ ID NO: 8583 - DNA, 25 bp, Homo sapiens
gggcagccagtttcctctacgttgg

SEQ ID NO: 8584 - DNA, 25 bp, Homo sapiens
cacggtgtcttccatatgtctcaaa

SEQ ID NO: 8585 - DNA, 25 bp, Homo sapiens
tggcagcactgcctccttcatctgg

SEQ ID NO: 8586 - DNA, 25 bp, Homo sapiens
tggcatcggcatctcactacttgtc

SEQ ID NO: 8587 - DNA, 25 bp, Homo sapiens
ggctccggccttctcatcatgggaa

SEQ ID NO: 8588 - DNA, 25 bp, Homo sapiens
aaaagaaaatacagataaagcagaa

SEQ ID NO: 8589 - DNA, 25 bp, Homo sapiens
ctcgagcgctacatcctaaagtttc

SEQ ID NO: 8590 - DNA, 25 bp, Homo sapiens
accttctgtgaatgttaaacctgca

SEQ ID NO: 8591 - DNA, 25 bp, Homo sapiens
ctggtcccgagagctgtataaagtg

SEQ ID NO: 8592 - DNA, 25 bp, Homo sapiens
tactggtcaggcaaagagctggctc

SEQ ID NO: 8593 - DNA, 25 bp, Homo sapiens
ccagcatggctctgcaggtttcaca

SEQ ID NO: 8594 - DNA, 25 bp, Homo sapiens
agggctcttcctctttgttcatggc

SEQ ID NO: 8595 - DNA, 25 bp, Homo sapiens
taaatatgcctttggggaaaaaacc

SEQ ID NO: 8596 - DNA, 25 bp, Homo sapiens
tcctcttctgaaggggaatgttatc

SEQ ID NO: 8597 - DNA, 25 bp, Homo sapiens
gcacctcagtgggatgacttcaaca

SEQ ID NO: 8598 - DNA, 25 bp, Homo sapiens
aggggataatcgagcctctcaatta

SEQ ID NO: 8599 - DNA, 25 bp, Homo sapiens
aggcccaggtggttatatcttttta

SEQ ID NO: 8600 - DNA, 25 bp, Homo sapiens
tttaaaaagttcaactgttttattt

SEQ ID NO: 8601 - DNA, 25 bp, Homo sapiens
tcttttggaggcagaacacacttta

SEQ ID NO: 8602 - DNA, 25 bp, Homo sapiens
tgacacctgtctagcacgattgatc

SEQ ID NO: 8603 - DNA, 25 bp, Homo sapiens
ggatgccaccatcacttcctgctta

SEQ ID NO: 8604 - DNA, 25 bp, Homo sapiens
tccagtggggaaagaacatctgcta

SEQ ID NO: 8605 - DNA, 25 bp, Homo sapiens
gtatgctcctcacccacagattgtg

SEQ ID NO: 8606 - DNA, 25 bp, Homo sapiens
tgccatcttccttacctgggctaag

SEQ ID NO: 8607 - DNA, 25 bp, Homo sapiens
cagggtatctgtgctacgtgcttta

SEQ ID NO: 8608 - DNA, 25 bp, Homo sapiens
gtggcgaggccagtcaacaaaataa

SEQ ID NO: 8609 - DNA, 25 bp, Homo sapiens
ctgtccctagcaggatctggctttc

SEQ ID NO: 8610 - DNA, 25 bp, Homo sapiens
tcaagttgggtgtcaggtatcctca

SEQ ID NO: 8611 - DNA, 25 bp, Homo sapiens
ctcagttggccatgttttgcgcagc

SEQ ID NO: 8612 - DNA, 25 bp, Homo sapiens
cacctgaccctggagttgtacaaca

SEQ ID NO: 8613 - DNA, 25 bp, Homo sapiens
agcgcttgttctctgatcttcctca

SEQ ID NO: 8614 - DNA, 25 bp, Homo sapiens
tcccttagtgcttggtccctttgta

SEQ ID NO: 8615 - DNA, 25 bp, Homo sapiens
gagggcatcggcattcatctaattg

SEQ ID NO: 8616 - DNA, 25 bp, Homo sapiens
aggcttgttattgttcccgtcacca

SEQ ID NO: 8617 - DNA, 25 bp, Homo sapiens
agcctcccagagttttgtgtttttc

SEQ ID NO: 8618 - DNA, 25 bp, Homo sapiens
gctaggaaataccctgaatgttaca

SEQ ID NO: 8619 - DNA, 25 bp, Homo sapiens
tcagcagtttgcctaagacagtctc

SEQ ID NO: 8620 - DNA, 25 bp, Homo sapiens
tccactcttgctgttcgttgaataa

SEQ ID NO: 8621 - DNA, 25 bp, Homo sapiens
ctgccggtcttgttgtagcttatca

SEQ ID NO: 8622 - DNA, 25 bp, Homo sapiens
ggggtcttgaccacatcctattctg

SEQ ID NO: 8623 - DNA, 25 bp, Homo sapiens
ccatggtgatggtgttctttcagca

SEQ ID NO: 8624 - DNA, 25 bp, Homo sapiens
ggtgacctggcacttctctgctgaa

SEQ ID NO: 8625 - DNA, 25 bp, Homo sapiens
tgctacgctagtgtgctttcaattc

SEQ ID NO: 8626 - DNA, 25 bp, Homo sapiens
tggtatctaaacatgtatacattta

SEQ ID NO: 8627 - DNA, 25 bp, Homo sapiens
gctttgtagcatccagctttgtgca

SEQ ID NO: 8628 - DNA, 25 bp, Homo sapiens
cccagtgctggtcaaattctctttc

SEQ ID NO: 8629 - DNA, 25 bp, Homo sapiens
tgctgctcatagtgcctagaattta

SEQ ID NO: 8630 - DNA, 25 bp, Homo sapiens
ttgcctaggacactgccacaagcta

SEQ ID NO: 8631 - DNA, 25 bp, Homo sapiens
gcttacgcagcaacaggatggattt

SEQ ID NO: 8632 - DNA, 25 bp, Homo sapiens
gacaagatatccacacctagaaatg

SEQ ID NO: 8633 - DNA, 25 bp, Homo sapiens
ccaatcattgcataatgggctttta

SEQ ID NO: 8634 - DNA, 25 bp, Homo sapiens
ctgagtttctcaaccaagaattctg

SEQ ID NO: 8635 - DNA, 25 bp, Homo sapiens
cttaacttggagagatgcagagagg

SEQ ID NO: 8636 - DNA, 25 bp, Homo sapiens
gctgcttttttagatcctggttata

SEQ ID NO: 8637 - DNA, 25 bp, Homo sapiens
tttgctgcagtgaaacagtagttgc

SEQ ID NO: 8638 - DNA, 25 bp, Homo sapiens
accacagggcttggctgaattcaca

SEQ ID NO: 8639 - DNA, 25 bp, Homo sapiens
cctgtgcccgaggttctcttaagta

SEQ ID NO: 8640 - DNA, 25 bp, Homo sapiens
ggctccctgctctcagaaaatcttg

SEQ ID NO: 8641 - DNA, 25 bp, Homo sapiens
cagatggccttatggtgtaagcaca

SEQ ID NO: 8642 - DNA, 25 bp, Homo sapiens
agtagtcatggcgtttcagtcaaga

SEQ ID NO: 8643 - DNA, 25 bp, Homo sapiens
tcagcatttgtctagatgatcttta

SEQ ID NO: 8644 - DNA, 25 bp, Homo sapiens
tgcaatcctgttgtggctcagagtc

SEQ ID NO: 8645 - DNA, 25 bp, Homo sapiens
gggaactcctttggcactattacta

SEQ ID NO: 8646 - DNA, 25 bp, Homo sapiens
cgctttgtgtgacccaggaatcttc

SEQ ID NO: 8647 - DNA, 25 bp, Homo sapiens
catgctctctcttctgttctcaggg

SEQ ID NO: 8648 - DNA, 25 bp, Homo sapiens
gcctcgcagaaggacaagtgtctta

SEQ ID NO: 8649 - DNA, 25 bp, Homo sapiens
gagccttcaggtttgtggacactta

SEQ ID NO: 8650 - DNA, 25 bp, Homo sapiens
tgccagctgctggaaacctatttcc

SEQ ID NO: 8651 - DNA, 25 bp, Homo sapiens
cctgctacctttttcctgctgatta

SEQ ID NO: 8652 - DNA, 25 bp, Homo sapiens
gccagtttgtcgctatgtttcttca

SEQ ID NO: 8653 - DNA, 25 bp, Homo sapiens
actggctccagatactcgcgatata

SEQ ID NO: 8654 - DNA, 25 bp, Homo sapiens
ctgtggccaggtccaattgtattgt

SEQ ID NO: 8655 - DNA, 25 bp, Homo sapiens
atgctccccacatataaattcattt

SEQ ID NO: 8656 - DNA, 25 bp, Homo sapiens
ccaaaattggccagggagatgttta

SEQ ID NO: 8657 - DNA, 25 bp, Homo sapiens
gctttgaactgtgccatctgggttg

SEQ ID NO: 8658 - DNA, 25 bp, Homo sapiens
tgcttgcctccagatgtagagtaca

SEQ ID NO: 8659 - DNA, 25 bp, Homo sapiens
ctccacatcaggattttatgggctc

SEQ ID NO: 8660 - DNA, 25 bp, Homo sapiens
tgcccaccatttatcctttgtcagg

SEQ ID NO: 8661 - DNA, 25 bp, Homo sapiens
gaaggaacttagggaactgatttta

SEQ ID NO: 8662 - DNA, 25 bp, Homo sapiens
ttgtttgtttgttttcattcgaagg

SEQ ID NO: 8663 - DNA, 25 bp, Homo sapiens
gcccatctgtccttctatttgtata

SEQ ID NO: 8664 - DNA, 25 bp, Homo sapiens
gtccaatgatgtctccacgcagctg

SEQ ID NO: 8665 - DNA, 25 bp, Homo sapiens
ctcaggaccactagaacccgtgtta

SEQ ID NO: 8666 - DNA, 25 bp, Homo sapiens
ggtccactccgggtcttagaatttg

SEQ ID NO: 8667 - DNA, 25 bp, Homo sapiens
tgccctgcctcatgtgctaagcttg

SEQ ID NO: 8668 - DNA, 25 bp, Homo sapiens
gactcttcccgtgcttcagtgtgta

SEQ ID NO: 8669 - DNA, 25 bp, Homo sapiens
atctgctggtctgtgacatcctgta

SEQ ID NO: 8670 - DNA, 25 bp, Homo sapiens
ccatttccggtgaaggtgttgcatc

SEQ ID NO: 8671 - DNA, 25 bp, Homo sapiens
acttctgctgcctttcaaatggtgg

SEQ ID NO: 8672 - DNA, 25 bp, Homo sapiens
ccagtgggtgtgtattttttatagc

SEQ ID NO: 8673 - DNA, 25 bp, Homo sapiens
actaagatttccaagattattttac

SEQ ID NO: 8674 - DNA, 25 bp, Homo sapiens
gagactccggttttagccaacatga

SEQ ID NO: 8675 - DNA, 25 bp, Homo sapiens
aagacgctggccttttcagaactga

SEQ ID NO: 8676 - DNA, 25 bp, Homo sapiens
cttaggagcaggcttgaataacttc

SEQ ID NO: 8677 - DNA, 25 bp, Homo sapiens
aagtttcccttgttccagtcacctg

SEQ ID NO: 8678 - DNA, 25 bp, Homo sapiens
atgatacagttctaggaaaggaaga

SEQ ID NO: 8679 - DNA, 25 bp, Homo sapiens
tccagggcttcctacaaatgcaaga

SEQ ID NO: 8680 - DNA, 25 bp, Homo sapiens
tctgttcattatagccctgggagtc

SEQ ID NO: 8681 - DNA, 25 bp, Homo sapiens
ggttcaccactccatatctccatag

SEQ ID NO: 8682 - DNA, 25 bp, Homo sapiens
gtcaaagcctgcctccataagtggg

SEQ ID NO: 8683 - DNA, 25 bp, Homo sapiens
tctaggggtcttacttcagcaaata

SEQ ID NO: 8684 - DNA, 25 bp, Homo sapiens
tctggctagtcaacctcaaggatta

SEQ ID NO: 8685 - DNA, 25 bp, Homo sapiens
gcggaaaagtgtccatagcatatac

SEQ ID NO: 8686 - DNA, 25 bp, Homo sapiens
cacagaaagctttggtttggacata

SEQ ID NO: 8687 - DNA, 25 bp, Homo sapiens
agcgagactgtttctggttcattta

SEQ ID NO: 8688 - DNA, 25 bp, Homo sapiens
ttttatctctcagtcaaaggtcagc

SEQ ID NO: 8689 - DNA, 25 bp, Homo sapiens
agactgatatccatgtgccttatga

SEQ ID NO: 8690 - DNA, 25 bp, Homo sapiens
atgccatccctgtccaaaagcttga

SEQ ID NO: 8691 - DNA, 25 bp, Homo sapiens
tgaccctgtcttggttgcatgcctg

SEQ ID NO: 8692 - DNA, 25 bp, Homo sapiens
gtgtgtgtatacatgtatatatata

SEQ ID NO: 8693 - DNA, 25 bp, Homo sapiens
ctattccaatctttttctcactttt

SEQ ID NO: 8694 - DNA, 25 bp, Homo sapiens
aataaaacataaaagtcagcaagtc

SEQ ID NO: 8695 - DNA, 25 bp, Homo sapiens
gctgcaatgactagcatcaactgtg

SEQ ID NO: 8696 - DNA, 25 bp, Homo sapiens
tgtttcaagtggaagcaagcatctc

SEQ ID NO: 8697 - DNA, 25 bp, Homo sapiens
actggtagatcttcttgggcttttg

SEQ ID NO: 8698 - DNA, 25 bp, Homo sapiens
ctaggctgagattccaacacgcttc

SEQ ID NO: 8699 - DNA, 25 bp, Homo sapiens
gcaccctgggtttgtatctaactca

SEQ ID NO: 8700 - DNA, 25 bp, Homo sapiens
tcccatagataatagcaagcagttc

SEQ ID NO: 8701 - DNA, 25 bp, Homo sapiens
ggcaataacgtcttctgtgataaca

SEQ ID NO: 8702 - DNA, 25 bp, Homo sapiens
gtgccacatttaccaaggcctttgt

SEQ ID NO: 8703 - DNA, 25 bp, Homo sapiens
tagcccagcagccagcacattttta

SEQ ID NO: 8704 - DNA, 25 bp, Homo sapiens
tggtggccatgtgtaatgaaaattc

SEQ ID NO: 8705 - DNA, 25 bp, Homo sapiens
ttgagctgcctacatggaattgacc

SEQ ID NO: 8706 - DNA, 25 bp, Homo sapiens
cttgatgattctattggcttacctg

SEQ ID NO: 8707 - DNA, 25 bp, Homo sapiens
agtctacgcagtccttcaattgtta

SEQ ID NO: 8708 - DNA, 25 bp, Homo sapiens
ttagtgcatatgtctcttagtgttc

SEQ ID NO: 8709 - DNA, 25 bp, Homo sapiens
gtgatcaccagactctcggaatttg

SEQ ID NO: 8710 - DNA, 25 bp, Homo sapiens
cctcagtatctttctcagtgaaggc

SEQ ID NO: 8711 - DNA, 25 bp, Homo sapiens
atgccaattgccctagtaatgtttg

SEQ ID NO: 8712 - DNA, 25 bp, Homo sapiens
tcaacttagtgaatggccaaacgcc

SEQ ID NO: 8713 - DNA, 25 bp, Homo sapiens
ggcaagatttagcttccctgtaata

SEQ ID NO: 8714 - DNA, 25 bp, Homo sapiens
acagagaggtgattaacaaactctc

SEQ ID NO: 8715 - DNA, 25 bp, Homo sapiens
tagatcaacagaagtaatatcaata

SEQ ID NO: 8716 - DNA, 25 bp, Homo sapiens
aggacgtctattacagctctcaaaa

SEQ ID NO: 8717 - DNA, 25 bp, Homo sapiens
caaacagaattttaattcatggatt

SEQ ID NO: 8718 - DNA, 25 bp, Homo sapiens
cttccctgtagagtaattccttata

SEQ ID NO: 8719 - DNA, 25 bp, Homo sapiens
tctaggcaagatattctcaaggaca

SEQ ID NO: 8720 - DNA, 25 bp, Homo sapiens
cgcctaaagtggtatgatattggga

SEQ ID NO: 8721 - DNA, 25 bp, Homo sapiens
gacactccaccctaagtatcttata

SEQ ID NO: 8722 - DNA, 25 bp, Homo sapiens
tggcaggccctactgaaactctgta

SEQ ID NO: 8723 - DNA, 25 bp, Homo sapiens
tttgtctttttatgtcaatagaaac

SEQ ID NO: 8724 - DNA, 25 bp, Homo sapiens
aacaaaaggctgttaactgcatcat

SEQ ID NO: 8725 - DNA, 25 bp, Homo sapiens
ttgctggccaattactgcagtttta

SEQ ID NO: 8726 - DNA, 25 bp, Homo sapiens
tgggattcccacagcaaaagcaagt

SEQ ID NO: 8727 - DNA, 25 bp, Homo sapiens
aatgctctttttgtggtcagtgcca

SEQ ID NO: 8728 - DNA, 25 bp, Homo sapiens
ggttcctgaacattaaaccctggta

SEQ ID NO: 8729 - DNA, 25 bp, Homo sapiens
tagagggtctcacttcagtttttgc

SEQ ID NO: 8730 - DNA, 25 bp, Homo sapiens
tggcctctctttgcctatttctata

SEQ ID NO: 8731 - DNA, 25 bp, Homo sapiens
aaaatttttcaaaagcactcataat

SEQ ID NO: 8732 - DNA, 25 bp, Homo sapiens
tcctccaagggtaaggcctgcctga

SEQ ID NO: 8733 - DNA, 25 bp, Homo sapiens
ggcacccagttttcctcattatagg

SEQ ID NO: 8734 - DNA, 25 bp, Homo sapiens
tttgccacttttgaatgcccttcta

SEQ ID NO: 8735 - DNA, 25 bp, Homo sapiens
ccgtgtatatagtaagccacttttc

SEQ ID NO: 8736 - DNA, 25 bp, Homo sapiens
acccttccgtggtcttctatggtga

SEQ ID NO: 8737 - DNA, 25 bp, Homo sapiens
cgggattagatactaaaggtgttat

SEQ ID NO: 8738 - DNA, 25 bp, Homo sapiens
tgccattgcaaaatcgtctcagagg

SEQ ID NO: 8739 - DNA, 25 bp, Homo sapiens
agccctcaagtagaacaagctgatc

SEQ ID NO: 8740 - DNA, 25 bp, Homo sapiens
agtgcttccgcaaacaaaggtgtta

SEQ ID NO: 8741 - DNA, 25 bp, Homo sapiens
ccctgtctcaaaaatgaagtaaatt

SEQ ID NO: 8742 - DNA, 25 bp, Homo sapiens
ctcatgtgataattgttctggcata

SEQ ID NO: 8743 - DNA, 25 bp, Homo sapiens
tgccaaagaaatagtacaattgata

SEQ ID NO: 8744 - DNA, 25 bp, Homo sapiens
actgtcagttgcataccaggtaatg

SEQ ID NO: 8745 - DNA, 25 bp, Homo sapiens
tggctggctctagtgcatttcaaca

SEQ ID NO: 8746 - DNA, 25 bp, Homo sapiens
tagcccactgcgttttagaggtaga

SEQ ID NO: 8747 - DNA, 25 bp, Homo sapiens
cagatccaggcagaatgactcaaga

SEQ ID NO: 8748 - DNA, 25 bp, Homo sapiens
actactggcactgggtttgagtcta

SEQ ID NO: 8749 - DNA, 25 bp, Homo sapiens
gttgctgtaatctgtgctccctatc

SEQ ID NO: 8750 - DNA, 25 bp, Homo sapiens
aggcaggcttctagattgtatcaga

SEQ ID NO: 8751 - DNA, 25 bp, Homo sapiens
ggcttagactttggacttgaacttc

SEQ ID NO: 8752 - DNA, 25 bp, Homo sapiens
acagtcattcgtacaggcttccaga

SEQ ID NO: 8753 - DNA, 25 bp, Homo sapiens
gtaccctgaggcctttcaagaacta

SEQ ID NO: 8754 - DNA, 25 bp, Homo sapiens
ggctgggtttgaaattccatctcca

SEQ ID NO: 8755 - DNA, 25 bp, Homo sapiens
acctgttgttttatggagactgccc

SEQ ID NO: 8756 - DNA, 25 bp, Homo sapiens
ctgactcataggaggaagtagatcc

SEQ ID NO: 8757 - DNA, 25 bp, Homo sapiens
gtgacaatgactttgctccctatga

SEQ ID NO: 8758 - DNA, 25 bp, Homo sapiens
gctctgattactcctgtgccacatg

SEQ ID NO: 8759 - DNA, 25 bp, Homo sapiens
tcgtgcaattaaagtacaaggtgtt

SEQ ID NO: 8760 - DNA, 25 bp, Homo sapiens
gtttcatatcagaagccatggtttc

SEQ ID NO: 8761 - DNA, 25 bp, Homo sapiens
cggtctccctttccctgtctgttag

SEQ ID NO: 8762 - DNA, 25 bp, Homo sapiens
tgctcgtgcgatttgggaataactg

SEQ ID NO: 8763 - DNA, 25 bp, Homo sapiens
ccctctggcagctgttctacttatc

SEQ ID NO: 8764 - DNA, 25 bp, Homo sapiens
gggcaaagttgatacctctgcagta

SEQ ID NO: 8765 - DNA, 25 bp, Homo sapiens
tgccctaagagaactgtgcccattt

SEQ ID NO: 8766 - DNA, 25 bp, Homo sapiens
tgttcctggcacctagtagctattg

SEQ ID NO: 8767 - DNA, 25 bp, Homo sapiens
tgctcacctatggcagttgtcctca

SEQ ID NO: 8768 - DNA, 25 bp, Homo sapiens
tcaattcccatcacaaattccaata

SEQ ID NO: 8769 - DNA, 25 bp, Homo sapiens
tgccagggcagaatgctgtttctta

SEQ ID NO: 8770 - DNA, 25 bp, Homo sapiens
aactgctgccttcattctggtgata

SEQ ID NO: 8771 - DNA, 25 bp, Homo sapiens
taatgaaaacaaatacactggtgta

SEQ ID NO: 8772 - DNA, 25 bp, Homo sapiens
ctggccgatttcttccctaaaagta

SEQ ID NO: 8773 - DNA, 25 bp, Homo sapiens
ttctaggaattccacaatggtcttc

SEQ ID NO: 8774 - DNA, 25 bp, Homo sapiens
ctcagggcacaactatttgcagata

SEQ ID NO: 8775 - DNA, 25 bp, Homo sapiens
gcttgctctcaattgaatcttgctg

SEQ ID NO: 8776 - DNA, 25 bp, Homo sapiens
taacaaagtgttagtaggagaaaaa

SEQ ID NO: 8777 - DNA, 25 bp, Homo sapiens
gaggatggactttcttttcagacga

SEQ ID NO: 8778 - DNA, 25 bp, Homo sapiens
ccagtgatcaattcttcaaagtttg

SEQ ID NO: 8779 - DNA, 25 bp, Homo sapiens
ccggggcataaagaaattaaaggtc

SEQ ID NO: 8780 - DNA, 25 bp, Homo sapiens
tgttatcggtcccaaagttttcagc

SEQ ID NO: 8781 - DNA, 25 bp, Homo sapiens
ccctcgggtagcgtatgttatttga

SEQ ID NO: 8782 - DNA, 25 bp, Homo sapiens
tgtgcatgagcacctattaagtgtt

SEQ ID NO: 8783 - DNA, 25 bp, Homo sapiens
ccagatatactgtggttcctctgta

SEQ ID NO: 8784 - DNA, 25 bp, Homo sapiens
gcccacagttgttagcattctcatt

SEQ ID NO: 8785 - DNA, 25 bp, Homo sapiens
ctgaggaacccatttgaagtgaaca

SEQ ID NO: 8786 - DNA, 25 bp, Homo sapiens
gggcatcatctccacatcacacagg

SEQ ID NO: 8787 - DNA, 25 bp, Homo sapiens
cccatgtatggcaggcagaactata

SEQ ID NO: 8788 - DNA, 25 bp, Homo sapiens
ttctgcaatgcactctggcttatta

SEQ ID NO: 8789 - DNA, 25 bp, Homo sapiens
tcatctggggtaaaattacagaagg

SEQ ID NO: 8790 - DNA, 25 bp, Homo sapiens
gaaagggccttcctactttggttta

SEQ ID NO: 8791 - DNA, 25 bp, Homo sapiens
gctgaactctaccaccttcccaggt

SEQ ID NO: 8792 - DNA, 25 bp, Homo sapiens
cctggaagtgctgggaaaattgtac

SEQ ID NO: 8793 - DNA, 25 bp, Homo sapiens
gcctatagtacttgcgggccaatga

SEQ ID NO: 8794 - DNA, 25 bp, Homo sapiens
tatgtaacaatcaactggcaaagta

SEQ ID NO: 8795 - DNA, 25 bp, Homo sapiens
ggctgcccaatattgcaactaaagc

SEQ ID NO: 8796 - DNA, 25 bp, Homo sapiens
cttgcagccatggaacgtatttgta

SEQ ID NO: 8797 - DNA, 25 bp, Homo sapiens
agagcacctgtgttcttcttaccca

SEQ ID NO: 8798 - DNA, 25 bp, Homo sapiens
cacaaatgctttagggtagggtccc

SEQ ID NO: 8799 - DNA, 25 bp, Homo sapiens
tcacaaaagaacctaattggcaata

SEQ ID NO: 8800 - DNA, 25 bp, Homo sapiens
acctggcttcttctaatatccttga

SEQ ID NO: 8801 - DNA, 25 bp, Homo sapiens
aaggcgcttggctgtttctgaaatg

SEQ ID NO: 8802 - DNA, 25 bp, Homo sapiens
aaatgggattctagcaacgtggcag

SEQ ID NO: 8803 - DNA, 25 bp, Homo sapiens
gtgtcttcccgtgtggcaacttata

SEQ ID NO: 8804 - DNA, 25 bp, Homo sapiens
ccaggtcatttgttaaggattcatt

SEQ ID NO: 8805 - DNA, 25 bp, Homo sapiens
tatcagctctcccaaataataggtc

SEQ ID NO: 8806 - DNA, 25 bp, Homo sapiens
tccctcaactgacaaacatgaactg

SEQ ID NO: 8807 - DNA, 25 bp, Homo sapiens
gttggtgatgtccatatgcaaaatc

SEQ ID NO: 8808 - DNA, 25 bp, Homo sapiens
tcctgagcacagataactaaagttg

SEQ ID NO: 8809 - DNA, 25 bp, Homo sapiens
gcatcaaccatgaatacgcatgcta

SEQ ID NO: 8810 - DNA, 25 bp, Homo sapiens
agaaactcctttttggctgaatacc

SEQ ID NO: 8811 - DNA, 25 bp, Homo sapiens
cttggtggatcaggctaacaatcta

SEQ ID NO: 8812 - DNA, 25 bp, Homo sapiens
ccgaggcagtggctatgtttaagaa

SEQ ID NO: 8813 - DNA, 25 bp, Homo sapiens
gcagtttctgtggaacatttcagca

SEQ ID NO: 8814 - DNA, 25 bp, Homo sapiens
ccctcatcttctccatcttgagaga

SEQ ID NO: 8815 - DNA, 25 bp, Homo sapiens
ctgaatccgtctctgcctttttgtg

SEQ ID NO: 8816 - DNA, 25 bp, Homo sapiens
cggcaatgttgacactaccagactt

SEQ ID NO: 8817 - DNA, 25 bp, Homo sapiens
ctttggaattctaaagtagcaagtc

SEQ ID NO: 8818 - DNA, 25 bp, Homo sapiens
ccctgcaagggtcattcaaaatatc

SEQ ID NO: 8819 - DNA, 25 bp, Homo sapiens
ctgcgttgagcagctattgtaaata

SEQ ID NO: 8820 - DNA, 25 bp, Homo sapiens
tctctagtggtagtgaaaacttttc

SEQ ID NO: 8821 - DNA, 25 bp, Homo sapiens
atagtgtctaggcagagctcctccc

SEQ ID NO: 8822 - DNA, 25 bp, Homo sapiens
tatttatatatgtgtgtctatttat

SEQ ID NO: 8823 - DNA, 25 bp, Homo sapiens
agtttccctggatgagtagtacaca

SEQ ID NO: 8824 - DNA, 25 bp, Homo sapiens
ctagacctaagaagtccaaaagtgg

SEQ ID NO: 8825 - DNA, 25 bp, Homo sapiens
tattaaacacatgtacacctactca

SEQ ID NO: 8826 - DNA, 25 bp, Homo sapiens
ctctgagagccctttggaagtaaaa

SEQ ID NO: 8827 - DNA, 25 bp, Homo sapiens
ccacttggaattcttgagggtctta

SEQ ID NO: 8828 - DNA, 25 bp, Homo sapiens
ctttgaactgctggtggaatatttc

SEQ ID NO: 8829 - DNA, 25 bp, Homo sapiens
catttggggtccttgaaactcagta

SEQ ID NO: 8830 - DNA, 25 bp, Homo sapiens
acattgttttgagtctggaagatcc

SEQ ID NO: 8831 - DNA, 25 bp, Homo sapiens
gccaagattcctgtctgcaccatga

SEQ ID NO: 8832 - DNA, 25 bp, Homo sapiens
tgtgcactgggctcttttccaatta

SEQ ID NO: 8833 - DNA, 25 bp, Homo sapiens
gtagtcttaatccaacccaaaaggg

SEQ ID NO: 8834 - DNA, 25 bp, Homo sapiens
agctgctttcactgggacttgaatc

SEQ ID NO: 8835 - DNA, 25 bp, Homo sapiens
ggcagctgcccttctcataccttga

SEQ ID NO: 8836 - DNA, 25 bp, Homo sapiens
tagcatcgctacataactcaagtgg

SEQ ID NO: 8837 - DNA, 25 bp, Homo sapiens
ctgtgacgtcactctgggtaagata

SEQ ID NO: 8838 - DNA, 25 bp, Homo sapiens
tgggctgctggttcaaacctcaata

SEQ ID NO: 8839 - DNA, 25 bp, Homo sapiens
ggagtttggcctctgctcatggtta

SEQ ID NO: 8840 - DNA, 25 bp, Homo sapiens
ggagggacaccttcactgagatata

SEQ ID NO: 8841 - DNA, 25 bp, Homo sapiens
tcccttggacttagcaactgacatg

SEQ ID NO: 8842 - DNA, 25 bp, Homo sapiens
gcaactgccctccacaatatagatg

SEQ ID NO: 8843 - DNA, 25 bp, Homo sapiens
tccacaaatgtgaatttgaggatta

SEQ ID NO: 8844 - DNA, 25 bp, Homo sapiens
ctcacagttaaattctaattcagag

SEQ ID NO: 8845 - DNA, 25 bp, Homo sapiens
ctagcatgcactaggaaattttgtc

SEQ ID NO: 8846 - DNA, 25 bp, Homo sapiens
ccctgatgggaactgaaattggaca

SEQ ID NO: 8847 - DNA, 25 bp, Homo sapiens
accattttcagcatctagagtcagc

SEQ ID NO: 8848 - DNA, 25 bp, Homo sapiens
gtcattaatataagcactgacaaaa

SEQ ID NO: 8849 - DNA, 25 bp, Homo sapiens
ccgtaaggtgaacaatgtggcagcc

SEQ ID NO: 8850 - DNA, 25 bp, Homo sapiens
gattaaagagagcacacaacctatg

SEQ ID NO: 8851 - DNA, 25 bp, Homo sapiens
tgcattgttacatttgcctgctgtt

SEQ ID NO: 8852 - DNA, 25 bp, Homo sapiens
ctacatactagtacaacatactagt

SEQ ID NO: 8853 - DNA, 25 bp, Homo sapiens
gtatatagagagaataacacacata

SEQ ID NO: 8854 - DNA, 25 bp, Homo sapiens
tcagcaggtttcagtatttgagcca

SEQ ID NO: 8855 - DNA, 25 bp, Homo sapiens
ttggggtgttgttaagatcttcaca

SEQ ID NO: 8856 - DNA, 25 bp, Homo sapiens
acacaacgcacacacaccaaaaaaa

SEQ ID NO: 8857 - DNA, 25 bp, Homo sapiens
tggaaccctaacactcagcacgttg

SEQ ID NO: 8858 - DNA, 25 bp, Homo sapiens
ttctgtcgcccttatacactgttgg

SEQ ID NO: 8859 - DNA, 25 bp, Homo sapiens
gctgacttaggacacactgcaactc

SEQ ID NO: 8860 - DNA, 25 bp, Homo sapiens
gggatgctttgacgagccacatgta

SEQ ID NO: 8861 - DNA, 25 bp, Homo sapiens
cctgggctgcaaaatgaatgggaca

SEQ ID NO: 8862 - DNA, 25 bp, Homo sapiens
gggtcatccaacgtgcctcagatca

SEQ ID NO: 8863 - DNA, 25 bp, Homo sapiens
gggtcatcacagctcaatacattta

SEQ ID NO: 8864 - DNA, 25 bp, Homo sapiens
cagtttccaggaggcacagttcagc

SEQ ID NO: 8865 - DNA, 25 bp, Homo sapiens
gctgctgttgatccttttgctctta

SEQ ID NO: 8866 - DNA, 25 bp, Homo sapiens
ttgggcttcacttgggacaaatgta

SEQ ID NO: 8867 - DNA, 25 bp, Homo sapiens
ctagcctgaagcttgtcgtctatta

SEQ ID NO: 8868 - DNA, 25 bp, Homo sapiens
caggcgccatttgcattagggatca

SEQ ID NO: 8869 - DNA, 25 bp, Homo sapiens
agctatacgttctctggctgacata

SEQ ID NO: 8870 - DNA, 25 bp, Homo sapiens
atcggcatgttctcaagggctagca

SEQ ID NO: 8871 - DNA, 25 bp, Homo sapiens
gaggatctgtgtgtcttcattcatg

SEQ ID NO: 8872 - DNA, 25 bp, Homo sapiens
cgctttgagtgtatactgtcctttc

SEQ ID NO: 8873 - DNA, 25 bp, Homo sapiens
actgcccaactgctacaagacttta

SEQ ID NO: 8874 - DNA, 25 bp, Homo sapiens
gccttccttgtagtgtgcttcatga

SEQ ID NO: 8875 - DNA, 25 bp, Homo sapiens
caccatgggtttcatttttaggaca

SEQ ID NO: 8876 - DNA, 25 bp, Homo sapiens
tgaaactgtcttgcctctaggtacc

SEQ ID NO: 8877 - DNA, 25 bp, Homo sapiens
ggccagaattactactttgttgttg

SEQ ID NO: 8878 - DNA, 25 bp, Homo sapiens
gccttgcctgtagttactggacttc

SEQ ID NO: 8879 - DNA, 25 bp, Homo sapiens
atatatttccactggaaatatactg

SEQ ID NO: 8880 - DNA, 25 bp, Homo sapiens
tcccgtagctttctgagtccaagta

SEQ ID NO: 8881 - DNA, 25 bp, Homo sapiens
cccagctttgctcctattcttaaga

SEQ ID NO: 8882 - DNA, 25 bp, Homo sapiens
tgctggctaccacacgtttgctaaa

SEQ ID NO: 8883 - DNA, 25 bp, Homo sapiens
ggtgttcacacaactgtcagtcgtc

SEQ ID NO: 8884 - DNA, 25 bp, Homo sapiens
acaggtgttttgtgctcaactcatc

SEQ ID NO: 8885 - DNA, 25 bp, Homo sapiens
atccctaggtgtctctcatgcagta

SEQ ID NO: 8886 - DNA, 25 bp, Homo sapiens
ctctccctcttaaattttgtacttc

SEQ ID NO: 8887 - DNA, 25 bp, Homo sapiens
gtatatattgtatatctaccccatt

SEQ ID NO: 8888 - DNA, 25 bp, Homo sapiens
ctgtgtttcaaataaaaggaaagtg

SEQ ID NO: 8889 - DNA, 25 bp, Homo sapiens
gtagcactcactactgaacaggcta

SEQ ID NO: 8890 - DNA, 25 bp, Homo sapiens
ctgtaagtcataaatataggaagcc

SEQ ID NO: 8891 - DNA, 25 bp, Homo sapiens
gggttttaagggcaggattctatca

SEQ ID NO: 8892 - DNA, 25 bp, Homo sapiens
cctgacggcattagagctgtacttt

SEQ ID NO: 8893 - DNA, 25 bp, Homo sapiens
ggtggtgaatcactgctaaacatta

SEQ ID NO: 8894 - DNA, 25 bp, Homo sapiens
ctttgggcatctcactggcattttc

SEQ ID NO: 8895 - DNA, 25 bp, Homo sapiens
attacagtagtcattttggggatta

SEQ ID NO: 8896 - DNA, 25 bp, Homo sapiens
aaaatgtatagaatttattatgcca

SEQ ID NO: 8897 - DNA, 25 bp, Homo sapiens
ttcaaccagggcagcagaaggcatc

SEQ ID NO: 8898 - DNA, 25 bp, Homo sapiens
cccagagcctttgctgcactgttca

SEQ ID NO: 8899 - DNA, 25 bp, Homo sapiens
gggcagctatcttcctaaatgtata

SEQ ID NO: 8900 - DNA, 25 bp, Homo sapiens
gcagtactgtgtctgtctgagcatc

SEQ ID NO: 8901 - DNA, 25 bp, Homo sapiens
tggggatcaggtactctgacatatc

SEQ ID NO: 8902 - DNA, 25 bp, Homo sapiens
ttctactgcaaagccaagaggcatg

SEQ ID NO: 8903 - DNA, 25 bp, Homo sapiens
ccagagaactctgttttcctgcttc

SEQ ID NO: 8904 - DNA, 25 bp, Homo sapiens
gaacctcatgccacttctaaagata

SEQ ID NO: 8905 - DNA, 25 bp, Homo sapiens
agcccagtggcagttagagtcagga

SEQ ID NO: 8906 - DNA, 25 bp, Homo sapiens
ggccactgccctaatgccagcgttt

SEQ ID NO: 8907 - DNA, 25 bp, Homo sapiens
gtaaaacatctcaaagccctggctg

SEQ ID NO: 8908 - DNA, 25 bp, Homo sapiens
cccaggtgtgtattgtctgttttca

SEQ ID NO: 8909 - DNA, 25 bp, Homo sapiens
aatctcccatggacaagccactgtg

SEQ ID NO: 8910 - DNA, 25 bp, Homo sapiens
ttcctggggcatggagcataaagtc

SEQ ID NO: 8911 - DNA, 25 bp, Homo sapiens
ctgcgtactcaggaataatcggtgc

SEQ ID NO: 8912 - DNA, 25 bp, Homo sapiens
ttgcccttcagtgctagttattatg

SEQ ID NO: 8913 - DNA, 25 bp, Homo sapiens
ccagggcatcccagcatagttctca

SEQ ID NO: 8914 - DNA, 25 bp, Homo sapiens
cagtggcagtcataatatcctgttc

SEQ ID NO: 8915 - DNA, 25 bp, Homo sapiens
cactggggactaaaagacatactgc

SEQ ID NO: 8916 - DNA, 25 bp, Homo sapiens
aagcgtgttctcttcctgtgtcata

SEQ ID NO: 8917 - DNA, 25 bp, Homo sapiens
ttacactgtcaccaccagccattgg

SEQ ID NO: 8918 - DNA, 25 bp, Homo sapiens
tccatccagagtattagtgtccttg

SEQ ID NO: 8919 - DNA, 25 bp, Homo sapiens
tctttcccagcacgcactcaggttg

SEQ ID NO: 8920 - DNA, 25 bp, Homo sapiens
ttcacccagggtgtggcaattcatc

SEQ ID NO: 8921 - DNA, 25 bp, Homo sapiens
gcgggagcagtatgttaccactttc

SEQ ID NO: 8922 - DNA, 25 bp, Homo sapiens
acccactggggagaaaatgcataca

SEQ ID NO: 8923 - DNA, 25 bp, Homo sapiens
tatcctttattaaaatctcaagtag

SEQ ID NO: 8924 - DNA, 25 bp, Homo sapiens
tcctctgctctgataaacttgattg

SEQ ID NO: 8925 - DNA, 25 bp, Homo sapiens
catcagctatgagtaccaggtaaca

SEQ ID NO: 8926 - DNA, 25 bp, Homo sapiens
aaggcccaggtttcccagtagctca

SEQ ID NO: 8927 - DNA, 25 bp, Homo sapiens
gcggcaggattttgcagaaggcaca

SEQ ID NO: 8928 - DNA, 25 bp, Homo sapiens
agcagtctgaagtagggcaccacta

SEQ ID NO: 8929 - DNA, 25 bp, Homo sapiens
ttatagcaggcttaccgggaatgtg

SEQ ID NO: 8930 - DNA, 25 bp, Homo sapiens
cagagtccatgttgtccagatttta

SEQ ID NO: 8931 - DNA, 25 bp, Homo sapiens
gcctcatcatcgtcttctgctggta

SEQ ID NO: 8932 - DNA, 25 bp, Homo sapiens
acagaggcatctacgtggcaaagca

SEQ ID NO: 8933 - DNA, 25 bp, Homo sapiens
aggccttttcaacgaacatgatttc

SEQ ID NO: 8934 - DNA, 25 bp, Homo sapiens
tgggaccttggccaaagtcagcata

SEQ ID NO: 8935 - DNA, 25 bp, Homo sapiens
caggccagcttcattacagggctta

SEQ ID NO: 8936 - DNA, 25 bp, Homo sapiens
gcctagctagtttctgatataaagc

SEQ ID NO: 8937 - DNA, 25 bp, Homo sapiens
caagattttgtggatatgtgttgta

SEQ ID NO: 8938 - DNA, 25 bp, Homo sapiens
gagtttacttaacctgcctttcata

SEQ ID NO: 8939 - DNA, 25 bp, Homo sapiens
ggctttataccactccttttgaaca

SEQ ID NO: 8940 - DNA, 25 bp, Homo sapiens
aaaggctttcctaaatattttcaca

SEQ ID NO: 8941 - DNA, 25 bp, Homo sapiens
tggggcacagaatccagacttcatt

SEQ ID NO: 8942 - DNA, 25 bp, Homo sapiens
gaggttcctgcctgttctcagtctg

SEQ ID NO: 8943 - DNA, 25 bp, Homo sapiens
gctaggaacagtttgatccgaaacc

SEQ ID NO: 8944 - DNA, 25 bp, Homo sapiens
cctgtgtgcattacctgctggttaa

SEQ ID NO: 8945 - DNA, 25 bp, Homo sapiens
gcactgaaggctgtgtaatattcca

SEQ ID NO: 8946 - DNA, 25 bp, Homo sapiens
cctggggaaactggatggacagcta

SEQ ID NO: 8947 - DNA, 25 bp, Homo sapiens
ttattataacaacagtttacttact

SEQ ID NO: 8948 - DNA, 25 bp, Homo sapiens
gtcctttaactcttgcagcaaattg

SEQ ID NO: 8949 - DNA, 25 bp, Homo sapiens
tgctctggatttcctccgaaggtgg

SEQ ID NO: 8950 - DNA, 25 bp, Homo sapiens
gtttgtaatcacaaagactttgata

SEQ ID NO: 8951 - DNA, 25 bp, Homo sapiens
tgggttaattaccctattaaccaac

SEQ ID NO: 8952 - DNA, 25 bp, Homo sapiens
tcttcagctgtcatccatcagagtg

SEQ ID NO: 8953 - DNA, 25 bp, Homo sapiens
tcttttggtccagaacacttctagg

SEQ ID NO: 8954 - DNA, 25 bp, Homo sapiens
tctaggcaccttggtattgaacaca

SEQ ID NO: 8955 - DNA, 25 bp, Homo sapiens
atgcacctgtggacttatgaagcta

SEQ ID NO: 8956 - DNA, 25 bp, Homo sapiens
ccactatgataggaactgctgatga

SEQ ID NO: 8957 - DNA, 25 bp, Homo sapiens
ccgtagatattgaggctgtaactta

SEQ ID NO: 8958 - DNA, 25 bp, Homo sapiens
gtcagcaaagccttgaagtcccaga

SEQ ID NO: 8959 - DNA, 25 bp, Homo sapiens
taaataaaaatacacacttgaaata

SEQ ID NO: 8960 - DNA, 25 bp, Homo sapiens
tggagactgttttctctcaggattc

SEQ ID NO: 8961 - DNA, 25 bp, Homo sapiens
ctagtttaagcggagaaatgacatc

SEQ ID NO: 8962 - DNA, 25 bp, Homo sapiens
tgtgcttcatagaacaatatttttc

SEQ ID NO: 8963 - DNA, 25 bp, Homo sapiens
cttcttgagccagaaagtgttttct

SEQ ID NO: 8964 - DNA, 25 bp, Homo sapiens
ctcatttggataggtaaaagctaca

SEQ ID NO: 8965 - DNA, 25 bp, Homo sapiens
aagaagtgtgtatttaaatttattt

SEQ ID NO: 8966 - DNA, 25 bp, Homo sapiens
gcctggctggacctttctgagatag

SEQ ID NO: 8967 - DNA, 25 bp, Homo sapiens
agcttggactcctcagcactgtagg

SEQ ID NO: 8968 - DNA, 25 bp, Homo sapiens
agtgggtccttttcatttcattgta

SEQ ID NO: 8969 - DNA, 25 bp, Homo sapiens
gcatgccttattggtgaagcactga

SEQ ID NO: 8970 - DNA, 25 bp, Homo sapiens
ggtagctctataaaagtgttactca

SEQ ID NO: 8971 - DNA, 25 bp, Homo sapiens
gtgtactaggttgtctttgtgcata

SEQ ID NO: 8972 - DNA, 25 bp, Homo sapiens
acttgaaactgtttctgtctttaaa

SEQ ID NO: 8973 - DNA, 25 bp, Homo sapiens
gttgagcttcaaagtggcctctcta

SEQ ID NO: 8974 - DNA, 25 bp, Homo sapiens
agctgtctcagggttctctatgttc

SEQ ID NO: 8975 - DNA, 25 bp, Homo sapiens
gggagtactagtgctcattaactta

SEQ ID NO: 8976 - DNA, 25 bp, Homo sapiens
accctgcctgactcctgcttttaga

SEQ ID NO: 8977 - DNA, 25 bp, Homo sapiens
cttagctgtgatagactgaggtcta

SEQ ID NO: 8978 - DNA, 25 bp, Homo sapiens
gaggtccgcactggccatatagttg

SEQ ID NO: 8979 - DNA, 25 bp, Homo sapiens
agccacgtttggtagatgactttag

SEQ ID NO: 8980 - DNA, 25 bp, Homo sapiens
gggtttatgagtcccacactaatgc

SEQ ID NO: 8981 - DNA, 25 bp, Homo sapiens
gtgctgcacagcagggccctacatg

SEQ ID NO: 8982 - DNA, 25 bp, Homo sapiens
cccatgctacattgcctagggtcta

SEQ ID NO: 8983 - DNA, 25 bp, Homo sapiens
gtcgaagcctgattcttctgtaata

SEQ ID NO: 8984 - DNA, 25 bp, Homo sapiens
tctctgactgtggataggatctagc

SEQ ID NO: 8985 - DNA, 25 bp, Homo sapiens
tgtctccttagaaacactgtgtacc

SEQ ID NO: 8986 - DNA, 25 bp, Homo sapiens
tcctagaagtggcattcagtgtttc

SEQ ID NO: 8987 - DNA, 25 bp, Homo sapiens
ctccctgttaggttatccttgcttc

SEQ ID NO: 8988 - DNA, 25 bp, Homo sapiens
ccctcttctttcctcggtggtgtca

SEQ ID NO: 8989 - DNA, 25 bp, Homo sapiens
gggtaccgacttcctgttcaaaact

SEQ ID NO: 8990 - DNA, 25 bp, Homo sapiens
ttccatcctcacagagtggcatttg

SEQ ID NO: 8991 - DNA, 25 bp, Homo sapiens
gcgcatgcgtgagttcacacccatt

SEQ ID NO: 8992 - DNA, 25 bp, Homo sapiens
ttcactagatatgcattgtcggtcc

SEQ ID NO: 8993 - DNA, 25 bp, Homo sapiens
ggccctggatggaagagacctacca

SEQ ID NO: 8994 - DNA, 25 bp, Homo sapiens
ctctccgtttaagctcaatgtgtca

SEQ ID NO: 8995 - DNA, 25 bp, Homo sapiens
gatcaccgctctaatgttccagtta

SEQ ID NO: 8996 - DNA, 25 bp, Homo sapiens
aaaattactgcattagctgggcgtg

SEQ ID NO: 8997 - DNA, 25 bp, Homo sapiens
tctttattgtttgactcattcgctc

SEQ ID NO: 8998 - DNA, 25 bp, Homo sapiens
tgaggatgccctgtcatctagatta

SEQ ID NO: 8999 - DNA, 25 bp, Homo sapiens
acgactttttctgagttgtcaacac

SEQ ID NO: 9000 - DNA, 25 bp, Homo sapiens
ctcactgtttggttcatgtcattta

SEQ ID NO: 9001 - DNA, 25 bp, Homo sapiens
gtctacaggctggagactctttcta

SEQ ID NO: 9002 - DNA, 25 bp, Homo sapiens
tttgcctccttgaacccatgcctta

SEQ ID NO: 9003 - DNA, 25 bp, Homo sapiens
tgttgccagtgctccaaatgggatc

SEQ ID NO: 9004 - DNA, 25 bp, Homo sapiens
cactttgataaaatcaagggattgc

SEQ ID NO: 9005 - DNA, 25 bp, Homo sapiens
gtactttgggcttaactctgcaaca

SEQ ID NO: 9006 - DNA, 25 bp, Homo sapiens
gcaggaccatctcatgcctcattga

SEQ ID NO: 9007 - DNA, 25 bp, Homo sapiens
tcatgtatattatagatatatgttg

SEQ ID NO: 9008 - DNA, 25 bp, Homo sapiens
taatagtctatattaataaacaagt

SEQ ID NO: 9009 - DNA, 25 bp, Homo sapiens
cctggtagaaatgaaggtcagtgtt

SEQ ID NO: 9010 - DNA, 25 bp, Homo sapiens
cagaggtctttgagccaacttcttc

SEQ ID NO: 9011 - DNA, 25 bp, Homo sapiens
ggactcggacttttggcagtaacta

SEQ ID NO: 9012 - DNA, 25 bp, Homo sapiens
gctttggaggtagattgagtacaca

SEQ ID NO: 9013 - DNA, 25 bp, Homo sapiens
gtgtatatgaatgagaaggttgtat

SEQ ID NO: 9014 - DNA, 25 bp, Homo sapiens
tgagttctctcacgcttgtgccaca

SEQ ID NO: 9015 - DNA, 25 bp, Homo sapiens
tcaattattcaagagggattattta

SEQ ID NO: 9016 - DNA, 25 bp, Homo sapiens
cccagaaggcacgtgtttcttttta

SEQ ID NO: 9017 - DNA, 25 bp, Homo sapiens
tgcagcactgggtaggtatcttaac

SEQ ID NO: 9018 - DNA, 25 bp, Homo sapiens
cagaggcctgcaaaatgatcgtatt

SEQ ID NO: 9019 - DNA, 25 bp, Homo sapiens
ggcttctaaacagagatcaagtcca

SEQ ID NO: 9020 - DNA, 25 bp, Homo sapiens
taggctaatggctctgcaagggaca

SEQ ID NO: 9021 - DNA, 25 bp, Homo sapiens
ccactgagggatttttgcaagaata

SEQ ID NO: 9022 - DNA, 25 bp, Homo sapiens
ccctgagcttccgtcatgttccata

SEQ ID NO: 9023 - DNA, 25 bp, Homo sapiens
ttttatagttctacaagtcttgttc

SEQ ID NO: 9024 - DNA, 25 bp, Homo sapiens
tagaaatacccagacctcgaacact

SEQ ID NO: 9025 - DNA, 25 bp, Homo sapiens
tgactactcaggaatgttacactcg

SEQ ID NO: 9026 - DNA, 25 bp, Homo sapiens
ctggttttcaggagctaatcatcta

SEQ ID NO: 9027 - DNA, 25 bp, Homo sapiens
tgctattctatattaacaaaaagca

SEQ ID NO: 9028 - DNA, 25 bp, Homo sapiens
attttgaaaaaataatgaaagttct

SEQ ID NO: 9029 - DNA, 25 bp, Homo sapiens
aaaatgttagttgagtattgacatc

SEQ ID NO: 9030 - DNA, 25 bp, Homo sapiens
aaggcaaaaaaaacaactagacata

SEQ ID NO: 9031 - DNA, 25 bp, Homo sapiens
tggcagcctgacttgagcgattaac

SEQ ID NO: 9032 - DNA, 25 bp, Homo sapiens
gtatgcagtcatttccagagtaagc

SEQ ID NO: 9033 - DNA, 25 bp, Homo sapiens
tgtgcaccatatgtcctcaaaagta

SEQ ID NO: 9034 - DNA, 25 bp, Homo sapiens
tgcccatgcagccatttgttatgta

SEQ ID NO: 9035 - DNA, 25 bp, Homo sapiens
tgatgacaatagctttcccaacata

SEQ ID NO: 9036 - DNA, 25 bp, Homo sapiens
cactcattagatgtctaacttttgt

SEQ ID NO: 9037 - DNA, 25 bp, Homo sapiens
agatgcgccactacagttttttata

SEQ ID NO: 9038 - DNA, 25 bp, Homo sapiens
acggactctggttggggtacaatca

SEQ ID NO: 9039 - DNA, 25 bp, Homo sapiens
accagtctttgaccgagcttccaag

SEQ ID NO: 9040 - DNA, 25 bp, Homo sapiens
tcttgagagtaccaaggagacaggc

SEQ ID NO: 9041 - DNA, 25 bp, Homo sapiens
caggattcatccatgcacagtgatc

SEQ ID NO: 9042 - DNA, 25 bp, Homo sapiens
gtgtggctttaccttcaatgtttca

SEQ ID NO: 9043 - DNA, 25 bp, Homo sapiens
ttgtgtgtgttaaccagcctttttg

SEQ ID NO: 9044 - DNA, 25 bp, Homo sapiens
ttttccagccactgaaaaacgtgga

SEQ ID NO: 9045 - DNA, 25 bp, Homo sapiens
gaccaccttagcctctgccaatgaa

SEQ ID NO: 9046 - DNA, 25 bp, Homo sapiens
tctggttccgcaaaatctctgcttt

SEQ ID NO: 9047 - DNA, 25 bp, Homo sapiens
gctcaggccatttagttcttacgta

SEQ ID NO: 9048 - DNA, 25 bp, Homo sapiens
agccatgggagagctttattacttc

SEQ ID NO: 9049 - DNA, 25 bp, Homo sapiens
tcggccttccttctggtaacattga

SEQ ID NO: 9050 - DNA, 25 bp, Homo sapiens
agttgctttctctgccctctcagta

SEQ ID NO: 9051 - DNA, 25 bp, Homo sapiens
gccacaagtggccagacatttaaca

SEQ ID NO: 9052 - DNA, 25 bp, Homo sapiens
tgttttttggaaatctcagctctgc

SEQ ID NO: 9053 - DNA, 25 bp, Homo sapiens
ctttttgctaggtaacatccctttg

SEQ ID NO: 9054 - DNA, 25 bp, Homo sapiens
tgtgagccagacactgcgtgaaata

SEQ ID NO: 9055 - DNA, 25 bp, Homo sapiens
gtccatgtgtcatcttaaatatgtg

SEQ ID NO: 9056 - DNA, 25 bp, Homo sapiens
acaggtaccaagccatcttgcaatg

SEQ ID NO: 9057 - DNA, 25 bp, Homo sapiens
aagtgagtatagttatacttctttt

SEQ ID NO: 9058 - DNA, 25 bp, Homo sapiens
gcttctttggcagtgggttcctttc

SEQ ID NO: 9059 - DNA, 25 bp, Homo sapiens
ctgggctgttcttggttactggtaa

SEQ ID NO: 9060 - DNA, 25 bp, Homo sapiens
agataaaagcttttgagaaaatatt

SEQ ID NO: 9061 - DNA, 25 bp, Homo sapiens
tgaactttgggacatgcctgaccta

SEQ ID NO: 9062 - DNA, 25 bp, Homo sapiens
gtgattgcatcacagtattgtaact

SEQ ID NO: 9063 - DNA, 25 bp, Homo sapiens
gtctagtggtgcatgattaatcaac

SEQ ID NO: 9064 - DNA, 25 bp, Homo sapiens
tggacctcaaaccatgcaaaacttg

SEQ ID NO: 9065 - DNA, 25 bp, Homo sapiens
gagacccagtaatgaatgccctttg

SEQ ID NO: 9066 - DNA, 25 bp, Homo sapiens
ctagtcggaaacctacagattggtc

SEQ ID NO: 9067 - DNA, 25 bp, Homo sapiens
cagatttgccttagtcttgcgttta

SEQ ID NO: 9068 - DNA, 25 bp, Homo sapiens
cgagcagccctctacatgaatgagc

SEQ ID NO: 9069 - DNA, 25 bp, Homo sapiens
tggagcccacggtagacttctttta

SEQ ID NO: 9070 - DNA, 25 bp, Homo sapiens
tatggtagtacctaataaaatagat

SEQ ID NO: 9071 - DNA, 25 bp, Homo sapiens
ggctcctcagctggaatatacagta

SEQ ID NO: 9072 - DNA, 25 bp, Homo sapiens
tctaaggtgcatatgactgattttc

SEQ ID NO: 9073 - DNA, 25 bp, Homo sapiens
gggaaatcactcaccttagccttga

SEQ ID NO: 9074 - DNA, 25 bp, Homo sapiens
caccttgtagacactggagtttgta

SEQ ID NO: 9075 - DNA, 25 bp, Homo sapiens
tcactgcttccttgtgctggaaagc

SEQ ID NO: 9076 - DNA, 25 bp, Homo sapiens
gtttcagggggtggctatgttagag

SEQ ID NO: 9077 - DNA, 25 bp, Homo sapiens
atcttgggccagtgaccaccttttg

SEQ ID NO: 9078 - DNA, 25 bp, Homo sapiens
ctttttaaattttaatcgagagccc

SEQ ID NO: 9079 - DNA, 25 bp, Homo sapiens
cctccaccggtgtaatatatcattc

SEQ ID NO: 9080 - DNA, 25 bp, Homo sapiens
gctaacagttctcttggctagggga

SEQ ID NO: 9081 - DNA, 25 bp, Homo sapiens
agggcccaatggaggacatgtccta

SEQ ID NO: 9082 - DNA, 25 bp, Homo sapiens
ctgccgcctagaggtattatgatta

SEQ ID NO: 9083 - DNA, 25 bp, Homo sapiens
agtgtctcctacctgtgaggcttca

SEQ ID NO: 9084 - DNA, 25 bp, Homo sapiens
tcagatccacttctagggctaaatc

SEQ ID NO: 9085 - DNA, 25 bp, Homo sapiens
ggtccatccggtgaaaccatggcta

SEQ ID NO: 9086 - DNA, 25 bp, Homo sapiens
atccatatgtcataaggagtaaaca

SEQ ID NO: 9087 - DNA, 25 bp, Homo sapiens
gtagcaagctgcagagtaagttttc

SEQ ID NO: 9088 - DNA, 25 bp, Homo sapiens
ctgggatcctgacttgctaattaca

SEQ ID NO: 9089 - DNA, 25 bp, Homo sapiens
agtcaaattctgtctgtaggctttc

SEQ ID NO: 9090 - DNA, 25 bp, Homo sapiens
agtgagtgcctcatactttacaggg

SEQ ID NO: 9091 - DNA, 25 bp, Homo sapiens
actgatcccagcccatgggttcact

SEQ ID NO: 9092 - DNA, 25 bp, Homo sapiens
tgacctctgggaacacatggactta

SEQ ID NO: 9093 - DNA, 25 bp, Homo sapiens
gtgagtgggttacgcaaaaacattc

SEQ ID NO: 9094 - DNA, 25 bp, Homo sapiens
ggagtaccaggcatgtttgttttca

SEQ ID NO: 9095 - DNA, 25 bp, Homo sapiens
gtctgaatagtgctctctttaccca

SEQ ID NO: 9096 - DNA, 25 bp, Homo sapiens
cgttgtttgaagatgttctcctcta

SEQ ID NO: 9097 - DNA, 25 bp, Homo sapiens
caggctggacttgctacgaagaaca

SEQ ID NO: 9098 - DNA, 25 bp, Homo sapiens
tagtggcagcacacagcagagtttc

SEQ ID NO: 9099 - DNA, 25 bp, Homo sapiens
aacacatcctgttggggagagaata

SEQ ID NO: 9100 - DNA, 25 bp, Homo sapiens
ctctcgggttaacttgtgaaataca

SEQ ID NO: 9101 - DNA, 25 bp, Homo sapiens
ctactcagatggtgaagctgtccta

SEQ ID NO: 9102 - DNA, 25 bp, Homo sapiens
agacaacattggtaagtccacttta

SEQ ID NO: 9103 - DNA, 25 bp, Homo sapiens
ctaagttaacttgaaaaaaaaaaga

SEQ ID NO: 9104 - DNA, 25 bp, Homo sapiens
tgcaaaagcctaggactcagattcc

SEQ ID NO: 9105 - DNA, 25 bp, Homo sapiens
ctaaaaataacaaaggatagtagaa

SEQ ID NO: 9106 - DNA, 25 bp, Homo sapiens
agtctagcttgctccttgtcccaga

SEQ ID NO: 9107 - DNA, 25 bp, Homo sapiens
tattcccttcatgttgcaacaattt

SEQ ID NO: 9108 - DNA, 25 bp, Homo sapiens
catcactcagttttgggctcttcca

SEQ ID NO: 9109 - DNA, 25 bp, Homo sapiens
caggctccctttctgacgaagttca

SEQ ID NO: 9110 - DNA, 25 bp, Homo sapiens
ccagtcatatgttctaggaagttgc

SEQ ID NO: 9111 - DNA, 25 bp, Homo sapiens
tagtagacccaattcagtgaagatc

SEQ ID NO: 9112 - DNA, 25 bp, Homo sapiens
agtggggaactatcttgaagactca

SEQ ID NO: 9113 - DNA, 25 bp, Homo sapiens
ggtatgactatgcaacaggctgctt

SEQ ID NO: 9114 - DNA, 25 bp, Homo sapiens
ctggtgacagcaaggtgatccattt

SEQ ID NO: 9115 - DNA, 25 bp, Homo sapiens
aagggctctctctgacttattatga

SEQ ID NO: 9116 - DNA, 25 bp, Homo sapiens
gcatctcagaagaacgcaggtctca

SEQ ID NO: 9117 - DNA, 25 bp, Homo sapiens
gtaaaaaaatatgttgtacataatc

SEQ ID NO: 9118 - DNA, 25 bp, Homo sapiens
ggggctagatttctgcctactatgc

SEQ ID NO: 9119 - DNA, 25 bp, Homo sapiens
ctacctaatggtgcgaagtctaaaa

SEQ ID NO: 9120 - DNA, 25 bp, Homo sapiens
catacttcgtggcagatttcttcaa

SEQ ID NO: 9121 - DNA, 25 bp, Homo sapiens
gtagcctgaacatgcgtatatttga

SEQ ID NO: 9122 - DNA, 25 bp, Homo sapiens
tggctggaaaaacctttgatgtctc

SEQ ID NO: 9123 - DNA, 25 bp, Homo sapiens
tacgactcactggaactttggaaag

SEQ ID NO: 9124 - DNA, 25 bp, Homo sapiens
tactgccaggttgaaggaaacggtc

SEQ ID NO: 9125 - DNA, 25 bp, Homo sapiens
accggcttttactttgctgctgaga

SEQ ID NO: 9126 - DNA, 25 bp, Homo sapiens
ctagaatgcatgttggccctgtgga

SEQ ID NO: 9127 - DNA, 25 bp, Homo sapiens
accatctgtaggactgtggctcata

SEQ ID NO: 9128 - DNA, 25 bp, Homo sapiens
ccaacaggcctgtaacgtgtattcc

SEQ ID NO: 9129 - DNA, 25 bp, Homo sapiens
ctcttggccgcaggtgatctgaatt

SEQ ID NO: 9130 - DNA, 25 bp, Homo sapiens
tcatggacttcaggggcacattttc

SEQ ID NO: 9131 - DNA, 25 bp, Homo sapiens
ctgaaaagtactgcgcaccctagtc

SEQ ID NO: 9132 - DNA, 25 bp, Homo sapiens
cccatattgtctttgaggtgaatca

SEQ ID NO: 9133 - DNA, 25 bp, Homo sapiens
tgctgtcacctatgcacttgaattg

SEQ ID NO: 9134 - DNA, 25 bp, Homo sapiens
ccctactagcacagagcggttttta

SEQ ID NO: 9135 - DNA, 25 bp, Homo sapiens
cacttaacttacatagcatgttacc

SEQ ID NO: 9136 - DNA, 25 bp, Homo sapiens
cctcacaggggagccactgagttta

SEQ ID NO: 9137 - DNA, 25 bp, Homo sapiens
gtgtagctgcattattttatcctta

SEQ ID NO: 9138 - DNA, 25 bp, Homo sapiens
caagtatattgagtctataagattc

SEQ ID NO: 9139 - DNA, 25 bp, Homo sapiens
ctcagtaactctgggtcaatcatta

SEQ ID NO: 9140 - DNA, 25 bp, Homo sapiens
tgaaatctgaatgctccatccttgg

SEQ ID NO: 9141 - DNA, 25 bp, Homo sapiens
ctctggtgcccaaggtaaggatata

SEQ ID NO: 9142 - DNA, 25 bp, Homo sapiens
ggtgattcctgctctttccttgtaa

SEQ ID NO: 9143 - DNA, 25 bp, Homo sapiens
aattctgtctgtgaggttgcaaccc

SEQ ID NO: 9144 - DNA, 25 bp, Homo sapiens
gcacattgttttggtctgactcaga

SEQ ID NO: 9145 - DNA, 25 bp, Homo sapiens
gctgtctctgctatggtctctctta

SEQ ID NO: 9146 - DNA, 25 bp, Homo sapiens
gcctaatgtgtcctttgcaaactct

SEQ ID NO: 9147 - DNA, 25 bp, Homo sapiens
cccttgagactgctggtaaataccc

SEQ ID NO: 9148 - DNA, 25 bp, Homo sapiens
ccctaggtacttatgagagattttc

SEQ ID NO: 9149 - DNA, 25 bp, Homo sapiens
ggccaccaattacccttttacatgc

SEQ ID NO: 9150 - DNA, 25 bp, Homo sapiens
cctgtcttcaaaggcgttagctctc

SEQ ID NO: 9151 - DNA, 25 bp, Homo sapiens
ccctgtgtttgttgaagagatttta

SEQ ID NO: 9152 - DNA, 25 bp, Homo sapiens
ttttaaaaaactcattgacttgtct

SEQ ID NO: 9153 - DNA, 25 bp, Homo sapiens
gtcttatatatcctagagtgttggt

SEQ ID NO: 9154 - DNA, 25 bp, Homo sapiens
acagggtacctaacacaattgcaga

SEQ ID NO: 9155 - DNA, 25 bp, Homo sapiens
tgggtgtcactcttccttccaaaca

SEQ ID NO: 9156 - DNA, 25 bp, Homo sapiens
gggaggctcttttctctcataaacc

SEQ ID NO: 9157 - DNA, 25 bp, Homo sapiens
gtcagcattctaggtactgtagcca

SEQ ID NO: 9158 - DNA, 25 bp, Homo sapiens
agcatggttcttctacttcattgaa

SEQ ID NO: 9159 - DNA, 25 bp, Homo sapiens
ctacccacttcatggatgttagtta

SEQ ID NO: 9160 - DNA, 25 bp, Homo sapiens
tgggtctgaccacgtaaatgaattc

SEQ ID NO: 9161 - DNA, 25 bp, Homo sapiens
ctaatgcctgaaggatccttggatc

SEQ ID NO: 9162 - DNA, 25 bp, Homo sapiens
tggcacagttcatgtgagaacttta

SEQ ID NO: 9163 - DNA, 25 bp, Homo sapiens
cctggtgaacataccgagtttctgc

SEQ ID NO: 9164 - DNA, 25 bp, Homo sapiens
tcccttgcctttgggatttcatcta

SEQ ID NO: 9165 - DNA, 25 bp, Homo sapiens
ctttccattgcctgtcagatctttg

SEQ ID NO: 9166 - DNA, 25 bp, Homo sapiens
tatttcttaatcttttgtaacttaa

SEQ ID NO: 9167 - DNA, 25 bp, Homo sapiens
caccaaggtattgctctaggctctg

SEQ ID NO: 9168 - DNA, 25 bp, Homo sapiens
gctactcacgcctactcatgtcaga

SEQ ID NO: 9169 - DNA, 25 bp, Homo sapiens
gggtatttagcctctctgacactga

SEQ ID NO: 9170 - DNA, 25 bp, Homo sapiens
tcactgtttcttgtggtggacacca

SEQ ID NO: 9171 - DNA, 25 bp, Homo sapiens
ctgtgtgaaaaactcctacttgctg

SEQ ID NO: 9172 - DNA, 25 bp, Homo sapiens
catgctgcagcaaacctttagtaga

SEQ ID NO: 9173 - DNA, 25 bp, Homo sapiens
ggcttcgcagggatacagctgtata

SEQ ID NO: 9174 - DNA, 25 bp, Homo sapiens
gggaatgtagtttgccaccacttta

SEQ ID NO: 9175 - DNA, 25 bp, Homo sapiens
ccacgagctgcatgtaggctgtaca

SEQ ID NO: 9176 - DNA, 25 bp, Homo sapiens
acatttgtataattggggaacctac

SEQ ID NO: 9177 - DNA, 25 bp, Homo sapiens
ggcaagcaattgttctccactttta

SEQ ID NO: 9178 - DNA, 25 bp, Homo sapiens
ccctcgctttgtgttgtgatagaaa

SEQ ID NO: 9179 - DNA, 25 bp, Homo sapiens
cctggggagttcaggcatactctta

SEQ ID NO: 9180 - DNA, 25 bp, Homo sapiens
tgcctgggctggaatataattttta

SEQ ID NO: 9181 - DNA, 25 bp, Homo sapiens
tgcatgggtactctagttgccaatt

SEQ ID NO: 9182 - DNA, 25 bp, Homo sapiens
gcagcctctgtaggagtcagatata

SEQ ID NO: 9183 - DNA, 25 bp, Homo sapiens
ccacagctgtgcatggactattaga

SEQ ID NO: 9184 - DNA, 25 bp, Homo sapiens
ctgcttatggttttcagcttcagta

SEQ ID NO: 9185 - DNA, 25 bp, Homo sapiens
ccagaagattccttttatatgtata

SEQ ID NO: 9186 - DNA, 25 bp, Homo sapiens
atggatacttgcagcaattcactaa

SEQ ID NO: 9187 - DNA, 25 bp, Homo sapiens
ctttaaggagtatctttcctaaggg

SEQ ID NO: 9188 - DNA, 25 bp, Homo sapiens
ggagttccttttctagccattatgg

SEQ ID NO: 9189 - DNA, 25 bp, Homo sapiens
aaagtgctttctagtaacttttatc

SEQ ID NO: 9190 - DNA, 25 bp, Homo sapiens
agtttatctcaatgaagtcagtctg

SEQ ID NO: 9191 - DNA, 25 bp, Homo sapiens
cccactatcagttgcatggataaac

SEQ ID NO: 9192 - DNA, 25 bp, Homo sapiens
catgcaagctgagaccctgatttta

SEQ ID NO: 9193 - DNA, 25 bp, Homo sapiens
cagcgctccatggtatttcagaaaa

SEQ ID NO: 9194 - DNA, 25 bp, Homo sapiens
gtgaagcttcatgcatacacactga

SEQ ID NO: 9195 - DNA, 25 bp, Homo sapiens
ccaaggatggtaatgatgcctcata

SEQ ID NO: 9196 - DNA, 25 bp, Homo sapiens
ggtagcctgcaagccaaatccattt

SEQ ID NO: 9197 - DNA, 25 bp, Homo sapiens
cccagcaactatgggtatttacgta

SEQ ID NO: 9198 - DNA, 25 bp, Homo sapiens
agcaaaaaataagagtatgttctgt

SEQ ID NO: 9199 - DNA, 25 bp, Homo sapiens
gtgccacagatgtattcaaaccata

SEQ ID NO: 9200 - DNA, 25 bp, Homo sapiens
acaactggcactgactgtttttata

SEQ ID NO: 9201 - DNA, 25 bp, Homo sapiens
tgcagtactttgagatttgaccgta

SEQ ID NO: 9202 - DNA, 25 bp, Homo sapiens
ctgtcttctctgttaggcccttgga

SEQ ID NO: 9203 - DNA, 25 bp, Homo sapiens
gtcctacgtcctgcagaactttata

SEQ ID NO: 9204 - DNA, 25 bp, Homo sapiens
ccatttctatgcagggccaaatttc

SEQ ID NO: 9205 - DNA, 25 bp, Homo sapiens
aaccatcaacccagaggggagctga

SEQ ID NO: 9206 - DNA, 25 bp, Homo sapiens
tgtcctgaccagctatttttgagtc

SEQ ID NO: 9207 - DNA, 25 bp, Homo sapiens
tagagaccacgaatcagcaccagta

SEQ ID NO: 9208 - DNA, 25 bp, Homo sapiens
gtacacagttcttaagccagcatcg

SEQ ID NO: 9209 - DNA, 25 bp, Homo sapiens
cccatgccactaaggattgattttt

SEQ ID NO: 9210 - DNA, 25 bp, Homo sapiens
ttctccagggtcagggaagtagata

SEQ ID NO: 9211 - DNA, 25 bp, Homo sapiens
tgctgctagagttccctggcaaata

SEQ ID NO: 9212 - DNA, 25 bp, Homo sapiens
gggttcatcactcctgccaattgtt

SEQ ID NO: 9213 - DNA, 25 bp, Homo sapiens
cccagggtgtctagacaggcattta

SEQ ID NO: 9214 - DNA, 25 bp, Homo sapiens
tacgtcttccggcaatcacttatga

SEQ ID NO: 9215 - DNA, 25 bp, Homo sapiens
gatcacttttgcctgttaatgaggg

SEQ ID NO: 9216 - DNA, 25 bp, Homo sapiens
ggagctgatgaccatacccggttta

SEQ ID NO: 9217 - DNA, 25 bp, Homo sapiens
cccatggaatggctctggtttcaaa

SEQ ID NO: 9218 - DNA, 25 bp, Homo sapiens
aataatatattttaccaatagcata

SEQ ID NO: 9219 - DNA, 25 bp, Homo sapiens
ggatacctatgcaatattcaaccta

SEQ ID NO: 9220 - DNA, 25 bp, Homo sapiens
caactctagtttcggccgtgtgact

SEQ ID NO: 9221 - DNA, 25 bp, Homo sapiens
cgaaaatgttgaatgagtctcctaa

SEQ ID NO: 9222 - DNA, 25 bp, Homo sapiens
ccatgtgtgagattcccaggttcta

SEQ ID NO: 9223 - DNA, 25 bp, Homo sapiens
cccaggctaaagagttgaggctctc

SEQ ID NO: 9224 - DNA, 25 bp, Homo sapiens
ctttacaaaataaagtttagctatt

SEQ ID NO: 9225 - DNA, 25 bp, Homo sapiens
catgaacaaacctgtaggatttatc

SEQ ID NO: 9226 - DNA, 25 bp, Homo sapiens
agcccaaattttagaggaagattta

SEQ ID NO: 9227 - DNA, 25 bp, Homo sapiens
cctgtgacatcttggtatattaata

SEQ ID NO: 9228 - DNA, 25 bp, Homo sapiens
gctggagccagccttagacatttta

SEQ ID NO: 9229 - DNA, 25 bp, Homo sapiens
gctctatcatagactgacggacctc

SEQ ID NO: 9230 - DNA, 25 bp, Homo sapiens
tccacagggatccaggccaaagctc

SEQ ID NO: 9231 - DNA, 25 bp, Homo sapiens
agggctgcccttgagcataatatta

SEQ ID NO: 9232 - DNA, 25 bp, Homo sapiens
ccgcagaaataatgggctagttgta

SEQ ID NO: 9233 - DNA, 25 bp, Homo sapiens
actgctgctagtcaaagatcattta

SEQ ID NO: 9234 - DNA, 25 bp, Homo sapiens
catcttatgcatgtgtttgtgtgta

SEQ ID NO: 9235 - DNA, 25 bp, Homo sapiens
gtcatcaagtgatagagaaacttca

SEQ ID NO: 9236 - DNA, 25 bp, Homo sapiens
tagccacacgtatgcataaatgtgc

SEQ ID NO: 9237 - DNA, 25 bp, Homo sapiens
ctggatctctagaagctaattatgt

SEQ ID NO: 9238 - DNA, 25 bp, Homo sapiens
caatgggcttggctggtctaaaacc

SEQ ID NO: 9239 - DNA, 25 bp, Homo sapiens
gattgactttgacctgcaccacagg

SEQ ID NO: 9240 - DNA, 25 bp, Homo sapiens
gtcattatcaaatagcggcggcagc

SEQ ID NO: 9241 - DNA, 25 bp, Homo sapiens
tctcaatatggggttcagggctttc

SEQ ID NO: 9242 - DNA, 25 bp, Homo sapiens
ctgggacatgcttctggttagtgga

SEQ ID NO: 9243 - DNA, 25 bp, Homo sapiens
tcctgcacccatgtttaggggattc

SEQ ID NO: 9244 - DNA, 25 bp, Homo sapiens
tgagttgcaaattacacccaggtta

SEQ ID NO: 9245 - DNA, 25 bp, Homo sapiens
agctcttccatgaccagcattgtag

SEQ ID NO: 9246 - DNA, 25 bp, Homo sapiens
cccaggaaaaaggtacagagtatta

SEQ ID NO: 9247 - DNA, 25 bp, Homo sapiens
cagtggtgataaggaatagagtagc

SEQ ID NO: 9248 - DNA, 25 bp, Homo sapiens
agctcgcagttgtcagtccagtata

SEQ ID NO: 9249 - DNA, 25 bp, Homo sapiens
caatggctgatctttgggtttcttc

SEQ ID NO: 9250 - DNA, 25 bp, Homo sapiens
ggaggattgcacaaaccttagatta

SEQ ID NO: 9251 - DNA, 25 bp, Homo sapiens
acccaggctgtccaggtcaaaaaca

SEQ ID NO: 9252 - DNA, 25 bp, Homo sapiens
tagggaattaccaccagagtcaaga

SEQ ID NO: 9253 - DNA, 25 bp, Homo sapiens
tctctctgaggcacttggcaagatc

SEQ ID NO: 9254 - DNA, 25 bp, Homo sapiens
ggcctaacaagtgaacagctcagta

SEQ ID NO: 9255 - DNA, 25 bp, Homo sapiens
tggtttactttgtttcttcacccct

SEQ ID NO: 9256 - DNA, 25 bp, Homo sapiens
gatgatgccaacttctccactgaga

SEQ ID NO: 9257 - DNA, 25 bp, Homo sapiens
tcatctggaatggaggctaataacc

SEQ ID NO: 9258 - DNA, 25 bp, Homo sapiens
cattggcttttggactcacaagata

SEQ ID NO: 9259 - DNA, 25 bp, Homo sapiens
actttgaactggaggtggggacatc

SEQ ID NO: 9260 - DNA, 25 bp, Homo sapiens
tggccttccacatccttggactgga

SEQ ID NO: 9261 - DNA, 25 bp, Homo sapiens
atcagaataaatgcatagacattta

SEQ ID NO: 9262 - DNA, 25 bp, Homo sapiens
tcaggtttcagtttcattgtctaca

SEQ ID NO: 9263 - DNA, 25 bp, Homo sapiens
aggaacctctgctttatttattaca

SEQ ID NO: 9264 - DNA, 25 bp, Homo sapiens
agccagctctttgacgtagtataaa

SEQ ID NO: 9265 - DNA, 25 bp, Homo sapiens
cgcaggcactttggaaaaatgagta

SEQ ID NO: 9266 - DNA, 25 bp, Homo sapiens
cacacttatgtgtcaggagccttta

SEQ ID NO: 9267 - DNA, 25 bp, Homo sapiens
tgtccctgggctagatcaactgctg

SEQ ID NO: 9268 - DNA, 25 bp, Homo sapiens
gccatctttctagtgttgcagctca

SEQ ID NO: 9269 - DNA, 25 bp, Homo sapiens
agagtctcctggtctgtgtaggtcc

SEQ ID NO: 9270 - DNA, 25 bp, Homo sapiens
tttaacttgctctggaatcattgtg

SEQ ID NO: 9271 - DNA, 25 bp, Homo sapiens
tggcagaaaacttaaggcatctttg

SEQ ID NO: 9272 - DNA, 25 bp, Homo sapiens
atgggacccattatagcaagtgata

SEQ ID NO: 9273 - DNA, 25 bp, Homo sapiens
ggcagaaattttcttacttcccatg

SEQ ID NO: 9274 - DNA, 25 bp, Homo sapiens
gtgcccttcttcaaagccctgatag

SEQ ID NO: 9275 - DNA, 25 bp, Homo sapiens
ttctattttgacaccagagttggga

SEQ ID NO: 9276 - DNA, 25 bp, Homo sapiens
cagcacctcgctagttccttcttta

SEQ ID NO: 9277 - DNA, 25 bp, Homo sapiens
gaggaggaactagtcccaattttta

SEQ ID NO: 9278 - DNA, 25 bp, Homo sapiens
gggttcagacagtacttttcagttc

SEQ ID NO: 9279 - DNA, 25 bp, Homo sapiens
ctggcctttggaaaatcataaactt

SEQ ID NO: 9280 - DNA, 25 bp, Homo sapiens
tgctgcttttgagggaccaagcttc

SEQ ID NO: 9281 - DNA, 25 bp, Homo sapiens
tgcggctttgttgagccctaaagaa

SEQ ID NO: 9282 - DNA, 25 bp, Homo sapiens
ctggttgatacagcaatgtcatcta

SEQ ID NO: 9283 - DNA, 25 bp, Homo sapiens
agctggttccttcctgtcatgtaga

SEQ ID NO: 9284 - DNA, 25 bp, Homo sapiens
tcctgcaccactcttttgtaaattg

SEQ ID NO: 9285 - DNA, 25 bp, Homo sapiens
tgatttgaactatgaccaggccttg

SEQ ID NO: 9286 - DNA, 25 bp, Homo sapiens
gcaactttgcaacgtggtcagaata

SEQ ID NO: 9287 - DNA, 25 bp, Homo sapiens
tcaatgccagtcagaacctaaagtc

SEQ ID NO: 9288 - DNA, 25 bp, Homo sapiens
aaaagaagaaatatgatcaaagtag

SEQ ID NO: 9289 - DNA, 25 bp, Homo sapiens
ccatgctgtgtacaactagtttcta

SEQ ID NO: 9290 - DNA, 25 bp, Homo sapiens
ggctatcccagggtgccagctaaga

SEQ ID NO: 9291 - DNA, 25 bp, Homo sapiens
tgcccttcaggatgcagcacttgtt

SEQ ID NO: 9292 - DNA, 25 bp, Homo sapiens
gcaggatgactgaagaccgattatc

SEQ ID NO: 9293 - DNA, 25 bp, Homo sapiens
cacttgggagaaaagacgatacctc

SEQ ID NO: 9294 - DNA, 25 bp, Homo sapiens
cagtgcctcgcagtcatggaagttt

SEQ ID NO: 9295 - DNA, 25 bp, Homo sapiens
ccctgaggagaaagatgcctaattc

SEQ ID NO: 9296 - DNA, 25 bp, Homo sapiens
ctggtttccaggacatgccatcatc

SEQ ID NO: 9297 - DNA, 25 bp, Homo sapiens
gccctgccacctgaggattccttta

SEQ ID NO: 9298 - DNA, 25 bp, Homo sapiens
gtgttcagcactctccttgtccaga

SEQ ID NO: 9299 - DNA, 25 bp, Homo sapiens
tggtatcaaacttcttgacatctct

SEQ ID NO: 9300 - DNA, 25 bp, Homo sapiens
cagtggcctggcttaacatatttgg

SEQ ID NO: 9301 - DNA, 25 bp, Homo sapiens
tggtcactgatactttgagacaaga

SEQ ID NO: 9302 - DNA, 25 bp, Homo sapiens
catttagttggtggcagtcagttac

SEQ ID NO: 9303 - DNA, 25 bp, Homo sapiens
ggacgtgatcatttgttttcaagga

SEQ ID NO: 9304 - DNA, 25 bp, Homo sapiens
ccaggttaactttgctcggccagta

SEQ ID NO: 9305 - DNA, 25 bp, Homo sapiens
atggcagaagggctgaacatttttc

SEQ ID NO: 9306 - DNA, 25 bp, Homo sapiens
gtgctccatgactggggttcccata

SEQ ID NO: 9307 - DNA, 25 bp, Homo sapiens
tgcctgcagtagcttgaaagtttta

SEQ ID NO: 9308 - DNA, 25 bp, Homo sapiens
ccgggtactgtaaattgctttgaac

SEQ ID NO: 9309 - DNA, 25 bp, Homo sapiens
atgctcctcatgctggtctctatga

SEQ ID NO: 9310 - DNA, 25 bp, Homo sapiens
tgaaactatataaccatttccaagt

SEQ ID NO: 9311 - DNA, 25 bp, Homo sapiens
gctgcctccctttctaacctggtta

SEQ ID NO: 9312 - DNA, 25 bp, Homo sapiens
aggtaagtctgcctctggtatttta

SEQ ID NO: 9313 - DNA, 25 bp, Homo sapiens
aacggcctgcctggacttggaaaca

SEQ ID NO: 9314 - DNA, 25 bp, Homo sapiens
acccttcctgggagccttgcaattg

SEQ ID NO: 9315 - DNA, 25 bp, Homo sapiens
agaaagttttctctaggtaagtgag

SEQ ID NO: 9316 - DNA, 25 bp, Homo sapiens
gcacagcctggccatggattctact

SEQ ID NO: 9317 - DNA, 25 bp, Homo sapiens
acctgtgtttatactggctcaaaga

SEQ ID NO: 9318 - DNA, 25 bp, Homo sapiens
ggcacagtgccttgttcattaggtg

SEQ ID NO: 9319 - DNA, 25 bp, Homo sapiens
gtaggtactacttctggctttgcta

SEQ ID NO: 9320 - DNA, 25 bp, Homo sapiens
tgcactccctgttgctaaagctatt

SEQ ID NO: 9321 - DNA, 25 bp, Homo sapiens
aagtattctgaagggtcgctcacca

SEQ ID NO: 9322 - DNA, 25 bp, Homo sapiens
agggtatcatcttcaagctgtcaca

SEQ ID NO: 9323 - DNA, 25 bp, Homo sapiens
gtcagtcagagatggccaatgcacc

SEQ ID NO: 9324 - DNA, 25 bp, Homo sapiens
accctggtcaatacatgtgcctcta

SEQ ID NO: 9325 - DNA, 25 bp, Homo sapiens
gtttttaccttaggtaaagaacacc

SEQ ID NO: 9326 - DNA, 25 bp, Homo sapiens
gggcattcttttctacctgtgttac

SEQ ID NO: 9327 - DNA, 25 bp, Homo sapiens
cttctgggagttggatgcacttatc

SEQ ID NO: 9328 - DNA, 25 bp, Homo sapiens
acaggctaaaggtggtgcagttcta

SEQ ID NO: 9329 - DNA, 25 bp, Homo sapiens
ccatttggatttcaggggatttttc

SEQ ID NO: 9330 - DNA, 25 bp, Homo sapiens
tcccagtgcttcctctgagtaggtt

SEQ ID NO: 9331 - DNA, 25 bp, Homo sapiens
ggtagcgtgtctcttacagctctca

SEQ ID NO: 9332 - DNA, 25 bp, Homo sapiens
tgcctggtggctcctcaaatccatg

SEQ ID NO: 9333 - DNA, 25 bp, Homo sapiens
agtaaattatatgtatacctgcaaa

SEQ ID NO: 9334 - DNA, 25 bp, Homo sapiens
cggagattttcttacttttgaaaca

SEQ ID NO: 9335 - DNA, 25 bp, Homo sapiens
ttttttttttagattattgtgcctt

SEQ ID NO: 9336 - DNA, 25 bp, Homo sapiens
gtctgtgctgatgccttcaaatcta

SEQ ID NO: 9337 - DNA, 25 bp, Homo sapiens
gtgggaaaacttcaagagttgcatc

SEQ ID NO: 9338 - DNA, 25 bp, Homo sapiens
aggcagccatttcagtcagatctta

SEQ ID NO: 9339 - DNA, 25 bp, Homo sapiens
acctgtcctagagtctcagccttga

SEQ ID NO: 9340 - DNA, 25 bp, Homo sapiens
tatctctgcctttgtagcttctctg

SEQ ID NO: 9341 - DNA, 25 bp, Homo sapiens
gtccgtcactgcagttgtcactata

SEQ ID NO: 9342 - DNA, 25 bp, Homo sapiens
tctcagtgatattttgggacccaaa

SEQ ID NO: 9343 - DNA, 25 bp, Homo sapiens
catcaccaggggagttctatatcta

SEQ ID NO: 9344 - DNA, 25 bp, Homo sapiens
cgtcaaattttcagttggcttaatc

SEQ ID NO: 9345 - DNA, 25 bp, Homo sapiens
ctggtagaagtattgtcagagactc

SEQ ID NO: 9346 - DNA, 25 bp, Homo sapiens
ggtcccttctgcatggtgaggaaca

SEQ ID NO: 9347 - DNA, 25 bp, Homo sapiens
gtatagtgactgtgagcaccctctc

SEQ ID NO: 9348 - DNA, 25 bp, Homo sapiens
gtctgcctatgtgatgccaacacca

SEQ ID NO: 9349 - DNA, 25 bp, Homo sapiens
gactctaagggcttctccaggttta

SEQ ID NO: 9350 - DNA, 25 bp, Homo sapiens
agtggccacaatcatctttcaatca

SEQ ID NO: 9351 - DNA, 25 bp, Homo sapiens
gtcctgcttacctacaaagttcctg

SEQ ID NO: 9352 - DNA, 25 bp, Homo sapiens
aggagcttctcctgctgtcaaatga

SEQ ID NO: 9353 - DNA, 25 bp, Homo sapiens
ctgatttcttattctccgcctttga

SEQ ID NO: 9354 - DNA, 25 bp, Homo sapiens
cagccaggtatttttgagcaaggtc

SEQ ID NO: 9355 - DNA, 25 bp, Homo sapiens
tgactgtccaacacctttttggatc

SEQ ID NO: 9356 - DNA, 25 bp, Homo sapiens
tgtgagctcattaaccagggcttta

SEQ ID NO: 9357 - DNA, 25 bp, Homo sapiens
gaccatgtgattttcattccgtaga

SEQ ID NO: 9358 - DNA, 25 bp, Homo sapiens
tctcccggggtattagccctatcta

SEQ ID NO: 9359 - DNA, 25 bp, Homo sapiens
gagatgcagcattttcccaattttg

SEQ ID NO: 9360 - DNA, 25 bp, Homo sapiens
gtgcatgcctttttgtcagacagta

SEQ ID NO: 9361 - DNA, 25 bp, Homo sapiens
gtagagtgacatctttggaacaatc

SEQ ID NO: 9362 - DNA, 25 bp, Homo sapiens
taccaagtatttatttctaaaaact

SEQ ID NO: 9363 - DNA, 25 bp, Homo sapiens
tgtcggaggcacaggatattttttc

SEQ ID NO: 9364 - DNA, 25 bp, Homo sapiens
ggctcagttctgaccaccaaatatg

SEQ ID NO: 9365 - DNA, 25 bp, Homo sapiens
aagcactcaatcctccataccaata

SEQ ID NO: 9366 - DNA, 25 bp, Homo sapiens
tctgcacagaagtctaaagcacttg

SEQ ID NO: 9367 - DNA, 25 bp, Homo sapiens
catgggtgaccactggcattagctc

SEQ ID NO: 9368 - DNA, 25 bp, Homo sapiens
cctgtatctctacaaaatatctata

SEQ ID NO: 9369 - DNA, 25 bp, Homo sapiens
aaatggaaatagttattatcccaat

SEQ ID NO: 9370 - DNA, 25 bp, Homo sapiens
gggctctgcttctctctagtttttc

SEQ ID NO: 9371 - DNA, 25 bp, Homo sapiens
actcccattaggcatgtctgctgga

SEQ ID NO: 9372 - DNA, 25 bp, Homo sapiens
ccctcggggctcatattcacatcta

SEQ ID NO: 9373 - DNA, 25 bp, Homo sapiens
tacggtgtttccatagcatcggatg

SEQ ID NO: 9374 - DNA, 25 bp, Homo sapiens
tgcagctactggcaagctcctctca

SEQ ID NO: 9375 - DNA, 25 bp, Homo sapiens
tcagggctgtagatgctagatcacc

SEQ ID NO: 9376 - DNA, 25 bp, Homo sapiens
ggcactagaatgagcataggacttg

SEQ ID NO: 9377 - DNA, 25 bp, Homo sapiens
cacatggttcagttagcagccttta

SEQ ID NO: 9378 - DNA, 25 bp, Homo sapiens
tgagaaccctcccttgtaccacatg

SEQ ID NO: 9379 - DNA, 25 bp, Homo sapiens
tcccacgatgtttttacctcaggtc

SEQ ID NO: 9380 - DNA, 25 bp, Homo sapiens
acagaggctcctacaacttttaaga

SEQ ID NO: 9381 - DNA, 25 bp, Homo sapiens
tcacagtgctgtctctcatggaaca

SEQ ID NO: 9382 - DNA, 25 bp, Homo sapiens
ccctgatgaataacatgaataactt

SEQ ID NO: 9383 - DNA, 25 bp, Homo sapiens
aaattgaataagtattttctgaatc

SEQ ID NO: 9384 - DNA, 25 bp, Homo sapiens
tttgctctgaaacactctggactga

SEQ ID NO: 9385 - DNA, 25 bp, Homo sapiens
cacttaagagtgaaacgcagcatcc

SEQ ID NO: 9386 - DNA, 25 bp, Homo sapiens
tcccagtcggtgataatgccagtca

SEQ ID NO: 9387 - DNA, 25 bp, Homo sapiens
actgattgcatcttggtggaaattc

SEQ ID NO: 9388 - DNA, 25 bp, Homo sapiens
ccacaccaagggaggtatatgcctg

SEQ ID NO: 9389 - DNA, 25 bp, Homo sapiens
ggtggcctctactaagcttaccaag

SEQ ID NO: 9390 - DNA, 25 bp, Homo sapiens
tgacttgtcctctgtagcactgttg

SEQ ID NO: 9391 - DNA, 25 bp, Homo sapiens
ccagagggcagttgaaaagttgtta

SEQ ID NO: 9392 - DNA, 25 bp, Homo sapiens
ttcatagggaggtgacaaaatgtct

SEQ ID NO: 9393 - DNA, 25 bp, Homo sapiens
ttcctgttgcacacacatacaaagt

SEQ ID NO: 9394 - DNA, 25 bp, Homo sapiens
gagtcccagacacctctttttattg

SEQ ID NO: 9395 - DNA, 25 bp, Homo sapiens
tgtgtagctagctcccaatgaagta

SEQ ID NO: 9396 - DNA, 25 bp, Homo sapiens
ccagcgctcgtcttgttaataatta

SEQ ID NO: 9397 - DNA, 25 bp, Homo sapiens
aaatcccagttgtagcttttgaagc

SEQ ID NO: 9398 - DNA, 25 bp, Homo sapiens
gatgggcttacctgtttcttcaatg

SEQ ID NO: 9399 - DNA, 25 bp, Homo sapiens
gtccctgggcttagaaatgagccta

SEQ ID NO: 9400 - DNA, 25 bp, Homo sapiens
tgccactttcagcaggagcagcaaa

SEQ ID NO: 9401 - DNA, 25 bp, Homo sapiens
atcaggactttttgcatgtgttctc

SEQ ID NO: 9402 - DNA, 25 bp, Homo sapiens
ccaggctaacttcctttgagtttga

SEQ ID NO: 9403 - DNA, 25 bp, Homo sapiens
gtctgggactcacactggcacttct

SEQ ID NO: 9404 - DNA, 25 bp, Homo sapiens
ccactgctgaagctggctggagttc

SEQ ID NO: 9405 - DNA, 25 bp, Homo sapiens
aatgtctaaatatacagtagttcca

SEQ ID NO: 9406 - DNA, 25 bp, Homo sapiens
ttgcgtgcctccagtcaagacgtgg

SEQ ID NO: 9407 - DNA, 25 bp, Homo sapiens
gtggcccacttctgagtatgaatta

SEQ ID NO: 9408 - DNA, 25 bp, Homo sapiens
ttccttaaaatacacctcttggagc

SEQ ID NO: 9409 - DNA, 25 bp, Homo sapiens
cacaggtgtcagcaactctaaattc

SEQ ID NO: 9410 - DNA, 25 bp, Homo sapiens
gctcacgagctctgaattcacaagt

SEQ ID NO: 9411 - DNA, 25 bp, Homo sapiens
catggtgagggctaagaaactgcta

SEQ ID NO: 9412 - DNA, 25 bp, Homo sapiens
gcccaggtgatccaatactccaata

SEQ ID NO: 9413 - DNA, 25 bp, Homo sapiens
ttgcatggaaagaaaactgtggctc

SEQ ID NO: 9414 - DNA, 25 bp, Homo sapiens
agcgactgctggacacacggactat

SEQ ID NO: 9415 - DNA, 25 bp, Homo sapiens
taaaaataaggcactcaaatgtttg

SEQ ID NO: 9416 - DNA, 25 bp, Homo sapiens
tcatcagctctctagggcaggtctc

SEQ ID NO: 9417 - DNA, 25 bp, Homo sapiens
gcagctgccagttcacaagttcaga

SEQ ID NO: 9418 - DNA, 25 bp, Homo sapiens
gagcgccttctccatgcatttccga

SEQ ID NO: 9419 - DNA, 25 bp, Homo sapiens
gagaagttcctacacccactgagtg

SEQ ID NO: 9420 - DNA, 25 bp, Homo sapiens
ggcggtgcatgtcccagttaaaagc

SEQ ID NO: 9421 - DNA, 25 bp, Homo sapiens
cctcctggtacacgggcagcatctt

SEQ ID NO: 9422 - DNA, 25 bp, Homo sapiens
cgggctttaggcatctcacatgttg

SEQ ID NO: 9423 - DNA, 25 bp, Homo sapiens
agtcatttctgtggctaccttaaca

SEQ ID NO: 9424 - DNA, 25 bp, Homo sapiens
cgccagcataccagctcatgtttca

SEQ ID NO: 9425 - DNA, 25 bp, Homo sapiens
ggggccagggctttatatcttttca

SEQ ID NO: 9426 - DNA, 25 bp, Homo sapiens
ataaaataaataaatgcacagttta

SEQ ID NO: 9427 - DNA, 25 bp, Homo sapiens
acccttcctctggtttcctgtgtga

SEQ ID NO: 9428 - DNA, 25 bp, Homo sapiens
cctgcaaaaaatatccttccaatta

SEQ ID NO: 9429 - DNA, 25 bp, Homo sapiens
atccttgggaaagcagtcctccaca

SEQ ID NO: 9430 - DNA, 25 bp, Homo sapiens
agcaaacctttcttttctaaaatga

SEQ ID NO: 9431 - DNA, 25 bp, Homo sapiens
ttgtgaattccagaagtctatcttc

SEQ ID NO: 9432 - DNA, 25 bp, Homo sapiens
gtcagcagcagatcaaggaacagtc

SEQ ID NO: 9433 - DNA, 25 bp, Homo sapiens
ggagaatcttgtgcctgctagttca

SEQ ID NO: 9434 - DNA, 25 bp, Homo sapiens
gccagcttgggttggcagttcttta

SEQ ID NO: 9435 - DNA, 25 bp, Homo sapiens
caaaaaactttcatgtttttatata

SEQ ID NO: 9436 - DNA, 25 bp, Homo sapiens
caggggtaaacctccaacaggaatt

SEQ ID NO: 9437 - DNA, 25 bp, Homo sapiens
ttgaatatcatgttgtattgtaaaa

SEQ ID NO: 9438 - DNA, 25 bp, Homo sapiens
attccttatcttgccatctttgctg

SEQ ID NO: 9439 - DNA, 25 bp, Homo sapiens
ggtatatattttctacacttctagg

SEQ ID NO: 9440 - DNA, 25 bp, Homo sapiens
tactgcccgaggaccacttggactt

SEQ ID NO: 9441 - DNA, 25 bp, Homo sapiens
cagagctccacacagggctgtttta

SEQ ID NO: 9442 - DNA, 25 bp, Homo sapiens
gtgggtcccactgcatgttatatca

SEQ ID NO: 9443 - DNA, 25 bp, Homo sapiens
aaaatggtgctcagctccccgctcc

SEQ ID NO: 9444 - DNA, 25 bp, Homo sapiens
ccctcctttggcttctaaacagata

SEQ ID NO: 9445 - DNA, 25 bp, Homo sapiens
ggagctatggacctgccctcaaaga

SEQ ID NO: 9446 - DNA, 25 bp, Homo sapiens
taattttgaggctgggccagcagtg

SEQ ID NO: 9447 - DNA, 25 bp, Homo sapiens
tatcctccggagtaagcagctctta

SEQ ID NO: 9448 - DNA, 25 bp, Homo sapiens
aatttatcctttaagagaaggaaaa

SEQ ID NO: 9449 - DNA, 25 bp, Homo sapiens
ctctagtgcagtgaccatggtacca

SEQ ID NO: 9450 - DNA, 25 bp, Homo sapiens
gcattctcactagctaatgttaggc

SEQ ID NO: 9451 - DNA, 25 bp, Homo sapiens
tcacctctgtgggagctggatactg

SEQ ID NO: 9452 - DNA, 25 bp, Homo sapiens
ttacagcttgattgtccaggccctc

SEQ ID NO: 9453 - DNA, 25 bp, Homo sapiens
cctcaagtgatctcggtggaatgtc

SEQ ID NO: 9454 - DNA, 25 bp, Homo sapiens
cgtgctgcagggacatagacttttc

SEQ ID NO: 9455 - DNA, 25 bp, Homo sapiens
gccaataggccgttcactgtccaga

SEQ ID NO: 9456 - DNA, 25 bp, Homo sapiens
tggcctgggcctaacacacataagc

SEQ ID NO: 9457 - DNA, 25 bp, Homo sapiens
ccttgaggctaacttgcttggctga

SEQ ID NO: 9458 - DNA, 25 bp, Homo sapiens
tcagcttgtcaagtgcacccattgg

SEQ ID NO: 9459 - DNA, 25 bp, Homo sapiens
acagccggttgaaatccttaatgca

SEQ ID NO: 9460 - DNA, 25 bp, Homo sapiens
gggtctttacacacggatggccatc

SEQ ID NO: 9461 - DNA, 25 bp, Homo sapiens
ccctacctgagctcaatgttgaatt

SEQ ID NO: 9462 - DNA, 25 bp, Homo sapiens
gctgatttaggtctccatggcaatt

SEQ ID NO: 9463 - DNA, 25 bp, Homo sapiens
tgagggcccttcaagtacagctctt

SEQ ID NO: 9464 - DNA, 25 bp, Homo sapiens
tgggtcttgaccaacagtcctgtga

SEQ ID NO: 9465 - DNA, 25 bp, Homo sapiens
atggcctttcttcccaggctacttc

SEQ ID NO: 9466 - DNA, 25 bp, Homo sapiens
taggaaaccactgagaagttttttg

SEQ ID NO: 9467 - DNA, 25 bp, Homo sapiens
cagagccatcacggcagccctgtcc

SEQ ID NO: 9468 - DNA, 25 bp, Homo sapiens
tgctacctttccacgggccttctaa

SEQ ID NO: 9469 - DNA, 25 bp, Homo sapiens
caaaggaaaccctcacaagaccaac

SEQ ID NO: 9470 - DNA, 25 bp, Homo sapiens
aggccattgctttgtttcctgcaca

SEQ ID NO: 9471 - DNA, 25 bp, Homo sapiens
cccatccctgtgtgagtttttccta

SEQ ID NO: 9472 - DNA, 25 bp, Homo sapiens
accggaggagagccaaggctactca

SEQ ID NO: 9473 - DNA, 25 bp, Homo sapiens
tgcctggcacaagggaagatacttc

SEQ ID NO: 9474 - DNA, 25 bp, Homo sapiens
tcagttcctgtgatcaagttgttac

SEQ ID NO: 9475 - DNA, 25 bp, Homo sapiens
cgcaaagggcagctggtttatattt

SEQ ID NO: 9476 - DNA, 25 bp, Homo sapiens
acgctaccagtcatccttaaggaag

SEQ ID NO: 9477 - DNA, 25 bp, Homo sapiens
tgctcttacacacacacgtcacaga

SEQ ID NO: 9478 - DNA, 25 bp, Homo sapiens
cgttgaactagctctgtgaattcta

SEQ ID NO: 9479 - DNA, 25 bp, Homo sapiens
tcacataatttactgattggacttc

SEQ ID NO: 9480 - DNA, 25 bp, Homo sapiens
ccaagtcaggatcccaaattgatgc

SEQ ID NO: 9481 - DNA, 25 bp, Homo sapiens
agagggagcccatctgctttgttca

SEQ ID NO: 9482 - DNA, 25 bp, Homo sapiens
ctgcagtctccatccctaggtagga

SEQ ID NO: 9483 - DNA, 25 bp, Homo sapiens
gaagagagtaggaagggcataatcg

SEQ ID NO: 9484 - DNA, 25 bp, Homo sapiens
tggggacgtgccctaaattgccttg

SEQ ID NO: 9485 - DNA, 25 bp, Homo sapiens
agtgtgccctgctcttcttggaata

SEQ ID NO: 9486 - DNA, 25 bp, Homo sapiens
ctggtttctggtagccataggacta

SEQ ID NO: 9487 - DNA, 25 bp, Homo sapiens
aggccctgaatacccattgcaagtg

SEQ ID NO: 9488 - DNA, 25 bp, Homo sapiens
tggagtttaagtttataatctattc

SEQ ID NO: 9489 - DNA, 25 bp, Homo sapiens
tattataggatgcaaattgggattc

SEQ ID NO: 9490 - DNA, 25 bp, Homo sapiens
gcagtgcccacctttactctgaaga

SEQ ID NO: 9491 - DNA, 25 bp, Homo sapiens
tgcttttcctcacgctggccacagg

SEQ ID NO: 9492 - DNA, 25 bp, Homo sapiens
cgtggcatcaccaggcccatgtgta

SEQ ID NO: 9493 - DNA, 25 bp, Homo sapiens
ggacagggtctagctccagtattta

SEQ ID NO: 9494 - DNA, 25 bp, Homo sapiens
ggggccactcttcggatgcttcaaa

SEQ ID NO: 9495 - DNA, 25 bp, Homo sapiens
ggttttacctctgccatttgactga

SEQ ID NO: 9496 - DNA, 25 bp, Homo sapiens
gatcgctattcttttctcctatttg

SEQ ID NO: 9497 - DNA, 25 bp, Homo sapiens
aaaagagagagagtatatatataaa

SEQ ID NO: 9498 - DNA, 25 bp, Homo sapiens
ggacattctctgtggtgcctaaaac

SEQ ID NO: 9499 - DNA, 25 bp, Homo sapiens
cacaggtcctgcctattttgggata

SEQ ID NO: 9500 - DNA, 25 bp, Homo sapiens
ggactctggggtatcatctgcttga

SEQ ID NO: 9501 - DNA, 25 bp, Homo sapiens
taccagttccatattcccaagaggg

SEQ ID NO: 9502 - DNA, 25 bp, Homo sapiens
tttgacatctgcttggctgaaccca

SEQ ID NO: 9503 - DNA, 25 bp, Homo sapiens
ccctgggcctgaagattgctagttc

SEQ ID NO: 9504 - DNA, 25 bp, Homo sapiens
cctccctggctgtgatgaaaagtaa

SEQ ID NO: 9505 - DNA, 25 bp, Homo sapiens
gccctttgcgtagcacctgcatgta

SEQ ID NO: 9506 - DNA, 25 bp, Homo sapiens
ggtgctacagcacagtactgatttc

SEQ ID NO: 9507 - DNA, 25 bp, Homo sapiens
actgcacttagcatggtgcctggta

SEQ ID NO: 9508 - DNA, 25 bp, Homo sapiens
tgtaatcactgttcatgtcctggca

SEQ ID NO: 9509 - DNA, 25 bp, Homo sapiens
tataatttgctctctccaggccagg

SEQ ID NO: 9510 - DNA, 25 bp, Homo sapiens
cagggatgtacttcttgggattctc

SEQ ID NO: 9511 - DNA, 25 bp, Homo sapiens
ctttctggttctctatgcgctgcta

SEQ ID NO: 9512 - DNA, 25 bp, Homo sapiens
tcctcccaggcaagtccaagctttg

SEQ ID NO: 9513 - DNA, 25 bp, Homo sapiens
cggagcccttctgcctgttctattg

SEQ ID NO: 9514 - DNA, 25 bp, Homo sapiens
ttgtgctatgcaaaaagtgacttcg

SEQ ID NO: 9515 - DNA, 25 bp, Homo sapiens
atgccaaaacttttgtagtttttgt

SEQ ID NO: 9516 - DNA, 25 bp, Homo sapiens
agctacatttgtgaggcctggatga

SEQ ID NO: 9517 - DNA, 25 bp, Homo sapiens
ggcttaaagttcaagtgtcctgcaa

SEQ ID NO: 9518 - DNA, 25 bp, Homo sapiens
caaacatgtttttatttagtaatca

SEQ ID NO: 9519 - DNA, 25 bp, Homo sapiens
gccatgctgaaagcgctaccggttt

SEQ ID NO: 9520 - DNA, 25 bp, Homo sapiens
tgggcatattattcaggtactctca

SEQ ID NO: 9521 - DNA, 25 bp, Homo sapiens
acacgtcctaaaagttctgctttat

SEQ ID NO: 9522 - DNA, 25 bp, Homo sapiens
gccttgtagtaataccctttccttg

SEQ ID NO: 9523 - DNA, 25 bp, Homo sapiens
aatgacccgtgtcttgcttgccttg

SEQ ID NO: 9524 - DNA, 25 bp, Homo sapiens
ccctggtctggtatctttgcgaatg

SEQ ID NO: 9525 - DNA, 25 bp, Homo sapiens
tcctgaagcaggagattactggttc

SEQ ID NO: 9526 - DNA, 25 bp, Homo sapiens
ctgacttcctccatgccctatagta

SEQ ID NO: 9527 - DNA, 25 bp, Homo sapiens
tcttctgtttgacttggcatgggta

SEQ ID NO: 9528 - DNA, 25 bp, Homo sapiens
gagcctcctcttccttgattacatg

SEQ ID NO: 9529 - DNA, 25 bp, Homo sapiens
cagagcggtgctcctgaaatatata

SEQ ID NO: 9530 - DNA, 25 bp, Homo sapiens
atgatgccgagattacagccctgta

SEQ ID NO: 9531 - DNA, 25 bp, Homo sapiens
atccctccgtggcaagtattgttga

SEQ ID NO: 9532 - DNA, 25 bp, Homo sapiens
atatcccagctgatccgactgccgg

SEQ ID NO: 9533 - DNA, 25 bp, Homo sapiens
tggcttgagccatatcccgtttgtc

SEQ ID NO: 9534 - DNA, 25 bp, Homo sapiens
gtcgtacacgctaggattgaacatc

SEQ ID NO: 9535 - DNA, 25 bp, Homo sapiens
tcaggctcgcttggacatttccaga

SEQ ID NO: 9536 - DNA, 25 bp, Homo sapiens
cacgggcgttgttttgagaactttc

SEQ ID NO: 9537 - DNA, 25 bp, Homo sapiens
gagggcacacggcttcaaatgagaa

SEQ ID NO: 9538 - DNA, 25 bp, Homo sapiens
cttcctaggcaagagaggctgtttc

SEQ ID NO: 9539 - DNA, 25 bp, Homo sapiens
tggccctgcatgctggtatccttgc

SEQ ID NO: 9540 - DNA, 25 bp, Homo sapiens
cctcggccctgacatgaagtctgca

SEQ ID NO: 9541 - DNA, 25 bp, Homo sapiens
cctcattcatgctagggaacacttc

SEQ ID NO: 9542 - DNA, 25 bp, Homo sapiens
cgcggctgctacacgttgatgttct

SEQ ID NO: 9543 - DNA, 25 bp, Homo sapiens
gcctttgttgcttgccacttggaga

SEQ ID NO: 9544 - DNA, 25 bp, Homo sapiens
ggccctggttggtactagcatttta

SEQ ID NO: 9545 - DNA, 25 bp, Homo sapiens
ggggcaagctcactgctacaatatc

SEQ ID NO: 9546 - DNA, 25 bp, Homo sapiens
attctagccattgttacatgtttgc

SEQ ID NO: 9547 - DNA, 25 bp, Homo sapiens
cccagtggtatggtatacacaatta

SEQ ID NO: 9548 - DNA, 25 bp, Homo sapiens
ctcgactttgtaatctgggtcctta

SEQ ID NO: 9549 - DNA, 25 bp, Homo sapiens
gagccctgcctttgaggtcataatc

SEQ ID NO: 9550 - DNA, 25 bp, Homo sapiens
tgttttttaacccaaaccaaaaatg

SEQ ID NO: 9551 - DNA, 25 bp, Homo sapiens
gaagtgcctgacctttgtcctccca

SEQ ID NO: 9552 - DNA, 25 bp, Homo sapiens
tgcagtcacctctctgttggaaaca

SEQ ID NO: 9553 - DNA, 25 bp, Homo sapiens
ctagcacagggcaagggctcaccca

SEQ ID NO: 9554 - DNA, 25 bp, Homo sapiens
gcggacaggatctcggttccatcta

SEQ ID NO: 9555 - DNA, 25 bp, Homo sapiens
gcttcccgtggcttttgagtcttaa

SEQ ID NO: 9556 - DNA, 25 bp, Homo sapiens
tgctgtaggcccatggacttccatg

SEQ ID NO: 9557 - DNA, 25 bp, Homo sapiens
tgttagcaagtgaggtggccattta

SEQ ID NO: 9558 - DNA, 25 bp, Homo sapiens
attaaagcatttccatcccaggggc

SEQ ID NO: 9559 - DNA, 25 bp, Homo sapiens
gcctcacattgtctgcctggtattc

SEQ ID NO: 9560 - DNA, 25 bp, Homo sapiens
ttctggacctgatacctgggatggc

SEQ ID NO: 9561 - DNA, 25 bp, Homo sapiens
cctgagctgtctttcgagttatcca

SEQ ID NO: 9562 - DNA, 25 bp, Homo sapiens
tctccgctgggttgatgtaagtata

SEQ ID NO: 9563 - DNA, 25 bp, Homo sapiens
gccctggctggtctggcagtttaat

SEQ ID NO: 9564 - DNA, 25 bp, Homo sapiens
ttactgggagctataaagagacctc

SEQ ID NO: 9565 - DNA, 25 bp, Homo sapiens
cattgtggcggaatctctgttgagc

SEQ ID NO: 9566 - DNA, 25 bp, Homo sapiens
gatgctgcccagttcctaaaagata

SEQ ID NO: 9567 - DNA, 25 bp, Homo sapiens
tcccgaggccttctacttggtgtca

SEQ ID NO: 9568 - DNA, 25 bp, Homo sapiens
tttcttctataaatttcattgtttt

SEQ ID NO: 9569 - DNA, 25 bp, Homo sapiens
caagcccaatttttggctgatgcat

SEQ ID NO: 9570 - DNA, 25 bp, Homo sapiens
ccagaggtgcttccagctcagaatc

SEQ ID NO: 9571 - DNA, 25 bp, Homo sapiens
gccagtgctcctgttagctcaaaga

SEQ ID NO: 9572 - DNA, 25 bp, Homo sapiens
tgggactgggcaagagaacaatttc

SEQ ID NO: 9573 - DNA, 25 bp, Homo sapiens
tgggtatgcattactttcataagaa

SEQ ID NO: 9574 - DNA, 25 bp, Homo sapiens
ttgccggtgcttccacagaacacta

SEQ ID NO: 9575 - DNA, 25 bp, Homo sapiens
tggccctgcttgaagtcgtcagtta

SEQ ID NO: 9576 - DNA, 25 bp, Homo sapiens
ggtgctcaaccatggctaaacagga

SEQ ID NO: 9577 - DNA, 25 bp, Homo sapiens
ctgggctggccttggcatttataca

SEQ ID NO: 9578 - DNA, 25 bp, Homo sapiens
ccctagacgcagcagtgtacacatc

SEQ ID NO: 9579 - DNA, 25 bp, Homo sapiens
tagcccactgcgagtccaatagatg

SEQ ID NO: 9580 - DNA, 25 bp, Homo sapiens
ggttcaggtgatactccagattaca

SEQ ID NO: 9581 - DNA, 25 bp, Homo sapiens
tatgtcccagtaattgcgctcttcc

SEQ ID NO: 9582 - DNA, 25 bp, Homo sapiens
ccctgggaacaaacagccgatcatt

SEQ ID NO: 9583 - DNA, 25 bp, Homo sapiens
ttaccattagttagccagacgttcc

SEQ ID NO: 9584 - DNA, 25 bp, Homo sapiens
gggtccagtctcttccttgcagtca

SEQ ID NO: 9585 - DNA, 25 bp, Homo sapiens
gtgccctccaaagctgccttttttg

SEQ ID NO: 9586 - DNA, 25 bp, Homo sapiens
ttgggccatcagcagacagacttct

SEQ ID NO: 9587 - DNA, 25 bp, Homo sapiens
gatcagtcgttgtcctcagagccac

SEQ ID NO: 9588 - DNA, 25 bp, Homo sapiens
accagccttgtttaggggtacagga

SEQ ID NO: 9589 - DNA, 25 bp, Homo sapiens
gctgtgaccctctcttctgagttga

SEQ ID NO: 9590 - DNA, 25 bp, Homo sapiens
ctagggccggagaatccaatctgtc

SEQ ID NO: 9591 - DNA, 25 bp, Homo sapiens
gggaccagcactacctacactgaca

SEQ ID NO: 9592 - DNA, 25 bp, Homo sapiens
ccgggcagatttttgggttcagaca

SEQ ID NO: 9593 - DNA, 25 bp, Homo sapiens
ccacccaggaggattacatttaagc

SEQ ID NO: 9594 - DNA, 25 bp, Homo sapiens
tgtgcagcacatagcataaacttcc

SEQ ID NO: 9595 - DNA, 25 bp, Homo sapiens
gcccactcggaagaacaggttactc

SEQ ID NO: 9596 - DNA, 25 bp, Homo sapiens
catggcagcgttcaccagggtgttt

SEQ ID NO: 9597 - DNA, 25 bp, Homo sapiens
gctgcctgaagcctgtgacctctaa

SEQ ID NO: 9598 - DNA, 25 bp, Homo sapiens
cccagaggtggctgattttcacata

SEQ ID NO: 9599 - DNA, 25 bp, Homo sapiens
tgggccctggattctattctctctc

SEQ ID NO: 9600 - DNA, 25 bp, Homo sapiens
cgaactctctcctgctcctgaaaaa

SEQ ID NO: 9601 - DNA, 25 bp, Homo sapiens
cctgggtctttaatcctagcatcta

SEQ ID NO: 9602 - DNA, 25 bp, Homo sapiens
gggcctctcaagagcactcatcatg

SEQ ID NO: 9603 - DNA, 25 bp, Homo sapiens
gggtctggctgtacactatctcgtc

SEQ ID NO: 9604 - DNA, 25 bp, Homo sapiens
ggaaggccttcctgtcctgaaaaca

SEQ ID NO: 9605 - DNA, 25 bp, Homo sapiens
ggttcctcttctgaccgtggcttta

SEQ ID NO: 9606 - DNA, 25 bp, Homo sapiens
accctcttgagagtaagcctgttca

SEQ ID NO: 9607 - DNA, 25 bp, Homo sapiens
ggccgggctccatccattgttttca

SEQ ID NO: 9608 - DNA, 25 bp, Homo sapiens
tcagatcaaaggcaagggctcaatg

SEQ ID NO: 9609 - DNA, 25 bp, Homo sapiens
ggccagcccatacagcgttgacaaa

SEQ ID NO: 9610 - DNA, 25 bp, Homo sapiens
aggcaatgttcttctcgtttcagta

SEQ ID NO: 9611 - DNA, 25 bp, Homo sapiens
aatgatctaaacatagaatatgcta

SEQ ID NO: 9612 - DNA, 25 bp, Homo sapiens
tggctggcacatgactgaagtactc

SEQ ID NO: 9613 - DNA, 25 bp, Homo sapiens
tctcctgagatcaaagattctacta

SEQ ID NO: 9614 - DNA, 25 bp, Homo sapiens
tgcctgctgcatgcatataaattcc

SEQ ID NO: 9615 - DNA, 25 bp, Homo sapiens
gcaatgcttcccatgatacctgtta

SEQ ID NO: 9616 - DNA, 25 bp, Homo sapiens
atcctacgcaggtgtcatcatttta

SEQ ID NO: 9617 - DNA, 25 bp, Homo sapiens
tggtgatgccttacccgaagtgatc

SEQ ID NO: 9618 - DNA, 25 bp, Homo sapiens
ggggcatagtcccatgtgtacaaaa

SEQ ID NO: 9619 - DNA, 25 bp, Homo sapiens
ggggatcagtccctgtgcctaataa

SEQ ID NO: 9620 - DNA, 25 bp, Homo sapiens
ggctggctcacttagtaggcatatt

SEQ ID NO: 9621 - DNA, 25 bp, Homo sapiens
ctgagtcgactccagcctgcagttg

SEQ ID NO: 9622 - DNA, 25 bp, Homo sapiens
gtcttcagcacagattgggcccata

SEQ ID NO: 9623 - DNA, 25 bp, Homo sapiens
tgggtgcccaggtttctagatatgc

SEQ ID NO: 9624 - DNA, 25 bp, Homo sapiens
actgggttcccaaggcatgcttatg

SEQ ID NO: 9625 - DNA, 25 bp, Homo sapiens
tctgtcccaggttcccagagagtta

SEQ ID NO: 9626 - DNA, 25 bp, Homo sapiens
ggatcctatgccttctccctgaggg

SEQ ID NO: 9627 - DNA, 25 bp, Homo sapiens
caggtggtgcactgagcaattatca

SEQ ID NO: 9628 - DNA, 25 bp, Homo sapiens
ttcctccaaagccaggtgctgcgtc

SEQ ID NO: 9629 - DNA, 25 bp, Homo sapiens
gctggaacctcttgctgttggaaca

SEQ ID NO: 9630 - DNA, 25 bp, Homo sapiens
gaagacttaaagctgcccatggaga

SEQ ID NO: 9631 - DNA, 25 bp, Homo sapiens
tgctatcttaatcaggtcccagggg

SEQ ID NO: 9632 - DNA, 25 bp, Homo sapiens
tgtgtctagaccaccgagaagctct

SEQ ID NO: 9633 - DNA, 25 bp, Homo sapiens
cccacttgggatacagaggctttca

SEQ ID NO: 9634 - DNA, 25 bp, Homo sapiens
cccagaaaccggcatagagtgatca

SEQ ID NO: 9635 - DNA, 25 bp, Homo sapiens
ccactgaagtgagcacctggccttg

SEQ ID NO: 9636 - DNA, 25 bp, Homo sapiens
ctggccgccgagaattggacttttt

SEQ ID NO: 9637 - DNA, 25 bp, Homo sapiens
ccttggcttctgctgggattctgaa

SEQ ID NO: 9638 - DNA, 25 bp, Homo sapiens
cagcctccgggtaagatgcaaagtt

SEQ ID NO: 9639 - DNA, 25 bp, Homo sapiens
gctcctgcttgtcaccttgttcttg

SEQ ID NO: 9640 - DNA, 25 bp, Homo sapiens
tacaagtctgcaaggatgattttat

SEQ ID NO: 9641 - DNA, 25 bp, Homo sapiens
cctctcggccttttgatttgtaata

SEQ ID NO: 9642 - DNA, 25 bp, Homo sapiens
ggcagccattttgtccatcagtatc

SEQ ID NO: 9643 - DNA, 25 bp, Homo sapiens
ggacagctgccagatgcccattaga

SEQ ID NO: 9644 - DNA, 25 bp, Homo sapiens
ctccttgggctagatgacagattta

SEQ ID NO: 9645 - DNA, 25 bp, Homo sapiens
ggctggcttccgtcttttaacctca

SEQ ID NO: 9646 - DNA, 25 bp, Homo sapiens
tcccattgtggccaccagctggtta

SEQ ID NO: 9647 - DNA, 25 bp, Homo sapiens
accagccttagagaattgtgactta

SEQ ID NO: 9648 - DNA, 25 bp, Homo sapiens
ccattgtgtcctaagcctgggttta

SEQ ID NO: 9649 - DNA, 25 bp, Homo sapiens
agcctgcgtacccaggagaattttc

SEQ ID NO: 9650 - DNA, 25 bp, Homo sapiens
tccaggtcttcttgccacgcagttc

SEQ ID NO: 9651 - DNA, 25 bp, Homo sapiens
tggggttgtacctaaaattcgcaga

SEQ ID NO: 9652 - DNA, 25 bp, Homo sapiens
atgggctcagcacctcacaggacta

SEQ ID NO: 9653 - DNA, 25 bp, Homo sapiens
agttgaccaggccagcgaacgttca

SEQ ID NO: 9654 - DNA, 25 bp, Homo sapiens
ttctgttctcttaaggtggggccca

SEQ ID NO: 9655 - DNA, 25 bp, Homo sapiens
cccgagtgtgcctttcttgagaacc

SEQ ID NO: 9656 - DNA, 25 bp, Homo sapiens
tagcaggacatagggcaggatcatc

SEQ ID NO: 9657 - DNA, 25 bp, Homo sapiens
gtggagccctctgtagactgaaatc

SEQ ID NO: 9658 - DNA, 25 bp, Homo sapiens
tgccaggttcacattttccagtagg

SEQ ID NO: 9659 - DNA, 25 bp, Homo sapiens
tggcttcccaaaagacggtgttaca

SEQ ID NO: 9660 - DNA, 25 bp, Homo sapiens
ggagtccggctgctttatgacaaca

SEQ ID NO: 9661 - DNA, 25 bp, Homo sapiens
tcacttggagacaggcctagagaca

SEQ ID NO: 9662 - DNA, 25 bp, Homo sapiens
cccaaggagaagagcatgctgatta

SEQ ID NO: 9663 - DNA, 25 bp, Homo sapiens
gtaagctctgctggtgcaaagtcca

SEQ ID NO: 9664 - DNA, 25 bp, Homo sapiens
aaatggtctgttttgctggggcaac

SEQ ID NO: 9665 - DNA, 25 bp, Homo sapiens
tgaccaccgtgcatatgtaaaattg

SEQ ID NO: 9666 - DNA, 25 bp, Homo sapiens
gggtgccatcactgagctcctagga

SEQ ID NO: 9667 - DNA, 25 bp, Homo sapiens
ggctctgtctcctatgaggccaaaa

SEQ ID NO: 9668 - DNA, 25 bp, Homo sapiens
cagtggctgcttctctcattgttca

SEQ ID NO: 9669 - DNA, 25 bp, Homo sapiens
caccaacagtagctagagcaatctc

SEQ ID NO: 9670 - DNA, 25 bp, Homo sapiens
ctctggccaggacacttaaacatta

SEQ ID NO: 9671 - DNA, 25 bp, Homo sapiens
ggtggctgatcccttacattgtctc

SEQ ID NO: 9672 - DNA, 25 bp, Homo sapiens
agtgtcaagcctgtctcttttcgta

SEQ ID NO: 9673 - DNA, 25 bp, Homo sapiens
ctcctgcagttttggtggcgtaata

SEQ ID NO: 9674 - DNA, 25 bp, Homo sapiens
tctcagtcccagaaggctacatttg

SEQ ID NO: 9675 - DNA, 25 bp, Homo sapiens
tgaccttgatcccattagcactgtg

SEQ ID NO: 9676 - DNA, 25 bp, Homo sapiens
ccgaaaaccttggagacctgatcta

SEQ ID NO: 9677 - DNA, 25 bp, Homo sapiens
ccgggaggatttctatgtttcaata

SEQ ID NO: 9678 - DNA, 25 bp, Homo sapiens
acaaggctctgttttaccacggtgc

SEQ ID NO: 9679 - DNA, 25 bp, Homo sapiens
aggacttctcatccaccgtggcttg

SEQ ID NO: 9680 - DNA, 25 bp, Homo sapiens
gtggtctctgtcctatgggaaatca

SEQ ID NO: 9681 - DNA, 25 bp, Homo sapiens
ctaatacttttcaatctgggccatg

SEQ ID NO: 9682 - DNA, 25 bp, Homo sapiens
cttgacgcttcatggcagggatttt

SEQ ID NO: 9683 - DNA, 25 bp, Homo sapiens
caggtccctttccagattgttttag

SEQ ID NO: 9684 - DNA, 25 bp, Homo sapiens
cttgtgtctttcagctggatttgta

SEQ ID NO: 9685 - DNA, 25 bp, Homo sapiens
gcttcacaacctgctactcatggga

SEQ ID NO: 9686 - DNA, 25 bp, Homo sapiens
acaagggcactctctggacataatc

SEQ ID NO: 9687 - DNA, 25 bp, Homo sapiens
tctctgtggggtaagtcaggcatca

SEQ ID NO: 9688 - DNA, 25 bp, Homo sapiens
cagaggccattgtgtagataaaatc

SEQ ID NO: 9689 - DNA, 25 bp, Homo sapiens
tttcaggaacacactaggtcagacg

SEQ ID NO: 9690 - DNA, 25 bp, Homo sapiens
gtcaccgtgtcatctggcatcatag

SEQ ID NO: 9691 - DNA, 25 bp, Homo sapiens
aagaaaactgacttaacctggatta

SEQ ID NO: 9692 - DNA, 25 bp, Homo sapiens
agcttagcgagatcttgggttattc

SEQ ID NO: 9693 - DNA, 25 bp, Homo sapiens
tgatctaaggttattcttgattagc

SEQ ID NO: 9694 - DNA, 25 bp, Homo sapiens
ttggtgtctgacaacgcttgctgta

SEQ ID NO: 9695 - DNA, 25 bp, Homo sapiens
agtgactgtggactcagcctccttc

SEQ ID NO: 9696 - DNA, 25 bp, Homo sapiens
ccaggcagttttaggctcttagaga

SEQ ID NO: 9697 - DNA, 25 bp, Homo sapiens
tggaagcttgccctcataacctttg

SEQ ID NO: 9698 - DNA, 25 bp, Homo sapiens
tctccttcacaggtggaaccaattg

SEQ ID NO: 9699 - DNA, 25 bp, Homo sapiens
tgggtattgggaaactcaccttctc

SEQ ID NO: 9700 - DNA, 25 bp, Homo sapiens
ttccagggtccttgcacaaagtagg

SEQ ID NO: 9701 - DNA, 25 bp, Homo sapiens
tagaaggtttgaccacccgacgacc

SEQ ID NO: 9702 - DNA, 25 bp, Homo sapiens
ggcatgctctgacaaggctacagta

SEQ ID NO: 9703 - DNA, 25 bp, Homo sapiens
ctacagtttggtgatggggtccaca

SEQ ID NO: 9704 - DNA, 25 bp, Homo sapiens
gctctgaaaaattgtggcccgcgca

SEQ ID NO: 9705 - DNA, 25 bp, Homo sapiens
gtctttgaggaaaggcctgcatttc

SEQ ID NO: 9706 - DNA, 25 bp, Homo sapiens
agcctgtcggctttattttttaata

SEQ ID NO: 9707 - DNA, 25 bp, Homo sapiens
aatacagttttcagggtccaggacc

SEQ ID NO: 9708 - DNA, 25 bp, Homo sapiens
ggagacatttgcacattcgcctttg

SEQ ID NO: 9709 - DNA, 25 bp, Homo sapiens
ttttggccacatacaaggagctacc

SEQ ID NO: 9710 - DNA, 25 bp, Homo sapiens
ctgctgctgaaagtcgaccaaatcc

SEQ ID NO: 9711 - DNA, 25 bp, Homo sapiens
aatgggtaggttttctgtttcttcc

SEQ ID NO: 9712 - DNA, 25 bp, Homo sapiens
gcctgggaggttctatttgccattg

SEQ ID NO: 9713 - DNA, 25 bp, Homo sapiens
cagccgccagtgtccaagactctta

SEQ ID NO: 9714 - DNA, 25 bp, Homo sapiens
tgactaactggcacattgttgattc

SEQ ID NO: 9715 - DNA, 25 bp, Homo sapiens
acagggttgtgccatttctatttta

SEQ ID NO: 9716 - DNA, 25 bp, Homo sapiens
gcctggctgtaaaatggagtaatta

SEQ ID NO: 9717 - DNA, 25 bp, Homo sapiens
ttttctacaaaggtagaagaatctg

SEQ ID NO: 9718 - DNA, 25 bp, Homo sapiens
catgatctagtgttatccaaaagcc

SEQ ID NO: 9719 - DNA, 25 bp, Homo sapiens
caggaacgaagtaggaaacaaagtt

SEQ ID NO: 9720 - DNA, 25 bp, Homo sapiens
tgcattttacaagctggagagtccc

SEQ ID NO: 9721 - DNA, 25 bp, Homo sapiens
aaacccaggggcattagaacgacta

SEQ ID NO: 9722 - DNA, 25 bp, Homo sapiens
tccttattgcatcagcgggtttata

SEQ ID NO: 9723 - DNA, 25 bp, Homo sapiens
gtgggtaatacctaacttgctttga

SEQ ID NO: 9724 - DNA, 25 bp, Homo sapiens
actgcctctctctgatggattgata

SEQ ID NO: 9725 - DNA, 25 bp, Homo sapiens
gggcctccaaagcaaagggtctata

SEQ ID NO: 9726 - DNA, 25 bp, Homo sapiens
atggtggcatagcttcagttgttca

SEQ ID NO: 9727 - DNA, 25 bp, Homo sapiens
gccaatggcagagagagctacgtta

SEQ ID NO: 9728 - DNA, 25 bp, Homo sapiens
tggggttccgaatgctactagttta

SEQ ID NO: 9729 - DNA, 25 bp, Homo sapiens
gggaccctcattagtacaaactctg

SEQ ID NO: 9730 - DNA, 25 bp, Homo sapiens
tgaggccgctccatgtatattcatc

SEQ ID NO: 9731 - DNA, 25 bp, Homo sapiens
ggctcagcaggtatccacacaaatg

SEQ ID NO: 9732 - DNA, 25 bp, Homo sapiens
ggggcgttcacatgtacaaattaat

SEQ ID NO: 9733 - DNA, 25 bp, Homo sapiens
gcttggaagacgcagcacactgtga

SEQ ID NO: 9734 - DNA, 25 bp, Homo sapiens
tctactcatttcaaggcagggaagg

SEQ ID NO: 9735 - DNA, 25 bp, Homo sapiens
ctgctctttgccctatcactatatg

SEQ ID NO: 9736 - DNA, 25 bp, Homo sapiens
ccattgtatacatgagggaatccca

SEQ ID NO: 9737 - DNA, 25 bp, Homo sapiens
ccgtgaggtgagatgttcctgaata

SEQ ID NO: 9738 - DNA, 25 bp, Homo sapiens
atggtggcatgcatctttaggctta

SEQ ID NO: 9739 - DNA, 25 bp, Homo sapiens
ggcatctgatgtactaccattacta

SEQ ID NO: 9740 - DNA, 25 bp, Homo sapiens
ggtagactccctgcaaaagaactcg

SEQ ID NO: 9741 - DNA, 25 bp, Homo sapiens
catgcgtggtttgtactgtatattc

SEQ ID NO: 9742 - DNA, 25 bp, Homo sapiens
acggcctttgtacctgtgttgcagc

SEQ ID NO: 9743 - DNA, 25 bp, Homo sapiens
ctgcaaggcagctgggacatttacc

SEQ ID NO: 9744 - DNA, 25 bp, Homo sapiens
ctggccctagagaaaaatctgattc

SEQ ID NO: 9745 - DNA, 25 bp, Homo sapiens
cctgcagttctgacaatgagtttga

SEQ ID NO: 9746 - DNA, 25 bp, Homo sapiens
ccaggctcccaggacccttttaaga

SEQ ID NO: 9747 - DNA, 25 bp, Homo sapiens
cagggttgcctcaaaataattttcg

SEQ ID NO: 9748 - DNA, 25 bp, Homo sapiens
tttccataggctgtcaacttaggtg

SEQ ID NO: 9749 - DNA, 25 bp, Homo sapiens
agccctttaggaatgtcctttgatc

SEQ ID NO: 9750 - DNA, 25 bp, Homo sapiens
cagggatcctcatgcattgtatgca

SEQ ID NO: 9751 - DNA, 25 bp, Homo sapiens
gcgtactgtcctttcacctcctttt

SEQ ID NO: 9752 - DNA, 25 bp, Homo sapiens
gtgtccttggaacatggctgctatc

SEQ ID NO: 9753 - DNA, 25 bp, Homo sapiens
gccctagtttctttgcttgagcctc

SEQ ID NO: 9754 - DNA, 25 bp, Homo sapiens
ggaaaccactatatgaacccaggtg

SEQ ID NO: 9755 - DNA, 25 bp, Homo sapiens
cctgggttcatatagtggtttcctc

SEQ ID NO: 9756 - DNA, 25 bp, Homo sapiens
tggccaagtgtagtgcaaagatttc

SEQ ID NO: 9757 - DNA, 25 bp, Homo sapiens
cctcttttggtgtgtctttgcaaga

SEQ ID NO: 9758 - DNA, 25 bp, Homo sapiens
tgaacatacttcctcctgcactggg

SEQ ID NO: 9759 - DNA, 25 bp, Homo sapiens
cccatgtgtcacctatcagtactta

SEQ ID NO: 9760 - DNA, 25 bp, Homo sapiens
caggtcctgcacatggctttcattc

SEQ ID NO: 9761 - DNA, 25 bp, Homo sapiens
ccacttacagaggtatgagcatcca

SEQ ID NO: 9762 - DNA, 25 bp, Homo sapiens
gcacttgtagtttaagcatgaccta

SEQ ID NO: 9763 - DNA, 25 bp, Homo sapiens
gggacaacatctctatggtggactt

SEQ ID NO: 9764 - DNA, 25 bp, Homo sapiens
tgcttgtgcatttcaaacataggtg

SEQ ID NO: 9765 - DNA, 25 bp, Homo sapiens
gcctcttgtcttgatggcaggatta

SEQ ID NO: 9766 - DNA, 25 bp, Homo sapiens
ggggctcaggtttgcttctcacata

SEQ ID NO: 9767 - DNA, 25 bp, Homo sapiens
ccgtcattcacaaacttcggtatgt

SEQ ID NO: 9768 - DNA, 25 bp, Homo sapiens
tgagaatgccctcaaaccctggtta

SEQ ID NO: 9769 - DNA, 25 bp, Homo sapiens
gaatgtgccctcttcctatgagtta

SEQ ID NO: 9770 - DNA, 25 bp, Homo sapiens
ttactggctagcaacctgatttgtc

SEQ ID NO: 9771 - DNA, 25 bp, Homo sapiens
caccgtgagcccgattaagactttg

SEQ ID NO: 9772 - DNA, 25 bp, Homo sapiens
ggatgccaaaatgtagcccttaata

SEQ ID NO: 9773 - DNA, 25 bp, Homo sapiens
ccttattgatgacatggtgaccatt

SEQ ID NO: 9774 - DNA, 25 bp, Homo sapiens
gttaccctttagcatctgagttgtc

SEQ ID NO: 9775 - DNA, 25 bp, Homo sapiens
agccttgtgtcctgctcaatgattg

SEQ ID NO: 9776 - DNA, 25 bp, Homo sapiens
ggggaaatactgacctacccttata

SEQ ID NO: 9777 - DNA, 25 bp, Homo sapiens
ggatgcttccacacattcatgtatt

SEQ ID NO: 9778 - DNA, 25 bp, Homo sapiens
ctcaggccaggcaataacatttgga

SEQ ID NO: 9779 - DNA, 25 bp, Homo sapiens
tctctaagtcctgagccagaatgtg

SEQ ID NO: 9780 - DNA, 25 bp, Homo sapiens
gccaggatgcctgctctgagataga

SEQ ID NO: 9781 - DNA, 25 bp, Homo sapiens
tctgccttgggacatgatctgattc

SEQ ID NO: 9782 - DNA, 25 bp, Homo sapiens
cccaacaatctggagggacagttca

SEQ ID NO: 9783 - DNA, 25 bp, Homo sapiens
atgagacacttgtggccgccttgac

SEQ ID NO: 9784 - DNA, 25 bp, Homo sapiens
tctccgtgttggcagtttgttttca

SEQ ID NO: 9785 - DNA, 25 bp, Homo sapiens
atgactcaaccttggcctgtgaacc

SEQ ID NO: 9786 - DNA, 25 bp, Homo sapiens
taggtagtacattcccatcattagc

SEQ ID NO: 9787 - DNA, 25 bp, Homo sapiens
cttgtttgttggacactgagtgata

SEQ ID NO: 9788 - DNA, 25 bp, Homo sapiens
ttttttaaaaaagagagaatccttg

SEQ ID NO: 9789 - DNA, 25 bp, Homo sapiens
cctggctcacgcctgtgaggaatta

SEQ ID NO: 9790 - DNA, 25 bp, Homo sapiens
ggtctctgctcaccacatctgatta

SEQ ID NO: 9791 - DNA, 25 bp, Homo sapiens
gggagccctcctaatataaaaaaga

SEQ ID NO: 9792 - DNA, 25 bp, Homo sapiens
tgcacaatgaacctagcctgaactg

SEQ ID NO: 9793 - DNA, 25 bp, Homo sapiens
tactcctgccttggggactatcaga

SEQ ID NO: 9794 - DNA, 25 bp, Homo sapiens
tgggtgcagctggttttcaattctc

SEQ ID NO: 9795 - DNA, 25 bp, Homo sapiens
acaggctgatgccttctggaattca

SEQ ID NO: 9796 - DNA, 25 bp, Homo sapiens
ataaacaataatttttaggtgttct

SEQ ID NO: 9797 - DNA, 25 bp, Homo sapiens
tccgcttggccctcctctaaaatta

SEQ ID NO: 9798 - DNA, 25 bp, Homo sapiens
gtggcctgtcctcttgtaggttttc

SEQ ID NO: 9799 - DNA, 25 bp, Homo sapiens
cgtcctgatttgagagcataccctg

SEQ ID NO: 9800 - DNA, 25 bp, Homo sapiens
tacttgccgcttctccaggatgagg

SEQ ID NO: 9801 - DNA, 25 bp, Homo sapiens
tgctacgggatcatcttgtaactca

SEQ ID NO: 9802 - DNA, 25 bp, Homo sapiens
gccttcatcagcatcacagtgcata

SEQ ID NO: 9803 - DNA, 25 bp, Homo sapiens
ctactgaggggtaaattacaaattg

SEQ ID NO: 9804 - DNA, 25 bp, Homo sapiens
cttctgttctgttaggggttgctcc

SEQ ID NO: 9805 - DNA, 25 bp, Homo sapiens
gggctttggacctgtacccagctga

SEQ ID NO: 9806 - DNA, 25 bp, Homo sapiens
agcctcctgtatttttgatcattta

SEQ ID NO: 9807 - DNA, 25 bp, Homo sapiens
cctggatgctggaaaccatatcttg

SEQ ID NO: 9808 - DNA, 25 bp, Homo sapiens
cgggcctctgccaaagcaacaaatg

SEQ ID NO: 9809 - DNA, 25 bp, Homo sapiens
gggacaattgcctcctccttatgga

SEQ ID NO: 9810 - DNA, 25 bp, Homo sapiens
aattactggatgcttgtggagggcc

SEQ ID NO: 9811 - DNA, 25 bp, Homo sapiens
tgtattagcctactctctcattgct

SEQ ID NO: 9812 - DNA, 25 bp, Homo sapiens
accctcaggtgatgctaagcacttt

SEQ ID NO: 9813 - DNA, 25 bp, Homo sapiens
ggtgtccttggatagcttagcatga

SEQ ID NO: 9814 - DNA, 25 bp, Homo sapiens
tttttcagcctgatggacgttacca

SEQ ID NO: 9815 - DNA, 25 bp, Homo sapiens
tgtctgttcaatctagtctgtgagc

SEQ ID NO: 9816 - DNA, 25 bp, Homo sapiens
ttatgcgacccacgagccatttcca

SEQ ID NO: 9817 - DNA, 25 bp, Homo sapiens
tgctgtcttcccaatatccgaagtg

SEQ ID NO: 9818 - DNA, 25 bp, Homo sapiens
cctcatggttatatgtcggagtctc

SEQ ID NO: 9819 - DNA, 25 bp, Homo sapiens
cccaatcttgggtgtatgactgttt

SEQ ID NO: 9820 - DNA, 25 bp, Homo sapiens
ctgttgcggcagttaggtttactta

SEQ ID NO: 9821 - DNA, 25 bp, Homo sapiens
aggccagtcagttcatttattgtca

SEQ ID NO: 9822 - DNA, 25 bp, Homo sapiens
caagagttacagatccaggtcaagc

SEQ ID NO: 9823 - DNA, 25 bp, Homo sapiens
cagctatggctttggggagatgaca

SEQ ID NO: 9824 - DNA, 25 bp, Homo sapiens
aggctggtagctacaacattgattc

SEQ ID NO: 9825 - DNA, 25 bp, Homo sapiens
tggctgcaactcatatgacatatta

SEQ ID NO: 9826 - DNA, 25 bp, Homo sapiens
actaataagtgaataattacatatg

SEQ ID NO: 9827 - DNA, 25 bp, Homo sapiens
gggtttattacgaagctgccataca

SEQ ID NO: 9828 - DNA, 25 bp, Homo sapiens
acctctctaatgttgccgatgtgtg

SEQ ID NO: 9829 - DNA, 25 bp, Homo sapiens
ccagagataaggcaggacattgata

SEQ ID NO: 9830 - DNA, 25 bp, Homo sapiens
caggcttggagcttaacggatcttc

SEQ ID NO: 9831 - DNA, 25 bp, Homo sapiens
accatgccttcagttttgtgtcaga

SEQ ID NO: 9832 - DNA, 25 bp, Homo sapiens
ggggaggccttctgagtactaataa

SEQ ID NO: 9833 - DNA, 25 bp, Homo sapiens
ccgtgctaagcaaggggaagatatc

SEQ ID NO: 9834 - DNA, 25 bp, Homo sapiens
tgctgtcacgccctgtccctaataa

SEQ ID NO: 9835 - DNA, 25 bp, Homo sapiens
ggtcccagtggtcatgtacattagc

SEQ ID NO: 9836 - DNA, 25 bp, Homo sapiens
tctcgacctgcaaatagaacttggc

SEQ ID NO: 9837 - DNA, 25 bp, Homo sapiens
cagggcatattcagcaaactttttt

SEQ ID NO: 9838 - DNA, 25 bp, Homo sapiens
ccagtgtctgcctaacttggaagtc

SEQ ID NO: 9839 - DNA, 25 bp, Homo sapiens
ctgtcactgcttcagggctcacatc

SEQ ID NO: 9840 - DNA, 25 bp, Homo sapiens
tgtggccaacaactgactctttttc

SEQ ID NO: 9841 - DNA, 25 bp, Homo sapiens
agcagatgcagctgagatccgctta

SEQ ID NO: 9842 - DNA, 25 bp, Homo sapiens
ataaaaataaaaatccagaaagtgt

SEQ ID NO: 9843 - DNA, 25 bp, Homo sapiens
agctctgaattggtacttgccctca

SEQ ID NO: 9844 - DNA, 25 bp, Homo sapiens
cttctggccttcttgtgatatgaca

SEQ ID NO: 9845 - DNA, 25 bp, Homo sapiens
ccttgtactccagatagagggcttg

SEQ ID NO: 9846 - DNA, 25 bp, Homo sapiens
ggacctcctgaattgcttaagccca

SEQ ID NO: 9847 - DNA, 25 bp, Homo sapiens
gtaattgctgttttgcatcaaccca

SEQ ID NO: 9848 - DNA, 25 bp, Homo sapiens
tgatgcgtgacttgcctacaatgtg

SEQ ID NO: 9849 - DNA, 25 bp, Homo sapiens
tggccacagccattcagtctttgtc

SEQ ID NO: 9850 - DNA, 25 bp, Homo sapiens
agactctgctcttgatgaaatgaaa

SEQ ID NO: 9851 - DNA, 25 bp, Homo sapiens
ggcatccttggcctgtttgagatta

SEQ ID NO: 9852 - DNA, 25 bp, Homo sapiens
ctgtgccttggagaatgcatatatc

SEQ ID NO: 9853 - DNA, 25 bp, Homo sapiens
atgtgaacgttctcttttggctcta

SEQ ID NO: 9854 - DNA, 25 bp, Homo sapiens
gcccaaggcctgtttgtcttcaata

SEQ ID NO: 9855 - DNA, 25 bp, Homo sapiens
ccacagctttttcaaggtgtcagga

SEQ ID NO: 9856 - DNA, 25 bp, Homo sapiens
ctgtgtcctagaagaagcattaata

SEQ ID NO: 9857 - DNA, 25 bp, Homo sapiens
ggtgctgttttcctgtctcctctca

SEQ ID NO: 9858 - DNA, 25 bp, Homo sapiens
ccagtcttggtaattcagcctccta

SEQ ID NO: 9859 - DNA, 25 bp, Homo sapiens
tggcgttacagcagagattcatttc

SEQ ID NO: 9860 - DNA, 25 bp, Homo sapiens
tcctctcgggaagaagcctttcgtg

SEQ ID NO: 9861 - DNA, 25 bp, Homo sapiens
gctctgaccgttgtttgctgttctc

SEQ ID NO: 9862 - DNA, 25 bp, Homo sapiens
tggcctgtgggacattagctctttc

SEQ ID NO: 9863 - DNA, 25 bp, Homo sapiens
gcgcatgctctgaaactgaccctca

SEQ ID NO: 9864 - DNA, 25 bp, Homo sapiens
caattccagggctctttgacaaatc

SEQ ID NO: 9865 - DNA, 25 bp, Homo sapiens
gggcttttcaagctcatggacttca

SEQ ID NO: 9866 - DNA, 25 bp, Homo sapiens
aacctccgaatggtgacactgaaca

SEQ ID NO: 9867 - DNA, 25 bp, Homo sapiens
ggccaccctggctgatgcaaaagac

SEQ ID NO: 9868 - DNA, 25 bp, Homo sapiens
tcatttctcaggaacttggactggg

SEQ ID NO: 9869 - DNA, 25 bp, Homo sapiens
tatgtatcaatattccatttactca

SEQ ID NO: 9870 - DNA, 25 bp, Homo sapiens
agatgcctcttctgcgatgcttcaa

SEQ ID NO: 9871 - DNA, 25 bp, Homo sapiens
ttttgtcttaggcaccaggagttcc

SEQ ID NO: 9872 - DNA, 25 bp, Homo sapiens
ctgctatatagggactgagacgtta

SEQ ID NO: 9873 - DNA, 25 bp, Homo sapiens
atgactctcccacatgctttgaagg

SEQ ID NO: 9874 - DNA, 25 bp, Homo sapiens
tcctgcctttagtagcgtcacaatg

SEQ ID NO: 9875 - DNA, 25 bp, Homo sapiens
ctgcccaatcagaggctaacatctg

SEQ ID NO: 9876 - DNA, 25 bp, Homo sapiens
gcccacacttgatgtacattgtacc

SEQ ID NO: 9877 - DNA, 25 bp, Homo sapiens
tggtagtgtgcaccgaatcagttcc

SEQ ID NO: 9878 - DNA, 25 bp, Homo sapiens
agcttcagttcatgggtttgtgttc

SEQ ID NO: 9879 - DNA, 25 bp, Homo sapiens
gtcagcattggtctaggtactcaca

SEQ ID NO: 9880 - DNA, 25 bp, Homo sapiens
atggcatcatgcttggataaaggtc

SEQ ID NO: 9881 - DNA, 25 bp, Homo sapiens
caggctgcataccagtccagatgta

SEQ ID NO: 9882 - DNA, 25 bp, Homo sapiens
ttcctggatacaagtcacccttctg

SEQ ID NO: 9883 - DNA, 25 bp, Homo sapiens
gagtcctcttcccatgtccagctga

SEQ ID NO: 9884 - DNA, 25 bp, Homo sapiens
gtctcgtgaagccactgagcattta

SEQ ID NO: 9885 - DNA, 25 bp, Homo sapiens
attttatcattcttaagatgatgga

SEQ ID NO: 9886 - DNA, 25 bp, Homo sapiens
ctctcaggggacatgacacagcata

SEQ ID NO: 9887 - DNA, 25 bp, Homo sapiens
tcccaagtccctagttatgttaaga

SEQ ID NO: 9888 - DNA, 25 bp, Homo sapiens
tgactaggccctgagagcattttta

SEQ ID NO: 9889 - DNA, 25 bp, Homo sapiens
aagtacagtaaactttaaaaaaatg

SEQ ID NO: 9890 - DNA, 25 bp, Homo sapiens
taggtctatccttgctctgtcaaga

SEQ ID NO: 9891 - DNA, 25 bp, Homo sapiens
gtagccactgctaaaatccctcata

SEQ ID NO: 9892 - DNA, 25 bp, Homo sapiens
gttttctcaggatgttggctgtcca

SEQ ID NO: 9893 - DNA, 25 bp, Homo sapiens
acagagtcacggttgccagagtcta

SEQ ID NO: 9894 - DNA, 25 bp, Homo sapiens
acgaatcatgactggggctaagcta

SEQ ID NO: 9895 - DNA, 25 bp, Homo sapiens
gggacctctgttgttgccataaagc

SEQ ID NO: 9896 - DNA, 25 bp, Homo sapiens
tggttgctggaaacctcagggttcc

SEQ ID NO: 9897 - DNA, 25 bp, Homo sapiens
atgttactgccctaagaccctgcta

SEQ ID NO: 9898 - DNA, 25 bp, Homo sapiens
gcctgcacatctatagctaaagctg

SEQ ID NO: 9899 - DNA, 25 bp, Homo sapiens
gtaaacaaagtgaaatagtgagata

SEQ ID NO: 9900 - DNA, 25 bp, Homo sapiens
tctggaccactgatgctactagctc

SEQ ID NO: 9901 - DNA, 25 bp, Homo sapiens
tggagtccagtcatcagcaaacaaa

SEQ ID NO: 9902 - DNA, 25 bp, Homo sapiens
gtcttctccatacctgctgccattg

SEQ ID NO: 9903 - DNA, 25 bp, Homo sapiens
tccgagactgtgatgtgatgatttc

SEQ ID NO: 9904 - DNA, 25 bp, Homo sapiens
ctgagctgcattgttcacagtcata

SEQ ID NO: 9905 - DNA, 25 bp, Homo sapiens
catggtcccgtgagagagatctttc

SEQ ID NO: 9906 - DNA, 25 bp, Homo sapiens
cgagaagccaccgtagattgttaaa

SEQ ID NO: 9907 - DNA, 25 bp, Homo sapiens
cactgctaggctgttggatctgaga

SEQ ID NO: 9908 - DNA, 25 bp, Homo sapiens
gtgcttgtggtacctgcaattcata

SEQ ID NO: 9909 - DNA, 25 bp, Homo sapiens
gggtcaatcctttcagccactattt

SEQ ID NO: 9910 - DNA, 25 bp, Homo sapiens
cccaagaattggttagcccaggtta

SEQ ID NO: 9911 - DNA, 25 bp, Homo sapiens
tgggtgattctctcatgtcaaattg

SEQ ID NO: 9912 - DNA, 25 bp, Homo sapiens
tgcctctgggcaactgagtcaaagt

SEQ ID NO: 9913 - DNA, 25 bp, Homo sapiens
tctagtgggattgcagtctaattcc

SEQ ID NO: 9914 - DNA, 25 bp, Homo sapiens
tcatgcttgagccaaagattattcc

SEQ ID NO: 9915 - DNA, 25 bp, Homo sapiens
gccagccaatgggaaacaggtatta

SEQ ID NO: 9916 - DNA, 25 bp, Homo sapiens
ttggcactcaggcactaattggtac

SEQ ID NO: 9917 - DNA, 25 bp, Homo sapiens
ctctgactgtctatactgattggga

SEQ ID NO: 9918 - DNA, 25 bp, Homo sapiens
gaccgccagtgcattaatccacaga

SEQ ID NO: 9919 - DNA, 25 bp, Homo sapiens
cagcatttgccaggttttggggaca

SEQ ID NO: 9920 - DNA, 25 bp, Homo sapiens
ctttctgtgaacttgcaatgcccta

SEQ ID NO: 9921 - DNA, 25 bp, Homo sapiens
tccaccaggtatgagttattcactg

SEQ ID NO: 9922 - DNA, 25 bp, Homo sapiens
ggctcagtgcctaccatgtcctaca

SEQ ID NO: 9923 - DNA, 25 bp, Homo sapiens
ggggaaacctcgtataagcagctta

SEQ ID NO: 9924 - DNA, 25 bp, Homo sapiens
ctggggcatgactgttgttagagac

SEQ ID NO: 9925 - DNA, 25 bp, Homo sapiens
gtccctctgagattataacaaacca

SEQ ID NO: 9926 - DNA, 25 bp, Homo sapiens
cttggctgaagcaatatcctctgtg

SEQ ID NO: 9927 - DNA, 25 bp, Homo sapiens
cgaggcagccgtatccatgacttaa

SEQ ID NO: 9928 - DNA, 25 bp, Homo sapiens
ttcctgaacagaccaaacccttgta

SEQ ID NO: 9929 - DNA, 25 bp, Homo sapiens
ctacggcatgcaggttccaaaattc

SEQ ID NO: 9930 - DNA, 25 bp, Homo sapiens
gaacaggtgcatcaggtccttccta

SEQ ID NO: 9931 - DNA, 25 bp, Homo sapiens
ccacttgttaggttcagcgttatgc

SEQ ID NO: 9932 - DNA, 25 bp, Homo sapiens
gacggaggtttcatgcaggctctaa

SEQ ID NO: 9933 - DNA, 25 bp, Homo sapiens
caggagtggtcttcagctttctatg

SEQ ID NO: 9934 - DNA, 25 bp, Homo sapiens
tggggcaatggcctctaagcatttc

SEQ ID NO: 9935 - DNA, 25 bp, Homo sapiens
ggatctgttgtaaactctcccaaga

SEQ ID NO: 9936 - DNA, 25 bp, Homo sapiens
tctgtcaggccaaagttgaagcatg

SEQ ID NO: 9937 - DNA, 25 bp, Homo sapiens
gcaggcagtctttagctatggctta

SEQ ID NO: 9938 - DNA, 25 bp, Homo sapiens
ccatacctggatattgctgtctgta

SEQ ID NO: 9939 - DNA, 25 bp, Homo sapiens
ccatttggccctttagcttgtcaca

SEQ ID NO: 9940 - DNA, 25 bp, Homo sapiens
ctcctctggttgaaggaatgctgtc

SEQ ID NO: 9941 - DNA, 25 bp, Homo sapiens
tctactaccatgtatccggaggaca

SEQ ID NO: 9942 - DNA, 25 bp, Homo sapiens
tggcagtattggtgcaacccttcta

SEQ ID NO: 9943 - DNA, 25 bp, Homo sapiens
ctgtctgaattgaggcccactttta

SEQ ID NO: 9944 - DNA, 25 bp, Homo sapiens
acccagatggcttgtgcttatatca

SEQ ID NO: 9945 - DNA, 25 bp, Homo sapiens
gggtgatctatctccattgcctgag

SEQ ID NO: 9946 - DNA, 25 bp, Homo sapiens
cttggaacgtgctcagttgtaactc

SEQ ID NO: 9947 - DNA, 25 bp, Homo sapiens
gcagttgcctctgttggaaccctta

SEQ ID NO: 9948 - DNA, 25 bp, Homo sapiens
agccaagttccaggttctcctatga

SEQ ID NO: 9949 - DNA, 25 bp, Homo sapiens
cgtcggtgacctcacagagcccata

SEQ ID NO: 9950 - DNA, 25 bp, Homo sapiens
gctgtcacaagcctctgctactttt

SEQ ID NO: 9951 - DNA, 25 bp, Homo sapiens
gcggcatgccacaggacagatcttt

SEQ ID NO: 9952 - DNA, 25 bp, Homo sapiens
gtggctactgtatgcagcggattta

SEQ ID NO: 9953 - DNA, 25 bp, Homo sapiens
tgaaggaccaacactgcagctgaga

SEQ ID NO: 9954 - DNA, 25 bp, Homo sapiens
gcacacctgccttctttctgggaaa

SEQ ID NO: 9955 - DNA, 25 bp, Homo sapiens
gcccttcagggtgtctcagatgtac

SEQ ID NO: 9956 - DNA, 25 bp, Homo sapiens
gtcagcgccgcatcgtcatcatttt

SEQ ID NO: 9957 - DNA, 25 bp, Homo sapiens
gcacagcaggttggctcagctttaa

SEQ ID NO: 9958 - DNA, 25 bp, Homo sapiens
ttctgggaagcctgcaatgacagtc

SEQ ID NO: 9959 - DNA, 25 bp, Homo sapiens
tacgtcagcacacttccaggaagtt

SEQ ID NO: 9960 - DNA, 25 bp, Homo sapiens
ttccctggcctgtcaggagacatta

SEQ ID NO: 9961 - DNA, 25 bp, Homo sapiens
tgaacgaggctactggaactaaatg

SEQ ID NO: 9962 - DNA, 25 bp, Homo sapiens
gcttcaggtcagagcccagagaatc

SEQ ID NO: 9963 - DNA, 25 bp, Homo sapiens
ggaaggtctcagctccactttcatg

SEQ ID NO: 9964 - DNA, 25 bp, Homo sapiens
cagagatgatggcttttttacccta

SEQ ID NO: 9965 - DNA, 25 bp, Homo sapiens
tgcctggctctaccgtgcaaaaata

SEQ ID NO: 9966 - DNA, 25 bp, Homo sapiens
cccacttattcagaggcggactata

SEQ ID NO: 9967 - DNA, 25 bp, Homo sapiens
tatcgttgtcacataggcccacgcc

SEQ ID NO: 9968 - DNA, 25 bp, Homo sapiens
gattctgtgccctgtctgactggta

SEQ ID NO: 9969 - DNA, 25 bp, Homo sapiens
ataaagataaaaatacatgggaggg

SEQ ID NO: 9970 - DNA, 25 bp, Homo sapiens
tggctccagttaactccctcaagca

SEQ ID NO: 9971 - DNA, 25 bp, Homo sapiens
ctctcaaagataagggtggtctccc

SEQ ID NO: 9972 - DNA, 25 bp, Homo sapiens
gcagctggtggcaaagtcacttaaa

SEQ ID NO: 9973 - DNA, 25 bp, Homo sapiens
cctgctgctctgttatggattttta

SEQ ID NO: 9974 - DNA, 25 bp, Homo sapiens
taggggctcaacaactctgcctttc

SEQ ID NO: 9975 - DNA, 25 bp, Homo sapiens
tgcggcttctcttttctgcttgata

SEQ ID NO: 9976 - DNA, 25 bp, Homo sapiens
gtacatgtgcctccaattcctcaga

SEQ ID NO: 9977 - DNA, 25 bp, Homo sapiens
tccctcagtaggagtggccctaata

SEQ ID NO: 9978 - DNA, 25 bp, Homo sapiens
ctccttgaaagcgtgggtaattatt

SEQ ID NO: 9979 - DNA, 25 bp, Homo sapiens
cagcaccttcctgggcagtagccaa

SEQ ID NO: 9980 - DNA, 25 bp, Homo sapiens
tgcgagataaaccctattttatttg

SEQ ID NO: 9981 - DNA, 25 bp, Homo sapiens
tctggggtgataccaaagtgctttc

SEQ ID NO: 9982 - DNA, 25 bp, Homo sapiens
cttgcggaccatgctttcagagaca

SEQ ID NO: 9983 - DNA, 25 bp, Homo sapiens
ctccttagggcttttgtaacattca

SEQ ID NO: 9984 - DNA, 25 bp, Homo sapiens
ttggcccttgggtctaatcaccaca

SEQ ID NO: 9985 - DNA, 25 bp, Homo sapiens
gacgctgctgctgaaatgtatccca

SEQ ID NO: 9986 - DNA, 25 bp, Homo sapiens
ttgggacttgcaccgagacacattc

SEQ ID NO: 9987 - DNA, 25 bp, Homo sapiens
accgtgatggaaacaactgactagc

SEQ ID NO: 9988 - DNA, 25 bp, Homo sapiens
acctcctctgggacagtcattttta

SEQ ID NO: 9989 - DNA, 25 bp, Homo sapiens
ccatgggtctgttttagggttatta

SEQ ID NO: 9990 - DNA, 25 bp, Homo sapiens
ccaccgaggctcctgcgaaaatgta

SEQ ID NO: 9991 - DNA, 25 bp, Homo sapiens
tccacgcttcccaagagactgaata

SEQ ID NO: 9992 - DNA, 25 bp, Homo sapiens
ggcgaaagccacattcattagttta

SEQ ID NO: 9993 - DNA, 25 bp, Homo sapiens
tcctcatttgaggtgtggaactctc

SEQ ID NO: 9994 - DNA, 25 bp, Homo sapiens
tctaccacgtcagctggtctgcagg

SEQ ID NO: 9995 - DNA, 25 bp, Homo sapiens
caccagctggggctaagagtcatga

SEQ ID NO: 9996 - DNA, 25 bp, Homo sapiens
agaccttctgtttgtacctgtttga

SEQ ID NO: 9997 - DNA, 25 bp, Homo sapiens
ggccactgttgctatgagctgctca

SEQ ID NO: 9998 - DNA, 25 bp, Homo sapiens
ggatgctctccaatgcggctaaata

SEQ ID NO: 9999 - DNA, 25 bp, Homo sapiens
ttgggcagggattagacactctatc

SEQ ID NO: 10000 - DNA, 25 bp, Homo sapiens
gtgtgttcactacctgccgccttaa

SEQ ID NO: 10001 - DNA, 25 bp, Homo sapiens
cttccttcaggcgagacttgagatc

SEQ ID NO: 10002 - DNA, 25 bp, Homo sapiens
gccatgagctgggagcaaacctttt

SEQ ID NO: 10003 - DNA, 25 bp, Homo sapiens
cgcacgtcatggttaagcaatttca

SEQ ID NO: 10004 - DNA, 25 bp, Homo sapiens
acattttcctgctcctcacagaggg

SEQ ID NO: 10005 - DNA, 25 bp, Homo sapiens
aagcctgggctagttgttgccttgc

SEQ ID NO: 10006 - DNA, 25 bp, Homo sapiens
acagcattgttgtgaagaagctcaa

SEQ ID NO: 10007 - DNA, 25 bp, Homo sapiens
aactgtgtgccgtatacttcatagg

SEQ ID NO: 10008 - DNA, 25 bp, Homo sapiens
tgtgagaccacattgcacttcagtg

SEQ ID NO: 10009 - DNA, 25 bp, Homo sapiens
aatgtctctcactctgctggctagg

SEQ ID NO: 10010 - DNA, 25 bp, Homo sapiens
ggcttggctcagtttcacctctata

SEQ ID NO: 10011 - DNA, 25 bp, Homo sapiens
tgtcactcatgtggccttaacagta

SEQ ID NO: 10012 - DNA, 25 bp, Homo sapiens
cggccagttactttacacacatgta

SEQ ID NO: 10013 - DNA, 25 bp, Homo sapiens
ggtccctgagaaactgactctctta

SEQ ID NO: 10014 - DNA, 25 bp, Homo sapiens
actctagagagcttgggccatatta

SEQ ID NO: 10015 - DNA, 25 bp, Homo sapiens
gtatctctgcgttgcccatgctttg

SEQ ID NO: 10016 - DNA, 25 bp, Homo sapiens
ccctcttattgtagtgtgtgcagga

SEQ ID NO: 10017 - DNA, 25 bp, Homo sapiens
cgtccctgcagacagaacgtgtttg

SEQ ID NO: 10018 - DNA, 25 bp, Homo sapiens
ccatcccacgatgaggtagtatttt

SEQ ID NO: 10019 - DNA, 25 bp, Homo sapiens
ttttttttctgattagtcaaatagt

SEQ ID NO: 10020 - DNA, 25 bp, Homo sapiens
ctctgtctgtgtgtgtaaggtgtct

SEQ ID NO: 10021 - DNA, 25 bp, Homo sapiens
aggtcagtgcctccataaagtggga

SEQ ID NO: 10022 - DNA, 25 bp, Homo sapiens
gataattacttgtgacccatgggcc

SEQ ID NO: 10023 - DNA, 25 bp, Homo sapiens
gtcacattatgaagacgtctccagg

SEQ ID NO: 10024 - DNA, 25 bp, Homo sapiens
tgggctctagtcctcagaaagaact

SEQ ID NO: 10025 - DNA, 25 bp, Homo sapiens
tgccaccctaggaagagatcattgc

SEQ ID NO: 10026 - DNA, 25 bp, Homo sapiens
ggcaggccttacacttgagaccctc

SEQ ID NO: 10027 - DNA, 25 bp, Homo sapiens
gccacgtgaaccttctttgaaatga

SEQ ID NO: 10028 - DNA, 25 bp, Homo sapiens
aatacaaagaataaataaatggaca

SEQ ID NO: 10029 - DNA, 25 bp, Homo sapiens
actggacagtgacgcaaggcattta

SEQ ID NO: 10030 - DNA, 25 bp, Homo sapiens
cctagagcttggtgcccaggaaatt

SEQ ID NO: 10031 - DNA, 25 bp, Homo sapiens
gccttcccatctaaacagtgtttca

SEQ ID NO: 10032 - DNA, 25 bp, Homo sapiens
ggctctctcctgttgtctaaatata

SEQ ID NO: 10033 - DNA, 25 bp, Homo sapiens
ttacccggtagatctcagcagtgtg

SEQ ID NO: 10034 - DNA, 25 bp, Homo sapiens
gtcccgacaggctcctaactgaatg

SEQ ID NO: 10035 - DNA, 25 bp, Homo sapiens
cagagacttgggctccttgctttta

SEQ ID NO: 10036 - DNA, 25 bp, Homo sapiens
tttactgtggatgaagcaacgcttc

SEQ ID NO: 10037 - DNA, 25 bp, Homo sapiens
aaactcagggcagcttttggaatcc

SEQ ID NO: 10038 - DNA, 25 bp, Homo sapiens
tccgtcgacatgtttggcagaatta

SEQ ID NO: 10039 - DNA, 25 bp, Homo sapiens
agccttttcggttggggaatcttca

SEQ ID NO: 10040 - DNA, 25 bp, Homo sapiens
tttccatgcctttatattggacatt

SEQ ID NO: 10041 - DNA, 25 bp, Homo sapiens
ctcaaggctgagactgggtctttcc

SEQ ID NO: 10042 - DNA, 25 bp, Homo sapiens
gactgggccgcttgattatattact

SEQ ID NO: 10043 - DNA, 25 bp, Homo sapiens
caggtctcccgtctcgtgttcattt

SEQ ID NO: 10044 - DNA, 25 bp, Homo sapiens
tttcctccaggctcagggacaggtc

SEQ ID NO: 10045 - DNA, 25 bp, Homo sapiens
tgcccgaagagtgcccttgtatata

SEQ ID NO: 10046 - DNA, 25 bp, Homo sapiens
ggagggctcccacatgacagttgaa

SEQ ID NO: 10047 - DNA, 25 bp, Homo sapiens
tgctaggcaagttcaggcatacgta

SEQ ID NO: 10048 - DNA, 25 bp, Homo sapiens
atctctgccaagtcactacatcatg

SEQ ID NO: 10049 - DNA, 25 bp, Homo sapiens
cctctttcatgcttgtggatcagtt

SEQ ID NO: 10050 - DNA, 25 bp, Homo sapiens
gtggccaatttcacgttcaaccatg

SEQ ID NO: 10051 - DNA, 25 bp, Homo sapiens
tgttatccttgttctccctgccttg

SEQ ID NO: 10052 - DNA, 25 bp, Homo sapiens
ctatgctggctgataagaggacttc

SEQ ID NO: 10053 - DNA, 25 bp, Homo sapiens
gctcccagcctgagaacctaaactg

SEQ ID NO: 10054 - DNA, 25 bp, Homo sapiens
tgattcacatgcctgccctcagtgg

SEQ ID NO: 10055 - DNA, 25 bp, Homo sapiens
ggaagtcagcttttctccttagaga

SEQ ID NO: 10056 - DNA, 25 bp, Homo sapiens
gctctgcatgagatagctgcacttc

SEQ ID NO: 10057 - DNA, 25 bp, Homo sapiens
agcccacagtttagcgtcagttttc

SEQ ID NO: 10058 - DNA, 25 bp, Homo sapiens
tccttagcctgtgagatatcttgca

SEQ ID NO: 10059 - DNA, 25 bp, Homo sapiens
cctgaaggccttgggtttggaatga

SEQ ID NO: 10060 - DNA, 25 bp, Homo sapiens
acccctttatacagccaactcttca

SEQ ID NO: 10061 - DNA, 25 bp, Homo sapiens
tacacgtttgctttcctgggtcagg

SEQ ID NO: 10062 - DNA, 25 bp, Homo sapiens
ggccatgcttatctcccactgcttg

SEQ ID NO: 10063 - DNA, 25 bp, Homo sapiens
agcctgatatttcggggattctaaa

SEQ ID NO: 10064 - DNA, 25 bp, Homo sapiens
cctccctgggtatggcaatcattta

SEQ ID NO: 10065 - DNA, 25 bp, Homo sapiens
gagggcttcacccagcatgtccatg

SEQ ID NO: 10066 - DNA, 25 bp, Homo sapiens
gccagaaggaaagggagaacaagtc

SEQ ID NO: 10067 - DNA, 25 bp, Homo sapiens
ccaggagatgtgtctgaagctaatt

SEQ ID NO: 10068 - DNA, 25 bp, Homo sapiens
atggccttggtactaaattctgatc

SEQ ID NO: 10069 - DNA, 25 bp, Homo sapiens
tccagctggagcaaggtattgactt

SEQ ID NO: 10070 - DNA, 25 bp, Homo sapiens
agcccagaggcccaaagatttgtca

SEQ ID NO: 10071 - DNA, 25 bp, Homo sapiens
cctcattgggttaaacggaacacca

SEQ ID NO: 10072 - DNA, 25 bp, Homo sapiens
cctggctccctgacattgaagtaga

SEQ ID NO: 10073 - DNA, 25 bp, Homo sapiens
ccaaatggttgtattcttgtctatg

SEQ ID NO: 10074 - DNA, 25 bp, Homo sapiens
tgccagcgtcatagtgtaagttaga

SEQ ID NO: 10075 - DNA, 25 bp, Homo sapiens
actgtcgatgttatgtggagcctcc

SEQ ID NO: 10076 - DNA, 25 bp, Homo sapiens
ggcctgatatcagtttgtcaccatg

SEQ ID NO: 10077 - DNA, 25 bp, Homo sapiens
cctcatgccgaggtagagattttaa

SEQ ID NO: 10078 - DNA, 25 bp, Homo sapiens
gatggatcccagttgaatttctacc

SEQ ID NO: 10079 - DNA, 25 bp, Homo sapiens
tccaggcttccacgatactttcaga

SEQ ID NO: 10080 - DNA, 25 bp, Homo sapiens
agctcagctttgttgcactctcagg

SEQ ID NO: 10081 - DNA, 25 bp, Homo sapiens
tcctgtttccttcagggccataata

SEQ ID NO: 10082 - DNA, 25 bp, Homo sapiens
tttgaaaagtgaataataataacag

SEQ ID NO: 10083 - DNA, 25 bp, Homo sapiens
gatgttgcttcgacctctttaccta

SEQ ID NO: 10084 - DNA, 25 bp, Homo sapiens
tcccattgaggaataagaagttgtc

SEQ ID NO: 10085 - DNA, 25 bp, Homo sapiens
tgccaccttggcaattctgtgatta

SEQ ID NO: 10086 - DNA, 25 bp, Homo sapiens
agtgtagccttcctggtccagaata

SEQ ID NO: 10087 - DNA, 25 bp, Homo sapiens
gccacatagggcacttattttagta

SEQ ID NO: 10088 - DNA, 25 bp, Homo sapiens
tcagagttgcatccctttgagcttc

SEQ ID NO: 10089 - DNA, 25 bp, Homo sapiens
gctgtcattcagcttggtccatgtg

SEQ ID NO: 10090 - DNA, 25 bp, Homo sapiens
gctcgttcccttaactggtgaagca

SEQ ID NO: 10091 - DNA, 25 bp, Homo sapiens
cttaggggctgacaattaggctcta

SEQ ID NO: 10092 - DNA, 25 bp, Homo sapiens
agtcagcattgactgggttaggagc

SEQ ID NO: 10093 - DNA, 25 bp, Homo sapiens
acactttcagtggaggcagaagcca

SEQ ID NO: 10094 - DNA, 25 bp, Homo sapiens
tttggtctggtaaaaaactcctccc

SEQ ID NO: 10095 - DNA, 25 bp, Homo sapiens
gtagcatttcctccaccaagtgatg

SEQ ID NO: 10096 - DNA, 25 bp, Homo sapiens
tcccggcacctgtctgataaggttc

SEQ ID NO: 10097 - DNA, 25 bp, Homo sapiens
cctgcctgcatcttctaactttgga

SEQ ID NO: 10098 - DNA, 25 bp, Homo sapiens
ttcctctggttaaggctgtacatta

SEQ ID NO: 10099 - DNA, 25 bp, Homo sapiens
ctggaatcctgaatgttgcctttgc

SEQ ID NO: 10100 - DNA, 25 bp, Homo sapiens
taggggcatctctttgcttgctatg

SEQ ID NO: 10101 - DNA, 25 bp, Homo sapiens
agatatactgttttcttttctgccc

SEQ ID NO: 10102 - DNA, 25 bp, Homo sapiens
ttggtaagtttctacatgagctggc

SEQ ID NO: 10103 - DNA, 25 bp, Homo sapiens
ttgccaccgccatggagcgagcata

SEQ ID NO: 10104 - DNA, 25 bp, Homo sapiens
ttgctgcaggccaaagacggctatg

SEQ ID NO: 10105 - DNA, 25 bp, Homo sapiens
ctgagctgtctgcaacctgaccttt

SEQ ID NO: 10106 - DNA, 25 bp, Homo sapiens
aacagcctctgcctcctatctagtg

SEQ ID NO: 10107 - DNA, 25 bp, Homo sapiens
atgctcagctcgacaccagattttc

SEQ ID NO: 10108 - DNA, 25 bp, Homo sapiens
cttgaaagagttaatgcaccacctg

SEQ ID NO: 10109 - DNA, 25 bp, Homo sapiens
cgagcctttgatttcatagactgac

SEQ ID NO: 10110 - DNA, 25 bp, Homo sapiens
ggcacagcagctcttctattaccag

SEQ ID NO: 10111 - DNA, 25 bp, Homo sapiens
tgattcctgaccttgagatcccttc

SEQ ID NO: 10112 - DNA, 25 bp, Homo sapiens
cagcccttctctctgtgggtatgaa

SEQ ID NO: 10113 - DNA, 25 bp, Homo sapiens
gtcgcagtatttcttaggaactcta

SEQ ID NO: 10114 - DNA, 25 bp, Homo sapiens
acagtctctctggatcaaatttagc

SEQ ID NO: 10115 - DNA, 25 bp, Homo sapiens
tggcggtggtcacacagcataaacc

SEQ ID NO: 10116 - DNA, 25 bp, Homo sapiens
cccaggtcattctatggagttcaga

SEQ ID NO: 10117 - DNA, 25 bp, Homo sapiens
gccctggttcctgattctgtagata

SEQ ID NO: 10118 - DNA, 25 bp, Homo sapiens
ggtgactctgctacctctttcttca

SEQ ID NO: 10119 - DNA, 25 bp, Homo sapiens
ggtataggacccacagcaattaatg

SEQ ID NO: 10120 - DNA, 25 bp, Homo sapiens
tttacctctcctaccacagactgtg

SEQ ID NO: 10121 - DNA, 25 bp, Homo sapiens
aaggtaaaataatagcctgaatata

SEQ ID NO: 10122 - DNA, 25 bp, Homo sapiens
cagatcttctgcttgtgttttcacc

SEQ ID NO: 10123 - DNA, 25 bp, Homo sapiens
tggctgcaaatctggatcaggcata

SEQ ID NO: 10124 - DNA, 25 bp, Homo sapiens
cctactgtcaaagtgcgagcattta

SEQ ID NO: 10125 - DNA, 25 bp, Homo sapiens
ttggccctgccttgactgttataaa

SEQ ID NO: 10126 - DNA, 25 bp, Homo sapiens
cttccctgggaagagcatctctata

SEQ ID NO: 10127 - DNA, 25 bp, Homo sapiens
cttggcatgccctggaaataataga

SEQ ID NO: 10128 - DNA, 25 bp, Homo sapiens
ttcatgtcaggtactgcaaagagcc

SEQ ID NO: 10129 - DNA, 25 bp, Homo sapiens
agtgcttgccaatctgccatattca

SEQ ID NO: 10130 - DNA, 25 bp, Homo sapiens
cggccctttatttaccaacagtgga

SEQ ID NO: 10131 - DNA, 25 bp, Homo sapiens
tcctcccagggcagcatcaataaag

SEQ ID NO: 10132 - DNA, 25 bp, Homo sapiens
ctcacagtgggcagaatttcttgtc

SEQ ID NO: 10133 - DNA, 25 bp, Homo sapiens
tcagcagtgtagctagctctaaagc

SEQ ID NO: 10134 - DNA, 25 bp, Homo sapiens
acgctcattgctcatcttgaaagta

SEQ ID NO: 10135 - DNA, 25 bp, Homo sapiens
aaggcctggctctcatgaatggaaa

SEQ ID NO: 10136 - DNA, 25 bp, Homo sapiens
cctggaagctagtttgtggcatatc

SEQ ID NO: 10137 - DNA, 25 bp, Homo sapiens
tgtgaactactctccaggcagctgg

SEQ ID NO: 10138 - DNA, 25 bp, Homo sapiens
gaagcacttctagatcctttcatgg

SEQ ID NO: 10139 - DNA, 25 bp, Homo sapiens
gtgcccactatgacttactttaagg

SEQ ID NO: 10140 - DNA, 25 bp, Homo sapiens
agccaggctgaggttgtaaaattta

SEQ ID NO: 10141 - DNA, 25 bp, Homo sapiens
agctctgtattttaggaaggccacc

SEQ ID NO: 10142 - DNA, 25 bp, Homo sapiens
cgacctatagtccatgtgcacgatg

SEQ ID NO: 10143 - DNA, 25 bp, Homo sapiens
gaaaactcctactttgtgcctactg

SEQ ID NO: 10144 - DNA, 25 bp, Homo sapiens
tatggcaggacttttggggcttcac

SEQ ID NO: 10145 - DNA, 25 bp, Homo sapiens
gtgtccgtgtaagccaatcagtgtt

SEQ ID NO: 10146 - DNA, 25 bp, Homo sapiens
tacctcggttgaatcggacctctga

SEQ ID NO: 10147 - DNA, 25 bp, Homo sapiens
agaacaatttctgttttaaatttat

SEQ ID NO: 10148 - DNA, 25 bp, Homo sapiens
tgggaagcttctcttattctgttta

SEQ ID NO: 10149 - DNA, 25 bp, Homo sapiens
ctgtgtgggtcctttcaaaacttta

SEQ ID NO: 10150 - DNA, 25 bp, Homo sapiens
aaagtgatctttgacccggaagttc

SEQ ID NO: 10151 - DNA, 25 bp, Homo sapiens
aagcagcttgtgtgttctcctcatg

SEQ ID NO: 10152 - DNA, 25 bp, Homo sapiens
cctcgtattctctagcggtatcttg

SEQ ID NO: 10153 - DNA, 25 bp, Homo sapiens
gctgccctcttgtggccatacaatc

SEQ ID NO: 10154 - DNA, 25 bp, Homo sapiens
tctcccacaccctcctcccccgaag

SEQ ID NO: 10155 - DNA, 25 bp, Homo sapiens
ccgaagtaaaggacacccccgcaca

SEQ ID NO: 10156 - DNA, 25 bp, Homo sapiens
gcacacacgccagcggtgggcctta

SEQ ID NO: 10157 - DNA, 25 bp, Homo sapiens
acacgccagcggtgggccttatctc

SEQ ID NO: 10158 - DNA, 25 bp, Homo sapiens
gcggtgggccttatctcccccctta

SEQ ID NO: 10159 - DNA, 25 bp, Homo sapiens
ccttatccaaagctgcgctagacta

SEQ ID NO: 10160 - DNA, 25 bp, Homo sapiens
gctgcgctagactattacctacaaa

SEQ ID NO: 10161 - DNA, 25 bp, Homo sapiens
cgctagactattacctacaaagggc

SEQ ID NO: 10162 - DNA, 25 bp, Homo sapiens
agggcacaattttcctgctggctca

SEQ ID NO: 10163 - DNA, 25 bp, Homo sapiens
ttcctgctggctcagaaatgccaga

SEQ ID NO: 10164 - DNA, 25 bp, Homo sapiens
tggctcagaaatgccagacactggc

SEQ ID NO: 10165 - DNA, 25 bp, Homo sapiens
atgccagacactggcctgcaaggcc

SEQ ID NO: 10166 - DNA, 25 bp, Homo sapiens
cctgcaaggccgactcggaaaagta

SEQ ID NO: 10167 - DNA, 25 bp, Homo sapiens
ctcggaaaagtagtgcctcgcctct

SEQ ID NO: 10168 - DNA, 25 bp, Homo sapiens
cggaaaagtagtgcctcgcctctac

SEQ ID NO: 10169 - DNA, 25 bp, Homo sapiens
aaaagtagtgcctcgcctctacctc

SEQ ID NO: 10170 - DNA, 25 bp, Homo sapiens
tcgcctctacctcctccatttcctg

SEQ ID NO: 10171 - DNA, 25 bp, Homo sapiens
ctcctccatttcctgccctctcgca

SEQ ID NO: 10172 - DNA, 25 bp, Homo sapiens
tgccctctcgcatcctctccctgca

SEQ ID NO: 10173 - DNA, 25 bp, Homo sapiens
atcctctccctgcactcccactctt

SEQ ID NO: 10174 - DNA, 25 bp, Homo sapiens
ccctgcactcccactcttcccacta

SEQ ID NO: 10175 - DNA, 25 bp, Homo sapiens
cccactcttcccactaccaccacca

SEQ ID NO: 10176 - DNA, 25 bp, Homo sapiens
cactcttcccactaccaccaccacc

SEQ ID NO: 10177 - DNA, 25 bp, Homo sapiens
tcttcccactaccaccaccaccccc

SEQ ID NO: 10178 - DNA, 25 bp, Homo sapiens
accaccacccccgctttcaaaaata

SEQ ID NO: 10179 - DNA, 25 bp, Homo sapiens
ataaaattggatacaaactttaatc

SEQ ID NO: 10180 - DNA, 25 bp, Homo sapiens
ggatacaaactttaatcactaagga

SEQ ID NO: 10181 - DNA, 25 bp, Homo sapiens
tcactaaggacaaatattgacgctt

SEQ ID NO: 10182 - DNA, 25 bp, Homo sapiens
ttgacgcttaaacgaaaatgaccca

SEQ ID NO: 10183 - DNA, 25 bp, Homo sapiens
cgaaaatgacccagtacaatgagga

SEQ ID NO: 10184 - DNA, 25 bp, Homo sapiens
cccagtacaatgaggaggaagccgg

SEQ ID NO: 10185 - DNA, 25 bp, Homo sapiens
gccggaaatgtgagctattggccct

SEQ ID NO: 10186 - DNA, 25 bp, Homo sapiens
ctattggccctaggaggggaatttc

SEQ ID NO: 10187 - DNA, 25 bp, Homo sapiens
ttggccctaggaggggaatttcggt

SEQ ID NO: 10188 - DNA, 25 bp, Homo sapiens
gccctaggaggggaatttcggtgga

SEQ ID NO: 10189 - DNA, 25 bp, Homo sapiens
cctaggaggggaatttcggtggagc

SEQ ID NO: 10190 - DNA, 25 bp, Homo sapiens
ggaatttcggtggagcggagccggc

SEQ ID NO: 10191 - DNA, 25 bp, Homo sapiens
aatttcggtggagcggagccggcgg

SEQ ID NO: 10192 - DNA, 25 bp, Homo sapiens
ttcggtggagcggagccggcggggt

SEQ ID NO: 10193 - DNA, 25 bp, Homo sapiens
cggtggagcggagccggcggggtgg

SEQ ID NO: 10194 - DNA, 25 bp, Homo sapiens
tggagcggagccggcggggtggagg

SEQ ID NO: 10195 - DNA, 25 bp, Homo sapiens
gagcggagccggcggggtggagggg

SEQ ID NO: 10196 - DNA, 25 bp, Homo sapiens
agccggcggggtggagggggtggcg

SEQ ID NO: 10197 - DNA, 25 bp, Homo sapiens
tggcgggggcgcagggaagggctgc

SEQ ID NO: 10198 - DNA, 25 bp, Homo sapiens
aagggctgcggcaccgcgtgctccc

SEQ ID NO: 10199 - DNA, 25 bp, Homo sapiens
gcaccgcgtgctcccgccggcgtat

SEQ ID NO: 10200 - DNA, 25 bp, Homo sapiens
tcccgccggcgtatccctacgcggc

SEQ ID NO: 10201 - DNA, 25 bp, Homo sapiens
atccctacgcggctccgcgcggcct

SEQ ID NO: 10202 - DNA, 25 bp, Homo sapiens
ccctacgcggctccgcgcggcctcg

SEQ ID NO: 10203 - DNA, 25 bp, Homo sapiens
cctcggggtccgaggcccgcggaga

SEQ ID NO: 10204 - DNA, 25 bp, Homo sapiens
tcggggtccgaggcccgcggagagg

SEQ ID NO: 10205 - DNA, 25 bp, Homo sapiens
ccgaggcccgcggagagggggaggc

SEQ ID NO: 10206 - DNA, 25 bp, Homo sapiens
gaggcccgcggagagggggaggcga

SEQ ID NO: 10207 - DNA, 25 bp, Homo sapiens
tccgattggtcgacggcgagagaga

SEQ ID NO: 10208 - DNA, 25 bp, Homo sapiens
gacggcgagagagacgctcccgcac

SEQ ID NO: 10209 - DNA, 25 bp, Homo sapiens
agacgctcccgcacgccgccagctc

SEQ ID NO: 10210 - DNA, 25 bp, Homo sapiens
gccagctctgattggcccagcggta

SEQ ID NO: 10211 - DNA, 25 bp, Homo sapiens
gcccagcggtaggaaaggttaaacc

SEQ ID NO: 10212 - DNA, 25 bp, Homo sapiens
ccagcggtaggaaaggttaaaccaa

SEQ ID NO: 10213 - DNA, 25 bp, Homo sapiens
agcggtaggaaaggttaaaccaaaa

SEQ ID NO: 10214 - DNA, 25 bp, Homo sapiens
caaaaatttttttacagccctagtg

SEQ ID NO: 10215 - DNA, 25 bp, Homo sapiens
acagccctagtgtgcgcctgtagct

SEQ ID NO: 10216 - DNA, 25 bp, Homo sapiens
tgtgcgcctgtagctcggaaaatta

SEQ ID NO: 10217 - DNA, 25 bp, Homo sapiens
gcgcctgtagctcggaaaattaatt

SEQ ID NO: 10218 - DNA, 25 bp, Homo sapiens
tcggaaaattaattgtggctatagc

SEQ ID NO: 10219 - DNA, 25 bp, Homo sapiens
attgtggctatagccgcctcgatcg

SEQ ID NO: 10220 - DNA, 25 bp, Homo sapiens
gctatagccgcctcgatcgctgtct

SEQ ID NO: 10221 - DNA, 25 bp, Homo sapiens
tatagccgcctcgatcgctgtctcc

SEQ ID NO: 10222 - DNA, 25 bp, Homo sapiens
agccgcctcgatcgctgtctcccca

SEQ ID NO: 10223 - DNA, 25 bp, Homo sapiens
gcctcgatcgctgtctccccagcct

SEQ ID NO: 10224 - DNA, 25 bp, Homo sapiens
gggggtggggggggagaccaagaag

SEQ ID NO: 10225 - DNA, 25 bp, Homo sapiens
gagaccaagaagtacagttgggagc

SEQ ID NO: 10226 - DNA, 25 bp, Homo sapiens
accaagaagtacagttgggagcgag

SEQ ID NO: 10227 - DNA, 25 bp, Homo sapiens
acagttgggagcgagggagcttcac

SEQ ID NO: 10228 - DNA, 25 bp, Homo sapiens
ttgggagcgagggagcttcaccccc

SEQ ID NO: 10229 - DNA, 25 bp, Homo sapiens
agcgagggagcttcacccccggggc

SEQ ID NO: 10230 - DNA, 25 bp, Homo sapiens
gagggagcttcacccccggggcggt

SEQ ID NO: 10231 - DNA, 25 bp, Homo sapiens
agcttcacccccggggcggtggttg

SEQ ID NO: 10232 - DNA, 25 bp, Homo sapiens
ctaattcctgaggggtggttgctgc

SEQ ID NO: 10233 - DNA, 25 bp, Homo sapiens
ggtggttgctgcttttgctacatga

SEQ ID NO: 10234 - DNA, 25 bp, Homo sapiens
ttttgctacatgacttgccagcgcc

SEQ ID NO: 10235 - DNA, 25 bp, Homo sapiens
tgctacatgacttgccagcgcccga

SEQ ID NO: 10236 - DNA, 25 bp, Homo sapiens
acatgacttgccagcgcccgagcct

SEQ ID NO: 10237 - DNA, 25 bp, Homo sapiens
cagcgcccgagcctgcggtccaact

SEQ ID NO: 10238 - DNA, 25 bp, Homo sapiens
tttccccccgacgactgggtgatgc

SEQ ID NO: 10239 - DNA, 25 bp, Homo sapiens
cccgacgactgggtgatgctggaca

SEQ ID NO: 10240 - DNA, 25 bp, Homo sapiens
tgctggacatgggagataggaaaga

SEQ ID NO: 10241 - DNA, 25 bp, Homo sapiens
ataggaaagaggtgaaaatgatccc

SEQ ID NO: 10242 - DNA, 25 bp, Homo sapiens
ggtgaaaatgatccccaagtcctcg

SEQ ID NO: 10243 - DNA, 25 bp, Homo sapiens
caagtcctcgttcagcatcaacagc

SEQ ID NO: 10244 - DNA, 25 bp, Homo sapiens
tcgttcagcatcaacagcctggtgc

SEQ ID NO: 10245 - DNA, 25 bp, Homo sapiens
agcatcaacagcctggtgcccgagg

SEQ ID NO: 10246 - DNA, 25 bp, Homo sapiens
ccgaggcggtccagaacgacaacca

SEQ ID NO: 10247 - DNA, 25 bp, Homo sapiens
aggcggtccagaacgacaaccacca

SEQ ID NO: 10248 - DNA, 25 bp, Homo sapiens
acgacaaccaccacgcgagccacgg

SEQ ID NO: 10249 - DNA, 25 bp, Homo sapiens
acgacgacaagggcccccagcagct

SEQ ID NO: 10250 - DNA, 25 bp, Homo sapiens
gacaagggcccccagcagctgctgc

SEQ ID NO: 10251 - DNA, 25 bp, Homo sapiens
caagggcccccagcagctgctgctc

SEQ ID NO: 10252 - DNA, 25 bp, Homo sapiens
ctggacggggctaaagcggacgggc

SEQ ID NO: 10253 - DNA, 25 bp, Homo sapiens
ggctaaagcggacgggctgggcggc

SEQ ID NO: 10254 - DNA, 25 bp, Homo sapiens
aaagcggacgggctgggcggcaagg

SEQ ID NO: 10255 - DNA, 25 bp, Homo sapiens
gctgggcggcaagggcgagccgggc

SEQ ID NO: 10256 - DNA, 25 bp, Homo sapiens
gcggcaagggcgagccgggcggcgg

SEQ ID NO: 10257 - DNA, 25 bp, Homo sapiens
gcaagggcgagccgggcggcgggcc

SEQ ID NO: 10258 - DNA, 25 bp, Homo sapiens
cgggccgggggagctggcgcccgtc

SEQ ID NO: 10259 - DNA, 25 bp, Homo sapiens
gccgggggagctggcgcccgtcggg

SEQ ID NO: 10260 - DNA, 25 bp, Homo sapiens
cgggggagctggcgcccgtcgggcc

SEQ ID NO: 10261 - DNA, 25 bp, Homo sapiens
aacggcaagtacgagaagccgccgt

SEQ ID NO: 10262 - DNA, 25 bp, Homo sapiens
cgagaagccgccgttcagctacaac

SEQ ID NO: 10263 - DNA, 25 bp, Homo sapiens
gttcagctacaacgcgctcatcatg

SEQ ID NO: 10264 - DNA, 25 bp, Homo sapiens
acgcgctcatcatgatggccatccg

SEQ ID NO: 10265 - DNA, 25 bp, Homo sapiens
tcatgatggccatccggcagagccc

SEQ ID NO: 10266 - DNA, 25 bp, Homo sapiens
tggccatccggcagagccccgagaa

SEQ ID NO: 10267 - DNA, 25 bp, Homo sapiens
gagaagcggctcacgctcaacggca

SEQ ID NO: 10268 - DNA, 25 bp, Homo sapiens
acgctcaacggcatctacgagttca

SEQ ID NO: 10269 - DNA, 25 bp, Homo sapiens
ggcatctacgagttcatcatgaaga

SEQ ID NO: 10270 - DNA, 25 bp, Homo sapiens
tgaagaacttcccttactaccgcga

SEQ ID NO: 10271 - DNA, 25 bp, Homo sapiens
cttactaccgcgagaacaagcaggg

SEQ ID NO: 10272 - DNA, 25 bp, Homo sapiens
aacaagcagggctggcagaactcca

SEQ ID NO: 10273 - DNA, 25 bp, Homo sapiens
agggctggcagaactccatccgcca

SEQ ID NO: 10274 - DNA, 25 bp, Homo sapiens
ggcagaactccatccgccacaatct

SEQ ID NO: 10275 - DNA, 25 bp, Homo sapiens
gccacaatctgtccctcaacaagtg

SEQ ID NO: 10276 - DNA, 25 bp, Homo sapiens
tctgtccctcaacaagtgcttcgtg

SEQ ID NO: 10277 - DNA, 25 bp, Homo sapiens
caagtgcttcgtgaaggtgccgcgc

SEQ ID NO: 10278 - DNA, 25 bp, Homo sapiens
cttcgtgaaggtgccgcgccactac

SEQ ID NO: 10279 - DNA, 25 bp, Homo sapiens
gccactacgacgacccgggcaaggg

SEQ ID NO: 10280 - DNA, 25 bp, Homo sapiens
gacgacccgggcaagggcaactact

SEQ ID NO: 10281 - DNA, 25 bp, Homo sapiens
gcaactactggatgctggacccgtc

SEQ ID NO: 10282 - DNA, 25 bp, Homo sapiens
aactactggatgctggacccgtcga

SEQ ID NO: 10283 - DNA, 25 bp, Homo sapiens
tgctggacccgtcgagcgacgacgt

SEQ ID NO: 10284 - DNA, 25 bp, Homo sapiens
acgacgtgttcatcggcggcaccac

SEQ ID NO: 10285 - DNA, 25 bp, Homo sapiens
tcatcggcggcaccacgggcaagct

SEQ ID NO: 10286 - DNA, 25 bp, Homo sapiens
atcggcggcaccacgggcaagctgc

SEQ ID NO: 10287 - DNA, 25 bp, Homo sapiens
accacgggcaagctgcggcgccgct

SEQ ID NO: 10288 - DNA, 25 bp, Homo sapiens
gctgcggcgccgctccaccacctcg

SEQ ID NO: 10289 - DNA, 25 bp, Homo sapiens
gctccaccacctcgcgggccaagct

SEQ ID NO: 10290 - DNA, 25 bp, Homo sapiens
tcgcgggccaagctggccttcaagc

SEQ ID NO: 10291 - DNA, 25 bp, Homo sapiens
ccaagctggccttcaagcgcggtgc

SEQ ID NO: 10292 - DNA, 25 bp, Homo sapiens
aagctggccttcaagcgcggtgcgc

SEQ ID NO: 10293 - DNA, 25 bp, Homo sapiens
ttcaagcgcggtgcgcgcctcacct

SEQ ID NO: 10294 - DNA, 25 bp, Homo sapiens
gcgcgcctcacctccaccggcctca

SEQ ID NO: 10295 - DNA, 25 bp, Homo sapiens
accggcctcaccttcatggaccgcg

SEQ ID NO: 10296 - DNA, 25 bp, Homo sapiens
ctcaccttcatggaccgcgccggct

SEQ ID NO: 10297 - DNA, 25 bp, Homo sapiens
gccggctccctctactggcccatgt

SEQ ID NO: 10298 - DNA, 25 bp, Homo sapiens
tactggcccatgtcgcccttcctgt

SEQ ID NO: 10299 - DNA, 25 bp, Homo sapiens
gtcgcccttcctgtccctgcaccac

SEQ ID NO: 10300 - DNA, 25 bp, Homo sapiens
cgcccttcctgtccctgcaccaccc

SEQ ID NO: 10301 - DNA, 25 bp, Homo sapiens
ccacccccgcgccagcagcactttg

SEQ ID NO: 10302 - DNA, 25 bp, Homo sapiens
cgcgccagcagcactttgagttaca

SEQ ID NO: 10303 - DNA, 25 bp, Homo sapiens
tttgagttacaacggcaccacgtcg

SEQ ID NO: 10304 - DNA, 25 bp, Homo sapiens
gttacaacggcaccacgtcggccta

SEQ ID NO: 10305 - DNA, 25 bp, Homo sapiens
tacaacggcaccacgtcggcctacc

SEQ ID NO: 10306 - DNA, 25 bp, Homo sapiens
aacggcaccacgtcggcctacccca

SEQ ID NO: 10307 - DNA, 25 bp, Homo sapiens
ccacgtcggcctaccccagccaccc

SEQ ID NO: 10308 - DNA, 25 bp, Homo sapiens
caccccatgccctacagctccgtgt

SEQ ID NO: 10309 - DNA, 25 bp, Homo sapiens
acagctccgtgttgactcagaactc

SEQ ID NO: 10310 - DNA, 25 bp, Homo sapiens
ttgactcagaactcgctgggcaaca

SEQ ID NO: 10311 - DNA, 25 bp, Homo sapiens
ctcagaactcgctgggcaacaacca

SEQ ID NO: 10312 - DNA, 25 bp, Homo sapiens
cgctgggcaacaaccactccttctc

SEQ ID NO: 10313 - DNA, 25 bp, Homo sapiens
ttctccaccgccaacggcctgagcg

SEQ ID NO: 10314 - DNA, 25 bp, Homo sapiens
ccaacggcctgagcgtggaccggct

SEQ ID NO: 10315 - DNA, 25 bp, Homo sapiens
accggctggtcaacggggagatccc

SEQ ID NO: 10316 - DNA, 25 bp, Homo sapiens
caacggggagatcccgtacgccacg

SEQ ID NO: 10317 - DNA, 25 bp, Homo sapiens
atcccgtacgccacgcaccacctca

SEQ ID NO: 10318 - DNA, 25 bp, Homo sapiens
cacgcaccacctcacggccgccgcg

SEQ ID NO: 10319 - DNA, 25 bp, Homo sapiens
cgcaccacctcacggccgccgcgct

SEQ ID NO: 10320 - DNA, 25 bp, Homo sapiens
acggccgccgcgctagccgcctcgg

SEQ ID NO: 10321 - DNA, 25 bp, Homo sapiens
tagccgcctcggtgccctgcggcct

SEQ ID NO: 10322 - DNA, 25 bp, Homo sapiens
tgcggcctgtcggtgccctgctctg

SEQ ID NO: 10323 - DNA, 25 bp, Homo sapiens
tcggtgccctgctctgggacctact

SEQ ID NO: 10324 - DNA, 25 bp, Homo sapiens
tgctctgggacctactccctcaacc

SEQ ID NO: 10325 - DNA, 25 bp, Homo sapiens
gggacctactccctcaacccctgct

SEQ ID NO: 10326 - DNA, 25 bp, Homo sapiens
ccctgctccgtcaacctgctcgcgg

SEQ ID NO: 10327 - DNA, 25 bp, Homo sapiens
cgcgggccagaccagttactttttc

SEQ ID NO: 10328 - DNA, 25 bp, Homo sapiens
cgggccagaccagttactttttccc

SEQ ID NO: 10329 - DNA, 25 bp, Homo sapiens
agaccagttactttttcccccacgt

SEQ ID NO: 10330 - DNA, 25 bp, Homo sapiens
ccacgtcccgcacccgtcaatgact

SEQ ID NO: 10331 - DNA, 25 bp, Homo sapiens
ccgtcaatgacttcgcagagcagca

SEQ ID NO: 10332 - DNA, 25 bp, Homo sapiens
ttcgcagagcagcacgtccatgagc

SEQ ID NO: 10333 - DNA, 25 bp, Homo sapiens
cagagcagcacgtccatgagcgcca

SEQ ID NO: 10334 - DNA, 25 bp, Homo sapiens
agcagcacgtccatgagcgccaggg

SEQ ID NO: 10335 - DNA, 25 bp, Homo sapiens
agcacgtccatgagcgccagggccg

SEQ ID NO: 10336 - DNA, 25 bp, Homo sapiens
tccatgagcgccagggccgcgtcct

SEQ ID NO: 10337 - DNA, 25 bp, Homo sapiens
agggccgcgtcctcctccacgtcgc

SEQ ID NO: 10338 - DNA, 25 bp, Homo sapiens
gtcctcctccacgtcgccgcaggcc

SEQ ID NO: 10339 - DNA, 25 bp, Homo sapiens
tccacgtcgccgcaggccccctcga

SEQ ID NO: 10340 - DNA, 25 bp, Homo sapiens
ctcgaccctgccctgtgagtcttta

SEQ ID NO: 10341 - DNA, 25 bp, Homo sapiens
ccctgccctgtgagtctttaagacc

SEQ ID NO: 10342 - DNA, 25 bp, Homo sapiens
gagtctttaagaccctctttgccaa

SEQ ID NO: 10343 - DNA, 25 bp, Homo sapiens
ctctttgccaagttttacgacggga

SEQ ID NO: 10344 - DNA, 25 bp, Homo sapiens
tgccaagttttacgacgggactgtc

SEQ ID NO: 10345 - DNA, 25 bp, Homo sapiens
ccaagttttacgacgggactgtctg

SEQ ID NO: 10346 - DNA, 25 bp, Homo sapiens
ctgtctgggggactgtctgattatt

SEQ ID NO: 10347 - DNA, 25 bp, Homo sapiens
ggggactgtctgattatttcacaca

SEQ ID NO: 10348 - DNA, 25 bp, Homo sapiens
tcacacatcaaaatcaggggtcttc

SEQ ID NO: 10349 - DNA, 25 bp, Homo sapiens
ggggtcttcttccaaccctttaata

SEQ ID NO: 10350 - DNA, 25 bp, Homo sapiens
ttaatacattaacatccctgggacc

SEQ ID NO: 10351 - DNA, 25 bp, Homo sapiens
catccctgggaccagactgtaagtg

SEQ ID NO: 10352 - DNA, 25 bp, Homo sapiens
gaccagactgtaagtgaacgtttta

SEQ ID NO: 10353 - DNA, 25 bp, Homo sapiens
gaacgttttacacacatttgcattg

SEQ ID NO: 10354 - DNA, 25 bp, Homo sapiens
acgttttacacacatttgcattgta

SEQ ID NO: 10355 - DNA, 25 bp, Homo sapiens
gttttacacacatttgcattgtaaa

SEQ ID NO: 10356 - DNA, 25 bp, Homo sapiens
taattaaaaaaataagtccaggtat

SEQ ID NO: 10357 - DNA, 25 bp, Homo sapiens
agtccaggtattttttattaagccc

SEQ ID NO: 10358 - DNA, 25 bp, Homo sapiens
caggtattttttattaagccccccc

SEQ ID NO: 10359 - DNA, 25 bp, Homo sapiens
gtattttttattaagcccccccctc

SEQ ID NO: 10360 - DNA, 25 bp, Homo sapiens
ccctcccatttctgtacgtttgttc

SEQ ID NO: 10361 - DNA, 25 bp, Homo sapiens
tacgtttgttcagtctctagggttg

SEQ ID NO: 10362 - DNA, 25 bp, Homo sapiens
cagtctctagggttgtttattattc

SEQ ID NO: 10363 - DNA, 25 bp, Homo sapiens
ttattctaacaaggtgtggagtgtc

SEQ ID NO: 10364 - DNA, 25 bp, Homo sapiens
ctaacaaggtgtggagtgtcagcga

SEQ ID NO: 10365 - DNA, 25 bp, Homo sapiens
tggagtgtcagcgaggtgcaatgtg

SEQ ID NO: 10366 - DNA, 25 bp, Homo sapiens
tgcaatgtggggagaatacattgta

SEQ ID NO: 10367 - DNA, 25 bp, Homo sapiens
tgtggggagaatacattgtagaata

SEQ ID NO: 10368 - DNA, 25 bp, Homo sapiens
ttgtagaatataaggtttggaagtc

SEQ ID NO: 10369 - DNA, 25 bp, Homo sapiens
ggtttggaagtcaaattatagtaga

SEQ ID NO: 10370 - DNA, 25 bp, Homo sapiens
gtcaaattatagtagaatgtgtatc

SEQ ID NO: 10371 - DNA, 25 bp, Homo sapiens
gtgtatctaaatagtgactgctttg

SEQ ID NO: 10372 - DNA, 25 bp, Homo sapiens
agtgactgctttgccatttcattca

SEQ ID NO: 10373 - DNA, 25 bp, Homo sapiens
tgccatttcattcaaacctgacaag

SEQ ID NO: 10374 - DNA, 25 bp, Homo sapiens
ctgacaagtctatctctaagagccg

SEQ ID NO: 10375 - DNA, 25 bp, Homo sapiens
ctaagagccgccagatttccatgtg

SEQ ID NO: 10376 - DNA, 25 bp, Homo sapiens
ccgccagatttccatgtgtgcagta

SEQ ID NO: 10377 - DNA, 25 bp, Homo sapiens
ccagatttccatgtgtgcagtatta

SEQ ID NO: 10378 - DNA, 25 bp, Homo sapiens
tccatgtgtgcagtattataagtta

SEQ ID NO: 10379 - DNA, 25 bp, Homo sapiens
catgtgtgcagtattataagttatc

SEQ ID NO: 10380 - DNA, 25 bp, Homo sapiens
ttatcatggaactatatggtggacg

SEQ ID NO: 10381 - DNA, 25 bp, Homo sapiens
actatatggtggacgcagaccttga

SEQ ID NO: 10382 - DNA, 25 bp, Homo sapiens
ggacgcagaccttgagaacaaccta

SEQ ID NO: 10383 - DNA, 25 bp, Homo sapiens
cttgagaacaacctaaattatgggg

SEQ ID NO: 10384 - DNA, 25 bp, Homo sapiens
caacctaaattatggggagaatttt

SEQ ID NO: 10385 - DNA, 25 bp, Homo sapiens
tggggagaattttaaaatgttaaac

SEQ ID NO: 10386 - DNA, 25 bp, Homo sapiens
gggagaattttaaaatgttaaactg

SEQ ID NO: 10387 - DNA, 25 bp, Homo sapiens
aaactgtaatttgtatttaaaaagc

SEQ ID NO: 10388 - DNA, 25 bp, Homo sapiens
aaagcattcgtagtaaaggtgccca

SEQ ID NO: 10389 - DNA, 25 bp, Homo sapiens
cgtagtaaaggtgcccaagaaatta

SEQ ID NO: 10390 - DNA, 25 bp, Homo sapiens
ggtgcccaagaaattattttggcca

SEQ ID NO: 10391 - DNA, 25 bp, Homo sapiens
ggccatttattgttttgtccttttc

SEQ ID NO: 10392 - DNA, 25 bp, Homo sapiens
ttttgtccttttctttaaagaactg

SEQ ID NO: 10393 - DNA, 25 bp, Homo sapiens
gtccttttctttaaagaactgtttt

SEQ ID NO: 10394 - DNA, 25 bp, Homo sapiens
ttctttaaagaactgtttttttttc

SEQ ID NO: 10395 - DNA, 25 bp, Homo sapiens
ttttcttttgtttacttttagacca

SEQ ID NO: 10396 - DNA, 25 bp, Homo sapiens
tacttttagaccaaagattgggttc

SEQ ID NO: 10397 - DNA, 25 bp, Homo sapiens
tgggttctagaaaatgcacttggta

SEQ ID NO: 10398 - DNA, 25 bp, Homo sapiens
ggttctagaaaatgcacttggtata

SEQ ID NO: 10399 - DNA, 25 bp, Homo sapiens
gaaaatgcacttggtatactaagta

SEQ ID NO: 10400 - DNA, 25 bp, Homo sapiens
atgcacttggtatactaagtattaa

SEQ ID NO: 10401 - DNA, 25 bp, Homo sapiens
gcacttggtatactaagtattaaaa

SEQ ID NO: 10402 - DNA, 25 bp, Homo sapiens
acttggtatactaagtattaaaaca

SEQ ID NO: 10403 - DNA, 25 bp, Homo sapiens
ggtatactaagtattaaaacaaaca

SEQ ID NO: 10404 - DNA, 25 bp, Homo sapiens
aacaaacaaaaaggaaagttgtttc

SEQ ID NO: 10405 - DNA, 25 bp, Homo sapiens
aggaaagttgtttcagttggcaaca

SEQ ID NO: 10406 - DNA, 25 bp, Homo sapiens
ttcagttggcaacactgcccattca

SEQ ID NO: 10407 - DNA, 25 bp, Homo sapiens
ggcaacactgcccattcaattgaat

SEQ ID NO: 10408 - DNA, 25 bp, Homo sapiens
cattcaattgaatcagaaggggaca

SEQ ID NO: 10409 - DNA, 25 bp, Homo sapiens
tcagaaggggacaaaattaacgatt

SEQ ID NO: 10410 - DNA, 25 bp, Homo sapiens
ggggacaaaattaacgattgccttc

SEQ ID NO: 10411 - DNA, 25 bp, Homo sapiens
acgattgccttcagtttgtgttgtg

SEQ ID NO: 10412 - DNA, 25 bp, Homo sapiens
gccttcagtttgtgttgtgtatatt

SEQ ID NO: 10413 - DNA, 25 bp, Homo sapiens
tgtgtatattttgatgtatgtggtc

SEQ ID NO: 10414 - DNA, 25 bp, Homo sapiens
tgtggtcactaacaggtcactttta

SEQ ID NO: 10415 - DNA, 25 bp, Homo sapiens
ggtcactaacaggtcacttttattt

SEQ ID NO: 10416 - DNA, 25 bp, Homo sapiens
acaggtcacttttattttttctaaa

SEQ ID NO: 10417 - DNA, 25 bp, Homo sapiens
ctaaatgtagtgaaatgttaatacc

SEQ ID NO: 10418 - DNA, 25 bp, Homo sapiens
tgtagtgaaatgttaatacctattg

SEQ ID NO: 10419 - DNA, 25 bp, Homo sapiens
tattgtacttataggtaaaccttgc

SEQ ID NO: 10420 - DNA, 25 bp, Homo sapiens
gtaaaccttgcaaatatgtaacctg

SEQ ID NO: 10421 - DNA, 25 bp, Homo sapiens
atgtaacctgtgttgcgcaaatgcc

SEQ ID NO: 10422 - DNA, 25 bp, Homo sapiens
acctgtgttgcgcaaatgccgcata

SEQ ID NO: 10423 - DNA, 25 bp, Homo sapiens
gccgcataaatttgagtgattgtta

SEQ ID NO: 10424 - DNA, 25 bp, Homo sapiens
ttgagtgattgttaatgttgtctta

SEQ ID NO: 10425 - DNA, 25 bp, Homo sapiens
gttgtcttaaaatttcttgattgtg

SEQ ID NO: 10426 - DNA, 25 bp, Homo sapiens
atttcttgattgtgatactgtggtc

SEQ ID NO: 10427 - DNA, 25 bp, Homo sapiens
gtgatactgtggtcatatgcccgtg

SEQ ID NO: 10428 - DNA, 25 bp, Homo sapiens
ctgtggtcatatgcccgtgtttgtc

SEQ ID NO: 10429 - DNA, 25 bp, Homo sapiens
catatgcccgtgtttgtcacttaca

SEQ ID NO: 10430 - DNA, 25 bp, Homo sapiens
atgcccgtgtttgtcacttacaaaa

SEQ ID NO: 10431 - DNA, 25 bp, Homo sapiens
gtcacttacaaaaatgtttactatg

SEQ ID NO: 10432 - DNA, 25 bp, Homo sapiens
tgtttactatgaacacacagaaata

SEQ ID NO: 10433 - DNA, 25 bp, Homo sapiens
tgaacacacagaaataaaaaatagg

SEQ ID NO: 10434 - DNA, 25 bp, Homo sapiens
ataggctaaattcatatatatcttg

SEQ ID NO: 10435 - DNA, 25 bp, Homo sapiens
ggctaaattcatatatatcttgata

SEQ ID NO: 10436 - DNA, 25 bp, Homo sapiens
tatcttgatacttttgtctctttta

SEQ ID NO: 10437 - DNA, 25 bp, Homo sapiens
ttgtctcttttattaagtagagcta

SEQ ID NO: 10438 - DNA, 25 bp, Homo sapiens
aagtagagctaattttttaaagacc

SEQ ID NO: 10439 - DNA, 25 bp, Homo sapiens
tttaaagaccaatcaacttataggg

SEQ ID NO: 10440 - DNA, 25 bp, Homo sapiens
ttatagggaattcaaaggctttttc

SEQ ID NO: 10441 - DNA, 25 bp, Homo sapiens
ttcaaaggctttttcagccaaacta

SEQ ID NO: 10442 - DNA, 25 bp, Homo sapiens
ggctttttcagccaaactaaaattt

SEQ ID NO: 10443 - DNA, 25 bp, Homo sapiens
gccaaactaaaatttaaactgctcc

SEQ ID NO: 10444 - DNA, 25 bp, Homo sapiens
ctgctcctttaatttgaactgactc

SEQ ID NO: 10445 - DNA, 25 bp, Homo sapiens
gctcctttaatttgaactgactcta

SEQ ID NO: 10446 - DNA, 25 bp, Homo sapiens
tgaactgactctaaaaatgaaaata

SEQ ID NO: 10447 - DNA, 25 bp, Homo sapiens
aaatagtatttttccctttgtgaac

SEQ ID NO: 10448 - DNA, 25 bp, Homo sapiens
tttccctttgtgaacaaattttaca

SEQ ID NO: 10449 - DNA, 25 bp, Homo sapiens
aattttacaaggagcagcctattta

SEQ ID NO: 10450 - DNA, 25 bp, Homo sapiens
ggagcagcctatttaataaacacta

SEQ ID NO: 10451 - DNA, 25 bp, Homo sapiens
cactagctttaaacaaagtataggc

SEQ ID NO: 10452 - DNA, 25 bp, Homo sapiens
caaagtataggcttttcagctgata

SEQ ID NO: 10453 - DNA, 25 bp, Homo sapiens
aggcttttcagctgatacctgtaag

SEQ ID NO: 10454 - DNA, 25 bp, Homo sapiens
gctgatacctgtaagtttctgtgga

SEQ ID NO: 10455 - DNA, 25 bp, Homo sapiens
acctgtaagtttctgtggatataca

SEQ ID NO: 10456 - DNA, 25 bp, Homo sapiens
tgtggatatacagcaaaaagagata

SEQ ID NO: 10457 - DNA, 25 bp, Homo sapiens
tggatatacagcaaaaagagatata

SEQ ID NO: 10458 - DNA, 25 bp, Homo sapiens
gatataatttaattttctgtgcata

SEQ ID NO: 10459 - DNA, 25 bp, Homo sapiens
tctgtgcatagctctttaccctgtg

SEQ ID NO: 10460 - DNA, 25 bp, Homo sapiens
tgcatagctctttaccctgtgttta

SEQ ID NO: 10461 - DNA, 25 bp, Homo sapiens
ttaccctgtgtttatttccaaatcc

SEQ ID NO: 10462 - DNA, 25 bp, Homo sapiens
cctgtgtttatttccaaatccatta

SEQ ID NO: 10463 - DNA, 25 bp, Homo sapiens
tttccaaatccattaatagaatgcc

SEQ ID NO: 10464 - DNA, 25 bp, Homo sapiens
gaatgccatttatatattttgtttc

SEQ ID NO: 10465 - DNA, 25 bp, Homo sapiens
tgccatttatatattttgtttcagg

SEQ ID NO: 10466 - DNA, 25 bp, Homo sapiens
gtttcaggtatattgttaatagagc

SEQ ID NO: 10467 - DNA, 25 bp, Homo sapiens
attgttaatagagcttggcaaatta

SEQ ID NO: 10468 - DNA, 25 bp, Homo sapiens
tgttaatagagcttggcaaattata

SEQ ID NO: 10469 - DNA, 25 bp, Homo sapiens
tagagcttggcaaattataaataaa

SEQ ID NO: 10470 - DNA, 25 bp, Homo sapiens
atatgtatatggttagatagaagtg

SEQ ID NO: 10471 - DNA, 25 bp, Homo sapiens
gaagtgactataatgcacacatatg

SEQ ID NO: 10472 - DNA, 25 bp, Homo sapiens
agtgactataatgcacacatatgta

SEQ ID NO: 10473 - DNA, 25 bp, Homo sapiens
atgtaatatatatagacacacagag

SEQ ID NO: 10474 - DNA, 25 bp, Homo sapiens
atagacacacagagcccttcagttc

SEQ ID NO: 10475 - DNA, 25 bp, Homo sapiens
agcccttcagttcaggtacaatttg

SEQ ID NO: 10476 - DNA, 25 bp, Homo sapiens
caggtacaatttgcgctatgaatgc

SEQ ID NO: 10477 - DNA, 25 bp, Homo sapiens
tgcgctatgaatgctgcaaacattt

SEQ ID NO: 10478 - DNA, 25 bp, Homo sapiens
cgctatgaatgctgcaaacattttt

SEQ ID NO: 10479 - DNA, 25 bp, Homo sapiens
ctatgaatgctgcaaacatttttgt

SEQ ID NO: 10480 - DNA, 25 bp, Homo sapiens
tgaatgctgcaaacatttttgttta

SEQ ID NO: 10481 - DNA, 25 bp, Homo sapiens
tgctgcaaacatttttgtttaaata

SEQ ID NO: 10482 - DNA, 25 bp, Homo sapiens
aatatttgtatttatactttctaag

SEQ ID NO: 10483 - DNA, 25 bp, Homo sapiens
ctaagtcagcatttatttttgtggc

SEQ ID NO: 10484 - DNA, 25 bp, Homo sapiens
catttatttttgtggctgtttaccc

SEQ ID NO: 10485 - DNA, 25 bp, Homo sapiens
tggctgtttacccacaatgaaagag

SEQ ID NO: 10486 - DNA, 25 bp, Homo sapiens
gtttacccacaatgaaagagttcta

SEQ ID NO: 10487 - DNA, 25 bp, Homo sapiens
tacccacaatgaaagagttctaata

SEQ ID NO: 10488 - DNA, 25 bp, Homo sapiens
tctaataaagatgtgctgaagttgc

SEQ ID NO: 10489 - DNA, 25 bp, Homo sapiens
tgtgctgaagttgcaatatagattt

SEQ ID NO: 10490 - DNA, 25 bp, Homo sapiens
tagattttgctgaagtgatcacctg

SEQ ID NO: 10491 - DNA, 25 bp, Homo sapiens
agtgatcacctgtttaatgacttgc

SEQ ID NO: 10492 - DNA, 25 bp, Homo sapiens
cacctgtttaatgacttgcagatca

SEQ ID NO: 10493 - DNA, 25 bp, Homo sapiens
ctgtttaatgacttgcagatcaatg

SEQ ID NO: 10494 - DNA, 25 bp, Homo sapiens
caatttagaattctagatattcaga

SEQ ID NO: 10495 - DNA, 25 bp, Homo sapiens
tctagatattcagaagtaaaatgcc

SEQ ID NO: 10496 - DNA, 25 bp, Homo sapiens
gatattcagaagtaaaatgcctctt

SEQ ID NO: 10497 - DNA, 25 bp, Homo sapiens
attcagaagtaaaatgcctcttttt

SEQ ID NO: 10498 - DNA, 25 bp, Homo sapiens
cagaagtaaaatgcctcttttttta

SEQ ID NO: 10499 - DNA, 25 bp, Homo sapiens
gcctctttttttaatttttacaatg

SEQ ID NO: 10500 - DNA, 25 bp, Homo sapiens
caatgtagaggtatttatttgattc

SEQ ID NO: 10501 - DNA, 25 bp, Homo sapiens
tttgattcccttttaaatgtctgtg

SEQ ID NO: 10502 - DNA, 25 bp, Homo sapiens
tcccttttaaatgtctgtgtaattc

SEQ ID NO: 10503 - DNA, 25 bp, Homo sapiens
atgtctgtgtaattcaatctagaga

SEQ ID NO: 10504 - DNA, 25 bp, Homo sapiens
agagatttgttccttttgtttagtc

SEQ ID NO: 10505 - DNA, 25 bp, Homo sapiens
gatttgttccttttgtttagtcata

SEQ ID NO: 10506 - DNA, 25 bp, Homo sapiens
tgttccttttgtttagtcataattt

SEQ ID NO: 10507 - DNA, 25 bp, Homo sapiens
ccttttgtttagtcataattttaac

SEQ ID NO: 10508 - DNA, 25 bp, Homo sapiens
tgtttagtcataattttaactttcc

SEQ ID NO: 10509 - DNA, 25 bp, Homo sapiens
cattttttgaattgtttcaggcagc

SEQ ID NO: 10510 - DNA, 25 bp, Homo sapiens
attgtttcaggcagcccaatcgcta

SEQ ID NO: 10511 - DNA, 25 bp, Homo sapiens
tcaggcagcccaatcgctataattg

SEQ ID NO: 10512 - DNA, 25 bp, Homo sapiens
gcagcccaatcgctataattgcaga

SEQ ID NO: 10513 - DNA, 25 bp, Homo sapiens
gcccaatcgctataattgcagaaaa

SEQ ID NO: 10514 - DNA, 25 bp, Homo sapiens
ccaatcgctataattgcagaaaata

SEQ ID NO: 10515 - DNA, 25 bp, Homo sapiens
tgcagaaaataattagaaaacctta

SEQ ID NO: 10516 - DNA, 25 bp, Homo sapiens
accttagtaaaaggtttagtaacta

SEQ ID NO: 10517 - DNA, 25 bp, Homo sapiens
gtttagtaactaattggatcctgtg

SEQ ID NO: 10518 - DNA, 25 bp, Homo sapiens
aattggatcctgtggtgaatctgtg

SEQ ID NO: 10519 - DNA, 25 bp, Homo sapiens
cctgtggtgaatctgtggaggacaa

SEQ ID NO: 10520 - DNA, 25 bp, Homo sapiens
cagccatctttctgctgttgcagca

SEQ ID NO: 10521 - DNA, 25 bp, Homo sapiens
gtcaactactgctttctggaatctt

SEQ ID NO: 10522 - DNA, 25 bp, Homo sapiens
actgcctatcacgttcttaccttgg

SEQ ID NO: 10523 - DNA, 25 bp, Homo sapiens
agagcctttccacattgagttcaaa

SEQ ID NO: 10524 - DNA, 25 bp, Homo sapiens
gctctcaactgaggcctttggcaaa

SEQ ID NO: 10525 - DNA, 25 bp, Homo sapiens
gggacagtcatgtttaatatctgga

SEQ ID NO: 10526 - DNA, 25 bp, Homo sapiens
tgaaaaatgcttagggtaggctctg

SEQ ID NO: 10527 - DNA, 25 bp, Homo sapiens
ttgtataggtgagtccaagcctatg

SEQ ID NO: 10528 - DNA, 25 bp, Homo sapiens
ttctgtaaatggttgtgcctggccc

SEQ ID NO: 10529 - DNA, 25 bp, Homo sapiens
caactgttataaagttcccatgggg

SEQ ID NO: 10530 - DNA, 25 bp, Homo sapiens
ctgtgctgtacaggaaaaccagatc

SEQ ID NO: 10531 - DNA, 25 bp, Homo sapiens
gccttgaagtggctttctggaatca

SEQ ID NO: 10532 - DNA, 25 bp, Homo sapiens
tccacagctgggatttggcaccatc

SEQ ID NO: 10533 - DNA, 25 bp, Homo sapiens
atggttgtgacttggaggacctccc

SEQ ID NO: 10534 - DNA, 25 bp, Homo sapiens
actggctcggtggattctgatctta

SEQ ID NO: 10535 - DNA, 25 bp, Homo sapiens
ttttctgcgaagagtagttattttc

SEQ ID NO: 10536 - DNA, 25 bp, Homo sapiens
aagggtgtcatatggtcatctgtca

SEQ ID NO: 10537 - DNA, 25 bp, Homo sapiens
cagatgtcatctagaatgatttgtg

SEQ ID NO: 10538 - DNA, 25 bp, Homo sapiens
acagaatctgtatgtgaggaaatta

SEQ ID NO: 10539 - DNA, 25 bp, Homo sapiens
tgctaaggatactggaaagagattc

SEQ ID NO: 10540 - DNA, 25 bp, Homo sapiens
ctttgtaagaaaggtgaaaatggtt

SEQ ID NO: 10541 - DNA, 25 bp, Homo sapiens
tgattgtattttatagcagaaaaga

SEQ ID NO: 10542 - DNA, 25 bp, Homo sapiens
ctaggtctccttgtcttttgtcata

SEQ ID NO: 10543 - DNA, 25 bp, Homo sapiens
aagagtgctgcctccctgccaaaaa

SEQ ID NO: 10544 - DNA, 25 bp, Homo sapiens
ggcttactatatcagggcctacagt

SEQ ID NO: 10545 - DNA, 25 bp, Homo sapiens
aagaacgtgttcttgcttcagaata

SEQ ID NO: 10546 - DNA, 25 bp, Homo sapiens
gcaggaattaagatgctggccctta

SEQ ID NO: 10547 - DNA, 25 bp, Homo sapiens
atagatctgatccagctgtggctgc

SEQ ID NO: 10548 - DNA, 25 bp, Homo sapiens
gccaatttgtagagtgtactgcacc

SEQ ID NO: 10549 - DNA, 25 bp, Homo sapiens
cgatggatgtttcccatctaaatgc

SEQ ID NO: 10550 - DNA, 25 bp, Homo sapiens
acctaggattttgtggatgctctta

SEQ ID NO: 10551 - DNA, 25 bp, Homo sapiens
catctgtgcttgtgtgttacattgc

SEQ ID NO: 10552 - DNA, 25 bp, Homo sapiens
gggtctagaatctatagttatatta

SEQ ID NO: 10553 - DNA, 25 bp, Homo sapiens
ccatgtttcattcctgaacagtctc

SEQ ID NO: 10554 - DNA, 25 bp, Homo sapiens
cctgcccatgtttgataatttagaa

SEQ ID NO: 10555 - DNA, 25 bp, Homo sapiens
aaggcatgctgtgtcctgtactttc

SEQ ID NO: 10556 - DNA, 25 bp, Homo sapiens
tgagcacctggataaaactggagtt

SEQ ID NO: 10557 - DNA, 25 bp, Homo sapiens
gtttcccgtgcctatgcctcagata

SEQ ID NO: 10558 - DNA, 25 bp, Homo sapiens
tgccttttaattttagatcatgatg

SEQ ID NO: 10559 - DNA, 25 bp, Homo sapiens
gttagatccatgaatctcctttagg

SEQ ID NO: 10560 - DNA, 25 bp, Homo sapiens
gcgccaatggtgaaacagcttatct

SEQ ID NO: 10561 - DNA, 25 bp, Homo sapiens
caaaattgttggactctgtgcagca

SEQ ID NO: 10562 - DNA, 25 bp, Homo sapiens
ctgcttctctagagttgtttcctcc

SEQ ID NO: 10563 - DNA, 25 bp, Homo sapiens
atgaaagaactttaatacctatatt

SEQ ID NO: 10564 - DNA, 25 bp, Homo sapiens
ctgaactctggaaggggcacatgcc

SEQ ID NO: 10565 - DNA, 25 bp, Homo sapiens
agagagcagtcacccgccctttttt

SEQ ID NO: 10566 - DNA, 25 bp, Homo sapiens
ttctgaggactgagacaaaactttg

SEQ ID NO: 10567 - DNA, 25 bp, Homo sapiens
gatccatgatctggaagcctccata

SEQ ID NO: 10568 - DNA, 25 bp, Homo sapiens
cctatgtctatatccttgccctagt

SEQ ID NO: 10569 - DNA, 25 bp, Homo sapiens
atactagctggatgtgggagccctc

SEQ ID NO: 10570 - DNA, 25 bp, Homo sapiens
agggcctggacatgcttataaactc

SEQ ID NO: 10571 - DNA, 25 bp, Homo sapiens
ggtgcatttctaatcccaaacagtt

SEQ ID NO: 10572 - DNA, 25 bp, Homo sapiens
ctgtgagctattccaggatccctga

SEQ ID NO: 10573 - DNA, 25 bp, Homo sapiens
cagtataatttattgaataatcttt

SEQ ID NO: 10574 - DNA, 25 bp, Homo sapiens
ttccagcaatgctaaagctccggtg

SEQ ID NO: 10575 - DNA, 25 bp, Homo sapiens
tgggccgcaattttgacatcatatg

SEQ ID NO: 10576 - DNA, 25 bp, Homo sapiens
actttatgctaagaattgggctgga

SEQ ID NO: 10577 - DNA, 25 bp, Homo sapiens
agtgccatcacctctaattattggg

SEQ ID NO: 10578 - DNA, 25 bp, Homo sapiens
gacctgcatttagaaacaactctgc

SEQ ID NO: 10579 - DNA, 25 bp, Homo sapiens
ggaagattcactcccacccaggata

SEQ ID NO: 10580 - DNA, 25 bp, Homo sapiens
gctgccaatcttctagggaaaagtg

SEQ ID NO: 10581 - DNA, 25 bp, Homo sapiens
gctgcagatgtatcagacacacttt

SEQ ID NO: 10582 - DNA, 25 bp, Homo sapiens
agctcacctgttggatgactgcaga

SEQ ID NO: 10583 - DNA, 25 bp, Homo sapiens
atagtctattaaaagcaataatcca

SEQ ID NO: 10584 - DNA, 25 bp, Homo sapiens
aggtgcctcagttgcagcaaagttc

SEQ ID NO: 10585 - DNA, 25 bp, Homo sapiens
gagccacagtgcagtatatattcta

SEQ ID NO: 10586 - DNA, 25 bp, Homo sapiens
attcatcagtgcctccttcacgggg

SEQ ID NO: 10587 - DNA, 25 bp, Homo sapiens
catgtgtcttaagaaactgagagtt

SEQ ID NO: 10588 - DNA, 25 bp, Homo sapiens
cggcaacttctcttcctgatgatta

SEQ ID NO: 10589 - DNA, 25 bp, Homo sapiens
gcggcttctcctctcactctttgta

SEQ ID NO: 10590 - DNA, 25 bp, Homo sapiens
ggtggacagtcaccactctgacata

SEQ ID NO: 10591 - DNA, 25 bp, Homo sapiens
ggtcctccaggtccagtaatttcaa

SEQ ID NO: 10592 - DNA, 25 bp, Homo sapiens
agacaacactgaataatcctgcttc

SEQ ID NO: 10593 - DNA, 25 bp, Homo sapiens
aatcatgaagctgggttagaaaatc

SEQ ID NO: 10594 - DNA, 25 bp, Homo sapiens
ttccaggttgtaaacacggcacatg

SEQ ID NO: 10595 - DNA, 25 bp, Homo sapiens
ttttggtaaaacttcagcactggtc

SEQ ID NO: 10596 - DNA, 25 bp, Homo sapiens
agtgctggctctaaaaaatgaaatc

SEQ ID NO: 10597 - DNA, 25 bp, Homo sapiens
gccaatgtgtcaattttttaaaagg

SEQ ID NO: 10598 - DNA, 25 bp, Homo sapiens
cctctttgtggtatggccattgaca

SEQ ID NO: 10599 - DNA, 25 bp, Homo sapiens
gtggtacacgctgcaaaaagtcttc

SEQ ID NO: 10600 - DNA, 25 bp, Homo sapiens
gatttgagttccactgcttgggcta

SEQ ID NO: 10601 - DNA, 25 bp, Homo sapiens
gcagtggctgcatgaattgttaatc

SEQ ID NO: 10602 - DNA, 25 bp, Homo sapiens
gtttggtcctaaattaatcatcgtc

SEQ ID NO: 10603 - DNA, 25 bp, Homo sapiens
agaagattgaacagcagggaaaaac

SEQ ID NO: 10604 - DNA, 25 bp, Homo sapiens
atgtggccaaacctcagtgtgcttc

SEQ ID NO: 10605 - DNA, 25 bp, Homo sapiens
tgggctctgatagccacgatcagtc

SEQ ID NO: 10606 - DNA, 25 bp, Homo sapiens
ccctaggtttgtgtgtccaactttc

SEQ ID NO: 10607 - DNA, 25 bp, Homo sapiens
gtacagcatgctcctttagtgaatc

SEQ ID NO: 10608 - DNA, 25 bp, Homo sapiens
tatgtccatcgaggcaacttgcttg

SEQ ID NO: 10609 - DNA, 25 bp, Homo sapiens
agacctacgctagctgacttgcaga

SEQ ID NO: 10610 - DNA, 25 bp, Homo sapiens
atgcttgtaggaagacatgatttta

SEQ ID NO: 10611 - DNA, 25 bp, Homo sapiens
gagcaagtccatgtaagaaaccctg

SEQ ID NO: 10612 - DNA, 25 bp, Homo sapiens
cagcctgtggtaactatggaaatta

SEQ ID NO: 10613 - DNA, 25 bp, Homo sapiens
ggcccatcactactcaaagaatttc

SEQ ID NO: 10614 - DNA, 25 bp, Homo sapiens
agagcctgtttccaccatgttgtaa

SEQ ID NO: 10615 - DNA, 25 bp, Homo sapiens
tctcgcagtgggtgctagatcaaat

SEQ ID NO: 10616 - DNA, 25 bp, Homo sapiens
tgagcattcacaggaggaaatcaga

SEQ ID NO: 10617 - DNA, 25 bp, Homo sapiens
tatgtctctaaagcaaaggcctaca

SEQ ID NO: 10618 - DNA, 25 bp, Homo sapiens
gcgttcctttcagtacttggcatta

SEQ ID NO: 10619 - DNA, 25 bp, Homo sapiens
tgtgtcaccgtcattcagaaaaatc

SEQ ID NO: 10620 - DNA, 25 bp, Homo sapiens
tataaaagtaatatgtttttaaagc

SEQ ID NO: 10621 - DNA, 25 bp, Homo sapiens
tgtatcacttccaaaggcaaacttg

SEQ ID NO: 10622 - DNA, 25 bp, Homo sapiens
cttgttttttagtgacgtcattaga

SEQ ID NO: 10623 - DNA, 25 bp, Homo sapiens
gtactccaaagtaaggtatcacctt

SEQ ID NO: 10624 - DNA, 25 bp, Homo sapiens
gtcattcatttcactaacctgtata

SEQ ID NO: 10625 - DNA, 25 bp, Homo sapiens
ctcatatcctagatgcaatcaatgt

SEQ ID NO: 10626 - DNA, 25 bp, Homo sapiens
tggggcatgcatctgctaacatttg

SEQ ID NO: 10627 - DNA, 25 bp, Homo sapiens
gaagagtcttgtttgcccagcccta

SEQ ID NO: 10628 - DNA, 25 bp, Homo sapiens
gtgggtcaccagcagatttttaaac

SEQ ID NO: 10629 - DNA, 25 bp, Homo sapiens
ttctttcttgatacagcagggctga

SEQ ID NO: 10630 - DNA, 25 bp, Homo sapiens
actgatgggacactgaattttattc

SEQ ID NO: 10631 - DNA, 25 bp, Homo sapiens
gtatagcatactcccttaccagggc

SEQ ID NO: 10632 - DNA, 25 bp, Homo sapiens
atctccaagaactttattctttgct

SEQ ID NO: 10633 - DNA, 25 bp, Homo sapiens
cttgcaaactctgggtgaagcctca

SEQ ID NO: 10634 - DNA, 25 bp, Homo sapiens
gtttagacaaggtaccgccaagata

SEQ ID NO: 10635 - DNA, 25 bp, Homo sapiens
gaggccatcttcaggggaattctta

SEQ ID NO: 10636 - DNA, 25 bp, Homo sapiens
gcaaagtttcctctctctcatcttg

SEQ ID NO: 10637 - DNA, 25 bp, Homo sapiens
gtcgtagaagaatgcacctgtcacc

SEQ ID NO: 10638 - DNA, 25 bp, Homo sapiens
ggccattgtactatcctccattttc

SEQ ID NO: 10639 - DNA, 25 bp, Homo sapiens
tgctgtcttgcagggccaatcaaca

SEQ ID NO: 10640 - DNA, 25 bp, Homo sapiens
cgtgactaaagcttgctgcaaaaca

SEQ ID NO: 10641 - DNA, 25 bp, Homo sapiens
ctgaatctttgtgtgggaattaccc

SEQ ID NO: 10642 - DNA, 25 bp, Homo sapiens
cattccatttagatttttgagctat

SEQ ID NO: 10643 - DNA, 25 bp, Homo sapiens
caggggatctgaagcactaccaata

SEQ ID NO: 10644 - DNA, 25 bp, Homo sapiens
gctctgctagcacggaataagtgta

SEQ ID NO: 10645 - DNA, 25 bp, Homo sapiens
agtcactctttctgctctgaaccta

SEQ ID NO: 10646 - DNA, 25 bp, Homo sapiens
cgggaacatgctgtatgagtgaaca

SEQ ID NO: 10647 - DNA, 25 bp, Homo sapiens
aactctctgaagatggtgatttgca

SEQ ID NO: 10648 - DNA, 25 bp, Homo sapiens
cagttgtcatctctgctacacagga

SEQ ID NO: 10649 - DNA, 25 bp, Homo sapiens
gccctaataaaggacatactagtta

SEQ ID NO: 10650 - DNA, 25 bp, Homo sapiens
ctagctaagaataaatgcacatgca

SEQ ID NO: 10651 - DNA, 25 bp, Homo sapiens
atatacgggaaattattggaaactg

SEQ ID NO: 10652 - DNA, 25 bp, Homo sapiens
ttttattactttctgcagctgttta

SEQ ID NO: 10653 - DNA, 25 bp, Homo sapiens
cacctagagcttaaggatgagcttg

SEQ ID NO: 10654 - DNA, 25 bp, Homo sapiens
tatcttagagaaaacttcacactta

SEQ ID NO: 10655 - DNA, 25 bp, Homo sapiens
aaaaatgtacactgaaatagttttt

SEQ ID NO: 10656 - DNA, 25 bp, Homo sapiens
tccaccagctgatcaaccagagttg

SEQ ID NO: 10657 - DNA, 25 bp, Homo sapiens
ctgagctagaaagattgcctgattt

SEQ ID NO: 10658 - DNA, 25 bp, Homo sapiens
cataagagaggcatcatttcttatt

SEQ ID NO: 10659 - DNA, 25 bp, Homo sapiens
aataataaaaagaagttactgctct

SEQ ID NO: 10660 - DNA, 25 bp, Homo sapiens
ttggcctcgttccagtcaaatagtg

SEQ ID NO: 10661 - DNA, 25 bp, Homo sapiens
cccagaactgccaagagattgtata

SEQ ID NO: 10662 - DNA, 25 bp, Homo sapiens
gggcatatgcacagctacaactatc

SEQ ID NO: 10663 - DNA, 25 bp, Homo sapiens
ggtagccaaccaagagagctttgtt

SEQ ID NO: 10664 - DNA, 25 bp, Homo sapiens
tttagatagaaagaaaaaatgacta

SEQ ID NO: 10665 - DNA, 25 bp, Homo sapiens
cccaggagaggcttttgtagtaata

SEQ ID NO: 10666 - DNA, 25 bp, Homo sapiens
tgcaaaatgtattgagaataactaa

SEQ ID NO: 10667 - DNA, 25 bp, Homo sapiens
tgtttaaaaaagtaatctttaactt

SEQ ID NO: 10668 - DNA, 25 bp, Homo sapiens
cttgcggtctcatgggtattataac

SEQ ID NO: 10669 - DNA, 25 bp, Homo sapiens
tgccagggacagctgacacctatca

SEQ ID NO: 10670 - DNA, 25 bp, Homo sapiens
agtgctttagctaaaaacaaacaaa

SEQ ID NO: 10671 - DNA, 25 bp, Homo sapiens
agcagcggtctcttatgcacaatta

SEQ ID NO: 10672 - DNA, 25 bp, Homo sapiens
tggacatgtgacctatttgcctctg

SEQ ID NO: 10673 - DNA, 25 bp, Homo sapiens
atctggctctggactactaagtaga

SEQ ID NO: 10674 - DNA, 25 bp, Homo sapiens
tggggaaaatcctgtaagctttgtc

SEQ ID NO: 10675 - DNA, 25 bp, Homo sapiens
tctgttaagtactaaaaatgtatgt

SEQ ID NO: 10676 - DNA, 25 bp, Homo sapiens
tgagggcctgcctgaattctcaatg

SEQ ID NO: 10677 - DNA, 25 bp, Homo sapiens
caggcagtaagttgcctaggatgtg

SEQ ID NO: 10678 - DNA, 25 bp, Homo sapiens
ttggagtcagccaaactctgagttg

SEQ ID NO: 10679 - DNA, 25 bp, Homo sapiens
tctcacgttgttgtcagctgtctcc

SEQ ID NO: 10680 - DNA, 25 bp, Homo sapiens
tgcccacctattgagaatatcttga

SEQ ID NO: 10681 - DNA, 25 bp, Homo sapiens
tcttgggctccttttccatgaaaaa

SEQ ID NO: 10682 - DNA, 25 bp, Homo sapiens
ggattccctttcaggcatttggata

SEQ ID NO: 10683 - DNA, 25 bp, Homo sapiens
ctgccattcccatgagacctcagga

SEQ ID NO: 10684 - DNA, 25 bp, Homo sapiens
cgtatggattgtataggctacactc

SEQ ID NO: 10685 - DNA, 25 bp, Homo sapiens
agcccaggtacccatgatgtttttg

SEQ ID NO: 10686 - DNA, 25 bp, Homo sapiens
accaggtgcctcaattctaagacta

SEQ ID NO: 10687 - DNA, 25 bp, Homo sapiens
ccctgagtggcttttatactgtctg

SEQ ID NO: 10688 - DNA, 25 bp, Homo sapiens
tatagcttatgggagaatgttttca

SEQ ID NO: 10689 - DNA, 25 bp, Homo sapiens
ggtatatatacacaacacagtatgc

SEQ ID NO: 10690 - DNA, 25 bp, Homo sapiens
agataaaagtgagtatggtaaattg

SEQ ID NO: 10691 - DNA, 25 bp, Homo sapiens
ctgcaggactttctcatgtttgacc

SEQ ID NO: 10692 - DNA, 25 bp, Homo sapiens
ggggccttctctctatataatcttc

SEQ ID NO: 10693 - DNA, 25 bp, Homo sapiens
ggctgtcctctgatggctaaaagta

SEQ ID NO: 10694 - DNA, 25 bp, Homo sapiens
gctctgctgctgtcctgtccataag

SEQ ID NO: 10695 - DNA, 25 bp, Homo sapiens
gctggcagcctgctcttatagatta

SEQ ID NO: 10696 - DNA, 25 bp, Homo sapiens
acagctctctgccagggagtttttc

SEQ ID NO: 10697 - DNA, 25 bp, Homo sapiens
ggctcttgcctttctcctgattttc

SEQ ID NO: 10698 - DNA, 25 bp, Homo sapiens
tactgtgccatcagaaaaactgttg

SEQ ID NO: 10699 - DNA, 25 bp, Homo sapiens
tggctgctaaactaaatcaaggtgg

SEQ ID NO: 10700 - DNA, 25 bp, Homo sapiens
tgaccttgactatctgggacgccta

SEQ ID NO: 10701 - DNA, 25 bp, Homo sapiens
ctgctgctcagtataatggggcata

SEQ ID NO: 10702 - DNA, 25 bp, Homo sapiens
tgggcgctgcatactttggtaatca

SEQ ID NO: 10703 - DNA, 25 bp, Homo sapiens
cttcggctctgggtctagttgaata

SEQ ID NO: 10704 - DNA, 25 bp, Homo sapiens
agtgtccgccttggaatcataatga

SEQ ID NO: 10705 - DNA, 25 bp, Homo sapiens
ctagggcacatgagggagtttttac

SEQ ID NO: 10706 - DNA, 25 bp, Homo sapiens
cagcatgtgttaggccagcattaaa

SEQ ID NO: 10707 - DNA, 25 bp, Homo sapiens
tttccagctctgtccaaaaaaggtg

SEQ ID NO: 10708 - DNA, 25 bp, Homo sapiens
ccaagcttctgggaatcatcaatac

SEQ ID NO: 10709 - DNA, 25 bp, Homo sapiens
agttcagtgggcatagcttcaattc

SEQ ID NO: 10710 - DNA, 25 bp, Homo sapiens
cgtaggtacagtagtattccaagtg

SEQ ID NO: 10711 - DNA, 25 bp, Homo sapiens
tctgtgttcatccacaatggtattg

SEQ ID NO: 10712 - DNA, 25 bp, Homo sapiens
tgctcacccgctttaggagaaccta

SEQ ID NO: 10713 - DNA, 25 bp, Homo sapiens
ggactgtaccattcatccacaatta

SEQ ID NO: 10714 - DNA, 25 bp, Homo sapiens
tctatctgtatatcaatcaccatgc

SEQ ID NO: 10715 - DNA, 25 bp, Homo sapiens
gcattgcttataactgacctgaggg

SEQ ID NO: 10716 - DNA, 25 bp, Homo sapiens
ccatgttgtgagggatgtgggatga

SEQ ID NO: 10717 - DNA, 25 bp, Homo sapiens
ggtgctgtttccagactgtcaatta

SEQ ID NO: 10718 - DNA, 25 bp, Homo sapiens
ggcccactgtggtttagtagaatta

SEQ ID NO: 10719 - DNA, 25 bp, Homo sapiens
ttctctgtggtgtctatgatagtta

SEQ ID NO: 10720 - DNA, 25 bp, Homo sapiens
ggatcacctgtgagtgacacatttc

SEQ ID NO: 10721 - DNA, 25 bp, Homo sapiens
atggggcacaccgtattgttatagc

SEQ ID NO: 10722 - DNA, 25 bp, Homo sapiens
tggggcacatctccttaccttgata

SEQ ID NO: 10723 - DNA, 25 bp, Homo sapiens
tgtgctccagtcatcctccatgaga

SEQ ID NO: 10724 - DNA, 25 bp, Homo sapiens
cagctttgtctagagagtgcccata

SEQ ID NO: 10725 - DNA, 25 bp, Homo sapiens
tacgtctgtaaaggtggcactatgc

SEQ ID NO: 10726 - DNA, 25 bp, Homo sapiens
ggcagcaggacctacctacatttta

SEQ ID NO: 10727 - DNA, 25 bp, Homo sapiens
gggattcgtctctggaagcctctca

SEQ ID NO: 10728 - DNA, 25 bp, Homo sapiens
tctgcagtctttggcctttattatg

SEQ ID NO: 10729 - DNA, 25 bp, Homo sapiens
agagagaaagactcccagaatttta

SEQ ID NO: 10730 - DNA, 25 bp, Homo sapiens
tacaggtaaacttaagtttgcttca

SEQ ID NO: 10731 - DNA, 25 bp, Homo sapiens
ttcttttaggaacagacaggacttg

SEQ ID NO: 10732 - DNA, 25 bp, Homo sapiens
gcccaaatcctttaaaaccagaagt

SEQ ID NO: 10733 - DNA, 25 bp, Homo sapiens
gaataaatctcaaatacatactctg

SEQ ID NO: 10734 - DNA, 25 bp, Homo sapiens
tcatggcaggcacagtacatcaacc

SEQ ID NO: 10735 - DNA, 25 bp, Homo sapiens
cccaggcttagtgacaaggttttgt

SEQ ID NO: 10736 - DNA, 25 bp, Homo sapiens
tgtgttcacagataggttttcagta

SEQ ID NO: 10737 - DNA, 25 bp, Homo sapiens
cccttggctctttgcttagcagaca

SEQ ID NO: 10738 - DNA, 25 bp, Homo sapiens
cccaggcttcctcatagatcaggta

SEQ ID NO: 10739 - DNA, 25 bp, Homo sapiens
gtgcctaagggccatgatctgtcta

SEQ ID NO: 10740 - DNA, 25 bp, Homo sapiens
tctatgaactggctaagctggattc

SEQ ID NO: 10741 - DNA, 25 bp, Homo sapiens
ttgtccataacatgtcaagccagcc

SEQ ID NO: 10742 - DNA, 25 bp, Homo sapiens
ggcgaacacaagataggcaaatttt

SEQ ID NO: 10743 - DNA, 25 bp, Homo sapiens
gtagacaagcaaacccattcagaga

SEQ ID NO: 10744 - DNA, 25 bp, Homo sapiens
tgaggccaaagcaaaacatgatgtc

SEQ ID NO: 10745 - DNA, 25 bp, Homo sapiens
gggttgttccctctcagttttgata

SEQ ID NO: 10746 - DNA, 25 bp, Homo sapiens
tgggtggttaatcctttcaagcttc

SEQ ID NO: 10747 - DNA, 25 bp, Homo sapiens
acctgaaaacctgcatgtggccttc

SEQ ID NO: 10748 - DNA, 25 bp, Homo sapiens
ttctaatatcttaaagaaaacatgt

SEQ ID NO: 10749 - DNA, 25 bp, Homo sapiens
taaagttatacatctattcaatata

SEQ ID NO: 10750 - DNA, 25 bp, Homo sapiens
cctgctgctttatcaagagtgagta

SEQ ID NO: 10751 - DNA, 25 bp, Homo sapiens
ggttcatatccctgtctcctcaaga

SEQ ID NO: 10752 - DNA, 25 bp, Homo sapiens
tcagggagaaattccttcagatttt

SEQ ID NO: 10753 - DNA, 25 bp, Homo sapiens
ttctccaggggtagcactggccatg

SEQ ID NO: 10754 - DNA, 25 bp, Homo sapiens
ccactttggcctaatggtgcttgta

SEQ ID NO: 10755 - DNA, 25 bp, Homo sapiens
gccgtgctctgtcctacttgaatta

SEQ ID NO: 10756 - DNA, 25 bp, Homo sapiens
catgatgctttctaccttggtgtta

SEQ ID NO: 10757 - DNA, 25 bp, Homo sapiens
agtgtctactccctgatggttctca

SEQ ID NO: 10758 - DNA, 25 bp, Homo sapiens
caactgaatgtaggaagatacacag

SEQ ID NO: 10759 - DNA, 25 bp, Homo sapiens
acggcgattttgtttggagcattca

SEQ ID NO: 10760 - DNA, 25 bp, Homo sapiens
ttttgagccctaacaccactttgac

SEQ ID NO: 10761 - DNA, 25 bp, Homo sapiens
atctgtgtgtggtgaaagtccctta

SEQ ID NO: 10762 - DNA, 25 bp, Homo sapiens
tttcctgtcaagtagagtccctata

SEQ ID NO: 10763 - DNA, 25 bp, Homo sapiens
gtgagagtctcaatttctaggaaca

SEQ ID NO: 10764 - DNA, 25 bp, Homo sapiens
acgatatctgttctgggtgctttta

SEQ ID NO: 10765 - DNA, 25 bp, Homo sapiens
aacactgtggtcaacttctctggga

SEQ ID NO: 10766 - DNA, 25 bp, Homo sapiens
gggacaccagttcctacacttatga

SEQ ID NO: 10767 - DNA, 25 bp, Homo sapiens
tcaagctgctcaagatggggttttc

SEQ ID NO: 10768 - DNA, 25 bp, Homo sapiens
ggcccattatgttgaccctattata

SEQ ID NO: 10769 - DNA, 25 bp, Homo sapiens
gctgtgtgtgcacccgtcagacaaa

SEQ ID NO: 10770 - DNA, 25 bp, Homo sapiens
atgtgtagccagagggaaaatatcc

SEQ ID NO: 10771 - DNA, 25 bp, Homo sapiens
cctgtgttaaatggggttttccttc

SEQ ID NO: 10772 - DNA, 25 bp, Homo sapiens
ggggttcccataagttaccattctc

SEQ ID NO: 10773 - DNA, 25 bp, Homo sapiens
atcacctcagggacagggactgtta

SEQ ID NO: 10774 - DNA, 25 bp, Homo sapiens
tccaactgtgctgggtttctaatcc

SEQ ID NO: 10775 - DNA, 25 bp, Homo sapiens
caggcctagccagttgttcaggatc

SEQ ID NO: 10776 - DNA, 25 bp, Homo sapiens
gcaagcttcctgagagtactgaata

SEQ ID NO: 10777 - DNA, 25 bp, Homo sapiens
actggcatctatggtcctcatgaaa

SEQ ID NO: 10778 - DNA, 25 bp, Homo sapiens
ggaggctccagacacacctatctga

SEQ ID NO: 10779 - DNA, 25 bp, Homo sapiens
cctgggccataaacaccgttagctt

SEQ ID NO: 10780 - DNA, 25 bp, Homo sapiens
cttagccgttagtaggaacccaagc

SEQ ID NO: 10781 - DNA, 25 bp, Homo sapiens
ggcctctggtggctctcttaaaaga

SEQ ID NO: 10782 - DNA, 25 bp, Homo sapiens
cctgtgatcttggtactttttgtta

SEQ ID NO: 10783 - DNA, 25 bp, Homo sapiens
tttctacactgggatctgggatttg

SEQ ID NO: 10784 - DNA, 25 bp, Homo sapiens
gatcgagaacctacagccgcagcta

SEQ ID NO: 10785 - DNA, 25 bp, Homo sapiens
gggaactcaagcttctctatttgtg

SEQ ID NO: 10786 - DNA, 25 bp, Homo sapiens
aggtccatttgtcttgaatccttgg

SEQ ID NO: 10787 - DNA, 25 bp, Homo sapiens
ggcaccaaactttactatttataac

SEQ ID NO: 10788 - DNA, 25 bp, Homo sapiens
gtgctctttctcaggtgaaccactg

SEQ ID NO: 10789 - DNA, 25 bp, Homo sapiens
tgttgtccactctgctttgaagatg

SEQ ID NO: 10790 - DNA, 25 bp, Homo sapiens
ctcggaagtataagtagcactgctt

SEQ ID NO: 10791 - DNA, 25 bp, Homo sapiens
ccttgagcactacgagcaacatctg

SEQ ID NO: 10792 - DNA, 25 bp, Homo sapiens
agctcctggtgactcactgtgctta

SEQ ID NO: 10793 - DNA, 25 bp, Homo sapiens
actgactagtccttgctcttgaaaa

SEQ ID NO: 10794 - DNA, 25 bp, Homo sapiens
ctggctctaagtgaaatggggtaca

SEQ ID NO: 10795 - DNA, 25 bp, Homo sapiens
cagcagaaatgtttacaacatattt

SEQ ID NO: 10796 - DNA, 25 bp, Homo sapiens
aaataaagttagaaaataactgttg

SEQ ID NO: 10797 - DNA, 25 bp, Homo sapiens
ctgctctgtgggtagaaaaacttta

SEQ ID NO: 10798 - DNA, 25 bp, Homo sapiens
agttgtatagctaaagcactgcaca

SEQ ID NO: 10799 - DNA, 25 bp, Homo sapiens
gggcctgcagtagtcagagaaattc

SEQ ID NO: 10800 - DNA, 25 bp, Homo sapiens
tgctacttgtgtcctcagatttctc

SEQ ID NO: 10801 - DNA, 25 bp, Homo sapiens
ttgctgtgggcaattacaaatatgc

SEQ ID NO: 10802 - DNA, 25 bp, Homo sapiens
ctcttcactttcttagggttcttca

SEQ ID NO: 10803 - DNA, 25 bp, Homo sapiens
aagctgatccttcttgtcccaatgg

SEQ ID NO: 10804 - DNA, 25 bp, Homo sapiens
cttaagttcttgctggcggttgaca

SEQ ID NO: 10805 - DNA, 25 bp, Homo sapiens
gacgagcactggctttcaaggttta

SEQ ID NO: 10806 - DNA, 25 bp, Homo sapiens
cccagcagagggcagagtgatttaa

SEQ ID NO: 10807 - DNA, 25 bp, Homo sapiens
ccaaggcctcatttaagctgcaaga

SEQ ID NO: 10808 - DNA, 25 bp, Homo sapiens
accagtaggggtagcaaatttctgc

SEQ ID NO: 10809 - DNA, 25 bp, Homo sapiens
atcctggagtaatttggcctcttta

SEQ ID NO: 10810 - DNA, 25 bp, Homo sapiens
tgagtgactgaccaactaccggctt

SEQ ID NO: 10811 - DNA, 25 bp, Homo sapiens
atttgtgttgctattcctgggtgtc

SEQ ID NO: 10812 - DNA, 25 bp, Homo sapiens
cagtcgttttcgttcttccaaagtc

SEQ ID NO: 10813 - DNA, 25 bp, Homo sapiens
gagccggctgagaagctactactta

SEQ ID NO: 10814 - DNA, 25 bp, Homo sapiens
tgacagagctttcaccatgacatta

SEQ ID NO: 10815 - DNA, 25 bp, Homo sapiens
gtttctgggcatggcaagacacttc

SEQ ID NO: 10816 - DNA, 25 bp, Homo sapiens
taaggtcatcttctcccagctctgc

SEQ ID NO: 10817 - DNA, 25 bp, Homo sapiens
atctgcttttctgagtgcctgtgga

SEQ ID NO: 10818 - DNA, 25 bp, Homo sapiens
agggccttacctggaaatgtctttc

SEQ ID NO: 10819 - DNA, 25 bp, Homo sapiens
ccaggctctctatggtggcaaatta

SEQ ID NO: 10820 - DNA, 25 bp, Homo sapiens
ttatcgtgtacttttgcagccatta

SEQ ID NO: 10821 - DNA, 25 bp, Homo sapiens
gggcacagtagatcaaccatttaat

SEQ ID NO: 10822 - DNA, 25 bp, Homo sapiens
gtagcacctgcacaaaaatgatgtg

SEQ ID NO: 10823 - DNA, 25 bp, Homo sapiens
tgtgtgtgatggcaacattagtgaa

SEQ ID NO: 10824 - DNA, 25 bp, Homo sapiens
tgtgagtgaccatgaagactacttc

SEQ ID NO: 10825 - DNA, 25 bp, Homo sapiens
taatacttttgttaggggtagaagg

SEQ ID NO: 10826 - DNA, 25 bp, Homo sapiens
ctctcattcattgtttccttttctt

SEQ ID NO: 10827 - DNA, 25 bp, Homo sapiens
tcctggctatcccttctgaatgtca

SEQ ID NO: 10828 - DNA, 25 bp, Homo sapiens
ctcctattgtctccgaagttggata

SEQ ID NO: 10829 - DNA, 25 bp, Homo sapiens
cagtggcccgtggtcaaagattaga

SEQ ID NO: 10830 - DNA, 25 bp, Homo sapiens
cagctcctgtggactataatggtaa

SEQ ID NO: 10831 - DNA, 25 bp, Homo sapiens
ccatctgatggctacagttatatta

SEQ ID NO: 10832 - DNA, 25 bp, Homo sapiens
aaagacaaaaggaaacagaaatgca

SEQ ID NO: 10833 - DNA, 25 bp, Homo sapiens
tatctataatatatattaccttcta

SEQ ID NO: 10834 - DNA, 25 bp, Homo sapiens
aactaaacacaaaaagagatatatc

SEQ ID NO: 10835 - DNA, 25 bp, Homo sapiens
ttaccctgtttttctcacccatgca

SEQ ID NO: 10836 - DNA, 25 bp, Homo sapiens
ccttctggagagcttgtcaaccttg

SEQ ID NO: 10837 - DNA, 25 bp, Homo sapiens
ctgctgctagcttcttccgtaagga

SEQ ID NO: 10838 - DNA, 25 bp, Homo sapiens
gagcttctctggaggctatctaata

SEQ ID NO: 10839 - DNA, 25 bp, Homo sapiens
ctctggacaaaggactctggacttc

SEQ ID NO: 10840 - DNA, 25 bp, Homo sapiens
gggtgacttgctacccaactgtttc

SEQ ID NO: 10841 - DNA, 25 bp, Homo sapiens
agggcccaaattgcagtctttcaga

SEQ ID NO: 10842 - DNA, 25 bp, Homo sapiens
tgagctttacctgacgcaaaattgg

SEQ ID NO: 10843 - DNA, 25 bp, Homo sapiens
tttgcctcagggtccagtactatga

SEQ ID NO: 10844 - DNA, 25 bp, Homo sapiens
gaggaggagaagattcttactgata

SEQ ID NO: 10845 - DNA, 25 bp, Homo sapiens
tccctcaggggcagatttcttggta

SEQ ID NO: 10846 - DNA, 25 bp, Homo sapiens
catggagctacatcgggctaaaatc

SEQ ID NO: 10847 - DNA, 25 bp, Homo sapiens
cttcactgttgttttgagaggtcta

SEQ ID NO: 10848 - DNA, 25 bp, Homo sapiens
caagagagaagtgggctggcctgac

SEQ ID NO: 10849 - DNA, 25 bp, Homo sapiens
tggctgtgtgccttctctaacaatg

SEQ ID NO: 10850 - DNA, 25 bp, Homo sapiens
ctgagatggagagagatgaaactta

SEQ ID NO: 10851 - DNA, 25 bp, Homo sapiens
ggacggtgacctcaaatgatcttta

SEQ ID NO: 10852 - DNA, 25 bp, Homo sapiens
gcccaggcaccaggcagctgaaatg

SEQ ID NO: 10853 - DNA, 25 bp, Homo sapiens
gcccaggatactgtcttacaactga

SEQ ID NO: 10854 - DNA, 25 bp, Homo sapiens
gctgtaatctacacaagggccatgg

SEQ ID NO: 10855 - DNA, 25 bp, Homo sapiens
gatgccaggctgtctcacatgcttg

SEQ ID NO: 10856 - DNA, 25 bp, Homo sapiens
gccgtttactttccagaatgctaga

SEQ ID NO: 10857 - DNA, 25 bp, Homo sapiens
ttaggggcaatctcaatatggcagc

SEQ ID NO: 10858 - DNA, 25 bp, Homo sapiens
cggcacacttgcaatacttgggctc

SEQ ID NO: 10859 - DNA, 25 bp, Homo sapiens
cagaattgtatatttaaggatgtca

SEQ ID NO: 10860 - DNA, 25 bp, Homo sapiens
gtgggcctggctccatttataaatc

SEQ ID NO: 10861 - DNA, 25 bp, Homo sapiens
gttgggattgtccatttgggagcat

SEQ ID NO: 10862 - DNA, 25 bp, Homo sapiens
actgcctctgtgtgctttggttcaa

SEQ ID NO: 10863 - DNA, 25 bp, Homo sapiens
cctgggttgttgcttgaatgcttta

SEQ ID NO: 10864 - DNA, 25 bp, Homo sapiens
ccctttgtatgctcagtgtctattc

SEQ ID NO: 10865 - DNA, 25 bp, Homo sapiens
tggcctattttcagttccttaagtg

SEQ ID NO: 10866 - DNA, 25 bp, Homo sapiens
caaagtctctgtacatgattgtctt

SEQ ID NO: 10867 - DNA, 25 bp, Homo sapiens
ttggtaccaaataatggttccttca

SEQ ID NO: 10868 - DNA, 25 bp, Homo sapiens
tgcccgactgtttttctgtctacga

SEQ ID NO: 10869 - DNA, 25 bp, Homo sapiens
gggcagtggccataatcattttgtc

SEQ ID NO: 10870 - DNA, 25 bp, Homo sapiens
atggctaccagcagtcaatgtccta

SEQ ID NO: 10871 - DNA, 25 bp, Homo sapiens
cccaaggctttgaatgtggcattta

SEQ ID NO: 10872 - DNA, 25 bp, Homo sapiens
ctggcttggcacctctatttcaatg

SEQ ID NO: 10873 - DNA, 25 bp, Homo sapiens
ggactgaggtccttctaacataaga

SEQ ID NO: 10874 - DNA, 25 bp, Homo sapiens
tcgactactggttggtgtcttcaca

SEQ ID NO: 10875 - DNA, 25 bp, Homo sapiens
cctctctgaggtggatccctatgtc

SEQ ID NO: 10876 - DNA, 25 bp, Homo sapiens
tgcagtatcttctgggctgacaata

SEQ ID NO: 10877 - DNA, 25 bp, Homo sapiens
gtggtggtcatcctctgcttctttg

SEQ ID NO: 10878 - DNA, 25 bp, Homo sapiens
gcatccagctgcagtgaaattcctg

SEQ ID NO: 10879 - DNA, 25 bp, Homo sapiens
gactgcccttaccagcatacaaatg

SEQ ID NO: 10880 - DNA, 25 bp, Homo sapiens
tctgaatggttatctctagctactg

SEQ ID NO: 10881 - DNA, 25 bp, Homo sapiens
tgtccccctcctaattcttacagca

SEQ ID NO: 10882 - DNA, 25 bp, Homo sapiens
cactatgtctgattttcgtagagca

SEQ ID NO: 10883 - DNA, 25 bp, Homo sapiens
attccaaaatattttactgcataca

SEQ ID NO: 10884 - DNA, 25 bp, Homo sapiens
ctgtttctacttgaccagtgtgttg

SEQ ID NO: 10885 - DNA, 25 bp, Homo sapiens
tttttctatttctctcaccattttt

SEQ ID NO: 10886 - DNA, 25 bp, Homo sapiens
gcctgcctgccttccttttgttatc

SEQ ID NO: 10887 - DNA, 25 bp, Homo sapiens
agggagtcttcttttgatgaccaga

SEQ ID NO: 10888 - DNA, 25 bp, Homo sapiens
caggcgcttgatcaccttgagttga

SEQ ID NO: 10889 - DNA, 25 bp, Homo sapiens
cttgtccagtggagccaaacttcta

SEQ ID NO: 10890 - DNA, 25 bp, Homo sapiens
catcacaggtcatgggcattaaata

SEQ ID NO: 10891 - DNA, 25 bp, Homo sapiens
tgagtcaggaagataatcacatatt

SEQ ID NO: 10892 - DNA, 25 bp, Homo sapiens
cagggccctctcttatgcattatga

SEQ ID NO: 10893 - DNA, 25 bp, Homo sapiens
atcgtaagtcccagttatatatgca

SEQ ID NO: 10894 - DNA, 25 bp, Homo sapiens
ctcatatgtatttcggcccaaagga

SEQ ID NO: 10895 - DNA, 25 bp, Homo sapiens
tgagccagtatttttaaaagcaatt

SEQ ID NO: 10896 - DNA, 25 bp, Homo sapiens
caaatatcatgtggaaactcactgg

SEQ ID NO: 10897 - DNA, 25 bp, Homo sapiens
ttaaaaagggaaaaacatagtaatc

SEQ ID NO: 10898 - DNA, 25 bp, Homo sapiens
gcctcagactgtgtgcttttatatc

SEQ ID NO: 10899 - DNA, 25 bp, Homo sapiens
gtgggacacctgacatcatcattga

SEQ ID NO: 10900 - DNA, 25 bp, Homo sapiens
cccagttaagaggatggtggcttca

SEQ ID NO: 10901 - DNA, 25 bp, Homo sapiens
attccatgtcctctgatccaggagg

SEQ ID NO: 10902 - DNA, 25 bp, Homo sapiens
aattattaatgaacacagtgaaata

SEQ ID NO: 10903 - DNA, 25 bp, Homo sapiens
acaaggttcaccaagggaggacatt

SEQ ID NO: 10904 - DNA, 25 bp, Homo sapiens
aaattatgactttcaaatctaccag

SEQ ID NO: 10905 - DNA, 25 bp, Homo sapiens
gttcttcccttgctcactccattga

SEQ ID NO: 10906 - DNA, 25 bp, Homo sapiens
gtttcagtgagcaaatggccttttt

SEQ ID NO: 10907 - DNA, 25 bp, Homo sapiens
ggagtcttcccaccatttcaaaaag

SEQ ID NO: 10908 - DNA, 25 bp, Homo sapiens
tgcctcagcggatatttcttcaaga

SEQ ID NO: 10909 - DNA, 25 bp, Homo sapiens
ttcagactacttggacacagcagtg

SEQ ID NO: 10910 - DNA, 25 bp, Homo sapiens
cagcacctctgttttcctcgggaaa

SEQ ID NO: 10911 - DNA, 25 bp, Homo sapiens
cccaggatgcttgacagaaatattg

SEQ ID NO: 10912 - DNA, 25 bp, Homo sapiens
ctaagcaggtggctctgtagtccta

SEQ ID NO: 10913 - DNA, 25 bp, Homo sapiens
ggtactttacccagccattatctta

SEQ ID NO: 10914 - DNA, 25 bp, Homo sapiens
tggcagatatctgtagctccacaca

SEQ ID NO: 10915 - DNA, 25 bp, Homo sapiens
gctgtagctctcatatcccaaaagg

SEQ ID NO: 10916 - DNA, 25 bp, Homo sapiens
tgccatgtccatgaagcaacttttc

SEQ ID NO: 10917 - DNA, 25 bp, Homo sapiens
atgccaaggcttctagagtcgaatg

SEQ ID NO: 10918 - DNA, 25 bp, Homo sapiens
ccattatatcgactagcttttgcaa

SEQ ID NO: 10919 - DNA, 25 bp, Homo sapiens
ttggccctttctacttgagtgacta

SEQ ID NO: 10920 - DNA, 25 bp, Homo sapiens
tctggtcaactcctccgtgtattta

SEQ ID NO: 10921 - DNA, 25 bp, Homo sapiens
gtgttcttttaggttattggccata

SEQ ID NO: 10922 - DNA, 25 bp, Homo sapiens
ctatgacatctgcaaaggaaaaaga

SEQ ID NO: 10923 - DNA, 25 bp, Homo sapiens
tgtttcttctctcatgtgtcacttg

SEQ ID NO: 10924 - DNA, 25 bp, Homo sapiens
gggtaaacaacacataggcaaactt

SEQ ID NO: 10925 - DNA, 25 bp, Homo sapiens
ggtgccttgcttttcatctccatca

SEQ ID NO: 10926 - DNA, 25 bp, Homo sapiens
ggaagacttggtattagctatgctc

SEQ ID NO: 10927 - DNA, 25 bp, Homo sapiens
agccttggtagagcactgtgcaatc

SEQ ID NO: 10928 - DNA, 25 bp, Homo sapiens
ccaagtgcttgtaaaagtgcctaaa

SEQ ID NO: 10929 - DNA, 25 bp, Homo sapiens
ccaccaaaggggacatctctaaaga

SEQ ID NO: 10930 - DNA, 25 bp, Homo sapiens
ggatctctcatctgttttatatgca

SEQ ID NO: 10931 - DNA, 25 bp, Homo sapiens
aatcatattctatcttgttatgcat

SEQ ID NO: 10932 - DNA, 25 bp, Homo sapiens
tccagtagccagaaagaatgtcttt

SEQ ID NO: 10933 - DNA, 25 bp, Homo sapiens
ctggaaaataaaagcatctttaatt

SEQ ID NO: 10934 - DNA, 25 bp, Homo sapiens
tgaattttccaatattccagtattt

SEQ ID NO: 10935 - DNA, 25 bp, Homo sapiens
gccacaggcttctcatttttcctta

SEQ ID NO: 10936 - DNA, 25 bp, Homo sapiens
agcaggcttctttcttgtctcacag

SEQ ID NO: 10937 - DNA, 25 bp, Homo sapiens
ttcagtggactcagcatcgatctta

SEQ ID NO: 10938 - DNA, 25 bp, Homo sapiens
ggccagtttttcatgttgtccagca

SEQ ID NO: 10939 - DNA, 25 bp, Homo sapiens
acttggtgtgttcttggagactaaa

SEQ ID NO: 10940 - DNA, 25 bp, Homo sapiens
tgttaccttggcacctcagatttta

SEQ ID NO: 10941 - DNA, 25 bp, Homo sapiens
cacgcacagcactggcagggtaata

SEQ ID NO: 10942 - DNA, 25 bp, Homo sapiens
gggaccaagcactagcaaatctatc

SEQ ID NO: 10943 - DNA, 25 bp, Homo sapiens
tccaagttttgtgagacccgagttc

SEQ ID NO: 10944 - DNA, 25 bp, Homo sapiens
ttcagttttatttttgtttccacag

SEQ ID NO: 10945 - DNA, 25 bp, Homo sapiens
gtccagggctgatcttacaaattaa

SEQ ID NO: 10946 - DNA, 25 bp, Homo sapiens
gcagccattctttttctgtttaata

SEQ ID NO: 10947 - DNA, 25 bp, Homo sapiens
ctttccacactacactgatgtatgt

SEQ ID NO: 10948 - DNA, 25 bp, Homo sapiens
aactagaacttgcagagccaatcag

SEQ ID NO: 10949 - DNA, 25 bp, Homo sapiens
ccatggcttgatgcaagaaaacttg

SEQ ID NO: 10950 - DNA, 25 bp, Homo sapiens
gttacatcatgagggatggctattg

SEQ ID NO: 10951 - DNA, 25 bp, Homo sapiens
tcttgggacagtatctaaaacaggc

SEQ ID NO: 10952 - DNA, 25 bp, Homo sapiens
tactaaaacagggctttgagttcag

SEQ ID NO: 10953 - DNA, 25 bp, Homo sapiens
ctccacagaaatggaggatgccatc

SEQ ID NO: 10954 - DNA, 25 bp, Homo sapiens
aggccctttcctcttttgcagcatg

SEQ ID NO: 10955 - DNA, 25 bp, Homo sapiens
ttcctacctgaagcttgactggctc

SEQ ID NO: 10956 - DNA, 25 bp, Homo sapiens
tatggcagcctcacctcctgtggta

SEQ ID NO: 10957 - DNA, 25 bp, Homo sapiens
tgcagcctttgggaaggcagcctca

SEQ ID NO: 10958 - DNA, 25 bp, Homo sapiens
gtgctttgcaaaactggaccctcta

SEQ ID NO: 10959 - DNA, 25 bp, Homo sapiens
tgctatcctgagagctcccaaaggg

SEQ ID NO: 10960 - DNA, 25 bp, Homo sapiens
ggagtcagtgcctacaacagtctta

SEQ ID NO: 10961 - DNA, 25 bp, Homo sapiens
aggcctgcctcttggttcagatttc

SEQ ID NO: 10962 - DNA, 25 bp, Homo sapiens
tgtggccactgcatgctgaaagata

SEQ ID NO: 10963 - DNA, 25 bp, Homo sapiens
attccttaggtgtgacatgcatcta

SEQ ID NO: 10964 - DNA, 25 bp, Homo sapiens
acctttagggagcagtataatttca

SEQ ID NO: 10965 - DNA, 25 bp, Homo sapiens
cctctctggtcacaggataaatgta

SEQ ID NO: 10966 - DNA, 25 bp, Homo sapiens
tggagctccctgtagtaggcaatta

SEQ ID NO: 10967 - DNA, 25 bp, Homo sapiens
ataacctttagtgtggctatccata

SEQ ID NO: 10968 - DNA, 25 bp, Homo sapiens
ctcccaaggaggaaaaccatatttc

SEQ ID NO: 10969 - DNA, 25 bp, Homo sapiens
ccttccaaaggaggtagtatttgcc

SEQ ID NO: 10970 - DNA, 25 bp, Homo sapiens
cccttgttaaggagttgcttgtaga

SEQ ID NO: 10971 - DNA, 25 bp, Homo sapiens
gcaagtttgcatgttggtgagccaa

SEQ ID NO: 10972 - DNA, 25 bp, Homo sapiens
aagttttctctggagcactgaactt

SEQ ID NO: 10973 - DNA, 25 bp, Homo sapiens
tcctgcctgcctgatgatcttgcta

SEQ ID NO: 10974 - DNA, 25 bp, Homo sapiens
gcctggtgaaggctctctaaaactc

SEQ ID NO: 10975 - DNA, 25 bp, Homo sapiens
ggcccttgggtttccactgcttaca

SEQ ID NO: 10976 - DNA, 25 bp, Homo sapiens
accacatttttaaaatgaaaactaa

SEQ ID NO: 10977 - DNA, 25 bp, Homo sapiens
gtatgctaatgcgtatcccttcaga

SEQ ID NO: 10978 - DNA, 25 bp, Homo sapiens
tcgaggggaatttgcactaagtgtc

SEQ ID NO: 10979 - DNA, 25 bp, Homo sapiens
tggtcaagccgtgtatgagacatgc

SEQ ID NO: 10980 - DNA, 25 bp, Homo sapiens
gtgggcatcagctacaaagacgttg

SEQ ID NO: 10981 - DNA, 25 bp, Homo sapiens
gtcagtatgttgttacacctctctt

SEQ ID NO: 10982 - DNA, 25 bp, Homo sapiens
cttaaatggcatgctgtggaatcca

SEQ ID NO: 10983 - DNA, 25 bp, Homo sapiens
ttgcttgcgttcaggatccatcatg

SEQ ID NO: 10984 - DNA, 25 bp, Homo sapiens
aggtgctcaccgataccactagtta

SEQ ID NO: 10985 - DNA, 25 bp, Homo sapiens
aaagaggtgccctcatgcacagtga

SEQ ID NO: 10986 - DNA, 25 bp, Homo sapiens
ttacaggtgattctttgaaattccc

SEQ ID NO: 10987 - DNA, 25 bp, Homo sapiens
ctctcaattttgatctagattgtca

SEQ ID NO: 10988 - DNA, 25 bp, Homo sapiens
gagagctctgcatccctctggaaaa

SEQ ID NO: 10989 - DNA, 25 bp, Homo sapiens
ggaacaacccagctctctttaaatg

SEQ ID NO: 10990 - DNA, 25 bp, Homo sapiens
cacagtttaacaaaggcacgatttc

SEQ ID NO: 10991 - DNA, 25 bp, Homo sapiens
tctgctcccgcgttagtctctagga

SEQ ID NO: 10992 - DNA, 25 bp, Homo sapiens
tcagcaatttcaagtgcatcatggc

SEQ ID NO: 10993 - DNA, 25 bp, Homo sapiens
gtgtatattaacctattatataatt

SEQ ID NO: 10994 - DNA, 25 bp, Homo sapiens
ggggtggactgggaagaaatggtaa

SEQ ID NO: 10995 - DNA, 25 bp, Homo sapiens
ctcagctttcagtttgctcacgatg

SEQ ID NO: 10996 - DNA, 25 bp, Homo sapiens
gtcccaactggaaactctgtaaaga

SEQ ID NO: 10997 - DNA, 25 bp, Homo sapiens
gtctgttttagtagtggtcccttta

SEQ ID NO: 10998 - DNA, 25 bp, Homo sapiens
ttctaagctcctgctcgtttttcat

SEQ ID NO: 10999 - DNA, 25 bp, Homo sapiens
gtggtagacagaatgcccctctttc

SEQ ID NO: 11000 - DNA, 25 bp, Homo sapiens
ttttttttttttcatggtgtctcaa

SEQ ID NO: 11001 - DNA, 25 bp, Homo sapiens
aaaatagttgttacagcccactttg

SEQ ID NO: 11002 - DNA, 25 bp, Homo sapiens
ttttttctttttaggaactgataca

SEQ ID NO: 11003 - DNA, 25 bp, Homo sapiens
cccaatgcccttaagcaaagtgata

SEQ ID NO: 11004 - DNA, 25 bp, Homo sapiens
cttgacctgttcctctgtttctgca

SEQ ID NO: 11005 - DNA, 25 bp, Homo sapiens
ttgaccaatatgttcccggtgagta

SEQ ID NO: 11006 - DNA, 25 bp, Homo sapiens
ctcttctatgtttgtgtctagttca

SEQ ID NO: 11007 - DNA, 25 bp, Homo sapiens
aatcccactttttaatttgaaatgc

SEQ ID NO: 11008 - DNA, 25 bp, Homo sapiens
agatcgggctgtccttaataacaca

SEQ ID NO: 11009 - DNA, 25 bp, Homo sapiens
cttgcctggtagttcatcttcattg

SEQ ID NO: 11010 - DNA, 25 bp, Homo sapiens
tggccaatagcgacaagaaatcttc

SEQ ID NO: 11011 - DNA, 25 bp, Homo sapiens
tcagaagagggtataggcgataatc

SEQ ID NO: 11012 - DNA, 25 bp, Homo sapiens
ggtgtcacagagaacagctaagttt

SEQ ID NO: 11013 - DNA, 25 bp, Homo sapiens
gacatggtccttctttgcaaatgca

SEQ ID NO: 11014 - DNA, 25 bp, Homo sapiens
gggagacaggcttattgttttatga

SEQ ID NO: 11015 - DNA, 25 bp, Homo sapiens
acactgaaggagattcaaatcacct

SEQ ID NO: 11016 - DNA, 25 bp, Homo sapiens
cctcatgtggttggggtctagtcac

SEQ ID NO: 11017 - DNA, 25 bp, Homo sapiens
tgtaccctgctgcaaagctttagtg

SEQ ID NO: 11018 - DNA, 25 bp, Homo sapiens
ataaggacttctctagctcagtgtc

SEQ ID NO: 11019 - DNA, 25 bp, Homo sapiens
agttcccaattgcagtagtctccta

SEQ ID NO: 11020 - DNA, 25 bp, Homo sapiens
gtggtccatgtcctatgaatgtata

SEQ ID NO: 11021 - DNA, 25 bp, Homo sapiens
caagggaatgggcatgtgatttcta

SEQ ID NO: 11022 - DNA, 25 bp, Homo sapiens
gcttcttcatcctgtacctgctgta

SEQ ID NO: 11023 - DNA, 25 bp, Homo sapiens
ggtgccttctgtctgctttctaatt

SEQ ID NO: 11024 - DNA, 25 bp, Homo sapiens
ttggtggctaccataaccattgttc

SEQ ID NO: 11025 - DNA, 25 bp, Homo sapiens
ggcacagttctttcacgaaataggg

SEQ ID NO: 11026 - DNA, 25 bp, Homo sapiens
gccacatacatacacatcccttaat

SEQ ID NO: 11027 - DNA, 25 bp, Homo sapiens
tcatggaaattcacaaattcttacg

SEQ ID NO: 11028 - DNA, 25 bp, Homo sapiens
tggacagtgtaaaaaatagtatgac

SEQ ID NO: 11029 - DNA, 25 bp, Homo sapiens
gaaaccactagcagcttgttttttt

SEQ ID NO: 11030 - DNA, 25 bp, Homo sapiens
tagccagcagcatgtttcaagcaga

SEQ ID NO: 11031 - DNA, 25 bp, Homo sapiens
tgtgccgtccgtcaattatgtgtcc

SEQ ID NO: 11032 - DNA, 25 bp, Homo sapiens
tgtacattaggtagagaggcttccc

SEQ ID NO: 11033 - DNA, 25 bp, Homo sapiens
ggcctccttttcaagtcctgtcatt

SEQ ID NO: 11034 - DNA, 25 bp, Homo sapiens
tggcagttcccatgttccctagata

SEQ ID NO: 11035 - DNA, 25 bp, Homo sapiens
tcctaacttgactgtggcctggctc

SEQ ID NO: 11036 - DNA, 25 bp, Homo sapiens
acttggcacaaggaggaactactta

SEQ ID NO: 11037 - DNA, 25 bp, Homo sapiens
cgtaggcttcttgaggtcagagaca

SEQ ID NO: 11038 - DNA, 25 bp, Homo sapiens
ctcaagttgttgttaatggctgttg

SEQ ID NO: 11039 - DNA, 25 bp, Homo sapiens
cagtcggtttcttcggacatatctc

SEQ ID NO: 11040 - DNA, 25 bp, Homo sapiens
gtctgagccactttacctttctttt

SEQ ID NO: 11041 - DNA, 25 bp, Homo sapiens
gtttctacccaagcaagtacagtga

SEQ ID NO: 11042 - DNA, 25 bp, Homo sapiens
tgacagactacgtcctctggaatga

SEQ ID NO: 11043 - DNA, 25 bp, Homo sapiens
aggctgtgtcctctgaccacgtata

SEQ ID NO: 11044 - DNA, 25 bp, Homo sapiens
gcctagtcctttgagattactatta

SEQ ID NO: 11045 - DNA, 25 bp, Homo sapiens
gattgagataaaaaaatcacctaac

SEQ ID NO: 11046 - DNA, 25 bp, Homo sapiens
actgttggagtgctgctgcctaata

SEQ ID NO: 11047 - DNA, 25 bp, Homo sapiens
ccaggctcaattcttgtatggtgaa

SEQ ID NO: 11048 - DNA, 25 bp, Homo sapiens
aatactttaaaaaatccatggtgaa

SEQ ID NO: 11049 - DNA, 25 bp, Homo sapiens
gtgggctctacacactgcacagaaa

SEQ ID NO: 11050 - DNA, 25 bp, Homo sapiens
cactggctttttacttggtgactta

SEQ ID NO: 11051 - DNA, 25 bp, Homo sapiens
agccggtgagacacacatattcagc

SEQ ID NO: 11052 - DNA, 25 bp, Homo sapiens
tcacggctgctgcttcacagagata

SEQ ID NO: 11053 - DNA, 25 bp, Homo sapiens
gggcctcctagcctattttcaaata

SEQ ID NO: 11054 - DNA, 25 bp, Homo sapiens
cagcaccggttatggcagcagttta

SEQ ID NO: 11055 - DNA, 25 bp, Homo sapiens
ggtctccctagcacctccgatttga

SEQ ID NO: 11056 - DNA, 25 bp, Homo sapiens
ttgggcatcatttctttgttctctg

SEQ ID NO: 11057 - DNA, 25 bp, Homo sapiens
tagggcatctttcagccatggttca

SEQ ID NO: 11058 - DNA, 25 bp, Homo sapiens
gccctcggtgatttggtaatacttt

SEQ ID NO: 11059 - DNA, 25 bp, Homo sapiens
caggattcttagttccatagcaata

SEQ ID NO: 11060 - DNA, 25 bp, Homo sapiens
agcccttaggccatggtgccttata

SEQ ID NO: 11061 - DNA, 25 bp, Homo sapiens
caattcactctagagatgaaaaaca

SEQ ID NO: 11062 - DNA, 25 bp, Homo sapiens
gaagagtctatttagatcttttgcc

SEQ ID NO: 11063 - DNA, 25 bp, Homo sapiens
gtagcataaacattgaagcacatag

SEQ ID NO: 11064 - DNA, 25 bp, Homo sapiens
cattgagtagactctaagagtattt

SEQ ID NO: 11065 - DNA, 25 bp, Homo sapiens
tgagaggcccttctgtgacaatata

SEQ ID NO: 11066 - DNA, 25 bp, Homo sapiens
tgagactgccaaactgtagccctga

SEQ ID NO: 11067 - DNA, 25 bp, Homo sapiens
tgcaggccagtagtatccacgtatg

SEQ ID NO: 11068 - DNA, 25 bp, Homo sapiens
tgggccagacaatgcacaagtgatt

SEQ ID NO: 11069 - DNA, 25 bp, Homo sapiens
tccggggtattattgcttagcttgc

SEQ ID NO: 11070 - DNA, 25 bp, Homo sapiens
caactcttagactgtggctccctga

SEQ ID NO: 11071 - DNA, 25 bp, Homo sapiens
tctcttcactctgtgccagggttta

SEQ ID NO: 11072 - DNA, 25 bp, Homo sapiens
tgtccatatcactattcatcttggt

SEQ ID NO: 11073 - DNA, 25 bp, Homo sapiens
tctcaatgtgtgttattttcaagga

SEQ ID NO: 11074 - DNA, 25 bp, Homo sapiens
ctgaggcttccagagaggtaagctt

SEQ ID NO: 11075 - DNA, 25 bp, Homo sapiens
ttttcaatctctccaaatagataaa

SEQ ID NO: 11076 - DNA, 25 bp, Homo sapiens
ccttacctttcttggtcatggctga

SEQ ID NO: 11077 - DNA, 25 bp, Homo sapiens
tgacaccaggaaggaactacagtta

SEQ ID NO: 11078 - DNA, 25 bp, Homo sapiens
tggctgcctgcatcaatcagttgtg

SEQ ID NO: 11079 - DNA, 25 bp, Homo sapiens
ggagatgtgctctttcagactattg

SEQ ID NO: 11080 - DNA, 25 bp, Homo sapiens
aaaattaatattatgatatgattgc

SEQ ID NO: 11081 - DNA, 25 bp, Homo sapiens
tgggcgacctcacatttctttttta

SEQ ID NO: 11082 - DNA, 25 bp, Homo sapiens
ggtccctttgaataacagccataga

SEQ ID NO: 11083 - DNA, 25 bp, Homo sapiens
aggattgtgtctcagtccataaaca

SEQ ID NO: 11084 - DNA, 25 bp, Homo sapiens
ggggtgcccactgaactacttaatt

SEQ ID NO: 11085 - DNA, 25 bp, Homo sapiens
cacataaatgccctgacttcgaata

SEQ ID NO: 11086 - DNA, 25 bp, Homo sapiens
cctgtgtcagagacagtaaatagcc

SEQ ID NO: 11087 - DNA, 25 bp, Homo sapiens
ggctgttacttcttttcttcctcaa

SEQ ID NO: 11088 - DNA, 25 bp, Homo sapiens
tgccctgcagtgttggttttctttc

SEQ ID NO: 11089 - DNA, 25 bp, Homo sapiens
ttcctgtattagagggcaacacctg

SEQ ID NO: 11090 - DNA, 25 bp, Homo sapiens
tggaggaaggaaaaggagaaaattc

SEQ ID NO: 11091 - DNA, 25 bp, Homo sapiens
aaaaaaaaaaatacatgcttctcta

SEQ ID NO: 11092 - DNA, 25 bp, Homo sapiens
ctcctttctggcctgttgatctaaa

SEQ ID NO: 11093 - DNA, 25 bp, Homo sapiens
tcaccaggtggtggaattgtccttc

SEQ ID NO: 11094 - DNA, 25 bp, Homo sapiens
cctgggtttcttgctgggacattaa

SEQ ID NO: 11095 - DNA, 25 bp, Homo sapiens
gtggccagatggcaggattttctta

SEQ ID NO: 11096 - DNA, 25 bp, Homo sapiens
ccttactttactgcaggaaaccctt

SEQ ID NO: 11097 - DNA, 25 bp, Homo sapiens
gtaaaaaccactaaatttttaggtc

SEQ ID NO: 11098 - DNA, 25 bp, Homo sapiens
ttcaaggtaggctccagactaagta

SEQ ID NO: 11099 - DNA, 25 bp, Homo sapiens
tctggcttgacactaggacacttcc

SEQ ID NO: 11100 - DNA, 25 bp, Homo sapiens
aaaataaagggctcataaataaaga

SEQ ID NO: 11101 - DNA, 25 bp, Homo sapiens
cctgctgtggggttttcaccttata

SEQ ID NO: 11102 - DNA, 25 bp, Homo sapiens
tgtctgggtccatcacctgccttta

SEQ ID NO: 11103 - DNA, 25 bp, Homo sapiens
aggtctctgacgctctctccaatgt

SEQ ID NO: 11104 - DNA, 25 bp, Homo sapiens
tggatggcagcaccacctttttcta

SEQ ID NO: 11105 - DNA, 25 bp, Homo sapiens
tggtagcagctttttggacctcaac

SEQ ID NO: 11106 - DNA, 25 bp, Homo sapiens
ttttcttacatgaacacaggtagtc

SEQ ID NO: 11107 - DNA, 25 bp, Homo sapiens
tttgccaaaaagaacgccatgtatg

SEQ ID NO: 11108 - DNA, 25 bp, Homo sapiens
gccctaatagagagccaacaagttg

SEQ ID NO: 11109 - DNA, 25 bp, Homo sapiens
ggtggcctggcaattcatattcata

SEQ ID NO: 11110 - DNA, 25 bp, Homo sapiens
ctttccacattgagggagtcacttg

SEQ ID NO: 11111 - DNA, 25 bp, Homo sapiens
ggacagatatgatcagctccacatc

SEQ ID NO: 11112 - DNA, 25 bp, Homo sapiens
gaccttctgggctggtttcattcta

SEQ ID NO: 11113 - DNA, 25 bp, Homo sapiens
gcaggcttcacaaattccagtcagg

SEQ ID NO: 11114 - DNA, 25 bp, Homo sapiens
agcgagtcttagcacaatgagtttg

SEQ ID NO: 11115 - DNA, 25 bp, Homo sapiens
tctctttgcagtagatccaggaatc

SEQ ID NO: 11116 - DNA, 25 bp, Homo sapiens
ccacctcataggcatgcgcagtgta

SEQ ID NO: 11117 - DNA, 25 bp, Homo sapiens
ctgctccgtgagattccaaactttg

SEQ ID NO: 11118 - DNA, 25 bp, Homo sapiens
ttcgccttagctactccaaatagtg

SEQ ID NO: 11119 - DNA, 25 bp, Homo sapiens
gccactgcttgctttagaataccta

SEQ ID NO: 11120 - DNA, 25 bp, Homo sapiens
tgtcccatggcttggatacattcta

SEQ ID NO: 11121 - DNA, 25 bp, Homo sapiens
ttataatacctgtagtgtttattaa

SEQ ID NO: 11122 - DNA, 25 bp, Homo sapiens
tttggacattgtatggcaaccatta

SEQ ID NO: 11123 - DNA, 25 bp, Homo sapiens
caatgtgtacagaatattcctttaa

SEQ ID NO: 11124 - DNA, 25 bp, Homo sapiens
tgctttggtgcatgcctacagtttg

SEQ ID NO: 11125 - DNA, 25 bp, Homo sapiens
tgcctaattgcgatgggtcagcgta

SEQ ID NO: 11126 - DNA, 25 bp, Homo sapiens
actccctgttgtatggcctctattc

SEQ ID NO: 11127 - DNA, 25 bp, Homo sapiens
gttgtcctctgagccttctagctta

SEQ ID NO: 11128 - DNA, 25 bp, Homo sapiens
aggcctttgtttcagctgttggata

SEQ ID NO: 11129 - DNA, 25 bp, Homo sapiens
tcagggctacgaagcacaggagtta

SEQ ID NO: 11130 - DNA, 25 bp, Homo sapiens
caggaatgggtctcttgtttgaata

SEQ ID NO: 11131 - DNA, 25 bp, Homo sapiens
tcccaatggcatcctctagcgaatc

SEQ ID NO: 11132 - DNA, 25 bp, Homo sapiens
gtccttagcccatgagatttttaga

SEQ ID NO: 11133 - DNA, 25 bp, Homo sapiens
cttccttggctacttggcatcatca

SEQ ID NO: 11134 - DNA, 25 bp, Homo sapiens
ttgcaaggcctatcatgtcatcaga

SEQ ID NO: 11135 - DNA, 25 bp, Homo sapiens
gctgctttcacctctcccttaatta

SEQ ID NO: 11136 - DNA, 25 bp, Homo sapiens
ctgctagtaaccagaaagtgtttta

SEQ ID NO: 11137 - DNA, 25 bp, Homo sapiens
ggttcactctctggctagtcatttg

SEQ ID NO: 11138 - DNA, 25 bp, Homo sapiens
cttcactgttgcataggagggcctt

SEQ ID NO: 11139 - DNA, 25 bp, Homo sapiens
ctctgtgtatgggtatggcttaaaa

SEQ ID NO: 11140 - DNA, 25 bp, Homo sapiens
tcctccttaaatggtagtcagtgtc

SEQ ID NO: 11141 - DNA, 25 bp, Homo sapiens
tgccctggggcagaattgcaacttg

SEQ ID NO: 11142 - DNA, 25 bp, Homo sapiens
ttgtgtaattagcaaagctcctgta

SEQ ID NO: 11143 - DNA, 25 bp, Homo sapiens
caatagtaatgaaatagcctttaaa

SEQ ID NO: 11144 - DNA, 25 bp, Homo sapiens
tctctgaattggtgtcaaattttta

SEQ ID NO: 11145 - DNA, 25 bp, Homo sapiens
agcagtcttgccctcttggaattca

SEQ ID NO: 11146 - DNA, 25 bp, Homo sapiens
gggctagagtcaccacgtttgtgta

SEQ ID NO: 11147 - DNA, 25 bp, Homo sapiens
ctggccttggaacaaaattagcttt

SEQ ID NO: 11148 - DNA, 25 bp, Homo sapiens
ggagacccatctttgcacagttaaa

SEQ ID NO: 11149 - DNA, 25 bp, Homo sapiens
caatgccaggtatagtgtcacgctc

SEQ ID NO: 11150 - DNA, 25 bp, Homo sapiens
gcagtgcccttggtagtaactctga

SEQ ID NO: 11151 - DNA, 25 bp, Homo sapiens
agtcctctcttgtcttcgcttctga

SEQ ID NO: 11152 - DNA, 25 bp, Homo sapiens
cctgcatgtgtaggaggacccagaa

SEQ ID NO: 11153 - DNA, 25 bp, Homo sapiens
cctgctcagtggtcagaagtaagta

SEQ ID NO: 11154 - DNA, 25 bp, Homo sapiens
ttttctgacaaagccaaatgtggtc

SEQ ID NO: 11155 - DNA, 25 bp, Homo sapiens
gttatccttgcttactagaatattg

SEQ ID NO: 11156 - DNA, 25 bp, Homo sapiens
tattgggatgactaagactttcacc

SEQ ID NO: 11157 - DNA, 25 bp, Homo sapiens
tagtctcccgctatccagtgctaga

SEQ ID NO: 11158 - DNA, 25 bp, Homo sapiens
cttgagctgcctagagaaatgtatt

SEQ ID NO: 11159 - DNA, 25 bp, Homo sapiens
agagctggccctgttcttacattta

SEQ ID NO: 11160 - DNA, 25 bp, Homo sapiens
gacagcctcgtcgtgatcatcatca

SEQ ID NO: 11161 - DNA, 25 bp, Homo sapiens
gggcattgccagtcacatccagata

SEQ ID NO: 11162 - DNA, 25 bp, Homo sapiens
tcttctcaagtgcagggataacatg

SEQ ID NO: 11163 - DNA, 25 bp, Homo sapiens
ggccactgcaatctgtaaggacttc

SEQ ID NO: 11164 - DNA, 25 bp, Homo sapiens
gcaggctccttctccagggttatga

SEQ ID NO: 11165 - DNA, 25 bp, Homo sapiens
tactggtgcatctctggctgtaaca

SEQ ID NO: 11166 - DNA, 25 bp, Homo sapiens
tcccacctgggcttaatgctaacta

SEQ ID NO: 11167 - DNA, 25 bp, Homo sapiens
acatattgtcaaaaatcttgttcca

SEQ ID NO: 11168 - DNA, 25 bp, Homo sapiens
ggtcccagcattagtccacagtaca

SEQ ID NO: 11169 - DNA, 25 bp, Homo sapiens
aatatgccatttctcccttaggatg

SEQ ID NO: 11170 - DNA, 25 bp, Homo sapiens
tctgtgcaaggaacgctgtggattc

SEQ ID NO: 11171 - DNA, 25 bp, Homo sapiens
tgcatgttagcacctgaaagcctca

SEQ ID NO: 11172 - DNA, 25 bp, Homo sapiens
ggtgccaagcccatgagattttatc

SEQ ID NO: 11173 - DNA, 25 bp, Homo sapiens
ctgaagtgactgatgcatgtatata

SEQ ID NO: 11174 - DNA, 25 bp, Homo sapiens
catcagccatcttgagctaatttgt

SEQ ID NO: 11175 - DNA, 25 bp, Homo sapiens
tgtccttagtagtacactgatagtc

SEQ ID NO: 11176 - DNA, 25 bp, Homo sapiens
tctgtggtttaaaacaggttaccta

SEQ ID NO: 11177 - DNA, 25 bp, Homo sapiens
ccagggtccacaacatgaggcttat

SEQ ID NO: 11178 - DNA, 25 bp, Homo sapiens
aaatagccttgtttcctggtcacag

SEQ ID NO: 11179 - DNA, 25 bp, Homo sapiens
attccaggaccaagcaccatatttc

SEQ ID NO: 11180 - DNA, 25 bp, Homo sapiens
taaccaggaggtaattcctcagttc

SEQ ID NO: 11181 - DNA, 25 bp, Homo sapiens
gggtgttcatttcttactgcgtgta

SEQ ID NO: 11182 - DNA, 25 bp, Homo sapiens
actggggcacatttcctttcttgga

SEQ ID NO: 11183 - DNA, 25 bp, Homo sapiens
gcactgatatttctcctggcacaca

SEQ ID NO: 11184 - DNA, 25 bp, Homo sapiens
agactcctccctacccctaaagttc

SEQ ID NO: 11185 - DNA, 25 bp, Homo sapiens
agtatgcatgtgcatgcacacacac

SEQ ID NO: 11186 - DNA, 25 bp, Homo sapiens
tttgctgactcaaaagccctacatc

SEQ ID NO: 11187 - DNA, 25 bp, Homo sapiens
tagagcaactacatcaactacgaga

SEQ ID NO: 11188 - DNA, 25 bp, Homo sapiens
ttgtttccacaacaatttattccac

SEQ ID NO: 11189 - DNA, 25 bp, Homo sapiens
ccttaaagcttgtacctgagtctcc

SEQ ID NO: 11190 - DNA, 25 bp, Homo sapiens
cattgtgtttaacattactaataaa

SEQ ID NO: 11191 - DNA, 25 bp, Homo sapiens
ggggtggaccatactctgaccaaga

SEQ ID NO: 11192 - DNA, 25 bp, Homo sapiens
ggacaatgataatggatatttaacc

SEQ ID NO: 11193 - DNA, 25 bp, Homo sapiens
tagcaacagtttcccagtatgatgg

SEQ ID NO: 11194 - DNA, 25 bp, Homo sapiens
tcctccacaggacacaagaattagg

SEQ ID NO: 11195 - DNA, 25 bp, Homo sapiens
taagtaaaatgaaaaacagtcaaga

SEQ ID NO: 11196 - DNA, 25 bp, Homo sapiens
gggaggtcacctgtctcacagattg

SEQ ID NO: 11197 - DNA, 25 bp, Homo sapiens
ttgcttgggcttagagccacccttc

SEQ ID NO: 11198 - DNA, 25 bp, Homo sapiens
gcctacgaggtctctggaattagta

SEQ ID NO: 11199 - DNA, 25 bp, Homo sapiens
cgctcacaattttctgggaagctta

SEQ ID NO: 11200 - DNA, 25 bp, Homo sapiens
attttgattctttgttgctataact

SEQ ID NO: 11201 - DNA, 25 bp, Homo sapiens
gttcttacttcaaagcatagctttt

SEQ ID NO: 11202 - DNA, 25 bp, Homo sapiens
aggtgttccgcaaaatctgattata

SEQ ID NO: 11203 - DNA, 25 bp, Homo sapiens
ctagggacttactgcaacaaatacg

SEQ ID NO: 11204 - DNA, 25 bp, Homo sapiens
ccttcatgagataccaaagttatgg

SEQ ID NO: 11205 - DNA, 25 bp, Homo sapiens
acaaaaaaattgaagcaattttgga

SEQ ID NO: 11206 - DNA, 25 bp, Homo sapiens
tatgaatttaaacgttttaagttca

SEQ ID NO: 11207 - DNA, 25 bp, Homo sapiens
agaacacctcaatatcactgttata

SEQ ID NO: 11208 - DNA, 25 bp, Homo sapiens
ccaaacttttgccagtgattatatc

SEQ ID NO: 11209 - DNA, 25 bp, Homo sapiens
ggccggcaggagacagtaacagaaa

SEQ ID NO: 11210 - DNA, 25 bp, Homo sapiens
tcctggatggtatcagctttgaaca

SEQ ID NO: 11211 - DNA, 25 bp, Homo sapiens
gctgttgcccatagacttccctgtg

SEQ ID NO: 11212 - DNA, 25 bp, Homo sapiens
gctggcattctctccttcacatata

SEQ ID NO: 11213 - DNA, 25 bp, Homo sapiens
cgttgtgcaactacttcctggctga

SEQ ID NO: 11214 - DNA, 25 bp, Homo sapiens
cagccactagtctatattatgtcta

SEQ ID NO: 11215 - DNA, 25 bp, Homo sapiens
catttccacaatcactgcagcagta

SEQ ID NO: 11216 - DNA, 25 bp, Homo sapiens
cagatgtaactgtgctaactttttc

SEQ ID NO: 11217 - DNA, 25 bp, Homo sapiens
ctgccaaacatacaaggagagcttc

SEQ ID NO: 11218 - DNA, 25 bp, Homo sapiens
ccaattctgagatggaacagcttga

SEQ ID NO: 11219 - DNA, 25 bp, Homo sapiens
cccaagactgagatgtattatgcac

SEQ ID NO: 11220 - DNA, 25 bp, Homo sapiens
acccagatgaggtcagtatcgcttc

SEQ ID NO: 11221 - DNA, 25 bp, Homo sapiens
gcttttccaagcatgttctgatttc

SEQ ID NO: 11222 - DNA, 25 bp, Homo sapiens
ttgggatactagacactttgacttg

SEQ ID NO: 11223 - DNA, 25 bp, Homo sapiens
ctctgatgcgctgggaaagacaatc

SEQ ID NO: 11224 - DNA, 25 bp, Homo sapiens
ggctaccatgctgtgttcatataca

SEQ ID NO: 11225 - DNA, 25 bp, Homo sapiens
tataactgaggaagcatggccactg

SEQ ID NO: 11226 - DNA, 25 bp, Homo sapiens
ctcgtgatgcctgctgacagcgtta

SEQ ID NO: 11227 - DNA, 25 bp, Homo sapiens
gacctctgtctgataaggcctttga

SEQ ID NO: 11228 - DNA, 25 bp, Homo sapiens
tcattgcttttgttaacaaaatagg

SEQ ID NO: 11229 - DNA, 25 bp, Homo sapiens
ccacatctgatgctggcctgaggta

SEQ ID NO: 11230 - DNA, 25 bp, Homo sapiens
cagcagctgctttatctgagaactg

SEQ ID NO: 11231 - DNA, 25 bp, Homo sapiens
ctcacagatggcaagaagataattc

SEQ ID NO: 11232 - DNA, 25 bp, Homo sapiens
gttggttttaaaatcagtttctgga

SEQ ID NO: 11233 - DNA, 25 bp, Homo sapiens
gctggtgagctgtcatggaaaacat

SEQ ID NO: 11234 - DNA, 25 bp, Homo sapiens
cgctcctctatggacagattcaaga

SEQ ID NO: 11235 - DNA, 25 bp, Homo sapiens
gcgcccttgcaaataacagctctta

SEQ ID NO: 11236 - DNA, 25 bp, Homo sapiens
cgaggcttctagtcaaagataatta

SEQ ID NO: 11237 - DNA, 25 bp, Homo sapiens
cagagttgtagatatgtcttgccta

SEQ ID NO: 11238 - DNA, 25 bp, Homo sapiens
ggtccaagatgtataattcctagtg

SEQ ID NO: 11239 - DNA, 25 bp, Homo sapiens
ctggaggctgtcttagggaatatta

SEQ ID NO: 11240 - DNA, 25 bp, Homo sapiens
tggatccactctgaggcacgaattg

SEQ ID NO: 11241 - DNA, 25 bp, Homo sapiens
ccttggacaagccagaaatatggta

SEQ ID NO: 11242 - DNA, 25 bp, Homo sapiens
agcactcatggcttggtaatatgtg

SEQ ID NO: 11243 - DNA, 25 bp, Homo sapiens
gagccatgctctttacttcctatga

SEQ ID NO: 11244 - DNA, 25 bp, Homo sapiens
cagagaccgccgagttgtgattatc

SEQ ID NO: 11245 - DNA, 25 bp, Homo sapiens
gttgcatagcctccagtacctactg

SEQ ID NO: 11246 - DNA, 25 bp, Homo sapiens
cagccagccacctttgcagttttta

SEQ ID NO: 11247 - DNA, 25 bp, Homo sapiens
ttttaaatctccagaggctttcgtg

SEQ ID NO: 11248 - DNA, 25 bp, Homo sapiens
cccagctgtatctaatgaattgtgt

SEQ ID NO: 11249 - DNA, 25 bp, Homo sapiens
aggaagatcatttttatttaaatca

SEQ ID NO: 11250 - DNA, 25 bp, Homo sapiens
ggaaagcgagatttttgcgacactt

SEQ ID NO: 11251 - DNA, 25 bp, Homo sapiens
cagggaatgcctcttgtttctagtc

SEQ ID NO: 11252 - DNA, 25 bp, Homo sapiens
ttcaattttttgcttcaatttccat

SEQ ID NO: 11253 - DNA, 25 bp, Homo sapiens
cctccaacctgtgaaaagatgtgta

SEQ ID NO: 11254 - DNA, 25 bp, Homo sapiens
ttgcttagatagtcacgagaacttg

SEQ ID NO: 11255 - DNA, 25 bp, Homo sapiens
tgtggtcctccttatacaagagata

SEQ ID NO: 11256 - DNA, 25 bp, Homo sapiens
cagtgtttattgttaagcctcatta

SEQ ID NO: 11257 - DNA, 25 bp, Homo sapiens
ggacttagtaattcaccgtttattg

SEQ ID NO: 11258 - DNA, 25 bp, Homo sapiens
gccagtatgtcttactttccaaacc

SEQ ID NO: 11259 - DNA, 25 bp, Homo sapiens
agttatgcataatatcccaatttta

SEQ ID NO: 11260 - DNA, 25 bp, Homo sapiens
gtggaggcacaatatatccagctta

SEQ ID NO: 11261 - DNA, 25 bp, Homo sapiens
cagagatcttcctcatgctaccaaa

SEQ ID NO: 11262 - DNA, 25 bp, Homo sapiens
ctctggcactgagaaatggcatcta

SEQ ID NO: 11263 - DNA, 25 bp, Homo sapiens
gctgtggccctttttgcgatacaaa

SEQ ID NO: 11264 - DNA, 25 bp, Homo sapiens
tcttggcatttgcaccgtgatatta

SEQ ID NO: 11265 - DNA, 25 bp, Homo sapiens
ccttgtgggtcttaataaggtcttc

SEQ ID NO: 11266 - DNA, 25 bp, Homo sapiens
tgtcgggaaaactcaaccacctctg

SEQ ID NO: 11267 - DNA, 25 bp, Homo sapiens
gctggcttcattctttcgggatacc

SEQ ID NO: 11268 - DNA, 25 bp, Homo sapiens
ttttgttttgttttggtctatggct

SEQ ID NO: 11269 - DNA, 25 bp, Homo sapiens
ctagtctttaacagtgggcatttgg

SEQ ID NO: 11270 - DNA, 25 bp, Homo sapiens
ccgcggggcttagctattttcttta

SEQ ID NO: 11271 - DNA, 25 bp, Homo sapiens
gggcatcacatttcctgaggtattc

SEQ ID NO: 11272 - DNA, 25 bp, Homo sapiens
agtggctagtcttccaagtcattca

SEQ ID NO: 11273 - DNA, 25 bp, Homo sapiens
tgctgatgccctatttacaatcgga

SEQ ID NO: 11274 - DNA, 25 bp, Homo sapiens
tccctttgggtttagcacgatgagc

SEQ ID NO: 11275 - DNA, 25 bp, Homo sapiens
gccttaagttcaagtaccggtgttc

SEQ ID NO: 11276 - DNA, 25 bp, Homo sapiens
agtctgtagtagttcattgctttac

SEQ ID NO: 11277 - DNA, 25 bp, Homo sapiens
ggcttcctcagccattaggtttgtg

SEQ ID NO: 11278 - DNA, 25 bp, Homo sapiens
aacgaatgtgttttttcctgaatga

SEQ ID NO: 11279 - DNA, 25 bp, Homo sapiens
gttgagataattaagacaggcttcc

SEQ ID NO: 11280 - DNA, 25 bp, Homo sapiens
ggctggtcttagattaaacggatta

SEQ ID NO: 11281 - DNA, 25 bp, Homo sapiens
agccatattgtgtttcgttagcatc

SEQ ID NO: 11282 - DNA, 25 bp, Homo sapiens
tggcagacttggcttagtgagaacc

SEQ ID NO: 11283 - DNA, 25 bp, Homo sapiens
tgacccacatcgttcagctgatagc

SEQ ID NO: 11284 - DNA, 25 bp, Homo sapiens
ccacagttgtcatcttcaagtgatt

SEQ ID NO: 11285 - DNA, 25 bp, Homo sapiens
aggacctctcggcacatacatagta

SEQ ID NO: 11286 - DNA, 25 bp, Homo sapiens
agacccatggtttttattcgttata

SEQ ID NO: 11287 - DNA, 25 bp, Homo sapiens
ctcgtcgataagtattagggcaatg

SEQ ID NO: 11288 - DNA, 25 bp, Homo sapiens
tgagtgctcagctgtagtcctacct

SEQ ID NO: 11289 - DNA, 25 bp, Homo sapiens
cgtgcgccagagagagttaagtatg

SEQ ID NO: 11290 - DNA, 25 bp, Homo sapiens
gacggtgcgcaactctacatgattg

SEQ ID NO: 11291 - DNA, 25 bp, Homo sapiens
tgatacgaggcagaggaaagatttt

SEQ ID NO: 11292 - DNA, 25 bp, Homo sapiens
gtgatttctaagagctttccctaaa

SEQ ID NO: 11293 - DNA, 25 bp, Homo sapiens
gagccctttggcattcatcagaatg

SEQ ID NO: 11294 - DNA, 25 bp, Homo sapiens
ttaatgctgtactagaaccctgctc

SEQ ID NO: 11295 - DNA, 25 bp, Homo sapiens
agctgcaggcgtaatattggatccc

SEQ ID NO: 11296 - DNA, 25 bp, Homo sapiens
gtcgttcaaacttcaggtctgccta

SEQ ID NO: 11297 - DNA, 25 bp, Homo sapiens
tgacctgccgtgatatcgttaaaga

SEQ ID NO: 11298 - DNA, 25 bp, Homo sapiens
ccgccctcctagtttcagttgtgaa

SEQ ID NO: 11299 - DNA, 25 bp, Homo sapiens
gtgcctccttctttgctgtaatttg

SEQ ID NO: 11300 - DNA, 25 bp, Homo sapiens
tgactttgggtctgtgaactacttc

SEQ ID NO: 11301 - DNA, 25 bp, Homo sapiens
gggtaaagttgccttggttccaaaa

SEQ ID NO: 11302 - DNA, 25 bp, Homo sapiens
gatacggtttcccactttcatatga

SEQ ID NO: 11303 - DNA, 25 bp, Homo sapiens
tgactatccctaagccaatctatgg

SEQ ID NO: 11304 - DNA, 25 bp, Homo sapiens
cccgcacaagactgagagttgttta

SEQ ID NO: 11305 - DNA, 25 bp, Homo sapiens
gcatggtttatcacctgaacagatc

SEQ ID NO: 11306 - DNA, 25 bp, Homo sapiens
ccaagacttaagaaaaactgcctag

SEQ ID NO: 11307 - DNA, 25 bp, Homo sapiens
cctcctttaaactggggtgaatttt

SEQ ID NO: 11308 - DNA, 25 bp, Homo sapiens
gagcaggattccttactcatgtatc

SEQ ID NO: 11309 - DNA, 25 bp, Homo sapiens
ctcaaagtgtggttcgaagatcacc

SEQ ID NO: 11310 - DNA, 25 bp, Homo sapiens
tttatagacgagctttggttccacc

SEQ ID NO: 11311 - DNA, 25 bp, Homo sapiens
ggttaccatggcctcggcaattcta

SEQ ID NO: 11312 - DNA, 25 bp, Homo sapiens
ggtgctagactgcaaccctaaaata

SEQ ID NO: 11313 - DNA, 25 bp, Homo sapiens
tgactggccaggacattcttgaatg

SEQ ID NO: 11314 - DNA, 25 bp, Homo sapiens
ctctgtgcctcgctgaggaaaaata

SEQ ID NO: 11315 - DNA, 25 bp, Homo sapiens
cagtcgtctctgatgtggcttatac

SEQ ID NO: 11316 - DNA, 25 bp, Homo sapiens
tctccagggttagctcaaaagtcca

SEQ ID NO: 11317 - DNA, 25 bp, Homo sapiens
atgttctcacaaaactatatttttt

SEQ ID NO: 11318 - DNA, 25 bp, Homo sapiens
cacagcaatgtttcaggagtcataa

SEQ ID NO: 11319 - DNA, 25 bp, Homo sapiens
gggtaggttggccacacaattttcc

SEQ ID NO: 11320 - DNA, 25 bp, Homo sapiens
gtgtacagaaacaactgcacagttg

SEQ ID NO: 11321 - DNA, 25 bp, Homo sapiens
gtctgaagaaactaacactccgata

SEQ ID NO: 11322 - DNA, 25 bp, Homo sapiens
ctcctagggtccaagaaaaattctc

SEQ ID NO: 11323 - DNA, 25 bp, Homo sapiens
tgcccagaaatttcagcatctaaaa

SEQ ID NO: 11324 - DNA, 25 bp, Homo sapiens
agacacaatattttgcaaaacatgt

SEQ ID NO: 11325 - DNA, 25 bp, Homo sapiens
tgggcgccaccaatatagcagtagg

SEQ ID NO: 11326 - DNA, 25 bp, Homo sapiens
cccgccgcagggagaagtttaccat

SEQ ID NO: 11327 - DNA, 25 bp, Homo sapiens
cgctaagtttgcttccgcgcggtga

SEQ ID NO: 11328 - DNA, 25 bp, Homo sapiens
aggccctctctgtagcagtactttg

SEQ ID NO: 11329 - DNA, 25 bp, Homo sapiens
cctacaagtctggagccatcagttc

SEQ ID NO: 11330 - DNA, 25 bp, Homo sapiens
tgtcagtgccaagtaccgaggtgcc

SEQ ID NO: 11331 - DNA, 25 bp, Homo sapiens
ttggtggttcctgccagtaattttc

SEQ ID NO: 11332 - DNA, 25 bp, Homo sapiens
ggaccatagtaaccagccatctgtt

SEQ ID NO: 11333 - DNA, 25 bp, Homo sapiens
tggtccatccctatctctccaggtg

SEQ ID NO: 11334 - DNA, 25 bp, Homo sapiens
cagtgtgggtgctcatattaacagc

SEQ ID NO: 11335 - DNA, 25 bp, Homo sapiens
acctctttgatgcttcttggactta

SEQ ID NO: 11336 - DNA, 25 bp, Homo sapiens
cctcttgggtcatgaacatcctgta

SEQ ID NO: 11337 - DNA, 25 bp, Homo sapiens
ccaggtggctcttctactgactaga

SEQ ID NO: 11338 - DNA, 25 bp, Homo sapiens
ctactggccttacctagggcatccg

SEQ ID NO: 11339 - DNA, 25 bp, Homo sapiens
aagtctcagctttgtcattttcctc

SEQ ID NO: 11340 - DNA, 25 bp, Homo sapiens
ctcttcagtgcctacaaatgttatg

SEQ ID NO: 11341 - DNA, 25 bp, Homo sapiens
tcacttaaggttgggagggttccta

SEQ ID NO: 11342 - DNA, 25 bp, Homo sapiens
cctggggcaatgaggtaccttctga

SEQ ID NO: 11343 - DNA, 25 bp, Homo sapiens
ttgagaaagcatctatgtaattatg

SEQ ID NO: 11344 - DNA, 25 bp, Homo sapiens
cgtgggcagccatttaacctgtgtt

SEQ ID NO: 11345 - DNA, 25 bp, Homo sapiens
tgcgccaggcccaaagtttttaatt

SEQ ID NO: 11346 - DNA, 25 bp, Homo sapiens
atataatgagtatttttaaaggcaa

SEQ ID NO: 11347 - DNA, 25 bp, Homo sapiens
ctggcataaaaatagaagggcaatc

SEQ ID NO: 11348 - DNA, 25 bp, Homo sapiens
ccctcataatatgtccaatggcttt

SEQ ID NO: 11349 - DNA, 25 bp, Homo sapiens
ggccatccctggctctcaatttatt

SEQ ID NO: 11350 - DNA, 25 bp, Homo sapiens
gtcccttgaacctttcagttgtata

SEQ ID NO: 11351 - DNA, 25 bp, Homo sapiens
gcaggaatctatttgaaggccatta

SEQ ID NO: 11352 - DNA, 25 bp, Homo sapiens
cctcatatttttaaagtgctggtca

SEQ ID NO: 11353 - DNA, 25 bp, Homo sapiens
tctcccagctgtaatgatgacatca

SEQ ID NO: 11354 - DNA, 25 bp, Homo sapiens
ccgtactatctgtaggaggattgta

SEQ ID NO: 11355 - DNA, 25 bp, Homo sapiens
ttctgtccgtttctagcattgctta

SEQ ID NO: 11356 - DNA, 25 bp, Homo sapiens
accctgcggatgctatgccctaaga

SEQ ID NO: 11357 - DNA, 25 bp, Homo sapiens
ctggccatacaggaagattttcttg

SEQ ID NO: 11358 - DNA, 25 bp, Homo sapiens
gggaccactgatacattaatgccta

SEQ ID NO: 11359 - DNA, 25 bp, Homo sapiens
tgcgagcatgctgtaaacctgtttg

SEQ ID NO: 11360 - DNA, 25 bp, Homo sapiens
gcatatcgcgtaatactaccttttt

SEQ ID NO: 11361 - DNA, 25 bp, Homo sapiens
caggctgtgtactctgtaggcaatc

SEQ ID NO: 11362 - DNA, 25 bp, Homo sapiens
ggggattcttcctgctgccttcaaa

SEQ ID NO: 11363 - DNA, 25 bp, Homo sapiens
tgtggctccgatatgttatacgcta

SEQ ID NO: 11364 - DNA, 25 bp, Homo sapiens
gtcatgggccataaccacctgtgtc

SEQ ID NO: 11365 - DNA, 25 bp, Homo sapiens
ggcatgcgttctcttccttgtggac

SEQ ID NO: 11366 - DNA, 25 bp, Homo sapiens
ccaggccttcaccagcagagaaatt

SEQ ID NO: 11367 - DNA, 25 bp, Homo sapiens
atattacgattacagggcacaggca

SEQ ID NO: 11368 - DNA, 25 bp, Homo sapiens
ctgtgactttgcaatccctggttta

SEQ ID NO: 11369 - DNA, 25 bp, Homo sapiens
gtgtggccttcagaaatcatccttc

SEQ ID NO: 11370 - DNA, 25 bp, Homo sapiens
aaccacctgttttgggctataaaga

SEQ ID NO: 11371 - DNA, 25 bp, Homo sapiens
catcttttggggtgaacagccttca

SEQ ID NO: 11372 - DNA, 25 bp, Homo sapiens
tgcctgtgccctaaactagatgata

SEQ ID NO: 11373 - DNA, 25 bp, Homo sapiens
tgtgctgtctagtatggatgaacca

SEQ ID NO: 11374 - DNA, 25 bp, Homo sapiens
cctgctatgtgccagccactgtgta

SEQ ID NO: 11375 - DNA, 25 bp, Homo sapiens
gcgctttgttcctgcttagagattc

SEQ ID NO: 11376 - DNA, 25 bp, Homo sapiens
aggcacaggagctatcacaattaca

SEQ ID NO: 11377 - DNA, 25 bp, Homo sapiens
gggtacagtgcacctttacataata

SEQ ID NO: 11378 - DNA, 25 bp, Homo sapiens
ttccaaccgtgcaagtgtttgtttc

SEQ ID NO: 11379 - DNA, 25 bp, Homo sapiens
atttaatatctctggttgccctgta

SEQ ID NO: 11380 - DNA, 25 bp, Homo sapiens
tccagtgtcgccaggaccaagtaca

SEQ ID NO: 11381 - DNA, 25 bp, Homo sapiens
ctccatggtaactggcttataaagc

SEQ ID NO: 11382 - DNA, 25 bp, Homo sapiens
cttgcctttccctagtgagtataca

SEQ ID NO: 11383 - DNA, 25 bp, Homo sapiens
gtgattttctctttataacccagga

SEQ ID NO: 11384 - DNA, 25 bp, Homo sapiens
tcaggtaccagaagtgctcgcagca

SEQ ID NO: 11385 - DNA, 25 bp, Homo sapiens
caatgctgttcatctgggatctttc

SEQ ID NO: 11386 - DNA, 25 bp, Homo sapiens
cttgaggatttgagcaccatgtgga

SEQ ID NO: 11387 - DNA, 25 bp, Homo sapiens
gcagcctttagaaaccctgaagtta

SEQ ID NO: 11388 - DNA, 25 bp, Homo sapiens
aatgttgcctctggtacctgtagta

SEQ ID NO: 11389 - DNA, 25 bp, Homo sapiens
ggtctccattaagaagccatgtatg

SEQ ID NO: 11390 - DNA, 25 bp, Homo sapiens
tctcaggtagagcatagtccttctg

SEQ ID NO: 11391 - DNA, 25 bp, Homo sapiens
gagtgacgtgtcatgtgtggccttg

SEQ ID NO: 11392 - DNA, 25 bp, Homo sapiens
gagtaccgatccctaatctgtgtta

SEQ ID NO: 11393 - DNA, 25 bp, Homo sapiens
tgttcagcagtgtgcccaggattga

SEQ ID NO: 11394 - DNA, 25 bp, Homo sapiens
gtgatggcatagcattactgaaatc

SEQ ID NO: 11395 - DNA, 25 bp, Homo sapiens
tccatggcataaaggtctcaccagc

SEQ ID NO: 11396 - DNA, 25 bp, Homo sapiens
cctaaaggatttcttcaagcacttc

SEQ ID NO: 11397 - DNA, 25 bp, Homo sapiens
ccccttttactattgcatatatcat

SEQ ID NO: 11398 - DNA, 25 bp, Homo sapiens
ggtacctgtacaggctaagaagttt

SEQ ID NO: 11399 - DNA, 25 bp, Homo sapiens
aggctaagaagtttcacaattatag

SEQ ID NO: 11400 - DNA, 25 bp, Homo sapiens
atactgtggtagtctaagatctcta

SEQ ID NO: 11401 - DNA, 25 bp, Homo sapiens
atccttattactgctttgtgggttg

SEQ ID NO: 11402 - DNA, 25 bp, Homo sapiens
tcatctgtccatttaaggaaatgtt

SEQ ID NO: 11403 - DNA, 25 bp, Homo sapiens
cccagctatctaaaccagtgtcttg

SEQ ID NO: 11404 - DNA, 25 bp, Homo sapiens
ggcaggcaactggaggaaaatctta

SEQ ID NO: 11405 - DNA, 25 bp, Homo sapiens
gccaaacctgttgaaccagcactta

SEQ ID NO: 11406 - DNA, 25 bp, Homo sapiens
ggccgtttgccatccagtgagaaca

SEQ ID NO: 11407 - DNA, 25 bp, Homo sapiens
tcagctttggcgacactgtgtcttc

SEQ ID NO: 11408 - DNA, 25 bp, Homo sapiens
tcttgctggatggagccttgaactc

SEQ ID NO: 11409 - DNA, 25 bp, Homo sapiens
accagcatcggagtgtattaagccc

SEQ ID NO: 11410 - DNA, 25 bp, Homo sapiens
gatgctatgaacaactgaccctgga

SEQ ID NO: 11411 - DNA, 25 bp, Homo sapiens
ttcacttaaaaaaaaggaagaattc

SEQ ID NO: 11412 - DNA, 25 bp, Homo sapiens
ggtcagagctggacacttaaaggtg

SEQ ID NO: 11413 - DNA, 25 bp, Homo sapiens
gcccagcagtaagaagcagaatatt

SEQ ID NO: 11414 - DNA, 25 bp, Homo sapiens
ctctttgagagcaaggcagtcactc

SEQ ID NO: 11415 - DNA, 25 bp, Homo sapiens
atccagtgttcagagccgtgagtta

SEQ ID NO: 11416 - DNA, 25 bp, Homo sapiens
gataccctgagagaagctggctttg

SEQ ID NO: 11417 - DNA, 25 bp, Homo sapiens
tgcctctgccctctcctgaagaatg

SEQ ID NO: 11418 - DNA, 25 bp, Homo sapiens
ctcggagtcccagtcattcagaatc

SEQ ID NO: 11419 - DNA, 25 bp, Homo sapiens
agctagagctgcatcctcccgtata

SEQ ID NO: 11420 - DNA, 25 bp, Homo sapiens
tgaccctgcgtgtgtgtagctccac

SEQ ID NO: 11421 - DNA, 25 bp, Homo sapiens
tgccttcgccctgctcagtacttga

SEQ ID NO: 11422 - DNA, 25 bp, Homo sapiens
tggctcctagtccagtgaactgcta

SEQ ID NO: 11423 - DNA, 25 bp, Homo sapiens
ggcctactggctttgcaccttcatg

SEQ ID NO: 11424 - DNA, 25 bp, Homo sapiens
ttcccaggctagcagaaccagcgtg

SEQ ID NO: 11425 - DNA, 25 bp, Homo sapiens
ttgagtgcggacagggccagggact

SEQ ID NO: 11426 - DNA, 25 bp, Homo sapiens
ggtcagtctccatttgtttggcaaa

SEQ ID NO: 11427 - DNA, 25 bp, Homo sapiens
ggggactatcacatctgcctgcaga

SEQ ID NO: 11428 - DNA, 25 bp, Homo sapiens
gccctaccgtgcaggacttcttttg

SEQ ID NO: 11429 - DNA, 25 bp, Homo sapiens
atctagcatggccttggggaacatc

SEQ ID NO: 11430 - DNA, 25 bp, Homo sapiens
tcgccacttcactggggagaaaagc

SEQ ID NO: 11431 - DNA, 25 bp, Homo sapiens
gcctctgctttcctgtgtgaccttg

SEQ ID NO: 11432 - DNA, 25 bp, Homo sapiens
tgttcccaggaccacagatcatgtg

SEQ ID NO: 11433 - DNA, 25 bp, Homo sapiens
ctacctggggctcaagaaagaacta

SEQ ID NO: 11434 - DNA, 25 bp, Homo sapiens
cagtggccatgtgtcctaaatctca

SEQ ID NO: 11435 - DNA, 25 bp, Homo sapiens
ctcacctgtgtatgggtcagacctc

SEQ ID NO: 11436 - DNA, 25 bp, Homo sapiens
aacaggggtacagctccaagactcc

SEQ ID NO: 11437 - DNA, 25 bp, Homo sapiens
ctgccagttctgaaaaggacacttc

SEQ ID NO: 11438 - DNA, 25 bp, Homo sapiens
ctagagtcctggtcatcgtgtcatc

SEQ ID NO: 11439 - DNA, 25 bp, Homo sapiens
ctccagggcccagcatagtagcttg

SEQ ID NO: 11440 - DNA, 25 bp, Homo sapiens
tggcccatctgtttcctggtcagga

SEQ ID NO: 11441 - DNA, 25 bp, Homo sapiens
gtgggcccttcacaatccctactga

SEQ ID NO: 11442 - DNA, 25 bp, Homo sapiens
ctgtgctctccttgccatgtgtcta

SEQ ID NO: 11443 - DNA, 25 bp, Homo sapiens
cgctgtcctgagtcctccgcagatt

SEQ ID NO: 11444 - DNA, 25 bp, Homo sapiens
cctccgcatagcagctgtggcctta

SEQ ID NO: 11445 - DNA, 25 bp, Homo sapiens
ggcaggtccaaatgctccacatgtt

SEQ ID NO: 11446 - DNA, 25 bp, Homo sapiens
agggtctagcttccatcctggggca

SEQ ID NO: 11447 - DNA, 25 bp, Homo sapiens
tgggccagcctccagctactgtaac

SEQ ID NO: 11448 - DNA, 25 bp, Homo sapiens
tgccctccttactagccagacatta

SEQ ID NO: 11449 - DNA, 25 bp, Homo sapiens
ccttgcctgttctgaggagtcatta

SEQ ID NO: 11450 - DNA, 25 bp, Homo sapiens
gaactccctggctttctggtataaa

SEQ ID NO: 11451 - DNA, 25 bp, Homo sapiens
tgtgccactacaactgaagctcttt

SEQ ID NO: 11452 - DNA, 25 bp, Homo sapiens
ctccgtgtgagggatgactgctttt

SEQ ID NO: 11453 - DNA, 25 bp, Homo sapiens
tttagctagcatggcaaacactgta

SEQ ID NO: 11454 - DNA, 25 bp, Homo sapiens
ctccaggactttttgcacataaggc

SEQ ID NO: 11455 - DNA, 25 bp, Homo sapiens
ggagtgatttaggatgtccccagat

SEQ ID NO: 11456 - DNA, 25 bp, Homo sapiens
cctgggtccttttgtacacagcata

SEQ ID NO: 11457 - DNA, 25 bp, Homo sapiens
ctgcgcctggaatagatacgggtaa

SEQ ID NO: 11458 - DNA, 25 bp, Homo sapiens
ggcctcctacaaggcagtcctcaga

SEQ ID NO: 11459 - DNA, 25 bp, Homo sapiens
ccctctagatgtatgcggctccata

SEQ ID NO: 11460 - DNA, 25 bp, Homo sapiens
ctgctgctgctgaccaacctgaata

SEQ ID NO: 11461 - DNA, 25 bp, Homo sapiens
tactatgcataaaacctcaaggctc

SEQ ID NO: 11462 - DNA, 25 bp, Homo sapiens
gcccagccttgagaatcagatttca

SEQ ID NO: 11463 - DNA, 25 bp, Homo sapiens
ggtaacacttgcctgactgggacaa

SEQ ID NO: 11464 - DNA, 25 bp, Homo sapiens
ccttggagcccgagaaacccttggt

SEQ ID NO: 11465 - DNA, 25 bp, Homo sapiens
ggtccctcaaacctagtgctcagtt

SEQ ID NO: 11466 - DNA, 25 bp, Homo sapiens
gctggctatgatctccgtcctgtta

SEQ ID NO: 11467 - DNA, 25 bp, Homo sapiens
ggaaagcctcttcctgtcaaatgga

SEQ ID NO: 11468 - DNA, 25 bp, Homo sapiens
tgtgtgaaacacaaaacctttaatg

SEQ ID NO: 11469 - DNA, 25 bp, Homo sapiens
gctgtgatggctctggcttactata

SEQ ID NO: 11470 - DNA, 25 bp, Homo sapiens
tctcaggtaaaaggtccaggagttg

SEQ ID NO: 11471 - DNA, 25 bp, Homo sapiens
tcatgtggcctctctgttgctaatc

SEQ ID NO: 11472 - DNA, 25 bp, Homo sapiens
agttctttgatatcttctccttgga

SEQ ID NO: 11473 - DNA, 25 bp, Homo sapiens
tgtgttactctgcaacccaggaatg

SEQ ID NO: 11474 - DNA, 25 bp, Homo sapiens
gcaccacaagggttcagattaccta

SEQ ID NO: 11475 - DNA, 25 bp, Homo sapiens
cccaagtccaatcggcatggttttt

SEQ ID NO: 11476 - DNA, 25 bp, Homo sapiens
cgagccctgggcctcaggcttcaat

SEQ ID NO: 11477 - DNA, 25 bp, Homo sapiens
gcctcctttatgagagtggccaaga

SEQ ID NO: 11478 - DNA, 25 bp, Homo sapiens
tctgcagcctcttccttgcccgggg

SEQ ID NO: 11479 - DNA, 25 bp, Homo sapiens
cctgctcaggacactttctggggtc

SEQ ID NO: 11480 - DNA, 25 bp, Homo sapiens
ggcctctgtggggaataaaatatta

SEQ ID NO: 11481 - DNA, 25 bp, Homo sapiens
gtgtgtccacatcttgcttctaagg

SEQ ID NO: 11482 - DNA, 25 bp, Homo sapiens
cactgggcgcttcgggaagaattta

SEQ ID NO: 11483 - DNA, 25 bp, Homo sapiens
gggaacagctgcttaacctggcttg

SEQ ID NO: 11484 - DNA, 25 bp, Homo sapiens
ggttctgcatcttaagccttccttg

SEQ ID NO: 11485 - DNA, 25 bp, Homo sapiens
ctgctgctgctgaccaacctgaata

SEQ ID NO: 11486 - DNA, 25 bp, Homo sapiens
tactatgcataaaacctcaaggctc

SEQ ID NO: 11487 - DNA, 25 bp, Homo sapiens
tctaaatcttcttcaacatcatgtg

SEQ ID NO: 11488 - DNA, 25 bp, Homo sapiens
agggttcttgtaagtattaaccatt

SEQ ID NO: 11489 - DNA, 25 bp, Homo sapiens
cccttgcctgactgggacaataatt

SEQ ID NO: 11490 - DNA, 25 bp, Homo sapiens
ccttggagcccgagaaacctttggt

SEQ ID NO: 11491 - DNA, 25 bp, Homo sapiens
tgtccctgccgctccaaaactgaga

SEQ ID NO: 11492 - DNA, 25 bp, Homo sapiens
cttggcctcgaatggtatctttgtc

SEQ ID NO: 11493 - DNA, 25 bp, Homo sapiens
ttgcgggtatcagcactgaactatg

SEQ ID NO: 11494 - DNA, 25 bp, Homo sapiens
tcagtcatcccgaggttagttcttc

SEQ ID NO: 11495 - DNA, 25 bp, Homo sapiens
tgctgtcgtcatcaacggctctgtg

SEQ ID NO: 11496 - DNA, 25 bp, Homo sapiens
tcatgtggcctctctgttgctaatc

SEQ ID NO: 11497 - DNA, 25 bp, Homo sapiens
agttctttgatatcttctccttgga

SEQ ID NO: 11498 - DNA, 25 bp, Homo sapiens
tgtgttactctgcaacccaggaatg

SEQ ID NO: 11499 - DNA, 25 bp, Homo sapiens
gcatcacaggggttcagatcaccta

SEQ ID NO: 11500 - DNA, 25 bp, Homo sapiens
atcatgaataattttaaagggaacc

SEQ ID NO: 11501 - DNA, 25 bp, Homo sapiens
atctcaggggctccaggcctcaata

SEQ ID NO: 11502 - DNA, 25 bp, Homo sapiens
gcctcctttatgagagtggccaaga

SEQ ID NO: 11503 - DNA, 25 bp, Homo sapiens
tctgcagcctcttccttgcccgggg

SEQ ID NO: 11504 - DNA, 25 bp, Homo sapiens
catgggccttatcccgggtttctta

SEQ ID NO: 11505 - DNA, 25 bp, Homo sapiens
ctgccaaaccagtatgatttctttt

SEQ ID NO: 11506 - DNA, 25 bp, Homo sapiens
tctctgcattagcttcggggtgtca

SEQ ID NO: 11507 - DNA, 25 bp, Homo sapiens
agcgtcctttcctgccctagatttc

SEQ ID NO: 11508 - DNA, 25 bp, Homo sapiens
gcacggcaggtagctcccacctata

SEQ ID NO: 11509 - DNA, 25 bp, Homo sapiens
ccttccatggagcccatgaaaggct

SEQ ID NO: 11510 - DNA, 25 bp, Homo sapiens
ccctggaacccgagaagcctttttg

SEQ ID NO: 11511 - DNA, 25 bp, Homo sapiens
gagatacctttctctttttgtagat

SEQ ID NO: 11512 - DNA, 25 bp, Homo sapiens
ggcaacattcccaactcccattagg

SEQ ID NO: 11513 - DNA, 25 bp, Homo sapiens
tgcacagttggcttggcactcactc

SEQ ID NO: 11514 - DNA, 25 bp, Homo sapiens
gagcagggacttcaccaatgtttga

SEQ ID NO: 11515 - DNA, 25 bp, Homo sapiens
tggcaggtgctcctaaacatgcttc

SEQ ID NO: 11516 - DNA, 25 bp, Homo sapiens
tccagctagctgaagaagtgtgatc

SEQ ID NO: 11517 - DNA, 25 bp, Homo sapiens
actcagaatatacttcaactcagca

SEQ ID NO: 11518 - DNA, 25 bp, Homo sapiens
tcttggtttgaatatatttcacatt

SEQ ID NO: 11519 - DNA, 25 bp, Homo sapiens
ttaacccaagttctgcaaaggcatg

SEQ ID NO: 11520 - DNA, 25 bp, Homo sapiens
tcccagcgtatggagaatctgaatt

SEQ ID NO: 11521 - DNA, 25 bp, Homo sapiens
tcagtttcctattctctgcctataa

SEQ ID NO: 11522 - DNA, 25 bp, Homo sapiens
gttggcacccaagatcaaaggctta

SEQ ID NO: 11523 - DNA, 25 bp, Homo sapiens
aggggaccttttgttgcatgactac

SEQ ID NO: 11524 - DNA, 25 bp, Homo sapiens
tcctgtaccaggttggaaatcattc

SEQ ID NO: 11525 - DNA, 25 bp, Homo sapiens
cacaggccaggcaagaaatactttg

SEQ ID NO: 11526 - DNA, 25 bp, Homo sapiens
ccgtcttacgcatggttctgaacta

SEQ ID NO: 11527 - DNA, 25 bp, Homo sapiens
ttcagagtagctgctaacagccaga

SEQ ID NO: 11528 - DNA, 25 bp, Homo sapiens
tcatattagaggtgtccagtagccc

SEQ ID NO: 11529 - DNA, 25 bp, Homo sapiens
tgccactctggggtgcagaactttc

SEQ ID NO: 11530 - DNA, 25 bp, Homo sapiens
cagtggttccaagaaatgcctttta

SEQ ID NO: 11531 - DNA, 25 bp, Homo sapiens
cccgaaggagggtattttagagtta

SEQ ID NO: 11532 - DNA, 25 bp, Homo sapiens
tgagggctagcgtgaacaaaatacc

SEQ ID NO: 11533 - DNA, 25 bp, Homo sapiens
cacagttctgagtgcctagtggcta

SEQ ID NO: 11534 - DNA, 25 bp, Homo sapiens
tggcgaacagtctcagcaccctatg

SEQ ID NO: 11535 - DNA, 25 bp, Homo sapiens
ctggcggacttagcaagatgtcatc

SEQ ID NO: 11536 - DNA, 25 bp, Homo sapiens
gccaccgcctggaattctgtataat

SEQ ID NO: 11537 - DNA, 25 bp, Homo sapiens
ccatggctttgttttgaggactcta

SEQ ID NO: 11538 - DNA, 25 bp, Homo sapiens
tagcctgggctgaaaatactgtttc

SEQ ID NO: 11539 - DNA, 25 bp, Homo sapiens
ggggatcttccttctcttttttaac

SEQ ID NO: 11540 - DNA, 25 bp, Homo sapiens
cagtggcttctctctgggtctcata

SEQ ID NO: 11541 - DNA, 25 bp, Homo sapiens
tgaagcctttagactgaagattctc

SEQ ID NO: 11542 - DNA, 25 bp, Homo sapiens
tcacagaagactgaattagtagata

SEQ ID NO: 11543 - DNA, 25 bp, Homo sapiens
cgctggagtcctagaacattattga

SEQ ID NO: 11544 - DNA, 25 bp, Homo sapiens
agaggccagtgggttctgtttcaca

SEQ ID NO: 11545 - DNA, 25 bp, Homo sapiens
tgcctagtatgtacgtgacaccatc

SEQ ID NO: 11546 - DNA, 25 bp, Homo sapiens
agccattagacattggatgaagtcc

SEQ ID NO: 11547 - DNA, 25 bp, Homo sapiens
tattatctgaaagattaaataaatg

SEQ ID NO: 11548 - DNA, 25 bp, Homo sapiens
cctggcactgggtaatctatggtca

SEQ ID NO: 11549 - DNA, 25 bp, Homo sapiens
gctagatcgtttatcgtgagacacc

SEQ ID NO: 11550 - DNA, 25 bp, Homo sapiens
ctgggccattagtcctcattgcttc

SEQ ID NO: 11551 - DNA, 25 bp, Homo sapiens
caggggttcagccaattatttccaa

SEQ ID NO: 11552 - DNA, 25 bp, Homo sapiens
agccttcttgcgagaactggttttc

SEQ ID NO: 11553 - DNA, 25 bp, Homo sapiens
ggtcccacttggttggaaaatcatg

SEQ ID NO: 11554 - DNA, 25 bp, Homo sapiens
tggtcttctgctcagtccctgattg

SEQ ID NO: 11555 - DNA, 25 bp, Homo sapiens
gaaacagtagagaaagtttttcttg

SEQ ID NO: 11556 - DNA, 25 bp, Homo sapiens
actttactccttttggcagcccata

SEQ ID NO: 11557 - DNA, 25 bp, Homo sapiens
cagctcacgtactggactgatcacc

SEQ ID NO: 11558 - DNA, 25 bp, Homo sapiens
ggctaactgggacatgcgcatcaaa

SEQ ID NO: 11559 - DNA, 25 bp, Homo sapiens
cacggcagcttgcatgctaggaata

SEQ ID NO: 11560 - DNA, 25 bp, Homo sapiens
gccctggctctgaaaggattttaac

SEQ ID NO: 11561 - DNA, 25 bp, Homo sapiens
tccctgaggccactgtttaaacatc

SEQ ID NO: 11562 - DNA, 25 bp, Homo sapiens
gcccttcgtaactgtgagtccattc

SEQ ID NO: 11563 - DNA, 25 bp, Homo sapiens
gcccagccaggtatctgagcattta

SEQ ID NO: 11564 - DNA, 25 bp, Homo sapiens
gtaaaaaccaataacaataactgag

SEQ ID NO: 11565 - DNA, 25 bp, Homo sapiens
tatggacaactctttggggccaaaa

SEQ ID NO: 11566 - DNA, 25 bp, Homo sapiens
tcccagtggtttttaaaaaatcatt

SEQ ID NO: 11567 - DNA, 25 bp, Homo sapiens
tggcactgggtgtcatagaacttct

SEQ ID NO: 11568 - DNA, 25 bp, Homo sapiens
cgtggccaccgtttctgaggaatta

SEQ ID NO: 11569 - DNA, 25 bp, Homo sapiens
agggccactgtttggactttataca

SEQ ID NO: 11570 - DNA, 25 bp, Homo sapiens
tactgtgcactaccttgtatttgtc

SEQ ID NO: 11571 - DNA, 25 bp, Homo sapiens
ccctatggtaccacaatgccatgtt

SEQ ID NO: 11572 - DNA, 25 bp, Homo sapiens
aagggagccctattgaagccaaata

SEQ ID NO: 11573 - DNA, 25 bp, Homo sapiens
ctatttttatgtctaaatgaactga

SEQ ID NO: 11574 - DNA, 25 bp, Homo sapiens
taaccatttgggaagtcgcctcagc

SEQ ID NO: 11575 - DNA, 25 bp, Homo sapiens
agcttggcaagcaccctgagagttc

SEQ ID NO: 11576 - DNA, 25 bp, Homo sapiens
ttctaaaggctacccaaggctgtgc

SEQ ID NO: 11577 - DNA, 25 bp, Homo sapiens
tcctaggggtgacagttaatgttcc

SEQ ID NO: 11578 - DNA, 25 bp, Homo sapiens
gggcaggggttttttgtcccacaca

SEQ ID NO: 11579 - DNA, 25 bp, Homo sapiens
tggccattcctatgatcaccacttg

SEQ ID NO: 11580 - DNA, 25 bp, Homo sapiens
tggactttgagaacactagactggg

SEQ ID NO: 11581 - DNA, 25 bp, Homo sapiens
tagtgctctgcatctttctctgtgg

SEQ ID NO: 11582 - DNA, 25 bp, Homo sapiens
caggggaggaaaaacgtgtacttta

SEQ ID NO: 11583 - DNA, 25 bp, Homo sapiens
ctctctctgggactgggaatattga

SEQ ID NO: 11584 - DNA, 25 bp, Homo sapiens
ctgtctgggttctctccgattgtta

SEQ ID NO: 11585 - DNA, 25 bp, Homo sapiens
ggtcagtgggtatccagatttctca

SEQ ID NO: 11586 - DNA, 25 bp, Homo sapiens
ggtgtcaggttatagcctctccaaa

SEQ ID NO: 11587 - DNA, 25 bp, Homo sapiens
cccttccatggacggattttcatcg

SEQ ID NO: 11588 - DNA, 25 bp, Homo sapiens
tgtgtgaccttctctcaaaaccttg

SEQ ID NO: 11589 - DNA, 25 bp, Homo sapiens
aggatttgccacaaccctatgatga

SEQ ID NO: 11590 - DNA, 25 bp, Homo sapiens
ttcaagggctggtctcaagtacatc

SEQ ID NO: 11591 - DNA, 25 bp, Homo sapiens
tctgtgcccaactcagtacctgatg

SEQ ID NO: 11592 - DNA, 25 bp, Homo sapiens
tagggtttcttccatgtagcagggc

SEQ ID NO: 11593 - DNA, 25 bp, Homo sapiens
gtcctacacatttttccggggttga

SEQ ID NO: 11594 - DNA, 25 bp, Homo sapiens
ttgacgtccttgctagccacttctc

SEQ ID NO: 11595 - DNA, 25 bp, Homo sapiens
gctaccgactgacctgcatgacatc

SEQ ID NO: 11596 - DNA, 25 bp, Homo sapiens
gggtagactgaccactccctagtta

SEQ ID NO: 11597 - DNA, 25 bp, Homo sapiens
tggctgtccctctgtctgaatccta

SEQ ID NO: 11598 - DNA, 25 bp, Homo sapiens
ctgaacatctttaggcagtaacttc

SEQ ID NO: 11599 - DNA, 25 bp, Homo sapiens
tatattgggaaacgtggcttacatc

SEQ ID NO: 11600 - DNA, 25 bp, Homo sapiens
ggagcctgaggcctatatctttgca

SEQ ID NO: 11601 - DNA, 25 bp, Homo sapiens
caggagggcccttccaaagccttta

SEQ ID NO: 11602 - DNA, 25 bp, Homo sapiens
ttctaacggcatcctggaaaggttc

SEQ ID NO: 11603 - DNA, 25 bp, Homo sapiens
cctgcctctatctggccatattttg

SEQ ID NO: 11604 - DNA, 25 bp, Homo sapiens
caggacagttctttatgtgccaata

SEQ ID NO: 11605 - DNA, 25 bp, Homo sapiens
ccatcattctttgtggggcattcaa

SEQ ID NO: 11606 - DNA, 25 bp, Homo sapiens
tgcctgagctattcgttaccttgta

SEQ ID NO: 11607 - DNA, 25 bp, Homo sapiens
cttctgtgtaccctgagattgtgtc

SEQ ID NO: 11608 - DNA, 25 bp, Homo sapiens
cccaggcagctgtatactgctttca

SEQ ID NO: 11609 - DNA, 25 bp, Homo sapiens
tgaagcagctgaccatgggaagacc

SEQ ID NO: 11610 - DNA, 25 bp, Homo sapiens
ctatccactgacaaggggtttgcta

SEQ ID NO: 11611 - DNA, 25 bp, Homo sapiens
gtaataatggcatgaaagcaaagct

SEQ ID NO: 11612 - DNA, 25 bp, Homo sapiens
ccagctaagctttccagaatgagtc

SEQ ID NO: 11613 - DNA, 25 bp, Homo sapiens
tcgccactgggagcaggataacatg

SEQ ID NO: 11614 - DNA, 25 bp, Homo sapiens
ctggcccagcttactcttagttatg

SEQ ID NO: 11615 - DNA, 25 bp, Homo sapiens
ggctgtctctcacctcctcatgatt

SEQ ID NO: 11616 - DNA, 25 bp, Homo sapiens
tcattgaagctgaggtgccacaacc

SEQ ID NO: 11617 - DNA, 25 bp, Homo sapiens
tggcaccagagaaattgggcattgc

SEQ ID NO: 11618 - DNA, 25 bp, Homo sapiens
ttcaatattcaatatatattcaatg

SEQ ID NO: 11619 - DNA, 25 bp, Homo sapiens
ggaccagttcgttgccctacacaaa

SEQ ID NO: 11620 - DNA, 25 bp, Homo sapiens
tgggcattcacctgtttcctgatta

SEQ ID NO: 11621 - DNA, 25 bp, Homo sapiens
cacctcatgcctgggaagatacata

SEQ ID NO: 11622 - DNA, 25 bp, Homo sapiens
ttggcagccacactcaggaaatttg

SEQ ID NO: 11623 - DNA, 25 bp, Homo sapiens
gagctgggccttgcaaaatttaata

SEQ ID NO: 11624 - DNA, 25 bp, Homo sapiens
taagtatgacaaaaggagatgccta

SEQ ID NO: 11625 - DNA, 25 bp, Homo sapiens
ggctcatgtcattccctttgggctg

SEQ ID NO: 11626 - DNA, 25 bp, Homo sapiens
catgcttcgtgctgttgccaaatta

SEQ ID NO: 11627 - DNA, 25 bp, Homo sapiens
catactgaacaaatgaatttgatga

SEQ ID NO: 11628 - DNA, 25 bp, Homo sapiens
gccagccaaagtgaagcagatgttt

SEQ ID NO: 11629 - DNA, 25 bp, Homo sapiens
ctcagccagtggtttgattctttca

SEQ ID NO: 11630 - DNA, 25 bp, Homo sapiens
cccgtgacctagaaaagggttgtta

SEQ ID NO: 11631 - DNA, 25 bp, Homo sapiens
ggaaccatataaccctcggcacctg

SEQ ID NO: 11632 - DNA, 25 bp, Homo sapiens
ggccacgttatcatacttggaagca

SEQ ID NO: 11633 - DNA, 25 bp, Homo sapiens
tgcatgttcttgactttccaattta

SEQ ID NO: 11634 - DNA, 25 bp, Homo sapiens
gtttgatcatgccacaccactgctc

SEQ ID NO: 11635 - DNA, 25 bp, Homo sapiens
tggactagcatttgtggtaacatta

SEQ ID NO: 11636 - DNA, 25 bp, Homo sapiens
gggagaaaagatataccactgtagg

SEQ ID NO: 11637 - DNA, 25 bp, Homo sapiens
gatatatcatagttgcatagaatag

SEQ ID NO: 11638 - DNA, 25 bp, Homo sapiens
tttgtgccttcccatgtgagtgcta

SEQ ID NO: 11639 - DNA, 25 bp, Homo sapiens
cttggaattcagctccctaggttgc

SEQ ID NO: 11640 - DNA, 25 bp, Homo sapiens
cccggcattctctggcaggagtttg

SEQ ID NO: 11641 - DNA, 25 bp, Homo sapiens
cctcaatacgaaggagttctctgtc

SEQ ID NO: 11642 - DNA, 25 bp, Homo sapiens
gacccaggctgttcttgtcttgtta

SEQ ID NO: 11643 - DNA, 25 bp, Homo sapiens
cctgaagctctggtagcccaatttc

SEQ ID NO: 11644 - DNA, 25 bp, Homo sapiens
gctacaaaggtgcaaagtgacattc

SEQ ID NO: 11645 - DNA, 25 bp, Homo sapiens
gacaatatgcttgacttttacaata

SEQ ID NO: 11646 - DNA, 25 bp, Homo sapiens
ctgaagacttgctcggacctgaaaa

SEQ ID NO: 11647 - DNA, 25 bp, Homo sapiens
cagtgccctgaacgtagccaagatc

SEQ ID NO: 11648 - DNA, 25 bp, Homo sapiens
aggcagagctcaagttttccatgga

SEQ ID NO: 11649 - DNA, 25 bp, Homo sapiens
atgggtgatcctcaactgaagtttg

SEQ ID NO: 11650 - DNA, 25 bp, Homo sapiens
gggagcctctgaccaagtgctaatg

SEQ ID NO: 11651 - DNA, 25 bp, Homo sapiens
agtagtcctgtggttcattcaaaga

SEQ ID NO: 11652 - DNA, 25 bp, Homo sapiens
cccttaatacgttcttaaataaatt

SEQ ID NO: 11653 - DNA, 25 bp, Homo sapiens
gacttgactgacctttgcaccctga

SEQ ID NO: 11654 - DNA, 25 bp, Homo sapiens
ttatgccttggaaaaccaccttttg

SEQ ID NO: 11655 - DNA, 25 bp, Homo sapiens
ccagagtgagcctattcaagctgta

SEQ ID NO: 11656 - DNA, 25 bp, Homo sapiens
tggtgatttccagacgctgcttgct

SEQ ID NO: 11657 - DNA, 25 bp, Homo sapiens
gactgatttccagcttctgcagaga

SEQ ID NO: 11658 - DNA, 25 bp, Homo sapiens
gagtagcttctaggggcaatgtgca

SEQ ID NO: 11659 - DNA, 25 bp, Homo sapiens
ctttctggtggtgtttgtgagcccg

SEQ ID NO: 11660 - DNA, 25 bp, Homo sapiens
accaagagcatgttccagaggacca

SEQ ID NO: 11661 - DNA, 25 bp, Homo sapiens
accgaagtgtttcaagtggatctca

SEQ ID NO: 11662 - DNA, 25 bp, Homo sapiens
aagagagctgggttattttccatta

SEQ ID NO: 11663 - DNA, 25 bp, Homo sapiens
aatgattcccaagactttgcctagg

SEQ ID NO: 11664 - DNA, 25 bp, Homo sapiens
aaccgtttgattcagagattgcctc

SEQ ID NO: 11665 - DNA, 25 bp, Homo sapiens
ttttccctgggatgccctggagata

SEQ ID NO: 11666 - DNA, 25 bp, Homo sapiens
cctagccaaggcaagatgaatctga

SEQ ID NO: 11667 - DNA, 25 bp, Homo sapiens
tggggaatagtagaccattggtttc

SEQ ID NO: 11668 - DNA, 25 bp, Homo sapiens
ccctgaagctccatggtgcctgtta

SEQ ID NO: 11669 - DNA, 25 bp, Homo sapiens
tgcaggttcagagtctcccagagta

SEQ ID NO: 11670 - DNA, 25 bp, Homo sapiens
ctccacctgagattttagaatactg

SEQ ID NO: 11671 - DNA, 25 bp, Homo sapiens
gtgtagtctgccaccatcggcttga

SEQ ID NO: 11672 - DNA, 25 bp, Homo sapiens
catttgggtctcttgtgcagtcaca

SEQ ID NO: 11673 - DNA, 25 bp, Homo sapiens
gtccctgagtgggtttgccattctc

SEQ ID NO: 11674 - DNA, 25 bp, Homo sapiens
ggagtgggctcttcatttttctaca

SEQ ID NO: 11675 - DNA, 25 bp, Homo sapiens
ttggaggcccaacacaaagagttca

SEQ ID NO: 11676 - DNA, 25 bp, Homo sapiens
ggtgctttccctaagcagtcctgga

SEQ ID NO: 11677 - DNA, 25 bp, Homo sapiens
ataattccctgcgtaggcatatagg

SEQ ID NO: 11678 - DNA, 25 bp, Homo sapiens
ccttggcccttgaccttggatttga

SEQ ID NO: 11679 - DNA, 25 bp, Homo sapiens
aggctgttttgctttgggtactgac

SEQ ID NO: 11680 - DNA, 25 bp, Homo sapiens
tctggacctttctttggaagcaatc

SEQ ID NO: 11681 - DNA, 25 bp, Homo sapiens
agggtttctgtccatcagcttgagc

SEQ ID NO: 11682 - DNA, 25 bp, Homo sapiens
ctctgatgcattctgggtcacacta

SEQ ID NO: 11683 - DNA, 25 bp, Homo sapiens
gcagtggaatttcacccagccttga

SEQ ID NO: 11684 - DNA, 25 bp, Homo sapiens
tagaaaatatcaacaacaacaaaaa

SEQ ID NO: 11685 - DNA, 25 bp, Homo sapiens
caactgggagttaagcctgctttta

SEQ ID NO: 11686 - DNA, 25 bp, Homo sapiens
accaggctgactatcctagaggaca

SEQ ID NO: 11687 - DNA, 25 bp, Homo sapiens
ggtgccttctatatagcctcatgtg

SEQ ID NO: 11688 - DNA, 25 bp, Homo sapiens
cctgaggtgcttgacactttaaata

SEQ ID NO: 11689 - DNA, 25 bp, Homo sapiens
tcaggatttttggaggggcacttca

SEQ ID NO: 11690 - DNA, 25 bp, Homo sapiens
tatctatctcagagaatgttggtat

SEQ ID NO: 11691 - DNA, 25 bp, Homo sapiens
caggaggggcttgtctttaaaaaac

SEQ ID NO: 11692 - DNA, 25 bp, Homo sapiens
gaggcgccttctcaatgactccatc

SEQ ID NO: 11693 - DNA, 25 bp, Homo sapiens
catcctctctcttcgggaaatcaca

SEQ ID NO: 11694 - DNA, 25 bp, Homo sapiens
taggtaccacactgactgcaagagc

SEQ ID NO: 11695 - DNA, 25 bp, Homo sapiens
cagtacttccttttcgcagccgtga

SEQ ID NO: 11696 - DNA, 25 bp, Homo sapiens
tcattggtctgtgctccagcctgtc

SEQ ID NO: 11697 - DNA, 25 bp, Homo sapiens
cgggttttccttacggtggcttata

SEQ ID NO: 11698 - DNA, 25 bp, Homo sapiens
cttgggtcctaagaacattcatgtc

SEQ ID NO: 11699 - DNA, 25 bp, Homo sapiens
ttactgtatatgaagccaactggca

SEQ ID NO: 11700 - DNA, 25 bp, Homo sapiens
ctaactggttgagcagttacttatt

SEQ ID NO: 11701 - DNA, 25 bp, Homo sapiens
actggcccaagaagaaaagatctgc

SEQ ID NO: 11702 - DNA, 25 bp, Homo sapiens
ggctcagtctgctcactttatgatc

SEQ ID NO: 11703 - DNA, 25 bp, Homo sapiens
tatggatagataaacagagagcttc

SEQ ID NO: 11704 - DNA, 25 bp, Homo sapiens
ggcccgctttctctttcaggacaca

SEQ ID NO: 11705 - DNA, 25 bp, Homo sapiens
agggcctttctgttcggagtttttc

SEQ ID NO: 11706 - DNA, 25 bp, Homo sapiens
agtagaccttctcccttgtcactga

SEQ ID NO: 11707 - DNA, 25 bp, Homo sapiens
gagtgccactgagctattttgccaa

SEQ ID NO: 11708 - DNA, 25 bp, Homo sapiens
tgcagactttacatgacccagaggg

SEQ ID NO: 11709 - DNA, 25 bp, Homo sapiens
cctcctgggaactggcctagtaaga

SEQ ID NO: 11710 - DNA, 25 bp, Homo sapiens
gctctcggagtcatctatatatata

SEQ ID NO: 11711 - DNA, 25 bp, Homo sapiens
tgctttggcaaaggtgacatcacta

SEQ ID NO: 11712 - DNA, 25 bp, Homo sapiens
ttctggagccactctcttgacatgg

SEQ ID NO: 11713 - DNA, 25 bp, Homo sapiens
gctctctttgcaggcttagatttta

SEQ ID NO: 11714 - DNA, 25 bp, Homo sapiens
gctggcacagaaccttgaagaccta

SEQ ID NO: 11715 - DNA, 25 bp, Homo sapiens
agcctcagatgcgtgatggtttatc

SEQ ID NO: 11716 - DNA, 25 bp, Homo sapiens
cgctccgcctccctggatgaaattg

SEQ ID NO: 11717 - DNA, 25 bp, Homo sapiens
ccctgggataatctggcatcagttt

SEQ ID NO: 11718 - DNA, 25 bp, Homo sapiens
gttagttcacatagcagggccttta

SEQ ID NO: 11719 - DNA, 25 bp, Homo sapiens
gcctcacgtttgttgttgcattaga

SEQ ID NO: 11720 - DNA, 25 bp, Homo sapiens
gaggtccctcagtcaatgtcaagta

SEQ ID NO: 11721 - DNA, 25 bp, Homo sapiens
tttagagggcaccaccactggcatc

SEQ ID NO: 11722 - DNA, 25 bp, Homo sapiens
ctggtctccactgctgcttcagcta

SEQ ID NO: 11723 - DNA, 25 bp, Homo sapiens
tctggccaaattgaaagtgctgctc

SEQ ID NO: 11724 - DNA, 25 bp, Homo sapiens
gcctctgagttcctgcacaatgcaa

SEQ ID NO: 11725 - DNA, 25 bp, Homo sapiens
gactggtgatagctaagatgactcc

SEQ ID NO: 11726 - DNA, 25 bp, Homo sapiens
ctccagcgttttgggaccatccatc

SEQ ID NO: 11727 - DNA, 25 bp, Homo sapiens
ccaagtgtcccattaagtaaagtca

SEQ ID NO: 11728 - DNA, 25 bp, Homo sapiens
cctgtgcactgttgatggctgtact

SEQ ID NO: 11729 - DNA, 25 bp, Homo sapiens
tgggtaagcccttctgtgccttttc

SEQ ID NO: 11730 - DNA, 25 bp, Homo sapiens
tgggctatacctgacaagattctga

SEQ ID NO: 11731 - DNA, 25 bp, Homo sapiens
tagtcaccaccaaggcaggccaggc

SEQ ID NO: 11732 - DNA, 25 bp, Homo sapiens
gaagtattcctccttgctgctgggc

SEQ ID NO: 11733 - DNA, 25 bp, Homo sapiens
ctctaacacagagcagaatgccatg

SEQ ID NO: 11734 - DNA, 25 bp, Homo sapiens
tcactctatatttctgaagtttttt

SEQ ID NO: 11735 - DNA, 25 bp, Homo sapiens
gatgatcaatcttttctggtgcttc

SEQ ID NO: 11736 - DNA, 25 bp, Homo sapiens
cattgctttattgctaggactgtga

SEQ ID NO: 11737 - DNA, 25 bp, Homo sapiens
tgggttcatcactctactcgggcta

SEQ ID NO: 11738 - DNA, 25 bp, Homo sapiens
ccgacgtatgccacagaggagttca

SEQ ID NO: 11739 - DNA, 25 bp, Homo sapiens
gagcactctgctgactgccgtaata

SEQ ID NO: 11740 - DNA, 25 bp, Homo sapiens
tgccaagtgctgttagttctaccga

SEQ ID NO: 11741 - DNA, 25 bp, Homo sapiens
gcagggtgcattaagccatcaaata

SEQ ID NO: 11742 - DNA, 25 bp, Homo sapiens
ctgctgcctctggactggtacttta

SEQ ID NO: 11743 - DNA, 25 bp, Homo sapiens
cttggcctggctccttgtaatcatc

SEQ ID NO: 11744 - DNA, 25 bp, Homo sapiens
cacacacatatatacccataattta

SEQ ID NO: 11745 - DNA, 25 bp, Homo sapiens
tttcatagcaaaaacgtgtagggtg

SEQ ID NO: 11746 - DNA, 25 bp, Homo sapiens
gtggccctaagctctagtctatgta

SEQ ID NO: 11747 - DNA, 25 bp, Homo sapiens
tttgaggtccagtccagcctgcttt

SEQ ID NO: 11748 - DNA, 25 bp, Homo sapiens
cctgctgcgcggacagttttcaatg

SEQ ID NO: 11749 - DNA, 25 bp, Homo sapiens
acacacgtacgaatgcctgggttta

SEQ ID NO: 11750 - DNA, 25 bp, Homo sapiens
ggggagtcattctcatcattacttg

SEQ ID NO: 11751 - DNA, 25 bp, Homo sapiens
ctggacttttgcaattaggacttga

SEQ ID NO: 11752 - DNA, 25 bp, Homo sapiens
ctgttttagaacatatctcagtttc

SEQ ID NO: 11753 - DNA, 25 bp, Homo sapiens
tcagtgaggctctatatcataaata

SEQ ID NO: 11754 - DNA, 25 bp, Homo sapiens
gtacattgtttcatctgttgttgat

SEQ ID NO: 11755 - DNA, 25 bp, Homo sapiens
tcatctttaattgtgttactaacca

SEQ ID NO: 11756 - DNA, 25 bp, Homo sapiens
acatggccatttcctgcagttactg

SEQ ID NO: 11757 - DNA, 25 bp, Homo sapiens
gctgttgctcccaatggcccataga

SEQ ID NO: 11758 - DNA, 25 bp, Homo sapiens
cctgccctattcttggtagtatatg

SEQ ID NO: 11759 - DNA, 25 bp, Homo sapiens
tcccgaattgtctgttttgcctgtc

SEQ ID NO: 11760 - DNA, 25 bp, Homo sapiens
tgcacctagtacactgtggctaata

SEQ ID NO: 11761 - DNA, 25 bp, Homo sapiens
gttgcttcccattaaggtacctagg

SEQ ID NO: 11762 - DNA, 25 bp, Homo sapiens
tggaggtccgcgatcagtaaaatga

SEQ ID NO: 11763 - DNA, 25 bp, Homo sapiens
gtactgccacgaaggaataacttgg

SEQ ID NO: 11764 - DNA, 25 bp, Homo sapiens
gtgagaggctccaaattaccgaatg

SEQ ID NO: 11765 - DNA, 25 bp, Homo sapiens
tggcatggagttgtttgtttaaatc

SEQ ID NO: 11766 - DNA, 25 bp, Homo sapiens
ccctttaagatctggagctcgctcc

SEQ ID NO: 11767 - DNA, 25 bp, Homo sapiens
tcctatagaaaaccaagtgttgcaa

SEQ ID NO: 11768 - DNA, 25 bp, Homo sapiens
tggcactgatcctctcttatgggta

SEQ ID NO: 11769 - DNA, 25 bp, Homo sapiens
actgggcgtgctagtctcatatctc

SEQ ID NO: 11770 - DNA, 25 bp, Homo sapiens
cttgagtgagcagaggtagcctttt

SEQ ID NO: 11771 - DNA, 25 bp, Homo sapiens
tacatctactatattgtatattttt

SEQ ID NO: 11772 - DNA, 25 bp, Homo sapiens
actgtggtattgttgcctgaatgca

SEQ ID NO: 11773 - DNA, 25 bp, Homo sapiens
ctccacctgttgtagaatgcacttc

SEQ ID NO: 11774 - DNA, 25 bp, Homo sapiens
catgctgcctgatagctgctgaatc

SEQ ID NO: 11775 - DNA, 25 bp, Homo sapiens
ctgaaacccaagctccatgatgatg

SEQ ID NO: 11776 - DNA, 25 bp, Homo sapiens
tgctgctgctaaaagtcggcattta

SEQ ID NO: 11777 - DNA, 25 bp, Homo sapiens
gactgtgttctttgctcctcttaga

SEQ ID NO: 11778 - DNA, 25 bp, Homo sapiens
ctgtttgcaggggaccagacttttc

SEQ ID NO: 11779 - DNA, 25 bp, Homo sapiens
agggcttcctgcaccaaactgatgg

SEQ ID NO: 11780 - DNA, 25 bp, Homo sapiens
ggggagctctatccactaaggtcta

SEQ ID NO: 11781 - DNA, 25 bp, Homo sapiens
tggcccaaaactttcatgttgctga

SEQ ID NO: 11782 - DNA, 25 bp, Homo sapiens
tcaaggctggactcaatcatatggc

SEQ ID NO: 11783 - DNA, 25 bp, Homo sapiens
cagagcacacatggcatcagcattc

SEQ ID NO: 11784 - DNA, 25 bp, Homo sapiens
agtctacataagaatttgatgaaga

SEQ ID NO: 11785 - DNA, 25 bp, Homo sapiens
tgcctcctttccagatgtccagaga

SEQ ID NO: 11786 - DNA, 25 bp, Homo sapiens
ccctttagggtactttggcaatatt

SEQ ID NO: 11787 - DNA, 25 bp, Homo sapiens
cgtgtgtgtgttctacattaggata

SEQ ID NO: 11788 - DNA, 25 bp, Homo sapiens
gaagacacttactggcactcctgta

SEQ ID NO: 11789 - DNA, 25 bp, Homo sapiens
gcagagatgattcttgaccagagtc

SEQ ID NO: 11790 - DNA, 25 bp, Homo sapiens
tggaagcactaacccacactcactg

SEQ ID NO: 11791 - DNA, 25 bp, Homo sapiens
ttctcactggggaactacaatacta

SEQ ID NO: 11792 - DNA, 25 bp, Homo sapiens
gtggctcgcgctggtaacaatatca

SEQ ID NO: 11793 - DNA, 25 bp, Homo sapiens
ttttaattagtccaagccaggcgca

SEQ ID NO: 11794 - DNA, 25 bp, Homo sapiens
tcagcagctttagatcctagtattg

SEQ ID NO: 11795 - DNA, 25 bp, Homo sapiens
gacaagttccagactcttttgcata

SEQ ID NO: 11796 - DNA, 25 bp, Homo sapiens
ggcttacttcctcttcccattgcag

SEQ ID NO: 11797 - DNA, 25 bp, Homo sapiens
ttacagctagaataagtttaaacac

SEQ ID NO: 11798 - DNA, 25 bp, Homo sapiens
caattaaccttataggactcctatg

SEQ ID NO: 11799 - DNA, 25 bp, Homo sapiens
cagaggccctgtccatgaatgtttc

SEQ ID NO: 11800 - DNA, 25 bp, Homo sapiens
gtttccacaggcagacttttatctc

SEQ ID NO: 11801 - DNA, 25 bp, Homo sapiens
tatatggaaaacaagaaaaaccaaa

SEQ ID NO: 11802 - DNA, 25 bp, Homo sapiens
gtgcatcaacaatacaggtgacttc

SEQ ID NO: 11803 - DNA, 25 bp, Homo sapiens
actgtgatccctgtctgttaaatta

SEQ ID NO: 11804 - DNA, 25 bp, Homo sapiens
ccacaggatttcaggggccctaata

SEQ ID NO: 11805 - DNA, 25 bp, Homo sapiens
ccagggaggttgtctgcctatttaa

SEQ ID NO: 11806 - DNA, 25 bp, Homo sapiens
gccttttgcagggaagcagagaacc

SEQ ID NO: 11807 - DNA, 25 bp, Homo sapiens
agtttcagccatacacctcagttga

SEQ ID NO: 11808 - DNA, 25 bp, Homo sapiens
caggggacgctaggaataaattttc

SEQ ID NO: 11809 - DNA, 25 bp, Homo sapiens
accctactgggtcacgtctattatc

SEQ ID NO: 11810 - DNA, 25 bp, Homo sapiens
gccagggagagcttgtgatccttta

SEQ ID NO: 11811 - DNA, 25 bp, Homo sapiens
ccatcttggagaatggaagctttta

SEQ ID NO: 11812 - DNA, 25 bp, Homo sapiens
tgacacttggcagtatagagctata

SEQ ID NO: 11813 - DNA, 25 bp, Homo sapiens
cagggtagtaattctgttgtcaaaa

SEQ ID NO: 11814 - DNA, 25 bp, Homo sapiens
aggcctctttctcttcacatgcttg

SEQ ID NO: 11815 - DNA, 25 bp, Homo sapiens
ggaggcaaccctgtattacccattg

SEQ ID NO: 11816 - DNA, 25 bp, Homo sapiens
cctctggttttcttgggacttctca

SEQ ID NO: 11817 - DNA, 25 bp, Homo sapiens
agccagtattctgcaggtgtcttta

SEQ ID NO: 11818 - DNA, 25 bp, Homo sapiens
ttaaaaatgatgaaaatactaaaga

SEQ ID NO: 11819 - DNA, 25 bp, Homo sapiens
caagcaaggtgctggccataattca

SEQ ID NO: 11820 - DNA, 25 bp, Homo sapiens
gcctccttcctctggtgaaaaaata

SEQ ID NO: 11821 - DNA, 25 bp, Homo sapiens
ccagctgtagcatggtgggaaaaca

SEQ ID NO: 11822 - DNA, 25 bp, Homo sapiens
agcagcctgtagatctattcccttc

SEQ ID NO: 11823 - DNA, 25 bp, Homo sapiens
atgccctttgggtcatgacagtttg

SEQ ID NO: 11824 - DNA, 25 bp, Homo sapiens
ggagaattctctctgcttaggaaga

SEQ ID NO: 11825 - DNA, 25 bp, Homo sapiens
aaattctgggaccttgacctgagcc

SEQ ID NO: 11826 - DNA, 25 bp, Homo sapiens
ctgaggggactcaatgttaagcaac

SEQ ID NO: 11827 - DNA, 25 bp, Homo sapiens
gtttgtttcccaccacctttctatg

SEQ ID NO: 11828 - DNA, 25 bp, Homo sapiens
ctctgagagatcttggctagtcaac

SEQ ID NO: 11829 - DNA, 25 bp, Homo sapiens
atgcccgtttcacttcacatgtgta

SEQ ID NO: 11830 - DNA, 25 bp, Homo sapiens
ttctgaggcttcacaacagtacatg

SEQ ID NO: 11831 - DNA, 25 bp, Homo sapiens
gggcatcctgggctgtaaatattaa

SEQ ID NO: 11832 - DNA, 25 bp, Homo sapiens
tctctctttgtggtatggaagctga

SEQ ID NO: 11833 - DNA, 25 bp, Homo sapiens
tgaagctttttgatagtgacccaca

SEQ ID NO: 11834 - DNA, 25 bp, Homo sapiens
gactgaagccctttcctttaaaatg

SEQ ID NO: 11835 - DNA, 25 bp, Homo sapiens
tcatagagagaaagacagagagata

SEQ ID NO: 11836 - DNA, 25 bp, Homo sapiens
gtaggtagcttttcctgattacatc

SEQ ID NO: 11837 - DNA, 25 bp, Homo sapiens
gtttgcctgctcaatatagcccgtc

SEQ ID NO: 11838 - DNA, 25 bp, Homo sapiens
aatcgtgtctctgcccaatttgctg

SEQ ID NO: 11839 - DNA, 25 bp, Homo sapiens
ggcctgtcctcatgcttgtccttta

SEQ ID NO: 11840 - DNA, 25 bp, Homo sapiens
gggatccaggcaacaactctaagta

SEQ ID NO: 11841 - DNA, 25 bp, Homo sapiens
tggaacctgaattaggcaagccttt

SEQ ID NO: 11842 - DNA, 25 bp, Homo sapiens
gactatgactgtgatgcctgaaaga

SEQ ID NO: 11843 - DNA, 25 bp, Homo sapiens
tgttcagcccacagcagtggtctta

SEQ ID NO: 11844 - DNA, 25 bp, Homo sapiens
atcctggcaagtcccggtagtatta

SEQ ID NO: 11845 - DNA, 25 bp, Homo sapiens
ctggtatgcacaacaagaaagtttg

SEQ ID NO: 11846 - DNA, 25 bp, Homo sapiens
tcactgtcttggtacttggaatata

SEQ ID NO: 11847 - DNA, 25 bp, Homo sapiens
ttggccatcttgctggacaatttga

SEQ ID NO: 11848 - DNA, 25 bp, Homo sapiens
cctatagcagaaggaggatcacttt

SEQ ID NO: 11849 - DNA, 25 bp, Homo sapiens
tatgtgtgtttacccattgttttcc

SEQ ID NO: 11850 - DNA, 25 bp, Homo sapiens
gaatgctggcaggttaaatttatcc

SEQ ID NO: 11851 - DNA, 25 bp, Homo sapiens
aggcgccgtgtttgaatcttggttc

SEQ ID NO: 11852 - DNA, 25 bp, Homo sapiens
atttaggacattttctaaaacatag

SEQ ID NO: 11853 - DNA, 25 bp, Homo sapiens
agcgtctgtaactttttcgtcaaaa

SEQ ID NO: 11854 - DNA, 25 bp, Homo sapiens
gatcctttcttgaccctacgcttag

SEQ ID NO: 11855 - DNA, 25 bp, Homo sapiens
ttcttctggagattgtggcagcata

SEQ ID NO: 11856 - DNA, 25 bp, Homo sapiens
gtaattgcttgatgagtggccacca

SEQ ID NO: 11857 - DNA, 25 bp, Homo sapiens
aggctggacctagtctgttctgaca

SEQ ID NO: 11858 - DNA, 25 bp, Homo sapiens
agttggtctcacatagtcttgggtc

SEQ ID NO: 11859 - DNA, 25 bp, Homo sapiens
gatggcctcaaagagtcctgcttta

SEQ ID NO: 11860 - DNA, 25 bp, Homo sapiens
ggccatttcagatgcatcacatttc

SEQ ID NO: 11861 - DNA, 25 bp, Homo sapiens
atgagaacattaatctgagagttgt

SEQ ID NO: 11862 - DNA, 25 bp, Homo sapiens
gttaccgctaacatacctatccttt

SEQ ID NO: 11863 - DNA, 25 bp, Homo sapiens
tctggggatcccgtaatataatttg

SEQ ID NO: 11864 - DNA, 25 bp, Homo sapiens
tccctcgatggatcacattttgtta

SEQ ID NO: 11865 - DNA, 25 bp, Homo sapiens
agaactccctattttgtgacaccga

SEQ ID NO: 11866 - DNA, 25 bp, Homo sapiens
gtgtctctctgagccctagaaattc

SEQ ID NO: 11867 - DNA, 25 bp, Homo sapiens
tggcagttcttcaccttagtctaca

SEQ ID NO: 11868 - DNA, 25 bp, Homo sapiens
gctggttttcatgtatttgctagta

SEQ ID NO: 11869 - DNA, 25 bp, Homo sapiens
ctgtactattaagaggaaagtttgc

SEQ ID NO: 11870 - DNA, 25 bp, Homo sapiens
ctgagtagtttctatacatggtttc

SEQ ID NO: 11871 - DNA, 25 bp, Homo sapiens
cacccagttgggagagtttgtataa

SEQ ID NO: 11872 - DNA, 25 bp, Homo sapiens
gcccagagtcttttgcacattagca

SEQ ID NO: 11873 - DNA, 25 bp, Homo sapiens
cacggttatgaatctcaacgggtta

SEQ ID NO: 11874 - DNA, 25 bp, Homo sapiens
ccctgcaaggtttatcaagtccaaa

SEQ ID NO: 11875 - DNA, 25 bp, Homo sapiens
tctctcgggaatcttactgggtata

SEQ ID NO: 11876 - DNA, 25 bp, Homo sapiens
tgatgggacataccatgctaaaatg

SEQ ID NO: 11877 - DNA, 25 bp, Homo sapiens
tccctgtgaggaattaatgccatta

SEQ ID NO: 11878 - DNA, 25 bp, Homo sapiens
aattcccgggagcattggcagtctc

SEQ ID NO: 11879 - DNA, 25 bp, Homo sapiens
ttgtactgacccacatctctatgga

SEQ ID NO: 11880 - DNA, 25 bp, Homo sapiens
ctctggagagtgtcataagcccgta

SEQ ID NO: 11881 - DNA, 25 bp, Homo sapiens
cagatctcttctggcagtggggaaa

SEQ ID NO: 11882 - DNA, 25 bp, Homo sapiens
gacatctccttcttgtaacttaaca

SEQ ID NO: 11883 - DNA, 25 bp, Homo sapiens
tgtgccaacactgcaaggaagactt

SEQ ID NO: 11884 - DNA, 25 bp, Homo sapiens
agccagctttggtcaacaattaaga

SEQ ID NO: 11885 - DNA, 25 bp, Homo sapiens
gcgtggttacctgaatgacttgaga

SEQ ID NO: 11886 - DNA, 25 bp, Homo sapiens
agcggacactgtactttgtatactg

SEQ ID NO: 11887 - DNA, 25 bp, Homo sapiens
ttccaaatgttggttgccaggaaga

SEQ ID NO: 11888 - DNA, 25 bp, Homo sapiens
gctatctccataaatacctattatt

SEQ ID NO: 11889 - DNA, 25 bp, Homo sapiens
agggtccaacctacttcatcacaga

SEQ ID NO: 11890 - DNA, 25 bp, Homo sapiens
acaccacacttgctcacattaacta

SEQ ID NO: 11891 - DNA, 25 bp, Homo sapiens
ttaaaattttactttaaatgcaaac

SEQ ID NO: 11892 - DNA, 25 bp, Homo sapiens
gcaccctgaaaatactgttgagtta

SEQ ID NO: 11893 - DNA, 25 bp, Homo sapiens
tctgaaataagcataggttgtgtcc

SEQ ID NO: 11894 - DNA, 25 bp, Homo sapiens
acacttcccaggattctgattaaga

SEQ ID NO: 11895 - DNA, 25 bp, Homo sapiens
tttggaccacagacctgaaggattg

SEQ ID NO: 11896 - DNA, 25 bp, Homo sapiens
tagaacagagctatacatgaacaaa

SEQ ID NO: 11897 - DNA, 25 bp, Homo sapiens
cacacacaaataataaaaattacta

SEQ ID NO: 11898 - DNA, 25 bp, Homo sapiens
aggccttccctttatcagtctcaga

SEQ ID NO: 11899 - DNA, 25 bp, Homo sapiens
ggacttttgcctggagctgtcttta

SEQ ID NO: 11900 - DNA, 25 bp, Homo sapiens
taaggttggccactctgaagaatgc

SEQ ID NO: 11901 - DNA, 25 bp, Homo sapiens
gctcctctcactgtacctagaatta

SEQ ID NO: 11902 - DNA, 25 bp, Homo sapiens
ggtcagagaccaaactcagttattc

SEQ ID NO: 11903 - DNA, 25 bp, Homo sapiens
ctccattgatgctattgttccagtg

SEQ ID NO: 11904 - DNA, 25 bp, Homo sapiens
gacatggattgattgcctctctacc

SEQ ID NO: 11905 - DNA, 25 bp, Homo sapiens
tacaaggtgtcagcagcaattactg

SEQ ID NO: 11906 - DNA, 25 bp, Homo sapiens
tgcatttgctccctttcacaagtga

SEQ ID NO: 11907 - DNA, 25 bp, Homo sapiens
ctacccaggaccaggagtaatatta

SEQ ID NO: 11908 - DNA, 25 bp, Homo sapiens
ccacgtgtgtgtttgtgcgtctttg

SEQ ID NO: 11909 - DNA, 25 bp, Homo sapiens
catgagtgtacacgtgactacagtc

SEQ ID NO: 11910 - DNA, 25 bp, Homo sapiens
cagagctgaatcacattgttgtatg

SEQ ID NO: 11911 - DNA, 25 bp, Homo sapiens
ggtccaagcgatgccctgttatgta

SEQ ID NO: 11912 - DNA, 25 bp, Homo sapiens
ttgcctacgcttagcacaatgtgta

SEQ ID NO: 11913 - DNA, 25 bp, Homo sapiens
ggctgtatgcatctacttcaggaga

SEQ ID NO: 11914 - DNA, 25 bp, Homo sapiens
cgtggcaaatgcctaactgtccttt

SEQ ID NO: 11915 - DNA, 25 bp, Homo sapiens
cagcaggcgtcttatggtaatgtca

SEQ ID NO: 11916 - DNA, 25 bp, Homo sapiens
ttcggccatcaagcatgacattttg

SEQ ID NO: 11917 - DNA, 25 bp, Homo sapiens
cacctgcagatgagctatgaatttc

SEQ ID NO: 11918 - DNA, 25 bp, Homo sapiens
ctgacctggactgctgatctgatta

SEQ ID NO: 11919 - DNA, 25 bp, Homo sapiens
ggttgaacaccgctctggaagccca

SEQ ID NO: 11920 - DNA, 25 bp, Homo sapiens
tgttactgaccaagtgccagccatg

SEQ ID NO: 11921 - DNA, 25 bp, Homo sapiens
cctgggcgtcccactattaggtttg

SEQ ID NO: 11922 - DNA, 25 bp, Homo sapiens
ccttgtcgtggagtacttttctaga

SEQ ID NO: 11923 - DNA, 25 bp, Homo sapiens
gcaatggactgctcactgtatcttc

SEQ ID NO: 11924 - DNA, 25 bp, Homo sapiens
ctctgtggcaagactttggaattcc

SEQ ID NO: 11925 - DNA, 25 bp, Homo sapiens
acggctggatggatgtctctctata

SEQ ID NO: 11926 - DNA, 25 bp, Homo sapiens
tggacgccatagaagtaactctttt

SEQ ID NO: 11927 - DNA, 25 bp, Homo sapiens
tgagggcaaatagagaccgcttagc

SEQ ID NO: 11928 - DNA, 25 bp, Homo sapiens
tccagtgagtgctatgagtcagtta

SEQ ID NO: 11929 - DNA, 25 bp, Homo sapiens
caactggggatgtgaatattctact

SEQ ID NO: 11930 - DNA, 25 bp, Homo sapiens
ctctggaagtttgttggcagtcctc

SEQ ID NO: 11931 - DNA, 25 bp, Homo sapiens
tgctcttttggaagtgagtctgccc

SEQ ID NO: 11932 - DNA, 25 bp, Homo sapiens
tttagtggtacgtattttaagaagt

SEQ ID NO: 11933 - DNA, 25 bp, Homo sapiens
ccaccctgtgaagccatggaaaaca

SEQ ID NO: 11934 - DNA, 25 bp, Homo sapiens
gactcagccctttaacccaatggta

SEQ ID NO: 11935 - DNA, 25 bp, Homo sapiens
ctccggaagagctgcctgtaagttc

SEQ ID NO: 11936 - DNA, 25 bp, Homo sapiens
ctccagtctgatttccattagaagg

SEQ ID NO: 11937 - DNA, 25 bp, Homo sapiens
gaccctgaatttctctggcctattg

SEQ ID NO: 11938 - DNA, 25 bp, Homo sapiens
ccgcagatggtagatgccacatcta

SEQ ID NO: 11939 - DNA, 25 bp, Homo sapiens
ggcactgcctcataaggttggccta

SEQ ID NO: 11940 - DNA, 25 bp, Homo sapiens
agccaggtctcttgggaacaattta

SEQ ID NO: 11941 - DNA, 25 bp, Homo sapiens
tctgagtccttgttatatacctgtc

SEQ ID NO: 11942 - DNA, 25 bp, Homo sapiens
ggccttgtttctaagcagctagttc

SEQ ID NO: 11943 - DNA, 25 bp, Homo sapiens
tgtccagctactgcttggcatggta

SEQ ID NO: 11944 - DNA, 25 bp, Homo sapiens
ttggctgggtctaatgcatgtctca

SEQ ID NO: 11945 - DNA, 25 bp, Homo sapiens
gtctggcgctggactgaactcattc

SEQ ID NO: 11946 - DNA, 25 bp, Homo sapiens
gtggtctgctctgccaaacccagga

SEQ ID NO: 11947 - DNA, 25 bp, Homo sapiens
ccgggtgacagcagaaggttctttc

SEQ ID NO: 11948 - DNA, 25 bp, Homo sapiens
catgccctgggtcaaaataaagtgc

SEQ ID NO: 11949 - DNA, 25 bp, Homo sapiens
gcctgccataagaaattgggctctc

SEQ ID NO: 11950 - DNA, 25 bp, Homo sapiens
catcgtgcatggacagaaagctctg

SEQ ID NO: 11951 - DNA, 25 bp, Homo sapiens
ccaccagtgtattagagactgtctc

SEQ ID NO: 11952 - DNA, 25 bp, Homo sapiens
ggcttttgactttggtaggttctgt

SEQ ID NO: 11953 - DNA, 25 bp, Homo sapiens
aatgtgtaaattattcccccgcatg

SEQ ID NO: 11954 - DNA, 25 bp, Homo sapiens
catgaatgatttttccacctcctcc

SEQ ID NO: 11955 - DNA, 25 bp, Homo sapiens
agcctctgtttcaaatagatcttgc

SEQ ID NO: 11956 - DNA, 25 bp, Homo sapiens
gcccaggttttattcacttatgagc

SEQ ID NO: 11957 - DNA, 25 bp, Homo sapiens
tgtttttaacagaaaagcaaacaaa

SEQ ID NO: 11958 - DNA, 25 bp, Homo sapiens
ggctagcccacctgcagacagaaga

SEQ ID NO: 11959 - DNA, 25 bp, Homo sapiens
gtggcccagttcctaataacccatg

SEQ ID NO: 11960 - DNA, 25 bp, Homo sapiens
tggtgtgccctaggaataccctcta

SEQ ID NO: 11961 - DNA, 25 bp, Homo sapiens
ttgccctggtctccgaactattaga

SEQ ID NO: 11962 - DNA, 25 bp, Homo sapiens
gccacaacgctgctaaggaaagatg

SEQ ID NO: 11963 - DNA, 25 bp, Homo sapiens
caaggccctctgagtaacatgcgga

SEQ ID NO: 11964 - DNA, 25 bp, Homo sapiens
ctcagtgatgcttggagtcattttc

SEQ ID NO: 11965 - DNA, 25 bp, Homo sapiens
ctctgccagtcatttgtgggtattc

SEQ ID NO: 11966 - DNA, 25 bp, Homo sapiens
gcagctgtctgtgaattccatctta

SEQ ID NO: 11967 - DNA, 25 bp, Homo sapiens
tgctagctgtcaccttcagaatatg

SEQ ID NO: 11968 - DNA, 25 bp, Homo sapiens
cactcggaactgaagaatcggtttc

SEQ ID NO: 11969 - DNA, 25 bp, Homo sapiens
cacaggcaggggagtaaaggtaatt

SEQ ID NO: 11970 - DNA, 25 bp, Homo sapiens
tggaccatgggctacatctcacttg

SEQ ID NO: 11971 - DNA, 25 bp, Homo sapiens
gtcctcatggcccacagaaagtttg

SEQ ID NO: 11972 - DNA, 25 bp, Homo sapiens
ggccgaatgcaaaagccacgtatta

SEQ ID NO: 11973 - DNA, 25 bp, Homo sapiens
tgcgagtcatcagtccatatcaaga

SEQ ID NO: 11974 - DNA, 25 bp, Homo sapiens
agctcttatttagggcagttgattc

SEQ ID NO: 11975 - DNA, 25 bp, Homo sapiens
agggacccttaatgagactgctctg

SEQ ID NO: 11976 - DNA, 25 bp, Homo sapiens
ttccctgagggcaacaacaccttta

SEQ ID NO: 11977 - DNA, 25 bp, Homo sapiens
gaggtttgcccttctccctttcaaa

SEQ ID NO: 11978 - DNA, 25 bp, Homo sapiens
ctcatagtcaacagcttaggatttc

SEQ ID NO: 11979 - DNA, 25 bp, Homo sapiens
atctggcaatgaagcccacttttta

SEQ ID NO: 11980 - DNA, 25 bp, Homo sapiens
gtgggtctcttcctaatctaacttg

SEQ ID NO: 11981 - DNA, 25 bp, Homo sapiens
tgtgtgtgtgtccttccgtcaaaca

SEQ ID NO: 11982 - DNA, 25 bp, Homo sapiens
gcctgcgagccactgaaagaaattt

SEQ ID NO: 11983 - DNA, 25 bp, Homo sapiens
aagtgaagctttacccagtggagta

SEQ ID NO: 11984 - DNA, 25 bp, Homo sapiens
gaatcatacccacctgtatgttttt

SEQ ID NO: 11985 - DNA, 25 bp, Homo sapiens
ccctgtttgactttgatgatatgcc

SEQ ID NO: 11986 - DNA, 25 bp, Homo sapiens
ctgtgatgctttgtggtgcagaacc

SEQ ID NO: 11987 - DNA, 25 bp, Homo sapiens
tacacagtagcatttggagtcactc

SEQ ID NO: 11988 - DNA, 25 bp, Homo sapiens
gtgctttccttgagcgacactaata

SEQ ID NO: 11989 - DNA, 25 bp, Homo sapiens
gctctctgaaaataatgcatgcctc

SEQ ID NO: 11990 - DNA, 25 bp, Homo sapiens
ggccttctgaggaacagctgcgtta

SEQ ID NO: 11991 - DNA, 25 bp, Homo sapiens
tttgagggacttaatgccacaattc

SEQ ID NO: 11992 - DNA, 25 bp, Homo sapiens
ccaagtgcctgggttctagtaaata

SEQ ID NO: 11993 - DNA, 25 bp, Homo sapiens
tggaagagctcatagaattgtaacc

SEQ ID NO: 11994 - DNA, 25 bp, Homo sapiens
ccagtgtccttcctttcaatgtttc

SEQ ID NO: 11995 - DNA, 25 bp, Homo sapiens
ggaacagtcccgatcatttgcattt

SEQ ID NO: 11996 - DNA, 25 bp, Homo sapiens
gtgtccttcatagcacagcagttta

SEQ ID NO: 11997 - DNA, 25 bp, Homo sapiens
cctctggacccgaaagttgtttgga

SEQ ID NO: 11998 - DNA, 25 bp, Homo sapiens
tgccttgagtgattctgagattcta

SEQ ID NO: 11999 - DNA, 25 bp, Homo sapiens
tgagctttcacaacatttccaggtc

SEQ ID NO: 12000 - DNA, 25 bp, Homo sapiens
gtcaccctacctgctttgaagcttg

SEQ ID NO: 12001 - DNA, 25 bp, Homo sapiens
gcccagggctttgcaaaacaatttt

SEQ ID NO: 12002 - DNA, 25 bp, Homo sapiens
gttgcctgtgtctccttttgcctca

SEQ ID NO: 12003 - DNA, 25 bp, Homo sapiens
ggatatttatcccacccggctgtta

SEQ ID NO: 12004 - DNA, 25 bp, Homo sapiens
gagctgtttccctttgccacatatg

SEQ ID NO: 12005 - DNA, 25 bp, Homo sapiens
gagcaggtggccttgttgacaacta

SEQ ID NO: 12006 - DNA, 25 bp, Homo sapiens
agcccgttagtgctgtgaattttta

SEQ ID NO: 12007 - DNA, 25 bp, Homo sapiens
gcagggtgcattaagacagctatta

SEQ ID NO: 12008 - DNA, 25 bp, Homo sapiens
gaccatctcatgagtttctgcagga

SEQ ID NO: 12009 - DNA, 25 bp, Homo sapiens
gatgtttcaccacttggccttcaga

SEQ ID NO: 12010 - DNA, 25 bp, Homo sapiens
cgaatgtccacgtatgcccaaagta

SEQ ID NO: 12011 - DNA, 25 bp, Homo sapiens
tgccaaattgtccatccagtagctg

SEQ ID NO: 12012 - DNA, 25 bp, Homo sapiens
cgggtccaaaggcattagcttgcta

SEQ ID NO: 12013 - DNA, 25 bp, Homo sapiens
cagttcttactttgcagagaccagg

SEQ ID NO: 12014 - DNA, 25 bp, Homo sapiens
acccggggctttactttgaagttaa

SEQ ID NO: 12015 - DNA, 25 bp, Homo sapiens
ttggggttatgaacagactgtcttc

SEQ ID NO: 12016 - DNA, 25 bp, Homo sapiens
caaattaaaagtgtgcagggtcagc

SEQ ID NO: 12017 - DNA, 25 bp, Homo sapiens
ccctgagagcatcatccatgacaca

SEQ ID NO: 12018 - DNA, 25 bp, Homo sapiens
gcctcagtgttctctagcttagtta

SEQ ID NO: 12019 - DNA, 25 bp, Homo sapiens
cccttgcttgcatggtgtgcttata

SEQ ID NO: 12020 - DNA, 25 bp, Homo sapiens
gcccatccctggcatgaatttagat

SEQ ID NO: 12021 - DNA, 25 bp, Homo sapiens
ctagcgttatcacagctcagaatta

SEQ ID NO: 12022 - DNA, 25 bp, Homo sapiens
gtagtctcagtctcaccaacgtgtg

SEQ ID NO: 12023 - DNA, 25 bp, Homo sapiens
gacttccagggaaggcactgcttta

SEQ ID NO: 12024 - DNA, 25 bp, Homo sapiens
agcttcccttcatttctcctagagg

SEQ ID NO: 12025 - DNA, 25 bp, Homo sapiens
gcatgctttgccaatggggaatgta

SEQ ID NO: 12026 - DNA, 25 bp, Homo sapiens
tgtcagcggtgtactttctatgttc

SEQ ID NO: 12027 - DNA, 25 bp, Homo sapiens
aggtgatcacctcccagcagacata

SEQ ID NO: 12028 - DNA, 25 bp, Homo sapiens
tgcagtgaagccacaatgccatatg

SEQ ID NO: 12029 - DNA, 25 bp, Homo sapiens
ctccctaaaggaagaaacgttggcc

SEQ ID NO: 12030 - DNA, 25 bp, Homo sapiens
tcccagctaagtgcaaaagtttccg

SEQ ID NO: 12031 - DNA, 25 bp, Homo sapiens
ccaccaggattttggctttccagta

SEQ ID NO: 12032 - DNA, 25 bp, Homo sapiens
tgactcatgagcaggaacacttttc

SEQ ID NO: 12033 - DNA, 25 bp, Homo sapiens
gggcagccagtcactcctttccatg

SEQ ID NO: 12034 - DNA, 25 bp, Homo sapiens
aggcttagggtcctctgcgattata

SEQ ID NO: 12035 - DNA, 25 bp, Homo sapiens
gtgctgctctgctttgagcctcaag

SEQ ID NO: 12036 - DNA, 25 bp, Homo sapiens
tgaaagactctcacgccatgtattg

SEQ ID NO: 12037 - DNA, 25 bp, Homo sapiens
gggtttccttccttatagcactaga

SEQ ID NO: 12038 - DNA, 25 bp, Homo sapiens
gaggccattgggctcctgttccata

SEQ ID NO: 12039 - DNA, 25 bp, Homo sapiens
ctggcacactagctttggaaaaatg

SEQ ID NO: 12040 - DNA, 25 bp, Homo sapiens
ctactgttcttagtgcgggccatca

SEQ ID NO: 12041 - DNA, 25 bp, Homo sapiens
acctctagctgtcagggacctcatg

SEQ ID NO: 12042 - DNA, 25 bp, Homo sapiens
cccagggctatgtgactctgaatca

SEQ ID NO: 12043 - DNA, 25 bp, Homo sapiens
atggactcttgggtttcaaactaac

SEQ ID NO: 12044 - DNA, 25 bp, Homo sapiens
ttccgctcagaaaaatcgattgttg

SEQ ID NO: 12045 - DNA, 25 bp, Homo sapiens
gccctctcaggtagaaccaatcata

SEQ ID NO: 12046 - DNA, 25 bp, Homo sapiens
atgcagtttttcacagggtcagcta

SEQ ID NO: 12047 - DNA, 25 bp, Homo sapiens
gagcttggcactttagacctctagg

SEQ ID NO: 12048 - DNA, 25 bp, Homo sapiens
tgatgcgtgaaaccctgctctgtgc

SEQ ID NO: 12049 - DNA, 25 bp, Homo sapiens
ttgtcaaccaaatgcccgggaagcc

SEQ ID NO: 12050 - DNA, 25 bp, Homo sapiens
tttcacacaaagacacagagggctg

SEQ ID NO: 12051 - DNA, 25 bp, Homo sapiens
ctgagagtgaccagtccctttctga

SEQ ID NO: 12052 - DNA, 25 bp, Homo sapiens
ctctgagctgttgaagtagacagag

SEQ ID NO: 12053 - DNA, 25 bp, Homo sapiens
ttcacggggccaaatgcactttttc

SEQ ID NO: 12054 - DNA, 25 bp, Homo sapiens
tttcctgggctatgtgacacaaagc

SEQ ID NO: 12055 - DNA, 25 bp, Homo sapiens
tctgggcccagcgactgtattgaca

SEQ ID NO: 12056 - DNA, 25 bp, Homo sapiens
gtgcagcatctttctaccaggaatc

SEQ ID NO: 12057 - DNA, 25 bp, Homo sapiens
tgaatgactagtgaaccctaaactg

SEQ ID NO: 12058 - DNA, 25 bp, Homo sapiens
ggctcctttcaatctgccaggtgta

SEQ ID NO: 12059 - DNA, 25 bp, Homo sapiens
ccaggacaatacagggccaggctta

SEQ ID NO: 12060 - DNA, 25 bp, Homo sapiens
gcgctggcatttagctgtagttaca

SEQ ID NO: 12061 - DNA, 25 bp, Homo sapiens
cccagctgtaagacggtgtccacta

SEQ ID NO: 12062 - DNA, 25 bp, Homo sapiens
aacctggtttgctatcctgggaata

SEQ ID NO: 12063 - DNA, 25 bp, Homo sapiens
taattgatcaattgtaacaaaccaa

SEQ ID NO: 12064 - DNA, 25 bp, Homo sapiens
cactgacctgtcgtttggagaactc

SEQ ID NO: 12065 - DNA, 25 bp, Homo sapiens
tgatcccattcccaaggtcagtgga

SEQ ID NO: 12066 - DNA, 25 bp, Homo sapiens
tccaaggttcagctgtgactcaatc

SEQ ID NO: 12067 - DNA, 25 bp, Homo sapiens
tgatcgtgcagtccaacagaggttg

SEQ ID NO: 12068 - DNA, 25 bp, Homo sapiens
cctggagtctgggatcaaactaatg

SEQ ID NO: 12069 - DNA, 25 bp, Homo sapiens
aagatgacctcctcctgcatgcaca

SEQ ID NO: 12070 - DNA, 25 bp, Homo sapiens
tggtcccaaggcaaaagccctcttt

SEQ ID NO: 12071 - DNA, 25 bp, Homo sapiens
ctccctgaggcatttggaaagttta

SEQ ID NO: 12072 - DNA, 25 bp, Homo sapiens
agcgcacttttctctctttcttgga

SEQ ID NO: 12073 - DNA, 25 bp, Homo sapiens
caccagggcttgaaagtggctaatt

SEQ ID NO: 12074 - DNA, 25 bp, Homo sapiens
tctgtccttgacttggcttgaatga

SEQ ID NO: 12075 - DNA, 25 bp, Homo sapiens
tgctccagagggtgcattgcttttc

SEQ ID NO: 12076 - DNA, 25 bp, Homo sapiens
tgggttcactgctactcaggctttg

SEQ ID NO: 12077 - DNA, 25 bp, Homo sapiens
agcctctgttccatgtacctgaaga

SEQ ID NO: 12078 - DNA, 25 bp, Homo sapiens
caaagtgaaagaaaagtctcaaaaa

SEQ ID NO: 12079 - DNA, 25 bp, Homo sapiens
ctgtaatctatattccctggcaagg

SEQ ID NO: 12080 - DNA, 25 bp, Homo sapiens
ccattgcagtgttaaggcctccatc

SEQ ID NO: 12081 - DNA, 25 bp, Homo sapiens
tcttccatgaagtagctaggcactc

SEQ ID NO: 12082 - DNA, 25 bp, Homo sapiens
gctgctaacatgaactgcacaatta

SEQ ID NO: 12083 - DNA, 25 bp, Homo sapiens
atttagaacctggtgaaattgatat

SEQ ID NO: 12084 - DNA, 25 bp, Homo sapiens
ggaggcttcatgcataccaaattta

SEQ ID NO: 12085 - DNA, 25 bp, Homo sapiens
attgtgggatatagggaaagttgta

SEQ ID NO: 12086 - DNA, 25 bp, Homo sapiens
actggatacttaattaacatacttc

SEQ ID NO: 12087 - DNA, 25 bp, Homo sapiens
tcgggtttgtgtttttccttgaatc

SEQ ID NO: 12088 - DNA, 25 bp, Homo sapiens
tatcaggtaggtccaattccaagtg

SEQ ID NO: 12089 - DNA, 25 bp, Homo sapiens
cctgtgaagcaggtggatgcctcta

SEQ ID NO: 12090 - DNA, 25 bp, Homo sapiens
gtacagcagagtttaggcacctaat

SEQ ID NO: 12091 - DNA, 25 bp, Homo sapiens
gcacccatgttgaggaaggcatata

SEQ ID NO: 12092 - DNA, 25 bp, Homo sapiens
tgcggcctcccatattggcaagata

SEQ ID NO: 12093 - DNA, 25 bp, Homo sapiens
ccgctagggtgtgctgttcctaaca

SEQ ID NO: 12094 - DNA, 25 bp, Homo sapiens
tgtcgagttatactagcctgcttca

SEQ ID NO: 12095 - DNA, 25 bp, Homo sapiens
gacagccattagacgcttgaaagat

SEQ ID NO: 12096 - DNA, 25 bp, Homo sapiens
tcacatttttatcccagagttttta

SEQ ID NO: 12097 - DNA, 25 bp, Homo sapiens
tccacgagggaaatacagggtgcta

SEQ ID NO: 12098 - DNA, 25 bp, Homo sapiens
catcagacagcaggtatgtaagata

SEQ ID NO: 12099 - DNA, 25 bp, Homo sapiens
agtatgacaaatcaaatatattttg

SEQ ID NO: 12100 - DNA, 25 bp, Homo sapiens
ctggtaacacagtcttctgagattg

SEQ ID NO: 12101 - DNA, 25 bp, Homo sapiens
tgacggctttcggatggcactaata

SEQ ID NO: 12102 - DNA, 25 bp, Homo sapiens
gtaacactcaggtctcctttgaaga

SEQ ID NO: 12103 - DNA, 25 bp, Homo sapiens
ttactggaagagctggccctaaaca

SEQ ID NO: 12104 - DNA, 25 bp, Homo sapiens
ctgcccacacattgagctgttgata

SEQ ID NO: 12105 - DNA, 25 bp, Homo sapiens
aagggccatttgagatcgaattcta

SEQ ID NO: 12106 - DNA, 25 bp, Homo sapiens
ccttcaggcagtagtcagtcttgtc

SEQ ID NO: 12107 - DNA, 25 bp, Homo sapiens
tggggacaatcccaagctcatttgg

SEQ ID NO: 12108 - DNA, 25 bp, Homo sapiens
tgtcttccgctttctagtgtcaatg

SEQ ID NO: 12109 - DNA, 25 bp, Homo sapiens
ggtgctttgggctgaaataaacaca

SEQ ID NO: 12110 - DNA, 25 bp, Homo sapiens
ccctgcaagatgagaacttcctttg

SEQ ID NO: 12111 - DNA, 25 bp, Homo sapiens
tgtagctcactcactgaagcagttt

SEQ ID NO: 12112 - DNA, 25 bp, Homo sapiens
gttagcacgtgggatagacttctga

SEQ ID NO: 12113 - DNA, 25 bp, Homo sapiens
ctaggctgatctccacgcagagtga

SEQ ID NO: 12114 - DNA, 25 bp, Homo sapiens
tatctgaattcacggcatggcatgg

SEQ ID NO: 12115 - DNA, 25 bp, Homo sapiens
ggctagctctcttcagtgtcagtta

SEQ ID NO: 12116 - DNA, 25 bp, Homo sapiens
cctcacaaaggcactgggaagattc

SEQ ID NO: 12117 - DNA, 25 bp, Homo sapiens
aagccctcggccagtcatgtctgca

SEQ ID NO: 12118 - DNA, 25 bp, Homo sapiens
cgccgcatattgtgcttgattttaa

SEQ ID NO: 12119 - DNA, 25 bp, Homo sapiens
tgccacccagtccatggagtcttga

SEQ ID NO: 12120 - DNA, 25 bp, Homo sapiens
tggctccagggcagatcttcaaacc

SEQ ID NO: 12121 - DNA, 25 bp, Homo sapiens
ggccatgctgtgttttttctaatcg

SEQ ID NO: 12122 - DNA, 25 bp, Homo sapiens
ctcgcactgggtcttaatgaaattc

SEQ ID NO: 12123 - DNA, 25 bp, Homo sapiens
aggacactcggtttgatatacaaca

SEQ ID NO: 12124 - DNA, 25 bp, Homo sapiens
ccattagtgtgtatcgcagtgtgta

SEQ ID NO: 12125 - DNA, 25 bp, Homo sapiens
aatactgcagttttataaagatacc

SEQ ID NO: 12126 - DNA, 25 bp, Homo sapiens
tgctctgatagtccaagggcaatcc

SEQ ID NO: 12127 - DNA, 25 bp, Homo sapiens
cagagtttcaggtgtgcttagtgta

SEQ ID NO: 12128 - DNA, 25 bp, Homo sapiens
cctttagtgagaacagagatccaga

SEQ ID NO: 12129 - DNA, 25 bp, Homo sapiens
acacactagcaggtgggccactaca

SEQ ID NO: 12130 - DNA, 25 bp, Homo sapiens
gaatcccgagcttccaggcacgaga

SEQ ID NO: 12131 - DNA, 25 bp, Homo sapiens
tcttctgtactgctgcctttgaggg

SEQ ID NO: 12132 - DNA, 25 bp, Homo sapiens
gggagtcgaccaccttcacaataat

SEQ ID NO: 12133 - DNA, 25 bp, Homo sapiens
gcagcgatgagtcctttactttaca

SEQ ID NO: 12134 - DNA, 25 bp, Homo sapiens
agttgcatctctaggtcacattgac

SEQ ID NO: 12135 - DNA, 25 bp, Homo sapiens
gaaggtacattctgggttctcacta

SEQ ID NO: 12136 - DNA, 25 bp, Homo sapiens
cagaagttctttgggtgacacaggc

SEQ ID NO: 12137 - DNA, 25 bp, Homo sapiens
cacagagtctatattgggcactagc

SEQ ID NO: 12138 - DNA, 25 bp, Homo sapiens
ccaaatgggtcagagtgtgagcttc

SEQ ID NO: 12139 - DNA, 25 bp, Homo sapiens
tgaggcacagtgcaacatttgttca

SEQ ID NO: 12140 - DNA, 25 bp, Homo sapiens
gcaggcttagcccaagaatcaagta

SEQ ID NO: 12141 - DNA, 25 bp, Homo sapiens
aggatccaaggaattatgtgtttcc

SEQ ID NO: 12142 - DNA, 25 bp, Homo sapiens
aaatatctagtcacttattttaaag

SEQ ID NO: 12143 - DNA, 25 bp, Homo sapiens
ctgtttccagtatcgagttagcatc

SEQ ID NO: 12144 - DNA, 25 bp, Homo sapiens
aaaagagtttgtctgcctgcgccta

SEQ ID NO: 12145 - DNA, 25 bp, Homo sapiens
gggagtagcccacacattgcctttt

SEQ ID NO: 12146 - DNA, 25 bp, Homo sapiens
tgatttaggaaattcttgaggagaa

SEQ ID NO: 12147 - DNA, 25 bp, Homo sapiens
aggcacctacgaaaggggctagcta

SEQ ID NO: 12148 - DNA, 25 bp, Homo sapiens
gctctcactggtgatgcttcacgga

SEQ ID NO: 12149 - DNA, 25 bp, Homo sapiens
tatgagaccttcaaaccctgagatg

SEQ ID NO: 12150 - DNA, 25 bp, Homo sapiens
tggtgtgtgtgtgtatctatcaatc

SEQ ID NO: 12151 - DNA, 25 bp, Homo sapiens
gcatcaaccttttgataactgagtg

SEQ ID NO: 12152 - DNA, 25 bp, Homo sapiens
ctcttcaatgaggtaggcaacaata

SEQ ID NO: 12153 - DNA, 25 bp, Homo sapiens
tcagctgctagtttatgccagaatc

SEQ ID NO: 12154 - DNA, 25 bp, Homo sapiens
tgccttctttgtgatgcgatactga

SEQ ID NO: 12155 - DNA, 25 bp, Homo sapiens
gtcttgaattcagttctcaggcatg

SEQ ID NO: 12156 - DNA, 25 bp, Homo sapiens
tctggcccaggtggtaaccattatc

SEQ ID NO: 12157 - DNA, 25 bp, Homo sapiens
gcagccctgcagtaataaaacctta

SEQ ID NO: 12158 - DNA, 25 bp, Homo sapiens
caaatatttctctcaattgggcgga

SEQ ID NO: 12159 - DNA, 25 bp, Homo sapiens
cacgggcgttgaaggtagatgtctt

SEQ ID NO: 12160 - DNA, 25 bp, Homo sapiens
tggccgggcagcactaattgtatca

SEQ ID NO: 12161 - DNA, 25 bp, Homo sapiens
ggttgccttttccttcttaatctta

SEQ ID NO: 12162 - DNA, 25 bp, Homo sapiens
gaacacaaatgtatgcagtcctagc

SEQ ID NO: 12163 - DNA, 25 bp, Homo sapiens
cccccaaaaaagaaatcacaataaa

SEQ ID NO: 12164 - DNA, 25 bp, Homo sapiens
gggctgatgcgctgaatggtaaaaa

SEQ ID NO: 12165 - DNA, 25 bp, Homo sapiens
taaatagggattggggataggagga

SEQ ID NO: 12166 - DNA, 25 bp, Homo sapiens
cagccgtggccatgtctttgaatcc

SEQ ID NO: 12167 - DNA, 25 bp, Homo sapiens
gagtccctcctctgacggcaagttg

SEQ ID NO: 12168 - DNA, 25 bp, Homo sapiens
gtgtctctgagtcaacaaagttgtg

SEQ ID NO: 12169 - DNA, 25 bp, Homo sapiens
gcctggctgtaaaaaggagcaaata

SEQ ID NO: 12170 - DNA, 25 bp, Homo sapiens
gagagtccctcccatgaaattcctg

SEQ ID NO: 12171 - DNA, 25 bp, Homo sapiens
ctgggtaagttagctgagtcatctc

SEQ ID NO: 12172 - DNA, 25 bp, Homo sapiens
agccatgccagttgatgataatttc

SEQ ID NO: 12173 - DNA, 25 bp, Homo sapiens
gcactttagagctttccctgaaata

SEQ ID NO: 12174 - DNA, 25 bp, Homo sapiens
tgtgccctgtgatcccacaattgtg

SEQ ID NO: 12175 - DNA, 25 bp, Homo sapiens
agcctagctcattttgtgcacagtg

SEQ ID NO: 12176 - DNA, 25 bp, Homo sapiens
aagcagcatgtgtcctctgagatgg

SEQ ID NO: 12177 - DNA, 25 bp, Homo sapiens
ggtatccgtaattccttttgtatgc

SEQ ID NO: 12178 - DNA, 25 bp, Homo sapiens
cttctgagtcactagagcctatacc

SEQ ID NO: 12179 - DNA, 25 bp, Homo sapiens
ggtcttgccttagcctctcctagtg

SEQ ID NO: 12180 - DNA, 25 bp, Homo sapiens
tgggccctgatttctactttactgg

SEQ ID NO: 12181 - DNA, 25 bp, Homo sapiens
ggctgcttgactgttttctctctta

SEQ ID NO: 12182 - DNA, 25 bp, Homo sapiens
ttggcctctggtaaataatcaaatg

SEQ ID NO: 12183 - DNA, 25 bp, Homo sapiens
acacagggtctgcatttatctctca

SEQ ID NO: 12184 - DNA, 25 bp, Homo sapiens
ggtctgtttcaagaggccctcagtc

SEQ ID NO: 12185 - DNA, 25 bp, Homo sapiens
ctccaggtggtatcaagaagctttt

SEQ ID NO: 12186 - DNA, 25 bp, Homo sapiens
ccttgatggaactgggtggactttt

SEQ ID NO: 12187 - DNA, 25 bp, Homo sapiens
ggcgaaaagtaatctaaacactgta

SEQ ID NO: 12188 - DNA, 25 bp, Homo sapiens
ttggcccatctagtaatcaactatg

SEQ ID NO: 12189 - DNA, 25 bp, Homo sapiens
ggctaagtgctacgccacataaggt

SEQ ID NO: 12190 - DNA, 25 bp, Homo sapiens
tgggctcagtcagcaaagattctgc

SEQ ID NO: 12191 - DNA, 25 bp, Homo sapiens
cccagagctgattccattttccaca

SEQ ID NO: 12192 - DNA, 25 bp, Homo sapiens
agcacagttctatttggagcatata

SEQ ID NO: 12193 - DNA, 25 bp, Homo sapiens
cccatcaatctggttttgctaattc

SEQ ID NO: 12194 - DNA, 25 bp, Homo sapiens
ggctagtgtgatgctctccaaccca

SEQ ID NO: 12195 - DNA, 25 bp, Homo sapiens
gttctctctgccacatagtacggga

SEQ ID NO: 12196 - DNA, 25 bp, Homo sapiens
cttctgcagctactatgaaatcatg

SEQ ID NO: 12197 - DNA, 25 bp, Homo sapiens
taaaataattagagcttaaaaaagt

SEQ ID NO: 12198 - DNA, 25 bp, Homo sapiens
tctccactaggaagacaaacacgtc

SEQ ID NO: 12199 - DNA, 25 bp, Homo sapiens
aatccataataagaaataaaacttt

SEQ ID NO: 12200 - DNA, 25 bp, Homo sapiens
aaaattagaaattttgtattacagc

SEQ ID NO: 12201 - DNA, 25 bp, Homo sapiens
ctgatttgaacatgcctcggagaac

SEQ ID NO: 12202 - DNA, 25 bp, Homo sapiens
gcctggggacatatacacactcttt

SEQ ID NO: 12203 - DNA, 25 bp, Homo sapiens
ctccagtggatatgaaagtaagcct

SEQ ID NO: 12204 - DNA, 25 bp, Homo sapiens
ccttggcctgactcttgaattggta

SEQ ID NO: 12205 - DNA, 25 bp, Homo sapiens
cccttaccacgagtgcatgtaaatc

SEQ ID NO: 12206 - DNA, 25 bp, Homo sapiens
ttttccattagaggggccatgacta

SEQ ID NO: 12207 - DNA, 25 bp, Homo sapiens
cacaaagagagaaagatgtttacag

SEQ ID NO: 12208 - DNA, 25 bp, Homo sapiens
ttgtgatgaagaggagaatctctcc

SEQ ID NO: 12209 - DNA, 25 bp, Homo sapiens
agaggctgatctcattttcccatcc

SEQ ID NO: 12210 - DNA, 25 bp, Homo sapiens
ggagccatttgtcttccagtgatga

SEQ ID NO: 12211 - DNA, 25 bp, Homo sapiens
tcatgcagcctggagtttcaacttg

SEQ ID NO: 12212 - DNA, 25 bp, Homo sapiens
tccatgataggttgactaagtttcc

SEQ ID NO: 12213 - DNA, 25 bp, Homo sapiens
ccctgctgggtatgtgtttccaaca

SEQ ID NO: 12214 - DNA, 25 bp, Homo sapiens
tcatctgtcgctacggggctttaga

SEQ ID NO: 12215 - DNA, 25 bp, Homo sapiens
gtggccagtcactcctcttgcatga

SEQ ID NO: 12216 - DNA, 25 bp, Homo sapiens
agcctggggattttcatttttctca

SEQ ID NO: 12217 - DNA, 25 bp, Homo sapiens
gcacagtccttgctgccattttata

SEQ ID NO: 12218 - DNA, 25 bp, Homo sapiens
gtgtagccttctctgtacatcagta

SEQ ID NO: 12219 - DNA, 25 bp, Homo sapiens
gcatcctcataggagcttccatttg

SEQ ID NO: 12220 - DNA, 25 bp, Homo sapiens
tgatgacctctgcaatagcctggta

SEQ ID NO: 12221 - DNA, 25 bp, Homo sapiens
atctgtagtatatgtgtgcaacacc

SEQ ID NO: 12222 - DNA, 25 bp, Homo sapiens
ttataggtcccatctctgtgagttg

SEQ ID NO: 12223 - DNA, 25 bp, Homo sapiens
ggcttagctgcctggaacatccatc

SEQ ID NO: 12224 - DNA, 25 bp, Homo sapiens
gctacaaagctgtctgggccctatt

SEQ ID NO: 12225 - DNA, 25 bp, Homo sapiens
attgattacatattaattaattcag

SEQ ID NO: 12226 - DNA, 25 bp, Homo sapiens
tcttcactctgggaaaggattcata

SEQ ID NO: 12227 - DNA, 25 bp, Homo sapiens
tcttccttgcgtgatgaactgcata

SEQ ID NO: 12228 - DNA, 25 bp, Homo sapiens
tcgcctaatggcctctggaaatgtt

SEQ ID NO: 12229 - DNA, 25 bp, Homo sapiens
ccgctctcctgtctttgggaaaaga

SEQ ID NO: 12230 - DNA, 25 bp, Homo sapiens
gctgctgagtttcctgctggatatc

SEQ ID NO: 12231 - DNA, 25 bp, Homo sapiens
tctgggacctccttgcaataaaagc

SEQ ID NO: 12232 - DNA, 25 bp, Homo sapiens
gacactggtcaggtggatctgccta

SEQ ID NO: 12233 - DNA, 25 bp, Homo sapiens
ctcagtgagggaaggttctgctttc

SEQ ID NO: 12234 - DNA, 25 bp, Homo sapiens
gatggtctgtctctagttctcaagg

SEQ ID NO: 12235 - DNA, 25 bp, Homo sapiens
tccgagccaatgcaaaggagtaata

SEQ ID NO: 12236 - DNA, 25 bp, Homo sapiens
ttggtccttccaacttagctaagtg

SEQ ID NO: 12237 - DNA, 25 bp, Homo sapiens
gtggtcaatgtacccaagtctctta

SEQ ID NO: 12238 - DNA, 25 bp, Homo sapiens
ggcccggcattgatatcattctgta

SEQ ID NO: 12239 - DNA, 25 bp, Homo sapiens
gtgtgacaggcttcctccctctgtg

SEQ ID NO: 12240 - DNA, 25 bp, Homo sapiens
cactgttgttgaggatgctggcatc

SEQ ID NO: 12241 - DNA, 25 bp, Homo sapiens
ggccagcagatacagctttggacta

SEQ ID NO: 12242 - DNA, 25 bp, Homo sapiens
gccacatatgtcaacctagagatta

SEQ ID NO: 12243 - DNA, 25 bp, Homo sapiens
ttctcctcagagctggccattgctg

SEQ ID NO: 12244 - DNA, 25 bp, Homo sapiens
atccttggtcacactctgctttgca

SEQ ID NO: 12245 - DNA, 25 bp, Homo sapiens
gcgagatgtctcattgctctgcata

SEQ ID NO: 12246 - DNA, 25 bp, Homo sapiens
ctctctctgcaggagtggggaaata

SEQ ID NO: 12247 - DNA, 25 bp, Homo sapiens
tcgggacataaagtgaaaatcattc

SEQ ID NO: 12248 - DNA, 25 bp, Homo sapiens
ggtccctaagactgctgaaaagatg

SEQ ID NO: 12249 - DNA, 25 bp, Homo sapiens
actgcattgactggggcttcacttg

SEQ ID NO: 12250 - DNA, 25 bp, Homo sapiens
ctgttactaaaactcaggggctgtg

SEQ ID NO: 12251 - DNA, 25 bp, Homo sapiens
ggtgccatgtgacccttgctctaga

SEQ ID NO: 12252 - DNA, 25 bp, Homo sapiens
gcagctccctccgtgtgtagtaata

SEQ ID NO: 12253 - DNA, 25 bp, Homo sapiens
taataaataaaaaagtacaagcggg

SEQ ID NO: 12254 - DNA, 25 bp, Homo sapiens
acaagtctggtgtcccttttgaata

SEQ ID NO: 12255 - DNA, 25 bp, Homo sapiens
tccttcccaggagtatcaacttgtg

SEQ ID NO: 12256 - DNA, 25 bp, Homo sapiens
tgcccagtttgttgcttccctcttg

SEQ ID NO: 12257 - DNA, 25 bp, Homo sapiens
tctgagacccactacttgatcaatg

SEQ ID NO: 12258 - DNA, 25 bp, Homo sapiens
ctgctctgggaaatatgtcactgtc

SEQ ID NO: 12259 - DNA, 25 bp, Homo sapiens
ggaagctacagtttacccatggttg

SEQ ID NO: 12260 - DNA, 25 bp, Homo sapiens
ccattcaggtttttcattggaagtc

SEQ ID NO: 12261 - DNA, 25 bp, Homo sapiens
ctagttcactccattcaggtttttc

SEQ ID NO: 12262 - DNA, 25 bp, Homo sapiens
aataatatttgatatatcctgcaaa

SEQ ID NO: 12263 - DNA, 25 bp, Homo sapiens
cccgggacaggagatcacttaaatt

SEQ ID NO: 12264 - DNA, 25 bp, Homo sapiens
atcattgcaagagttctgtactggc

SEQ ID NO: 12265 - DNA, 25 bp, Homo sapiens
catgttgaatccaagaggatcgaga

SEQ ID NO: 12266 - DNA, 25 bp, Homo sapiens
aggcatacctgtccactgagtgaga

SEQ ID NO: 12267 - DNA, 25 bp, Homo sapiens
cactgttactcactggggctccttc

SEQ ID NO: 12268 - DNA, 25 bp, Homo sapiens
cccactgccttgtctaaaagtagta

SEQ ID NO: 12269 - DNA, 25 bp, Homo sapiens
cctgccagtcgtggggtatatagtt

SEQ ID NO: 12270 - DNA, 25 bp, Homo sapiens
gacgggcaaacattacaggcttatt

SEQ ID NO: 12271 - DNA, 25 bp, Homo sapiens
aggtgttaccaactccaaattaagc

SEQ ID NO: 12272 - DNA, 25 bp, Homo sapiens
tattctttaactggcataaaataat

SEQ ID NO: 12273 - DNA, 25 bp, Homo sapiens
caaaaatagcaacaacaaagaagaa

SEQ ID NO: 12274 - DNA, 25 bp, Homo sapiens
acacagcagattggagttgccctta

SEQ ID NO: 12275 - DNA, 25 bp, Homo sapiens
tgtgcatgtggaacattcatctaaa

SEQ ID NO: 12276 - DNA, 25 bp, Homo sapiens
tgtgtcatggtgtcaaagagaaaca

SEQ ID NO: 12277 - DNA, 25 bp, Homo sapiens
caggaaataagatcgcataacactc

SEQ ID NO: 12278 - DNA, 25 bp, Homo sapiens
ctctttcctattagagaaaacatga

SEQ ID NO: 12279 - DNA, 25 bp, Homo sapiens
aacagtatcagttttcatttcatta

SEQ ID NO: 12280 - DNA, 25 bp, Homo sapiens
ttcagaaccaagaacatagctcaca

SEQ ID NO: 12281 - DNA, 25 bp, Homo sapiens
gggccgtttatgtgcttcagcttta

SEQ ID NO: 12282 - DNA, 25 bp, Homo sapiens
tcaggctccctcgttagacccaaag

SEQ ID NO: 12283 - DNA, 25 bp, Homo sapiens
cattccctggttgtctgagaaatca

SEQ ID NO: 12284 - DNA, 25 bp, Homo sapiens
gggaagatgcccaacccagctttgc

SEQ ID NO: 12285 - DNA, 25 bp, Homo sapiens
attgttcttttctcataggtgctga

SEQ ID NO: 12286 - DNA, 25 bp, Homo sapiens
ctctcttagagagatcttagatctc

SEQ ID NO: 12287 - DNA, 25 bp, Homo sapiens
aaggctcgcctacgttagcttccta

SEQ ID NO: 12288 - DNA, 25 bp, Homo sapiens
acacccagtccctgtcattcagttg

SEQ ID NO: 12289 - DNA, 25 bp, Homo sapiens
agctgtgtattaatgcctcgatttc

SEQ ID NO: 12290 - DNA, 25 bp, Homo sapiens
ccacctgtggttgcctcaaaaatta

SEQ ID NO: 12291 - DNA, 25 bp, Homo sapiens
caaactgggagttgtgctttctatc

SEQ ID NO: 12292 - DNA, 25 bp, Homo sapiens
cctggctgagaaccatcattttatt

SEQ ID NO: 12293 - DNA, 25 bp, Homo sapiens
ggtgactctgctcaaagtggtatta

SEQ ID NO: 12294 - DNA, 25 bp, Homo sapiens
atggccatgacttacaccctgacta

SEQ ID NO: 12295 - DNA, 25 bp, Homo sapiens
ccctctgaggcggaagttgaaaatc

SEQ ID NO: 12296 - DNA, 25 bp, Homo sapiens
tctcagtgttcccatccgacaaatg

SEQ ID NO: 12297 - DNA, 25 bp, Homo sapiens
atggtctcagcttctcccttgtaag

SEQ ID NO: 12298 - DNA, 25 bp, Homo sapiens
gtgtgtaagtttgctgccatctata

SEQ ID NO: 12299 - DNA, 25 bp, Homo sapiens
agccttgtttcactgccctggattg

SEQ ID NO: 12300 - DNA, 25 bp, Homo sapiens
gtgccttggactctgtgcctaattc

SEQ ID NO: 12301 - DNA, 25 bp, Homo sapiens
gcagtgtgtgaactataagctccta

SEQ ID NO: 12302 - DNA, 25 bp, Homo sapiens
gaatggcttcaaccttagtgcagta

SEQ ID NO: 12303 - DNA, 25 bp, Homo sapiens
gcccaatgtcctctgcagtctaaga

SEQ ID NO: 12304 - DNA, 25 bp, Homo sapiens
gggtggtcaacccagccatatttta

SEQ ID NO: 12305 - DNA, 25 bp, Homo sapiens
tggctgtgatagcattcggcaatta

SEQ ID NO: 12306 - DNA, 25 bp, Homo sapiens
ggttttggccatccaccatgtttga

SEQ ID NO: 12307 - DNA, 25 bp, Homo sapiens
tccctgtagtcagcttaggtgcaca

SEQ ID NO: 12308 - DNA, 25 bp, Homo sapiens
aggctccaaagtacccgtttaaatg

SEQ ID NO: 12309 - DNA, 25 bp, Homo sapiens
gccctacttctgctttggttgaatt

SEQ ID NO: 12310 - DNA, 25 bp, Homo sapiens
tgaccagtggtgctttgttctactg

SEQ ID NO: 12311 - DNA, 25 bp, Homo sapiens
gcctctctggccaatatgggttata

SEQ ID NO: 12312 - DNA, 25 bp, Homo sapiens
acacctcggtgctggccaagattta

SEQ ID NO: 12313 - DNA, 25 bp, Homo sapiens
ctgccctgtaagtgatggtgaccta

SEQ ID NO: 12314 - DNA, 25 bp, Homo sapiens
atgcctgccctcagaatattgatca

SEQ ID NO: 12315 - DNA, 25 bp, Homo sapiens
tcatcagctgtttttggcctcagtc

SEQ ID NO: 12316 - DNA, 25 bp, Homo sapiens
tggccattctttcatgtgtcagaga

SEQ ID NO: 12317 - DNA, 25 bp, Homo sapiens
tttccttgttggtggagtgtccttc

SEQ ID NO: 12318 - DNA, 25 bp, Homo sapiens
tgcagccaacatggaaagcttcttt

SEQ ID NO: 12319 - DNA, 25 bp, Homo sapiens
gctgagcagccaatccaggaccttg

SEQ ID NO: 12320 - DNA, 25 bp, Homo sapiens
ccctcgactagtgataatgatattg

SEQ ID NO: 12321 - DNA, 25 bp, Homo sapiens
gagctctggactgactgctactcta

SEQ ID NO: 12322 - DNA, 25 bp, Homo sapiens
tgggcttttccacttcatgacaatg

SEQ ID NO: 12323 - DNA, 25 bp, Homo sapiens
tccgggttaaggtaatcagcaattc

SEQ ID NO: 12324 - DNA, 25 bp, Homo sapiens
agagtgtgccctttcctactgccca

SEQ ID NO: 12325 - DNA, 25 bp, Homo sapiens
tgccctccacagttaatagcgagtg

SEQ ID NO: 12326 - DNA, 25 bp, Homo sapiens
tacacaagttggtgctaggctcata

SEQ ID NO: 12327 - DNA, 25 bp, Homo sapiens
cagcacataagtagcctaggaataa

SEQ ID NO: 12328 - DNA, 25 bp, Homo sapiens
ctgtctcctttgacgcacgaatgga

SEQ ID NO: 12329 - DNA, 25 bp, Homo sapiens
actctcagctctaggaattcacagg

SEQ ID NO: 12330 - DNA, 25 bp, Homo sapiens
tttccactaacgtgattacagtgta

SEQ ID NO: 12331 - DNA, 25 bp, Homo sapiens
ctgcatatttccagaaggtcccttg

SEQ ID NO: 12332 - DNA, 25 bp, Homo sapiens
gcgggtgatcacagcttttctattt

SEQ ID NO: 12333 - DNA, 25 bp, Homo sapiens
gtctcgcttccggtacaaaagtctc

SEQ ID NO: 12334 - DNA, 25 bp, Homo sapiens
gaaggtgccctctgatcactcctga

SEQ ID NO: 12335 - DNA, 25 bp, Homo sapiens
gcccacagtggatttggcacaagta

SEQ ID NO: 12336 - DNA, 25 bp, Homo sapiens
tctgcgaagcactcatgggatactc

SEQ ID NO: 12337 - DNA, 25 bp, Homo sapiens
ccaaaagtggtttttcctacgcata

SEQ ID NO: 12338 - DNA, 25 bp, Homo sapiens
gctctgggacctcatcaacttggga

SEQ ID NO: 12339 - DNA, 25 bp, Homo sapiens
tgctcagccagtttcccagacagga

SEQ ID NO: 12340 - DNA, 25 bp, Homo sapiens
ggctccctagatggcatggttccta

SEQ ID NO: 12341 - DNA, 25 bp, Homo sapiens
cccaaacctgggtcaagaagctaca

SEQ ID NO: 12342 - DNA, 25 bp, Homo sapiens
ggcgcctctcttcacgggcaagatt

SEQ ID NO: 12343 - DNA, 25 bp, Homo sapiens
caggtgccagctccttgaattcagc

SEQ ID NO: 12344 - DNA, 25 bp, Homo sapiens
gcagacgatttcactcacccagata

SEQ ID NO: 12345 - DNA, 25 bp, Homo sapiens
aggagccatattgggatcatccagc

SEQ ID NO: 12346 - DNA, 25 bp, Homo sapiens
gtggctcaaccacaaacagctgatg

SEQ ID NO: 12347 - DNA, 25 bp, Homo sapiens
ctgctgtcagaaacatgtgcccgtc

SEQ ID NO: 12348 - DNA, 25 bp, Homo sapiens
ctggcctgagtgaggatgctatctc

SEQ ID NO: 12349 - DNA, 25 bp, Homo sapiens
ccactgagccatctgggatgagttc

SEQ ID NO: 12350 - DNA, 25 bp, Homo sapiens
tgggagactccaaccatccactttg

SEQ ID NO: 12351 - DNA, 25 bp, Homo sapiens
cctgtgtgcctgacttgttttaaga

SEQ ID NO: 12352 - DNA, 25 bp, Homo sapiens
catcacctggctgaaggctccctga

SEQ ID NO: 12353 - DNA, 25 bp, Homo sapiens
cccaaagggtaatatggatggcttc

SEQ ID NO: 12354 - DNA, 25 bp, Homo sapiens
ccagggagccactatgtgcttccta

SEQ ID NO: 12355 - DNA, 25 bp, Homo sapiens
atggctctacttcttcaggctgtga

SEQ ID NO: 12356 - DNA, 25 bp, Homo sapiens
tctttgggctacagctgggtctatc

SEQ ID NO: 12357 - DNA, 25 bp, Homo sapiens
tcccatggatgtttgcagaagaagc

SEQ ID NO: 12358 - DNA, 25 bp, Homo sapiens
tgtgcttcccaagactccgaggtta

SEQ ID NO: 12359 - DNA, 25 bp, Homo sapiens
cgccttctctgccagtgggaatttg

SEQ ID NO: 12360 - DNA, 25 bp, Homo sapiens
ctcaataccgctggggcagtgcctt

SEQ ID NO: 12361 - DNA, 25 bp, Homo sapiens
acagagtacatgggagtgcatatga

SEQ ID NO: 12362 - DNA, 25 bp, Homo sapiens
ctcggctcctgaggggacattaaaa

SEQ ID NO: 12363 - DNA, 25 bp, Homo sapiens
cccagcacctagttgatgctcaata

SEQ ID NO: 12364 - DNA, 25 bp, Homo sapiens
acggggccctcatgaatgcttcatc

SEQ ID NO: 12365 - DNA, 25 bp, Homo sapiens
agggtctgaggacaggttccacatc

SEQ ID NO: 12366 - DNA, 25 bp, Homo sapiens
gctctgctgagctggaaacatgcca

SEQ ID NO: 12367 - DNA, 25 bp, Homo sapiens
gggtaggccaacatctcttccagga

SEQ ID NO: 12368 - DNA, 25 bp, Homo sapiens
ctccctagggcagacagcaagacta

SEQ ID NO: 12369 - DNA, 25 bp, Homo sapiens
gactgcctggtggtgttacttcatc

SEQ ID NO: 12370 - DNA, 25 bp, Homo sapiens
ctgtggcctcagacatggattgatt

SEQ ID NO: 12371 - DNA, 25 bp, Homo sapiens
gagccggctaatcccacagggttta

SEQ ID NO: 12372 - DNA, 25 bp, Homo sapiens
cggcctaaatatgagcagctgacca

SEQ ID NO: 12373 - DNA, 25 bp, Homo sapiens
tgctcagcgggtctctattggctta

SEQ ID NO: 12374 - DNA, 25 bp, Homo sapiens
cgagggctgcctgaccatatttaga

SEQ ID NO: 12375 - DNA, 25 bp, Homo sapiens
ggccttgctggcagatggccccagg

SEQ ID NO: 12376 - DNA, 25 bp, Homo sapiens
agggccctctctgtagtctctattc

SEQ ID NO: 12377 - DNA, 25 bp, Homo sapiens
tggcggcctcatcaaatccctgctg

SEQ ID NO: 12378 - DNA, 25 bp, Homo sapiens
tgctgctccctgacctttgctcatg

SEQ ID NO: 12379 - DNA, 25 bp, Homo sapiens
ctccctggggattgtttagcctgca

SEQ ID NO: 12380 - DNA, 25 bp, Homo sapiens
tcctggacacaagtggggcatccta

SEQ ID NO: 12381 - DNA, 25 bp, Homo sapiens
ctccaagagccagcatcaggtgata

SEQ ID NO: 12382 - DNA, 25 bp, Homo sapiens
atgcccggcactatcaggtcccaga

SEQ ID NO: 12383 - DNA, 25 bp, Homo sapiens
aggtctctttgtgccactggtttta

SEQ ID NO: 12384 - DNA, 25 bp, Homo sapiens
gccaggacctcgcatgtgtgatttg

SEQ ID NO: 12385 - DNA, 25 bp, Homo sapiens
ttcttgcgaatgtcccagagcctgg

SEQ ID NO: 12386 - DNA, 25 bp, Homo sapiens
cacgtgctaaatatctggggctatc

SEQ ID NO: 12387 - DNA, 25 bp, Homo sapiens
tgaagctgcctctcagcactggagg

SEQ ID NO: 12388 - DNA, 25 bp, Homo sapiens
gagagcccatctcatcctcagagtg

SEQ ID NO: 12389 - DNA, 25 bp, Homo sapiens
tctgggcctgccacagaggaatagg

SEQ ID NO: 12390 - DNA, 25 bp, Homo sapiens
ggcttgcactcacaggctgctcttc

SEQ ID NO: 12391 - DNA, 25 bp, Homo sapiens
ccggaggcactccatggctatgata

SEQ ID NO: 12392 - DNA, 25 bp, Homo sapiens
tgcgatctgctcagccaggcacacg

SEQ ID NO: 12393 - DNA, 25 bp, Homo sapiens
caggcccagggattctttcaggaga

SEQ ID NO: 12394 - DNA, 25 bp, Homo sapiens
ctcctgcttggccagtggaaaatta

SEQ ID NO: 12395 - DNA, 25 bp, Homo sapiens
gctcctgatggccttgtcatgtcta

SEQ ID NO: 12396 - DNA, 25 bp, Homo sapiens
gtcccggggaacaagctggtttaaa

SEQ ID NO: 12397 - DNA, 25 bp, Homo sapiens
ctggcccgacacaatgacctatttt

SEQ ID NO: 12398 - DNA, 25 bp, Homo sapiens
tggttctcagtctcttacataaggg

SEQ ID NO: 12399 - DNA, 25 bp, Homo sapiens
ccctggatttggtacctgtagcaga

SEQ ID NO: 12400 - DNA, 25 bp, Homo sapiens
gggtggctcctcatcagcacacaga

SEQ ID NO: 12401 - DNA, 25 bp, Homo sapiens
gtactgcctggctgaaggacactta

SEQ ID NO: 12402 - DNA, 25 bp, Homo sapiens
gatgggccaccatgcattatctgtc

SEQ ID NO: 12403 - DNA, 25 bp, Homo sapiens
tgtgagcacacttcaaacccggcgg

SEQ ID NO: 12404 - DNA, 25 bp, Homo sapiens
tgcccatgggcagcagaacttgtta

SEQ ID NO: 12405 - DNA, 25 bp, Homo sapiens
tcagatgtcacagagctcaggtata

SEQ ID NO: 12406 - DNA, 25 bp, Homo sapiens
gcagcctatagttggcacttttgtt

SEQ ID NO: 12407 - DNA, 25 bp, Homo sapiens
gcacgtttagtcagctgtcctgcta

SEQ ID NO: 12408 - DNA, 25 bp, Homo sapiens
aggggcacacactcactaagtaata

SEQ ID NO: 12409 - DNA, 25 bp, Homo sapiens
ctcctggccacaaggcactataata

SEQ ID NO: 12410 - DNA, 25 bp, Homo sapiens
ccaggagacattccgtgtattcatc

SEQ ID NO: 12411 - DNA, 25 bp, Homo sapiens
gtcaggacctccacaaggcttcaga

SEQ ID NO: 12412 - DNA, 25 bp, Homo sapiens
aggaacccactcgaagaacctgttg

SEQ ID NO: 12413 - DNA, 25 bp, Homo sapiens
gctgctgccaccaagaagaggattc

SEQ ID NO: 12414 - DNA, 25 bp, Homo sapiens
ctcctgggaagttgttattgaaatc

SEQ ID NO: 12415 - DNA, 25 bp, Homo sapiens
cagatgcccacccactttgtaaagg

SEQ ID NO: 12416 - DNA, 25 bp, Homo sapiens
tctctgggaagggacattgtaaacc

SEQ ID NO: 12417 - DNA, 25 bp, Homo sapiens
gggcctgtcgcacccagtgcatata

SEQ ID NO: 12418 - DNA, 25 bp, Homo sapiens
ttccacgtgactctccagcaggttc

SEQ ID NO: 12419 - DNA, 25 bp, Homo sapiens
ccagtgctctgaagctccaggtgca

SEQ ID NO: 12420 - DNA, 25 bp, Homo sapiens
ttgcaccctcatacggtcagacatg

SEQ ID NO: 12421 - DNA, 25 bp, Homo sapiens
acctgaaacgtgatgtcctgagacc

SEQ ID NO: 12422 - DNA, 25 bp, Homo sapiens
ttcgtagcggctatgacattctgta

SEQ ID NO: 12423 - DNA, 25 bp, Homo sapiens
accctggagcctgaataatattttg

SEQ ID NO: 12424 - DNA, 25 bp, Homo sapiens
gtggttgtttgtacagcacaggata

SEQ ID NO: 12425 - DNA, 25 bp, Homo sapiens
ggcccatcacggagtctgcatagta

SEQ ID NO: 12426 - DNA, 25 bp, Homo sapiens
ggcagatttcctttagtatttcaga

SEQ ID NO: 12427 - DNA, 25 bp, Homo sapiens
tctgtctgagagaggagagcccata

SEQ ID NO: 12428 - DNA, 25 bp, Homo sapiens
tctccaagaagaaaggggcagtccc

SEQ ID NO: 12429 - DNA, 25 bp, Homo sapiens
cttggaactctgaaggctgaacatg

SEQ ID NO: 12430 - DNA, 25 bp, Homo sapiens
ttttataatcttaaacagcaggtgt

SEQ ID NO: 12431 - DNA, 25 bp, Homo sapiens
gcgccctctggtgttctgatcactc

SEQ ID NO: 12432 - DNA, 25 bp, Homo sapiens
gaggggcctcatttccatgtctttc

SEQ ID NO: 12433 - DNA, 25 bp, Homo sapiens
cgtctccaggggaaaagctcatttt

SEQ ID NO: 12434 - DNA, 25 bp, Homo sapiens
gggcagagatccacctatgagtacg

SEQ ID NO: 12435 - DNA, 25 bp, Homo sapiens
aggaggttctcacatcttctggaaa

SEQ ID NO: 12436 - DNA, 25 bp, Homo sapiens
caggtgttagtagagactgccatta

SEQ ID NO: 12437 - DNA, 25 bp, Homo sapiens
cctgcagacctgagccttggaattt

SEQ ID NO: 12438 - DNA, 25 bp, Homo sapiens
gcggacccagttcatgctatagcta

SEQ ID NO: 12439 - DNA, 25 bp, Homo sapiens
gcatgtgtggttttgctgccctcca

SEQ ID NO: 12440 - DNA, 25 bp, Homo sapiens
tatttgcattctttttttactctgg

SEQ ID NO: 12441 - DNA, 25 bp, Homo sapiens
cacctgagggagctgaacatgattc

SEQ ID NO: 12442 - DNA, 25 bp, Homo sapiens
tcctgtctctgtgttgaatcatttg

SEQ ID NO: 12443 - DNA, 25 bp, Homo sapiens
gatctatttgccctttgcaagtctc

SEQ ID NO: 12444 - DNA, 25 bp, Homo sapiens
ggtagctcagcagtgtgtcttcatc

SEQ ID NO: 12445 - DNA, 25 bp, Homo sapiens
cccaagttccaggtgaggccatagt

SEQ ID NO: 12446 - DNA, 25 bp, Homo sapiens
gggtatccatgtgcagaagaaaata

SEQ ID NO: 12447 - DNA, 25 bp, Homo sapiens
cgctgtatcattctgaaacctgcta

SEQ ID NO: 12448 - DNA, 25 bp, Homo sapiens
gtggtacaaagttatccatgtatgg

SEQ ID NO: 12449 - DNA, 25 bp, Homo sapiens
ggtataatgcatacttatatttcaa

SEQ ID NO: 12450 - DNA, 25 bp, Homo sapiens
gcaaaatgtaaatgtgattattatg

SEQ ID NO: 12451 - DNA, 25 bp, Homo sapiens
tgcagcctctccagaagtcttcggg

SEQ ID NO: 12452 - DNA, 25 bp, Homo sapiens
cggcgtattctgttgtcccaccata

SEQ ID NO: 12453 - DNA, 25 bp, Homo sapiens
ctagggttcaggcagatacattctt

SEQ ID NO: 12454 - DNA, 25 bp, Homo sapiens
ggaacactggttccaccctacagga

SEQ ID NO: 12455 - DNA, 25 bp, Homo sapiens
cctgggcacatgagctgtcaaatta

SEQ ID NO: 12456 - DNA, 25 bp, Homo sapiens
aggcatcgccattgctcgtatcata

SEQ ID NO: 12457 - DNA, 25 bp, Homo sapiens
tgtaggcctggttgttgtccaccca

SEQ ID NO: 12458 - DNA, 25 bp, Homo sapiens
ccaggagtctttgatttcttatgta

SEQ ID NO: 12459 - DNA, 25 bp, Homo sapiens
ggacgacttgatgcacctacatatg

SEQ ID NO: 12460 - DNA, 25 bp, Homo sapiens
gcaggcccttagttgtacaggaaca

SEQ ID NO: 12461 - DNA, 25 bp, Homo sapiens
tggaactgtccctgccttttgtgtg

SEQ ID NO: 12462 - DNA, 25 bp, Homo sapiens
tcctcctctgtagcaaactctgatg

SEQ ID NO: 12463 - DNA, 25 bp, Homo sapiens
tgcaaagcagggcaccagctcctgc

SEQ ID NO: 12464 - DNA, 25 bp, Homo sapiens
ttatgaaagaagtctttattacacc

SEQ ID NO: 12465 - DNA, 25 bp, Homo sapiens
cgggctttttcacctctgctccaga

SEQ ID NO: 12466 - DNA, 25 bp, Homo sapiens
ccacattgcttggaggaggccctta

SEQ ID NO: 12467 - DNA, 25 bp, Homo sapiens
catgcgtcagcaatcaggaactttc

SEQ ID NO: 12468 - DNA, 25 bp, Homo sapiens
gaggggttcttcctgagccaaagca

SEQ ID NO: 12469 - DNA, 25 bp, Homo sapiens
cccatgtggtttcagcctggattga

SEQ ID NO: 12470 - DNA, 25 bp, Homo sapiens
gggcctcaccctggatacctgaaaa

SEQ ID NO: 12471 - DNA, 25 bp, Homo sapiens
agaatttgtgctccctcgtgaccta

SEQ ID NO: 12472 - DNA, 25 bp, Homo sapiens
gctgactgcatggttgcttcttcta

SEQ ID NO: 12473 - DNA, 25 bp, Homo sapiens
gtcaatcggcccttcacagagtcta

SEQ ID NO: 12474 - DNA, 25 bp, Homo sapiens
cttccttcctgtaatgaaagcatgg

SEQ ID NO: 12475 - DNA, 25 bp, Homo sapiens
ctgggacagaggctgccaaatatca

SEQ ID NO: 12476 - DNA, 25 bp, Homo sapiens
ttgggtctaatatctgtaataaggc

SEQ ID NO: 12477 - DNA, 25 bp, Homo sapiens
caggaaagtggtgtgaccctctaca

SEQ ID NO: 12478 - DNA, 25 bp, Homo sapiens
ctggcctaccctctattgtctgtga

SEQ ID NO: 12479 - DNA, 25 bp, Homo sapiens
tgaggtccctgtccttggtctgata

SEQ ID NO: 12480 - DNA, 25 bp, Homo sapiens
tttcatcagcagagggagggcccta

SEQ ID NO: 12481 - DNA, 25 bp, Homo sapiens
gtagctactcggcacgggaatttaa

SEQ ID NO: 12482 - DNA, 25 bp, Homo sapiens
tccagctgcgtgaagataaaagata

SEQ ID NO: 12483 - DNA, 25 bp, Homo sapiens
gggcactgtcattgttcatacgaga

SEQ ID NO: 12484 - DNA, 25 bp, Homo sapiens
ttcctgctgcatagaataagttgtc

SEQ ID NO: 12485 - DNA, 25 bp, Homo sapiens
tgcccagggctcatttatgtgtata

SEQ ID NO: 12486 - DNA, 25 bp, Homo sapiens
tgcacctgccctgaagctgagcttt

SEQ ID NO: 12487 - DNA, 25 bp, Homo sapiens
ctctgaatcgtgcaggaacagctcc

SEQ ID NO: 12488 - DNA, 25 bp, Homo sapiens
gatgaccatctgcacctgccctaga

SEQ ID NO: 12489 - DNA, 25 bp, Homo sapiens
tctgaccactagaggagactgctcc

SEQ ID NO: 12490 - DNA, 25 bp, Homo sapiens
cttatctgctgtcctgtggtgctga

SEQ ID NO: 12491 - DNA, 25 bp, Homo sapiens
ctgacggacccacccatgagcttta

SEQ ID NO: 12492 - DNA, 25 bp, Homo sapiens
ccatccagctggtacgccttgtcta

SEQ ID NO: 12493 - DNA, 25 bp, Homo sapiens
tcgcacagtaatacacggccgtgtc

SEQ ID NO: 12494 - DNA, 25 bp, Homo sapiens
gagctgcccttctgagaccttttga

SEQ ID NO: 12495 - DNA, 25 bp, Homo sapiens
gaaggaagttccatctgacagctca

SEQ ID NO: 12496 - DNA, 25 bp, Homo sapiens
gacttccaggagaggtgaacatttc

SEQ ID NO: 12497 - DNA, 25 bp, Homo sapiens
tgctgctgccaccaagaagaggatg

SEQ ID NO: 12498 - DNA, 25 bp, Homo sapiens
cctggagctctagaggcactgaatc

SEQ ID NO: 12499 - DNA, 25 bp, Homo sapiens
cgcagccaggctcatttaaattatc

SEQ ID NO: 12500 - DNA, 25 bp, Homo sapiens
agatactttttcatgggacctccaa

SEQ ID NO: 12501 - DNA, 25 bp, Homo sapiens
gatggcagatccttactcagtagta

SEQ ID NO: 12502 - DNA, 25 bp, Homo sapiens
gcacagctttgcctttgcctttata

SEQ ID NO: 12503 - DNA, 25 bp, Homo sapiens
aagacgaatgtaactatgaaattta

SEQ ID NO: 12504 - DNA, 25 bp, Homo sapiens
catggggatttgaacgtcatcatca

SEQ ID NO: 12505 - DNA, 25 bp, Homo sapiens
ccaggtcgggaatcacccaggttta

SEQ ID NO: 12506 - DNA, 25 bp, Homo sapiens
tccatttcggaagggcaggatcaaa

SEQ ID NO: 12507 - DNA, 25 bp, Homo sapiens
tgcctgacgtgtgctgaagcttgta

SEQ ID NO: 12508 - DNA, 25 bp, Homo sapiens
ggtcctgtcattcttcattgctgta

SEQ ID NO: 12509 - DNA, 25 bp, Homo sapiens
ttgatggttccacaactacacgggc

SEQ ID NO: 12510 - DNA, 25 bp, Homo sapiens
ctaaccagtgtcagagagcagccca

SEQ ID NO: 12511 - DNA, 25 bp, Homo sapiens
tctgggttcttagctgcaatgagtc

SEQ ID NO: 12512 - DNA, 25 bp, Homo sapiens
gcgactttttaccagccgcggcttt

SEQ ID NO: 12513 - DNA, 25 bp, Homo sapiens
tggacccaggaaaagtcgcaaaatc

SEQ ID NO: 12514 - DNA, 25 bp, Homo sapiens
tccaggctctgtgttgaatcacttg

SEQ ID NO: 12515 - DNA, 25 bp, Homo sapiens
ggtctccacttgctgtaagctcaca

SEQ ID NO: 12516 - DNA, 25 bp, Homo sapiens
ctcacttggttctggatattgggtc

SEQ ID NO: 12517 - DNA, 25 bp, Homo sapiens
aagcaatcagcacaattggaaggct

SEQ ID NO: 12518 - DNA, 25 bp, Homo sapiens
ccagcaaggtttgtgtcagggctca

SEQ ID NO: 12519 - DNA, 25 bp, Homo sapiens
gaggactccttttgtaccactgtga

SEQ ID NO: 12520 - DNA, 25 bp, Homo sapiens
tttcccttactgtgttattactata

SEQ ID NO: 12521 - DNA, 25 bp, Homo sapiens
tcctggtcacactagcatcaaatca

SEQ ID NO: 12522 - DNA, 25 bp, Homo sapiens
gactattccatgaccaggggcttga

SEQ ID NO: 12523 - DNA, 25 bp, Homo sapiens
cccatatggctggtggatatcctta

SEQ ID NO: 12524 - DNA, 25 bp, Homo sapiens
tcactgtcagctatacgggatggtc

SEQ ID NO: 12525 - DNA, 25 bp, Homo sapiens
tgcctggatcccatgcatgtgcttg

SEQ ID NO: 12526 - DNA, 25 bp, Homo sapiens
tatggtgactctgccctggaacttc

SEQ ID NO: 12527 - DNA, 25 bp, Homo sapiens
gcagcctcatgtgcaccagctctgg

SEQ ID NO: 12528 - DNA, 25 bp, Homo sapiens
caggagggcagagtaccaattattc

SEQ ID NO: 12529 - DNA, 25 bp, Homo sapiens
tacttcttggggactgcattggacc

SEQ ID NO: 12530 - DNA, 25 bp, Homo sapiens
ggggcacccagaatatctcatccta

SEQ ID NO: 12531 - DNA, 25 bp, Homo sapiens
tcctggctgcagcatccacatatta

SEQ ID NO: 12532 - DNA, 25 bp, Homo sapiens
tcaccagtgacctgacacaagcagc

SEQ ID NO: 12533 - DNA, 25 bp, Homo sapiens
gcagaacctatggtgcttcaagata

SEQ ID NO: 12534 - DNA, 25 bp, Homo sapiens
tgctgctgccaccaagaaaaggatg

SEQ ID NO: 12535 - DNA, 25 bp, Homo sapiens
tgcaggttgatagaagcccactcca

SEQ ID NO: 12536 - DNA, 25 bp, Homo sapiens
agctggcagccctcaatcctgtttc

SEQ ID NO: 12537 - DNA, 25 bp, Homo sapiens
gcctccatcatgtatgcttccaatg

SEQ ID NO: 12538 - DNA, 25 bp, Homo sapiens
ctccctaggggatggcagatcctta

SEQ ID NO: 12539 - DNA, 25 bp, Homo sapiens
cagataattgctccttttgcatttt

SEQ ID NO: 12540 - DNA, 25 bp, Homo sapiens
ctctctctctgtctccatatataca

SEQ ID NO: 12541 - DNA, 25 bp, Homo sapiens
cccgggttttcagtgggtcttttga

SEQ ID NO: 12542 - DNA, 25 bp, Homo sapiens
atgctcctggacctgtggacacaca

SEQ ID NO: 12543 - DNA, 25 bp, Homo sapiens
tacacggccaagtcctcggttttca

SEQ ID NO: 12544 - DNA, 25 bp, Homo sapiens
tctcaggactggatccaactgcttc

SEQ ID NO: 12545 - DNA, 25 bp, Homo sapiens
tacctgccctgatgctgagccttga

SEQ ID NO: 12546 - DNA, 25 bp, Homo sapiens
aagcactggttctgttggggaatcc

SEQ ID NO: 12547 - DNA, 25 bp, Homo sapiens
gcggcatcttcatccctgtgggtta

SEQ ID NO: 12548 - DNA, 25 bp, Homo sapiens
cccgggtgcatgaacacttgaaata

SEQ ID NO: 12549 - DNA, 25 bp, Homo sapiens
gggttatcacaccaagtaagcagtc

SEQ ID NO: 12550 - DNA, 25 bp, Homo sapiens
ataagggcctgtgatattttgaagc

SEQ ID NO: 12551 - DNA, 25 bp, Homo sapiens
aggcttgtttctgggctcatactga

SEQ ID NO: 12552 - DNA, 25 bp, Homo sapiens
aattttaattttaagatcattggtc

SEQ ID NO: 12553 - DNA, 25 bp, Homo sapiens
aggcctcagtagtgacctgctcaca

SEQ ID NO: 12554 - DNA, 25 bp, Homo sapiens
caagcctctgttgggtggtttcttc

SEQ ID NO: 12555 - DNA, 25 bp, Homo sapiens
tctggtgtctttacttatgaggtca

SEQ ID NO: 12556 - DNA, 25 bp, Homo sapiens
ccaggtaacagagcatcagcattca

SEQ ID NO: 12557 - DNA, 25 bp, Homo sapiens
cattctggaggtcagcagctgccta

SEQ ID NO: 12558 - DNA, 25 bp, Homo sapiens
gggcctggccctacgaaacatagtg

SEQ ID NO: 12559 - DNA, 25 bp, Homo sapiens
cccgggaatgccttctgtcttggaa

SEQ ID NO: 12560 - DNA, 25 bp, Homo sapiens
gcaggcatcactcaggctttttata

SEQ ID NO: 12561 - DNA, 25 bp, Homo sapiens
gtgcaattgcctgtgtcatcgttta

SEQ ID NO: 12562 - DNA, 25 bp, Homo sapiens
aaagctctttccttggggcctgtgc

SEQ ID NO: 12563 - DNA, 25 bp, Homo sapiens
cgctggaggccgatttctttcattg

SEQ ID NO: 12564 - DNA, 25 bp, Homo sapiens
tggcaatcctcagctcatcttagaa

SEQ ID NO: 12565 - DNA, 25 bp, Homo sapiens
cctcctgatgctgtgattggggttc

SEQ ID NO: 12566 - DNA, 25 bp, Homo sapiens
gccactgagacacatttaccttaga

SEQ ID NO: 12567 - DNA, 25 bp, Homo sapiens
tagtgccactctgctcttctgtttg

SEQ ID NO: 12568 - DNA, 25 bp, Homo sapiens
ggttttccttcccacattctaattg

SEQ ID NO: 12569 - DNA, 25 bp, Homo sapiens
gtaaaggtttgtagcctgggcaaca

SEQ ID NO: 12570 - DNA, 25 bp, Homo sapiens
ccaaccaaattaaacagagcagaaa

SEQ ID NO: 12571 - DNA, 25 bp, Homo sapiens
ggctctattcccaaagctgtggtca

SEQ ID NO: 12572 - DNA, 25 bp, Homo sapiens
gtgcttggactctgcctgcttatta

SEQ ID NO: 12573 - DNA, 25 bp, Homo sapiens
gccactgttctttgttgctcctagg

SEQ ID NO: 12574 - DNA, 25 bp, Homo sapiens
taataacttttgactggaacaataa

SEQ ID NO: 12575 - DNA, 25 bp, Homo sapiens
tcttctattggggtacatttgtacc

SEQ ID NO: 12576 - DNA, 25 bp, Homo sapiens
gcccggcccatgaaatcgattttta

SEQ ID NO: 12577 - DNA, 25 bp, Homo sapiens
tcccaggggcccaaggattggttaa

SEQ ID NO: 12578 - DNA, 25 bp, Homo sapiens
gccttttagctgttacttagtcaca

SEQ ID NO: 12579 - DNA, 25 bp, Homo sapiens
tatttgagggcatcaaaggaaaagg

SEQ ID NO: 12580 - DNA, 25 bp, Homo sapiens
agatgtagactgtagccctgctgcc

SEQ ID NO: 12581 - DNA, 25 bp, Homo sapiens
cctagggactttctcatggctttta

SEQ ID NO: 12582 - DNA, 25 bp, Homo sapiens
tttgagcgagccacagcaacttttc

SEQ ID NO: 12583 - DNA, 25 bp, Homo sapiens
gccctcttggtgtttggcaagcaca

SEQ ID NO: 12584 - DNA, 25 bp, Homo sapiens
cctcgggcctgagaatgaaattatt

SEQ ID NO: 12585 - DNA, 25 bp, Homo sapiens
ggacaccctggtgcaacttttacta

SEQ ID NO: 12586 - DNA, 25 bp, Homo sapiens
atcggccagaggagaggaactaacc

SEQ ID NO: 12587 - DNA, 25 bp, Homo sapiens
tgtgggctaatcgttccaaatactg

SEQ ID NO: 12588 - DNA, 25 bp, Homo sapiens
ttaaacgaggcaaattttggaatat

SEQ ID NO: 12589 - DNA, 25 bp, Homo sapiens
cagtgtacaactgcttcaaggattg

SEQ ID NO: 12590 - DNA, 25 bp, Homo sapiens
tctctagagatgttttgtagccata

SEQ ID NO: 12591 - DNA, 25 bp, Homo sapiens
aaggtgcactaactcccgggataca

SEQ ID NO: 12592 - DNA, 25 bp, Homo sapiens
tgacatcaagtggtacatggcaata

SEQ ID NO: 12593 - DNA, 25 bp, Homo sapiens
tccaggaacaaagggcagtcaaagt

SEQ ID NO: 12594 - DNA, 25 bp, Homo sapiens
ggctaagcatttaagagccctacta

SEQ ID NO: 12595 - DNA, 25 bp, Homo sapiens
tgggttagttacatcctgccgttaa

SEQ ID NO: 12596 - DNA, 25 bp, Homo sapiens
agcgaatcgctattggccatttttg

SEQ ID NO: 12597 - DNA, 25 bp, Homo sapiens
caagcgaagatgcagtgctacctta

SEQ ID NO: 12598 - DNA, 25 bp, Homo sapiens
tgtctcctagagtgggtagtcctgc

SEQ ID NO: 12599 - DNA, 25 bp, Homo sapiens
ctcttcctgcaacccaaggtggata

SEQ ID NO: 12600 - DNA, 25 bp, Homo sapiens
ttggcaccattgaaaccagctctgg

SEQ ID NO: 12601 - DNA, 25 bp, Homo sapiens
agggctcttcctatttccaaatgtg

SEQ ID NO: 12602 - DNA, 25 bp, Homo sapiens
ccgctctatgggttttttgcttacg

SEQ ID NO: 12603 - DNA, 25 bp, Homo sapiens
ggatcccttggtgaacagttttaaa

SEQ ID NO: 12604 - DNA, 25 bp, Homo sapiens
caggggcaaccacaagacattcaaa

SEQ ID NO: 12605 - DNA, 25 bp, Homo sapiens
tgggtctggacttcacaccataaga

SEQ ID NO: 12606 - DNA, 25 bp, Homo sapiens
actcacctagcatagcagtcttctg

SEQ ID NO: 12607 - DNA, 25 bp, Homo sapiens
gcacagtattcgttgcagcctcgga

SEQ ID NO: 12608 - DNA, 25 bp, Homo sapiens
ctacaccatccttaggctgggcatg

SEQ ID NO: 12609 - DNA, 25 bp, Homo sapiens
agctgcttagcaaaggaaattaatc

SEQ ID NO: 12610 - DNA, 25 bp, Homo sapiens
agattgagaagtaacactttgataa

SEQ ID NO: 12611 - DNA, 25 bp, Homo sapiens
ggtcccagttctttttgtaaaattg

SEQ ID NO: 12612 - DNA, 25 bp, Homo sapiens
tttctgagtacatctgcctaggttc

SEQ ID NO: 12613 - DNA, 25 bp, Homo sapiens
ggtgtctcctgactccaattccatg

SEQ ID NO: 12614 - DNA, 25 bp, Homo sapiens
gctgggatagaaaggccacctcttc

SEQ ID NO: 12615 - DNA, 25 bp, Homo sapiens
cgaggctttaggacatggcacactt

SEQ ID NO: 12616 - DNA, 25 bp, Homo sapiens
aggagcgtctccgcccggcagccac

SEQ ID NO: 12617 - DNA, 25 bp, Homo sapiens
aaaaaaaaaagatcaagacccaaca

SEQ ID NO: 12618 - DNA, 25 bp, Homo sapiens
cccatatttccatatactagcaatg

SEQ ID NO: 12619 - DNA, 25 bp, Homo sapiens
ttagaagaaatctaaatgcaacaga

SEQ ID NO: 12620 - DNA, 25 bp, Homo sapiens
gccttgggttaagctctggagaatt

SEQ ID NO: 12621 - DNA, 25 bp, Homo sapiens
gcagtggccctgagaagaaatattc

SEQ ID NO: 12622 - DNA, 25 bp, Homo sapiens
tacagaagctctccaggatatattc

SEQ ID NO: 12623 - DNA, 25 bp, Homo sapiens
cttaaatacaagtatatataatttg

SEQ ID NO: 12624 - DNA, 25 bp, Homo sapiens
aggcctaggacaccaactttagcag

SEQ ID NO: 12625 - DNA, 25 bp, Homo sapiens
ggtaggcactcacctgtgttcaatg

SEQ ID NO: 12626 - DNA, 25 bp, Homo sapiens
ttcctggcccaaagcaatgcgcaga

SEQ ID NO: 12627 - DNA, 25 bp, Homo sapiens
ctagcaagggccaccaagaagcttc

SEQ ID NO: 12628 - DNA, 25 bp, Homo sapiens
gacattatcaataaggtttgttgat

SEQ ID NO: 12629 - DNA, 25 bp, Homo sapiens
ccgtagcccagccaactgaggtttt

SEQ ID NO: 12630 - DNA, 25 bp, Homo sapiens
ttgggtccagactgcgctgtttttc

SEQ ID NO: 12631 - DNA, 25 bp, Homo sapiens
ctcttgctgtttttgatctttgatc

SEQ ID NO: 12632 - DNA, 25 bp, Homo sapiens
ccttggcctcccagacagtggtagt

SEQ ID NO: 12633 - DNA, 25 bp, Homo sapiens
ttcagccctggccaaccttagaagg

SEQ ID NO: 12634 - DNA, 25 bp, Homo sapiens
ttgtgttaagcaggatcctaatgtc

SEQ ID NO: 12635 - DNA, 25 bp, Homo sapiens
agcccagggccatgcacttaccata

SEQ ID NO: 12636 - DNA, 25 bp, Homo sapiens
atgaagtcagcatgcaagaggctta

SEQ ID NO: 12637 - DNA, 25 bp, Homo sapiens
ctttagacagaagggaatgctcatc

SEQ ID NO: 12638 - DNA, 25 bp, Homo sapiens
agagggctgaccttacagcatctta

SEQ ID NO: 12639 - DNA, 25 bp, Homo sapiens
cgctgcagggagaaaccacattata

SEQ ID NO: 12640 - DNA, 25 bp, Homo sapiens
ttccaagattagataatggacagta

SEQ ID NO: 12641 - DNA, 25 bp, Homo sapiens
gtcaagggccactgaccatgtcatg

SEQ ID NO: 12642 - DNA, 25 bp, Homo sapiens
aacttctggagctgacctttttatc

SEQ ID NO: 12643 - DNA, 25 bp, Homo sapiens
cgtggtccaggcgacttatgtcttc

SEQ ID NO: 12644 - DNA, 25 bp, Homo sapiens
gcctctgccatgcttgccaaggatg

SEQ ID NO: 12645 - DNA, 25 bp, Homo sapiens
atggggcctgtgtaagactatctaa

SEQ ID NO: 12646 - DNA, 25 bp, Homo sapiens
tcctaacaggggtattgatgccttc

SEQ ID NO: 12647 - DNA, 25 bp, Homo sapiens
gaaatagcttcctgtgtctgccata

SEQ ID NO: 12648 - DNA, 25 bp, Homo sapiens
gcacctggccttattttaacctttg

SEQ ID NO: 12649 - DNA, 25 bp, Homo sapiens
ccgcattaatcagaggcaaattttg

SEQ ID NO: 12650 - DNA, 25 bp, Homo sapiens
gggaccctattctagcctgatgaga

SEQ ID NO: 12651 - DNA, 25 bp, Homo sapiens
cagtaataataattatgccgatgct

SEQ ID NO: 12652 - DNA, 25 bp, Homo sapiens
agagataaaggacactgtcactttg

SEQ ID NO: 12653 - DNA, 25 bp, Homo sapiens
ccctgtggctacttgtttaatgcga

SEQ ID NO: 12654 - DNA, 25 bp, Homo sapiens
tgctgtgagttttcccagtaacttc

SEQ ID NO: 12655 - DNA, 25 bp, Homo sapiens
agagggattgtacttatcagatgca

SEQ ID NO: 12656 - DNA, 25 bp, Homo sapiens
tgcatttgtgaaactgaaggggtca

SEQ ID NO: 12657 - DNA, 25 bp, Homo sapiens
cctccttagcaggaaggcagtacta

SEQ ID NO: 12658 - DNA, 25 bp, Homo sapiens
agtctgtcttggcacttgatccata

SEQ ID NO: 12659 - DNA, 25 bp, Homo sapiens
agtataattgtggactggtattggt

SEQ ID NO: 12660 - DNA, 25 bp, Homo sapiens
ccattagatagttgaggctcctcgc

SEQ ID NO: 12661 - DNA, 25 bp, Homo sapiens
ccctccgagtgatggtgttaacttc

SEQ ID NO: 12662 - DNA, 25 bp, Homo sapiens
accggtgccctgcatgtgcatattg

SEQ ID NO: 12663 - DNA, 25 bp, Homo sapiens
gtccacccttgccactcagtattgt

SEQ ID NO: 12664 - DNA, 25 bp, Homo sapiens
aacgcctgcagattaaccttttaga

SEQ ID NO: 12665 - DNA, 25 bp, Homo sapiens
aggggagctagcagccattcaatca

SEQ ID NO: 12666 - DNA, 25 bp, Homo sapiens
tccagctgtgtggtactgctttata

SEQ ID NO: 12667 - DNA, 25 bp, Homo sapiens
gcctcctgtcagttgggattaaaaa

SEQ ID NO: 12668 - DNA, 25 bp, Homo sapiens
agaggcttgggctctatcccatttc

SEQ ID NO: 12669 - DNA, 25 bp, Homo sapiens
acaccggtgggtgctcattttctca

SEQ ID NO: 12670 - DNA, 25 bp, Homo sapiens
gactggcttccagattttttaagtg

SEQ ID NO: 12671 - DNA, 25 bp, Homo sapiens
gcactgtggtgtgtttctctagtaa

SEQ ID NO: 12672 - DNA, 25 bp, Homo sapiens
gtagcggcactccaacttctcagta

SEQ ID NO: 12673 - DNA, 25 bp, Homo sapiens
tttggccttggggtagttaactgta

SEQ ID NO: 12674 - DNA, 25 bp, Homo sapiens
tgagtcttccagcttttcccaataa

SEQ ID NO: 12675 - DNA, 25 bp, Homo sapiens
cccggttttgagcacatgcctatga

SEQ ID NO: 12676 - DNA, 25 bp, Homo sapiens
tggggcttatactcttcaaaaattc

SEQ ID NO: 12677 - DNA, 25 bp, Homo sapiens
taacaaactggtttcttactgtagc

SEQ ID NO: 12678 - DNA, 25 bp, Homo sapiens
gggtactccatgaatctcctgactg

SEQ ID NO: 12679 - DNA, 25 bp, Homo sapiens
agcttcctagatgacagtgtctacg

SEQ ID NO: 12680 - DNA, 25 bp, Homo sapiens
ttaaattgtatataaatgatacaca

SEQ ID NO: 12681 - DNA, 25 bp, Homo sapiens
agcggactgcctttttgcacaccca

SEQ ID NO: 12682 - DNA, 25 bp, Homo sapiens
ttaaattggtttctaggtgagcaca

SEQ ID NO: 12683 - DNA, 25 bp, Homo sapiens
aaaaaaaaaatgcattcatgtaaag

SEQ ID NO: 12684 - DNA, 25 bp, Homo sapiens
cacggcccatgtttttcccactata

SEQ ID NO: 12685 - DNA, 25 bp, Homo sapiens
ttatggatgaattttaggtacaaat

SEQ ID NO: 12686 - DNA, 25 bp, Homo sapiens
aaggcactgttgtgttatttgcaca

SEQ ID NO: 12687 - DNA, 25 bp, Homo sapiens
tggccctttaacttcacactctgga

SEQ ID NO: 12688 - DNA, 25 bp, Homo sapiens
gtctgtgaccacatgcctgtgaata

SEQ ID NO: 12689 - DNA, 25 bp, Homo sapiens
aggcaagccgcatcctgggaacctc

SEQ ID NO: 12690 - DNA, 25 bp, Homo sapiens
tctgcctgggtcttgctgtatttcc

SEQ ID NO: 12691 - DNA, 25 bp, Homo sapiens
tcattcagctgagggagaagattta

SEQ ID NO: 12692 - DNA, 25 bp, Homo sapiens
ttccaggcatgtaaggcaaatctcc

SEQ ID NO: 12693 - DNA, 25 bp, Homo sapiens
cttggcctcttgctcatgcttggtg

SEQ ID NO: 12694 - DNA, 25 bp, Homo sapiens
tataccatcatttttatgagcctct

SEQ ID NO: 12695 - DNA, 25 bp, Homo sapiens
ctctccagagttcctgtttcaggga

SEQ ID NO: 12696 - DNA, 25 bp, Homo sapiens
tgccctcttgatccttgaggaaatc

SEQ ID NO: 12697 - DNA, 25 bp, Homo sapiens
ggattagtcaaataccacccagagg

SEQ ID NO: 12698 - DNA, 25 bp, Homo sapiens
ttttaatatggatttaaaataatcc

SEQ ID NO: 12699 - DNA, 25 bp, Homo sapiens
ctgtgcagaggcatgaccatctttt

SEQ ID NO: 12700 - DNA, 25 bp, Homo sapiens
agcctaatggtgtggtgtcaaaaca

SEQ ID NO: 12701 - DNA, 25 bp, Homo sapiens
gaagcattccaaagggccagagaca

SEQ ID NO: 12702 - DNA, 25 bp, Homo sapiens
tgctctgggcttaatcttttgattc

SEQ ID NO: 12703 - DNA, 25 bp, Homo sapiens
tcctacaaactgagaaccactgctg

SEQ ID NO: 12704 - DNA, 25 bp, Homo sapiens
tcatagggaaataacacatgtgttc

SEQ ID NO: 12705 - DNA, 25 bp, Homo sapiens
catactgcccactggccagagagga

SEQ ID NO: 12706 - DNA, 25 bp, Homo sapiens
agctgccatcttctctaacctagtc

SEQ ID NO: 12707 - DNA, 25 bp, Homo sapiens
cctggcctcccaattaaaccttaaa

SEQ ID NO: 12708 - DNA, 25 bp, Homo sapiens
gggagggcacttaaacactgtctta

SEQ ID NO: 12709 - DNA, 25 bp, Homo sapiens
cgctactacgggacttagggaaata

SEQ ID NO: 12710 - DNA, 25 bp, Homo sapiens
gcaggaactccctaggccttgaatc

SEQ ID NO: 12711 - DNA, 25 bp, Homo sapiens
acctcttgctgttggtggacacgca

SEQ ID NO: 12712 - DNA, 25 bp, Homo sapiens
agatgggccctcgagctatatgtga

SEQ ID NO: 12713 - DNA, 25 bp, Homo sapiens
ctctctggtctcaaaggaaagtctc

SEQ ID NO: 12714 - DNA, 25 bp, Homo sapiens
tgcttctgttatactggactctcca

SEQ ID NO: 12715 - DNA, 25 bp, Homo sapiens
tgagctggctataacaactttcttg

SEQ ID NO: 12716 - DNA, 25 bp, Homo sapiens
ataaggttatctttggaaatcaagg

SEQ ID NO: 12717 - DNA, 25 bp, Homo sapiens
ctttcctcagtacagggcatgtctc

SEQ ID NO: 12718 - DNA, 25 bp, Homo sapiens
gttggctcctcccataggtgtctta

SEQ ID NO: 12719 - DNA, 25 bp, Homo sapiens
cctgggacttctgacctggaatatg

SEQ ID NO: 12720 - DNA, 25 bp, Homo sapiens
gtaaaatatttagaggcctgtccca

SEQ ID NO: 12721 - DNA, 25 bp, Homo sapiens
tccaggcttttttctagggacagac

SEQ ID NO: 12722 - DNA, 25 bp, Homo sapiens
tgaggggaagacctaacctatttta

SEQ ID NO: 12723 - DNA, 25 bp, Homo sapiens
ggaagccattgattgactctctttt

SEQ ID NO: 12724 - DNA, 25 bp, Homo sapiens
tgcttcttgaaccaacgggtgcata

SEQ ID NO: 12725 - DNA, 25 bp, Homo sapiens
tatccaagttatactgcttatcatc

SEQ ID NO: 12726 - DNA, 25 bp, Homo sapiens
ccttcacagaaggtcaagcagtaga

SEQ ID NO: 12727 - DNA, 25 bp, Homo sapiens
aaataaaaaaattctatgagattcc

SEQ ID NO: 12728 - DNA, 25 bp, Homo sapiens
tcaccaagggatgaaagggtactca

SEQ ID NO: 12729 - DNA, 25 bp, Homo sapiens
tgccactgccttgatgctacatgtg

SEQ ID NO: 12730 - DNA, 25 bp, Homo sapiens
tcctccctatccagctgagattttg

SEQ ID NO: 12731 - DNA, 25 bp, Homo sapiens
gtctcctttgctgacttcacctgta

SEQ ID NO: 12732 - DNA, 25 bp, Homo sapiens
ttgactgcatactctgtgtgaacta

SEQ ID NO: 12733 - DNA, 25 bp, Homo sapiens
agcaggcacagctgagccattttca

SEQ ID NO: 12734 - DNA, 25 bp, Homo sapiens
gcagggacgttttggcagtcattta

SEQ ID NO: 12735 - DNA, 25 bp, Homo sapiens
acctggcatagcatcataaaaattg

SEQ ID NO: 12736 - DNA, 25 bp, Homo sapiens
acatgtatttacctctcttttctga

SEQ ID NO: 12737 - DNA, 25 bp, Homo sapiens
gtgtttgtctgttgtgttatcctca

SEQ ID NO: 12738 - DNA, 25 bp, Homo sapiens
attcttcaaagcacccaggactcgg

SEQ ID NO: 12739 - DNA, 25 bp, Homo sapiens
ttgggggtgactataacagattgca

SEQ ID NO: 12740 - DNA, 25 bp, Homo sapiens
gcctgtgccttccaaagtaaagtta

SEQ ID NO: 12741 - DNA, 25 bp, Homo sapiens
agaagtgttccctctgtactgtgtc

SEQ ID NO: 12742 - DNA, 25 bp, Homo sapiens
ctcttcagcagagaaaaaggtcttg

SEQ ID NO: 12743 - DNA, 25 bp, Homo sapiens
tctctgttttgacccactggaaatc

SEQ ID NO: 12744 - DNA, 25 bp, Homo sapiens
ggtacctctggcctgctgtatctta

SEQ ID NO: 12745 - DNA, 25 bp, Homo sapiens
tctcagcagatgtttatgtgactta

SEQ ID NO: 12746 - DNA, 25 bp, Homo sapiens
ctccctttttactcaggaaagtggc

SEQ ID NO: 12747 - DNA, 25 bp, Homo sapiens
gagccacattcataggtacttgata

SEQ ID NO: 12748 - DNA, 25 bp, Homo sapiens
tgggactcgaccctgtgacagttaa

SEQ ID NO: 12749 - DNA, 25 bp, Homo sapiens
ttccttggtagcatggaccgtctta

SEQ ID NO: 12750 - DNA, 25 bp, Homo sapiens
ctggggctgtgttctttctgtaaaa

SEQ ID NO: 12751 - DNA, 25 bp, Homo sapiens
tctggatccctgtaaacatagtcta

SEQ ID NO: 12752 - DNA, 25 bp, Homo sapiens
gctcagtctgcacatcccgagggta

SEQ ID NO: 12753 - DNA, 25 bp, Homo sapiens
agccaggtggcaacagcgttaatcc

SEQ ID NO: 12754 - DNA, 25 bp, Homo sapiens
ctcaacctggttgctttgctgctca

SEQ ID NO: 12755 - DNA, 25 bp, Homo sapiens
aggccctccttgcagttattctaaa

SEQ ID NO: 12756 - DNA, 25 bp, Homo sapiens
catttctcagcatacacaggtggga

SEQ ID NO: 12757 - DNA, 25 bp, Homo sapiens
tcatagtcctagacccacagggttc

SEQ ID NO: 12758 - DNA, 25 bp, Homo sapiens
cgctggggcagtactcatctgtctt

SEQ ID NO: 12759 - DNA, 25 bp, Homo sapiens
ccctctcctgggaggaataagacta

SEQ ID NO: 12760 - DNA, 25 bp, Homo sapiens
acagctctgctaggacctggtttta

SEQ ID NO: 12761 - DNA, 25 bp, Homo sapiens
cctctgcatgctggggcattttata

SEQ ID NO: 12762 - DNA, 25 bp, Homo sapiens
caccgggtcatgtgagcttaagtca

SEQ ID NO: 12763 - DNA, 25 bp, Homo sapiens
ccctggctgtttggagtttcacttg

SEQ ID NO: 12764 - DNA, 25 bp, Homo sapiens
tgtatgtcaggtttccttcaggaaa

SEQ ID NO: 12765 - DNA, 25 bp, Homo sapiens
tctcgggcttgaaaaagtatatctg

SEQ ID NO: 12766 - DNA, 25 bp, Homo sapiens
cgcccttggtctgggagctatattc

SEQ ID NO: 12767 - DNA, 25 bp, Homo sapiens
ttcagaggggtttcttgccagccac

SEQ ID NO: 12768 - DNA, 25 bp, Homo sapiens
tactaaaagaaaatatatgaatgtt

SEQ ID NO: 12769 - DNA, 25 bp, Homo sapiens
cagaatgtctgtgtccttatggaga

SEQ ID NO: 12770 - DNA, 25 bp, Homo sapiens
ggataacctggtacaaagactctgg

SEQ ID NO: 12771 - DNA, 25 bp, Homo sapiens
ggcccatttggagcgtgacatctga

SEQ ID NO: 12772 - DNA, 25 bp, Homo sapiens
agccagttctgtatcaagtgacatg

SEQ ID NO: 12773 - DNA, 25 bp, Homo sapiens
ggcaaaccactgttacgacccattg

SEQ ID NO: 12774 - DNA, 25 bp, Homo sapiens
acctggtccttctgtgtctatgatg

SEQ ID NO: 12775 - DNA, 25 bp, Homo sapiens
ggacaggttctctgcctactggata

SEQ ID NO: 12776 - DNA, 25 bp, Homo sapiens
tgctggctcctgtgtatctagttcc

SEQ ID NO: 12777 - DNA, 25 bp, Homo sapiens
ttgaataaatgttcattgtaaaaaa

SEQ ID NO: 12778 - DNA, 25 bp, Homo sapiens
ctccttggggaagctaggcaaatcc

SEQ ID NO: 12779 - DNA, 25 bp, Homo sapiens
gcctccagcctgaagtcctagaatg

SEQ ID NO: 12780 - DNA, 25 bp, Homo sapiens
gcggctctgcttcccttagactgga

SEQ ID NO: 12781 - DNA, 25 bp, Homo sapiens
cgccagagatcttgagcactttcta

SEQ ID NO: 12782 - DNA, 25 bp, Homo sapiens
tcacctgtggatgctaattaaaacg

SEQ ID NO: 12783 - DNA, 25 bp, Homo sapiens
tcttggggccaaatcatgtagactc

SEQ ID NO: 12784 - DNA, 25 bp, Homo sapiens
ccagtagtttccctgcagttgagca

SEQ ID NO: 12785 - DNA, 25 bp, Homo sapiens
tactgcccagggtacattgatgctg

SEQ ID NO: 12786 - DNA, 25 bp, Homo sapiens
gcaggttgctccacaggtagctcta

SEQ ID NO: 12787 - DNA, 25 bp, Homo sapiens
gatggccagctttgtttatttgacc

SEQ ID NO: 12788 - DNA, 25 bp, Homo sapiens
ccacatggcaggtttgggtaattcc

SEQ ID NO: 12789 - DNA, 25 bp, Homo sapiens
agttcagtcataaagaactctctct

SEQ ID NO: 12790 - DNA, 25 bp, Homo sapiens
ttcctttggagcatgccttagtttc

SEQ ID NO: 12791 - DNA, 25 bp, Homo sapiens
cacggtatttttgggctgttgcttt

SEQ ID NO: 12792 - DNA, 25 bp, Homo sapiens
tggtcctccacaacataggtgatta

SEQ ID NO: 12793 - DNA, 25 bp, Homo sapiens
catagttgaagtggttttctcgtca

SEQ ID NO: 12794 - DNA, 25 bp, Homo sapiens
ccttagctgtctgcaagtgtgcatg

SEQ ID NO: 12795 - DNA, 25 bp, Homo sapiens
tgacagccttttccaagccactaag

SEQ ID NO: 12796 - DNA, 25 bp, Homo sapiens
ttctaccatgtatctcccgtaaaga

SEQ ID NO: 12797 - DNA, 25 bp, Homo sapiens
tgcagtgccctctccaatacaaagg

SEQ ID NO: 12798 - DNA, 25 bp, Homo sapiens
aggtggtattttaagggcctttttc

SEQ ID NO: 12799 - DNA, 25 bp, Homo sapiens
tcttcttttattggcttctttttta

SEQ ID NO: 12800 - DNA, 25 bp, Homo sapiens
gcacgccattacaaagaacttttta

SEQ ID NO: 12801 - DNA, 25 bp, Homo sapiens
ggcagacttggccaatgactcataa

SEQ ID NO: 12802 - DNA, 25 bp, Homo sapiens
gccagggcccacatatacctaaatg

SEQ ID NO: 12803 - DNA, 25 bp, Homo sapiens
ctgcagttgtattgtgcctggcaca

SEQ ID NO: 12804 - DNA, 25 bp, Homo sapiens
cccagtaccaaaagggagcatttta

SEQ ID NO: 12805 - DNA, 25 bp, Homo sapiens
agctcctgaagcactatactctatg

SEQ ID NO: 12806 - DNA, 25 bp, Homo sapiens
aaggcactcctggtggacaatccca

SEQ ID NO: 12807 - DNA, 25 bp, Homo sapiens
cccaacgtgtactttctataactaa

SEQ ID NO: 12808 - DNA, 25 bp, Homo sapiens
agagtggctgctttcgctcgcaaag

SEQ ID NO: 12809 - DNA, 25 bp, Homo sapiens
ggtgactcaagtgctagctgaacta

SEQ ID NO: 12810 - DNA, 25 bp, Homo sapiens
tgaaagaataccctccagctccata

SEQ ID NO: 12811 - DNA, 25 bp, Homo sapiens
tgctgccagtacacatcataatatc

SEQ ID NO: 12812 - DNA, 25 bp, Homo sapiens
aacggcaaggccatgtttgtttgtc

SEQ ID NO: 12813 - DNA, 25 bp, Homo sapiens
tagttcactgttttccctaagggtc

SEQ ID NO: 12814 - DNA, 25 bp, Homo sapiens
cccagatttaccctagttattgcca

SEQ ID NO: 12815 - DNA, 25 bp, Homo sapiens
tgatagcctgattttggacataatg

SEQ ID NO: 12816 - DNA, 25 bp, Homo sapiens
gtctgcttttggagtatcatataca

SEQ ID NO: 12817 - DNA, 25 bp, Homo sapiens
gactcattggtgctaacatgtcaca

SEQ ID NO: 12818 - DNA, 25 bp, Homo sapiens
atgtcgtcatccaaactcaatgatc

SEQ ID NO: 12819 - DNA, 25 bp, Homo sapiens
cgacccaaagccaccgagtttttta

SEQ ID NO: 12820 - DNA, 25 bp, Homo sapiens
ttttggagaacacagaccctagcgc

SEQ ID NO: 12821 - DNA, 25 bp, Homo sapiens
gacatttcaattgtttctcgtgtct

SEQ ID NO: 12822 - DNA, 25 bp, Homo sapiens
ttaccaggcctgagttatgtgacta

SEQ ID NO: 12823 - DNA, 25 bp, Homo sapiens
cagtgtgactgcattcttgtgtatc

SEQ ID NO: 12824 - DNA, 25 bp, Homo sapiens
gtagagagtctggatttctagagaa

SEQ ID NO: 12825 - DNA, 25 bp, Homo sapiens
atgggctcttggcttgcttcactga

SEQ ID NO: 12826 - DNA, 25 bp, Homo sapiens
gggcatggcctagcagtttataata

SEQ ID NO: 12827 - DNA, 25 bp, Homo sapiens
cggggtgtacttcccttcaactacc

SEQ ID NO: 12828 - DNA, 25 bp, Homo sapiens
tctaggtcctttgcatctttgaatg

SEQ ID NO: 12829 - DNA, 25 bp, Homo sapiens
aggcctggtaaatcactgtgcttca

SEQ ID NO: 12830 - DNA, 25 bp, Homo sapiens
agctgccagtcacaagggtgattta

SEQ ID NO: 12831 - DNA, 25 bp, Homo sapiens
tggggaactccttcgcatgctgacc

SEQ ID NO: 12832 - DNA, 25 bp, Homo sapiens
cttcagaagggttaaggtcataata

SEQ ID NO: 12833 - DNA, 25 bp, Homo sapiens
ctgctaaaataataataagaacttc

SEQ ID NO: 12834 - DNA, 25 bp, Homo sapiens
tattggggaggggggactgtaaggg

SEQ ID NO: 12835 - DNA, 25 bp, Homo sapiens
tgcattctcaacagcgcctcacatt

SEQ ID NO: 12836 - DNA, 25 bp, Homo sapiens
tgcccaggacggttgcaaactgttt

SEQ ID NO: 12837 - DNA, 25 bp, Homo sapiens
ctacccagcttgcagagtgatttcc

SEQ ID NO: 12838 - DNA, 25 bp, Homo sapiens
gtcctgtcccaaatagtgccctatg

SEQ ID NO: 12839 - DNA, 25 bp, Homo sapiens
tgaccacagcaaggaggagcattta

SEQ ID NO: 12840 - DNA, 25 bp, Homo sapiens
ctgtccacaatgaagggccaatttt

SEQ ID NO: 12841 - DNA, 25 bp, Homo sapiens
agccagctgcttctatgtgatcaga

SEQ ID NO: 12842 - DNA, 25 bp, Homo sapiens
agccctattctaaggggagacccta

SEQ ID NO: 12843 - DNA, 25 bp, Homo sapiens
ctctcggccatggtcactttctttg

SEQ ID NO: 12844 - DNA, 25 bp, Homo sapiens
gtcccagcatgtccaaacctaagtg

SEQ ID NO: 12845 - DNA, 25 bp, Homo sapiens
agccttgtagagtggtcagattttc

SEQ ID NO: 12846 - DNA, 25 bp, Homo sapiens
atgtatttactgagtcggcattccc

SEQ ID NO: 12847 - DNA, 25 bp, Homo sapiens
aagagaggagtatatatgtgattaa

SEQ ID NO: 12848 - DNA, 25 bp, Homo sapiens
gttctctctagtgacccagggccta

SEQ ID NO: 12849 - DNA, 25 bp, Homo sapiens
cagaaagggctcgtaacttgacata

SEQ ID NO: 12850 - DNA, 25 bp, Homo sapiens
taggactttcctagcccgttgacaa

SEQ ID NO: 12851 - DNA, 25 bp, Homo sapiens
ccagactgctgacttgtcccaaaga

SEQ ID NO: 12852 - DNA, 25 bp, Homo sapiens
gcttggctcctggtaacagcttttc

SEQ ID NO: 12853 - DNA, 25 bp, Homo sapiens
agcttgatttcctctgtggcctaaa

SEQ ID NO: 12854 - DNA, 25 bp, Homo sapiens
gcagcccggaaataaggtcacgtta

SEQ ID NO: 12855 - DNA, 25 bp, Homo sapiens
cccagcatcttcatacttgagaaag

SEQ ID NO: 12856 - DNA, 25 bp, Homo sapiens
ccacctgattatggaggatcttgaa

SEQ ID NO: 12857 - DNA, 25 bp, Homo sapiens
tccagagggcccgaacactagtaca

SEQ ID NO: 12858 - DNA, 25 bp, Homo sapiens
tcctgaggcattcccatccttgatg

SEQ ID NO: 12859 - DNA, 25 bp, Homo sapiens
acagagtctcagccttgccactgct

SEQ ID NO: 12860 - DNA, 25 bp, Homo sapiens
cttgacgttgtggacatcagatacc

SEQ ID NO: 12861 - DNA, 25 bp, Homo sapiens
ttgaatttctatatttcccatgtgg

SEQ ID NO: 12862 - DNA, 25 bp, Homo sapiens
agttacctgctgttagctttcatta

SEQ ID NO: 12863 - DNA, 25 bp, Homo sapiens
accccctacaggtgaagcagtctag

SEQ ID NO: 12864 - DNA, 25 bp, Homo sapiens
aaaaccccaaaaaaccagcaatgag

SEQ ID NO: 12865 - DNA, 25 bp, Homo sapiens
gtcctctgcaggtcattggcctttg

SEQ ID NO: 12866 - DNA, 25 bp, Homo sapiens
gcctccctaggaataagactgactc

SEQ ID NO: 12867 - DNA, 25 bp, Homo sapiens
tctgagtttttctagggcccactgg

SEQ ID NO: 12868 - DNA, 25 bp, Homo sapiens
aggactccttgtacatgcttctgcc

SEQ ID NO: 12869 - DNA, 25 bp, Homo sapiens
agggcagccactgtcctcagatgtg

SEQ ID NO: 12870 - DNA, 25 bp, Homo sapiens
ttgcagtgtcccattccctcagtga

SEQ ID NO: 12871 - DNA, 25 bp, Homo sapiens
gtgagccagcaatctgcctgcagta

SEQ ID NO: 12872 - DNA, 25 bp, Homo sapiens
ctgcattgctttcattccgtgggtc

SEQ ID NO: 12873 - DNA, 25 bp, Homo sapiens
acgagagctttgttgccatcagatc

SEQ ID NO: 12874 - DNA, 25 bp, Homo sapiens
gccttaattgtatgtgggaaatccc

SEQ ID NO: 12875 - DNA, 25 bp, Homo sapiens
ttgtgccctgcccttagagcatttg

SEQ ID NO: 12876 - DNA, 25 bp, Homo sapiens
tgggtcccgaatctgtaaagctttg

SEQ ID NO: 12877 - DNA, 25 bp, Homo sapiens
tcagggcgccagttttccagtaagc

SEQ ID NO: 12878 - DNA, 25 bp, Homo sapiens
ggcttgtcagcacttccagtttaga

SEQ ID NO: 12879 - DNA, 25 bp, Homo sapiens
gccatgaccttgtgcccgattcttt

SEQ ID NO: 12880 - DNA, 25 bp, Homo sapiens
ttggcctctgtaccttgaacctagg

SEQ ID NO: 12881 - DNA, 25 bp, Homo sapiens
cacttgcttttctggaatcaggatc

SEQ ID NO: 12882 - DNA, 25 bp, Homo sapiens
gtgagccgccatcaatgaacttata

SEQ ID NO: 12883 - DNA, 25 bp, Homo sapiens
tggctaggcccacccaagttagtga

SEQ ID NO: 12884 - DNA, 25 bp, Homo sapiens
ctctccaagtaggtgcaaatccatg

SEQ ID NO: 12885 - DNA, 25 bp, Homo sapiens
gggctttcagcacagcacagggaca

SEQ ID NO: 12886 - DNA, 25 bp, Homo sapiens
aggccggcagtctcaacatgtagtg

SEQ ID NO: 12887 - DNA, 25 bp, Homo sapiens
acaccttgctgtggctttcaggctc

SEQ ID NO: 12888 - DNA, 25 bp, Homo sapiens
cctgggtagttctcacagtatcata

SEQ ID NO: 12889 - DNA, 25 bp, Homo sapiens
caccctgttgcccttgtaccttgta

SEQ ID NO: 12890 - DNA, 25 bp, Homo sapiens
ggccttcagtctttatgcatgcgta

SEQ ID NO: 12891 - DNA, 25 bp, Homo sapiens
tgggtctgacacagaggaaatcttc

SEQ ID NO: 12892 - DNA, 25 bp, Homo sapiens
ctatccatttgagacaccgagtgca

SEQ ID NO: 12893 - DNA, 25 bp, Homo sapiens
agcttcggcttctcttactaatagg

SEQ ID NO: 12894 - DNA, 25 bp, Homo sapiens
actcctcttactcaaaaattcttaa

SEQ ID NO: 12895 - DNA, 25 bp, Homo sapiens
cccagagcggggaagatttgctttc

SEQ ID NO: 12896 - DNA, 25 bp, Homo sapiens
ctcatctgtgtaattgtctgggcca

SEQ ID NO: 12897 - DNA, 25 bp, Homo sapiens
ctggtgccctcctcaaagttgctga

SEQ ID NO: 12898 - DNA, 25 bp, Homo sapiens
gcaatcgggtggagttctctgctca

SEQ ID NO: 12899 - DNA, 25 bp, Homo sapiens
gcgggtcacaattcggccacctatg

SEQ ID NO: 12900 - DNA, 25 bp, Homo sapiens
ccaacctgctgggtaaagggactca

SEQ ID NO: 12901 - DNA, 25 bp, Homo sapiens
agcttgtcacctccatagatgattg

SEQ ID NO: 12902 - DNA, 25 bp, Homo sapiens
atgactcctttcctgctggccctga

SEQ ID NO: 12903 - DNA, 25 bp, Homo sapiens
ggcccaccctatgagtcccaggaga

SEQ ID NO: 12904 - DNA, 25 bp, Homo sapiens
ccggtagttctccacgaagcgcttg

SEQ ID NO: 12905 - DNA, 25 bp, Homo sapiens
gcctgattttaccaggggctgatca

SEQ ID NO: 12906 - DNA, 25 bp, Homo sapiens
ggtcccgcagcatgaagtgaaaatc

SEQ ID NO: 12907 - DNA, 25 bp, Homo sapiens
cgtcccaccgacagtaagcaagata

SEQ ID NO: 12908 - DNA, 25 bp, Homo sapiens
gttgggcgtgccgtaaaatagttca

SEQ ID NO: 12909 - DNA, 25 bp, Homo sapiens
actggggcctctgttgtcctataga

SEQ ID NO: 12910 - DNA, 25 bp, Homo sapiens
cggaagcttagttcacccacagggg

SEQ ID NO: 12911 - DNA, 25 bp, Homo sapiens
gccttggctttcctctcactctgta

SEQ ID NO: 12912 - DNA, 25 bp, Homo sapiens
cagggtggtatttcggatgtcttca

SEQ ID NO: 12913 - DNA, 25 bp, Homo sapiens
ccagcctgcctgacctcaatgatta

SEQ ID NO: 12914 - DNA, 25 bp, Homo sapiens
agcgccctaggtctgctattgatga

SEQ ID NO: 12915 - DNA, 25 bp, Homo sapiens
cccttaggagagctggagagatttc

SEQ ID NO: 12916 - DNA, 25 bp, Homo sapiens
gcgcgtgcctccctatcatttacag

SEQ ID NO: 12917 - DNA, 25 bp, Homo sapiens
catggggcgccaatacgtgacaaac

SEQ ID NO: 12918 - DNA, 25 bp, Homo sapiens
tcgtggtgcctcaggttgttaaacc

SEQ ID NO: 12919 - DNA, 25 bp, Homo sapiens
gggtgtgcccaatgtctccaatgtt

SEQ ID NO: 12920 - DNA, 25 bp, Homo sapiens
gccactcggtaagggtgtcctcata

SEQ ID NO: 12921 - DNA, 25 bp, Homo sapiens
gcctattcctgcagcgctggttttg

SEQ ID NO: 12922 - DNA, 25 bp, Homo sapiens
acagcctcgcgggttagaagatcca

SEQ ID NO: 12923 - DNA, 25 bp, Homo sapiens
aggccgctctcccagacttaaaatg

SEQ ID NO: 12924 - DNA, 25 bp, Homo sapiens
acaggctttatggacaggcccagca

SEQ ID NO: 12925 - DNA, 25 bp, Homo sapiens
tccctggccttgagacttctagtgc

SEQ ID NO: 12926 - DNA, 25 bp, Homo sapiens
aagagccctccctcacctgtgagtg

SEQ ID NO: 12927 - DNA, 25 bp, Homo sapiens
tgcacttcgcactcacccaggattg

SEQ ID NO: 12928 - DNA, 25 bp, Homo sapiens
ctccaggttccataagtcagtgcta

SEQ ID NO: 12929 - DNA, 25 bp, Homo sapiens
ggggcattttgttactccatttatc

SEQ ID NO: 12930 - DNA, 25 bp, Homo sapiens
catccctgaggaataggcgtctctc

SEQ ID NO: 12931 - DNA, 25 bp, Homo sapiens
tgcatttccttctgtactgcctctg

SEQ ID NO: 12932 - DNA, 25 bp, Homo sapiens
cccacaggtggcttctgattttgca

SEQ ID NO: 12933 - DNA, 25 bp, Homo sapiens
caacgcttgtgtttccctggggaac

SEQ ID NO: 12934 - DNA, 25 bp, Homo sapiens
ggcgattcgatgtctataaaccttg

SEQ ID NO: 12935 - DNA, 25 bp, Homo sapiens
ggcaccgacggaacatctctacctg

SEQ ID NO: 12936 - DNA, 25 bp, Homo sapiens
accgctgtggctacttccgtatatc

SEQ ID NO: 12937 - DNA, 25 bp, Homo sapiens
cctggctctagcatggacacttctg

SEQ ID NO: 12938 - DNA, 25 bp, Homo sapiens
tgtggccctgcccaaagtcttgaac

SEQ ID NO: 12939 - DNA, 25 bp, Homo sapiens
cagcgatttgatgggtggtacaaca

SEQ ID NO: 12940 - DNA, 25 bp, Homo sapiens
gcccgcaggctatcacgtgctttca

SEQ ID NO: 12941 - DNA, 25 bp, Homo sapiens
gcacgcgctgtttataggagaaatc

SEQ ID NO: 12942 - DNA, 25 bp, Homo sapiens
ctcctgctgctggtgtagatattac

SEQ ID NO: 12943 - DNA, 25 bp, Homo sapiens
tctccgggtctgcaacagctactgg

SEQ ID NO: 12944 - DNA, 25 bp, Homo sapiens
accctgagtggggaatcaacctgca

SEQ ID NO: 12945 - DNA, 25 bp, Homo sapiens
gccacctttcaggagtcagctgtta

SEQ ID NO: 12946 - DNA, 25 bp, Homo sapiens
tgaccgctactggtttgagaacacc

SEQ ID NO: 12947 - DNA, 25 bp, Homo sapiens
gtgctccctctgttgttcgtgacta

SEQ ID NO: 12948 - DNA, 25 bp, Homo sapiens
tgcccggctccggatgagaaatttc

SEQ ID NO: 12949 - DNA, 25 bp, Homo sapiens
tccgggtctgctggatgacataatc

SEQ ID NO: 12950 - DNA, 25 bp, Homo sapiens
ggggcattgatgtccaccttgcaga

SEQ ID NO: 12951 - DNA, 25 bp, Homo sapiens
actgggcatctccactcattcagga

SEQ ID NO: 12952 - DNA, 25 bp, Homo sapiens
cccaagtgcaggtgctggacatcaa

SEQ ID NO: 12953 - DNA, 25 bp, Homo sapiens
ttcacgcagctctgtgtcaaaggtg

SEQ ID NO: 12954 - DNA, 25 bp, Homo sapiens
ttttacctttcccaggcagccaggg

SEQ ID NO: 12955 - DNA, 25 bp, Homo sapiens
agcctgcctggccaactttctttca

SEQ ID NO: 12956 - DNA, 25 bp, Homo sapiens
gttcccgcagcgacattgagactga

SEQ ID NO: 12957 - DNA, 25 bp, Homo sapiens
cctgtccctaggcttgcaatgagtg

SEQ ID NO: 12958 - DNA, 25 bp, Homo sapiens
tttcagactcacatggttgcgcaca

SEQ ID NO: 12959 - DNA, 25 bp, Homo sapiens
ggtgagaaccctccttgatccatga

SEQ ID NO: 12960 - DNA, 25 bp, Homo sapiens
tggtcctggccagtcactaacagtg

SEQ ID NO: 12961 - DNA, 25 bp, Homo sapiens
ctcgacgtccctctttgaaggtgga

SEQ ID NO: 12962 - DNA, 25 bp, Homo sapiens
cagggctctcctttgtgccgagaca

SEQ ID NO: 12963 - DNA, 25 bp, Homo sapiens
agagcaccctctttgttcccacttg

SEQ ID NO: 12964 - DNA, 25 bp, Homo sapiens
cccagcagcagaaggggagactcta

SEQ ID NO: 12965 - DNA, 25 bp, Homo sapiens
gccctcagtgggaaggtcctaagga

SEQ ID NO: 12966 - DNA, 25 bp, Homo sapiens
tgagctggccctgtattctgctatg

SEQ ID NO: 12967 - DNA, 25 bp, Homo sapiens
gaggcctcctttgtcatattccaga

SEQ ID NO: 12968 - DNA, 25 bp, Homo sapiens
acagaactggtttgcggatgcctcc

SEQ ID NO: 12969 - DNA, 25 bp, Homo sapiens
gacctggtgtctgtgcacatctaca

SEQ ID NO: 12970 - DNA, 25 bp, Homo sapiens
tgcgttatccctgcctctgagcaaa

SEQ ID NO: 12971 - DNA, 25 bp, Homo sapiens
gaccctggcccaatacctatgtatg

SEQ ID NO: 12972 - DNA, 25 bp, Homo sapiens
gcacactttggaggttgcacgttta

SEQ ID NO: 12973 - DNA, 25 bp, Homo sapiens
cccaaggggccgaattctgcactac

SEQ ID NO: 12974 - DNA, 25 bp, Homo sapiens
tggggctctcccttctaatgactag

SEQ ID NO: 12975 - DNA, 25 bp, Homo sapiens
agtccacctggggaattgtctctcc

SEQ ID NO: 12976 - DNA, 25 bp, Homo sapiens
caggctgcttggtatgctccatgaa

SEQ ID NO: 12977 - DNA, 25 bp, Homo sapiens
cccactggcttcctaacggggtgca

SEQ ID NO: 12978 - DNA, 25 bp, Homo sapiens
ggcagctcttctccggtccttcaaa

SEQ ID NO: 12979 - DNA, 25 bp, Homo sapiens
tctgcgccaaggagttccacacttg

SEQ ID NO: 12980 - DNA, 25 bp, Homo sapiens
cgcctcaggttgtcaggattactca

SEQ ID NO: 12981 - DNA, 25 bp, Homo sapiens
ggggtccactccttccattctcttg

SEQ ID NO: 12982 - DNA, 25 bp, Homo sapiens
tggaccacccgctccttgaaacttt

SEQ ID NO: 12983 - DNA, 25 bp, Homo sapiens
ctgctcctgtgctgtctttgaccca

SEQ ID NO: 12984 - DNA, 25 bp, Homo sapiens
gtagccatcattttcagggaccttc

SEQ ID NO: 12985 - DNA, 25 bp, Homo sapiens
ggcgcttccagatggtgaacaaata

SEQ ID NO: 12986 - DNA, 25 bp, Homo sapiens
tctctgcctgcttgtgggataacca

SEQ ID NO: 12987 - DNA, 25 bp, Homo sapiens
tggcaactctgtgggcagctcaatg

SEQ ID NO: 12988 - DNA, 25 bp, Homo sapiens
ccacggctggtatttaggcacattc

SEQ ID NO: 12989 - DNA, 25 bp, Homo sapiens
gcagtagatcctagcaaccctcata

SEQ ID NO: 12990 - DNA, 25 bp, Homo sapiens
ctgtgtccctttcagcgcctaatga

SEQ ID NO: 12991 - DNA, 25 bp, Homo sapiens
ctctggcttgtcatagaaacacctc

SEQ ID NO: 12992 - DNA, 25 bp, Homo sapiens
ccttggagaagtgcccttgaacctt

SEQ ID NO: 12993 - DNA, 25 bp, Homo sapiens
aggtgcgcctcaattcccgttagca

SEQ ID NO: 12994 - DNA, 25 bp, Homo sapiens
ttccagccggtatgcacaggcaaga

SEQ ID NO: 12995 - DNA, 25 bp, Homo sapiens
gtgtctccgcactcctaggttcatg

SEQ ID NO: 12996 - DNA, 25 bp, Homo sapiens
tcagagagtctccacagtcaccagg

SEQ ID NO: 12997 - DNA, 25 bp, Homo sapiens
gcagttcgccatagtatcaggattc

SEQ ID NO: 12998 - DNA, 25 bp, Homo sapiens
ctccctacagttttttttttttctg

SEQ ID NO: 12999 - DNA, 25 bp, Homo sapiens
cttcatgcaggacaggaggtagccc

SEQ ID NO: 13000 - DNA, 25 bp, Homo sapiens
gccacattcttgtttcccctcttaa

SEQ ID NO: 13001 - DNA, 25 bp, Homo sapiens
cctggccatgtcactcatttatgga

SEQ ID NO: 13002 - DNA, 25 bp, Homo sapiens
ggtcctcggagtgcctcagttttca

SEQ ID NO: 13003 - DNA, 25 bp, Homo sapiens
acacgtcctcgagaagcgcctacta

SEQ ID NO: 13004 - DNA, 25 bp, Homo sapiens
ctgagggcacgcaagagcattaatc

SEQ ID NO: 13005 - DNA, 25 bp, Homo sapiens
gaaccgttttgcttcagatcccgtg

SEQ ID NO: 13006 - DNA, 25 bp, Homo sapiens
tactgtaaaggaaaggagaaagaaa

SEQ ID NO: 13007 - DNA, 25 bp, Homo sapiens
tgggaactgatagcgaaatccaatt

SEQ ID NO: 13008 - DNA, 25 bp, Homo sapiens
ggagtcctgtggttctaatccttaa

SEQ ID NO: 13009 - DNA, 25 bp, Homo sapiens
gctcatatgaaaatcctttcccttc

SEQ ID NO: 13010 - DNA, 25 bp, Homo sapiens
ttcaccctgttttcttttaaaagtc

SEQ ID NO: 13011 - DNA, 25 bp, Homo sapiens
gcccatcattttgtatctaggacca

SEQ ID NO: 13012 - DNA, 25 bp, Homo sapiens
tctgtagtctggagcaagatgccta

SEQ ID NO: 13013 - DNA, 25 bp, Homo sapiens
tgtacttagaaaaaaatggtacaca

SEQ ID NO: 13014 - DNA, 25 bp, Homo sapiens
gggactcacctggttataaagctca

SEQ ID NO: 13015 - DNA, 25 bp, Homo sapiens
agtgacctaaggcacaagaacagtc

SEQ ID NO: 13016 - DNA, 25 bp, Homo sapiens
gggctatccatgcatctcagaattc

SEQ ID NO: 13017 - DNA, 25 bp, Homo sapiens
ttaaatttttgtttaaaactggtta

SEQ ID NO: 13018 - DNA, 25 bp, Homo sapiens
ggtctataggcaaacagcaggctga

SEQ ID NO: 13019 - DNA, 25 bp, Homo sapiens
ttgatagcagatatttactatattt

SEQ ID NO: 13020 - DNA, 25 bp, Homo sapiens
gccttttaaaaacatgtggatggtg

SEQ ID NO: 13021 - DNA, 25 bp, Homo sapiens
attacttgttgccagggaaatcctg

SEQ ID NO: 13022 - DNA, 25 bp, Homo sapiens
ttacaggctgtgacggaagaagatc

SEQ ID NO: 13023 - DNA, 25 bp, Homo sapiens
ggggacggaacctccttttccctta

SEQ ID NO: 13024 - DNA, 25 bp, Homo sapiens
tgaagctgagcttcccagggatacc

SEQ ID NO: 13025 - DNA, 25 bp, Homo sapiens
ccctggcttgagaaactccgtcatg

SEQ ID NO: 13026 - DNA, 25 bp, Homo sapiens
tatagacactgattggaaggtacca

SEQ ID NO: 13027 - DNA, 25 bp, Homo sapiens
cctcctgccagccaaaggtgtaata

SEQ ID NO: 13028 - DNA, 25 bp, Homo sapiens
gctctgatttgtgatgtgtctcttc

SEQ ID NO: 13029 - DNA, 25 bp, Homo sapiens
ccttgtagcccttcagtactttgca

SEQ ID NO: 13030 - DNA, 25 bp, Homo sapiens
tgattgagtcgtaccagcagcctgg

SEQ ID NO: 13031 - DNA, 25 bp, Homo sapiens
ttgtcaccctggaaggctgagacca

SEQ ID NO: 13032 - DNA, 25 bp, Homo sapiens
gctctatgctactgctttggggata

SEQ ID NO: 13033 - DNA, 25 bp, Homo sapiens
tcccatttgtctgctgtcatttgtc

SEQ ID NO: 13034 - DNA, 25 bp, Homo sapiens
cttggaagtgtttttacttcaggcc

SEQ ID NO: 13035 - DNA, 25 bp, Homo sapiens
gtgccctataagtagctggctctta

SEQ ID NO: 13036 - DNA, 25 bp, Homo sapiens
ctagtgagactttaacaggcctttc

SEQ ID NO: 13037 - DNA, 25 bp, Homo sapiens
agacagttgtctccatccattcctc

SEQ ID NO: 13038 - DNA, 25 bp, Homo sapiens
ctgtctgagggtaatccataggcta

SEQ ID NO: 13039 - DNA, 25 bp, Homo sapiens
actaatgcatttatgcttgtaaatg

SEQ ID NO: 13040 - DNA, 25 bp, Homo sapiens
cgaactaactaaataaataagcata

SEQ ID NO: 13041 - DNA, 25 bp, Homo sapiens
tacttaaaaagaaaatggaaagttc

SEQ ID NO: 13042 - DNA, 25 bp, Homo sapiens
gagagttctttcagtttccagtgga

SEQ ID NO: 13043 - DNA, 25 bp, Homo sapiens
agccactggttgatatctgactaca

SEQ ID NO: 13044 - DNA, 25 bp, Homo sapiens
tataatatagagaattgagatgtca

SEQ ID NO: 13045 - DNA, 25 bp, Homo sapiens
cgaattcttcgataaggtgcctatt

SEQ ID NO: 13046 - DNA, 25 bp, Homo sapiens
agagttgctccagctgtagcacacc

SEQ ID NO: 13047 - DNA, 25 bp, Homo sapiens
ggttgtgacatagtctagccagtta

SEQ ID NO: 13048 - DNA, 25 bp, Homo sapiens
gtcacttaggcaatgaaaattttag

SEQ ID NO: 13049 - DNA, 25 bp, Homo sapiens
aatataggtctgtgtttttatagga

SEQ ID NO: 13050 - DNA, 25 bp, Homo sapiens
ttaagtttttatatgtggctatctt

SEQ ID NO: 13051 - DNA, 25 bp, Homo sapiens
gcacaagtgtacagcattctataga

SEQ ID NO: 13052 - DNA, 25 bp, Homo sapiens
gtttaaagtgtagggaaataagata

SEQ ID NO: 13053 - DNA, 25 bp, Homo sapiens
gtcacacagctctaactacaaagtt

SEQ ID NO: 13054 - DNA, 25 bp, Homo sapiens
aattacaacagtctattttgatagc

SEQ ID NO: 13055 - DNA, 25 bp, Homo sapiens
aattcatgcccacagatatccctaa

SEQ ID NO: 13056 - DNA, 25 bp, Homo sapiens
ggtacctgcctcatgactgattctg

SEQ ID NO: 13057 - DNA, 25 bp, Homo sapiens
acagtgattcacaaacaggttttcc

SEQ ID NO: 13058 - DNA, 25 bp, Homo sapiens
gtaagtctgagtcacagccagtgga

SEQ ID NO: 13059 - DNA, 25 bp, Homo sapiens
tttagaagaaggaaacaaactttag

SEQ ID NO: 13060 - DNA, 25 bp, Homo sapiens
ttggggaaattagcaagaatggagt

SEQ ID NO: 13061 - DNA, 25 bp, Homo sapiens
ggatgtagtaaatttaccaaatatt

SEQ ID NO: 13062 - DNA, 25 bp, Homo sapiens
tcctgaaatagaagtgcactgtctc

SEQ ID NO: 13063 - DNA, 25 bp, Homo sapiens
catggcggtttgttatgctgtccaa

SEQ ID NO: 13064 - DNA, 25 bp, Homo sapiens
gctataattaatacagtacggaatt

SEQ ID NO: 13065 - DNA, 25 bp, Homo sapiens
tacaccaatgttctctgtacaattc

SEQ ID NO: 13066 - DNA, 25 bp, Homo sapiens
aagaacttctttttatttaagttgg

SEQ ID NO: 13067 - DNA, 25 bp, Homo sapiens
ttaaacacttttagcaaaaacaaaa

SEQ ID NO: 13068 - DNA, 25 bp, Homo sapiens
gactctgtctcttccccgcccccgc

SEQ ID NO: 13069 - DNA, 25 bp, Homo sapiens
tattaatgagtttaaaagctaatgt

SEQ ID NO: 13070 - DNA, 25 bp, Homo sapiens
tactccgttcagattcctgtgcctg

SEQ ID NO: 13071 - DNA, 25 bp, Homo sapiens
ggttttattcctactgtcatgcatc

SEQ ID NO: 13072 - DNA, 25 bp, Homo sapiens
ttcctgcactgttcgggaatctaca

SEQ ID NO: 13073 - DNA, 25 bp, Homo sapiens
ttggaaccaacttctgctgctgctg

SEQ ID NO: 13074 - DNA, 25 bp, Homo sapiens
cctgaggcttttgctccagctgagc

SEQ ID NO: 13075 - DNA, 25 bp, Homo sapiens
tatgtgcccacaaaaatgtaaaaat

SEQ ID NO: 13076 - DNA, 25 bp, Homo sapiens
gtggccagctccttggttctgcaaa

SEQ ID NO: 13077 - DNA, 25 bp, Homo sapiens
tacccgaagggagcattcatatttg

SEQ ID NO: 13078 - DNA, 25 bp, Homo sapiens
tggggcacaccctgaattttcagtg

SEQ ID NO: 13079 - DNA, 25 bp, Homo sapiens
gcctagctgaccactggaaatgcca

SEQ ID NO: 13080 - DNA, 25 bp, Homo sapiens
atctgggaagctacaacctctactg

SEQ ID NO: 13081 - DNA, 25 bp, Homo sapiens
ctaggatgtccttcccagtaagcta

SEQ ID NO: 13082 - DNA, 25 bp, Homo sapiens
ttagtggacactacggcaaccctgc

SEQ ID NO: 13083 - DNA, 25 bp, Homo sapiens
tgctcaggctacacgaagatattta

SEQ ID NO: 13084 - DNA, 25 bp, Homo sapiens
tgtgctctataacaaactactaagc

SEQ ID NO: 13085 - DNA, 25 bp, Homo sapiens
ctctgcatataactaatctcctgtc

SEQ ID NO: 13086 - DNA, 25 bp, Homo sapiens
aagtagactttctgcgagcgccatc

SEQ ID NO: 13087 - DNA, 25 bp, Homo sapiens
cttcccacgttttccatcattttga

SEQ ID NO: 13088 - DNA, 25 bp, Homo sapiens
gagacctccacgtgcccaatattta

SEQ ID NO: 13089 - DNA, 25 bp, Homo sapiens
acttaaaacaaattttttttagagc

SEQ ID NO: 13090 - DNA, 25 bp, Homo sapiens
gggtgctactcaatccagtgaagtc

SEQ ID NO: 13091 - DNA, 25 bp, Homo sapiens
ccaatggtcatcatgcttgagagtc

SEQ ID NO: 13092 - DNA, 25 bp, Homo sapiens
gtatagctactattataatcctgtg

SEQ ID NO: 13093 - DNA, 25 bp, Homo sapiens
tcccgtggccaacaagcatctagtt

SEQ ID NO: 13094 - DNA, 25 bp, Homo sapiens
gtcagacttgttttccatcaggttg

SEQ ID NO: 13095 - DNA, 25 bp, Homo sapiens
caagctatgatgagaagtacagata

SEQ ID NO: 13096 - DNA, 25 bp, Homo sapiens
ctatgtcagtatggctttagggata

SEQ ID NO: 13097 - DNA, 25 bp, Homo sapiens
ggcatacgaagtgggactttcaaaa

SEQ ID NO: 13098 - DNA, 25 bp, Homo sapiens
agagctgctgaagctggcacaatta

SEQ ID NO: 13099 - DNA, 25 bp, Homo sapiens
tccagccctctccagaagtattatg

SEQ ID NO: 13100 - DNA, 25 bp, Homo sapiens
gtctccgtttgtgtatatgtcttca

SEQ ID NO: 13101 - DNA, 25 bp, Homo sapiens
ctggattggcctaactcataatgga

SEQ ID NO: 13102 - DNA, 25 bp, Homo sapiens
ccctgatggctatatgctatgactg

SEQ ID NO: 13103 - DNA, 25 bp, Homo sapiens
tgggtgaactctcttccaaacgata

SEQ ID NO: 13104 - DNA, 25 bp, Homo sapiens
agtgacagctgtgcatttagacacc

SEQ ID NO: 13105 - DNA, 25 bp, Homo sapiens
tggaggagtgacctttagaaaaatc

SEQ ID NO: 13106 - DNA, 25 bp, Homo sapiens
tcaaggtggtcaagaataactcagc

SEQ ID NO: 13107 - DNA, 25 bp, Homo sapiens
ctgaccctgttgtttcctgttgatt

SEQ ID NO: 13108 - DNA, 25 bp, Homo sapiens
cagctttctagtggatcttcctgta

SEQ ID NO: 13109 - DNA, 25 bp, Homo sapiens
ctgcagcctttgttgtgtatatgtg

SEQ ID NO: 13110 - DNA, 25 bp, Homo sapiens
tcgcagttagctggaaatgagttca

SEQ ID NO: 13111 - DNA, 25 bp, Homo sapiens
ccaatcaccctgactggggacagta

SEQ ID NO: 13112 - DNA, 25 bp, Homo sapiens
agtcaggtcattaagttacaaatca

SEQ ID NO: 13113 - DNA, 25 bp, Homo sapiens
gagaattctttttcttccctcctaa

SEQ ID NO: 13114 - DNA, 25 bp, Homo sapiens
ggcaacatgtattgtctgtgacctt

SEQ ID NO: 13115 - DNA, 25 bp, Homo sapiens
ccttttggggatcttggtaactttc

SEQ ID NO: 13116 - DNA, 25 bp, Homo sapiens
ggtccgctgaacctacacctatttc

SEQ ID NO: 13117 - DNA, 25 bp, Homo sapiens
tttctaagagtcagggtcatgttca

SEQ ID NO: 13118 - DNA, 25 bp, Homo sapiens
gcagtctcctttagctcttttgata

SEQ ID NO: 13119 - DNA, 25 bp, Homo sapiens
tagataacttcctaggctggcctta

SEQ ID NO: 13120 - DNA, 25 bp, Homo sapiens
acttggctgagatggtgtactaaca

SEQ ID NO: 13121 - DNA, 25 bp, Homo sapiens
acgtttttgttccacaggctactta

SEQ ID NO: 13122 - DNA, 25 bp, Homo sapiens
tcaccagtgtgatgtcagcagaata

SEQ ID NO: 13123 - DNA, 25 bp, Homo sapiens
acgctggtacttccatacaatattg

SEQ ID NO: 13124 - DNA, 25 bp, Homo sapiens
ttgttggcaaccgaggaaaaatccc

SEQ ID NO: 13125 - DNA, 25 bp, Homo sapiens
cccttcgaggcagggtttaacctga

SEQ ID NO: 13126 - DNA, 25 bp, Homo sapiens
ttctatgtggccacccttggaccta

SEQ ID NO: 13127 - DNA, 25 bp, Homo sapiens
cactaacgcctttgtgtggggctta

SEQ ID NO: 13128 - DNA, 25 bp, Homo sapiens
ttaagctaagcaagtcatgggcatc

SEQ ID NO: 13129 - DNA, 25 bp, Homo sapiens
tgcaacttgcagaggcctaacacgc

SEQ ID NO: 13130 - DNA, 25 bp, Homo sapiens
tcctctggttagaaactccctgctc

SEQ ID NO: 13131 - DNA, 25 bp, Homo sapiens
ctggcactagggaaaacacacaatg

SEQ ID NO: 13132 - DNA, 25 bp, Homo sapiens
cggcaaggagtagacccaatatatt

SEQ ID NO: 13133 - DNA, 25 bp, Homo sapiens
gtttactttcccagcttcagacata

SEQ ID NO: 13134 - DNA, 25 bp, Homo sapiens
agaaattccttctggttcgagttgg

SEQ ID NO: 13135 - DNA, 25 bp, Homo sapiens
cctcacggactttctcaatggcata

SEQ ID NO: 13136 - DNA, 25 bp, Homo sapiens
tttgacccaggtaaggaaacagccc

SEQ ID NO: 13137 - DNA, 25 bp, Homo sapiens
aggggctaatctcatttgctgtatc

SEQ ID NO: 13138 - DNA, 25 bp, Homo sapiens
tcctgcttaccatggggatctcttc

SEQ ID NO: 13139 - DNA, 25 bp, Homo sapiens
ctgctaggggccataatctccaata

SEQ ID NO: 13140 - DNA, 25 bp, Homo sapiens
gagccggaggtcttagtatatatta

SEQ ID NO: 13141 - DNA, 25 bp, Homo sapiens
aaagcgcttggtttctggatcatca

SEQ ID NO: 13142 - DNA, 25 bp, Homo sapiens
ctctttcgcaactgaggagtgctgc

SEQ ID NO: 13143 - DNA, 25 bp, Homo sapiens
ctgaggtctcaaaggtgtgccctga

SEQ ID NO: 13144 - DNA, 25 bp, Homo sapiens
ttactatcttggtttcactgggcac

SEQ ID NO: 13145 - DNA, 25 bp, Homo sapiens
gccaccgatgtaacaacaatgtata

SEQ ID NO: 13146 - DNA, 25 bp, Homo sapiens
atgtctcggttcttcctataggata

SEQ ID NO: 13147 - DNA, 25 bp, Homo sapiens
tgcgttcatcaccaccaatactaga

SEQ ID NO: 13148 - DNA, 25 bp, Homo sapiens
cttggatgaccagaagctcaacagc

SEQ ID NO: 13149 - DNA, 25 bp, Homo sapiens
atggcgctgtacaatacctttcttc

SEQ ID NO: 13150 - DNA, 25 bp, Homo sapiens
ggggctaagttctctctgccaattc

SEQ ID NO: 13151 - DNA, 25 bp, Homo sapiens
gtccactagggacagtaaaatgcca

SEQ ID NO: 13152 - DNA, 25 bp, Homo sapiens
ccactaagaagggtagtatatcttc

SEQ ID NO: 13153 - DNA, 25 bp, Homo sapiens
aagcaatgctctcagtgtttaggga

SEQ ID NO: 13154 - DNA, 25 bp, Homo sapiens
ggctgtagtttatcatggcatcgta

SEQ ID NO: 13155 - DNA, 25 bp, Homo sapiens
cctccgtaaaggctggtaatacttc

SEQ ID NO: 13156 - DNA, 25 bp, Homo sapiens
agtcaggtcacagttcccgcaaata

SEQ ID NO: 13157 - DNA, 25 bp, Homo sapiens
gtgtcagccaccattcagaagtagc

SEQ ID NO: 13158 - DNA, 25 bp, Homo sapiens
tcatgaatatggtactctcttttta

SEQ ID NO: 13159 - DNA, 25 bp, Homo sapiens
agtgtgtgtgtgcttcaatccctta

SEQ ID NO: 13160 - DNA, 25 bp, Homo sapiens
aggcttaccttttagcagtgcagta

SEQ ID NO: 13161 - DNA, 25 bp, Homo sapiens
cttccttggtactgaacattatctg

SEQ ID NO: 13162 - DNA, 25 bp, Homo sapiens
gtgaaagtctccttcccgctctctt

SEQ ID NO: 13163 - DNA, 25 bp, Homo sapiens
tttggcccaccctcaaatataagtg

SEQ ID NO: 13164 - DNA, 25 bp, Homo sapiens
gtctcaaatgccacctgaaaggttt

SEQ ID NO: 13165 - DNA, 25 bp, Homo sapiens
agagctcaacttcctggggtcctta

SEQ ID NO: 13166 - DNA, 25 bp, Homo sapiens
gctattagtacagcccaggacaatt

SEQ ID NO: 13167 - DNA, 25 bp, Homo sapiens
atttttccagccatgagtagactca

SEQ ID NO: 13168 - DNA, 25 bp, Homo sapiens
tgagggcatctccaacatgttttgc

SEQ ID NO: 13169 - DNA, 25 bp, Homo sapiens
tcggtggcacaggaccatacgcaaa

SEQ ID NO: 13170 - DNA, 25 bp, Homo sapiens
tcactcagtttgatctccataatgc

SEQ ID NO: 13171 - DNA, 25 bp, Homo sapiens
aagctacttcttactgctgctgagg

SEQ ID NO: 13172 - DNA, 25 bp, Homo sapiens
cgtgggtgaagctcaaatttctgca

SEQ ID NO: 13173 - DNA, 25 bp, Homo sapiens
tcatggtgttcggatggattctcca

SEQ ID NO: 13174 - DNA, 25 bp, Homo sapiens
ctggagtcccttaagaatactttgg

SEQ ID NO: 13175 - DNA, 25 bp, Homo sapiens
ctcactgttgggcaaggttttcctc

SEQ ID NO: 13176 - DNA, 25 bp, Homo sapiens
taatattctttttctaaagaacaga

SEQ ID NO: 13177 - DNA, 25 bp, Homo sapiens
taagcatccgttgggctctgttctg

SEQ ID NO: 13178 - DNA, 25 bp, Homo sapiens
gacagatggctttctacccagaagc

SEQ ID NO: 13179 - DNA, 25 bp, Homo sapiens
agctccaactattaagaccatgctt

SEQ ID NO: 13180 - DNA, 25 bp, Homo sapiens
ggcaaagcattagcattacaagaaa

SEQ ID NO: 13181 - DNA, 25 bp, Homo sapiens
tctgtgaacggggtcctaaaggtct

SEQ ID NO: 13182 - DNA, 25 bp, Homo sapiens
tgtcaggttttttgtttttgttttt

SEQ ID NO: 13183 - DNA, 25 bp, Homo sapiens
gctctcgctgcctaaaattcctgtc

SEQ ID NO: 13184 - DNA, 25 bp, Homo sapiens
ctagtgatcgccaagataagttaca

SEQ ID NO: 13185 - DNA, 25 bp, Homo sapiens
ataaatgtataccaggcacggtgac

SEQ ID NO: 13186 - DNA, 25 bp, Homo sapiens
tgtgtttgttgtgagagatccgttc

SEQ ID NO: 13187 - DNA, 25 bp, Homo sapiens
ggatacccagtagatgcccaataga

SEQ ID NO: 13188 - DNA, 25 bp, Homo sapiens
gaagcctagtttgagattcccacta

SEQ ID NO: 13189 - DNA, 25 bp, Homo sapiens
gaggcggtggaggtggcagcacaag

SEQ ID NO: 13190 - DNA, 25 bp, Homo sapiens
actacatcccatagttttgggtttt

SEQ ID NO: 13191 - DNA, 25 bp, Homo sapiens
tgctaggttgcactaccagatttta

SEQ ID NO: 13192 - DNA, 25 bp, Homo sapiens
ccttcctgcctagatgctgctagca

SEQ ID NO: 13193 - DNA, 25 bp, Homo sapiens
cggtaatcaaattaaaagaaattgc

SEQ ID NO: 13194 - DNA, 25 bp, Homo sapiens
tggctgccaactactcaactaatta

SEQ ID NO: 13195 - DNA, 25 bp, Homo sapiens
cgcttggacgttcacactgcgagta

SEQ ID NO: 13196 - DNA, 25 bp, Homo sapiens
cctgtcatctgaggtcttacaaata

SEQ ID NO: 13197 - DNA, 25 bp, Homo sapiens
ccaaaggttaaggtttccagaagtc

SEQ ID NO: 13198 - DNA, 25 bp, Homo sapiens
cactgaattttgcttcccggtacca

SEQ ID NO: 13199 - DNA, 25 bp, Homo sapiens
gtgcctcttaatgtaatgcaacaga

SEQ ID NO: 13200 - DNA, 25 bp, Homo sapiens
taaggtggaaaatagtgaaagacac

SEQ ID NO: 13201 - DNA, 25 bp, Homo sapiens
gggtccagtaccattctcctcacgg

SEQ ID NO: 13202 - DNA, 25 bp, Homo sapiens
cctctcctgttgctgccggtaaata

SEQ ID NO: 13203 - DNA, 25 bp, Homo sapiens
gttagctgagtgcagtgcatgcctg

SEQ ID NO: 13204 - DNA, 25 bp, Homo sapiens
cgtgggcccagctgaaagtaaatgc

SEQ ID NO: 13205 - DNA, 25 bp, Homo sapiens
tgactggcgtataccaagctgttta

SEQ ID NO: 13206 - DNA, 25 bp, Homo sapiens
ggactgactgtactgggcccataaa

SEQ ID NO: 13207 - DNA, 25 bp, Homo sapiens
tctgagccagaggtaccatattgta

SEQ ID NO: 13208 - DNA, 25 bp, Homo sapiens
attttatgtaatttcactgaaagtt

SEQ ID NO: 13209 - DNA, 25 bp, Homo sapiens
tctgggccatcaagcacaattttca

SEQ ID NO: 13210 - DNA, 25 bp, Homo sapiens
agtcaccaatcccaaggccaagttg

SEQ ID NO: 13211 - DNA, 25 bp, Homo sapiens
tctggagggagagactacttatttc

SEQ ID NO: 13212 - DNA, 25 bp, Homo sapiens
ggagtatcactttctggcccacaga

SEQ ID NO: 13213 - DNA, 25 bp, Homo sapiens
ggcaagagtttggtccctcacactg

SEQ ID NO: 13214 - DNA, 25 bp, Homo sapiens
gggcatttcctagggtatcttcacc

SEQ ID NO: 13215 - DNA, 25 bp, Homo sapiens
tgtatatttggcgttttttccttct

SEQ ID NO: 13216 - DNA, 25 bp, Homo sapiens
agctatcacgatcagaggccttgga

SEQ ID NO: 13217 - DNA, 25 bp, Homo sapiens
gcatctaccacatctaagagtttta

SEQ ID NO: 13218 - DNA, 25 bp, Homo sapiens
ctgctcagggcagaatgtgtccttc

SEQ ID NO: 13219 - DNA, 25 bp, Homo sapiens
cctgttgggtacactcagagactta

SEQ ID NO: 13220 - DNA, 25 bp, Homo sapiens
tcttgagactaatgcatgacctatc

SEQ ID NO: 13221 - DNA, 25 bp, Homo sapiens
gaggtaacaacagtaggagcagtaa

SEQ ID NO: 13222 - DNA, 25 bp, Homo sapiens
tctactggccaatattctttaaagg

SEQ ID NO: 13223 - DNA, 25 bp, Homo sapiens
gaagtagctttctcatagtctggcc

SEQ ID NO: 13224 - DNA, 25 bp, Homo sapiens
tggctgcctgcctatgcttcaagga

SEQ ID NO: 13225 - DNA, 25 bp, Homo sapiens
gctattcagggccaggtcataacta

SEQ ID NO: 13226 - DNA, 25 bp, Homo sapiens
ttggtgtgccatcctcctttcctta

SEQ ID NO: 13227 - DNA, 25 bp, Homo sapiens
ggaccgtggtcagagatctatgata

SEQ ID NO: 13228 - DNA, 25 bp, Homo sapiens
tgcttggactagacgtgacctcatc

SEQ ID NO: 13229 - DNA, 25 bp, Homo sapiens
ggaggcttctattacccagatattc

SEQ ID NO: 13230 - DNA, 25 bp, Homo sapiens
tcctgcacttggtctgaggtgagtt

SEQ ID NO: 13231 - DNA, 25 bp, Homo sapiens
ctgctctttgcatctagaacggaaa

SEQ ID NO: 13232 - DNA, 25 bp, Homo sapiens
tatgatcttcatctggggccaccta

SEQ ID NO: 13233 - DNA, 25 bp, Homo sapiens
ggtgctctgggttccatttcctgta

SEQ ID NO: 13234 - DNA, 25 bp, Homo sapiens
tcttcttgcacataccctgggcttc

SEQ ID NO: 13235 - DNA, 25 bp, Homo sapiens
tggcacagacaggtgagctctcaaa

SEQ ID NO: 13236 - DNA, 25 bp, Homo sapiens
acctccctggaatctctctgtatga

SEQ ID NO: 13237 - DNA, 25 bp, Homo sapiens
cctccaaggtgtctagtgtggtatc

SEQ ID NO: 13238 - DNA, 25 bp, Homo sapiens
tggtttctttttacgtaactgtcaa

SEQ ID NO: 13239 - DNA, 25 bp, Homo sapiens
cacacgtcagctggtatgtaaattg

SEQ ID NO: 13240 - DNA, 25 bp, Homo sapiens
gggccatctcctcaatcctgggttg

SEQ ID NO: 13241 - DNA, 25 bp, Homo sapiens
ctgggactcttatgcgaatgtatta

SEQ ID NO: 13242 - DNA, 25 bp, Homo sapiens
gcaagtcttttctgtgtgaatacca

SEQ ID NO: 13243 - DNA, 25 bp, Homo sapiens
tctgccctactgaatgtgtgatcca

SEQ ID NO: 13244 - DNA, 25 bp, Homo sapiens
ccactgtgtttcctagctctaatta

SEQ ID NO: 13245 - DNA, 25 bp, Homo sapiens
tttaaaagtttcttcatacactaga

SEQ ID NO: 13246 - DNA, 25 bp, Homo sapiens
ctgctgggcagaggaaaaatccatc

SEQ ID NO: 13247 - DNA, 25 bp, Homo sapiens
tcctcagcactggaatatggctctc

SEQ ID NO: 13248 - DNA, 25 bp, Homo sapiens
ttgggatattcgtgcccagtctcta

SEQ ID NO: 13249 - DNA, 25 bp, Homo sapiens
ccaatgtcactaaaaaaacacattt

SEQ ID NO: 13250 - DNA, 25 bp, Homo sapiens
tcggtgggccttccagtcaaatgcc

SEQ ID NO: 13251 - DNA, 25 bp, Homo sapiens
cacttaagttccctgagagcctcta

SEQ ID NO: 13252 - DNA, 25 bp, Homo sapiens
ggcatggcttcagtggtcctagata

SEQ ID NO: 13253 - DNA, 25 bp, Homo sapiens
tctctcttagctcctagtggaacta

SEQ ID NO: 13254 - DNA, 25 bp, Homo sapiens
taccattcttctaagattattttag

SEQ ID NO: 13255 - DNA, 25 bp, Homo sapiens
gggactctcattgtcctagttttaa

SEQ ID NO: 13256 - DNA, 25 bp, Homo sapiens
ttaaaacactaatttttaagtcaag

SEQ ID NO: 13257 - DNA, 25 bp, Homo sapiens
tgtattgcctcccactcagctgtag

SEQ ID NO: 13258 - DNA, 25 bp, Homo sapiens
tgtgtccctctatatcctctcctta

SEQ ID NO: 13259 - DNA, 25 bp, Homo sapiens
tcagtgggcctatcagagggtggat

SEQ ID NO: 13260 - DNA, 25 bp, Homo sapiens
agtccctctgcatggttcacctgga

SEQ ID NO: 13261 - DNA, 25 bp, Homo sapiens
ttgaaacagtaagaccgaagtgccc

SEQ ID NO: 13262 - DNA, 25 bp, Homo sapiens
cagaggtgtcgaagtaaaacttgaa

SEQ ID NO: 13263 - DNA, 25 bp, Homo sapiens
tatcccaaggaagtattgacgttta

SEQ ID NO: 13264 - DNA, 25 bp, Homo sapiens
gaagataggaacaggttgtctatgc

SEQ ID NO: 13265 - DNA, 25 bp, Homo sapiens
agtagccttctgctggtgacccaag

SEQ ID NO: 13266 - DNA, 25 bp, Homo sapiens
tgttctcaaagactggtgctcccta

SEQ ID NO: 13267 - DNA, 25 bp, Homo sapiens
gctgtcaaatcaggacccaccagga

SEQ ID NO: 13268 - DNA, 25 bp, Homo sapiens
tgggtacatctgctctgtgaaatta

SEQ ID NO: 13269 - DNA, 25 bp, Homo sapiens
cagggcttagcatttcttgagaacc

SEQ ID NO: 13270 - DNA, 25 bp, Homo sapiens
agccatgtcttctctttccttgata

SEQ ID NO: 13271 - DNA, 25 bp, Homo sapiens
cactgtggcaatgggaagacttcta

SEQ ID NO: 13272 - DNA, 25 bp, Homo sapiens
tctgccaaagggtaggggttatcac

SEQ ID NO: 13273 - DNA, 25 bp, Homo sapiens
tatggctgtcctcctactacatggg

SEQ ID NO: 13274 - DNA, 25 bp, Homo sapiens
ctttatctatttcttccttgggaga

SEQ ID NO: 13275 - DNA, 25 bp, Homo sapiens
tcgccactgggcaaactgaaatgta

SEQ ID NO: 13276 - DNA, 25 bp, Homo sapiens
ctgggaccagttaagtctccatata

SEQ ID NO: 13277 - DNA, 25 bp, Homo sapiens
caggcctctgtcaaacgggatcatc

SEQ ID NO: 13278 - DNA, 25 bp, Homo sapiens
ttggggattattagaactggacatg

SEQ ID NO: 13279 - DNA, 25 bp, Homo sapiens
ccctggacgctgttactttatagtg

SEQ ID NO: 13280 - DNA, 25 bp, Homo sapiens
ttcctttacacaactggctggctca

SEQ ID NO: 13281 - DNA, 25 bp, Homo sapiens
gggcgttcattgctcagtttattca

SEQ ID NO: 13282 - DNA, 25 bp, Homo sapiens
ccatccaggagggagcagaaacttt

SEQ ID NO: 13283 - DNA, 25 bp, Homo sapiens
gccctggggaagaacctgttccttt

SEQ ID NO: 13284 - DNA, 25 bp, Homo sapiens
agctcatgactatgtacagggtcca

SEQ ID NO: 13285 - DNA, 25 bp, Homo sapiens
ctcctgaatgcttgggttttacgcc

SEQ ID NO: 13286 - DNA, 25 bp, Homo sapiens
tcagatgttgacactctctcggttc

SEQ ID NO: 13287 - DNA, 25 bp, Homo sapiens
atcactggtactttgtgttaaaaat

SEQ ID NO: 13288 - DNA, 25 bp, Homo sapiens
ccaggcacttttggcggattcaaca

SEQ ID NO: 13289 - DNA, 25 bp, Homo sapiens
catgagtaccttgacaccctagtga

SEQ ID NO: 13290 - DNA, 25 bp, Homo sapiens
tacctatcggtggagctggttccta

SEQ ID NO: 13291 - DNA, 25 bp, Homo sapiens
ctttggaggagagcacatctgtcta

SEQ ID NO: 13292 - DNA, 25 bp, Homo sapiens
gcaacccttggagacagacattatc

SEQ ID NO: 13293 - DNA, 25 bp, Homo sapiens
gacctctgatgttggctgcctctga

SEQ ID NO: 13294 - DNA, 25 bp, Homo sapiens
agcacctgatagctgcctccttatc

SEQ ID NO: 13295 - DNA, 25 bp, Homo sapiens
cttgcactatttctaaaggacttcc

SEQ ID NO: 13296 - DNA, 25 bp, Homo sapiens
gtggtaagagaatcattgaaatcta

SEQ ID NO: 13297 - DNA, 25 bp, Homo sapiens
cctttaggaggcctgtgtatgatcc

SEQ ID NO: 13298 - DNA, 25 bp, Homo sapiens
ttttaaaaaatgatcttgagactac

SEQ ID NO: 13299 - DNA, 25 bp, Homo sapiens
gatggtctccctccactattagatg

SEQ ID NO: 13300 - DNA, 25 bp, Homo sapiens
tcctgcatggtcagaactcagtatg

SEQ ID NO: 13301 - DNA, 25 bp, Homo sapiens
ggcagcagtctccttgtttcataac

SEQ ID NO: 13302 - DNA, 25 bp, Homo sapiens
tgacctgaggtttcagtaacacacc

SEQ ID NO: 13303 - DNA, 25 bp, Homo sapiens
ttaggccactgttctctgggttttc

SEQ ID NO: 13304 - DNA, 25 bp, Homo sapiens
ggttagcctcgttgccagttcttca

SEQ ID NO: 13305 - DNA, 25 bp, Homo sapiens
tcaagtggctagttaccgtgatcta

SEQ ID NO: 13306 - DNA, 25 bp, Homo sapiens
cctcagaggtgatttccatgttgtt

SEQ ID NO: 13307 - DNA, 25 bp, Homo sapiens
aggattcgtggattaaccattgtct

SEQ ID NO: 13308 - DNA, 25 bp, Homo sapiens
ttggagctagaacactgtagatgct

SEQ ID NO: 13309 - DNA, 25 bp, Homo sapiens
aacaaaaacaaaagccaatcctggt

SEQ ID NO: 13310 - DNA, 25 bp, Homo sapiens
gtccaagcagtaatcagccattttg

SEQ ID NO: 13311 - DNA, 25 bp, Homo sapiens
ccatctagggtgagggaagctaaga

SEQ ID NO: 13312 - DNA, 25 bp, Homo sapiens
aaatgtattatcatttaacgatgcc

SEQ ID NO: 13313 - DNA, 25 bp, Homo sapiens
tgtagactgtattaggtaaagaaga

SEQ ID NO: 13314 - DNA, 25 bp, Homo sapiens
acagaaagattttaggcccaagttc

SEQ ID NO: 13315 - DNA, 25 bp, Homo sapiens
ccggaatataaacgcttggtcacta

SEQ ID NO: 13316 - DNA, 25 bp, Homo sapiens
aatgtgttctctcttgccttgtcaa

SEQ ID NO: 13317 - DNA, 25 bp, Homo sapiens
gcagaacttgcatctagaactcagt

SEQ ID NO: 13318 - DNA, 25 bp, Homo sapiens
cctgaatagacatttaggaaataca

SEQ ID NO: 13319 - DNA, 25 bp, Homo sapiens
cttccctctgcatgtttaaatttta

SEQ ID NO: 13320 - DNA, 25 bp, Homo sapiens
tcattaccagttcaagatccagttc

SEQ ID NO: 13321 - DNA, 25 bp, Homo sapiens
gcagaaaattcccatcactctgtga

SEQ ID NO: 13322 - DNA, 25 bp, Homo sapiens
attttcaagagtcaggccagctaca

SEQ ID NO: 13323 - DNA, 25 bp, Homo sapiens
gatccaaccaccactcaatctttta

SEQ ID NO: 13324 - DNA, 25 bp, Homo sapiens
ggggccttccacttctgaaattatg

SEQ ID NO: 13325 - DNA, 25 bp, Homo sapiens
tgtacgctgtgactgcaaatgcatt

SEQ ID NO: 13326 - DNA, 25 bp, Homo sapiens
aggaagttgaagtgctagggtttta

SEQ ID NO: 13327 - DNA, 25 bp, Homo sapiens
tcagggaactaggaaaggcagactc

SEQ ID NO: 13328 - DNA, 25 bp, Homo sapiens
ttatccggatgaaaagtatacaatg

SEQ ID NO: 13329 - DNA, 25 bp, Homo sapiens
ccagggctgagcacaagtattttgc

SEQ ID NO: 13330 - DNA, 25 bp, Homo sapiens
gtgtccagtgtcctctctagaaata

SEQ ID NO: 13331 - DNA, 25 bp, Homo sapiens
cctggctatgcctaagctacattta

SEQ ID NO: 13332 - DNA, 25 bp, Homo sapiens
tggatggcacatgcaacctaataga

SEQ ID NO: 13333 - DNA, 25 bp, Homo sapiens
atgggcaagagtaaatctaacagta

SEQ ID NO: 13334 - DNA, 25 bp, Homo sapiens
cacaaaggtaaaactacaggaagta

SEQ ID NO: 13335 - DNA, 25 bp, Homo sapiens
ccaatgagctataaggggcaccaca

SEQ ID NO: 13336 - DNA, 25 bp, Homo sapiens
tcagcactgtactcaaagattaggc

SEQ ID NO: 13337 - DNA, 25 bp, Homo sapiens
gctaattcaaatatcttagcagaaa

SEQ ID NO: 13338 - DNA, 25 bp, Homo sapiens
ggtgttggccttaattctcagtctc

SEQ ID NO: 13339 - DNA, 25 bp, Homo sapiens
ggggaaactgtctccatttaaagtg

SEQ ID NO: 13340 - DNA, 25 bp, Homo sapiens
ctctcagaaaagttaacgtttgtcc

SEQ ID NO: 13341 - DNA, 25 bp, Homo sapiens
tctaggttaccagggcatacgttcc

SEQ ID NO: 13342 - DNA, 25 bp, Homo sapiens
acatcctttgggtagctattctcga

SEQ ID NO: 13343 - DNA, 25 bp, Homo sapiens
aggtatcttcttccacaagctgttg

SEQ ID NO: 13344 - DNA, 25 bp, Homo sapiens
tgggccaacacgtagctcagattaa

SEQ ID NO: 13345 - DNA, 25 bp, Homo sapiens
agttgacttgctccgaatggctttc

SEQ ID NO: 13346 - DNA, 25 bp, Homo sapiens
tgagctcctagacgacactgatttc

SEQ ID NO: 13347 - DNA, 25 bp, Homo sapiens
tagctttttcccagccagctctata

SEQ ID NO: 13348 - DNA, 25 bp, Homo sapiens
agccaatgtgtggattctgcggcca

SEQ ID NO: 13349 - DNA, 25 bp, Homo sapiens
gaggcaatccatcttttcggcaata

SEQ ID NO: 13350 - DNA, 25 bp, Homo sapiens
gtaccaggggtgcaaatatccattg

SEQ ID NO: 13351 - DNA, 25 bp, Homo sapiens
tcacagtctgtaggtcagatcaatc

SEQ ID NO: 13352 - DNA, 25 bp, Homo sapiens
ctgataccggagagaacacatttgc

SEQ ID NO: 13353 - DNA, 25 bp, Homo sapiens
tggtattcgccatccagagcgtctg

SEQ ID NO: 13354 - DNA, 25 bp, Homo sapiens
caaggacttttgttatgtgaccata

SEQ ID NO: 13355 - DNA, 25 bp, Homo sapiens
acctgagatcctacagcctgattta

SEQ ID NO: 13356 - DNA, 25 bp, Homo sapiens
ggtgccaagagatttcaagctactg

SEQ ID NO: 13357 - DNA, 25 bp, Homo sapiens
taacatgagtctgtgatcctcctta

SEQ ID NO: 13358 - DNA, 25 bp, Homo sapiens
ccaatggcacggtaaagtctgaata

SEQ ID NO: 13359 - DNA, 25 bp, Homo sapiens
aatttgcaagttatctcagagagga

SEQ ID NO: 13360 - DNA, 25 bp, Homo sapiens
ccaggaagttttgaaggcagtaatc

SEQ ID NO: 13361 - DNA, 25 bp, Homo sapiens
ctgtaggggacaaaagtgagacttc

SEQ ID NO: 13362 - DNA, 25 bp, Homo sapiens
tggctgctgccttccattgctcaga

SEQ ID NO: 13363 - DNA, 25 bp, Homo sapiens
ctgacagggatgcaaggtatacata

SEQ ID NO: 13364 - DNA, 25 bp, Homo sapiens
ccatggaagtacagttaggaagttc

SEQ ID NO: 13365 - DNA, 25 bp, Homo sapiens
caggcagagactgaataaactcctc

SEQ ID NO: 13366 - DNA, 25 bp, Homo sapiens
tctaagtctcgtatcacctgaaagg

SEQ ID NO: 13367 - DNA, 25 bp, Homo sapiens
tcacttggtttacatacagactgcc

SEQ ID NO: 13368 - DNA, 25 bp, Homo sapiens
ggccgagtcatgtgtcagccaaata

SEQ ID NO: 13369 - DNA, 25 bp, Homo sapiens
cggccactcatatacgggaagctga

SEQ ID NO: 13370 - DNA, 25 bp, Homo sapiens
ggctatcattccatggcagtacctg

SEQ ID NO: 13371 - DNA, 25 bp, Homo sapiens
ctctcaggactggttggatttcaaa

SEQ ID NO: 13372 - DNA, 25 bp, Homo sapiens
ctacagcggccctagatttttgttc

SEQ ID NO: 13373 - DNA, 25 bp, Homo sapiens
gacctccgaggaccgttagtgctta

SEQ ID NO: 13374 - DNA, 25 bp, Homo sapiens
ttggctgctgcctaaagtgtaaacc

SEQ ID NO: 13375 - DNA, 25 bp, Homo sapiens
tccagttagtaaggtggccaacgcc

SEQ ID NO: 13376 - DNA, 25 bp, Homo sapiens
gctgctcactagcatgcttccttta

SEQ ID NO: 13377 - DNA, 25 bp, Homo sapiens
cagagatcttggcttctggaagaaa

SEQ ID NO: 13378 - DNA, 25 bp, Homo sapiens
tttgccgctgcacatggatacctgg

SEQ ID NO: 13379 - DNA, 25 bp, Homo sapiens
tgatgcctccaaaaagtgcaatttg

SEQ ID NO: 13380 - DNA, 25 bp, Homo sapiens
aaggcctcaagtcagtgcttcactg

SEQ ID NO: 13381 - DNA, 25 bp, Homo sapiens
agcctagcaggcgtcacatcttccg

SEQ ID NO: 13382 - DNA, 25 bp, Homo sapiens
taagtttctgtaacagggagatccc

SEQ ID NO: 13383 - DNA, 25 bp, Homo sapiens
tgtcctttccaccatcatatctgtg

SEQ ID NO: 13384 - DNA, 25 bp, Homo sapiens
ttcaaaaaaaaaaaaatagtgattc

SEQ ID NO: 13385 - DNA, 25 bp, Homo sapiens
gactgtctatcatcctctaggtagg

SEQ ID NO: 13386 - DNA, 25 bp, Homo sapiens
tcctggctacccaacaggcatgatg

SEQ ID NO: 13387 - DNA, 25 bp, Homo sapiens
ccctagattccctgttgggtcttct

SEQ ID NO: 13388 - DNA, 25 bp, Homo sapiens
tggctccctgctccgtggttaaata

SEQ ID NO: 13389 - DNA, 25 bp, Homo sapiens
gcccaggtctttggcagaagtcaca

SEQ ID NO: 13390 - DNA, 25 bp, Homo sapiens
gctgactctcggttctggatttgta

SEQ ID NO: 13391 - DNA, 25 bp, Homo sapiens
ctttgtgagttcaggggtttgcata

SEQ ID NO: 13392 - DNA, 25 bp, Homo sapiens
agaatgcttcgatcctccctgtaca

SEQ ID NO: 13393 - DNA, 25 bp, Homo sapiens
ccagcctttgacatgtggggaaaca

SEQ ID NO: 13394 - DNA, 25 bp, Homo sapiens
ggcggtacatttcctccaagacagg

SEQ ID NO: 13395 - DNA, 25 bp, Homo sapiens
gcccaggctggcaaaactgaagatt

SEQ ID NO: 13396 - DNA, 25 bp, Homo sapiens
ggtccctccactatggccaggaagt

SEQ ID NO: 13397 - DNA, 25 bp, Homo sapiens
cttggcccaggtggaacttgagtta

SEQ ID NO: 13398 - DNA, 25 bp, Homo sapiens
tgacaactttcttctgcagcctgga

SEQ ID NO: 13399 - DNA, 25 bp, Homo sapiens
ctcgcactgcctcgtggaagacatg

SEQ ID NO: 13400 - DNA, 25 bp, Homo sapiens
ctggatcttcctgacctactgctga

SEQ ID NO: 13401 - DNA, 25 bp, Homo sapiens
gggtcccttccttgctaacaccagt

SEQ ID NO: 13402 - DNA, 25 bp, Homo sapiens
tggctgcctggaagaccaacatcta

SEQ ID NO: 13403 - DNA, 25 bp, Homo sapiens
caccactggttttgggttgagttca

SEQ ID NO: 13404 - DNA, 25 bp, Homo sapiens
agggctcagcatcagtggtcactca

SEQ ID NO: 13405 - DNA, 25 bp, Homo sapiens
cccaaccctggctgaatttatagtc

SEQ ID NO: 13406 - DNA, 25 bp, Homo sapiens
tgctgcctcagaaatggtgcctatg

SEQ ID NO: 13407 - DNA, 25 bp, Homo sapiens
gtctctgctgctgctggaaccaaca

SEQ ID NO: 13408 - DNA, 25 bp, Homo sapiens
acaccctggggttctgtttaaaatc

SEQ ID NO: 13409 - DNA, 25 bp, Homo sapiens
gaatttctcgaatgtcctgcccagg

SEQ ID NO: 13410 - DNA, 25 bp, Homo sapiens
ggggcctctacactcatcatggata

SEQ ID NO: 13411 - DNA, 25 bp, Homo sapiens
ctgagcttgggttggccatcactaa

SEQ ID NO: 13412 - DNA, 25 bp, Homo sapiens
gggttttccaaacaccgaggacatg

SEQ ID NO: 13413 - DNA, 25 bp, Homo sapiens
tccaggcctgcgtacattctagaac

SEQ ID NO: 13414 - DNA, 25 bp, Homo sapiens
tggggccctcaactgtgacagctca

SEQ ID NO: 13415 - DNA, 25 bp, Homo sapiens
cagggcgttcccatcagacttcaga

SEQ ID NO: 13416 - DNA, 25 bp, Homo sapiens
cctggggcagagtcagagatatttc

SEQ ID NO: 13417 - DNA, 25 bp, Homo sapiens
ctgcccagcatttgtagcacagaga

SEQ ID NO: 13418 - DNA, 25 bp, Homo sapiens
agcctcgcagcaagtgtggaattcc

SEQ ID NO: 13419 - DNA, 25 bp, Homo sapiens
ggtatctccctagcagccctcagtg

SEQ ID NO: 13420 - DNA, 25 bp, Homo sapiens
ttattaccatttcttctaaggatat

SEQ ID NO: 13421 - DNA, 25 bp, Homo sapiens
cacgctgggcaacaagctttacatc

SEQ ID NO: 13422 - DNA, 25 bp, Homo sapiens
tgccacacagggatccaggaagctt

SEQ ID NO: 13423 - DNA, 25 bp, Homo sapiens
cccaggctacagaggccactagtta

SEQ ID NO: 13424 - DNA, 25 bp, Homo sapiens
tggcccaaagccacacagcatagca

SEQ ID NO: 13425 - DNA, 25 bp, Homo sapiens
cattgtctgcacttggggctgctta

SEQ ID NO: 13426 - DNA, 25 bp, Homo sapiens
gtccgtcctttctgagaggcctaca

SEQ ID NO: 13427 - DNA, 25 bp, Homo sapiens
tggggcctctttttcatcctaattg

SEQ ID NO: 13428 - DNA, 25 bp, Homo sapiens
tgcctgcctgccagctgattttgca

SEQ ID NO: 13429 - DNA, 25 bp, Homo sapiens
gtgcctctgcctgatcacacagtta

SEQ ID NO: 13430 - DNA, 25 bp, Homo sapiens
ccagccctgggtctgactgaagatc

SEQ ID NO: 13431 - DNA, 25 bp, Homo sapiens
gggttccctcatccagcttaacata

SEQ ID NO: 13432 - DNA, 25 bp, Homo sapiens
ggcaggggccatttcctatccttca

SEQ ID NO: 13433 - DNA, 25 bp, Homo sapiens
gcgctgctcccatgccagaagaatg

SEQ ID NO: 13434 - DNA, 25 bp, Homo sapiens
ggcagccacctgatccttagtatta

SEQ ID NO: 13435 - DNA, 25 bp, Homo sapiens
gcctgtcaactggtcgcctctaatc

SEQ ID NO: 13436 - DNA, 25 bp, Homo sapiens
ccaggtgcctgcaggactcagaaga

SEQ ID NO: 13437 - DNA, 25 bp, Homo sapiens
gctgctctgccatggggcacttaga

SEQ ID NO: 13438 - DNA, 25 bp, Homo sapiens
ggctttctctgagtgcctggcgata

SEQ ID NO: 13439 - DNA, 25 bp, Homo sapiens
ccgtagaccttcagagctgggatga

SEQ ID NO: 13440 - DNA, 25 bp, Homo sapiens
gctgctctgtctctatcacctgatg

SEQ ID NO: 13441 - DNA, 25 bp, Homo sapiens
cccggctcctgtttgaaagtcactt

SEQ ID NO: 13442 - DNA, 25 bp, Homo sapiens
agcacctctttttgggcactttggg

SEQ ID NO: 13443 - DNA, 25 bp, Homo sapiens
cactcagttgggctggacattttta

SEQ ID NO: 13444 - DNA, 25 bp, Homo sapiens
ccagggtggagaacatcaaagttta

SEQ ID NO: 13445 - DNA, 25 bp, Homo sapiens
tctactctagtcaaagggccgcagg

SEQ ID NO: 13446 - DNA, 25 bp, Homo sapiens
cctgagcccagcagtttgccaatga

SEQ ID NO: 13447 - DNA, 25 bp, Homo sapiens
gccagcagcactcagagggattaaa

SEQ ID NO: 13448 - DNA, 25 bp, Homo sapiens
aagccaaacttatcggtagccaaga

SEQ ID NO: 13449 - DNA, 25 bp, Homo sapiens
tccgaggctgcatactctgaatctc

SEQ ID NO: 13450 - DNA, 25 bp, Homo sapiens
ggcccttggcaaagcccagacaaca

SEQ ID NO: 13451 - DNA, 25 bp, Homo sapiens
gcctcagaaaggttggggttactct

SEQ ID NO: 13452 - DNA, 25 bp, Homo sapiens
gtgctggcagcaactttacctccta

SEQ ID NO: 13453 - DNA, 25 bp, Homo sapiens
tgtgtcccggaaagggcatctcatc

SEQ ID NO: 13454 - DNA, 25 bp, Homo sapiens
tagaattgcctgctcccttgtctgg

SEQ ID NO: 13455 - DNA, 25 bp, Homo sapiens
cttacaaatggaggtctataatatc

SEQ ID NO: 13456 - DNA, 25 bp, Homo sapiens
ctgtgcagcactttgaactttagga

SEQ ID NO: 13457 - DNA, 25 bp, Homo sapiens
aggctgcaacagacctgcaggtaaa

SEQ ID NO: 13458 - DNA, 25 bp, Homo sapiens
ccctggccaagtgaagtctgcatga

SEQ ID NO: 13459 - DNA, 25 bp, Homo sapiens
cggcctctagataatggcggggtca

SEQ ID NO: 13460 - DNA, 25 bp, Homo sapiens
atcagggctccacagagtttcattc

SEQ ID NO: 13461 - DNA, 25 bp, Homo sapiens
atccctggacccttttgtgctcaca

SEQ ID NO: 13462 - DNA, 25 bp, Homo sapiens
ccctcagtagtgacgacttgggtca

SEQ ID NO: 13463 - DNA, 25 bp, Homo sapiens
tggaagctcggaatacatgtgttta

SEQ ID NO: 13464 - DNA, 25 bp, Homo sapiens
tctgtcatctttgtctcattcaact

SEQ ID NO: 13465 - DNA, 25 bp, Homo sapiens
aggcagcatcaccttcctgggaagc

SEQ ID NO: 13466 - DNA, 25 bp, Homo sapiens
catgtacccaccaccaagcttaaga

SEQ ID NO: 13467 - DNA, 25 bp, Homo sapiens
tgataaaagaaagaagcaagggagg

SEQ ID NO: 13468 - DNA, 25 bp, Homo sapiens
ggagtggacacacatctctggatta

SEQ ID NO: 13469 - DNA, 25 bp, Homo sapiens
cagtgggtttgatctaggacctcta

SEQ ID NO: 13470 - DNA, 25 bp, Homo sapiens
gggactcctggctttgcaagaaatc

SEQ ID NO: 13471 - DNA, 25 bp, Homo sapiens
cacctggtcgatgtgggtcttccaa

SEQ ID NO: 13472 - DNA, 25 bp, Homo sapiens
gcagaccctttttacagagcagatc

SEQ ID NO: 13473 - DNA, 25 bp, Homo sapiens
tcagccttggggagatacgtgatcc

SEQ ID NO: 13474 - DNA, 25 bp, Homo sapiens
gggtatcccaagcacacagatctag

SEQ ID NO: 13475 - DNA, 25 bp, Homo sapiens
gctcttgcgaccacagggctcatta

SEQ ID NO: 13476 - DNA, 25 bp, Homo sapiens
cggaattgactctgggtccacctta

SEQ ID NO: 13477 - DNA, 25 bp, Homo sapiens
ttggcccttcctgagactgttggtc

SEQ ID NO: 13478 - DNA, 25 bp, Homo sapiens
actggccttgcttcctctgcagaga

SEQ ID NO: 13479 - DNA, 25 bp, Homo sapiens
cctgccagggaaaggactgcgttta

SEQ ID NO: 13480 - DNA, 25 bp, Homo sapiens
ggaaactgtccaaatgtcacctgtg

SEQ ID NO: 13481 - DNA, 25 bp, Homo sapiens
ggcactccactgagccctctgatta

SEQ ID NO: 13482 - DNA, 25 bp, Homo sapiens
gaaggcatattcctctccaagatta

SEQ ID NO: 13483 - DNA, 25 bp, Homo sapiens
ctttgggccataccaagcagctgga

SEQ ID NO: 13484 - DNA, 25 bp, Homo sapiens
tggctggcattcttccctcaaggga

SEQ ID NO: 13485 - DNA, 25 bp, Homo sapiens
cagtttgatggatacgatgccaggc

SEQ ID NO: 13486 - DNA, 25 bp, Homo sapiens
cggggtcactcttcatagcctgatt

SEQ ID NO: 13487 - DNA, 25 bp, Homo sapiens
gctgtcattgcatctccctaaggtg

SEQ ID NO: 13488 - DNA, 25 bp, Homo sapiens
ccaggctcccaaggagggtgtcttc

SEQ ID NO: 13489 - DNA, 25 bp, Homo sapiens
gagccttgggattgactcctctata

SEQ ID NO: 13490 - DNA, 25 bp, Homo sapiens
gctggctgcctcagaaaatctcttg

SEQ ID NO: 13491 - DNA, 25 bp, Homo sapiens
gcgggtctctctttgcaaacaggca

SEQ ID NO: 13492 - DNA, 25 bp, Homo sapiens
cctggcttccctgaggagtgatctt

SEQ ID NO: 13493 - DNA, 25 bp, Homo sapiens
tccagcctggttagaagccttagtc

SEQ ID NO: 13494 - DNA, 25 bp, Homo sapiens
caaggcctagaaacctcagggactc

SEQ ID NO: 13495 - DNA, 25 bp, Homo sapiens
agcggacgttttgccaccatccttg

SEQ ID NO: 13496 - DNA, 25 bp, Homo sapiens
ggagggtctccgtggctttaacaaa

SEQ ID NO: 13497 - DNA, 25 bp, Homo sapiens
ggtcctcctattgcttctctgctgg

SEQ ID NO: 13498 - DNA, 25 bp, Homo sapiens
tctgtccgcgaacaagatcactgtg

SEQ ID NO: 13499 - DNA, 25 bp, Homo sapiens
tgggcgccaactctacgtcaatacg

SEQ ID NO: 13500 - DNA, 25 bp, Homo sapiens
ccctgaccctatggagaagcgcatc

SEQ ID NO: 13501 - DNA, 25 bp, Homo sapiens
cctgccggcagggaaccaaatcctt

SEQ ID NO: 13502 - DNA, 25 bp, Homo sapiens
agagcctcccgttggaatcttttga

SEQ ID NO: 13503 - DNA, 25 bp, Homo sapiens
ccaagttccaatgctcagggtccta

SEQ ID NO: 13504 - DNA, 25 bp, Homo sapiens
ctgcctgggacacaactcaagaata

SEQ ID NO: 13505 - DNA, 25 bp, Homo sapiens
tgctagcttcaatctctccagtgtg

SEQ ID NO: 13506 - DNA, 25 bp, Homo sapiens
ttcggaggaagcaagtggagccatt

SEQ ID NO: 13507 - DNA, 25 bp, Homo sapiens
tgaagcctctacaaaccagtgaagt

SEQ ID NO: 13508 - DNA, 25 bp, Homo sapiens
ttaaaaatggaaaaataacccttgg

SEQ ID NO: 13509 - DNA, 25 bp, Homo sapiens
agggctctcttcctattcatctcga

SEQ ID NO: 13510 - DNA, 25 bp, Homo sapiens
gaagtctaacacacgttcaggaaag

SEQ ID NO: 13511 - DNA, 25 bp, Homo sapiens
aagcaagatgttttaaatgttattt

SEQ ID NO: 13512 - DNA, 25 bp, Homo sapiens
cgggcttttctattcaagaaacaaa

SEQ ID NO: 13513 - DNA, 25 bp, Homo sapiens
tcctgctgccatggaaatgaatgca

SEQ ID NO: 13514 - DNA, 25 bp, Homo sapiens
ggccttattgctggctaacccgtga

SEQ ID NO: 13515 - DNA, 25 bp, Homo sapiens
acatgttctccctagctcttaagta

SEQ ID NO: 13516 - DNA, 25 bp, Homo sapiens
gccgcaggccaaagtgaatgttata

SEQ ID NO: 13517 - DNA, 25 bp, Homo sapiens
tgtcccgggttgtctttctaaaata

SEQ ID NO: 13518 - DNA, 25 bp, Homo sapiens
agtcctcaggtcttcgtgtctcaag

SEQ ID NO: 13519 - DNA, 25 bp, Homo sapiens
ctgcttcttctctgggctgttgaca

SEQ ID NO: 13520 - DNA, 25 bp, Homo sapiens
gggcctggcatatactaacaatgta

SEQ ID NO: 13521 - DNA, 25 bp, Homo sapiens
agttgctccaagaagaagacgctta

SEQ ID NO: 13522 - DNA, 25 bp, Homo sapiens
gccatgcgtatgaactaaaaccttg

SEQ ID NO: 13523 - DNA, 25 bp, Homo sapiens
acgtgtgtaaccacagccgaagaag

SEQ ID NO: 13524 - DNA, 25 bp, Homo sapiens
tcgtgatcctgaccctatagcactg

SEQ ID NO: 13525 - DNA, 25 bp, Homo sapiens
gagaagccctcatgcccaagtggtg

SEQ ID NO: 13526 - DNA, 25 bp, Homo sapiens
tgccttccaggaaaagctgacgtgg

SEQ ID NO: 13527 - DNA, 25 bp, Homo sapiens
gcatgggtctcctacactgtatgaa

SEQ ID NO: 13528 - DNA, 25 bp, Homo sapiens
ctgggctccttcatctttcggtttc

SEQ ID NO: 13529 - DNA, 25 bp, Homo sapiens
acacaggtccttgttgctgcagaga

SEQ ID NO: 13530 - DNA, 25 bp, Homo sapiens
cctcctgatgggaaagagctctggc

SEQ ID NO: 13531 - DNA, 25 bp, Homo sapiens
cccagtggcattgtggagatcacca

SEQ ID NO: 13532 - DNA, 25 bp, Homo sapiens
ggagtccctttgtcctcatctgaga

SEQ ID NO: 13533 - DNA, 25 bp, Homo sapiens
cttcagcctctccagtgcatgtgtg

SEQ ID NO: 13534 - DNA, 25 bp, Homo sapiens
tggacccagggcatgttctttattc

SEQ ID NO: 13535 - DNA, 25 bp, Homo sapiens
catggagtcctttgtctgtagcagc

SEQ ID NO: 13536 - DNA, 25 bp, Homo sapiens
agatgccttcctcactgcttgggta

SEQ ID NO: 13537 - DNA, 25 bp, Homo sapiens
ttctgcaggatcacagccagggcca

SEQ ID NO: 13538 - DNA, 25 bp, Homo sapiens
tttctcactgcagtacccaagggga

SEQ ID NO: 13539 - DNA, 25 bp, Homo sapiens
ggaggccactaacccaagatatctg

SEQ ID NO: 13540 - DNA, 25 bp, Homo sapiens
ctgaactctgtgtggaagcctcttg

SEQ ID NO: 13541 - DNA, 25 bp, Homo sapiens
aggcagagccttcatgatttatttc

SEQ ID NO: 13542 - DNA, 25 bp, Homo sapiens
acaggcctggcctttgatctccatc

SEQ ID NO: 13543 - DNA, 25 bp, Homo sapiens
ccagcatgcccaggtctgtaggata

SEQ ID NO: 13544 - DNA, 25 bp, Homo sapiens
caccttctggatagtgggtaccacg

SEQ ID NO: 13545 - DNA, 25 bp, Homo sapiens
cgagtcacttcatgagtccaagagt

SEQ ID NO: 13546 - DNA, 25 bp, Homo sapiens
tctggcctctgctagctgaaactgg

SEQ ID NO: 13547 - DNA, 25 bp, Homo sapiens
aacacccggtgcaggtttcacattg

SEQ ID NO: 13548 - DNA, 25 bp, Homo sapiens
gctcctgtcctacggctgaagcttc

SEQ ID NO: 13549 - DNA, 25 bp, Homo sapiens
ggaattctcctctcagccctcttag

SEQ ID NO: 13550 - DNA, 25 bp, Homo sapiens
tcacgtctcaggatagcagcccatc

SEQ ID NO: 13551 - DNA, 25 bp, Homo sapiens
ggcaagctctttctggggccaacca

SEQ ID NO: 13552 - DNA, 25 bp, Homo sapiens
aacttgggttggactcactgacagc

SEQ ID NO: 13553 - DNA, 25 bp, Homo sapiens
agcagtagagctccgggttttccca

SEQ ID NO: 13554 - DNA, 25 bp, Homo sapiens
ccactgagggtgtttgagccattga

SEQ ID NO: 13555 - DNA, 25 bp, Homo sapiens
gagaactggctctgggtcctacaca

SEQ ID NO: 13556 - DNA, 25 bp, Homo sapiens
tagctctctgggaaaagcccgtctg

SEQ ID NO: 13557 - DNA, 25 bp, Homo sapiens
aatattttgaattcaggcacctgta

SEQ ID NO: 13558 - DNA, 25 bp, Homo sapiens
tgtcccacagtccagccaatgaggt

SEQ ID NO: 13559 - DNA, 25 bp, Homo sapiens
ggctctccaggggtgttttccaaca

SEQ ID NO: 13560 - DNA, 25 bp, Homo sapiens
gcagggcttcaatctcaggttcgta

SEQ ID NO: 13561 - DNA, 25 bp, Homo sapiens
tgctgcggtaagaggtcaagaacta

SEQ ID NO: 13562 - DNA, 25 bp, Homo sapiens
ccgctcagtgactcccaggtttggt

SEQ ID NO: 13563 - DNA, 25 bp, Homo sapiens
aggacgccttgtgtatctcatgcta

SEQ ID NO: 13564 - DNA, 25 bp, Homo sapiens
ggcaccttgatgttggcttctttga

SEQ ID NO: 13565 - DNA, 25 bp, Homo sapiens
ttaaaacagaattttttagaacatc

SEQ ID NO: 13566 - DNA, 25 bp, Homo sapiens
aggtgctgctacgaagtcatcttta

SEQ ID NO: 13567 - DNA, 25 bp, Homo sapiens
tcttcttagatcctgctgcggggtg

SEQ ID NO: 13568 - DNA, 25 bp, Homo sapiens
ggctccttcccttaagaggcttgta

SEQ ID NO: 13569 - DNA, 25 bp, Homo sapiens
gaaacttgctctccctcctggtatg

SEQ ID NO: 13570 - DNA, 25 bp, Homo sapiens
cccggatgcatgaagctataatatt

SEQ ID NO: 13571 - DNA, 25 bp, Homo sapiens
cctcaatcttgcaggcgctcttgta

SEQ ID NO: 13572 - DNA, 25 bp, Homo sapiens
tggcttcctccacctgcctaagata

SEQ ID NO: 13573 - DNA, 25 bp, Homo sapiens
acggggctatcagttcaccaggaag

SEQ ID NO: 13574 - DNA, 25 bp, Homo sapiens
tatgtaacatgttggatactccata

SEQ ID NO: 13575 - DNA, 25 bp, Homo sapiens
agcttgtgtactctggtgtcttcca

SEQ ID NO: 13576 - DNA, 25 bp, Homo sapiens
gcttcttccagggacggagttctaa

SEQ ID NO: 13577 - DNA, 25 bp, Homo sapiens
cgcggcagttccctgagaaaacaca

SEQ ID NO: 13578 - DNA, 25 bp, Homo sapiens
gatactctctcttctggccatagcc

SEQ ID NO: 13579 - DNA, 25 bp, Homo sapiens
tcgccaggctcaggagtcgattaca

SEQ ID NO: 13580 - DNA, 25 bp, Homo sapiens
actgcgcctgtgtttgtacttgtga

SEQ ID NO: 13581 - DNA, 25 bp, Homo sapiens
aactggggtgtatgtccttaactga

SEQ ID NO: 13582 - DNA, 25 bp, Homo sapiens
ccagctatggcttcctctcagatta

SEQ ID NO: 13583 - DNA, 25 bp, Homo sapiens
ctagcgcaggatccctctactgttg

SEQ ID NO: 13584 - DNA, 25 bp, Homo sapiens
cgtggtctgtatccctggctttatc

SEQ ID NO: 13585 - DNA, 25 bp, Homo sapiens
tgaatgacatagaggtcagtgagta

SEQ ID NO: 13586 - DNA, 25 bp, Homo sapiens
gagattctattcacaatggcaacaa

SEQ ID NO: 13587 - DNA, 25 bp, Homo sapiens
gtgaatctgttccttctgctgcata

SEQ ID NO: 13588 - DNA, 25 bp, Homo sapiens
tccggataatggttcccaggtgttt

SEQ ID NO: 13589 - DNA, 25 bp, Homo sapiens
tgggctccagactctctaattaagg

SEQ ID NO: 13590 - DNA, 25 bp, Homo sapiens
ctgagccctgggaacacaagtgaac

SEQ ID NO: 13591 - DNA, 25 bp, Homo sapiens
ggcctggtgactccacgactttcca

SEQ ID NO: 13592 - DNA, 25 bp, Homo sapiens
cttatcttggaaaagccggccctga

SEQ ID NO: 13593 - DNA, 25 bp, Homo sapiens
tcagtgctttcccatctgctgagca

SEQ ID NO: 13594 - DNA, 25 bp, Homo sapiens
tcacttgtagaataaagtaacacaa

SEQ ID NO: 13595 - DNA, 25 bp, Homo sapiens
gcacttttgattctggggacacata

SEQ ID NO: 13596 - DNA, 25 bp, Homo sapiens
aggccctgacctgaaccaattcttg

SEQ ID NO: 13597 - DNA, 25 bp, Homo sapiens
ttcgatgcaggaaataggctggttt

SEQ ID NO: 13598 - DNA, 25 bp, Homo sapiens
ccagttccggaaagccaggtttcta

SEQ ID NO: 13599 - DNA, 25 bp, Homo sapiens
agaaagcccagaagtcccacgtata

SEQ ID NO: 13600 - DNA, 25 bp, Homo sapiens
cccatgaatccaaacaactttcttc

SEQ ID NO: 13601 - DNA, 25 bp, Homo sapiens
agagtgggaaccagtcattacactc

SEQ ID NO: 13602 - DNA, 25 bp, Homo sapiens
tccttgcacgtggagggaaatcatc

SEQ ID NO: 13603 - DNA, 25 bp, Homo sapiens
ccaagtgtggtacaatgcggtccta

SEQ ID NO: 13604 - DNA, 25 bp, Homo sapiens
acgggcattgactgtatctgagctt

SEQ ID NO: 13605 - DNA, 25 bp, Homo sapiens
ctcagccagctgtgcactaacaatc

SEQ ID NO: 13606 - DNA, 25 bp, Homo sapiens
ttgctttctccaaccagggcacgga

SEQ ID NO: 13607 - DNA, 25 bp, Homo sapiens
gagctctgtctcttaccttggtctg

SEQ ID NO: 13608 - DNA, 25 bp, Homo sapiens
tgtggaggcctcaacaagttccttc

SEQ ID NO: 13609 - DNA, 25 bp, Homo sapiens
gtgcccatttggattgcgccctatg

SEQ ID NO: 13610 - DNA, 25 bp, Homo sapiens
cacagtctgtgatctcccttggagc

SEQ ID NO: 13611 - DNA, 25 bp, Homo sapiens
cccagtggagtgcagcttgatcttt

SEQ ID NO: 13612 - DNA, 25 bp, Homo sapiens
tgccatagtagaagtccattgaccc

SEQ ID NO: 13613 - DNA, 25 bp, Homo sapiens
cttccacagtgggaggcacctcaga

SEQ ID NO: 13614 - DNA, 25 bp, Homo sapiens
tagcgctctggtcctatgtgaagtc

SEQ ID NO: 13615 - DNA, 25 bp, Homo sapiens
tgccctgggccaaatgaaaagcatg

SEQ ID NO: 13616 - DNA, 25 bp, Homo sapiens
ccagcagctgcgtgggactaaatcc

SEQ ID NO: 13617 - DNA, 25 bp, Homo sapiens
ttaggctttcccaggtgttaccagg

SEQ ID NO: 13618 - DNA, 25 bp, Homo sapiens
actgtgttgcatgggaaacttcatc

SEQ ID NO: 13619 - DNA, 25 bp, Homo sapiens
ctgcacctgggctgttagataaaac

SEQ ID NO: 13620 - DNA, 25 bp, Homo sapiens
gagccactcactgtctttgcataaa

SEQ ID NO: 13621 - DNA, 25 bp, Homo sapiens
atgggtgcttgggtctcttctataa

SEQ ID NO: 13622 - DNA, 25 bp, Homo sapiens
tgcctccaataagaaacgctgatgc

SEQ ID NO: 13623 - DNA, 25 bp, Homo sapiens
gggctcatgtttgcagctctcaagg

SEQ ID NO: 13624 - DNA, 25 bp, Homo sapiens
ccaaggtgtcagtgatcggtacatc

SEQ ID NO: 13625 - DNA, 25 bp, Homo sapiens
tttggatgtgggttgattttatacc

SEQ ID NO: 13626 - DNA, 25 bp, Homo sapiens
ctgatagggatttctaacataatgg

SEQ ID NO: 13627 - DNA, 25 bp, Homo sapiens
cttgccttataaaaaaattccttat

SEQ ID NO: 13628 - DNA, 25 bp, Homo sapiens
gggagggttaagactgcaattcata

SEQ ID NO: 13629 - DNA, 25 bp, Homo sapiens
tatatatttttaatgaaagaattca

SEQ ID NO: 13630 - DNA, 25 bp, Homo sapiens
gtcagacgtctaaggcaatataaag

SEQ ID NO: 13631 - DNA, 25 bp, Homo sapiens
tattagaaagttcctgctcattggc

SEQ ID NO: 13632 - DNA, 25 bp, Homo sapiens
tctcacagtcccgttttaaaacagg

SEQ ID NO: 13633 - DNA, 25 bp, Homo sapiens
gtctacccaagaactgtaaagtggc

SEQ ID NO: 13634 - DNA, 25 bp, Homo sapiens
gctgtggttcatgagctagtcaaca

SEQ ID NO: 13635 - DNA, 25 bp, Homo sapiens
atctggctgaacatcaggtctttcc

SEQ ID NO: 13636 - DNA, 25 bp, Homo sapiens
ttgactcctgcttgggctttgaaga

SEQ ID NO: 13637 - DNA, 25 bp, Homo sapiens
gccagaaattctatgggctccaata

SEQ ID NO: 13638 - DNA, 25 bp, Homo sapiens
cctctgaagtctctgggaatcctga

SEQ ID NO: 13639 - DNA, 25 bp, Homo sapiens
agcagatgtttggtatcttgacacc

SEQ ID NO: 13640 - DNA, 25 bp, Homo sapiens
agccctctgggacaagaactttttg

SEQ ID NO: 13641 - DNA, 25 bp, Homo sapiens
cacttgagaatggtttaagacctct

SEQ ID NO: 13642 - DNA, 25 bp, Homo sapiens
accctctcctttagtgtgtatacag

SEQ ID NO: 13643 - DNA, 25 bp, Homo sapiens
ctgttggaagtactgctcatgtgtc

SEQ ID NO: 13644 - DNA, 25 bp, Homo sapiens
ggactctagtaagcgcaattttctc

SEQ ID NO: 13645 - DNA, 25 bp, Homo sapiens
tgtgcgtttcccagtttccattgaa

SEQ ID NO: 13646 - DNA, 25 bp, Homo sapiens
ccactgtgctgttggagtttcttta

SEQ ID NO: 13647 - DNA, 25 bp, Homo sapiens
ggctctccaggccacagcacttata

SEQ ID NO: 13648 - DNA, 25 bp, Homo sapiens
cctgttcaggcacaatattctttta

SEQ ID NO: 13649 - DNA, 25 bp, Homo sapiens
caggcttcccatggtatccggaata

SEQ ID NO: 13650 - DNA, 25 bp, Homo sapiens
ttgggcctctattaatcagcttttc

SEQ ID NO: 13651 - DNA, 25 bp, Homo sapiens
ccgggacattttcctgatcaacgtg

SEQ ID NO: 13652 - DNA, 25 bp, Homo sapiens
atgcctggatatctgtgaacttgtc

SEQ ID NO: 13653 - DNA, 25 bp, Homo sapiens
tgctctgttgggagacctcagtatc

SEQ ID NO: 13654 - DNA, 25 bp, Homo sapiens
ggtgtcccttcctccagcaataaag

SEQ ID NO: 13655 - DNA, 25 bp, Homo sapiens
ccgcagtgctgctgttaccattaga

SEQ ID NO: 13656 - DNA, 25 bp, Homo sapiens
ccctggctcaggaagctgcaaattc

SEQ ID NO: 13657 - DNA, 25 bp, Homo sapiens
acccagtgcgggacattatttcaaa

SEQ ID NO: 13658 - DNA, 25 bp, Homo sapiens
accacggtgtggagagagaaactta

SEQ ID NO: 13659 - DNA, 25 bp, Homo sapiens
ttgatggtcatcttccacccgctgc

SEQ ID NO: 13660 - DNA, 25 bp, Homo sapiens
catgcgtagctggtaaagaactgta

SEQ ID NO: 13661 - DNA, 25 bp, Homo sapiens
cggcctttaaagcaccctatacttg

SEQ ID NO: 13662 - DNA, 25 bp, Homo sapiens
cttgacaggacttgctagggcttta

SEQ ID NO: 13663 - DNA, 25 bp, Homo sapiens
tggtggttccctttgatctacagaa

SEQ ID NO: 13664 - DNA, 25 bp, Homo sapiens
gcagaggcctaatcggagcttcagc

SEQ ID NO: 13665 - DNA, 25 bp, Homo sapiens
ctgtgggctccaagctgttcaaatc

SEQ ID NO: 13666 - DNA, 25 bp, Homo sapiens
aggtcattccctaacagtgtcactg

SEQ ID NO: 13667 - DNA, 25 bp, Homo sapiens
gggccacaggtcattctctaacagt

SEQ ID NO: 13668 - DNA, 25 bp, Homo sapiens
tcttggccatggtgtagagcattcc

SEQ ID NO: 13669 - DNA, 25 bp, Homo sapiens
cctcgccctttgcatggacaatgta

SEQ ID NO: 13670 - DNA, 25 bp, Homo sapiens
accctgacatgagcaatactggaga

SEQ ID NO: 13671 - DNA, 25 bp, Homo sapiens
ccggctctttatgcaaggccattca

SEQ ID NO: 13672 - DNA, 25 bp, Homo sapiens
ggtccctgaacatctctgagccaca

SEQ ID NO: 13673 - DNA, 25 bp, Homo sapiens
ggagacccttcctgttctcatagta

SEQ ID NO: 13674 - DNA, 25 bp, Homo sapiens
tggagcccacttaattctgactaga

SEQ ID NO: 13675 - DNA, 25 bp, Homo sapiens
tgtcatcttcctagagccatagtgg

SEQ ID NO: 13676 - DNA, 25 bp, Homo sapiens
gaaagccaccgagctgcagtgcaga

SEQ ID NO: 13677 - DNA, 25 bp, Homo sapiens
ggcgtgacccaattacctgaaaatg

SEQ ID NO: 13678 - DNA, 25 bp, Homo sapiens
ctgacatgctgggactttggctatc

SEQ ID NO: 13679 - DNA, 25 bp, Homo sapiens
taattctaaaggtcatctggagccc

SEQ ID NO: 13680 - DNA, 25 bp, Homo sapiens
ttaacatgagcaacgtgctatttta

SEQ ID NO: 13681 - DNA, 25 bp, Homo sapiens
ggcccatctgtacctaatgttggca

SEQ ID NO: 13682 - DNA, 25 bp, Homo sapiens
gagaccatgagagagcttcatgtgc

SEQ ID NO: 13683 - DNA, 25 bp, Homo sapiens
tccagcatgaggtggcagttaccta

SEQ ID NO: 13684 - DNA, 25 bp, Homo sapiens
acaagaagtggttcctgccttcaca

SEQ ID NO: 13685 - DNA, 25 bp, Homo sapiens
accgtgttttctgatggctcccatg

SEQ ID NO: 13686 - DNA, 25 bp, Homo sapiens
ccgccctatgactgctgagaaagtt

SEQ ID NO: 13687 - DNA, 25 bp, Homo sapiens
gcagggcctaagtcagtcggaaacc

SEQ ID NO: 13688 - DNA, 25 bp, Homo sapiens
ctctgtgcagctaaggggagtttca

SEQ ID NO: 13689 - DNA, 25 bp, Homo sapiens
caaaggctcctacggtgtcactcta

SEQ ID NO: 13690 - DNA, 25 bp, Homo sapiens
cttccctgagaccaccgtagttgta

SEQ ID NO: 13691 - DNA, 25 bp, Homo sapiens
ccactggctgtgttggaagttctga

SEQ ID NO: 13692 - DNA, 25 bp, Homo sapiens
tggtgtcatccaaaactcatgggta

SEQ ID NO: 13693 - DNA, 25 bp, Homo sapiens
accgcgctgatttaggaggtgcacc

SEQ ID NO: 13694 - DNA, 25 bp, Homo sapiens
acctgttcagggtttgttacaagga

SEQ ID NO: 13695 - DNA, 25 bp, Homo sapiens
ttcccacagtacctttttagcaata

SEQ ID NO: 13696 - DNA, 25 bp, Homo sapiens
gagcttgatttgtaccaccctattt

SEQ ID NO: 13697 - DNA, 25 bp, Homo sapiens
tggccctggttctggcccttgtata

SEQ ID NO: 13698 - DNA, 25 bp, Homo sapiens
tgagggtttgccatagctgctgatc

SEQ ID NO: 13699 - DNA, 25 bp, Homo sapiens
gtgccagggagccaaagtatctttc

SEQ ID NO: 13700 - DNA, 25 bp, Homo sapiens
ggtcaaattctgtatggtgcccttc

SEQ ID NO: 13701 - DNA, 25 bp, Homo sapiens
gggccacaggctaattcaaacttca

SEQ ID NO: 13702 - DNA, 25 bp, Homo sapiens
ccagtactttgccatccagttagtg

SEQ ID NO: 13703 - DNA, 25 bp, Homo sapiens
ttacccatttcttatttataagaat

SEQ ID NO: 13704 - DNA, 25 bp, Homo sapiens
gtcagtccaggcacagaacaggtca

SEQ ID NO: 13705 - DNA, 25 bp, Homo sapiens
gccatctgacagaatctccttcgta

SEQ ID NO: 13706 - DNA, 25 bp, Homo sapiens
aaggcctcagagcagccatcttgta

SEQ ID NO: 13707 - DNA, 25 bp, Homo sapiens
tccagggaaatccttgcatgtactg

SEQ ID NO: 13708 - DNA, 25 bp, Homo sapiens
tgaggctcccaagaagtctcctgta

SEQ ID NO: 13709 - DNA, 25 bp, Homo sapiens
actccacagttcagtttggactgca

SEQ ID NO: 13710 - DNA, 25 bp, Homo sapiens
tggaatctggtagaagcttctacaa

SEQ ID NO: 13711 - DNA, 25 bp, Homo sapiens
ccgttataaaaatttgggatgccca

SEQ ID NO: 13712 - DNA, 25 bp, Homo sapiens
tatctggtgagctaaaggcatcttc

SEQ ID NO: 13713 - DNA, 25 bp, Homo sapiens
aataattataagccacaatcacaaa

SEQ ID NO: 13714 - DNA, 25 bp, Homo sapiens
gggtgcttcagtaacacagtcaata

SEQ ID NO: 13715 - DNA, 25 bp, Homo sapiens
tccgtgtagcaaccaaggcactgtg

SEQ ID NO: 13716 - DNA, 25 bp, Homo sapiens
aggtacctgtaaccatggcatgttc

SEQ ID NO: 13717 - DNA, 25 bp, Homo sapiens
tgagactctgaaggttgcatatttg

SEQ ID NO: 13718 - DNA, 25 bp, Homo sapiens
gaggcttcaggtacacaaacttgga

SEQ ID NO: 13719 - DNA, 25 bp, Homo sapiens
gcccagatttgctaacatgattata

SEQ ID NO: 13720 - DNA, 25 bp, Homo sapiens
caactgggtacataggtccttgcta

SEQ ID NO: 13721 - DNA, 25 bp, Homo sapiens
gggtcaagtctgtccatcatgctaa

SEQ ID NO: 13722 - DNA, 25 bp, Homo sapiens
agctccatttgggtcagtctgttcc

SEQ ID NO: 13723 - DNA, 25 bp, Homo sapiens
ccactggatgtctaagtgagaaacc

SEQ ID NO: 13724 - DNA, 25 bp, Homo sapiens
gcaagtggcacaacctcaggggata

SEQ ID NO: 13725 - DNA, 25 bp, Homo sapiens
agcgtttctgattggggcctactac

SEQ ID NO: 13726 - DNA, 25 bp, Homo sapiens
ctggatggcaggtacatgaacgttc

SEQ ID NO: 13727 - DNA, 25 bp, Homo sapiens
ccacagagggagtcttggattccta

SEQ ID NO: 13728 - DNA, 25 bp, Homo sapiens
gggcacgcattacttcctggtgaga

SEQ ID NO: 13729 - DNA, 25 bp, Homo sapiens
ctgccattattgaagatgtaaacta

SEQ ID NO: 13730 - DNA, 25 bp, Homo sapiens
caaaggggagagcacatggttcatc

SEQ ID NO: 13731 - DNA, 25 bp, Homo sapiens
gtcagggtgcccaaactctgcagta

SEQ ID NO: 13732 - DNA, 25 bp, Homo sapiens
aggggtccaccctcacttctatatg

SEQ ID NO: 13733 - DNA, 25 bp, Homo sapiens
cctagggtcttatgagtctattagc

SEQ ID NO: 13734 - DNA, 25 bp, Homo sapiens
agttccctccgtgctccatgtacaa

SEQ ID NO: 13735 - DNA, 25 bp, Homo sapiens
ctgctctggtactggggcattttta

SEQ ID NO: 13736 - DNA, 25 bp, Homo sapiens
ttggtttactttctacggggcttca

SEQ ID NO: 13737 - DNA, 25 bp, Homo sapiens
cccagactgtgctaacatgaagcaa

SEQ ID NO: 13738 - DNA, 25 bp, Homo sapiens
gcacgctcctttccatctttaatta

SEQ ID NO: 13739 - DNA, 25 bp, Homo sapiens
tgctttcctacagaggcggcacttg

SEQ ID NO: 13740 - DNA, 25 bp, Homo sapiens
ctttggagcaatatacactgagatt

SEQ ID NO: 13741 - DNA, 25 bp, Homo sapiens
cttttttttttttttttgctcatgc

SEQ ID NO: 13742 - DNA, 25 bp, Homo sapiens
gggcatcctgcttcaaaccatctgg

SEQ ID NO: 13743 - DNA, 25 bp, Homo sapiens
taagtgttcaaatcggtggtctcca

SEQ ID NO: 13744 - DNA, 25 bp, Homo sapiens
gggatcatttcaggccagtcagctt

SEQ ID NO: 13745 - DNA, 25 bp, Homo sapiens
ttgcccagggacagagattatacac

SEQ ID NO: 13746 - DNA, 25 bp, Homo sapiens
cctcattctggaaaacagtgctgtc

SEQ ID NO: 13747 - DNA, 25 bp, Homo sapiens
agtgggttcaaatgctcagcttctc

SEQ ID NO: 13748 - DNA, 25 bp, Homo sapiens
aggggagcacacagtcattcattta

SEQ ID NO: 13749 - DNA, 25 bp, Homo sapiens
tcaagggttctatatgcagagtatc

SEQ ID NO: 13750 - DNA, 25 bp, Homo sapiens
attcccaggggacagaaaatttacc

SEQ ID NO: 13751 - DNA, 25 bp, Homo sapiens
tgaccctgctagagctggaacattg

SEQ ID NO: 13752 - DNA, 25 bp, Homo sapiens
ctgcggcccgcaaaataagaccttg

SEQ ID NO: 13753 - DNA, 25 bp, Homo sapiens
ccctcctgttgactggaccatggca

SEQ ID NO: 13754 - DNA, 25 bp, Homo sapiens
tccagggaagaatctacgtgcttgc

SEQ ID NO: 13755 - DNA, 25 bp, Homo sapiens
aggatcttcggagctgccttccatg

SEQ ID NO: 13756 - DNA, 25 bp, Homo sapiens
ctgttccctaactttttgaagaaaa

SEQ ID NO: 13757 - DNA, 25 bp, Homo sapiens
gccacatgtcatgtttcaggtcata

SEQ ID NO: 13758 - DNA, 25 bp, Homo sapiens
agtccctctggcactttactcaaga

SEQ ID NO: 13759 - DNA, 25 bp, Homo sapiens
gtaatccactagtcgcaaagcattg

SEQ ID NO: 13760 - DNA, 25 bp, Homo sapiens
agctgacttcatgggtgctaatatc

SEQ ID NO: 13761 - DNA, 25 bp, Homo sapiens
ctgcattttcaaacggaccagtatg

SEQ ID NO: 13762 - DNA, 25 bp, Homo sapiens
aaaggtttctgacgcctaggttacc

SEQ ID NO: 13763 - DNA, 25 bp, Homo sapiens
aggtgtgccctgatcactatgaaca

SEQ ID NO: 13764 - DNA, 25 bp, Homo sapiens
gggcagttttcttctcactccttaa

SEQ ID NO: 13765 - DNA, 25 bp, Homo sapiens
tccctgggaatccatagtcttctta

SEQ ID NO: 13766 - DNA, 25 bp, Homo sapiens
tcccgaagtggttggttgtccatca

SEQ ID NO: 13767 - DNA, 25 bp, Homo sapiens
ctggaccaacagactaggccttttt

SEQ ID NO: 13768 - DNA, 25 bp, Homo sapiens
ccatctggtggagctgagaagccta

SEQ ID NO: 13769 - DNA, 25 bp, Homo sapiens
tgacctttcaggcacatgttacatc

SEQ ID NO: 13770 - DNA, 25 bp, Homo sapiens
aaggatgaacacaaattctgggtag

SEQ ID NO: 13771 - DNA, 25 bp, Homo sapiens
gccagctagtttttggatcttccta

SEQ ID NO: 13772 - DNA, 25 bp, Homo sapiens
ggtcccagctccattccaggcaatt

SEQ ID NO: 13773 - DNA, 25 bp, Homo sapiens
ctggaagccatgcaggtaaccattc

SEQ ID NO: 13774 - DNA, 25 bp, Homo sapiens
accaggttatgtctttccttcaaga

SEQ ID NO: 13775 - DNA, 25 bp, Homo sapiens
gcgccgaatcctgtttcctgcctta

SEQ ID NO: 13776 - DNA, 25 bp, Homo sapiens
ctcagatggaggaacagcacaagta

SEQ ID NO: 13777 - DNA, 25 bp, Homo sapiens
tgaggcaaggccttagcatcaactg

SEQ ID NO: 13778 - DNA, 25 bp, Homo sapiens
ccacaggaagtaagaatcaaacatg

SEQ ID NO: 13779 - DNA, 25 bp, Homo sapiens
gcatgtgtacaagtcgctggtctca

SEQ ID NO: 13780 - DNA, 25 bp, Homo sapiens
gcctcccgggctccaatttttaatc

SEQ ID NO: 13781 - DNA, 25 bp, Homo sapiens
atgcgggctctttccatggacttca

SEQ ID NO: 13782 - DNA, 25 bp, Homo sapiens
cctttgagggtatatgacagcattc

SEQ ID NO: 13783 - DNA, 25 bp, Homo sapiens
accgtggtctccagtcacaggaaga

SEQ ID NO: 13784 - DNA, 25 bp, Homo sapiens
ccatgtgcctacagagttctactta

SEQ ID NO: 13785 - DNA, 25 bp, Homo sapiens
ggagaagacctaggttcagcctcta

SEQ ID NO: 13786 - DNA, 25 bp, Homo sapiens
gccttgcattctagtcagctcctga

SEQ ID NO: 13787 - DNA, 25 bp, Homo sapiens
gggatccctttgtggtatacatttg

SEQ ID NO: 13788 - DNA, 25 bp, Homo sapiens
caatcaactgcatataaaatctgca

SEQ ID NO: 13789 - DNA, 25 bp, Homo sapiens
ccaatgcagggcaggagttatttta

SEQ ID NO: 13790 - DNA, 25 bp, Homo sapiens
ccggacggatgttttcaagccaagc

SEQ ID NO: 13791 - DNA, 25 bp, Homo sapiens
cccactgatgggactactgattcca

SEQ ID NO: 13792 - DNA, 25 bp, Homo sapiens
aatgacttcgcttgtgccctaggtg

SEQ ID NO: 13793 - DNA, 25 bp, Homo sapiens
cctttgtgatacgaccgggacctga

SEQ ID NO: 13794 - DNA, 25 bp, Homo sapiens
ggcttcatttcaaggcacagatcta

SEQ ID NO: 13795 - DNA, 25 bp, Homo sapiens
tgacacaggtaacagggtaactatc

SEQ ID NO: 13796 - DNA, 25 bp, Homo sapiens
aggcctgctgcgtagatagtaaatc

SEQ ID NO: 13797 - DNA, 25 bp, Homo sapiens
tagtgttggccacaagacgtgcata

SEQ ID NO: 13798 - DNA, 25 bp, Homo sapiens
tatggctgactcttgggtgaatccc

SEQ ID NO: 13799 - DNA, 25 bp, Homo sapiens
ggaatacttcctaactcttgagatg

SEQ ID NO: 13800 - DNA, 25 bp, Homo sapiens
acggtctctagagctatcttggatc

SEQ ID NO: 13801 - DNA, 25 bp, Homo sapiens
tcccagggtcctatagcaaattctc

SEQ ID NO: 13802 - DNA, 25 bp, Homo sapiens
ccagctaaagtcctagggctcctga

SEQ ID NO: 13803 - DNA, 25 bp, Homo sapiens
tggggcaggtcaagaacaacttacg

SEQ ID NO: 13804 - DNA, 25 bp, Homo sapiens
gtctcagtcccttgtcagttttcta

SEQ ID NO: 13805 - DNA, 25 bp, Homo sapiens
gatgtagaccttcaactggtgggta

SEQ ID NO: 13806 - DNA, 25 bp, Homo sapiens
tcgtatcctgaaacctgccaaattg

SEQ ID NO: 13807 - DNA, 25 bp, Homo sapiens
accaggtcaaaagtgtcaaatgttc

SEQ ID NO: 13808 - DNA, 25 bp, Homo sapiens
caatcctcaggcacaagcagctttc

SEQ ID NO: 13809 - DNA, 25 bp, Homo sapiens
gcatggcctcagctggaatttgcta

SEQ ID NO: 13810 - DNA, 25 bp, Homo sapiens
tcacagctggcttcacttgtaagtg

SEQ ID NO: 13811 - DNA, 25 bp, Homo sapiens
tgggctagtgccctactcataaatc

SEQ ID NO: 13812 - DNA, 25 bp, Homo sapiens
cccatggagcccgaacaaagttttg

SEQ ID NO: 13813 - DNA, 25 bp, Homo sapiens
ttgggatccgcctgactgaaaagtc

SEQ ID NO: 13814 - DNA, 25 bp, Homo sapiens
tgtgccttgactctctccttatgta

SEQ ID NO: 13815 - DNA, 25 bp, Homo sapiens
ctggggtgttttgccctacaactga

SEQ ID NO: 13816 - DNA, 25 bp, Homo sapiens
ggacttaccttttttgatctctgta

SEQ ID NO: 13817 - DNA, 25 bp, Homo sapiens
actagtgtaggggtatggctcttcc

SEQ ID NO: 13818 - DNA, 25 bp, Homo sapiens
agcctgccctgaacgagtaggattc

SEQ ID NO: 13819 - DNA, 25 bp, Homo sapiens
ctgttttgtttttttggtggagggt

SEQ ID NO: 13820 - DNA, 25 bp, Homo sapiens
tggggaacttacagacatacgcagc

SEQ ID NO: 13821 - DNA, 25 bp, Homo sapiens
agcctcgccatgtgccagaagaata

SEQ ID NO: 13822 - DNA, 25 bp, Homo sapiens
gggccatgtatgcttttctttccaa

SEQ ID NO: 13823 - DNA, 25 bp, Homo sapiens
cgcctacccattcaacgagtaagta

SEQ ID NO: 13824 - DNA, 25 bp, Homo sapiens
cctgggtttcctgtagattctgata

SEQ ID NO: 13825 - DNA, 25 bp, Homo sapiens
catatgcagaaggtgcaagaaggat

SEQ ID NO: 13826 - DNA, 25 bp, Homo sapiens
atccactgcaggaaaggcaccactc

SEQ ID NO: 13827 - DNA, 25 bp, Homo sapiens
aggttgccattcattccatatttgc

SEQ ID NO: 13828 - DNA, 25 bp, Homo sapiens
ggagctgccacataaccaaactgta

SEQ ID NO: 13829 - DNA, 25 bp, Homo sapiens
ctgctctgatggtcacttgaaattc

SEQ ID NO: 13830 - DNA, 25 bp, Homo sapiens
caccggtgtgactttcagggtctca

SEQ ID NO: 13831 - DNA, 25 bp, Homo sapiens
ggttggtggtatacagactgctgca

SEQ ID NO: 13832 - DNA, 25 bp, Homo sapiens
ttgccaggccaagtcactgtttaga

SEQ ID NO: 13833 - DNA, 25 bp, Homo sapiens
tggtctcctccctggacaaaggtca

SEQ ID NO: 13834 - DNA, 25 bp, Homo sapiens
tcactcagaggctgggaaacccaca

SEQ ID NO: 13835 - DNA, 25 bp, Homo sapiens
gctgggaggtgcttacagacagtaa

SEQ ID NO: 13836 - DNA, 25 bp, Homo sapiens
gtcttggagttgtagcttccgtgaa

SEQ ID NO: 13837 - DNA, 25 bp, Homo sapiens
tcctggactttggagcacctagtgc

SEQ ID NO: 13838 - DNA, 25 bp, Homo sapiens
cccgtggagtctattgtcgtgaaca

SEQ ID NO: 13839 - DNA, 25 bp, Homo sapiens
ttgtggcaaaaaaggataagaatcc

SEQ ID NO: 13840 - DNA, 25 bp, Homo sapiens
ccaaccaaaaacccaaaatacaaac

SEQ ID NO: 13841 - DNA, 25 bp, Homo sapiens
cagttgacttctcttccttggggca

SEQ ID NO: 13842 - DNA, 25 bp, Homo sapiens
cctggactctgaatgttggcggaca

SEQ ID NO: 13843 - DNA, 25 bp, Homo sapiens
tcggtgtcccttagaccagaggata

SEQ ID NO: 13844 - DNA, 25 bp, Homo sapiens
gagccatcgctctacctgggataag

SEQ ID NO: 13845 - DNA, 25 bp, Homo sapiens
gtgttctccctgtgctagactcaga

SEQ ID NO: 13846 - DNA, 25 bp, Homo sapiens
tcctctgtaggttctgctgctgcca

SEQ ID NO: 13847 - DNA, 25 bp, Homo sapiens
cccattttgaggagagtttgcgcac

SEQ ID NO: 13848 - DNA, 25 bp, Homo sapiens
tatccagcctgtgggtcacaaagtc

SEQ ID NO: 13849 - DNA, 25 bp, Homo sapiens
tgtgccacctgatttgccattgctg

SEQ ID NO: 13850 - DNA, 25 bp, Homo sapiens
acagtcatactgcagggccgtggta

SEQ ID NO: 13851 - DNA, 25 bp, Homo sapiens
tagaagatggcaacagcagagcatt

SEQ ID NO: 13852 - DNA, 25 bp, Homo sapiens
cactcactgtggggcttaagcaggg

SEQ ID NO: 13853 - DNA, 25 bp, Homo sapiens
cctcgctgccatggttttgaacttg

SEQ ID NO: 13854 - DNA, 25 bp, Homo sapiens
gcactcctgctgctaagccgttgta

SEQ ID NO: 13855 - DNA, 25 bp, Homo sapiens
gcctactctgccttctgcgaggaca

SEQ ID NO: 13856 - DNA, 25 bp, Homo sapiens
gggccagggcttgattccatgattc

SEQ ID NO: 13857 - DNA, 25 bp, Homo sapiens
tgcgcttacccaagactggcctgtg

SEQ ID NO: 13858 - DNA, 25 bp, Homo sapiens
cccgcgaatgagtactttgccaaga

SEQ ID NO: 13859 - DNA, 25 bp, Homo sapiens
ccctcctcgtgtgttgcagaacgtg

SEQ ID NO: 13860 - DNA, 25 bp, Homo sapiens
ccagccttatgatgagaccagttta

SEQ ID NO: 13861 - DNA, 25 bp, Homo sapiens
tgggccctggaccaagtgtacagtc

SEQ ID NO: 13862 - DNA, 25 bp, Homo sapiens
cctcagggtctcagaatcgggaatc

SEQ ID NO: 13863 - DNA, 25 bp, Homo sapiens
ctcaggggagggacaacttactctc

SEQ ID NO: 13864 - DNA, 25 bp, Homo sapiens
ggaggtctgccttcatcctgacatg

SEQ ID NO: 13865 - DNA, 25 bp, Homo sapiens
cttggtcttcagctacagggaggca

SEQ ID NO: 13866 - DNA, 25 bp, Homo sapiens
agggtttccactgatggcctgcaga

SEQ ID NO: 13867 - DNA, 25 bp, Homo sapiens
tgcgcaggaccttggtgactatttc

SEQ ID NO: 13868 - DNA, 25 bp, Homo sapiens
acaggccctttgtcccatgtgagca

SEQ ID NO: 13869 - DNA, 25 bp, Homo sapiens
cctgcctcagctggtacatgtcttc

SEQ ID NO: 13870 - DNA, 25 bp, Homo sapiens
aggcctctcagtcatgtcccgtgtg

SEQ ID NO: 13871 - DNA, 25 bp, Homo sapiens
tgtccctgaagctgtgtgaaaactg

SEQ ID NO: 13872 - DNA, 25 bp, Homo sapiens
ggcatcacatctctcgccttcatgg

SEQ ID NO: 13873 - DNA, 25 bp, Homo sapiens
ccctggtttccgctgacagcctgta

SEQ ID NO: 13874 - DNA, 25 bp, Homo sapiens
aacgagtccctgagagcatggcatc

SEQ ID NO: 13875 - DNA, 25 bp, Homo sapiens
aggggtcacctctcacattctactc

SEQ ID NO: 13876 - DNA, 25 bp, Homo sapiens
ccacgctctgagtcatgggttccca

SEQ ID NO: 13877 - DNA, 25 bp, Homo sapiens
gctgctgcagcgcatccatactctg

SEQ ID NO: 13878 - DNA, 25 bp, Homo sapiens
gcccttgggcactggtatctgtctt

SEQ ID NO: 13879 - DNA, 25 bp, Homo sapiens
ggtctgtttgtctccctccattaga

SEQ ID NO: 13880 - DNA, 25 bp, Homo sapiens
ctgaatgaggtactgcaagagactg

SEQ ID NO: 13881 - DNA, 25 bp, Homo sapiens
ctagagcctgtatatgcctgttcca

SEQ ID NO: 13882 - DNA, 25 bp, Homo sapiens
ggtgatgtttagctccctgttctcc

SEQ ID NO: 13883 - DNA, 25 bp, Homo sapiens
ccgaggccggaatccagtttgaatc

SEQ ID NO: 13884 - DNA, 25 bp, Homo sapiens
gggcaacgtaccagctcctcgaagc

SEQ ID NO: 13885 - DNA, 25 bp, Homo sapiens
acctccctggggcattctaagtcac

SEQ ID NO: 13886 - DNA, 25 bp, Homo sapiens
ccagggccactgctagttcttggta

SEQ ID NO: 13887 - DNA, 25 bp, Homo sapiens
tgccagggctcttcctctgccaata

SEQ ID NO: 13888 - DNA, 25 bp, Homo sapiens
gtgtaggcttttcccactgtcaatg

SEQ ID NO: 13889 - DNA, 25 bp, Homo sapiens
gttggggccacatcagcgaaatacc

SEQ ID NO: 13890 - DNA, 25 bp, Homo sapiens
acctggcctctctaagccttgcaaa

SEQ ID NO: 13891 - DNA, 25 bp, Homo sapiens
agcagactcctggtaggcacatttg

SEQ ID NO: 13892 - DNA, 25 bp, Homo sapiens
ggagccaagccaaagcatcattatt

SEQ ID NO: 13893 - DNA, 25 bp, Homo sapiens
tgaagaactgggcatgcctggcttt

SEQ ID NO: 13894 - DNA, 25 bp, Homo sapiens
tgaggtcctttgcagcttgaacacg

SEQ ID NO: 13895 - DNA, 25 bp, Homo sapiens
ccgcacggtgagagcgcaacttagt

SEQ ID NO: 13896 - DNA, 25 bp, Homo sapiens
ccaacggtgcagttcttgaaaggtc

SEQ ID NO: 13897 - DNA, 25 bp, Homo sapiens
gggccaccaactctggggacttgtc

SEQ ID NO: 13898 - DNA, 25 bp, Homo sapiens
ggtgccaccatttgcagaagaaagc

SEQ ID NO: 13899 - DNA, 25 bp, Homo sapiens
ctctttcccaggttaggctgtctta

SEQ ID NO: 13900 - DNA, 25 bp, Homo sapiens
ggacacagtttctttggcttattaa

SEQ ID NO: 13901 - DNA, 25 bp, Homo sapiens
cctgtagggttccactgtgtctgtc

SEQ ID NO: 13902 - DNA, 25 bp, Homo sapiens
gagccttctggggtcattactttga

SEQ ID NO: 13903 - DNA, 25 bp, Homo sapiens
tcccatgtcctaggcaagtctgagc

SEQ ID NO: 13904 - DNA, 25 bp, Homo sapiens
gcctagatgaagtcctggtccaatc

SEQ ID NO: 13905 - DNA, 25 bp, Homo sapiens
ggagatcctcctactgccactgtga

SEQ ID NO: 13906 - DNA, 25 bp, Homo sapiens
tgtgaccaccgaggagccattgatg

SEQ ID NO: 13907 - DNA, 25 bp, Homo sapiens
gagtagtagtttggggaaattagtg

SEQ ID NO: 13908 - DNA, 25 bp, Homo sapiens
acaccggaggccagctaaagcttta

SEQ ID NO: 13909 - DNA, 25 bp, Homo sapiens
gcccaggttgcaacaaatggtctga

SEQ ID NO: 13910 - DNA, 25 bp, Homo sapiens
tcagctgctgtttccctatagaatg

SEQ ID NO: 13911 - DNA, 25 bp, Homo sapiens
tctggggcccttcacgataactgtg

SEQ ID NO: 13912 - DNA, 25 bp, Homo sapiens
gtggctgctttctaggctgctttta

SEQ ID NO: 13913 - DNA, 25 bp, Homo sapiens
gtgagctgtctaggaacagggacct

SEQ ID NO: 13914 - DNA, 25 bp, Homo sapiens
ccatccagtgggtttctgcagctta

SEQ ID NO: 13915 - DNA, 25 bp, Homo sapiens
accttgaattgtgttgcccttgata

SEQ ID NO: 13916 - DNA, 25 bp, Homo sapiens
ccttccaagtggtggctttcagtta

SEQ ID NO: 13917 - DNA, 25 bp, Homo sapiens
ctggcctcaatggaactatgtaagt

SEQ ID NO: 13918 - DNA, 25 bp, Homo sapiens
aatagttgaggtcgtattctccata

SEQ ID NO: 13919 - DNA, 25 bp, Homo sapiens
aaatattgtggactagccctgggcc

SEQ ID NO: 13920 - DNA, 25 bp, Homo sapiens
acatgtttacatctccagcaagggg

SEQ ID NO: 13921 - DNA, 25 bp, Homo sapiens
tgtgtcccatcagtaattctccttg

SEQ ID NO: 13922 - DNA, 25 bp, Homo sapiens
ctttcttgttgcttggtatgactcc

SEQ ID NO: 13923 - DNA, 25 bp, Homo sapiens
atttcttttaattcctgtttcaccc

SEQ ID NO: 13924 - DNA, 25 bp, Homo sapiens
tgtagtgattatagcccaagccata

SEQ ID NO: 13925 - DNA, 25 bp, Homo sapiens
ctgttgtagccctttctgtgagatc

SEQ ID NO: 13926 - DNA, 25 bp, Homo sapiens
agtcttgtatctcacgtcatttcta

SEQ ID NO: 13927 - DNA, 25 bp, Homo sapiens
tcattcatatttgagagaggtactg

SEQ ID NO: 13928 - DNA, 25 bp, Homo sapiens
tgcagggctaactcgggaagcttta

SEQ ID NO: 13929 - DNA, 25 bp, Homo sapiens
gcatcctctgttcacattgctctta

SEQ ID NO: 13930 - DNA, 25 bp, Homo sapiens
ggcctgtgacctttcagcgagatta

SEQ ID NO: 13931 - DNA, 25 bp, Homo sapiens
ggccagtgagctttccagattttga

SEQ ID NO: 13932 - DNA, 25 bp, Homo sapiens
ctccctgtggtgtcttgtggtacca

SEQ ID NO: 13933 - DNA, 25 bp, Homo sapiens
gtaggtctctaattgttggtcccga

SEQ ID NO: 13934 - DNA, 25 bp, Homo sapiens
aaaaatctatacttatgtcaagccc

SEQ ID NO: 13935 - DNA, 25 bp, Homo sapiens
ggaaactgcttggtacatggtaaga

SEQ ID NO: 13936 - DNA, 25 bp, Homo sapiens
gagtagtaaaagtcacatacctctg

SEQ ID NO: 13937 - DNA, 25 bp, Homo sapiens
ggacctttgggacattgctttcttt

SEQ ID NO: 13938 - DNA, 25 bp, Homo sapiens
tatgtctgagttccttgaaagcagg

SEQ ID NO: 13939 - DNA, 25 bp, Homo sapiens
cagagagatcaaaaaaggtaagtcc

SEQ ID NO: 13940 - DNA, 25 bp, Homo sapiens
taccacggcatgctcgaatttcttg

SEQ ID NO: 13941 - DNA, 25 bp, Homo sapiens
tggcctttatgcatggtcactggaa

SEQ ID NO: 13942 - DNA, 25 bp, Homo sapiens
ccttcaaaggaataaaaaaaaagaa

SEQ ID NO: 13943 - DNA, 25 bp, Homo sapiens
gcggatcccaaagaactgctgcctg

SEQ ID NO: 13944 - DNA, 25 bp, Homo sapiens
cgacagtgcacctgcttggatagta

SEQ ID NO: 13945 - DNA, 25 bp, Homo sapiens
ccagcccagctgtagaggaggtttt

SEQ ID NO: 13946 - DNA, 25 bp, Homo sapiens
ccagctgagaatgagttttagtaca

SEQ ID NO: 13947 - DNA, 25 bp, Homo sapiens
tggtggtttgccctatcacggaaaa

SEQ ID NO: 13948 - DNA, 25 bp, Homo sapiens
agctgcttatgcctgaagattgtga

SEQ ID NO: 13949 - DNA, 25 bp, Homo sapiens
tgacctgctaatgttcccaatgtgg

SEQ ID NO: 13950 - DNA, 25 bp, Homo sapiens
caatttggcaggtttcaggatatga

SEQ ID NO: 13951 - DNA, 25 bp, Homo sapiens
ataagccaggagcacagggtacttc

SEQ ID NO: 13952 - DNA, 25 bp, Homo sapiens
tctgtaagttgttcttgacctgccc

SEQ ID NO: 13953 - DNA, 25 bp, Homo sapiens
tctggcgtctccacatgacctgttg

SEQ ID NO: 13954 - DNA, 25 bp, Homo sapiens
aaggctgctttcttctttactcaga

SEQ ID NO: 13955 - DNA, 25 bp, Homo sapiens
ggatcctgcctctggaactccactg

SEQ ID NO: 13956 - DNA, 25 bp, Homo sapiens
ggagcctctattatcttgacgtttg

SEQ ID NO: 13957 - DNA, 25 bp, Homo sapiens
gggattcacccaagagtcagccata

SEQ ID NO: 13958 - DNA, 25 bp, Homo sapiens
tatggacgtcttgtggccaacacta

SEQ ID NO: 13959 - DNA, 25 bp, Homo sapiens
ctctgatgatatgacccgcacctta

SEQ ID NO: 13960 - DNA, 25 bp, Homo sapiens
aggacactttcaggaggttcagatc

SEQ ID NO: 13961 - DNA, 25 bp, Homo sapiens
gctgtgtaactgaccatggcatttc

SEQ ID NO: 13962 - DNA, 25 bp, Homo sapiens
tccagggctctggttatttgacttc

SEQ ID NO: 13963 - DNA, 25 bp, Homo sapiens
ggatgtgccatcaccctactataag

SEQ ID NO: 13964 - DNA, 25 bp, Homo sapiens
aaccgctgttcgcatttgtgatgga

SEQ ID NO: 13965 - DNA, 25 bp, Homo sapiens
agcatgttctcagtagtcccttcca

SEQ ID NO: 13966 - DNA, 25 bp, Homo sapiens
gcctgaagagagtagtgcacatttc

SEQ ID NO: 13967 - DNA, 25 bp, Homo sapiens
ctggcttggaggacacagatgattc

SEQ ID NO: 13968 - DNA, 25 bp, Homo sapiens
atagattttatatacaattgatttt

SEQ ID NO: 13969 - DNA, 25 bp, Homo sapiens
accagattttgtcttgggcagggca

SEQ ID NO: 13970 - DNA, 25 bp, Homo sapiens
cacattgacttggatgggtagcatc

SEQ ID NO: 13971 - DNA, 25 bp, Homo sapiens
ggccttatctcactgcatgctggtc

SEQ ID NO: 13972 - DNA, 25 bp, Homo sapiens
cacctcatgtatatgggagcgtata

SEQ ID NO: 13973 - DNA, 25 bp, Homo sapiens
ctttttctgtggcaggattcccttc

SEQ ID NO: 13974 - DNA, 25 bp, Homo sapiens
cattgactgtcctccatcctggctg

SEQ ID NO: 13975 - DNA, 25 bp, Homo sapiens
aagacttctgatacatgtttgattc

SEQ ID NO: 13976 - DNA, 25 bp, Homo sapiens
cgagttctaatctaagcctgccttg

SEQ ID NO: 13977 - DNA, 25 bp, Homo sapiens
acttgtgctgttcctccatctgaga

SEQ ID NO: 13978 - DNA, 25 bp, Homo sapiens
acagtgccgctgtggttgtaaatga

SEQ ID NO: 13979 - DNA, 25 bp, Homo sapiens
tttgattgcctgacgagacacctga

SEQ ID NO: 13980 - DNA, 25 bp, Homo sapiens
tatgcttgtttacctgccagagtcg

SEQ ID NO: 13981 - DNA, 25 bp, Homo sapiens
ttggggcccaaatacagtcctcttg

SEQ ID NO: 13982 - DNA, 25 bp, Homo sapiens
gcagtccttgttgagctatggcatg

SEQ ID NO: 13983 - DNA, 25 bp, Homo sapiens
ctatccctccagcccatctttagag

SEQ ID NO: 13984 - DNA, 25 bp, Homo sapiens
taggcttctcagctccaccagatgg

SEQ ID NO: 13985 - DNA, 25 bp, Homo sapiens
gttgccgttcacctacagagatata

SEQ ID NO: 13986 - DNA, 25 bp, Homo sapiens
cccgtagaagcaagatggccttata

SEQ ID NO: 13987 - DNA, 25 bp, Homo sapiens
cagcagtctcaagccagggtgttta

SEQ ID NO: 13988 - DNA, 25 bp, Homo sapiens
cagggcacgcctgtaaacttcgtca

SEQ ID NO: 13989 - DNA, 25 bp, Homo sapiens
gcctgtcgattcatggtgtctctta

SEQ ID NO: 13990 - DNA, 25 bp, Homo sapiens
ataggggtaaccatcagtctttttc

SEQ ID NO: 13991 - DNA, 25 bp, Homo sapiens
tggtacttcatgctcacagataatc

SEQ ID NO: 13992 - DNA, 25 bp, Homo sapiens
gcccattgctgctgtagatattata

SEQ ID NO: 13993 - DNA, 25 bp, Homo sapiens
ttgtcatgagaacactgggcaggcc

SEQ ID NO: 13994 - DNA, 25 bp, Homo sapiens
tggcaggtctttcggtctttccaga

SEQ ID NO: 13995 - DNA, 25 bp, Homo sapiens
gctgtcttgtagaatttatcccata

SEQ ID NO: 13996 - DNA, 25 bp, Homo sapiens
gcctgttcaacaaagccattagctg

SEQ ID NO: 13997 - DNA, 25 bp, Homo sapiens
ctcccagagccaagatgatgttatc

SEQ ID NO: 13998 - DNA, 25 bp, Homo sapiens
gggagcggccttttccattttcata

SEQ ID NO: 13999 - DNA, 25 bp, Homo sapiens
ctgtgccctcttctctatctgtgga

SEQ ID NO: 14000 - DNA, 25 bp, Homo sapiens
ccaggcctcctcagtgtaggttata

SEQ ID NO: 14001 - DNA, 25 bp, Homo sapiens
acagtttacgtaatcggtttcacca

SEQ ID NO: 14002 - DNA, 25 bp, Homo sapiens
gtctgcttcttctgatcttcctgtg

SEQ ID NO: 14003 - DNA, 25 bp, Homo sapiens
ctgcccagacatgagatacactagc

SEQ ID NO: 14004 - DNA, 25 bp, Homo sapiens
cctagggactcccaagtgagttttc

SEQ ID NO: 14005 - DNA, 25 bp, Homo sapiens
gttccattttcaggatccagtagtc

SEQ ID NO: 14006 - DNA, 25 bp, Homo sapiens
tgcccagcttctttgtctcagcaga

SEQ ID NO: 14007 - DNA, 25 bp, Homo sapiens
cccaaaggtttcagggtgtgttgta

SEQ ID NO: 14008 - DNA, 25 bp, Homo sapiens
tgcccgcatttggaggtgaaaacta

SEQ ID NO: 14009 - DNA, 25 bp, Homo sapiens
gggcccagtctgtgcatctctcatt

SEQ ID NO: 14010 - DNA, 25 bp, Homo sapiens
gtggcctcattagcaagcaccttcc

SEQ ID NO: 14011 - DNA, 25 bp, Homo sapiens
cgggcccagaggcattaaccttttc

SEQ ID NO: 14012 - DNA, 25 bp, Homo sapiens
gtgtgcagccctcagccgtaattta

SEQ ID NO: 14013 - DNA, 25 bp, Homo sapiens
cccattgtcaacaggggctctctga

SEQ ID NO: 14014 - DNA, 25 bp, Homo sapiens
ctggggtcagatactcattgccttc

SEQ ID NO: 14015 - DNA, 25 bp, Homo sapiens
ctcctgaccagcgtctgacagtctg

SEQ ID NO: 14016 - DNA, 25 bp, Homo sapiens
cagtgcgcatctctccctctgtgga

SEQ ID NO: 14017 - DNA, 25 bp, Homo sapiens
tctccaatcagtggggccttcacgg

SEQ ID NO: 14018 - DNA, 25 bp, Homo sapiens
gcaggccccatccatctggcccatt

SEQ ID NO: 14019 - DNA, 25 bp, Homo sapiens
tatcttgagcaagcgcctggtcctg

SEQ ID NO: 14020 - DNA, 25 bp, Homo sapiens
cctgggttgccagtagcacattatt

SEQ ID NO: 14021 - DNA, 25 bp, Homo sapiens
ctgctgctgtgatgctactgtaatg

SEQ ID NO: 14022 - DNA, 25 bp, Homo sapiens
gctcggcctggtatgttcccatttc

SEQ ID NO: 14023 - DNA, 25 bp, Homo sapiens
gggcacaagttttcagcaacggtca

SEQ ID NO: 14024 - DNA, 25 bp, Homo sapiens
ctgtgtgtccttccatggcctatga

SEQ ID NO: 14025 - DNA, 25 bp, Homo sapiens
tggctccctactgcctacagcgttg

SEQ ID NO: 14026 - DNA, 25 bp, Homo sapiens
tggctccactgcaaagcaaagttga

SEQ ID NO: 14027 - DNA, 25 bp, Homo sapiens
ctccagtccgcgagtgtgaagaacg

SEQ ID NO: 14028 - DNA, 25 bp, Homo sapiens
ctcccgctgttgtttgagcccagtg

SEQ ID NO: 14029 - DNA, 25 bp, Homo sapiens
gtgtctgaccatcaaggctcttctg

SEQ ID NO: 14030 - DNA, 25 bp, Homo sapiens
atgtgtcccataagcagccttcaga

SEQ ID NO: 14031 - DNA, 25 bp, Homo sapiens
catgtagagtttgtgccgaaggtta

SEQ ID NO: 14032 - DNA, 25 bp, Homo sapiens
ggtggccaaccttgtccctgtgatt

SEQ ID NO: 14033 - DNA, 25 bp, Homo sapiens
aaataggtacttagacgtactagat

SEQ ID NO: 14034 - DNA, 25 bp, Homo sapiens
gtggcttcagctttaattcagatta

SEQ ID NO: 14035 - DNA, 25 bp, Homo sapiens
gtccagctcctcacatgggtttaaa

SEQ ID NO: 14036 - DNA, 25 bp, Homo sapiens
cgcctctagcgttgggaatcagtca

SEQ ID NO: 14037 - DNA, 25 bp, Homo sapiens
gatctctgacgttgaccatgcccta

SEQ ID NO: 14038 - DNA, 25 bp, Homo sapiens
ctgcggggcttacttgattccctta

SEQ ID NO: 14039 - DNA, 25 bp, Homo sapiens
gcccactttggtttgacactgcata

SEQ ID NO: 14040 - DNA, 25 bp, Homo sapiens
ggcgagattccttgtctagctttga

SEQ ID NO: 14041 - DNA, 25 bp, Homo sapiens
tgggctccctgtccctgaacagtta

SEQ ID NO: 14042 - DNA, 25 bp, Homo sapiens
cagggtactgtattgctcctcaaca

SEQ ID NO: 14043 - DNA, 25 bp, Homo sapiens
cggtggccctacacaggacttgaca

SEQ ID NO: 14044 - DNA, 25 bp, Homo sapiens
ttcaccaatggagacctgatgcatg

SEQ ID NO: 14045 - DNA, 25 bp, Homo sapiens
cacgtgcctcagatatgctcccata

SEQ ID NO: 14046 - DNA, 25 bp, Homo sapiens
cctgtgtgactgcatcggcatctga

SEQ ID NO: 14047 - DNA, 25 bp, Homo sapiens
ggactcccagtccaggggttataca

SEQ ID NO: 14048 - DNA, 25 bp, Homo sapiens
ctgctgttccttctcctgtggctta

SEQ ID NO: 14049 - DNA, 25 bp, Homo sapiens
ccttcctgggttgggtacacaagct

SEQ ID NO: 14050 - DNA, 25 bp, Homo sapiens
tcatgtggacatgggcaccagctcc

SEQ ID NO: 14051 - DNA, 25 bp, Homo sapiens
ggtgcccttcccacaatgagatatt

SEQ ID NO: 14052 - DNA, 25 bp, Homo sapiens
agccgctggccaatatgtactcatg

SEQ ID NO: 14053 - DNA, 25 bp, Homo sapiens
ggcggctgcccacactttgcatttc

SEQ ID NO: 14054 - DNA, 25 bp, Homo sapiens
cttcaggctatttggcacccaggtc

SEQ ID NO: 14055 - DNA, 25 bp, Homo sapiens
agtgccactgctcaaggtctccatg

SEQ ID NO: 14056 - DNA, 25 bp, Homo sapiens
ccttcccggctctcagatgatggtg

SEQ ID NO: 14057 - DNA, 25 bp, Homo sapiens
ctacctctggcttcttctgggacga

SEQ ID NO: 14058 - DNA, 25 bp, Homo sapiens
cagacaggctagtacgttttccaca

SEQ ID NO: 14059 - DNA, 25 bp, Homo sapiens
tgcaacgatgaaggcagaatccaga

SEQ ID NO: 14060 - DNA, 25 bp, Homo sapiens
agatgtgtttaaaccaactaactta

SEQ ID NO: 14061 - DNA, 25 bp, Homo sapiens
acatttacaaattaatatgaagaca

SEQ ID NO: 14062 - DNA, 25 bp, Homo sapiens
tccaacatggaaagttatatttctt

SEQ ID NO: 14063 - DNA, 25 bp, Homo sapiens
tggccctgtcagaactcatcttgtc

SEQ ID NO: 14064 - DNA, 25 bp, Homo sapiens
cagtgctccttacatggaaagttta

SEQ ID NO: 14065 - DNA, 25 bp, Homo sapiens
tcctaggttccgagttggcattatc

SEQ ID NO: 14066 - DNA, 25 bp, Homo sapiens
aggctcctgagtcaaggcttgtttc

SEQ ID NO: 14067 - DNA, 25 bp, Homo sapiens
agcaagtcagaaattaactcctctg

SEQ ID NO: 14068 - DNA, 25 bp, Homo sapiens
acaatctcgctaaaagcagcctaga

SEQ ID NO: 14069 - DNA, 25 bp, Homo sapiens
gctcgccctgtagaagaactcaata

SEQ ID NO: 14070 - DNA, 25 bp, Homo sapiens
agctacttccaaatggatgcctgtc

SEQ ID NO: 14071 - DNA, 25 bp, Homo sapiens
gctttcttctgcaaatggtggcacc

SEQ ID NO: 14072 - DNA, 25 bp, Homo sapiens
cacaatggaggcagagttttcacta

SEQ ID NO: 14073 - DNA, 25 bp, Homo sapiens
tgcctgtgcctgaagaaaatttgtc

SEQ ID NO: 14074 - DNA, 25 bp, Homo sapiens
ctgggcaatcccgtggcttagaaaa

SEQ ID NO: 14075 - DNA, 25 bp, Homo sapiens
accttcgccgcggagaaagacaata

SEQ ID NO: 14076 - DNA, 25 bp, Homo sapiens
cgtgttcaagctgcaaaggacctca

SEQ ID NO: 14077 - DNA, 25 bp, Homo sapiens
gagcctcagcatccaacccagaata

SEQ ID NO: 14078 - DNA, 25 bp, Homo sapiens
ttgtaggcccttccgcactgaaagc

SEQ ID NO: 14079 - DNA, 25 bp, Homo sapiens
ccgaggtttgcaggacttttgtttc

SEQ ID NO: 14080 - DNA, 25 bp, Homo sapiens
cccagcctagtgtggatttcaggta

SEQ ID NO: 14081 - DNA, 25 bp, Homo sapiens
ttatgatgccacaggtccctctgga

SEQ ID NO: 14082 - DNA, 25 bp, Homo sapiens
ttactgctgcaagaccggcctttga

SEQ ID NO: 14083 - DNA, 25 bp, Homo sapiens
ctgtaggggctgatcattctcatga

SEQ ID NO: 14084 - DNA, 25 bp, Homo sapiens
ggccctggattcaagctccgcaata

SEQ ID NO: 14085 - DNA, 25 bp, Homo sapiens
accatccgggtgtgaggagtcatta

SEQ ID NO: 14086 - DNA, 25 bp, Homo sapiens
atggggcattgtagccttcacatga

SEQ ID NO: 14087 - DNA, 25 bp, Homo sapiens
ggcctcggttccactggtcataatt

SEQ ID NO: 14088 - DNA, 25 bp, Homo sapiens
cccttatgtggtgggagttcaaaca

SEQ ID NO: 14089 - DNA, 25 bp, Homo sapiens
agctgtgtgacacctggcattcctc

SEQ ID NO: 14090 - DNA, 25 bp, Homo sapiens
gcagtcttttgcagtacctcattca

SEQ ID NO: 14091 - DNA, 25 bp, Homo sapiens
ggggctcccatcttcttactcagag

SEQ ID NO: 14092 - DNA, 25 bp, Homo sapiens
ccagagccggcttcacaggataaga

SEQ ID NO: 14093 - DNA, 25 bp, Homo sapiens
acacgctggcctgtctcatggaacc

SEQ ID NO: 14094 - DNA, 25 bp, Homo sapiens
gtgtctgaccatcaaggctcttctg

SEQ ID NO: 14095 - DNA, 25 bp, Homo sapiens
atgtgtcccataagcagccttcaga

SEQ ID NO: 14096 - DNA, 25 bp, Homo sapiens
cctcacgggccttgaaattagtata

SEQ ID NO: 14097 - DNA, 25 bp, Homo sapiens
tccctgtggtcgctttcagttctca

SEQ ID NO: 14098 - DNA, 25 bp, Homo sapiens
ctatccctaggtggccaatcttgtc

SEQ ID NO: 14099 - DNA, 25 bp, Homo sapiens
gggggtctgagggctgcactttggg

SEQ ID NO: 14100 - DNA, 25 bp, Homo sapiens
tgatgtcctccttcaatacaacttg

SEQ ID NO: 14101 - DNA, 25 bp, Homo sapiens
gtccagctcctcacatgggtttaaa

SEQ ID NO: 14102 - DNA, 25 bp, Homo sapiens
actactgggagggaattgccttttc

SEQ ID NO: 14103 - DNA, 25 bp, Homo sapiens
ttctgctgggcacagtggctcatac

SEQ ID NO: 14104 - DNA, 25 bp, Homo sapiens
acatgtttacatctccagcaagggg

SEQ ID NO: 14105 - DNA, 25 bp, Homo sapiens
cctctgggaagggacatgataatcg

SEQ ID NO: 14106 - DNA, 25 bp, Homo sapiens
ctgttgtagccctttctgtgagatc

SEQ ID NO: 14107 - DNA, 25 bp, Homo sapiens
ggaaattttatttggacaatcaacg

SEQ ID NO: 14108 - DNA, 25 bp, Homo sapiens
tgggagttcttcatggccaagactt

SEQ ID NO: 14109 - DNA, 25 bp, Homo sapiens
tatcaacggtgtgcagggctaactc

SEQ ID NO: 14110 - DNA, 25 bp, Homo sapiens
taaaacaatttgaaacaaaaatgtc

SEQ ID NO: 14111 - DNA, 25 bp, Homo sapiens
tagccaagctccaaagtcacacatc

SEQ ID NO: 14112 - DNA, 25 bp, Homo sapiens
cctgctgtatgccagaggttcttga

SEQ ID NO: 14113 - DNA, 25 bp, Homo sapiens
tcctcctggaatgctggatactata

SEQ ID NO: 14114 - DNA, 25 bp, Homo sapiens
ttccgagttctccacagttctggga

SEQ ID NO: 14115 - DNA, 25 bp, Homo sapiens
acgcttggaaacttctgtgtctatc

SEQ ID NO: 14116 - DNA, 25 bp, Homo sapiens
tgcctctccgtctgctaaggattga

SEQ ID NO: 14117 - DNA, 25 bp, Homo sapiens
tagcagtggccctggattcaagctc

SEQ ID NO: 14118 - DNA, 25 bp, Homo sapiens
gttcaagtcatgcaaaaccatttcg

SEQ ID NO: 14119 - DNA, 25 bp, Homo sapiens
tggttcacaaagtctggccctcaga

SEQ ID NO: 14120 - DNA, 25 bp, Homo sapiens
ccttcccctccactttcttccttcc

SEQ ID NO: 14121 - DNA, 25 bp, Homo sapiens
cctatgtagtcagtaccaggaaaca

SEQ ID NO: 14122 - DNA, 25 bp, Homo sapiens
agcaaaactgcctgccggtatgtta

SEQ ID NO: 14123 - DNA, 25 bp, Homo sapiens
agggaccctggcttcatcactctgg

SEQ ID NO: 14124 - DNA, 25 bp, Homo sapiens
acccgggatagagggatcgctcaaa

SEQ ID NO: 14125 - DNA, 25 bp, Homo sapiens
cggctcctggttcttgtggaaaata

SEQ ID NO: 14126 - DNA, 25 bp, Homo sapiens
tcaggctatcagctcatggactgtc

SEQ ID NO: 14127 - DNA, 25 bp, Homo sapiens
aggggtccaggcagtatcaacttta

SEQ ID NO: 14128 - DNA, 25 bp, Homo sapiens
tgccctggagcttagctaaccttta

SEQ ID NO: 14129 - DNA, 25 bp, Homo sapiens
ctcagcccagtgacagaagcatttg

SEQ ID NO: 14130 - DNA, 25 bp, Homo sapiens
ggtggcctcattagaagttagctgc

SEQ ID NO: 14131 - DNA, 25 bp, Homo sapiens
tgctaaggatagatttactgccata

SEQ ID NO: 14132 - DNA, 25 bp, Homo sapiens
cacttctctgacattttgatggata

SEQ ID NO: 14133 - DNA, 25 bp, Homo sapiens
ccgttgtttgattccagctgcagca

SEQ ID NO: 14134 - DNA, 25 bp, Homo sapiens
ctagactttcctgtgcttgagtata

SEQ ID NO: 14135 - DNA, 25 bp, Homo sapiens
gctcaattagcaacacttctgggtc

SEQ ID NO: 14136 - DNA, 25 bp, Homo sapiens
ggggcagctgcccttctcttagcaa

SEQ ID NO: 14137 - DNA, 25 bp, Homo sapiens
gtggcccttggtctgtgcaatttta

SEQ ID NO: 14138 - DNA, 25 bp, Homo sapiens
ctgccaagccctctagtgtcatgtg

SEQ ID NO: 14139 - DNA, 25 bp, Homo sapiens
gggccttgatacctctgtccttgga

SEQ ID NO: 14140 - DNA, 25 bp, Homo sapiens
tttcttcttttcttgttttactgag

SEQ ID NO: 14141 - DNA, 25 bp, Homo sapiens
gggaagaattgaatatgatgttaaa

SEQ ID NO: 14142 - DNA, 25 bp, Homo sapiens
ggaggctccagctgtatgcttcata

SEQ ID NO: 14143 - DNA, 25 bp, Homo sapiens
cagacgtggaacagtgggccttatc

SEQ ID NO: 14144 - DNA, 25 bp, Homo sapiens
acgactgtgggtttctgtcttaacc

SEQ ID NO: 14145 - DNA, 25 bp, Homo sapiens
aggcaagattttcctttttttcttc

SEQ ID NO: 14146 - DNA, 25 bp, Homo sapiens
actcagtgtcttgtggggtctattg

SEQ ID NO: 14147 - DNA, 25 bp, Homo sapiens
gcacagggtcctgcaagttttggca

SEQ ID NO: 14148 - DNA, 25 bp, Homo sapiens
ttcttctcaagactcagggttctca

SEQ ID NO: 14149 - DNA, 25 bp, Homo sapiens
ctctgggtcacagcctctagggaca

SEQ ID NO: 14150 - DNA, 25 bp, Homo sapiens
tgtccttcctctgaatgttctcttc

SEQ ID NO: 14151 - DNA, 25 bp, Homo sapiens
ctgttatggaaagaactgttatgga

SEQ ID NO: 14152 - DNA, 25 bp, Homo sapiens
tccagtgacaagctagtgccagttc

SEQ ID NO: 14153 - DNA, 25 bp, Homo sapiens
aggtgcctccagtaattgctcagtg

SEQ ID NO: 14154 - DNA, 25 bp, Homo sapiens
gtgccgtctccaccaacagaaaggc

SEQ ID NO: 14155 - DNA, 25 bp, Homo sapiens
gccgtcccgttcttttttcctgtga

SEQ ID NO: 14156 - DNA, 25 bp, Homo sapiens
cctgctgctggatttttaaggactc

SEQ ID NO: 14157 - DNA, 25 bp, Homo sapiens
tggctgcagacatcccgagagtgac

SEQ ID NO: 14158 - DNA, 25 bp, Homo sapiens
cctgggctcttaaaatcgtaatttc

SEQ ID NO: 14159 - DNA, 25 bp, Homo sapiens
tcctctggagaaagggactgacgcc

SEQ ID NO: 14160 - DNA, 25 bp, Homo sapiens
tggggcactcctgcttaaaaacctt

SEQ ID NO: 14161 - DNA, 25 bp, Homo sapiens
cccagttgttctttgagtgcccacc

SEQ ID NO: 14162 - DNA, 25 bp, Homo sapiens
cccaggagaggaatagaggttatca

SEQ ID NO: 14163 - DNA, 25 bp, Homo sapiens
cctgtgaacggccacgggaatttgt

SEQ ID NO: 14164 - DNA, 25 bp, Homo sapiens
gtggatgtctgggccatccagcctc

SEQ ID NO: 14165 - DNA, 25 bp, Homo sapiens
tacctgggagttcaaagacttgaca

SEQ ID NO: 14166 - DNA, 25 bp, Homo sapiens
atttttgcaaacctctacttagctg

SEQ ID NO: 14167 - DNA, 25 bp, Homo sapiens
tggatggaaatgatcacttttctca

SEQ ID NO: 14168 - DNA, 25 bp, Homo sapiens
tggcagggctctgtgctcaaaactt

SEQ ID NO: 14169 - DNA, 25 bp, Homo sapiens
cctgagaggggcatgtccaatttta

SEQ ID NO: 14170 - DNA, 25 bp, Homo sapiens
taagctcccactgcagacaaatttg

SEQ ID NO: 14171 - DNA, 25 bp, Homo sapiens
ttctagcctctttgtgttcactgga

SEQ ID NO: 14172 - DNA, 25 bp, Homo sapiens
cccacatggtggagaagccctataa

SEQ ID NO: 14173 - DNA, 25 bp, Homo sapiens
agccagtgtcccagtgtcctttcca

SEQ ID NO: 14174 - DNA, 25 bp, Homo sapiens
cctgtgctcagaatgggcttagttc

SEQ ID NO: 14175 - DNA, 25 bp, Homo sapiens
ctcagcctggagctatgctttcagc

SEQ ID NO: 14176 - DNA, 25 bp, Homo sapiens
tagggaacctctgtggaaactcatc

SEQ ID NO: 14177 - DNA, 25 bp, Homo sapiens
ctgcgcgttccttggtcagatgata

SEQ ID NO: 14178 - DNA, 25 bp, Homo sapiens
ctgtttggacaagcggtgaaccctc

SEQ ID NO: 14179 - DNA, 25 bp, Homo sapiens
tgcttcacttgggttgcattatata

SEQ ID NO: 14180 - DNA, 25 bp, Homo sapiens
catggccctgcttcgcaactgattc

SEQ ID NO: 14181 - DNA, 25 bp, Homo sapiens
ctgccctcggccctaagtgaaaata

SEQ ID NO: 14182 - DNA, 25 bp, Homo sapiens
gctgggctaacacttgcgattttta

SEQ ID NO: 14183 - DNA, 25 bp, Homo sapiens
gccttccacatgtctgccgtcttta

SEQ ID NO: 14184 - DNA, 25 bp, Homo sapiens
ggtgccagcctccttgagtcaaggg

SEQ ID NO: 14185 - DNA, 25 bp, Homo sapiens
gctgtgactttgtaccgcatgatca

SEQ ID NO: 14186 - DNA, 25 bp, Homo sapiens
cttcccagatgtgatgccagtcttc

SEQ ID NO: 14187 - DNA, 25 bp, Homo sapiens
ccctgacagtcagtacctagatgga

SEQ ID NO: 14188 - DNA, 25 bp, Homo sapiens
ggggctcctgcaaccaactctcttg

SEQ ID NO: 14189 - DNA, 25 bp, Homo sapiens
gtcacgctgggtaagaatgcctttt

SEQ ID NO: 14190 - DNA, 25 bp, Homo sapiens
cccacgtggagtaggatgaaaaccc

SEQ ID NO: 14191 - DNA, 25 bp, Homo sapiens
ggagtctcccttcctgccttcagta

SEQ ID NO: 14192 - DNA, 25 bp, Homo sapiens
ggcactcagtgcacccagtttacta

SEQ ID NO: 14193 - DNA, 25 bp, Homo sapiens
accaccttaggaagcctctcattta

SEQ ID NO: 14194 - DNA, 25 bp, Homo sapiens
tggctccgtgttccatcccaagatg

SEQ ID NO: 14195 - DNA, 25 bp, Homo sapiens
gcctgctgacctagctggcttgcta

SEQ ID NO: 14196 - DNA, 25 bp, Homo sapiens
agtacctgagatggccaagcaattc

SEQ ID NO: 14197 - DNA, 25 bp, Homo sapiens
ttccatgacctcgagtgacttgcta

SEQ ID NO: 14198 - DNA, 25 bp, Homo sapiens
ccagaccatggggagcttatccaca

SEQ ID NO: 14199 - DNA, 25 bp, Homo sapiens
caggtgggttcctctaacgataaaa

SEQ ID NO: 14200 - DNA, 25 bp, Homo sapiens
tctcccaggctgaacaatgtttttc

SEQ ID NO: 14201 - DNA, 25 bp, Homo sapiens
tggcccttcaaggtcatctgcctgc

SEQ ID NO: 14202 - DNA, 25 bp, Homo sapiens
ctctgatagccctctgtaaaccacg

SEQ ID NO: 14203 - DNA, 25 bp, Homo sapiens
tgggtccctctaggcttagctcctg

SEQ ID NO: 14204 - DNA, 25 bp, Homo sapiens
gaggaccaaatgatcgcccgtttta

SEQ ID NO: 14205 - DNA, 25 bp, Homo sapiens
tcggggcagtagttttctcagaaca

SEQ ID NO: 14206 - DNA, 25 bp, Homo sapiens
ccagtccaggtgaacaaggtccaga

SEQ ID NO: 14207 - DNA, 25 bp, Homo sapiens
caccagcggttagaagattcggtta

SEQ ID NO: 14208 - DNA, 25 bp, Homo sapiens
cagaggcatttttacagtgtccagc

SEQ ID NO: 14209 - DNA, 25 bp, Homo sapiens
ggacgtttcatttctggccctggct

SEQ ID NO: 14210 - DNA, 25 bp, Homo sapiens
cactccatggggaaaggctagcatt

SEQ ID NO: 14211 - DNA, 25 bp, Homo sapiens
tgagcacaatctccaactgtatggg

SEQ ID NO: 14212 - DNA, 25 bp, Homo sapiens
ccctggataacagccatggtgttga

SEQ ID NO: 14213 - DNA, 25 bp, Homo sapiens
tgtttcccaaaagaggccatgagtt

SEQ ID NO: 14214 - DNA, 25 bp, Homo sapiens
tgggctcagaagctccatccggagt

SEQ ID NO: 14215 - DNA, 25 bp, Homo sapiens
ccagctgggtcatctctgaagttta

SEQ ID NO: 14216 - DNA, 25 bp, Homo sapiens
cctcgaggccatatccacaaattta

SEQ ID NO: 14217 - DNA, 25 bp, Homo sapiens
caggcggtataagagcagacaagta

SEQ ID NO: 14218 - DNA, 25 bp, Homo sapiens
tgtccctgttctcatgccattagca

SEQ ID NO: 14219 - DNA, 25 bp, Homo sapiens
ggggctttggctcaaccttttaata

SEQ ID NO: 14220 - DNA, 25 bp, Homo sapiens
gctaggggctaggtttatcatcata

SEQ ID NO: 14221 - DNA, 25 bp, Homo sapiens
ggaggctgacctttgcacactttaa

SEQ ID NO: 14222 - DNA, 25 bp, Homo sapiens
ctcccttctagcaggatcactgaga

SEQ ID NO: 14223 - DNA, 25 bp, Homo sapiens
agactctgttacctccatgcaatga

SEQ ID NO: 14224 - DNA, 25 bp, Homo sapiens
gtctatatctgggaagtctgaaatc

SEQ ID NO: 14225 - DNA, 25 bp, Homo sapiens
gagccttaggcctcaacataaaatt

SEQ ID NO: 14226 - DNA, 25 bp, Homo sapiens
acttgcctgtggaaaagctctattc

SEQ ID NO: 14227 - DNA, 25 bp, Homo sapiens
ggcccagataaaggaacactcagtt

SEQ ID NO: 14228 - DNA, 25 bp, Homo sapiens
atggggactagtatttctcagaagc

SEQ ID NO: 14229 - DNA, 25 bp, Homo sapiens
ccagttcctcacctttggagtagta

SEQ ID NO: 14230 - DNA, 25 bp, Homo sapiens
ctaaagatccaatattaaggagctc

SEQ ID NO: 14231 - DNA, 25 bp, Homo sapiens
cagtggctatctatggctttcttta

SEQ ID NO: 14232 - DNA, 25 bp, Homo sapiens
tggcaaccggctcttattagaccta

SEQ ID NO: 14233 - DNA, 25 bp, Homo sapiens
gccagtgttcagtatcatccaatta

SEQ ID NO: 14234 - DNA, 25 bp, Homo sapiens
gttatctacacaggcctgcaagttg

SEQ ID NO: 14235 - DNA, 25 bp, Homo sapiens
agcaatggttgacagtttcctcttc

SEQ ID NO: 14236 - DNA, 25 bp, Homo sapiens
ggcctagaggttcctcactgtttta

SEQ ID NO: 14237 - DNA, 25 bp, Homo sapiens
tacgccaagtgctgaaaaggtccta

SEQ ID NO: 14238 - DNA, 25 bp, Homo sapiens
atgcactccattatctccagaaaag

SEQ ID NO: 14239 - DNA, 25 bp, Homo sapiens
atgccttcaaaattcctggagtcta

SEQ ID NO: 14240 - DNA, 25 bp, Homo sapiens
gcaccctgctccattttgtttggta

SEQ ID NO: 14241 - DNA, 25 bp, Homo sapiens
caggactgaaactgtggatctaaca

SEQ ID NO: 14242 - DNA, 25 bp, Homo sapiens
caaactttggctggatcttggttca

SEQ ID NO: 14243 - DNA, 25 bp, Homo sapiens
ggggtgtaatactaggcaattctta

SEQ ID NO: 14244 - DNA, 25 bp, Homo sapiens
atgaggaatccagctctcttgtacc

SEQ ID NO: 14245 - DNA, 25 bp, Homo sapiens
ctgggccctaattcagaacctctga

SEQ ID NO: 14246 - DNA, 25 bp, Homo sapiens
ggtggcagctacctaacctcatatc

SEQ ID NO: 14247 - DNA, 25 bp, Homo sapiens
tgcaggacctggaatgaatcttaaa

SEQ ID NO: 14248 - DNA, 25 bp, Homo sapiens
aatagatacttatattttatactta

SEQ ID NO: 14249 - DNA, 25 bp, Homo sapiens
atttctgcaactaataacccggcta

SEQ ID NO: 14250 - DNA, 25 bp, Homo sapiens
agcccattttaagccagttttaagt

SEQ ID NO: 14251 - DNA, 25 bp, Homo sapiens
attccacctgatacccagtgggtct

SEQ ID NO: 14252 - DNA, 25 bp, Homo sapiens
aaccatgttttttggacaaaatttt

SEQ ID NO: 14253 - DNA, 25 bp, Homo sapiens
ctgcggggagctaagcacacattta

SEQ ID NO: 14254 - DNA, 25 bp, Homo sapiens
tggcctagtgaagtaataagtcagc

SEQ ID NO: 14255 - DNA, 25 bp, Homo sapiens
ctctaaataggtttttctgcacaca

SEQ ID NO: 14256 - DNA, 25 bp, Homo sapiens
ggtggtacccagagactaagaaaga

SEQ ID NO: 14257 - DNA, 25 bp, Homo sapiens
acaaaattctagtttccctctttcg

SEQ ID NO: 14258 - DNA, 25 bp, Homo sapiens
gccctgactggaacctctcaaaatt

SEQ ID NO: 14259 - DNA, 25 bp, Homo sapiens
gtgcttcacacatggcaagagctca

SEQ ID NO: 14260 - DNA, 25 bp, Homo sapiens
ttcaagcgcgtacggtttccatttg

SEQ ID NO: 14261 - DNA, 25 bp, Homo sapiens
ttctctggtcgagcaagtctcctgc

SEQ ID NO: 14262 - DNA, 25 bp, Homo sapiens
cgctaccttttgctttgactggcca

SEQ ID NO: 14263 - DNA, 25 bp, Homo sapiens
ttgtcacctccaaaaactgctgcct

SEQ ID NO: 14264 - DNA, 25 bp, Homo sapiens
ctgccgactgggatggcaatctttc

SEQ ID NO: 14265 - DNA, 25 bp, Homo sapiens
tctaggctaggaaggtctgtcatta

SEQ ID NO: 14266 - DNA, 25 bp, Homo sapiens
ccttctgggttggtatgtgcgtata

SEQ ID NO: 14267 - DNA, 25 bp, Homo sapiens
ggctactgcctctttcatcaacttg

SEQ ID NO: 14268 - DNA, 25 bp, Homo sapiens
gtgagctaatgaataaaacccacta

SEQ ID NO: 14269 - DNA, 25 bp, Homo sapiens
agtatttttatatgtcccttattac

SEQ ID NO: 14270 - DNA, 25 bp, Homo sapiens
tgagtgttcatcagcagcacctgca

SEQ ID NO: 14271 - DNA, 25 bp, Homo sapiens
tggagagctgtactggaaacactta

SEQ ID NO: 14272 - DNA, 25 bp, Homo sapiens
agtacttttttgttttttaaataca

SEQ ID NO: 14273 - DNA, 25 bp, Homo sapiens
cttttgatatattgagaaaagtata

SEQ ID NO: 14274 - DNA, 25 bp, Homo sapiens
tggcgacctcctttttgctcagatc

SEQ ID NO: 14275 - DNA, 25 bp, Homo sapiens
tggccatgtccagttcattctctga

SEQ ID NO: 14276 - DNA, 25 bp, Homo sapiens
ttcctcggtgcggacagaagtatcc

SEQ ID NO: 14277 - DNA, 25 bp, Homo sapiens
ctctgccatgagtcacctgctgtga

SEQ ID NO: 14278 - DNA, 25 bp, Homo sapiens
cccttaggggacagaacagatcatg

SEQ ID NO: 14279 - DNA, 25 bp, Homo sapiens
ggagtctgtgtccataccaagttaa

SEQ ID NO: 14280 - DNA, 25 bp, Homo sapiens
gtactcccatttttctcctgcttga

SEQ ID NO: 14281 - DNA, 25 bp, Homo sapiens
ctcccatgaaactggccaccatata

SEQ ID NO: 14282 - DNA, 25 bp, Homo sapiens
gtacgtataaatacattaagaacaa

SEQ ID NO: 14283 - DNA, 25 bp, Homo sapiens
aggcccttggctacatgctttggca

SEQ ID NO: 14284 - DNA, 25 bp, Homo sapiens
ctgccacggttttctcttgactgta

SEQ ID NO: 14285 - DNA, 25 bp, Homo sapiens
cagtcaacttggaagccaggtttta

SEQ ID NO: 14286 - DNA, 25 bp, Homo sapiens
caacagtgttagataagatggcctc

SEQ ID NO: 14287 - DNA, 25 bp, Homo sapiens
agacacagggttcagcttggcattc

SEQ ID NO: 14288 - DNA, 25 bp, Homo sapiens
tcctgcttataggtagggtgcaata

SEQ ID NO: 14289 - DNA, 25 bp, Homo sapiens
aggctccggctgcatgttagttcca

SEQ ID NO: 14290 - DNA, 25 bp, Homo sapiens
ggcagatcctgttcctctagtgggc

SEQ ID NO: 14291 - DNA, 25 bp, Homo sapiens
tttctcccggagcagacaggtattc

SEQ ID NO: 14292 - DNA, 25 bp, Homo sapiens
ggtgctagtgcgtccattttgatca

SEQ ID NO: 14293 - DNA, 25 bp, Homo sapiens
gggagatcctttgcctctgtgagtc

SEQ ID NO: 14294 - DNA, 25 bp, Homo sapiens
agctcccatttcaggcttgacactg

SEQ ID NO: 14295 - DNA, 25 bp, Homo sapiens
gccagggctgggacatactaacaaa

SEQ ID NO: 14296 - DNA, 25 bp, Homo sapiens
tttcagaggatcagagtgctacttc

SEQ ID NO: 14297 - DNA, 25 bp, Homo sapiens
ggggactgcatgactttaacttttt

SEQ ID NO: 14298 - DNA, 25 bp, Homo sapiens
tagcacctctgattgggatagtccc

SEQ ID NO: 14299 - DNA, 25 bp, Homo sapiens
gctgctatctgcctttgtgctgtta

SEQ ID NO: 14300 - DNA, 25 bp, Homo sapiens
tattattcttaattagcatgtgtac

SEQ ID NO: 14301 - DNA, 25 bp, Homo sapiens
gctggcctcctatccacaaagtatg

SEQ ID NO: 14302 - DNA, 25 bp, Homo sapiens
ggtccagtctgttccagtctctata

SEQ ID NO: 14303 - DNA, 25 bp, Homo sapiens
ggcaccttcacctcacgggctgtaa

SEQ ID NO: 14304 - DNA, 25 bp, Homo sapiens
ccctgtatttggtggagagatttga

SEQ ID NO: 14305 - DNA, 25 bp, Homo sapiens
ttgatgggccgttaaccagtgtttc

SEQ ID NO: 14306 - DNA, 25 bp, Homo sapiens
ggctgacctgaactggccttgaaaa

SEQ ID NO: 14307 - DNA, 25 bp, Homo sapiens
gtctactagccaaggggtgggtccc

SEQ ID NO: 14308 - DNA, 25 bp, Homo sapiens
gtgtccctccagacctgtcagttta

SEQ ID NO: 14309 - DNA, 25 bp, Homo sapiens
aaactgtgcttgctgcctatgccta

SEQ ID NO: 14310 - DNA, 25 bp, Homo sapiens
tcagccattacagggatccaggatt

SEQ ID NO: 14311 - DNA, 25 bp, Homo sapiens
ggtggattaccttcctgtaaacaca

SEQ ID NO: 14312 - DNA, 25 bp, Homo sapiens
tgtgccctcagtgccagtcataagt

SEQ ID NO: 14313 - DNA, 25 bp, Homo sapiens
cactggggcagctgtttcttacgta

SEQ ID NO: 14314 - DNA, 25 bp, Homo sapiens
gttgagagttcacccacaggttgtg

SEQ ID NO: 14315 - DNA, 25 bp, Homo sapiens
tgggaatgtccaagcccagtacata

SEQ ID NO: 14316 - DNA, 25 bp, Homo sapiens
tggctggtccttgagcacacatatc

SEQ ID NO: 14317 - DNA, 25 bp, Homo sapiens
ttcggcatgctgaggccctttcaaa

SEQ ID NO: 14318 - DNA, 25 bp, Homo sapiens
ccctggtgatccatgtcagatgtgc

SEQ ID NO: 14319 - DNA, 25 bp, Homo sapiens
gggaaaataataaccaccaaagtgc

SEQ ID NO: 14320 - DNA, 25 bp, Homo sapiens
ttgaatttcttttcctggcccatga

SEQ ID NO: 14321 - DNA, 25 bp, Homo sapiens
agcaggctcccagctaatccttaga

SEQ ID NO: 14322 - DNA, 25 bp, Homo sapiens
tggctcaaatgcacgcgtagtttta

SEQ ID NO: 14323 - DNA, 25 bp, Homo sapiens
tccagcaggtttgagccagccagtt

SEQ ID NO: 14324 - DNA, 25 bp, Homo sapiens
ccggccgtgagtgtcattgtcaaga

SEQ ID NO: 14325 - DNA, 25 bp, Homo sapiens
gtcacctctagggagcgccattgca

SEQ ID NO: 14326 - DNA, 25 bp, Homo sapiens
ggctggtaagcagaccctcactgtt

SEQ ID NO: 14327 - DNA, 25 bp, Homo sapiens
gctgagaataccctttggcaccttc

SEQ ID NO: 14328 - DNA, 25 bp, Homo sapiens
ctgggcctgggattttttcacactg

SEQ ID NO: 14329 - DNA, 25 bp, Homo sapiens
ggtgctgcgttcttcctgtttcata

SEQ ID NO: 14330 - DNA, 25 bp, Homo sapiens
agtcagctcctctgaccccacatca

SEQ ID NO: 14331 - DNA, 25 bp, Homo sapiens
ttctgtgcccaccagcggattcatg

SEQ ID NO: 14332 - DNA, 25 bp, Homo sapiens
cttccctctagagctcattgatctg

SEQ ID NO: 14333 - DNA, 25 bp, Homo sapiens
ccacatttctgtcttggggtaaaca

SEQ ID NO: 14334 - DNA, 25 bp, Homo sapiens
ttgtgactcagcgaaagggattact

SEQ ID NO: 14335 - DNA, 25 bp, Homo sapiens
ccattttattgaactctactacaga

SEQ ID NO: 14336 - DNA, 25 bp, Homo sapiens
gtgggctgctcttcattgctaatta

SEQ ID NO: 14337 - DNA, 25 bp, Homo sapiens
cacttttgagctgcatggtccagta

SEQ ID NO: 14338 - DNA, 25 bp, Homo sapiens
cctgaccttggccttgctgaaaagc

SEQ ID NO: 14339 - DNA, 25 bp, Homo sapiens
gtgtgttgccacctccttccttaga

SEQ ID NO: 14340 - DNA, 25 bp, Homo sapiens
gtgggtcactctctagtcctgtgtg

SEQ ID NO: 14341 - DNA, 25 bp, Homo sapiens
cacagggtgaagaaaagcatgcata

SEQ ID NO: 14342 - DNA, 25 bp, Homo sapiens
agtccctttttcagtgcgcgaaatg

SEQ ID NO: 14343 - DNA, 25 bp, Homo sapiens
tgcacacctctgtttggaacctggg

SEQ ID NO: 14344 - DNA, 25 bp, Homo sapiens
ccgggtgcttagaggtcatctttca

SEQ ID NO: 14345 - DNA, 25 bp, Homo sapiens
tgagtcaagcctgtcaaccactgtg

SEQ ID NO: 14346 - DNA, 25 bp, Homo sapiens
gctacagctgttctctcagggtctg

SEQ ID NO: 14347 - DNA, 25 bp, Homo sapiens
gacgccctagggtgcagtctcattt

SEQ ID NO: 14348 - DNA, 25 bp, Homo sapiens
ccaggcatttttcattagggttcta

SEQ ID NO: 14349 - DNA, 25 bp, Homo sapiens
cttgattcgtcaacggcagcacttg

SEQ ID NO: 14350 - DNA, 25 bp, Homo sapiens
ctggagtgtccaccctcttggaata

SEQ ID NO: 14351 - DNA, 25 bp, Homo sapiens
ggagctccacgttaaccctcaggga

SEQ ID NO: 14352 - DNA, 25 bp, Homo sapiens
gccacgctgcctgagattggactta

SEQ ID NO: 14353 - DNA, 25 bp, Homo sapiens
ggagcagcttcctttattgcactga

SEQ ID NO: 14354 - DNA, 25 bp, Homo sapiens
tccatccctgagttccttgacattc

SEQ ID NO: 14355 - DNA, 25 bp, Homo sapiens
tgtgccctaacctgacccatgagtg

SEQ ID NO: 14356 - DNA, 25 bp, Homo sapiens
ccacacggagtaggggaaagccatt

SEQ ID NO: 14357 - DNA, 25 bp, Homo sapiens
aggggcctgtcctccatgaccagga

SEQ ID NO: 14358 - DNA, 25 bp, Homo sapiens
ctgcccagagtaggagctgcttagc

SEQ ID NO: 14359 - DNA, 25 bp, Homo sapiens
accagggtccttcttggagacagca

SEQ ID NO: 14360 - DNA, 25 bp, Homo sapiens
tccagtccatgtcggtgcaagaata

SEQ ID NO: 14361 - DNA, 25 bp, Homo sapiens
gagacctttcctttctgggccctga

SEQ ID NO: 14362 - DNA, 25 bp, Homo sapiens
ccacgcggcctccagaggattttta

SEQ ID NO: 14363 - DNA, 25 bp, Homo sapiens
atggggtgacctctgacatctctca

SEQ ID NO: 14364 - DNA, 25 bp, Homo sapiens
cccagctctggaaggtaaatgcata

SEQ ID NO: 14365 - DNA, 25 bp, Homo sapiens
ttacccttggctgaactgactgtta

SEQ ID NO: 14366 - DNA, 25 bp, Homo sapiens
ggcggcttcatacctaggagcttaa

SEQ ID NO: 14367 - DNA, 25 bp, Homo sapiens
actgtgtctctgctggcccttgaaa

SEQ ID NO: 14368 - DNA, 25 bp, Homo sapiens
gacccagccgctatttgagaccacg

SEQ ID NO: 14369 - DNA, 25 bp, Homo sapiens
gtcaaggtcattcgtggtttccagc

SEQ ID NO: 14370 - DNA, 25 bp, Homo sapiens
accatcattttctctgtttccctga

SEQ ID NO: 14371 - DNA, 25 bp, Homo sapiens
tcctgaagatggtgcagagggcata

SEQ ID NO: 14372 - DNA, 25 bp, Homo sapiens
caaatgaccacagtgaagcttgact

SEQ ID NO: 14373 - DNA, 25 bp, Homo sapiens
aaggccctggggttcttccaactca

SEQ ID NO: 14374 - DNA, 25 bp, Homo sapiens
cggagccctcctgcttttatgcatt

SEQ ID NO: 14375 - DNA, 25 bp, Homo sapiens
ggttcccttgtcaggcatgcccttc

SEQ ID NO: 14376 - DNA, 25 bp, Homo sapiens
cattgctgccttgtgcgggtgcatg

SEQ ID NO: 14377 - DNA, 25 bp, Homo sapiens
ctatcatacagtggctcggttcttc

SEQ ID NO: 14378 - DNA, 25 bp, Homo sapiens
cctgcttctgaagggagctctcctg

SEQ ID NO: 14379 - DNA, 25 bp, Homo sapiens
gcccaggccaggaagtgtatttctc

SEQ ID NO: 14380 - DNA, 25 bp, Homo sapiens
gagtgccatcatcttctagggaaca

SEQ ID NO: 14381 - DNA, 25 bp, Homo sapiens
gggctttcccatggagagaactttc

SEQ ID NO: 14382 - DNA, 25 bp, Homo sapiens
tgtctgtgttggttccactgctcca

SEQ ID NO: 14383 - DNA, 25 bp, Homo sapiens
aaatgactgccctgccccatccctg

SEQ ID NO: 14384 - DNA, 25 bp, Homo sapiens
gggcctcactgatcacacaagggtt

SEQ ID NO: 14385 - DNA, 25 bp, Homo sapiens
tgccatggcatcctagagagaactt

SEQ ID NO: 14386 - DNA, 25 bp, Homo sapiens
ggcaccaaggcagttttgtctgtta

SEQ ID NO: 14387 - DNA, 25 bp, Homo sapiens
acagtgttttcacttcttctctgca

SEQ ID NO: 14388 - DNA, 25 bp, Homo sapiens
gcagctcttgttgcacgtggactta

SEQ ID NO: 14389 - DNA, 25 bp, Homo sapiens
ggcaagattcccatcagagcagttg

SEQ ID NO: 14390 - DNA, 25 bp, Homo sapiens
cttcctggaactgggctgacagcta

SEQ ID NO: 14391 - DNA, 25 bp, Homo sapiens
ttctccctaaggtcagagcagcagg

SEQ ID NO: 14392 - DNA, 25 bp, Homo sapiens
gagcagtttcctgatgcctccggta

SEQ ID NO: 14393 - DNA, 25 bp, Homo sapiens
ccctttgcccatgtcagagtctttg

SEQ ID NO: 14394 - DNA, 25 bp, Homo sapiens
ttagtgacttttgtttagtaatcaa

SEQ ID NO: 14395 - DNA, 25 bp, Homo sapiens
acatcctgagcactgtgtttggaca

SEQ ID NO: 14396 - DNA, 25 bp, Homo sapiens
ggcagtcttcctggctctacacaga

SEQ ID NO: 14397 - DNA, 25 bp, Homo sapiens
aagggcccttcttttaggtccaaga

SEQ ID NO: 14398 - DNA, 25 bp, Homo sapiens
aggttgctgggaatatcacacatca

SEQ ID NO: 14399 - DNA, 25 bp, Homo sapiens
tggcctgagcacagtgaaaacgttt

SEQ ID NO: 14400 - DNA, 25 bp, Homo sapiens
cggacctcgagtctgctccaattta

SEQ ID NO: 14401 - DNA, 25 bp, Homo sapiens
cagcccagtccagcagcagatgtta

SEQ ID NO: 14402 - DNA, 25 bp, Homo sapiens
caggcccactggaaaaatgaatcta

SEQ ID NO: 14403 - DNA, 25 bp, Homo sapiens
gtgctgttctcccatctcacgtatg

SEQ ID NO: 14404 - DNA, 25 bp, Homo sapiens
tctagcaatagcagggccatgtcca

SEQ ID NO: 14405 - DNA, 25 bp, Homo sapiens
tgccaatttcccgtcccttctgtag

SEQ ID NO: 14406 - DNA, 25 bp, Homo sapiens
tgccagttcatgcagtttcttcaga

SEQ ID NO: 14407 - DNA, 25 bp, Homo sapiens
aaggctgctactttcccatccctga

SEQ ID NO: 14408 - DNA, 25 bp, Homo sapiens
cagggaggctatctcattctggtta

SEQ ID NO: 14409 - DNA, 25 bp, Homo sapiens
tggacactgtgtttacctgatagtc

SEQ ID NO: 14410 - DNA, 25 bp, Homo sapiens
ccagccgacacaggaggaataatta

SEQ ID NO: 14411 - DNA, 25 bp, Homo sapiens
cctgtctagtggtgagcttctgttc

SEQ ID NO: 14412 - DNA, 25 bp, Homo sapiens
gagtagttcatccaggcccagcttg

SEQ ID NO: 14413 - DNA, 25 bp, Homo sapiens
tggctctcgctgacagagaaatttc

SEQ ID NO: 14414 - DNA, 25 bp, Homo sapiens
cctcaggttggccagcttctcaata

SEQ ID NO: 14415 - DNA, 25 bp, Homo sapiens
gggccacatcagaccacttctatga

SEQ ID NO: 14416 - DNA, 25 bp, Homo sapiens
tgtgcccagatgttctcagtgagta

SEQ ID NO: 14417 - DNA, 25 bp, Homo sapiens
gtcaacccttctgagctctgctgga

SEQ ID NO: 14418 - DNA, 25 bp, Homo sapiens
ggtggccacccatggagacagtagt

SEQ ID NO: 14419 - DNA, 25 bp, Homo sapiens
tgtcctgagcgcgtaccattaatta

SEQ ID NO: 14420 - DNA, 25 bp, Homo sapiens
cgtgtgcttccctctctctctgaga

SEQ ID NO: 14421 - DNA, 25 bp, Homo sapiens
tgggcgctccctgatttgtctttca

SEQ ID NO: 14422 - DNA, 25 bp, Homo sapiens
cgccgaagcccttctccagatggta

SEQ ID NO: 14423 - DNA, 25 bp, Homo sapiens
agtgggcgtctactcaatgtgtgtc

SEQ ID NO: 14424 - DNA, 25 bp, Homo sapiens
ctatccatgtctcagggcagggtca

SEQ ID NO: 14425 - DNA, 25 bp, Homo sapiens
tgatggtgtcttccacagagctaga

SEQ ID NO: 14426 - DNA, 25 bp, Homo sapiens
cctggtctgcttggtgaacttgaaa

SEQ ID NO: 14427 - DNA, 25 bp, Homo sapiens
gggctccacccgtgtgtctcaatga

SEQ ID NO: 14428 - DNA, 25 bp, Homo sapiens
aacgcagtccgagcacacatgtgta

SEQ ID NO: 14429 - DNA, 25 bp, Homo sapiens
ctgtggtggacgaaaactggactca

SEQ ID NO: 14430 - DNA, 25 bp, Homo sapiens
gggtgcctctcactttcccaaagtg

SEQ ID NO: 14431 - DNA, 25 bp, Homo sapiens
aatacacttttaaaaattgctgcat

SEQ ID NO: 14432 - DNA, 25 bp, Homo sapiens
ccacggtgcctggccttgtcataaa

SEQ ID NO: 14433 - DNA, 25 bp, Homo sapiens
taaaaaatctgagacaagcatttaa

SEQ ID NO: 14434 - DNA, 25 bp, Homo sapiens
caggtgctcagcttggaggtccaaa

SEQ ID NO: 14435 - DNA, 25 bp, Homo sapiens
cagaggccaccaggacatttgtttc

SEQ ID NO: 14436 - DNA, 25 bp, Homo sapiens
tggctgcccagagcatcttagatta

SEQ ID NO: 14437 - DNA, 25 bp, Homo sapiens
cttgagccacggtgcccagccaatt

SEQ ID NO: 14438 - DNA, 25 bp, Homo sapiens
gctggcctcactgacagtaactgta

SEQ ID NO: 14439 - DNA, 25 bp, Homo sapiens
ggtcagcttgactcagggtcccaga

SEQ ID NO: 14440 - DNA, 25 bp, Homo sapiens
cccatgtgcaggttccagaggtttc

SEQ ID NO: 14441 - DNA, 25 bp, Homo sapiens
caggcagctgcgttcaagtgcagta

SEQ ID NO: 14442 - DNA, 25 bp, Homo sapiens
cctggaccgtgtattggctgatgca

SEQ ID NO: 14443 - DNA, 25 bp, Homo sapiens
ccgagcatcttccagctttgggttt

SEQ ID NO: 14444 - DNA, 25 bp, Homo sapiens
cctccaggactgttcccagggcaaa

SEQ ID NO: 14445 - DNA, 25 bp, Homo sapiens
ggttgctcaagactctccctcctta

SEQ ID NO: 14446 - DNA, 25 bp, Homo sapiens
ttgagaaatgtccacctattattga

SEQ ID NO: 14447 - DNA, 25 bp, Homo sapiens
ggaccttacgatgttgcccagcctg

SEQ ID NO: 14448 - DNA, 25 bp, Homo sapiens
ggaaccctgggacttcatgcactga

SEQ ID NO: 14449 - DNA, 25 bp, Homo sapiens
cagggtctcctgtcatgatactaaa

SEQ ID NO: 14450 - DNA, 25 bp, Homo sapiens
cagacctggagactgtgttcaacca

SEQ ID NO: 14451 - DNA, 25 bp, Homo sapiens
ccctgagtgtggctggaaacatctt

SEQ ID NO: 14452 - DNA, 25 bp, Homo sapiens
ccttcagggatcagtggcatcattt

SEQ ID NO: 14453 - DNA, 25 bp, Homo sapiens
ggctgcccagatgcccagaaatgca

SEQ ID NO: 14454 - DNA, 25 bp, Homo sapiens
ccagtggtgtgaattaggccctaaa

SEQ ID NO: 14455 - DNA, 25 bp, Homo sapiens
gtgtggtactcacccactcatggta

SEQ ID NO: 14456 - DNA, 25 bp, Homo sapiens
ccagctgttgcgtgacttttcaaga

SEQ ID NO: 14457 - DNA, 25 bp, Homo sapiens
acgctggtgttcctcctagtcatta

SEQ ID NO: 14458 - DNA, 25 bp, Homo sapiens
tgttgctcaatctctggctcccttc

SEQ ID NO: 14459 - DNA, 25 bp, Homo sapiens
gggaatgtcacagccctgcagagta

SEQ ID NO: 14460 - DNA, 25 bp, Homo sapiens
agcctgagtgtctgtcttcaactta

SEQ ID NO: 14461 - DNA, 25 bp, Homo sapiens
acgcttagccggtctcccattgtta

SEQ ID NO: 14462 - DNA, 25 bp, Homo sapiens
gccacctcgttgattgcagcctctg

SEQ ID NO: 14463 - DNA, 25 bp, Homo sapiens
gcgcactccagttctcacatcttaa

SEQ ID NO: 14464 - DNA, 25 bp, Homo sapiens
ggctcagcttccaggtgcgtttctg

SEQ ID NO: 14465 - DNA, 25 bp, Homo sapiens
accttgcctcttctgttggaaaacg

SEQ ID NO: 14466 - DNA, 25 bp, Homo sapiens
ccttcactgttagtatagtggattc

SEQ ID NO: 14467 - DNA, 25 bp, Homo sapiens
ggaagccctttctcttgtcttttta

SEQ ID NO: 14468 - DNA, 25 bp, Homo sapiens
tcagagattaatagagggcacgccc

SEQ ID NO: 14469 - DNA, 25 bp, Homo sapiens
ggctgctctgtggaacacaactgta

SEQ ID NO: 14470 - DNA, 25 bp, Homo sapiens
tgtgtgccaacaagagcctgcttta

SEQ ID NO: 14471 - DNA, 25 bp, Homo sapiens
agctctcacttgacccagcatttgg

SEQ ID NO: 14472 - DNA, 25 bp, Homo sapiens
ggggaggctctataccaatttttta

SEQ ID NO: 14473 - DNA, 25 bp, Homo sapiens
acgacgtttgccctctgtggatttg

SEQ ID NO: 14474 - DNA, 25 bp, Homo sapiens
gtccctctggccatctattaataga

SEQ ID NO: 14475 - DNA, 25 bp, Homo sapiens
ctcttcagggaagccacaggactta

SEQ ID NO: 14476 - DNA, 25 bp, Homo sapiens
cacaaactgcgatgtggggcctctc

SEQ ID NO: 14477 - DNA, 25 bp, Homo sapiens
ggactccctgcacgctcattctgtg

SEQ ID NO: 14478 - DNA, 25 bp, Homo sapiens
cccactgtatggatggcctctgtca

SEQ ID NO: 14479 - DNA, 25 bp, Homo sapiens
ctccagacctgattcgaagctgttc

SEQ ID NO: 14480 - DNA, 25 bp, Homo sapiens
agccaggcgattgtcccacacttga

SEQ ID NO: 14481 - DNA, 25 bp, Homo sapiens
gcctgctagtagacaggaagaataa

SEQ ID NO: 14482 - DNA, 25 bp, Homo sapiens
tggagatgccaccacgcaggttact

SEQ ID NO: 14483 - DNA, 25 bp, Homo sapiens
gggcctccttctgaaaagttccgta

SEQ ID NO: 14484 - DNA, 25 bp, Homo sapiens
ccagacccattgttgaggcctagaa

SEQ ID NO: 14485 - DNA, 25 bp, Homo sapiens
gtctgaccgtgaagcatctggaata

SEQ ID NO: 14486 - DNA, 25 bp, Homo sapiens
cccagccttcctgatcaagggatag

SEQ ID NO: 14487 - DNA, 25 bp, Homo sapiens
gcacatcttgttccttctgaacata

SEQ ID NO: 14488 - DNA, 25 bp, Homo sapiens
atataaatccgcaagctctgagagc

SEQ ID NO: 14489 - DNA, 25 bp, Homo sapiens
ggcatttttgcctagccttatctga

SEQ ID NO: 14490 - DNA, 25 bp, Homo sapiens
ttgggattcacaacggcagcaccta

SEQ ID NO: 14491 - DNA, 25 bp, Homo sapiens
tgtgacccatagctgaggatcttta

SEQ ID NO: 14492 - DNA, 25 bp, Homo sapiens
gcagctgcacagagatcacctattc

SEQ ID NO: 14493 - DNA, 25 bp, Homo sapiens
ttggtggcaatacatggaagtctcc

SEQ ID NO: 14494 - DNA, 25 bp, Homo sapiens
atccctttaggtgtcagtgatctga

SEQ ID NO: 14495 - DNA, 25 bp, Homo sapiens
ggagatccgctttgttacgttgcta

SEQ ID NO: 14496 - DNA, 25 bp, Homo sapiens
atgtggcccatctaacccttgaaga

SEQ ID NO: 14497 - DNA, 25 bp, Homo sapiens
gggccaggagagcaccgaatttata

SEQ ID NO: 14498 - DNA, 25 bp, Homo sapiens
acctgagcttgagcgagatttcctc

SEQ ID NO: 14499 - DNA, 25 bp, Homo sapiens
tcccagggattaggaagctgcttta

SEQ ID NO: 14500 - DNA, 25 bp, Homo sapiens
tggggctacctccttcacacttaga

SEQ ID NO: 14501 - DNA, 25 bp, Homo sapiens
ggggacgctcacacaggacacatct

SEQ ID NO: 14502 - DNA, 25 bp, Homo sapiens
ctggggctcagccattaacatggta

SEQ ID NO: 14503 - DNA, 25 bp, Homo sapiens
tcccaggggccattagccaagtgct

SEQ ID NO: 14504 - DNA, 25 bp, Homo sapiens
aaggccttggtttcatcatcacaga

SEQ ID NO: 14505 - DNA, 25 bp, Homo sapiens
agagactttcctttgcctctgtaca

SEQ ID NO: 14506 - DNA, 25 bp, Homo sapiens
ggaggcagcctaccttccagcagta

SEQ ID NO: 14507 - DNA, 25 bp, Homo sapiens
gaggtcgcgctttaaacttccatga

SEQ ID NO: 14508 - DNA, 25 bp, Homo sapiens
ggacgcccgactagcactttggtta

SEQ ID NO: 14509 - DNA, 25 bp, Homo sapiens
cctgggtaaggagagcgcaaatctc

SEQ ID NO: 14510 - DNA, 25 bp, Homo sapiens
gcggcgtcggttttttggacacatc

SEQ ID NO: 14511 - DNA, 25 bp, Homo sapiens
ggcttactaactcaaggtgctctta

SEQ ID NO: 14512 - DNA, 25 bp, Homo sapiens
ggggatgcttttatagtcctacagc

SEQ ID NO: 14513 - DNA, 25 bp, Homo sapiens
caggacttgagttgcccttgaaaga

SEQ ID NO: 14514 - DNA, 25 bp, Homo sapiens
tgcctgctcctagtttacaaagtgg

SEQ ID NO: 14515 - DNA, 25 bp, Homo sapiens
gtggtcccttctggcgcaaatgttt

SEQ ID NO: 14516 - DNA, 25 bp, Homo sapiens
tctgccctctttgctgtctgaaatg

SEQ ID NO: 14517 - DNA, 25 bp, Homo sapiens
ggcacatcagcagttcccaggttgt

SEQ ID NO: 14518 - DNA, 25 bp, Homo sapiens
taccataaaatcagttcaggcaaat

SEQ ID NO: 14519 - DNA, 25 bp, Homo sapiens
ggtgaccacttacagaaacaggttc

SEQ ID NO: 14520 - DNA, 25 bp, Homo sapiens
ccatgtagattgctttaaataacta

SEQ ID NO: 14521 - DNA, 25 bp, Homo sapiens
gtgatgaaattttgtaattaaaaaa

SEQ ID NO: 14522 - DNA, 25 bp, Homo sapiens
gcagccattttcccgttttattaat

SEQ ID NO: 14523 - DNA, 25 bp, Homo sapiens
ttggcatgcagtgaaacctacagta

SEQ ID NO: 14524 - DNA, 25 bp, Homo sapiens
tggcctcccttttaagatgataagc

SEQ ID NO: 14525 - DNA, 25 bp, Homo sapiens
aggagatctctaccctgcaagcaga

SEQ ID NO: 14526 - DNA, 25 bp, Homo sapiens
gcgtgggtcactagcctggaaataa

SEQ ID NO: 14527 - DNA, 25 bp, Homo sapiens
ttcacctttattggcctggagctgc

SEQ ID NO: 14528 - DNA, 25 bp, Homo sapiens
gcttcccagttgacgttctccctta

SEQ ID NO: 14529 - DNA, 25 bp, Homo sapiens
cttccgttcattgctgtcagttcta

SEQ ID NO: 14530 - DNA, 25 bp, Homo sapiens
ggggacaacctcagcattaggactg

SEQ ID NO: 14531 - DNA, 25 bp, Homo sapiens
cccttctggcattagagacttttga

SEQ ID NO: 14532 - DNA, 25 bp, Homo sapiens
atgaaccttgaccttgcccagggtg

SEQ ID NO: 14533 - DNA, 25 bp, Homo sapiens
ggcccatgggaggtacaagttttga

SEQ ID NO: 14534 - DNA, 25 bp, Homo sapiens
tgcacctgtcccttctggtcttagg

SEQ ID NO: 14535 - DNA, 25 bp, Homo sapiens
ttggcccagtaggaagacgaattga

SEQ ID NO: 14536 - DNA, 25 bp, Homo sapiens
taatggttttaacatacagtattgt

SEQ ID NO: 14537 - DNA, 25 bp, Homo sapiens
tgtttgccagaataaaggaattgtg

SEQ ID NO: 14538 - DNA, 25 bp, Homo sapiens
gtgatgataatcacatctttctttc

SEQ ID NO: 14539 - DNA, 25 bp, Homo sapiens
ctacattattatatgaccttgtgca

SEQ ID NO: 14540 - DNA, 25 bp, Homo sapiens
tatttagcagacttttacactttta

SEQ ID NO: 14541 - DNA, 25 bp, Homo sapiens
gcagagccacatttttaccagtatg

SEQ ID NO: 14542 - DNA, 25 bp, Homo sapiens
aaaggctcttgggtctctggagaac

SEQ ID NO: 14543 - DNA, 25 bp, Homo sapiens
aactcatgggtagcatgttttgaca

SEQ ID NO: 14544 - DNA, 25 bp, Homo sapiens
atgaagtattgaggccagatggcat

SEQ ID NO: 14545 - DNA, 25 bp, Homo sapiens
cagcggctttagcttaccaatgctc

SEQ ID NO: 14546 - DNA, 25 bp, Homo sapiens
tcacgcctttttgatgctgaccata

SEQ ID NO: 14547 - DNA, 25 bp, Homo sapiens
gtctgggccaggagtcaaaacttcc

SEQ ID NO: 14548 - DNA, 25 bp, Homo sapiens
gctgctaaattgtccttcccaaatg

SEQ ID NO: 14549 - DNA, 25 bp, Homo sapiens
tgacactgctggactggaccctttt

SEQ ID NO: 14550 - DNA, 25 bp, Homo sapiens
tgcctggctgcagcactgttaattg

SEQ ID NO: 14551 - DNA, 25 bp, Homo sapiens
tgccattgctctcctcgcctgtatg

SEQ ID NO: 14552 - DNA, 25 bp, Homo sapiens
ccatagccagctttgaggttcagtg

SEQ ID NO: 14553 - DNA, 25 bp, Homo sapiens
agtgaccatgtgttactccatattc

SEQ ID NO: 14554 - DNA, 25 bp, Homo sapiens
gggtctatttacagctacaaagcta

SEQ ID NO: 14555 - DNA, 25 bp, Homo sapiens
tcaagagctattctcaaggaccagg

SEQ ID NO: 14556 - DNA, 25 bp, Homo sapiens
cgccaggaagcagagccactttatt

SEQ ID NO: 14557 - DNA, 25 bp, Homo sapiens
tacgaatgcctttttgggactggtg

SEQ ID NO: 14558 - DNA, 25 bp, Homo sapiens
tctgcaaggctctctccaattgggg

SEQ ID NO: 14559 - DNA, 25 bp, Homo sapiens
catttttgccttaagtctcctcttt

SEQ ID NO: 14560 - DNA, 25 bp, Homo sapiens
gaaccgtttgcctgctctctcgtga

SEQ ID NO: 14561 - DNA, 25 bp, Homo sapiens
cctcaggttgaggacagcattcaga

SEQ ID NO: 14562 - DNA, 25 bp, Homo sapiens
ctcggattgggttatctctcctata

SEQ ID NO: 14563 - DNA, 25 bp, Homo sapiens
gccatcttgtgggtggatctggaaa

SEQ ID NO: 14564 - DNA, 25 bp, Homo sapiens
acggccaggttattttagacttttc

SEQ ID NO: 14565 - DNA, 25 bp, Homo sapiens
gttcctaggacttaggctcttcgta

SEQ ID NO: 14566 - DNA, 25 bp, Homo sapiens
tgtttactctttgagggcccactgc

SEQ ID NO: 14567 - DNA, 25 bp, Homo sapiens
gcagtagcagcatccctccagttta

SEQ ID NO: 14568 - DNA, 25 bp, Homo sapiens
ataggatctcactgtgttgagctca

SEQ ID NO: 14569 - DNA, 25 bp, Homo sapiens
ctcctgtgctcgtacatggcttttt

SEQ ID NO: 14570 - DNA, 25 bp, Homo sapiens
atcttttaagactctcctgtggacc

SEQ ID NO: 14571 - DNA, 25 bp, Homo sapiens
ccatggttctgactgctggattgca

SEQ ID NO: 14572 - DNA, 25 bp, Homo sapiens
ctctgtcagagagaagatatctgta

SEQ ID NO: 14573 - DNA, 25 bp, Homo sapiens
tctgccagtgggtttcttagcaaaa

SEQ ID NO: 14574 - DNA, 25 bp, Homo sapiens
ctgtgcaggtaagcccaagactcgg

SEQ ID NO: 14575 - DNA, 25 bp, Homo sapiens
tggccagtcacccagcacattcatg

SEQ ID NO: 14576 - DNA, 25 bp, Homo sapiens
gtgcctctcctctatgaagtgccta

SEQ ID NO: 14577 - DNA, 25 bp, Homo sapiens
ctcctcaggtctgggcactgcattt

SEQ ID NO: 14578 - DNA, 25 bp, Homo sapiens
cccagcagagcagcaaggctttatg

SEQ ID NO: 14579 - DNA, 25 bp, Homo sapiens
ccagtgttgtgttgagaccattatc

SEQ ID NO: 14580 - DNA, 25 bp, Homo sapiens
tggggacttccctgagtacttaaca

SEQ ID NO: 14581 - DNA, 25 bp, Homo sapiens
gctagagctgcttttccattcctga

SEQ ID NO: 14582 - DNA, 25 bp, Homo sapiens
gagtctgctcgcttctcccagtgta

SEQ ID NO: 14583 - DNA, 25 bp, Homo sapiens
ggggtatcttcctagggccttctaa

SEQ ID NO: 14584 - DNA, 25 bp, Homo sapiens
tgcctgctaaggtcatctaaacata

SEQ ID NO: 14585 - DNA, 25 bp, Homo sapiens
ggcatagcaaattttatgaggaaca

SEQ ID NO: 14586 - DNA, 25 bp, Homo sapiens
gtgagctataaaccctgccatgtgc

SEQ ID NO: 14587 - DNA, 25 bp, Homo sapiens
cgtcccaggttggaagtcagaagtc

SEQ ID NO: 14588 - DNA, 25 bp, Homo sapiens
ggacctgctagcttcctcaattgga

SEQ ID NO: 14589 - DNA, 25 bp, Homo sapiens
tggcaggcatgtcacctctgtcaga

SEQ ID NO: 14590 - DNA, 25 bp, Homo sapiens
gccagtgcctctgctgtggaagata

SEQ ID NO: 14591 - DNA, 25 bp, Homo sapiens
ctggagtctgcctggatgtctaata

SEQ ID NO: 14592 - DNA, 25 bp, Homo sapiens
ttcctcctgtgtaccttagctgtca

SEQ ID NO: 14593 - DNA, 25 bp, Homo sapiens
caggggtgttactgctagattggta

SEQ ID NO: 14594 - DNA, 25 bp, Homo sapiens
agggcttctcacagatccatctccg

SEQ ID NO: 14595 - DNA, 25 bp, Homo sapiens
tctgaggccagagaatcttaaaatc

SEQ ID NO: 14596 - DNA, 25 bp, Homo sapiens
ttttcaataaacattgtcacttgta

SEQ ID NO: 14597 - DNA, 25 bp, Homo sapiens
gtctttcttacttctgggctctcca

SEQ ID NO: 14598 - DNA, 25 bp, Homo sapiens
gctcctgagctttttctggggaaaa

SEQ ID NO: 14599 - DNA, 25 bp, Homo sapiens
ccctgccaggggaatgacaaaagta

SEQ ID NO: 14600 - DNA, 25 bp, Homo sapiens
aacctgctggtctatgggcaacatg

SEQ ID NO: 14601 - DNA, 25 bp, Homo sapiens
ggtctggttcagcatcctactatca

SEQ ID NO: 14602 - DNA, 25 bp, Homo sapiens
cctctggtgactggaaaacttattg

SEQ ID NO: 14603 - DNA, 25 bp, Homo sapiens
tgacctaaggactcagctgggcttt

SEQ ID NO: 14604 - DNA, 25 bp, Homo sapiens
cctcttgtctgcagatggccactga

SEQ ID NO: 14605 - DNA, 25 bp, Homo sapiens
ttcacaggttctaagatgagggcca

SEQ ID NO: 14606 - DNA, 25 bp, Homo sapiens
ccagtgaccgtgagcagattgtttg

SEQ ID NO: 14607 - DNA, 25 bp, Homo sapiens
tccctggtttggagtcacctgtttc

SEQ ID NO: 14608 - DNA, 25 bp, Homo sapiens
ccagcattgccatggtcgagaggaa

SEQ ID NO: 14609 - DNA, 25 bp, Homo sapiens
ctcgtgtgtgacctgcagacatgca

SEQ ID NO: 14610 - DNA, 25 bp, Homo sapiens
gggagcatctcccaaactgcatttg

SEQ ID NO: 14611 - DNA, 25 bp, Homo sapiens
ggccctgagcctgactgtaagcata

SEQ ID NO: 14612 - DNA, 25 bp, Homo sapiens
actttgcaggtgttctcatgggcta

SEQ ID NO: 14613 - DNA, 25 bp, Homo sapiens
tcctcctggaaatgctgtcgtcctc

SEQ ID NO: 14614 - DNA, 25 bp, Homo sapiens
tgtccctgccctcaagtcattcatg

SEQ ID NO: 14615 - DNA, 25 bp, Homo sapiens
tgcccacagagaagaggatttagtt

SEQ ID NO: 14616 - DNA, 25 bp, Homo sapiens
gttgaacacatggagccctgccctg

SEQ ID NO: 14617 - DNA, 25 bp, Homo sapiens
aggtccctgcccagaacagtcttca

SEQ ID NO: 14618 - DNA, 25 bp, Homo sapiens
atctttatactttttttcttacctt

SEQ ID NO: 14619 - DNA, 25 bp, Homo sapiens
cctctgttttctctctggcctgtga

SEQ ID NO: 14620 - DNA, 25 bp, Homo sapiens
ccattgcctgggttctgctattctc

SEQ ID NO: 14621 - DNA, 25 bp, Homo sapiens
ggtgttgaccttgctcctgagttta

SEQ ID NO: 14622 - DNA, 25 bp, Homo sapiens
ttgtgcacaagcctggtacctggtc

SEQ ID NO: 14623 - DNA, 25 bp, Homo sapiens
gctgccctgcactctctgaaatttg

SEQ ID NO: 14624 - DNA, 25 bp, Homo sapiens
ttgtcccagtcacaggccacttttg

SEQ ID NO: 14625 - DNA, 25 bp, Homo sapiens
tctcaagagtctgtagggtatttcc

SEQ ID NO: 14626 - DNA, 25 bp, Homo sapiens
gactcctatctgttgagaacacctg

SEQ ID NO: 14627 - DNA, 25 bp, Homo sapiens
ttccctgatctctcatgctaagtta

SEQ ID NO: 14628 - DNA, 25 bp, Homo sapiens
ttgggcctcaagacacctccatgtg

SEQ ID NO: 14629 - DNA, 25 bp, Homo sapiens
gcacatatcatggtagcagcagcta

SEQ ID NO: 14630 - DNA, 25 bp, Homo sapiens
ggctcctgccctgccattctggata

SEQ ID NO: 14631 - DNA, 25 bp, Homo sapiens
gggaatctgccctatcacaggactg

SEQ ID NO: 14632 - DNA, 25 bp, Homo sapiens
gggctgcacgcatttcggaagaata

SEQ ID NO: 14633 - DNA, 25 bp, Homo sapiens
ttttcttccttttttatggtaaaat

SEQ ID NO: 14634 - DNA, 25 bp, Homo sapiens
ccggtgctcaggctttgattttaaa

SEQ ID NO: 14635 - DNA, 25 bp, Homo sapiens
ggttcgcctgcttctctcaagtaga

SEQ ID NO: 14636 - DNA, 25 bp, Homo sapiens
ggttgcacatccacaggggcttcta

SEQ ID NO: 14637 - DNA, 25 bp, Homo sapiens
tggggtctcctgatcacattttctg

SEQ ID NO: 14638 - DNA, 25 bp, Homo sapiens
gcccaaaggtgctgctggtttaatg

SEQ ID NO: 14639 - DNA, 25 bp, Homo sapiens
tgcaatcgctcacttgggaacacta

SEQ ID NO: 14640 - DNA, 25 bp, Homo sapiens
cactgcctggtacctctgaatggga

SEQ ID NO: 14641 - DNA, 25 bp, Homo sapiens
tcacaggaaagcaaagaagaaataa

SEQ ID NO: 14642 - DNA, 25 bp, Homo sapiens
atactgcctagcttcctggtgaaca

SEQ ID NO: 14643 - DNA, 25 bp, Homo sapiens
ttttaaaggcagctagggccaaggc

SEQ ID NO: 14644 - DNA, 25 bp, Homo sapiens
cccacaagccatgtatcatttttac

SEQ ID NO: 14645 - DNA, 25 bp, Homo sapiens
caggctagggcttgcttgggagggg

SEQ ID NO: 14646 - DNA, 25 bp, Homo sapiens
cagagcctgctggaactggactcta

SEQ ID NO: 14647 - DNA, 25 bp, Homo sapiens
caggccctgcaatgaggtattttca

SEQ ID NO: 14648 - DNA, 25 bp, Homo sapiens
gctagtcacatccttccttcaaatg

SEQ ID NO: 14649 - DNA, 25 bp, Homo sapiens
aaaatttgattttactgtagtcttc

SEQ ID NO: 14650 - DNA, 25 bp, Homo sapiens
tcgctggggttcctcatgagtctag

SEQ ID NO: 14651 - DNA, 25 bp, Homo sapiens
gtacctaattcaaaagacacagagg

SEQ ID NO: 14652 - DNA, 25 bp, Homo sapiens
cagagggatatacaatgaaaagtgt

SEQ ID NO: 14653 - DNA, 25 bp, Homo sapiens
caccatggtagttggaacactattc

SEQ ID NO: 14654 - DNA, 25 bp, Homo sapiens
tgaaccttatgatttttaatgccgt

SEQ ID NO: 14655 - DNA, 25 bp, Homo sapiens
cccaggagtgagttaaattgcaaga

SEQ ID NO: 14656 - DNA, 25 bp, Homo sapiens
cacttacattggaggcagagggatc

SEQ ID NO: 14657 - DNA, 25 bp, Homo sapiens
ttcctggctggtcttctggctgaaa

SEQ ID NO: 14658 - DNA, 25 bp, Homo sapiens
ggtgtgctccttcatattcccatag

SEQ ID NO: 14659 - DNA, 25 bp, Homo sapiens
tcggtttgtctcgtctctgcacagg

SEQ ID NO: 14660 - DNA, 25 bp, Homo sapiens
tctcctgagtatgaggcctcgtttc

SEQ ID NO: 14661 - DNA, 25 bp, Homo sapiens
agagcccttggccatgcatcagaga

SEQ ID NO: 14662 - DNA, 25 bp, Homo sapiens
ttcatactctcaggaggggtctcta

SEQ ID NO: 14663 - DNA, 25 bp, Homo sapiens
agtgattctgtctaccctgcattgc

SEQ ID NO: 14664 - DNA, 25 bp, Homo sapiens
gtggccttgtttttagcatggggct

SEQ ID NO: 14665 - DNA, 25 bp, Homo sapiens
ggcccacagtttcttccaggttata

SEQ ID NO: 14666 - DNA, 25 bp, Homo sapiens
tgccgctgctcctttgctccaatag

SEQ ID NO: 14667 - DNA, 25 bp, Homo sapiens
cgatatggcagaaattcaaactatt

SEQ ID NO: 14668 - DNA, 25 bp, Homo sapiens
accacacacttagggaggattaatc

SEQ ID NO: 14669 - DNA, 25 bp, Homo sapiens
ttgccttgccgagctctaccagaga

SEQ ID NO: 14670 - DNA, 25 bp, Homo sapiens
taccatgtgccgttccttaaagatg

SEQ ID NO: 14671 - DNA, 25 bp, Homo sapiens
gggacagaacacctttagtgggcta

SEQ ID NO: 14672 - DNA, 25 bp, Homo sapiens
actgtgctcaatgtggtctgtaaga

SEQ ID NO: 14673 - DNA, 25 bp, Homo sapiens
aatttttaacacttaaacttggtat

SEQ ID NO: 14674 - DNA, 25 bp, Homo sapiens
gtacagttccagatctcagaaggtg

SEQ ID NO: 14675 - DNA, 25 bp, Homo sapiens
tagggcaggcttgttttatccatgc

SEQ ID NO: 14676 - DNA, 25 bp, Homo sapiens
aggtgccagcttcaggtatttcttc

SEQ ID NO: 14677 - DNA, 25 bp, Homo sapiens
tgcaggaacttcgtaccagatcagc

SEQ ID NO: 14678 - DNA, 25 bp, Homo sapiens
ccttccagcttgagatgacacagta

SEQ ID NO: 14679 - DNA, 25 bp, Homo sapiens
gccaggcctttattctcactagatt

SEQ ID NO: 14680 - DNA, 25 bp, Homo sapiens
tctgcccatatgtggtggcttcttc

SEQ ID NO: 14681 - DNA, 25 bp, Homo sapiens
agcagccttcccagccagtgaaaga

SEQ ID NO: 14682 - DNA, 25 bp, Homo sapiens
gctggctttgccacgtacttcttga

SEQ ID NO: 14683 - DNA, 25 bp, Homo sapiens
gaagccattctgtgtcagctgtgga

SEQ ID NO: 14684 - DNA, 25 bp, Homo sapiens
gattcaagaaacgaggagggggaag

SEQ ID NO: 14685 - DNA, 25 bp, Homo sapiens
tcctctttactaatcattttaagct

SEQ ID NO: 14686 - DNA, 25 bp, Homo sapiens
acttcgcttctcttgaccttcatga

SEQ ID NO: 14687 - DNA, 25 bp, Homo sapiens
tgagagccctttaccagcactggtg

SEQ ID NO: 14688 - DNA, 25 bp, Homo sapiens
gcacttggtaattccacaactcaga

SEQ ID NO: 14689 - DNA, 25 bp, Homo sapiens
ggactcctacaactggtcatccatg

SEQ ID NO: 14690 - DNA, 25 bp, Homo sapiens
gtccaaagtattcggtctcccaaga

SEQ ID NO: 14691 - DNA, 25 bp, Homo sapiens
ctccacccagaggtcagagtgatct

SEQ ID NO: 14692 - DNA, 25 bp, Homo sapiens
tcctggaggctgctttaggcaaaga

SEQ ID NO: 14693 - DNA, 25 bp, Homo sapiens
agccgcctgggtttttgccaaactg

SEQ ID NO: 14694 - DNA, 25 bp, Homo sapiens
gaagtcttctctgtctcaccctggg

SEQ ID NO: 14695 - DNA, 25 bp, Homo sapiens
cgctgctcttactatgtgggatctc

SEQ ID NO: 14696 - DNA, 25 bp, Homo sapiens
ctttcagtcgcgctttctccaggag

SEQ ID NO: 14697 - DNA, 25 bp, Homo sapiens
ggttaccaccgaccctttcgtgatg

SEQ ID NO: 14698 - DNA, 25 bp, Homo sapiens
ccagagcttgaatccgggcctcata

SEQ ID NO: 14699 - DNA, 25 bp, Homo sapiens
gctgctggcccaccttgtcaaaata

SEQ ID NO: 14700 - DNA, 25 bp, Homo sapiens
cataggctttctctctgctcaggga

SEQ ID NO: 14701 - DNA, 25 bp, Homo sapiens
ggaccctggatcctcctggacatca

SEQ ID NO: 14702 - DNA, 25 bp, Homo sapiens
tcttcctctggaatgccgcgatctc

SEQ ID NO: 14703 - DNA, 25 bp, Homo sapiens
ggcactcaacaagggcaggcagata

SEQ ID NO: 14704 - DNA, 25 bp, Homo sapiens
ctcttggacatttgaactgagaaaa

SEQ ID NO: 14705 - DNA, 25 bp, Homo sapiens
acgctgcagggtaggtttctttaga

SEQ ID NO: 14706 - DNA, 25 bp, Homo sapiens
cctgggaggtttcccagcccttgga

SEQ ID NO: 14707 - DNA, 25 bp, Homo sapiens
atgtctggttgaaaatatttatgat

SEQ ID NO: 14708 - DNA, 25 bp, Homo sapiens
agctcctccttcatgcggatgttga

SEQ ID NO: 14709 - DNA, 25 bp, Homo sapiens
ctgccatttgtcacctgctagggga

SEQ ID NO: 14710 - DNA, 25 bp, Homo sapiens
cggtcgctctgcaagacatggtcca

SEQ ID NO: 14711 - DNA, 25 bp, Homo sapiens
tggacacccggcctcttcttgttta

SEQ ID NO: 14712 - DNA, 25 bp, Homo sapiens
cgcccagcgagtctttgaggatcct

SEQ ID NO: 14713 - DNA, 25 bp, Homo sapiens
aggagttgccattcccagacaggta

SEQ ID NO: 14714 - DNA, 25 bp, Homo sapiens
gctgcctcaagggaaagaaatggta

SEQ ID NO: 14715 - DNA, 25 bp, Homo sapiens
tggctgtatcccttctgctgttgca

SEQ ID NO: 14716 - DNA, 25 bp, Homo sapiens
tgaggcttcctccagtctccattca

SEQ ID NO: 14717 - DNA, 25 bp, Homo sapiens
agggtccctgcttgatccttctagg

SEQ ID NO: 14718 - DNA, 25 bp, Homo sapiens
ttggtgggccacttcattacaatac

SEQ ID NO: 14719 - DNA, 25 bp, Homo sapiens
gtatgccctggtaagcttagtaata

SEQ ID NO: 14720 - DNA, 25 bp, Homo sapiens
tgccaggtcctgctttaaatttgaa

SEQ ID NO: 14721 - DNA, 25 bp, Homo sapiens
accttcctgcctgaatagtctttga

SEQ ID NO: 14722 - DNA, 25 bp, Homo sapiens
acaatggccactttactgtcagagg

SEQ ID NO: 14723 - DNA, 25 bp, Homo sapiens
cttcaattgagggaggccagcagta

SEQ ID NO: 14724 - DNA, 25 bp, Homo sapiens
agggccttgtgcatcttatttcttc

SEQ ID NO: 14725 - DNA, 25 bp, Homo sapiens
tgtctaccgggagctttggcttata

SEQ ID NO: 14726 - DNA, 25 bp, Homo sapiens
cccacctgtgagattcatgtttata

SEQ ID NO: 14727 - DNA, 25 bp, Homo sapiens
tgctccattgggttgacttaacatg

SEQ ID NO: 14728 - DNA, 25 bp, Homo sapiens
tccactttctatagaaggacagggt

SEQ ID NO: 14729 - DNA, 25 bp, Homo sapiens
atctgtctgccaagtgcatccctgg

SEQ ID NO: 14730 - DNA, 25 bp, Homo sapiens
agcctgctctttctatccgctggga

SEQ ID NO: 14731 - DNA, 25 bp, Homo sapiens
tgttgaagaataaacaatggttcat

SEQ ID NO: 14732 - DNA, 25 bp, Homo sapiens
tgtcctggcccaagatgaagaagcc

SEQ ID NO: 14733 - DNA, 25 bp, Homo sapiens
ggcttggaaacccaggctacttgtc

SEQ ID NO: 14734 - DNA, 25 bp, Homo sapiens
gacgaatcttttctgggcaaaaaca

SEQ ID NO: 14735 - DNA, 25 bp, Homo sapiens
tacagcatcatgagtctccaagcta

SEQ ID NO: 14736 - DNA, 25 bp, Homo sapiens
gtggctcacaggactgacatggttt

SEQ ID NO: 14737 - DNA, 25 bp, Homo sapiens
tccacgtggagagaaggtgcaccta

SEQ ID NO: 14738 - DNA, 25 bp, Homo sapiens
gggctacctgttgtgcctacaatca

SEQ ID NO: 14739 - DNA, 25 bp, Homo sapiens
gccatggctgttctgctgactgaca

SEQ ID NO: 14740 - DNA, 25 bp, Homo sapiens
caggagtcctgtggcaaattatttt

SEQ ID NO: 14741 - DNA, 25 bp, Homo sapiens
tgggttcccaaccaactagcccagg

SEQ ID NO: 14742 - DNA, 25 bp, Homo sapiens
gcttccctgggaaaaggactcttcc

SEQ ID NO: 14743 - DNA, 25 bp, Homo sapiens
ggccacggctctatcttcatattta

SEQ ID NO: 14744 - DNA, 25 bp, Homo sapiens
tggcacagtgtctccagccttgttt

SEQ ID NO: 14745 - DNA, 25 bp, Homo sapiens
tgcggtatcgtacccagagcagtta

SEQ ID NO: 14746 - DNA, 25 bp, Homo sapiens
accctgtcttctgggagttgaatca

SEQ ID NO: 14747 - DNA, 25 bp, Homo sapiens
ctaaggggatactgcctgactgggc

SEQ ID NO: 14748 - DNA, 25 bp, Homo sapiens
ctgattcctctggtgcggcataatt

SEQ ID NO: 14749 - DNA, 25 bp, Homo sapiens
agggctgggtgcatgttgtaaaaca

SEQ ID NO: 14750 - DNA, 25 bp, Homo sapiens
ctcactattacctttctggggctta

SEQ ID NO: 14751 - DNA, 25 bp, Homo sapiens
gcctgtgtgggtccagtatcttaga

SEQ ID NO: 14752 - DNA, 25 bp, Homo sapiens
tcaggagtccctacaaaagcaatca

SEQ ID NO: 14753 - DNA, 25 bp, Homo sapiens
ttggcatcgcataaaaacagggttc

SEQ ID NO: 14754 - DNA, 25 bp, Homo sapiens
cttgttccacagttgcccgtattta

SEQ ID NO: 14755 - DNA, 25 bp, Homo sapiens
tttaatgatatattttattgtttgg

SEQ ID NO: 14756 - DNA, 25 bp, Homo sapiens
tggcctgtcctgagcatcatattga

SEQ ID NO: 14757 - DNA, 25 bp, Homo sapiens
ctgagctcagtcaagcgacgtaatc

SEQ ID NO: 14758 - DNA, 25 bp, Homo sapiens
tttcctggagcagagcacctcactg

SEQ ID NO: 14759 - DNA, 25 bp, Homo sapiens
aaggctgcctttgctgtgttaatca

SEQ ID NO: 14760 - DNA, 25 bp, Homo sapiens
tggcccgaggtcataacacttgaga

SEQ ID NO: 14761 - DNA, 25 bp, Homo sapiens
ccatgaggccagttctctagaatta

SEQ ID NO: 14762 - DNA, 25 bp, Homo sapiens
ccctgtggatttggcagtgataatc

SEQ ID NO: 14763 - DNA, 25 bp, Homo sapiens
tggtgccatcatcggggagaaaatc

SEQ ID NO: 14764 - DNA, 25 bp, Homo sapiens
ctttagggcaggtcattatttcgtc

SEQ ID NO: 14765 - DNA, 25 bp, Homo sapiens
gtcccgatttcctaggcctgttttg

SEQ ID NO: 14766 - DNA, 25 bp, Homo sapiens
tgcgccctctgaagagttaaatctc

SEQ ID NO: 14767 - DNA, 25 bp, Homo sapiens
acctgagttgggacatctaatgaca

SEQ ID NO: 14768 - DNA, 25 bp, Homo sapiens
gaatcccagtccttgcatagctcta

SEQ ID NO: 14769 - DNA, 25 bp, Homo sapiens
gaatcactggctctatacccaaatg

SEQ ID NO: 14770 - DNA, 25 bp, Homo sapiens
gaactacagctaggaggttccttgc

SEQ ID NO: 14771 - DNA, 25 bp, Homo sapiens
tctgaacatttttggggtacttttc

SEQ ID NO: 14772 - DNA, 25 bp, Homo sapiens
tccgtccaccttgcaagttttcatg

SEQ ID NO: 14773 - DNA, 25 bp, Homo sapiens
ggccacatttcaggtctcccagtta

SEQ ID NO: 14774 - DNA, 25 bp, Homo sapiens
ggataggcccactttgagttcttta

SEQ ID NO: 14775 - DNA, 25 bp, Homo sapiens
tcctgagcccgtagcaaacattatg

SEQ ID NO: 14776 - DNA, 25 bp, Homo sapiens
ggtcaggcctggcagctccaaattc

SEQ ID NO: 14777 - DNA, 25 bp, Homo sapiens
aaagaaaacacaaatatttatgtac

SEQ ID NO: 14778 - DNA, 25 bp, Homo sapiens
tacaccctagggaatggctgccact

SEQ ID NO: 14779 - DNA, 25 bp, Homo sapiens
ggctggaggaccctgaatacataca

SEQ ID NO: 14780 - DNA, 25 bp, Homo sapiens
tcaaaaataaatatttgtggagcaa

SEQ ID NO: 14781 - DNA, 25 bp, Homo sapiens
gtgtgtgcaaatataaccgctggta

SEQ ID NO: 14782 - DNA, 25 bp, Homo sapiens
tggcagtttcaccttgcaccaagtg

SEQ ID NO: 14783 - DNA, 25 bp, Homo sapiens
ctccacctaggtttgggaagaagca

SEQ ID NO: 14784 - DNA, 25 bp, Homo sapiens
tcccagggcctctttgatgtgtttg

SEQ ID NO: 14785 - DNA, 25 bp, Homo sapiens
ccctgatggctgtggaagtgaattc

SEQ ID NO: 14786 - DNA, 25 bp, Homo sapiens
ccctaagtagcaggttttcccagta

SEQ ID NO: 14787 - DNA, 25 bp, Homo sapiens
cctgggttttttgtttccgatttca

SEQ ID NO: 14788 - DNA, 25 bp, Homo sapiens
tgaccatcttgaactcgttgacaga

SEQ ID NO: 14789 - DNA, 25 bp, Homo sapiens
tccatggtcatacctggggctgttc

SEQ ID NO: 14790 - DNA, 25 bp, Homo sapiens
ttggattttagatgataatagatag

SEQ ID NO: 14791 - DNA, 25 bp, Homo sapiens
gccttctgagccatgggaatgtata

SEQ ID NO: 14792 - DNA, 25 bp, Homo sapiens
ggaagccattgccaccacctgatga

SEQ ID NO: 14793 - DNA, 25 bp, Homo sapiens
catagcacctgctgtgtgttagaca

SEQ ID NO: 14794 - DNA, 25 bp, Homo sapiens
tgtgttcagttaaagcccagcgttc

SEQ ID NO: 14795 - DNA, 25 bp, Homo sapiens
taatacctgtatatcgaaaaccttc

SEQ ID NO: 14796 - DNA, 25 bp, Homo sapiens
aaatcttttaatttttgtcacacat

SEQ ID NO: 14797 - DNA, 25 bp, Homo sapiens
tgtgctagacatatcatagaatcat

SEQ ID NO: 14798 - DNA, 25 bp, Homo sapiens
agccctggcagctctcttcaatttc

SEQ ID NO: 14799 - DNA, 25 bp, Homo sapiens
caatttatcaaaaacttgagaattt

SEQ ID NO: 14800 - DNA, 25 bp, Homo sapiens
gtgtgcttgcactaagtccaacatg

SEQ ID NO: 14801 - DNA, 25 bp, Homo sapiens
tcctcctgggatgggtctatgacta

SEQ ID NO: 14802 - DNA, 25 bp, Homo sapiens
catgagggcccagacagtacacagc

SEQ ID NO: 14803 - DNA, 25 bp, Homo sapiens
gtttctgaccttctgtgagcacttc

SEQ ID NO: 14804 - DNA, 25 bp, Homo sapiens
aaaaaattttcccagctttactgac

SEQ ID NO: 14805 - DNA, 25 bp, Homo sapiens
gtccagccataaaactttaagttaa

SEQ ID NO: 14806 - DNA, 25 bp, Homo sapiens
tgtggcacgtgaacttctccctgtc

SEQ ID NO: 14807 - DNA, 25 bp, Homo sapiens
cgtgtagcatgatatccaggacata

SEQ ID NO: 14808 - DNA, 25 bp, Homo sapiens
gctgggcctgctattgactcttaaa

SEQ ID NO: 14809 - DNA, 25 bp, Homo sapiens
atcaggcattcaagcagcagtttta

SEQ ID NO: 14810 - DNA, 25 bp, Homo sapiens
gctttccttgtggtgtagttcaata

SEQ ID NO: 14811 - DNA, 25 bp, Homo sapiens
cagtggccatcctgacctgtgctga

SEQ ID NO: 14812 - DNA, 25 bp, Homo sapiens
gtagatggctcagcagctccacgtc

SEQ ID NO: 14813 - DNA, 25 bp, Homo sapiens
gggccctttgcctgattttatgtca

SEQ ID NO: 14814 - DNA, 25 bp, Homo sapiens
aattttatatgttttaaagaagaga

SEQ ID NO: 14815 - DNA, 25 bp, Homo sapiens
gcctgtgggctgtaaaatccgctct

SEQ ID NO: 14816 - DNA, 25 bp, Homo sapiens
ccttccttgtggtgtgagtctaatc

SEQ ID NO: 14817 - DNA, 25 bp, Homo sapiens
gcacgggtatacagcacaggcatga

SEQ ID NO: 14818 - DNA, 25 bp, Homo sapiens
gagcccagcccatgttcctgctttg

SEQ ID NO: 14819 - DNA, 25 bp, Homo sapiens
ggtagcctcaaccatgctggaaatg

SEQ ID NO: 14820 - DNA, 25 bp, Homo sapiens
aagtatgcactgtcgggctccacca

SEQ ID NO: 14821 - DNA, 25 bp, Homo sapiens
ggctctacgaagatccctggctgga

SEQ ID NO: 14822 - DNA, 25 bp, Homo sapiens
ggtgaccttgagtccgtaaaactga

SEQ ID NO: 14823 - DNA, 25 bp, Homo sapiens
tgctcggtcctggagaatctaggcc

SEQ ID NO: 14824 - DNA, 25 bp, Homo sapiens
tgctgtcaatgcgaacgtcccagtg

SEQ ID NO: 14825 - DNA, 25 bp, Homo sapiens
tgcggcgtcgaggatgatttccaca

SEQ ID NO: 14826 - DNA, 25 bp, Homo sapiens
cccacgcttgagtttctgccactga

SEQ ID NO: 14827 - DNA, 25 bp, Homo sapiens
gggacccttgttggctcttgcacca

SEQ ID NO: 14828 - DNA, 25 bp, Homo sapiens
cggcacccttgcagcctgttgactt

SEQ ID NO: 14829 - DNA, 25 bp, Homo sapiens
agcccaactgcctggtcatcgatga

SEQ ID NO: 14830 - DNA, 25 bp, Homo sapiens
ctggccgccctctgtgagaaaactg

SEQ ID NO: 14831 - DNA, 25 bp, Homo sapiens
aacacgggtccatctagcttcagca

SEQ ID NO: 14832 - DNA, 25 bp, Homo sapiens
cgcctgcagggcttgtttgacaact

SEQ ID NO: 14833 - DNA, 25 bp, Homo sapiens
gggtcacttccagctacttgagatt

SEQ ID NO: 14834 - DNA, 25 bp, Homo sapiens
agggttctacccaggcctcagtttc

SEQ ID NO: 14835 - DNA, 25 bp, Homo sapiens
ggccgggcacagtcttacaagatgt

SEQ ID NO: 14836 - DNA, 25 bp, Homo sapiens
ccgcctcctgcactgggactaatta

SEQ ID NO: 14837 - DNA, 25 bp, Homo sapiens
tgcaggccttttctcggagacccta

SEQ ID NO: 14838 - DNA, 25 bp, Homo sapiens
gagtgccgtgcttttcagtctgatc

SEQ ID NO: 14839 - DNA, 25 bp, Homo sapiens
gcatctgctcatctggaaggaccta

SEQ ID NO: 14840 - DNA, 25 bp, Homo sapiens
ggccaggggctcctttctgaaatta

SEQ ID NO: 14841 - DNA, 25 bp, Homo sapiens
cgcccgtctcctgaaaagctaggta

SEQ ID NO: 14842 - DNA, 25 bp, Homo sapiens
tggccaagctccgtctcgggaaata

SEQ ID NO: 14843 - DNA, 25 bp, Homo sapiens
cagcctcggtatctgcagatgcaca

SEQ ID NO: 14844 - DNA, 25 bp, Homo sapiens
aagggtcctccctatagcctctgga

SEQ ID NO: 14845 - DNA, 25 bp, Homo sapiens
cccgctgtctttttggtccatttca

SEQ ID NO: 14846 - DNA, 25 bp, Homo sapiens
gtgtcgcatcagtaggcattctcca

SEQ ID NO: 14847 - DNA, 25 bp, Homo sapiens
ggacagtgtctgatttgccctcttt

SEQ ID NO: 14848 - DNA, 25 bp, Homo sapiens
gcagagcctttcatgatgtcccaga

SEQ ID NO: 14849 - DNA, 25 bp, Homo sapiens
ctggggtatgcaaagcgcttagtca

SEQ ID NO: 14850 - DNA, 25 bp, Homo sapiens
gctgtgtttacagttcccaaggaga

SEQ ID NO: 14851 - DNA, 25 bp, Homo sapiens
tcggccatcatgtgcgaatgttttg

SEQ ID NO: 14852 - DNA, 25 bp, Homo sapiens
agatgcctgttgtggggtctttacc

SEQ ID NO: 14853 - DNA, 25 bp, Homo sapiens
cgtgaaccaggatcgacgcagttta

SEQ ID NO: 14854 - DNA, 25 bp, Homo sapiens
ctccaggcagtctcacgggaatgca

SEQ ID NO: 14855 - DNA, 25 bp, Homo sapiens
gcagccgaggtttcctatagcatta

SEQ ID NO: 14856 - DNA, 25 bp, Homo sapiens
tggctgtaccacgtccagtttgctg

SEQ ID NO: 14857 - DNA, 25 bp, Homo sapiens
tgggacctgaggctgctacaaattc

SEQ ID NO: 14858 - DNA, 25 bp, Homo sapiens
cccaggcagacacagtggcttttca

SEQ ID NO: 14859 - DNA, 25 bp, Homo sapiens
gggacaagctctgcctgttcttcca

SEQ ID NO: 14860 - DNA, 25 bp, Homo sapiens
ggggttgtacccacactttcatgta

SEQ ID NO: 14861 - DNA, 25 bp, Homo sapiens
gtcgtctgatccaagaaggtcctta

SEQ ID NO: 14862 - DNA, 25 bp, Homo sapiens
attggtgccgattccattcgcgtca

SEQ ID NO: 14863 - DNA, 25 bp, Homo sapiens
actgctgctttttaacccggccgga

SEQ ID NO: 14864 - DNA, 25 bp, Homo sapiens
ctcaggccaggtgtgaagacttctc

SEQ ID NO: 14865 - DNA, 25 bp, Homo sapiens
tggggacctgaaccaacagtttgtt

SEQ ID NO: 14866 - DNA, 25 bp, Homo sapiens
ccggagtctctacgaggtgctctca

SEQ ID NO: 14867 - DNA, 25 bp, Homo sapiens
gccggcgtctccttctgtcatgaaa

SEQ ID NO: 14868 - DNA, 25 bp, Homo sapiens
tgggtcaggctccagaagaaatatc

SEQ ID NO: 14869 - DNA, 25 bp, Homo sapiens
ggcctcagctccttccctggtgaga

SEQ ID NO: 14870 - DNA, 25 bp, Homo sapiens
gggtcgggctgaacattactcccta

SEQ ID NO: 14871 - DNA, 25 bp, Homo sapiens
cctcctggcagctgtgtgacttgaa

SEQ ID NO: 14872 - DNA, 25 bp, Homo sapiens
gccctgtggtctccgattcctatta

SEQ ID NO: 14873 - DNA, 25 bp, Homo sapiens
ttcacagggctctgcaccaacaggc

SEQ ID NO: 14874 - DNA, 25 bp, Homo sapiens
gggagttgtttgtgcttttgacttt

SEQ ID NO: 14875 - DNA, 25 bp, Homo sapiens
aagcagggcatgttcaccgtcacca

SEQ ID NO: 14876 - DNA, 25 bp, Homo sapiens
agaggccggaccttcctccgaaaga

SEQ ID NO: 14877 - DNA, 25 bp, Homo sapiens
aaccttcagctttggggcctgaccc

SEQ ID NO: 14878 - DNA, 25 bp, Homo sapiens
ctggctgatgatgccgcgtatcttt

SEQ ID NO: 14879 - DNA, 25 bp, Homo sapiens
cggggtcgaccatcagcagaaacaa

SEQ ID NO: 14880 - DNA, 25 bp, Homo sapiens
tggcgctgacacgtttctgtgctca

SEQ ID NO: 14881 - DNA, 25 bp, Homo sapiens
tctgaggacgatggctccaagatga

SEQ ID NO: 14882 - DNA, 25 bp, Homo sapiens
atgtcccgtgtctgtaatgcgtccc

SEQ ID NO: 14883 - DNA, 25 bp, Homo sapiens
gctgacggaagctttcgccaacttg

SEQ ID NO: 14884 - DNA, 25 bp, Homo sapiens
gcccagggtctcaggacgcttaaga

SEQ ID NO: 14885 - DNA, 25 bp, Homo sapiens
tctcccgggtctacatgcagatgtg

SEQ ID NO: 14886 - DNA, 25 bp, Homo sapiens
ctcgggttgttctcatcggaaggta

SEQ ID NO: 14887 - DNA, 25 bp, Homo sapiens
ggagctttcttttctgccactgtgg

SEQ ID NO: 14888 - DNA, 25 bp, Homo sapiens
gtgggaccctccgtcacacagaaca

SEQ ID NO: 14889 - DNA, 25 bp, Homo sapiens
tcctcggcctgaaccaccgtgttgt

SEQ ID NO: 14890 - DNA, 25 bp, Homo sapiens
tggccattgtctcaactcctgtggg

SEQ ID NO: 14891 - DNA, 25 bp, Homo sapiens
cagtcggcaccctcagcagtgaaca

SEQ ID NO: 14892 - DNA, 25 bp, Homo sapiens
cttgggttctctccctgcctatgga

SEQ ID NO: 14893 - DNA, 25 bp, Homo sapiens
tgtacgcccacccagttctgcaagg

SEQ ID NO: 14894 - DNA, 25 bp, Homo sapiens
catcttcattcatctggttgggaca

SEQ ID NO: 14895 - DNA, 25 bp, Homo sapiens
ctgatgtcatcacgtgctgtcccta

SEQ ID NO: 14896 - DNA, 25 bp, Homo sapiens
tcctaggagtgaacaacgatctgac

SEQ ID NO: 14897 - DNA, 25 bp, Homo sapiens
agggtctacgttctctttgtcagca

SEQ ID NO: 14898 - DNA, 25 bp, Homo sapiens
ggtcggattccagatgccttttcag

SEQ ID NO: 14899 - DNA, 25 bp, Homo sapiens
tgtgttggaagacaggtagcacttc

SEQ ID NO: 14900 - DNA, 25 bp, Homo sapiens
gtggagccaaactgcccaggattta

SEQ ID NO: 14901 - DNA, 25 bp, Homo sapiens
gtaaataagaccatagattaagaga

SEQ ID NO: 14902 - DNA, 25 bp, Homo sapiens
gcgccctgccaagctagaaatcctg

SEQ ID NO: 14903 - DNA, 25 bp, Homo sapiens
gcccgtggtggtggttcaacatcac

SEQ ID NO: 14904 - DNA, 25 bp, Homo sapiens
ggtcacctgccaagacgctaactga

SEQ ID NO: 14905 - DNA, 25 bp, Homo sapiens
tccgttttgaagcagggtgtcccta

SEQ ID NO: 14906 - DNA, 25 bp, Homo sapiens
tgggctgcaccagccataactgacc

SEQ ID NO: 14907 - DNA, 25 bp, Homo sapiens
tcagttcgtggataaggacagcctc

SEQ ID NO: 14908 - DNA, 25 bp, Homo sapiens
gtgggtccaccctaaacaatagttt

SEQ ID NO: 14909 - DNA, 25 bp, Homo sapiens
tgactcctcgtagcacctgtaagcg

SEQ ID NO: 14910 - DNA, 25 bp, Homo sapiens
ccctacagaagaggtatattaagaa

SEQ ID NO: 14911 - DNA, 25 bp, Homo sapiens
taggtatttctaaaacactccaaca

SEQ ID NO: 14912 - DNA, 25 bp, Homo sapiens
ggattacaaggcagaaaccagagtc

SEQ ID NO: 14913 - DNA, 25 bp, Homo sapiens
tagattgcccagagtcctacttgcc

SEQ ID NO: 14914 - DNA, 25 bp, Homo sapiens
ctcccctagagtgtcaggtgcttga

SEQ ID NO: 14915 - DNA, 25 bp, Homo sapiens
cctcagtattgtctatcctgaagta

SEQ ID NO: 14916 - DNA, 25 bp, Homo sapiens
agttgttcatcagcctcccttttca

SEQ ID NO: 14917 - DNA, 25 bp, Homo sapiens
tgttttccactgattgcccacggta

SEQ ID NO: 14918 - DNA, 25 bp, Homo sapiens
gagcaagagattgtctcaaaagaaa

SEQ ID NO: 14919 - DNA, 25 bp, Homo sapiens
ggctggtgttggtcccagtctttta

SEQ ID NO: 14920 - DNA, 25 bp, Homo sapiens
tatgttcatgctgcggggtctggtg

SEQ ID NO: 14921 - DNA, 25 bp, Homo sapiens
tctggtgctctagagatttctccca

SEQ ID NO: 14922 - DNA, 25 bp, Homo sapiens
tggtgtgcacatcagccaaggcttc

SEQ ID NO: 14923 - DNA, 25 bp, Homo sapiens
ttgtgtggcctaggaacattctctg

SEQ ID NO: 14924 - DNA, 25 bp, Homo sapiens
gtcagtgggccagtaatcaatagtc

SEQ ID NO: 14925 - DNA, 25 bp, Homo sapiens
tctcaagtggctccaaagagtactg

SEQ ID NO: 14926 - DNA, 25 bp, Homo sapiens
ggcctttgccagcagacgacttatg

SEQ ID NO: 14927 - DNA, 25 bp, Homo sapiens
gcattctaggtgttcggggctatta

SEQ ID NO: 14928 - DNA, 25 bp, Homo sapiens
tcgctcctgtgtattgccatcaaac

SEQ ID NO: 14929 - DNA, 25 bp, Homo sapiens
ggcggtccgtcttagttttctgcaa

SEQ ID NO: 14930 - DNA, 25 bp, Homo sapiens
cacctcgatgttgttgactgggcta

SEQ ID NO: 14931 - DNA, 25 bp, Homo sapiens
gctgccaggggaccattctttttga

SEQ ID NO: 14932 - DNA, 25 bp, Homo sapiens
gcccagccgtgatgactagtttcca

SEQ ID NO: 14933 - DNA, 25 bp, Homo sapiens
ggcatccgggcagcattttccttta

SEQ ID NO: 14934 - DNA, 25 bp, Homo sapiens
agcagctttccatcgcggttctaga

SEQ ID NO: 14935 - DNA, 25 bp, Homo sapiens
tccgtgtcacttgggcattagaatg

SEQ ID NO: 14936 - DNA, 25 bp, Homo sapiens
ggggcggtgcaaatcctcaaaaact

SEQ ID NO: 14937 - DNA, 25 bp, Homo sapiens
agagaggctcctagatctttgtttc

SEQ ID NO: 14938 - DNA, 25 bp, Homo sapiens
ggcgctgaccttttggccacaaaga

SEQ ID NO: 14939 - DNA, 25 bp, Homo sapiens
cactgtcgttactggcgtttgatgc

SEQ ID NO: 14940 - DNA, 25 bp, Homo sapiens
ctcgcgtttcctccatcatcagtga

SEQ ID NO: 14941 - DNA, 25 bp, Homo sapiens
gctcctactggccaaacttctattc

SEQ ID NO: 14942 - DNA, 25 bp, Homo sapiens
aactccacagccttgccagtgctgg

SEQ ID NO: 14943 - DNA, 25 bp, Homo sapiens
ggtacctggccacctgcacagtaga

SEQ ID NO: 14944 - DNA, 25 bp, Homo sapiens
ggtcctttgctttgctcctttcaga

SEQ ID NO: 14945 - DNA, 25 bp, Homo sapiens
gcccagctccatggggttggatttt

SEQ ID NO: 14946 - DNA, 25 bp, Homo sapiens
ctcctggaggagacaaggcctcttt

SEQ ID NO: 14947 - DNA, 25 bp, Homo sapiens
ctctgttaataggtgtcccggggca

SEQ ID NO: 14948 - DNA, 25 bp, Homo sapiens
gcttggttcacagctcccaggaaga

SEQ ID NO: 14949 - DNA, 25 bp, Homo sapiens
gccatgtgccatgcccttagcagta

SEQ ID NO: 14950 - DNA, 25 bp, Homo sapiens
ctcctaccttttccatgctaagggg

SEQ ID NO: 14951 - DNA, 25 bp, Homo sapiens
gtggccattacttttgctctgagaa

SEQ ID NO: 14952 - DNA, 25 bp, Homo sapiens
ccagcatatcatttacgggtagttc

SEQ ID NO: 14953 - DNA, 25 bp, Homo sapiens
atgccctggttgatgaagccataga

SEQ ID NO: 14954 - DNA, 25 bp, Homo sapiens
ccctggcagagaaagcgaagatttg

SEQ ID NO: 14955 - DNA, 25 bp, Homo sapiens
ctcccatgataacggatgtctgctg

SEQ ID NO: 14956 - DNA, 25 bp, Homo sapiens
gtagcctgcagtctcctttgggatg

SEQ ID NO: 14957 - DNA, 25 bp, Homo sapiens
atggtgaccctgcatgaaccttgta

SEQ ID NO: 14958 - DNA, 25 bp, Homo sapiens
cagctggttctcctggtctcatcta

SEQ ID NO: 14959 - DNA, 25 bp, Homo sapiens
ttcacagggttcacagggtttcaca

SEQ ID NO: 14960 - DNA, 25 bp, Homo sapiens
gtgcacagtgccctcctaatcatga

SEQ ID NO: 14961 - DNA, 25 bp, Homo sapiens
ggagactgttcctcacccagccttg

SEQ ID NO: 14962 - DNA, 25 bp, Homo sapiens
tgtgggctaaagtcattcaatgttg

SEQ ID NO: 14963 - DNA, 25 bp, Homo sapiens
tccacggggcttgtcctataacagc

SEQ ID NO: 14964 - DNA, 25 bp, Homo sapiens
aatggccctacctttcactggcagg

SEQ ID NO: 14965 - DNA, 25 bp, Homo sapiens
agagacagccatgaagataactagc

SEQ ID NO: 14966 - DNA, 25 bp, Homo sapiens
tttcaggataggtgtatgagtgaca

SEQ ID NO: 14967 - DNA, 25 bp, Homo sapiens
tctgcaccaggaagggataattatc

SEQ ID NO: 14968 - DNA, 25 bp, Homo sapiens
cagggtccctgagcacaaggttgca

SEQ ID NO: 14969 - DNA, 25 bp, Homo sapiens
agtccgtaaattcccagcagtaaca

SEQ ID NO: 14970 - DNA, 25 bp, Homo sapiens
tgcactaggaactgccctgggaatc

SEQ ID NO: 14971 - DNA, 25 bp, Homo sapiens
cactcctgctacttactgtgtgaga

SEQ ID NO: 14972 - DNA, 25 bp, Homo sapiens
gccctgaagggagggaatccaattt

SEQ ID NO: 14973 - DNA, 25 bp, Homo sapiens
gctgccatggccacgactgatgtta

SEQ ID NO: 14974 - DNA, 25 bp, Homo sapiens
aggtccctcaggcaatcataccaga

SEQ ID NO: 14975 - DNA, 25 bp, Homo sapiens
acgctcggcaggtgtcttgatatta

SEQ ID NO: 14976 - DNA, 25 bp, Homo sapiens
acgctcggcaggtgtcttgatatta

SEQ ID NO: 14977 - DNA, 25 bp, Homo sapiens
ctggtggcccatcctgttttttaaa

SEQ ID NO: 14978 - DNA, 25 bp, Homo sapiens
acgtgtaatcataggactcggcagc

SEQ ID NO: 14979 - DNA, 25 bp, Homo sapiens
ctgcctgctgacttctgagatgata

SEQ ID NO: 14980 - DNA, 25 bp, Homo sapiens
tccaccctggtgttgactgacttta

SEQ ID NO: 14981 - DNA, 25 bp, Homo sapiens
ggaaaaccaatgccagtactagcaa

SEQ ID NO: 14982 - DNA, 25 bp, Homo sapiens
aggctctctgctgtacatccgtgga

SEQ ID NO: 14983 - DNA, 25 bp, Homo sapiens
ctgctccttcctgatctgcactgga

SEQ ID NO: 14984 - DNA, 25 bp, Homo sapiens
ggcacccatgatgtccctgctaagg

SEQ ID NO: 14985 - DNA, 25 bp, Homo sapiens
tgatctctctccagttccaagtcgg

SEQ ID NO: 14986 - DNA, 25 bp, Homo sapiens
cccacgatgatgatggtcagccaga

SEQ ID NO: 14987 - DNA, 25 bp, Homo sapiens
tatcacatggtaaaagaatccctct

SEQ ID NO: 14988 - DNA, 25 bp, Homo sapiens
cagagatagcccttcaacaggttga

SEQ ID NO: 14989 - DNA, 25 bp, Homo sapiens
tttcatgccacgtgatacagcccag

SEQ ID NO: 14990 - DNA, 25 bp, Homo sapiens
gtagccatccgtccatcaacctgta

SEQ ID NO: 14991 - DNA, 25 bp, Homo sapiens
ggcctctggcagctgaaaaccactg

SEQ ID NO: 14992 - DNA, 25 bp, Homo sapiens
gagtcaccgtgatcatagcccaagc

SEQ ID NO: 14993 - DNA, 25 bp, Homo sapiens
ctctcacctgtgcaatctgaaagga

SEQ ID NO: 14994 - DNA, 25 bp, Homo sapiens
tccacactctgtgatgcagactagc

SEQ ID NO: 14995 - DNA, 25 bp, Homo sapiens
ttggactttttgtagactgcacaga

SEQ ID NO: 14996 - DNA, 25 bp, Homo sapiens
ctcaggtactcgcatgggcatgtca

SEQ ID NO: 14997 - DNA, 25 bp, Homo sapiens
gtgacccatgccctcaagtttcttg

SEQ ID NO: 14998 - DNA, 25 bp, Homo sapiens
tctggtgagtaaagatgccattctc

SEQ ID NO: 14999 - DNA, 25 bp, Homo sapiens
tttttattatcaaaaaagagtagtg

SEQ ID NO: 15000 - DNA, 25 bp, Homo sapiens
caccagagttctgttgtctccaatg

SEQ ID NO: 15001 - DNA, 25 bp, Homo sapiens
gaagcatttgcccagtttacttgta

SEQ ID NO: 15002 - DNA, 25 bp, Homo sapiens
caatatattctggaggcagctttca

SEQ ID NO: 15003 - DNA, 25 bp, Homo sapiens
agggcagcctttaaggacctgtata

SEQ ID NO: 15004 - DNA, 25 bp, Homo sapiens
ctgcacgggctttctttcagctgga

SEQ ID NO: 15005 - DNA, 25 bp, Homo sapiens
ccactgtgctaggtgcaagactata

SEQ ID NO: 15006 - DNA, 25 bp, Homo sapiens
ggcacatggctgctacagtcctcta

SEQ ID NO: 15007 - DNA, 25 bp, Homo sapiens
tttctcagttgtgcgagcagcatta

SEQ ID NO: 15008 - DNA, 25 bp, Homo sapiens
aaaagaaacaattgctggctttgca

SEQ ID NO: 15009 - DNA, 25 bp, Homo sapiens
tatgtggtgatcgctcagggcccat

SEQ ID NO: 15010 - DNA, 25 bp, Homo sapiens
cgtatctccagaaagtataggcaca

SEQ ID NO: 15011 - DNA, 25 bp, Homo sapiens
tgacatttgcacttgagactccaga

SEQ ID NO: 15012 - DNA, 25 bp, Homo sapiens
acacttctcattctttaaaccagac

SEQ ID NO: 15013 - DNA, 25 bp, Homo sapiens
tcgccgtgtttgatgtcagttttcc

SEQ ID NO: 15014 - DNA, 25 bp, Homo sapiens
ccacagcattctggcaacttttcta

SEQ ID NO: 15015 - DNA, 25 bp, Homo sapiens
acggcctcacgtcatgctgtttaca

SEQ ID NO: 15016 - DNA, 25 bp, Homo sapiens
cgatgcgggatgtttgcttcaagta

SEQ ID NO: 15017 - DNA, 25 bp, Homo sapiens
aggggacaaatctagacctgcatta

SEQ ID NO: 15018 - DNA, 25 bp, Homo sapiens
gtcctggcttctttcactgctggca

SEQ ID NO: 15019 - DNA, 25 bp, Homo sapiens
aaggctgactactcccatctggatg

SEQ ID NO: 15020 - DNA, 25 bp, Homo sapiens
ttcccagccaagtgtctgcaacaga

SEQ ID NO: 15021 - DNA, 25 bp, Homo sapiens
cctggtactccacagaggccttttc

SEQ ID NO: 15022 - DNA, 25 bp, Homo sapiens
agcctgttgagccactgagttaatc

SEQ ID NO: 15023 - DNA, 25 bp, Homo sapiens
gtcgaatccgcgttagccagtcctg

SEQ ID NO: 15024 - DNA, 25 bp, Homo sapiens
ggtcacgcttatccagtctctggca

SEQ ID NO: 15025 - DNA, 25 bp, Homo sapiens
aggtgatctgtcttctcctaaagta

SEQ ID NO: 15026 - DNA, 25 bp, Homo sapiens
ggtgcatatgtttcggacttcttca

SEQ ID NO: 15027 - DNA, 25 bp, Homo sapiens
gaagctgctctacctcacctctata

SEQ ID NO: 15028 - DNA, 25 bp, Homo sapiens
ctcctcgtctatcgctacagtaaga

SEQ ID NO: 15029 - DNA, 25 bp, Homo sapiens
ggcaaggtgccctgttcaataagga

SEQ ID NO: 15030 - DNA, 25 bp, Homo sapiens
gagcagggccatgtcgaattactta

SEQ ID NO: 15031 - DNA, 25 bp, Homo sapiens
tgttcctagggaaaaacagacagcc

SEQ ID NO: 15032 - DNA, 25 bp, Homo sapiens
ccaggaaagtctgtggtggatttga

SEQ ID NO: 15033 - DNA, 25 bp, Homo sapiens
tggcagaaatgctcagcagaatgtc

SEQ ID NO: 15034 - DNA, 25 bp, Homo sapiens
ctggtgcgtagagcaatgtttcctc

SEQ ID NO: 15035 - DNA, 25 bp, Homo sapiens
aaacacctggtttgcagccgtcaca

SEQ ID NO: 15036 - DNA, 25 bp, Homo sapiens
caggattttatttagtctacccata

SEQ ID NO: 15037 - DNA, 25 bp, Homo sapiens
tgacggtatcacacatgcttctttc

SEQ ID NO: 15038 - DNA, 25 bp, Homo sapiens
ggaagcttttgccactcctgaatta

SEQ ID NO: 15039 - DNA, 25 bp, Homo sapiens
aggcttgtcctccaaagtacgattc

SEQ ID NO: 15040 - DNA, 25 bp, Homo sapiens
cagggccacatctaaccattaaagg

SEQ ID NO: 15041 - DNA, 25 bp, Homo sapiens
gaggcactgttttccatctgattcc

SEQ ID NO: 15042 - DNA, 25 bp, Homo sapiens
catgcaggctcaggttaccattata

SEQ ID NO: 15043 - DNA, 25 bp, Homo sapiens
gcccaagctggtggcattctgttca

SEQ ID NO: 15044 - DNA, 25 bp, Homo sapiens
tgaagcactcttctatccggcatta

SEQ ID NO: 15045 - DNA, 25 bp, Homo sapiens
gcattgccctcaagtatctgtctga

SEQ ID NO: 15046 - DNA, 25 bp, Homo sapiens
gccagtgggtttgtcttcttgtgta

SEQ ID NO: 15047 - DNA, 25 bp, Homo sapiens
gccaatcttcggtctcggtcgtttt

SEQ ID NO: 15048 - DNA, 25 bp, Homo sapiens
ttggggagccataatcacacattta

SEQ ID NO: 15049 - DNA, 25 bp, Homo sapiens
ccgtagcccatagagtatttcaata

SEQ ID NO: 15050 - DNA, 25 bp, Homo sapiens
ccacaggcccaagagttcaaggact

SEQ ID NO: 15051 - DNA, 25 bp, Homo sapiens
tgccgagacaccacagctgaatttg

SEQ ID NO: 15052 - DNA, 25 bp, Homo sapiens
ccctccctctatggtgtaaaagtga

SEQ ID NO: 15053 - DNA, 25 bp, Homo sapiens
ttccaactaggaagcatctgatttc

SEQ ID NO: 15054 - DNA, 25 bp, Homo sapiens
tgtagccttgcagtccattcttgta

SEQ ID NO: 15055 - DNA, 25 bp, Homo sapiens
tttgggaggctcagggaatttatta

SEQ ID NO: 15056 - DNA, 25 bp, Homo sapiens
gtcaccaatttttaactgtctgtca

SEQ ID NO: 15057 - DNA, 25 bp, Homo sapiens
aaaccattaaatatactgtagctca

SEQ ID NO: 15058 - DNA, 25 bp, Homo sapiens
cctgcatctgcacatacagcttttc

SEQ ID NO: 15059 - DNA, 25 bp, Homo sapiens
aataagcaccacactcccaggtcct

SEQ ID NO: 15060 - DNA, 25 bp, Homo sapiens
ggtgggctgaatgaaactccttttt

SEQ ID NO: 15061 - DNA, 25 bp, Homo sapiens
tggagtggctctctgcctttatttc

SEQ ID NO: 15062 - DNA, 25 bp, Homo sapiens
ggggaaggttcaacttaaagataca

SEQ ID NO: 15063 - DNA, 25 bp, Homo sapiens
tgtggaacagaactggcaatcgcta

SEQ ID NO: 15064 - DNA, 25 bp, Homo sapiens
tacgcttgaggaacccacagatttc

SEQ ID NO: 15065 - DNA, 25 bp, Homo sapiens
acgggtttgctctcttgccatatga

SEQ ID NO: 15066 - DNA, 25 bp, Homo sapiens
cgtggctgcgactcttctctattta

SEQ ID NO: 15067 - DNA, 25 bp, Homo sapiens
ccggccttgcacttagggaaaactt

SEQ ID NO: 15068 - DNA, 25 bp, Homo sapiens
ttccagctccgcgaatagttggtgc

SEQ ID NO: 15069 - DNA, 25 bp, Homo sapiens
gcccatcgagtcctagcacctttta

SEQ ID NO: 15070 - DNA, 25 bp, Homo sapiens
ggtgggccaggatgctccttaaaca

SEQ ID NO: 15071 - DNA, 25 bp, Homo sapiens
tgcttgagcaactggacacaatctc

SEQ ID NO: 15072 - DNA, 25 bp, Homo sapiens
tgaggctctaggcaccacatttgcc

SEQ ID NO: 15073 - DNA, 25 bp, Homo sapiens
tggcaaacctgacacccagccttgg

SEQ ID NO: 15074 - DNA, 25 bp, Homo sapiens
ccctgggctccagaaaatgaatgtc

SEQ ID NO: 15075 - DNA, 25 bp, Homo sapiens
ggcagcttctcatgtggtcaggttc

SEQ ID NO: 15076 - DNA, 25 bp, Homo sapiens
ctgcacaagtgctacaggggctcct

SEQ ID NO: 15077 - DNA, 25 bp, Homo sapiens
agcagctcacacatatagtgtctca

SEQ ID NO: 15078 - DNA, 25 bp, Homo sapiens
ggctggtacacattcctgggcaaga

SEQ ID NO: 15079 - DNA, 25 bp, Homo sapiens
tggcaccttcacacacggaggcctg

SEQ ID NO: 15080 - DNA, 25 bp, Homo sapiens
gaggccaacccatttcacacgatta

SEQ ID NO: 15081 - DNA, 25 bp, Homo sapiens
tctgcgacagcactcctttcaaggg

SEQ ID NO: 15082 - DNA, 25 bp, Homo sapiens
tgaggctttacctactgggaccaaa

SEQ ID NO: 15083 - DNA, 25 bp, Homo sapiens
aatgtgtcacccaggcaggagctta

SEQ ID NO: 15084 - DNA, 25 bp, Homo sapiens
tgccctcggggcattctcacattta

SEQ ID NO: 15085 - DNA, 25 bp, Homo sapiens
ctggcacttgcctgaaccgcttaag

SEQ ID NO: 15086 - DNA, 25 bp, Homo sapiens
cgtcacgaagatgcccgagctcatg

SEQ ID NO: 15087 - DNA, 25 bp, Homo sapiens
ccggtgcccgtagctttgagaagca

SEQ ID NO: 15088 - DNA, 25 bp, Homo sapiens
gcggaggtcgcacagatactaactt

SEQ ID NO: 15089 - DNA, 25 bp, Homo sapiens
tgacatggaagcaacagtaggagcc

SEQ ID NO: 15090 - DNA, 25 bp, Homo sapiens
gcctctgcagtatgagccaaacctg

SEQ ID NO: 15091 - DNA, 25 bp, Homo sapiens
atacgcctggctttgtgagaatgca

SEQ ID NO: 15092 - DNA, 25 bp, Homo sapiens
atggacagcccacctttcagcagga

SEQ ID NO: 15093 - DNA, 25 bp, Homo sapiens
gcccggcattgtaggataagttttc

SEQ ID NO: 15094 - DNA, 25 bp, Homo sapiens
aacgtgcccatttcccagcttggtg

SEQ ID NO: 15095 - DNA, 25 bp, Homo sapiens
tcaccttgggaaacagattagcatc

SEQ ID NO: 15096 - DNA, 25 bp, Homo sapiens
ggtgcaaccattgctataagcttga

SEQ ID NO: 15097 - DNA, 25 bp, Homo sapiens
ctggcacaagtggtagctctctttc

SEQ ID NO: 15098 - DNA, 25 bp, Homo sapiens
cgacagatgaattgatcgatcaatc

SEQ ID NO: 15099 - DNA, 25 bp, Homo sapiens
tgggcgatagttgttcaccatcatc

SEQ ID NO: 15100 - DNA, 25 bp, Homo sapiens
tttcactcaaggaactaaaagacta

SEQ ID NO: 15101 - DNA, 25 bp, Homo sapiens
cctgctgcgactgctgagaaacgtc

SEQ ID NO: 15102 - DNA, 25 bp, Homo sapiens
cgttgctcagaacatgctcgctgtg

SEQ ID NO: 15103 - DNA, 25 bp, Homo sapiens
gcataccttggctgcaaaaaatatt

SEQ ID NO: 15104 - DNA, 25 bp, Homo sapiens
tctgtccctggaaactgtgcctgcc

SEQ ID NO: 15105 - DNA, 25 bp, Homo sapiens
cgccggcagacacatgcatcagttc

SEQ ID NO: 15106 - DNA, 25 bp, Homo sapiens
cgtcagtctgtgcacatgggtaaca

SEQ ID NO: 15107 - DNA, 25 bp, Homo sapiens
cggatggcccagctacctgtggaaa

SEQ ID NO: 15108 - DNA, 25 bp, Homo sapiens
cctgtgtttccctctaagctgctga

SEQ ID NO: 15109 - DNA, 25 bp, Homo sapiens
tttcgtttcgtgacaggcagcagca

SEQ ID NO: 15110 - DNA, 25 bp, Homo sapiens
tccctgacccgtgaagcatagactc

SEQ ID NO: 15111 - DNA, 25 bp, Homo sapiens
gagctctcagaaccgtggccttgtg

SEQ ID NO: 15112 - DNA, 25 bp, Homo sapiens
tgtggacacacgagcatcaaccctg

SEQ ID NO: 15113 - DNA, 25 bp, Homo sapiens
ggctgacctatgtgtccacttaatc

SEQ ID NO: 15114 - DNA, 25 bp, Homo sapiens
cacctctgggtgtgcgattacaagc

SEQ ID NO: 15115 - DNA, 25 bp, Homo sapiens
cgtccagatatgtgccgttaggcca

SEQ ID NO: 15116 - DNA, 25 bp, Homo sapiens
cacagggccagcttttattggaaca

SEQ ID NO: 15117 - DNA, 25 bp, Homo sapiens
ggtctggagcaacctcggagtcata

SEQ ID NO: 15118 - DNA, 25 bp, Homo sapiens
cccagcctggtagatgtcatttgta

SEQ ID NO: 15119 - DNA, 25 bp, Homo sapiens
ctaactctggggctagaagactttc

SEQ ID NO: 15120 - DNA, 25 bp, Homo sapiens
ttccaaaattagacctgcgccgcga

SEQ ID NO: 15121 - DNA, 25 bp, Homo sapiens
gtccaggccctcagcttttgtagta

SEQ ID NO: 15122 - DNA, 25 bp, Homo sapiens
gcgcgtgccagactctccaaacata

SEQ ID NO: 15123 - DNA, 25 bp, Homo sapiens
gctatcatcactggcatcgtcatca

SEQ ID NO: 15124 - DNA, 25 bp, Homo sapiens
gggtatgattcttcccactgacatt

SEQ ID NO: 15125 - DNA, 25 bp, Homo sapiens
gaactggctcctgcttgtttaatga

SEQ ID NO: 15126 - DNA, 25 bp, Homo sapiens
tggtgagacatgacttcccgctttc

SEQ ID NO: 15127 - DNA, 25 bp, Homo sapiens
aggcgatcccttccagttgagagtg

SEQ ID NO: 15128 - DNA, 25 bp, Homo sapiens
ttagtagcaatgagggaaatgttcc

SEQ ID NO: 15129 - DNA, 25 bp, Homo sapiens
tggccttgtccattctgagctcctg

SEQ ID NO: 15130 - DNA, 25 bp, Homo sapiens
cctgcgggtggatactttcttcttt

SEQ ID NO: 15131 - DNA, 25 bp, Homo sapiens
atcatggcatctctcctagcttggg

SEQ ID NO: 15132 - DNA, 25 bp, Homo sapiens
cctttccctagagtggtcagagaca

SEQ ID NO: 15133 - DNA, 25 bp, Homo sapiens
ccctggcctctgtggtcatctcaga

SEQ ID NO: 15134 - DNA, 25 bp, Homo sapiens
gccggaggttttgcacatgattcta

SEQ ID NO: 15135 - DNA, 25 bp, Homo sapiens
gggtgactcagctatccataatttg

SEQ ID NO: 15136 - DNA, 25 bp, Homo sapiens
aaggcctgtccgttggctatttcca

SEQ ID NO: 15137 - DNA, 25 bp, Homo sapiens
aaacctcatgttgcttctctgacca

SEQ ID NO: 15138 - DNA, 25 bp, Homo sapiens
gatcagatttgggaaattcaagacc

SEQ ID NO: 15139 - DNA, 25 bp, Homo sapiens
cttagccaagagtgatcatcagctc

SEQ ID NO: 15140 - DNA, 25 bp, Homo sapiens
cagatattaataacctttaagagca

SEQ ID NO: 15141 - DNA, 25 bp, Homo sapiens
tgaatctcaacccataccttgcacc

SEQ ID NO: 15142 - DNA, 25 bp, Homo sapiens
ctaactaactaacaaaaacaaatgg

SEQ ID NO: 15143 - DNA, 25 bp, Homo sapiens
gacgtttaagtactttttaattata

SEQ ID NO: 15144 - DNA, 25 bp, Homo sapiens
acaaaagtaaataaacactaggagg

SEQ ID NO: 15145 - DNA, 25 bp, Homo sapiens
tgtggcccagatctagaatgtcatg

SEQ ID NO: 15146 - DNA, 25 bp, Homo sapiens
gggcttcctgcctcttgatataaat

SEQ ID NO: 15147 - DNA, 25 bp, Homo sapiens
ctccaatgttgatggtaaagataga

SEQ ID NO: 15148 - DNA, 25 bp, Homo sapiens
tgacagtgcatgatctcaagttttc

SEQ ID NO: 15149 - DNA, 25 bp, Homo sapiens
atgttgtcctgaaaagatgggcttc

SEQ ID NO: 15150 - DNA, 25 bp, Homo sapiens
gcgggagtcttacaatgccacagtt

SEQ ID NO: 15151 - DNA, 25 bp, Homo sapiens
gctctgactcatagacctgttattg

SEQ ID NO: 15152 - DNA, 25 bp, Homo sapiens
ctgatgccatcaggaagcaacctta

SEQ ID NO: 15153 - DNA, 25 bp, Homo sapiens
atcatggcatctctcctagcttggg

SEQ ID NO: 15154 - DNA, 25 bp, Homo sapiens
cctttccctagagtggtcagagaca

SEQ ID NO: 15155 - DNA, 25 bp, Homo sapiens
ccctggcctctgtggtcatctcaga

SEQ ID NO: 15156 - DNA, 25 bp, Homo sapiens
gccggaggttttgcacatgattcta

SEQ ID NO: 15157 - DNA, 25 bp, Homo sapiens
gggtgactcagctatccataatttg

SEQ ID NO: 15158 - DNA, 25 bp, Homo sapiens
aaggcctgtccgttggctatttcca

SEQ ID NO: 15159 - DNA, 25 bp, Homo sapiens
aaacctcatgttgcttctctgacca

SEQ ID NO: 15160 - DNA, 25 bp, Homo sapiens
gatcagatttgggaaattcaagacc

SEQ ID NO: 15161 - DNA, 25 bp, Homo sapiens
cttagccaagagtgatcatcagctc

SEQ ID NO: 15162 - DNA, 25 bp, Homo sapiens
cagatattaataacctttaagagca

SEQ ID NO: 15163 - DNA, 25 bp, Homo sapiens
tgaatctcaacccataccttgcacc

SEQ ID NO: 15164 - DNA, 25 bp, Homo sapiens
ctaactaactaacaaaaacaaatgg

SEQ ID NO: 15165 - DNA, 25 bp, Homo sapiens
gacgtttaagtactttttaattata

SEQ ID NO: 15166 - DNA, 25 bp, Homo sapiens
acaaaagtaaataaacactaggagg

SEQ ID NO: 15167 - DNA, 25 bp, Homo sapiens
tgtggcccagatctagaatgtcatg

SEQ ID NO: 15168 - DNA, 25 bp, Homo sapiens
gggcttcctgcctcttgatataaat

SEQ ID NO: 15169 - DNA, 25 bp, Homo sapiens
ctccaatgttgatggtaaagataga

SEQ ID NO: 15170 - DNA, 25 bp, Homo sapiens
tgacagtgcatgatctcaagttttc

SEQ ID NO: 15171 - DNA, 25 bp, Homo sapiens
atgttgtcctgaaaagatgggcttc

SEQ ID NO: 15172 - DNA, 25 bp, Homo sapiens
gcgggagtcttacaatgccacagtt

SEQ ID NO: 15173 - DNA, 25 bp, Homo sapiens
gctctgactcatagacctgttattg

SEQ ID NO: 15174 - DNA, 25 bp, Homo sapiens
gtccaaggagagctaggtttacatc

SEQ ID NO: 15175 - DNA, 25 bp, Homo sapiens
agcacatttcctcaaggcagctttc

SEQ ID NO: 15176 - DNA, 25 bp, Homo sapiens
tgctatcgtcatgggttctaagaga

SEQ ID NO: 15177 - DNA, 25 bp, Homo sapiens
ctggagcccacagtgatatcattgc

SEQ ID NO: 15178 - DNA, 25 bp, Homo sapiens
cgccaaaattttgggcctgtgtaca

SEQ ID NO: 15179 - DNA, 25 bp, Homo sapiens
ctttttgatgacttgggccaggacc

SEQ ID NO: 15180 - DNA, 25 bp, Homo sapiens
tgggcagggccatcaatacatctaa

SEQ ID NO: 15181 - DNA, 25 bp, Homo sapiens
acccgctccctgtacgtgaacatga

SEQ ID NO: 15182 - DNA, 25 bp, Homo sapiens
ccagagtgttggcttgtcatagcta

SEQ ID NO: 15183 - DNA, 25 bp, Homo sapiens
ggggatgggtcaactcttttcctta

SEQ ID NO: 15184 - DNA, 25 bp, Homo sapiens
agcagggtttcacttagagcaggga

SEQ ID NO: 15185 - DNA, 25 bp, Homo sapiens
ctccgggtgacatactgcaaggttt

SEQ ID NO: 15186 - DNA, 25 bp, Homo sapiens
tgaccagcccttgccttggagagaa

SEQ ID NO: 15187 - DNA, 25 bp, Homo sapiens
cagctgcttgaagttctggccttta

SEQ ID NO: 15188 - DNA, 25 bp, Homo sapiens
ctgactctgctagtgtgcttaaatc

SEQ ID NO: 15189 - DNA, 25 bp, Homo sapiens
ttgcctgtgcacctttgtctctgta

SEQ ID NO: 15190 - DNA, 25 bp, Homo sapiens
ggccagcgagtccatcttttaattc

SEQ ID NO: 15191 - DNA, 25 bp, Homo sapiens
cctagcctagcctttcgtaggtata

SEQ ID NO: 15192 - DNA, 25 bp, Homo sapiens
cctgtgtgacagtaagggttcaacc

SEQ ID NO: 15193 - DNA, 25 bp, Homo sapiens
aggggcttattcttatttctcaggc

SEQ ID NO: 15194 - DNA, 25 bp, Homo sapiens
cgggctggctatttatccaattata

SEQ ID NO: 15195 - DNA, 25 bp, Homo sapiens
cccttgaggtttggagcagtttcta

SEQ ID NO: 15196 - DNA, 25 bp, Homo sapiens
aggtgcatctctccgtagactctta

SEQ ID NO: 15197 - DNA, 25 bp, Homo sapiens
gcctctttctgctgtgactggtttc

SEQ ID NO: 15198 - DNA, 25 bp, Homo sapiens
atttggtttctctgctactgtggtc

SEQ ID NO: 15199 - DNA, 25 bp, Homo sapiens
tttcaggttgctaggaagaggctca

SEQ ID NO: 15200 - DNA, 25 bp, Homo sapiens
tgcttttagtttatagtcatcagtg

SEQ ID NO: 15201 - DNA, 25 bp, Homo sapiens
cagtggcttaagtcaggctgaattc

SEQ ID NO: 15202 - DNA, 25 bp, Homo sapiens
ttagagctctcccaacccgagatgg

SEQ ID NO: 15203 - DNA, 25 bp, Homo sapiens
gctgatgatgtttggcttctgcttc

SEQ ID NO: 15204 - DNA, 25 bp, Homo sapiens
tgtcctgggctttatcttttctgta

SEQ ID NO: 15205 - DNA, 25 bp, Homo sapiens
acggggttccagtatgatgtcatca

SEQ ID NO: 15206 - DNA, 25 bp, Homo sapiens
gtgacttctggccattctgacttaa

SEQ ID NO: 15207 - DNA, 25 bp, Homo sapiens
tgggcaaccgcatgatagaacttta

SEQ ID NO: 15208 - DNA, 25 bp, Homo sapiens
ccagtccagttccacaatcttgttc

SEQ ID NO: 15209 - DNA, 25 bp, Homo sapiens
ttacttgaagttgctgttgtttggc

SEQ ID NO: 15210 - DNA, 25 bp, Homo sapiens
gtaaaacaagttgtttcagtattaa

SEQ ID NO: 15211 - DNA, 25 bp, Homo sapiens
tgttggcgcctgaaatcaatgactg

SEQ ID NO: 15212 - DNA, 25 bp, Homo sapiens
tgggcacataggatcaggaaagttt

SEQ ID NO: 15213 - DNA, 25 bp, Homo sapiens
tgtgttgcccacatcttccctggtg

SEQ ID NO: 15214 - DNA, 25 bp, Homo sapiens
cgtggctgggagctttacaattctc

SEQ ID NO: 15215 - DNA, 25 bp, Homo sapiens
gccagcctggggctatttaatattg

SEQ ID NO: 15216 - DNA, 25 bp, Homo sapiens
aggcggcttttagtttcttcatcaa

SEQ ID NO: 15217 - DNA, 25 bp, Homo sapiens
ccatacattgaggagcgcagtgctc

SEQ ID NO: 15218 - DNA, 25 bp, Homo sapiens
tggatggtctcccttcctcagagtc

SEQ ID NO: 15219 - DNA, 25 bp, Homo sapiens
catcactggctagggtattaactta

SEQ ID NO: 15220 - DNA, 25 bp, Homo sapiens
cctgtggaaatgcagccctggctta

SEQ ID NO: 15221 - DNA, 25 bp, Homo sapiens
tcatggcgtttgtgatgcgagtctc

SEQ ID NO: 15222 - DNA, 25 bp, Homo sapiens
gctccatctccagccaaggggattg

SEQ ID NO: 15223 - DNA, 25 bp, Homo sapiens
cggggatagctgactttcaacactt

SEQ ID NO: 15224 - DNA, 25 bp, Homo sapiens
caaagctgtctctctatctagtaag

SEQ ID NO: 15225 - DNA, 25 bp, Homo sapiens
caaccctttggtcagattgtctcca

SEQ ID NO: 15226 - DNA, 25 bp, Homo sapiens
aatatgtgggccctctgtcctctgt

SEQ ID NO: 15227 - DNA, 25 bp, Homo sapiens
ggcatctcctgctcataggtttgga

SEQ ID NO: 15228 - DNA, 25 bp, Homo sapiens
ggggaccgccattctaaatatcatg

SEQ ID NO: 15229 - DNA, 25 bp, Homo sapiens
agagcttggctcttccctgaaatcc

SEQ ID NO: 15230 - DNA, 25 bp, Homo sapiens
tggtgtgtcaccattccactagatg

SEQ ID NO: 15231 - DNA, 25 bp, Homo sapiens
tccgccggctagaagatagtgcatg

SEQ ID NO: 15232 - DNA, 25 bp, Homo sapiens
gtgctttgtagcttgctatctatat

SEQ ID NO: 15233 - DNA, 25 bp, Homo sapiens
gggtggccatgactgatcgtaaagc

SEQ ID NO: 15234 - DNA, 25 bp, Homo sapiens
ttactatcagatgggcagcagaatg

SEQ ID NO: 15235 - DNA, 25 bp, Homo sapiens
ccttgtgctaattatgtggtctttg

SEQ ID NO: 15236 - DNA, 25 bp, Homo sapiens
tgcgtcttgcaagcttcgacagata

SEQ ID NO: 15237 - DNA, 25 bp, Homo sapiens
ccagtgctgggcttagttctttatg

SEQ ID NO: 15238 - DNA, 25 bp, Homo sapiens
atgcccggctcatagaggatgctca

SEQ ID NO: 15239 - DNA, 25 bp, Homo sapiens
tcgagtagttttcaccacagggatc

SEQ ID NO: 15240 - DNA, 25 bp, Homo sapiens
tgtcctgggcagtaaagtaagcata

SEQ ID NO: 15241 - DNA, 25 bp, Homo sapiens
agcatgaaataattacacaaacata

SEQ ID NO: 15242 - DNA, 25 bp, Homo sapiens
atttcttgcagataaaatagagtct

SEQ ID NO: 15243 - DNA, 25 bp, Homo sapiens
gaggatttttcaagccacggttttc

SEQ ID NO: 15244 - DNA, 25 bp, Homo sapiens
cttggggcctcatatcagggatacc

SEQ ID NO: 15245 - DNA, 25 bp, Homo sapiens
tcatggtgtacctagcgtctgcttt

SEQ ID NO: 15246 - DNA, 25 bp, Homo sapiens
ctggcctatctgaattcccggaatg

SEQ ID NO: 15247 - DNA, 25 bp, Homo sapiens
agagcttgttgtctgccaggtccca

SEQ ID NO: 15248 - DNA, 25 bp, Homo sapiens
ggcatgtctgtttaacggagattta

SEQ ID NO: 15249 - DNA, 25 bp, Homo sapiens
gcactgccatgaaatgcctcttaga

SEQ ID NO: 15250 - DNA, 25 bp, Homo sapiens
atcagatgatgcgtttgctccaagc

SEQ ID NO: 15251 - DNA, 25 bp, Homo sapiens
gaccctggcttctgtcattgcttta

SEQ ID NO: 15252 - DNA, 25 bp, Homo sapiens
cagtatccttcaggggctgccgtga

SEQ ID NO: 15253 - DNA, 25 bp, Homo sapiens
attggttacacctagccctgcatga

SEQ ID NO: 15254 - DNA, 25 bp, Homo sapiens
tagttacatatacctaaggagtgtg

SEQ ID NO: 15255 - DNA, 25 bp, Homo sapiens
agagagctctctattcctggatgac

SEQ ID NO: 15256 - DNA, 25 bp, Homo sapiens
ttgatggatgttgcttaaagcctcc

SEQ ID NO: 15257 - DNA, 25 bp, Homo sapiens
atttagatactggtagcggctatga

SEQ ID NO: 15258 - DNA, 25 bp, Homo sapiens
tagtagaattccctctgcctggtgc

SEQ ID NO: 15259 - DNA, 25 bp, Homo sapiens
ggcagccacttccagctcagtgaaa

SEQ ID NO: 15260 - DNA, 25 bp, Homo sapiens
tggcctcatgtttccagattattta

SEQ ID NO: 15261 - DNA, 25 bp, Homo sapiens
tttgggcagatacatggttcaccta

SEQ ID NO: 15262 - DNA, 25 bp, Homo sapiens
gccctgactcttctggccagtgaga

SEQ ID NO: 15263 - DNA, 25 bp, Homo sapiens
agaagacttgcacgtggcacccttg

SEQ ID NO: 15264 - DNA, 25 bp, Homo sapiens
ggtggctggtccatctctttgaata

SEQ ID NO: 15265 - DNA, 25 bp, Homo sapiens
gtgtccgtctctcaaggtcttatta

SEQ ID NO: 15266 - DNA, 25 bp, Homo sapiens
actgtggtcaactaggtagtcttca

SEQ ID NO: 15267 - DNA, 25 bp, Homo sapiens
ccactgtggctcaagtcctgcttta

SEQ ID NO: 15268 - DNA, 25 bp, Homo sapiens
atgagttcccaagaccagatgagca

SEQ ID NO: 15269 - DNA, 25 bp, Homo sapiens
cagcgctccagttttgtggaagaca

SEQ ID NO: 15270 - DNA, 25 bp, Homo sapiens
acccaggcgctttgacagttgtttc

SEQ ID NO: 15271 - DNA, 25 bp, Homo sapiens
gctaaggccagaagaggtgtcctcc

SEQ ID NO: 15272 - DNA, 25 bp, Homo sapiens
atcagttatacacacacagcagggg

SEQ ID NO: 15273 - DNA, 25 bp, Homo sapiens
ggtccagtccagagggctccaaatc

SEQ ID NO: 15274 - DNA, 25 bp, Homo sapiens
gtgttagtacctcccatgcagcttg

SEQ ID NO: 15275 - DNA, 25 bp, Homo sapiens
gcactcccactttctgactcaggta

SEQ ID NO: 15276 - DNA, 25 bp, Homo sapiens
gaagtgccgtctcccagtatgtatc

SEQ ID NO: 15277 - DNA, 25 bp, Homo sapiens
caggtccgttctgtccaatggcaaa

SEQ ID NO: 15278 - DNA, 25 bp, Homo sapiens
catcgtggagatacaaggggctttc

SEQ ID NO: 15279 - DNA, 25 bp, Homo sapiens
tgctctgccttagtaccatcgttga

SEQ ID NO: 15280 - DNA, 25 bp, Homo sapiens
tgctggtgctttctagcccatcctg

SEQ ID NO: 15281 - DNA, 25 bp, Homo sapiens
gcctggattggctgtggcatctaaa

SEQ ID NO: 15282 - DNA, 25 bp, Homo sapiens
gaagctctctcattcccttggactg

SEQ ID NO: 15283 - DNA, 25 bp, Homo sapiens
gaacagtttgctattacttttgaga

SEQ ID NO: 15284 - DNA, 25 bp, Homo sapiens
gagcccatttgtggtttttacatta

SEQ ID NO: 15285 - DNA, 25 bp, Homo sapiens
agggtggccctgcttttcaaacatg

SEQ ID NO: 15286 - DNA, 25 bp, Homo sapiens
ccagatgggtttcatgcagcctttc

SEQ ID NO: 15287 - DNA, 25 bp, Homo sapiens
agcaatgacaggcttgggataaaga

SEQ ID NO: 15288 - DNA, 25 bp, Homo sapiens
gcagtgcctggtaagaaaactcttc

SEQ ID NO: 15289 - DNA, 25 bp, Homo sapiens
gccaagccagggttttccagatttc

SEQ ID NO: 15290 - DNA, 25 bp, Homo sapiens
tcctgccctgcaaacagagtctctg

SEQ ID NO: 15291 - DNA, 25 bp, Homo sapiens
tgtcactgctaattgggcagacctc

SEQ ID NO: 15292 - DNA, 25 bp, Homo sapiens
gcctccaagggctaagatgtttcca

SEQ ID NO: 15293 - DNA, 25 bp, Homo sapiens
acctaggatcacacgcagcacattc

SEQ ID NO: 15294 - DNA, 25 bp, Homo sapiens
ggaaaatgccattcactccgctatg

SEQ ID NO: 15295 - DNA, 25 bp, Homo sapiens
cctccttttcatgacaaatgttgtg

SEQ ID NO: 15296 - DNA, 25 bp, Homo sapiens
agtttagtaaaaacttagaaatagc

SEQ ID NO: 15297 - DNA, 25 bp, Homo sapiens
aggcctccttatgcagggaactgga

SEQ ID NO: 15298 - DNA, 25 bp, Homo sapiens
ggccaggcatgaggagacaaagtta

SEQ ID NO: 15299 - DNA, 25 bp, Homo sapiens
tcaaggtctagcagtccatgtcatc

SEQ ID NO: 15300 - DNA, 25 bp, Homo sapiens
cccatttttataggaaggctgctgc

SEQ ID NO: 15301 - DNA, 25 bp, Homo sapiens
gctcacagcaggttttctcagaatc

SEQ ID NO: 15302 - DNA, 25 bp, Homo sapiens
tggaatatctagttaccctcaaggg

SEQ ID NO: 15303 - DNA, 25 bp, Homo sapiens
gctaattgttagactttcaggttgc

SEQ ID NO: 15304 - DNA, 25 bp, Homo sapiens
gcctaaaggtttgggacatgccatc

SEQ ID NO: 15305 - DNA, 25 bp, Homo sapiens
gggtgtctaatccactgtactgctg

SEQ ID NO: 15306 - DNA, 25 bp, Homo sapiens
gagctttttgtaatcacggtggcca

SEQ ID NO: 15307 - DNA, 25 bp, Homo sapiens
gctgagcttgcattttccgggtttc

SEQ ID NO: 15308 - DNA, 25 bp, Homo sapiens
ggacaacttgatgaggacactgacc

SEQ ID NO: 15309 - DNA, 25 bp, Homo sapiens
tttcgcttccacttaggggtctctc

SEQ ID NO: 15310 - DNA, 25 bp, Homo sapiens
ggagacttatgtgtcagccgcctta

SEQ ID NO: 15311 - DNA, 25 bp, Homo sapiens
cctggggaccttgatcattcctgga

SEQ ID NO: 15312 - DNA, 25 bp, Homo sapiens
tgcgtttcactgtaggaggccaatc

SEQ ID NO: 15313 - DNA, 25 bp, Homo sapiens
aagcagggtatctaatgacaggtcc

SEQ ID NO: 15314 - DNA, 25 bp, Homo sapiens
tggaagccaaaaaagtacctctctg

SEQ ID NO: 15315 - DNA, 25 bp, Homo sapiens
tcccagattcttcagggcctttaga

SEQ ID NO: 15316 - DNA, 25 bp, Homo sapiens
tagatggcgccaagactcactcctg

SEQ ID NO: 15317 - DNA, 25 bp, Homo sapiens
gatcctgggaacatggccttctttc

SEQ ID NO: 15318 - DNA, 25 bp, Homo sapiens
ctgcaaggcatgtggtgaaatcttt

SEQ ID NO: 15319 - DNA, 25 bp, Homo sapiens
gctgccattggatgaacccttccta

SEQ ID NO: 15320 - DNA, 25 bp, Homo sapiens
ggaagcccttctctgtcccattgca

SEQ ID NO: 15321 - DNA, 25 bp, Homo sapiens
ggtgctcctcaggtacagaacatta

SEQ ID NO: 15322 - DNA, 25 bp, Homo sapiens
ccagggtctcaggttgaaatgcaca

SEQ ID NO: 15323 - DNA, 25 bp, Homo sapiens
tcccaggaatcgttggaggtcttga

SEQ ID NO: 15324 - DNA, 25 bp, Homo sapiens
ctgcatgatttgacttgacctcttg

SEQ ID NO: 15325 - DNA, 25 bp, Homo sapiens
cctggtgcagtcaaggcccttttac

SEQ ID NO: 15326 - DNA, 25 bp, Homo sapiens
ggtgtccaccatcagctctaagttt

SEQ ID NO: 15327 - DNA, 25 bp, Homo sapiens
gctgcctggaattgagccttactta

SEQ ID NO: 15328 - DNA, 25 bp, Homo sapiens
cactgggccacagcatcaatcttta

SEQ ID NO: 15329 - DNA, 25 bp, Homo sapiens
cagcgtctttgttttgggtgcattc

SEQ ID NO: 15330 - DNA, 25 bp, Homo sapiens
gtagctgtgagaaagagccgcccaa

SEQ ID NO: 15331 - DNA, 25 bp, Homo sapiens
acctcttacttctggcttggggaca

SEQ ID NO: 15332 - DNA, 25 bp, Homo sapiens
actttagttgatgattccggtgggg

SEQ ID NO: 15333 - DNA, 25 bp, Homo sapiens
agactccaggagaactaagactttg

SEQ ID NO: 15334 - DNA, 25 bp, Homo sapiens
cctatatgaaaaacttgaattttgg

SEQ ID NO: 15335 - DNA, 25 bp, Homo sapiens
ctccggagggtagcttacacaaata

SEQ ID NO: 15336 - DNA, 25 bp, Homo sapiens
ctgtggagggctctggacaaaaacc

SEQ ID NO: 15337 - DNA, 25 bp, Homo sapiens
ggcaagcccttgttaccataagagc

SEQ ID NO: 15338 - DNA, 25 bp, Homo sapiens
atgacttgtgtcctgctcatgcagc

SEQ ID NO: 15339 - DNA, 25 bp, Homo sapiens
ctgcccttgaatagtcactgtcttc

SEQ ID NO: 15340 - DNA, 25 bp, Homo sapiens
ctgcacctaggattgctgacaattc

SEQ ID NO: 15341 - DNA, 25 bp, Homo sapiens
ccttgacggaggctgaattttctga

SEQ ID NO: 15342 - DNA, 25 bp, Homo sapiens
actccttaaaaatgatgacaagcaa

SEQ ID NO: 15343 - DNA, 25 bp, Homo sapiens
tttgcttctttgtctcccttaggag

SEQ ID NO: 15344 - DNA, 25 bp, Homo sapiens
cagaatctgttatcaagggtgccca

SEQ ID NO: 15345 - DNA, 25 bp, Homo sapiens
tgctgcactgtgatggaaactttca

SEQ ID NO: 15346 - DNA, 25 bp, Homo sapiens
gtggagcaccttttcccgtcaccag

SEQ ID NO: 15347 - DNA, 25 bp, Homo sapiens
ggtatgtctaccctgcccattactg

SEQ ID NO: 15348 - DNA, 25 bp, Homo sapiens
gggaacgtgtccctccatgactgac

SEQ ID NO: 15349 - DNA, 25 bp, Homo sapiens
gacttgttccttttctctgcctata

SEQ ID NO: 15350 - DNA, 25 bp, Homo sapiens
ctgtttattaaacacataatgtgcc

SEQ ID NO: 15351 - DNA, 25 bp, Homo sapiens
cttcaggggatttagctggctcatc

SEQ ID NO: 15352 - DNA, 25 bp, Homo sapiens
ggcttcaggcagagtgtaatctata

SEQ ID NO: 15353 - DNA, 25 bp, Homo sapiens
ccctcttagggtgattggccaaata

SEQ ID NO: 15354 - DNA, 25 bp, Homo sapiens
gcacctcgggtgttaaataatccaa

SEQ ID NO: 15355 - DNA, 25 bp, Homo sapiens
cgcccatgtgggcagactgaattca

SEQ ID NO: 15356 - DNA, 25 bp, Homo sapiens
caattatcggagcccaaggattttt

SEQ ID NO: 15357 - DNA, 25 bp, Homo sapiens
gccgggacagtcatatgcgccattt

SEQ ID NO: 15358 - DNA, 25 bp, Homo sapiens
gatcttttttaaaatgcttaatcca

SEQ ID NO: 15359 - DNA, 25 bp, Homo sapiens
gaactaattttactacttatgtgca

SEQ ID NO: 15360 - DNA, 25 bp, Homo sapiens
ttttttggaaaccttgtttgtgtgt

SEQ ID NO: 15361 - DNA, 25 bp, Homo sapiens
gatataatttttaaattgcacacga

SEQ ID NO: 15362 - DNA, 25 bp, Homo sapiens
ctggactgtgtttgttagggaaccc

SEQ ID NO: 15363 - DNA, 25 bp, Homo sapiens
ggtgtcactcccatttgctcttgta

SEQ ID NO: 15364 - DNA, 25 bp, Homo sapiens
tccggacgctgccatcatgttgaag

SEQ ID NO: 15365 - DNA, 25 bp, Homo sapiens
tggaggccctgctcagtttttcctg

SEQ ID NO: 15366 - DNA, 25 bp, Homo sapiens
tgagtgtcttctcccaccctgttta

SEQ ID NO: 15367 - DNA, 25 bp, Homo sapiens
gggcacacgtactctggacttctta

SEQ ID NO: 15368 - DNA, 25 bp, Homo sapiens
gtgtaggcccatttctcttcccaaa

SEQ ID NO: 15369 - DNA, 25 bp, Homo sapiens
tagttgattacttttgccagccacg

SEQ ID NO: 15370 - DNA, 25 bp, Homo sapiens
cggtgcccgttacccagatgttgaa

SEQ ID NO: 15371 - DNA, 25 bp, Homo sapiens
gccttagctctttgccacctcgtgg

SEQ ID NO: 15372 - DNA, 25 bp, Homo sapiens
aggcccttgtactcactgctgttga

SEQ ID NO: 15373 - DNA, 25 bp, Homo sapiens
ccgtatcggataaggaggacaaacc

SEQ ID NO: 15374 - DNA, 25 bp, Homo sapiens
ctgggcattcgtgagcgagtcattc

SEQ ID NO: 15375 - DNA, 25 bp, Homo sapiens
tggttctccctctttcctgctgcag

SEQ ID NO: 15376 - DNA, 25 bp, Homo sapiens
ccgacctgcacctgtctgtgaagta

SEQ ID NO: 15377 - DNA, 25 bp, Homo sapiens
gtgctgcattgtgacctgttccttc

SEQ ID NO: 15378 - DNA, 25 bp, Homo sapiens
ctctcggagacttgaccttggtttc

SEQ ID NO: 15379 - DNA, 25 bp, Homo sapiens
ctttctggaaggactgcagattgta

SEQ ID NO: 15380 - DNA, 25 bp, Homo sapiens
agccttgccttgagcactgaggaga

SEQ ID NO: 15381 - DNA, 25 bp, Homo sapiens
tcggctcaagtatttttaaatcaag

SEQ ID NO: 15382 - DNA, 25 bp, Homo sapiens
tcccaggaggctgaataacggcatc

SEQ ID NO: 15383 - DNA, 25 bp, Homo sapiens
cccttctgttggctagcagcggcaa

SEQ ID NO: 15384 - DNA, 25 bp, Homo sapiens
ccacaggcagcaggaaaggcttctc

SEQ ID NO: 15385 - DNA, 25 bp, Homo sapiens
ggcggcagtgctatactccacatga

SEQ ID NO: 15386 - DNA, 25 bp, Homo sapiens
aacgtagttctctctggcggtcgca

SEQ ID NO: 15387 - DNA, 25 bp, Homo sapiens
tatggctgcttaaccctggctaatg

SEQ ID NO: 15388 - DNA, 25 bp, Homo sapiens
caaaaagtgtgcacaccgcactgtc

SEQ ID NO: 15389 - DNA, 25 bp, Homo sapiens
gctgttgaccgtagcatcctctgta

SEQ ID NO: 15390 - DNA, 25 bp, Homo sapiens
cttatacatctgaacgtggggcacc

SEQ ID NO: 15391 - DNA, 25 bp, Homo sapiens
aggccacttctctaatatgcaggga

SEQ ID NO: 15392 - DNA, 25 bp, Homo sapiens
cccaatacctttcacatccattctc

SEQ ID NO: 15393 - DNA, 25 bp, Homo sapiens
cgtgtgtcccacaaggcctgcataa

SEQ ID NO: 15394 - DNA, 25 bp, Homo sapiens
atctcaccagctcgtggcactaaga

SEQ ID NO: 15395 - DNA, 25 bp, Homo sapiens
tccctgcatgccaaccctgagtgtg

SEQ ID NO: 15396 - DNA, 25 bp, Homo sapiens
tcaggttcagcagttcacaagaatg

SEQ ID NO: 15397 - DNA, 25 bp, Homo sapiens
tcatttatttggttttttttagaga

SEQ ID NO: 15398 - DNA, 25 bp, Homo sapiens
ttggcttaacctgggccctggataa

SEQ ID NO: 15399 - DNA, 25 bp, Homo sapiens
tccctggtctctggtatgtgatttc

SEQ ID NO: 15400 - DNA, 25 bp, Homo sapiens
ttcttaggtgagtcaggatttatcc

SEQ ID NO: 15401 - DNA, 25 bp, Homo sapiens
cgtcccaaaagcacgtctggaattg

SEQ ID NO: 15402 - DNA, 25 bp, Homo sapiens
caaggtcgtaagttcaggctccgcc

SEQ ID NO: 15403 - DNA, 25 bp, Homo sapiens
ctgagtcaccagcttaggagtcgca

SEQ ID NO: 15404 - DNA, 25 bp, Homo sapiens
ctggggtcagctttcaagacaatta

SEQ ID NO: 15405 - DNA, 25 bp, Homo sapiens
cggagatttcgccacatgacctgtc

SEQ ID NO: 15406 - DNA, 25 bp, Homo sapiens
gcgtcgccgaaaggaggtatatata

SEQ ID NO: 15407 - DNA, 25 bp, Homo sapiens
aggcgtcgtctcatctctgtaggtg

SEQ ID NO: 15408 - DNA, 25 bp, Homo sapiens
ctgtcaggggcaatcacgttttctc

SEQ ID NO: 15409 - DNA, 25 bp, Homo sapiens
aggggctttgtcctatagttcaaca

SEQ ID NO: 15410 - DNA, 25 bp, Homo sapiens
gggtcactacccacagagctgtttg

SEQ ID NO: 15411 - DNA, 25 bp, Homo sapiens
ggctccagtgatgttgtccttgtca

SEQ ID NO: 15412 - DNA, 25 bp, Homo sapiens
accagtactccttcgtgtgagccaa

SEQ ID NO: 15413 - DNA, 25 bp, Homo sapiens
ggccctgtgggcatttgagtttata

SEQ ID NO: 15414 - DNA, 25 bp, Homo sapiens
ggtgtctctgtgtcccatgctttta

SEQ ID NO: 15415 - DNA, 25 bp, Homo sapiens
cagcagctgccctggtggtaaccaa

SEQ ID NO: 15416 - DNA, 25 bp, Homo sapiens
ttggggtatctctgccactgcttca

SEQ ID NO: 15417 - DNA, 25 bp, Homo sapiens
cagagtcccgagatccagagttttg

SEQ ID NO: 15418 - DNA, 25 bp, Homo sapiens
accctcgcggcttcaagagcttgga

SEQ ID NO: 15419 - DNA, 25 bp, Homo sapiens
tggggcctcattacctgtcattctc

SEQ ID NO: 15420 - DNA, 25 bp, Homo sapiens
tccaggacagcatctgcagggcagc

SEQ ID NO: 15421 - DNA, 25 bp, Homo sapiens
agtcttgacctctctgtgcccttga

SEQ ID NO: 15422 - DNA, 25 bp, Homo sapiens
ggttcccgatatgtggtcctctcca

SEQ ID NO: 15423 - DNA, 25 bp, Homo sapiens
gcgggttgaccagtccatcctgaca

SEQ ID NO: 15424 - DNA, 25 bp, Homo sapiens
tgacctgcttgacgtttccattctg

SEQ ID NO: 15425 - DNA, 25 bp, Homo sapiens
agctgcttctgtttccgcactggca

SEQ ID NO: 15426 - DNA, 25 bp, Homo sapiens
cgcggggccatctactactttaaga

SEQ ID NO: 15427 - DNA, 25 bp, Homo sapiens
gctgcacctctgtcatctgttccga

SEQ ID NO: 15428 - DNA, 25 bp, Homo sapiens
tggctctccagaatggtcactcatg

SEQ ID NO: 15429 - DNA, 25 bp, Homo sapiens
taaataaacaaaacaggattctggg

SEQ ID NO: 15430 - DNA, 25 bp, Homo sapiens
cccttcacagagttttgtggaagac

SEQ ID NO: 15431 - DNA, 25 bp, Homo sapiens
tgcctgtactcccagcatcatggtg

SEQ ID NO: 15432 - DNA, 25 bp, Homo sapiens
aggcctcccttgatgcaggtgccca

SEQ ID NO: 15433 - DNA, 25 bp, Homo sapiens
ggcggccatgcccttgatgaatcta

SEQ ID NO: 15434 - DNA, 25 bp, Homo sapiens
tttcctggctactgatgttttgttc

SEQ ID NO: 15435 - DNA, 25 bp, Homo sapiens
gctcagttgcaccaattgtacagtg

SEQ ID NO: 15436 - DNA, 25 bp, Homo sapiens
agggcgtcatcgaccgctgtaacta

SEQ ID NO: 15437 - DNA, 25 bp, Homo sapiens
tttcttctaagttgtgggtcacgta

SEQ ID NO: 15438 - DNA, 25 bp, Homo sapiens
aatgagatgtttcctgcctctgagc

SEQ ID NO: 15439 - DNA, 25 bp, Homo sapiens
gtgtgccgatctttgttctaaactg

SEQ ID NO: 15440 - DNA, 25 bp, Homo sapiens
tgcaccgaggacaacacccactttg

SEQ ID NO: 15441 - DNA, 25 bp, Homo sapiens
gcgcgtcgcatccaaggtcacttgt

SEQ ID NO: 15442 - DNA, 25 bp, Homo sapiens
tctcagggacggtggaaaagccatc

SEQ ID NO: 15443 - DNA, 25 bp, Homo sapiens
ctccagcacctctgtgggaaggaaa

SEQ ID NO: 15444 - DNA, 25 bp, Homo sapiens
caccgaagaccgcaagggcaaagca

SEQ ID NO: 15445 - DNA, 25 bp, Homo sapiens
aattcaatcttgtggctcgcgtgtc

SEQ ID NO: 15446 - DNA, 25 bp, Homo sapiens
gccagggcccaagccagatatttta

SEQ ID NO: 15447 - DNA, 25 bp, Homo sapiens
ctgtgtggctgcaggggccctgttc

SEQ ID NO: 15448 - DNA, 25 bp, Homo sapiens
tgccccggtctttaagagtacttcc

SEQ ID NO: 15449 - DNA, 25 bp, Homo sapiens
ccggctctagttctgggtctgaaca

SEQ ID NO: 15450 - DNA, 25 bp, Homo sapiens
ccagcatctgggttgggattacacc

SEQ ID NO: 15451 - DNA, 25 bp, Homo sapiens
ttgttctcccacactcctatcacca

SEQ ID NO: 15452 - DNA, 25 bp, Homo sapiens
ccttcactgtgttgggcagctttca

SEQ ID NO: 15453 - DNA, 25 bp, Homo sapiens
ttaagaacactttcgaaccagcctg

SEQ ID NO: 15454 - DNA, 25 bp, Homo sapiens
gctaagcgaacttggtcacccacta

SEQ ID NO: 15455 - DNA, 25 bp, Homo sapiens
ggtgtccagccctttctcaggcaca

SEQ ID NO: 15456 - DNA, 25 bp, Homo sapiens
cccagggccttgaatgtgacgccaa

SEQ ID NO: 15457 - DNA, 25 bp, Homo sapiens
gacctattattgtgcactaacagta

SEQ ID NO: 15458 - DNA, 25 bp, Homo sapiens
ccagcagctgttagaaagggaaatc

SEQ ID NO: 15459 - DNA, 25 bp, Homo sapiens
gcttagcaagtcctgcaacctagta

SEQ ID NO: 15460 - DNA, 25 bp, Homo sapiens
gcttcatttttctgagcgcctcgga

SEQ ID NO: 15461 - DNA, 25 bp, Homo sapiens
aagtgttttccaccaagcttggagc

SEQ ID NO: 15462 - DNA, 25 bp, Homo sapiens
atccagactccctgtgcatgcagca

SEQ ID NO: 15463 - DNA, 25 bp, Homo sapiens
aggagctttcctcgcctctacaaaa

SEQ ID NO: 15464 - DNA, 25 bp, Homo sapiens
agtgaaagccagtctgggcagctgg

SEQ ID NO: 15465 - DNA, 25 bp, Homo sapiens
cacccatggttgagtgccctccagg

SEQ ID NO: 15466 - DNA, 25 bp, Homo sapiens
tctgcatttggttctgggtctcttc

SEQ ID NO: 15467 - DNA, 25 bp, Homo sapiens
tcactgctcggccaggtagagtttc

SEQ ID NO: 15468 - DNA, 25 bp, Homo sapiens
gtgctggatcccaactgtaaccttg

SEQ ID NO: 15469 - DNA, 25 bp, Homo sapiens
ggctctggccagtctgacaaccatc

SEQ ID NO: 15470 - DNA, 25 bp, Homo sapiens
gggtccgccattccattccaagtcg

SEQ ID NO: 15471 - DNA, 25 bp, Homo sapiens
gcctttgtgggacctcagagactta

SEQ ID NO: 15472 - DNA, 25 bp, Homo sapiens
ttaccgtaggctgtacttcccatgc

SEQ ID NO: 15473 - DNA, 25 bp, Homo sapiens
gggagggctgccttctgcatacaaa

SEQ ID NO: 15474 - DNA, 25 bp, Homo sapiens
cttattatgtggcaggattgtattc

SEQ ID NO: 15475 - DNA, 25 bp, Homo sapiens
cggaggcatgctgtagttactatta

SEQ ID NO: 15476 - DNA, 25 bp, Homo sapiens
cttctacattgtgagccagggcctg

SEQ ID NO: 15477 - DNA, 25 bp, Homo sapiens
gcctgtgactcctggtgaaaatatc

SEQ ID NO: 15478 - DNA, 25 bp, Homo sapiens
ctctgccactttggggagtctccca

SEQ ID NO: 15479 - DNA, 25 bp, Homo sapiens
cagggccacctcctgcttgcggttt

SEQ ID NO: 15480 - DNA, 25 bp, Homo sapiens
cgtgtagtctctgaggtgcacaata

SEQ ID NO: 15481 - DNA, 25 bp, Homo sapiens
ttaaatccgcggtttccacagggaa

SEQ ID NO: 15482 - DNA, 25 bp, Homo sapiens
gcgtcccgggataacagcaacagtg

SEQ ID NO: 15483 - DNA, 25 bp, Homo sapiens
gcagccgctggcttctcttaagaga

SEQ ID NO: 15484 - DNA, 25 bp, Homo sapiens
tgcagaatcataggcctcttgcagc

SEQ ID NO: 15485 - DNA, 25 bp, Homo sapiens
acccttgggagtggattctgagacc

SEQ ID NO: 15486 - DNA, 25 bp, Homo sapiens
tctcttgcttctacagggatctgga

SEQ ID NO: 15487 - DNA, 25 bp, Homo sapiens
cctggcgaagcctgatatttttgta

SEQ ID NO: 15488 - DNA, 25 bp, Homo sapiens
gggtgatttcatacaaaggtccaga

SEQ ID NO: 15489 - DNA, 25 bp, Homo sapiens
cctaaagctcggagtggctgacatc

SEQ ID NO: 15490 - DNA, 25 bp, Homo sapiens
aaggacccttagacggtaatcaata

SEQ ID NO: 15491 - DNA, 25 bp, Homo sapiens
agaaaacaaactcaggatttttttc

SEQ ID NO: 15492 - DNA, 25 bp, Homo sapiens
tctgtttcatagggaaggaggctga

SEQ ID NO: 15493 - DNA, 25 bp, Homo sapiens
tgaggacccttcagagccacccttt

SEQ ID NO: 15494 - DNA, 25 bp, Homo sapiens
tgggcaattgcagataattccaaga

SEQ ID NO: 15495 - DNA, 25 bp, Homo sapiens
gctgggctgtactggttgctaaata

SEQ ID NO: 15496 - DNA, 25 bp, Homo sapiens
gatttttgtctttgtggccctcatg

SEQ ID NO: 15497 - DNA, 25 bp, Homo sapiens
gagattgttcatcctttcacatgtc

SEQ ID NO: 15498 - DNA, 25 bp, Homo sapiens
ctcccattgcacagcccggtgtaga

SEQ ID NO: 15499 - DNA, 25 bp, Homo sapiens
ttgactcattttaagcatacagttc

SEQ ID NO: 15500 - DNA, 25 bp, Homo sapiens
atgcctgcaacctgaagttcctgtc

SEQ ID NO: 15501 - DNA, 25 bp, Homo sapiens
gacgctctttttgacgctccaggga

SEQ ID NO: 15502 - DNA, 25 bp, Homo sapiens
ttctgttctgtctcaagtggggcca

SEQ ID NO: 15503 - DNA, 25 bp, Homo sapiens
cctgtaggactttgcgaagaacttt

SEQ ID NO: 15504 - DNA, 25 bp, Homo sapiens
tccgcctgacaggaagctctgatgg

SEQ ID NO: 15505 - DNA, 25 bp, Homo sapiens
ccgtccttagcttcaggtgcctttg

SEQ ID NO: 15506 - DNA, 25 bp, Homo sapiens
gcgacgttctcactgatccctgttt

SEQ ID NO: 15507 - DNA, 25 bp, Homo sapiens
tggggcagctctcattctgctgagc

SEQ ID NO: 15508 - DNA, 25 bp, Homo sapiens
tgtgcctatcctgaagccctctgtc

SEQ ID NO: 15509 - DNA, 25 bp, Homo sapiens
cccgtggtagcatcgtggccactta

SEQ ID NO: 15510 - DNA, 25 bp, Homo sapiens
gggcacttctcaccttccattgtca

SEQ ID NO: 15511 - DNA, 25 bp, Homo sapiens
cccaagggctcggtgctatttgtaa

SEQ ID NO: 15512 - DNA, 25 bp, Homo sapiens
ctgctgcccatcctggccatgttga

SEQ ID NO: 15513 - DNA, 25 bp, Homo sapiens
gcctggcctgagctgacttagtctc

SEQ ID NO: 15514 - DNA, 25 bp, Homo sapiens
gtttgccatccagattcccagtttg

SEQ ID NO: 15515 - DNA, 25 bp, Homo sapiens
ctctaggtgacagagggagactcca

SEQ ID NO: 15516 - DNA, 25 bp, Homo sapiens
ccatgctctcagtgtgaccagatcc

SEQ ID NO: 15517 - DNA, 25 bp, Homo sapiens
tgagacagtcccagaacacggcagc

SEQ ID NO: 15518 - DNA, 25 bp, Homo sapiens
gttgttttgcgatgaaaagttggtg

SEQ ID NO: 15519 - DNA, 25 bp, Homo sapiens
gtcgggccatcaacacgtggagtta

SEQ ID NO: 15520 - DNA, 25 bp, Homo sapiens
ttcctggttataaacctttaccaac

SEQ ID NO: 15521 - DNA, 25 bp, Homo sapiens
aagacacagttttctttactggttt

SEQ ID NO: 15522 - DNA, 25 bp, Homo sapiens
cagcctggcctgttggccgtctgaa

SEQ ID NO: 15523 - DNA, 25 bp, Homo sapiens
agggcccatgcgactctagttgttg

SEQ ID NO: 15524 - DNA, 25 bp, Homo sapiens
caaggcggccacagtgacttcaata

SEQ ID NO: 15525 - DNA, 25 bp, Homo sapiens
cctgggagcccagggattctaatta

SEQ ID NO: 15526 - DNA, 25 bp, Homo sapiens
acttatggaagtgtagcctaccttg

SEQ ID NO: 15527 - DNA, 25 bp, Homo sapiens
ctagacaggatgctgtgggagcacc

SEQ ID NO: 15528 - DNA, 25 bp, Homo sapiens
tgtcactgtgtgtcttggggtcacc

SEQ ID NO: 15529 - DNA, 25 bp, Homo sapiens
atcctggagagatgccgggattaca

SEQ ID NO: 15530 - DNA, 25 bp, Homo sapiens
ggccagccaggcacaagggatcatt

SEQ ID NO: 15531 - DNA, 25 bp, Homo sapiens
ggtggcctttttcccattccatgta

SEQ ID NO: 15532 - DNA, 25 bp, Homo sapiens
cacgtggtacgttcccagccttaga

SEQ ID NO: 15533 - DNA, 25 bp, Homo sapiens
ccctgccccccaagtgatctgctgg

SEQ ID NO: 15534 - DNA, 25 bp, Homo sapiens
aaaagaaaaggaaaaggcagtatat

SEQ ID NO: 15535 - DNA, 25 bp, Homo sapiens
catgagaagcagctatatttttccc

SEQ ID NO: 15536 - DNA, 25 bp, Homo sapiens
gcagttctgtgctatgtgttctata

SEQ ID NO: 15537 - DNA, 25 bp, Homo sapiens
agcctggccactttgagctgtcaga

SEQ ID NO: 15538 - DNA, 25 bp, Homo sapiens
tgggcagcccgatttggcagataaa

SEQ ID NO: 15539 - DNA, 25 bp, Homo sapiens
tggctggggcttagaatcttcaatg

SEQ ID NO: 15540 - DNA, 25 bp, Homo sapiens
ggcctgccctgtcttaactgcttta

SEQ ID NO: 15541 - DNA, 25 bp, Homo sapiens
gctggatggacactaacaattacta

SEQ ID NO: 15542 - DNA, 25 bp, Homo sapiens
cacacacttgggtctgagcctactg

SEQ ID NO: 15543 - DNA, 25 bp, Homo sapiens
agccagctccctgcaggtgtccaag

SEQ ID NO: 15544 - DNA, 25 bp, Homo sapiens
gccaagaagaggaggttgaagatta

SEQ ID NO: 15545 - DNA, 25 bp, Homo sapiens
cctaaatatcatgaagtttctttgc

SEQ ID NO: 15546 - DNA, 25 bp, Homo sapiens
ctctgggaagagaattgtatcactg

SEQ ID NO: 15547 - DNA, 25 bp, Homo sapiens
atgcataattgcatggtattccatc

SEQ ID NO: 15548 - DNA, 25 bp, Homo sapiens
caccattggcaagatcagctttatg

SEQ ID NO: 15549 - DNA, 25 bp, Homo sapiens
tcccagtgacatctatacggctatg

SEQ ID NO: 15550 - DNA, 25 bp, Homo sapiens
gggccacgtcttgctgtgttagcta

SEQ ID NO: 15551 - DNA, 25 bp, Homo sapiens
gctcagtgctcatggtggttatatc

SEQ ID NO: 15552 - DNA, 25 bp, Homo sapiens
ccctgtgagcttcttgaaggcaata

SEQ ID NO: 15553 - DNA, 25 bp, Homo sapiens
ctgcctggattctgagtgactattc

SEQ ID NO: 15554 - DNA, 25 bp, Homo sapiens
tggtgcttctagtcagtgccctata

SEQ ID NO: 15555 - DNA, 25 bp, Homo sapiens
gtcctaggggaaacagggttcatcc

SEQ ID NO: 15556 - DNA, 25 bp, Homo sapiens
tcctgagcaggaccatgatgtgttc

SEQ ID NO: 15557 - DNA, 25 bp, Homo sapiens
gcaggccctcatgctagtcagcaaa

SEQ ID NO: 15558 - DNA, 25 bp, Homo sapiens
cagcaaacaggtcaaggtggaaatc

SEQ ID NO: 15559 - DNA, 25 bp, Homo sapiens
cttcttatctagaggtgtccagttg

SEQ ID NO: 15560 - DNA, 25 bp, Homo sapiens
atactactagcatgggtgggaactg

SEQ ID NO: 15561 - DNA, 25 bp, Homo sapiens
gcactacaatgtccaagattccctg

SEQ ID NO: 15562 - DNA, 25 bp, Homo sapiens
tttcagagcggtaaactggcatttc

SEQ ID NO: 15563 - DNA, 25 bp, Homo sapiens
tgtggcatcggctctgtagtatttc

SEQ ID NO: 15564 - DNA, 25 bp, Homo sapiens
gtaatagctcctaggcattttccca

SEQ ID NO: 15565 - DNA, 25 bp, Homo sapiens
gcaggttttctggactcacagttta

SEQ ID NO: 15566 - DNA, 25 bp, Homo sapiens
ggaggggtcttcaactgtatcaata

SEQ ID NO: 15567 - DNA, 25 bp, Homo sapiens
tgacagcagctgagtattacattta

SEQ ID NO: 15568 - DNA, 25 bp, Homo sapiens
tacaaaagttaactgcagaacattt

SEQ ID NO: 15569 - DNA, 25 bp, Homo sapiens
cccagtcagtgtctaggatatgtga

SEQ ID NO: 15570 - DNA, 25 bp, Homo sapiens
cccaagtgacccaattgaagattta

SEQ ID NO: 15571 - DNA, 25 bp, Homo sapiens
cgttctgaatccaactgcatgcttg

SEQ ID NO: 15572 - DNA, 25 bp, Homo sapiens
tctgtgcacatctgtaacattaagc

SEQ ID NO: 15573 - DNA, 25 bp, Homo sapiens
tgtcccagttcaagctcagaattgc

SEQ ID NO: 15574 - DNA, 25 bp, Homo sapiens
ctcactgacagcacagctatgtaca

SEQ ID NO: 15575 - DNA, 25 bp, Homo sapiens
agcttcatgggtacaatatatacta

SEQ ID NO: 15576 - DNA, 25 bp, Homo sapiens
caaaccaggttcactcttggtacct

SEQ ID NO: 15577 - DNA, 25 bp, Homo sapiens
ctgtgctccttagagagtcaagaga

SEQ ID NO: 15578 - DNA, 25 bp, Homo sapiens
ttctttcatgtaccctctgcctctg

SEQ ID NO: 15579 - DNA, 25 bp, Homo sapiens
ctctcaggtagttcacattcaagga

SEQ ID NO: 15580 - DNA, 25 bp, Homo sapiens
gaagtcttcctagttgcatcctgta

SEQ ID NO: 15581 - DNA, 25 bp, Homo sapiens
gcagacttttctcccttttatttac

SEQ ID NO: 15582 - DNA, 25 bp, Homo sapiens
cccttgtgtgaaggagacagtcttc

SEQ ID NO: 15583 - DNA, 25 bp, Homo sapiens
ctgcctctggcctgagtaactggga

SEQ ID NO: 15584 - DNA, 25 bp, Homo sapiens
ctgtgtcccattttaccaagttgta

SEQ ID NO: 15585 - DNA, 25 bp, Homo sapiens
tgggccataaacacaagccactttg

SEQ ID NO: 15586 - DNA, 25 bp, Homo sapiens
tctggcagcccttatagctatatgg

SEQ ID NO: 15587 - DNA, 25 bp, Homo sapiens
cccacagagccaggagaggtaatca

SEQ ID NO: 15588 - DNA, 25 bp, Homo sapiens
tccgaggctaacagtgacatgatgc

SEQ ID NO: 15589 - DNA, 25 bp, Homo sapiens
caagggcctgtcaattctggactga

SEQ ID NO: 15590 - DNA, 25 bp, Homo sapiens
gggcccactgtcacttcgggaaagt

SEQ ID NO: 15591 - DNA, 25 bp, Homo sapiens
acgaggctccttcttcattttgatg

SEQ ID NO: 15592 - DNA, 25 bp, Homo sapiens
gactcagttcccagcttccatgttg

SEQ ID NO: 15593 - DNA, 25 bp, Homo sapiens
ggctgcctggaacctgctacttaaa

SEQ ID NO: 15594 - DNA, 25 bp, Homo sapiens
ttgggcacagctggaacctttattc

SEQ ID NO: 15595 - DNA, 25 bp, Homo sapiens
ggcggcctcctgttaacactgcttt

SEQ ID NO: 15596 - DNA, 25 bp, Homo sapiens
atggaagccctgcaaacctcgattc

SEQ ID NO: 15597 - DNA, 25 bp, Homo sapiens
cttccacattgagtgtacagctatt

SEQ ID NO: 15598 - DNA, 25 bp, Homo sapiens
tccctgggatgtttctgagagcttt

SEQ ID NO: 15599 - DNA, 25 bp, Homo sapiens
aaaaaaaaagaatttccctaagtca

SEQ ID NO: 15600 - DNA, 25 bp, Homo sapiens
cacatacgtcttgatggaagccacc

SEQ ID NO: 15601 - DNA, 25 bp, Homo sapiens
ctcagatgttaaaggcccggctctc

SEQ ID NO: 15602 - DNA, 25 bp, Homo sapiens
ccggtgtcatggcatctagtaaaca

SEQ ID NO: 15603 - DNA, 25 bp, Homo sapiens
ggatgcttttctgtgtccaccacta

SEQ ID NO: 15604 - DNA, 25 bp, Homo sapiens
tggggctcctcttaactcacagatg

SEQ ID NO: 15605 - DNA, 25 bp, Homo sapiens
tcccggtgtgtttttggccatcaaa

SEQ ID NO: 15606 - DNA, 25 bp, Homo sapiens
ccctcggctgagtgttttgcatgtt

SEQ ID NO: 15607 - DNA, 25 bp, Homo sapiens
ggtgctccgtgctctcacattcatt

SEQ ID NO: 15608 - DNA, 25 bp, Homo sapiens
tgctccgtgctacattgactcctta

SEQ ID NO: 15609 - DNA, 25 bp, Homo sapiens
agccctgctggtactgggtccttta

SEQ ID NO: 15610 - DNA, 25 bp, Homo sapiens
gtggggcccatcaccagcaataaga

SEQ ID NO: 15611 - DNA, 25 bp, Homo sapiens
ctcctggggcatgtattctagaaca

SEQ ID NO: 15612 - DNA, 25 bp, Homo sapiens
agccgcacgcatgcacttgtgtttc

SEQ ID NO: 15613 - DNA, 25 bp, Homo sapiens
gtcactctgtttcctcctgctagca

SEQ ID NO: 15614 - DNA, 25 bp, Homo sapiens
cccacttgggcttgagatccgaaca

SEQ ID NO: 15615 - DNA, 25 bp, Homo sapiens
ttgaccctgggttctgagtttgaca

SEQ ID NO: 15616 - DNA, 25 bp, Homo sapiens
ctcctgagtatattccggctttgta

SEQ ID NO: 15617 - DNA, 25 bp, Homo sapiens
tcccatgccagtgaagctgcagttc

SEQ ID NO: 15618 - DNA, 25 bp, Homo sapiens
caaaggttagtttacgcagtgcata

SEQ ID NO: 15619 - DNA, 25 bp, Homo sapiens
gcagccttgagaagcccttagaata

SEQ ID NO: 15620 - DNA, 25 bp, Homo sapiens
gggcctcgttgaccttcagttctca

SEQ ID NO: 15621 - DNA, 25 bp, Homo sapiens
catcgggcatctgtagagcaatttc

SEQ ID NO: 15622 - DNA, 25 bp, Homo sapiens
ctgcctgttagggtgtcaagatatc

SEQ ID NO: 15623 - DNA, 25 bp, Homo sapiens
taccatgtggccgtgcgattgacaa

SEQ ID NO: 15624 - DNA, 25 bp, Homo sapiens
cctgtggctggactagttcttaaac

SEQ ID NO: 15625 - DNA, 25 bp, Homo sapiens
tgtttgcaccaaacccaagggcttg

SEQ ID NO: 15626 - DNA, 25 bp, Homo sapiens
gacagtgtcaatccagctctcgtta

SEQ ID NO: 15627 - DNA, 25 bp, Homo sapiens
ggagtcactttttcagagcagcacc

SEQ ID NO: 15628 - DNA, 25 bp, Homo sapiens
aggcttggctgtcgtttgtaacaca

SEQ ID NO: 15629 - DNA, 25 bp, Homo sapiens
aaggccaggtatggtggttcacgcc

SEQ ID NO: 15630 - DNA, 25 bp, Homo sapiens
ggccacactaaatgggcaggctcta

SEQ ID NO: 15631 - DNA, 25 bp, Homo sapiens
cttggcagcttcctcagcaaagatg

SEQ ID NO: 15632 - DNA, 25 bp, Homo sapiens
tcaccgaacagatgggcagagtcta

SEQ ID NO: 15633 - DNA, 25 bp, Homo sapiens
tggttgcaactgacccgccatgctg

SEQ ID NO: 15634 - DNA, 25 bp, Homo sapiens
agctatcttttgttcctctggtgga

SEQ ID NO: 15635 - DNA, 25 bp, Homo sapiens
agactgggtctgtgccatttgcata

SEQ ID NO: 15636 - DNA, 25 bp, Homo sapiens
atgccttcagcttttggggtccaca

SEQ ID NO: 15637 - DNA, 25 bp, Homo sapiens
tttctcttggacttgcttgggcctc

SEQ ID NO: 15638 - DNA, 25 bp, Homo sapiens
ttcatgtctgcagctaaggtattta

SEQ ID NO: 15639 - DNA, 25 bp, Homo sapiens
ccagggatctcaggtactgtcattc

SEQ ID NO: 15640 - DNA, 25 bp, Homo sapiens
gttaatggaaccatatacagaatta

SEQ ID NO: 15641 - DNA, 25 bp, Homo sapiens
gtgaacccttctacgtcattggatg

SEQ ID NO: 15642 - DNA, 25 bp, Homo sapiens
tggcctcctgtacatctctctcttg

SEQ ID NO: 15643 - DNA, 25 bp, Homo sapiens
agggcctaagggtgtcttttctaca

SEQ ID NO: 15644 - DNA, 25 bp, Homo sapiens
ccgtggctctcagcatataggatta

SEQ ID NO: 15645 - DNA, 25 bp, Homo sapiens
tgcttgatttgctccagaacactta

SEQ ID NO: 15646 - DNA, 25 bp, Homo sapiens
aggccaggacactatgacatctttg

SEQ ID NO: 15647 - DNA, 25 bp, Homo sapiens
ggactcatctgttaaggccttggca

SEQ ID NO: 15648 - DNA, 25 bp, Homo sapiens
gttccctaccctaagtgacctgtta

SEQ ID NO: 15649 - DNA, 25 bp, Homo sapiens
agcggcctccgacttgatacatata

SEQ ID NO: 15650 - DNA, 25 bp, Homo sapiens
ccctttggtgtgagaggagatgtca

SEQ ID NO: 15651 - DNA, 25 bp, Homo sapiens
ggggagctcttaaccatgatttaca

SEQ ID NO: 15652 - DNA, 25 bp, Homo sapiens
cccagaagcgtgaggcccaaaagta

SEQ ID NO: 15653 - DNA, 25 bp, Homo sapiens
accaatgttttctacctgaggcctc

SEQ ID NO: 15654 - DNA, 25 bp, Homo sapiens
taagggcctcacagtcaaaagaatg

SEQ ID NO: 15655 - DNA, 25 bp, Homo sapiens
gacgcccttcatgagttacaccttg

SEQ ID NO: 15656 - DNA, 25 bp, Homo sapiens
atccagccctagtcctgaaaattgg

SEQ ID NO: 15657 - DNA, 25 bp, Homo sapiens
ccagccttaggtgcaatttgattca

SEQ ID NO: 15658 - DNA, 25 bp, Homo sapiens
aagggttctactcctggcccagatg

SEQ ID NO: 15659 - DNA, 25 bp, Homo sapiens
cccggggtcagctaatcttattatt

SEQ ID NO: 15660 - DNA, 25 bp, Homo sapiens
tctccaaagtcaatcccggcctgta

SEQ ID NO: 15661 - DNA, 25 bp, Homo sapiens
gccctctggggaaagacagaactta

SEQ ID NO: 15662 - DNA, 25 bp, Homo sapiens
ccgccagttttgtcttgtgatgcca

SEQ ID NO: 15663 - DNA, 25 bp, Homo sapiens
ttgcatggatgagccagcttcactg

SEQ ID NO: 15664 - DNA, 25 bp, Homo sapiens
agccgctcgggttttattccacaca

SEQ ID NO: 15665 - DNA, 25 bp, Homo sapiens
gctcacctgagacacccgatagatt

SEQ ID NO: 15666 - DNA, 25 bp, Homo sapiens
ggcggatggcatggaactttttata

SEQ ID NO: 15667 - DNA, 25 bp, Homo sapiens
cagccttgcttggtgttaaagatta

SEQ ID NO: 15668 - DNA, 25 bp, Homo sapiens
gcagaccctgttcgatttcccaaga

SEQ ID NO: 15669 - DNA, 25 bp, Homo sapiens
cacctgtgatcgtgcctattaagca

SEQ ID NO: 15670 - DNA, 25 bp, Homo sapiens
gccacgcgaatccttgagtcactta

SEQ ID NO: 15671 - DNA, 25 bp, Homo sapiens
cctgtgctactaagatagtggtgtc

SEQ ID NO: 15672 - DNA, 25 bp, Homo sapiens
catgcatggacccctcataagatgg

SEQ ID NO: 15673 - DNA, 25 bp, Homo sapiens
actgctaaccctgtgtgaaatggcc

SEQ ID NO: 15674 - DNA, 25 bp, Homo sapiens
aggggactgtttcaagcattctacc

SEQ ID NO: 15675 - DNA, 25 bp, Homo sapiens
tcctgcttctctaatgcttgctggg

SEQ ID NO: 15676 - DNA, 25 bp, Homo sapiens
ctattgttctttcaggagggctccc

SEQ ID NO: 15677 - DNA, 25 bp, Homo sapiens
tgctctcactgggacagctgttctg

SEQ ID NO: 15678 - DNA, 25 bp, Homo sapiens
agttgccttaacaccagtcaatgga

SEQ ID NO: 15679 - DNA, 25 bp, Homo sapiens
gctgccctggtcatcatgtgaagta

SEQ ID NO: 15680 - DNA, 25 bp, Homo sapiens
ggaagcctagttttcagttaccaaa

SEQ ID NO: 15681 - DNA, 25 bp, Homo sapiens
gaagccatagttatccctgtctctg

SEQ ID NO: 15682 - DNA, 25 bp, Homo sapiens
cccagctctggtcagtgatttggtc

SEQ ID NO: 15683 - DNA, 25 bp, Homo sapiens
cgagttgcaagccaccctgctaata

SEQ ID NO: 15684 - DNA, 25 bp, Homo sapiens
accctcttgggatctgctaaagtta

SEQ ID NO: 15685 - DNA, 25 bp, Homo sapiens
gtccaagggtttttaagagccccct

SEQ ID NO: 15686 - DNA, 25 bp, Homo sapiens
gggcatagccagagttccaaatttg

SEQ ID NO: 15687 - DNA, 25 bp, Homo sapiens
tgcccaatggtagaagagccacctc

SEQ ID NO: 15688 - DNA, 25 bp, Homo sapiens
accatactttcacaggcagggaatg

SEQ ID NO: 15689 - DNA, 25 bp, Homo sapiens
actgtggggcccaaattcttgattt

SEQ ID NO: 15690 - DNA, 25 bp, Homo sapiens
aggggcttcatacagggctaatacg

SEQ ID NO: 15691 - DNA, 25 bp, Homo sapiens
ggccaggactcttccttcataaagt

SEQ ID NO: 15692 - DNA, 25 bp, Homo sapiens
ggcctctttgtcactccttggatta

SEQ ID NO: 15693 - DNA, 25 bp, Homo sapiens
taccctgcttgctctagtttctgga

SEQ ID NO: 15694 - DNA, 25 bp, Homo sapiens
ggcagagttgtcttacattaacata

SEQ ID NO: 15695 - DNA, 25 bp, Homo sapiens
ctggacacgctattgacgagaaatc

SEQ ID NO: 15696 - DNA, 25 bp, Homo sapiens
tcgtctgttcggtatgcaagtaatc

SEQ ID NO: 15697 - DNA, 25 bp, Homo sapiens
ggtcgcatttggacatgactgaata

SEQ ID NO: 15698 - DNA, 25 bp, Homo sapiens
gtgttccttcgagcccactttgaga

SEQ ID NO: 15699 - DNA, 25 bp, Homo sapiens
cgggcacgtctcttaaacatgattc

SEQ ID NO: 15700 - DNA, 25 bp, Homo sapiens
gaacttgccgttagcattgcccatg

SEQ ID NO: 15701 - DNA, 25 bp, Homo sapiens
accctccttgttagcggaaagctta

SEQ ID NO: 15702 - DNA, 25 bp, Homo sapiens
tggccgtcagccactagatcagagg

SEQ ID NO: 15703 - DNA, 25 bp, Homo sapiens
agcattcagaagtgggtaaatttcc

SEQ ID NO: 15704 - DNA, 25 bp, Homo sapiens
gctgaaaaccagtttgaactgtttc

SEQ ID NO: 15705 - DNA, 25 bp, Homo sapiens
tgctcacgctccatcctgcttaagg

SEQ ID NO: 15706 - DNA, 25 bp, Homo sapiens
ttgcatgcagcctccatctagggtg

SEQ ID NO: 15707 - DNA, 25 bp, Homo sapiens
tatgggccagccacaagcactgtcc

SEQ ID NO: 15708 - DNA, 25 bp, Homo sapiens
gctctgatgtcttctggcagggtca

SEQ ID NO: 15709 - DNA, 25 bp, Homo sapiens
ggcccagcacccaggctcagtttta

SEQ ID NO: 15710 - DNA, 25 bp, Homo sapiens
tccacatggaggatgagtttgctca

SEQ ID NO: 15711 - DNA, 25 bp, Homo sapiens
tggccatgcttgatgaacaacccta

SEQ ID NO: 15712 - DNA, 25 bp, Homo sapiens
ctttctgcaggcgagaccttatgga

SEQ ID NO: 15713 - DNA, 25 bp, Homo sapiens
actcagctttccagggtttcgggta

SEQ ID NO: 15714 - DNA, 25 bp, Homo sapiens
tctctatgttagcaggcacggtcta

SEQ ID NO: 15715 - DNA, 25 bp, Homo sapiens
tgagtccatcttccctgtacaagtg

SEQ ID NO: 15716 - DNA, 25 bp, Homo sapiens
ggaccctgacgagcagcccttattg

SEQ ID NO: 15717 - DNA, 25 bp, Homo sapiens
gctgcctaatggtttgctgtcgata

SEQ ID NO: 15718 - DNA, 25 bp, Homo sapiens
agggcaggcatcttctcagcatttg

SEQ ID NO: 15719 - DNA, 25 bp, Homo sapiens
ccggggagtcgttattgccttacta

SEQ ID NO: 15720 - DNA, 25 bp, Homo sapiens
tctaggccctgaaaagcgatgcttt

SEQ ID NO: 15721 - DNA, 25 bp, Homo sapiens
ttcgcccactgtagccaggagattc

SEQ ID NO: 15722 - DNA, 25 bp, Homo sapiens
gagggcttttttcctggcacttaga

SEQ ID NO: 15723 - DNA, 25 bp, Homo sapiens
cctcagcctggaaatctggaacttc

SEQ ID NO: 15724 - DNA, 25 bp, Homo sapiens
ttgttctctctgcaacctgtatgga

SEQ ID NO: 15725 - DNA, 25 bp, Homo sapiens
ctgggaggtgtctcctctgtacata

SEQ ID NO: 15726 - DNA, 25 bp, Homo sapiens
tctcagctcatagtcctcgaaagtg

SEQ ID NO: 15727 - DNA, 25 bp, Homo sapiens
tattcccagggaaagaacccattcg

SEQ ID NO: 15728 - DNA, 25 bp, Homo sapiens
tggcatttagtaaccctctctttta

SEQ ID NO: 15729 - DNA, 25 bp, Homo sapiens
cctgagcatacgtatttttaaggtt

SEQ ID NO: 15730 - DNA, 25 bp, Homo sapiens
cggcatgggcttatcatcttcaaca

SEQ ID NO: 15731 - DNA, 25 bp, Homo sapiens
ggggtttcctcctcagctaaaaatc

SEQ ID NO: 15732 - DNA, 25 bp, Homo sapiens
gtggtcactcacttcttctcaggga

SEQ ID NO: 15733 - DNA, 25 bp, Homo sapiens
tgggcatgtcttccttgtctctttg

SEQ ID NO: 15734 - DNA, 25 bp, Homo sapiens
acctccgttttcagggatctttaga

SEQ ID NO: 15735 - DNA, 25 bp, Homo sapiens
tgctctctggctgaaggaaaccttc

SEQ ID NO: 15736 - DNA, 25 bp, Homo sapiens
ccattcattgtcaggagggagtaac

SEQ ID NO: 15737 - DNA, 25 bp, Homo sapiens
tggagacaccctgcctgagaagcca

SEQ ID NO: 15738 - DNA, 25 bp, Homo sapiens
gtgggctgttcccatcacagaagcc

SEQ ID NO: 15739 - DNA, 25 bp, Homo sapiens
gcatctagttcctgctggaggttca

SEQ ID NO: 15740 - DNA, 25 bp, Homo sapiens
gtgccattctctgtgcccatcatag

SEQ ID NO: 15741 - DNA, 25 bp, Homo sapiens
gcccggtttcatgcaagacgccctg

SEQ ID NO: 15742 - DNA, 25 bp, Homo sapiens
ccagggtgcccttttacaaactttg

SEQ ID NO: 15743 - DNA, 25 bp, Homo sapiens
tgtgtgctcccactctgccttgaga

SEQ ID NO: 15744 - DNA, 25 bp, Homo sapiens
ttgaacctctctctcctggccagtg

SEQ ID NO: 15745 - DNA, 25 bp, Homo sapiens
ggatctcctcctgccttcacttata

SEQ ID NO: 15746 - DNA, 25 bp, Homo sapiens
tctggctttaggagcagctacattc

SEQ ID NO: 15747 - DNA, 25 bp, Homo sapiens
ggcctcaccttgcaagcagccaata

SEQ ID NO: 15748 - DNA, 25 bp, Homo sapiens
agccgacttgagagaggtgtttatc

SEQ ID NO: 15749 - DNA, 25 bp, Homo sapiens
ccctgggtccagtcttcagaggcta

SEQ ID NO: 15750 - DNA, 25 bp, Homo sapiens
ctgagcttgttgagggcactctttc

SEQ ID NO: 15751 - DNA, 25 bp, Homo sapiens
gcagaacagctgcaagagctcatta

SEQ ID NO: 15752 - DNA, 25 bp, Homo sapiens
ttcgcctccaaagagcatcagattg

SEQ ID NO: 15753 - DNA, 25 bp, Homo sapiens
gctgttctgggatccttcacctcta

SEQ ID NO: 15754 - DNA, 25 bp, Homo sapiens
ctgggtgctctccttgtgctattta

SEQ ID NO: 15755 - DNA, 25 bp, Homo sapiens
atgacagctgtcgttcggcactcca

SEQ ID NO: 15756 - DNA, 25 bp, Homo sapiens
gaccagttgcccagaagctctcata

SEQ ID NO: 15757 - DNA, 25 bp, Homo sapiens
accatgggagtccttctcactgtgc

SEQ ID NO: 15758 - DNA, 25 bp, Homo sapiens
tccagggaggcccagcaatttccag

SEQ ID NO: 15759 - DNA, 25 bp, Homo sapiens
agcccggggtaatactgatacttta

SEQ ID NO: 15760 - DNA, 25 bp, Homo sapiens
gtagacctcagacctccagactttg

SEQ ID NO: 15761 - DNA, 25 bp, Homo sapiens
ccactcttggggacagacttatctc

SEQ ID NO: 15762 - DNA, 25 bp, Homo sapiens
caactgcgtttctgtctgctgggaa

SEQ ID NO: 15763 - DNA, 25 bp, Homo sapiens
gccatttctgctgtgaccttcgtta

SEQ ID NO: 15764 - DNA, 25 bp, Homo sapiens
gccaaggtctttttggacgtccctg

SEQ ID NO: 15765 - DNA, 25 bp, Homo sapiens
ggctttccttccagttacccagaca

SEQ ID NO: 15766 - DNA, 25 bp, Homo sapiens
gaagggcccaacctcccagtaaatc

SEQ ID NO: 15767 - DNA, 25 bp, Homo sapiens
gtggtggcacatccagttaaatata

SEQ ID NO: 15768 - DNA, 25 bp, Homo sapiens
actggagttggctgtctgagatttc

SEQ ID NO: 15769 - DNA, 25 bp, Homo sapiens
gttactgggaggctgcaatgcatca

SEQ ID NO: 15770 - DNA, 25 bp, Homo sapiens
ccttggggattgattggtgattgtc

SEQ ID NO: 15771 - DNA, 25 bp, Homo sapiens
gggtgtccctcatctacaaatgttg

SEQ ID NO: 15772 - DNA, 25 bp, Homo sapiens
ggggtcaatctttctgctggtctca

SEQ ID NO: 15773 - DNA, 25 bp, Homo sapiens
tgctgcaggaagaatcacgtttctc

SEQ ID NO: 15774 - DNA, 25 bp, Homo sapiens
aggcaggcctcccactatgtagatg

SEQ ID NO: 15775 - DNA, 25 bp, Homo sapiens
gagacttatcatgacagcgcctgtg

SEQ ID NO: 15776 - DNA, 25 bp, Homo sapiens
tgatgcaatgaccatggagccctta

SEQ ID NO: 15777 - DNA, 25 bp, Homo sapiens
tgggagcattcctcacttcagcatg

SEQ ID NO: 15778 - DNA, 25 bp, Homo sapiens
tcctctgtaaactggtggcaatttc

SEQ ID NO: 15779 - DNA, 25 bp, Homo sapiens
gtatatttcaaaatcaccaccacca

SEQ ID NO: 15780 - DNA, 25 bp, Homo sapiens
gcccaatagtgtcatgagtgccatg

SEQ ID NO: 15781 - DNA, 25 bp, Homo sapiens
cccaatagatgatgtcccaaatgtg

SEQ ID NO: 15782 - DNA, 25 bp, Homo sapiens
gccggcctgccttaaataactctaa

SEQ ID NO: 15783 - DNA, 25 bp, Homo sapiens
tccctctgcaggctcaggacaactg

SEQ ID NO: 15784 - DNA, 25 bp, Homo sapiens
ccggcgctcagcttcgttcaagtct

SEQ ID NO: 15785 - DNA, 25 bp, Homo sapiens
agggtccagtgttgctctagtcaga

SEQ ID NO: 15786 - DNA, 25 bp, Homo sapiens
tctagcagtcatgccctcagcagga

SEQ ID NO: 15787 - DNA, 25 bp, Homo sapiens
cggctacactcctagttcttgagaa

SEQ ID NO: 15788 - DNA, 25 bp, Homo sapiens
cccgctgggaagaaacaactacatc

SEQ ID NO: 15789 - DNA, 25 bp, Homo sapiens
ccctaagtgcttgaggcggagaaca

SEQ ID NO: 15790 - DNA, 25 bp, Homo sapiens
taatctgtacctgccctgttgggga

SEQ ID NO: 15791 - DNA, 25 bp, Homo sapiens
cagccctgtcctgggaattgtatta

SEQ ID NO: 15792 - DNA, 25 bp, Homo sapiens
tgacggggcctccttgcaaaatcaa

SEQ ID NO: 15793 - DNA, 25 bp, Homo sapiens
cgggaggtctttgccaggtaaccaa

SEQ ID NO: 15794 - DNA, 25 bp, Homo sapiens
gggcactccagtcttccttagaaga

SEQ ID NO: 15795 - DNA, 25 bp, Homo sapiens
agcaccacctgaaggcgcttggcca

SEQ ID NO: 15796 - DNA, 25 bp, Homo sapiens
cctgaggtcttggaactggttatta

SEQ ID NO: 15797 - DNA, 25 bp, Homo sapiens
aggctctgctttcttccaacatggg

SEQ ID NO: 15798 - DNA, 25 bp, Homo sapiens
gccctttggggacaaaactccttta

SEQ ID NO: 15799 - DNA, 25 bp, Homo sapiens
ctctgggattaacctgggcactttt

SEQ ID NO: 15800 - DNA, 25 bp, Homo sapiens
cagcgtggccctagtgaatgcattc

SEQ ID NO: 15801 - DNA, 25 bp, Homo sapiens
aagtagctaaccttcccataatgtg

SEQ ID NO: 15802 - DNA, 25 bp, Homo sapiens
ctgtatctgtctatcaattgagagg

SEQ ID NO: 15803 - DNA, 25 bp, Homo sapiens
aagaaagaaaccaaagcggtggccc

SEQ ID NO: 15804 - DNA, 25 bp, Homo sapiens
atctgccctggaattgcgtttaacc

SEQ ID NO: 15805 - DNA, 25 bp, Homo sapiens
tccgtggccacccttgtgaaaagca

SEQ ID NO: 15806 - DNA, 25 bp, Homo sapiens
cttggttctgattgctggttggttg

SEQ ID NO: 15807 - DNA, 25 bp, Homo sapiens
gacctcttggcctgatcgttatgta

SEQ ID NO: 15808 - DNA, 25 bp, Homo sapiens
gctggctctgggcaaagtatgaatc

SEQ ID NO: 15809 - DNA, 25 bp, Homo sapiens
tgacgactgtatacctgccacctga

SEQ ID NO: 15810 - DNA, 25 bp, Homo sapiens
caggtcagtgctttgcacagcatca

SEQ ID NO: 15811 - DNA, 25 bp, Homo sapiens
gtccagggccttcctcttcctcttt

SEQ ID NO: 15812 - DNA, 25 bp, Homo sapiens
cccaggttttactgaggagtatcta

SEQ ID NO: 15813 - DNA, 25 bp, Homo sapiens
tgaccctggcccatccaagacagtg

SEQ ID NO: 15814 - DNA, 25 bp, Homo sapiens
cagctcctggaggtgacaagatttc

SEQ ID NO: 15815 - DNA, 25 bp, Homo sapiens
gcaggctcgcctcccagtacaaaag

SEQ ID NO: 15816 - DNA, 25 bp, Homo sapiens
ctcagaggggagcagcaactgcatc

SEQ ID NO: 15817 - DNA, 25 bp, Homo sapiens
cggctgtcctcagtgtgctcagaga

SEQ ID NO: 15818 - DNA, 25 bp, Homo sapiens
gcctcctcttgggtgatgttcagtg

SEQ ID NO: 15819 - DNA, 25 bp, Homo sapiens
agacgtctccttggcctctggggaa

SEQ ID NO: 15820 - DNA, 25 bp, Homo sapiens
gctgggcagtcacacatcatctaga

SEQ ID NO: 15821 - DNA, 25 bp, Homo sapiens
atcctacttggattggggccgatcg

SEQ ID NO: 15822 - DNA, 25 bp, Homo sapiens
ggccgcgccgtctaagttctccaaa

SEQ ID NO: 15823 - DNA, 25 bp, Homo sapiens
ctccgggctctgattgacatttcta

SEQ ID NO: 15824 - DNA, 25 bp, Homo sapiens
agtgcgtcctaacagagtctccaga

SEQ ID NO: 15825 - DNA, 25 bp, Homo sapiens
ggccgccctggctttgaaatatctc

SEQ ID NO: 15826 - DNA, 25 bp, Homo sapiens
caaagcgctttggagactgactgca

SEQ ID NO: 15827 - DNA, 25 bp, Homo sapiens
agaatggtctgtcttatatgaagga

SEQ ID NO: 15828 - DNA, 25 bp, Homo sapiens
cttggacttagttggctgcatgtaa

SEQ ID NO: 15829 - DNA, 25 bp, Homo sapiens
ctgcatccaaatgtttacgggtgtg

SEQ ID NO: 15830 - DNA, 25 bp, Homo sapiens
atcacctactttcttgtctggcaga

SEQ ID NO: 15831 - DNA, 25 bp, Homo sapiens
ctagtgtgacatctccaggaccttt

SEQ ID NO: 15832 - DNA, 25 bp, Homo sapiens
ctgtcttatttgatcccgtgtaggg

SEQ ID NO: 15833 - DNA, 25 bp, Homo sapiens
accgcctggttttagatgatcccta

SEQ ID NO: 15834 - DNA, 25 bp, Homo sapiens
gggcaaacttcacttctctttgttc

SEQ ID NO: 15835 - DNA, 25 bp, Homo sapiens
tgactccctcctgttgtagcctata

SEQ ID NO: 15836 - DNA, 25 bp, Homo sapiens
acttggacagtctccttttgcagga

SEQ ID NO: 15837 - DNA, 25 bp, Homo sapiens
cgcataagagactggggagagccct

SEQ ID NO: 15838 - DNA, 25 bp, Homo sapiens
tcaaagaatggactggaatgccgta

SEQ ID NO: 15839 - DNA, 25 bp, Homo sapiens
tcggtgggcacttactgaatttatc

SEQ ID NO: 15840 - DNA, 25 bp, Homo sapiens
atcatctctgagtttagtttctatt

SEQ ID NO: 15841 - DNA, 25 bp, Homo sapiens
tttctgagaggaaattggcaatgta

SEQ ID NO: 15842 - DNA, 25 bp, Homo sapiens
tgcaacactagtaatttgtagagtc

SEQ ID NO: 15843 - DNA, 25 bp, Homo sapiens
ataccatcttaccaaaaattttccc

SEQ ID NO: 15844 - DNA, 25 bp, Homo sapiens
cttcctttccttctataatgctcac

SEQ ID NO: 15845 - DNA, 25 bp, Homo sapiens
tagcctagctctccttgatcaaaag

SEQ ID NO: 15846 - DNA, 25 bp, Homo sapiens
ggagcacagacatgcccaccttaga

SEQ ID NO: 15847 - DNA, 25 bp, Homo sapiens
cagccctggtagcatagaggtaatc

SEQ ID NO: 15848 - DNA, 25 bp, Homo sapiens
ggagctggtattcatccaacattta

SEQ ID NO: 15849 - DNA, 25 bp, Homo sapiens
ttggaacccttgcttcttggtaaga

SEQ ID NO: 15850 - DNA, 25 bp, Homo sapiens
gccatggatgacaaaccctttctta

SEQ ID NO: 15851 - DNA, 25 bp, Homo sapiens
accttctgtgcttggctacctccta

SEQ ID NO: 15852 - DNA, 25 bp, Homo sapiens
acatcattttgtacagagggcctgg

SEQ ID NO: 15853 - DNA, 25 bp, Homo sapiens
aggataacttttcaaacaatgataa

SEQ ID NO: 15854 - DNA, 25 bp, Homo sapiens
gtgcctgtagcatagataaaacctc

SEQ ID NO: 15855 - DNA, 25 bp, Homo sapiens
agcagtatttccctggccaaatgga

SEQ ID NO: 15856 - DNA, 25 bp, Homo sapiens
ggggtgatgatcttttttcctgaca

SEQ ID NO: 15857 - DNA, 25 bp, Homo sapiens
gagtgactcttgatgccctgtgcta

SEQ ID NO: 15858 - DNA, 25 bp, Homo sapiens
agcattcaacctgggctcatgtgga

SEQ ID NO: 15859 - DNA, 25 bp, Homo sapiens
caaaactggaagtccgtcatatgct

SEQ ID NO: 15860 - DNA, 25 bp, Homo sapiens
tgagcctcagccacacagcagtgta

SEQ ID NO: 15861 - DNA, 25 bp, Homo sapiens
atggccctcactaacactgctaata

SEQ ID NO: 15862 - DNA, 25 bp, Homo sapiens
cattgcagtagtgcttctaagagta

SEQ ID NO: 15863 - DNA, 25 bp, Homo sapiens
ctctgctcagatgggataaaacctc

SEQ ID NO: 15864 - DNA, 25 bp, Homo sapiens
tgaacctatgaccatctgaccaatg

SEQ ID NO: 15865 - DNA, 25 bp, Homo sapiens
gggctgttattgtcactccagaata

SEQ ID NO: 15866 - DNA, 25 bp, Homo sapiens
tccaagctaatcagaggggcaatgt

SEQ ID NO: 15867 - DNA, 25 bp, Homo sapiens
ggtcattcatgctttctcctcttag

SEQ ID NO: 15868 - DNA, 25 bp, Homo sapiens
cctggagagggttactgcagtattt

SEQ ID NO: 15869 - DNA, 25 bp, Homo sapiens
cctttgggccaagggaactattgcc

SEQ ID NO: 15870 - DNA, 25 bp, Homo sapiens
ggtcagccttattatcttcccaggg

SEQ ID NO: 15871 - DNA, 25 bp, Homo sapiens
tagctggggacattggcatacctga

SEQ ID NO: 15872 - DNA, 25 bp, Homo sapiens
tccctgactgatcaagaagaccata

SEQ ID NO: 15873 - DNA, 25 bp, Homo sapiens
gttgcacatctatctagaatagttc

SEQ ID NO: 15874 - DNA, 25 bp, Homo sapiens
tggctctccacaacacgaatgcata

SEQ ID NO: 15875 - DNA, 25 bp, Homo sapiens
gccaccagttcttaggtttcttacc

SEQ ID NO: 15876 - DNA, 25 bp, Homo sapiens
accttacttgtatcagggcctgaga

SEQ ID NO: 15877 - DNA, 25 bp, Homo sapiens
ttccttcagtttcccatttcaaata

SEQ ID NO: 15878 - DNA, 25 bp, Homo sapiens
attatgtttctcttttgaaaaagca

SEQ ID NO: 15879 - DNA, 25 bp, Homo sapiens
gctgtaatcctggatctgagattcc

SEQ ID NO: 15880 - DNA, 25 bp, Homo sapiens
tcttgaagtccataatctacagttg

SEQ ID NO: 15881 - DNA, 25 bp, Homo sapiens
ccctgttgactttggttatgccata

SEQ ID NO: 15882 - DNA, 25 bp, Homo sapiens
ctgtgaggcgcttccctataccata

SEQ ID NO: 15883 - DNA, 25 bp, Homo sapiens
ttctgagtttctggggcaaatcttc

SEQ ID NO: 15884 - DNA, 25 bp, Homo sapiens
tggtagccatgtcagggattcattc

SEQ ID NO: 15885 - DNA, 25 bp, Homo sapiens
tcctcagagagcatctaagggtttc

SEQ ID NO: 15886 - DNA, 25 bp, Homo sapiens
aaccagtcgttgagtgctatgtagc

SEQ ID NO: 15887 - DNA, 25 bp, Homo sapiens
gccaacttgctttgagtaacggttt

SEQ ID NO: 15888 - DNA, 25 bp, Homo sapiens
gaacccagatcagtcccaggcaatg

SEQ ID NO: 15889 - DNA, 25 bp, Homo sapiens
ccagaagagaggagttgctgatttc

SEQ ID NO: 15890 - DNA, 25 bp, Homo sapiens
ctacctctcatgagtgtggaccaca

SEQ ID NO: 15891 - DNA, 25 bp, Homo sapiens
ttgccttcaagcgactcatggtgta

SEQ ID NO: 15892 - DNA, 25 bp, Homo sapiens
tgccatggatacaggtcaaagtcta

SEQ ID NO: 15893 - DNA, 25 bp, Homo sapiens
tcgctaattacctctgcctgaaatg

SEQ ID NO: 15894 - DNA, 25 bp, Homo sapiens
agcatctgttgaaagtgtagtaata

SEQ ID NO: 15895 - DNA, 25 bp, Homo sapiens
ttattgctgataaaacctcttccat

SEQ ID NO: 15896 - DNA, 25 bp, Homo sapiens
gcctgtggccaagcctgtacaattg

SEQ ID NO: 15897 - DNA, 25 bp, Homo sapiens
gagtgacatcatctgcccttttgca

SEQ ID NO: 15898 - DNA, 25 bp, Homo sapiens
agtgatttaccaatgaccagggcca

SEQ ID NO: 15899 - DNA, 25 bp, Homo sapiens
tcccagctggagaaacatctaggta

SEQ ID NO: 15900 - DNA, 25 bp, Homo sapiens
tgaccctgacaggagctagcattta

SEQ ID NO: 15901 - DNA, 25 bp, Homo sapiens
atagggactttacgtaagtcactat

SEQ ID NO: 15902 - DNA, 25 bp, Homo sapiens
ttcagcaggagccagaacatctttc

SEQ ID NO: 15903 - DNA, 25 bp, Homo sapiens
cccatctgggaaataaaggcttaac

SEQ ID NO: 15904 - DNA, 25 bp, Homo sapiens
tccgctacagagagaaccacaatgc

SEQ ID NO: 15905 - DNA, 25 bp, Homo sapiens
gtgccttttggtgttgtcttctcta

SEQ ID NO: 15906 - DNA, 25 bp, Homo sapiens
tcccagggcacttcagtggcctttc

SEQ ID NO: 15907 - DNA, 25 bp, Homo sapiens
gtagtctgctgcctaactgagaatg

SEQ ID NO: 15908 - DNA, 25 bp, Homo sapiens
gactgggctcaaacacattctttcc

SEQ ID NO: 15909 - DNA, 25 bp, Homo sapiens
agcgcagtatctggtgcatagttac

SEQ ID NO: 15910 - DNA, 25 bp, Homo sapiens
aacagttccctgtctgaggtgggca

SEQ ID NO: 15911 - DNA, 25 bp, Homo sapiens
ggccctgaagccaaactcgtcattt

SEQ ID NO: 15912 - DNA, 25 bp, Homo sapiens
ggcttctcaacccagagcactgttg

SEQ ID NO: 15913 - DNA, 25 bp, Homo sapiens
gtagcccatcctttgagaaacagcc

SEQ ID NO: 15914 - DNA, 25 bp, Homo sapiens
tccgacttcatgacctttagctatg

SEQ ID NO: 15915 - DNA, 25 bp, Homo sapiens
ctgactactttatggtttctgcttg

SEQ ID NO: 15916 - DNA, 25 bp, Homo sapiens
gaaccagtaggtgacttcctcatta

SEQ ID NO: 15917 - DNA, 25 bp, Homo sapiens
atgcctggggctattttactcttta

SEQ ID NO: 15918 - DNA, 25 bp, Homo sapiens
ggtatgcccacctccaagtacagga

SEQ ID NO: 15919 - DNA, 25 bp, Homo sapiens
ttcccaggtggtgagcagcaatact

SEQ ID NO: 15920 - DNA, 25 bp, Homo sapiens
gtgaccctctgtctttgaatctaag

SEQ ID NO: 15921 - DNA, 25 bp, Homo sapiens
ggctctagatgcatacaaccttagc

SEQ ID NO: 15922 - DNA, 25 bp, Homo sapiens
cgacatctgccttaatcactggtga

SEQ ID NO: 15923 - DNA, 25 bp, Homo sapiens
tttgaccctgtggtagaacccagca

SEQ ID NO: 15924 - DNA, 25 bp, Homo sapiens
gccgctacggctgcacttcgaatca

SEQ ID NO: 15925 - DNA, 25 bp, Homo sapiens
tgcacagccttatttcaagatcagg

SEQ ID NO: 15926 - DNA, 25 bp, Homo sapiens
tgccctcaaggctactgtggttatc

SEQ ID NO: 15927 - DNA, 25 bp, Homo sapiens
cctccgctggctgcagaatataata

SEQ ID NO: 15928 - DNA, 25 bp, Homo sapiens
ggccatgtcacctgctgctggttta

SEQ ID NO: 15929 - DNA, 25 bp, Homo sapiens
gaagtctaaagcttgcctaccatga

SEQ ID NO: 15930 - DNA, 25 bp, Homo sapiens
tcttgatcaaactggacactatgtc

SEQ ID NO: 15931 - DNA, 25 bp, Homo sapiens
ttcctcagagacaaggtgatgatcc

SEQ ID NO: 15932 - DNA, 25 bp, Homo sapiens
aggttcttgcccagcatcagttcta

SEQ ID NO: 15933 - DNA, 25 bp, Homo sapiens
tcctggactggtttagcatggctca

SEQ ID NO: 15934 - DNA, 25 bp, Homo sapiens
tatcctgggtttctgcttatctgca

SEQ ID NO: 15935 - DNA, 25 bp, Homo sapiens
ctgctttagctctggggtagccata

SEQ ID NO: 15936 - DNA, 25 bp, Homo sapiens
ttggttctccaactctcatgtagga

SEQ ID NO: 15937 - DNA, 25 bp, Homo sapiens
cctatgttccatatgtgctcaattg

SEQ ID NO: 15938 - DNA, 25 bp, Homo sapiens
gtagtaaattttatgttaactttaa

SEQ ID NO: 15939 - DNA, 25 bp, Homo sapiens
actgaggtcccttgaggcaggtata

SEQ ID NO: 15940 - DNA, 25 bp, Homo sapiens
atctcatgtctctttggccttggga

SEQ ID NO: 15941 - DNA, 25 bp, Homo sapiens
agtgtcctttgtgtgcttgagaatc

SEQ ID NO: 15942 - DNA, 25 bp, Homo sapiens
actttgggaaattttgtcctatata

SEQ ID NO: 15943 - DNA, 25 bp, Homo sapiens
ttaccatgctgttattgtcattggg

SEQ ID NO: 15944 - DNA, 25 bp, Homo sapiens
gagaggtccatcgatccaaacttta

SEQ ID NO: 15945 - DNA, 25 bp, Homo sapiens
actgcgtctcttcaccattattgga

SEQ ID NO: 15946 - DNA, 25 bp, Homo sapiens
tgttctataaccatgagccttagta

SEQ ID NO: 15947 - DNA, 25 bp, Homo sapiens
gaggcatctggcacatttgcttata

SEQ ID NO: 15948 - DNA, 25 bp, Homo sapiens
cccttataggcttctgtgcaatttg

SEQ ID NO: 15949 - DNA, 25 bp, Homo sapiens
aagtgagatcttaccggccatgacc

SEQ ID NO: 15950 - DNA, 25 bp, Homo sapiens
ttgtttgctccctcaaagagaattc

SEQ ID NO: 15951 - DNA, 25 bp, Homo sapiens
cttgcccacctctgcttgatttata

SEQ ID NO: 15952 - DNA, 25 bp, Homo sapiens
caagtgctctaggttgggccaatca

SEQ ID NO: 15953 - DNA, 25 bp, Homo sapiens
tcacctccagagagtcaagtatgtc

SEQ ID NO: 15954 - DNA, 25 bp, Homo sapiens
tatatttccattcccacgctttaga

SEQ ID NO: 15955 - DNA, 25 bp, Homo sapiens
caaggaagaattgaggttatacatc

SEQ ID NO: 15956 - DNA, 25 bp, Homo sapiens
gtccttggcagagtgacaaatccca

SEQ ID NO: 15957 - DNA, 25 bp, Homo sapiens
caggaggacttttacccagggtgct

SEQ ID NO: 15958 - DNA, 25 bp, Homo sapiens
caccctttcaggtcaggttctgaga

SEQ ID NO: 15959 - DNA, 25 bp, Homo sapiens
gactgagatgtgtcttcctgaccta

SEQ ID NO: 15960 - DNA, 25 bp, Homo sapiens
gcctggaatcttgcctctgaactga

SEQ ID NO: 15961 - DNA, 25 bp, Homo sapiens
cttccagtatatgagacagggcttg

SEQ ID NO: 15962 - DNA, 25 bp, Homo sapiens
cgagtagcgcctatcagtctagtga

SEQ ID NO: 15963 - DNA, 25 bp, Homo sapiens
gcccatggccaaatagaacctcttt

SEQ ID NO: 15964 - DNA, 25 bp, Homo sapiens
tggctcataggtaccaacgtttgta

SEQ ID NO: 15965 - DNA, 25 bp, Homo sapiens
cgtgcctgccatccagttggtgtta

SEQ ID NO: 15966 - DNA, 25 bp, Homo sapiens
gcttgcttgtcttctgatcgtcttc

SEQ ID NO: 15967 - DNA, 25 bp, Homo sapiens
atgtatatatacacagatgatatgt

SEQ ID NO: 15968 - DNA, 25 bp, Homo sapiens
gccaacaagggtctgatatttcatg

SEQ ID NO: 15969 - DNA, 25 bp, Homo sapiens
cttttcaggaaaggttggctcattc

SEQ ID NO: 15970 - DNA, 25 bp, Homo sapiens
ccagcaggtgctcatataatcttta

SEQ ID NO: 15971 - DNA, 25 bp, Homo sapiens
agagcgatttctgccttaccctatt

SEQ ID NO: 15972 - DNA, 25 bp, Homo sapiens
gtgaacacctccatggcctctgaag

SEQ ID NO: 15973 - DNA, 25 bp, Homo sapiens
ggtgttctttccaacaaccagtgta

SEQ ID NO: 15974 - DNA, 25 bp, Homo sapiens
tgtccctggcttagattcatcattg

SEQ ID NO: 15975 - DNA, 25 bp, Homo sapiens
gcttctgctttaatccctgcctgga

SEQ ID NO: 15976 - DNA, 25 bp, Homo sapiens
gtgatgttgatttataattctttat

SEQ ID NO: 15977 - DNA, 25 bp, Homo sapiens
cctggtactgtggttggcttattca

SEQ ID NO: 15978 - DNA, 25 bp, Homo sapiens
tggacagttaatcctcctcttaatg

SEQ ID NO: 15979 - DNA, 25 bp, Homo sapiens
agatccctgggtctgtctcttttta

SEQ ID NO: 15980 - DNA, 25 bp, Homo sapiens
tcaacctgggtatgcacagtgacta

SEQ ID NO: 15981 - DNA, 25 bp, Homo sapiens
caagcctgtggtgttctctagagga

SEQ ID NO: 15982 - DNA, 25 bp, Homo sapiens
cgggaatgcacagaagcacatctta

SEQ ID NO: 15983 - DNA, 25 bp, Homo sapiens
cacatttggttcctcttgaccgata

SEQ ID NO: 15984 - DNA, 25 bp, Homo sapiens
ctggctcagttgcaattaccgttcc

SEQ ID NO: 15985 - DNA, 25 bp, Homo sapiens
gggatcttccactcagccatgtgca

SEQ ID NO: 15986 - DNA, 25 bp, Homo sapiens
gcccttccctatattgctctgctga

SEQ ID NO: 15987 - DNA, 25 bp, Homo sapiens
tctgtcactgtcaccaaaaaggagg

SEQ ID NO: 15988 - DNA, 25 bp, Homo sapiens
gctgcaagcttgagttatacacatg

SEQ ID NO: 15989 - DNA, 25 bp, Homo sapiens
ctgtcacatgctttacaaggcaggg

SEQ ID NO: 15990 - DNA, 25 bp, Homo sapiens
tgatgcatgctttacacggactggg

SEQ ID NO: 15991 - DNA, 25 bp, Homo sapiens
agccggtgtaaacaggacttatttc

SEQ ID NO: 15992 - DNA, 25 bp, Homo sapiens
tcacagtttatccttggagggtgcc

SEQ ID NO: 15993 - DNA, 25 bp, Homo sapiens
gtccctgcatgcgtgtttacatatg

SEQ ID NO: 15994 - DNA, 25 bp, Homo sapiens
ctgcagtgcggcttacaggtaaaac

SEQ ID NO: 15995 - DNA, 25 bp, Homo sapiens
ccatggacttcggacttgttaaaaa

SEQ ID NO: 15996 - DNA, 25 bp, Homo sapiens
aggtccctccttgcatctgttttta

SEQ ID NO: 15997 - DNA, 25 bp, Homo sapiens
caggaggtgttgacgattctacagc

SEQ ID NO: 15998 - DNA, 25 bp, Homo sapiens
tggggcattcccatttcagttttgg

SEQ ID NO: 15999 - DNA, 25 bp, Homo sapiens
acaaggctgtcacttcacacgtgga

SEQ ID NO: 16000 - DNA, 25 bp, Homo sapiens
ctgggtggagaagacctacttgatc

SEQ ID NO: 16001 - DNA, 25 bp, Homo sapiens
acgcttagtgagttgcccattttga

SEQ ID NO: 16002 - DNA, 25 bp, Homo sapiens
tgggctccagtcctctacaaagatg

SEQ ID NO: 16003 - DNA, 25 bp, Homo sapiens
gattgtccactctcagcagcaaaga

SEQ ID NO: 16004 - DNA, 25 bp, Homo sapiens
cttgccattcatatttggggtaaaa

SEQ ID NO: 16005 - DNA, 25 bp, Homo sapiens
tcctgtctgtgcttgtggctataca

SEQ ID NO: 16006 - DNA, 25 bp, Homo sapiens
caggttgcccttttgtctgtagaga

SEQ ID NO: 16007 - DNA, 25 bp, Homo sapiens
tgcagcctgtgtgaacccataaatc

SEQ ID NO: 16008 - DNA, 25 bp, Homo sapiens
tcctttcagtgaggcagctttcttg

SEQ ID NO: 16009 - DNA, 25 bp, Homo sapiens
ggtctaagagctgtactatcctgtg

SEQ ID NO: 16010 - DNA, 25 bp, Homo sapiens
ctcagcagtaggcagattcttctta

SEQ ID NO: 16011 - DNA, 25 bp, Homo sapiens
tggggctagtaatgcattctttcta

SEQ ID NO: 16012 - DNA, 25 bp, Homo sapiens
aggcaatctagtctccttctggatg

SEQ ID NO: 16013 - DNA, 25 bp, Homo sapiens
gcaggtagctagcacttcccatgta

SEQ ID NO: 16014 - DNA, 25 bp, Homo sapiens
tggctttctcgtctcatctcaatgg

SEQ ID NO: 16015 - DNA, 25 bp, Homo sapiens
gaggctgcctccctaattgcaaatg

SEQ ID NO: 16016 - DNA, 25 bp, Homo sapiens
aggcaccctgcttcctttgcttgca

SEQ ID NO: 16017 - DNA, 25 bp, Homo sapiens
ccaagagtggttccagcacaggata

SEQ ID NO: 16018 - DNA, 25 bp, Homo sapiens
cagggcaacttactggtttatagca

SEQ ID NO: 16019 - DNA, 25 bp, Homo sapiens
gttcagggtgcaggtttcaaatacc

SEQ ID NO: 16020 - DNA, 25 bp, Homo sapiens
gttagtttattctgcttttgtatcc

SEQ ID NO: 16021 - DNA, 25 bp, Homo sapiens
ggtgtcccatatttctcagagactg

SEQ ID NO: 16022 - DNA, 25 bp, Homo sapiens
atccaggcttgctgtgtgcaccaca

SEQ ID NO: 16023 - DNA, 25 bp, Homo sapiens
gtgacaacaagagacccagtggatt

SEQ ID NO: 16024 - DNA, 25 bp, Homo sapiens
gacaataatctagtttaaatctgcc

SEQ ID NO: 16025 - DNA, 25 bp, Homo sapiens
ttttgtttgtttttggctgacctca

SEQ ID NO: 16026 - DNA, 25 bp, Homo sapiens
gcagcttcttacacaacaggttata

SEQ ID NO: 16027 - DNA, 25 bp, Homo sapiens
ggcaatgcacaatccagttcttccc

SEQ ID NO: 16028 - DNA, 25 bp, Homo sapiens
ggaggtgccatatatttctaaaata

SEQ ID NO: 16029 - DNA, 25 bp, Homo sapiens
actccatacgtaaaggggtgttctc

SEQ ID NO: 16030 - DNA, 25 bp, Homo sapiens
acacctgctgtgattgatacctgga

SEQ ID NO: 16031 - DNA, 25 bp, Homo sapiens
tgccacatcctataggtgaaccata

SEQ ID NO: 16032 - DNA, 25 bp, Homo sapiens
gcctgactgtacaagggctcatttg

SEQ ID NO: 16033 - DNA, 25 bp, Homo sapiens
tccatctcagggcttggtacaaagt

SEQ ID NO: 16034 - DNA, 25 bp, Homo sapiens
ccctttggcacatggttctctcttg

SEQ ID NO: 16035 - DNA, 25 bp, Homo sapiens
ggcttttctgcccacttagctagta

SEQ ID NO: 16036 - DNA, 25 bp, Homo sapiens
gggcaacgatttcctctcgaaacta

SEQ ID NO: 16037 - DNA, 25 bp, Homo sapiens
gtagccctggcaacttaccttaata

SEQ ID NO: 16038 - DNA, 25 bp, Homo sapiens
ggggcatattccaacttttctgtta

SEQ ID NO: 16039 - DNA, 25 bp, Homo sapiens
ctccggaggcaagggtaaatctctt

SEQ ID NO: 16040 - DNA, 25 bp, Homo sapiens
tgcttcctgctgtgagagtataatc

SEQ ID NO: 16041 - DNA, 25 bp, Homo sapiens
taatggatttcaggttacagcttca

SEQ ID NO: 16042 - DNA, 25 bp, Homo sapiens
ttgaatcctctgacaactacagcta

SEQ ID NO: 16043 - DNA, 25 bp, Homo sapiens
cattaatataaaatgtcctcaaagg

SEQ ID NO: 16044 - DNA, 25 bp, Homo sapiens
tgactctcagatggccaacttaatg

SEQ ID NO: 16045 - DNA, 25 bp, Homo sapiens
agccagcttacaggccatgcttctg

SEQ ID NO: 16046 - DNA, 25 bp, Homo sapiens
catgcttctgttttatcctggccaa

SEQ ID NO: 16047 - DNA, 25 bp, Homo sapiens
acttgtctgtccataggtaggtata

SEQ ID NO: 16048 - DNA, 25 bp, Homo sapiens
agaactctttaatttgcatccagga

SEQ ID NO: 16049 - DNA, 25 bp, Homo sapiens
ggctgagccatgatacggaatattc

SEQ ID NO: 16050 - DNA, 25 bp, Homo sapiens
agggaccattatcttcctgagttta

SEQ ID NO: 16051 - DNA, 25 bp, Homo sapiens
tgggattctcatatttttatgtgct

SEQ ID NO: 16052 - DNA, 25 bp, Homo sapiens
aaaccgtgtatttctccgcagagcc

SEQ ID NO: 16053 - DNA, 25 bp, Homo sapiens
tttagagcgcacatggaacactgta

SEQ ID NO: 16054 - DNA, 25 bp, Homo sapiens
ggtagcatgtctccaaagccaagtg

SEQ ID NO: 16055 - DNA, 25 bp, Homo sapiens
cttgcaggttgcttcgatcattcta

SEQ ID NO: 16056 - DNA, 25 bp, Homo sapiens
tgcaggtcccactataaactcaact

SEQ ID NO: 16057 - DNA, 25 bp, Homo sapiens
accagtgtatgtgctctcttcaatc

SEQ ID NO: 16058 - DNA, 25 bp, Homo sapiens
ccattaataaatttacctagaaatg

SEQ ID NO: 16059 - DNA, 25 bp, Homo sapiens
acacacactttggaggaagcctgtc

SEQ ID NO: 16060 - DNA, 25 bp, Homo sapiens
gtaggctttagcaacccaacacatg

SEQ ID NO: 16061 - DNA, 25 bp, Homo sapiens
tccctttggtaactggctaacaatg

SEQ ID NO: 16062 - DNA, 25 bp, Homo sapiens
ggacactgtctcctcttttatgcta

SEQ ID NO: 16063 - DNA, 25 bp, Homo sapiens
ttgttcaaaaattcaggcctgcagc

SEQ ID NO: 16064 - DNA, 25 bp, Homo sapiens
aagataggagttcaatttcattact

SEQ ID NO: 16065 - DNA, 25 bp, Homo sapiens
ttaccttaccccaccataaaaagta

SEQ ID NO: 16066 - DNA, 25 bp, Homo sapiens
tagaatctaataatatacagaagac

SEQ ID NO: 16067 - DNA, 25 bp, Homo sapiens
taactatatgtgtatgtagtacatg

SEQ ID NO: 16068 - DNA, 25 bp, Homo sapiens
tgtccctggagatttcaacgtgaga

SEQ ID NO: 16069 - DNA, 25 bp, Homo sapiens
gatggttcctcttctctgctttatg

SEQ ID NO: 16070 - DNA, 25 bp, Homo sapiens
gtcaggggatacttcatgtaccatc

SEQ ID NO: 16071 - DNA, 25 bp, Homo sapiens
atgcccatttctgctttcaaccatg

SEQ ID NO: 16072 - DNA, 25 bp, Homo sapiens
aaggagccatctcagcctctcaaag

SEQ ID NO: 16073 - DNA, 25 bp, Homo sapiens
catgggagccaaggagatgtcatcc

SEQ ID NO: 16074 - DNA, 25 bp, Homo sapiens
cagcccactgaccttgttacttgta

SEQ ID NO: 16075 - DNA, 25 bp, Homo sapiens
gtgggttaccttctctggataaatg

SEQ ID NO: 16076 - DNA, 25 bp, Homo sapiens
gaggccctttcccacataggctgtg

SEQ ID NO: 16077 - DNA, 25 bp, Homo sapiens
ccgtatatgattccctctggtgaga

SEQ ID NO: 16078 - DNA, 25 bp, Homo sapiens
tcctttaggctttttgaacactttc

SEQ ID NO: 16079 - DNA, 25 bp, Homo sapiens
agaccctgtgttcacaccttcaaca

SEQ ID NO: 16080 - DNA, 25 bp, Homo sapiens
ccctgtggaagaaaatggatgcaac

SEQ ID NO: 16081 - DNA, 25 bp, Homo sapiens
catggcttcacatattaaaaaatac

SEQ ID NO: 16082 - DNA, 25 bp, Homo sapiens
acttggactggcccttgaattcaga

SEQ ID NO: 16083 - DNA, 25 bp, Homo sapiens
cggtgagggtgcacattataatctc

SEQ ID NO: 16084 - DNA, 25 bp, Homo sapiens
tgtgattctaccctttacttgctgc

SEQ ID NO: 16085 - DNA, 25 bp, Homo sapiens
aagtcggcaatcagcaggtggttta

SEQ ID NO: 16086 - DNA, 25 bp, Homo sapiens
gtctctcagggaagcagatccatta

SEQ ID NO: 16087 - DNA, 25 bp, Homo sapiens
tctaactctgaacgtggcccttata

SEQ ID NO: 16088 - DNA, 25 bp, Homo sapiens
gttgccatgaacaaggagcctctga

SEQ ID NO: 16089 - DNA, 25 bp, Homo sapiens
tggggcctacagtaagactctcata

SEQ ID NO: 16090 - DNA, 25 bp, Homo sapiens
ccatactctagcctacactgggtga

SEQ ID NO: 16091 - DNA, 25 bp, Homo sapiens
ctaagcagtcagtccacaggagatg

SEQ ID NO: 16092 - DNA, 25 bp, Homo sapiens
aggactccttcacttgcagcatatg

SEQ ID NO: 16093 - DNA, 25 bp, Homo sapiens
cacctagtggtggatagctattata

SEQ ID NO: 16094 - DNA, 25 bp, Homo sapiens
cctcggcaagctgacctgtgacaaa

SEQ ID NO: 16095 - DNA, 25 bp, Homo sapiens
agtggctcccttccatgatgacaaa

SEQ ID NO: 16096 - DNA, 25 bp, Homo sapiens
cccacacctggagagattcataaaa

SEQ ID NO: 16097 - DNA, 25 bp, Homo sapiens
gctcacaggtgagacccattgctta

SEQ ID NO: 16098 - DNA, 25 bp, Homo sapiens
cccatgtttgttgctgagggctata

SEQ ID NO: 16099 - DNA, 25 bp, Homo sapiens
cttgactacagtggtgaaaacatgg

SEQ ID NO: 16100 - DNA, 25 bp, Homo sapiens
gctggagatggctgcacaatgccta

SEQ ID NO: 16101 - DNA, 25 bp, Homo sapiens
tctctactttgtgaggaaggaataa

SEQ ID NO: 16102 - DNA, 25 bp, Homo sapiens
gtggcaggccacttcttctcatgta

SEQ ID NO: 16103 - DNA, 25 bp, Homo sapiens
tggcaatgctatcccagatcttagg

SEQ ID NO: 16104 - DNA, 25 bp, Homo sapiens
cagtaattcaagctccctggaggga

SEQ ID NO: 16105 - DNA, 25 bp, Homo sapiens
cttgtaggctttttggactgtgtca

SEQ ID NO: 16106 - DNA, 25 bp, Homo sapiens
ggtttctcttggagcttgagctgca

SEQ ID NO: 16107 - DNA, 25 bp, Homo sapiens
tctgttttcttgttcattccaagcc

SEQ ID NO: 16108 - DNA, 25 bp, Homo sapiens
tacattggtattcatccttctcttt

SEQ ID NO: 16109 - DNA, 25 bp, Homo sapiens
gtcatttgtcaaaagagtaacttga

SEQ ID NO: 16110 - DNA, 25 bp, Homo sapiens
tgagaatattactttaggaaccatc

SEQ ID NO: 16111 - DNA, 25 bp, Homo sapiens
agttgatttgccctcgtagtcgtca

SEQ ID NO: 16112 - DNA, 25 bp, Homo sapiens
ccgtaccctaggatctgcctcaatg

SEQ ID NO: 16113 - DNA, 25 bp, Homo sapiens
tttgtttttaatacaaaattgcatt

SEQ ID NO: 16114 - DNA, 25 bp, Homo sapiens
gcagccagctggtttgcctctctta

SEQ ID NO: 16115 - DNA, 25 bp, Homo sapiens
gggaaatatctactgtcttactagg

SEQ ID NO: 16116 - DNA, 25 bp, Homo sapiens
tgtttctttttttaattgtatttta

SEQ ID NO: 16117 - DNA, 25 bp, Homo sapiens
acacacttgtataaccaccatctgg

SEQ ID NO: 16118 - DNA, 25 bp, Homo sapiens
ctcacctagatgtctgccagcagtt

SEQ ID NO: 16119 - DNA, 25 bp, Homo sapiens
tgctgcatgctcagcggctcatata

SEQ ID NO: 16120 - DNA, 25 bp, Homo sapiens
ggtgacccatcagctccagaacttt

SEQ ID NO: 16121 - DNA, 25 bp, Homo sapiens
tcgggcctagtgcagtgattccaac

SEQ ID NO: 16122 - DNA, 25 bp, Homo sapiens
ccactcactgggtggagacctttta

SEQ ID NO: 16123 - DNA, 25 bp, Homo sapiens
acttcctgaggcactactttatata

SEQ ID NO: 16124 - DNA, 25 bp, Homo sapiens
gggagcccttatgcagagaaaacta

SEQ ID NO: 16125 - DNA, 25 bp, Homo sapiens
tgaaactccaaagctatgccctgtg

SEQ ID NO: 16126 - DNA, 25 bp, Homo sapiens
agcgtggccttgatttgtatattga

SEQ ID NO: 16127 - DNA, 25 bp, Homo sapiens
cactgtactcaagggacatgtcttc

SEQ ID NO: 16128 - DNA, 25 bp, Homo sapiens
ctcagtgctctctgtgccagtttgc

SEQ ID NO: 16129 - DNA, 25 bp, Homo sapiens
ccctggaggtaaccagccatcattt

SEQ ID NO: 16130 - DNA, 25 bp, Homo sapiens
tctccatagaggcttaacgtgtttt

SEQ ID NO: 16131 - DNA, 25 bp, Homo sapiens
ctgagggttctcaaggactaatgtc

SEQ ID NO: 16132 - DNA, 25 bp, Homo sapiens
tccctgtctgtcgtaatgcgtcata

SEQ ID NO: 16133 - DNA, 25 bp, Homo sapiens
aagcctgctgctctaggtttcacca

SEQ ID NO: 16134 - DNA, 25 bp, Homo sapiens
cctggctgctaagagctgtgccttc

SEQ ID NO: 16135 - DNA, 25 bp, Homo sapiens
ttttgggcagcagcaacctatgcta

SEQ ID NO: 16136 - DNA, 25 bp, Homo sapiens
ggtcagcctttagtcccgaagttca

SEQ ID NO: 16137 - DNA, 25 bp, Homo sapiens
gcttatgctataaaacttagactta

SEQ ID NO: 16138 - DNA, 25 bp, Homo sapiens
tggattcttcagtctcttgcggtta

SEQ ID NO: 16139 - DNA, 25 bp, Homo sapiens
cataggcgctgttctcttaggtttc

SEQ ID NO: 16140 - DNA, 25 bp, Homo sapiens
gtggtgccggacaaaaaactacatg

SEQ ID NO: 16141 - DNA, 25 bp, Homo sapiens
agggactgcccatgtaaactattta

SEQ ID NO: 16142 - DNA, 25 bp, Homo sapiens
tacacatcatggctgctggacacga

SEQ ID NO: 16143 - DNA, 25 bp, Homo sapiens
tttctgctggaatgcgcacacagtg

SEQ ID NO: 16144 - DNA, 25 bp, Homo sapiens
agggctcggctatttcactgtcaca

SEQ ID NO: 16145 - DNA, 25 bp, Homo sapiens
ttgagtcccatgcaaaagtttcctg

SEQ ID NO: 16146 - DNA, 25 bp, Homo sapiens
cacttgcctgggtaatgtccttata

SEQ ID NO: 16147 - DNA, 25 bp, Homo sapiens
gagtgtctacttctggtcccatcaa

SEQ ID NO: 16148 - DNA, 25 bp, Homo sapiens
acaccacgctcaggtttcacagaat

SEQ ID NO: 16149 - DNA, 25 bp, Homo sapiens
cttaggtacctggaaagtagaaatc

SEQ ID NO: 16150 - DNA, 25 bp, Homo sapiens
gtggcagtacacaggcagcatattt

SEQ ID NO: 16151 - DNA, 25 bp, Homo sapiens
tccttggctacattgggtcttgaca

SEQ ID NO: 16152 - DNA, 25 bp, Homo sapiens
gtgtgttacattctcagccaccttg

SEQ ID NO: 16153 - DNA, 25 bp, Homo sapiens
cagcttgcacaccttgaggcattta

SEQ ID NO: 16154 - DNA, 25 bp, Homo sapiens
cgctggcctccagagataattatct

SEQ ID NO: 16155 - DNA, 25 bp, Homo sapiens
gccaggtctttctccagatactttg

SEQ ID NO: 16156 - DNA, 25 bp, Homo sapiens
tcctttcagaatagggcataagtag

SEQ ID NO: 16157 - DNA, 25 bp, Homo sapiens
gggttcttttccatgcagatgccaa

SEQ ID NO: 16158 - DNA, 25 bp, Homo sapiens
cagcacgttgctgggaaacactgta

SEQ ID NO: 16159 - DNA, 25 bp, Homo sapiens
tgtgatcaacaaacaggctggcatg

SEQ ID NO: 16160 - DNA, 25 bp, Homo sapiens
tccaagtgcagagaatgtgacagcc

SEQ ID NO: 16161 - DNA, 25 bp, Homo sapiens
cgcctggctcctgcctgaattaatc

SEQ ID NO: 16162 - DNA, 25 bp, Homo sapiens
cacctggtgcagacaattttctttg

SEQ ID NO: 16163 - DNA, 25 bp, Homo sapiens
caaaattctgaactggagggtctcc

SEQ ID NO: 16164 - DNA, 25 bp, Homo sapiens
aggcccagcacagatatctacgatc

SEQ ID NO: 16165 - DNA, 25 bp, Homo sapiens
acaacctttgtgaggagggctttta

SEQ ID NO: 16166 - DNA, 25 bp, Homo sapiens
ttgcctcccaaaagcttcacaggtg

SEQ ID NO: 16167 - DNA, 25 bp, Homo sapiens
atactgcgtgattgtcttctggcca

SEQ ID NO: 16168 - DNA, 25 bp, Homo sapiens
ctttggaaatcgctgtactctagtc

SEQ ID NO: 16169 - DNA, 25 bp, Homo sapiens
gaatagcttaggtcttcccctcaag

SEQ ID NO: 16170 - DNA, 25 bp, Homo sapiens
taggcccttatctcagccagctttg

SEQ ID NO: 16171 - DNA, 25 bp, Homo sapiens
cgaggcttcagaggtgacataattc

SEQ ID NO: 16172 - DNA, 25 bp, Homo sapiens
tgaggccaattgtcttcaaacctgg

SEQ ID NO: 16173 - DNA, 25 bp, Homo sapiens
tcatcgtctgtcaatctgctgtgca

SEQ ID NO: 16174 - DNA, 25 bp, Homo sapiens
aggccttcttctcccgttgtgctca

SEQ ID NO: 16175 - DNA, 25 bp, Homo sapiens
ggcctctcctgtcctgtctttgaca

SEQ ID NO: 16176 - DNA, 25 bp, Homo sapiens
cattctcgtggctgtgacttctcta

SEQ ID NO: 16177 - DNA, 25 bp, Homo sapiens
ctccagcctggggtgtatacatctg

SEQ ID NO: 16178 - DNA, 25 bp, Homo sapiens
tgattctcttgaaaagtataaagag

SEQ ID NO: 16179 - DNA, 25 bp, Homo sapiens
caaagacagggaggagcaaaataat

SEQ ID NO: 16180 - DNA, 25 bp, Homo sapiens
cgagatagcctgtaattatttagca

SEQ ID NO: 16181 - DNA, 25 bp, Homo sapiens
ttggctgtcattagtgtcaccagtc

SEQ ID NO: 16182 - DNA, 25 bp, Homo sapiens
atcgagaccgggtattcattggcca

SEQ ID NO: 16183 - DNA, 25 bp, Homo sapiens
ttaatgttagccctcactcctccta

SEQ ID NO: 16184 - DNA, 25 bp, Homo sapiens
ggcccaggcaggcagggtattaata

SEQ ID NO: 16185 - DNA, 25 bp, Homo sapiens
acgcggggtgatcacacagatgccc

SEQ ID NO: 16186 - DNA, 25 bp, Homo sapiens
gtctgtaaaagtccatggtgcccta

SEQ ID NO: 16187 - DNA, 25 bp, Homo sapiens
aggtcttctcagttggttcccagtc

SEQ ID NO: 16188 - DNA, 25 bp, Homo sapiens
gaggctacagcccaccctggaaata

SEQ ID NO: 16189 - DNA, 25 bp, Homo sapiens
gcccgcaagggagttcctgctacta

SEQ ID NO: 16190 - DNA, 25 bp, Homo sapiens
ggtgaagaacccacagcctctgctg

SEQ ID NO: 16191 - DNA, 25 bp, Homo sapiens
taacagatgtgtccagggccgcatg

SEQ ID NO: 16192 - DNA, 25 bp, Homo sapiens
tcagcacttgctaccagagaggaca

SEQ ID NO: 16193 - DNA, 25 bp, Homo sapiens
tctgaggagggtttcattataaacc

SEQ ID NO: 16194 - DNA, 25 bp, Homo sapiens
tgccatggccacgactgttgttaca

SEQ ID NO: 16195 - DNA, 25 bp, Homo sapiens
ggtccctcaggcaatcataccgata

SEQ ID NO: 16196 - DNA, 25 bp, Homo sapiens
gccactgtgtctgtctgcaaatgta

SEQ ID NO: 16197 - DNA, 25 bp, Homo sapiens
cttacccagttgcaaagaggctttc

SEQ ID NO: 16198 - DNA, 25 bp, Homo sapiens
aggagaccttttgctgcttcacatc

SEQ ID NO: 16199 - DNA, 25 bp, Homo sapiens
tccaccctggtgttgactgacttta

SEQ ID NO: 16200 - DNA, 25 bp, Homo sapiens
gagagagagaaaggaaaaccaatgc

SEQ ID NO: 16201 - DNA, 25 bp, Homo sapiens
tagctctctgctgtacatccctgga

SEQ ID NO: 16202 - DNA, 25 bp, Homo sapiens
tggagcatcttccttctgtccctgc

SEQ ID NO: 16203 - DNA, 25 bp, Homo sapiens
gcacccatgatgtccctgcttagga

SEQ ID NO: 16204 - DNA, 25 bp, Homo sapiens
tctccagttgcaagtgggaacatgc

SEQ ID NO: 16205 - DNA, 25 bp, Homo sapiens
gtgggattccactgctacaaaaaag

SEQ ID NO: 16206 - DNA, 25 bp, Homo sapiens
tatcacatggtaaaagaatccctct

SEQ ID NO: 16207 - DNA, 25 bp, Homo sapiens
cagagatagcccttcaactggttga

SEQ ID NO: 16208 - DNA, 25 bp, Homo sapiens
tgccgcctgacacagcccagtaaaa

SEQ ID NO: 16209 - DNA, 25 bp, Homo sapiens
actgcccgtgtgtgtggactttaaa

SEQ ID NO: 16210 - DNA, 25 bp, Homo sapiens
gcagccatgttccagccctagattt

SEQ ID NO: 16211 - DNA, 25 bp, Homo sapiens
ggcatccttcgttccagagctggca

SEQ ID NO: 16212 - DNA, 25 bp, Homo sapiens
tctgggacaaactccacctggctga

SEQ ID NO: 16213 - DNA, 25 bp, Homo sapiens
agccagtgtttttcccttcatagta

SEQ ID NO: 16214 - DNA, 25 bp, Homo sapiens
ctttaggttaccatgccagcaatga

SEQ ID NO: 16215 - DNA, 25 bp, Homo sapiens
gccacagtgcaaccaggtgacctta

SEQ ID NO: 16216 - DNA, 25 bp, Homo sapiens
accaagttatgtgttctccagccca

SEQ ID NO: 16217 - DNA, 25 bp, Homo sapiens
tcagtaagtacgttttttattatca

SEQ ID NO: 16218 - DNA, 25 bp, Homo sapiens
caccagagttctgttgtctccaatg

SEQ ID NO: 16219 - DNA, 25 bp, Homo sapiens
gaagcatttgcccagtttacttgta

SEQ ID NO: 16220 - DNA, 25 bp, Homo sapiens
cccgtcagtattagttgcatggtca

SEQ ID NO: 16221 - DNA, 25 bp, Homo sapiens
tagctgtaatgccaggtccaccata

SEQ ID NO: 16222 - DNA, 25 bp, Homo sapiens
ctctgctgtgctaggtgcaagacta

SEQ ID NO: 16223 - DNA, 25 bp, Homo sapiens
tcagggctgctacagtcctctatta

SEQ ID NO: 16224 - DNA, 25 bp, Homo sapiens
tttctcagttgtgcgagcagcatta

SEQ ID NO: 16225 - DNA, 25 bp, Homo sapiens
tgggctgatgagtcatattacagta

SEQ ID NO: 16226 - DNA, 25 bp, Homo sapiens
acacaccggaacactttgcttagca

SEQ ID NO: 16227 - DNA, 25 bp, Homo sapiens
gtgccctcagcttccagatccatga

SEQ ID NO: 16228 - DNA, 25 bp, Homo sapiens
ctgggacggctttaaacactggatc

SEQ ID NO: 16229 - DNA, 25 bp, Homo sapiens
aagggaagagcgtggtccctttaaa

SEQ ID NO: 16230 - DNA, 25 bp, Homo sapiens
cagattcctgggcacaacctattga

SEQ ID NO: 16231 - DNA, 25 bp, Homo sapiens
cttcggaacaagatgcaagtcctgc

SEQ ID NO: 16232 - DNA, 25 bp, Homo sapiens
ctcagtggtctcaaatgtcaaagtg

SEQ ID NO: 16233 - DNA, 25 bp, Homo sapiens
ccagtgtggcctacagagatgctcc

SEQ ID NO: 16234 - DNA, 25 bp, Homo sapiens
cccaaagcattctgaggcacaaagt

SEQ ID NO: 16235 - DNA, 25 bp, Homo sapiens
cactgtggactataaggcatggcta

SEQ ID NO: 16236 - DNA, 25 bp, Homo sapiens
cgaagggactactgctagagcacta

SEQ ID NO: 16237 - DNA, 25 bp, Homo sapiens
ctaaccctgagtaaacatgaccctg

SEQ ID NO: 16238 - DNA, 25 bp, Homo sapiens
agggcgattagtctctggctcatga

SEQ ID NO: 16239 - DNA, 25 bp, Homo sapiens
cccacttcgaaggtagctctgagca

SEQ ID NO: 16240 - DNA, 25 bp, Homo sapiens
cctccgcagtgaggggaaacttacc

SEQ ID NO: 16241 - DNA, 25 bp, Homo sapiens
gcagctactttgcactgtaacagga

SEQ ID NO: 16242 - DNA, 25 bp, Homo sapiens
gtgagttgacttattacaagctttg

SEQ ID NO: 16243 - DNA, 25 bp, Homo sapiens
ccacccaggttctttgtaatacaga

SEQ ID NO: 16244 - DNA, 25 bp, Homo sapiens
agtgatggttttcctgttggcaata

SEQ ID NO: 16245 - DNA, 25 bp, Homo sapiens
ctggcctgacataatattttaaaga

SEQ ID NO: 16246 - DNA, 25 bp, Homo sapiens
ttttaaaagaagacaggcctgggac

SEQ ID NO: 16247 - DNA, 25 bp, Homo sapiens
ggtagttgctctgccgcctataagg

SEQ ID NO: 16248 - DNA, 25 bp, Homo sapiens
gggcagtcttcctcgctctatatca

SEQ ID NO: 16249 - DNA, 25 bp, Homo sapiens
tctggaggccagcaaaaagaacttc

SEQ ID NO: 16250 - DNA, 25 bp, Homo sapiens
cctggcatgcagtagacactaagta

SEQ ID NO: 16251 - DNA, 25 bp, Homo sapiens
gcccttgggtaatctatcacatatt

SEQ ID NO: 16252 - DNA, 25 bp, Homo sapiens
tgctgaggctccatctcctagagga

SEQ ID NO: 16253 - DNA, 25 bp, Homo sapiens
gctgaccctatcaaacacatatgtg

SEQ ID NO: 16254 - DNA, 25 bp, Homo sapiens
ccagccttaagaattgtggagggta

SEQ ID NO: 16255 - DNA, 25 bp, Homo sapiens
ggcatagacattttgctggtgtata

SEQ ID NO: 16256 - DNA, 25 bp, Homo sapiens
ggggctcctcatcttcatctccatg

SEQ ID NO: 16257 - DNA, 25 bp, Homo sapiens
tgtccgtttggactaacagcctcta

SEQ ID NO: 16258 - DNA, 25 bp, Homo sapiens
ggcacactgtgatccttcctccata

SEQ ID NO: 16259 - DNA, 25 bp, Homo sapiens
cagcaggtgcggcaatatcaccaac

SEQ ID NO: 16260 - DNA, 25 bp, Homo sapiens
actgtgaagccaagaggcaccttta

SEQ ID NO: 16261 - DNA, 25 bp, Homo sapiens
gggtaccggcaacgcatgacctaca

SEQ ID NO: 16262 - DNA, 25 bp, Homo sapiens
ggggcttctaactccctagcagatc

SEQ ID NO: 16263 - DNA, 25 bp, Homo sapiens
gtatagcataaaaacgtctgattct

SEQ ID NO: 16264 - DNA, 25 bp, Homo sapiens
gcagctgccatttatcctcatgatt

SEQ ID NO: 16265 - DNA, 25 bp, Homo sapiens
ctggagtgcacatgcagtttacgta

SEQ ID NO: 16266 - DNA, 25 bp, Homo sapiens
tcctcaatagctgtgggcaatgcca

SEQ ID NO: 16267 - DNA, 25 bp, Homo sapiens
atcaacattaataaacaacaccagg

SEQ ID NO: 16268 - DNA, 25 bp, Homo sapiens
gtctcaactagatggccgtaaactc

SEQ ID NO: 16269 - DNA, 25 bp, Homo sapiens
ttgcatgctcactgtcacagaactg

SEQ ID NO: 16270 - DNA, 25 bp, Homo sapiens
ctccctcactaccagaagaaatatt

SEQ ID NO: 16271 - DNA, 25 bp, Homo sapiens
agttaaaccagttcaccaaagtgtg

SEQ ID NO: 16272 - DNA, 25 bp, Homo sapiens
ttaagagatacagagctaagccttc

SEQ ID NO: 16273 - DNA, 25 bp, Homo sapiens
tcctcccaggcgaaaacaaacagtg

SEQ ID NO: 16274 - DNA, 25 bp, Homo sapiens
ctccgtgttccaaaaacctgtgttc

SEQ ID NO: 16275 - DNA, 25 bp, Homo sapiens
ggctttgaccacagctcaccttcga

SEQ ID NO: 16276 - DNA, 25 bp, Homo sapiens
ggccgagtcccatcagttttccctg

SEQ ID NO: 16277 - DNA, 25 bp, Homo sapiens
aggtctgggctattctacaagttta

SEQ ID NO: 16278 - DNA, 25 bp, Homo sapiens
cgttcattccatctaaggccctgta

SEQ ID NO: 16279 - DNA, 25 bp, Homo sapiens
tcagacgaccgggaagactttattc

SEQ ID NO: 16280 - DNA, 25 bp, Homo sapiens
cccacaggtttgcagctggctctga

SEQ ID NO: 16281 - DNA, 25 bp, Homo sapiens
ccgccggcatccctcgagaatggaa

SEQ ID NO: 16282 - DNA, 25 bp, Homo sapiens
cccttgtgtgctggtttagactgta

SEQ ID NO: 16283 - DNA, 25 bp, Homo sapiens
gacaagctctctgccctgaagaaaa

SEQ ID NO: 16284 - DNA, 25 bp, Homo sapiens
atgtctgggccagttttttcccttg

SEQ ID NO: 16285 - DNA, 25 bp, Homo sapiens
gccagatacaagtgaatacctattt

SEQ ID NO: 16286 - DNA, 25 bp, Homo sapiens
cccttggtctttctgtacagcaaga

SEQ ID NO: 16287 - DNA, 25 bp, Homo sapiens
ctacatggaggcagaggtatttacc

SEQ ID NO: 16288 - DNA, 25 bp, Homo sapiens
ccatcccttggtcgtcaatttgaaa

SEQ ID NO: 16289 - DNA, 25 bp, Homo sapiens
gggcccggtgactcatgccttatta

SEQ ID NO: 16290 - DNA, 25 bp, Homo sapiens
tggtgggtatctccaagcacagtta

SEQ ID NO: 16291 - DNA, 25 bp, Homo sapiens
ctgagatttacttaggccatggttg

SEQ ID NO: 16292 - DNA, 25 bp, Homo sapiens
agggcctgtgacacaactgaacttc

SEQ ID NO: 16293 - DNA, 25 bp, Homo sapiens
tggacatccttcttggccaccatga

SEQ ID NO: 16294 - DNA, 25 bp, Homo sapiens
aacccattttgccagctcaggacta

SEQ ID NO: 16295 - DNA, 25 bp, Homo sapiens
cggactctcttactcaacttcagga

SEQ ID NO: 16296 - DNA, 25 bp, Homo sapiens
tccacctgcaaggaacatgtaaaca

SEQ ID NO: 16297 - DNA, 25 bp, Homo sapiens
ccgttgcctgctttgtgatgttatg

SEQ ID NO: 16298 - DNA, 25 bp, Homo sapiens
tgagccttaagccaatacacagatg

SEQ ID NO: 16299 - DNA, 25 bp, Homo sapiens
ggcctacactaaagtttcagaagtc

SEQ ID NO: 16300 - DNA, 25 bp, Homo sapiens
accgtcttggtttgtttgcatgtta

SEQ ID NO: 16301 - DNA, 25 bp, Homo sapiens
gctccacttaggcttacaaatgtta

SEQ ID NO: 16302 - DNA, 25 bp, Homo sapiens
tcactggctcaggtggagtaccatc

SEQ ID NO: 16303 - DNA, 25 bp, Homo sapiens
ggcagctcagccctatttgctcttg

SEQ ID NO: 16304 - DNA, 25 bp, Homo sapiens
cctgctgtgtcccagaggatgtaaa

SEQ ID NO: 16305 - DNA, 25 bp, Homo sapiens
ccgagcagtgaaaacaaggcctttt

SEQ ID NO: 16306 - DNA, 25 bp, Homo sapiens
agtttggggcagagcatcttctcta

SEQ ID NO: 16307 - DNA, 25 bp, Homo sapiens
tcccgttggacctgtacagtaactc

SEQ ID NO: 16308 - DNA, 25 bp, Homo sapiens
tggaaagaaccgcaaccaatgtttg

SEQ ID NO: 16309 - DNA, 25 bp, Homo sapiens
gcttctaatttgatgcctccacagg

SEQ ID NO: 16310 - DNA, 25 bp, Homo sapiens
caccactgtgttcttggattctaaa

SEQ ID NO: 16311 - DNA, 25 bp, Homo sapiens
agttcaggtctgctccacatgtctc

SEQ ID NO: 16312 - DNA, 25 bp, Homo sapiens
cccgctgtagggaagcaagtcatta

SEQ ID NO: 16313 - DNA, 25 bp, Homo sapiens
gcagttgtgtctcctttgaaggcac

SEQ ID NO: 16314 - DNA, 25 bp, Homo sapiens
taccatcgggaaggggttaagtctc

SEQ ID NO: 16315 - DNA, 25 bp, Homo sapiens
gaggtgacacttgatctgggtctta

SEQ ID NO: 16316 - DNA, 25 bp, Homo sapiens
atgtgtgccttggaactctcaaaga

SEQ ID NO: 16317 - DNA, 25 bp, Homo sapiens
aatcaggatacagatttgtttcaca

SEQ ID NO: 16318 - DNA, 25 bp, Homo sapiens
tcccttggagagtacaatgaccttc

SEQ ID NO: 16319 - DNA, 25 bp, Homo sapiens
gttcaggctccttgtcaccagtgca

SEQ ID NO: 16320 - DNA, 25 bp, Homo sapiens
gggctgacctctgacattgtgtttc

SEQ ID NO: 16321 - DNA, 25 bp, Homo sapiens
ttgcagaggcaacagtaactaaagg

SEQ ID NO: 16322 - DNA, 25 bp, Homo sapiens
gatctctcaaaaggagggaacctgg

SEQ ID NO: 16323 - DNA, 25 bp, Homo sapiens
tcccatggtgtgaatgagaacatcc

SEQ ID NO: 16324 - DNA, 25 bp, Homo sapiens
aaaggggccttaggacttacttccc

SEQ ID NO: 16325 - DNA, 25 bp, Homo sapiens
gtggctgcagcatgagacccttatg

SEQ ID NO: 16326 - DNA, 25 bp, Homo sapiens
cgctagctcacgcttccagtgggtt

SEQ ID NO: 16327 - DNA, 25 bp, Homo sapiens
agtcttccttgtgaccggcagtcca

SEQ ID NO: 16328 - DNA, 25 bp, Homo sapiens
cccaagatgcaatggtggccgcacc

SEQ ID NO: 16329 - DNA, 25 bp, Homo sapiens
gagggaaacgttgcaggtacatgaa

SEQ ID NO: 16330 - DNA, 25 bp, Homo sapiens
cagccagtaggtgctttcttcttca

SEQ ID NO: 16331 - DNA, 25 bp, Homo sapiens
ctaccggttgctgtcgattgttgga

SEQ ID NO: 16332 - DNA, 25 bp, Homo sapiens
tacaggcctttgactctgataattc

SEQ ID NO: 16333 - DNA, 25 bp, Homo sapiens
cttgtgatcagacttgggttagaga

SEQ ID NO: 16334 - DNA, 25 bp, Homo sapiens
cgcagtggatacttttaagagcaaa

SEQ ID NO: 16335 - DNA, 25 bp, Homo sapiens
ccgtggcttgtgaaatggttttata

SEQ ID NO: 16336 - DNA, 25 bp, Homo sapiens
ctttgggccctagcattactgtagc

SEQ ID NO: 16337 - DNA, 25 bp, Homo sapiens
ctctctggagggaagttaagttcta

SEQ ID NO: 16338 - DNA, 25 bp, Homo sapiens
ccaggcacttgaccattgagcagaa

SEQ ID NO: 16339 - DNA, 25 bp, Homo sapiens
ggtcgaatccctgcccaaaactgtc

SEQ ID NO: 16340 - DNA, 25 bp, Homo sapiens
gcaagtgctgcctcccaaaatggtg

SEQ ID NO: 16341 - DNA, 25 bp, Homo sapiens
aaggcccatttacatagtctcagga

SEQ ID NO: 16342 - DNA, 25 bp, Homo sapiens
ctttggttcccatgagctcctttga

SEQ ID NO: 16343 - DNA, 25 bp, Homo sapiens
gctgacttgcctctaaacccttgtt

SEQ ID NO: 16344 - DNA, 25 bp, Homo sapiens
ctttgtgtgtgtttagtcatctcta

SEQ ID NO: 16345 - DNA, 25 bp, Homo sapiens
ggagacttctttcagtaggacttca

SEQ ID NO: 16346 - DNA, 25 bp, Homo sapiens
gctctggtctggtttcatctttttc

SEQ ID NO: 16347 - DNA, 25 bp, Homo sapiens
ggcccagttggctcgtctttaaaaa

SEQ ID NO: 16348 - DNA, 25 bp, Homo sapiens
gctgggtctcttcccttctagaatt

SEQ ID NO: 16349 - DNA, 25 bp, Homo sapiens
tggcttctatgttaaatacctccta

SEQ ID NO: 16350 - DNA, 25 bp, Homo sapiens
cttcaggcttccgtgagtgactttc

SEQ ID NO: 16351 - DNA, 25 bp, Homo sapiens
tgagcttctgcttggtgatatgaca

SEQ ID NO: 16352 - DNA, 25 bp, Homo sapiens
ccctagctttgttgtgtgaataatg

SEQ ID NO: 16353 - DNA, 25 bp, Homo sapiens
ttccagaccggtaggcagttacgca

SEQ ID NO: 16354 - DNA, 25 bp, Homo sapiens
ccctggagcttcttgcagtggagta

SEQ ID NO: 16355 - DNA, 25 bp, Homo sapiens
ttgggcctggcttaagaaacacatg

SEQ ID NO: 16356 - DNA, 25 bp, Homo sapiens
cctgctcctggattgggatactaca

SEQ ID NO: 16357 - DNA, 25 bp, Homo sapiens
tagcggtggcaggtacatattctta

SEQ ID NO: 16358 - DNA, 25 bp, Homo sapiens
aggtcccttctctccatgcagtgtg

SEQ ID NO: 16359 - DNA, 25 bp, Homo sapiens
ggcgtccctcccttgacaagtaatg

SEQ ID NO: 16360 - DNA, 25 bp, Homo sapiens
gctgagttcagtctaatcatatgca

SEQ ID NO: 16361 - DNA, 25 bp, Homo sapiens
gtaggcatgcttgttttcttcttga

SEQ ID NO: 16362 - DNA, 25 bp, Homo sapiens
tcacctgggtgcttgtggtcaaacc

SEQ ID NO: 16363 - DNA, 25 bp, Homo sapiens
ttcagctacagtggtgcagttcata

SEQ ID NO: 16364 - DNA, 25 bp, Homo sapiens
gccttctggggtcaggatataaata

SEQ ID NO: 16365 - DNA, 25 bp, Homo sapiens
agtcgtcctatagtcagctgcctaa

SEQ ID NO: 16366 - DNA, 25 bp, Homo sapiens
tgcatggtcttgttgggattatata

SEQ ID NO: 16367 - DNA, 25 bp, Homo sapiens
gcctgggctttgtgcacaatttttc

SEQ ID NO: 16368 - DNA, 25 bp, Homo sapiens
gggcagcctccctataattttcttc

SEQ ID NO: 16369 - DNA, 25 bp, Homo sapiens
gctggctccttctagacatttcttg

SEQ ID NO: 16370 - DNA, 25 bp, Homo sapiens
accaccggtgtcagatatcagagca

SEQ ID NO: 16371 - DNA, 25 bp, Homo sapiens
acccggagttttacctgcttgcttg

SEQ ID NO: 16372 - DNA, 25 bp, Homo sapiens
ccattgtcagtacagggctcgcctt

SEQ ID NO: 16373 - DNA, 25 bp, Homo sapiens
cacggctgcttgtgaaatgttcttc

SEQ ID NO: 16374 - DNA, 25 bp, Homo sapiens
gagaggtctcccactcccatatttg

SEQ ID NO: 16375 - DNA, 25 bp, Homo sapiens
ttgccgactttacaacaggacgatg

SEQ ID NO: 16376 - DNA, 25 bp, Homo sapiens
tgacccattgcacgatctttccatg

SEQ ID NO: 16377 - DNA, 25 bp, Homo sapiens
gcagaacctcagctcttggcatgtt

SEQ ID NO: 16378 - DNA, 25 bp, Homo sapiens
tggacatgtaatttttaaaagaaaa

SEQ ID NO: 16379 - DNA, 25 bp, Homo sapiens
ccatgggacccttcaaaagttgctc

SEQ ID NO: 16380 - DNA, 25 bp, Homo sapiens
tctcagcagagcttccacggagttg

SEQ ID NO: 16381 - DNA, 25 bp, Homo sapiens
cggagttgtctcttttcatgccagc

SEQ ID NO: 16382 - DNA, 25 bp, Homo sapiens
ccctgaacaggaaggagagtttctt

SEQ ID NO: 16383 - DNA, 25 bp, Homo sapiens
ccagggcccttttgtcaaagtctta

SEQ ID NO: 16384 - DNA, 25 bp, Homo sapiens
agttgaatctttgaggcctggccca

SEQ ID NO: 16385 - DNA, 25 bp, Homo sapiens
ttcccaaagttcaggagcatcactg

SEQ ID NO: 16386 - DNA, 25 bp, Homo sapiens
ggctccttaagttttgtcagactca

SEQ ID NO: 16387 - DNA, 25 bp, Homo sapiens
atctgcctgctacaagccagtcttg

SEQ ID NO: 16388 - DNA, 25 bp, Homo sapiens
gagccctctgttcacctggatgata

SEQ ID NO: 16389 - DNA, 25 bp, Homo sapiens
agggctgctacacttcctgagagtc

SEQ ID NO: 16390 - DNA, 25 bp, Homo sapiens
ttccacacctgtgacctgaggatcg

SEQ ID NO: 16391 - DNA, 25 bp, Homo sapiens
gccagcacacacacgtggcatctta

SEQ ID NO: 16392 - DNA, 25 bp, Homo sapiens
ctctcctttgggaagcttgtcgctc

SEQ ID NO: 16393 - DNA, 25 bp, Homo sapiens
tactcctggttgagagctgctgttc

SEQ ID NO: 16394 - DNA, 25 bp, Homo sapiens
cgctctgccaagacacctgggtttg

SEQ ID NO: 16395 - DNA, 25 bp, Homo sapiens
cttcaacagaaacacttgaaggtga

SEQ ID NO: 16396 - DNA, 25 bp, Homo sapiens
ggcccagagggtatatgacaaattc

SEQ ID NO: 16397 - DNA, 25 bp, Homo sapiens
ggaaggaacaagccatgaattttca

SEQ ID NO: 16398 - DNA, 25 bp, Homo sapiens
caccagcagatttcattttatagga

SEQ ID NO: 16399 - DNA, 25 bp, Homo sapiens
gttcagtggccaaccagcatgtttt

SEQ ID NO: 16400 - DNA, 25 bp, Homo sapiens
ggaatgcccttcacttcgttttgga

SEQ ID NO: 16401 - DNA, 25 bp, Homo sapiens
ccctgctggcttcatgtacaaaatc

SEQ ID NO: 16402 - DNA, 25 bp, Homo sapiens
atgggtccctgctttccttttttga

SEQ ID NO: 16403 - DNA, 25 bp, Homo sapiens
ggtgctcagtccgaaagccgtgttc

SEQ ID NO: 16404 - DNA, 25 bp, Homo sapiens
cccgaggtggcagtcctaagtatcc

SEQ ID NO: 16405 - DNA, 25 bp, Homo sapiens
ctggtctgcctcatccctgattgca

SEQ ID NO: 16406 - DNA, 25 bp, Homo sapiens
tccaggtctaggcatgtgattcaca

SEQ ID NO: 16407 - DNA, 25 bp, Homo sapiens
tgggacccgtaatggctgtaattgc

SEQ ID NO: 16408 - DNA, 25 bp, Homo sapiens
agcagctgggccttttgtatttttc

SEQ ID NO: 16409 - DNA, 25 bp, Homo sapiens
gtagtcttctgctctctggtccttg

SEQ ID NO: 16410 - DNA, 25 bp, Homo sapiens
ttgtgtactgaactgcacgcagctt

SEQ ID NO: 16411 - DNA, 25 bp, Homo sapiens
ttaaatatcattcaaaagatcagga

SEQ ID NO: 16412 - DNA, 25 bp, Homo sapiens
gaaacaaaaaaacccaaaagatcag

SEQ ID NO: 16413 - DNA, 25 bp, Homo sapiens
cctgatctaacatgtgggcctcctc

SEQ ID NO: 16414 - DNA, 25 bp, Homo sapiens
ttccagtcttggttgggccatgatc

SEQ ID NO: 16415 - DNA, 25 bp, Homo sapiens
aagatcccagcccttctgcggtaga

SEQ ID NO: 16416 - DNA, 25 bp, Homo sapiens
ggggccctttccttgacttccctga

SEQ ID NO: 16417 - DNA, 25 bp, Homo sapiens
gcgtggccatcttgaatccctctta

SEQ ID NO: 16418 - DNA, 25 bp, Homo sapiens
ggtccctgcaaagtgatctctctga

SEQ ID NO: 16419 - DNA, 25 bp, Homo sapiens
agcctatggtcgctaagtacacatg

SEQ ID NO: 16420 - DNA, 25 bp, Homo sapiens
taactacacaccgtgagtatggcac

SEQ ID NO: 16421 - DNA, 25 bp, Homo sapiens
tacgttccaaatgaggtgtcttccc

SEQ ID NO: 16422 - DNA, 25 bp, Homo sapiens
ttcccaatgtaggtgattctgctcc

SEQ ID NO: 16423 - DNA, 25 bp, Homo sapiens
tcctccatggagtggctgtcaatgc

SEQ ID NO: 16424 - DNA, 25 bp, Homo sapiens
tgctcggagagaccaggaaccactt

SEQ ID NO: 16425 - DNA, 25 bp, Homo sapiens
gcagtcagttggctattcctcagtc

SEQ ID NO: 16426 - DNA, 25 bp, Homo sapiens
tcagtgcttgcaacacagtgggtcc

SEQ ID NO: 16427 - DNA, 25 bp, Homo sapiens
acgtggcatccagcaagtgttcttc

SEQ ID NO: 16428 - DNA, 25 bp, Homo sapiens
agcctgggcatttcacctgtggaaa

SEQ ID NO: 16429 - DNA, 25 bp, Homo sapiens
acaagcagcaactggggcaactcca

SEQ ID NO: 16430 - DNA, 25 bp, Homo sapiens
agaggcctcaccatgcttatggata

SEQ ID NO: 16431 - DNA, 25 bp, Homo sapiens
ttggaatttgaaacatcattatgtg

SEQ ID NO: 16432 - DNA, 25 bp, Homo sapiens
attgacaagttgctatatacggttc

SEQ ID NO: 16433 - DNA, 25 bp, Homo sapiens
ccagagctggggcattcagttcatc

SEQ ID NO: 16434 - DNA, 25 bp, Homo sapiens
gggacgtacttttcacgactactga

SEQ ID NO: 16435 - DNA, 25 bp, Homo sapiens
ggcatgtgtttctccagctggttta

SEQ ID NO: 16436 - DNA, 25 bp, Homo sapiens
ccttggcttggagacagatgtgaac

SEQ ID NO: 16437 - DNA, 25 bp, Homo sapiens
actccctagatgctttctttgtaga

SEQ ID NO: 16438 - DNA, 25 bp, Homo sapiens
gctaagtgttccctgcagagtttga

SEQ ID NO: 16439 - DNA, 25 bp, Homo sapiens
cctctcaatgggagtcagaatacta

SEQ ID NO: 16440 - DNA, 25 bp, Homo sapiens
ccatggggtgagtgcatcagccaaa

SEQ ID NO: 16441 - DNA, 25 bp, Homo sapiens
cagccagctttgtgagcataggtta

SEQ ID NO: 16442 - DNA, 25 bp, Homo sapiens
tgtgtgcagagtgcaacactgcata

SEQ ID NO: 16443 - DNA, 25 bp, Homo sapiens
gatgctggttctctgcgtaggtata

SEQ ID NO: 16444 - DNA, 25 bp, Homo sapiens
tcaaggctgtgctatttcagatgca

SEQ ID NO: 16445 - DNA, 25 bp, Homo sapiens
tgccctcttgtgttgcatgcacatg

SEQ ID NO: 16446 - DNA, 25 bp, Homo sapiens
ccctgaaattgtcttccggtaaata

SEQ ID NO: 16447 - DNA, 25 bp, Homo sapiens
tgacgccctcaaaaggtaaaatttt

SEQ ID NO: 16448 - DNA, 25 bp, Homo sapiens
gctgctttttggttccctgacatta

SEQ ID NO: 16449 - DNA, 25 bp, Homo sapiens
tgagtgtccctgtcctccaacagta

SEQ ID NO: 16450 - DNA, 25 bp, Homo sapiens
cacaggactcacttcttggcagcta

SEQ ID NO: 16451 - DNA, 25 bp, Homo sapiens
ccctgaagactgtggtttgtaaaac

SEQ ID NO: 16452 - DNA, 25 bp, Homo sapiens
gtttctcctgactgctgcctcttga

SEQ ID NO: 16453 - DNA, 25 bp, Homo sapiens
cttcatcggtttcatatacttggtg

SEQ ID NO: 16454 - DNA, 25 bp, Homo sapiens
tgggttagatcctttctcacagaaa

SEQ ID NO: 16455 - DNA, 25 bp, Homo sapiens
actgcctattctttccttcgttgtg

SEQ ID NO: 16456 - DNA, 25 bp, Homo sapiens
ttaggctgcacagtacttgaatctc

SEQ ID NO: 16457 - DNA, 25 bp, Homo sapiens
agtgatcagctgagtggaggaataa

SEQ ID NO: 16458 - DNA, 25 bp, Homo sapiens
caggtgccacattctttcgtttttg

SEQ ID NO: 16459 - DNA, 25 bp, Homo sapiens
gcctacctctcaacgaaattttttc

SEQ ID NO: 16460 - DNA, 25 bp, Homo sapiens
ctctggattgtattgtcacttttta

SEQ ID NO: 16461 - DNA, 25 bp, Homo sapiens
ccaggggaacagagctaggtaaatt

SEQ ID NO: 16462 - DNA, 25 bp, Homo sapiens
agctattcctttctcttgattttaa

SEQ ID NO: 16463 - DNA, 25 bp, Homo sapiens
tgctgctgttttcaaacctctcctt

SEQ ID NO: 16464 - DNA, 25 bp, Homo sapiens
gcgttagtacttagccacattgcca

SEQ ID NO: 16465 - DNA, 25 bp, Homo sapiens
tcaactgggaaaagagaaacgattc

SEQ ID NO: 16466 - DNA, 25 bp, Homo sapiens
agcccatggcacagcatctgctagg

SEQ ID NO: 16467 - DNA, 25 bp, Homo sapiens
catgataacctcacacagggctttg

SEQ ID NO: 16468 - DNA, 25 bp, Homo sapiens
tccttaggtttggtggtctgtaatc

SEQ ID NO: 16469 - DNA, 25 bp, Homo sapiens
tttgcctttctctcagtccatgata

SEQ ID NO: 16470 - DNA, 25 bp, Homo sapiens
gggacctgatgaatcctcctattga

SEQ ID NO: 16471 - DNA, 25 bp, Homo sapiens
cagctctgtacctgtaggcagaaaa

SEQ ID NO: 16472 - DNA, 25 bp, Homo sapiens
cacccacttgagctctggacaaaaa

SEQ ID NO: 16473 - DNA, 25 bp, Homo sapiens
gcctgactttagtaccttctcactg

SEQ ID NO: 16474 - DNA, 25 bp, Homo sapiens
caggtaccagggatgaatgctcaaa

SEQ ID NO: 16475 - DNA, 25 bp, Homo sapiens
caggctatggcctttggcaaagaca

SEQ ID NO: 16476 - DNA, 25 bp, Homo sapiens
cctggcaacgcactcctgtaaaata

SEQ ID NO: 16477 - DNA, 25 bp, Homo sapiens
gccctggagaaaccttcatcctgta

SEQ ID NO: 16478 - DNA, 25 bp, Homo sapiens
ccacagtcagacaagaggaggcttc

SEQ ID NO: 16479 - DNA, 25 bp, Homo sapiens
tgccagggcatgagacttaagttta

SEQ ID NO: 16480 - DNA, 25 bp, Homo sapiens
gtctgttcctgtctcgggtttctta

SEQ ID NO: 16481 - DNA, 25 bp, Homo sapiens
gccaggattcggctccagtatggta

SEQ ID NO: 16482 - DNA, 25 bp, Homo sapiens
acaacgacttccatgactttcagcg

SEQ ID NO: 16483 - DNA, 25 bp, Homo sapiens
aaacataagcagatttgttaaaaca

SEQ ID NO: 16484 - DNA, 25 bp, Homo sapiens
gccatggaagttaacagactctttc

SEQ ID NO: 16485 - DNA, 25 bp, Homo sapiens
gacgataggcctgatggggacaata

SEQ ID NO: 16486 - DNA, 25 bp, Homo sapiens
actaaataagacatggattagaaca

SEQ ID NO: 16487 - DNA, 25 bp, Homo sapiens
agctgcacatgctgccacaagtttg

SEQ ID NO: 16488 - DNA, 25 bp, Homo sapiens
tgcatctctctccatccacgtgaag

SEQ ID NO: 16489 - DNA, 25 bp, Homo sapiens
ccaggttgctttgtgtccgcatgtc

SEQ ID NO: 16490 - DNA, 25 bp, Homo sapiens
tttattgctaatttgtactaagaag

SEQ ID NO: 16491 - DNA, 25 bp, Homo sapiens
ctcatgtcagaggataaggaatctc

SEQ ID NO: 16492 - DNA, 25 bp, Homo sapiens
tgggctgacccactgtaaaaccttt

SEQ ID NO: 16493 - DNA, 25 bp, Homo sapiens
aggttgcttttcctccacagaacta

SEQ ID NO: 16494 - DNA, 25 bp, Homo sapiens
cattatgttactttttaagaatttt

SEQ ID NO: 16495 - DNA, 25 bp, Homo sapiens
cctgtacagtagaggaaacagtttc

SEQ ID NO: 16496 - DNA, 25 bp, Homo sapiens
tcctccctgggctttgatcattaca

SEQ ID NO: 16497 - DNA, 25 bp, Homo sapiens
caaagggttctactcctaagagcta

SEQ ID NO: 16498 - DNA, 25 bp, Homo sapiens
gaagtgctgttttcctggctcaata

SEQ ID NO: 16499 - DNA, 25 bp, Homo sapiens
cccaactctgtagtaccatttcata

SEQ ID NO: 16500 - DNA, 25 bp, Homo sapiens
cctcttgcctacagtctggtacatg

SEQ ID NO: 16501 - DNA, 25 bp, Homo sapiens
acaatgtcattgtgtgcagcccatc

SEQ ID NO: 16502 - DNA, 25 bp, Homo sapiens
agggtcactgctatccttttttgaa

SEQ ID NO: 16503 - DNA, 25 bp, Homo sapiens
tgggacagtttcttgtactcattta

SEQ ID NO: 16504 - DNA, 25 bp, Homo sapiens
agaaaattcttgtgggtacctatga

SEQ ID NO: 16505 - DNA, 25 bp, Homo sapiens
ctggtaaatcgagggctttttcata

SEQ ID NO: 16506 - DNA, 25 bp, Homo sapiens
ggcttgtgccatacttccagattta

SEQ ID NO: 16507 - DNA, 25 bp, Homo sapiens
agcctgtctcacagcaagttcactg

SEQ ID NO: 16508 - DNA, 25 bp, Homo sapiens
ggtaattagataaagatgtacaaaa

SEQ ID NO: 16509 - DNA, 25 bp, Homo sapiens
ttcatgaacactctgaccaccagtc

SEQ ID NO: 16510 - DNA, 25 bp, Homo sapiens
tttagtgaaaaacaatccaggtatg

SEQ ID NO: 16511 - DNA, 25 bp, Homo sapiens
gcagatctgagagtgtcataagcca

SEQ ID NO: 16512 - DNA, 25 bp, Homo sapiens
gagcccatctccattagacccagtg

SEQ ID NO: 16513 - DNA, 25 bp, Homo sapiens
aggctggtggcttggaacattaatc

SEQ ID NO: 16514 - DNA, 25 bp, Homo sapiens
ctctgccagtgataaaagctttgtc

SEQ ID NO: 16515 - DNA, 25 bp, Homo sapiens
gggctagcctaatctttcctcactg

SEQ ID NO: 16516 - DNA, 25 bp, Homo sapiens
tgtttgccagttacacttctgtagg

SEQ ID NO: 16517 - DNA, 25 bp, Homo sapiens
tgagacccacctaggcaatacagtg

SEQ ID NO: 16518 - DNA, 25 bp, Homo sapiens
agaaagggacttctgctagaaatcc

SEQ ID NO: 16519 - DNA, 25 bp, Homo sapiens
cctctccgtggagacagagaagact

SEQ ID NO: 16520 - DNA, 25 bp, Homo sapiens
caggagcttaaagacatatgtgatg

SEQ ID NO: 16521 - DNA, 25 bp, Homo sapiens
acgggtaatagtggctgcttctgga

SEQ ID NO: 16522 - DNA, 25 bp, Homo sapiens
aggggtgtcacaaaagccagcagtc

SEQ ID NO: 16523 - DNA, 25 bp, Homo sapiens
ggcccacgtgtcatttcttgaaaca

SEQ ID NO: 16524 - DNA, 25 bp, Homo sapiens
ccctctgtagggaaaaagaaaatct

SEQ ID NO: 16525 - DNA, 25 bp, Homo sapiens
agtatgcctgcagcttgtaagttca

SEQ ID NO: 16526 - DNA, 25 bp, Homo sapiens
cttggactaggcacataggtgttta

SEQ ID NO: 16527 - DNA, 25 bp, Homo sapiens
caccaacacttattgagccaagata

SEQ ID NO: 16528 - DNA, 25 bp, Homo sapiens
tcttctttttaactaatggtttcta

SEQ ID NO: 16529 - DNA, 25 bp, Homo sapiens
tttttcttaaagttgccatgcgggg

SEQ ID NO: 16530 - DNA, 25 bp, Homo sapiens
caatggtttcactgctgtctggata

SEQ ID NO: 16531 - DNA, 25 bp, Homo sapiens
tgcccggttaaagatactcactgtg

SEQ ID NO: 16532 - DNA, 25 bp, Homo sapiens
cttgggagttggcataaaatcattc

SEQ ID NO: 16533 - DNA, 25 bp, Homo sapiens
tgttcttatattcatgtttgattgc

SEQ ID NO: 16534 - DNA, 25 bp, Homo sapiens
tatgttgcccaggcttattgctttt

SEQ ID NO: 16535 - DNA, 25 bp, Homo sapiens
agaggcagcttttcctattcagtca

SEQ ID NO: 16536 - DNA, 25 bp, Homo sapiens
tggcttaggatctcgaagtcactca

SEQ ID NO: 16537 - DNA, 25 bp, Homo sapiens
cctgccggctgggtatttttagaca

SEQ ID NO: 16538 - DNA, 25 bp, Homo sapiens
gccggaccatgttgcatacttaagc

SEQ ID NO: 16539 - DNA, 25 bp, Homo sapiens
cctggtttgcttgcccacactgaaa

SEQ ID NO: 16540 - DNA, 25 bp, Homo sapiens
ctcacaacgtggcttaagtttcttc

SEQ ID NO: 16541 - DNA, 25 bp, Homo sapiens
gtggtgactcccattttcacaaata

SEQ ID NO: 16542 - DNA, 25 bp, Homo sapiens
tccctgaagggttagaagcaaagta

SEQ ID NO: 16543 - DNA, 25 bp, Homo sapiens
ggaagtatgctcatctgtctcctta

SEQ ID NO: 16544 - DNA, 25 bp, Homo sapiens
agggcctgtgctttcagttttctca

SEQ ID NO: 16545 - DNA, 25 bp, Homo sapiens
ctcctgtgtgctttacctgaaacta

SEQ ID NO: 16546 - DNA, 25 bp, Homo sapiens
atgggctttcatccctctcaaggag

SEQ ID NO: 16547 - DNA, 25 bp, Homo sapiens
ggcattcagatcaggtttgtaacta

SEQ ID NO: 16548 - DNA, 25 bp, Homo sapiens
ggacagtgagtgatgccttctagta

SEQ ID NO: 16549 - DNA, 25 bp, Homo sapiens
tgaggttacctcatagctatgtgtc

SEQ ID NO: 16550 - DNA, 25 bp, Homo sapiens
ggcatactggctttgttctgtaaca

SEQ ID NO: 16551 - DNA, 25 bp, Homo sapiens
caacaacactaacaacgagatgagg

SEQ ID NO: 16552 - DNA, 25 bp, Homo sapiens
ggggaattcgacctatagctgagca

SEQ ID NO: 16553 - DNA, 25 bp, Homo sapiens
ctgccacacagtattggggtccaaa

SEQ ID NO: 16554 - DNA, 25 bp, Homo sapiens
caccagggctgcaaaaagtacattt

SEQ ID NO: 16555 - DNA, 25 bp, Homo sapiens
tgactaactgcctttgcggaaactg

SEQ ID NO: 16556 - DNA, 25 bp, Homo sapiens
cctgcccttttgtaaggacatccta

SEQ ID NO: 16557 - DNA, 25 bp, Homo sapiens
ttggaggccattatacatctgtctg

SEQ ID NO: 16558 - DNA, 25 bp, Homo sapiens
ctcaatgtcagcagccagagggtta

SEQ ID NO: 16559 - DNA, 25 bp, Homo sapiens
tgcctgagactcaccaactggattc

SEQ ID NO: 16560 - DNA, 25 bp, Homo sapiens
tccttggaagacagcagggaatttc

SEQ ID NO: 16561 - DNA, 25 bp, Homo sapiens
catcctgatcctgttttagagccta

SEQ ID NO: 16562 - DNA, 25 bp, Homo sapiens
tgccatggaccgtgaaagccacttg

SEQ ID NO: 16563 - DNA, 25 bp, Homo sapiens
ctaggtggatagagcccgatgttta

SEQ ID NO: 16564 - DNA, 25 bp, Homo sapiens
ccaaggtcacttttagagtttaaga

SEQ ID NO: 16565 - DNA, 25 bp, Homo sapiens
ggcaaaccctgactccaactgaaca

SEQ ID NO: 16566 - DNA, 25 bp, Homo sapiens
gcaagatctgacttcccatagccca

SEQ ID NO: 16567 - DNA, 25 bp, Homo sapiens
ggtggcagttgcctattcctgtatt

SEQ ID NO: 16568 - DNA, 25 bp, Homo sapiens
gtccataccctgaaatgtgtgaaaa

SEQ ID NO: 16569 - DNA, 25 bp, Homo sapiens
aaagctaaaacaacagcaatgatag

SEQ ID NO: 16570 - DNA, 25 bp, Homo sapiens
cacccagggccagtaagaaattatt

SEQ ID NO: 16571 - DNA, 25 bp, Homo sapiens
gaaaggtgttatgaatggctctcca

SEQ ID NO: 16572 - DNA, 25 bp, Homo sapiens
cctgggtgccagactgtagcagaca

SEQ ID NO: 16573 - DNA, 25 bp, Homo sapiens
gtctatggcataactaagaggcaca

SEQ ID NO: 16574 - DNA, 25 bp, Homo sapiens
ttggggaaaaaaccacttctccggg

SEQ ID NO: 16575 - DNA, 25 bp, Homo sapiens
tgagatgtaattggtttcatgccca

SEQ ID NO: 16576 - DNA, 25 bp, Homo sapiens
tcaaagagaaataaaggtgcaagaa

SEQ ID NO: 16577 - DNA, 25 bp, Homo sapiens
aaggatttgaggcagggactctttt

SEQ ID NO: 16578 - DNA, 25 bp, Homo sapiens
ccagtattttcagcgtaggcactta

SEQ ID NO: 16579 - DNA, 25 bp, Homo sapiens
aagtttggctcatccagttctggca

SEQ ID NO: 16580 - DNA, 25 bp, Homo sapiens
aatatatgaatatattacagaagga

SEQ ID NO: 16581 - DNA, 25 bp, Homo sapiens
gttcctctgatctccaaaaagttgg

SEQ ID NO: 16582 - DNA, 25 bp, Homo sapiens
aataataatctcattaggaaaggta

SEQ ID NO: 16583 - DNA, 25 bp, Homo sapiens
aacacaaatatatccgtgatgatgt

SEQ ID NO: 16584 - DNA, 25 bp, Homo sapiens
ccaacaggtctaaattcggaatctc

SEQ ID NO: 16585 - DNA, 25 bp, Homo sapiens
ccaagcaagcctagcagtcattttc

SEQ ID NO: 16586 - DNA, 25 bp, Homo sapiens
ctcttcccgggaaacaggcttgatg

SEQ ID NO: 16587 - DNA, 25 bp, Homo sapiens
gctgtgtcctgcaaatattcttata

SEQ ID NO: 16588 - DNA, 25 bp, Homo sapiens
cccttagatcacaactagagttatt

SEQ ID NO: 16589 - DNA, 25 bp, Homo sapiens
ggaaaaaaaaaagcaaagagcaagc

SEQ ID NO: 16590 - DNA, 25 bp, Homo sapiens
agactctggatgcaataccttgtga

SEQ ID NO: 16591 - DNA, 25 bp, Homo sapiens
cacgtcatgatattcccggtcggga

SEQ ID NO: 16592 - DNA, 25 bp, Homo sapiens
tgcacgttatttccctaaggtaagc

SEQ ID NO: 16593 - DNA, 25 bp, Homo sapiens
gccacctgcattgtggagccattta

SEQ ID NO: 16594 - DNA, 25 bp, Homo sapiens
tgggagcaattatctgtcacctttc

SEQ ID NO: 16595 - DNA, 25 bp, Homo sapiens
tggcacttggtacctctaatatatc

SEQ ID NO: 16596 - DNA, 25 bp, Homo sapiens
gagaccttgaaagaggcagcatatg

SEQ ID NO: 16597 - DNA, 25 bp, Homo sapiens
ctgtggtggtcaactatataaaaga

SEQ ID NO: 16598 - DNA, 25 bp, Homo sapiens
cgtaagccttctctctgttggaaca

SEQ ID NO: 16599 - DNA, 25 bp, Homo sapiens
tgtagcagctttctcatggcaacta

SEQ ID NO: 16600 - DNA, 25 bp, Homo sapiens
ctatattatgtatgtatatgaataa

SEQ ID NO: 16601 - DNA, 25 bp, Homo sapiens
tgtcagtggctctttcatagtaacc

SEQ ID NO: 16602 - DNA, 25 bp, Homo sapiens
tgctgctacacacctgagaattctc

SEQ ID NO: 16603 - DNA, 25 bp, Homo sapiens
tctcctgaaactgcttggttacttc

SEQ ID NO: 16604 - DNA, 25 bp, Homo sapiens
gaacttggttctacaggctggcttg

SEQ ID NO: 16605 - DNA, 25 bp, Homo sapiens
cctcggagcagtgctattgatagta

SEQ ID NO: 16606 - DNA, 25 bp, Homo sapiens
tttactgatagattttcttgatttt

SEQ ID NO: 16607 - DNA, 25 bp, Homo sapiens
gccagcagttactaaagcagtattt

SEQ ID NO: 16608 - DNA, 25 bp, Homo sapiens
tactggcaaatctattaggttggtg

SEQ ID NO: 16609 - DNA, 25 bp, Homo sapiens
catttctattattctctcaaactgt

SEQ ID NO: 16610 - DNA, 25 bp, Homo sapiens
tccaggctatatccacgtgggttca

SEQ ID NO: 16611 - DNA, 25 bp, Homo sapiens
gagaggtctaggcatgccacattta

SEQ ID NO: 16612 - DNA, 25 bp, Homo sapiens
gtccacaggccttatacatttcatg

SEQ ID NO: 16613 - DNA, 25 bp, Homo sapiens
tcccaagggccagttattatgattg

SEQ ID NO: 16614 - DNA, 25 bp, Homo sapiens
taagggcgcatgctctcagacattc

SEQ ID NO: 16615 - DNA, 25 bp, Homo sapiens
cccaagaggctctagtagttccaaa

SEQ ID NO: 16616 - DNA, 25 bp, Homo sapiens
aagcccctttccattaagttctttt

SEQ ID NO: 16617 - DNA, 25 bp, Homo sapiens
tgcagctttcttcgatccagagttc

SEQ ID NO: 16618 - DNA, 25 bp, Homo sapiens
gtcatgattcaaaaggtaggaaaca

SEQ ID NO: 16619 - DNA, 25 bp, Homo sapiens
atacttggtggtcagctgctatcta

SEQ ID NO: 16620 - DNA, 25 bp, Homo sapiens
atacttgttgctaatgtgctcctga

SEQ ID NO: 16621 - DNA, 25 bp, Homo sapiens
tggggagagttacacaagaggcttc

SEQ ID NO: 16622 - DNA, 25 bp, Homo sapiens
ggactctagatgatgcccacttgta

SEQ ID NO: 16623 - DNA, 25 bp, Homo sapiens
ggtggcatcccaaaacatcccttgg

SEQ ID NO: 16624 - DNA, 25 bp, Homo sapiens
tctgggagactgcatgaatcttctg

SEQ ID NO: 16625 - DNA, 25 bp, Homo sapiens
tgaggccctgacagcactggctata

SEQ ID NO: 16626 - DNA, 25 bp, Homo sapiens
accttgctgtatctctcaccagcat

SEQ ID NO: 16627 - DNA, 25 bp, Homo sapiens
ggctgggatctcatcatactctgtc

SEQ ID NO: 16628 - DNA, 25 bp, Homo sapiens
agcgccactaagactcatagcattg

SEQ ID NO: 16629 - DNA, 25 bp, Homo sapiens
gcttacctggtctggggctttaata

SEQ ID NO: 16630 - DNA, 25 bp, Homo sapiens
actcccgtgttttccttaaggtctg

SEQ ID NO: 16631 - DNA, 25 bp, Homo sapiens
ggtgcctgggcttcaattattattg

SEQ ID NO: 16632 - DNA, 25 bp, Homo sapiens
gtgggaactatcattactctgggaa

SEQ ID NO: 16633 - DNA, 25 bp, Homo sapiens
ccatgttttggggacagactacctg

SEQ ID NO: 16634 - DNA, 25 bp, Homo sapiens
cgtcacccaggacagcaagatatta

SEQ ID NO: 16635 - DNA, 25 bp, Homo sapiens
tacctctttgctggccacattatgc

SEQ ID NO: 16636 - DNA, 25 bp, Homo sapiens
ccagcaggtttattggcagaagtca

SEQ ID NO: 16637 - DNA, 25 bp, Homo sapiens
gttgggatcctttcaggccaccttc

SEQ ID NO: 16638 - DNA, 25 bp, Homo sapiens
tctcctggggtgatacaaagcagtc

SEQ ID NO: 16639 - DNA, 25 bp, Homo sapiens
aagctgtttgagagcccggaattcc

SEQ ID NO: 16640 - DNA, 25 bp, Homo sapiens
ccactggggatggtcttagaactac

SEQ ID NO: 16641 - DNA, 25 bp, Homo sapiens
tgaccacagtgctggatgcttctgc

SEQ ID NO: 16642 - DNA, 25 bp, Homo sapiens
cgttggaaactgacagaggcctctc

SEQ ID NO: 16643 - DNA, 25 bp, Homo sapiens
cctctggactactggcctctattta

SEQ ID NO: 16644 - DNA, 25 bp, Homo sapiens
cggtgtgcaatagggccctgaattt

SEQ ID NO: 16645 - DNA, 25 bp, Homo sapiens
gtgctcgccattcaggcaatgttta

SEQ ID NO: 16646 - DNA, 25 bp, Homo sapiens
cttaaatagcatggtggcctggtcc

SEQ ID NO: 16647 - DNA, 25 bp, Homo sapiens
attgccttgggaaactctgttgttc

SEQ ID NO: 16648 - DNA, 25 bp, Homo sapiens
tgtggaaaatcagctgggaactcta

SEQ ID NO: 16649 - DNA, 25 bp, Homo sapiens
gccctggtaaaaggccatccacttc

SEQ ID NO: 16650 - DNA, 25 bp, Homo sapiens
aggcagattttagcatagacacgga

SEQ ID NO: 16651 - DNA, 25 bp, Homo sapiens
aggattcctcccacaagtcagcaca

SEQ ID NO: 16652 - DNA, 25 bp, Homo sapiens
actgtagttctaggcatgcattttc

SEQ ID NO: 16653 - DNA, 25 bp, Homo sapiens
tcacccgttgtatgtcctggagata

SEQ ID NO: 16654 - DNA, 25 bp, Homo sapiens
caggcctgctttgtaggaagccata

SEQ ID NO: 16655 - DNA, 25 bp, Homo sapiens
aggggtctcaccacatatgccattg

SEQ ID NO: 16656 - DNA, 25 bp, Homo sapiens
ccctagttttggacatggccctgga

SEQ ID NO: 16657 - DNA, 25 bp, Homo sapiens
tttccttggggatagagccactacc

SEQ ID NO: 16658 - DNA, 25 bp, Homo sapiens
cctgcagcctgtgactaagtacttc

SEQ ID NO: 16659 - DNA, 25 bp, Homo sapiens
gtgcttagtctaacctcaccttatg

SEQ ID NO: 16660 - DNA, 25 bp, Homo sapiens
ggcacacctcaccagggtacatttt

SEQ ID NO: 16661 - DNA, 25 bp, Homo sapiens
ctgcctctggctacacacaggttta

SEQ ID NO: 16662 - DNA, 25 bp, Homo sapiens
atcttcaggttgctcaggtgccatg

SEQ ID NO: 16663 - DNA, 25 bp, Homo sapiens
ttcttatcttctggggccgacttcc

SEQ ID NO: 16664 - DNA, 25 bp, Homo sapiens
atcttgccaagcagaggactgactg

SEQ ID NO: 16665 - DNA, 25 bp, Homo sapiens
acacccagtgtgatgagtgacctca

SEQ ID NO: 16666 - DNA, 25 bp, Homo sapiens
gtctccctgcaagcaattatttttg

SEQ ID NO: 16667 - DNA, 25 bp, Homo sapiens
tctccagattatgggccttgacatc

SEQ ID NO: 16668 - DNA, 25 bp, Homo sapiens
ggaaatatttccagttgacccaatg

SEQ ID NO: 16669 - DNA, 25 bp, Homo sapiens
ttttttacatttttaatacagtttt

SEQ ID NO: 16670 - DNA, 25 bp, Homo sapiens
gccgccacctctgtaaatgaccttg

SEQ ID NO: 16671 - DNA, 25 bp, Homo sapiens
acccagagtctgtgtggccaaagtc

SEQ ID NO: 16672 - DNA, 25 bp, Homo sapiens
tcctctgggcctgttagcaaagtgc

SEQ ID NO: 16673 - DNA, 25 bp, Homo sapiens
cccgaacgtaatggcctagatgtta

SEQ ID NO: 16674 - DNA, 25 bp, Homo sapiens
tgtgggctcactctgcagcatgtta

SEQ ID NO: 16675 - DNA, 25 bp, Homo sapiens
tgtgaattcctgcatactggacctc

SEQ ID NO: 16676 - DNA, 25 bp, Homo sapiens
atgtgtgtgtacctgtctgtgaatc

SEQ ID NO: 16677 - DNA, 25 bp, Homo sapiens
agcaggcattggtctattataacgc

SEQ ID NO: 16678 - DNA, 25 bp, Homo sapiens
gggtcacttggtggctaaatacata

SEQ ID NO: 16679 - DNA, 25 bp, Homo sapiens
cactgtccctgaataagcttttgaa

SEQ ID NO: 16680 - DNA, 25 bp, Homo sapiens
agctgctgtgatcattgcttgcaaa

SEQ ID NO: 16681 - DNA, 25 bp, Homo sapiens
tccatgcctctctgggctgaagaca

SEQ ID NO: 16682 - DNA, 25 bp, Homo sapiens
tcactaggtacaaggatcatgtttg

SEQ ID NO: 16683 - DNA, 25 bp, Homo sapiens
tcttgaccacttcattgtgcttgtg

SEQ ID NO: 16684 - DNA, 25 bp, Homo sapiens
ggtcatctcctatgctgcttgcttg

SEQ ID NO: 16685 - DNA, 25 bp, Homo sapiens
ggtgaaaacttcctgctggaccttc

SEQ ID NO: 16686 - DNA, 25 bp, Homo sapiens
caggggttgccttctccaaatgaca

SEQ ID NO: 16687 - DNA, 25 bp, Homo sapiens
tgccagtgccatagccagtgacgta

SEQ ID NO: 16688 - DNA, 25 bp, Homo sapiens
gagcttattgagttcacccttagga

SEQ ID NO: 16689 - DNA, 25 bp, Homo sapiens
gcctccaggacaacagaaaagattg

SEQ ID NO: 16690 - DNA, 25 bp, Homo sapiens
ggtcaccatgagaagcaagagtttc

SEQ ID NO: 16691 - DNA, 25 bp, Homo sapiens
acaagtcctgttttctgctgcagca

SEQ ID NO: 16692 - DNA, 25 bp, Homo sapiens
ggccatgcctggttgtcatctaaca

SEQ ID NO: 16693 - DNA, 25 bp, Homo sapiens
ctgcccagactagttgatgcccttc

SEQ ID NO: 16694 - DNA, 25 bp, Homo sapiens
ggtcactccattcctactctttaag

SEQ ID NO: 16695 - DNA, 25 bp, Homo sapiens
ttaccatgtgaggaagaccagtttc

SEQ ID NO: 16696 - DNA, 25 bp, Homo sapiens
ggctgtgtactcgtttcccagttaa

SEQ ID NO: 16697 - DNA, 25 bp, Homo sapiens
gataatttatcatacaatgtggtat

SEQ ID NO: 16698 - DNA, 25 bp, Homo sapiens
gcggtatgtcctcttgccctgaata

SEQ ID NO: 16699 - DNA, 25 bp, Homo sapiens
ctgcagttactagtccctttggtga

SEQ ID NO: 16700 - DNA, 25 bp, Homo sapiens
ctgcaagggacaggatatgactttc

SEQ ID NO: 16701 - DNA, 25 bp, Homo sapiens
ccaggtagccttctgatgcaattta

SEQ ID NO: 16702 - DNA, 25 bp, Homo sapiens
gctactctagctccgtgggacagca

SEQ ID NO: 16703 - DNA, 25 bp, Homo sapiens
tgagatcaatctgacccactgggtc

SEQ ID NO: 16704 - DNA, 25 bp, Homo sapiens
ttgcactgtgggtatcttcttgatg

SEQ ID NO: 16705 - DNA, 25 bp, Homo sapiens
gtcctgtaagaattggtgcccactg

SEQ ID NO: 16706 - DNA, 25 bp, Homo sapiens
ggccttcaggaaagcccaggtgatc

SEQ ID NO: 16707 - DNA, 25 bp, Homo sapiens
cactccctggcgtttagcaatgcta

SEQ ID NO: 16708 - DNA, 25 bp, Homo sapiens
acacaagtgcctgaaatctcttctg

SEQ ID NO: 16709 - DNA, 25 bp, Homo sapiens
catcgctgctatgaagatcgccttc

SEQ ID NO: 16710 - DNA, 25 bp, Homo sapiens
cctagtcttggaaatgtctgtgttc

SEQ ID NO: 16711 - DNA, 25 bp, Homo sapiens
tgttccgcatgcaaggtcctctttg

SEQ ID NO: 16712 - DNA, 25 bp, Homo sapiens
ctgagaaccatcgacggatcatatc

SEQ ID NO: 16713 - DNA, 25 bp, Homo sapiens
ggatcctgcctgagatatttagaca

SEQ ID NO: 16714 - DNA, 25 bp, Homo sapiens
gccggcagacccaactgtactttta

SEQ ID NO: 16715 - DNA, 25 bp, Homo sapiens
ctggaatgatccctcatgtttctga

SEQ ID NO: 16716 - DNA, 25 bp, Homo sapiens
gtattttattatctcatggactatg

SEQ ID NO: 16717 - DNA, 25 bp, Homo sapiens
tcccaactctcatgtgaagaaattg

SEQ ID NO: 16718 - DNA, 25 bp, Homo sapiens
gtgtcgcaccgataattccctgatg

SEQ ID NO: 16719 - DNA, 25 bp, Homo sapiens
gaaataaaagtgaaaaaggtagaaa

SEQ ID NO: 16720 - DNA, 25 bp, Homo sapiens
ttcagatttattgtcacttgcagca

SEQ ID NO: 16721 - DNA, 25 bp, Homo sapiens
tggcacctgagtcgaccctgatgca

SEQ ID NO: 16722 - DNA, 25 bp, Homo sapiens
ggtcctggcccatagaattggatca

SEQ ID NO: 16723 - DNA, 25 bp, Homo sapiens
gggagccaatgtctataccttcggg

SEQ ID NO: 16724 - DNA, 25 bp, Homo sapiens
gttgcccatgtttgttactgatcta

SEQ ID NO: 16725 - DNA, 25 bp, Homo sapiens
cagagctggtgcctaattagataac

SEQ ID NO: 16726 - DNA, 25 bp, Homo sapiens
cttgagatgggcacaggattgattc

SEQ ID NO: 16727 - DNA, 25 bp, Homo sapiens
aaagtcctgccctccctgaatatgg

SEQ ID NO: 16728 - DNA, 25 bp, Homo sapiens
actgctggctttgggtcttccctta

SEQ ID NO: 16729 - DNA, 25 bp, Homo sapiens
tcgggtgtctgttcctactgaaaaa

SEQ ID NO: 16730 - DNA, 25 bp, Homo sapiens
agaaagttaattcccatctcatagg

SEQ ID NO: 16731 - DNA, 25 bp, Homo sapiens
ctgctgggtatagagaagactgata

SEQ ID NO: 16732 - DNA, 25 bp, Homo sapiens
cctctgcagagcaggactataaata

SEQ ID NO: 16733 - DNA, 25 bp, Homo sapiens
atcatcttgtttcgccttgggttca

SEQ ID NO: 16734 - DNA, 25 bp, Homo sapiens
actgtttgtccctaccctactctgg

SEQ ID NO: 16735 - DNA, 25 bp, Homo sapiens
caccctgcgttgatgtatagaaata

SEQ ID NO: 16736 - DNA, 25 bp, Homo sapiens
tgcagctggcattcatcgcagagtt

SEQ ID NO: 16737 - DNA, 25 bp, Homo sapiens
tggcattgtgggcttcttacgcaga

SEQ ID NO: 16738 - DNA, 25 bp, Homo sapiens
gacaccctagactttcccgctttga

SEQ ID NO: 16739 - DNA, 25 bp, Homo sapiens
tggggctatgaacggcctacacttc

SEQ ID NO: 16740 - DNA, 25 bp, Homo sapiens
gggtcctgaccacctctgttttctg

SEQ ID NO: 16741 - DNA, 25 bp, Homo sapiens
tcctttgggcatctaccagaacata

SEQ ID NO: 16742 - DNA, 25 bp, Homo sapiens
aggcatctttccaggtgctcatttg

SEQ ID NO: 16743 - DNA, 25 bp, Homo sapiens
gcaccttaagctttttcgcaacaag

SEQ ID NO: 16744 - DNA, 25 bp, Homo sapiens
ttgtcctgaacgcaaaagtattcca

SEQ ID NO: 16745 - DNA, 25 bp, Homo sapiens
gcttgggcttgcattgagaaactcc

SEQ ID NO: 16746 - DNA, 25 bp, Homo sapiens
cagcctcatgctgtaagtctagatg

SEQ ID NO: 16747 - DNA, 25 bp, Homo sapiens
aaaaggccacatgttagctgtaggt

SEQ ID NO: 16748 - DNA, 25 bp, Homo sapiens
agagtccttggcatgtcagaattcc

SEQ ID NO: 16749 - DNA, 25 bp, Homo sapiens
tgcaccgtgcctgatagcagccatc

SEQ ID NO: 16750 - DNA, 25 bp, Homo sapiens
ccaattccggtttagaggtgccttc

SEQ ID NO: 16751 - DNA, 25 bp, Homo sapiens
gtggcctaagcaagccaagctcatg

SEQ ID NO: 16752 - DNA, 25 bp, Homo sapiens
ctggggttatcactcctctttggta

SEQ ID NO: 16753 - DNA, 25 bp, Homo sapiens
ccgttctacgagaagaggctgcaga

SEQ ID NO: 16754 - DNA, 25 bp, Homo sapiens
tcccaccagtcagatgagtcctttg

SEQ ID NO: 16755 - DNA, 25 bp, Homo sapiens
ctgctcagttttccaagagagggta

SEQ ID NO: 16756 - DNA, 25 bp, Homo sapiens
cttcatatatgcagcggcagtgccc

SEQ ID NO: 16757 - DNA, 25 bp, Homo sapiens
acacggctgctttggagaatattgc

SEQ ID NO: 16758 - DNA, 25 bp, Homo sapiens
actccaactgggactggggttcatg

SEQ ID NO: 16759 - DNA, 25 bp, Homo sapiens
ccttccgtgaaccagtgagcctgta

SEQ ID NO: 16760 - DNA, 25 bp, Homo sapiens
ttccaggtctcccaggcattgagca

SEQ ID NO: 16761 - DNA, 25 bp, Homo sapiens
attgggagaaaacaaagactttggc

SEQ ID NO: 16762 - DNA, 25 bp, Homo sapiens
tttgtgggcaggcactgttatacca

SEQ ID NO: 16763 - DNA, 25 bp, Homo sapiens
gagaatatggtttcccacctcaata

SEQ ID NO: 16764 - DNA, 25 bp, Homo sapiens
ctgcttccagcacagaatagtattc

SEQ ID NO: 16765 - DNA, 25 bp, Homo sapiens
atcctcttggtacacaggggtcaaa

SEQ ID NO: 16766 - DNA, 25 bp, Homo sapiens
cagggatgcccattttgttttcagg

SEQ ID NO: 16767 - DNA, 25 bp, Homo sapiens
cctgcagttgtccatggcagatata

SEQ ID NO: 16768 - DNA, 25 bp, Homo sapiens
atgaggccatttctgcccacaggga

SEQ ID NO: 16769 - DNA, 25 bp, Homo sapiens
tctcattcagtggtgctggtcaata

SEQ ID NO: 16770 - DNA, 25 bp, Homo sapiens
aagccctttggcatctgtgtaactg

SEQ ID NO: 16771 - DNA, 25 bp, Homo sapiens
tctcctgacaggtgggcacatcata

SEQ ID NO: 16772 - DNA, 25 bp, Homo sapiens
gggcgcactcctacagaacatttta

SEQ ID NO: 16773 - DNA, 25 bp, Homo sapiens
aggttgctgctttctccctaatggc

SEQ ID NO: 16774 - DNA, 25 bp, Homo sapiens
ggccggtaccatgtactttctcatg

SEQ ID NO: 16775 - DNA, 25 bp, Homo sapiens
gttgtggtatttccagttgcttttt

SEQ ID NO: 16776 - DNA, 25 bp, Homo sapiens
tcctctttggcgtgtggaaaaatgc

SEQ ID NO: 16777 - DNA, 25 bp, Homo sapiens
gcgctgtactgcttcataatcatgg

SEQ ID NO: 16778 - DNA, 25 bp, Homo sapiens
agggtttgaccactcacttggttga

SEQ ID NO: 16779 - DNA, 25 bp, Homo sapiens
tttcctcaatgtaatcgaaccgctg

SEQ ID NO: 16780 - DNA, 25 bp, Homo sapiens
gcattctccaccacagcactttata

SEQ ID NO: 16781 - DNA, 25 bp, Homo sapiens
tcctgctctgcagcgtaatttagtc

SEQ ID NO: 16782 - DNA, 25 bp, Homo sapiens
ttggcctcctgggataatgaaaatc

SEQ ID NO: 16783 - DNA, 25 bp, Homo sapiens
cgcatgtaaacagctgggcactaaa

SEQ ID NO: 16784 - DNA, 25 bp, Homo sapiens
tcagggccagacacagagagattgc

SEQ ID NO: 16785 - DNA, 25 bp, Homo sapiens
ctggacaggattgcctcatttgtgc

SEQ ID NO: 16786 - DNA, 25 bp, Homo sapiens
agcaggccataagtgttctcaagca

SEQ ID NO: 16787 - DNA, 25 bp, Homo sapiens
atcaacaggcttggtagctcccagc

SEQ ID NO: 16788 - DNA, 25 bp, Homo sapiens
ccctggattgtttctcaagcctaca

SEQ ID NO: 16789 - DNA, 25 bp, Homo sapiens
gctggttttttacgcctcttgaaga

SEQ ID NO: 16790 - DNA, 25 bp, Homo sapiens
tcaagtctgtaagaaggcaacattc

SEQ ID NO: 16791 - DNA, 25 bp, Homo sapiens
agtccggttcctttgtcaccacaga

SEQ ID NO: 16792 - DNA, 25 bp, Homo sapiens
ttattaaaaataaccttgaggacag

SEQ ID NO: 16793 - DNA, 25 bp, Homo sapiens
tctcatgtgtagttttatcctcata

SEQ ID NO: 16794 - DNA, 25 bp, Homo sapiens
tttgatgatgcatgtgtacagtgtc

SEQ ID NO: 16795 - DNA, 25 bp, Homo sapiens
gacctaatagtattattgactgata

SEQ ID NO: 16796 - DNA, 25 bp, Homo sapiens
acgaactggagggtttctaatggcc

SEQ ID NO: 16797 - DNA, 25 bp, Homo sapiens
ctaagtgtggaagcagaaagatgtc

SEQ ID NO: 16798 - DNA, 25 bp, Homo sapiens
gagtctgctttcatgacaccaggta

SEQ ID NO: 16799 - DNA, 25 bp, Homo sapiens
agcctgtggctctgctggaagatta

SEQ ID NO: 16800 - DNA, 25 bp, Homo sapiens
gcgttggccaagcagagtcatcttc

SEQ ID NO: 16801 - DNA, 25 bp, Homo sapiens
gagacctctcatttgtactgtgaca

SEQ ID NO: 16802 - DNA, 25 bp, Homo sapiens
gtggccaagagcttcccagaatttg

SEQ ID NO: 16803 - DNA, 25 bp, Homo sapiens
agcacatgatcttgggacgccacca

SEQ ID NO: 16804 - DNA, 25 bp, Homo sapiens
tccctcgcttaaaatccaatggttg

SEQ ID NO: 16805 - DNA, 25 bp, Homo sapiens
ctgtaaatgtgagaggagccctgcc

SEQ ID NO: 16806 - DNA, 25 bp, Homo sapiens
aaagctgatactccttataatcaag

SEQ ID NO: 16807 - DNA, 25 bp, Homo sapiens
tatttacctaaatactacctaaata

SEQ ID NO: 16808 - DNA, 25 bp, Homo sapiens
ctcctaaaattgaattatattataa

SEQ ID NO: 16809 - DNA, 25 bp, Homo sapiens
cactgtcttggcacctattaagatc

SEQ ID NO: 16810 - DNA, 25 bp, Homo sapiens
agctgtctgtgtctgctgtgtccca

SEQ ID NO: 16811 - DNA, 25 bp, Homo sapiens
tacttgctagcgatgagggtggaca

SEQ ID NO: 16812 - DNA, 25 bp, Homo sapiens
cctgggatcagggaagaaatcttac

SEQ ID NO: 16813 - DNA, 25 bp, Homo sapiens
ggtttagaaaagtggtttagtggtt

SEQ ID NO: 16814 - DNA, 25 bp, Homo sapiens
aggtggcacctcctaaacttgttta

SEQ ID NO: 16815 - DNA, 25 bp, Homo sapiens
ctgcatacagggacataaataggga

SEQ ID NO: 16816 - DNA, 25 bp, Homo sapiens
ggttgacaccaggaatgcttattta

SEQ ID NO: 16817 - DNA, 25 bp, Homo sapiens
gactcctattaagcaacatgatttg

SEQ ID NO: 16818 - DNA, 25 bp, Homo sapiens
tcctgagaagaatgggaaacgatac

SEQ ID NO: 16819 - DNA, 25 bp, Homo sapiens
gttgcccaagcttcagacctgttct

SEQ ID NO: 16820 - DNA, 25 bp, Homo sapiens
gggaggcttagtccttcagtataga

SEQ ID NO: 16821 - DNA, 25 bp, Homo sapiens
gctcggggtcttctgagtttcaaga

SEQ ID NO: 16822 - DNA, 25 bp, Homo sapiens
cagggtgctctctgacttgtgttta

SEQ ID NO: 16823 - DNA, 25 bp, Homo sapiens
gtcaccttcatccagagaattcctg

SEQ ID NO: 16824 - DNA, 25 bp, Homo sapiens
cccggtccatcagagtcagtaaatg

SEQ ID NO: 16825 - DNA, 25 bp, Homo sapiens
tagcacctgtgtccaatctatggta

SEQ ID NO: 16826 - DNA, 25 bp, Homo sapiens
tgctgctgttatttcaagggtactg

SEQ ID NO: 16827 - DNA, 25 bp, Homo sapiens
agcacctcttggttatagacagaca

SEQ ID NO: 16828 - DNA, 25 bp, Homo sapiens
ggcacgcaatctctctgacaataaa

SEQ ID NO: 16829 - DNA, 25 bp, Homo sapiens
tatgggcacaggagacctcatcttc

SEQ ID NO: 16830 - DNA, 25 bp, Homo sapiens
agaatggggtgcagaagaatcttcc

SEQ ID NO: 16831 - DNA, 25 bp, Homo sapiens
ggctagtatacccttccagattgtc

SEQ ID NO: 16832 - DNA, 25 bp, Homo sapiens
agctttcctcctacagtcataagta

SEQ ID NO: 16833 - DNA, 25 bp, Homo sapiens
tgcctgaccaaagggatttagtttt

SEQ ID NO: 16834 - DNA, 25 bp, Homo sapiens
tgggcagggctttgttcttataaaa

SEQ ID NO: 16835 - DNA, 25 bp, Homo sapiens
ctctgtctgagtggagcagcctaca

SEQ ID NO: 16836 - DNA, 25 bp, Homo sapiens
tggagctttctacccagagtacgtc

SEQ ID NO: 16837 - DNA, 25 bp, Homo sapiens
tcccagccttctgcttggatgaata

SEQ ID NO: 16838 - DNA, 25 bp, Homo sapiens
gtttacgttttttccatcaggcctg

SEQ ID NO: 16839 - DNA, 25 bp, Homo sapiens
tgccgtgacacttgaaactgctatc

SEQ ID NO: 16840 - DNA, 25 bp, Homo sapiens
cagattacttggttagcctcgaata

SEQ ID NO: 16841 - DNA, 25 bp, Homo sapiens
ctgcaattgcaggtacagtcccatt

SEQ ID NO: 16842 - DNA, 25 bp, Homo sapiens
gcatcgatcgctgtggccatatgta

SEQ ID NO: 16843 - DNA, 25 bp, Homo sapiens
caggaccctcagaagagtctcttta

SEQ ID NO: 16844 - DNA, 25 bp, Homo sapiens
agcaggtaccattcaacaagcattc

SEQ ID NO: 16845 - DNA, 25 bp, Homo sapiens
tgtgcttgcagtctattggatccta

SEQ ID NO: 16846 - DNA, 25 bp, Homo sapiens
agcctaacctcaatttcataaaatg

SEQ ID NO: 16847 - DNA, 25 bp, Homo sapiens
tgattctgtaggtggacttcctgcc

SEQ ID NO: 16848 - DNA, 25 bp, Homo sapiens
gcctgcacttctgaaatcttgatta

SEQ ID NO: 16849 - DNA, 25 bp, Homo sapiens
gggtcacccgaccactgttgtcatg

SEQ ID NO: 16850 - DNA, 25 bp, Homo sapiens
actggtctgaagctctactgtgatc

SEQ ID NO: 16851 - DNA, 25 bp, Homo sapiens
ccaatagtttagtggactgtcctca

SEQ ID NO: 16852 - DNA, 25 bp, Homo sapiens
tgactggcaatgcagacgcactctg

SEQ ID NO: 16853 - DNA, 25 bp, Homo sapiens
ggcacagatcctagctggtctcatc

SEQ ID NO: 16854 - DNA, 25 bp, Homo sapiens
cctagttcctcaagggccaaaatta

SEQ ID NO: 16855 - DNA, 25 bp, Homo sapiens
tgggccttacccaagaagacttact

SEQ ID NO: 16856 - DNA, 25 bp, Homo sapiens
cccagagacagttgcttcctaaatg

SEQ ID NO: 16857 - DNA, 25 bp, Homo sapiens
ctggtgagccttcttgctgaaagtc

SEQ ID NO: 16858 - DNA, 25 bp, Homo sapiens
gtcactttggatcttcgttagccga

SEQ ID NO: 16859 - DNA, 25 bp, Homo sapiens
tcgctagtgtgtccagagaagtgcc

SEQ ID NO: 16860 - DNA, 25 bp, Homo sapiens
ctccaccttggatgcaaatgtaaga

SEQ ID NO: 16861 - DNA, 25 bp, Homo sapiens
agggagggaccaagcactctgcttc

SEQ ID NO: 16862 - DNA, 25 bp, Homo sapiens
ggagcctgttcttccctggagtttg

SEQ ID NO: 16863 - DNA, 25 bp, Homo sapiens
tgccttgtctatctggttcacctaa

SEQ ID NO: 16864 - DNA, 25 bp, Homo sapiens
ggctctgcctgcatctccaatatta

SEQ ID NO: 16865 - DNA, 25 bp, Homo sapiens
cactgggtctagtccatggtcagca

SEQ ID NO: 16866 - DNA, 25 bp, Homo sapiens
acgccaactcatgcatcagctgatg

SEQ ID NO: 16867 - DNA, 25 bp, Homo sapiens
gggcctgcccaaaccatgctgtgtc

SEQ ID NO: 16868 - DNA, 25 bp, Homo sapiens
ctcaggcatgcccaaccattttttc

SEQ ID NO: 16869 - DNA, 25 bp, Homo sapiens
ggtttgtattcttaacgtgacatga

SEQ ID NO: 16870 - DNA, 25 bp, Homo sapiens
gtcacacacacacgtttctctggga

SEQ ID NO: 16871 - DNA, 25 bp, Homo sapiens
gacttagtcacagagccagaacatg

SEQ ID NO: 16872 - DNA, 25 bp, Homo sapiens
agacagggcccagttaagaaagatt

SEQ ID NO: 16873 - DNA, 25 bp, Homo sapiens
gccacagtcctttgttcccagaatg

SEQ ID NO: 16874 - DNA, 25 bp, Homo sapiens
ccactattgtcaggaaaatgtcaga

SEQ ID NO: 16875 - DNA, 25 bp, Homo sapiens
ttatccaaacaaccagggaattggg

SEQ ID NO: 16876 - DNA, 25 bp, Homo sapiens
cccacttttagaatgtatgaggttg

SEQ ID NO: 16877 - DNA, 25 bp, Homo sapiens
agagcttcaggcttcccaagaaata

SEQ ID NO: 16878 - DNA, 25 bp, Homo sapiens
agtgctctccctacctgtgctgtgc

SEQ ID NO: 16879 - DNA, 25 bp, Homo sapiens
gatgggcctgctccactgatataga

SEQ ID NO: 16880 - DNA, 25 bp, Homo sapiens
tgccaaagggagctatcgccatttc

SEQ ID NO: 16881 - DNA, 25 bp, Homo sapiens
ccctcttgattgaggtatactaata

SEQ ID NO: 16882 - DNA, 25 bp, Homo sapiens
gattgcatgttcttgccgcccacga

SEQ ID NO: 16883 - DNA, 25 bp, Homo sapiens
aggccctttgtctcatgcttgtaca

SEQ ID NO: 16884 - DNA, 25 bp, Homo sapiens
ttggttgctactgctctggaataca

SEQ ID NO: 16885 - DNA, 25 bp, Homo sapiens
tcctgacatgagcacaaagtttctg

SEQ ID NO: 16886 - DNA, 25 bp, Homo sapiens
tccagcaggccaaaacaggcttttc

SEQ ID NO: 16887 - DNA, 25 bp, Homo sapiens
cctcgacttctaagaatataggtga

SEQ ID NO: 16888 - DNA, 25 bp, Homo sapiens
cggtcattctccaagccctgctatg

SEQ ID NO: 16889 - DNA, 25 bp, Homo sapiens
gccaccagccacatgaggatgttga

SEQ ID NO: 16890 - DNA, 25 bp, Homo sapiens
tctagaagaagttttttttattttt

SEQ ID NO: 16891 - DNA, 25 bp, Homo sapiens
gggcccttgatactgtccctaatta

SEQ ID NO: 16892 - DNA, 25 bp, Homo sapiens
ggtgtaattctaactccctgatgtg

SEQ ID NO: 16893 - DNA, 25 bp, Homo sapiens
cctctggctctccatccaagatgta

SEQ ID NO: 16894 - DNA, 25 bp, Homo sapiens
tctgcaaggccggtctctaatattc

SEQ ID NO: 16895 - DNA, 25 bp, Homo sapiens
ccctccatagggctttggcatcaca

SEQ ID NO: 16896 - DNA, 25 bp, Homo sapiens
cccttctaggagctggatccaattc

SEQ ID NO: 16897 - DNA, 25 bp, Homo sapiens
ttggaattttccagagtctcagtta

SEQ ID NO: 16898 - DNA, 25 bp, Homo sapiens
agctctcaggatagcctctcaattg

SEQ ID NO: 16899 - DNA, 25 bp, Homo sapiens
gttgagctcccgttaatattcctga

SEQ ID NO: 16900 - DNA, 25 bp, Homo sapiens
aggagttgttcttacctcacaggac

SEQ ID NO: 16901 - DNA, 25 bp, Homo sapiens
gtacccaggagagcatcagtgattc

SEQ ID NO: 16902 - DNA, 25 bp, Homo sapiens
ctgctgcaggaagctcttgaacatc

SEQ ID NO: 16903 - DNA, 25 bp, Homo sapiens
ggctcccaggcatctttttcagttt

SEQ ID NO: 16904 - DNA, 25 bp, Homo sapiens
ggcattctttgatcagggcctatga

SEQ ID NO: 16905 - DNA, 25 bp, Homo sapiens
cctctttgggcctgatgattacgtc

SEQ ID NO: 16906 - DNA, 25 bp, Homo sapiens
cttcagctgactcaggagaccatta

SEQ ID NO: 16907 - DNA, 25 bp, Homo sapiens
acgggcttcattacttccacaggga

SEQ ID NO: 16908 - DNA, 25 bp, Homo sapiens
ggtggcagtggtgttattattctta

SEQ ID NO: 16909 - DNA, 25 bp, Homo sapiens
ggaccattttatctctagggcctta

SEQ ID NO: 16910 - DNA, 25 bp, Homo sapiens
ctgcacttgtgaccctaagatgata

SEQ ID NO: 16911 - DNA, 25 bp, Homo sapiens
tccagtgccgtgctagttaacaatc

SEQ ID NO: 16912 - DNA, 25 bp, Homo sapiens
cctccctggtgattctttgctgaag

SEQ ID NO: 16913 - DNA, 25 bp, Homo sapiens
agatgttataatacctgcattatct

SEQ ID NO: 16914 - DNA, 25 bp, Homo sapiens
catttcagtgtgtgactttgactca

SEQ ID NO: 16915 - DNA, 25 bp, Homo sapiens
agcttgggattacctgggacttaca

SEQ ID NO: 16916 - DNA, 25 bp, Homo sapiens
tgaaggcgtaactattcctctactc

SEQ ID NO: 16917 - DNA, 25 bp, Homo sapiens
tccatcgggactgacgctgcaaaag

SEQ ID NO: 16918 - DNA, 25 bp, Homo sapiens
agtggcttaaaccatcgccgggtca

SEQ ID NO: 16919 - DNA, 25 bp, Homo sapiens
ggtcatcaggtatcagtgggcatca

SEQ ID NO: 16920 - DNA, 25 bp, Homo sapiens
cccgtggtctttgctgtgtatctaa

SEQ ID NO: 16921 - DNA, 25 bp, Homo sapiens
gggcctccggcacttcctgtataag

SEQ ID NO: 16922 - DNA, 25 bp, Homo sapiens
tgcgcctcatttaccacgtggctga

SEQ ID NO: 16923 - DNA, 25 bp, Homo sapiens
aggctgaccctgtgtgcactatttg

SEQ ID NO: 16924 - DNA, 25 bp, Homo sapiens
ggtaggtccctcatcttctaaggtg

SEQ ID NO: 16925 - DNA, 25 bp, Homo sapiens
ctagtgtgcctcattcccagctaca

SEQ ID NO: 16926 - DNA, 25 bp, Homo sapiens
ggcagcctgggtctttatccagaaa

SEQ ID NO: 16927 - DNA, 25 bp, Homo sapiens
agaccaccttcagacatgggctgta

SEQ ID NO: 16928 - DNA, 25 bp, Homo sapiens
tgcttttccttaggtcaactcagca

SEQ ID NO: 16929 - DNA, 25 bp, Homo sapiens
gtgtagcctcccaaagaaaatagtt

SEQ ID NO: 16930 - DNA, 25 bp, Homo sapiens
cttctggccaagagggagacatatc

SEQ ID NO: 16931 - DNA, 25 bp, Homo sapiens
acctggtggcttcagatggttaaca

SEQ ID NO: 16932 - DNA, 25 bp, Homo sapiens
cccgcccacgtgttctttgactatt

SEQ ID NO: 16933 - DNA, 25 bp, Homo sapiens
tgccttccgggatttctctacatta

SEQ ID NO: 16934 - DNA, 25 bp, Homo sapiens
ttaggagttccaccagcaaggcatg

SEQ ID NO: 16935 - DNA, 25 bp, Homo sapiens
gtctccgcctgattaactgccattt

SEQ ID NO: 16936 - DNA, 25 bp, Homo sapiens
catcaacacactggggagggctacc

SEQ ID NO: 16937 - DNA, 25 bp, Homo sapiens
tagacgcacgcagacacacaccttg

SEQ ID NO: 16938 - DNA, 25 bp, Homo sapiens
actgtgtaccttgagctggggcacc

SEQ ID NO: 16939 - DNA, 25 bp, Homo sapiens
ggctctccatgttgataggtcgaaa

SEQ ID NO: 16940 - DNA, 25 bp, Homo sapiens
gccaggctttctcttccgcattgta

SEQ ID NO: 16941 - DNA, 25 bp, Homo sapiens
gagtgctctaccaacaatgtctgtg

SEQ ID NO: 16942 - DNA, 25 bp, Homo sapiens
ctctagctaggtcaagggaagatca

SEQ ID NO: 16943 - DNA, 25 bp, Homo sapiens
gccttttgttcatgcgtctactaga

SEQ ID NO: 16944 - DNA, 25 bp, Homo sapiens
tctcagcagggaaagtgacagcttc

SEQ ID NO: 16945 - DNA, 25 bp, Homo sapiens
agtggtcctcttttctctgtgcttc

SEQ ID NO: 16946 - DNA, 25 bp, Homo sapiens
tggtggcaagcaaagtccctattcc

SEQ ID NO: 16947 - DNA, 25 bp, Homo sapiens
ctgattccgctagaggcagacagta

SEQ ID NO: 16948 - DNA, 25 bp, Homo sapiens
tccctcagggaagtaattagcaaca

SEQ ID NO: 16949 - DNA, 25 bp, Homo sapiens
catggactttcctagctgctttaca

SEQ ID NO: 16950 - DNA, 25 bp, Homo sapiens
ctgttcccgtggctcagaaaacttc

SEQ ID NO: 16951 - DNA, 25 bp, Homo sapiens
caactgggctggtttcctggatcac

SEQ ID NO: 16952 - DNA, 25 bp, Homo sapiens
agccaatgctttgagtgtctacaga

SEQ ID NO: 16953 - DNA, 25 bp, Homo sapiens
tctacagtgcccagtgccaagaatg

SEQ ID NO: 16954 - DNA, 25 bp, Homo sapiens
gcaggggtctttcacatggagttaa

SEQ ID NO: 16955 - DNA, 25 bp, Homo sapiens
tgtcccaataagaaggcctccgata

SEQ ID NO: 16956 - DNA, 25 bp, Homo sapiens
atgaccctagctggcattttcgtgc

SEQ ID NO: 16957 - DNA, 25 bp, Homo sapiens
ggcactgtgttctctggcattcata

SEQ ID NO: 16958 - DNA, 25 bp, Homo sapiens
ggctctcagttggaggcactcagaa

SEQ ID NO: 16959 - DNA, 25 bp, Homo sapiens
ggtggccttgtgatcctactgaaaa

SEQ ID NO: 16960 - DNA, 25 bp, Homo sapiens
cccttggcaaagagtgagattgaca

SEQ ID NO: 16961 - DNA, 25 bp, Homo sapiens
aaagatacatgcatacatgcactca

SEQ ID NO: 16962 - DNA, 25 bp, Homo sapiens
ttgtatcccatgtatcccacgtgta

SEQ ID NO: 16963 - DNA, 25 bp, Homo sapiens
gccctgggcaaaatgttatcacata

SEQ ID NO: 16964 - DNA, 25 bp, Homo sapiens
ttgtggtctcctatctgtaaagtaa

SEQ ID NO: 16965 - DNA, 25 bp, Homo sapiens
cagatctttttgtgtgaatgtgtac

SEQ ID NO: 16966 - DNA, 25 bp, Homo sapiens
agcccggtggcgttatcaatagaga

SEQ ID NO: 16967 - DNA, 25 bp, Homo sapiens
cgggccaggctcacctagttcagta

SEQ ID NO: 16968 - DNA, 25 bp, Homo sapiens
gtggagcatccactcttctggggaa

SEQ ID NO: 16969 - DNA, 25 bp, Homo sapiens
gggcccggaacaatgacaggaaata

SEQ ID NO: 16970 - DNA, 25 bp, Homo sapiens
caattctctgagtgtctgcccaagc

SEQ ID NO: 16971 - DNA, 25 bp, Homo sapiens
tggcagagcagacggcttttcagtc

SEQ ID NO: 16972 - DNA, 25 bp, Homo sapiens
tgagctcattgcagactcccgtatg

SEQ ID NO: 16973 - DNA, 25 bp, Homo sapiens
cacctgtcgctgtaaacaatgtcta

SEQ ID NO: 16974 - DNA, 25 bp, Homo sapiens
ctcctgactaagagcagactagttc

SEQ ID NO: 16975 - DNA, 25 bp, Homo sapiens
gactgtgtactctctcattccagga

SEQ ID NO: 16976 - DNA, 25 bp, Homo sapiens
gtgcccttgggagacattatccatc

SEQ ID NO: 16977 - DNA, 25 bp, Homo sapiens
ggggccaagcagaagtcctccaaca

SEQ ID NO: 16978 - DNA, 25 bp, Homo sapiens
gacagtgcctgatgcagacccagta

SEQ ID NO: 16979 - DNA, 25 bp, Homo sapiens
gcttttctgagcacttggagtcaca

SEQ ID NO: 16980 - DNA, 25 bp, Homo sapiens
ccagagcaagacatcccggttcaga

SEQ ID NO: 16981 - DNA, 25 bp, Homo sapiens
cacatttcctgggaggctgggtatc

SEQ ID NO: 16982 - DNA, 25 bp, Homo sapiens
gggcttgacacctactcttttgacc

SEQ ID NO: 16983 - DNA, 25 bp, Homo sapiens
tccagcagaggttcagggagcaatc

SEQ ID NO: 16984 - DNA, 25 bp, Homo sapiens
ctctgccgagtgatcacctacagga

SEQ ID NO: 16985 - DNA, 25 bp, Homo sapiens
ctgggccttgttcttgcagaattca

SEQ ID NO: 16986 - DNA, 25 bp, Homo sapiens
ccagtgccctgtgttggagcatata

SEQ ID NO: 16987 - DNA, 25 bp, Homo sapiens
cgggcccagccattgtgttaaaaga

SEQ ID NO: 16988 - DNA, 25 bp, Homo sapiens
gctttgtgtctttcaggcagttcca

SEQ ID NO: 16989 - DNA, 25 bp, Homo sapiens
ctctcttttcagttcaggaccagtg

SEQ ID NO: 16990 - DNA, 25 bp, Homo sapiens
agggctgcctcttctagttgtgttc

SEQ ID NO: 16991 - DNA, 25 bp, Homo sapiens
ccgtctggtgcctctaattctatca

SEQ ID NO: 16992 - DNA, 25 bp, Homo sapiens
ggggcccagtctccaattcttcatt

SEQ ID NO: 16993 - DNA, 25 bp, Homo sapiens
ccagatccaggcaatacagaggtga

SEQ ID NO: 16994 - DNA, 25 bp, Homo sapiens
cacaggtttggccatcatgcataca

SEQ ID NO: 16995 - DNA, 25 bp, Homo sapiens
tgctgatgaacccaaggcctcctga

SEQ ID NO: 16996 - DNA, 25 bp, Homo sapiens
gccagcagcgccatcttgttttcca

SEQ ID NO: 16997 - DNA, 25 bp, Homo sapiens
ccagggcctgtcctcaaatgtaagc

SEQ ID NO: 16998 - DNA, 25 bp, Homo sapiens
ccaggctgattggagctgtcacaga

SEQ ID NO: 16999 - DNA, 25 bp, Homo sapiens
tggcacggtgtttcatagactcatc

SEQ ID NO: 17000 - DNA, 25 bp, Homo sapiens
ctgcaggtaatcacgggccactttc

SEQ ID NO: 17001 - DNA, 25 bp, Homo sapiens
tcgactatctatggagggaaacgca

SEQ ID NO: 17002 - DNA, 25 bp, Homo sapiens
gtggccctcctctgaagctgaatgc

SEQ ID NO: 17003 - DNA, 25 bp, Homo sapiens
ggctagacttcttaaatatgctttg

SEQ ID NO: 17004 - DNA, 25 bp, Homo sapiens
gagaccttatgtacctgctgttaga

SEQ ID NO: 17005 - DNA, 25 bp, Homo sapiens
aaaattgacagatacatttaaaaac

SEQ ID NO: 17006 - DNA, 25 bp, Homo sapiens
gatttataaaagcaagttgcaggac

SEQ ID NO: 17007 - DNA, 25 bp, Homo sapiens
tgtccgtgcctttctgcgtaaaata

SEQ ID NO: 17008 - DNA, 25 bp, Homo sapiens
gtggctgcctctcctctgaattctt

SEQ ID NO: 17009 - DNA, 25 bp, Homo sapiens
cttgactcatctgcaggggacattc

SEQ ID NO: 17010 - DNA, 25 bp, Homo sapiens
gtctcgtggctaacaaggtcatatt

SEQ ID NO: 17011 - DNA, 25 bp, Homo sapiens
tgggaaaagcctatggaaatcattc

SEQ ID NO: 17012 - DNA, 25 bp, Homo sapiens
caccacatggctctctatacggata

SEQ ID NO: 17013 - DNA, 25 bp, Homo sapiens
tacatggcctgaaaggataggtctc

SEQ ID NO: 17014 - DNA, 25 bp, Homo sapiens
aagaagtagaaccatatatgatgat

SEQ ID NO: 17015 - DNA, 25 bp, Homo sapiens
cctgtgcctccaattaaaatgactg

SEQ ID NO: 17016 - DNA, 25 bp, Homo sapiens
cctgaacacttacctctggctatga

SEQ ID NO: 17017 - DNA, 25 bp, Homo sapiens
ttcttggctgtggtgagtataactc

SEQ ID NO: 17018 - DNA, 25 bp, Homo sapiens
aatccttttgggtcaggctggaaac

SEQ ID NO: 17019 - DNA, 25 bp, Homo sapiens
ataggccctggagcttatgattcta

SEQ ID NO: 17020 - DNA, 25 bp, Homo sapiens
gaattcctggaaaacacgtgtctgc

SEQ ID NO: 17021 - DNA, 25 bp, Homo sapiens
tgacctccttttccagctccagtaa

SEQ ID NO: 17022 - DNA, 25 bp, Homo sapiens
gctctggggctgacctaagatttca

SEQ ID NO: 17023 - DNA, 25 bp, Homo sapiens
tggcataggcccacatgattgtata

SEQ ID NO: 17024 - DNA, 25 bp, Homo sapiens
aagccgcctttcttcccaggaagga

SEQ ID NO: 17025 - DNA, 25 bp, Homo sapiens
tggacacaattgctggccgtaagtg

SEQ ID NO: 17026 - DNA, 25 bp, Homo sapiens
tgcctggatgggattcttcaacttc

SEQ ID NO: 17027 - DNA, 25 bp, Homo sapiens
cctgctgcccatgagataaagattg

SEQ ID NO: 17028 - DNA, 25 bp, Homo sapiens
atgtgctgcacacccagtagagtta

SEQ ID NO: 17029 - DNA, 25 bp, Homo sapiens
tacctcctgggaacatcaaagactt

SEQ ID NO: 17030 - DNA, 25 bp, Homo sapiens
ctgcagtccaggttggctccttcta

SEQ ID NO: 17031 - DNA, 25 bp, Homo sapiens
cctcaagtgagccttggcaatgttc

SEQ ID NO: 17032 - DNA, 25 bp, Homo sapiens
gcttgcttggctctcctcatctaga

SEQ ID NO: 17033 - DNA, 25 bp, Homo sapiens
tgcagcaagtgtctccaactggagc

SEQ ID NO: 17034 - DNA, 25 bp, Homo sapiens
aagatgtaaagcatacaggcattct

SEQ ID NO: 17035 - DNA, 25 bp, Homo sapiens
cacgccagggttaattacaagatta

SEQ ID NO: 17036 - DNA, 25 bp, Homo sapiens
ttacactcccaaggtttcagaaatc

SEQ ID NO: 17037 - DNA, 25 bp, Homo sapiens
ctccagccaaatgcagatcagattc

SEQ ID NO: 17038 - DNA, 25 bp, Homo sapiens
catgtgcctgattcctcctgaacta

SEQ ID NO: 17039 - DNA, 25 bp, Homo sapiens
aggtcccatctatcaccaaagctgg

SEQ ID NO: 17040 - DNA, 25 bp, Homo sapiens
gggcagcactcaggcacctgtttta

SEQ ID NO: 17041 - DNA, 25 bp, Homo sapiens
tcctgccacccagatgactgctgtt

SEQ ID NO: 17042 - DNA, 25 bp, Homo sapiens
ccagggtggcgttcactcatgtaaa

SEQ ID NO: 17043 - DNA, 25 bp, Homo sapiens
cctcggtgttggttcctggagataa

SEQ ID NO: 17044 - DNA, 25 bp, Homo sapiens
ggttccagtccagatgccctcaaga

SEQ ID NO: 17045 - DNA, 25 bp, Homo sapiens
cttggggtttctgaacaaatagtcc

SEQ ID NO: 17046 - DNA, 25 bp, Homo sapiens
ccgtgcctttatggacagcatggta

SEQ ID NO: 17047 - DNA, 25 bp, Homo sapiens
agatacccagcccacaggtgccctg

SEQ ID NO: 17048 - DNA, 25 bp, Homo sapiens
actctggcccttggaagaactgtgc

SEQ ID NO: 17049 - DNA, 25 bp, Homo sapiens
agcgggaggcctgttttctaagaaa

SEQ ID NO: 17050 - DNA, 25 bp, Homo sapiens
ctggagccgtgaataccaggaaaca

SEQ ID NO: 17051 - DNA, 25 bp, Homo sapiens
tcaaatgagtctcttggattttatc

SEQ ID NO: 17052 - DNA, 25 bp, Homo sapiens
tcaattaaattttacactacagata

SEQ ID NO: 17053 - DNA, 25 bp, Homo sapiens
cgcctcctcagctgtaggatgaaga

SEQ ID NO: 17054 - DNA, 25 bp, Homo sapiens
cagggtcacccacagttcttcgtta

SEQ ID NO: 17055 - DNA, 25 bp, Homo sapiens
agcgctacaactggccacctggtca

SEQ ID NO: 17056 - DNA, 25 bp, Homo sapiens
tacctgggaccctgaacaatgtttc

SEQ ID NO: 17057 - DNA, 25 bp, Homo sapiens
ggtgccttgagccacgtgactttca

SEQ ID NO: 17058 - DNA, 25 bp, Homo sapiens
tgcctccgatgatgctgacgatctc

SEQ ID NO: 17059 - DNA, 25 bp, Homo sapiens
cacagtgcgtgtgttgactagaagc

SEQ ID NO: 17060 - DNA, 25 bp, Homo sapiens
cacaggagtccaaggctgcctgaga

SEQ ID NO: 17061 - DNA, 25 bp, Homo sapiens
agggccttacccgtcagtgaataga

SEQ ID NO: 17062 - DNA, 25 bp, Homo sapiens
cgggcagcagagaatgtttccgtta

SEQ ID NO: 17063 - DNA, 25 bp, Homo sapiens
ggggatgctttttccggacacactg

SEQ ID NO: 17064 - DNA, 25 bp, Homo sapiens
ggtgcctccttttctccctgtttga

SEQ ID NO: 17065 - DNA, 25 bp, Homo sapiens
tagaagtcctggtgtagccgcattg

SEQ ID NO: 17066 - DNA, 25 bp, Homo sapiens
cagtgtctgcttccacctgctagga

SEQ ID NO: 17067 - DNA, 25 bp, Homo sapiens
cctgcggctgcaatggtgaatttta

SEQ ID NO: 17068 - DNA, 25 bp, Homo sapiens
gctagagtaccaccggctcagtgta

SEQ ID NO: 17069 - DNA, 25 bp, Homo sapiens
agattctgtacctccacactgtggg

SEQ ID NO: 17070 - DNA, 25 bp, Homo sapiens
gcccttcgggatggcagctgtaata

SEQ ID NO: 17071 - DNA, 25 bp, Homo sapiens
aaatgccgtgggttctcggctccca

SEQ ID NO: 17072 - DNA, 25 bp, Homo sapiens
ccctgaggtgtcttaagtgcttctt

SEQ ID NO: 17073 - DNA, 25 bp, Homo sapiens
aggggccttttgcttcatgggtcaa

SEQ ID NO: 17074 - DNA, 25 bp, Homo sapiens
gttggctccatttactcatctgtga

SEQ ID NO: 17075 - DNA, 25 bp, Homo sapiens
ctctcctaaaatcgcctgggctgtg

SEQ ID NO: 17076 - DNA, 25 bp, Homo sapiens
tgcaattgtaaaatattgagggatt

SEQ ID NO: 17077 - DNA, 25 bp, Homo sapiens
agggttcccttctcctcaagtctgc

SEQ ID NO: 17078 - DNA, 25 bp, Homo sapiens
tgtcacaccagttttaggctcaatc

SEQ ID NO: 17079 - DNA, 25 bp, Homo sapiens
ctttccaaagggtgctgcatgcatc

SEQ ID NO: 17080 - DNA, 25 bp, Homo sapiens
acatgcagctcagatccggaatttg

SEQ ID NO: 17081 - DNA, 25 bp, Homo sapiens
tcccggagctcaaggctggacaatg

SEQ ID NO: 17082 - DNA, 25 bp, Homo sapiens
ccactcgctggagggtcactaaacc

SEQ ID NO: 17083 - DNA, 25 bp, Homo sapiens
ctagccggctgcagcacacagtatc

SEQ ID NO: 17084 - DNA, 25 bp, Homo sapiens
cctggcccacgaaggctgcttagta

SEQ ID NO: 17085 - DNA, 25 bp, Homo sapiens
acttgggttcacactgacactggga

SEQ ID NO: 17086 - DNA, 25 bp, Homo sapiens
cagacctgggttttcgcctgagaaa

SEQ ID NO: 17087 - DNA, 25 bp, Homo sapiens
ggcctcttctgttgggtggcacatc

SEQ ID NO: 17088 - DNA, 25 bp, Homo sapiens
caaggcccgcatgtgcttaaggaga

SEQ ID NO: 17089 - DNA, 25 bp, Homo sapiens
aggggacctcagcaacacattcgga

SEQ ID NO: 17090 - DNA, 25 bp, Homo sapiens
tggaaagagtccgttacacagtatc

SEQ ID NO: 17091 - DNA, 25 bp, Homo sapiens
cagagctaccatgacggcctttttc

SEQ ID NO: 17092 - DNA, 25 bp, Homo sapiens
gtttaagtagatcacccagccgttg

SEQ ID NO: 17093 - DNA, 25 bp, Homo sapiens
tctgagcagcaaaacgtggggtccc

SEQ ID NO: 17094 - DNA, 25 bp, Homo sapiens
ctctggggaccgagaataattttca

SEQ ID NO: 17095 - DNA, 25 bp, Homo sapiens
gcaggtccacctcaaacactgggta

SEQ ID NO: 17096 - DNA, 25 bp, Homo sapiens
gcactggctggtcaaactttgctga

SEQ ID NO: 17097 - DNA, 25 bp, Homo sapiens
atcctctctggagtgactgagcctg

SEQ ID NO: 17098 - DNA, 25 bp, Homo sapiens
ggcaatttgttttcagggacacctc

SEQ ID NO: 17099 - DNA, 25 bp, Homo sapiens
cccagtggtcacagcgcattagaag

SEQ ID NO: 17100 - DNA, 25 bp, Homo sapiens
ccatgagagtttccactgagcagtg

SEQ ID NO: 17101 - DNA, 25 bp, Homo sapiens
gaccaccgctttgatcccttgttta

SEQ ID NO: 17102 - DNA, 25 bp, Homo sapiens
ggaaacttcgcgatgctgcaccctg

SEQ ID NO: 17103 - DNA, 25 bp, Homo sapiens
ggcttcaactgaaaccaactgtctg

SEQ ID NO: 17104 - DNA, 25 bp, Homo sapiens
gcttggcgatctcttcagggaagta

SEQ ID NO: 17105 - DNA, 25 bp, Homo sapiens
tgctggcaaccatctgtgtctgaca

SEQ ID NO: 17106 - DNA, 25 bp, Homo sapiens
ctcagcgtcatcagagtccaggctc

SEQ ID NO: 17107 - DNA, 25 bp, Homo sapiens
aggaagccgctttcttggtcacaga

SEQ ID NO: 17108 - DNA, 25 bp, Homo sapiens
cacctggaggaacattttgctgaac

SEQ ID NO: 17109 - DNA, 25 bp, Homo sapiens
acactaatggaataaaaacacttta

SEQ ID NO: 17110 - DNA, 25 bp, Homo sapiens
gctgaggctggaagcgagttttcta

SEQ ID NO: 17111 - DNA, 25 bp, Homo sapiens
tgtcggcattcctccatagtagatg

SEQ ID NO: 17112 - DNA, 25 bp, Homo sapiens
aggcatacgtggatcctgcttctca

SEQ ID NO: 17113 - DNA, 25 bp, Homo sapiens
acctaacagagctaccgggcgctct

SEQ ID NO: 17114 - DNA, 25 bp, Homo sapiens
gaccacattaatcaaatgatgaaaa

SEQ ID NO: 17115 - DNA, 25 bp, Homo sapiens
cctgcttcatactggcgggattcac

SEQ ID NO: 17116 - DNA, 25 bp, Homo sapiens
tgctcaaagctatgggtcaacaatc

SEQ ID NO: 17117 - DNA, 25 bp, Homo sapiens
caactctggtctactcgcttggaga

SEQ ID NO: 17118 - DNA, 25 bp, Homo sapiens
ggggcagcactcacctcactaacaa

SEQ ID NO: 17119 - DNA, 25 bp, Homo sapiens
agtggacactggcttatcaccaaga

SEQ ID NO: 17120 - DNA, 25 bp, Homo sapiens
cgcttagaatcagccggtgctcatc

SEQ ID NO: 17121 - DNA, 25 bp, Homo sapiens
gtggtggtgttctaccctcctcata

SEQ ID NO: 17122 - DNA, 25 bp, Homo sapiens
ccacagggtttcagaacggcagcca

SEQ ID NO: 17123 - DNA, 25 bp, Homo sapiens
cgagggtatgttcatgccacttaca

SEQ ID NO: 17124 - DNA, 25 bp, Homo sapiens
aagaggtccgtcattgccaatagca

SEQ ID NO: 17125 - DNA, 25 bp, Homo sapiens
cgccgatgctgaggtttaacacgtc

SEQ ID NO: 17126 - DNA, 25 bp, Homo sapiens
cagggaggcaagcacacttattcta

SEQ ID NO: 17127 - DNA, 25 bp, Homo sapiens
ggtccagttggttctctccttcaca

SEQ ID NO: 17128 - DNA, 25 bp, Homo sapiens
tgaaatgccagtccaccgggtatta

SEQ ID NO: 17129 - DNA, 25 bp, Homo sapiens
ctccaccgggtttcattgcagggta

SEQ ID NO: 17130 - DNA, 25 bp, Homo sapiens
ctctgctgagtctgatctttaagtc

SEQ ID NO: 17131 - DNA, 25 bp, Homo sapiens
ggcaactccgtgtctcctaaagcat

SEQ ID NO: 17132 - DNA, 25 bp, Homo sapiens
caaggacgcgtctttcagcacgaga

SEQ ID NO: 17133 - DNA, 25 bp, Homo sapiens
ttcgaaaccagatacccgtgatatt

SEQ ID NO: 17134 - DNA, 25 bp, Homo sapiens
tgtgctgtgcactcaacccattgga

SEQ ID NO: 17135 - DNA, 25 bp, Homo sapiens
ggccttttgtggttcagcctgaaga

SEQ ID NO: 17136 - DNA, 25 bp, Homo sapiens
ttgcacagaccatacccggggcgta

SEQ ID NO: 17137 - DNA, 25 bp, Homo sapiens
gcgtttctcactcaaggcaggcttt

SEQ ID NO: 17138 - DNA, 25 bp, Homo sapiens
tagtcagggcacaaccttccaagtg

SEQ ID NO: 17139 - DNA, 25 bp, Homo sapiens
agcctcagggtcaagggcacggctt

SEQ ID NO: 17140 - DNA, 25 bp, Homo sapiens
gaatggtccctcctggttctcacta

SEQ ID NO: 17141 - DNA, 25 bp, Homo sapiens
ggcagaagcccactacagggtctta

SEQ ID NO: 17142 - DNA, 25 bp, Homo sapiens
cttcctgttaggttcagcctgtttc

SEQ ID NO: 17143 - DNA, 25 bp, Homo sapiens
tggatcctgcctctcacctacttta

SEQ ID NO: 17144 - DNA, 25 bp, Homo sapiens
gctggtgacggaagtcctcagtttc

SEQ ID NO: 17145 - DNA, 25 bp, Homo sapiens
caatgtgtgtgtccaattctgtcat

SEQ ID NO: 17146 - DNA, 25 bp, Homo sapiens
agaatgttgcttagaaacccaaatt

SEQ ID NO: 17147 - DNA, 25 bp, Homo sapiens
gaagcaaaccttatattcagtctca

SEQ ID NO: 17148 - DNA, 25 bp, Homo sapiens
cacgaagctgctctcctggttaacc

SEQ ID NO: 17149 - DNA, 25 bp, Homo sapiens
gggagtttccttcatcatccgcaaa

SEQ ID NO: 17150 - DNA, 25 bp, Homo sapiens
ccactggacagctgtcgggttttca

SEQ ID NO: 17151 - DNA, 25 bp, Homo sapiens
caaccctgaatactttaagcctcgg

SEQ ID NO: 17152 - DNA, 25 bp, Homo sapiens
agagcttgatttcttctggaataga

SEQ ID NO: 17153 - DNA, 25 bp, Homo sapiens
gagatttcagccctctgccagttgg

SEQ ID NO: 17154 - DNA, 25 bp, Homo sapiens
cctcctgttgctcttgttgtggcca

SEQ ID NO: 17155 - DNA, 25 bp, Homo sapiens
tctagctcagaactcataatgtgtg

SEQ ID NO: 17156 - DNA, 25 bp, Homo sapiens
cccaaggacaccagcgtaatggtta

SEQ ID NO: 17157 - DNA, 25 bp, Homo sapiens
tgtgcccgtgtgaatcttggatgac

SEQ ID NO: 17158 - DNA, 25 bp, Homo sapiens
tcctaagggtgcaacagggcatctc

SEQ ID NO: 17159 - DNA, 25 bp, Homo sapiens
ggagctggactcggtgccatcaaga

SEQ ID NO: 17160 - DNA, 25 bp, Homo sapiens
tgtgtcacccttccctgatggcata

SEQ ID NO: 17161 - DNA, 25 bp, Homo sapiens
cccagctggaaggtagaaactttac

SEQ ID NO: 17162 - DNA, 25 bp, Homo sapiens
cagccgaggaacttggtaccatttc

SEQ ID NO: 17163 - DNA, 25 bp, Homo sapiens
accacatatatgcagctggaatacg

SEQ ID NO: 17164 - DNA, 25 bp, Homo sapiens
atcctccctggaagccgagtgcaga

SEQ ID NO: 17165 - DNA, 25 bp, Homo sapiens
ccggcctgggaatgaccttggaaaa

SEQ ID NO: 17166 - DNA, 25 bp, Homo sapiens
caattcttacgttaccgcggggcga

SEQ ID NO: 17167 - DNA, 25 bp, Homo sapiens
tgcacagggttctttccacgctttg

SEQ ID NO: 17168 - DNA, 25 bp, Homo sapiens
tcctgacaactctgggccctgctgt

SEQ ID NO: 17169 - DNA, 25 bp, Homo sapiens
tgagcaccatctagggcatggccta

SEQ ID NO: 17170 - DNA, 25 bp, Homo sapiens
cctcttagactgtgccctccatgga

SEQ ID NO: 17171 - DNA, 25 bp, Homo sapiens
taatggggtagctccttgaacttcc

SEQ ID NO: 17172 - DNA, 25 bp, Homo sapiens
cccagcgacttttggcctctgagca

SEQ ID NO: 17173 - DNA, 25 bp, Homo sapiens
gggctgcctacctttctctgtgtcc

SEQ ID NO: 17174 - DNA, 25 bp, Homo sapiens
ggggtcattcagcagccactctgtc

SEQ ID NO: 17175 - DNA, 25 bp, Homo sapiens
cgggtttaagccctgagcaaattga

SEQ ID NO: 17176 - DNA, 25 bp, Homo sapiens
tgggcctgaaatgcacacgtccagc

SEQ ID NO: 17177 - DNA, 25 bp, Homo sapiens
gggatagagagaggggagcctcggg

SEQ ID NO: 17178 - DNA, 25 bp, Homo sapiens
cccagcccagctacaggatgagatc

SEQ ID NO: 17179 - DNA, 25 bp, Homo sapiens
ccgggctccgtgttgctagaaaagc

SEQ ID NO: 17180 - DNA, 25 bp, Homo sapiens
gccttccaaaggtagcagccatctg

SEQ ID NO: 17181 - DNA, 25 bp, Homo sapiens
gacctaccgtgtgttggagctcagc

SEQ ID NO: 17182 - DNA, 25 bp, Homo sapiens
cagaccctgaggtgcctttcacaca

SEQ ID NO: 17183 - DNA, 25 bp, Homo sapiens
gctgctgctaacaggtgagcccttc

SEQ ID NO: 17184 - DNA, 25 bp, Homo sapiens
aaatgccttgttcccagcccagctg

SEQ ID NO: 17185 - DNA, 25 bp, Homo sapiens
ccttacatattttttaaaagccagg

SEQ ID NO: 17186 - DNA, 25 bp, Homo sapiens
cagtcacactgctaggctcctcata

SEQ ID NO: 17187 - DNA, 25 bp, Homo sapiens
gtcctccctggagctttctggcttc

SEQ ID NO: 17188 - DNA, 25 bp, Homo sapiens
acttgcttggcactcttggacctgg

SEQ ID NO: 17189 - DNA, 25 bp, Homo sapiens
agggcctcattctcctccaaggtga

SEQ ID NO: 17190 - DNA, 25 bp, Homo sapiens
tcaccgaggggtaggacagtatttt

SEQ ID NO: 17191 - DNA, 25 bp, Homo sapiens
ggctgccaggattgcattgcacata

SEQ ID NO: 17192 - DNA, 25 bp, Homo sapiens
cctggcctcccagcacttggaagtg

SEQ ID NO: 17193 - DNA, 25 bp, Homo sapiens
tgtgctcattcacccagaaagatgg

SEQ ID NO: 17194 - DNA, 25 bp, Homo sapiens
ggcccacatcccttgaccagataaa

SEQ ID NO: 17195 - DNA, 25 bp, Homo sapiens
aggacagttcctgaagggcctttgc

SEQ ID NO: 17196 - DNA, 25 bp, Homo sapiens
tccttgccagagcacacggtgtcag

SEQ ID NO: 17197 - DNA, 25 bp, Homo sapiens
agccctgggttggtttcctcaagta

SEQ ID NO: 17198 - DNA, 25 bp, Homo sapiens
cagatgtcggcttaggtggtttcca

SEQ ID NO: 17199 - DNA, 25 bp, Homo sapiens
tggcccttcgcatctctgcttggtg

SEQ ID NO: 17200 - DNA, 25 bp, Homo sapiens
caggcgtggtgatgtgattactccc

SEQ ID NO: 17201 - DNA, 25 bp, Homo sapiens
gcgtcttcacccttgcctgactgaa

SEQ ID NO: 17202 - DNA, 25 bp, Homo sapiens
caggtgtttctgtacttggggttcc

SEQ ID NO: 17203 - DNA, 25 bp, Homo sapiens
cctggagccacgcagaacagatgtt

SEQ ID NO: 17204 - DNA, 25 bp, Homo sapiens
tccctgaggctggaaagtcactttc

SEQ ID NO: 17205 - DNA, 25 bp, Homo sapiens
ccgtggcagtttggtagcttcttta

SEQ ID NO: 17206 - DNA, 25 bp, Homo sapiens
gtccctgttgagaaatccttgctta

SEQ ID NO: 17207 - DNA, 25 bp, Homo sapiens
gggctcctctccacatgggcacagg

SEQ ID NO: 17208 - DNA, 25 bp, Homo sapiens
agcgtctgtctgtagcactctccca

SEQ ID NO: 17209 - DNA, 25 bp, Homo sapiens
aagcccttgtgccagtttccgaaaa

SEQ ID NO: 17210 - DNA, 25 bp, Homo sapiens
cctgggcaattctgggccttgtaaa

SEQ ID NO: 17211 - DNA, 25 bp, Homo sapiens
cgtctgctttaaactccgtgtatca

SEQ ID NO: 17212 - DNA, 25 bp, Homo sapiens
ggtggtcactttccagctgcagaaa

SEQ ID NO: 17213 - DNA, 25 bp, Homo sapiens
ttatatgagtttgtgtgtgggcgtt

SEQ ID NO: 17214 - DNA, 25 bp, Homo sapiens
agcgcctgctccctgaagttttgac

SEQ ID NO: 17215 - DNA, 25 bp, Homo sapiens
ggcccagcagctccttttgaccttg

SEQ ID NO: 17216 - DNA, 25 bp, Homo sapiens
gccagcctctgttttgaagtgtgtg

SEQ ID NO: 17217 - DNA, 25 bp, Homo sapiens
tggccgcacacctgagaacatgctg

SEQ ID NO: 17218 - DNA, 25 bp, Homo sapiens
gccaggcccattggaacagattttc

SEQ ID NO: 17219 - DNA, 25 bp, Homo sapiens
ccgccgcgttaaggacagatggatt

SEQ ID NO: 17220 - DNA, 25 bp, Homo sapiens
gggtggcatgtctcctgtcttagaa

SEQ ID NO: 17221 - DNA, 25 bp, Homo sapiens
cctgggcaggccgatttcataaaca

SEQ ID NO: 17222 - DNA, 25 bp, Homo sapiens
gggctctctgcatggctaagctcta

SEQ ID NO: 17223 - DNA, 25 bp, Homo sapiens
aaccaggtggtacatggctccagca

SEQ ID NO: 17224 - DNA, 25 bp, Homo sapiens
gggcccaggagcacctcatgttttc

SEQ ID NO: 17225 - DNA, 25 bp, Homo sapiens
gcagcttcctttcaacggccaggta

SEQ ID NO: 17226 - DNA, 25 bp, Homo sapiens
cgcatgctgcacgtgcctcctaata

SEQ ID NO: 17227 - DNA, 25 bp, Homo sapiens
tgctcaggagccagtaaaccaggtg

SEQ ID NO: 17228 - DNA, 25 bp, Homo sapiens
aggttggcccagttcagtcctgctt

SEQ ID NO: 17229 - DNA, 25 bp, Homo sapiens
tccctggggttcgactcagaatgca

SEQ ID NO: 17230 - DNA, 25 bp, Homo sapiens
cctcggcagtggtctgagttattta

SEQ ID NO: 17231 - DNA, 25 bp, Homo sapiens
agtgccctttctttcggtgtttagc

SEQ ID NO: 17232 - DNA, 25 bp, Homo sapiens
gggtccgatccatgagctgctcttt

SEQ ID NO: 17233 - DNA, 25 bp, Homo sapiens
tgcttggctcagacttcccttttgg

SEQ ID NO: 17234 - DNA, 25 bp, Homo sapiens
tctctgggtcactgtggctatcaca

SEQ ID NO: 17235 - DNA, 25 bp, Homo sapiens
actggggttcttatcacttatcggc

SEQ ID NO: 17236 - DNA, 25 bp, Homo sapiens
atgggcctgccctgctttttagaca

SEQ ID NO: 17237 - DNA, 25 bp, Homo sapiens
gggcgctagggcactctttaaatga

SEQ ID NO: 17238 - DNA, 25 bp, Homo sapiens
cggagtccctttggtacatggatta

SEQ ID NO: 17239 - DNA, 25 bp, Homo sapiens
gcgcatggctccttctctgagggaa

SEQ ID NO: 17240 - DNA, 25 bp, Homo sapiens
cctgtatgttggcatgctggctcac

SEQ ID NO: 17241 - DNA, 25 bp, Homo sapiens
cagggctgagctcatcgcattgata

SEQ ID NO: 17242 - DNA, 25 bp, Homo sapiens
agcctgccagttgccacagctttta

SEQ ID NO: 17243 - DNA, 25 bp, Homo sapiens
tccaggggccctgcattgaattcca

SEQ ID NO: 17244 - DNA, 25 bp, Homo sapiens
gtcccgggattcacaaaagctcttg

SEQ ID NO: 17245 - DNA, 25 bp, Homo sapiens
ccactatcttcctttactttgtgga

SEQ ID NO: 17246 - DNA, 25 bp, Homo sapiens
gggctctccgccacttggatttctt

SEQ ID NO: 17247 - DNA, 25 bp, Homo sapiens
cgggacgtctctaaagcaccttcta

SEQ ID NO: 17248 - DNA, 25 bp, Homo sapiens
tgagagactctcctggcaacaagcg

SEQ ID NO: 17249 - DNA, 25 bp, Homo sapiens
cttgcacatggccagggctcaaatc

SEQ ID NO: 17250 - DNA, 25 bp, Homo sapiens
ggtctcctgggaaatggtgcttaca

SEQ ID NO: 17251 - DNA, 25 bp, Homo sapiens
gctgatggctgaactcctgcttaga

SEQ ID NO: 17252 - DNA, 25 bp, Homo sapiens
ttcctggagcccattcaccgtggcg

SEQ ID NO: 17253 - DNA, 25 bp, Homo sapiens
tgaaaggccttagagaccaccagtg

SEQ ID NO: 17254 - DNA, 25 bp, Homo sapiens
ggggaaccctctcctttctctgaag

SEQ ID NO: 17255 - DNA, 25 bp, Homo sapiens
gggcctggctccctcatatacaata

SEQ ID NO: 17256 - DNA, 25 bp, Homo sapiens
cctagggctgtacactttgggttta

SEQ ID NO: 17257 - DNA, 25 bp, Homo sapiens
actcgatgtggttgtcctgcaggta

SEQ ID NO: 17258 - DNA, 25 bp, Homo sapiens
tgctcacggatattgggaaggactc

SEQ ID NO: 17259 - DNA, 25 bp, Homo sapiens
gcctccaggctgtggttgcaaaacc

SEQ ID NO: 17260 - DNA, 25 bp, Homo sapiens
ccacttgacttttgggaagcctgcc

SEQ ID NO: 17261 - DNA, 25 bp, Homo sapiens
cgacccgctgattgcctgattaatg

SEQ ID NO: 17262 - DNA, 25 bp, Homo sapiens
ggctctgtctctcaggctctaagta

SEQ ID NO: 17263 - DNA, 25 bp, Homo sapiens
gggcttccctcgtcctattgctgga

SEQ ID NO: 17264 - DNA, 25 bp, Homo sapiens
aggggcgcttacccaaagcgaggag

SEQ ID NO: 17265 - DNA, 25 bp, Homo sapiens
cacgcttgtgtgctcatgtacctgg

SEQ ID NO: 17266 - DNA, 25 bp, Homo sapiens
ggccctccctaagccgtgatgatta

SEQ ID NO: 17267 - DNA, 25 bp, Homo sapiens
tgggcccaccaagtcctcagtgata

SEQ ID NO: 17268 - DNA, 25 bp, Homo sapiens
ccctgcgatcagtgaaaggcattca

SEQ ID NO: 17269 - DNA, 25 bp, Homo sapiens
gacaggcgggtggtgctgaaatcac

SEQ ID NO: 17270 - DNA, 25 bp, Homo sapiens
tcactgtctggggttggtttaaaca

SEQ ID NO: 17271 - DNA, 25 bp, Homo sapiens
tgctcagtcagtcagacaagatttc

SEQ ID NO: 17272 - DNA, 25 bp, Homo sapiens
ttgagcccaggtagcatttagcata

SEQ ID NO: 17273 - DNA, 25 bp, Homo sapiens
cgggttccagccagaagcagtagtc

SEQ ID NO: 17274 - DNA, 25 bp, Homo sapiens
caccagctgtgggagctctcagaga

SEQ ID NO: 17275 - DNA, 25 bp, Homo sapiens
ccgtgtctttgctcccttgccaata

SEQ ID NO: 17276 - DNA, 25 bp, Homo sapiens
tactctgggcagtctatggcacaca

SEQ ID NO: 17277 - DNA, 25 bp, Homo sapiens
gccggttcactatcaagcactcgga

SEQ ID NO: 17278 - DNA, 25 bp, Homo sapiens
gtaaccaccttttaagagtcatggg

SEQ ID NO: 17279 - DNA, 25 bp, Homo sapiens
atagctgtcatcacctgggcctcta

SEQ ID NO: 17280 - DNA, 25 bp, Homo sapiens
ggtctcaagcctccggaacagtctg

SEQ ID NO: 17281 - DNA, 25 bp, Homo sapiens
aatctaatgtacctgtggctgcaca

SEQ ID NO: 17282 - DNA, 25 bp, Homo sapiens
agcagcctaacttccctggacagga

SEQ ID NO: 17283 - DNA, 25 bp, Homo sapiens
tcttcgagccctacacctggaattc

SEQ ID NO: 17284 - DNA, 25 bp, Homo sapiens
tgggctcgaagccaacactcatctg

SEQ ID NO: 17285 - DNA, 25 bp, Homo sapiens
tgagcctctctctctctccatgtgg

SEQ ID NO: 17286 - DNA, 25 bp, Homo sapiens
tccgacagatggacagaagggctcc

SEQ ID NO: 17287 - DNA, 25 bp, Homo sapiens
tcaaacccctctctaagtgctccta

SEQ ID NO: 17288 - DNA, 25 bp, Homo sapiens
tggtgtcctccacccaaactaggtc

SEQ ID NO: 17289 - DNA, 25 bp, Homo sapiens
gggatgtcccagcacctttactagc

SEQ ID NO: 17290 - DNA, 25 bp, Homo sapiens
cctcacgggtgtgcgaaatttattt

SEQ ID NO: 17291 - DNA, 25 bp, Homo sapiens
aaccactgcagttggggctcaaacc

SEQ ID NO: 17292 - DNA, 25 bp, Homo sapiens
cccggagcagccagcagattaaaaa

SEQ ID NO: 17293 - DNA, 25 bp, Homo sapiens
tcctttgggaactggaagctgttgc

SEQ ID NO: 17294 - DNA, 25 bp, Homo sapiens
tgggagtcttcaccagcctatacta

SEQ ID NO: 17295 - DNA, 25 bp, Homo sapiens
tgggcccgctcagcaacctatttaa

SEQ ID NO: 17296 - DNA, 25 bp, Homo sapiens
ctgagcagcctcacacgagtcactg

SEQ ID NO: 17297 - DNA, 25 bp, Homo sapiens
aaggggcagttccacaaacaccggg

SEQ ID NO: 17298 - DNA, 25 bp, Homo sapiens
gacgctgcacctaattcgggaacga

SEQ ID NO: 17299 - DNA, 25 bp, Homo sapiens
tgagttctatcccagccgctgctgc

SEQ ID NO: 17300 - DNA, 25 bp, Homo sapiens
tctgtcaactctgcccggaaatgtg

SEQ ID NO: 17301 - DNA, 25 bp, Homo sapiens
agagccatctccagaaggtcacagg

SEQ ID NO: 17302 - DNA, 25 bp, Homo sapiens
tttattacagggagtttgggccacc

SEQ ID NO: 17303 - DNA, 25 bp, Homo sapiens
ccaggtctggccatttccaagggtc

SEQ ID NO: 17304 - DNA, 25 bp, Homo sapiens
gtcctcaatgatggaacatccctcc

SEQ ID NO: 17305 - DNA, 25 bp, Homo sapiens
gccagctgctggatcacaggcttga

SEQ ID NO: 17306 - DNA, 25 bp, Homo sapiens
gctgggttttccgtctatcacactg

SEQ ID NO: 17307 - DNA, 25 bp, Homo sapiens
cctggaagtggaattgctctattta

SEQ ID NO: 17308 - DNA, 25 bp, Homo sapiens
cgggcctttgccagtacctaataaa

SEQ ID NO: 17309 - DNA, 25 bp, Homo sapiens
gggtgccatcgcgttttgaatctca

SEQ ID NO: 17310 - DNA, 25 bp, Homo sapiens
gcgagtactgcccaagtcctgaata

SEQ ID NO: 17311 - DNA, 25 bp, Homo sapiens
cagcagggtctggaatgtgtactaa

SEQ ID NO: 17312 - DNA, 25 bp, Homo sapiens
acaccttcgatgactccttgggaga

SEQ ID NO: 17313 - DNA, 25 bp, Homo sapiens
gaggcactctccagggtttcagaca

SEQ ID NO: 17314 - DNA, 25 bp, Homo sapiens
cggcaatgcctgtccctaatacttt

SEQ ID NO: 17315 - DNA, 25 bp, Homo sapiens
atatttcttttgcaggtctgttatt

SEQ ID NO: 17316 - DNA, 25 bp, Homo sapiens
tggactcccagtgcacaggccattg

SEQ ID NO: 17317 - DNA, 25 bp, Homo sapiens
agatgattccctcccagtgcagatg

SEQ ID NO: 17318 - DNA, 25 bp, Homo sapiens
cgacctcttgttgcaggcatcaata

SEQ ID NO: 17319 - DNA, 25 bp, Homo sapiens
ggggctactctttttcctatggata

SEQ ID NO: 17320 - DNA, 25 bp, Homo sapiens
acggctcgtgtattcctgacttctc

SEQ ID NO: 17321 - DNA, 25 bp, Homo sapiens
ctgacagcggtgcaaatgccaaatc

SEQ ID NO: 17322 - DNA, 25 bp, Homo sapiens
gcccacatcttcgtttgacaccagg

SEQ ID NO: 17323 - DNA, 25 bp, Homo sapiens
cctgactcggtctagattccaattt

SEQ ID NO: 17324 - DNA, 25 bp, Homo sapiens
gcgccaggcatgtccacgaaaaatc

SEQ ID NO: 17325 - DNA, 25 bp, Homo sapiens
ccctctggctatggagctgaatcac

SEQ ID NO: 17326 - DNA, 25 bp, Homo sapiens
ccagccaatggctcttgcttatttg

SEQ ID NO: 17327 - DNA, 25 bp, Homo sapiens
cggccctgggtagaatgctgttctt

SEQ ID NO: 17328 - DNA, 25 bp, Homo sapiens
tgggccctaggttttgagatacttc

SEQ ID NO: 17329 - DNA, 25 bp, Homo sapiens
tgtccgtagctacaagccctgcaga

SEQ ID NO: 17330 - DNA, 25 bp, Homo sapiens
tctacgtgaaccgttgctgcaaatg

SEQ ID NO: 17331 - DNA, 25 bp, Homo sapiens
tcacagggaagggtcagtcacattc

SEQ ID NO: 17332 - DNA, 25 bp, Homo sapiens
gacggcactggcaaacgcttagtta

SEQ ID NO: 17333 - DNA, 25 bp, Homo sapiens
tcacggttagcctccagcatctctg

SEQ ID NO: 17334 - DNA, 25 bp, Homo sapiens
ggccaggccctcatgctctattttc

SEQ ID NO: 17335 - DNA, 25 bp, Homo sapiens
ccttcatggcacataagctggacta

SEQ ID NO: 17336 - DNA, 25 bp, Homo sapiens
ggttatttaaggccgggagccttaa

SEQ ID NO: 17337 - DNA, 25 bp, Homo sapiens
ttataactattttatcaatgaaaac

SEQ ID NO: 17338 - DNA, 25 bp, Homo sapiens
aaaaaaagaactgaataaacatacc

SEQ ID NO: 17339 - DNA, 25 bp, Homo sapiens
tgtattctctatctgggtggcaatc

SEQ ID NO: 17340 - DNA, 25 bp, Homo sapiens
ttaaaaaaatttctcatctccaagt

SEQ ID NO: 17341 - DNA, 25 bp, Homo sapiens
caatgtgctaggaaggtgatgcatc

SEQ ID NO: 17342 - DNA, 25 bp, Homo sapiens
tgtactctgccttctgcctcaaatg

SEQ ID NO: 17343 - DNA, 25 bp, Homo sapiens
ataaccctggccttctgcatggagc

SEQ ID NO: 17344 - DNA, 25 bp, Homo sapiens
ttgcagcaaccaaggggaccatacc

SEQ ID NO: 17345 - DNA, 25 bp, Homo sapiens
gcccggccaattcacgtctgagaga

SEQ ID NO: 17346 - DNA, 25 bp, Homo sapiens
ggccacacattccattcctctaagg

SEQ ID NO: 17347 - DNA, 25 bp, Homo sapiens
gcctgaattttagagcctgcctgga

SEQ ID NO: 17348 - DNA, 25 bp, Homo sapiens
gggcagcattacctccacttcactg

SEQ ID NO: 17349 - DNA, 25 bp, Homo sapiens
cggttagagaaaaatgccctgccca

SEQ ID NO: 17350 - DNA, 25 bp, Homo sapiens
aggcgagtgttcagtcctctctgca

SEQ ID NO: 17351 - DNA, 25 bp, Homo sapiens
aggcagtcagatggagccctgtttc

SEQ ID NO: 17352 - DNA, 25 bp, Homo sapiens
cgccctgttgagtgtaagttctgca

SEQ ID NO: 17353 - DNA, 25 bp, Homo sapiens
cctatgtattggctccctggtacca

SEQ ID NO: 17354 - DNA, 25 bp, Homo sapiens
ggtcttcatttgtgcccagcccttc

SEQ ID NO: 17355 - DNA, 25 bp, Homo sapiens
ttcgatcctataagtggtccatgtg

SEQ ID NO: 17356 - DNA, 25 bp, Homo sapiens
tggccttgcacgaaaagaatttttt

SEQ ID NO: 17357 - DNA, 25 bp, Homo sapiens
gggagcatgttatgccccaggcttg

SEQ ID NO: 17358 - DNA, 25 bp, Homo sapiens
tggggccttgcatttaccactcttg

SEQ ID NO: 17359 - DNA, 25 bp, Homo sapiens
atgtactcaaatgtgtttgcttttc

SEQ ID NO: 17360 - DNA, 25 bp, Homo sapiens
atgggactttcctgtcatccaagcc

SEQ ID NO: 17361 - DNA, 25 bp, Homo sapiens
ttctgggaaccatccgcacagtgtc

SEQ ID NO: 17362 - DNA, 25 bp, Homo sapiens
ggggtgttactagtgccatttttcc

SEQ ID NO: 17363 - DNA, 25 bp, Homo sapiens
tgccggtggttagcttcatcaaaag

SEQ ID NO: 17364 - DNA, 25 bp, Homo sapiens
ggattattttccctctttcgaacaa

SEQ ID NO: 17365 - DNA, 25 bp, Homo sapiens
cctctgggaagcatctttggctgca

SEQ ID NO: 17366 - DNA, 25 bp, Homo sapiens
gggaggctcccagtcattaaataga

SEQ ID NO: 17367 - DNA, 25 bp, Homo sapiens
gggctgctgttcagtcctttacgga

SEQ ID NO: 17368 - DNA, 25 bp, Homo sapiens
ccgggactctctagttgggtcagaa

SEQ ID NO: 17369 - DNA, 25 bp, Homo sapiens
ggaagccctgcctaacacacagctg

SEQ ID NO: 17370 - DNA, 25 bp, Homo sapiens
gcttggcccgaatcctcttgcagga

SEQ ID NO: 17371 - DNA, 25 bp, Homo sapiens
ttttgcaaccttggatgagatcacc

SEQ ID NO: 17372 - DNA, 25 bp, Homo sapiens
ttaaagttaaaaacccccaaatcat

SEQ ID NO: 17373 - DNA, 25 bp, Homo sapiens
ttagaactacacttgggcactgccg

SEQ ID NO: 17374 - DNA, 25 bp, Homo sapiens
ggaccctgactcttgctaacctgtg

SEQ ID NO: 17375 - DNA, 25 bp, Homo sapiens
ctgagcccatgccatagacattgta

SEQ ID NO: 17376 - DNA, 25 bp, Homo sapiens
ctcagcccttgaggcaatgtatgta

SEQ ID NO: 17377 - DNA, 25 bp, Homo sapiens
tgctgacccagtgccttaaaaagtg

SEQ ID NO: 17378 - DNA, 25 bp, Homo sapiens
gctcatgttccatagcaggtgctca

SEQ ID NO: 17379 - DNA, 25 bp, Homo sapiens
tggtatcctggcaagacgctgactc

SEQ ID NO: 17380 - DNA, 25 bp, Homo sapiens
ctgggtccactctgaggaatctttc

SEQ ID NO: 17381 - DNA, 25 bp, Homo sapiens
tgtcgaagttctcatcaaagcctgg

SEQ ID NO: 17382 - DNA, 25 bp, Homo sapiens
gcctgggatggcaaagtgctacacc

SEQ ID NO: 17383 - DNA, 25 bp, Homo sapiens
caaaggcttttgcaaccgtgggcta

SEQ ID NO: 17384 - DNA, 25 bp, Homo sapiens
aggcccacactctgcattatcattg

SEQ ID NO: 17385 - DNA, 25 bp, Homo sapiens
ggtgatccagcccaactactttatt

SEQ ID NO: 17386 - DNA, 25 bp, Homo sapiens
tgctagcctaccttgcgacattgtg

SEQ ID NO: 17387 - DNA, 25 bp, Homo sapiens
acagggtacctttgtatcatgagca

SEQ ID NO: 17388 - DNA, 25 bp, Homo sapiens
ggttttcataagtccggttcacaga

SEQ ID NO: 17389 - DNA, 25 bp, Homo sapiens
ttaaattatcttaacaaataagacc

SEQ ID NO: 17390 - DNA, 25 bp, Homo sapiens
ttttattgttttattaccagtatgt

SEQ ID NO: 17391 - DNA, 25 bp, Homo sapiens
agtcctaaagctccaaccgggtttg

SEQ ID NO: 17392 - DNA, 25 bp, Homo sapiens
aatagctgtcactttgggcaacctc

SEQ ID NO: 17393 - DNA, 25 bp, Homo sapiens
caccagttatctcagtggatgtaaa

SEQ ID NO: 17394 - DNA, 25 bp, Homo sapiens
gggttccagcgtcctccagtttata

SEQ ID NO: 17395 - DNA, 25 bp, Homo sapiens
actggtcacttggtctgaaacatgc

SEQ ID NO: 17396 - DNA, 25 bp, Homo sapiens
gtgccacatgtgcttctagccaaga

SEQ ID NO: 17397 - DNA, 25 bp, Homo sapiens
tctgcatgggagagacatactgtcc

SEQ ID NO: 17398 - DNA, 25 bp, Homo sapiens
ctcagtgatgtgcaagggctctttc

SEQ ID NO: 17399 - DNA, 25 bp, Homo sapiens
gcagatttattagtcaccatgagta

SEQ ID NO: 17400 - DNA, 25 bp, Homo sapiens
tgttgtgtcacatgccagatatacc

SEQ ID NO: 17401 - DNA, 25 bp, Homo sapiens
ttactatgtagacatagaaatgaat

SEQ ID NO: 17402 - DNA, 25 bp, Homo sapiens
ggctcagctctcagtctcttagaca

SEQ ID NO: 17403 - DNA, 25 bp, Homo sapiens
cctaagcatctagcacagggtcaga

SEQ ID NO: 17404 - DNA, 25 bp, Homo sapiens
tcctgggtatcctgtactggactca

SEQ ID NO: 17405 - DNA, 25 bp, Homo sapiens
ctaatggctaattttaaaatgattc

SEQ ID NO: 17406 - DNA, 25 bp, Homo sapiens
atgtgctttcctgagatctttgcta

SEQ ID NO: 17407 - DNA, 25 bp, Homo sapiens
caggctgggttaccttgtgtctatc

SEQ ID NO: 17408 - DNA, 25 bp, Homo sapiens
gtcggcagtggaaacgctaaaatta

SEQ ID NO: 17409 - DNA, 25 bp, Homo sapiens
caactggcttatttctgcgtggggc

SEQ ID NO: 17410 - DNA, 25 bp, Homo sapiens
gtttcgtctctaacacaggtggcta

SEQ ID NO: 17411 - DNA, 25 bp, Homo sapiens
gaccactctctgaactcattctctg

SEQ ID NO: 17412 - DNA, 25 bp, Homo sapiens
gccactgtgacccttgacctctgtt

SEQ ID NO: 17413 - DNA, 25 bp, Homo sapiens
cgttggaggcttgactagacctttc

SEQ ID NO: 17414 - DNA, 25 bp, Homo sapiens
ccttggctgactgtgaagcaaacta

SEQ ID NO: 17415 - DNA, 25 bp, Homo sapiens
agcatgggatcagcctctggtatca

SEQ ID NO: 17416 - DNA, 25 bp, Homo sapiens
tggtgtcttaacatactcagggata

SEQ ID NO: 17417 - DNA, 25 bp, Homo sapiens
cagggcatgacctcagggaactttc

SEQ ID NO: 17418 - DNA, 25 bp, Homo sapiens
ctgcctgatcccttgagtcgtgaaa

SEQ ID NO: 17419 - DNA, 25 bp, Homo sapiens
gccctggtagctctgcggataaacc

SEQ ID NO: 17420 - DNA, 25 bp, Homo sapiens
gcctgaattgctgtggactagttta

SEQ ID NO: 17421 - DNA, 25 bp, Homo sapiens
gcgggactgagtagaagaaaccttt

SEQ ID NO: 17422 - DNA, 25 bp, Homo sapiens
taaggcctgcgtacatatatgcatg

SEQ ID NO: 17423 - DNA, 25 bp, Homo sapiens
agttccccctcattttcttgaatta

SEQ ID NO: 17424 - DNA, 25 bp, Homo sapiens
gggcatgttccctcctagttccagc

SEQ ID NO: 17425 - DNA, 25 bp, Homo sapiens
ggtccatgctagacacacagatttg

SEQ ID NO: 17426 - DNA, 25 bp, Homo sapiens
gagctctttgtcttggtacttactg

SEQ ID NO: 17427 - DNA, 25 bp, Homo sapiens
agagccccggtttaagatctccagg

SEQ ID NO: 17428 - DNA, 25 bp, Homo sapiens
ggcctctaggaggttacccacattt

SEQ ID NO: 17429 - DNA, 25 bp, Homo sapiens
tcccttacaggagatgtcatgtttt

SEQ ID NO: 17430 - DNA, 25 bp, Homo sapiens
ctctctaaatttgcatttaatgtct

SEQ ID NO: 17431 - DNA, 25 bp, Homo sapiens
aatagagttacttctttacaaaagg

SEQ ID NO: 17432 - DNA, 25 bp, Homo sapiens
gcaggtgaaggcaaatagatgctgt

SEQ ID NO: 17433 - DNA, 25 bp, Homo sapiens
gtctgcttttcatttatgatctatt

SEQ ID NO: 17434 - DNA, 25 bp, Homo sapiens
ctgcaaatagggatgcggaaccttt

SEQ ID NO: 17435 - DNA, 25 bp, Homo sapiens
cttggcttccttcacagatgatgta

SEQ ID NO: 17436 - DNA, 25 bp, Homo sapiens
cccgaggtggtccattttgtgcact

SEQ ID NO: 17437 - DNA, 25 bp, Homo sapiens
tcccaaagtcacctggacaagttta

SEQ ID NO: 17438 - DNA, 25 bp, Homo sapiens
ttttattctgaataaagtgaatata

SEQ ID NO: 17439 - DNA, 25 bp, Homo sapiens
ttaaatctattttctatctttatgc

SEQ ID NO: 17440 - DNA, 25 bp, Homo sapiens
gcctctaggttcaaaaacaggttta

SEQ ID NO: 17441 - DNA, 25 bp, Homo sapiens
accgctcgtattctcaggattcttc

SEQ ID NO: 17442 - DNA, 25 bp, Homo sapiens
tctgttcacgatagcccaggaggtc

SEQ ID NO: 17443 - DNA, 25 bp, Homo sapiens
cctcctgatggtgaagctgcgcaaa

SEQ ID NO: 17444 - DNA, 25 bp, Homo sapiens
gccttctttgggtaccagtttctca

SEQ ID NO: 17445 - DNA, 25 bp, Homo sapiens
gcttcagcctgatggaggactctta

SEQ ID NO: 17446 - DNA, 25 bp, Homo sapiens
tggaaacacccaggacacacactta

SEQ ID NO: 17447 - DNA, 25 bp, Homo sapiens
ttcaccacgggatgctctgagaaga

SEQ ID NO: 17448 - DNA, 25 bp, Homo sapiens
cctgcccaaggaagctgagaattct

SEQ ID NO: 17449 - DNA, 25 bp, Homo sapiens
ctggactggtactcctggatcccta

SEQ ID NO: 17450 - DNA, 25 bp, Homo sapiens
gttacacttttttgccctctcctga

SEQ ID NO: 17451 - DNA, 25 bp, Homo sapiens
accagtgctgattcctaaagaaaag

SEQ ID NO: 17452 - DNA, 25 bp, Homo sapiens
gctaaatgtttgctttggcccagaa

SEQ ID NO: 17453 - DNA, 25 bp, Homo sapiens
ctttcacacatcataagaccagtgc

SEQ ID NO: 17454 - DNA, 25 bp, Homo sapiens
cctccagggtaatagctgtccatta

SEQ ID NO: 17455 - DNA, 25 bp, Homo sapiens
tagtaggacttttaaagtagcgtgt

SEQ ID NO: 17456 - DNA, 25 bp, Homo sapiens
tcacggtaaatgtaggcagaccctt

SEQ ID NO: 17457 - DNA, 25 bp, Homo sapiens
ttgaaacattgacttgagacataga

SEQ ID NO: 17458 - DNA, 25 bp, Homo sapiens
aggccctgaaagttcccgatgtgta

SEQ ID NO: 17459 - DNA, 25 bp, Homo sapiens
ccagggccttgtttgtgcagaagca

SEQ ID NO: 17460 - DNA, 25 bp, Homo sapiens
gccctgagttggctctggaagaaca

SEQ ID NO: 17461 - DNA, 25 bp, Homo sapiens
accacactgtgtgccagggacatta

SEQ ID NO: 17462 - DNA, 25 bp, Homo sapiens
tcacatgacttgagcttgtagctat

SEQ ID NO: 17463 - DNA, 25 bp, Homo sapiens
tttcaaagtactattagaagtaaaa

SEQ ID NO: 17464 - DNA, 25 bp, Homo sapiens
aatgataaaaaaagaataggtttct

SEQ ID NO: 17465 - DNA, 25 bp, Homo sapiens
actgctcggtaggtgtctgtaacca

SEQ ID NO: 17466 - DNA, 25 bp, Homo sapiens
gcacgcttgcccttgtagcttagga

SEQ ID NO: 17467 - DNA, 25 bp, Homo sapiens
gctgggtcctcctgatcagtgcaaa

SEQ ID NO: 17468 - DNA, 25 bp, Homo sapiens
ggggccacatctgcactgaatccta

SEQ ID NO: 17469 - DNA, 25 bp, Homo sapiens
ccagcatgtccctgtggtgtcagca

SEQ ID NO: 17470 - DNA, 25 bp, Homo sapiens
ggtctgctatcaaggggcccacaca

SEQ ID NO: 17471 - DNA, 25 bp, Homo sapiens
gtgcagccctgcaaagatgtttaga

SEQ ID NO: 17472 - DNA, 25 bp, Homo sapiens
gccaagactgtgagccttcagacta

SEQ ID NO: 17473 - DNA, 25 bp, Homo sapiens
acctgtcctgtgtccctcttttcaa

SEQ ID NO: 17474 - DNA, 25 bp, Homo sapiens
acgtaggtaaggagctgactgcttc

SEQ ID NO: 17475 - DNA, 25 bp, Homo sapiens
aggtcacctggcatctgtatctttg

SEQ ID NO: 17476 - DNA, 25 bp, Homo sapiens
ctgctaaggtggatcccgactaata

SEQ ID NO: 17477 - DNA, 25 bp, Homo sapiens
cctgctggcatagcctggaaacatc

SEQ ID NO: 17478 - DNA, 25 bp, Homo sapiens
gggccctcttcattcagtcctggga

SEQ ID NO: 17479 - DNA, 25 bp, Homo sapiens
ctctcggctgccagttttcagggtc

SEQ ID NO: 17480 - DNA, 25 bp, Homo sapiens
ctaccctggctgtttgaagtgcacg

SEQ ID NO: 17481 - DNA, 25 bp, Homo sapiens
ggggtgcaccttattcctggaatgg

SEQ ID NO: 17482 - DNA, 25 bp, Homo sapiens
tgctgccaacagtgtgtgctctctg

SEQ ID NO: 17483 - DNA, 25 bp, Homo sapiens
tggctatctcagacagtcccacgga

SEQ ID NO: 17484 - DNA, 25 bp, Homo sapiens
tccaaactggctggtctctctaaga

SEQ ID NO: 17485 - DNA, 25 bp, Homo sapiens
tttgtgcacatctgcctgggctgga

SEQ ID NO: 17486 - DNA, 25 bp, Homo sapiens
ggaccctgtggctgagcagtttcta

SEQ ID NO: 17487 - DNA, 25 bp, Homo sapiens
cctccagcttttgaccagatcggtg

SEQ ID NO: 17488 - DNA, 25 bp, Homo sapiens
agatggtgcccttgctttgcttgtc

SEQ ID NO: 17489 - DNA, 25 bp, Homo sapiens
cacggtcttctctgggtggaacatc

SEQ ID NO: 17490 - DNA, 25 bp, Homo sapiens
ccatgacaagtaggtggcatttttc

SEQ ID NO: 17491 - DNA, 25 bp, Homo sapiens
gccgtccgttaaactagcaagcttg

SEQ ID NO: 17492 - DNA, 25 bp, Homo sapiens
tctgccagccatgcaaacacagttg

SEQ ID NO: 17493 - DNA, 25 bp, Homo sapiens
ccagcattaatgatggccttccata

SEQ ID NO: 17494 - DNA, 25 bp, Homo sapiens
cgtgggcaggtactcaaacatgttg

SEQ ID NO: 17495 - DNA, 25 bp, Homo sapiens
gccttgggaccaatgaaccggaata

SEQ ID NO: 17496 - DNA, 25 bp, Homo sapiens
aagggcctgtgtgttatgagctcca

SEQ ID NO: 17497 - DNA, 25 bp, Homo sapiens
agcgctcgtgactttgtacccaaca

SEQ ID NO: 17498 - DNA, 25 bp, Homo sapiens
ggcctccaggccacatgtgcttaaa

SEQ ID NO: 17499 - DNA, 25 bp, Homo sapiens
gtgggccctttgtgaaccacatttg

SEQ ID NO: 17500 - DNA, 25 bp, Homo sapiens
ccctagagggtgtcagtgaaagttc

SEQ ID NO: 17501 - DNA, 25 bp, Homo sapiens
aggcgtctagctcctggatatgtca

SEQ ID NO: 17502 - DNA, 25 bp, Homo sapiens
gccaggccttctgcagtcaggtttc

SEQ ID NO: 17503 - DNA, 25 bp, Homo sapiens
ctgtgcagccatcgcagaagccttc

SEQ ID NO: 17504 - DNA, 25 bp, Homo sapiens
gccctccttgtaacacctgggaatg

SEQ ID NO: 17505 - DNA, 25 bp, Homo sapiens
gtttgctgcctttctcccacagtca

SEQ ID NO: 17506 - DNA, 25 bp, Homo sapiens
gttggatatgttggagcctgcactc

SEQ ID NO: 17507 - DNA, 25 bp, Homo sapiens
ctgggtcccatcactgagcttgttc

SEQ ID NO: 17508 - DNA, 25 bp, Homo sapiens
gtctgggcggctaacacatctcatt

SEQ ID NO: 17509 - DNA, 25 bp, Homo sapiens
aggggatccacaaacggcagctgca

SEQ ID NO: 17510 - DNA, 25 bp, Homo sapiens
ccctcctccagctgcaaccccctcc

SEQ ID NO: 17511 - DNA, 25 bp, Homo sapiens
tggcatgaaggcactaccctgagtc

SEQ ID NO: 17512 - DNA, 25 bp, Homo sapiens
gctcctgtctatcactgcgtcaaga

SEQ ID NO: 17513 - DNA, 25 bp, Homo sapiens
agtgccactgcttctccagggaatg

SEQ ID NO: 17514 - DNA, 25 bp, Homo sapiens
tccatcttggagtaggagcccacta

SEQ ID NO: 17515 - DNA, 25 bp, Homo sapiens
ttgttattatccctgcccacacatg

SEQ ID NO: 17516 - DNA, 25 bp, Homo sapiens
ggcgggtctctcagtctgcaaacta

SEQ ID NO: 17517 - DNA, 25 bp, Homo sapiens
gtgcgcgcctttacagtgaatcaga

SEQ ID NO: 17518 - DNA, 25 bp, Homo sapiens
gctgctcctcgctgtagaagaactc

SEQ ID NO: 17519 - DNA, 25 bp, Homo sapiens
ccctggtgcccgaattccgaaaata

SEQ ID NO: 17520 - DNA, 25 bp, Homo sapiens
cccaagggctttatgctactgaaca

SEQ ID NO: 17521 - DNA, 25 bp, Homo sapiens
tcagaattctgagtttttacagagg

SEQ ID NO: 17522 - DNA, 25 bp, Homo sapiens
gtactcaggtctgggagcctttctc

SEQ ID NO: 17523 - DNA, 25 bp, Homo sapiens
tgctgctcagcacaaacacttggtc

SEQ ID NO: 17524 - DNA, 25 bp, Homo sapiens
tgtcaagggcctcgaatgccataga

SEQ ID NO: 17525 - DNA, 25 bp, Homo sapiens
cctgagcctgggaaattcgtgagtc

SEQ ID NO: 17526 - DNA, 25 bp, Homo sapiens
gtgtccgtctctcgaacagatgatg

SEQ ID NO: 17527 - DNA, 25 bp, Homo sapiens
tcccagaaggcctttcacagcaatg

SEQ ID NO: 17528 - DNA, 25 bp, Homo sapiens
ccgcactgactttgagggatgagcc

SEQ ID NO: 17529 - DNA, 25 bp, Homo sapiens
ctgtcccagggatgcaaaatagtca

SEQ ID NO: 17530 - DNA, 25 bp, Homo sapiens
gaccctgatggctctgtccagctga

SEQ ID NO: 17531 - DNA, 25 bp, Homo sapiens
cctgcctggctaggggttaattagc

SEQ ID NO: 17532 - DNA, 25 bp, Homo sapiens
atccagggagccaccaaagggtttg

SEQ ID NO: 17533 - DNA, 25 bp, Homo sapiens
tgagaaccttacctggtggaccctg

SEQ ID NO: 17534 - DNA, 25 bp, Homo sapiens
ggccctgctcatatccctgatcatg

SEQ ID NO: 17535 - DNA, 25 bp, Homo sapiens
acctcaatgatgtcgccacggcgga

SEQ ID NO: 17536 - DNA, 25 bp, Homo sapiens
gcccagctggagagaaaagtgccct

SEQ ID NO: 17537 - DNA, 25 bp, Homo sapiens
gggctggacgcctcttgcaatacca

SEQ ID NO: 17538 - DNA, 25 bp, Homo sapiens
ttggcctcagggtaaactcttaaca

SEQ ID NO: 17539 - DNA, 25 bp, Homo sapiens
ctggaacctctcacactcggcgtgt

SEQ ID NO: 17540 - DNA, 25 bp, Homo sapiens
tctctgcctggccaaaccttagcta

SEQ ID NO: 17541 - DNA, 25 bp, Homo sapiens
ggggtggcttccttccttattgatg

SEQ ID NO: 17542 - DNA, 25 bp, Homo sapiens
cacgtgctaaccagcccagggttta

SEQ ID NO: 17543 - DNA, 25 bp, Homo sapiens
gctgctggagccattcacttcagtg

SEQ ID NO: 17544 - DNA, 25 bp, Homo sapiens
acatgtgcattgactccagggtacc

SEQ ID NO: 17545 - DNA, 25 bp, Homo sapiens
ccacctgctggtgctgtgtacaacc

SEQ ID NO: 17546 - DNA, 25 bp, Homo sapiens
cagtcagggccaagaacgcacagta

SEQ ID NO: 17547 - DNA, 25 bp, Homo sapiens
gtgttagctatcgacccaggcctgt

SEQ ID NO: 17548 - DNA, 25 bp, Homo sapiens
ggattcctcaatcactccagggtgg

SEQ ID NO: 17549 - DNA, 25 bp, Homo sapiens
ggctcccagatggttccgcttcatc

SEQ ID NO: 17550 - DNA, 25 bp, Homo sapiens
gctgctgaccaaacagaactgggta

SEQ ID NO: 17551 - DNA, 25 bp, Homo sapiens
cggggccttttttctggtgattgac

SEQ ID NO: 17552 - DNA, 25 bp, Homo sapiens
tcccagtcccacagctgttcttatg

SEQ ID NO: 17553 - DNA, 25 bp, Homo sapiens
cctctggcatgtctggatggtccca

SEQ ID NO: 17554 - DNA, 25 bp, Homo sapiens
ccagtcattctcagggcagcagtgt

SEQ ID NO: 17555 - DNA, 25 bp, Homo sapiens
caggtgattcacagactccaaggga

SEQ ID NO: 17556 - DNA, 25 bp, Homo sapiens
tacaggggcatcaactccagcagtg

SEQ ID NO: 17557 - DNA, 25 bp, Homo sapiens
ctccctggaggagtatcactgctca

SEQ ID NO: 17558 - DNA, 25 bp, Homo sapiens
ggtgagtccatgagccagagttttc

SEQ ID NO: 17559 - DNA, 25 bp, Homo sapiens
tagaccgtcttggaaggctgcaaca

SEQ ID NO: 17560 - DNA, 25 bp, Homo sapiens
ccctgatgcctcttgtgatgccctg

SEQ ID NO: 17561 - DNA, 25 bp, Homo sapiens
agagaagatgacagctgcccgccgc

SEQ ID NO: 17562 - DNA, 25 bp, Homo sapiens
ggacttgactgagaggacccttgaa

SEQ ID NO: 17563 - DNA, 25 bp, Homo sapiens
ggaggtccctcaaaagctgctcaca

SEQ ID NO: 17564 - DNA, 25 bp, Homo sapiens
taagccatgcctgctgtcttgatga

SEQ ID NO: 17565 - DNA, 25 bp, Homo sapiens
cccggcacccgtgacaaataaaatg

SEQ ID NO: 17566 - DNA, 25 bp, Homo sapiens
tatttgtggttaggcatggtgactc

SEQ ID NO: 17567 - DNA, 25 bp, Homo sapiens
tacgggaaaaaccaaagcgtttttc

SEQ ID NO: 17568 - DNA, 25 bp, Homo sapiens
aagcctcgaagggggatccttcctt

SEQ ID NO: 17569 - DNA, 25 bp, Homo sapiens
cagggctcatgacctctgcttatta

SEQ ID NO: 17570 - DNA, 25 bp, Homo sapiens
ggtatatggcttcatgtgtatcaca

SEQ ID NO: 17571 - DNA, 25 bp, Homo sapiens
gttcagtgacacaatagagctctcc

SEQ ID NO: 17572 - DNA, 25 bp, Homo sapiens
ttgcgactgacagacgctgctgcga

SEQ ID NO: 17573 - DNA, 25 bp, Homo sapiens
agtgctgctttagactcccggccta

SEQ ID NO: 17574 - DNA, 25 bp, Homo sapiens
cgggttcacttacagcacacgttca

SEQ ID NO: 17575 - DNA, 25 bp, Homo sapiens
cggggcccagccaattaaatgtgac

SEQ ID NO: 17576 - DNA, 25 bp, Homo sapiens
tcttggggccacataaagttttatc

SEQ ID NO: 17577 - DNA, 25 bp, Homo sapiens
agctgctttgccctggagccattta

SEQ ID NO: 17578 - DNA, 25 bp, Homo sapiens
aaagaaaactcatttttcttgcact

SEQ ID NO: 17579 - DNA, 25 bp, Homo sapiens
gtagtatacttcctagatgagaaaa

SEQ ID NO: 17580 - DNA, 25 bp, Homo sapiens
ggtgggcctcctgtactttcttaga

SEQ ID NO: 17581 - DNA, 25 bp, Homo sapiens
agacaaggtcttgcagctcctcata

SEQ ID NO: 17582 - DNA, 25 bp, Homo sapiens
ctgggcttcctggtcatcttgtgga

SEQ ID NO: 17583 - DNA, 25 bp, Homo sapiens
ctcctatatcctggtgggtcacaaa

SEQ ID NO: 17584 - DNA, 25 bp, Homo sapiens
gggagagcacctttcaccattatgc

SEQ ID NO: 17585 - DNA, 25 bp, Homo sapiens
tggtcccagccctagattcagattc

SEQ ID NO: 17586 - DNA, 25 bp, Homo sapiens
gtcctggactcaaggtggtgctttc

SEQ ID NO: 17587 - DNA, 25 bp, Homo sapiens
gtcctgcgtcagaaaggcctttcta

SEQ ID NO: 17588 - DNA, 25 bp, Homo sapiens
agccactgtgctcatggaaaccatg

SEQ ID NO: 17589 - DNA, 25 bp, Homo sapiens
ggactttcccaatgacagccgtagc

SEQ ID NO: 17590 - DNA, 25 bp, Homo sapiens
gggctcatccctgctatctgttcta

SEQ ID NO: 17591 - DNA, 25 bp, Homo sapiens
gccctgtgcttgtgccgtgaaaatt

SEQ ID NO: 17592 - DNA, 25 bp, Homo sapiens
ggaagttcctctctctctgcacgtg

SEQ ID NO: 17593 - DNA, 25 bp, Homo sapiens
ttggtacttcatttctcgcctgcta

SEQ ID NO: 17594 - DNA, 25 bp, Homo sapiens
cacatgtttttaagaggcgtaaatg

SEQ ID NO: 17595 - DNA, 25 bp, Homo sapiens
cgaaggttagtgttgccatgaagtc

SEQ ID NO: 17596 - DNA, 25 bp, Homo sapiens
gccgggatttgtgtccaccgttata

SEQ ID NO: 17597 - DNA, 25 bp, Homo sapiens
tgaagacggctcaactccctggttc

SEQ ID NO: 17598 - DNA, 25 bp, Homo sapiens
aaggctactgtcctgtcacggtgtc

SEQ ID NO: 17599 - DNA, 25 bp, Homo sapiens
gtgcccatgcctccgagcaagttcg

SEQ ID NO: 17600 - DNA, 25 bp, Homo sapiens
aagcagcagtaagtctcagagcctc

SEQ ID NO: 17601 - DNA, 25 bp, Homo sapiens
aggcctacaacctggcgcgagatga

SEQ ID NO: 17602 - DNA, 25 bp, Homo sapiens
gcacctggtgattgcagccttcata

SEQ ID NO: 17603 - DNA, 25 bp, Homo sapiens
cggcaccgctaaagctcatggcttc

SEQ ID NO: 17604 - DNA, 25 bp, Homo sapiens
ctcttggttactgggcactgactga

SEQ ID NO: 17605 - DNA, 25 bp, Homo sapiens
ggacacgctgcctttccacatgaca

SEQ ID NO: 17606 - DNA, 25 bp, Homo sapiens
ccctgcctgtaagctggggaatcca

SEQ ID NO: 17607 - DNA, 25 bp, Homo sapiens
acctttgtcttgtgtggctactgtc

SEQ ID NO: 17608 - DNA, 25 bp, Homo sapiens
gccggtacatttgcactgtgtccta

SEQ ID NO: 17609 - DNA, 25 bp, Homo sapiens
gggcctttggccacatgtactgatg

SEQ ID NO: 17610 - DNA, 25 bp, Homo sapiens
tgtccactcttaccgcaggcaggtc

SEQ ID NO: 17611 - DNA, 25 bp, Homo sapiens
ccctgaaagcagtggatggacaacc

SEQ ID NO: 17612 - DNA, 25 bp, Homo sapiens
tccctagcccaagatcaaataaacg

SEQ ID NO: 17613 - DNA, 25 bp, Homo sapiens
tcccatgtggccctttttgaagttc

SEQ ID NO: 17614 - DNA, 25 bp, Homo sapiens
cttaggtctgtgattttgtgctttc

SEQ ID NO: 17615 - DNA, 25 bp, Homo sapiens
tgctgtactgggttctcttgactta

SEQ ID NO: 17616 - DNA, 25 bp, Homo sapiens
cccagtggagtcctgagtaggctta

SEQ ID NO: 17617 - DNA, 25 bp, Homo sapiens
cagggcctgtttattgtgctaattc

SEQ ID NO: 17618 - DNA, 25 bp, Homo sapiens
ctgagacattgtagggacccttggc

SEQ ID NO: 17619 - DNA, 25 bp, Homo sapiens
tgagctcagtggcttcccagacctt

SEQ ID NO: 17620 - DNA, 25 bp, Homo sapiens
tcctcccagggtggacaaatgtttc

SEQ ID NO: 17621 - DNA, 25 bp, Homo sapiens
tcctgattcaggtcggcccagatta

SEQ ID NO: 17622 - DNA, 25 bp, Homo sapiens
gtctcctttggcagcagtcagcatg

SEQ ID NO: 17623 - DNA, 25 bp, Homo sapiens
tgagggcctcttttggataaccatg

SEQ ID NO: 17624 - DNA, 25 bp, Homo sapiens
cacagacacgcattgtagaatagtt

SEQ ID NO: 17625 - DNA, 25 bp, Homo sapiens
tggaacttccggatgtgaccacaga

SEQ ID NO: 17626 - DNA, 25 bp, Homo sapiens
gcctcccagaccagaataatatatg

SEQ ID NO: 17627 - DNA, 25 bp, Homo sapiens
ggtcgcccggatctgacattttgga

SEQ ID NO: 17628 - DNA, 25 bp, Homo sapiens
cgccagcgtttaagttgatcatcaa

SEQ ID NO: 17629 - DNA, 25 bp, Homo sapiens
aggggttttaccacatgaagtcatc

SEQ ID NO: 17630 - DNA, 25 bp, Homo sapiens
tcagggtgagctcttctgtcattca

SEQ ID NO: 17631 - DNA, 25 bp, Homo sapiens
gtgctaattgtaaccacagctattt

SEQ ID NO: 17632 - DNA, 25 bp, Homo sapiens
ggcttcatcgctgatccctggcata

SEQ ID NO: 17633 - DNA, 25 bp, Homo sapiens
gctgcatgccagatacaagagaaaa

SEQ ID NO: 17634 - DNA, 25 bp, Homo sapiens
aagggcctgccttgcgttcactact

SEQ ID NO: 17635 - DNA, 25 bp, Homo sapiens
tggagacctctctaaatgtcctaga

SEQ ID NO: 17636 - DNA, 25 bp, Homo sapiens
gacttttaacaattttcacttgagc

SEQ ID NO: 17637 - DNA, 25 bp, Homo sapiens
acgcccggccatttttcatatttca

SEQ ID NO: 17638 - DNA, 25 bp, Homo sapiens
gctgaggtctttcaagccagtaata

SEQ ID NO: 17639 - DNA, 25 bp, Homo sapiens
taaaatactcgctggctgcccttcg

SEQ ID NO: 17640 - DNA, 25 bp, Homo sapiens
tgcatcagaaagtgcccaatcatgg

SEQ ID NO: 17641 - DNA, 25 bp, Homo sapiens
tcagtcatcataggtcatttcaggc

SEQ ID NO: 17642 - DNA, 25 bp, Homo sapiens
tgtaatccaactatgctggttctgc

SEQ ID NO: 17643 - DNA, 25 bp, Homo sapiens
cttccaggttttccttcatcaggga

SEQ ID NO: 17644 - DNA, 25 bp, Homo sapiens
cctcttgttgatttgaagggcatta

SEQ ID NO: 17645 - DNA, 25 bp, Homo sapiens
caacttgttctgtgtgaagaggacc

SEQ ID NO: 17646 - DNA, 25 bp, Homo sapiens
ccgaaagtggtcaatgtgggcctct

SEQ ID NO: 17647 - DNA, 25 bp, Homo sapiens
cccaatttgatctgtgtggtgtaaa

SEQ ID NO: 17648 - DNA, 25 bp, Homo sapiens
tgccctgaacgcgtgatggatctcg

SEQ ID NO: 17649 - DNA, 25 bp, Homo sapiens
gccacacgtctgtatgcaccgactg

SEQ ID NO: 17650 - DNA, 25 bp, Homo sapiens
cctaaagagggtgtcctggtctcca

SEQ ID NO: 17651 - DNA, 25 bp, Homo sapiens
cccttctgggtgatacagtctgtaa

SEQ ID NO: 17652 - DNA, 25 bp, Homo sapiens
aggggtcacaccagtccttctgttc

SEQ ID NO: 17653 - DNA, 25 bp, Homo sapiens
ttggccactatgcaagcctcctgga

SEQ ID NO: 17654 - DNA, 25 bp, Homo sapiens
actttcacagggaagacctttactg

SEQ ID NO: 17655 - DNA, 25 bp, Homo sapiens
tcctcacaggggcattttctacaga

SEQ ID NO: 17656 - DNA, 25 bp, Homo sapiens
ggcccaagggcattctgacatctga

SEQ ID NO: 17657 - DNA, 25 bp, Homo sapiens
ggctgtcagtagatccaggctttca

SEQ ID NO: 17658 - DNA, 25 bp, Homo sapiens
gggctgaaaccattagggtccattc

SEQ ID NO: 17659 - DNA, 25 bp, Homo sapiens
ccagttttgatgctaggactaaggc

SEQ ID NO: 17660 - DNA, 25 bp, Homo sapiens
gagtccacttccaggcagcaacagg

SEQ ID NO: 17661 - DNA, 25 bp, Homo sapiens
ttagaaatagtgtgagggtctctca

SEQ ID NO: 17662 - DNA, 25 bp, Homo sapiens
ggaggtggcccaatcaaccattttg

SEQ ID NO: 17663 - DNA, 25 bp, Homo sapiens
ccctctttgttatcgggcagaagga

SEQ ID NO: 17664 - DNA, 25 bp, Homo sapiens
cttaacagtgagcatggcaggcatc

SEQ ID NO: 17665 - DNA, 25 bp, Homo sapiens
aacctgatgctctctgggccttgcc

SEQ ID NO: 17666 - DNA, 25 bp, Homo sapiens
cctgagggccttctgtcatctggaa

SEQ ID NO: 17667 - DNA, 25 bp, Homo sapiens
ccgtcagatgtttccaaaccttgtg

SEQ ID NO: 17668 - DNA, 25 bp, Homo sapiens
ggcctagcatgtttccactctgtga

SEQ ID NO: 17669 - DNA, 25 bp, Homo sapiens
ctgcacattgatcctttattggctc

SEQ ID NO: 17670 - DNA, 25 bp, Homo sapiens
tgtcctggtccaattgtgtcctcaa

SEQ ID NO: 17671 - DNA, 25 bp, Homo sapiens
gactcgggccatcccatagttgata

SEQ ID NO: 17672 - DNA, 25 bp, Homo sapiens
catcgggtcagtcaggcattatctc

SEQ ID NO: 17673 - DNA, 25 bp, Homo sapiens
gactatttgcagtatgggtccaacc

SEQ ID NO: 17674 - DNA, 25 bp, Homo sapiens
ataggcataagatggtgagggatag

SEQ ID NO: 17675 - DNA, 25 bp, Homo sapiens
tttgccactgtgtccatgagcctgc

SEQ ID NO: 17676 - DNA, 25 bp, Homo sapiens
cttgccaagcattgacactgtgttg

SEQ ID NO: 17677 - DNA, 25 bp, Homo sapiens
ggcaaagcatttaggtcacaccagc

SEQ ID NO: 17678 - DNA, 25 bp, Homo sapiens
gctggtcggctcctaggtttcaaaa

SEQ ID NO: 17679 - DNA, 25 bp, Homo sapiens
ctcgaatgactctgatagccgtatg

SEQ ID NO: 17680 - DNA, 25 bp, Homo sapiens
ccagtgccttttcctagcagcaaga

SEQ ID NO: 17681 - DNA, 25 bp, Homo sapiens
cctctgctctggacgggaagaaaca

SEQ ID NO: 17682 - DNA, 25 bp, Homo sapiens
gcacctggatcctgacacgggatta

SEQ ID NO: 17683 - DNA, 25 bp, Homo sapiens
actgccctctgtgttgctctgatgg

SEQ ID NO: 17684 - DNA, 25 bp, Homo sapiens
gacagcccagctcttcccatgattg

SEQ ID NO: 17685 - DNA, 25 bp, Homo sapiens
actcagcctggaaacttagtgttca

SEQ ID NO: 17686 - DNA, 25 bp, Homo sapiens
cagctatgtttctgcagggccttta

SEQ ID NO: 17687 - DNA, 25 bp, Homo sapiens
aaagatgtgtttttatccccagtgc

SEQ ID NO: 17688 - DNA, 25 bp, Homo sapiens
gcagggcattattttgttcatcacc

SEQ ID NO: 17689 - DNA, 25 bp, Homo sapiens
ggtgccatgcaacgcttcccaaatg

SEQ ID NO: 17690 - DNA, 25 bp, Homo sapiens
gtgtgacacaccatcagaaagtctg

SEQ ID NO: 17691 - DNA, 25 bp, Homo sapiens
tggggacaagcagaacacatgcttc

SEQ ID NO: 17692 - DNA, 25 bp, Homo sapiens
cagggctttctcatactgactcgta

SEQ ID NO: 17693 - DNA, 25 bp, Homo sapiens
ttcacagggagatcacatgacatgc

SEQ ID NO: 17694 - DNA, 25 bp, Homo sapiens
ggacgtcctccaccttttcagtttg

SEQ ID NO: 17695 - DNA, 25 bp, Homo sapiens
ttcttcctggactgcaatgaacatg

SEQ ID NO: 17696 - DNA, 25 bp, Homo sapiens
agctgctgtctctcctgccaggtag

SEQ ID NO: 17697 - DNA, 25 bp, Homo sapiens
agtgagcctgtcctgagatcttcca

SEQ ID NO: 17698 - DNA, 25 bp, Homo sapiens
gtttcctgccttaaaaagacctttc

SEQ ID NO: 17699 - DNA, 25 bp, Homo sapiens
aaaacctcacaatggctctgctcac

SEQ ID NO: 17700 - DNA, 25 bp, Homo sapiens
cctgtgcttggcctcttgtgtaaca

SEQ ID NO: 17701 - DNA, 25 bp, Homo sapiens
caaaataaaatgcttttacacacgt

SEQ ID NO: 17702 - DNA, 25 bp, Homo sapiens
gcaccggtctgcttggatgattcta

SEQ ID NO: 17703 - DNA, 25 bp, Homo sapiens
cctgtggctggaatggcctttctca

SEQ ID NO: 17704 - DNA, 25 bp, Homo sapiens
tgcagtgcccgtcttcagtgagttt

SEQ ID NO: 17705 - DNA, 25 bp, Homo sapiens
tgaacctgttttagtccgtgccata

SEQ ID NO: 17706 - DNA, 25 bp, Homo sapiens
gtcctgtttatgtgcgcgagattta

SEQ ID NO: 17707 - DNA, 25 bp, Homo sapiens
tgtgctcttctctctaaccagtgtg

SEQ ID NO: 17708 - DNA, 25 bp, Homo sapiens
ccacccaaggagacagcttttgcta

SEQ ID NO: 17709 - DNA, 25 bp, Homo sapiens
tcacatccagaagaagagcatcgcc

SEQ ID NO: 17710 - DNA, 25 bp, Homo sapiens
gggtattggctctgtaaacagcata

SEQ ID NO: 17711 - DNA, 25 bp, Homo sapiens
ccccaccaaatagcacatttttaaa

SEQ ID NO: 17712 - DNA, 25 bp, Homo sapiens
ggcctcttgagctgggcacaatcca

SEQ ID NO: 17713 - DNA, 25 bp, Homo sapiens
acctggggctctgtttcttgtcttt

SEQ ID NO: 17714 - DNA, 25 bp, Homo sapiens
cagcctcttcctcgggaattttgga

SEQ ID NO: 17715 - DNA, 25 bp, Homo sapiens
agtaaaatatatgtattttacccta

SEQ ID NO: 17716 - DNA, 25 bp, Homo sapiens
gtgttcccataatcaagtctgcaga

SEQ ID NO: 17717 - DNA, 25 bp, Homo sapiens
gcctggaagcctcagagcactttat

SEQ ID NO: 17718 - DNA, 25 bp, Homo sapiens
ataacctcctctctgggccctgatg

SEQ ID NO: 17719 - DNA, 25 bp, Homo sapiens
tggaacagcctttgatcctagaagc

SEQ ID NO: 17720 - DNA, 25 bp, Homo sapiens
gccctgggtcaaatttagcgtccta

SEQ ID NO: 17721 - DNA, 25 bp, Homo sapiens
tgcctgccaggctccttgtcagtta

SEQ ID NO: 17722 - DNA, 25 bp, Homo sapiens
tgcccaggtttgctctctctctaag

SEQ ID NO: 17723 - DNA, 25 bp, Homo sapiens
ccgaagcgtttagcacccagggtct

SEQ ID NO: 17724 - DNA, 25 bp, Homo sapiens
agcctctggttacttggtcttcaca

SEQ ID NO: 17725 - DNA, 25 bp, Homo sapiens
tgacagtgaaccagctgcatctctg

SEQ ID NO: 17726 - DNA, 25 bp, Homo sapiens
tccaacctatacaaggcagcagctg

SEQ ID NO: 17727 - DNA, 25 bp, Homo sapiens
gaggaggccgactctcaaatccgga

SEQ ID NO: 17728 - DNA, 25 bp, Homo sapiens
agcctccctgaagtacccatgttta

SEQ ID NO: 17729 - DNA, 25 bp, Homo sapiens
tggtccctgtgatgaaccatcattg

SEQ ID NO: 17730 - DNA, 25 bp, Homo sapiens
ggaaacaaatccgggggtcagatgg

SEQ ID NO: 17731 - DNA, 25 bp, Homo sapiens
tcttcactgtggtctggcttccatt

SEQ ID NO: 17732 - DNA, 25 bp, Homo sapiens
ggatacactccaaacagacagcagt

SEQ ID NO: 17733 - DNA, 25 bp, Homo sapiens
ctgaatccctgtggttagtaaaaga

SEQ ID NO: 17734 - DNA, 25 bp, Homo sapiens
tttcttgtagaaacagggtctccct

SEQ ID NO: 17735 - DNA, 25 bp, Homo sapiens
accgtgttcctcgtgttctgtgaga

SEQ ID NO: 17736 - DNA, 25 bp, Homo sapiens
ggtgtcacgattcacaaagcgtatg

SEQ ID NO: 17737 - DNA, 25 bp, Homo sapiens
atcttggtttattgaatgctggcga

SEQ ID NO: 17738 - DNA, 25 bp, Homo sapiens
acacctgtcctgctggggtcactac

SEQ ID NO: 17739 - DNA, 25 bp, Homo sapiens
ccgcattaatgcaaggtttccaggc

SEQ ID NO: 17740 - DNA, 25 bp, Homo sapiens
gggagctcccaaacgcctgaaaata

SEQ ID NO: 17741 - DNA, 25 bp, Homo sapiens
cacgtgcaaagtgggtgcaataatc

SEQ ID NO: 17742 - DNA, 25 bp, Homo sapiens
cagccagctgacattgtattactta

SEQ ID NO: 17743 - DNA, 25 bp, Homo sapiens
gatgccttttcttgcccatgccata

SEQ ID NO: 17744 - DNA, 25 bp, Homo sapiens
cccaggtgctcttacacagggttga

SEQ ID NO: 17745 - DNA, 25 bp, Homo sapiens
ggcacttggaaacgcccatctgttt

SEQ ID NO: 17746 - DNA, 25 bp, Homo sapiens
agcacgtgcttgaggaagaagtgca

SEQ ID NO: 17747 - DNA, 25 bp, Homo sapiens
cctaccttggctgaggagatccacc

SEQ ID NO: 17748 - DNA, 25 bp, Homo sapiens
caacaacaaaaagcaaatgggcatg

SEQ ID NO: 17749 - DNA, 25 bp, Homo sapiens
tcctgcaccaatagaggacgatgat

SEQ ID NO: 17750 - DNA, 25 bp, Homo sapiens
ccactgggtttccagcggagacatc

SEQ ID NO: 17751 - DNA, 25 bp, Homo sapiens
attttctgaatctgggctgcagaga

SEQ ID NO: 17752 - DNA, 25 bp, Homo sapiens
catggctagccagggtttattgttg

SEQ ID NO: 17753 - DNA, 25 bp, Homo sapiens
gggaggaaagggatggggctggggt

SEQ ID NO: 17754 - DNA, 25 bp, Homo sapiens
ggctccatgactgttctcccaggtc

SEQ ID NO: 17755 - DNA, 25 bp, Homo sapiens
gcccaggaggttttcaaatgaatcc

SEQ ID NO: 17756 - DNA, 25 bp, Homo sapiens
ggctcggagtcaggaatctatgtca

SEQ ID NO: 17757 - DNA, 25 bp, Homo sapiens
gatgctttgcatcgccttcaccaaa

SEQ ID NO: 17758 - DNA, 25 bp, Homo sapiens
ggatgcctgacttctcctaaagacg

SEQ ID NO: 17759 - DNA, 25 bp, Homo sapiens
caagtgctcgtggaattggatatca

SEQ ID NO: 17760 - DNA, 25 bp, Homo sapiens
tccttaattttctttctgtctctct

SEQ ID NO: 17761 - DNA, 25 bp, Homo sapiens
tttggcctgtatggttaactccttg

SEQ ID NO: 17762 - DNA, 25 bp, Homo sapiens
aaatgagctcatgcaaggttaggag

SEQ ID NO: 17763 - DNA, 25 bp, Homo sapiens
ccctcctgagcacctgggaagaaga

SEQ ID NO: 17764 - DNA, 25 bp, Homo sapiens
tcaatagagtggtcaggaggtaaca

SEQ ID NO: 17765 - DNA, 25 bp, Homo sapiens
tatttattcttattttaacattttg

SEQ ID NO: 17766 - DNA, 25 bp, Homo sapiens
tgagccatttctcggccagcctgaa

SEQ ID NO: 17767 - DNA, 25 bp, Homo sapiens
tggagctcagaaatcgcccaaggtt

SEQ ID NO: 17768 - DNA, 25 bp, Homo sapiens
acagcagggttgtgcatcctatacc

SEQ ID NO: 17769 - DNA, 25 bp, Homo sapiens
tccaaactgagctgagggtgcctta

SEQ ID NO: 17770 - DNA, 25 bp, Homo sapiens
gccaagttaattcccgtgcagccta

SEQ ID NO: 17771 - DNA, 25 bp, Homo sapiens
ccaggatcttctgctaagggtctca

SEQ ID NO: 17772 - DNA, 25 bp, Homo sapiens
ggcgcctttccttttacttcactgg

SEQ ID NO: 17773 - DNA, 25 bp, Homo sapiens
ggccgcctttggatccgtgtaatcc

SEQ ID NO: 17774 - DNA, 25 bp, Homo sapiens
ttgctccagccgtgtccagaaaatg

SEQ ID NO: 17775 - DNA, 25 bp, Homo sapiens
acccgtgcacggagccacatacatg

SEQ ID NO: 17776 - DNA, 25 bp, Homo sapiens
atccggtgttcataagggtcccttg

SEQ ID NO: 17777 - DNA, 25 bp, Homo sapiens
ggcatgtgtctccttttcgagggta

SEQ ID NO: 17778 - DNA, 25 bp, Homo sapiens
ggtggattctccttcctgtccttga

SEQ ID NO: 17779 - DNA, 25 bp, Homo sapiens
gcttaaagtacaaggcgagtcccgc

SEQ ID NO: 17780 - DNA, 25 bp, Homo sapiens
gctcgggccctagcttctagaactc

SEQ ID NO: 17781 - DNA, 25 bp, Homo sapiens
gaactcggtaaacatccactgaata

SEQ ID NO: 17782 - DNA, 25 bp, Homo sapiens
cctaccgctctgcagtctagtgctg

SEQ ID NO: 17783 - DNA, 25 bp, Homo sapiens
aaggaccatgtacctgggccctctc

SEQ ID NO: 17784 - DNA, 25 bp, Homo sapiens
cctggcttcccagatgtagaacgtc

SEQ ID NO: 17785 - DNA, 25 bp, Homo sapiens
actgtgcccagcctgacattttttt

SEQ ID NO: 17786 - DNA, 25 bp, Homo sapiens
ctctaggagtggtcaagtaaaagta

SEQ ID NO: 17787 - DNA, 25 bp, Homo sapiens
cacctctgagtctgagggacacaga

SEQ ID NO: 17788 - DNA, 25 bp, Homo sapiens
ttgtcttttaaaacacccctctgga

SEQ ID NO: 17789 - DNA, 25 bp, Homo sapiens
ggaggtggtgcctctggctgccagg

SEQ ID NO: 17790 - DNA, 25 bp, Homo sapiens
ggggacactgcctccactgaacctt

SEQ ID NO: 17791 - DNA, 25 bp, Homo sapiens
tgcggctgagccctgaacaatgagc

SEQ ID NO: 17792 - DNA, 25 bp, Homo sapiens
gtcagggagctaactgggccaatta

SEQ ID NO: 17793 - DNA, 25 bp, Homo sapiens
tcccgcgaattcagttcaaagaggc

SEQ ID NO: 17794 - DNA, 25 bp, Homo sapiens
ccacgttcagagcaggcggctttta

SEQ ID NO: 17795 - DNA, 25 bp, Homo sapiens
acctcagggaagtcaagtgtcatta

SEQ ID NO: 17796 - DNA, 25 bp, Homo sapiens
tcttgagttctgctcggtaacaata

SEQ ID NO: 17797 - DNA, 25 bp, Homo sapiens
tactctgtgccatgggttatttctc

SEQ ID NO: 17798 - DNA, 25 bp, Homo sapiens
tccactggttattttcaagtttgat

SEQ ID NO: 17799 - DNA, 25 bp, Homo sapiens
ctctttggtggactgctactgttta

SEQ ID NO: 17800 - DNA, 25 bp, Homo sapiens
ctgcctaggatgcaacctgatctta

SEQ ID NO: 17801 - DNA, 25 bp, Homo sapiens
cagctcgtgctttactctttttaga

SEQ ID NO: 17802 - DNA, 25 bp, Homo sapiens
agcttcgctatggaggctcttctca

SEQ ID NO: 17803 - DNA, 25 bp, Homo sapiens
tgagctttaggctttgctgataatc

SEQ ID NO: 17804 - DNA, 25 bp, Homo sapiens
ggcagggacttcacaatatcacgta

SEQ ID NO: 17805 - DNA, 25 bp, Homo sapiens
cttgggatcctcagggcctttttta

SEQ ID NO: 17806 - DNA, 25 bp, Homo sapiens
gaaggaccctaaacaccagtatgtg

SEQ ID NO: 17807 - DNA, 25 bp, Homo sapiens
tctgggagtcttccactagaattca

SEQ ID NO: 17808 - DNA, 25 bp, Homo sapiens
tttgaccaggcactatggctgatta

SEQ ID NO: 17809 - DNA, 25 bp, Homo sapiens
attcctggtcttctgttagtagctg

SEQ ID NO: 17810 - DNA, 25 bp, Homo sapiens
aggcctgcatctatattcttggttg

SEQ ID NO: 17811 - DNA, 25 bp, Homo sapiens
gttgttttaaaagttgtatattatt

SEQ ID NO: 17812 - DNA, 25 bp, Homo sapiens
caggatgctgctctttggtcacttc

SEQ ID NO: 17813 - DNA, 25 bp, Homo sapiens
taaattatttttaagagaactattg

SEQ ID NO: 17814 - DNA, 25 bp, Homo sapiens
aggtgcctcatcagttgccatttga

SEQ ID NO: 17815 - DNA, 25 bp, Homo sapiens
ccacctatggaagggatcattggta

SEQ ID NO: 17816 - DNA, 25 bp, Homo sapiens
tcacctgtggtgaaagatcattttg

SEQ ID NO: 17817 - DNA, 25 bp, Homo sapiens
gcagacagtttcatggcctacttca

SEQ ID NO: 17818 - DNA, 25 bp, Homo sapiens
ggaaggcatacctgctgtcatttta

SEQ ID NO: 17819 - DNA, 25 bp, Homo sapiens
tactcccgtaaaagctcaaagcatg

SEQ ID NO: 17820 - DNA, 25 bp, Homo sapiens
tgccaattggccagttgtcaaaatg

SEQ ID NO: 17821 - DNA, 25 bp, Homo sapiens
ccctttgttctcagggacctgtgta

SEQ ID NO: 17822 - DNA, 25 bp, Homo sapiens
catggtgagtattgttcggcaaata

SEQ ID NO: 17823 - DNA, 25 bp, Homo sapiens
tctggggaaagcgtctaaaaatagc

SEQ ID NO: 17824 - DNA, 25 bp, Homo sapiens
gctttctgccaagaagctttaactg

SEQ ID NO: 17825 - DNA, 25 bp, Homo sapiens
tctgttaccctggaagtcctgcttg

SEQ ID NO: 17826 - DNA, 25 bp, Homo sapiens
gtccagggtcccagtgctgatattc

SEQ ID NO: 17827 - DNA, 25 bp, Homo sapiens
gtcatctctggagcgtaagacctgg

SEQ ID NO: 17828 - DNA, 25 bp, Homo sapiens
cgtcccttgcagtttccagtaatga

SEQ ID NO: 17829 - DNA, 25 bp, Homo sapiens
agcgaggctcccacaatgttctgga

SEQ ID NO: 17830 - DNA, 25 bp, Homo sapiens
ccaggctgcgtgctggtagttaaca

SEQ ID NO: 17831 - DNA, 25 bp, Homo sapiens
aaagtgccaagaagaaactgggaga

SEQ ID NO: 17832 - DNA, 25 bp, Homo sapiens
tccagttaattccttgaaataataa

SEQ ID NO: 17833 - DNA, 25 bp, Homo sapiens
gccagttgcttgatatatacagtta

SEQ ID NO: 17834 - DNA, 25 bp, Homo sapiens
ggcgcttacagcttttagatgggga

SEQ ID NO: 17835 - DNA, 25 bp, Homo sapiens
aggtcagtgtaccatccgatgcaaa

SEQ ID NO: 17836 - DNA, 25 bp, Homo sapiens
ggggaaatatctgtaacacaaaatg

SEQ ID NO: 17837 - DNA, 25 bp, Homo sapiens
ggatgatagtttgacaagatttcca

SEQ ID NO: 17838 - DNA, 25 bp, Homo sapiens
gtgctgtgtccaaactagtctctga

SEQ ID NO: 17839 - DNA, 25 bp, Homo sapiens
ggggtttcgcctgtcatcacatctg

SEQ ID NO: 17840 - DNA, 25 bp, Homo sapiens
cctagcacataggtttggagtacta

SEQ ID NO: 17841 - DNA, 25 bp, Homo sapiens
cctggagccacaagaagcctgtttt

SEQ ID NO: 17842 - DNA, 25 bp, Homo sapiens
ggagagcacagtcaacacattcatg

SEQ ID NO: 17843 - DNA, 25 bp, Homo sapiens
tccagggttgtactcttccagcaga

SEQ ID NO: 17844 - DNA, 25 bp, Homo sapiens
cccgctgcagagagtcatatccatc

SEQ ID NO: 17845 - DNA, 25 bp, Homo sapiens
gctgccagcgcctaaatcttccata

SEQ ID NO: 17846 - DNA, 25 bp, Homo sapiens
ggttgctagcagacctgggcatcta

SEQ ID NO: 17847 - DNA, 25 bp, Homo sapiens
tgtctttcacatcacggtcagcaga

SEQ ID NO: 17848 - DNA, 25 bp, Homo sapiens
aggggaggcttgctttcagttttac

SEQ ID NO: 17849 - DNA, 25 bp, Homo sapiens
aggcctctaaatttttaagatttac

SEQ ID NO: 17850 - DNA, 25 bp, Homo sapiens
ttaggggccatggtcaagttcaata

SEQ ID NO: 17851 - DNA, 25 bp, Homo sapiens
tccacctagggagaaaagctttatg

SEQ ID NO: 17852 - DNA, 25 bp, Homo sapiens
ttaggggtcctgcatatattctgta

SEQ ID NO: 17853 - DNA, 25 bp, Homo sapiens
ggaatgacagtcctgttagaaaata

SEQ ID NO: 17854 - DNA, 25 bp, Homo sapiens
tgcctccaggtttctctattagttc

SEQ ID NO: 17855 - DNA, 25 bp, Homo sapiens
caactcatgtctgggtgggtctcta

SEQ ID NO: 17856 - DNA, 25 bp, Homo sapiens
tgtgccctgtagttactcaagtttt

SEQ ID NO: 17857 - DNA, 25 bp, Homo sapiens
gtaacactcacactgcctcaaaggg

SEQ ID NO: 17858 - DNA, 25 bp, Homo sapiens
tgcccaagccaaatgcctaactacg

SEQ ID NO: 17859 - DNA, 25 bp, Homo sapiens
gcctttaccattcctacctggatta

SEQ ID NO: 17860 - DNA, 25 bp, Homo sapiens
gtatctctctctcactgggctctga

SEQ ID NO: 17861 - DNA, 25 bp, Homo sapiens
aagcctgctgctatcctgagaaatc

SEQ ID NO: 17862 - DNA, 25 bp, Homo sapiens
agggtcaccaatcgctcatccagga

SEQ ID NO: 17863 - DNA, 25 bp, Homo sapiens
tttgcacaaacagacagaagtacac

SEQ ID NO: 17864 - DNA, 25 bp, Homo sapiens
gcagagctgggacaatgacttaatc

SEQ ID NO: 17865 - DNA, 25 bp, Homo sapiens
tctctcgcttaatgggaaaattcta

SEQ ID NO: 17866 - DNA, 25 bp, Homo sapiens
gatctttgcaaactgggccctcatc

SEQ ID NO: 17867 - DNA, 25 bp, Homo sapiens
cctgtcttgctctttagcggatata

SEQ ID NO: 17868 - DNA, 25 bp, Homo sapiens
acgtagtatttcctgtccctgtgta

SEQ ID NO: 17869 - DNA, 25 bp, Homo sapiens
cacccaaaagcttagggagtatttc

SEQ ID NO: 17870 - DNA, 25 bp, Homo sapiens
ctcagtttctgtgaaatgtatatta

SEQ ID NO: 17871 - DNA, 25 bp, Homo sapiens
caaagcccaggtatgccagtgttcc

SEQ ID NO: 17872 - DNA, 25 bp, Homo sapiens
agtgactcactgatagccctcaata

SEQ ID NO: 17873 - DNA, 25 bp, Homo sapiens
catacctctataacattcacacaca

SEQ ID NO: 17874 - DNA, 25 bp, Homo sapiens
ccagcagctttcagagtaccatatt

SEQ ID NO: 17875 - DNA, 25 bp, Homo sapiens
tggggtaccagaatcaatacattgc

SEQ ID NO: 17876 - DNA, 25 bp, Homo sapiens
gttcttggttttccctgtatctgga

SEQ ID NO: 17877 - DNA, 25 bp, Homo sapiens
ccaggatcttaccatttgctcttga

SEQ ID NO: 17878 - DNA, 25 bp, Homo sapiens
ggccaagttggctgtaaacattatc

SEQ ID NO: 17879 - DNA, 25 bp, Homo sapiens
aatcatctgccaaaaagatataaaa

SEQ ID NO: 17880 - DNA, 25 bp, Homo sapiens
tgcttccggtttcgccactaaaatg

SEQ ID NO: 17881 - DNA, 25 bp, Homo sapiens
acccaccgcaggttttttaccagtc

SEQ ID NO: 17882 - DNA, 25 bp, Homo sapiens
aagccgcagaatttgagcccagatc

SEQ ID NO: 17883 - DNA, 25 bp, Homo sapiens
cagctagccatcagacagagtttta

SEQ ID NO: 17884 - DNA, 25 bp, Homo sapiens
cgctcctaactgtactggacacata

SEQ ID NO: 17885 - DNA, 25 bp, Homo sapiens
acaacaataacgatttttaaaagta

SEQ ID NO: 17886 - DNA, 25 bp, Homo sapiens
ctatatgtatcatggatggcttttg

SEQ ID NO: 17887 - DNA, 25 bp, Homo sapiens
cggcccgggtcatcatagaaaagta

SEQ ID NO: 17888 - DNA, 25 bp, Homo sapiens
ggacggcgcgaaaacccaattgaca

SEQ ID NO: 17889 - DNA, 25 bp, Homo sapiens
tgccatgaagtagtgggctagcatc

SEQ ID NO: 17890 - DNA, 25 bp, Homo sapiens
cgtttttcacctaaaggaggcttcc

SEQ ID NO: 17891 - DNA, 25 bp, Homo sapiens
tccgaaatttcccagcaggtacgct

SEQ ID NO: 17892 - DNA, 25 bp, Homo sapiens
ccctttgattcagagagccctatta

SEQ ID NO: 17893 - DNA, 25 bp, Homo sapiens
gccctagttggttctttgctgtcta

SEQ ID NO: 17894 - DNA, 25 bp, Homo sapiens
ccaccaaggtgactctgaattaatc

SEQ ID NO: 17895 - DNA, 25 bp, Homo sapiens
tggacttcttaccacagggcccttg

SEQ ID NO: 17896 - DNA, 25 bp, Homo sapiens
ccttgaggccaaggtccatgtatta

SEQ ID NO: 17897 - DNA, 25 bp, Homo sapiens
agccctcttgcctttcttcaaaacg

SEQ ID NO: 17898 - DNA, 25 bp, Homo sapiens
ggtgcactcaccatgctgtattata

SEQ ID NO: 17899 - DNA, 25 bp, Homo sapiens
tggactcctgctattctattgtgtg

SEQ ID NO: 17900 - DNA, 25 bp, Homo sapiens
cagctgatcctgtccctagttttga

SEQ ID NO: 17901 - DNA, 25 bp, Homo sapiens
caggtctaggagcaacatgggttta

SEQ ID NO: 17902 - DNA, 25 bp, Homo sapiens
gtaccttgtacccctctccttaaca

SEQ ID NO: 17903 - DNA, 25 bp, Homo sapiens
tgggtagactttcatttttgtgatg

SEQ ID NO: 17904 - DNA, 25 bp, Homo sapiens
ctgctgcgctggatgtgtacaatgc

SEQ ID NO: 17905 - DNA, 25 bp, Homo sapiens
gggaacctctctctcttacaacctt

SEQ ID NO: 17906 - DNA, 25 bp, Homo sapiens
gcctcgagtgttgtcctagagttta

SEQ ID NO: 17907 - DNA, 25 bp, Homo sapiens
caagtactttcttccgagtgtcata

SEQ ID NO: 17908 - DNA, 25 bp, Homo sapiens
tccagcttgctttcagtatgttata

SEQ ID NO: 17909 - DNA, 25 bp, Homo sapiens
ttcccaaagcagaactggaggctga

SEQ ID NO: 17910 - DNA, 25 bp, Homo sapiens
acctcacggattatgggcttacaaa

SEQ ID NO: 17911 - DNA, 25 bp, Homo sapiens
catatctctgacatgttctcattca

SEQ ID NO: 17912 - DNA, 25 bp, Homo sapiens
gagcctgcaatttcaagcccagata

SEQ ID NO: 17913 - DNA, 25 bp, Homo sapiens
cttggtctgggccattctgagaaca

SEQ ID NO: 17914 - DNA, 25 bp, Homo sapiens
ccaagtggctggtctgaaagtaatc

SEQ ID NO: 17915 - DNA, 25 bp, Homo sapiens
ctgagatcaggtccctccagagtga

SEQ ID NO: 17916 - DNA, 25 bp, Homo sapiens
gcagtcctggactggaagattctta

SEQ ID NO: 17917 - DNA, 25 bp, Homo sapiens
tcctgcctgataaatggtaaaagtc

SEQ ID NO: 17918 - DNA, 25 bp, Homo sapiens
ggagctggctgattctgacctacta

SEQ ID NO: 17919 - DNA, 25 bp, Homo sapiens
gcttcccttgtttttcaggttttaa

SEQ ID NO: 17920 - DNA, 25 bp, Homo sapiens
taggctgttcctctatgggcatata

SEQ ID NO: 17921 - DNA, 25 bp, Homo sapiens
aggcctttcttggagtacactggtc

SEQ ID NO: 17922 - DNA, 25 bp, Homo sapiens
tttctccaggcttagggtgttctca

SEQ ID NO: 17923 - DNA, 25 bp, Homo sapiens
gggtggccattctcaaataattttc

SEQ ID NO: 17924 - DNA, 25 bp, Homo sapiens
agggccactgctccaagatttaaca

SEQ ID NO: 17925 - DNA, 25 bp, Homo sapiens
ttccagtgaacaccaactttagggg

SEQ ID NO: 17926 - DNA, 25 bp, Homo sapiens
tggagacagtttgaaacagacatta

SEQ ID NO: 17927 - DNA, 25 bp, Homo sapiens
gtctcagtgggtgctagtaactctg

SEQ ID NO: 17928 - DNA, 25 bp, Homo sapiens
cctttcagtgtagccagagttccca

SEQ ID NO: 17929 - DNA, 25 bp, Homo sapiens
gatcacaggggattggctagcctca

SEQ ID NO: 17930 - DNA, 25 bp, Homo sapiens
gaaaagaaagggaaatgggctgcga

SEQ ID NO: 17931 - DNA, 25 bp, Homo sapiens
ggcgcccaggtcgagtccttatata

SEQ ID NO: 17932 - DNA, 25 bp, Homo sapiens
gtcggaggcccacttctcactgatg

SEQ ID NO: 17933 - DNA, 25 bp, Homo sapiens
caaatttctggttaactgaggctca

SEQ ID NO: 17934 - DNA, 25 bp, Homo sapiens
cctggcttcttattcacatgagtga

SEQ ID NO: 17935 - DNA, 25 bp, Homo sapiens
ccagcagtctgtgcaagatttattc

SEQ ID NO: 17936 - DNA, 25 bp, Homo sapiens
gctttatagacatgcagtggacttt

SEQ ID NO: 17937 - DNA, 25 bp, Homo sapiens
aggttttataaaggagagtggcttg

SEQ ID NO: 17938 - DNA, 25 bp, Homo sapiens
ttcccaaagtgtggtgggcctttca

SEQ ID NO: 17939 - DNA, 25 bp, Homo sapiens
tggcagccacgatcaggtcatctta

SEQ ID NO: 17940 - DNA, 25 bp, Homo sapiens
ttcattattatttattcataaatgc

SEQ ID NO: 17941 - DNA, 25 bp, Homo sapiens
acctgtagagagttgccatgcactg

SEQ ID NO: 17942 - DNA, 25 bp, Homo sapiens
gctatttcttttctagagcaccaaa

SEQ ID NO: 17943 - DNA, 25 bp, Homo sapiens
tcccacagaggagaggaatttgttc

SEQ ID NO: 17944 - DNA, 25 bp, Homo sapiens
gcctggctccgtgtaccatcaatga

SEQ ID NO: 17945 - DNA, 25 bp, Homo sapiens
ctctggtcaggccttcgatataata

SEQ ID NO: 17946 - DNA, 25 bp, Homo sapiens
ctaccccaggtttcttgcaatgatg

SEQ ID NO: 17947 - DNA, 25 bp, Homo sapiens
tggtgctccttcctcttgttgatga

SEQ ID NO: 17948 - DNA, 25 bp, Homo sapiens
tgtggttctcttgcaagcccagatc

SEQ ID NO: 17949 - DNA, 25 bp, Homo sapiens
ctcattggctaatacaggtcagatg

SEQ ID NO: 17950 - DNA, 25 bp, Homo sapiens
tttaaaaattaacatataagatacc

SEQ ID NO: 17951 - DNA, 25 bp, Homo sapiens
ggcagggacagacaatttgatcaag

SEQ ID NO: 17952 - DNA, 25 bp, Homo sapiens
gcggctgggaaagttgttatccaca

SEQ ID NO: 17953 - DNA, 25 bp, Homo sapiens
ttacctggacagtgatgtctctgcc

SEQ ID NO: 17954 - DNA, 25 bp, Homo sapiens
cggggtttccttcaaaactagtata

SEQ ID NO: 17955 - DNA, 25 bp, Homo sapiens
cggccaaggccttcatgttattttc

SEQ ID NO: 17956 - DNA, 25 bp, Homo sapiens
tcccagcagctatgcagtgtccaag

SEQ ID NO: 17957 - DNA, 25 bp, Homo sapiens
aggatcactgctttgctctaaatgg

SEQ ID NO: 17958 - DNA, 25 bp, Homo sapiens
cctgtcaccatttctttatattaaa

SEQ ID NO: 17959 - DNA, 25 bp, Homo sapiens
tggcctgtaccttttgcggggaaga

SEQ ID NO: 17960 - DNA, 25 bp, Homo sapiens
ggagctgcagttgagccaccttata

SEQ ID NO: 17961 - DNA, 25 bp, Homo sapiens
ccagcccatgcaggagcaaaagttc

SEQ ID NO: 17962 - DNA, 25 bp, Homo sapiens
ccagacccttattctcctgcttcag

SEQ ID NO: 17963 - DNA, 25 bp, Homo sapiens
tttgaaatgcacacaggccacgatg

SEQ ID NO: 17964 - DNA, 25 bp, Homo sapiens
tttcccagagcaccaggatggcttc

SEQ ID NO: 17965 - DNA, 25 bp, Homo sapiens
gaaaaaaatctcaaatattatgcgt

SEQ ID NO: 17966 - DNA, 25 bp, Homo sapiens
ccgctttccatgcttgagattcaga

SEQ ID NO: 17967 - DNA, 25 bp, Homo sapiens
gctttttggtgctgagctgtatctc

SEQ ID NO: 17968 - DNA, 25 bp, Homo sapiens
agctacgctgagatgttacaatgta

SEQ ID NO: 17969 - DNA, 25 bp, Homo sapiens
aggtttctaccatcagcagactgtc

SEQ ID NO: 17970 - DNA, 25 bp, Homo sapiens
cctcagaggctggttttcacaaacg

SEQ ID NO: 17971 - DNA, 25 bp, Homo sapiens
ttccctgggagaaaggtcgcatttg

SEQ ID NO: 17972 - DNA, 25 bp, Homo sapiens
tggtgccacctttgaagcattagcg

SEQ ID NO: 17973 - DNA, 25 bp, Homo sapiens
gtctcccagagttgattttatgcta

SEQ ID NO: 17974 - DNA, 25 bp, Homo sapiens
ggacgctcatccctgttggccattt

SEQ ID NO: 17975 - DNA, 25 bp, Homo sapiens
cagcagagttcagaggtcaagattc

SEQ ID NO: 17976 - DNA, 25 bp, Homo sapiens
gcccttgcttctctgtggaaattga

SEQ ID NO: 17977 - DNA, 25 bp, Homo sapiens
ggcgccaaggtcaggttcttataac

SEQ ID NO: 17978 - DNA, 25 bp, Homo sapiens
ctctgtgctcagtcaacgccttgga

SEQ ID NO: 17979 - DNA, 25 bp, Homo sapiens
tgtgcaaacctgtactgaatccaga

SEQ ID NO: 17980 - DNA, 25 bp, Homo sapiens
ctgtttcctgggatcgccttaaaga

SEQ ID NO: 17981 - DNA, 25 bp, Homo sapiens
cccacctgttatggctgttaacgaa

SEQ ID NO: 17982 - DNA, 25 bp, Homo sapiens
gttctatccctgttagttcagtccc

SEQ ID NO: 17983 - DNA, 25 bp, Homo sapiens
atggtctcagcagaaaataaacagt

SEQ ID NO: 17984 - DNA, 25 bp, Homo sapiens
tgcccttgcatttgatatgtctgtg

SEQ ID NO: 17985 - DNA, 25 bp, Homo sapiens
ccctggtaggaggtcacatttacta

SEQ ID NO: 17986 - DNA, 25 bp, Homo sapiens
agatctgtcttactggccttgggta

SEQ ID NO: 17987 - DNA, 25 bp, Homo sapiens
ccaggccaagaaggaggagatcatc

SEQ ID NO: 17988 - DNA, 25 bp, Homo sapiens
cctgagcttggactactggctacta

SEQ ID NO: 17989 - DNA, 25 bp, Homo sapiens
gcggccagcgtgtttcacccattag

SEQ ID NO: 17990 - DNA, 25 bp, Homo sapiens
tccgggtcctgtagccttgagaaaa

SEQ ID NO: 17991 - DNA, 25 bp, Homo sapiens
aacctaggctggcttcctgcaaagc

SEQ ID NO: 17992 - DNA, 25 bp, Homo sapiens
gggtgtctctgtctccattttgtta

SEQ ID NO: 17993 - DNA, 25 bp, Homo sapiens
ctttcagagacggaggaattcttcc

SEQ ID NO: 17994 - DNA, 25 bp, Homo sapiens
agcacgggccaggattttgttctca

SEQ ID NO: 17995 - DNA, 25 bp, Homo sapiens
tctcagatctcagtcagggcgtcga

SEQ ID NO: 17996 - DNA, 25 bp, Homo sapiens
tcctccagatctagggctctccgga

SEQ ID NO: 17997 - DNA, 25 bp, Homo sapiens
cagatcattgttctcctggggcaga

SEQ ID NO: 17998 - DNA, 25 bp, Homo sapiens
ggtctcgtagacagggtccaccttc

SEQ ID NO: 17999 - DNA, 25 bp, Homo sapiens
gggaagtcttccctgattttgcaga

SEQ ID NO: 18000 - DNA, 25 bp, Homo sapiens
cgcaagccctgtttggagtttccta

SEQ ID NO: 18001 - DNA, 25 bp, Homo sapiens
gcccgagcgaaggaagaagttctcc

SEQ ID NO: 18002 - DNA, 25 bp, Homo sapiens
ggggtgatgcctgatcctgctaaaa

SEQ ID NO: 18003 - DNA, 25 bp, Homo sapiens
cttcctggatagcactgtgggcttc

SEQ ID NO: 18004 - DNA, 25 bp, Homo sapiens
aacttacatctctgaggggctgtca

SEQ ID NO: 18005 - DNA, 25 bp, Homo sapiens
gaccacttcagagacatcgggcttg

SEQ ID NO: 18006 - DNA, 25 bp, Homo sapiens
tctccaagctcagacccagaggtga

SEQ ID NO: 18007 - DNA, 25 bp, Homo sapiens
tgccttcgcggggagtaatttattc

SEQ ID NO: 18008 - DNA, 25 bp, Homo sapiens
tctccgggactctgaagccgttctc

SEQ ID NO: 18009 - DNA, 25 bp, Homo sapiens
ggggacccatctgtgccattaattg

SEQ ID NO: 18010 - DNA, 25 bp, Homo sapiens
cactggtggctgagagaacctttcc

SEQ ID NO: 18011 - DNA, 25 bp, Homo sapiens
ggctggaacacacagggccttcttc

SEQ ID NO: 18012 - DNA, 25 bp, Homo sapiens
cttggccatttggagcctggtattc

SEQ ID NO: 18013 - DNA, 25 bp, Homo sapiens
tgaactcagcctgttaattctcatg

SEQ ID NO: 18014 - DNA, 25 bp, Homo sapiens
caacatgggctctgtgtatgcaatc

SEQ ID NO: 18015 - DNA, 25 bp, Homo sapiens
cgaggcccttctgtagattctgacc

SEQ ID NO: 18016 - DNA, 25 bp, Homo sapiens
tcgcctggcccaatatttgttttta

SEQ ID NO: 18017 - DNA, 25 bp, Homo sapiens
tagtctgaagtcacactgagcactg

SEQ ID NO: 18018 - DNA, 25 bp, Homo sapiens
cctttgatgtactaggccctgggga

SEQ ID NO: 18019 - DNA, 25 bp, Homo sapiens
acggggacccttcatctcacttctg

SEQ ID NO: 18020 - DNA, 25 bp, Homo sapiens
ggcccacccacaggctgactgtatt

SEQ ID NO: 18021 - DNA, 25 bp, Homo sapiens
ttttggcacaaccagccggagcatc

SEQ ID NO: 18022 - DNA, 25 bp, Homo sapiens
ctctgggcaagaagccaatgtcatc

SEQ ID NO: 18023 - DNA, 25 bp, Homo sapiens
aaactgggtcctcaatgctggcgtc

SEQ ID NO: 18024 - DNA, 25 bp, Homo sapiens
gctgcttacccttagaatcctggtg

SEQ ID NO: 18025 - DNA, 25 bp, Homo sapiens
cccttgaaggggatgtcttagctca

SEQ ID NO: 18026 - DNA, 25 bp, Homo sapiens
gctggctgcctcatcaaggtgttta

SEQ ID NO: 18027 - DNA, 25 bp, Homo sapiens
ccctgtctgtggttgttgaagcttc

SEQ ID NO: 18028 - DNA, 25 bp, Homo sapiens
tactgccggatgctggccaacttca

SEQ ID NO: 18029 - DNA, 25 bp, Homo sapiens
cctagtgtccagcattcgttaaata

SEQ ID NO: 18030 - DNA, 25 bp, Homo sapiens
ggggcatcttcattctcctcagtga

SEQ ID NO: 18031 - DNA, 25 bp, Homo sapiens
agggcacctctgactagtctgcttg

SEQ ID NO: 18032 - DNA, 25 bp, Homo sapiens
cccaaggggaaatgtcttctgctta

SEQ ID NO: 18033 - DNA, 25 bp, Homo sapiens
ccggggttggtctccaaaagaaaaa

SEQ ID NO: 18034 - DNA, 25 bp, Homo sapiens
gacttgaaccaggtagcctctgcta

SEQ ID NO: 18035 - DNA, 25 bp, Homo sapiens
gtcccttcattcagcctcacgagta

SEQ ID NO: 18036 - DNA, 25 bp, Homo sapiens
gtcacagatactcagggctccaaga

SEQ ID NO: 18037 - DNA, 25 bp, Homo sapiens
gtaggagccctctttgccagtaaaa

SEQ ID NO: 18038 - DNA, 25 bp, Homo sapiens
ggcactcggatacaacccaatttta

SEQ ID NO: 18039 - DNA, 25 bp, Homo sapiens
gccgcctgtgactttcagcacaata

SEQ ID NO: 18040 - DNA, 25 bp, Homo sapiens
ggcctgagccacctaacagtcactg

SEQ ID NO: 18041 - DNA, 25 bp, Homo sapiens
acctgcctgtgggtatatcctttga

SEQ ID NO: 18042 - DNA, 25 bp, Homo sapiens
agggtgcttcttcttggactcttga

SEQ ID NO: 18043 - DNA, 25 bp, Homo sapiens
ttggcaaagattcaggcagggtccc

SEQ ID NO: 18044 - DNA, 25 bp, Homo sapiens
agggcctgggttctactttgttcca

SEQ ID NO: 18045 - DNA, 25 bp, Homo sapiens
cagcaggtgtgaagcagatgttcca

SEQ ID NO: 18046 - DNA, 25 bp, Homo sapiens
ctctgctgggaggagacctactttt

SEQ ID NO: 18047 - DNA, 25 bp, Homo sapiens
gaatgccttcctctagtgtcactga

SEQ ID NO: 18048 - DNA, 25 bp, Homo sapiens
tccaaataaaatcctgagtcatacc

SEQ ID NO: 18049 - DNA, 25 bp, Homo sapiens
ccattggctacctgaacctgttcta

SEQ ID NO: 18050 - DNA, 25 bp, Homo sapiens
gcttcacaggggctacaaaatggta

SEQ ID NO: 18051 - DNA, 25 bp, Homo sapiens
catgagcacctctgcctggaagata

SEQ ID NO: 18052 - DNA, 25 bp, Homo sapiens
tgtgctggctcccacctaattaata

SEQ ID NO: 18053 - DNA, 25 bp, Homo sapiens
tcttggtccctgaaaactgagttta

SEQ ID NO: 18054 - DNA, 25 bp, Homo sapiens
gctggcagccattcacctcttatta

SEQ ID NO: 18055 - DNA, 25 bp, Homo sapiens
cgatctgactggaacacaacttttg

SEQ ID NO: 18056 - DNA, 25 bp, Homo sapiens
ttaggccaggtaatcatcagaaaca

SEQ ID NO: 18057 - DNA, 25 bp, Homo sapiens
gggtggacctttaaaaactactttg

SEQ ID NO: 18058 - DNA, 25 bp, Homo sapiens
aactgggatcagtatggggtacatc

SEQ ID NO: 18059 - DNA, 25 bp, Homo sapiens
tttgttgcacaataagccacctcac

SEQ ID NO: 18060 - DNA, 25 bp, Homo sapiens
tcacgctgtagggaagaaatgactc

SEQ ID NO: 18061 - DNA, 25 bp, Homo sapiens
aactgtggttgatctctcaggagta

SEQ ID NO: 18062 - DNA, 25 bp, Homo sapiens
tgagcaactctcactccaaggcaaa

SEQ ID NO: 18063 - DNA, 25 bp, Homo sapiens
gtactgttaacattctaggtgcctg

SEQ ID NO: 18064 - DNA, 25 bp, Homo sapiens
gtgcacctatgtacttgagagcttc

SEQ ID NO: 18065 - DNA, 25 bp, Homo sapiens
ttccgaatttcacgagccctacatg

SEQ ID NO: 18066 - DNA, 25 bp, Homo sapiens
gccctgtgtatttccttatctgaga

SEQ ID NO: 18067 - DNA, 25 bp, Homo sapiens
gggaccctttttaaagcactttata

SEQ ID NO: 18068 - DNA, 25 bp, Homo sapiens
atccttggtatatcagacactgttc

SEQ ID NO: 18069 - DNA, 25 bp, Homo sapiens
tataggtcatggtccctggcctttt

SEQ ID NO: 18070 - DNA, 25 bp, Homo sapiens
ccaggggtactatttaatacctttt

SEQ ID NO: 18071 - DNA, 25 bp, Homo sapiens
tgcttctttgatttaaaaaatttgt

SEQ ID NO: 18072 - DNA, 25 bp, Homo sapiens
tgtgtgactataactccaacttggg

SEQ ID NO: 18073 - DNA, 25 bp, Homo sapiens
tctgtgactgtaagcctcttgagga

SEQ ID NO: 18074 - DNA, 25 bp, Homo sapiens
ttcctgcagttttgtgcaaaggttc

SEQ ID NO: 18075 - DNA, 25 bp, Homo sapiens
gcccaggttagggttaaccataacc

SEQ ID NO: 18076 - DNA, 25 bp, Homo sapiens
tactgcctagctgggttaagctgca

SEQ ID NO: 18077 - DNA, 25 bp, Homo sapiens
tggctttggcctcattcaaccttcg

SEQ ID NO: 18078 - DNA, 25 bp, Homo sapiens
ccgcccacgcacacttaaattagag

SEQ ID NO: 18079 - DNA, 25 bp, Homo sapiens
tgtgcctgcatcaacatgtgacttc

SEQ ID NO: 18080 - DNA, 25 bp, Homo sapiens
gtacatacagatgctgaccaagttc

SEQ ID NO: 18081 - DNA, 25 bp, Homo sapiens
tgtgcaaatagttcagggaatcctg

SEQ ID NO: 18082 - DNA, 25 bp, Homo sapiens
ttctccaactgtagaggcccatgta

SEQ ID NO: 18083 - DNA, 25 bp, Homo sapiens
acaaacttctgttagtcaagggcca

SEQ ID NO: 18084 - DNA, 25 bp, Homo sapiens
gtagagaggaatacacccattcata

SEQ ID NO: 18085 - DNA, 25 bp, Homo sapiens
aaggtctgtacctgctgtttgtcta

SEQ ID NO: 18086 - DNA, 25 bp, Homo sapiens
aaacttttggcttttaaatttagct

SEQ ID NO: 18087 - DNA, 25 bp, Homo sapiens
ctggctccctagtaagatggatata

SEQ ID NO: 18088 - DNA, 25 bp, Homo sapiens
ggctgccagggttttagctactaca

SEQ ID NO: 18089 - DNA, 25 bp, Homo sapiens
tagtaaggttttcacaaactacctc

SEQ ID NO: 18090 - DNA, 25 bp, Homo sapiens
ctgtagagcgaaattggttaaaatc

SEQ ID NO: 18091 - DNA, 25 bp, Homo sapiens
tcgttggagttaagaattccatgag

SEQ ID NO: 18092 - DNA, 25 bp, Homo sapiens
tctgcctctcagagaattattaatg

SEQ ID NO: 18093 - DNA, 25 bp, Homo sapiens
tgccctgtccagaatgtctagtatg

SEQ ID NO: 18094 - DNA, 25 bp, Homo sapiens
tgtcccagttagaaccagcagtaga

SEQ ID NO: 18095 - DNA, 25 bp, Homo sapiens
gaagtgtataaaagttaagtggatc

SEQ ID NO: 18096 - DNA, 25 bp, Homo sapiens
gccactgctaagcttcctgggcaaa

SEQ ID NO: 18097 - DNA, 25 bp, Homo sapiens
gtaggtaccacattcccaggtatta

SEQ ID NO: 18098 - DNA, 25 bp, Homo sapiens
ggggctcatttctgcttatggaacc

SEQ ID NO: 18099 - DNA, 25 bp, Homo sapiens
taaggaggtctctagaaggctaaca

SEQ ID NO: 18100 - DNA, 25 bp, Homo sapiens
gactaaagacccctgccctcacaaa

SEQ ID NO: 18101 - DNA, 25 bp, Homo sapiens
ctagggattcccaggtcttgtttga

SEQ ID NO: 18102 - DNA, 25 bp, Homo sapiens
agtcagtgggacagagttctattca

SEQ ID NO: 18103 - DNA, 25 bp, Homo sapiens
ggcagcagccttcctgcagggagca

SEQ ID NO: 18104 - DNA, 25 bp, Homo sapiens
tgctgaggcagcgatccctaaatca

SEQ ID NO: 18105 - DNA, 25 bp, Homo sapiens
gacacagtgcctaaccttgtttata

SEQ ID NO: 18106 - DNA, 25 bp, Homo sapiens
ctgtcacagcttctttagtttgttg

SEQ ID NO: 18107 - DNA, 25 bp, Homo sapiens
ggtgatgtctcccagtctttttcca

SEQ ID NO: 18108 - DNA, 25 bp, Homo sapiens
ctttaccacatggacttttttagtc

SEQ ID NO: 18109 - DNA, 25 bp, Homo sapiens
ctggtgttcttcagaggctggctta

SEQ ID NO: 18110 - DNA, 25 bp, Homo sapiens
acagccttaatctgatgccaagttg

SEQ ID NO: 18111 - DNA, 25 bp, Homo sapiens
gtaccggctacgtattaaactttga

SEQ ID NO: 18112 - DNA, 25 bp, Homo sapiens
tgcacacacttcctagccacatggg

SEQ ID NO: 18113 - DNA, 25 bp, Homo sapiens
gccatgcttgttaagccctcaagga

SEQ ID NO: 18114 - DNA, 25 bp, Homo sapiens
cccttgtgcaggttccaaaatcttg

SEQ ID NO: 18115 - DNA, 25 bp, Homo sapiens
gctgctgctgccgccaatggacagc

SEQ ID NO: 18116 - DNA, 25 bp, Homo sapiens
cgttttacccgaaggcgctctgtga

SEQ ID NO: 18117 - DNA, 25 bp, Homo sapiens
cgctacctgcgcgacttctgtggct

SEQ ID NO: 18118 - DNA, 25 bp, Homo sapiens
tgttccagcgcctgccacactatgg

SEQ ID NO: 18119 - DNA, 25 bp, Homo sapiens
tgaatggcatcaacctggcactggc

SEQ ID NO: 18120 - DNA, 25 bp, Homo sapiens
atggctgctccaggctctgcttaag

SEQ ID NO: 18121 - DNA, 25 bp, Homo sapiens
atcggtgatagatggtcatgggccc

SEQ ID NO: 18122 - DNA, 25 bp, Homo sapiens
gcagcccttgggagtggcagcaggg

SEQ ID NO: 18123 - DNA, 25 bp, Homo sapiens
cccagccttgaaaaatgagtgttgc

SEQ ID NO: 18124 - DNA, 25 bp, Homo sapiens
gcttgtttcaggccacaggaagggg

SEQ ID NO: 18125 - DNA, 25 bp, Homo sapiens
actgccgtctatgaggccatgactg

SEQ ID NO: 18126 - DNA, 25 bp, Homo sapiens
agggctccttcctgccacttaaagg

SEQ ID NO: 18127 - DNA, 25 bp, Homo sapiens
ctgtcctggagttttcagagggacg

SEQ ID NO: 18128 - DNA, 25 bp, Homo sapiens
aagtggtctattccctcatggctga

SEQ ID NO: 18129 - DNA, 25 bp, Homo sapiens
gccgaggccgatttctacgagcaga

SEQ ID NO: 18130 - DNA, 25 bp, Homo sapiens
cccaaagtgtgggattaaagtactg

SEQ ID NO: 18131 - DNA, 25 bp, Homo sapiens
acgtctctctttttaacactaatgt

SEQ ID NO: 18132 - DNA, 25 bp, Homo sapiens
tgcttttcggagttgtttttttttt

SEQ ID NO: 18133 - DNA, 25 bp, Homo sapiens
ttatttaaaaaagcactgggattac

SEQ ID NO: 18134 - DNA, 25 bp, Homo sapiens
gtcagaaatgtcaaggataaacagc

SEQ ID NO: 18135 - DNA, 25 bp, Homo sapiens
acagtgatccctttaaaatacatgg

SEQ ID NO: 18136 - DNA, 25 bp, Homo sapiens
actagcggtgttcgagtatctactg

SEQ ID NO: 18137 - DNA, 25 bp, Homo sapiens
gaaagcttgttcttgccctggctga

SEQ ID NO: 18138 - DNA, 25 bp, Homo sapiens
ctgcctcgttatgcatgctcatata

SEQ ID NO: 18139 - DNA, 25 bp, Homo sapiens
gcccatggttgttgcttctctttga

SEQ ID NO: 18140 - DNA, 25 bp, Homo sapiens
ggctgctgccttggttctgaaacta

SEQ ID NO: 18141 - DNA, 25 bp, Homo sapiens
gatcgctccctgcagacttgtagga

SEQ ID NO: 18142 - DNA, 25 bp, Homo sapiens
gagagagaaaaaagttgatattttc

SEQ ID NO: 18143 - DNA, 25 bp, Homo sapiens
tggcccaaggatgcactagaaagtt

SEQ ID NO: 18144 - DNA, 25 bp, Homo sapiens
gccgttaactgggttctagcctatc

SEQ ID NO: 18145 - DNA, 25 bp, Homo sapiens
ggttctgaatgctctcccatgtggc

SEQ ID NO: 18146 - DNA, 25 bp, Homo sapiens
accaccatgtggagttgccatctga

SEQ ID NO: 18147 - DNA, 25 bp, Homo sapiens
gggttttttccactctccagcttca

SEQ ID NO: 18148 - DNA, 25 bp, Homo sapiens
tcaagactaagtgggctggaggctc

SEQ ID NO: 18149 - DNA, 25 bp, Homo sapiens
ctccttatctccaagttctgaaatc

SEQ ID NO: 18150 - DNA, 25 bp, Homo sapiens
gcctgcatgttcgagtgagtctgta

SEQ ID NO: 18151 - DNA, 25 bp, Homo sapiens
cccgagagtagatgcagagtagatg

SEQ ID NO: 18152 - DNA, 25 bp, Homo sapiens
acggctcactgtagccttgaaattc

SEQ ID NO: 18153 - DNA, 25 bp, Homo sapiens
ggtcccgctgctcaaaatggctgtc

SEQ ID NO: 18154 - DNA, 25 bp, Homo sapiens
taggcagggttctgagttgcaactc

SEQ ID NO: 18155 - DNA, 25 bp, Homo sapiens
ccgctgagaagtaaaaggaggccta

SEQ ID NO: 18156 - DNA, 25 bp, Homo sapiens
tcccttttcagagacgtagataccg

SEQ ID NO: 18157 - DNA, 25 bp, Homo sapiens
ttcattctcgcagtagacgtggcta

SEQ ID NO: 18158 - DNA, 25 bp, Homo sapiens
ctaattaacgctttggaggtctact

SEQ ID NO: 18159 - DNA, 25 bp, Homo sapiens
aaggaagggatggggaagaagaaga

SEQ ID NO: 18160 - DNA, 25 bp, Homo sapiens
gtgcatgtgtgtttgttcgtattaa

SEQ ID NO: 18161 - DNA, 25 bp, Homo sapiens
cgcagccaagctcaactccagggtg

SEQ ID NO: 18162 - DNA, 25 bp, Homo sapiens
cttcgccgaaggtagcgccgaatcc

SEQ ID NO: 18163 - DNA, 25 bp, Homo sapiens
tcatcctccagatgtgggaagcttc

SEQ ID NO: 18164 - DNA, 25 bp, Homo sapiens
tgccatctcaggtctggacagcttc

SEQ ID NO: 18165 - DNA, 25 bp, Homo sapiens
agacacctgtatttttgctgccaga

SEQ ID NO: 18166 - DNA, 25 bp, Homo sapiens
cccgtagtgccagttggagccattc

SEQ ID NO: 18167 - DNA, 25 bp, Homo sapiens
ctgcacaggtctctcatagtcacta

SEQ ID NO: 18168 - DNA, 25 bp, Homo sapiens
gacattcactcactggggctccttc

SEQ ID NO: 18169 - DNA, 25 bp, Homo sapiens
tccggaggccgttttgtacattctc

SEQ ID NO: 18170 - DNA, 25 bp, Homo sapiens
ccagctgtttccttgactgccagta

SEQ ID NO: 18171 - DNA, 25 bp, Homo sapiens
tggaactcctgaatgtggcactatg

SEQ ID NO: 18172 - DNA, 25 bp, Homo sapiens
aggcctctgtctaaccaccggtgta

SEQ ID NO: 18173 - DNA, 25 bp, Homo sapiens
aggcatgcgcatccttgtcacgttg

SEQ ID NO: 18174 - DNA, 25 bp, Homo sapiens
gcccaccttgcggtctggactatga

SEQ ID NO: 18175 - DNA, 25 bp, Homo sapiens
ttggtgttaaatgctgcctgatctc

SEQ ID NO: 18176 - DNA, 25 bp, Homo sapiens
cagctctctggaatcacactagtga

SEQ ID NO: 18177 - DNA, 25 bp, Homo sapiens
aggtgggctccttcttcatgatcaa

SEQ ID NO: 18178 - DNA, 25 bp, Homo sapiens
gagtctcattgcctccgcacaggga

SEQ ID NO: 18179 - DNA, 25 bp, Homo sapiens
cccatggaaagtgctgctcagaaca

SEQ ID NO: 18180 - DNA, 25 bp, Homo sapiens
gttctacccaggaaggctgctcaga

SEQ ID NO: 18181 - DNA, 25 bp, Homo sapiens
tccctggtttggaacgaaggccatg

SEQ ID NO: 18182 - DNA, 25 bp, Homo sapiens
ggtgcctgcaccttcttcttgctca

SEQ ID NO: 18183 - DNA, 25 bp, Homo sapiens
cctcctgactgaggaagcacctata

SEQ ID NO: 18184 - DNA, 25 bp, Homo sapiens
tgcgggccatcctgaccatatccag

SEQ ID NO: 18185 - DNA, 25 bp, Homo sapiens
aggggagcatatcctgtgcacagca

SEQ ID NO: 18186 - DNA, 25 bp, Homo sapiens
cagctgctgctgaggcatccactaa

SEQ ID NO: 18187 - DNA, 25 bp, Homo sapiens
gagctgggaaatatcatgtcaccta

SEQ ID NO: 18188 - DNA, 25 bp, Homo sapiens
cccagtgtggtgtttagttgcagcc

SEQ ID NO: 18189 - DNA, 25 bp, Homo sapiens
gcagatcgttcccagcctccaattt

SEQ ID NO: 18190 - DNA, 25 bp, Homo sapiens
cccagggctttatatgcattgatcc

SEQ ID NO: 18191 - DNA, 25 bp, Homo sapiens
ggttcgtcattcgtccttctgagga

SEQ ID NO: 18192 - DNA, 25 bp, Homo sapiens
ggtccctttggctacatcaagaatc

SEQ ID NO: 18193 - DNA, 25 bp, Homo sapiens
gtggccaccttctgcatgctgctta

SEQ ID NO: 18194 - DNA, 25 bp, Homo sapiens
tcgtcacaggcagcgtcatcaatta

SEQ ID NO: 18195 - DNA, 25 bp, Homo sapiens
acctttgcagggagggtctcactca

SEQ ID NO: 18196 - DNA, 25 bp, Homo sapiens
cctgagggcctgtagttgaattctg

SEQ ID NO: 18197 - DNA, 25 bp, Homo sapiens
tggggaacctactgacctgctaaga

SEQ ID NO: 18198 - DNA, 25 bp, Homo sapiens
ggcccacgagatgaagtcaccggta

SEQ ID NO: 18199 - DNA, 25 bp, Homo sapiens
tgatgtgatgccagtgaggctccca

SEQ ID NO: 18200 - DNA, 25 bp, Homo sapiens
ctcctcagctgaggtgtgtctctga

SEQ ID NO: 18201 - DNA, 25 bp, Homo sapiens
gggtgctttgtctcattccaggcta

SEQ ID NO: 18202 - DNA, 25 bp, Homo sapiens
ctgctccatttctggggtgcacagc

SEQ ID NO: 18203 - DNA, 25 bp, Homo sapiens
ggccgcagtaatttccctccaggtg

SEQ ID NO: 18204 - DNA, 25 bp, Homo sapiens
agctgctgttgctgccttcattcca

SEQ ID NO: 18205 - DNA, 25 bp, Homo sapiens
gagcccagtccttccggtggattta

SEQ ID NO: 18206 - DNA, 25 bp, Homo sapiens
tgggtccggcacaagtacaactttg

SEQ ID NO: 18207 - DNA, 25 bp, Homo sapiens
tccatctgtgggctcaggtcactca

SEQ ID NO: 18208 - DNA, 25 bp, Homo sapiens
tgtggccttctttgtcctgaacatg

SEQ ID NO: 18209 - DNA, 25 bp, Homo sapiens
gctcccatctgcctggtacagcgta

SEQ ID NO: 18210 - DNA, 25 bp, Homo sapiens
cggccagtgaccaatgtcgtgtttc

SEQ ID NO: 18211 - DNA, 25 bp, Homo sapiens
ctgtggggcctcataacactatgtc

SEQ ID NO: 18212 - DNA, 25 bp, Homo sapiens
gggctagcccacagagacttttcca

SEQ ID NO: 18213 - DNA, 25 bp, Homo sapiens
tgggctccctgtgactcctactaac

SEQ ID NO: 18214 - DNA, 25 bp, Homo sapiens
ggagccgctttttctaacctaattg

SEQ ID NO: 18215 - DNA, 25 bp, Homo sapiens
caaccttctggctctgtgattttca

SEQ ID NO: 18216 - DNA, 25 bp, Homo sapiens
ctctgggcaaggttaacacagcctg

SEQ ID NO: 18217 - DNA, 25 bp, Homo sapiens
ccgtcggttcttccaggacaggtaa

SEQ ID NO: 18218 - DNA, 25 bp, Homo sapiens
ctggccattgtgctgctgtccatca

SEQ ID NO: 18219 - DNA, 25 bp, Homo sapiens
tggaactccctctcccaggaacatg

SEQ ID NO: 18220 - DNA, 25 bp, Homo sapiens
ctgtttgacaccatatccctgctga

SEQ ID NO: 18221 - DNA, 25 bp, Homo sapiens
ccttgcctcttgttgggattcagtc

SEQ ID NO: 18222 - DNA, 25 bp, Homo sapiens
acggatgactctttgcctgatgaca

SEQ ID NO: 18223 - DNA, 25 bp, Homo sapiens
cctcaggcctgctggggctatttaa

SEQ ID NO: 18224 - DNA, 25 bp, Homo sapiens
gggctgctctcccttctctggatac

SEQ ID NO: 18225 - DNA, 25 bp, Homo sapiens
accctctgctgctggtgatgacctg

SEQ ID NO: 18226 - DNA, 25 bp, Homo sapiens
agatggcctggcttctctcatatcc

SEQ ID NO: 18227 - DNA, 25 bp, Homo sapiens
tccactgggtgccaagtcctagctc

SEQ ID NO: 18228 - DNA, 25 bp, Homo sapiens
cagggtctcttctgctgctatcaaa

SEQ ID NO: 18229 - DNA, 25 bp, Homo sapiens
gagggacctccaaacccacgttgtg

SEQ ID NO: 18230 - DNA, 25 bp, Homo sapiens
tgtggccacagaagcaagagtaccc

SEQ ID NO: 18231 - DNA, 25 bp, Homo sapiens
acctgtggccctgaagaaagccttc

SEQ ID NO: 18232 - DNA, 25 bp, Homo sapiens
ccagagtctcacgatcgaagagttc

SEQ ID NO: 18233 - DNA, 25 bp, Homo sapiens
caatctctgttactggtggctcctc

SEQ ID NO: 18234 - DNA, 25 bp, Homo sapiens
agctgacttgggaatggctcacaca

SEQ ID NO: 18235 - DNA, 25 bp, Homo sapiens
gtgggctttcttaaacgattgtctg

SEQ ID NO: 18236 - DNA, 25 bp, Homo sapiens
cgcagtccttttagagtcaccaata

SEQ ID NO: 18237 - DNA, 25 bp, Homo sapiens
gttgaactttttggggacaccacta

SEQ ID NO: 18238 - DNA, 25 bp, Homo sapiens
tgtgctcctattatgcccttgacta

SEQ ID NO: 18239 - DNA, 25 bp, Homo sapiens
tgacggaggtggttctcttagacta

SEQ ID NO: 18240 - DNA, 25 bp, Homo sapiens
agttcactcgcatacccttggttcc

SEQ ID NO: 18241 - DNA, 25 bp, Homo sapiens
gttgacagttttcgttgcccgccca

SEQ ID NO: 18242 - DNA, 25 bp, Homo sapiens
ccttctaatagggaacgagagctta

SEQ ID NO: 18243 - DNA, 25 bp, Homo sapiens
agttttgccagaataatttggaatt

SEQ ID NO: 18244 - DNA, 25 bp, Homo sapiens
cttggcaggctagttaatgaagtta

SEQ ID NO: 18245 - DNA, 25 bp, Homo sapiens
gggcgctgtgcagtcatgatattta

SEQ ID NO: 18246 - DNA, 25 bp, Homo sapiens
tggtagcagcatcaacactctcaga

SEQ ID NO: 18247 - DNA, 25 bp, Homo sapiens
gcctctgtggggatgcaaattctaa

SEQ ID NO: 18248 - DNA, 25 bp, Homo sapiens
ctcgtgtgccgtgatgtgaaaactc

SEQ ID NO: 18249 - DNA, 25 bp, Homo sapiens
cgagcctgtgctcctggatttgttc

SEQ ID NO: 18250 - DNA, 25 bp, Homo sapiens
ttgtctcaagcaaaggaagcctgta

SEQ ID NO: 18251 - DNA, 25 bp, Homo sapiens
gggccagacctctctccttgatgaa

SEQ ID NO: 18252 - DNA, 25 bp, Homo sapiens
ggagacctcaggcttctttagagca

SEQ ID NO: 18253 - DNA, 25 bp, Homo sapiens
acgcgtacttggctctctgacagtg

SEQ ID NO: 18254 - DNA, 25 bp, Homo sapiens
caccacttctgccttggggacatca

SEQ ID NO: 18255 - DNA, 25 bp, Homo sapiens
aaatgggaatttttaggttacaagt

SEQ ID NO: 18256 - DNA, 25 bp, Homo sapiens
aggatcagtgaatgcagaggaaaga

SEQ ID NO: 18257 - DNA, 25 bp, Homo sapiens
aaaaaccacaagctgcagggcacca

SEQ ID NO: 18258 - DNA, 25 bp, Homo sapiens
ggtttgttaacacatactcagactc

SEQ ID NO: 18259 - DNA, 25 bp, Homo sapiens
ccagagagagggtagaagtgttttc

SEQ ID NO: 18260 - DNA, 25 bp, Homo sapiens
cacaactactgggaaggggctccta

SEQ ID NO: 18261 - DNA, 25 bp, Homo sapiens
ggctgctcaagggaaccagcttatt

SEQ ID NO: 18262 - DNA, 25 bp, Homo sapiens
acccacccagttgcttcaagtaatg

SEQ ID NO: 18263 - DNA, 25 bp, Homo sapiens
ccattctttttcagagaggcagtca

SEQ ID NO: 18264 - DNA, 25 bp, Homo sapiens
cacatgggactcacaactggatttc

SEQ ID NO: 18265 - DNA, 25 bp, Homo sapiens
cagcagcattgcacctaaggagttc

SEQ ID NO: 18266 - DNA, 25 bp, Homo sapiens
gccctctcttgtctggaaatgcttg

SEQ ID NO: 18267 - DNA, 25 bp, Homo sapiens
aggactcccattgcagctgctcaga

SEQ ID NO: 18268 - DNA, 25 bp, Homo sapiens
ctgggacttcagaattgctattttt

SEQ ID NO: 18269 - DNA, 25 bp, Homo sapiens
tagctattgctatcacatgtgtctg

SEQ ID NO: 18270 - DNA, 25 bp, Homo sapiens
ctcagaggggagtttatggctcatc

SEQ ID NO: 18271 - DNA, 25 bp, Homo sapiens
tcctcctcttgtttttgaatacagc

SEQ ID NO: 18272 - DNA, 25 bp, Homo sapiens
tgcctcctaagcatgtccagcatgt

SEQ ID NO: 18273 - DNA, 25 bp, Homo sapiens
tatgtattaaaaaattaaagttagg

SEQ ID NO: 18274 - DNA, 25 bp, Homo sapiens
gggtgcctccttcctgctagattaa

SEQ ID NO: 18275 - DNA, 25 bp, Homo sapiens
tgtgggtctcctttcatctttaaaa

SEQ ID NO: 18276 - DNA, 25 bp, Homo sapiens
tgctaccgtactcaggtcctggttg

SEQ ID NO: 18277 - DNA, 25 bp, Homo sapiens
cagagattccttttttcaacccagc

SEQ ID NO: 18278 - DNA, 25 bp, Homo sapiens
gttccttattatcgcagagttcttc

SEQ ID NO: 18279 - DNA, 25 bp, Homo sapiens
cagggagccagttaaggttacatca

SEQ ID NO: 18280 - DNA, 25 bp, Homo sapiens
ggccatctttcttcatccacggaga

SEQ ID NO: 18281 - DNA, 25 bp, Homo sapiens
cccagtgatctgcttccaggtttta

SEQ ID NO: 18282 - DNA, 25 bp, Homo sapiens
acccagctgcactgaatagatttga

SEQ ID NO: 18283 - DNA, 25 bp, Homo sapiens
tcttttttttcctttagcatttctt

SEQ ID NO: 18284 - DNA, 25 bp, Homo sapiens
aatgacatcactatgactttaattt

SEQ ID NO: 18285 - DNA, 25 bp, Homo sapiens
agggtggttgtaaactgcatcattc

SEQ ID NO: 18286 - DNA, 25 bp, Homo sapiens
gcctagtctgtgctggttcttgcta

SEQ ID NO: 18287 - DNA, 25 bp, Homo sapiens
gccctgctgccattgagagattttc

SEQ ID NO: 18288 - DNA, 25 bp, Homo sapiens
agcctgactcactggatttgttgga

SEQ ID NO: 18289 - DNA, 25 bp, Homo sapiens
agggtctctccttctctctggccaa

SEQ ID NO: 18290 - DNA, 25 bp, Homo sapiens
ctaggactctcattctcacaagtgg

SEQ ID NO: 18291 - DNA, 25 bp, Homo sapiens
gagcgacactgtaaaggttttcacg

SEQ ID NO: 18292 - DNA, 25 bp, Homo sapiens
aagcccatggccagtcaggtaaaga

SEQ ID NO: 18293 - DNA, 25 bp, Homo sapiens
taaacagaacatttgcatataatct

SEQ ID NO: 18294 - DNA, 25 bp, Homo sapiens
ctcatatgttttctaaaggtgggga

SEQ ID NO: 18295 - DNA, 25 bp, Homo sapiens
gtctctttatagtctgcagtagtca

SEQ ID NO: 18296 - DNA, 25 bp, Homo sapiens
gagcccagcaagtcaggtagaaata

SEQ ID NO: 18297 - DNA, 25 bp, Homo sapiens
gtttccagagcttgcatgcatacta

SEQ ID NO: 18298 - DNA, 25 bp, Homo sapiens
gtggtcttaacctcacaatggccta

SEQ ID NO: 18299 - DNA, 25 bp, Homo sapiens
tgtatggggatttgaccacagattt

SEQ ID NO: 18300 - DNA, 25 bp, Homo sapiens
ccattccttaggtttcttgtctgca

SEQ ID NO: 18301 - DNA, 25 bp, Homo sapiens
tggctgtgtaagttgttatgtcatc

SEQ ID NO: 18302 - DNA, 25 bp, Homo sapiens
aggcactatggcgtcctgcagttta

SEQ ID NO: 18303 - DNA, 25 bp, Homo sapiens
agccgtgtgtgtgcatttatctcca

SEQ ID NO: 18304 - DNA, 25 bp, Homo sapiens
agtgaccttatctttcgacaattgg

SEQ ID NO: 18305 - DNA, 25 bp, Homo sapiens
tactcctgggaaaacccttcgggtc

SEQ ID NO: 18306 - DNA, 25 bp, Homo sapiens
gctcttggctttaggcatgaaattc

SEQ ID NO: 18307 - DNA, 25 bp, Homo sapiens
tgcccattagattgtttaacgctta

SEQ ID NO: 18308 - DNA, 25 bp, Homo sapiens
agtctgacatatttttccattgtga

SEQ ID NO: 18309 - DNA, 25 bp, Homo sapiens
acaggcttagtgtcatccataatca

SEQ ID NO: 18310 - DNA, 25 bp, Homo sapiens
accacatgggcaattcacatatttg

SEQ ID NO: 18311 - DNA, 25 bp, Homo sapiens
tttggatccaggcaagctcaatttc

SEQ ID NO: 18312 - DNA, 25 bp, Homo sapiens
tcccttctgggaggctttcatactc

SEQ ID NO: 18313 - DNA, 25 bp, Homo sapiens
cctaggctgctccaatgtgagtttc

SEQ ID NO: 18314 - DNA, 25 bp, Homo sapiens
ttctcgaagtccctacatgctattg

SEQ ID NO: 18315 - DNA, 25 bp, Homo sapiens
gagagttcctttctttcccgttaaa

SEQ ID NO: 18316 - DNA, 25 bp, Homo sapiens
ttcctcatgcaagcattgctgtatc

SEQ ID NO: 18317 - DNA, 25 bp, Homo sapiens
acgcggctgttcttagcatgaatta

SEQ ID NO: 18318 - DNA, 25 bp, Homo sapiens
gcctacggcttgctggagtaaaatc

SEQ ID NO: 18319 - DNA, 25 bp, Homo sapiens
caagccagttggtatctaagcctaa

SEQ ID NO: 18320 - DNA, 25 bp, Homo sapiens
accctctttaggacttggcagtcta

SEQ ID NO: 18321 - DNA, 25 bp, Homo sapiens
gcaatgtacagccattccagaagga

SEQ ID NO: 18322 - DNA, 25 bp, Homo sapiens
ctccgtggaagcttgctatcaattc

SEQ ID NO: 18323 - DNA, 25 bp, Homo sapiens
agccaattggtagcaggaagctatc

SEQ ID NO: 18324 - DNA, 25 bp, Homo sapiens
gagctggctatatgactctcctcca

SEQ ID NO: 18325 - DNA, 25 bp, Homo sapiens
caccatgacctagaaaggtttactc

SEQ ID NO: 18326 - DNA, 25 bp, Homo sapiens
aagagttaaacattttctcctgaaa

SEQ ID NO: 18327 - DNA, 25 bp, Homo sapiens
tcagccctcatgaaacaagttttta

SEQ ID NO: 18328 - DNA, 25 bp, Homo sapiens
tcctcctgggcaagaacacacctgg

SEQ ID NO: 18329 - DNA, 25 bp, Homo sapiens
cctcttgatgtgtatagcagttagc

SEQ ID NO: 18330 - DNA, 25 bp, Homo sapiens
aagtggctcagcgatatcagttatc

SEQ ID NO: 18331 - DNA, 25 bp, Homo sapiens
ccaagggagtgcctttatgtataca

SEQ ID NO: 18332 - DNA, 25 bp, Homo sapiens
ttgttcccatcaatcttgtgctatg

SEQ ID NO: 18333 - DNA, 25 bp, Homo sapiens
tggcagtaggaaacacacgctttga

SEQ ID NO: 18334 - DNA, 25 bp, Homo sapiens
cccactcatagctgacttggcttta

SEQ ID NO: 18335 - DNA, 25 bp, Homo sapiens
tcagaggcacgttgcttaccacttc

SEQ ID NO: 18336 - DNA, 25 bp, Homo sapiens
cgggccagttaatgagatgtactac

SEQ ID NO: 18337 - DNA, 25 bp, Homo sapiens
cagctccctcaattgcttggttctc

SEQ ID NO: 18338 - DNA, 25 bp, Homo sapiens
ggtgacgcagccaagccatatcatt

SEQ ID NO: 18339 - DNA, 25 bp, Homo sapiens
tgtttgttttttcatggaaaaccca

SEQ ID NO: 18340 - DNA, 25 bp, Homo sapiens
ggcacattgcttagagagaccactc

SEQ ID NO: 18341 - DNA, 25 bp, Homo sapiens
ttctagcttggccttgactgagtta

SEQ ID NO: 18342 - DNA, 25 bp, Homo sapiens
gagcactccatccttccctagttta

SEQ ID NO: 18343 - DNA, 25 bp, Homo sapiens
ttagtgctcccgagtgacttctctc

SEQ ID NO: 18344 - DNA, 25 bp, Homo sapiens
gccctggctattactggtagctata

SEQ ID NO: 18345 - DNA, 25 bp, Homo sapiens
ggggccacctgaatatcaaaatttg

SEQ ID NO: 18346 - DNA, 25 bp, Homo sapiens
ggtctcctacagcaaatggcctcta

SEQ ID NO: 18347 - DNA, 25 bp, Homo sapiens
ctggcctgtgacacctcttggttta

SEQ ID NO: 18348 - DNA, 25 bp, Homo sapiens
tgctcatctgaacctgagactctgg

SEQ ID NO: 18349 - DNA, 25 bp, Homo sapiens
gcttcctaagatacccacacagatg

SEQ ID NO: 18350 - DNA, 25 bp, Homo sapiens
gagtttaatttggaggaaggaaaga

SEQ ID NO: 18351 - DNA, 25 bp, Homo sapiens
actgtattgtcacacaggcctaata

SEQ ID NO: 18352 - DNA, 25 bp, Homo sapiens
cttgctaggcattaggcttcagcaa

SEQ ID NO: 18353 - DNA, 25 bp, Homo sapiens
ttggtcagctttgggtcagagaatc

SEQ ID NO: 18354 - DNA, 25 bp, Homo sapiens
aggggaacctggtagcatttcttca

SEQ ID NO: 18355 - DNA, 25 bp, Homo sapiens
tggtctcaggtcctcagtaaagcta

SEQ ID NO: 18356 - DNA, 25 bp, Homo sapiens
cctacttggcactatgatcacttga

SEQ ID NO: 18357 - DNA, 25 bp, Homo sapiens
ggaggccatactaaggagatttatc

SEQ ID NO: 18358 - DNA, 25 bp, Homo sapiens
cttgtacttaagactgcacgatttc

SEQ ID NO: 18359 - DNA, 25 bp, Homo sapiens
ttattttaaatgatcaaattatggc

SEQ ID NO: 18360 - DNA, 25 bp, Homo sapiens
ctgcaccaaggttcacatgttatta

SEQ ID NO: 18361 - DNA, 25 bp, Homo sapiens
tgctgaccttgccactaacaaaata

SEQ ID NO: 18362 - DNA, 25 bp, Homo sapiens
gcaagatacacatgtattacagctt

SEQ ID NO: 18363 - DNA, 25 bp, Homo sapiens
gtgcctgacacctcatagccagata

SEQ ID NO: 18364 - DNA, 25 bp, Homo sapiens
gggttcgttctagcaggtcattatc

SEQ ID NO: 18365 - DNA, 25 bp, Homo sapiens
ccagggccagatgagctgttacgta

SEQ ID NO: 18366 - DNA, 25 bp, Homo sapiens
tgccaatgccttcacaactgtattt

SEQ ID NO: 18367 - DNA, 25 bp, Homo sapiens
tctagacaattcagccagaaaaggc

SEQ ID NO: 18368 - DNA, 25 bp, Homo sapiens
ccttttttagggcttctagaggaac

SEQ ID NO: 18369 - DNA, 25 bp, Homo sapiens
ttacccttttcctcacaagtcatgg

SEQ ID NO: 18370 - DNA, 25 bp, Homo sapiens
ccacctgggacatatagaactaata

SEQ ID NO: 18371 - DNA, 25 bp, Homo sapiens
ggtaaccagcttttcttccagagca

SEQ ID NO: 18372 - DNA, 25 bp, Homo sapiens
tgcgcaggaatgtctcgaccttgtc

SEQ ID NO: 18373 - DNA, 25 bp, Homo sapiens
aactcctggtaggtgtcaatggcca

SEQ ID NO: 18374 - DNA, 25 bp, Homo sapiens
ctgagcaccattgagtcctgaattc

SEQ ID NO: 18375 - DNA, 25 bp, Homo sapiens
agggcagcagatctccacaaccttg

SEQ ID NO: 18376 - DNA, 25 bp, Homo sapiens
aaggggccctttgcctgattttgtc

SEQ ID NO: 18377 - DNA, 25 bp, Homo sapiens
ctagctggggactactgcataactc

SEQ ID NO: 18378 - DNA, 25 bp, Homo sapiens
gaagccattctcaccggtctcagga

SEQ ID NO: 18379 - DNA, 25 bp, Homo sapiens
tgccctcagctggaaatagcctctc

SEQ ID NO: 18380 - DNA, 25 bp, Homo sapiens
gtctggacgtccttctgctggtata

SEQ ID NO: 18381 - DNA, 25 bp, Homo sapiens
cctctaggtccttcaggtggcgata

SEQ ID NO: 18382 - DNA, 25 bp, Homo sapiens
cccaaagggattttaggggcgctta

SEQ ID NO: 18383 - DNA, 25 bp, Homo sapiens
tcagccagggcagcagatcttcaca

SEQ ID NO: 18384 - DNA, 25 bp, Homo sapiens
ccagggttggggctacttcaatata

SEQ ID NO: 18385 - DNA, 25 bp, Homo sapiens
ctgcaggctgagagagtacccaaca

SEQ ID NO: 18386 - DNA, 25 bp, Homo sapiens
ccctcaggggtttgggattcttatc

SEQ ID NO: 18387 - DNA, 25 bp, Homo sapiens
tgccgtttcttcatggttctcactg

SEQ ID NO: 18388 - DNA, 25 bp, Homo sapiens
agttcccttcccttctgtgtcattg

SEQ ID NO: 18389 - DNA, 25 bp, Homo sapiens
ccctgagtctggtgctatagattaa

SEQ ID NO: 18390 - DNA, 25 bp, Homo sapiens
tcagtgccttgaagcacagcgaatc

SEQ ID NO: 18391 - DNA, 25 bp, Homo sapiens
atctccagaggaagagtggccttta

SEQ ID NO: 18392 - DNA, 25 bp, Homo sapiens
gcttgtcttggcctagaagcccaga

SEQ ID NO: 18393 - DNA, 25 bp, Homo sapiens
ggtctcatctttgcggtccctaaca

SEQ ID NO: 18394 - DNA, 25 bp, Homo sapiens
ccacttcccaaggactgagttatta

SEQ ID NO: 18395 - DNA, 25 bp, Homo sapiens
ctggaacctgttggcactgcattta

SEQ ID NO: 18396 - DNA, 25 bp, Homo sapiens
tgggtcagcgccttactgctaaaaa

SEQ ID NO: 18397 - DNA, 25 bp, Homo sapiens
cccaaagggattttaggggcgctta

SEQ ID NO: 18398 - DNA, 25 bp, Homo sapiens
ccatggaagcccgtcctcttttgtc

SEQ ID NO: 18399 - DNA, 25 bp, Homo sapiens
aaggggccctttgcctgattttgtc

SEQ ID NO: 18400 - DNA, 25 bp, Homo sapiens
agtctgcagcctcccttaggaaaga

SEQ ID NO: 18401 - DNA, 25 bp, Homo sapiens
ggactccctgcccatacggaaagtg

SEQ ID NO: 18402 - DNA, 25 bp, Homo sapiens
ccatgtcctgtgtgtccaatatgtc

SEQ ID NO: 18403 - DNA, 25 bp, Homo sapiens
cttcgggccagacaagcatcgtatc

SEQ ID NO: 18404 - DNA, 25 bp, Homo sapiens
tgcattagctcagggtggcagccta

SEQ ID NO: 18405 - DNA, 25 bp, Homo sapiens
agccattttggtgtcaggatcagtc

SEQ ID NO: 18406 - DNA, 25 bp, Homo sapiens
cttcattgtctataggaggaggccc

SEQ ID NO: 18407 - DNA, 25 bp, Homo sapiens
gcactccagggccttctgaattaaa

SEQ ID NO: 18408 - DNA, 25 bp, Homo sapiens
ggtgttcacctagagctcaaggctg

SEQ ID NO: 18409 - DNA, 25 bp, Homo sapiens
tttattactacttcccaagcctggc

SEQ ID NO: 18410 - DNA, 25 bp, Homo sapiens
atcattaccaagacacagccaccta

SEQ ID NO: 18411 - DNA, 25 bp, Homo sapiens
cttgtccttttgataaatgagttga

SEQ ID NO: 18412 - DNA, 25 bp, Homo sapiens
gggttggctagcatctcatccactg

SEQ ID NO: 18413 - DNA, 25 bp, Homo sapiens
gggtcctctccaatatcaataaatt

SEQ ID NO: 18414 - DNA, 25 bp, Homo sapiens
cctagatggggtcctgtagttttcc

SEQ ID NO: 18415 - DNA, 25 bp, Homo sapiens
acttgagttttttgagcggattggc

SEQ ID NO: 18416 - DNA, 25 bp, Homo sapiens
ggtcctcagaatgtttcagtacaga

SEQ ID NO: 18417 - DNA, 25 bp, Homo sapiens
cctatagatgggtggtttctttagc

SEQ ID NO: 18418 - DNA, 25 bp, Homo sapiens
tcttgcacatcatacttaggacttg

SEQ ID NO: 18419 - DNA, 25 bp, Homo sapiens
tcagggtcctagagcattcattttc

SEQ ID NO: 18420 - DNA, 25 bp, Homo sapiens
gatacatcattcctcaaaaagtttt

SEQ ID NO: 18421 - DNA, 25 bp, Homo sapiens
ttcagttgtgaactgctgggatgta

SEQ ID NO: 18422 - DNA, 25 bp, Homo sapiens
ttctgatgcccttctatgagaatga

SEQ ID NO: 18423 - DNA, 25 bp, Homo sapiens
gggtcttgcatgcagctggcactta

SEQ ID NO: 18424 - DNA, 25 bp, Homo sapiens
tcataggattcccacaggcagagtg

SEQ ID NO: 18425 - DNA, 25 bp, Homo sapiens
tgggttctgaatccacacaaagaca

SEQ ID NO: 18426 - DNA, 25 bp, Homo sapiens
gcagtccgtcttcaaggtccagata

SEQ ID NO: 18427 - DNA, 25 bp, Homo sapiens
cttgggcccatgaggactctgttca

SEQ ID NO: 18428 - DNA, 25 bp, Homo sapiens
gatgagctgtcctctctgcagactg

SEQ ID NO: 18429 - DNA, 25 bp, Homo sapiens
cctgtattcaagctatgtggacata

SEQ ID NO: 18430 - DNA, 25 bp, Homo sapiens
ggagtccctttctcaatttctgttg

SEQ ID NO: 18431 - DNA, 25 bp, Homo sapiens
ggggccttttctgagtcctccaaaa

SEQ ID NO: 18432 - DNA, 25 bp, Homo sapiens
tgcccaaggctgtgtgctcatctct

SEQ ID NO: 18433 - DNA, 25 bp, Homo sapiens
tcagccgctagtgtaaacgagcatc

SEQ ID NO: 18434 - DNA, 25 bp, Homo sapiens
cagctccttcccatggcggatcagg

SEQ ID NO: 18435 - DNA, 25 bp, Homo sapiens
tgtataatgccctcaaccagcctta

SEQ ID NO: 18436 - DNA, 25 bp, Homo sapiens
taaaacaaacctaaaaaaccaacta

SEQ ID NO: 18437 - DNA, 25 bp, Homo sapiens
ctatgttggtaggaagccctgactc

SEQ ID NO: 18438 - DNA, 25 bp, Homo sapiens
ttaggttaacccaagaatcactgta

SEQ ID NO: 18439 - DNA, 25 bp, Homo sapiens
tgccagattcttttgagggactccc

SEQ ID NO: 18440 - DNA, 25 bp, Homo sapiens
gatgccttttcttgcccatgccata

SEQ ID NO: 18441 - DNA, 25 bp, Homo sapiens
gtaggggttcaaatgtatgtctttc

SEQ ID NO: 18442 - DNA, 25 bp, Homo sapiens
tacctggatggtgttacgttgtctg

SEQ ID NO: 18443 - DNA, 25 bp, Homo sapiens
catggcaaccttgtcggggatattc

SEQ ID NO: 18444 - DNA, 25 bp, Homo sapiens
catacttggccctaggtgtgacaca

SEQ ID NO: 18445 - DNA, 25 bp, Homo sapiens
gaatgctgaacctgacccttgtctg

SEQ ID NO: 18446 - DNA, 25 bp, Homo sapiens
ctgctggactggagaggattctacc

SEQ ID NO: 18447 - DNA, 25 bp, Homo sapiens
cttcagcttcttgggcgaaacaata

SEQ ID NO: 18448 - DNA, 25 bp, Homo sapiens
cccgcctcaggatattcagaagctc

SEQ ID NO: 18449 - DNA, 25 bp, Homo sapiens
gggattccaagattcgcctcattta

SEQ ID NO: 18450 - DNA, 25 bp, Homo sapiens
gggtctgtactccacagctatttta

SEQ ID NO: 18451 - DNA, 25 bp, Homo sapiens
cagggccacctcttacaagcaaata

SEQ ID NO: 18452 - DNA, 25 bp, Homo sapiens
ctgggctgtcttccctttcataagg

SEQ ID NO: 18453 - DNA, 25 bp, Homo sapiens
tctttagatgatgacctggcatggt

SEQ ID NO: 18454 - DNA, 25 bp, Homo sapiens
ggtagcaggccaattcagacatgtc

SEQ ID NO: 18455 - DNA, 25 bp, Homo sapiens
ggccgcttaaagaatgttcccactc

SEQ ID NO: 18456 - DNA, 25 bp, Homo sapiens
agggctgagttcttccatccatcgc

SEQ ID NO: 18457 - DNA, 25 bp, Homo sapiens
gcccatctgaggtgctaagcttctg

SEQ ID NO: 18458 - DNA, 25 bp, Homo sapiens
catgagccctgggaagattcctatc

SEQ ID NO: 18459 - DNA, 25 bp, Homo sapiens
ggaaaatatacttctggaaataaat

SEQ ID NO: 18460 - DNA, 25 bp, Homo sapiens
ctcaggcttcgatgctatttgctta

SEQ ID NO: 18461 - DNA, 25 bp, Homo sapiens
cggccactctgaagccaaggagtta

SEQ ID NO: 18462 - DNA, 25 bp, Homo sapiens
gcattgctaaacactttcttccata

SEQ ID NO: 18463 - DNA, 25 bp, Homo sapiens
cctaaaatgtttaaaaattactgta

SEQ ID NO: 18464 - DNA, 25 bp, Homo sapiens
ggacacacattgaaccctcccagtg

SEQ ID NO: 18465 - DNA, 25 bp, Homo sapiens
ttagtgaatttaccctccctccagc

SEQ ID NO: 18466 - DNA, 25 bp, Homo sapiens
ggccagtggtcttcagggaatcatc

SEQ ID NO: 18467 - DNA, 25 bp, Homo sapiens
ctcttcctggtctatgctcgtgatg

SEQ ID NO: 18468 - DNA, 25 bp, Homo sapiens
ctcctggcatttgtcagcggataca

SEQ ID NO: 18469 - DNA, 25 bp, Homo sapiens
tggcagcttgcacacaggtcatttc

SEQ ID NO: 18470 - DNA, 25 bp, Homo sapiens
cgtcagagtctggataaaccttttc

SEQ ID NO: 18471 - DNA, 25 bp, Homo sapiens
ccatgatgtccctgtgttcctgcta

SEQ ID NO: 18472 - DNA, 25 bp, Homo sapiens
cttgtctggagctcccattagattg

SEQ ID NO: 18473 - DNA, 25 bp, Homo sapiens
gctaatacagatgacaaaagaagtt

SEQ ID NO: 18474 - DNA, 25 bp, Homo sapiens
gaggccttccagctgtttgaccgaa

SEQ ID NO: 18475 - DNA, 25 bp, Homo sapiens
ctggcagtgccaaagattctagaac

SEQ ID NO: 18476 - DNA, 25 bp, Homo sapiens
tgtgcccacagtctcatagtttatg

SEQ ID NO: 18477 - DNA, 25 bp, Homo sapiens
aatcctctgaagagatgccagcctg

SEQ ID NO: 18478 - DNA, 25 bp, Homo sapiens
gacacatctaggatcctgccacata

SEQ ID NO: 18479 - DNA, 25 bp, Homo sapiens
gggctccaccctgctacctaggaaa

SEQ ID NO: 18480 - DNA, 25 bp, Homo sapiens
tatagagaagatgaaaaaatggcat

SEQ ID NO: 18481 - DNA, 25 bp, Homo sapiens
gggaaagctacccatatatcttttg

SEQ ID NO: 18482 - DNA, 25 bp, Homo sapiens
atatttaacttatgccccagttgat

SEQ ID NO: 18483 - DNA, 25 bp, Homo sapiens
ctctgggtagcaggagaaaacgcta

SEQ ID NO: 18484 - DNA, 25 bp, Homo sapiens
tgtctgctgttgatcgccatctctg

SEQ ID NO: 18485 - DNA, 25 bp, Homo sapiens
ccagaggatttaaagccaggatacc

SEQ ID NO: 18486 - DNA, 25 bp, Homo sapiens
ggaaactctgttacctcctaagata

SEQ ID NO: 18487 - DNA, 25 bp, Homo sapiens
gacttgcagttgctccatgcctttg

SEQ ID NO: 18488 - DNA, 25 bp, Homo sapiens
gcacagcctgatggtacccagacta

SEQ ID NO: 18489 - DNA, 25 bp, Homo sapiens
tgacaggctaggtaccacaaaattg

SEQ ID NO: 18490 - DNA, 25 bp, Homo sapiens
cgagaaattctagtgctccatgtca

SEQ ID NO: 18491 - DNA, 25 bp, Homo sapiens
ctctgcaattttgtgctactatttc

SEQ ID NO: 18492 - DNA, 25 bp, Homo sapiens
tcacagtaaacaagtcccagacatt

SEQ ID NO: 18493 - DNA, 25 bp, Homo sapiens
agaacagctgtcttctgcaacaaga

SEQ ID NO: 18494 - DNA, 25 bp, Homo sapiens
tgaaaaatgctcaatgagataaagc

SEQ ID NO: 18495 - DNA, 25 bp, Homo sapiens
ggactgggactcttgccaattatta

SEQ ID NO: 18496 - DNA, 25 bp, Homo sapiens
ccatctggttctcgagtttagtaca

SEQ ID NO: 18497 - DNA, 25 bp, Homo sapiens
ctgaaatagtttgcctcccacgaga

SEQ ID NO: 18498 - DNA, 25 bp, Homo sapiens
tgggcagaaggcttcccttataata

SEQ ID NO: 18499 - DNA, 25 bp, Homo sapiens
tcccggattgctcctctggattcta

SEQ ID NO: 18500 - DNA, 25 bp, Homo sapiens
ttaaccatccatcttctggctgggg

SEQ ID NO: 18501 - DNA, 25 bp, Homo sapiens
agctctctggcctaatgacccattg

SEQ ID NO: 18502 - DNA, 25 bp, Homo sapiens
tccagatcatggaaagggtgacaca

SEQ ID NO: 18503 - DNA, 25 bp, Homo sapiens
ggacctgggtcaaatcatctgctga

SEQ ID NO: 18504 - DNA, 25 bp, Homo sapiens
cagctggcagcttggcctcagaata

SEQ ID NO: 18505 - DNA, 25 bp, Homo sapiens
agggacagcctttcttcgagtctga

SEQ ID NO: 18506 - DNA, 25 bp, Homo sapiens
ccagtcctgagctccttattcaata

SEQ ID NO: 18507 - DNA, 25 bp, Homo sapiens
tttgcctaaaactgggatgtcatcc

SEQ ID NO: 18508 - DNA, 25 bp, Homo sapiens
ttgggaaccgaccaagaacaccttg

SEQ ID NO: 18509 - DNA, 25 bp, Homo sapiens
caggctctgttagggtaggttaata

SEQ ID NO: 18510 - DNA, 25 bp, Homo sapiens
gttgttgtcacatctgcaccttctg

SEQ ID NO: 18511 - DNA, 25 bp, Homo sapiens
tgctgtcctcctctccttttgaatg

SEQ ID NO: 18512 - DNA, 25 bp, Homo sapiens
ctcgcttgtgagagcagactgtgta

SEQ ID NO: 18513 - DNA, 25 bp, Homo sapiens
ggtaagctttctctcttggcatcta

SEQ ID NO: 18514 - DNA, 25 bp, Homo sapiens
cccagggctgcctgcaatttaaatg

SEQ ID NO: 18515 - DNA, 25 bp, Homo sapiens
ccctgcagtgagagttcatttcttc

SEQ ID NO: 18516 - DNA, 25 bp, Homo sapiens
gtctgggcctgcagtcaaagtcttc

SEQ ID NO: 18517 - DNA, 25 bp, Homo sapiens
ttctatgaaaactgcaggaatgttt

SEQ ID NO: 18518 - DNA, 25 bp, Homo sapiens
gggccaccggagctgctaaaatatg

SEQ ID NO: 18519 - DNA, 25 bp, Homo sapiens
ttctcccaccctgaaaagctttgtg

SEQ ID NO: 18520 - DNA, 25 bp, Homo sapiens
gggatcattccattctaagctagtc

SEQ ID NO: 18521 - DNA, 25 bp, Homo sapiens
atcaggcgtcaaaggctctagttta

SEQ ID NO: 18522 - DNA, 25 bp, Homo sapiens
cccactggaatcagagtacttgctc

SEQ ID NO: 18523 - DNA, 25 bp, Homo sapiens
ccagttattgtgatgccatgttaga

SEQ ID NO: 18524 - DNA, 25 bp, Homo sapiens
tcgttggctctgactccttgggata

SEQ ID NO: 18525 - DNA, 25 bp, Homo sapiens
tgtctgagaaacattgccctgggtc

SEQ ID NO: 18526 - DNA, 25 bp, Homo sapiens
cttggggccatgatcacctttgaga

SEQ ID NO: 18527 - DNA, 25 bp, Homo sapiens
ggggccttttccaccatttccagaa

SEQ ID NO: 18528 - DNA, 25 bp, Homo sapiens
tgccaccgatttctgggaaccattg

SEQ ID NO: 18529 - DNA, 25 bp, Homo sapiens
agggtacttccctgctccactgata

SEQ ID NO: 18530 - DNA, 25 bp, Homo sapiens
gcccatctgccttctgctatgaata

SEQ ID NO: 18531 - DNA, 25 bp, Homo sapiens
gggtcccttacatggagccacattc

SEQ ID NO: 18532 - DNA, 25 bp, Homo sapiens
ggagatcgatttgctgccagccatt

SEQ ID NO: 18533 - DNA, 25 bp, Homo sapiens
cgatgccattcggtacctggtttaa

SEQ ID NO: 18534 - DNA, 25 bp, Homo sapiens
atgcctggcctcacatgtttattga

SEQ ID NO: 18535 - DNA, 25 bp, Homo sapiens
gggctccaccgtgcctggcatttaa

SEQ ID NO: 18536 - DNA, 25 bp, Homo sapiens
gctcctccaggtgaagcaagtttta

SEQ ID NO: 18537 - DNA, 25 bp, Homo sapiens
actcccaaacgtggtgtggccttta

SEQ ID NO: 18538 - DNA, 25 bp, Homo sapiens
actcgctccttccatggggttgtca

SEQ ID NO: 18539 - DNA, 25 bp, Homo sapiens
tcgggccaccgtctatatcttcttc

SEQ ID NO: 18540 - DNA, 25 bp, Homo sapiens
ttccaaggtcgagaggtcacagagc

SEQ ID NO: 18541 - DNA, 25 bp, Homo sapiens
cacactctttggtctcccgcaggaa

SEQ ID NO: 18542 - DNA, 25 bp, Homo sapiens
ctgagcccttggatacctggaaaca

SEQ ID NO: 18543 - DNA, 25 bp, Homo sapiens
tgtggaaccagctcctgtcaaactc

SEQ ID NO: 18544 - DNA, 25 bp, Homo sapiens
tgttacctatgtgtgcaagtgcctg

SEQ ID NO: 18545 - DNA, 25 bp, Homo sapiens
atggcatctatcaagccaggctttc

SEQ ID NO: 18546 - DNA, 25 bp, Homo sapiens
ccactcagcgtttgatgatggatga

SEQ ID NO: 18547 - DNA, 25 bp, Homo sapiens
cactcccaggagctgtgctgtctca

SEQ ID NO: 18548 - DNA, 25 bp, Homo sapiens
agccatcttgcttcggtcagacctg

SEQ ID NO: 18549 - DNA, 25 bp, Homo sapiens
cctctggctccaggtttcaaagacc

SEQ ID NO: 18550 - DNA, 25 bp, Homo sapiens
cttttgcacagctggagggcatttc

SEQ ID NO: 18551 - DNA, 25 bp, Homo sapiens
ctcctgctgggattcaagttctctg

SEQ ID NO: 18552 - DNA, 25 bp, Homo sapiens
aatcagccctaaaagacagaccact

SEQ ID NO: 18553 - DNA, 25 bp, Homo sapiens
ctctccagaccacaggggctttttc

SEQ ID NO: 18554 - DNA, 25 bp, Homo sapiens
tccacgaggctctcatgaaatgctg

SEQ ID NO: 18555 - DNA, 25 bp, Homo sapiens
caaggcctgcatttgtgttttcatc

SEQ ID NO: 18556 - DNA, 25 bp, Homo sapiens
ttgtgacattttcccactggcaggg

SEQ ID NO: 18557 - DNA, 25 bp, Homo sapiens
cggctcctgcttccctttggtatca

SEQ ID NO: 18558 - DNA, 25 bp, Homo sapiens
atctcaatggcttacagcaagtctg

SEQ ID NO: 18559 - DNA, 25 bp, Homo sapiens
gacttctgtcctaggcaaactgtta

SEQ ID NO: 18560 - DNA, 25 bp, Homo sapiens
ttcctggacatcctgggcatcatcc

SEQ ID NO: 18561 - DNA, 25 bp, Homo sapiens
gacgctccaggtacaatcgaatttt

SEQ ID NO: 18562 - DNA, 25 bp, Homo sapiens
ccaactgtatctctgtgggacaaaa

SEQ ID NO: 18563 - DNA, 25 bp, Homo sapiens
ggctcctgaaacgtccctgctattt

SEQ ID NO: 18564 - DNA, 25 bp, Homo sapiens
ctgggaggataggactggccattac

SEQ ID NO: 18565 - DNA, 25 bp, Homo sapiens
gcctgtccgggttatttctgctgaa

SEQ ID NO: 18566 - DNA, 25 bp, Homo sapiens
cggtgttggctcttctccgagattc

SEQ ID NO: 18567 - DNA, 25 bp, Homo sapiens
cccaaatgctggtgatgtcctgtcc

SEQ ID NO: 18568 - DNA, 25 bp, Homo sapiens
gggctgtccactgcactgggataaa

SEQ ID NO: 18569 - DNA, 25 bp, Homo sapiens
ccctgggccagtcttggacacatta

SEQ ID NO: 18570 - DNA, 25 bp, Homo sapiens
agatggcagcccttcttggatacca

SEQ ID NO: 18571 - DNA, 25 bp, Homo sapiens
cggcgccacgtctcaatctatcaaa

SEQ ID NO: 18572 - DNA, 25 bp, Homo sapiens
gaagagtccgctttccctggtttta

SEQ ID NO: 18573 - DNA, 25 bp, Homo sapiens
ttgccatgaaagacaccactccctg

SEQ ID NO: 18574 - DNA, 25 bp, Homo sapiens
gcccacgtgtgtctccaggtgattc

SEQ ID NO: 18575 - DNA, 25 bp, Homo sapiens
ttcccagggccaagcaccttatctg

SEQ ID NO: 18576 - DNA, 25 bp, Homo sapiens
ctcgcagacgcttcatttgggccta

SEQ ID NO: 18577 - DNA, 25 bp, Homo sapiens
gggccggcccactggacttttatct

SEQ ID NO: 18578 - DNA, 25 bp, Homo sapiens
ggtgcagctgcttcctctacatgga

SEQ ID NO: 18579 - DNA, 25 bp, Homo sapiens
gcagctggtcaacaagccttgatta

SEQ ID NO: 18580 - DNA, 25 bp, Homo sapiens
agtccggtctctgttcctgaagctg

SEQ ID NO: 18581 - DNA, 25 bp, Homo sapiens
gcccagctggtcttgcatatttgtc

SEQ ID NO: 18582 - DNA, 25 bp, Homo sapiens
cctttctggagcctggactagcttc

SEQ ID NO: 18583 - DNA, 25 bp, Homo sapiens
cggggatgacctcctacttccgaga

SEQ ID NO: 18584 - DNA, 25 bp, Homo sapiens
cacacggggcagatcttacagcaga

SEQ ID NO: 18585 - DNA, 25 bp, Homo sapiens
ctgaccaccttgtacgacttcgatc

SEQ ID NO: 18586 - DNA, 25 bp, Homo sapiens
gcggtcatgggcaaccctttctttg

SEQ ID NO: 18587 - DNA, 25 bp, Homo sapiens
tcctagggactttctgtgggtgcaa

SEQ ID NO: 18588 - DNA, 25 bp, Homo sapiens
cagttgatgcctcgggaagtccaca

SEQ ID NO: 18589 - DNA, 25 bp, Homo sapiens
aggggctccagtacctcctgtgaca

SEQ ID NO: 18590 - DNA, 25 bp, Homo sapiens
caagtgttctgttctccaccaggtc

SEQ ID NO: 18591 - DNA, 25 bp, Homo sapiens
ggggccacttctttcactgggagca

SEQ ID NO: 18592 - DNA, 25 bp, Homo sapiens
tcctttagaactggggccttgcctc

SEQ ID NO: 18593 - DNA, 25 bp, Homo sapiens
tttccaaagcagagagggtttcagc

SEQ ID NO: 18594 - DNA, 25 bp, Homo sapiens
ttcctgcccagacacctcgggatga

SEQ ID NO: 18595 - DNA, 25 bp, Homo sapiens
ttcccggttctgaagctcacaggtc

SEQ ID NO: 18596 - DNA, 25 bp, Homo sapiens
ttctctgaggagaaaggattccttc

SEQ ID NO: 18597 - DNA, 25 bp, Homo sapiens
agccggtcatcacgcacatcatctg

SEQ ID NO: 18598 - DNA, 25 bp, Homo sapiens
acccagggttaagtgcagccttcca

SEQ ID NO: 18599 - DNA, 25 bp, Homo sapiens
tggatgctcaagctgccaggacctg

SEQ ID NO: 18600 - DNA, 25 bp, Homo sapiens
ccgcagagcctgaatcttggaaatg

SEQ ID NO: 18601 - DNA, 25 bp, Homo sapiens
tccggcggcggattttcagaatatt

SEQ ID NO: 18602 - DNA, 25 bp, Homo sapiens
ttttcacctggggactcacttcgcc

SEQ ID NO: 18603 - DNA, 25 bp, Homo sapiens
gaggacttttcaccatcaggggtca

SEQ ID NO: 18604 - DNA, 25 bp, Homo sapiens
caggccatcgccgacgagcagaaga

SEQ ID NO: 18605 - DNA, 25 bp, Homo sapiens
gcgatgcctcaggaactccagttta

SEQ ID NO: 18606 - DNA, 25 bp, Homo sapiens
cgccgacgtcatccaagaattaacc

SEQ ID NO: 18607 - DNA, 25 bp, Homo sapiens
tgccctgtccgcagaccacgtatgt

SEQ ID NO: 18608 - DNA, 25 bp, Homo sapiens
cctggtcgatgggaaagggcatctt

SEQ ID NO: 18609 - DNA, 25 bp, Homo sapiens
aacctgagtttcctgctgtcccggg

SEQ ID NO: 18610 - DNA, 25 bp, Homo sapiens
ccacacctttcctgacggagacaga

SEQ ID NO: 18611 - DNA, 25 bp, Homo sapiens
tatactcgctccttcccagctgggg

SEQ ID NO: 18612 - DNA, 25 bp, Homo sapiens
aaccacaaaaaactcacagacctca

SEQ ID NO: 18613 - DNA, 25 bp, Homo sapiens
tttcttcatcatctagggccagggc

SEQ ID NO: 18614 - DNA, 25 bp, Homo sapiens
caggaatttccggacgagcagctta

SEQ ID NO: 18615 - DNA, 25 bp, Homo sapiens
ttctcggggccctgatttagacttc

SEQ ID NO: 18616 - DNA, 25 bp, Homo sapiens
taggagcatgtgtgccttaacggtg

SEQ ID NO: 18617 - DNA, 25 bp, Homo sapiens
cgctgttgttgtacgcgccactctc

SEQ ID NO: 18618 - DNA, 25 bp, Homo sapiens
ttagcaggtagactggtatccagca

SEQ ID NO: 18619 - DNA, 25 bp, Homo sapiens
tctcactgatgccatctcaaaggcc

SEQ ID NO: 18620 - DNA, 25 bp, Homo sapiens
tggcagtccgtgctaagaaaggccc

SEQ ID NO: 18621 - DNA, 25 bp, Homo sapiens
ccctctctggggagacacccgtgaa

SEQ ID NO: 18622 - DNA, 25 bp, Homo sapiens
tggcgcagggtctcctccggagacc

SEQ ID NO: 18623 - DNA, 25 bp, Homo sapiens
ggacagaaggcacccaggatttgca

SEQ ID NO: 18624 - DNA, 25 bp, Homo sapiens
ggacacgcttgcaggaggaacccaa

SEQ ID NO: 18625 - DNA, 25 bp, Homo sapiens
aggccgtcagtgtcttcttcaagga

SEQ ID NO: 18626 - DNA, 25 bp, Homo sapiens
tccagggttgggtttggcactcaac

SEQ ID NO: 18627 - DNA, 25 bp, Homo sapiens
tgtgctggaccaaccctgattctgc

SEQ ID NO: 18628 - DNA, 25 bp, Homo sapiens
ggtgctcacctcctccctgattttg

SEQ ID NO: 18629 - DNA, 25 bp, Homo sapiens
tccctgcagcggcatagcattcgta

SEQ ID NO: 18630 - DNA, 25 bp, Homo sapiens
tgtttccaggtatctcgggccctca

SEQ ID NO: 18631 - DNA, 25 bp, Homo sapiens
gggcctgctcttttcagcgtctaaa

SEQ ID NO: 18632 - DNA, 25 bp, Homo sapiens
ggaaccctatctccttgtgcctgtg

SEQ ID NO: 18633 - DNA, 25 bp, Homo sapiens
ggtgcacaccttcgaagccctagag

SEQ ID NO: 18634 - DNA, 25 bp, Homo sapiens
agccagcctgtctcagaattcctta

SEQ ID NO: 18635 - DNA, 25 bp, Homo sapiens
tgtgaaaactgcagcgggtctccca

SEQ ID NO: 18636 - DNA, 25 bp, Homo sapiens
tggtgcccactcctcttctggaatc

SEQ ID NO: 18637 - DNA, 25 bp, Homo sapiens
ccctgctgttagagcccacgttgta

SEQ ID NO: 18638 - DNA, 25 bp, Homo sapiens
acagggtacttctcgtccaagggaa

SEQ ID NO: 18639 - DNA, 25 bp, Homo sapiens
gtgtccaccaccaagtaccctgttg

SEQ ID NO: 18640 - DNA, 25 bp, Homo sapiens
tcatgctgccatttacggaaaacgc

SEQ ID NO: 18641 - DNA, 25 bp, Homo sapiens
gctggcagtgcgacttacaaatttg

SEQ ID NO: 18642 - DNA, 25 bp, Homo sapiens
gggcaggctgttacctccatacaca

SEQ ID NO: 18643 - DNA, 25 bp, Homo sapiens
gggaccgctcaactgtgggacacta

SEQ ID NO: 18644 - DNA, 25 bp, Homo sapiens
gagcctcgagaagccagtcagctga

SEQ ID NO: 18645 - DNA, 25 bp, Homo sapiens
gcacaagcgagtggctgattctatc

SEQ ID NO: 18646 - DNA, 25 bp, Homo sapiens
cacaggaatgtgcaccgcagcctca

SEQ ID NO: 18647 - DNA, 25 bp, Homo sapiens
ccctgcactgctgggagcataagca

SEQ ID NO: 18648 - DNA, 25 bp, Homo sapiens
actcaaccttattacggatttgtga

SEQ ID NO: 18649 - DNA, 25 bp, Homo sapiens
ctgccctgctgaaaacagtgttgtg

SEQ ID NO: 18650 - DNA, 25 bp, Homo sapiens
atgggactgatggtgtactgactga

SEQ ID NO: 18651 - DNA, 25 bp, Homo sapiens
gcggccactcatgctgctatttgta

SEQ ID NO: 18652 - DNA, 25 bp, Homo sapiens
gtggccgccatttccttctctggga

SEQ ID NO: 18653 - DNA, 25 bp, Homo sapiens
ccaccaggtgtctgtgcatttaaca

SEQ ID NO: 18654 - DNA, 25 bp, Homo sapiens
acctacaaatgtgccgcggagcctt

SEQ ID NO: 18655 - DNA, 25 bp, Homo sapiens
ccacggggagcatgcattgaaattc

SEQ ID NO: 18656 - DNA, 25 bp, Homo sapiens
gaaccctggtgttgctctgtgactg

SEQ ID NO: 18657 - DNA, 25 bp, Homo sapiens
tgctcctgagtttgaatctggccca

SEQ ID NO: 18658 - DNA, 25 bp, Homo sapiens
ctgcctacagttgggacagtctatc

SEQ ID NO: 18659 - DNA, 25 bp, Homo sapiens
tgagccctgggtgtcagattcaaaa

SEQ ID NO: 18660 - DNA, 25 bp, Homo sapiens
ttggggccctattgcataccaggca

SEQ ID NO: 18661 - DNA, 25 bp, Homo sapiens
tggctgcccaaacaaaactatggtg

SEQ ID NO: 18662 - DNA, 25 bp, Homo sapiens
tgagtcctctctctggtgacaagtg

SEQ ID NO: 18663 - DNA, 25 bp, Homo sapiens
gcctttgtttactgcggtgacctta

SEQ ID NO: 18664 - DNA, 25 bp, Homo sapiens
gggcatcccagtacgtcagcgtctg

SEQ ID NO: 18665 - DNA, 25 bp, Homo sapiens
gtgtcttgactctataacccgtgca

SEQ ID NO: 18666 - DNA, 25 bp, Homo sapiens
aggtctgtcctgatacaactgaacg

SEQ ID NO: 18667 - DNA, 25 bp, Homo sapiens
gaggaaagtttacagatacccattt

SEQ ID NO: 18668 - DNA, 25 bp, Homo sapiens
gggtaccatgtcaagcagcactctg

SEQ ID NO: 18669 - DNA, 25 bp, Homo sapiens
ttcccggccctcacttggtatctga

SEQ ID NO: 18670 - DNA, 25 bp, Homo sapiens
cccagaaacaaaaacaaccaccaaa

SEQ ID NO: 18671 - DNA, 25 bp, Homo sapiens
cacctgctggccaagggtaactcta

SEQ ID NO: 18672 - DNA, 25 bp, Homo sapiens
gcagccctgggcaaatcgtgtatcc

SEQ ID NO: 18673 - DNA, 25 bp, Homo sapiens
tggccagtcccaagcatgttccctg

SEQ ID NO: 18674 - DNA, 25 bp, Homo sapiens
cccgtgaaagcaccctgcaggaatg

SEQ ID NO: 18675 - DNA, 25 bp, Homo sapiens
tattggctaactggacctcatggtc

SEQ ID NO: 18676 - DNA, 25 bp, Homo sapiens
gtgtccttgccactgccctcatttg

SEQ ID NO: 18677 - DNA, 25 bp, Homo sapiens
gccacgtgagcatgcagacaggcta

SEQ ID NO: 18678 - DNA, 25 bp, Homo sapiens
ctgtaggttcctgattgctcccata

SEQ ID NO: 18679 - DNA, 25 bp, Homo sapiens
attggaaggctagtgggccggtgca

SEQ ID NO: 18680 - DNA, 25 bp, Homo sapiens
gcgttccgtgttgtatccagcaatc

SEQ ID NO: 18681 - DNA, 25 bp, Homo sapiens
gaacccgcgcttcctgcaagtctta

SEQ ID NO: 18682 - DNA, 25 bp, Homo sapiens
tcctcgtaaggcaagaacgtgctgc

SEQ ID NO: 18683 - DNA, 25 bp, Homo sapiens
cctaatggcatttcattggaaatga

SEQ ID NO: 18684 - DNA, 25 bp, Homo sapiens
ctgggtcctgcatcctcttcgaggt

SEQ ID NO: 18685 - DNA, 25 bp, Homo sapiens
gtcctccagggtcagagctacagtt

SEQ ID NO: 18686 - DNA, 25 bp, Homo sapiens
ccttttggcctttatgctaatgtca

SEQ ID NO: 18687 - DNA, 25 bp, Homo sapiens
cggctgaagctctctgcaccatttc

SEQ ID NO: 18688 - DNA, 25 bp, Homo sapiens
tatatttgaactcttttattgtcta

SEQ ID NO: 18689 - DNA, 25 bp, Homo sapiens
gacgcattctcttttctataggaaa

SEQ ID NO: 18690 - DNA, 25 bp, Homo sapiens
ctgagaagtctgacattcaaaatct

SEQ ID NO: 18691 - DNA, 25 bp, Homo sapiens
agggttcttatcctcctctatttga

SEQ ID NO: 18692 - DNA, 25 bp, Homo sapiens
tggaaagtgtactacccatgcacta

SEQ ID NO: 18693 - DNA, 25 bp, Homo sapiens
caagttgtcagtacctcagtgtgca

SEQ ID NO: 18694 - DNA, 25 bp, Homo sapiens
acagccttgagtggaaatccttcta

SEQ ID NO: 18695 - DNA, 25 bp, Homo sapiens
ctcagacatgcaatgcaatagcttt

SEQ ID NO: 18696 - DNA, 25 bp, Homo sapiens
tattcatgactgtctcaaatgaacc

SEQ ID NO: 18697 - DNA, 25 bp, Homo sapiens
tccagtgagtttgcaacatttaatg

SEQ ID NO: 18698 - DNA, 25 bp, Homo sapiens
acacacaccgtctttctctggcaga

SEQ ID NO: 18699 - DNA, 25 bp, Homo sapiens
ggcaaatgctatgtgatcccagcta

SEQ ID NO: 18700 - DNA, 25 bp, Homo sapiens
tgtactctctggcttgctctctgaa

SEQ ID NO: 18701 - DNA, 25 bp, Homo sapiens
ctagaaactatcgactggggaaatt

SEQ ID NO: 18702 - DNA, 25 bp, Homo sapiens
acacagtgttgtcccatcagtatta

SEQ ID NO: 18703 - DNA, 25 bp, Homo sapiens
tcaccggtcgcatcaatcgcaagta

SEQ ID NO: 18704 - DNA, 25 bp, Homo sapiens
tatgggtatttgaacgaagcacttc

SEQ ID NO: 18705 - DNA, 25 bp, Homo sapiens
agcaggcctccattgttcagataca

SEQ ID NO: 18706 - DNA, 25 bp, Homo sapiens
cagccctctaggtaagtcagatata

SEQ ID NO: 18707 - DNA, 25 bp, Homo sapiens
gcagttttcagtcccatagcagtaa

SEQ ID NO: 18708 - DNA, 25 bp, Homo sapiens
tgacccagctctttttgcatattta

SEQ ID NO: 18709 - DNA, 25 bp, Homo sapiens
ttcaaattgttgctttgctgtctgt

SEQ ID NO: 18710 - DNA, 25 bp, Homo sapiens
tctccagctgctcgataacccattg

SEQ ID NO: 18711 - DNA, 25 bp, Homo sapiens
cgttcccaaattctgcatgctcgca

SEQ ID NO: 18712 - DNA, 25 bp, Homo sapiens
cagctgagcaattacctgataaggc

SEQ ID NO: 18713 - DNA, 25 bp, Homo sapiens
agaagaacagctagcaacacaagaa

SEQ ID NO: 18714 - DNA, 25 bp, Homo sapiens
tcagggatttaagagtaagacagta

SEQ ID NO: 18715 - DNA, 25 bp, Homo sapiens
taaaaataagacagtacttatctta

SEQ ID NO: 18716 - DNA, 25 bp, Homo sapiens
tctgtaaagtcgaatagtgttgtcc

SEQ ID NO: 18717 - DNA, 25 bp, Homo sapiens
tacatagttgtgttttagcgtaaca

SEQ ID NO: 18718 - DNA, 25 bp, Homo sapiens
aagaaaagatagagatgaactgtat

SEQ ID NO: 18719 - DNA, 25 bp, Homo sapiens
ccttaaaggaaacattaaattagtt

SEQ ID NO: 18720 - DNA, 25 bp, Homo sapiens
ccttactctgtgactctgattctga

SEQ ID NO: 18721 - DNA, 25 bp, Homo sapiens
ttcccaggcgatgcattgctatttc

SEQ ID NO: 18722 - DNA, 25 bp, Homo sapiens
tggtcagagcataaaagccctttcc

SEQ ID NO: 18723 - DNA, 25 bp, Homo sapiens
cagcagtttcatgagcacagggagc

SEQ ID NO: 18724 - DNA, 25 bp, Homo sapiens
gtggtggccaaactctcacatatga

SEQ ID NO: 18725 - DNA, 25 bp, Homo sapiens
cagcgtgtgctgtccttatcttatg

SEQ ID NO: 18726 - DNA, 25 bp, Homo sapiens
ccattctaaactgattagccagcaa

SEQ ID NO: 18727 - DNA, 25 bp, Homo sapiens
cttggcatgggctaaaaactcagta

SEQ ID NO: 18728 - DNA, 25 bp, Homo sapiens
ttcgcttccctcaccttatgtcaga

SEQ ID NO: 18729 - DNA, 25 bp, Homo sapiens
cctgccatgtaaattgaggtggtta

SEQ ID NO: 18730 - DNA, 25 bp, Homo sapiens
tcctggaattgcatcactttgaaga

SEQ ID NO: 18731 - DNA, 25 bp, Homo sapiens
aactgcattttactactgtggtgga

SEQ ID NO: 18732 - DNA, 25 bp, Homo sapiens
aggtcgttaattcattctgtacaga

SEQ ID NO: 18733 - DNA, 25 bp, Homo sapiens
gcccatggccttttgcaagtgtacc

SEQ ID NO: 18734 - DNA, 25 bp, Homo sapiens
atgatagctgttgccctgccgaagg

SEQ ID NO: 18735 - DNA, 25 bp, Homo sapiens
ggcactttgacacaccatttttaga

SEQ ID NO: 18736 - DNA, 25 bp, Homo sapiens
tgtggacatgtctctggctacctga

SEQ ID NO: 18737 - DNA, 25 bp, Homo sapiens
gcacaaggctgatgttctcaccata

SEQ ID NO: 18738 - DNA, 25 bp, Homo sapiens
gcccttagatgcatccgtaaattta

SEQ ID NO: 18739 - DNA, 25 bp, Homo sapiens
tggggctaatcctagctcttgttta

SEQ ID NO: 18740 - DNA, 25 bp, Homo sapiens
gaggagtcacctgtccacactggca

SEQ ID NO: 18741 - DNA, 25 bp, Homo sapiens
atggggtccttcttcagagctctgc

SEQ ID NO: 18742 - DNA, 25 bp, Homo sapiens
gttgcgcatgtgtgtaagttatatc

SEQ ID NO: 18743 - DNA, 25 bp, Homo sapiens
ttatcactcggacttctgctcaggg

SEQ ID NO: 18744 - DNA, 25 bp, Homo sapiens
gtggccagcaaggagctcaatatta

SEQ ID NO: 18745 - DNA, 25 bp, Homo sapiens
tgtcccataggccacattctgaagg

SEQ ID NO: 18746 - DNA, 25 bp, Homo sapiens
tttaaatgattttgggcacagatcc

SEQ ID NO: 18747 - DNA, 25 bp, Homo sapiens
cttaccttggtgattgctgagttgc

SEQ ID NO: 18748 - DNA, 25 bp, Homo sapiens
ggcactggggcatctgtcaagtata

SEQ ID NO: 18749 - DNA, 25 bp, Homo sapiens
tcatattcatgcctctagtttccca

SEQ ID NO: 18750 - DNA, 25 bp, Homo sapiens
tggggttttttctcacatgcataga

SEQ ID NO: 18751 - DNA, 25 bp, Homo sapiens
gtcctccctctggtgattctaaata

SEQ ID NO: 18752 - DNA, 25 bp, Homo sapiens
cttgtgttcttcaggggcaatatta

SEQ ID NO: 18753 - DNA, 25 bp, Homo sapiens
gtatctttatattttatgagactta

SEQ ID NO: 18754 - DNA, 25 bp, Homo sapiens
tcatgaccttttgtccttccacaaa

SEQ ID NO: 18755 - DNA, 25 bp, Homo sapiens
ttccctgtgatatagtgagatagac

SEQ ID NO: 18756 - DNA, 25 bp, Homo sapiens
gcaatttattttctaacttcggttg

SEQ ID NO: 18757 - DNA, 25 bp, Homo sapiens
ccggatttaagtatctttgttttgt

SEQ ID NO: 18758 - DNA, 25 bp, Homo sapiens
cgtatggctcctgcactgatgagga

SEQ ID NO: 18759 - DNA, 25 bp, Homo sapiens
tagccattgtgcctgttgattaata

SEQ ID NO: 18760 - DNA, 25 bp, Homo sapiens
cgatgtcagagtctattgtgccata

SEQ ID NO: 18761 - DNA, 25 bp, Homo sapiens
ttcaatttggtaacgcagagctgta

SEQ ID NO: 18762 - DNA, 25 bp, Homo sapiens
gcctttggaagcactgaaaatgtta

SEQ ID NO: 18763 - DNA, 25 bp, Homo sapiens
agaggtccttgcacagcttcacatg

SEQ ID NO: 18764 - DNA, 25 bp, Homo sapiens
gtcctaagagcatcaagcacttttg

SEQ ID NO: 18765 - DNA, 25 bp, Homo sapiens
gagctgttctttcctccctggtaaa

SEQ ID NO: 18766 - DNA, 25 bp, Homo sapiens
gcactgagcctctacaaacatttga

SEQ ID NO: 18767 - DNA, 25 bp, Homo sapiens
tagagggctttgaggcttaccaacc

SEQ ID NO: 18768 - DNA, 25 bp, Homo sapiens
ccaggcttccgagtgtcaaattgca

SEQ ID NO: 18769 - DNA, 25 bp, Homo sapiens
tcaggccctggatactgggaaatca

SEQ ID NO: 18770 - DNA, 25 bp, Homo sapiens
ggaactggaaagtaatactacaaac

SEQ ID NO: 18771 - DNA, 25 bp, Homo sapiens
ccaggaagtctgcactaggttctaa

SEQ ID NO: 18772 - DNA, 25 bp, Homo sapiens
ctgtggagctgtttatcattacttc

SEQ ID NO: 18773 - DNA, 25 bp, Homo sapiens
cccagtacttctgagagttgctgta

SEQ ID NO: 18774 - DNA, 25 bp, Homo sapiens
gcatgcctgagactgtacaaatttc

SEQ ID NO: 18775 - DNA, 25 bp, Homo sapiens
gactctcctgctggaactactaaga

SEQ ID NO: 18776 - DNA, 25 bp, Homo sapiens
gcctgtggcctttcaatattatttg

SEQ ID NO: 18777 - DNA, 25 bp, Homo sapiens
cttccataggtacaatttgagactc

SEQ ID NO: 18778 - DNA, 25 bp, Homo sapiens
tatgctaccttttccacgaagctta

SEQ ID NO: 18779 - DNA, 25 bp, Homo sapiens
ctgccacagccctggatttatctta

SEQ ID NO: 18780 - DNA, 25 bp, Homo sapiens
atgccatgcgctttttcactaagga

SEQ ID NO: 18781 - DNA, 25 bp, Homo sapiens
ttccctggggaagaagtagtcctta

SEQ ID NO: 18782 - DNA, 25 bp, Homo sapiens
gtgattgccagtgattcttcctatg

SEQ ID NO: 18783 - DNA, 25 bp, Homo sapiens
ctctccgggcttacagattttattc

SEQ ID NO: 18784 - DNA, 25 bp, Homo sapiens
ctacacaggtgggtttggctttgcc

SEQ ID NO: 18785 - DNA, 25 bp, Homo sapiens
tcaccgggtgcaagcttggttcaga

SEQ ID NO: 18786 - DNA, 25 bp, Homo sapiens
agagcctggagtgcaaactatattc

SEQ ID NO: 18787 - DNA, 25 bp, Homo sapiens
acagggccaccagcatttcaaggga

SEQ ID NO: 18788 - DNA, 25 bp, Homo sapiens
agcacagggccaaaaaggcattttc

SEQ ID NO: 18789 - DNA, 25 bp, Homo sapiens
cgaggccagtgtatgcttttaaaac

SEQ ID NO: 18790 - DNA, 25 bp, Homo sapiens
gggcaactcgttcccttctcataaa

SEQ ID NO: 18791 - DNA, 25 bp, Homo sapiens
aacgctttcagcagggtgtcaggca

SEQ ID NO: 18792 - DNA, 25 bp, Homo sapiens
tacctggcccacagctgaagcttga

SEQ ID NO: 18793 - DNA, 25 bp, Homo sapiens
gatgcccttgacttctagctcttga

SEQ ID NO: 18794 - DNA, 25 bp, Homo sapiens
ggtcggctggcttgtttttctaaaa

SEQ ID NO: 18795 - DNA, 25 bp, Homo sapiens
tggcccagggttttctagcaatttg

SEQ ID NO: 18796 - DNA, 25 bp, Homo sapiens
ctcctgggagctatcgcagaaactc

SEQ ID NO: 18797 - DNA, 25 bp, Homo sapiens
ggggcaatctcaccagcacagtagc

SEQ ID NO: 18798 - DNA, 25 bp, Homo sapiens
tgggctctcttctctctaacactcg

SEQ ID NO: 18799 - DNA, 25 bp, Homo sapiens
tcccagtgggtctatggcaaagctg

SEQ ID NO: 18800 - DNA, 25 bp, Homo sapiens
agtctaactttctctctgggcaata

SEQ ID NO: 18801 - DNA, 25 bp, Homo sapiens
cgtgagaatgcagtaggaattctaa

SEQ ID NO: 18802 - DNA, 25 bp, Homo sapiens
gcccgttagtcctttgcaatgtatt

SEQ ID NO: 18803 - DNA, 25 bp, Homo sapiens
gtctggcagcatcctcaagtctttc

SEQ ID NO: 18804 - DNA, 25 bp, Homo sapiens
tgcaggccaagctgtccagtttctc

SEQ ID NO: 18805 - DNA, 25 bp, Homo sapiens
tgggtctatccacttactttaaaga

SEQ ID NO: 18806 - DNA, 25 bp, Homo sapiens
tatcttgtattagggcgtcttgtgg

SEQ ID NO: 18807 - DNA, 25 bp, Homo sapiens
ccttactcgtagaagatggtcattc

SEQ ID NO: 18808 - DNA, 25 bp, Homo sapiens
agctttgtctgccacccactgtttc

SEQ ID NO: 18809 - DNA, 25 bp, Homo sapiens
cctgtgaggccaaaagcagctgtca

SEQ ID NO: 18810 - DNA, 25 bp, Homo sapiens
aggccctccttctgcaggtctgaaa

SEQ ID NO: 18811 - DNA, 25 bp, Homo sapiens
tgccacggcactgactagaattttg

SEQ ID NO: 18812 - DNA, 25 bp, Homo sapiens
gggcagttccctcatgttcattatc

SEQ ID NO: 18813 - DNA, 25 bp, Homo sapiens
cccactgctgctgagacataccttg

SEQ ID NO: 18814 - DNA, 25 bp, Homo sapiens
ctacatagggaagtgacacgatgcc

SEQ ID NO: 18815 - DNA, 25 bp, Homo sapiens
gcacacagacatgaagcaggcatta

SEQ ID NO: 18816 - DNA, 25 bp, Homo sapiens
gtacctgtatctatggaccttgaaa

SEQ ID NO: 18817 - DNA, 25 bp, Homo sapiens
actgctgtcgtcacactgttggatc

SEQ ID NO: 18818 - DNA, 25 bp, Homo sapiens
cccaaatctggggtgacttaagtcc

SEQ ID NO: 18819 - DNA, 25 bp, Homo sapiens
ccttgggcgcaaacatcagcttata

SEQ ID NO: 18820 - DNA, 25 bp, Homo sapiens
gtagtgccagccttaaacaatagtg

SEQ ID NO: 18821 - DNA, 25 bp, Homo sapiens
ctcctggctatggatcttgcaaagg

SEQ ID NO: 18822 - DNA, 25 bp, Homo sapiens
ccctggcctctgcttagcgtcttta

SEQ ID NO: 18823 - DNA, 25 bp, Homo sapiens
gctgtcactataggaaccctggtta

SEQ ID NO: 18824 - DNA, 25 bp, Homo sapiens
ctcataatatgtcaccggggctttc

SEQ ID NO: 18825 - DNA, 25 bp, Homo sapiens
ccctaaagttgaggaaacactgatg

SEQ ID NO: 18826 - DNA, 25 bp, Homo sapiens
acagggcttgccttacttacatata

SEQ ID NO: 18827 - DNA, 25 bp, Homo sapiens
ttgccctctattaaattctattttg

SEQ ID NO: 18828 - DNA, 25 bp, Homo sapiens
tattttttaaatgtctggattattt

SEQ ID NO: 18829 - DNA, 25 bp, Homo sapiens
aatgctttttttctgaaatttatct

SEQ ID NO: 18830 - DNA, 25 bp, Homo sapiens
ttccctcatctcttccaggtggata

SEQ ID NO: 18831 - DNA, 25 bp, Homo sapiens
gggcagaaattatggtcctcctatg

SEQ ID NO: 18832 - DNA, 25 bp, Homo sapiens
ctggagacttctgcatggggccact

SEQ ID NO: 18833 - DNA, 25 bp, Homo sapiens
ggtaatcccttcttcctgtttgaca

SEQ ID NO: 18834 - DNA, 25 bp, Homo sapiens
agactaggaaacacgcagagcattg

SEQ ID NO: 18835 - DNA, 25 bp, Homo sapiens
tttttcgtttttgagtgtttttata

SEQ ID NO: 18836 - DNA, 25 bp, Homo sapiens
gatataactcttatcttttatcttt

SEQ ID NO: 18837 - DNA, 25 bp, Homo sapiens
catcgttgagaaaaggcaccaagct

SEQ ID NO: 18838 - DNA, 25 bp, Homo sapiens
ctgggcttccagcattgcataatta

SEQ ID NO: 18839 - DNA, 25 bp, Homo sapiens
gcactgtctcatatgggaaggtctc

SEQ ID NO: 18840 - DNA, 25 bp, Homo sapiens
tgattcctccacagatttgcaagtc

SEQ ID NO: 18841 - DNA, 25 bp, Homo sapiens
ccgttttcctactatgtgtttaaga

SEQ ID NO: 18842 - DNA, 25 bp, Homo sapiens
ttgcccttcattggagagagtctta

SEQ ID NO: 18843 - DNA, 25 bp, Homo sapiens
tatggcaagtctcctcctgtagttc

SEQ ID NO: 18844 - DNA, 25 bp, Homo sapiens
gcctggaggtcttatattttatgta

SEQ ID NO: 18845 - DNA, 25 bp, Homo sapiens
cttggaatggcttctgatttttacc

SEQ ID NO: 18846 - DNA, 25 bp, Homo sapiens
tgatctccgtaaggttcattagttt

SEQ ID NO: 18847 - DNA, 25 bp, Homo sapiens
ccaactgttgccaggggtcaccttt

SEQ ID NO: 18848 - DNA, 25 bp, Homo sapiens
tccatatgactacacttttgtaaat

SEQ ID NO: 18849 - DNA, 25 bp, Homo sapiens
aggattggaaactctggccctaaga

SEQ ID NO: 18850 - DNA, 25 bp, Homo sapiens
ttatagtttggtgggtgcatcatca

SEQ ID NO: 18851 - DNA, 25 bp, Homo sapiens
atcctgcagcttgagtcacacattc

SEQ ID NO: 18852 - DNA, 25 bp, Homo sapiens
cgggaccctcacagctctgaatttg

SEQ ID NO: 18853 - DNA, 25 bp, Homo sapiens
tgataatatctcctcgctggccctg

SEQ ID NO: 18854 - DNA, 25 bp, Homo sapiens
ggaagctgttgcctatatcctgaca

SEQ ID NO: 18855 - DNA, 25 bp, Homo sapiens
tcaaggtctatttggaggctcccga

SEQ ID NO: 18856 - DNA, 25 bp, Homo sapiens
agtcctgctgggagtaacgctcatc

SEQ ID NO: 18857 - DNA, 25 bp, Homo sapiens
catgctgttatgctgagggacttta

SEQ ID NO: 18858 - DNA, 25 bp, Homo sapiens
cgagcagtttctatacagtaagtga

SEQ ID NO: 18859 - DNA, 25 bp, Homo sapiens
cctcatctggctgaaaggactctta

SEQ ID NO: 18860 - DNA, 25 bp, Homo sapiens
ggcctgggccagagattattttatt

SEQ ID NO: 18861 - DNA, 25 bp, Homo sapiens
gggctgccttggtccactgtctaaa

SEQ ID NO: 18862 - DNA, 25 bp, Homo sapiens
tggaaggacctaaactggggacata

SEQ ID NO: 18863 - DNA, 25 bp, Homo sapiens
tgctggccggactttccaacaaatg

SEQ ID NO: 18864 - DNA, 25 bp, Homo sapiens
tggggtgggtcatacaccatgattc

SEQ ID NO: 18865 - DNA, 25 bp, Homo sapiens
gcgggcagtcctactctctagtgtc

SEQ ID NO: 18866 - DNA, 25 bp, Homo sapiens
gccagaggctgaggtctaaaacttc

SEQ ID NO: 18867 - DNA, 25 bp, Homo sapiens
gctggtctagcaacacctctggttg

SEQ ID NO: 18868 - DNA, 25 bp, Homo sapiens
gcccggctgctatatgtctggtaaa

SEQ ID NO: 18869 - DNA, 25 bp, Homo sapiens
cttggcccagaaaggataccagctc

SEQ ID NO: 18870 - DNA, 25 bp, Homo sapiens
ctcctcgttggttgagtgtttaata

SEQ ID NO: 18871 - DNA, 25 bp, Homo sapiens
ctcctgttggagttctggatgttca

SEQ ID NO: 18872 - DNA, 25 bp, Homo sapiens
taccctcaggctacagttcgacttc

SEQ ID NO: 18873 - DNA, 25 bp, Homo sapiens
ctgcctcctggtgcggattatattc

SEQ ID NO: 18874 - DNA, 25 bp, Homo sapiens
tgccatccacacaaaagagctcctg

SEQ ID NO: 18875 - DNA, 25 bp, Homo sapiens
gggtccttctctccagtctcttaaa

SEQ ID NO: 18876 - DNA, 25 bp, Homo sapiens
gttccaagtgggcagtcagtaaata

SEQ ID NO: 18877 - DNA, 25 bp, Homo sapiens
gctgctctcaaagacagacgttttc

SEQ ID NO: 18878 - DNA, 25 bp, Homo sapiens
tcctttacaactgggctgcagcata

SEQ ID NO: 18879 - DNA, 25 bp, Homo sapiens
gcttggcacttatgcagtgactttg

SEQ ID NO: 18880 - DNA, 25 bp, Homo sapiens
tcttccacacgctagaaaaggctgt

SEQ ID NO: 18881 - DNA, 25 bp, Homo sapiens
tagcgaaatttgtatgccagccatg

SEQ ID NO: 18882 - DNA, 25 bp, Homo sapiens
gggaccaagtcctgttgctaagttc

SEQ ID NO: 18883 - DNA, 25 bp, Homo sapiens
cccttgtgaaaggtctgagaacatc

SEQ ID NO: 18884 - DNA, 25 bp, Homo sapiens
gtgtccagtgcccagtactcttagg

SEQ ID NO: 18885 - DNA, 25 bp, Homo sapiens
ccatggtggcaaatagctgtatcaa

SEQ ID NO: 18886 - DNA, 25 bp, Homo sapiens
tggggagcctctattttcttgacta

SEQ ID NO: 18887 - DNA, 25 bp, Homo sapiens
tgccaatctgtgctctagaactttg

SEQ ID NO: 18888 - DNA, 25 bp, Homo sapiens
tatttaaacctatattggctagtga

SEQ ID NO: 18889 - DNA, 25 bp, Homo sapiens
ttctgcatctttcccaggtggcctg

SEQ ID NO: 18890 - DNA, 25 bp, Homo sapiens
catacaggctgcaaggatgaaaatc

SEQ ID NO: 18891 - DNA, 25 bp, Homo sapiens
ccaggcttgacatataaggatccta

SEQ ID NO: 18892 - DNA, 25 bp, Homo sapiens
gctgtgtgtgtacccactgactcta

SEQ ID NO: 18893 - DNA, 25 bp, Homo sapiens
ttcagtactggaatggcctcatgtc

SEQ ID NO: 18894 - DNA, 25 bp, Homo sapiens
cgtgaaccgtctgtttgtgcgcata

SEQ ID NO: 18895 - DNA, 25 bp, Homo sapiens
cttaggtggccaagatctctgtgca

SEQ ID NO: 18896 - DNA, 25 bp, Homo sapiens
cctgacccagggagttgaatagttt

SEQ ID NO: 18897 - DNA, 25 bp, Homo sapiens
catggtctcatgaaagtactgctaa

SEQ ID NO: 18898 - DNA, 25 bp, Homo sapiens
gggcattccttctttctctgctata

SEQ ID NO: 18899 - DNA, 25 bp, Homo sapiens
atcctaattcttataatccaacgtc

SEQ ID NO: 18900 - DNA, 25 bp, Homo sapiens
agtgctttgcatgcttccctcaggg

SEQ ID NO: 18901 - DNA, 25 bp, Homo sapiens
cctggcttgactcatcactggttga

SEQ ID NO: 18902 - DNA, 25 bp, Homo sapiens
ggtgacctctactgtgactagctga

SEQ ID NO: 18903 - DNA, 25 bp, Homo sapiens
ccagaccctatagagtgcccagttc

SEQ ID NO: 18904 - DNA, 25 bp, Homo sapiens
tcgctcctggtagcactttcctata

SEQ ID NO: 18905 - DNA, 25 bp, Homo sapiens
tcttactgccttggatgacatctta

SEQ ID NO: 18906 - DNA, 25 bp, Homo sapiens
gccagcttggcatatcagtgactca

SEQ ID NO: 18907 - DNA, 25 bp, Homo sapiens
gaccctggggtcatctaatctgatc

SEQ ID NO: 18908 - DNA, 25 bp, Homo sapiens
gattctcagggcagtcattccattg

SEQ ID NO: 18909 - DNA, 25 bp, Homo sapiens
atctcattagattgtgcctggaagc

SEQ ID NO: 18910 - DNA, 25 bp, Homo sapiens
aagccttcatatcttcttgataaga

SEQ ID NO: 18911 - DNA, 25 bp, Homo sapiens
gcatgcatgctttctgatagatata

SEQ ID NO: 18912 - DNA, 25 bp, Homo sapiens
tgagtcaatgcatttttccctcgta

SEQ ID NO: 18913 - DNA, 25 bp, Homo sapiens
gactggtatgccctaaatcatttga

SEQ ID NO: 18914 - DNA, 25 bp, Homo sapiens
gctcattagttagattgccattaga

SEQ ID NO: 18915 - DNA, 25 bp, Homo sapiens
catcaagcaaaagtagcagcatatg

SEQ ID NO: 18916 - DNA, 25 bp, Homo sapiens
cttaaggcttctggactggcatcta

SEQ ID NO: 18917 - DNA, 25 bp, Homo sapiens
ggccgcttattcagcacagatttga

SEQ ID NO: 18918 - DNA, 25 bp, Homo sapiens
ctctgccatttcaggagggtcctcg

SEQ ID NO: 18919 - DNA, 25 bp, Homo sapiens
ctccttctgggagatagctctatcc

SEQ ID NO: 18920 - DNA, 25 bp, Homo sapiens
ttgacacgctgagcacatggctttg

SEQ ID NO: 18921 - DNA, 25 bp, Homo sapiens
tggacacctggcttgtcatactatg

SEQ ID NO: 18922 - DNA, 25 bp, Homo sapiens
tccctgccattggtgcgactgtttc

SEQ ID NO: 18923 - DNA, 25 bp, Homo sapiens
gcctgacttctggtatccgcagcca

SEQ ID NO: 18924 - DNA, 25 bp, Homo sapiens
gccagccacatctccctttaagttg

SEQ ID NO: 18925 - DNA, 25 bp, Homo sapiens
gctggcattgcaagaacgtaactaa

SEQ ID NO: 18926 - DNA, 25 bp, Homo sapiens
tcattcggttgaagtcctggttctc

SEQ ID NO: 18927 - DNA, 25 bp, Homo sapiens
ggcccagggaagaccttgaacttca

SEQ ID NO: 18928 - DNA, 25 bp, Homo sapiens
gctgacattgacattgcctggaatt

SEQ ID NO: 18929 - DNA, 25 bp, Homo sapiens
cattcccgagtatcctcaaggagga

SEQ ID NO: 18930 - DNA, 25 bp, Homo sapiens
gcaaaaccctctatgatgtcactta

SEQ ID NO: 18931 - DNA, 25 bp, Homo sapiens
agacatagtcagctgtgcatacatt

SEQ ID NO: 18932 - DNA, 25 bp, Homo sapiens
gctccgctgggaatagtctttctta

SEQ ID NO: 18933 - DNA, 25 bp, Homo sapiens
gccagacccgagtttcctaggattc

SEQ ID NO: 18934 - DNA, 25 bp, Homo sapiens
tggcctcagtgcaaacctagaatta

SEQ ID NO: 18935 - DNA, 25 bp, Homo sapiens
cttgtgccaagctatcctcagtcga

SEQ ID NO: 18936 - DNA, 25 bp, Homo sapiens
gggttccagaccttccagatgtttt

SEQ ID NO: 18937 - DNA, 25 bp, Homo sapiens
catcctgtgggagactggaaacata

SEQ ID NO: 18938 - DNA, 25 bp, Homo sapiens
cacagctcatggttgcctaggatca

SEQ ID NO: 18939 - DNA, 25 bp, Homo sapiens
gctctttggcttctacttatctatt

SEQ ID NO: 18940 - DNA, 25 bp, Homo sapiens
tgtctttgatagtgatgcctccctg

SEQ ID NO: 18941 - DNA, 25 bp, Homo sapiens
gattgctactcttaaaactgctgcc

SEQ ID NO: 18942 - DNA, 25 bp, Homo sapiens
ctgccaagtaccacgcagtgggtta

SEQ ID NO: 18943 - DNA, 25 bp, Homo sapiens
ctctaacagggctttccattaaggc

SEQ ID NO: 18944 - DNA, 25 bp, Homo sapiens
gtagcgacttcagcccgtttcattg

SEQ ID NO: 18945 - DNA, 25 bp, Homo sapiens
gatccatgtttctagcgtgcctatg

SEQ ID NO: 18946 - DNA, 25 bp, Homo sapiens
gctgaacttcttgaggatgcttgta

SEQ ID NO: 18947 - DNA, 25 bp, Homo sapiens
gccgcgccaagaatgactaagtaca

SEQ ID NO: 18948 - DNA, 25 bp, Homo sapiens
gtcctcagggcatccacagagtgtg

SEQ ID NO: 18949 - DNA, 25 bp, Homo sapiens
cccttgccaggattttcagagagaa

SEQ ID NO: 18950 - DNA, 25 bp, Homo sapiens
ggcccgatcctctctctgtttctga

SEQ ID NO: 18951 - DNA, 25 bp, Homo sapiens
tagctgctgttttccctatatgagg

SEQ ID NO: 18952 - DNA, 25 bp, Homo sapiens
ttgcggtgttcactgacagagacta

SEQ ID NO: 18953 - DNA, 25 bp, Homo sapiens
aggcccgtgccatcatataatgata

SEQ ID NO: 18954 - DNA, 25 bp, Homo sapiens
ggtgggatcctgcacatagaacaga

SEQ ID NO: 18955 - DNA, 25 bp, Homo sapiens
ccaggaagtgcagtatgtatataga

SEQ ID NO: 18956 - DNA, 25 bp, Homo sapiens
aggccctttactgtcgactccactg

SEQ ID NO: 18957 - DNA, 25 bp, Homo sapiens
attattaacagtaccctgcgggctg

SEQ ID NO: 18958 - DNA, 25 bp, Homo sapiens
ggcctgccatgcaaaacagtatttg

SEQ ID NO: 18959 - DNA, 25 bp, Homo sapiens
cacgtaatggtggtttgtatttttc

SEQ ID NO: 18960 - DNA, 25 bp, Homo sapiens
tgactatcatgaagcaggcaccctg

SEQ ID NO: 18961 - DNA, 25 bp, Homo sapiens
tccagattgggctaggaagctgcta

SEQ ID NO: 18962 - DNA, 25 bp, Homo sapiens
tgatgatggctttttaagtgtacta

SEQ ID NO: 18963 - DNA, 25 bp, Homo sapiens
caggtgtgcttcatggtgctcaatt

SEQ ID NO: 18964 - DNA, 25 bp, Homo sapiens
gccactgggcagttgtccatgcata

SEQ ID NO: 18965 - DNA, 25 bp, Homo sapiens
tgcctagagaccatgcttcctttca

SEQ ID NO: 18966 - DNA, 25 bp, Homo sapiens
tctgcaaggctatctgaaaggactc

SEQ ID NO: 18967 - DNA, 25 bp, Homo sapiens
aagggccattgtgtctccacactca

SEQ ID NO: 18968 - DNA, 25 bp, Homo sapiens
agacggtggtgtgaagatctctatc

SEQ ID NO: 18969 - DNA, 25 bp, Homo sapiens
gcccaggattccagcttcttgtcaa

SEQ ID NO: 18970 - DNA, 25 bp, Homo sapiens
agggagacagtacaccaggcttttc

SEQ ID NO: 18971 - DNA, 25 bp, Homo sapiens
gttcccagaaaagctcccgtcaagg

SEQ ID NO: 18972 - DNA, 25 bp, Homo sapiens
ccacccagatcatcagctgtgttga

SEQ ID NO: 18973 - DNA, 25 bp, Homo sapiens
tggggctcatgcttctcacctgtac

SEQ ID NO: 18974 - DNA, 25 bp, Homo sapiens
gcctgtggacacatcgctcagataa

SEQ ID NO: 18975 - DNA, 25 bp, Homo sapiens
tcccagaagggatgacggtacaacc

SEQ ID NO: 18976 - DNA, 25 bp, Homo sapiens
acaggtgtacgagaaagcattatcc

SEQ ID NO: 18977 - DNA, 25 bp, Homo sapiens
ggatactgttcccatgtcctgtgga

SEQ ID NO: 18978 - DNA, 25 bp, Homo sapiens
agcgttcactggagcagcaaatttc

SEQ ID NO: 18979 - DNA, 25 bp, Homo sapiens
tgatggagatgaaacagtgcctgcc

SEQ ID NO: 18980 - DNA, 25 bp, Homo sapiens
tcattgtgattctctggccataatc

SEQ ID NO: 18981 - DNA, 25 bp, Homo sapiens
taccacctggagctgaataatgttg

SEQ ID NO: 18982 - DNA, 25 bp, Homo sapiens
ctccatttagtgctgtctgacaaca

SEQ ID NO: 18983 - DNA, 25 bp, Homo sapiens
aagccacattgagagatttaaaatc

SEQ ID NO: 18984 - DNA, 25 bp, Homo sapiens
ttccctaggaaagtcagcttgatta

SEQ ID NO: 18985 - DNA, 25 bp, Homo sapiens
gcacacaggccaaactttaagagta

SEQ ID NO: 18986 - DNA, 25 bp, Homo sapiens
tgggtgtatttccagcatcaagttc

SEQ ID NO: 18987 - DNA, 25 bp, Homo sapiens
acccgtgcatgtggggaaatcaata

SEQ ID NO: 18988 - DNA, 25 bp, Homo sapiens
tctgggccaggatctgcattttaca

SEQ ID NO: 18989 - DNA, 25 bp, Homo sapiens
tctgtgtctccgtgcctaaaatcta

SEQ ID NO: 18990 - DNA, 25 bp, Homo sapiens
ggggcttattccaacgcatgacatt

SEQ ID NO: 18991 - DNA, 25 bp, Homo sapiens
ggctgtctcctcattttgtattatc

SEQ ID NO: 18992 - DNA, 25 bp, Homo sapiens
ctgcaacttgttggttttttactta

SEQ ID NO: 18993 - DNA, 25 bp, Homo sapiens
acttatctattgagcatctagattg

SEQ ID NO: 18994 - DNA, 25 bp, Homo sapiens
ccctgcccacatatgattaaagagc

SEQ ID NO: 18995 - DNA, 25 bp, Homo sapiens
ttccttcctttctagttcctttttt

SEQ ID NO: 18996 - DNA, 25 bp, Homo sapiens
caaggctactagcatgtatcaggta

SEQ ID NO: 18997 - DNA, 25 bp, Homo sapiens
gtactcaactttctaggagcctttg

SEQ ID NO: 18998 - DNA, 25 bp, Homo sapiens
aaaagatactgtgttacttgaaaat

SEQ ID NO: 18999 - DNA, 25 bp, Homo sapiens
gcctgccctgcagttcctgattttt

SEQ ID NO: 19000 - DNA, 25 bp, Homo sapiens
atttccaaggaccctcttcattgtg

SEQ ID NO: 19001 - DNA, 25 bp, Homo sapiens
ggggtatattcttcctcagtccttc

SEQ ID NO: 19002 - DNA, 25 bp, Homo sapiens
tcacatggtattagtgcgatttttc

SEQ ID NO: 19003 - DNA, 25 bp, Homo sapiens
cttacggagtttagagggtagacta

SEQ ID NO: 19004 - DNA, 25 bp, Homo sapiens
ctttagaagcatcgtggtaaactta

SEQ ID NO: 19005 - DNA, 25 bp, Homo sapiens
tggtgattccagctgcatcgcttta

SEQ ID NO: 19006 - DNA, 25 bp, Homo sapiens
ggagccatctgcaccctaagttttg

SEQ ID NO: 19007 - DNA, 25 bp, Homo sapiens
atcacatagtgttgaaggtaattcc

SEQ ID NO: 19008 - DNA, 25 bp, Homo sapiens
ctgcttcctcagtccaggcttcacc

SEQ ID NO: 19009 - DNA, 25 bp, Homo sapiens
agggtaactcagttgatcattattc

SEQ ID NO: 19010 - DNA, 25 bp, Homo sapiens
cagcgcataaaaattttataggaaa

SEQ ID NO: 19011 - DNA, 25 bp, Homo sapiens
agtgaacccaaggaagccaggctta

SEQ ID NO: 19012 - DNA, 25 bp, Homo sapiens
attttacataatacccaacgtattc

SEQ ID NO: 19013 - DNA, 25 bp, Homo sapiens
acctgatttggttggggatttctga

SEQ ID NO: 19014 - DNA, 25 bp, Homo sapiens
ggcgacaccttttacctgatatcta

SEQ ID NO: 19015 - DNA, 25 bp, Homo sapiens
tgtctgtctctctgtctttctcgtg

SEQ ID NO: 19016 - DNA, 25 bp, Homo sapiens
cccaccctgaggaggcactttgttg

SEQ ID NO: 19017 - DNA, 25 bp, Homo sapiens
gctctatgtctatctgaactcacta

SEQ ID NO: 19018 - DNA, 25 bp, Homo sapiens
tgccagttatgtgtagcagctaatg

SEQ ID NO: 19019 - DNA, 25 bp, Homo sapiens
ctgggcacagcctcaagtttgtttg

SEQ ID NO: 19020 - DNA, 25 bp, Homo sapiens
cccaccttcagacaatgaatgagtc

SEQ ID NO: 19021 - DNA, 25 bp, Homo sapiens
ctttcacaagctgcggtcccatggc

SEQ ID NO: 19022 - DNA, 25 bp, Homo sapiens
ccggtcccttctgagttcgcatttc

SEQ ID NO: 19023 - DNA, 25 bp, Homo sapiens
agggcctcacctcttcagcatggta

SEQ ID NO: 19024 - DNA, 25 bp, Homo sapiens
gcggcatccttaagctgttccagta

SEQ ID NO: 19025 - DNA, 25 bp, Homo sapiens
gcccagtcgttccattcggttattt

SEQ ID NO: 19026 - DNA, 25 bp, Homo sapiens
gctgtcagcttctgtgagtttccca

SEQ ID NO: 19027 - DNA, 25 bp, Homo sapiens
cccagggaccagaaacttcatgata

SEQ ID NO: 19028 - DNA, 25 bp, Homo sapiens
tgctggggatctctcactagaaggc

SEQ ID NO: 19029 - DNA, 25 bp, Homo sapiens
ggatcatgcctgaacactctctgag

SEQ ID NO: 19030 - DNA, 25 bp, Homo sapiens
ggtatcctttctccacagtttagtt

SEQ ID NO: 19031 - DNA, 25 bp, Homo sapiens
attgtctacagcagagatacccgta

SEQ ID NO: 19032 - DNA, 25 bp, Homo sapiens
ggagacgccaaatccctttagaatg

SEQ ID NO: 19033 - DNA, 25 bp, Homo sapiens
cacagcgatttcgagaggggtaata

SEQ ID NO: 19034 - DNA, 25 bp, Homo sapiens
tccagtgcaatgagcgagagccttg

SEQ ID NO: 19035 - DNA, 25 bp, Homo sapiens
gaggtcaaaggctgagataattcaa

SEQ ID NO: 19036 - DNA, 25 bp, Homo sapiens
acccatcatgggagaattagcagtg

SEQ ID NO: 19037 - DNA, 25 bp, Homo sapiens
ctcactgcttgggaaaggtcaattt

SEQ ID NO: 19038 - DNA, 25 bp, Homo sapiens
ttcaacacagaggtgccagggagcc

SEQ ID NO: 19039 - DNA, 25 bp, Homo sapiens
cccagtgaatggtggaacttggctc

SEQ ID NO: 19040 - DNA, 25 bp, Homo sapiens
tgggctgcggcaataaagacctgtc

SEQ ID NO: 19041 - DNA, 25 bp, Homo sapiens
ccagctgtgggtacttaagatatta

SEQ ID NO: 19042 - DNA, 25 bp, Homo sapiens
tttcactaggagtctcaaggccctc

SEQ ID NO: 19043 - DNA, 25 bp, Homo sapiens
aggtcccagttgtctcttagttcca

SEQ ID NO: 19044 - DNA, 25 bp, Homo sapiens
ggatcacagagacacccactgagtg

SEQ ID NO: 19045 - DNA, 25 bp, Homo sapiens
cgcccactgagttattgccaattag

SEQ ID NO: 19046 - DNA, 25 bp, Homo sapiens
cacgacccttccatgagctattata

SEQ ID NO: 19047 - DNA, 25 bp, Homo sapiens
tctgggatactgtaagtcctgcttc

SEQ ID NO: 19048 - DNA, 25 bp, Homo sapiens
tcgttgtctattccctctaaggttg

SEQ ID NO: 19049 - DNA, 25 bp, Homo sapiens
tacctccggggcacagtgaatgatc

SEQ ID NO: 19050 - DNA, 25 bp, Homo sapiens
ttgtccaaggcctgtactcccatga

SEQ ID NO: 19051 - DNA, 25 bp, Homo sapiens
ggtaccatcctaatctctgcttcta

SEQ ID NO: 19052 - DNA, 25 bp, Homo sapiens
tggctcggctatcagtggtttccta

SEQ ID NO: 19053 - DNA, 25 bp, Homo sapiens
agtgctcccagcttggcttttcaaa

SEQ ID NO: 19054 - DNA, 25 bp, Homo sapiens
actagttaatgctggtgctccctgc

SEQ ID NO: 19055 - DNA, 25 bp, Homo sapiens
tttgtgcctagacaacatgggattc

SEQ ID NO: 19056 - DNA, 25 bp, Homo sapiens
agtgcctgcttttgccattcttaga

SEQ ID NO: 19057 - DNA, 25 bp, Homo sapiens
ttctcagttgtccacacccagttga

SEQ ID NO: 19058 - DNA, 25 bp, Homo sapiens
acgtgtcgcgtttcttattatattg

SEQ ID NO: 19059 - DNA, 25 bp, Homo sapiens
tggtgccatccacgctaagagactg

SEQ ID NO: 19060 - DNA, 25 bp, Homo sapiens
tgctggcccaaagatggacttcatt

SEQ ID NO: 19061 - DNA, 25 bp, Homo sapiens
accgtctgaaggagctgaccctcta

SEQ ID NO: 19062 - DNA, 25 bp, Homo sapiens
gaggccgtctctgtccggatcttta

SEQ ID NO: 19063 - DNA, 25 bp, Homo sapiens
cttgtgtgtacttcgtgcctgagca

SEQ ID NO: 19064 - DNA, 25 bp, Homo sapiens
gggtgtaccctgtccattcatcttg

SEQ ID NO: 19065 - DNA, 25 bp, Homo sapiens
cagtggtctctaccagctgcattta

SEQ ID NO: 19066 - DNA, 25 bp, Homo sapiens
gaggctggttcttgccctcaacata

SEQ ID NO: 19067 - DNA, 25 bp, Homo sapiens
tggcacctgcagaactgagcaatta

SEQ ID NO: 19068 - DNA, 25 bp, Homo sapiens
agctgtctctgaaaagcctgcgtta

SEQ ID NO: 19069 - DNA, 25 bp, Homo sapiens
tcactgcactgaaggatgggctctg

SEQ ID NO: 19070 - DNA, 25 bp, Homo sapiens
gctgggctgcagttatcaaagtgta

SEQ ID NO: 19071 - DNA, 25 bp, Homo sapiens
cttgcctctgatgaatccgtgatga

SEQ ID NO: 19072 - DNA, 25 bp, Homo sapiens
ttacagtatctgcagggtacccagc

SEQ ID NO: 19073 - DNA, 25 bp, Homo sapiens
aggacttgtcggtagccattttata

SEQ ID NO: 19074 - DNA, 25 bp, Homo sapiens
agtgaccttcctcttgctgccaata

SEQ ID NO: 19075 - DNA, 25 bp, Homo sapiens
ttccaggctagctcaaggtccattg

SEQ ID NO: 19076 - DNA, 25 bp, Homo sapiens
cacattgacttcttcccgtgatctt

SEQ ID NO: 19077 - DNA, 25 bp, Homo sapiens
tgttcttgtacatcagcctctgggg

SEQ ID NO: 19078 - DNA, 25 bp, Homo sapiens
tgtgcaatagatccaagactctctg

SEQ ID NO: 19079 - DNA, 25 bp, Homo sapiens
gcccggccttgataaaacaaatata

SEQ ID NO: 19080 - DNA, 25 bp, Homo sapiens
gcctgtgccaggatatgtttcattc

SEQ ID NO: 19081 - DNA, 25 bp, Homo sapiens
ccatttgaggctgctcctggatgta

SEQ ID NO: 19082 - DNA, 25 bp, Homo sapiens
tcagagatttctagcacgtgtgatc

SEQ ID NO: 19083 - DNA, 25 bp, Homo sapiens
acgaccactggagatctgcatttta

SEQ ID NO: 19084 - DNA, 25 bp, Homo sapiens
gagggcatcccacataagtttcatt

SEQ ID NO: 19085 - DNA, 25 bp, Homo sapiens
ccctcctaccggatgcgttgtttta

SEQ ID NO: 19086 - DNA, 25 bp, Homo sapiens
ctgtctgtggaaaaaggggagcttc

SEQ ID NO: 19087 - DNA, 25 bp, Homo sapiens
tctttagacactgatcctgggattc

SEQ ID NO: 19088 - DNA, 25 bp, Homo sapiens
agagggcctctctactccacattta

SEQ ID NO: 19089 - DNA, 25 bp, Homo sapiens
ggcccagctactttctctgtagaga

SEQ ID NO: 19090 - DNA, 25 bp, Homo sapiens
gcttgttaaagagtccagctagcta

SEQ ID NO: 19091 - DNA, 25 bp, Homo sapiens
aggcctttttgcaatggtgccaaga

SEQ ID NO: 19092 - DNA, 25 bp, Homo sapiens
agctcgtctcccgtgcataaaaaca

SEQ ID NO: 19093 - DNA, 25 bp, Homo sapiens
tggatttctcccttagccctgcaag

SEQ ID NO: 19094 - DNA, 25 bp, Homo sapiens
ctgttgcagcgtcctcttccaagta

SEQ ID NO: 19095 - DNA, 25 bp, Homo sapiens
gtatctcaagaaccacctgtgccgg

SEQ ID NO: 19096 - DNA, 25 bp, Homo sapiens
aatatgcgattatctaatctcttct

SEQ ID NO: 19097 - DNA, 25 bp, Homo sapiens
ttctctggccaataacactgtgatg

SEQ ID NO: 19098 - DNA, 25 bp, Homo sapiens
caggactggttttcacaggagctga

SEQ ID NO: 19099 - DNA, 25 bp, Homo sapiens
gcctttgatgcttggaaaactactg

SEQ ID NO: 19100 - DNA, 25 bp, Homo sapiens
aggaagttcctgttggctacatata

SEQ ID NO: 19101 - DNA, 25 bp, Homo sapiens
cactcgtatgaagtttgtttctgtt

SEQ ID NO: 19102 - DNA, 25 bp, Homo sapiens
tgcctagaatacactcatatctata

SEQ ID NO: 19103 - DNA, 25 bp, Homo sapiens
ggaatccaggccacttttctagaga

SEQ ID NO: 19104 - DNA, 25 bp, Homo sapiens
gcttgctctgtaagtgtgcactcta

SEQ ID NO: 19105 - DNA, 25 bp, Homo sapiens
taaaaaactttaaccatcagttccc

SEQ ID NO: 19106 - DNA, 25 bp, Homo sapiens
tccagggaccagtgcatatatacaa

SEQ ID NO: 19107 - DNA, 25 bp, Homo sapiens
tgctctcttgcttcagttcacactg

SEQ ID NO: 19108 - DNA, 25 bp, Homo sapiens
gaggatctgttcacttcagctaata

SEQ ID NO: 19109 - DNA, 25 bp, Homo sapiens
caggagtcttttgggtaacacgtaa

SEQ ID NO: 19110 - DNA, 25 bp, Homo sapiens
ggacacctctaatcactgggacatc

SEQ ID NO: 19111 - DNA, 25 bp, Homo sapiens
ggcctccaggctagaccatatcttc

SEQ ID NO: 19112 - DNA, 25 bp, Homo sapiens
tggatacctgcagccacctctaagg

SEQ ID NO: 19113 - DNA, 25 bp, Homo sapiens
accacactggggacggataactttc

SEQ ID NO: 19114 - DNA, 25 bp, Homo sapiens
ctgagctcagctctcttgctaaaga

SEQ ID NO: 19115 - DNA, 25 bp, Homo sapiens
tcctgggatggcctacagagtctta

SEQ ID NO: 19116 - DNA, 25 bp, Homo sapiens
gctttctgcgtttagtcggcacaca

SEQ ID NO: 19117 - DNA, 25 bp, Homo sapiens
gctgcagttgctcccatttaatata

SEQ ID NO: 19118 - DNA, 25 bp, Homo sapiens
ctgcctggtcctttaattatgtatc

SEQ ID NO: 19119 - DNA, 25 bp, Homo sapiens
agtcagcctggcaatactgcatata

SEQ ID NO: 19120 - DNA, 25 bp, Homo sapiens
ctcagtgatcttgtgtggtacctta

SEQ ID NO: 19121 - DNA, 25 bp, Homo sapiens
cactggcagcggtacaatagttcta

SEQ ID NO: 19122 - DNA, 25 bp, Homo sapiens
gagtcctgggacttccaattcttga

SEQ ID NO: 19123 - DNA, 25 bp, Homo sapiens
tctgtaagcctcaaacgtttcatta

SEQ ID NO: 19124 - DNA, 25 bp, Homo sapiens
ctagagctttcggttgcaactttca

SEQ ID NO: 19125 - DNA, 25 bp, Homo sapiens
ttcctgatttgctgtgccctcgatg

SEQ ID NO: 19126 - DNA, 25 bp, Homo sapiens
ccttgctcttgctgcgtttgccata

SEQ ID NO: 19127 - DNA, 25 bp, Homo sapiens
gcggctgcctgatagccctttcatg

SEQ ID NO: 19128 - DNA, 25 bp, Homo sapiens
ctcatgctggtgtacagacccttta

SEQ ID NO: 19129 - DNA, 25 bp, Homo sapiens
gtcggggagccatcattactaattt

SEQ ID NO: 19130 - DNA, 25 bp, Homo sapiens
gaaggcttcacctgagctccaatta

SEQ ID NO: 19131 - DNA, 25 bp, Homo sapiens
ggtaaaatcttaagcacagtgccca

SEQ ID NO: 19132 - DNA, 25 bp, Homo sapiens
tgtcccacactggtttacttgtatg

SEQ ID NO: 19133 - DNA, 25 bp, Homo sapiens
aagtatgtacatataattaagaaaa

SEQ ID NO: 19134 - DNA, 25 bp, Homo sapiens
caccaggtcgcttctcaacagtata

SEQ ID NO: 19135 - DNA, 25 bp, Homo sapiens
ctggtgccagttgcctgctgacaaa

SEQ ID NO: 19136 - DNA, 25 bp, Homo sapiens
cccagtcaccagcaaggcatcattg

SEQ ID NO: 19137 - DNA, 25 bp, Homo sapiens
atcacctggtgcctgtttctttcta

SEQ ID NO: 19138 - DNA, 25 bp, Homo sapiens
tcatggatgctagggtaaggacttc

SEQ ID NO: 19139 - DNA, 25 bp, Homo sapiens
gctcctcctgctgactctggataaa

SEQ ID NO: 19140 - DNA, 25 bp, Homo sapiens
ctttcgctcagtagttatattgtta

SEQ ID NO: 19141 - DNA, 25 bp, Homo sapiens
ccaggatgcgacacccaagcagttc

SEQ ID NO: 19142 - DNA, 25 bp, Homo sapiens
ggcccagcctatcggtctttttaaa

SEQ ID NO: 19143 - DNA, 25 bp, Homo sapiens
tgtttgtctaaatcttgatggcaca

SEQ ID NO: 19144 - DNA, 25 bp, Homo sapiens
atttttttcaagcctactttcatgt

SEQ ID NO: 19145 - DNA, 25 bp, Homo sapiens
tggtcaaccttgctgtgtaaacaga

SEQ ID NO: 19146 - DNA, 25 bp, Homo sapiens
acctcctagtgactgagagctattg

SEQ ID NO: 19147 - DNA, 25 bp, Homo sapiens
gcatttataaatggagctctccctg

SEQ ID NO: 19148 - DNA, 25 bp, Homo sapiens
gaagccatctgcagccgacacgttg

SEQ ID NO: 19149 - DNA, 25 bp, Homo sapiens
ccctgggcatctggcaagcaattgt

SEQ ID NO: 19150 - DNA, 25 bp, Homo sapiens
tgcctcttcctaaatagtctctgtg

SEQ ID NO: 19151 - DNA, 25 bp, Homo sapiens
ttgtcctttaagctgggagccagta

SEQ ID NO: 19152 - DNA, 25 bp, Homo sapiens
ttccctgagacacaagacaacttcg

SEQ ID NO: 19153 - DNA, 25 bp, Homo sapiens
tgtgttatattttttcagatgccca

SEQ ID NO: 19154 - DNA, 25 bp, Homo sapiens
cagccttccactgtgttcagtatca

SEQ ID NO: 19155 - DNA, 25 bp, Homo sapiens
taagatgcactacccagctacgagg

SEQ ID NO: 19156 - DNA, 25 bp, Homo sapiens
ctcgatgtagtctttgtggccaatc

SEQ ID NO: 19157 - DNA, 25 bp, Homo sapiens
gcacttctttggacagctggcagcc

SEQ ID NO: 19158 - DNA, 25 bp, Homo sapiens
tgccctcaggactcagtgtgatttc

SEQ ID NO: 19159 - DNA, 25 bp, Homo sapiens
tcaacctgggcataagagatttttc

SEQ ID NO: 19160 - DNA, 25 bp, Homo sapiens
ggaccctgctagtaaacaaccctga

SEQ ID NO: 19161 - DNA, 25 bp, Homo sapiens
gctcttggggaagccaacgctattc

SEQ ID NO: 19162 - DNA, 25 bp, Homo sapiens
tctgtgcatcagagaaaaacagtgg

SEQ ID NO: 19163 - DNA, 25 bp, Homo sapiens
ggctgagcctggagaccttgaaatc

SEQ ID NO: 19164 - DNA, 25 bp, Homo sapiens
gattgctctctgtttgcctccctgc

SEQ ID NO: 19165 - DNA, 25 bp, Homo sapiens
cctcgttttgtgctaacactgggta

SEQ ID NO: 19166 - DNA, 25 bp, Homo sapiens
atagagatcacacaattgcctgggc

SEQ ID NO: 19167 - DNA, 25 bp, Homo sapiens
ccgtgggtcttatgatggtagaagc

SEQ ID NO: 19168 - DNA, 25 bp, Homo sapiens
atttggccacgaggtccctgtagtc

SEQ ID NO: 19169 - DNA, 25 bp, Homo sapiens
ccagatgactctagatgcttgcaca

SEQ ID NO: 19170 - DNA, 25 bp, Homo sapiens
ttccgggaacaaggactgctcagtc

SEQ ID NO: 19171 - DNA, 25 bp, Homo sapiens
ctgatcctggaactagagacttgta

SEQ ID NO: 19172 - DNA, 25 bp, Homo sapiens
tgagcttccaggttccaggccatta

SEQ ID NO: 19173 - DNA, 25 bp, Homo sapiens
tgcctggccagtctttgaaacaatg

SEQ ID NO: 19174 - DNA, 25 bp, Homo sapiens
tctttgacatgaccaaggtggcctc

SEQ ID NO: 19175 - DNA, 25 bp, Homo sapiens
ccacagctcctttgcagtagtagta

SEQ ID NO: 19176 - DNA, 25 bp, Homo sapiens
ctaggctagtccaatcacaggtttc

SEQ ID NO: 19177 - DNA, 25 bp, Homo sapiens
ctgagcactgcccagagactgatac

SEQ ID NO: 19178 - DNA, 25 bp, Homo sapiens
ccactggtttggctctctgcctcta

SEQ ID NO: 19179 - DNA, 25 bp, Homo sapiens
ggctgtgctgctgaggtcaatcaaa

SEQ ID NO: 19180 - DNA, 25 bp, Homo sapiens
tttgccacgaggaatgaaggacacc

SEQ ID NO: 19181 - DNA, 25 bp, Homo sapiens
tcagagtactgattgcatccaggta

SEQ ID NO: 19182 - DNA, 25 bp, Homo sapiens
ctggatcatgtagcttgggccacta

SEQ ID NO: 19183 - DNA, 25 bp, Homo sapiens
aaagttgtttctctccaggccctgg

SEQ ID NO: 19184 - DNA, 25 bp, Homo sapiens
gcctgctgtgaggtgctactttcta

SEQ ID NO: 19185 - DNA, 25 bp, Homo sapiens
ccctatgtcatttcttggggaatgc

SEQ ID NO: 19186 - DNA, 25 bp, Homo sapiens
taccgtagtgagagtggctttagtc

SEQ ID NO: 19187 - DNA, 25 bp, Homo sapiens
ctaggttgtccagcttctcagagaa

SEQ ID NO: 19188 - DNA, 25 bp, Homo sapiens
tgctcctgtagaggggtaattttta

SEQ ID NO: 19189 - DNA, 25 bp, Homo sapiens
gtggtccaaggcattcagttcatta

SEQ ID NO: 19190 - DNA, 25 bp, Homo sapiens
tcggaaattatctttgcacctgaca

SEQ ID NO: 19191 - DNA, 25 bp, Homo sapiens
gggacacattttgatgacccagatg

SEQ ID NO: 19192 - DNA, 25 bp, Homo sapiens
aggggattctgaaagtatctggatt

SEQ ID NO: 19193 - DNA, 25 bp, Homo sapiens
cccacaggaacatctttctagaaga

SEQ ID NO: 19194 - DNA, 25 bp, Homo sapiens
tgtggacttcccagattccaggttc

SEQ ID NO: 19195 - DNA, 25 bp, Homo sapiens
acagcctgggtattgcttggcaaaa

SEQ ID NO: 19196 - DNA, 25 bp, Homo sapiens
tatggacatcatctggggactctca

SEQ ID NO: 19197 - DNA, 25 bp, Homo sapiens
ccagagcagaagttcccagattatc

SEQ ID NO: 19198 - DNA, 25 bp, Homo sapiens
ttcacgtgttccaggtgcacatgta

SEQ ID NO: 19199 - DNA, 25 bp, Homo sapiens
cccgttttatgacctgtgaccaaga

SEQ ID NO: 19200 - DNA, 25 bp, Homo sapiens
accatgtcggcagatggcggtcata

SEQ ID NO: 19201 - DNA, 25 bp, Homo sapiens
cctgcactccttctgacttattaga

SEQ ID NO: 19202 - DNA, 25 bp, Homo sapiens
gaggaacctccacactgcaatactt

SEQ ID NO: 19203 - DNA, 25 bp, Homo sapiens
ttggacgggataaaacgacatcttc

SEQ ID NO: 19204 - DNA, 25 bp, Homo sapiens
ggggcttccagcgtgactcattatt

SEQ ID NO: 19205 - DNA, 25 bp, Homo sapiens
agttctggttagagtagcactgtta

SEQ ID NO: 19206 - DNA, 25 bp, Homo sapiens
gcccttccatattaacagcctgttg

SEQ ID NO: 19207 - DNA, 25 bp, Homo sapiens
aatggatcttcttcggtgtctctca

SEQ ID NO: 19208 - DNA, 25 bp, Homo sapiens
tgtcctctctgcagctgtcaaaatg

SEQ ID NO: 19209 - DNA, 25 bp, Homo sapiens
ccaggtggtgacattcagtattata

SEQ ID NO: 19210 - DNA, 25 bp, Homo sapiens
tgcccattgcaagtttctgagagtg

SEQ ID NO: 19211 - DNA, 25 bp, Homo sapiens
gaagcccttggtttcctcagttcta

SEQ ID NO: 19212 - DNA, 25 bp, Homo sapiens
ccatgggttttggagattaatttaa

SEQ ID NO: 19213 - DNA, 25 bp, Homo sapiens
gatttgtctattatcttcatatgag

SEQ ID NO: 19214 - DNA, 25 bp, Homo sapiens
cttattataaaaaataagccattta

SEQ ID NO: 19215 - DNA, 25 bp, Homo sapiens
tgcaggggaccactctgtcaacttc

SEQ ID NO: 19216 - DNA, 25 bp, Homo sapiens
taggcttttgtgcatcgtaggattc

SEQ ID NO: 19217 - DNA, 25 bp, Homo sapiens
tcctaacaggggagatggactcttc

SEQ ID NO: 19218 - DNA, 25 bp, Homo sapiens
cagtgcctaggatcataagttctca

SEQ ID NO: 19219 - DNA, 25 bp, Homo sapiens
gttccgatgccacagagtgcctatc

SEQ ID NO: 19220 - DNA, 25 bp, Homo sapiens
caggggacctctggtctccaaaaga

SEQ ID NO: 19221 - DNA, 25 bp, Homo sapiens
ttctgatttcaaaggtgaaccttta

SEQ ID NO: 19222 - DNA, 25 bp, Homo sapiens
gtcaccctaggtcttcacatgcagc

SEQ ID NO: 19223 - DNA, 25 bp, Homo sapiens
ctcacagcccagaacataataactt

SEQ ID NO: 19224 - DNA, 25 bp, Homo sapiens
gtgctcactttctccatctaggtta

SEQ ID NO: 19225 - DNA, 25 bp, Homo sapiens
tttctttagatccaccctaggggca

SEQ ID NO: 19226 - DNA, 25 bp, Homo sapiens
cctgtgcactgtgggagatagcata

SEQ ID NO: 19227 - DNA, 25 bp, Homo sapiens
cccgagggactcagccttagaattt

SEQ ID NO: 19228 - DNA, 25 bp, Homo sapiens
cctcagctgctagagagacagtttc

SEQ ID NO: 19229 - DNA, 25 bp, Homo sapiens
gcctgcaactctggcctgatagtta

SEQ ID NO: 19230 - DNA, 25 bp, Homo sapiens
gaagagtcacgaaggcatagctatc

SEQ ID NO: 19231 - DNA, 25 bp, Homo sapiens
ccaggttgctctgtctaccactgta

SEQ ID NO: 19232 - DNA, 25 bp, Homo sapiens
ttgctgtggccaaaaagttcggatc

SEQ ID NO: 19233 - DNA, 25 bp, Homo sapiens
tcccagggcaagacaggactccagc

SEQ ID NO: 19234 - DNA, 25 bp, Homo sapiens
gccactaggccaaaatgtttcactc

SEQ ID NO: 19235 - DNA, 25 bp, Homo sapiens
tgtgccacccagcatagcttcagta

SEQ ID NO: 19236 - DNA, 25 bp, Homo sapiens
acttttcactggaggtagaggcaca

SEQ ID NO: 19237 - DNA, 25 bp, Homo sapiens
ggcccgaactcaggactcccagatg

SEQ ID NO: 19238 - DNA, 25 bp, Homo sapiens
tttcttgctctcacaccaggctgga

SEQ ID NO: 19239 - DNA, 25 bp, Homo sapiens
cgtggactttcctatgactctgtac

SEQ ID NO: 19240 - DNA, 25 bp, Homo sapiens
ggtccagtgatgttcccagataatt

SEQ ID NO: 19241 - DNA, 25 bp, Homo sapiens
gggagcctcggctgccacattcaaa

SEQ ID NO: 19242 - DNA, 25 bp, Homo sapiens
gccacatgcaaacgaagggaacagt

SEQ ID NO: 19243 - DNA, 25 bp, Homo sapiens
cctcaggcaggtcatggagcttctt

SEQ ID NO: 19244 - DNA, 25 bp, Homo sapiens
catgttgtcttcttggcagccttca

SEQ ID NO: 19245 - DNA, 25 bp, Homo sapiens
tgtcacacaagctgtcctcaatgta

SEQ ID NO: 19246 - DNA, 25 bp, Homo sapiens
tgagcttggctcaggatccttcaca

SEQ ID NO: 19247 - DNA, 25 bp, Homo sapiens
gaatggtctgccttctcttagagta

SEQ ID NO: 19248 - DNA, 25 bp, Homo sapiens
tggctgtggaagaaaccaccatttc

SEQ ID NO: 19249 - DNA, 25 bp, Homo sapiens
aggtgttttacagggcagactctca

SEQ ID NO: 19250 - DNA, 25 bp, Homo sapiens
gcctggtaggttgcagttactcttc

SEQ ID NO: 19251 - DNA, 25 bp, Homo sapiens
cggggcatccctagaattttgagtc

SEQ ID NO: 19252 - DNA, 25 bp, Homo sapiens
ccacaggctgaactcttaaacaata

SEQ ID NO: 19253 - DNA, 25 bp, Homo sapiens
ttcttgtggcattgcaatgtgcatc

SEQ ID NO: 19254 - DNA, 25 bp, Homo sapiens
ggggtcctctctgtttagcactagc

SEQ ID NO: 19255 - DNA, 25 bp, Homo sapiens
ggggcctgactttgcagagtaaaca

SEQ ID NO: 19256 - DNA, 25 bp, Homo sapiens
ccctagacagtctttaccaaactga

SEQ ID NO: 19257 - DNA, 25 bp, Homo sapiens
gtgggctcagtaagattgctcatta

SEQ ID NO: 19258 - DNA, 25 bp, Homo sapiens
ctgccctgtgttttggaggactgta

SEQ ID NO: 19259 - DNA, 25 bp, Homo sapiens
cagagctttccaggtgcacccagca

SEQ ID NO: 19260 - DNA, 25 bp, Homo sapiens
aagggtttctttactggagcacagc

SEQ ID NO: 19261 - DNA, 25 bp, Homo sapiens
tgtggattccatagagccctcctgt

SEQ ID NO: 19262 - DNA, 25 bp, Homo sapiens
tcagggccattgagtgtacttacac

SEQ ID NO: 19263 - DNA, 25 bp, Homo sapiens
gtgctggacatacggaagattcttt

SEQ ID NO: 19264 - DNA, 25 bp, Homo sapiens
gtaggcagtcagtagccaacttaaa

SEQ ID NO: 19265 - DNA, 25 bp, Homo sapiens
attcacatcattttctaatagtagc

SEQ ID NO: 19266 - DNA, 25 bp, Homo sapiens
ataatacataaatagaagttgaaag

SEQ ID NO: 19267 - DNA, 25 bp, Homo sapiens
tcctttggccctggtagtatgcttc

SEQ ID NO: 19268 - DNA, 25 bp, Homo sapiens
tctggcggagttcaaaagcaattca

SEQ ID NO: 19269 - DNA, 25 bp, Homo sapiens
ggaggggactgacttgctcttctca

SEQ ID NO: 19270 - DNA, 25 bp, Homo sapiens
tacctggagcgaacaccatgatttc

SEQ ID NO: 19271 - DNA, 25 bp, Homo sapiens
actgggactgccttatgctcacttc

SEQ ID NO: 19272 - DNA, 25 bp, Homo sapiens
tggcaccctgggagtagagtacacc

SEQ ID NO: 19273 - DNA, 25 bp, Homo sapiens
ccgaggtacttcagtgatttttcta

SEQ ID NO: 19274 - DNA, 25 bp, Homo sapiens
agccattccctgattctttccactg

SEQ ID NO: 19275 - DNA, 25 bp, Homo sapiens
cctgctcacttaggctgtatgtttg

SEQ ID NO: 19276 - DNA, 25 bp, Homo sapiens
acatggaatattttgagagctaacc

SEQ ID NO: 19277 - DNA, 25 bp, Homo sapiens
tgcgtagcccttctggatgacaata

SEQ ID NO: 19278 - DNA, 25 bp, Homo sapiens
tctcctcaggaagtcatgccatatg

SEQ ID NO: 19279 - DNA, 25 bp, Homo sapiens
cttggtgaatacatagcattgtctc

SEQ ID NO: 19280 - DNA, 25 bp, Homo sapiens
gcactttgagtacccaggcttttga

SEQ ID NO: 19281 - DNA, 25 bp, Homo sapiens
ggggttactcctgtcctgaacattg

SEQ ID NO: 19282 - DNA, 25 bp, Homo sapiens
ttgccctgggaacattggctcattg

SEQ ID NO: 19283 - DNA, 25 bp, Homo sapiens
ttcctcagaggccatggttccaaga

SEQ ID NO: 19284 - DNA, 25 bp, Homo sapiens
ccatagatacatgtgcctttgtcca

SEQ ID NO: 19285 - DNA, 25 bp, Homo sapiens
tgcaggccctctgtctatgcaaaca

SEQ ID NO: 19286 - DNA, 25 bp, Homo sapiens
ttcccagttggagacgcaccttagc

SEQ ID NO: 19287 - DNA, 25 bp, Homo sapiens
cctatggtctgcaagaatactttca

SEQ ID NO: 19288 - DNA, 25 bp, Homo sapiens
ttcggttacaacagaagaggtgtcc

SEQ ID NO: 19289 - DNA, 25 bp, Homo sapiens
tgacgcccagctgtcgtatattctc

SEQ ID NO: 19290 - DNA, 25 bp, Homo sapiens
tcagggccaacatggatacattgtc

SEQ ID NO: 19291 - DNA, 25 bp, Homo sapiens
atgtccagtgctttctttcctcaga

SEQ ID NO: 19292 - DNA, 25 bp, Homo sapiens
tcctgaggctactgaagcatgttta

SEQ ID NO: 19293 - DNA, 25 bp, Homo sapiens
ccacagtgttggtcttggaattctg

SEQ ID NO: 19294 - DNA, 25 bp, Homo sapiens
ctcctcacagatggggtatattatg

SEQ ID NO: 19295 - DNA, 25 bp, Homo sapiens
aaaggtcagtcatgtctcagtagca

SEQ ID NO: 19296 - DNA, 25 bp, Homo sapiens
ggcagttctctgctcctcttgaaaa

SEQ ID NO: 19297 - DNA, 25 bp, Homo sapiens
tgtggtcatcctgctgtaattagta

SEQ ID NO: 19298 - DNA, 25 bp, Homo sapiens
gggccctgctgctaactttcaccta

SEQ ID NO: 19299 - DNA, 25 bp, Homo sapiens
tgggtgacttgcaaccactctgatg

SEQ ID NO: 19300 - DNA, 25 bp, Homo sapiens
gatttgtcggaccagcctttcatta

SEQ ID NO: 19301 - DNA, 25 bp, Homo sapiens
agcctgttttattttgccgggagca

SEQ ID NO: 19302 - DNA, 25 bp, Homo sapiens
tgttgggaaatatgcatgggctagc

SEQ ID NO: 19303 - DNA, 25 bp, Homo sapiens
gccatgcgcaagtacccgaaccggt

SEQ ID NO: 19304 - DNA, 25 bp, Homo sapiens
cgcccatacacgtgagactcttgat

SEQ ID NO: 19305 - DNA, 25 bp, Homo sapiens
gtggctctagagctcgagtgtttaa

SEQ ID NO: 19306 - DNA, 25 bp, Homo sapiens
tgccatgggtaggtgaaaagctttc

SEQ ID NO: 19307 - DNA, 25 bp, Homo sapiens
tgctggggctctccatttatgctga

SEQ ID NO: 19308 - DNA, 25 bp, Homo sapiens
ggccacagctaccttagacctttta

SEQ ID NO: 19309 - DNA, 25 bp, Homo sapiens
agccggccatttccttttagcagtg

SEQ ID NO: 19310 - DNA, 25 bp, Homo sapiens
ggtgtctctgcagatgcttcccaga

SEQ ID NO: 19311 - DNA, 25 bp, Homo sapiens
gccagtcggctctttttcgcaaagc

SEQ ID NO: 19312 - DNA, 25 bp, Homo sapiens
cgcaggcagctcgtttgggaaaact

SEQ ID NO: 19313 - DNA, 25 bp, Homo sapiens
atggcaccttcctccagcatctagg

SEQ ID NO: 19314 - DNA, 25 bp, Homo sapiens
cgctcatgatcctgggtcttctcta

SEQ ID NO: 19315 - DNA, 25 bp, Homo sapiens
gagagttgtgccctcatgtcacttc

SEQ ID NO: 19316 - DNA, 25 bp, Homo sapiens
gtatgattacccttaagagttaact

SEQ ID NO: 19317 - DNA, 25 bp, Homo sapiens
tccctgccaggatctcattagtata

SEQ ID NO: 19318 - DNA, 25 bp, Homo sapiens
cacagttttgccatgctggagcaca

SEQ ID NO: 19319 - DNA, 25 bp, Homo sapiens
tgctcgttaggctctcctgtgcaga

SEQ ID NO: 19320 - DNA, 25 bp, Homo sapiens
ggagggaagcaccacgccttttatt

SEQ ID NO: 19321 - DNA, 25 bp, Homo sapiens
cgtctgctgagggacacgttctaca

SEQ ID NO: 19322 - DNA, 25 bp, Homo sapiens
cacacatgatggggtgggacacgtc

SEQ ID NO: 19323 - DNA, 25 bp, Homo sapiens
cccaattgaggtgatttctgacagc

SEQ ID NO: 19324 - DNA, 25 bp, Homo sapiens
agctcttagtgaattaccctgtgga

SEQ ID NO: 19325 - DNA, 25 bp, Homo sapiens
ggtggcccacttttacatgcaaata

SEQ ID NO: 19326 - DNA, 25 bp, Homo sapiens
acccttgtgggtgtacagctcttca

SEQ ID NO: 19327 - DNA, 25 bp, Homo sapiens
tgcgccggcttgaactgatgatttc

SEQ ID NO: 19328 - DNA, 25 bp, Homo sapiens
agcccagcggtctctgtcaattttg

SEQ ID NO: 19329 - DNA, 25 bp, Homo sapiens
gcacaaggttcatgctgggctcaca

SEQ ID NO: 19330 - DNA, 25 bp, Homo sapiens
cactgtgagcacaccggcctgtaaa

SEQ ID NO: 19331 - DNA, 25 bp, Homo sapiens
agctcttaagtgtctcctcatcatg

SEQ ID NO: 19332 - DNA, 25 bp, Homo sapiens
ggacctggcgaatatgcatcacttc

SEQ ID NO: 19333 - DNA, 25 bp, Homo sapiens
tggtttccctacaagcagctgcgga

SEQ ID NO: 19334 - DNA, 25 bp, Homo sapiens
gggctgtaaacccttcaggcagatg

SEQ ID NO: 19335 - DNA, 25 bp, Homo sapiens
tggccgggtaaagaaccacactagc

SEQ ID NO: 19336 - DNA, 25 bp, Homo sapiens
tggccttagtgttcagatatctctg

SEQ ID NO: 19337 - DNA, 25 bp, Homo sapiens
ggcgtccttggccatacactggtta

SEQ ID NO: 19338 - DNA, 25 bp, Homo sapiens
acggcctgacctcgcaacactaaga

SEQ ID NO: 19339 - DNA, 25 bp, Homo sapiens
gtgctgcccactgtcctgagaaatg

SEQ ID NO: 19340 - DNA, 25 bp, Homo sapiens
cctcacgttagtaggcgtttccttt

SEQ ID NO: 19341 - DNA, 25 bp, Homo sapiens
cacatgtgcctgctctgtcataaga

SEQ ID NO: 19342 - DNA, 25 bp, Homo sapiens
ttattaccagtgagaagagatccta

SEQ ID NO: 19343 - DNA, 25 bp, Homo sapiens
tggcctcacctaaaacctactgctg

SEQ ID NO: 19344 - DNA, 25 bp, Homo sapiens
cacgtttctttactccagggtggaa

SEQ ID NO: 19345 - DNA, 25 bp, Homo sapiens
acctgggtgcataactcagcatttc

SEQ ID NO: 19346 - DNA, 25 bp, Homo sapiens
tttggcactcagagggtgcattctc

SEQ ID NO: 19347 - DNA, 25 bp, Homo sapiens
aggctggctgatcctcactgagtta

SEQ ID NO: 19348 - DNA, 25 bp, Homo sapiens
attcaggcattctcatgtaccgtga

SEQ ID NO: 19349 - DNA, 25 bp, Homo sapiens
attatagcgacaccatgccctgtgc

SEQ ID NO: 19350 - DNA, 25 bp, Homo sapiens
ctgttctgtgtgataatttggaccc

SEQ ID NO: 19351 - DNA, 25 bp, Homo sapiens
aaccatgtttggaagccagccatta

SEQ ID NO: 19352 - DNA, 25 bp, Homo sapiens
ggtgccacatggagaattgtcttta

SEQ ID NO: 19353 - DNA, 25 bp, Homo sapiens
ccgggtttaaaccagtagctagtga

SEQ ID NO: 19354 - DNA, 25 bp, Homo sapiens
ttctgtaagtgccagggagccttcc

SEQ ID NO: 19355 - DNA, 25 bp, Homo sapiens
tggagacccagcaggcaatgacgta

SEQ ID NO: 19356 - DNA, 25 bp, Homo sapiens
gcaggcacctgctgtgaggtactta

SEQ ID NO: 19357 - DNA, 25 bp, Homo sapiens
ccatggtgtcatgccacagctgatc

SEQ ID NO: 19358 - DNA, 25 bp, Homo sapiens
ctggcagcaggtcactttctaatta

SEQ ID NO: 19359 - DNA, 25 bp, Homo sapiens
cgggttatgtaacagccaggtttca

SEQ ID NO: 19360 - DNA, 25 bp, Homo sapiens
agaacccatcgtataggctgcaaga

SEQ ID NO: 19361 - DNA, 25 bp, Homo sapiens
cagaagggtctaaacttgtactaca

SEQ ID NO: 19362 - DNA, 25 bp, Homo sapiens
cccttagtggctacatgtcagactc

SEQ ID NO: 19363 - DNA, 25 bp, Homo sapiens
tattatttatttcctgttgaagcac

SEQ ID NO: 19364 - DNA, 25 bp, Homo sapiens
cagggagacagcctctagacttcta

SEQ ID NO: 19365 - DNA, 25 bp, Homo sapiens
cctccggctgttgttattatgggta

SEQ ID NO: 19366 - DNA, 25 bp, Homo sapiens
actctgaagctttgtcaccagaaag

SEQ ID NO: 19367 - DNA, 25 bp, Homo sapiens
cggcacgatgttctcatatagttca

SEQ ID NO: 19368 - DNA, 25 bp, Homo sapiens
atgttccctatatgctagcgtgata

SEQ ID NO: 19369 - DNA, 25 bp, Homo sapiens
ggtagccctctttgccttctttaaa

SEQ ID NO: 19370 - DNA, 25 bp, Homo sapiens
gctgagttctagagatgacacccta

SEQ ID NO: 19371 - DNA, 25 bp, Homo sapiens
ctattgtggaggaccagtctgtctc

SEQ ID NO: 19372 - DNA, 25 bp, Homo sapiens
accattttgctgctgggtcagttaa

SEQ ID NO: 19373 - DNA, 25 bp, Homo sapiens
tgatgacataagaccacagctaata

SEQ ID NO: 19374 - DNA, 25 bp, Homo sapiens
atataataaatgggtacatgggtat

SEQ ID NO: 19375 - DNA, 25 bp, Homo sapiens
cttctggataaggaggaaaatcacc

SEQ ID NO: 19376 - DNA, 25 bp, Homo sapiens
cccattgctgcttgatctttggata

SEQ ID NO: 19377 - DNA, 25 bp, Homo sapiens
caagtgatgtttcataagaaccttc

SEQ ID NO: 19378 - DNA, 25 bp, Homo sapiens
ccgcatctaggaacttaaggatttc

SEQ ID NO: 19379 - DNA, 25 bp, Homo sapiens
gtactgccgctcttggaccttctta

SEQ ID NO: 19380 - DNA, 25 bp, Homo sapiens
cctgcctataatgtgtcaaagtctc

SEQ ID NO: 19381 - DNA, 25 bp, Homo sapiens
agacaggagacagttacccacatta

SEQ ID NO: 19382 - DNA, 25 bp, Homo sapiens
ttcagtggctgggaaaaccaattta

SEQ ID NO: 19383 - DNA, 25 bp, Homo sapiens
tggtcaaaagcaacccattcatatg

SEQ ID NO: 19384 - DNA, 25 bp, Homo sapiens
tcctcaaatgtaagactaagcattc

SEQ ID NO: 19385 - DNA, 25 bp, Homo sapiens
gctccgtaaactctagggccaatta

SEQ ID NO: 19386 - DNA, 25 bp, Homo sapiens
tgcctgcctgcacttaaactgagtt

SEQ ID NO: 19387 - DNA, 25 bp, Homo sapiens
ggagcggtatcttatctgccacaca

SEQ ID NO: 19388 - DNA, 25 bp, Homo sapiens
tcctaggggagcttaatccacagca

SEQ ID NO: 19389 - DNA, 25 bp, Homo sapiens
ggtgtcactgttaggcctgcctaca

SEQ ID NO: 19390 - DNA, 25 bp, Homo sapiens
tggcaattacgcttcccatttctga

SEQ ID NO: 19391 - DNA, 25 bp, Homo sapiens
ggaagtctcccatgcagagttaatg

SEQ ID NO: 19392 - DNA, 25 bp, Homo sapiens
ggcagagttcttccacgagctttca

SEQ ID NO: 19393 - DNA, 25 bp, Homo sapiens
caggtgtcccagtgtgagttagtta

SEQ ID NO: 19394 - DNA, 25 bp, Homo sapiens
ataaatcacttaacaaagtttctct

SEQ ID NO: 19395 - DNA, 25 bp, Homo sapiens
caccgtgcctggtgaattgtgcaga

SEQ ID NO: 19396 - DNA, 25 bp, Homo sapiens
gatcccatgtgtatagaacttcgtg

SEQ ID NO: 19397 - DNA, 25 bp, Homo sapiens
cagtggtcccagtgtttgagaagtc

SEQ ID NO: 19398 - DNA, 25 bp, Homo sapiens
tcacaggcagctactttattaaggt

SEQ ID NO: 19399 - DNA, 25 bp, Homo sapiens
agagatactgtcttgggtccctaaa

SEQ ID NO: 19400 - DNA, 25 bp, Homo sapiens
gcaccgcaggtacagccacacttga

SEQ ID NO: 19401 - DNA, 25 bp, Homo sapiens
cggaagcttaacatgtcttgcctcc

SEQ ID NO: 19402 - DNA, 25 bp, Homo sapiens
tggaacacctttgccggactgaagg

SEQ ID NO: 19403 - DNA, 25 bp, Homo sapiens
tatcagtaactgagctcaagtgttc

SEQ ID NO: 19404 - DNA, 25 bp, Homo sapiens
ttcaaccagttgtgagggcccaacc

SEQ ID NO: 19405 - DNA, 25 bp, Homo sapiens
gggtgatctgcctgagacatccatc

SEQ ID NO: 19406 - DNA, 25 bp, Homo sapiens
ccttcccggaagaggtcctaacatg

SEQ ID NO: 19407 - DNA, 25 bp, Homo sapiens
ttcccatcatccagggcttaatgta

SEQ ID NO: 19408 - DNA, 25 bp, Homo sapiens
ggctttctgttttcacgtatagtaa

SEQ ID NO: 19409 - DNA, 25 bp, Homo sapiens
gtctctcctctttgctctacatata

SEQ ID NO: 19410 - DNA, 25 bp, Homo sapiens
gctcccactgaacttaaaacccaaa

SEQ ID NO: 19411 - DNA, 25 bp, Homo sapiens
gattacttgaaataaaagactatcc

SEQ ID NO: 19412 - DNA, 25 bp, Homo sapiens
acctgtcctcgtaagcaccctttta

SEQ ID NO: 19413 - DNA, 25 bp, Homo sapiens
ttccagagtccttgagagttgtacc

SEQ ID NO: 19414 - DNA, 25 bp, Homo sapiens
accgtgttggccatgtgatcgataa

SEQ ID NO: 19415 - DNA, 25 bp, Homo sapiens
tgctccagactttggccaatacagg

SEQ ID NO: 19416 - DNA, 25 bp, Homo sapiens
gtctgacctggcactgtagccattc

SEQ ID NO: 19417 - DNA, 25 bp, Homo sapiens
tatccttcttcctagggaggcggga

SEQ ID NO: 19418 - DNA, 25 bp, Homo sapiens
ctcaggtattcgtttggatagagtc

SEQ ID NO: 19419 - DNA, 25 bp, Homo sapiens
cagtaatacatctacttctgagttc

SEQ ID NO: 19420 - DNA, 25 bp, Homo sapiens
aaaaagaaatatttaaaaatctggc

SEQ ID NO: 19421 - DNA, 25 bp, Homo sapiens
agaaggatggcacagactctatatc

SEQ ID NO: 19422 - DNA, 25 bp, Homo sapiens
cccgattatgaatccctgttctata

SEQ ID NO: 19423 - DNA, 25 bp, Homo sapiens
tcatgttgcataaaaggggcttttc

SEQ ID NO: 19424 - DNA, 25 bp, Homo sapiens
atttttctcatcttactacaaagtt

SEQ ID NO: 19425 - DNA, 25 bp, Homo sapiens
tggcatgtgcaccagctgactcatc

SEQ ID NO: 19426 - DNA, 25 bp, Homo sapiens
agcacagcgcctaccctttcagttg

SEQ ID NO: 19427 - DNA, 25 bp, Homo sapiens
atgtccactgtgcatagttcccttc

SEQ ID NO: 19428 - DNA, 25 bp, Homo sapiens
cactgatgtgttttgtggaccaaga

SEQ ID NO: 19429 - DNA, 25 bp, Homo sapiens
acagcaattattcatgactttagtt

SEQ ID NO: 19430 - DNA, 25 bp, Homo sapiens
ctgaacaagtatttccactgtgaac

SEQ ID NO: 19431 - DNA, 25 bp, Homo sapiens
cacaggccagtttgcttgaatcatc

SEQ ID NO: 19432 - DNA, 25 bp, Homo sapiens
agcctgtccctcaatactggagata

SEQ ID NO: 19433 - DNA, 25 bp, Homo sapiens
agtcctttgtatgccagtcagtttc

SEQ ID NO: 19434 - DNA, 25 bp, Homo sapiens
gggcaaaaatattggatgaaacatg

SEQ ID NO: 19435 - DNA, 25 bp, Homo sapiens
acaggcagccagaattacaaggtga

SEQ ID NO: 19436 - DNA, 25 bp, Homo sapiens
ggatcccaccagacaaaaggctttc

SEQ ID NO: 19437 - DNA, 25 bp, Homo sapiens
ggtttgtcccatctctacattcgtt

SEQ ID NO: 19438 - DNA, 25 bp, Homo sapiens
actggcccaggagcatattctaaga

SEQ ID NO: 19439 - DNA, 25 bp, Homo sapiens
tggttctgccaccaaaggttatctc

SEQ ID NO: 19440 - DNA, 25 bp, Homo sapiens
tccggtggagaaagcaggcatactc

SEQ ID NO: 19441 - DNA, 25 bp, Homo sapiens
ccctgagcagtagaatggcagcatc

SEQ ID NO: 19442 - DNA, 25 bp, Homo sapiens
ttcttttttctgagataataaagaa

SEQ ID NO: 19443 - DNA, 25 bp, Homo sapiens
ctctggtccctaagtctttgttgta

SEQ ID NO: 19444 - DNA, 25 bp, Homo sapiens
atctgtgatcaaaccaactatgtta

SEQ ID NO: 19445 - DNA, 25 bp, Homo sapiens
cgtgtggctcatctaccagaagttc

SEQ ID NO: 19446 - DNA, 25 bp, Homo sapiens
cctcagaaggagaaatctgtggctc

SEQ ID NO: 19447 - DNA, 25 bp, Homo sapiens
gctccactttccaggggcacaatta

SEQ ID NO: 19448 - DNA, 25 bp, Homo sapiens
ggcaaggatatcgactggctcagtg

SEQ ID NO: 19449 - DNA, 25 bp, Homo sapiens
acacatacacataaagggctgagtt

SEQ ID NO: 19450 - DNA, 25 bp, Homo sapiens
tgcctgctcagggattggatctata

SEQ ID NO: 19451 - DNA, 25 bp, Homo sapiens
gagagtcaaggagataaaaactgtt

SEQ ID NO: 19452 - DNA, 25 bp, Homo sapiens
tacttatccaagcaggccagcaata

SEQ ID NO: 19453 - DNA, 25 bp, Homo sapiens
agggctattctcctggtctaccttg

SEQ ID NO: 19454 - DNA, 25 bp, Homo sapiens
catagttcttgagttgctgccaggc

SEQ ID NO: 19455 - DNA, 25 bp, Homo sapiens
tgtctgaggctatcactattaattg

SEQ ID NO: 19456 - DNA, 25 bp, Homo sapiens
taccctggtaagaaaggctggcttc

SEQ ID NO: 19457 - DNA, 25 bp, Homo sapiens
ttttaaagtcttgtcttcagttggt

SEQ ID NO: 19458 - DNA, 25 bp, Homo sapiens
aaatagctccttcctccctgcaaga

SEQ ID NO: 19459 - DNA, 25 bp, Homo sapiens
ttcctgcctttagaagtcagagttc

SEQ ID NO: 19460 - DNA, 25 bp, Homo sapiens
gcggagccctgcctcataattgacc

SEQ ID NO: 19461 - DNA, 25 bp, Homo sapiens
gacagaaccgtgttgcctatgctta

SEQ ID NO: 19462 - DNA, 25 bp, Homo sapiens
ggagaatctattccacccgccagct

SEQ ID NO: 19463 - DNA, 25 bp, Homo sapiens
attagaaacatcatcaaaaaattag

SEQ ID NO: 19464 - DNA, 25 bp, Homo sapiens
actatggtgtccttcttcctggaaa

SEQ ID NO: 19465 - DNA, 25 bp, Homo sapiens
gatcccatccgcattgcattatgtg

SEQ ID NO: 19466 - DNA, 25 bp, Homo sapiens
gggaggtgtttaagctacccatata

SEQ ID NO: 19467 - DNA, 25 bp, Homo sapiens
ctctgaggacgtacaaactgatttc

SEQ ID NO: 19468 - DNA, 25 bp, Homo sapiens
ccctgtttgggtcaaaaactgtaca

SEQ ID NO: 19469 - DNA, 25 bp, Homo sapiens
cttttgcttcagaggtggacagaga

SEQ ID NO: 19470 - DNA, 25 bp, Homo sapiens
agtaagctgtaaaatatttcttcaa

SEQ ID NO: 19471 - DNA, 25 bp, Homo sapiens
aaggacttccttcttgctcccagga

SEQ ID NO: 19472 - DNA, 25 bp, Homo sapiens
tgagcctgccttcttgctgacaaaa

SEQ ID NO: 19473 - DNA, 25 bp, Homo sapiens
gtcttggttctgagcagcactactc

SEQ ID NO: 19474 - DNA, 25 bp, Homo sapiens
taatcccttgggaagcctacatttc

SEQ ID NO: 19475 - DNA, 25 bp, Homo sapiens
ctctggatcttagctaactcaattc

SEQ ID NO: 19476 - DNA, 25 bp, Homo sapiens
ggctgcaccaacattagtatttttc

SEQ ID NO: 19477 - DNA, 25 bp, Homo sapiens
tgatcctaatgagaaacactggctg

SEQ ID NO: 19478 - DNA, 25 bp, Homo sapiens
ctagctctgctcatcaaaagtggga

SEQ ID NO: 19479 - DNA, 25 bp, Homo sapiens
gcaggggtactgtccaggctaacta

SEQ ID NO: 19480 - DNA, 25 bp, Homo sapiens
gatcatttcaccatgggtctgctca

SEQ ID NO: 19481 - DNA, 25 bp, Homo sapiens
aacaacatcctgaacatgctccatg

SEQ ID NO: 19482 - DNA, 25 bp, Homo sapiens
cccaagccaggctctaggactttca

SEQ ID NO: 19483 - DNA, 25 bp, Homo sapiens
atagcctggagccacatttctgaca

SEQ ID NO: 19484 - DNA, 25 bp, Homo sapiens
ataggtctcagatgaaatgtgttcc

SEQ ID NO: 19485 - DNA, 25 bp, Homo sapiens
gccagctcttagttctctccatgtt

SEQ ID NO: 19486 - DNA, 25 bp, Homo sapiens
tgggaccaggcaacctatagggatt

SEQ ID NO: 19487 - DNA, 25 bp, Homo sapiens
gagtcacagttttcagaagccagca

SEQ ID NO: 19488 - DNA, 25 bp, Homo sapiens
tttttttgactaaaaattcccacta

SEQ ID NO: 19489 - DNA, 25 bp, Homo sapiens
tgcatggtaaattggaaccaaaagt

SEQ ID NO: 19490 - DNA, 25 bp, Homo sapiens
gactagaactatttgcccttacatc

SEQ ID NO: 19491 - DNA, 25 bp, Homo sapiens
agggatccctttattagtatgcaca

SEQ ID NO: 19492 - DNA, 25 bp, Homo sapiens
tggcaagaaccagtacgactcattc

SEQ ID NO: 19493 - DNA, 25 bp, Homo sapiens
cgttgcagattgctaactacatata

SEQ ID NO: 19494 - DNA, 25 bp, Homo sapiens
agactgtatcttcctgagccacgca

SEQ ID NO: 19495 - DNA, 25 bp, Homo sapiens
aatgagcatctgagtaaaccctggc

SEQ ID NO: 19496 - DNA, 25 bp, Homo sapiens
gttgtacagccgcaggatctcctcc

SEQ ID NO: 19497 - DNA, 25 bp, Homo sapiens
gctctgcgcgttttccgatttcttg

SEQ ID NO: 19498 - DNA, 25 bp, Homo sapiens
cagtatctatgtgtgccaaagccca

SEQ ID NO: 19499 - DNA, 25 bp, Homo sapiens
gagggagacattactgcactgtatc

SEQ ID NO: 19500 - DNA, 25 bp, Homo sapiens
gtgactgctgaccactcaaaggcta

SEQ ID NO: 19501 - DNA, 25 bp, Homo sapiens
ctgagtctttcagggagcaccatca

SEQ ID NO: 19502 - DNA, 25 bp, Homo sapiens
ctaggctaagcaataatcacgtttc

SEQ ID NO: 19503 - DNA, 25 bp, Homo sapiens
cagactgaatcacactttgctgatg

SEQ ID NO: 19504 - DNA, 25 bp, Homo sapiens
agatggccctttcctgttgctcaaa

SEQ ID NO: 19505 - DNA, 25 bp, Homo sapiens
gccatgggcattttcagggttaaca

SEQ ID NO: 19506 - DNA, 25 bp, Homo sapiens
tagacctgcaggtgctttctgatcc

SEQ ID NO: 19507 - DNA, 25 bp, Homo sapiens
tttattcaataggttcatgcttgac

SEQ ID NO: 19508 - DNA, 25 bp, Homo sapiens
gggaagctcagcctcaatgttaata

SEQ ID NO: 19509 - DNA, 25 bp, Homo sapiens
gcacagaagtgctaaatgggcaatc

SEQ ID NO: 19510 - DNA, 25 bp, Homo sapiens
gtggtctcacacaatcaatctctta

SEQ ID NO: 19511 - DNA, 25 bp, Homo sapiens
cgcacttggtctccacggcaacaga

SEQ ID NO: 19512 - DNA, 25 bp, Homo sapiens
cctgccggactgatctgtaagactc

SEQ ID NO: 19513 - DNA, 25 bp, Homo sapiens
gactgactcttcctaccataaactc

SEQ ID NO: 19514 - DNA, 25 bp, Homo sapiens
gacctattgatatctggacacatga

SEQ ID NO: 19515 - DNA, 25 bp, Homo sapiens
agaaaacagggctcacccaaggtga

SEQ ID NO: 19516 - DNA, 25 bp, Homo sapiens
ggagcctcagctgcatttcaatttc

SEQ ID NO: 19517 - DNA, 25 bp, Homo sapiens
ggttatgcatttttaggcacaacta

SEQ ID NO: 19518 - DNA, 25 bp, Homo sapiens
agagttcatttacttggctgccata

SEQ ID NO: 19519 - DNA, 25 bp, Homo sapiens
tggtcccaacacaaacaaaggcttc

SEQ ID NO: 19520 - DNA, 25 bp, Homo sapiens
acaatggttattactggggaggtta

SEQ ID NO: 19521 - DNA, 25 bp, Homo sapiens
cttcaagtggctttacaaaaatgta

SEQ ID NO: 19522 - DNA, 25 bp, Homo sapiens
aggtaaagtttcaccattactgttg

SEQ ID NO: 19523 - DNA, 25 bp, Homo sapiens
ctggtcctggtgctgttcctaattc

SEQ ID NO: 19524 - DNA, 25 bp, Homo sapiens
agccgtccagctcgaagtggtttaa

SEQ ID NO: 19525 - DNA, 25 bp, Homo sapiens
ggcactgtgaaagggccacttacta

SEQ ID NO: 19526 - DNA, 25 bp, Homo sapiens
tggccacggcaaatctacagatctt

SEQ ID NO: 19527 - DNA, 25 bp, Homo sapiens
actgagttgctgtttggccttgaaa

SEQ ID NO: 19528 - DNA, 25 bp, Homo sapiens
tctccttgcctttgtcctgataatg

SEQ ID NO: 19529 - DNA, 25 bp, Homo sapiens
cgttctgcacacaagagctggattt

SEQ ID NO: 19530 - DNA, 25 bp, Homo sapiens
acctgccctggcctatgaactctgg

SEQ ID NO: 19531 - DNA, 25 bp, Homo sapiens
gtagagcccaaacatttactttata

SEQ ID NO: 19532 - DNA, 25 bp, Homo sapiens
tgccatcccggcaagtcagcagata

SEQ ID NO: 19533 - DNA, 25 bp, Homo sapiens
aggcacttgggtgttttatcactta

SEQ ID NO: 19534 - DNA, 25 bp, Homo sapiens
gctgtccactggcaaggtttaactc

SEQ ID NO: 19535 - DNA, 25 bp, Homo sapiens
tttctgagcccaaaaccgatcgcca

SEQ ID NO: 19536 - DNA, 25 bp, Homo sapiens
ttgtgaagacattctgaaactttgc

SEQ ID NO: 19537 - DNA, 25 bp, Homo sapiens
cttgtccaggtaaaggctcaggttc

SEQ ID NO: 19538 - DNA, 25 bp, Homo sapiens
cccaggtattgaggtcacagtttcc

SEQ ID NO: 19539 - DNA, 25 bp, Homo sapiens
cactggttatctggcacctttgtta

SEQ ID NO: 19540 - DNA, 25 bp, Homo sapiens
taagcgcttcattctcacggccgtc

SEQ ID NO: 19541 - DNA, 25 bp, Homo sapiens
ggcagccgtccaaacagaacctttg

SEQ ID NO: 19542 - DNA, 25 bp, Homo sapiens
ctgtaggccctgtgaacccagaagg

SEQ ID NO: 19543 - DNA, 25 bp, Homo sapiens
tgggagaacatgctgagggaacacc

SEQ ID NO: 19544 - DNA, 25 bp, Homo sapiens
gatcacttcaacctttcggaatggg

SEQ ID NO: 19545 - DNA, 25 bp, Homo sapiens
ggccagcttgcaatggatctgatta

SEQ ID NO: 19546 - DNA, 25 bp, Homo sapiens
tgggagcacccagttactacctttg

SEQ ID NO: 19547 - DNA, 25 bp, Homo sapiens
agaatttgtatactttccactagtg

SEQ ID NO: 19548 - DNA, 25 bp, Homo sapiens
ggggcagaatacagaaaaggtgttg

SEQ ID NO: 19549 - DNA, 25 bp, Homo sapiens
cacgccagccataggagacaatttc

SEQ ID NO: 19550 - DNA, 25 bp, Homo sapiens
gccttcaagaaagctggtggctcta

SEQ ID NO: 19551 - DNA, 25 bp, Homo sapiens
caaaaagccagcataacaagagtca

SEQ ID NO: 19552 - DNA, 25 bp, Homo sapiens
gaggtatcatcttttcaggaggtta

SEQ ID NO: 19553 - DNA, 25 bp, Homo sapiens
acccaaagttttgcagttagagttg

SEQ ID NO: 19554 - DNA, 25 bp, Homo sapiens
tgcctctcttaactgctgcactaga

SEQ ID NO: 19555 - DNA, 25 bp, Homo sapiens
atctgcagcttcgtaggtatgtttc

SEQ ID NO: 19556 - DNA, 25 bp, Homo sapiens
cctggcatgtcagagtgagttctta

SEQ ID NO: 19557 - DNA, 25 bp, Homo sapiens
gaaacttgtgttttgcctgtgcagc

SEQ ID NO: 19558 - DNA, 25 bp, Homo sapiens
tttgcaacctctacacgcgcacttt

SEQ ID NO: 19559 - DNA, 25 bp, Homo sapiens
ccttgggtctgtcttcttgggtata

SEQ ID NO: 19560 - DNA, 25 bp, Homo sapiens
ttcttcatttgcgacagagtcttgc

SEQ ID NO: 19561 - DNA, 25 bp, Homo sapiens
aggggcctgctctcacaagtagaaa

SEQ ID NO: 19562 - DNA, 25 bp, Homo sapiens
acagtatctgcctcacggtggaaaa

SEQ ID NO: 19563 - DNA, 25 bp, Homo sapiens
catgctggattctgtggcctatttc

SEQ ID NO: 19564 - DNA, 25 bp, Homo sapiens
gaggctcactggcaaactaaatata

SEQ ID NO: 19565 - DNA, 25 bp, Homo sapiens
ccgtcaggagaaatcaaatctttga

SEQ ID NO: 19566 - DNA, 25 bp, Homo sapiens
gctccagcctgacgagttttcttca

SEQ ID NO: 19567 - DNA, 25 bp, Homo sapiens
cccatggggcccaactatgcttcta

SEQ ID NO: 19568 - DNA, 25 bp, Homo sapiens
cgtgatttttcctagggtccagata

SEQ ID NO: 19569 - DNA, 25 bp, Homo sapiens
agcacctgggaatctatggcatttg

SEQ ID NO: 19570 - DNA, 25 bp, Homo sapiens
gaggtcagcctccatcttttcagta

SEQ ID NO: 19571 - DNA, 25 bp, Homo sapiens
cccgtgttttgctcctgtcggtaaa

SEQ ID NO: 19572 - DNA, 25 bp, Homo sapiens
gcaccgtgcacccttttcttcaata

SEQ ID NO: 19573 - DNA, 25 bp, Homo sapiens
cccaggggatccttttcctatgcta

SEQ ID NO: 19574 - DNA, 25 bp, Homo sapiens
gcaggcccatccatcacagacaatg

SEQ ID NO: 19575 - DNA, 25 bp, Homo sapiens
ggggcctcattatctgggactatta

SEQ ID NO: 19576 - DNA, 25 bp, Homo sapiens
ctcccagaaggccagctaattgttc

SEQ ID NO: 19577 - DNA, 25 bp, Homo sapiens
tttataggaggcagagtgtactttc

SEQ ID NO: 19578 - DNA, 25 bp, Homo sapiens
gtaaataaagacatgtgacgtatac

SEQ ID NO: 19579 - DNA, 25 bp, Homo sapiens
cccaggaagtttcacagtccagata

SEQ ID NO: 19580 - DNA, 25 bp, Homo sapiens
gagttgtaacagtctcatttgctgt

SEQ ID NO: 19581 - DNA, 25 bp, Homo sapiens
tgtcagttagtccagagcccacata

SEQ ID NO: 19582 - DNA, 25 bp, Homo sapiens
agctgcagcaggaaactagtctttt

SEQ ID NO: 19583 - DNA, 25 bp, Homo sapiens
ggtttttcctcccatagagattctg

SEQ ID NO: 19584 - DNA, 25 bp, Homo sapiens
aggagtcccttcaagttcactaaga

SEQ ID NO: 19585 - DNA, 25 bp, Homo sapiens
ctggggttgtacctgcataatgcta

SEQ ID NO: 19586 - DNA, 25 bp, Homo sapiens
agtctactgtcatttatcatgtatc

SEQ ID NO: 19587 - DNA, 25 bp, Homo sapiens
gcaacacctttgattgtcatgaatg

SEQ ID NO: 19588 - DNA, 25 bp, Homo sapiens
aatgcggcaccaaagtccacttgta

SEQ ID NO: 19589 - DNA, 25 bp, Homo sapiens
caaagcaaattgcagggcactattt

SEQ ID NO: 19590 - DNA, 25 bp, Homo sapiens
ggtgggtctccattctcatgcaatc

SEQ ID NO: 19591 - DNA, 25 bp, Homo sapiens
acagtgagtcagttaggtacccatc

SEQ ID NO: 19592 - DNA, 25 bp, Homo sapiens
ctggctgtctgtgataaactttgga

SEQ ID NO: 19593 - DNA, 25 bp, Homo sapiens
ctaagaattctcctgcctgtggtcc

SEQ ID NO: 19594 - DNA, 25 bp, Homo sapiens
tcagtctgtatcttcccatggaggc

SEQ ID NO: 19595 - DNA, 25 bp, Homo sapiens
cagctggctttgcaattttaggaga

SEQ ID NO: 19596 - DNA, 25 bp, Homo sapiens
tgcctggatgaagaagctggcccta

SEQ ID NO: 19597 - DNA, 25 bp, Homo sapiens
ctgtcctcccaaatgctacgaaata

SEQ ID NO: 19598 - DNA, 25 bp, Homo sapiens
gatgctgacagatatcccggagata

SEQ ID NO: 19599 - DNA, 25 bp, Homo sapiens
ctcgcgggcactttaaggacaaatc

SEQ ID NO: 19600 - DNA, 25 bp, Homo sapiens
caggagtagcctgtgtacacctctc

SEQ ID NO: 19601 - DNA, 25 bp, Homo sapiens
cagctggggcactgctttgataata

SEQ ID NO: 19602 - DNA, 25 bp, Homo sapiens
ggggcctgtcattttattatctctc

SEQ ID NO: 19603 - DNA, 25 bp, Homo sapiens
tgtctgcctcattctctctctctta

SEQ ID NO: 19604 - DNA, 25 bp, Homo sapiens
ttgtttttttttacatggctttctg

SEQ ID NO: 19605 - DNA, 25 bp, Homo sapiens
cggtgcattagaaacaggccttcca

SEQ ID NO: 19606 - DNA, 25 bp, Homo sapiens
gccagggcatcatgtttagcttgta

SEQ ID NO: 19607 - DNA, 25 bp, Homo sapiens
gatgctttctgtttgagggccacca

SEQ ID NO: 19608 - DNA, 25 bp, Homo sapiens
acactccctgcgatctggttttttc

SEQ ID NO: 19609 - DNA, 25 bp, Homo sapiens
acgggaagcctctaggaaatgtttc

SEQ ID NO: 19610 - DNA, 25 bp, Homo sapiens
gcagcaagccctcacactgtgtgtg

SEQ ID NO: 19611 - DNA, 25 bp, Homo sapiens
agagttagtgtcctgttcccttttg

SEQ ID NO: 19612 - DNA, 25 bp, Homo sapiens
tccagcagctcagtggtcagtcgta

SEQ ID NO: 19613 - DNA, 25 bp, Homo sapiens
actgttgctgctggaaagggactta

SEQ ID NO: 19614 - DNA, 25 bp, Homo sapiens
ctccagtatgtctgtgggcttcttg

SEQ ID NO: 19615 - DNA, 25 bp, Homo sapiens
actctcatcttggtaggcttagacc

SEQ ID NO: 19616 - DNA, 25 bp, Homo sapiens
acaaccgttttgtgtcaggcaacta

SEQ ID NO: 19617 - DNA, 25 bp, Homo sapiens
agggtcagttcccagagcactcaga

SEQ ID NO: 19618 - DNA, 25 bp, Homo sapiens
ggtacggctgtaatgttcccttttg

SEQ ID NO: 19619 - DNA, 25 bp, Homo sapiens
cttggagataatttgttgatggccc

SEQ ID NO: 19620 - DNA, 25 bp, Homo sapiens
tactagttttaactgcaagttttgc

SEQ ID NO: 19621 - DNA, 25 bp, Homo sapiens
tagctgtagctcaaccctgtggata

SEQ ID NO: 19622 - DNA, 25 bp, Homo sapiens
gggtgtgctcccagtgataaatagc

SEQ ID NO: 19623 - DNA, 25 bp, Homo sapiens
gtctaccagttgagaagtttccgtg

SEQ ID NO: 19624 - DNA, 25 bp, Homo sapiens
ggccacaaggcccacagagactgtt

SEQ ID NO: 19625 - DNA, 25 bp, Homo sapiens
gacacccttttagggatccctttga

SEQ ID NO: 19626 - DNA, 25 bp, Homo sapiens
ccttggctggtatagatgtggcata

SEQ ID NO: 19627 - DNA, 25 bp, Homo sapiens
ttcttgacatgggatcccaatgctc

SEQ ID NO: 19628 - DNA, 25 bp, Homo sapiens
ctcaggctgttagtacccaatggca

SEQ ID NO: 19629 - DNA, 25 bp, Homo sapiens
tggcactgctggtaagactcaatta

SEQ ID NO: 19630 - DNA, 25 bp, Homo sapiens
agctgacacgcccttcctttgtgca

SEQ ID NO: 19631 - DNA, 25 bp, Homo sapiens
ctagtggcactcctgaacaaacttc

SEQ ID NO: 19632 - DNA, 25 bp, Homo sapiens
cccttcgtgatttcctggctatttg

SEQ ID NO: 19633 - DNA, 25 bp, Homo sapiens
tctcctgtctctggttgcaaagttc

SEQ ID NO: 19634 - DNA, 25 bp, Homo sapiens
cggggcacattgagtctccttgttc

SEQ ID NO: 19635 - DNA, 25 bp, Homo sapiens
ttctgcggtcatagaggggatcaca

SEQ ID NO: 19636 - DNA, 25 bp, Homo sapiens
ccattggcaagagtaggacaactta

SEQ ID NO: 19637 - DNA, 25 bp, Homo sapiens
gagcagctcaaactaggaaatcctt

SEQ ID NO: 19638 - DNA, 25 bp, Homo sapiens
ccaggagccaactgtgtcaccatca

SEQ ID NO: 19639 - DNA, 25 bp, Homo sapiens
atgggctttgtgacagcgcaacctc

SEQ ID NO: 19640 - DNA, 25 bp, Homo sapiens
agggcaatctccttctctgtgtgtg

SEQ ID NO: 19641 - DNA, 25 bp, Homo sapiens
gtccaagggtgccagattcaattca

SEQ ID NO: 19642 - DNA, 25 bp, Homo sapiens
cctctttgagggacatgattagttc

SEQ ID NO: 19643 - DNA, 25 bp, Homo sapiens
cacacaattgggaagggagatatac

SEQ ID NO: 19644 - DNA, 25 bp, Homo sapiens
tctgtgtgaaacttggctacctgga

SEQ ID NO: 19645 - DNA, 25 bp, Homo sapiens
gctctgtcagtcttggcatcttcca

SEQ ID NO: 19646 - DNA, 25 bp, Homo sapiens
ctccggccaatattgacatcaggta

SEQ ID NO: 19647 - DNA, 25 bp, Homo sapiens
tgtagtttaactatggggaaaagcc

SEQ ID NO: 19648 - DNA, 25 bp, Homo sapiens
cgtggagcccacagcatactttaaa

SEQ ID NO: 19649 - DNA, 25 bp, Homo sapiens
ggttctctctcactcttgctgcaga

SEQ ID NO: 19650 - DNA, 25 bp, Homo sapiens
cttgccattcgtctagtctctgaga

SEQ ID NO: 19651 - DNA, 25 bp, Homo sapiens
ccactgttagtggaagtcttataga

SEQ ID NO: 19652 - DNA, 25 bp, Homo sapiens
gttcattgggtggctctgatgtgaa

SEQ ID NO: 19653 - DNA, 25 bp, Homo sapiens
cccggcatttaagagtcactagact

SEQ ID NO: 19654 - DNA, 25 bp, Homo sapiens
tctggtccagcaagagcagcatctg

SEQ ID NO: 19655 - DNA, 25 bp, Homo sapiens
ctagaaggaaaaaggcaggttatat

SEQ ID NO: 19656 - DNA, 25 bp, Homo sapiens
gagcctcttctctttctggagctga

SEQ ID NO: 19657 - DNA, 25 bp, Homo sapiens
gcaggttgccgacgcttcagaaaga

SEQ ID NO: 19658 - DNA, 25 bp, Homo sapiens
ggggctaagtatttcttcgcattta

SEQ ID NO: 19659 - DNA, 25 bp, Homo sapiens
tggctgaattgttccacataagagc

SEQ ID NO: 19660 - DNA, 25 bp, Homo sapiens
ttgtggtctatactgctggttacta

SEQ ID NO: 19661 - DNA, 25 bp, Homo sapiens
gagggctcataccactctcagtgtg

SEQ ID NO: 19662 - DNA, 25 bp, Homo sapiens
caatggtgtctattcccagggccaa

SEQ ID NO: 19663 - DNA, 25 bp, Homo sapiens
tggggtgaaaactatcctgagcctt

SEQ ID NO: 19664 - DNA, 25 bp, Homo sapiens
tgtcccgttccagccagattttttg

SEQ ID NO: 19665 - DNA, 25 bp, Homo sapiens
tttccgttctccaggcgtccatttc

SEQ ID NO: 19666 - DNA, 25 bp, Homo sapiens
cacgcctatggtggatcgctctaga

SEQ ID NO: 19667 - DNA, 25 bp, Homo sapiens
tccaggcatctggttaggtctccaa

SEQ ID NO: 19668 - DNA, 25 bp, Homo sapiens
ccgatggcccaagtcaaatatgttt

SEQ ID NO: 19669 - DNA, 25 bp, Homo sapiens
aagggcctcctgtagcaaagctgtc

SEQ ID NO: 19670 - DNA, 25 bp, Homo sapiens
taacacgcctctgtatttcttactg

SEQ ID NO: 19671 - DNA, 25 bp, Homo sapiens
gaagcatagcatcctctccctcaga

SEQ ID NO: 19672 - DNA, 25 bp, Homo sapiens
gtgtggtccctttctgcaatagtta

SEQ ID NO: 19673 - DNA, 25 bp, Homo sapiens
tgctgctagggagtttaagaaatta

SEQ ID NO: 19674 - DNA, 25 bp, Homo sapiens
gtcaaaatcatacacaaagagaaaa

SEQ ID NO: 19675 - DNA, 25 bp, Homo sapiens
catggcttcagcttggcacttcctc

SEQ ID NO: 19676 - DNA, 25 bp, Homo sapiens
gtgcagcattcctcatgcagttata

SEQ ID NO: 19677 - DNA, 25 bp, Homo sapiens
gcctccgttgttgaccctttactta

SEQ ID NO: 19678 - DNA, 25 bp, Homo sapiens
tgggagttgatggggaggggcggca

SEQ ID NO: 19679 - DNA, 25 bp, Homo sapiens
gggcagccaactccggatacaagta

SEQ ID NO: 19680 - DNA, 25 bp, Homo sapiens
ttttctggggtgagccaaattaaga

SEQ ID NO: 19681 - DNA, 25 bp, Homo sapiens
gcatgtgcagcccaatcctcagata

SEQ ID NO: 19682 - DNA, 25 bp, Homo sapiens
tccaagttttcatagcctctgatgc

SEQ ID NO: 19683 - DNA, 25 bp, Homo sapiens
ctgtcgcaacagcacttacatgtca

SEQ ID NO: 19684 - DNA, 25 bp, Homo sapiens
ttctgtggcctgcatacctccaaca

SEQ ID NO: 19685 - DNA, 25 bp, Homo sapiens
caggttccattgacactagcaaatt

SEQ ID NO: 19686 - DNA, 25 bp, Homo sapiens
ctctgtaagagttctcaggaagttc

SEQ ID NO: 19687 - DNA, 25 bp, Homo sapiens
agtgatcctgtggttcctgttacaa

SEQ ID NO: 19688 - DNA, 25 bp, Homo sapiens
ccagctgctatctgttcttggaata

SEQ ID NO: 19689 - DNA, 25 bp, Homo sapiens
actacagctttattatgtaatgagg

SEQ ID NO: 19690 - DNA, 25 bp, Homo sapiens
tgactgcctggtttccttggaaatg

SEQ ID NO: 19691 - DNA, 25 bp, Homo sapiens
ttcgtgagagctttgcaagaaagca

SEQ ID NO: 19692 - DNA, 25 bp, Homo sapiens
tttcaggcctcacggagtggtattc

SEQ ID NO: 19693 - DNA, 25 bp, Homo sapiens
ggacagctgtccctcatgatgccca

SEQ ID NO: 19694 - DNA, 25 bp, Homo sapiens
tcccacctgggctatctctagtgta

SEQ ID NO: 19695 - DNA, 25 bp, Homo sapiens
gaccttccttctgtagcttgtgata

SEQ ID NO: 19696 - DNA, 25 bp, Homo sapiens
tcccattgagctagaggaatcttcc

SEQ ID NO: 19697 - DNA, 25 bp, Homo sapiens
gagggtcctggtacccaccataata

SEQ ID NO: 19698 - DNA, 25 bp, Homo sapiens
tcaagggatagcagagcgttgtctc

SEQ ID NO: 19699 - DNA, 25 bp, Homo sapiens
cttaggcccttttagaaacgtctta

SEQ ID NO: 19700 - DNA, 25 bp, Homo sapiens
caggatctgtgtctctgtgaaccta

SEQ ID NO: 19701 - DNA, 25 bp, Homo sapiens
cagatcaatgagaaatacaactaat

SEQ ID NO: 19702 - DNA, 25 bp, Homo sapiens
gagtctcccatcttccgtctcaagg

SEQ ID NO: 19703 - DNA, 25 bp, Homo sapiens
ggccattctcattttaacgttctca

SEQ ID NO: 19704 - DNA, 25 bp, Homo sapiens
gcccagagctacaggatcaaatttc

SEQ ID NO: 19705 - DNA, 25 bp, Homo sapiens
aaaccccccatcagattttcccctt

SEQ ID NO: 19706 - DNA, 25 bp, Homo sapiens
cattagagggattggcagcagaaac

SEQ ID NO: 19707 - DNA, 25 bp, Homo sapiens
ttagtctggcaacacctgggctctc

SEQ ID NO: 19708 - DNA, 25 bp, Homo sapiens
caggtgaaaatgtgaacttaattta

SEQ ID NO: 19709 - DNA, 25 bp, Homo sapiens
ttctcagatgtgcaaaggtattttc

SEQ ID NO: 19710 - DNA, 25 bp, Homo sapiens
agcctgttacctgccagtggccaga

SEQ ID NO: 19711 - DNA, 25 bp, Homo sapiens
aatgtggcacatcaaaccagcctgc

SEQ ID NO: 19712 - DNA, 25 bp, Homo sapiens
cggtggttgctatagagtgtcgacc

SEQ ID NO: 19713 - DNA, 25 bp, Homo sapiens
tactagctgttccaaggcaatcttg

SEQ ID NO: 19714 - DNA, 25 bp, Homo sapiens
tgcactcctagtgccctctagtgga

SEQ ID NO: 19715 - DNA, 25 bp, Homo sapiens
ctgttacactgctctttctttgtta

SEQ ID NO: 19716 - DNA, 25 bp, Homo sapiens
taccgtgccaaaagcagctagttca

SEQ ID NO: 19717 - DNA, 25 bp, Homo sapiens
cagccaagatgagagtgtccctttt

SEQ ID NO: 19718 - DNA, 25 bp, Homo sapiens
aaatataaccagggtacctaaccct

SEQ ID NO: 19719 - DNA, 25 bp, Homo sapiens
ttgttgtccatcatatccgaattga

SEQ ID NO: 19720 - DNA, 25 bp, Homo sapiens
caaccaacaccaaaagcttgtaaga

SEQ ID NO: 19721 - DNA, 25 bp, Homo sapiens
ccagctgcaatgtagatgtcggaac

SEQ ID NO: 19722 - DNA, 25 bp, Homo sapiens
gcccatggccctaaactctcaagaa

SEQ ID NO: 19723 - DNA, 25 bp, Homo sapiens
aggagtactgccaacaaggcctttc

SEQ ID NO: 19724 - DNA, 25 bp, Homo sapiens
cagactgtgaatctcctggctttta

SEQ ID NO: 19725 - DNA, 25 bp, Homo sapiens
accaggacaagcttgagtaactttc

SEQ ID NO: 19726 - DNA, 25 bp, Homo sapiens
tgtactggtgctatgccctaacttc

SEQ ID NO: 19727 - DNA, 25 bp, Homo sapiens
gctgggctctagagtcagactgcta

SEQ ID NO: 19728 - DNA, 25 bp, Homo sapiens
tctctctgtgggactgtgaatcatc

SEQ ID NO: 19729 - DNA, 25 bp, Homo sapiens
agcctctcaatgcagcaaaggttta

SEQ ID NO: 19730 - DNA, 25 bp, Homo sapiens
aacaaagcatgagtactgggcaaca

SEQ ID NO: 19731 - DNA, 25 bp, Homo sapiens
gaaggtcccttctttagcgcaaagc

SEQ ID NO: 19732 - DNA, 25 bp, Homo sapiens
gctgctctactgatggccttgagga

SEQ ID NO: 19733 - DNA, 25 bp, Homo sapiens
ccctcaccacccaggagaatatttg

SEQ ID NO: 19734 - DNA, 25 bp, Homo sapiens
actactgtgctatactgctttggca

SEQ ID NO: 19735 - DNA, 25 bp, Homo sapiens
ggctacttgccagcttttcacagga

SEQ ID NO: 19736 - DNA, 25 bp, Homo sapiens
ttgtgcacagcattccctatattta

SEQ ID NO: 19737 - DNA, 25 bp, Homo sapiens
ccacctgtcaggaggaaagcacgtg

SEQ ID NO: 19738 - DNA, 25 bp, Homo sapiens
ttgccttcaggtccacggtgaaata

SEQ ID NO: 19739 - DNA, 25 bp, Homo sapiens
accgtgcttgacagtaacctctaaa

SEQ ID NO: 19740 - DNA, 25 bp, Homo sapiens
gctcaggacctgttcagcgtctata

SEQ ID NO: 19741 - DNA, 25 bp, Homo sapiens
ccttgtcacaaagttcgggtgatta

SEQ ID NO: 19742 - DNA, 25 bp, Homo sapiens
tctgcacatgggcttgctgaactta

SEQ ID NO: 19743 - DNA, 25 bp, Homo sapiens
gtgtttctttctgccttcaccagtg

SEQ ID NO: 19744 - DNA, 25 bp, Homo sapiens
ggatggaatatcactgccctagaga

SEQ ID NO: 19745 - DNA, 25 bp, Homo sapiens
tctccctactggcaagtttggtatc

SEQ ID NO: 19746 - DNA, 25 bp, Homo sapiens
tgtggaattccttaacgcctgcttc

SEQ ID NO: 19747 - DNA, 25 bp, Homo sapiens
gctaagagtcctatttcaaacatga

SEQ ID NO: 19748 - DNA, 25 bp, Homo sapiens
tctgcagacagtggcccgtacattt

SEQ ID NO: 19749 - DNA, 25 bp, Homo sapiens
tacagccgctccctagaataatacc

SEQ ID NO: 19750 - DNA, 25 bp, Homo sapiens
tctggttgacttcctgtgccaatgc

SEQ ID NO: 19751 - DNA, 25 bp, Homo sapiens
gaagcagctcaactacttatgtcta

SEQ ID NO: 19752 - DNA, 25 bp, Homo sapiens
agctggcagtcacttcatgaaattc

SEQ ID NO: 19753 - DNA, 25 bp, Homo sapiens
gctcagttgctgaaagtccttttaa

SEQ ID NO: 19754 - DNA, 25 bp, Homo sapiens
agtggctttaggctttctgtaatgc

SEQ ID NO: 19755 - DNA, 25 bp, Homo sapiens
ctcctaggctttaccaatgcaattc

SEQ ID NO: 19756 - DNA, 25 bp, Homo sapiens
atttggtatcactggcacttttgga

SEQ ID NO: 19757 - DNA, 25 bp, Homo sapiens
tctaaacgtcgatcagggccatatt

SEQ ID NO: 19758 - DNA, 25 bp, Homo sapiens
aagatcctagttacatacaagtggg

SEQ ID NO: 19759 - DNA, 25 bp, Homo sapiens
ccgggaagagcaccaatgccatcta

SEQ ID NO: 19760 - DNA, 25 bp, Homo sapiens
ctagctgctcatagtcaacaatggc

SEQ ID NO: 19761 - DNA, 25 bp, Homo sapiens
gcaccaaaatgctgggttatttccc

SEQ ID NO: 19762 - DNA, 25 bp, Homo sapiens
ccagcagggcactacaatacttttc

SEQ ID NO: 19763 - DNA, 25 bp, Homo sapiens
gggtttctaaaagccacttccactg

SEQ ID NO: 19764 - DNA, 25 bp, Homo sapiens
gatgttcttttcctcctgactctga

SEQ ID NO: 19765 - DNA, 25 bp, Homo sapiens
ttccattattgccattctagggttc

SEQ ID NO: 19766 - DNA, 25 bp, Homo sapiens
cgctggtcgtctgtcatggccaaaa

SEQ ID NO: 19767 - DNA, 25 bp, Homo sapiens
ggactggcgcccaatagtgaaatta

SEQ ID NO: 19768 - DNA, 25 bp, Homo sapiens
ggttctctgccagcatcaggtgcta

SEQ ID NO: 19769 - DNA, 25 bp, Homo sapiens
aggagagtattttcttcaagatcgc

SEQ ID NO: 19770 - DNA, 25 bp, Homo sapiens
tctgtaattactgttttaaaagagg

SEQ ID NO: 19771 - DNA, 25 bp, Homo sapiens
cactgcactggcctgaatggaaata

SEQ ID NO: 19772 - DNA, 25 bp, Homo sapiens
gtctgccactggacggcatgaaatg

SEQ ID NO: 19773 - DNA, 25 bp, Homo sapiens
gaacggcgcttgcaacttttctata

SEQ ID NO: 19774 - DNA, 25 bp, Homo sapiens
acacacacacttctggggcaagata

SEQ ID NO: 19775 - DNA, 25 bp, Homo sapiens
ggtgcttctcagaaacaactaggcc

SEQ ID NO: 19776 - DNA, 25 bp, Homo sapiens
gggtgaatgttcagctcctagtata

SEQ ID NO: 19777 - DNA, 25 bp, Homo sapiens
tatgtgccatgtaccaaatctgtga

SEQ ID NO: 19778 - DNA, 25 bp, Homo sapiens
cccatgcttcatgtcatttgccaga

SEQ ID NO: 19779 - DNA, 25 bp, Homo sapiens
tttgcagggaagcacactctctttg

SEQ ID NO: 19780 - DNA, 25 bp, Homo sapiens
tgcaaaacctggatgggcagcaatc

SEQ ID NO: 19781 - DNA, 25 bp, Homo sapiens
ctagggaacacagctcaggaatgtc

SEQ ID NO: 19782 - DNA, 25 bp, Homo sapiens
gccgcagtcccaaagagaaaatatt

SEQ ID NO: 19783 - DNA, 25 bp, Homo sapiens
acaagcctgcagtcaatgtaactca

SEQ ID NO: 19784 - DNA, 25 bp, Homo sapiens
agtctatgtccttgttttgcaccta

SEQ ID NO: 19785 - DNA, 25 bp, Homo sapiens
cacaccttttcttggaggttagata

SEQ ID NO: 19786 - DNA, 25 bp, Homo sapiens
agggctttcttctctttagccagta

SEQ ID NO: 19787 - DNA, 25 bp, Homo sapiens
ttggccaactggtctcagagaaatc

SEQ ID NO: 19788 - DNA, 25 bp, Homo sapiens
cactggtccgagcaacctcttggtc

SEQ ID NO: 19789 - DNA, 25 bp, Homo sapiens
ttccacccagagagaagctttggcc

SEQ ID NO: 19790 - DNA, 25 bp, Homo sapiens
tctactggcaataactaggacttta

SEQ ID NO: 19791 - DNA, 25 bp, Homo sapiens
gctgctgcacagaaaggcgctcttt

SEQ ID NO: 19792 - DNA, 25 bp, Homo sapiens
ttaaaaacttggttggccgggcaca

SEQ ID NO: 19793 - DNA, 25 bp, Homo sapiens
tcaactagtctgagggaaatccatc

SEQ ID NO: 19794 - DNA, 25 bp, Homo sapiens
tcacagcaagccagatgtatttttc

SEQ ID NO: 19795 - DNA, 25 bp, Homo sapiens
ctccaactgaagtgggtgagctcta

SEQ ID NO: 19796 - DNA, 25 bp, Homo sapiens
ctctgctaactgttggcctcattta

SEQ ID NO: 19797 - DNA, 25 bp, Homo sapiens
cacaaccttaggtgactgaactcta

SEQ ID NO: 19798 - DNA, 25 bp, Homo sapiens
tggcatttgactactaccaagcggc

SEQ ID NO: 19799 - DNA, 25 bp, Homo sapiens
ccattctgcacgtctagcctatcta

SEQ ID NO: 19800 - DNA, 25 bp, Homo sapiens
tccaaggatctggtatctgttcatc

SEQ ID NO: 19801 - DNA, 25 bp, Homo sapiens
ttatccaacgggctacagacatttc

SEQ ID NO: 19802 - DNA, 25 bp, Homo sapiens
caagtgtttttgtacagactgtata

SEQ ID NO: 19803 - DNA, 25 bp, Homo sapiens
gttccacaggttcagcttcactaga

SEQ ID NO: 19804 - DNA, 25 bp, Homo sapiens
cctgtatctaggaggccatttaaca

SEQ ID NO: 19805 - DNA, 25 bp, Homo sapiens
gccactagtcacactgccataagta

SEQ ID NO: 19806 - DNA, 25 bp, Homo sapiens
ggagagcaactactatcacgatttc

SEQ ID NO: 19807 - DNA, 25 bp, Homo sapiens
gctcttcttagcaacactatctgta

SEQ ID NO: 19808 - DNA, 25 bp, Homo sapiens
accaagtgctgtgaataaagagatc

SEQ ID NO: 19809 - DNA, 25 bp, Homo sapiens
gaggacaagccttctctgtatcttg

SEQ ID NO: 19810 - DNA, 25 bp, Homo sapiens
cggcactgttaagcttatgaggtaa

SEQ ID NO: 19811 - DNA, 25 bp, Homo sapiens
ccgcctgaagagttaagctatagta

SEQ ID NO: 19812 - DNA, 25 bp, Homo sapiens
gtggggcaaggtacagatcactgtt

SEQ ID NO: 19813 - DNA, 25 bp, Homo sapiens
gggctttggaggttagcaaaatatt

SEQ ID NO: 19814 - DNA, 25 bp, Homo sapiens
taccaggtatgccacagctctatta

SEQ ID NO: 19815 - DNA, 25 bp, Homo sapiens
ggacactctggcatttgattcattg

SEQ ID NO: 19816 - DNA, 25 bp, Homo sapiens
tcaggccctagcacttagtaaactc

SEQ ID NO: 19817 - DNA, 25 bp, Homo sapiens
ttctttccctagtcggcctgcattc

SEQ ID NO: 19818 - DNA, 25 bp, Homo sapiens
ccaccgtcctatagtccttgtttca

SEQ ID NO: 19819 - DNA, 25 bp, Homo sapiens
tcacctgcaccatgggttattatca

SEQ ID NO: 19820 - DNA, 25 bp, Homo sapiens
ttcccagtcagtctaattatgcagc

SEQ ID NO: 19821 - DNA, 25 bp, Homo sapiens
taggcttgagccactggacccactg

SEQ ID NO: 19822 - DNA, 25 bp, Homo sapiens
gtttggtacttccacaccttggaga

SEQ ID NO: 19823 - DNA, 25 bp, Homo sapiens
agccttcaaaagttatatcctagtc

SEQ ID NO: 19824 - DNA, 25 bp, Homo sapiens
ctcagcagtcaaggcaaagttctac

SEQ ID NO: 19825 - DNA, 25 bp, Homo sapiens
ggaatgactgccctcttgctttcta

SEQ ID NO: 19826 - DNA, 25 bp, Homo sapiens
cacaaagcaagtatcaggtattagc

SEQ ID NO: 19827 - DNA, 25 bp, Homo sapiens
cttccttagggcaaaaagctgcttc

SEQ ID NO: 19828 - DNA, 25 bp, Homo sapiens
tccttcggacggcaaaaccttggtc

SEQ ID NO: 19829 - DNA, 25 bp, Homo sapiens
tgtgtactgtcctgaaccggctttc

SEQ ID NO: 19830 - DNA, 25 bp, Homo sapiens
ccttaccctttataatgtgagaatc

SEQ ID NO: 19831 - DNA, 25 bp, Homo sapiens
cacagtgtttccagtgagtaacttc

SEQ ID NO: 19832 - DNA, 25 bp, Homo sapiens
atatttactgtgaccatagtagcag

SEQ ID NO: 19833 - DNA, 25 bp, Homo sapiens
ggtaagtatcttcccaattgagtca

SEQ ID NO: 19834 - DNA, 25 bp, Homo sapiens
gggaaaaaaaagaaacagaagatgg

SEQ ID NO: 19835 - DNA, 25 bp, Homo sapiens
gggtgagtaaaattcacagtctacc

SEQ ID NO: 19836 - DNA, 25 bp, Homo sapiens
taatttgaagcttctttggtgtggc

SEQ ID NO: 19837 - DNA, 25 bp, Homo sapiens
agattctcttaaagctatcttgttg

SEQ ID NO: 19838 - DNA, 25 bp, Homo sapiens
gtttcacttttagcaactgccacca

SEQ ID NO: 19839 - DNA, 25 bp, Homo sapiens
gatgcagaatttagacccacagtta

SEQ ID NO: 19840 - DNA, 25 bp, Homo sapiens
tcaccaggcccagaaagaatacttg

SEQ ID NO: 19841 - DNA, 25 bp, Homo sapiens
gaaactcttgttcctccatttttta

SEQ ID NO: 19842 - DNA, 25 bp, Homo sapiens
caagtcctgtggctcctactgtcta

SEQ ID NO: 19843 - DNA, 25 bp, Homo sapiens
gtatgccgggtaagtcctcttcctg

SEQ ID NO: 19844 - DNA, 25 bp, Homo sapiens
ggcacacatggctttattctttata

SEQ ID NO: 19845 - DNA, 25 bp, Homo sapiens
ggcaggaatcttaacctattgtcaa

SEQ ID NO: 19846 - DNA, 25 bp, Homo sapiens
ttacacagagagaggtgcacagctc

SEQ ID NO: 19847 - DNA, 25 bp, Homo sapiens
tgctatgacaataaaagtatgcctg

SEQ ID NO: 19848 - DNA, 25 bp, Homo sapiens
atgaggttaccccggaatgcagttg

SEQ ID NO: 19849 - DNA, 25 bp, Homo sapiens
gaagttctaaagtatgggcccgccc

SEQ ID NO: 19850 - DNA, 25 bp, Homo sapiens
cccataatcttgcaggacacttcta

SEQ ID NO: 19851 - DNA, 25 bp, Homo sapiens
cctgtggccacataggttagctata

SEQ ID NO: 19852 - DNA, 25 bp, Homo sapiens
aacgaaatttgcatgctggctccca

SEQ ID NO: 19853 - DNA, 25 bp, Homo sapiens
cattttataattttcagggcaattg

SEQ ID NO: 19854 - DNA, 25 bp, Homo sapiens
ggtctctgtgccaatttccctattc

SEQ ID NO: 19855 - DNA, 25 bp, Homo sapiens
cctttccaactaggatgaggccata

SEQ ID NO: 19856 - DNA, 25 bp, Homo sapiens
atggcatagattcttcaaattcaga

SEQ ID NO: 19857 - DNA, 25 bp, Homo sapiens
gatgtggtattctttactacacaga

SEQ ID NO: 19858 - DNA, 25 bp, Homo sapiens
ttggaaataatagtccattttactt

SEQ ID NO: 19859 - DNA, 25 bp, Homo sapiens
gttagcttcctcctctcacatttgg

SEQ ID NO: 19860 - DNA, 25 bp, Homo sapiens
aaaaccctgtggactgtggagaccc

SEQ ID NO: 19861 - DNA, 25 bp, Homo sapiens
cttccggagagttgttcagagcttt

SEQ ID NO: 19862 - DNA, 25 bp, Homo sapiens
gccttttctgcatggggctgctaca

SEQ ID NO: 19863 - DNA, 25 bp, Homo sapiens
aggcacctactgaaagcttttgaga

SEQ ID NO: 19864 - DNA, 25 bp, Homo sapiens
gttttcccttagaaccctcagtgtc

SEQ ID NO: 19865 - DNA, 25 bp, Homo sapiens
tgaccttgttaagcaagctgaactc

SEQ ID NO: 19866 - DNA, 25 bp, Homo sapiens
agccggtgtctctcaactcttacta

SEQ ID NO: 19867 - DNA, 25 bp, Homo sapiens
cggcagccgcagcaggaaatatttt

SEQ ID NO: 19868 - DNA, 25 bp, Homo sapiens
agcttgcttggaaaaccgtggtata

SEQ ID NO: 19869 - DNA, 25 bp, Homo sapiens
ggtcctgagagaaggccacaaacta

SEQ ID NO: 19870 - DNA, 25 bp, Homo sapiens
gctgggctgagtttctgatttcttc

SEQ ID NO: 19871 - DNA, 25 bp, Homo sapiens
aaatggaaacaatgaaagttaccta

SEQ ID NO: 19872 - DNA, 25 bp, Homo sapiens
acggttttctaccatggctctcaga

SEQ ID NO: 19873 - DNA, 25 bp, Homo sapiens
attctgatgcaaagaccatggaaca

SEQ ID NO: 19874 - DNA, 25 bp, Homo sapiens
aaaactcttttcatggctggctggc

SEQ ID NO: 19875 - DNA, 25 bp, Homo sapiens
cccagacaggtcagattgatggctc

SEQ ID NO: 19876 - DNA, 25 bp, Homo sapiens
ccagccaggtggataaagttattca

SEQ ID NO: 19877 - DNA, 25 bp, Homo sapiens
tggcagggagccactgaaacttttc

SEQ ID NO: 19878 - DNA, 25 bp, Homo sapiens
tagccaggcctgcagtttcagagca

SEQ ID NO: 19879 - DNA, 25 bp, Homo sapiens
ctctgcccgcaaactctaggattta

SEQ ID NO: 19880 - DNA, 25 bp, Homo sapiens
agatggtctccttcagtgccttttc

SEQ ID NO: 19881 - DNA, 25 bp, Homo sapiens
aaaacaaaaaagaaagcagcatgat

SEQ ID NO: 19882 - DNA, 25 bp, Homo sapiens
cccagacctttcatcatttttaact

SEQ ID NO: 19883 - DNA, 25 bp, Homo sapiens
ggccgatcctggcttcttcactgta

SEQ ID NO: 19884 - DNA, 25 bp, Homo sapiens
ctcagtggggaagaatgccatcatc

SEQ ID NO: 19885 - DNA, 25 bp, Homo sapiens
tcccgctttagatagttgaagtgta

SEQ ID NO: 19886 - DNA, 25 bp, Homo sapiens
ggcaatggaactgctcacttgaatg

SEQ ID NO: 19887 - DNA, 25 bp, Homo sapiens
ttgcgtctttctacccaacaggtta

SEQ ID NO: 19888 - DNA, 25 bp, Homo sapiens
ctgagtgctaccacaggatgaaatg

SEQ ID NO: 19889 - DNA, 25 bp, Homo sapiens
tgcctggcacagactttatttttgt

SEQ ID NO: 19890 - DNA, 25 bp, Homo sapiens
ccatggtgcatgtttgctatatttg

SEQ ID NO: 19891 - DNA, 25 bp, Homo sapiens
gcactgatctgtttctcctggcata

SEQ ID NO: 19892 - DNA, 25 bp, Homo sapiens
ccctggctgtggaacctcatttgac

SEQ ID NO: 19893 - DNA, 25 bp, Homo sapiens
ttgctgtagcccaagaaacctgagc

SEQ ID NO: 19894 - DNA, 25 bp, Homo sapiens
actgtgtgcctttactgatatatgg

SEQ ID NO: 19895 - DNA, 25 bp, Homo sapiens
cacacagtttggctagttcattgaa

SEQ ID NO: 19896 - DNA, 25 bp, Homo sapiens
gggcctgaatgtctccctcaatagg

SEQ ID NO: 19897 - DNA, 25 bp, Homo sapiens
gtgcctctagatgtgcttacccttc

SEQ ID NO: 19898 - DNA, 25 bp, Homo sapiens
agtgcttacctccatccttacaagg

SEQ ID NO: 19899 - DNA, 25 bp, Homo sapiens
tcgaggtggaatcctactggaacta

SEQ ID NO: 19900 - DNA, 25 bp, Homo sapiens
ctgtgtgtttatataccttgtacca

SEQ ID NO: 19901 - DNA, 25 bp, Homo sapiens
ttctgccatggcttgtgatttctca

SEQ ID NO: 19902 - DNA, 25 bp, Homo sapiens
cataggccctgatggagattctttc

SEQ ID NO: 19903 - DNA, 25 bp, Homo sapiens
tccctgagggagattctaagtttta

SEQ ID NO: 19904 - DNA, 25 bp, Homo sapiens
cccacttgtgacgaagcagtatcta

SEQ ID NO: 19905 - DNA, 25 bp, Homo sapiens
tgtaatcacagctgccttgcctgga

SEQ ID NO: 19906 - DNA, 25 bp, Homo sapiens
tgctgcatgctgtaagaccaaagtg

SEQ ID NO: 19907 - DNA, 25 bp, Homo sapiens
ctctgcctgatttgaagtacatatc

SEQ ID NO: 19908 - DNA, 25 bp, Homo sapiens
cccagctgttggctacctagaagga

SEQ ID NO: 19909 - DNA, 25 bp, Homo sapiens
gggaccacagtacccacctaggttg

SEQ ID NO: 19910 - DNA, 25 bp, Homo sapiens
acagcccaccctgcttgactgaagg

SEQ ID NO: 19911 - DNA, 25 bp, Homo sapiens
ccataatggtcttactagtccttta

SEQ ID NO: 19912 - DNA, 25 bp, Homo sapiens
tcatcaatgtacagtcaaaatgttc

SEQ ID NO: 19913 - DNA, 25 bp, Homo sapiens
gtgtagtagcccaaaagctgcctca

SEQ ID NO: 19914 - DNA, 25 bp, Homo sapiens
tcagaattcctgtgtgttaccctta

SEQ ID NO: 19915 - DNA, 25 bp, Homo sapiens
tcctgtagtactgggtcaatgcaga

SEQ ID NO: 19916 - DNA, 25 bp, Homo sapiens
gagcagagctccctgtgtttcagca

SEQ ID NO: 19917 - DNA, 25 bp, Homo sapiens
tggccacagtgagagtcaacatttc

SEQ ID NO: 19918 - DNA, 25 bp, Homo sapiens
agagttgctaccttctggcctcaaa

SEQ ID NO: 19919 - DNA, 25 bp, Homo sapiens
tgcctttaaggcatttgcaatccaa

SEQ ID NO: 19920 - DNA, 25 bp, Homo sapiens
atgtagctcccaccaccagcatgtg

SEQ ID NO: 19921 - DNA, 25 bp, Homo sapiens
cctctttggggtcatttcagggaca

SEQ ID NO: 19922 - DNA, 25 bp, Homo sapiens
ttacacatgctttctcctggggata

SEQ ID NO: 19923 - DNA, 25 bp, Homo sapiens
ctccacaaggcttggatcaagtttc

SEQ ID NO: 19924 - DNA, 25 bp, Homo sapiens
gcagcaaattccatggcccttcaga

SEQ ID NO: 19925 - DNA, 25 bp, Homo sapiens
gtgaacctcagtcctccattgtacc

SEQ ID NO: 19926 - DNA, 25 bp, Homo sapiens
ggcagccaatctggagagttgcata

SEQ ID NO: 19927 - DNA, 25 bp, Homo sapiens
cgtgtcatgttcctgtgtctaaatc

SEQ ID NO: 19928 - DNA, 25 bp, Homo sapiens
aacggggccttcaagatgtaacaca

SEQ ID NO: 19929 - DNA, 25 bp, Homo sapiens
ggctgcctaaagattgtccctgaga

SEQ ID NO: 19930 - DNA, 25 bp, Homo sapiens
tctgtgagaaaatagacctgctggc

SEQ ID NO: 19931 - DNA, 25 bp, Homo sapiens
tgcatcttggactgcaaaagacatc

SEQ ID NO: 19932 - DNA, 25 bp, Homo sapiens
tgctgagctctgtggtacctgaata

SEQ ID NO: 19933 - DNA, 25 bp, Homo sapiens
agctgctcctattgttttcctcgtc

SEQ ID NO: 19934 - DNA, 25 bp, Homo sapiens
aggtaccctaggcaccatttgtcta

SEQ ID NO: 19935 - DNA, 25 bp, Homo sapiens
tcttgtcagtgcagagatcattttc

SEQ ID NO: 19936 - DNA, 25 bp, Homo sapiens
aggccgtcttgcttccatgtgaata

SEQ ID NO: 19937 - DNA, 25 bp, Homo sapiens
ccttgggaaggctatctgtgctgta

SEQ ID NO: 19938 - DNA, 25 bp, Homo sapiens
tgtctttgcctctctacccagtaca

SEQ ID NO: 19939 - DNA, 25 bp, Homo sapiens
gtcatgctcgttggacctgcactta

SEQ ID NO: 19940 - DNA, 25 bp, Homo sapiens
gggctgtggctcatcttctcaaaaa

SEQ ID NO: 19941 - DNA, 25 bp, Homo sapiens
ggtgtatgccttctctccctaatta

SEQ ID NO: 19942 - DNA, 25 bp, Homo sapiens
tcctcctggaggctgctaagcagta

SEQ ID NO: 19943 - DNA, 25 bp, Homo sapiens
agattgatttttctgcccacccgta

SEQ ID NO: 19944 - DNA, 25 bp, Homo sapiens
gccagaacaggccattcagagtcta

SEQ ID NO: 19945 - DNA, 25 bp, Homo sapiens
gtgatacctttccttcttgacaatg

SEQ ID NO: 19946 - DNA, 25 bp, Homo sapiens
ctacaagtcacattattaggaatat

SEQ ID NO: 19947 - DNA, 25 bp, Homo sapiens
gtctctttctctttgtggcactcta

SEQ ID NO: 19948 - DNA, 25 bp, Homo sapiens
cccagtcttgagttaggcatgttta

SEQ ID NO: 19949 - DNA, 25 bp, Homo sapiens
tgggcaatctctcctaacagtgaca

SEQ ID NO: 19950 - DNA, 25 bp, Homo sapiens
cactcccagggattcagatagtatc

SEQ ID NO: 19951 - DNA, 25 bp, Homo sapiens
gctcctgttcctaaacgggcacatc

SEQ ID NO: 19952 - DNA, 25 bp, Homo sapiens
aggcatctttctcaacactatactg

SEQ ID NO: 19953 - DNA, 25 bp, Homo sapiens
ctgtggcttttttgctagtgaattc

SEQ ID NO: 19954 - DNA, 25 bp, Homo sapiens
tccacgtgagagagagcagtcagtc

SEQ ID NO: 19955 - DNA, 25 bp, Homo sapiens
cccaaagggtgcgtatgatcaagcc

SEQ ID NO: 19956 - DNA, 25 bp, Homo sapiens
gggtgtctgcctcatgctacaattc

SEQ ID NO: 19957 - DNA, 25 bp, Homo sapiens
tgcttttgggattctgacactcttg

SEQ ID NO: 19958 - DNA, 25 bp, Homo sapiens
tttctcctgggaagacagctccttc

SEQ ID NO: 19959 - DNA, 25 bp, Homo sapiens
ggcatcccagtatgtggctacacta

SEQ ID NO: 19960 - DNA, 25 bp, Homo sapiens
atagcaccttaggacgaagacagtc

SEQ ID NO: 19961 - DNA, 25 bp, Homo sapiens
tgtcagggcacatcagggccattta

SEQ ID NO: 19962 - DNA, 25 bp, Homo sapiens
gttttgggactttgacacatctgta

SEQ ID NO: 19963 - DNA, 25 bp, Homo sapiens
cccatgtataggagtgaagctgtta

SEQ ID NO: 19964 - DNA, 25 bp, Homo sapiens
ccacagcccttgttccattatagga

SEQ ID NO: 19965 - DNA, 25 bp, Homo sapiens
acactgtcagcccactggatttgtg

SEQ ID NO: 19966 - DNA, 25 bp, Homo sapiens
tttctgctcagctgtaagaccaagc

SEQ ID NO: 19967 - DNA, 25 bp, Homo sapiens
gggaaacctttctcattgtgctgtc

SEQ ID NO: 19968 - DNA, 25 bp, Homo sapiens
tctagtatttgtagcagccgccagc

SEQ ID NO: 19969 - DNA, 25 bp, Homo sapiens
gtcagcgcgcccacttcatttctta

SEQ ID NO: 19970 - DNA, 25 bp, Homo sapiens
gcactgctctgttgacatgactttg

SEQ ID NO: 19971 - DNA, 25 bp, Homo sapiens
gctagcatttctttcacttactgga

SEQ ID NO: 19972 - DNA, 25 bp, Homo sapiens
tccgccgtttacaggacactgaatc

SEQ ID NO: 19973 - DNA, 25 bp, Homo sapiens
cctgctgcagcaccagtgacttctg

SEQ ID NO: 19974 - DNA, 25 bp, Homo sapiens
ctgcagatggaacccgggaacatta

SEQ ID NO: 19975 - DNA, 25 bp, Homo sapiens
gcttggtccaccatggttatttgcc

SEQ ID NO: 19976 - DNA, 25 bp, Homo sapiens
ctggtgtccggcttctacactgtga

SEQ ID NO: 19977 - DNA, 25 bp, Homo sapiens
ctgcctggtggaaaactgatcaatc

SEQ ID NO: 19978 - DNA, 25 bp, Homo sapiens
aggcacgtttcaatagctgagtttc

SEQ ID NO: 19979 - DNA, 25 bp, Homo sapiens
cttcggtacatcagtctcagggtta

SEQ ID NO: 19980 - DNA, 25 bp, Homo sapiens
tctgtgactggaaggaccacatttc

SEQ ID NO: 19981 - DNA, 25 bp, Homo sapiens
gcacgtgcacatgagagctctcttg

SEQ ID NO: 19982 - DNA, 25 bp, Homo sapiens
cctgtggcccagaagtgaataatta

SEQ ID NO: 19983 - DNA, 25 bp, Homo sapiens
gtgtggcttaaaatcctagtcaatg

SEQ ID NO: 19984 - DNA, 25 bp, Homo sapiens
tcctattcaggctgtggaaaaatgc

SEQ ID NO: 19985 - DNA, 25 bp, Homo sapiens
attggggtgacttcttccttctgcc

SEQ ID NO: 19986 - DNA, 25 bp, Homo sapiens
gtgtttcactttcaggagcccttta

SEQ ID NO: 19987 - DNA, 25 bp, Homo sapiens
gacactgggacacttggaaactctc

SEQ ID NO: 19988 - DNA, 25 bp, Homo sapiens
gttcagcgtctataccaggtcaatt

SEQ ID NO: 19989 - DNA, 25 bp, Homo sapiens
tgctggtctaccttctgccaaaaca

SEQ ID NO: 19990 - DNA, 25 bp, Homo sapiens
attgtaaacattgcataaggtagtt

SEQ ID NO: 19991 - DNA, 25 bp, Homo sapiens
attacaggctcatacccaaggattg

SEQ ID NO: 19992 - DNA, 25 bp, Homo sapiens
ccgactgctggagaaaaactgcctt

SEQ ID NO: 19993 - DNA, 25 bp, Homo sapiens
caccgcaggtgttttattaccatta

SEQ ID NO: 19994 - DNA, 25 bp, Homo sapiens
catagtcaggggcagcaagcaagca

SEQ ID NO: 19995 - DNA, 25 bp, Homo sapiens
tgtttcagtgtggttccagacattc

SEQ ID NO: 19996 - DNA, 25 bp, Homo sapiens
aaattagatatctttctggaaatta

SEQ ID NO: 19997 - DNA, 25 bp, Homo sapiens
gttttgctccagtctagcgctccta

SEQ ID NO: 19998 - DNA, 25 bp, Homo sapiens
tggctactcagaactcagggaatta

SEQ ID NO: 19999 - DNA, 25 bp, Homo sapiens
ttagcttcagacagagaggcatgcc

SEQ ID NO: 20000 - DNA, 25 bp, Homo sapiens
tgcccatagagagggaactaacatg

SEQ ID NO: 20001 - DNA, 25 bp, Homo sapiens
cgtggcagaggttgaggctttaaaa

SEQ ID NO: 20002 - DNA, 25 bp, Homo sapiens
gggtcaggttttccatttcatagta

SEQ ID NO: 20003 - DNA, 25 bp, Homo sapiens
ctgtttattacatggtctagggctc

SEQ ID NO: 20004 - DNA, 25 bp, Homo sapiens
atccttgcatgggtggttctttcta

SEQ ID NO: 20005 - DNA, 25 bp, Homo sapiens
gtgccgcttaggttctgatccctga

SEQ ID NO: 20006 - DNA, 25 bp, Homo sapiens
gcaccctttttggagctgttgcaca

SEQ ID NO: 20007 - DNA, 25 bp, Homo sapiens
gaggcttctgctttcatggactttg

SEQ ID NO: 20008 - DNA, 25 bp, Homo sapiens
actaaaaaaataaattcattgaagc

SEQ ID NO: 20009 - DNA, 25 bp, Homo sapiens
tgccaatcatacagaaaggtccaga

SEQ ID NO: 20010 - DNA, 25 bp, Homo sapiens
ccgtgggaacattgactgggtctta

SEQ ID NO: 20011 - DNA, 25 bp, Homo sapiens
agactgtccttctctctcctaggta

SEQ ID NO: 20012 - DNA, 25 bp, Homo sapiens
aggcactggcctttctttaactaga

SEQ ID NO: 20013 - DNA, 25 bp, Homo sapiens
ctgccaggtcatatcttcaggtttg

SEQ ID NO: 20014 - DNA, 25 bp, Homo sapiens
cacagctgtctgtattggggcctca

SEQ ID NO: 20015 - DNA, 25 bp, Homo sapiens
ttaccctgcagtgcctgttgatggc

SEQ ID NO: 20016 - DNA, 25 bp, Homo sapiens
caggcccttggctgatgtccatttc

SEQ ID NO: 20017 - DNA, 25 bp, Homo sapiens
tttcccgccaaatgtgattacacta

SEQ ID NO: 20018 - DNA, 25 bp, Homo sapiens
gaccatccctgtacaataagagttg

SEQ ID NO: 20019 - DNA, 25 bp, Homo sapiens
tacctctttttaggagccaccattc

SEQ ID NO: 20020 - DNA, 25 bp, Homo sapiens
ttggtgtttacatgatataaagagt

SEQ ID NO: 20021 - DNA, 25 bp, Homo sapiens
ggccaatctccttccagaaagcttt

SEQ ID NO: 20022 - DNA, 25 bp, Homo sapiens
gggtctcctctactcctgttcttga

SEQ ID NO: 20023 - DNA, 25 bp, Homo sapiens
ctcagccacctcttgtagtacaggg

SEQ ID NO: 20024 - DNA, 25 bp, Homo sapiens
ctgccatctggacagattatagttc

SEQ ID NO: 20025 - DNA, 25 bp, Homo sapiens
ttggggaccagttacatttcagctc

SEQ ID NO: 20026 - DNA, 25 bp, Homo sapiens
ttgaactctggaggcatggcccatg

SEQ ID NO: 20027 - DNA, 25 bp, Homo sapiens
cctgggccagtttccatctgtgtaa

SEQ ID NO: 20028 - DNA, 25 bp, Homo sapiens
gcccagctatcctcagggttttata

SEQ ID NO: 20029 - DNA, 25 bp, Homo sapiens
gcaactcgtctcttggagggtccca

SEQ ID NO: 20030 - DNA, 25 bp, Homo sapiens
cctcatttccagtttgggtagaacc

SEQ ID NO: 20031 - DNA, 25 bp, Homo sapiens
tgttgataacttgccttccctctgg

SEQ ID NO: 20032 - DNA, 25 bp, Homo sapiens
agagggccctgtcttcagtttcgca

SEQ ID NO: 20033 - DNA, 25 bp, Homo sapiens
agctgagacttacctgcccttgaca

SEQ ID NO: 20034 - DNA, 25 bp, Homo sapiens
ggcagctaccaccttcattttaaaa

SEQ ID NO: 20035 - DNA, 25 bp, Homo sapiens
tcatgggccaacagcatttattatg

SEQ ID NO: 20036 - DNA, 25 bp, Homo sapiens
tgcactgtgctccagggaagctcca

SEQ ID NO: 20037 - DNA, 25 bp, Homo sapiens
ttagaagtgtatttctaaagtcttg

SEQ ID NO: 20038 - DNA, 25 bp, Homo sapiens
cctgcagcagtcttggagtccacac

SEQ ID NO: 20039 - DNA, 25 bp, Homo sapiens
ctcttgtatagctctggacattggc

SEQ ID NO: 20040 - DNA, 25 bp, Homo sapiens
ggcaaccacaaagtttaggggctgt

SEQ ID NO: 20041 - DNA, 25 bp, Homo sapiens
gtatgaaaatgaaatggcaattata

SEQ ID NO: 20042 - DNA, 25 bp, Homo sapiens
gggttactcatatcattggctggtc

SEQ ID NO: 20043 - DNA, 25 bp, Homo sapiens
tgtgttccaattcaccaaaggtttg

SEQ ID NO: 20044 - DNA, 25 bp, Homo sapiens
tcccgtttctttggcttgatgcaga

SEQ ID NO: 20045 - DNA, 25 bp, Homo sapiens
ggctcagtcaggagtcccaccaatt

SEQ ID NO: 20046 - DNA, 25 bp, Homo sapiens
cttgggccaccatgtatctcagtta

SEQ ID NO: 20047 - DNA, 25 bp, Homo sapiens
ttcaggcccaggaaaagctagattc

SEQ ID NO: 20048 - DNA, 25 bp, Homo sapiens
tctggggttttgtacgcctagaaca

SEQ ID NO: 20049 - DNA, 25 bp, Homo sapiens
ggtaggcttagcatcccaggtattt

SEQ ID NO: 20050 - DNA, 25 bp, Homo sapiens
gggctgtaagctccaaactcaattt

SEQ ID NO: 20051 - DNA, 25 bp, Homo sapiens
gttcctgcaggtccaaccagcttca

SEQ ID NO: 20052 - DNA, 25 bp, Homo sapiens
gtcctcaatggtatattctcagcta

SEQ ID NO: 20053 - DNA, 25 bp, Homo sapiens
tctgcctgtctaggaatgtagaatc

SEQ ID NO: 20054 - DNA, 25 bp, Homo sapiens
tggactggggacctattctctattc

SEQ ID NO: 20055 - DNA, 25 bp, Homo sapiens
agtcattcctttgctttgctcaacg

SEQ ID NO: 20056 - DNA, 25 bp, Homo sapiens
cgtgatttcatagatttcaaccata

SEQ ID NO: 20057 - DNA, 25 bp, Homo sapiens
caactttaaagattcagtggtagtt

SEQ ID NO: 20058 - DNA, 25 bp, Homo sapiens
cccaggaatgggcatcacatgttca

SEQ ID NO: 20059 - DNA, 25 bp, Homo sapiens
tgtgaagttagctcttgcctcaata

SEQ ID NO: 20060 - DNA, 25 bp, Homo sapiens
agtgcgttcaagatttcagtccaaa

SEQ ID NO: 20061 - DNA, 25 bp, Homo sapiens
gctgatgacttttctgctacaataa

SEQ ID NO: 20062 - DNA, 25 bp, Homo sapiens
ctcagttcctgagagctgcaataca

SEQ ID NO: 20063 - DNA, 25 bp, Homo sapiens
gggccatcctggtgacaaaatattg

SEQ ID NO: 20064 - DNA, 25 bp, Homo sapiens
tatgtggactgatatctcaactaac

SEQ ID NO: 20065 - DNA, 25 bp, Homo sapiens
gcacacaaatgttgatgtttctcta

SEQ ID NO: 20066 - DNA, 25 bp, Homo sapiens
tactatgtactctaggaccagaaga

SEQ ID NO: 20067 - DNA, 25 bp, Homo sapiens
tgcctttgattagatgaattagtcc

SEQ ID NO: 20068 - DNA, 25 bp, Homo sapiens
cctgcttatgactagatttcctttg

SEQ ID NO: 20069 - DNA, 25 bp, Homo sapiens
gcccacgaaggctcagtcacataca

SEQ ID NO: 20070 - DNA, 25 bp, Homo sapiens
gagttctacttcttcttggcccagg

SEQ ID NO: 20071 - DNA, 25 bp, Homo sapiens
atggttggtatgaccctttaacttc

SEQ ID NO: 20072 - DNA, 25 bp, Homo sapiens
gttatcccaatgaaggggccctgca

SEQ ID NO: 20073 - DNA, 25 bp, Homo sapiens
ctgcaggcatgttgattgattaatc

SEQ ID NO: 20074 - DNA, 25 bp, Homo sapiens
aggtttcagtacgtgtcccagttta

SEQ ID NO: 20075 - DNA, 25 bp, Homo sapiens
gtggcgttcacctacaataagatcc

SEQ ID NO: 20076 - DNA, 25 bp, Homo sapiens
ttgggtttcctcaccaggatacttg

SEQ ID NO: 20077 - DNA, 25 bp, Homo sapiens
tgcaagccttacttatctgtagatc

SEQ ID NO: 20078 - DNA, 25 bp, Homo sapiens
ttattaatgtgtatgatacaaaact

SEQ ID NO: 20079 - DNA, 25 bp, Homo sapiens
ttccctactggctggtaatcattga

SEQ ID NO: 20080 - DNA, 25 bp, Homo sapiens
tttccagagttattccaggcagttg

SEQ ID NO: 20081 - DNA, 25 bp, Homo sapiens
agaattctagttttcagtggttttc

SEQ ID NO: 20082 - DNA, 25 bp, Homo sapiens
ctacttcaaaactgggatggatctc

SEQ ID NO: 20083 - DNA, 25 bp, Homo sapiens
ggctgggaggtactgattaaacaca

SEQ ID NO: 20084 - DNA, 25 bp, Homo sapiens
tcttccagaggagatcagtgactta

SEQ ID NO: 20085 - DNA, 25 bp, Homo sapiens
ccatcgagcatgagactgtgatttc

SEQ ID NO: 20086 - DNA, 25 bp, Homo sapiens
ttgccagctagcatgtgtctctatc

SEQ ID NO: 20087 - DNA, 25 bp, Homo sapiens
ggtggtcctacttttgagacacaga

SEQ ID NO: 20088 - DNA, 25 bp, Homo sapiens
gctgagctcctcttttctgaatgaa

SEQ ID NO: 20089 - DNA, 25 bp, Homo sapiens
cctgtgacctcaaggaaaagacttt

SEQ ID NO: 20090 - DNA, 25 bp, Homo sapiens
gcagtggcccttggatttaatctga

SEQ ID NO: 20091 - DNA, 25 bp, Homo sapiens
agggacacctgctccaatggcatta

SEQ ID NO: 20092 - DNA, 25 bp, Homo sapiens
gtgatcatactttcaggggcaagtg

SEQ ID NO: 20093 - DNA, 25 bp, Homo sapiens
gcaattgggaagcatttctgactta

SEQ ID NO: 20094 - DNA, 25 bp, Homo sapiens
cctggatagggcaatactgtatttc

SEQ ID NO: 20095 - DNA, 25 bp, Homo sapiens
cgctattttaaccagctgtccagtg

SEQ ID NO: 20096 - DNA, 25 bp, Homo sapiens
tggcgtgtttcctcaaagtacaatc

SEQ ID NO: 20097 - DNA, 25 bp, Homo sapiens
tcccttccataggtggcagtatatc

SEQ ID NO: 20098 - DNA, 25 bp, Homo sapiens
tccgggccaagtttatctttagagc

SEQ ID NO: 20099 - DNA, 25 bp, Homo sapiens
tgagatttcatttgcctgtggttcc

SEQ ID NO: 20100 - DNA, 25 bp, Homo sapiens
caggttgtttgtccctacacgtttc

SEQ ID NO: 20101 - DNA, 25 bp, Homo sapiens
gtgcagattttaaggtgaccgaata

SEQ ID NO: 20102 - DNA, 25 bp, Homo sapiens
ggccaaactccattctgtgtctgtg

SEQ ID NO: 20103 - DNA, 25 bp, Homo sapiens
ttccagtgactgtgagtgctaacca

SEQ ID NO: 20104 - DNA, 25 bp, Homo sapiens
gccaccaagcaaaatatctcttagg

SEQ ID NO: 20105 - DNA, 25 bp, Homo sapiens
gctctgctgactggaactgttaaca

SEQ ID NO: 20106 - DNA, 25 bp, Homo sapiens
gtgcagctgtctccattatgatctc

SEQ ID NO: 20107 - DNA, 25 bp, Homo sapiens
ctaggcctgctctaacaaaagatta

SEQ ID NO: 20108 - DNA, 25 bp, Homo sapiens
tagggccttctagatgcatgtaatc

SEQ ID NO: 20109 - DNA, 25 bp, Homo sapiens
gaccagtctgactcattcacattta

SEQ ID NO: 20110 - DNA, 25 bp, Homo sapiens
ctaggagacagtcaattagtgacct

SEQ ID NO: 20111 - DNA, 25 bp, Homo sapiens
tgaaaatggccaaagtcacagactg

SEQ ID NO: 20112 - DNA, 25 bp, Homo sapiens
cccttcctagtcctctatagaaaga

SEQ ID NO: 20113 - DNA, 25 bp, Homo sapiens
cctgggtcacagtttggccttttac

SEQ ID NO: 20114 - DNA, 25 bp, Homo sapiens
gtcctttttcagttggtgtgcaata

SEQ ID NO: 20115 - DNA, 25 bp, Homo sapiens
tgagacctggctactcatctatagc

SEQ ID NO: 20116 - DNA, 25 bp, Homo sapiens
tctatggcaacgacttcagtggttc

SEQ ID NO: 20117 - DNA, 25 bp, Homo sapiens
ccacctcataggactggaaagtctc

SEQ ID NO: 20118 - DNA, 25 bp, Homo sapiens
gggaacccttggctttgaggaacaa

SEQ ID NO: 20119 - DNA, 25 bp, Homo sapiens
ccctctctgaggaaagtagctactt

SEQ ID NO: 20120 - DNA, 25 bp, Homo sapiens
gctgatagttcaaccacgtatttta

SEQ ID NO: 20121 - DNA, 25 bp, Homo sapiens
tcccaggtacgtctatttgaatcgc

SEQ ID NO: 20122 - DNA, 25 bp, Homo sapiens
tttggaagtgaccatagcttgtatc

SEQ ID NO: 20123 - DNA, 25 bp, Homo sapiens
ctgctggtaagcttcattatgaaac

SEQ ID NO: 20124 - DNA, 25 bp, Homo sapiens
gtgaagatgtacacaaaaatacaaa

SEQ ID NO: 20125 - DNA, 25 bp, Homo sapiens
tcctcctggcaaccctgaaattctg

SEQ ID NO: 20126 - DNA, 25 bp, Homo sapiens
aagctgtttctccttctttggaaga

SEQ ID NO: 20127 - DNA, 25 bp, Homo sapiens
cttagctaaaatggcagtacagaaa

SEQ ID NO: 20128 - DNA, 25 bp, Homo sapiens
cacagagctgctttgtccatgcata

SEQ ID NO: 20129 - DNA, 25 bp, Homo sapiens
ctctggcccagaagaggtttgtttc

SEQ ID NO: 20130 - DNA, 25 bp, Homo sapiens
cacgttggaaaattcaaagaagtga

SEQ ID NO: 20131 - DNA, 25 bp, Homo sapiens
ttccattgtgttcaaggcatagctg

SEQ ID NO: 20132 - DNA, 25 bp, Homo sapiens
ttggctatctgcttctctcacgaga

SEQ ID NO: 20133 - DNA, 25 bp, Homo sapiens
aggaatcggctactttctagagaca

SEQ ID NO: 20134 - DNA, 25 bp, Homo sapiens
ctctccctgagcaaaaagaaacatg

SEQ ID NO: 20135 - DNA, 25 bp, Homo sapiens
ccaggactcagctgtaagggaatca

SEQ ID NO: 20136 - DNA, 25 bp, Homo sapiens
cggacagcccatcgtataaactata

SEQ ID NO: 20137 - DNA, 25 bp, Homo sapiens
cctggtggacgagaaagccttagca

SEQ ID NO: 20138 - DNA, 25 bp, Homo sapiens
cctgtggtagacacttgcacgcata

SEQ ID NO: 20139 - DNA, 25 bp, Homo sapiens
acactcctgtgtggacattgaggca

SEQ ID NO: 20140 - DNA, 25 bp, Homo sapiens
agcctggctagactgcaattctgta

SEQ ID NO: 20141 - DNA, 25 bp, Homo sapiens
ctgggagcctcacagcaatagctta

SEQ ID NO: 20142 - DNA, 25 bp, Homo sapiens
tcgtaccgggccctgagaattcaaa

SEQ ID NO: 20143 - DNA, 25 bp, Homo sapiens
gtgcaactttggctccagcatacca

SEQ ID NO: 20144 - DNA, 25 bp, Homo sapiens
ggagtatggtgattgttagctaaac

SEQ ID NO: 20145 - DNA, 25 bp, Homo sapiens
accctgtgtacagcagaagctattg

SEQ ID NO: 20146 - DNA, 25 bp, Homo sapiens
caggtggtaggttactctctaaata

SEQ ID NO: 20147 - DNA, 25 bp, Homo sapiens
ggcattctccaggtcaatacgtaca

SEQ ID NO: 20148 - DNA, 25 bp, Homo sapiens
tttgacattgcagcctccgtggacc

SEQ ID NO: 20149 - DNA, 25 bp, Homo sapiens
catgccacaggatgtatagttatgc

SEQ ID NO: 20150 - DNA, 25 bp, Homo sapiens
ggttcgtgttgcttttccttccagg

SEQ ID NO: 20151 - DNA, 25 bp, Homo sapiens
gtccctctgagtggtccagcaaata

SEQ ID NO: 20152 - DNA, 25 bp, Homo sapiens
ccactttgtggggtttgcaaacttc

SEQ ID NO: 20153 - DNA, 25 bp, Homo sapiens
gggaggcaattagggcaacttttta

SEQ ID NO: 20154 - DNA, 25 bp, Homo sapiens
aatcttactatataagagataattt

SEQ ID NO: 20155 - DNA, 25 bp, Homo sapiens
cagatgtgacaattttaagttgaaa

SEQ ID NO: 20156 - DNA, 25 bp, Homo sapiens
gttattgaagaaaaattctatgaag

SEQ ID NO: 20157 - DNA, 25 bp, Homo sapiens
ggccttaactgcatttgttcccata

SEQ ID NO: 20158 - DNA, 25 bp, Homo sapiens
tacctcttgagtgtggaccattttc

SEQ ID NO: 20159 - DNA, 25 bp, Homo sapiens
tgaccctggccattacgataccctg

SEQ ID NO: 20160 - DNA, 25 bp, Homo sapiens
agcaggtctttcctccactctgagg

SEQ ID NO: 20161 - DNA, 25 bp, Homo sapiens
ggcttgtagccacctatctttgatg

SEQ ID NO: 20162 - DNA, 25 bp, Homo sapiens
caggcttatgggtgcagacagttta

SEQ ID NO: 20163 - DNA, 25 bp, Homo sapiens
actacagttttacgtgagccagaga

SEQ ID NO: 20164 - DNA, 25 bp, Homo sapiens
actgccctgcttggtgacaggctta

SEQ ID NO: 20165 - DNA, 25 bp, Homo sapiens
ttggtcctcaaatgacagcagattc

SEQ ID NO: 20166 - DNA, 25 bp, Homo sapiens
tctggacaccaaagagaatgcctct

SEQ ID NO: 20167 - DNA, 25 bp, Homo sapiens
tcggcatctgtgtctcttggagcta

SEQ ID NO: 20168 - DNA, 25 bp, Homo sapiens
ggcagcacttctatcccgggctatg

SEQ ID NO: 20169 - DNA, 25 bp, Homo sapiens
tccctgtaagggcaaatcaattctg

SEQ ID NO: 20170 - DNA, 25 bp, Homo sapiens
tgtttgagctagataaactgtctgc

SEQ ID NO: 20171 - DNA, 25 bp, Homo sapiens
cccaaaacgtgcttaggagacagta

SEQ ID NO: 20172 - DNA, 25 bp, Homo sapiens
tggccagctgccaccctctaaaata

SEQ ID NO: 20173 - DNA, 25 bp, Homo sapiens
tctggcttcgagttaaaatagcatc

SEQ ID NO: 20174 - DNA, 25 bp, Homo sapiens
cagcaagcctatcctaggaactata

SEQ ID NO: 20175 - DNA, 25 bp, Homo sapiens
gtgtggatcccaattagccatcata

SEQ ID NO: 20176 - DNA, 25 bp, Homo sapiens
tgggctgcagaatctctctctacta

SEQ ID NO: 20177 - DNA, 25 bp, Homo sapiens
taggttcctcaaaatgtgtgccaca

SEQ ID NO: 20178 - DNA, 25 bp, Homo sapiens
ttcaagctagggtctggggtaattc

SEQ ID NO: 20179 - DNA, 25 bp, Homo sapiens
ccctggtaggtgttcatctgagacc

SEQ ID NO: 20180 - DNA, 25 bp, Homo sapiens
gcacaatcatttgggagcttgtcca

SEQ ID NO: 20181 - DNA, 25 bp, Homo sapiens
gtggttgttatatgtaatccttaca

SEQ ID NO: 20182 - DNA, 25 bp, Homo sapiens
aattatagctcctggattacagtgg

SEQ ID NO: 20183 - DNA, 25 bp, Homo sapiens
ggtcacttctgatctcctctgaaag

SEQ ID NO: 20184 - DNA, 25 bp, Homo sapiens
tttcaaattcagattaattctggac

SEQ ID NO: 20185 - DNA, 25 bp, Homo sapiens
agtcctggacacaaaaagctgctta

SEQ ID NO: 20186 - DNA, 25 bp, Homo sapiens
cctgtcttgtagcaaggacaatcta

SEQ ID NO: 20187 - DNA, 25 bp, Homo sapiens
acctcatggggtattcctgatatcc

SEQ ID NO: 20188 - DNA, 25 bp, Homo sapiens
gctgccgtcaatgtatcaacctcta

SEQ ID NO: 20189 - DNA, 25 bp, Homo sapiens
aggggatgctaattacaacttttca

SEQ ID NO: 20190 - DNA, 25 bp, Homo sapiens
ccacagggcttgttggcttctacta

SEQ ID NO: 20191 - DNA, 25 bp, Homo sapiens
cctttatggggtaatggcaatgtcc

SEQ ID NO: 20192 - DNA, 25 bp, Homo sapiens
agtcagtgttgtcagcagctaaatc

SEQ ID NO: 20193 - DNA, 25 bp, Homo sapiens
gcccaggctctgttcttgtctaaaa

SEQ ID NO: 20194 - DNA, 25 bp, Homo sapiens
aacagcctctttgcggggaacagta

SEQ ID NO: 20195 - DNA, 25 bp, Homo sapiens
acaccatcttggtaggcgcctatgc

SEQ ID NO: 20196 - DNA, 25 bp, Homo sapiens
caggcattcttctctccgggtcaaa

SEQ ID NO: 20197 - DNA, 25 bp, Homo sapiens
gtgaccgggagaaactgagaccttc

SEQ ID NO: 20198 - DNA, 25 bp, Homo sapiens
ttctagaagagtccatcagccgtta

SEQ ID NO: 20199 - DNA, 25 bp, Homo sapiens
ccaaggggatctggagccatcttca

SEQ ID NO: 20200 - DNA, 25 bp, Homo sapiens
ttggagcccaggacacagcttgtga

SEQ ID NO: 20201 - DNA, 25 bp, Homo sapiens
ggctgcttctgcttccttcctacta

SEQ ID NO: 20202 - DNA, 25 bp, Homo sapiens
agatcgctcctccatgtaccagtga

SEQ ID NO: 20203 - DNA, 25 bp, Homo sapiens
ttctgcggcccagtttaaaatcatc

SEQ ID NO: 20204 - DNA, 25 bp, Homo sapiens
gaggcagccaatgatgtttcgtttc

SEQ ID NO: 20205 - DNA, 25 bp, Homo sapiens
gactgtcttaagtttcttgcctgga

SEQ ID NO: 20206 - DNA, 25 bp, Homo sapiens
aacaccataatttttctaatgtgct

SEQ ID NO: 20207 - DNA, 25 bp, Homo sapiens
gcatgttaccctgagtgcttgagga

SEQ ID NO: 20208 - DNA, 25 bp, Homo sapiens
ttttccacgagatacaggcccaggc

SEQ ID NO: 20209 - DNA, 25 bp, Homo sapiens
ggttaaaatggatctccctatcaca

SEQ ID NO: 20210 - DNA, 25 bp, Homo sapiens
tgggcaccagccagttgcctgatta

SEQ ID NO: 20211 - DNA, 25 bp, Homo sapiens
gcctggatgatctctaagtgacctc

SEQ ID NO: 20212 - DNA, 25 bp, Homo sapiens
gcatgtttgttgttgcataccaata

SEQ ID NO: 20213 - DNA, 25 bp, Homo sapiens
tcccgtgcatggtcagctgaatatt

SEQ ID NO: 20214 - DNA, 25 bp, Homo sapiens
ccctggtgccctgttgctattagga

SEQ ID NO: 20215 - DNA, 25 bp, Homo sapiens
cttgctgcctatggtgatctgctta

SEQ ID NO: 20216 - DNA, 25 bp, Homo sapiens
agggcccacctttgccttgctgtga

SEQ ID NO: 20217 - DNA, 25 bp, Homo sapiens
aggagtttgctccttgtccttagca

SEQ ID NO: 20218 - DNA, 25 bp, Homo sapiens
tgggtctgacacctagcttgctgtg

SEQ ID NO: 20219 - DNA, 25 bp, Homo sapiens
ggctggtagagccatcctagtcaca

SEQ ID NO: 20220 - DNA, 25 bp, Homo sapiens
tgaactgcaactttccttgactctg

SEQ ID NO: 20221 - DNA, 25 bp, Homo sapiens
ctgactctggaggagaagacatttc

SEQ ID NO: 20222 - DNA, 25 bp, Homo sapiens
ggcttcatcgtttaccactggggca

SEQ ID NO: 20223 - DNA, 25 bp, Homo sapiens
cagccggtcttcgaattgttttata

SEQ ID NO: 20224 - DNA, 25 bp, Homo sapiens
gcccgatctttgctctcctgtaaga

SEQ ID NO: 20225 - DNA, 25 bp, Homo sapiens
gctcctgaagccactcgttagtcta

SEQ ID NO: 20226 - DNA, 25 bp, Homo sapiens
ggggtctttctcaccagcctggata

SEQ ID NO: 20227 - DNA, 25 bp, Homo sapiens
cctggtcccactctctcttgaaatg

SEQ ID NO: 20228 - DNA, 25 bp, Homo sapiens
ttccacggagcctgctatgtcaagc

SEQ ID NO: 20229 - DNA, 25 bp, Homo sapiens
gtcctggcatcattggctactctgg

SEQ ID NO: 20230 - DNA, 25 bp, Homo sapiens
gcctcggatctttttaggccatctt

SEQ ID NO: 20231 - DNA, 25 bp, Homo sapiens
actgccaggccagcacagcttgata

SEQ ID NO: 20232 - DNA, 25 bp, Homo sapiens
ggagagcttctacaactcagtttta

SEQ ID NO: 20233 - DNA, 25 bp, Homo sapiens
gcctcacggccttccaaaaataata

SEQ ID NO: 20234 - DNA, 25 bp, Homo sapiens
ctctaggaggacttaactgtgttgc

SEQ ID NO: 20235 - DNA, 25 bp, Homo sapiens
aacgggcctccctcatgctaattgg

SEQ ID NO: 20236 - DNA, 25 bp, Homo sapiens
ggtgtgctctcttgccagtatccca

SEQ ID NO: 20237 - DNA, 25 bp, Homo sapiens
cacccagggatcgatcggtacagtc

SEQ ID NO: 20238 - DNA, 25 bp, Homo sapiens
acccgctaggtggttaatttatcca

SEQ ID NO: 20239 - DNA, 25 bp, Homo sapiens
acccgagtttctgctgtgactgtca

SEQ ID NO: 20240 - DNA, 25 bp, Homo sapiens
ctggcctggtttgcttacccattta

SEQ ID NO: 20241 - DNA, 25 bp, Homo sapiens
agccctgctggtgaagtcttgcaac

SEQ ID NO: 20242 - DNA, 25 bp, Homo sapiens
agggacgcaccttctccacagttga

SEQ ID NO: 20243 - DNA, 25 bp, Homo sapiens
ttatagcctctctctttcaatgaca

SEQ ID NO: 20244 - DNA, 25 bp, Homo sapiens
tgagctgccatgtcctagaattgtc

SEQ ID NO: 20245 - DNA, 25 bp, Homo sapiens
gccgcctctgactcagctctggaga

SEQ ID NO: 20246 - DNA, 25 bp, Homo sapiens
ggtgatatgccctgaaccctcagga

SEQ ID NO: 20247 - DNA, 25 bp, Homo sapiens
ccaaggcattctgctttcagctgta

SEQ ID NO: 20248 - DNA, 25 bp, Homo sapiens
aggccctgtggatctgtgttcatga

SEQ ID NO: 20249 - DNA, 25 bp, Homo sapiens
gcacagcttctataggttttagatc

SEQ ID NO: 20250 - DNA, 25 bp, Homo sapiens
gcaggacgcagtactgttcactata

SEQ ID NO: 20251 - DNA, 25 bp, Homo sapiens
ttgggtcccattctcaggctgtttc

SEQ ID NO: 20252 - DNA, 25 bp, Homo sapiens
ggtagacctctccttagccttcagc

SEQ ID NO: 20253 - DNA, 25 bp, Homo sapiens
gggtacctagctctgactgcaaaga

SEQ ID NO: 20254 - DNA, 25 bp, Homo sapiens
acactgtccgaatgggttttggtta

SEQ ID NO: 20255 - DNA, 25 bp, Homo sapiens
cctggttgttctgtcctgaccttga

SEQ ID NO: 20256 - DNA, 25 bp, Homo sapiens
ggacttgcctccctcattcactgaa

SEQ ID NO: 20257 - DNA, 25 bp, Homo sapiens
tccctctagttggacctgagccgtc

SEQ ID NO: 20258 - DNA, 25 bp, Homo sapiens
caggcttcttggaggagatatatca

SEQ ID NO: 20259 - DNA, 25 bp, Homo sapiens
tttgcttaagaagccaatcatgccc

SEQ ID NO: 20260 - DNA, 25 bp, Homo sapiens
tactccctggacaactgagctcttg

SEQ ID NO: 20261 - DNA, 25 bp, Homo sapiens
agggctctccctccatactgtcagg

SEQ ID NO: 20262 - DNA, 25 bp, Homo sapiens
acccacagatatagatggactgctg

SEQ ID NO: 20263 - DNA, 25 bp, Homo sapiens
ggtgcctggcacagccctaagtaaa

SEQ ID NO: 20264 - DNA, 25 bp, Homo sapiens
gggctcctcaattgcttctgccaaa

SEQ ID NO: 20265 - DNA, 25 bp, Homo sapiens
ccagcagaagtcagctcggtcagca

SEQ ID NO: 20266 - DNA, 25 bp, Homo sapiens
cctcccggttccagtggttctgtta

SEQ ID NO: 20267 - DNA, 25 bp, Homo sapiens
gtgagcattccctgccacatcgaga

SEQ ID NO: 20268 - DNA, 25 bp, Homo sapiens
gtcatacctgtaccctcctctgttg

SEQ ID NO: 20269 - DNA, 25 bp, Homo sapiens
ggccctggggatgcaaagattacta

SEQ ID NO: 20270 - DNA, 25 bp, Homo sapiens
gtgcactctgcccttctgaccatga

SEQ ID NO: 20271 - DNA, 25 bp, Homo sapiens
cctattctgttattaggtgacacta

SEQ ID NO: 20272 - DNA, 25 bp, Homo sapiens
tccaggcccttcttttgagaatgtc

SEQ ID NO: 20273 - DNA, 25 bp, Homo sapiens
tgccagctctcaccaggatcatttg

SEQ ID NO: 20274 - DNA, 25 bp, Homo sapiens
gcccatcgcatcttcacctttatta

SEQ ID NO: 20275 - DNA, 25 bp, Homo sapiens
ggtgttgtccacgtagcttcatata

SEQ ID NO: 20276 - DNA, 25 bp, Homo sapiens
ttcgggccacactgagtaacaggtg

SEQ ID NO: 20277 - DNA, 25 bp, Homo sapiens
tgccagttaacagcctcaaagagtg

SEQ ID NO: 20278 - DNA, 25 bp, Homo sapiens
tgccctctgatttgcctactgagtg

SEQ ID NO: 20279 - DNA, 25 bp, Homo sapiens
gttacccatgcatctgagacccgtg

SEQ ID NO: 20280 - DNA, 25 bp, Homo sapiens
cctgtggagcagagtcagaatttta

SEQ ID NO: 20281 - DNA, 25 bp, Homo sapiens
gcctaggacagttgctaaaagaaca

SEQ ID NO: 20282 - DNA, 25 bp, Homo sapiens
ggtatccacagctcaaggagttttc

SEQ ID NO: 20283 - DNA, 25 bp, Homo sapiens
tgaccctggctcgaggaaaacatta

SEQ ID NO: 20284 - DNA, 25 bp, Homo sapiens
ggcccataggaagcctgtaaagata

SEQ ID NO: 20285 - DNA, 25 bp, Homo sapiens
tagatcttaatctactgcagccttt

SEQ ID NO: 20286 - DNA, 25 bp, Homo sapiens
tcccggggacattgctgacttttta

SEQ ID NO: 20287 - DNA, 25 bp, Homo sapiens
attccggttgtttgccctttcaggg

SEQ ID NO: 20288 - DNA, 25 bp, Homo sapiens
cccagcagctatgttggggctcaga

SEQ ID NO: 20289 - DNA, 25 bp, Homo sapiens
cgaaggtactttttcccattgtttg

SEQ ID NO: 20290 - DNA, 25 bp, Homo sapiens
agcgtctgacaccagtggcccattc

SEQ ID NO: 20291 - DNA, 25 bp, Homo sapiens
caagcgggaaatcgtgcatgacatc

SEQ ID NO: 20292 - DNA, 25 bp, Homo sapiens
tcccgagtctacacaggaggtgata

SEQ ID NO: 20293 - DNA, 25 bp, Homo sapiens
ccattatccggtctgggtctaggtc

SEQ ID NO: 20294 - DNA, 25 bp, Homo sapiens
gtgttctgtgatcacccaggtctta

SEQ ID NO: 20295 - DNA, 25 bp, Homo sapiens
ttcgctgtctgcttgcccaatgatg

SEQ ID NO: 20296 - DNA, 25 bp, Homo sapiens
tgctctagcttgaatctcctgggga

SEQ ID NO: 20297 - DNA, 25 bp, Homo sapiens
gtattattacttggggcaggcactc

SEQ ID NO: 20298 - DNA, 25 bp, Homo sapiens
gcagcgtctgccctccttaacaaga

SEQ ID NO: 20299 - DNA, 25 bp, Homo sapiens
ctgtttcactgcagcccatggctta

SEQ ID NO: 20300 - DNA, 25 bp, Homo sapiens
ccttggtgagctccgctgtgataac

SEQ ID NO: 20301 - DNA, 25 bp, Homo sapiens
ttggggcttccagcaagtagtatca

SEQ ID NO: 20302 - DNA, 25 bp, Homo sapiens
ccaggactggctgagctctttagta

SEQ ID NO: 20303 - DNA, 25 bp, Homo sapiens
ccaatgtctgggctgaggaaggcca

SEQ ID NO: 20304 - DNA, 25 bp, Homo sapiens
cagagaggttttcccaggtcactta

SEQ ID NO: 20305 - DNA, 25 bp, Homo sapiens
cttcccggagcaggatctcagtgta

SEQ ID NO: 20306 - DNA, 25 bp, Homo sapiens
gtatgggtccctcacctaagcctgg

SEQ ID NO: 20307 - DNA, 25 bp, Homo sapiens
aggttcgtttcccacagttttctga

SEQ ID NO: 20308 - DNA, 25 bp, Homo sapiens
agcagctccttggtggttttcaaca

SEQ ID NO: 20309 - DNA, 25 bp, Homo sapiens
gagttcctcccaggaatgggtttta

SEQ ID NO: 20310 - DNA, 25 bp, Homo sapiens
cagggcctggcattgactctatcaa

SEQ ID NO: 20311 - DNA, 25 bp, Homo sapiens
gtccagactcataggtttaaatttg

SEQ ID NO: 20312 - DNA, 25 bp, Homo sapiens
agtggggcactcaatctgtttttta

SEQ ID NO: 20313 - DNA, 25 bp, Homo sapiens
tgagttcctgccctcctacctagag

SEQ ID NO: 20314 - DNA, 25 bp, Homo sapiens
tcccaccatggagaaagctgctttc

SEQ ID NO: 20315 - DNA, 25 bp, Homo sapiens
agctggaccttcttcacatttcctg

SEQ ID NO: 20316 - DNA, 25 bp, Homo sapiens
gatctaagaatttacctggacatta

SEQ ID NO: 20317 - DNA, 25 bp, Homo sapiens
caaaaacatcttccattaagattct

SEQ ID NO: 20318 - DNA, 25 bp, Homo sapiens
tgaaatagttttagtgcccaagtta

SEQ ID NO: 20319 - DNA, 25 bp, Homo sapiens
ctccagtctcaggtttgtaagtctc

SEQ ID NO: 20320 - DNA, 25 bp, Homo sapiens
gtattatattagtatatgatcgtat

SEQ ID NO: 20321 - DNA, 25 bp, Homo sapiens
ttgtatgcctaaaaaccttatactc

SEQ ID NO: 20322 - DNA, 25 bp, Homo sapiens
cctgctgataaaaggggcatctctc

SEQ ID NO: 20323 - DNA, 25 bp, Homo sapiens
tgccgccaagcgctgggataaaata

SEQ ID NO: 20324 - DNA, 25 bp, Homo sapiens
cttggggccaacgtgcataatgcta

SEQ ID NO: 20325 - DNA, 25 bp, Homo sapiens
ggaggtcctggacacaaatctatca

SEQ ID NO: 20326 - DNA, 25 bp, Homo sapiens
ctgtaaagatacaatttccactgat

SEQ ID NO: 20327 - DNA, 25 bp, Homo sapiens
tcaggtattcattggacagctcttc

SEQ ID NO: 20328 - DNA, 25 bp, Homo sapiens
ggtgacctccaaggcattcagattc

SEQ ID NO: 20329 - DNA, 25 bp, Homo sapiens
acagcatgtttgtaggtgcccaccc

SEQ ID NO: 20330 - DNA, 25 bp, Homo sapiens
gacagcagggtggttcttctgaatg

SEQ ID NO: 20331 - DNA, 25 bp, Homo sapiens
ggccagggaacagcatgaggatatt

SEQ ID NO: 20332 - DNA, 25 bp, Homo sapiens
atctctctccatctccgtgtgtgtg

SEQ ID NO: 20333 - DNA, 25 bp, Homo sapiens
gtgccaggccctgttctccaaaaca

SEQ ID NO: 20334 - DNA, 25 bp, Homo sapiens
tggcctcctggtcagatgtcctata

SEQ ID NO: 20335 - DNA, 25 bp, Homo sapiens
aggtgttatccctcccttgcagagc

SEQ ID NO: 20336 - DNA, 25 bp, Homo sapiens
tcctggttttagcatgtggagcacc

SEQ ID NO: 20337 - DNA, 25 bp, Homo sapiens
ttagttaattttatgttgagtgaac

SEQ ID NO: 20338 - DNA, 25 bp, Homo sapiens
cccacaatgggctctgcagtatgtc

SEQ ID NO: 20339 - DNA, 25 bp, Homo sapiens
tcgctgcctgagtacctatgtgttc

SEQ ID NO: 20340 - DNA, 25 bp, Homo sapiens
ctcattcacttttttgggaacaaca

SEQ ID NO: 20341 - DNA, 25 bp, Homo sapiens
ccgatgtgccatttcctgatttgca

SEQ ID NO: 20342 - DNA, 25 bp, Homo sapiens
gtgccctccaccaagagataatttt

SEQ ID NO: 20343 - DNA, 25 bp, Homo sapiens
gagggcccaatcattacttaatcca

SEQ ID NO: 20344 - DNA, 25 bp, Homo sapiens
gatgtttgagacttatgatgaaaac

SEQ ID NO: 20345 - DNA, 25 bp, Homo sapiens
caaggggctgtttaagtcatcatac

SEQ ID NO: 20346 - DNA, 25 bp, Homo sapiens
gggacactaactctgcaagccatta

SEQ ID NO: 20347 - DNA, 25 bp, Homo sapiens
cgaaccaattgcaaaagtacaggat

SEQ ID NO: 20348 - DNA, 25 bp, Homo sapiens
ctccagggagactgtgaattcaatc

SEQ ID NO: 20349 - DNA, 25 bp, Homo sapiens
tgaaaagcctcctccgtcactagtg

SEQ ID NO: 20350 - DNA, 25 bp, Homo sapiens
agacagctggctcactatgaacctg

SEQ ID NO: 20351 - DNA, 25 bp, Homo sapiens
tgtgagcgacacctggcaaagtttc

SEQ ID NO: 20352 - DNA, 25 bp, Homo sapiens
tgaagctgccgctgaagccaacgca

SEQ ID NO: 20353 - DNA, 25 bp, Homo sapiens
tagaagtcccttccgtgccacggtg

SEQ ID NO: 20354 - DNA, 25 bp, Homo sapiens
cgacgcttctgtgaggtaactaatt

SEQ ID NO: 20355 - DNA, 25 bp, Homo sapiens
ctgatgatgttgctcccaggctgtc

SEQ ID NO: 20356 - DNA, 25 bp, Homo sapiens
tgactgggcccagcaactgttagtg

SEQ ID NO: 20357 - DNA, 25 bp, Homo sapiens
gtagccatgagtccttcacttacta

SEQ ID NO: 20358 - DNA, 25 bp, Homo sapiens
cctgtgggtaatgtctcctgttgtc

SEQ ID NO: 20359 - DNA, 25 bp, Homo sapiens
gctcagctcaggcaggtagacaaca

SEQ ID NO: 20360 - DNA, 25 bp, Homo sapiens
gtagatatctgcattttcctgagga

SEQ ID NO: 20361 - DNA, 25 bp, Homo sapiens
tgaaatttctctagtgcagggctcc

SEQ ID NO: 20362 - DNA, 25 bp, Homo sapiens
acttttttgcataagcctagctttg

SEQ ID NO: 20363 - DNA, 25 bp, Homo sapiens
gaagtcctccttgcaattcacagta

SEQ ID NO: 20364 - DNA, 25 bp, Homo sapiens
ggctcttgcctctgaacccttgaga

SEQ ID NO: 20365 - DNA, 25 bp, Homo sapiens
acatctggccctgaaatactttggg

SEQ ID NO: 20366 - DNA, 25 bp, Homo sapiens
ggctgagttcaaccctggaaatttc

SEQ ID NO: 20367 - DNA, 25 bp, Homo sapiens
tggcacttcggttaagcagtagatc

SEQ ID NO: 20368 - DNA, 25 bp, Homo sapiens
caacaattataaataggactaatgt

SEQ ID NO: 20369 - DNA, 25 bp, Homo sapiens
tggtacaagcctagatataatttag

SEQ ID NO: 20370 - DNA, 25 bp, Homo sapiens
tgaccttgtactcagctattgcatc

SEQ ID NO: 20371 - DNA, 25 bp, Homo sapiens
aagcatctttctgtactgacccatc

SEQ ID NO: 20372 - DNA, 25 bp, Homo sapiens
ccagcagggcattgcacaggtgttc

SEQ ID NO: 20373 - DNA, 25 bp, Homo sapiens
agatgacttcccagctgccagtaca

SEQ ID NO: 20374 - DNA, 25 bp, Homo sapiens
tgtgctaagcagagtgcccaccttc

SEQ ID NO: 20375 - DNA, 25 bp, Homo sapiens
acccacgctggtgtcttcaaacagg

SEQ ID NO: 20376 - DNA, 25 bp, Homo sapiens
tgcccatggtgtccaaaaggttccc

SEQ ID NO: 20377 - DNA, 25 bp, Homo sapiens
cttggttcagtctaggaggcataca

SEQ ID NO: 20378 - DNA, 25 bp, Homo sapiens
tcttcaaatcagaacacattggcga

SEQ ID NO: 20379 - DNA, 25 bp, Homo sapiens
tgaacctgacttttaaggattatgg

SEQ ID NO: 20380 - DNA, 25 bp, Homo sapiens
aactaagacctttacctctggattc

SEQ ID NO: 20381 - DNA, 25 bp, Homo sapiens
gcattcgaatttgtgttaaacaaaa

SEQ ID NO: 20382 - DNA, 25 bp, Homo sapiens
gagacttcatgcatgcttccaggca

SEQ ID NO: 20383 - DNA, 25 bp, Homo sapiens
tgtggcactacccttggtactaata

SEQ ID NO: 20384 - DNA, 25 bp, Homo sapiens
ccaaagttgtagtactgttttccca

SEQ ID NO: 20385 - DNA, 25 bp, Homo sapiens
agccttgcagacacagctagattta

SEQ ID NO: 20386 - DNA, 25 bp, Homo sapiens
atgtggctgcaccagaaatctgtta

SEQ ID NO: 20387 - DNA, 25 bp, Homo sapiens
tgcacgcgtctgtaggcacttcaga

SEQ ID NO: 20388 - DNA, 25 bp, Homo sapiens
gtgtctctatctcagcaacatgtta

SEQ ID NO: 20389 - DNA, 25 bp, Homo sapiens
gccagcctggtatttgtgtctctta

SEQ ID NO: 20390 - DNA, 25 bp, Homo sapiens
taccacaatgacctgcaagctaatg

SEQ ID NO: 20391 - DNA, 25 bp, Homo sapiens
tgaactgttgcatcatacctctgtg

SEQ ID NO: 20392 - DNA, 25 bp, Homo sapiens
cagtggctatgtccttccttaagaa

SEQ ID NO: 20393 - DNA, 25 bp, Homo sapiens
ccactctctccaggcttcaggttga

SEQ ID NO: 20394 - DNA, 25 bp, Homo sapiens
aggttcatgcaagaccacatgggtc

SEQ ID NO: 20395 - DNA, 25 bp, Homo sapiens
ccgccgtttctctcagggattggga

SEQ ID NO: 20396 - DNA, 25 bp, Homo sapiens
tcatttctagaaggaagaagtgctc

SEQ ID NO: 20397 - DNA, 25 bp, Homo sapiens
tccttgtgcagttaatgaggtctcc

SEQ ID NO: 20398 - DNA, 25 bp, Homo sapiens
catgggctttggagttaggaaaacc

SEQ ID NO: 20399 - DNA, 25 bp, Homo sapiens
ggttctctggtagcaaactgttgta

SEQ ID NO: 20400 - DNA, 25 bp, Homo sapiens
gaagtcccagaagtgtgcacgccta

SEQ ID NO: 20401 - DNA, 25 bp, Homo sapiens
gttcttgaacatatctgcaacttac

SEQ ID NO: 20402 - DNA, 25 bp, Homo sapiens
ttacattggtttgcaaaaattactg

SEQ ID NO: 20403 - DNA, 25 bp, Homo sapiens
ttccgagtgaaaaaatgtaagcttc

SEQ ID NO: 20404 - DNA, 25 bp, Homo sapiens
aagtcattctttccagtctcaggga

SEQ ID NO: 20405 - DNA, 25 bp, Homo sapiens
gtagcctcaagtcaagataaaattg

SEQ ID NO: 20406 - DNA, 25 bp, Homo sapiens
ggtggtaaagtcatgctcgctaacg

SEQ ID NO: 20407 - DNA, 25 bp, Homo sapiens
tgcctgtggaaccagctttgacttg

SEQ ID NO: 20408 - DNA, 25 bp, Homo sapiens
ggattctgatcccattgtctttaaa

SEQ ID NO: 20409 - DNA, 25 bp, Homo sapiens
ggggctcctgatccacatcaatttg

SEQ ID NO: 20410 - DNA, 25 bp, Homo sapiens
gggtgtttcttcactagacaacttc

SEQ ID NO: 20411 - DNA, 25 bp, Homo sapiens
tatgacttgttgattgataaattga

SEQ ID NO: 20412 - DNA, 25 bp, Homo sapiens
aatcagggccctgcagtgacatctc

SEQ ID NO: 20413 - DNA, 25 bp, Homo sapiens
tacaatatagactaagtaatcagca

SEQ ID NO: 20414 - DNA, 25 bp, Homo sapiens
ccctggacttttgatcactaatgga

SEQ ID NO: 20415 - DNA, 25 bp, Homo sapiens
actttcctttgggagcctctgctgc

SEQ ID NO: 20416 - DNA, 25 bp, Homo sapiens
gtctcacaacattggcagcaagttc

SEQ ID NO: 20417 - DNA, 25 bp, Homo sapiens
ctccttgcagagatgactgttttta

SEQ ID NO: 20418 - DNA, 25 bp, Homo sapiens
caatgcttatttcatgggttgcata

SEQ ID NO: 20419 - DNA, 25 bp, Homo sapiens
tgtggctttgccctagcatacatta

SEQ ID NO: 20420 - DNA, 25 bp, Homo sapiens
tctgctcatgtatcaaggaatttgc

SEQ ID NO: 20421 - DNA, 25 bp, Homo sapiens
tgggccacagcttcagtctaacagg

SEQ ID NO: 20422 - DNA, 25 bp, Homo sapiens
gccgtccagcatcttgcagttgttg

SEQ ID NO: 20423 - DNA, 25 bp, Homo sapiens
tggtcgaagttcctgctagctggta

SEQ ID NO: 20424 - DNA, 25 bp, Homo sapiens
tacatctctgggaggctgatatatc

SEQ ID NO: 20425 - DNA, 25 bp, Homo sapiens
gggcactgaggtaccaatgacaaca

SEQ ID NO: 20426 - DNA, 25 bp, Homo sapiens
tggtgcccattaaccctaaaaattg

SEQ ID NO: 20427 - DNA, 25 bp, Homo sapiens
tgtggccctgtgaaactggaaatga

SEQ ID NO: 20428 - DNA, 25 bp, Homo sapiens
tgaactgacgcaacgaaagcatctg

SEQ ID NO: 20429 - DNA, 25 bp, Homo sapiens
ctgggcatctgctgattatatattc

SEQ ID NO: 20430 - DNA, 25 bp, Homo sapiens
tatgctgctcttaacggtgattgta

SEQ ID NO: 20431 - DNA, 25 bp, Homo sapiens
ggtgtatccctgtccctgttttttc

SEQ ID NO: 20432 - DNA, 25 bp, Homo sapiens
gactttaaaatatcttgaattagga

SEQ ID NO: 20433 - DNA, 25 bp, Homo sapiens
tctactgcaggctttcaaacttggc

SEQ ID NO: 20434 - DNA, 25 bp, Homo sapiens
tgagaattaatctgtaccagggata

SEQ ID NO: 20435 - DNA, 25 bp, Homo sapiens
gcgatcacaattttccctagagagt

SEQ ID NO: 20436 - DNA, 25 bp, Homo sapiens
acttgagtggcacacctactggtga

SEQ ID NO: 20437 - DNA, 25 bp, Homo sapiens
tgctgagctgtgaggattctaatta

SEQ ID NO: 20438 - DNA, 25 bp, Homo sapiens
aatttaatggtcaattatcatgaat

SEQ ID NO: 20439 - DNA, 25 bp, Homo sapiens
cctgtctggcaagatagtcaatctg

SEQ ID NO: 20440 - DNA, 25 bp, Homo sapiens
ggtgacccagccctagctgctaata

SEQ ID NO: 20441 - DNA, 25 bp, Homo sapiens
tgttgaccggtaattgctctgaata

SEQ ID NO: 20442 - DNA, 25 bp, Homo sapiens
ccaggtttctcaatgtcaaatcagg

SEQ ID NO: 20443 - DNA, 25 bp, Homo sapiens
agttcccgaagatgccaacatagtg

SEQ ID NO: 20444 - DNA, 25 bp, Homo sapiens
tctgcccacacagcgggtgaaattg

SEQ ID NO: 20445 - DNA, 25 bp, Homo sapiens
aggctgaggctctgctgtctatcta

SEQ ID NO: 20446 - DNA, 25 bp, Homo sapiens
ttgggacacccacataacagttctg

SEQ ID NO: 20447 - DNA, 25 bp, Homo sapiens
gctctgcagctgtaaaaacaacttg

SEQ ID NO: 20448 - DNA, 25 bp, Homo sapiens
taaaataaatacccaacggaaaaaa

SEQ ID NO: 20449 - DNA, 25 bp, Homo sapiens
gtggggctataaaacctacttcatg

SEQ ID NO: 20450 - DNA, 25 bp, Homo sapiens
ggtgcacatgttaagttctcaattt

SEQ ID NO: 20451 - DNA, 25 bp, Homo sapiens
gtgtggaagccagttactacctttc

SEQ ID NO: 20452 - DNA, 25 bp, Homo sapiens
taggaacacccttgagctagattgc

SEQ ID NO: 20453 - DNA, 25 bp, Homo sapiens
cagcgatgctggtttcccaaaaata

SEQ ID NO: 20454 - DNA, 25 bp, Homo sapiens
gtaaagtgtatcctctgcctcagtg

SEQ ID NO: 20455 - DNA, 25 bp, Homo sapiens
cctcccagggtagattatgtgaaga

SEQ ID NO: 20456 - DNA, 25 bp, Homo sapiens
ggggtaacacatccatcaccattga

SEQ ID NO: 20457 - DNA, 25 bp, Homo sapiens
gctccaacttctgctagatcgtagg

SEQ ID NO: 20458 - DNA, 25 bp, Homo sapiens
tgggtccatttgcatccatcaagga

SEQ ID NO: 20459 - DNA, 25 bp, Homo sapiens
cattgagcctgatagagttttgtcc

SEQ ID NO: 20460 - DNA, 25 bp, Homo sapiens
tggcactgttccctagattgatgac

SEQ ID NO: 20461 - DNA, 25 bp, Homo sapiens
caggcatccgggcaacagtaaaatc

SEQ ID NO: 20462 - DNA, 25 bp, Homo sapiens
gggaaatgtctcttctctcagtcta

SEQ ID NO: 20463 - DNA, 25 bp, Homo sapiens
tgtgtggagactagaagccatggta

SEQ ID NO: 20464 - DNA, 25 bp, Homo sapiens
agacttctggatatcggcgcactga

SEQ ID NO: 20465 - DNA, 25 bp, Homo sapiens
cagcaccggtttccctgttaggatc

SEQ ID NO: 20466 - DNA, 25 bp, Homo sapiens
ttcccaggggacaaaccatttaaga

SEQ ID NO: 20467 - DNA, 25 bp, Homo sapiens
cttggatttttatgagtttggggtg

SEQ ID NO: 20468 - DNA, 25 bp, Homo sapiens
tcctctcataagaattcgtgtgatg

SEQ ID NO: 20469 - DNA, 25 bp, Homo sapiens
accaagggttgtttctcatggggca

SEQ ID NO: 20470 - DNA, 25 bp, Homo sapiens
catccttgcaccttcttctactttt

SEQ ID NO: 20471 - DNA, 25 bp, Homo sapiens
taccttcgaggtacattctgtggcc

SEQ ID NO: 20472 - DNA, 25 bp, Homo sapiens
gacagtgccttatttccctactatg

SEQ ID NO: 20473 - DNA, 25 bp, Homo sapiens
acgtcacccttgtatgagaagcatc

SEQ ID NO: 20474 - DNA, 25 bp, Homo sapiens
tatctctccagcacagaggtctgtg

SEQ ID NO: 20475 - DNA, 25 bp, Homo sapiens
taatccagttaacgagcctaaagtc

SEQ ID NO: 20476 - DNA, 25 bp, Homo sapiens
cagttccctggtgatctaatattag

SEQ ID NO: 20477 - DNA, 25 bp, Homo sapiens
ttccagcctgggcagtagtttctcc

SEQ ID NO: 20478 - DNA, 25 bp, Homo sapiens
ccaggcaggtgctcttttattttca

SEQ ID NO: 20479 - DNA, 25 bp, Homo sapiens
gtgatggtggcccttctatagaaca

SEQ ID NO: 20480 - DNA, 25 bp, Homo sapiens
tcactgctgcagttaaagttttcta

SEQ ID NO: 20481 - DNA, 25 bp, Homo sapiens
tatacttttaaactgtgaggcagaa

SEQ ID NO: 20482 - DNA, 25 bp, Homo sapiens
actgccagtttgagctccatactta

SEQ ID NO: 20483 - DNA, 25 bp, Homo sapiens
tgctggtacatatggccttcctata

SEQ ID NO: 20484 - DNA, 25 bp, Homo sapiens
gggcaggaactggatccctccttta

SEQ ID NO: 20485 - DNA, 25 bp, Homo sapiens
tgccctagcagtgtgaacaagcttc

SEQ ID NO: 20486 - DNA, 25 bp, Homo sapiens
aaacagcctatagtgaaatcttaga

SEQ ID NO: 20487 - DNA, 25 bp, Homo sapiens
cccctactaatatgatttaaataca

SEQ ID NO: 20488 - DNA, 25 bp, Homo sapiens
tcctgtctgtgagttctgtgaaatc

SEQ ID NO: 20489 - DNA, 25 bp, Homo sapiens
tggtcccttaagaaagcagcatgtc

SEQ ID NO: 20490 - DNA, 25 bp, Homo sapiens
tcagcctgggctcctgcagagaaaa

SEQ ID NO: 20491 - DNA, 25 bp, Homo sapiens
tctcctcggaaaatcagcagtgctc

SEQ ID NO: 20492 - DNA, 25 bp, Homo sapiens
tgggatcagatctcatttacaatgg

SEQ ID NO: 20493 - DNA, 25 bp, Homo sapiens
tgccctgtttatgtgctgtgctagc

SEQ ID NO: 20494 - DNA, 25 bp, Homo sapiens
cagggatgaatataaatgtatgttg

SEQ ID NO: 20495 - DNA, 25 bp, Homo sapiens
tggctcacagctggaagaatttctg

SEQ ID NO: 20496 - DNA, 25 bp, Homo sapiens
actccctggaggacagctgaattta

SEQ ID NO: 20497 - DNA, 25 bp, Homo sapiens
gccatgttgtgaccttctgagatga

SEQ ID NO: 20498 - DNA, 25 bp, Homo sapiens
ctgatcgacaatgtattcaaggtta

SEQ ID NO: 20499 - DNA, 25 bp, Homo sapiens
tttggccacctgtcagcaacctgtc

SEQ ID NO: 20500 - DNA, 25 bp, Homo sapiens
cctttgccagcgtagggattttatc

SEQ ID NO: 20501 - DNA, 25 bp, Homo sapiens
tagctttgttgactgactgctcaga

SEQ ID NO: 20502 - DNA, 25 bp, Homo sapiens
aattagaggctctgatcatttatag

SEQ ID NO: 20503 - DNA, 25 bp, Homo sapiens
ggacgcacctgcctaagccttctga

SEQ ID NO: 20504 - DNA, 25 bp, Homo sapiens
tgcacagttgcatcataaagaggtc

SEQ ID NO: 20505 - DNA, 25 bp, Homo sapiens
accacgtgttctgctttgctcttca

SEQ ID NO: 20506 - DNA, 25 bp, Homo sapiens
gagaggtcctttgtgatagctttca

SEQ ID NO: 20507 - DNA, 25 bp, Homo sapiens
ggaaccagctcctccagcctgatta

SEQ ID NO: 20508 - DNA, 25 bp, Homo sapiens
ggtgacagggcttatcaaactctcc

SEQ ID NO: 20509 - DNA, 25 bp, Homo sapiens
ctgtggctgtttccatattctctga

SEQ ID NO: 20510 - DNA, 25 bp, Homo sapiens
gttgctaccgtgctgtaactcatgc

SEQ ID NO: 20511 - DNA, 25 bp, Homo sapiens
agctgaggttaacttgcacatggta

SEQ ID NO: 20512 - DNA, 25 bp, Homo sapiens
tgctggtggaggtaaacttgctaca

SEQ ID NO: 20513 - DNA, 25 bp, Homo sapiens
aggctgcccactgcttaccagaagg

SEQ ID NO: 20514 - DNA, 25 bp, Homo sapiens
tctggtttgaatttgcggcaatggc

SEQ ID NO: 20515 - DNA, 25 bp, Homo sapiens
tacttgatgctatagggacccactc

SEQ ID NO: 20516 - DNA, 25 bp, Homo sapiens
agcctggtgcactttccctttgaca

SEQ ID NO: 20517 - DNA, 25 bp, Homo sapiens
ccttgggccactacatactgggaca

SEQ ID NO: 20518 - DNA, 25 bp, Homo sapiens
agctatgtcctccaagtcaaacggg

SEQ ID NO: 20519 - DNA, 25 bp, Homo sapiens
tgggtactcctgcacatcattaatg

SEQ ID NO: 20520 - DNA, 25 bp, Homo sapiens
ggcatgatcctcgaattgtttgaac

SEQ ID NO: 20521 - DNA, 25 bp, Homo sapiens
gggcaagctctctcataccaaactt

SEQ ID NO: 20522 - DNA, 25 bp, Homo sapiens
aggacagaatggaaaggcacctttc

SEQ ID NO: 20523 - DNA, 25 bp, Homo sapiens
gcttctggaatctggagcagtttta

SEQ ID NO: 20524 - DNA, 25 bp, Homo sapiens
aggactccctggacactgagaaata

SEQ ID NO: 20525 - DNA, 25 bp, Homo sapiens
gctggcacaaacacactctctctta

SEQ ID NO: 20526 - DNA, 25 bp, Homo sapiens
aaaggcctctttgtgtgtaccgaga

SEQ ID NO: 20527 - DNA, 25 bp, Homo sapiens
tctggacctggtgccaagaatgctt

SEQ ID NO: 20528 - DNA, 25 bp, Homo sapiens
cccatggagccagaaacagttattt

SEQ ID NO: 20529 - DNA, 25 bp, Homo sapiens
ggggttcatgttgccacctgagaca

SEQ ID NO: 20530 - DNA, 25 bp, Homo sapiens
tgtgtgttcacatctagcagacctg

SEQ ID NO: 20531 - DNA, 25 bp, Homo sapiens
ctcagagttccattttttggtgtcc

SEQ ID NO: 20532 - DNA, 25 bp, Homo sapiens
tccggggaaccgatctcaaatatac

SEQ ID NO: 20533 - DNA, 25 bp, Homo sapiens
agcctctctgatacgcgtgtacaca

SEQ ID NO: 20534 - DNA, 25 bp, Homo sapiens
ttacatggccctttctcagatagtg

SEQ ID NO: 20535 - DNA, 25 bp, Homo sapiens
ccctgtgtagatgaggagcacaaga

SEQ ID NO: 20536 - DNA, 25 bp, Homo sapiens
cctcaggagtccttagttgaaatca

SEQ ID NO: 20537 - DNA, 25 bp, Homo sapiens
agctgcgtaagtagggtgattttcc

SEQ ID NO: 20538 - DNA, 25 bp, Homo sapiens
gatcctctgctagtctcaaaatatg

SEQ ID NO: 20539 - DNA, 25 bp, Homo sapiens
ctgtactcaaggtatgcaccaaatc

SEQ ID NO: 20540 - DNA, 25 bp, Homo sapiens
tgtgtggcatccatctgaaatgtca

SEQ ID NO: 20541 - DNA, 25 bp, Homo sapiens
acttcacctgttctgtatctcgtta

SEQ ID NO: 20542 - DNA, 25 bp, Homo sapiens
tgctggattgtgctcatctggaaca

SEQ ID NO: 20543 - DNA, 25 bp, Homo sapiens
tactctaggggcaaggctttttctc

SEQ ID NO: 20544 - DNA, 25 bp, Homo sapiens
tgagagctgtcacaaccacaatttc

SEQ ID NO: 20545 - DNA, 25 bp, Homo sapiens
ctgccagttcttcaggtgcaaattc

SEQ ID NO: 20546 - DNA, 25 bp, Homo sapiens
cctaacacttgttgaaatacactca

SEQ ID NO: 20547 - DNA, 25 bp, Homo sapiens
ttgatacactatattcgcttttgga

SEQ ID NO: 20548 - DNA, 25 bp, Homo sapiens
atggatactatcttccctgctttga

SEQ ID NO: 20549 - DNA, 25 bp, Homo sapiens
acagtcatgtgatttgcccaagata

SEQ ID NO: 20550 - DNA, 25 bp, Homo sapiens
cagctctggctgtcttttctacaga

SEQ ID NO: 20551 - DNA, 25 bp, Homo sapiens
cttacccagaaggagatggcaatcc

SEQ ID NO: 20552 - DNA, 25 bp, Homo sapiens
cttgggacaacacagccaggaattc

SEQ ID NO: 20553 - DNA, 25 bp, Homo sapiens
catgctatctctgtaagtcccagta

SEQ ID NO: 20554 - DNA, 25 bp, Homo sapiens
gggctccaattcgtaggtttcctaa

SEQ ID NO: 20555 - DNA, 25 bp, Homo sapiens
tcgtactaacaggatgtgggctttc

SEQ ID NO: 20556 - DNA, 25 bp, Homo sapiens
gggctccaattcgtaggtttcctaa

SEQ ID NO: 20557 - DNA, 25 bp, Homo sapiens
cttgggacaacacagccaggaattc

SEQ ID NO: 20558 - DNA, 25 bp, Homo sapiens
tgagatgtttcatccaggcacatgc

SEQ ID NO: 20559 - DNA, 25 bp, Homo sapiens
cactcctgatggtgtataaggctcc

SEQ ID NO: 20560 - DNA, 25 bp, Homo sapiens
gtcgtatcaaggtgttctctccata

SEQ ID NO: 20561 - DNA, 25 bp, Homo sapiens
catgcaggtgccaacagttttcttc

SEQ ID NO: 20562 - DNA, 25 bp, Homo sapiens
cacactgaataaagaattactttga

SEQ ID NO: 20563 - DNA, 25 bp, Homo sapiens
tgctgtatcatactccaaattcttg

SEQ ID NO: 20564 - DNA, 25 bp, Homo sapiens
tcaccctgtgggaaactaactgtag

SEQ ID NO: 20565 - DNA, 25 bp, Homo sapiens
ctcacgtgtgttactccagcgattc

SEQ ID NO: 20566 - DNA, 25 bp, Homo sapiens
tttacccagaataccaacagagatc

SEQ ID NO: 20567 - DNA, 25 bp, Homo sapiens
gtgtcagcgtgccaatttttctata

SEQ ID NO: 20568 - DNA, 25 bp, Homo sapiens
ttcctgtacagctgcctagagcatt

SEQ ID NO: 20569 - DNA, 25 bp, Homo sapiens
tgccacgtctgtcaagaacactata

SEQ ID NO: 20570 - DNA, 25 bp, Homo sapiens
catcagaaatgttgacgcagcagta

SEQ ID NO: 20571 - DNA, 25 bp, Homo sapiens
tcccttcagtgtaggtgattgcata

SEQ ID NO: 20572 - DNA, 25 bp, Homo sapiens
gacctaggtctatcatttggcattc

SEQ ID NO: 20573 - DNA, 25 bp, Homo sapiens
tgccttagggccagctggatttgca

SEQ ID NO: 20574 - DNA, 25 bp, Homo sapiens
ctggaagatctttgagtcccacatc

SEQ ID NO: 20575 - DNA, 25 bp, Homo sapiens
atggcgttactagcctctcagctta

SEQ ID NO: 20576 - DNA, 25 bp, Homo sapiens
tctcctggcatagatctgatactca

SEQ ID NO: 20577 - DNA, 25 bp, Homo sapiens
gcctgggatttcacctagcttctta

SEQ ID NO: 20578 - DNA, 25 bp, Homo sapiens
gtcgctagctaccatgtgacctatt

SEQ ID NO: 20579 - DNA, 25 bp, Homo sapiens
gacctcgggctgagaagtcaaagta

SEQ ID NO: 20580 - DNA, 25 bp, Homo sapiens
gcttgcgtctgcacttgagtcaaga

SEQ ID NO: 20581 - DNA, 25 bp, Homo sapiens
gtggccttcagcttcttctattaaa

SEQ ID NO: 20582 - DNA, 25 bp, Homo sapiens
ttgacaggcaccatccgaattgttg

SEQ ID NO: 20583 - DNA, 25 bp, Homo sapiens
gacacttactctgcaaggaacattg

SEQ ID NO: 20584 - DNA, 25 bp, Homo sapiens
agtggtcccttctgaattccttgtc

SEQ ID NO: 20585 - DNA, 25 bp, Homo sapiens
tttcctggggagcagacaagctatc

SEQ ID NO: 20586 - DNA, 25 bp, Homo sapiens
gcacacatttgcacctctgatttga

SEQ ID NO: 20587 - DNA, 25 bp, Homo sapiens
gtttcagtgtaattgaggtccttca

SEQ ID NO: 20588 - DNA, 25 bp, Homo sapiens
acgcaggtcacagaggccaacttga

SEQ ID NO: 20589 - DNA, 25 bp, Homo sapiens
ttcaggaagccacagttcacatagc

SEQ ID NO: 20590 - DNA, 25 bp, Homo sapiens
cctgcaaggtgagtgggtctctaaa

SEQ ID NO: 20591 - DNA, 25 bp, Homo sapiens
tttggcgaggagatacggttcattt

SEQ ID NO: 20592 - DNA, 25 bp, Homo sapiens
tggtccaagcccttcctctgtgatg

SEQ ID NO: 20593 - DNA, 25 bp, Homo sapiens
agtgccagcttggttttctctgatg

SEQ ID NO: 20594 - DNA, 25 bp, Homo sapiens
aggtccttgaaatgagtcctcttaa

SEQ ID NO: 20595 - DNA, 25 bp, Homo sapiens
catctgttcgtttcatggggtcata

SEQ ID NO: 20596 - DNA, 25 bp, Homo sapiens
tgccagcataatctagccaggatgg

SEQ ID NO: 20597 - DNA, 25 bp, Homo sapiens
ctttctacaggacacccgggctttc

SEQ ID NO: 20598 - DNA, 25 bp, Homo sapiens
ttggccacctcctagagaagcaaga

SEQ ID NO: 20599 - DNA, 25 bp, Homo sapiens
agccgccctgggtaactcagtttca

SEQ ID NO: 20600 - DNA, 25 bp, Homo sapiens
cccagggtctgtgtaatgtccaaac

SEQ ID NO: 20601 - DNA, 25 bp, Homo sapiens
agtgagcacctaactcctctgagga

SEQ ID NO: 20602 - DNA, 25 bp, Homo sapiens
atggcctactctccctcatgtgaag

SEQ ID NO: 20603 - DNA, 25 bp, Homo sapiens
acaagcgaccctttgccatgacagg

SEQ ID NO: 20604 - DNA, 25 bp, Homo sapiens
ccaggggcagtgtatgagaattatc

SEQ ID NO: 20605 - DNA, 25 bp, Homo sapiens
ggtattatgtcaagcccacccgtaa

SEQ ID NO: 20606 - DNA, 25 bp, Homo sapiens
ggaacagtctgtttgaatcctctga

SEQ ID NO: 20607 - DNA, 25 bp, Homo sapiens
ttttttttttttcaggcaatgcctt

SEQ ID NO: 20608 - DNA, 25 bp, Homo sapiens
cagtctccgtgtgcctgatctaatc

SEQ ID NO: 20609 - DNA, 25 bp, Homo sapiens
gctcaggccatgataccacatatta

SEQ ID NO: 20610 - DNA, 25 bp, Homo sapiens
catgggctctagcagaaagtgacta

SEQ ID NO: 20611 - DNA, 25 bp, Homo sapiens
ccagatgatttatgaggcacccaca

SEQ ID NO: 20612 - DNA, 25 bp, Homo sapiens
ttgccaaaattgagcgtctgccatg

SEQ ID NO: 20613 - DNA, 25 bp, Homo sapiens
ttcagtttcagatcagctcctcatg

SEQ ID NO: 20614 - DNA, 25 bp, Homo sapiens
tctcgctgatggttgatagagccca

SEQ ID NO: 20615 - DNA, 25 bp, Homo sapiens
ccagcccgggagtaaagattgatta

SEQ ID NO: 20616 - DNA, 25 bp, Homo sapiens
acgtactggtttctgactagctgga

SEQ ID NO: 20617 - DNA, 25 bp, Homo sapiens
tgagggactccaacatctatatata

SEQ ID NO: 20618 - DNA, 25 bp, Homo sapiens
tgggtgcagcaccttcaaatcttgc

SEQ ID NO: 20619 - DNA, 25 bp, Homo sapiens
tgctagggtcccataacacttttaa

SEQ ID NO: 20620 - DNA, 25 bp, Homo sapiens
ccgcctagcgttctttcaactattg

SEQ ID NO: 20621 - DNA, 25 bp, Homo sapiens
atgtgctcacctgcgctcgagtgta

SEQ ID NO: 20622 - DNA, 25 bp, Homo sapiens
taggtacagagattcagataagatg

SEQ ID NO: 20623 - DNA, 25 bp, Homo sapiens
tttatcaaatgcttttggtacataa

SEQ ID NO: 20624 - DNA, 25 bp, Homo sapiens
accaggatgtgcctagctgatacca

SEQ ID NO: 20625 - DNA, 25 bp, Homo sapiens
cagcagattatgtgttaccatcatg

SEQ ID NO: 20626 - DNA, 25 bp, Homo sapiens
tgactgtactaggaccatgcaacta

SEQ ID NO: 20627 - DNA, 25 bp, Homo sapiens
gcctgcattgtgtattagtctttaa

SEQ ID NO: 20628 - DNA, 25 bp, Homo sapiens
cctcgtgttttaggtacggtattca

SEQ ID NO: 20629 - DNA, 25 bp, Homo sapiens
cctaggacaggggttggcaatttaa

SEQ ID NO: 20630 - DNA, 25 bp, Homo sapiens
atgcagcagcctgggaattcctttc

SEQ ID NO: 20631 - DNA, 25 bp, Homo sapiens
aatgcatttttatctggggacgtca

SEQ ID NO: 20632 - DNA, 25 bp, Homo sapiens
gctgctgcttggtatggcaatctta

SEQ ID NO: 20633 - DNA, 25 bp, Homo sapiens
ttttagcaatgcaaggaaatactga

SEQ ID NO: 20634 - DNA, 25 bp, Homo sapiens
gtgaatctgatgcctagaatatcca

SEQ ID NO: 20635 - DNA, 25 bp, Homo sapiens
gtgactgccaattgcctgacctgta

SEQ ID NO: 20636 - DNA, 25 bp, Homo sapiens
atgaaaaatacaaggtaagacaatt

SEQ ID NO: 20637 - DNA, 25 bp, Homo sapiens
ggctggagcaacctagaagacacta

SEQ ID NO: 20638 - DNA, 25 bp, Homo sapiens
ttcccatatgacttgaggcatcttg

SEQ ID NO: 20639 - DNA, 25 bp, Homo sapiens
ctgaggctcattctaagtcatttta

SEQ ID NO: 20640 - DNA, 25 bp, Homo sapiens
tgggtacagggcatgaaaaagtctt

SEQ ID NO: 20641 - DNA, 25 bp, Homo sapiens
tgccatgaaaacacaggtagaaata

SEQ ID NO: 20642 - DNA, 25 bp, Homo sapiens
tatacattcagggagcagcatggcc

SEQ ID NO: 20643 - DNA, 25 bp, Homo sapiens
tgtcccacatgagccagtaaacgta

SEQ ID NO: 20644 - DNA, 25 bp, Homo sapiens
aaggacgcttgcctcccatttatgg

SEQ ID NO: 20645 - DNA, 25 bp, Homo sapiens
tgtgactacatcctagccttgagtt

SEQ ID NO: 20646 - DNA, 25 bp, Homo sapiens
caacttgatagggatagtgcattcc

SEQ ID NO: 20647 - DNA, 25 bp, Homo sapiens
taccaattttatgcactttaatggc

SEQ ID NO: 20648 - DNA, 25 bp, Homo sapiens
acttctccagcagcctccagttgtg

SEQ ID NO: 20649 - DNA, 25 bp, Homo sapiens
cgctgtctgtgaatacacctggatc

SEQ ID NO: 20650 - DNA, 25 bp, Homo sapiens
tggcagggttgaactctctaatttc

SEQ ID NO: 20651 - DNA, 25 bp, Homo sapiens
tataaaagctgaagaaaatgtatac

SEQ ID NO: 20652 - DNA, 25 bp, Homo sapiens
gctctgtaccaaaacctcctgactt

SEQ ID NO: 20653 - DNA, 25 bp, Homo sapiens
gcacgtaggatactatatggaccca

SEQ ID NO: 20654 - DNA, 25 bp, Homo sapiens
tgcctactggtggttttacttaaaa

SEQ ID NO: 20655 - DNA, 25 bp, Homo sapiens
cagcagggttgggtctgttaccttt

SEQ ID NO: 20656 - DNA, 25 bp, Homo sapiens
ctagagtagatttttaaggagggta

SEQ ID NO: 20657 - DNA, 25 bp, Homo sapiens
tgctggaatgcaatacttttagttt

SEQ ID NO: 20658 - DNA, 25 bp, Homo sapiens
accctcttagggagtcactgcatta

SEQ ID NO: 20659 - DNA, 25 bp, Homo sapiens
ctccactgctgtagagacaaggaca

SEQ ID NO: 20660 - DNA, 25 bp, Homo sapiens
tgggctaagccatcctaatttgtta

SEQ ID NO: 20661 - DNA, 25 bp, Homo sapiens
aggatgcattattaccaagcttttg

SEQ ID NO: 20662 - DNA, 25 bp, Homo sapiens
cccattgtcatctggctctctgata

SEQ ID NO: 20663 - DNA, 25 bp, Homo sapiens
tagggcacacgggtttaaatgtttc

SEQ ID NO: 20664 - DNA, 25 bp, Homo sapiens
agctgtctgatagtcccatgaaata

SEQ ID NO: 20665 - DNA, 25 bp, Homo sapiens
cttgctgtgcacactggagttgcta

SEQ ID NO: 20666 - DNA, 25 bp, Homo sapiens
gggcctcaagaaagacactgacttc

SEQ ID NO: 20667 - DNA, 25 bp, Homo sapiens
ccgaagtttctattccctgtaccaa

SEQ ID NO: 20668 - DNA, 25 bp, Homo sapiens
ttctgccttaggacaccttatgagg

SEQ ID NO: 20669 - DNA, 25 bp, Homo sapiens
gtctgttactgtgcctgacacctta

SEQ ID NO: 20670 - DNA, 25 bp, Homo sapiens
gccttgtttataccacagtcactga

SEQ ID NO: 20671 - DNA, 25 bp, Homo sapiens
aagactgtttttaaattggtctatt

SEQ ID NO: 20672 - DNA, 25 bp, Homo sapiens
tgcctcaggtaaaaggctcagttaa

SEQ ID NO: 20673 - DNA, 25 bp, Homo sapiens
gcccgcgctctgtgttttagcattc

SEQ ID NO: 20674 - DNA, 25 bp, Homo sapiens
ccataaacttgagaccctaggccta

SEQ ID NO: 20675 - DNA, 25 bp, Homo sapiens
tggacctttgaggaaaccacctgtc

SEQ ID NO: 20676 - DNA, 25 bp, Homo sapiens
gttattcccaaatgcaacagaagtg

SEQ ID NO: 20677 - DNA, 25 bp, Homo sapiens
aggggttaagcgcacatactacaga

SEQ ID NO: 20678 - DNA, 25 bp, Homo sapiens
gcagggtgtggcctttagttctatt

SEQ ID NO: 20679 - DNA, 25 bp, Homo sapiens
atgcccttcctagacatatcttaga

SEQ ID NO: 20680 - DNA, 25 bp, Homo sapiens
gtcccacgctgatctttttgtaaaa

SEQ ID NO: 20681 - DNA, 25 bp, Homo sapiens
tttccagctgtaagtggctcttatg

SEQ ID NO: 20682 - DNA, 25 bp, Homo sapiens
tgtatatcatctatttttcccctta

SEQ ID NO: 20683 - DNA, 25 bp, Homo sapiens
agaggctgcttttccattcaatgtc

SEQ ID NO: 20684 - DNA, 25 bp, Homo sapiens
tttgcataaaaatccagtgtaattc

SEQ ID NO: 20685 - DNA, 25 bp, Homo sapiens
ctgatctacccagctgcccttgtct

SEQ ID NO: 20686 - DNA, 25 bp, Homo sapiens
tgggctgcaggcatgagttcctcaa

SEQ ID NO: 20687 - DNA, 25 bp, Homo sapiens
ttcctcaagggacaaagcacatttc

SEQ ID NO: 20688 - DNA, 25 bp, Homo sapiens
ccaggtgctactgcctctcatgata

SEQ ID NO: 20689 - DNA, 25 bp, Homo sapiens
tccctggggactcagcttgacatta

SEQ ID NO: 20690 - DNA, 25 bp, Homo sapiens
ggccctctttggatctagccttctg

SEQ ID NO: 20691 - DNA, 25 bp, Homo sapiens
tgactcaataatcttttctccacag

SEQ ID NO: 20692 - DNA, 25 bp, Homo sapiens
aagtgccagcttctccataaaatga

SEQ ID NO: 20693 - DNA, 25 bp, Homo sapiens
actgagtagagttttgcacccaatc

SEQ ID NO: 20694 - DNA, 25 bp, Homo sapiens
ggctgcagtatcttggcttctttta

SEQ ID NO: 20695 - DNA, 25 bp, Homo sapiens
tttgataagtcacccagagccatgc

SEQ ID NO: 20696 - DNA, 25 bp, Homo sapiens
tggctgcttcccacaaagtaggact

SEQ ID NO: 20697 - DNA, 25 bp, Homo sapiens
cggacaatttttccagttgacttga

SEQ ID NO: 20698 - DNA, 25 bp, Homo sapiens
tgtgcattcaaaccagcccagtctc

SEQ ID NO: 20699 - DNA, 25 bp, Homo sapiens
tgtgccctccaatccaataatcatg

SEQ ID NO: 20700 - DNA, 25 bp, Homo sapiens
gtcaagatatttgtctgatgtcctc

SEQ ID NO: 20701 - DNA, 25 bp, Homo sapiens
atcgcatttcgttgcatgcagcaga

SEQ ID NO: 20702 - DNA, 25 bp, Homo sapiens
tgttacagatcttttagtgaacttt

SEQ ID NO: 20703 - DNA, 25 bp, Homo sapiens
tgagggcacagtaccaaatctgttg

SEQ ID NO: 20704 - DNA, 25 bp, Homo sapiens
attgcatgcttaactcctctaggga

SEQ ID NO: 20705 - DNA, 25 bp, Homo sapiens
cagcctgcggcactcacagagaata

SEQ ID NO: 20706 - DNA, 25 bp, Homo sapiens
gagcatctggcatttcaacttatcg

SEQ ID NO: 20707 - DNA, 25 bp, Homo sapiens
ggtgcctctttagagcctcacagtg

SEQ ID NO: 20708 - DNA, 25 bp, Homo sapiens
tgcaatcttcgccttcccggtggta

SEQ ID NO: 20709 - DNA, 25 bp, Homo sapiens
tatgatccaaatgaaaccctgtgtg

SEQ ID NO: 20710 - DNA, 25 bp, Homo sapiens
caggactgttggtatgaattgcaca

SEQ ID NO: 20711 - DNA, 25 bp, Homo sapiens
tctggggcaagaacacacattttta

SEQ ID NO: 20712 - DNA, 25 bp, Homo sapiens
gggctccagaccttctacaattaga

SEQ ID NO: 20713 - DNA, 25 bp, Homo sapiens
tatcccaaatggttcatggtatttt

SEQ ID NO: 20714 - DNA, 25 bp, Homo sapiens
tggcacagttaccacaggcttcaga

SEQ ID NO: 20715 - DNA, 25 bp, Homo sapiens
tgtgctaccctacaagtctgctttg

SEQ ID NO: 20716 - DNA, 25 bp, Homo sapiens
ggaaacctcacctatcagcattttg

SEQ ID NO: 20717 - DNA, 25 bp, Homo sapiens
caccagggcccaggaatctctcata

SEQ ID NO: 20718 - DNA, 25 bp, Homo sapiens
ggtggatctcaaaaccagaagcttg

SEQ ID NO: 20719 - DNA, 25 bp, Homo sapiens
ccctgaagttagagagccctggctc

SEQ ID NO: 20720 - DNA, 25 bp, Homo sapiens
gaccagattactaatggtaagaatt

SEQ ID NO: 20721 - DNA, 25 bp, Homo sapiens
gtaggcaattatacagaaaaatgaa

SEQ ID NO: 20722 - DNA, 25 bp, Homo sapiens
caggttgctccctcatcaagtacta

SEQ ID NO: 20723 - DNA, 25 bp, Homo sapiens
ttagtcacagtaaaggcaggtctcc

SEQ ID NO: 20724 - DNA, 25 bp, Homo sapiens
cggaacccaaagctccaggaatttc

SEQ ID NO: 20725 - DNA, 25 bp, Homo sapiens
ccgcatcttttcatctcagagggtg

SEQ ID NO: 20726 - DNA, 25 bp, Homo sapiens
gaatagcttgtgtttgggcctcacc

SEQ ID NO: 20727 - DNA, 25 bp, Homo sapiens
ccatcccatggaagctgaaatttta

SEQ ID NO: 20728 - DNA, 25 bp, Homo sapiens
ccactgcaagtgtccatttggtttc

SEQ ID NO: 20729 - DNA, 25 bp, Homo sapiens
agagagagagagacaagtgtaatga

SEQ ID NO: 20730 - DNA, 25 bp, Homo sapiens
cttcaaggatcagacattcagcata

SEQ ID NO: 20731 - DNA, 25 bp, Homo sapiens
acatgggctgggcactttcttcaca

SEQ ID NO: 20732 - DNA, 25 bp, Homo sapiens
gcagaatttgagacttcccacaggg

SEQ ID NO: 20733 - DNA, 25 bp, Homo sapiens
tgtaagtcatcacagcaggtcagtc

SEQ ID NO: 20734 - DNA, 25 bp, Homo sapiens
tctttgcacggggtacgcatctcta

SEQ ID NO: 20735 - DNA, 25 bp, Homo sapiens
agtgctttgaactccgcatgggaca

SEQ ID NO: 20736 - DNA, 25 bp, Homo sapiens
cctcctgttctgtgtgggtcactca

SEQ ID NO: 20737 - DNA, 25 bp, Homo sapiens
tctgctgacacacccatctcggagg

SEQ ID NO: 20738 - DNA, 25 bp, Homo sapiens
ggctttcccaacacctcagagatgg

SEQ ID NO: 20739 - DNA, 25 bp, Homo sapiens
gctaaatgtttcctgggcccggaga

SEQ ID NO: 20740 - DNA, 25 bp, Homo sapiens
ctcccggacagtggaggaaatccta

SEQ ID NO: 20741 - DNA, 25 bp, Homo sapiens
caccctttgtgctggttacagatta

SEQ ID NO: 20742 - DNA, 25 bp, Homo sapiens
ggcagcctatctcgtgcattactaa

SEQ ID NO: 20743 - DNA, 25 bp, Homo sapiens
aggtcgctctgtccctctaagaaca

SEQ ID NO: 20744 - DNA, 25 bp, Homo sapiens
ggaattctctcccttgcacgtttag

SEQ ID NO: 20745 - DNA, 25 bp, Homo sapiens
cctgtcacgcgcacatatgagtaga

SEQ ID NO: 20746 - DNA, 25 bp, Homo sapiens
ccgccctgttctttaagccgctatg

SEQ ID NO: 20747 - DNA, 25 bp, Homo sapiens
tctggctgtgctccaactttggaca

SEQ ID NO: 20748 - DNA, 25 bp, Homo sapiens
aggcacaggctgcagctcccattta

SEQ ID NO: 20749 - DNA, 25 bp, Homo sapiens
cactccggaggccacatgttgtctt

SEQ ID NO: 20750 - DNA, 25 bp, Homo sapiens
gtgggatacactccctcactgggta

SEQ ID NO: 20751 - DNA, 25 bp, Homo sapiens
gaggccagccctctcctaatggttg

SEQ ID NO: 20752 - DNA, 25 bp, Homo sapiens
caggacttgatattgatgtcaaaga

SEQ ID NO: 20753 - DNA, 25 bp, Homo sapiens
tttgtccatttctaggcgccaagca

SEQ ID NO: 20754 - DNA, 25 bp, Homo sapiens
cctctggtcctgttcaagcataatc

SEQ ID NO: 20755 - DNA, 25 bp, Homo sapiens
tccatgggatcgcagcagtgtttcc

SEQ ID NO: 20756 - DNA, 25 bp, Homo sapiens
gagcctcgctcctcaggaaaatttt

SEQ ID NO: 20757 - DNA, 25 bp, Homo sapiens
gcaggctgcaccacgttcatggata

SEQ ID NO: 20758 - DNA, 25 bp, Homo sapiens
aggatcctctatcgaagtctgttta

SEQ ID NO: 20759 - DNA, 25 bp, Homo sapiens
gctggggctgtttctacacctcaaa

SEQ ID NO: 20760 - DNA, 25 bp, Homo sapiens
aggggcacaggacagctcaaaattc

SEQ ID NO: 20761 - DNA, 25 bp, Homo sapiens
ggcctccagggatgcacaagatctc

SEQ ID NO: 20762 - DNA, 25 bp, Homo sapiens
gctcaggtcctaggtgcccagtaaa

SEQ ID NO: 20763 - DNA, 25 bp, Homo sapiens
gtgcccagccacacgcagtaaattt

SEQ ID NO: 20764 - DNA, 25 bp, Homo sapiens
cagggatcctgcagaccacatttca

SEQ ID NO: 20765 - DNA, 25 bp, Homo sapiens
caccagctgtcaggatttgctatca

SEQ ID NO: 20766 - DNA, 25 bp, Homo sapiens
tgctgtcaaccagaggggcctcctt

SEQ ID NO: 20767 - DNA, 25 bp, Homo sapiens
ggtgttcacagaccacgccattatc

SEQ ID NO: 20768 - DNA, 25 bp, Homo sapiens
agggagtggcctcttcagatctacc

SEQ ID NO: 20769 - DNA, 25 bp, Homo sapiens
tgtcctagccttagtcctacgtgta

SEQ ID NO: 20770 - DNA, 25 bp, Homo sapiens
gatggccgacattctccttgctgtg

SEQ ID NO: 20771 - DNA, 25 bp, Homo sapiens
gtccctccgagaagcaagctgtctt

SEQ ID NO: 20772 - DNA, 25 bp, Homo sapiens
tgtagagttacttcgcaccatgtga

SEQ ID NO: 20773 - DNA, 25 bp, Homo sapiens
agtgtttcagtgcatatgtgagtgc

SEQ ID NO: 20774 - DNA, 25 bp, Homo sapiens
cctggctacgttgcggcattcatga

SEQ ID NO: 20775 - DNA, 25 bp, Homo sapiens
tgccctcttccgtgtctccattgga

SEQ ID NO: 20776 - DNA, 25 bp, Homo sapiens
aggccagctcctttctgagaccaga

SEQ ID NO: 20777 - DNA, 25 bp, Homo sapiens
aggccatttgctgatcccatgcgaa

SEQ ID NO: 20778 - DNA, 25 bp, Homo sapiens
agcctgtctcgcacctaggaatttc

SEQ ID NO: 20779 - DNA, 25 bp, Homo sapiens
gggagtaatttgctgccatccatga

SEQ ID NO: 20780 - DNA, 25 bp, Homo sapiens
cggggatgataaccacagacgtata

SEQ ID NO: 20781 - DNA, 25 bp, Homo sapiens
ggggctgagtctcgttcctaccaca

SEQ ID NO: 20782 - DNA, 25 bp, Homo sapiens
ggccacgtgaccactcttgtaagca

SEQ ID NO: 20783 - DNA, 25 bp, Homo sapiens
cggcactgaccatggcacgaaacta

SEQ ID NO: 20784 - DNA, 25 bp, Homo sapiens
ggcctgaactgcagatcccaatttc

SEQ ID NO: 20785 - DNA, 25 bp, Homo sapiens
tgctcatttgaggatcaggactttc

SEQ ID NO: 20786 - DNA, 25 bp, Homo sapiens
tcagtccacggcaaaggttcaaaga

SEQ ID NO: 20787 - DNA, 25 bp, Homo sapiens
tcccggcgggctcttacttaaagga

SEQ ID NO: 20788 - DNA, 25 bp, Homo sapiens
acctgtgtgcacaaccctgaggaca

SEQ ID NO: 20789 - DNA, 25 bp, Homo sapiens
tgcccttttgtgtcagaggaggatc

SEQ ID NO: 20790 - DNA, 25 bp, Homo sapiens
cagggaacaccctcagtcaggaaac

SEQ ID NO: 20791 - DNA, 25 bp, Homo sapiens
cctcagtcccgggaacccttcagtc

SEQ ID NO: 20792 - DNA, 25 bp, Homo sapiens
agcatgctgtttactccctcactga

SEQ ID NO: 20793 - DNA, 25 bp, Homo sapiens
tcctcgtggcgtgttccatagcatg

SEQ ID NO: 20794 - DNA, 25 bp, Homo sapiens
tccagagagagccattgtgtccatg

SEQ ID NO: 20795 - DNA, 25 bp, Homo sapiens
gtggctctcggcacatcctgcctta

SEQ ID NO: 20796 - DNA, 25 bp, Homo sapiens
tggacatcaacctgcacctgtggtg

SEQ ID NO: 20797 - DNA, 25 bp, Homo sapiens
agggctttgctcctcatggtttcca

SEQ ID NO: 20798 - DNA, 25 bp, Homo sapiens
ttgtccctcctccagtgagagaatg

SEQ ID NO: 20799 - DNA, 25 bp, Homo sapiens
cccaagctatagaggccgtgagatg

SEQ ID NO: 20800 - DNA, 25 bp, Homo sapiens
cccagggcgacttttcagaggataa

SEQ ID NO: 20801 - DNA, 25 bp, Homo sapiens
tgtgcgctcctgagaatggctgtcc

SEQ ID NO: 20802 - DNA, 25 bp, Homo sapiens
tcctggggccacactgaagaaatta

SEQ ID NO: 20803 - DNA, 25 bp, Homo sapiens
ggcgaactgggtctcaggacaaatc

SEQ ID NO: 20804 - DNA, 25 bp, Homo sapiens
ggaggggctactgttcactgtttaa

SEQ ID NO: 20805 - DNA, 25 bp, Homo sapiens
ggctggcatcctcaagggagcttga

SEQ ID NO: 20806 - DNA, 25 bp, Homo sapiens
ggagcacgcagagtcccagacatta

SEQ ID NO: 20807 - DNA, 25 bp, Homo sapiens
tctctcctgagataacggccacctg

SEQ ID NO: 20808 - DNA, 25 bp, Homo sapiens
gaggcccgtcttctctctgatcaca

SEQ ID NO: 20809 - DNA, 25 bp, Homo sapiens
ggaggcaactccaccaatcattttg

SEQ ID NO: 20810 - DNA, 25 bp, Homo sapiens
acctctcaggatgcgtgctctcaca

SEQ ID NO: 20811 - DNA, 25 bp, Homo sapiens
ctgactttgtacattccctgggtga

SEQ ID NO: 20812 - DNA, 25 bp, Homo sapiens
ggacgccctggagaacactctcttg

SEQ ID NO: 20813 - DNA, 25 bp, Homo sapiens
aaggccgcgcttctctaagactgga

SEQ ID NO: 20814 - DNA, 25 bp, Homo sapiens
ggccgcagggagttttttgttcaaa

SEQ ID NO: 20815 - DNA, 25 bp, Homo sapiens
gtgtgtctcacctctgcttcccaga

SEQ ID NO: 20816 - DNA, 25 bp, Homo sapiens
cgggcagcctctcttggaatagaaa

SEQ ID NO: 20817 - DNA, 25 bp, Homo sapiens
gctcgtgtctttccaggacccagga

SEQ ID NO: 20818 - DNA, 25 bp, Homo sapiens
cccagccaaggagggttctaatttt

SEQ ID NO: 20819 - DNA, 25 bp, Homo sapiens
cacagctctgatgatggcctcctta

SEQ ID NO: 20820 - DNA, 25 bp, Homo sapiens
tcggcccattcccagagagcagttc

SEQ ID NO: 20821 - DNA, 25 bp, Homo sapiens
tggaagctcgttcatctctaggtga

SEQ ID NO: 20822 - DNA, 25 bp, Homo sapiens
ggtagctcttctggttggacacaca

SEQ ID NO: 20823 - DNA, 25 bp, Homo sapiens
tgggaagcccttggtgaacacattc

SEQ ID NO: 20824 - DNA, 25 bp, Homo sapiens
acgacctgcaggctgtctttgctca

SEQ ID NO: 20825 - DNA, 25 bp, Homo sapiens
gcggcttctccagtccaaggtcaga

SEQ ID NO: 20826 - DNA, 25 bp, Homo sapiens
agcatgtggcattctctgtccctca

SEQ ID NO: 20827 - DNA, 25 bp, Homo sapiens
ttctgtcccagccagcactgatgtg

SEQ ID NO: 20828 - DNA, 25 bp, Homo sapiens
taattgttgtcagcgccagagtcca

SEQ ID NO: 20829 - DNA, 25 bp, Homo sapiens
taccggtatacagattgcgccacta

SEQ ID NO: 20830 - DNA, 25 bp, Homo sapiens
gcattgttcctcgtatagatcccta

SEQ ID NO: 20831 - DNA, 25 bp, Homo sapiens
agccagagagccaggacttgattca

SEQ ID NO: 20832 - DNA, 25 bp, Homo sapiens
taccatccgtccagtgcccattttg

SEQ ID NO: 20833 - DNA, 25 bp, Homo sapiens
cctgccacggcttacacacattgag

SEQ ID NO: 20834 - DNA, 25 bp, Homo sapiens
aggtgactccagactcgagccttta

SEQ ID NO: 20835 - DNA, 25 bp, Homo sapiens
tgtcggcatccatgtcctcgataga

SEQ ID NO: 20836 - DNA, 25 bp, Homo sapiens
gtcctgactggcactggcatgaaca

SEQ ID NO: 20837 - DNA, 25 bp, Homo sapiens
ctccttggtttacgaggccctctca

SEQ ID NO: 20838 - DNA, 25 bp, Homo sapiens
ctgcccggggagcagataatccata

SEQ ID NO: 20839 - DNA, 25 bp, Homo sapiens
gagctgcaacctaaatgggccatta

SEQ ID NO: 20840 - DNA, 25 bp, Homo sapiens
ctgcggcggctcatcgaaattacca

SEQ ID NO: 20841 - DNA, 25 bp, Homo sapiens
gcttccggggttattttctcagaga

SEQ ID NO: 20842 - DNA, 25 bp, Homo sapiens
ctccgaccttccgtgatagcaaatg

SEQ ID NO: 20843 - DNA, 25 bp, Homo sapiens
tgtgatctgcacgtaatcgcctgga

SEQ ID NO: 20844 - DNA, 25 bp, Homo sapiens
cgttctggagtttctgcaacacaca

SEQ ID NO: 20845 - DNA, 25 bp, Homo sapiens
tggtcagcatattgaggtacagcac

SEQ ID NO: 20846 - DNA, 25 bp, Homo sapiens
ggtcaacgcggtatccaaaagatgt

SEQ ID NO: 20847 - DNA, 25 bp, Homo sapiens
gcgcaccctgggcatcttaacaagt

SEQ ID NO: 20848 - DNA, 25 bp, Homo sapiens
gccagtatttgtccagtaagcatcc

SEQ ID NO: 20849 - DNA, 25 bp, Homo sapiens
taggctttgcagtaccttccgggca

SEQ ID NO: 20850 - DNA, 25 bp, Homo sapiens
agcaggtttcaccagcagatcatga

SEQ ID NO: 20851 - DNA, 25 bp, Homo sapiens
gccgtgtgcacctgttattttgatc

SEQ ID NO: 20852 - DNA, 25 bp, Homo sapiens
gcctggacctgcgaccttacaaatg

SEQ ID NO: 20853 - DNA, 25 bp, Homo sapiens
tcccgagcctatgactgacacagtg

SEQ ID NO: 20854 - DNA, 25 bp, Homo sapiens
gagcaaagctgtgtccctgtagaga

SEQ ID NO: 20855 - DNA, 25 bp, Homo sapiens
tctggcctttccctgaagcgaatta

SEQ ID NO: 20856 - DNA, 25 bp, Homo sapiens
acactgggtgtaggacttggtcaca

SEQ ID NO: 20857 - DNA, 25 bp, Homo sapiens
ccggagactgttcgtgtattagcaa

SEQ ID NO: 20858 - DNA, 25 bp, Homo sapiens
gaggcttttccagattttcccaggg

SEQ ID NO: 20859 - DNA, 25 bp, Homo sapiens
gttccagggatcagctcttaccatg

SEQ ID NO: 20860 - DNA, 25 bp, Homo sapiens
cctggcaggtggagagtaattcttt

SEQ ID NO: 20861 - DNA, 25 bp, Homo sapiens
tggcccaacgctgcattccctgaga

SEQ ID NO: 20862 - DNA, 25 bp, Homo sapiens
cccggcctggcagagacatctatac

SEQ ID NO: 20863 - DNA, 25 bp, Homo sapiens
ggccatcgacaccttgcattgaatt

SEQ ID NO: 20864 - DNA, 25 bp, Homo sapiens
tccacgtcccgtgtgagcaggatct

SEQ ID NO: 20865 - DNA, 25 bp, Homo sapiens
tcccttagagatgagccggttcttc

SEQ ID NO: 20866 - DNA, 25 bp, Homo sapiens
tgcgtcgttcctagtgtctcctatg

SEQ ID NO: 20867 - DNA, 25 bp, Homo sapiens
aggacctgcttggtagagccctccc

SEQ ID NO: 20868 - DNA, 25 bp, Homo sapiens
tgttggctgcacacttgagctctga

SEQ ID NO: 20869 - DNA, 25 bp, Homo sapiens
aaagcgttctctcacagcctcagga

SEQ ID NO: 20870 - DNA, 25 bp, Homo sapiens
tcgggtttccagacagcagcaagtc

SEQ ID NO: 20871 - DNA, 25 bp, Homo sapiens
gcgaggtgagcagtttccatgttta

SEQ ID NO: 20872 - DNA, 25 bp, Homo sapiens
agcctccggtctatttgtgatccca

SEQ ID NO: 20873 - DNA, 25 bp, Homo sapiens
ctgctctggggaaagtagtcacact

SEQ ID NO: 20874 - DNA, 25 bp, Homo sapiens
agtccactctgctgctctgacagga

SEQ ID NO: 20875 - DNA, 25 bp, Homo sapiens
ttgtttcatgagtgcccacgggcca

SEQ ID NO: 20876 - DNA, 25 bp, Homo sapiens
agtgcggctctcagtctatggatcc

SEQ ID NO: 20877 - DNA, 25 bp, Homo sapiens
tgcagcacaagagtcgggagccttc

SEQ ID NO: 20878 - DNA, 25 bp, Homo sapiens
tcacacgtggatggagctgtttctc

SEQ ID NO: 20879 - DNA, 25 bp, Homo sapiens
tgtcatcagagctcaccaagtattt

SEQ ID NO: 20880 - DNA, 25 bp, Homo sapiens
ttttaatgagtttttttgtctgcag

SEQ ID NO: 20881 - DNA, 25 bp, Homo sapiens
ctgtcttttaatttcaatttttctg

SEQ ID NO: 20882 - DNA, 25 bp, Homo sapiens
ataagctgtccttacaccatcctca

SEQ ID NO: 20883 - DNA, 25 bp, Homo sapiens
ggctgttgctttcactgctccttga

SEQ ID NO: 20884 - DNA, 25 bp, Homo sapiens
ttgaccagcaaacaggagcaccgtg

SEQ ID NO: 20885 - DNA, 25 bp, Homo sapiens
aggcctcttgctgagctgaccttca

SEQ ID NO: 20886 - DNA, 25 bp, Homo sapiens
cccggtggtcattacctggtctcca

SEQ ID NO: 20887 - DNA, 25 bp, Homo sapiens
gcaccttttgtgagcgttccatttg

SEQ ID NO: 20888 - DNA, 25 bp, Homo sapiens
ggggaccctgtaaacacgccagttc

SEQ ID NO: 20889 - DNA, 25 bp, Homo sapiens
gtcgtgcctcatttgttcctgtaga

SEQ ID NO: 20890 - DNA, 25 bp, Homo sapiens
aagctgaactcttgcctgggaccca

SEQ ID NO: 20891 - DNA, 25 bp, Homo sapiens
ctataggacttttcagcaggctgtg

SEQ ID NO: 20892 - DNA, 25 bp, Homo sapiens
cagatcccgctttacccggtgcgta

SEQ ID NO: 20893 - DNA, 25 bp, Homo sapiens
ttcggccatttgagagactaacata

SEQ ID NO: 20894 - DNA, 25 bp, Homo sapiens
gtcctgggtatcagatggtgttaca

SEQ ID NO: 20895 - DNA, 25 bp, Homo sapiens
gcagtaagatattgtgactcaacct

SEQ ID NO: 20896 - DNA, 25 bp, Homo sapiens
aactttaacaggaacgagcatccgg

SEQ ID NO: 20897 - DNA, 25 bp, Homo sapiens
cgttgggtaccccgggtatgagtac

SEQ ID NO: 20898 - DNA, 25 bp, Homo sapiens
cgtgtgccacacatagtagctcata

SEQ ID NO: 20899 - DNA, 25 bp, Homo sapiens
ctcagctcaagggactatttccatg

SEQ ID NO: 20900 - DNA, 25 bp, Homo sapiens
cagtgctcttgggtttggtatcatc

SEQ ID NO: 20901 - DNA, 25 bp, Homo sapiens
ttccgtgggataatgagaaaccatg

SEQ ID NO: 20902 - DNA, 25 bp, Homo sapiens
gccagtctttttaggccttcagaga

SEQ ID NO: 20903 - DNA, 25 bp, Homo sapiens
agtcatgtgttgttgaaggatgggg

SEQ ID NO: 20904 - DNA, 25 bp, Homo sapiens
ataaatatagagaaatagtgtgtat

SEQ ID NO: 20905 - DNA, 25 bp, Homo sapiens
gctgcccttgtcttgaaactgtgtg

SEQ ID NO: 20906 - DNA, 25 bp, Homo sapiens
ataggctgcctgtttcttgaaatca

SEQ ID NO: 20907 - DNA, 25 bp, Homo sapiens
tgtctgtgatggctggaagttcctc

SEQ ID NO: 20908 - DNA, 25 bp, Homo sapiens
tcttcccaaaagatagatatgggcc

SEQ ID NO: 20909 - DNA, 25 bp, Homo sapiens
gtgtgtgtgtgcagttctcggtgat

SEQ ID NO: 20910 - DNA, 25 bp, Homo sapiens
actaaaccaaataactatttgtagt

SEQ ID NO: 20911 - DNA, 25 bp, Homo sapiens
cgtggcccgaagaagaccctgattt

SEQ ID NO: 20912 - DNA, 25 bp, Homo sapiens
ccatatgggatgagaagcgacctga

SEQ ID NO: 20913 - DNA, 25 bp, Homo sapiens
catgggcgaatgtgctcatctttta

SEQ ID NO: 20914 - DNA, 25 bp, Homo sapiens
tgctcatgttatgcagacagtggtc

SEQ ID NO: 20915 - DNA, 25 bp, Homo sapiens
gtcgcagtctgcatggcaccacagc

SEQ ID NO: 20916 - DNA, 25 bp, Homo sapiens
tatttgacttatacggcaggctttc

SEQ ID NO: 20917 - DNA, 25 bp, Homo sapiens
ccctggggtacatttatataagact

SEQ ID NO: 20918 - DNA, 25 bp, Homo sapiens
tacatggaatgtgggttgctttatc

SEQ ID NO: 20919 - DNA, 25 bp, Homo sapiens
cccattgccctgcttggtgaaattt

SEQ ID NO: 20920 - DNA, 25 bp, Homo sapiens
cctgcctgtagagctgccaaagtta

SEQ ID NO: 20921 - DNA, 25 bp, Homo sapiens
ggtaggctccgtctccctaaccaga

SEQ ID NO: 20922 - DNA, 25 bp, Homo sapiens
gattgatcacaaagtctaaagaatg

SEQ ID NO: 20923 - DNA, 25 bp, Homo sapiens
ggcgtcaactcttccagggctctca

SEQ ID NO: 20924 - DNA, 25 bp, Homo sapiens
tgcttaagtatcgtttcccggctgg

SEQ ID NO: 20925 - DNA, 25 bp, Homo sapiens
tttcgttccttggtttggcagcagc

SEQ ID NO: 20926 - DNA, 25 bp, Homo sapiens
ttctcgtgtgcgtgtctctgcatta

SEQ ID NO: 20927 - DNA, 25 bp, Homo sapiens
gtgggagcttaatttcactgacttc

SEQ ID NO: 20928 - DNA, 25 bp, Homo sapiens
actggccatcattccctattgtata

SEQ ID NO: 20929 - DNA, 25 bp, Homo sapiens
tacagtgtgtgctaaaggacctaag

SEQ ID NO: 20930 - DNA, 25 bp, Homo sapiens
gcagcacacttaatttggcctattg

SEQ ID NO: 20931 - DNA, 25 bp, Homo sapiens
ttcggcgttttcagcgtgacaagga

SEQ ID NO: 20932 - DNA, 25 bp, Homo sapiens
cccaaagtctgtttaaaaagtttgc

SEQ ID NO: 20933 - DNA, 25 bp, Homo sapiens
tctttgatgctcgaatggtggtgtg

SEQ ID NO: 20934 - DNA, 25 bp, Homo sapiens
caaaaatggcataaaatgttgagga

SEQ ID NO: 20935 - DNA, 25 bp, Homo sapiens
tggtctgacacctgagcagcatttg

SEQ ID NO: 20936 - DNA, 25 bp, Homo sapiens
ctgtcctgtactgtttggccacttc

SEQ ID NO: 20937 - DNA, 25 bp, Homo sapiens
atgagctggctccactgaacctgtg

SEQ ID NO: 20938 - DNA, 25 bp, Homo sapiens
agggttagttgtcttttatctcagc

SEQ ID NO: 20939 - DNA, 25 bp, Homo sapiens
gggcattctctgttccttttggata

SEQ ID NO: 20940 - DNA, 25 bp, Homo sapiens
gctccagcctggacctcagtgtttt

SEQ ID NO: 20941 - DNA, 25 bp, Homo sapiens
ttgctatgtgccttaatccgttatg

SEQ ID NO: 20942 - DNA, 25 bp, Homo sapiens
gcagctaacttagggtccattttga

SEQ ID NO: 20943 - DNA, 25 bp, Homo sapiens
cacgacttactgagtgtgcacttga

SEQ ID NO: 20944 - DNA, 25 bp, Homo sapiens
actgccggatgctttgctgtgaaaa

SEQ ID NO: 20945 - DNA, 25 bp, Homo sapiens
ttctcctgtgttggtaaagctattg

SEQ ID NO: 20946 - DNA, 25 bp, Homo sapiens
gttttcagaacttcctcctacaggg

SEQ ID NO: 20947 - DNA, 25 bp, Homo sapiens
tgactgaaggtccaggctgcatgtc

SEQ ID NO: 20948 - DNA, 25 bp, Homo sapiens
tgactgaaggtccatgctgcatatc

SEQ ID NO: 20949 - DNA, 25 bp, Homo sapiens
gtggtgttaggagaacacagggctc

SEQ ID NO: 20950 - DNA, 25 bp, Homo sapiens
aatctagttttattaggttgtacag

SEQ ID NO: 20951 - DNA, 25 bp, Homo sapiens
ggcaatacctgctgtgttacatgta

SEQ ID NO: 20952 - DNA, 25 bp, Homo sapiens
cggacatggtgtttcttaggacttc

SEQ ID NO: 20953 - DNA, 25 bp, Homo sapiens
gcctagtgtcgccaaatagaaaatc

SEQ ID NO: 20954 - DNA, 25 bp, Homo sapiens
gggagatcagctctacccaataatc

SEQ ID NO: 20955 - DNA, 25 bp, Homo sapiens
ggtaggctgccttcatagtttgtca

SEQ ID NO: 20956 - DNA, 25 bp, Homo sapiens
gcttgtttaaaaaatcagctttagt

SEQ ID NO: 20957 - DNA, 25 bp, Homo sapiens
ttcctgggaaactgtaacttcattc

SEQ ID NO: 20958 - DNA, 25 bp, Homo sapiens
ttccatgttgtagggagaatcactc

SEQ ID NO: 20959 - DNA, 25 bp, Homo sapiens
tctggtgactgatggcttaaattcc

SEQ ID NO: 20960 - DNA, 25 bp, Homo sapiens
gaggcatggcttttttctttaaaca

SEQ ID NO: 20961 - DNA, 25 bp, Homo sapiens
gagaatcttttcatggctcttgatc

SEQ ID NO: 20962 - DNA, 25 bp, Homo sapiens
ctagctaccatgatacgagttccca

SEQ ID NO: 20963 - DNA, 25 bp, Homo sapiens
tggagagtcctagatccagcctatc

SEQ ID NO: 20964 - DNA, 25 bp, Homo sapiens
cattgaccagaaagtggtttacgtg

SEQ ID NO: 20965 - DNA, 25 bp, Homo sapiens
ggcatttttctatgacgggtccctc

SEQ ID NO: 20966 - DNA, 25 bp, Homo sapiens
gcagccggccggtaactttcattca

SEQ ID NO: 20967 - DNA, 25 bp, Homo sapiens
agaggtctctctcctgcatgtcaga

SEQ ID NO: 20968 - DNA, 25 bp, Homo sapiens
accattcatgaccttcggagactcg

SEQ ID NO: 20969 - DNA, 25 bp, Homo sapiens
cttcccttaaaggttttattcattt

SEQ ID NO: 20970 - DNA, 25 bp, Homo sapiens
cctggatgaattctctctgtgatta

SEQ ID NO: 20971 - DNA, 25 bp, Homo sapiens
ggcctgagagcatatggtaacattt

SEQ ID NO: 20972 - DNA, 25 bp, Homo sapiens
tgtgctcctctcctttgcgactttg

SEQ ID NO: 20973 - DNA, 25 bp, Homo sapiens
ggtagagtcaaccaggcagctatta

SEQ ID NO: 20974 - DNA, 25 bp, Homo sapiens
cggaagtcagtcatttgactctgta

SEQ ID NO: 20975 - DNA, 25 bp, Homo sapiens
atcctgctgatgtctactgaaatcc

SEQ ID NO: 20976 - DNA, 25 bp, Homo sapiens
gcttccatagctgacctgatattgg

SEQ ID NO: 20977 - DNA, 25 bp, Homo sapiens
gttccagctgatgcacaaagaccta

SEQ ID NO: 20978 - DNA, 25 bp, Homo sapiens
cgtggccagtacactttgatacaga

SEQ ID NO: 20979 - DNA, 25 bp, Homo sapiens
gtgttggccttgacctcacagcaga

SEQ ID NO: 20980 - DNA, 25 bp, Homo sapiens
gggcaactttgtcatctctgatacg

SEQ ID NO: 20981 - DNA, 25 bp, Homo sapiens
ggtgctccctgtaatccttgttaga

SEQ ID NO: 20982 - DNA, 25 bp, Homo sapiens
ttgtccttgaatagacctgtttccc

SEQ ID NO: 20983 - DNA, 25 bp, Homo sapiens
atgacagaactttatacactcacac

SEQ ID NO: 20984 - DNA, 25 bp, Homo sapiens
tttcgaaggcacatttaccagggta

SEQ ID NO: 20985 - DNA, 25 bp, Homo sapiens
gcactgggccttttgtagctgccta

SEQ ID NO: 20986 - DNA, 25 bp, Homo sapiens
tcatccaggttttgcacacagaaga

SEQ ID NO: 20987 - DNA, 25 bp, Homo sapiens
cagctcaagtgtgtgttattaaata

SEQ ID NO: 20988 - DNA, 25 bp, Homo sapiens
tcccagtgggtcaggtggacagaaa

SEQ ID NO: 20989 - DNA, 25 bp, Homo sapiens
tggggatttcagaggccaggtaata

SEQ ID NO: 20990 - DNA, 25 bp, Homo sapiens
aattgttttcatcagaatagacttg

SEQ ID NO: 20991 - DNA, 25 bp, Homo sapiens
ggtccctgtggcagtatacccagta

SEQ ID NO: 20992 - DNA, 25 bp, Homo sapiens
gagcaggtgcctgatgcctcataca

SEQ ID NO: 20993 - DNA, 25 bp, Homo sapiens
cccgtaatagtggtgtgttagctac

SEQ ID NO: 20994 - DNA, 25 bp, Homo sapiens
ggacacttcctaactactgggcttg

SEQ ID NO: 20995 - DNA, 25 bp, Homo sapiens
ggccatattggtttgctatctgtta

SEQ ID NO: 20996 - DNA, 25 bp, Homo sapiens
tccagggactccaaacaagggtttc

SEQ ID NO: 20997 - DNA, 25 bp, Homo sapiens
agaccaggtctaggagcagcttttc

SEQ ID NO: 20998 - DNA, 25 bp, Homo sapiens
gagtgctcggccttcagtagttaca

SEQ ID NO: 20999 - DNA, 25 bp, Homo sapiens
gggtcctggagaaccatcgtgttta

SEQ ID NO: 21000 - DNA, 25 bp, Homo sapiens
gccctgcctgcttttgctaacggta

SEQ ID NO: 21001 - DNA, 25 bp, Homo sapiens
ctaccaacatggtcctgaactcagg

SEQ ID NO: 21002 - DNA, 25 bp, Homo sapiens
gctggccttgcctttcatgaacttt

SEQ ID NO: 21003 - DNA, 25 bp, Homo sapiens
aggaccactttcatgtttttgcagg

SEQ ID NO: 21004 - DNA, 25 bp, Homo sapiens
aagtcctaggccgtttgcagcagta

SEQ ID NO: 21005 - DNA, 25 bp, Homo sapiens
gcggcctcctagttttgcaagcatg

SEQ ID NO: 21006 - DNA, 25 bp, Homo sapiens
gcgctgctgatagtgaagctcctga

SEQ ID NO: 21007 - DNA, 25 bp, Homo sapiens
ggcagctcctgcttcttgtcatgtt

SEQ ID NO: 21008 - DNA, 25 bp, Homo sapiens
tgcaatcacagctggaggactcttc

SEQ ID NO: 21009 - DNA, 25 bp, Homo sapiens
aggctgttacagacactggattatc

SEQ ID NO: 21010 - DNA, 25 bp, Homo sapiens
tgttaaccatgtgcaagtcccagtg

SEQ ID NO: 21011 - DNA, 25 bp, Homo sapiens
gctgctgccttaactctctttcttg

SEQ ID NO: 21012 - DNA, 25 bp, Homo sapiens
tgtgcccatgtgcttcaccaaagag

SEQ ID NO: 21013 - DNA, 25 bp, Homo sapiens
gggcaggtcccttggttttctaatt

SEQ ID NO: 21014 - DNA, 25 bp, Homo sapiens
ggggacgtcctttcgaaaccatgtt

SEQ ID NO: 21015 - DNA, 25 bp, Homo sapiens
agatgtcgcctcttccactgaaatg

SEQ ID NO: 21016 - DNA, 25 bp, Homo sapiens
ccttcccgggaggttctaactgttc

SEQ ID NO: 21017 - DNA, 25 bp, Homo sapiens
aggtgatcgcctgttgcatctgtca

SEQ ID NO: 21018 - DNA, 25 bp, Homo sapiens
gcaggcgctctgctgtcttcacaga

SEQ ID NO: 21019 - DNA, 25 bp, Homo sapiens
ataataaaatggaagtttccttggc

SEQ ID NO: 21020 - DNA, 25 bp, Homo sapiens
accttctgtaaagagggtcattgct

SEQ ID NO: 21021 - DNA, 25 bp, Homo sapiens
ctgggaaaggcacacgcatgacact

SEQ ID NO: 21022 - DNA, 25 bp, Homo sapiens
agatcgctgcctttgctccacgaga

SEQ ID NO: 21023 - DNA, 25 bp, Homo sapiens
acccactcatggtgcgtcacacttg

SEQ ID NO: 21024 - DNA, 25 bp, Homo sapiens
gtgcacgagtcagtgtccacacctg

SEQ ID NO: 21025 - DNA, 25 bp, Homo sapiens
ccctttcctgtgattggtctgctga

SEQ ID NO: 21026 - DNA, 25 bp, Homo sapiens
tgctgctgtcatctcaaggctgtgg

SEQ ID NO: 21027 - DNA, 25 bp, Homo sapiens
tgcagacactgtgagcccacccatg

SEQ ID NO: 21028 - DNA, 25 bp, Homo sapiens
taccagttgagcaggaagttttatc

SEQ ID NO: 21029 - DNA, 25 bp, Homo sapiens
tcccgtgtgagaattccgcagcctt

SEQ ID NO: 21030 - DNA, 25 bp, Homo sapiens
gaagccagctgtgtttccctacata

SEQ ID NO: 21031 - DNA, 25 bp, Homo sapiens
acagccttgtgtccttgactaggtc

SEQ ID NO: 21032 - DNA, 25 bp, Homo sapiens
acagaccttgtgcttgggaatttcg

SEQ ID NO: 21033 - DNA, 25 bp, Homo sapiens
agggcaccaccctactgactgagga

SEQ ID NO: 21034 - DNA, 25 bp, Homo sapiens
ctggccagcattctgcgtgacaaaa

SEQ ID NO: 21035 - DNA, 25 bp, Homo sapiens
tcggcggacagagtgacaatcaata

SEQ ID NO: 21036 - DNA, 25 bp, Homo sapiens
ggtgtcagagtcgaggcttttcaaa

SEQ ID NO: 21037 - DNA, 25 bp, Homo sapiens
ggcacagcccatccttgaaaagtta

SEQ ID NO: 21038 - DNA, 25 bp, Homo sapiens
tggcaggccaagtgtctcattaatt

SEQ ID NO: 21039 - DNA, 25 bp, Homo sapiens
gctgttccctgacctagtgatgcca

SEQ ID NO: 21040 - DNA, 25 bp, Homo sapiens
ggctgggccctcagaactctgtgtt

SEQ ID NO: 21041 - DNA, 25 bp, Homo sapiens
ccagtgccctttgatctgtgtggaa

SEQ ID NO: 21042 - DNA, 25 bp, Homo sapiens
cagcctggcttgtggattaaaccta

SEQ ID NO: 21043 - DNA, 25 bp, Homo sapiens
tggttctcagtagctccacgtaagg

SEQ ID NO: 21044 - DNA, 25 bp, Homo sapiens
ggccgcagccttcttggcattactg

SEQ ID NO: 21045 - DNA, 25 bp, Homo sapiens
ctagggcacctctgtctttaactga

SEQ ID NO: 21046 - DNA, 25 bp, Homo sapiens
tgcgggtctctcttgctctagtttt

SEQ ID NO: 21047 - DNA, 25 bp, Homo sapiens
ggcagcacaggcacagcagtcattg

SEQ ID NO: 21048 - DNA, 25 bp, Homo sapiens
gatggcatctttaagaaaccagtac

SEQ ID NO: 21049 - DNA, 25 bp, Homo sapiens
ccagcgtggctgcaaaaaccatcta

SEQ ID NO: 21050 - DNA, 25 bp, Homo sapiens
cttctgttactgcttttaagacttc

SEQ ID NO: 21051 - DNA, 25 bp, Homo sapiens
gcgcatccttgcctccatagtttta

SEQ ID NO: 21052 - DNA, 25 bp, Homo sapiens
gagggaagccctgaagcactgtttc

SEQ ID NO: 21053 - DNA, 25 bp, Homo sapiens
ttgttccagcggcacagcatgtgta

SEQ ID NO: 21054 - DNA, 25 bp, Homo sapiens
ttgggtcttgtctccaccatggatc

SEQ ID NO: 21055 - DNA, 25 bp, Homo sapiens
cccatgtggtagtatatgtgcccta

SEQ ID NO: 21056 - DNA, 25 bp, Homo sapiens
ttggcaggcagcagttcacatagtc

SEQ ID NO: 21057 - DNA, 25 bp, Homo sapiens
cccatgttgatttgcaggaggaccc

SEQ ID NO: 21058 - DNA, 25 bp, Homo sapiens
cctccctagtggcttattaagagca

SEQ ID NO: 21059 - DNA, 25 bp, Homo sapiens
cccatcataagttgaggagtctctg

SEQ ID NO: 21060 - DNA, 25 bp, Homo sapiens
ccagccctttggaggaacaggttta

SEQ ID NO: 21061 - DNA, 25 bp, Homo sapiens
tagtttcctatctagtttcctatgt

SEQ ID NO: 21062 - DNA, 25 bp, Homo sapiens
ctcgacgccggctgataaatgaaca

SEQ ID NO: 21063 - DNA, 25 bp, Homo sapiens
accgtcctgagaatcgcagtttaga

SEQ ID NO: 21064 - DNA, 25 bp, Homo sapiens
ttccatttcttgtaaggtctaagta

SEQ ID NO: 21065 - DNA, 25 bp, Homo sapiens
acggcactcttactctctggctgca

SEQ ID NO: 21066 - DNA, 25 bp, Homo sapiens
tcccacttctttgggcaggaggatg

SEQ ID NO: 21067 - DNA, 25 bp, Homo sapiens
cttcagggttttgtccgtgcacaca

SEQ ID NO: 21068 - DNA, 25 bp, Homo sapiens
gtgtcgtcagccttcccaaagtgtc

SEQ ID NO: 21069 - DNA, 25 bp, Homo sapiens
tgaccagggtcaccagcagcatagc

SEQ ID NO: 21070 - DNA, 25 bp, Homo sapiens
ctaagcagtgctttcccaaggaggc

SEQ ID NO: 21071 - DNA, 25 bp, Homo sapiens
agagccctgaccaccttgaacttta

SEQ ID NO: 21072 - DNA, 25 bp, Homo sapiens
ctggagtgcattaccctactcaata

SEQ ID NO: 21073 - DNA, 25 bp, Homo sapiens
tgcgtccattccaggcagagtctga

SEQ ID NO: 21074 - DNA, 25 bp, Homo sapiens
gcagcctctgtgactcgcctcagtt

SEQ ID NO: 21075 - DNA, 25 bp, Homo sapiens
tgcacagcccgttcccagagcaaga

SEQ ID NO: 21076 - DNA, 25 bp, Homo sapiens
ccgttgaccaagactcccagggctg

SEQ ID NO: 21077 - DNA, 25 bp, Homo sapiens
tcctcggcaagggtttcatcacaga

SEQ ID NO: 21078 - DNA, 25 bp, Homo sapiens
ggtgtcgtgtgcacaaggcttcaca

SEQ ID NO: 21079 - DNA, 25 bp, Homo sapiens
ttgccagggacaagaaggaccattc

SEQ ID NO: 21080 - DNA, 25 bp, Homo sapiens
gtcctggaggatgaagacagctcta

SEQ ID NO: 21081 - DNA, 25 bp, Homo sapiens
ctgtcacgaaggatggcaatagctc

SEQ ID NO: 21082 - DNA, 25 bp, Homo sapiens
ctcccttgaggcacgagcatgttga

SEQ ID NO: 21083 - DNA, 25 bp, Homo sapiens
tcgccatgggctctgaaaatacgtg

SEQ ID NO: 21084 - DNA, 25 bp, Homo sapiens
agaggctgccctgtgaacatcagtg

SEQ ID NO: 21085 - DNA, 25 bp, Homo sapiens
ttgacctgcaccctccctggagtta

SEQ ID NO: 21086 - DNA, 25 bp, Homo sapiens
gtggcaaacatctccctggtcgctg

SEQ ID NO: 21087 - DNA, 25 bp, Homo sapiens
ccgcctgatcggcaaggtttactcc

SEQ ID NO: 21088 - DNA, 25 bp, Homo sapiens
ttgcccagtgcatcctacaagtagg

SEQ ID NO: 21089 - DNA, 25 bp, Homo sapiens
agaaacgcgtgttcccttcccagtg

SEQ ID NO: 21090 - DNA, 25 bp, Homo sapiens
aagtccctggcactgagctgtcaca

SEQ ID NO: 21091 - DNA, 25 bp, Homo sapiens
ggctcctcctatcccagcgaatgtg

SEQ ID NO: 21092 - DNA, 25 bp, Homo sapiens
ttcccggagcacaggctaatttaga

SEQ ID NO: 21093 - DNA, 25 bp, Homo sapiens
tttcttcggaacactcggggtcgca

SEQ ID NO: 21094 - DNA, 25 bp, Homo sapiens
cgggtgggctcaccacagaatctga

SEQ ID NO: 21095 - DNA, 25 bp, Homo sapiens
gcctcccatcgtaagcgcgtttctg

SEQ ID NO: 21096 - DNA, 25 bp, Homo sapiens
cctggccttgggtcttatcatcata

SEQ ID NO: 21097 - DNA, 25 bp, Homo sapiens
cgcttcccatctggagctcaagtta

SEQ ID NO: 21098 - DNA, 25 bp, Homo sapiens
tcccgcactgcagaaggtgagttcc

SEQ ID NO: 21099 - DNA, 25 bp, Homo sapiens
tcccagagatacacggtcacagatg

SEQ ID NO: 21100 - DNA, 25 bp, Homo sapiens
ctgagggccacgctggaaatattcc

SEQ ID NO: 21101 - DNA, 25 bp, Homo sapiens
gctctgagccaagaagcattcactg

SEQ ID NO: 21102 - DNA, 25 bp, Homo sapiens
tctgtattttttggagccttttgca

SEQ ID NO: 21103 - DNA, 25 bp, Homo sapiens
taatcaaaatggtatagtctacata

SEQ ID NO: 21104 - DNA, 25 bp, Homo sapiens
cccatcccaaaaaagctggtcttta

SEQ ID NO: 21105 - DNA, 25 bp, Homo sapiens
cctgcctgctcgacagaagagacta

SEQ ID NO: 21106 - DNA, 25 bp, Homo sapiens
cccacgttgcccttcctttaaaata

SEQ ID NO: 21107 - DNA, 25 bp, Homo sapiens
cgtcacatgctgggaaggatgatga

SEQ ID NO: 21108 - DNA, 25 bp, Homo sapiens
gtagccagaaagttgatcacccaca

SEQ ID NO: 21109 - DNA, 25 bp, Homo sapiens
ggcgtccttggcatacagcagatta

SEQ ID NO: 21110 - DNA, 25 bp, Homo sapiens
cccggaagctctgggatcaatcaat

SEQ ID NO: 21111 - DNA, 25 bp, Homo sapiens
ccctgctgacctgcttagttgttta

SEQ ID NO: 21112 - DNA, 25 bp, Homo sapiens
ctctgctgtagcctgcaaggtccta

SEQ ID NO: 21113 - DNA, 25 bp, Homo sapiens
tcagtgtggaactaacgagcgccct

SEQ ID NO: 21114 - DNA, 25 bp, Homo sapiens
cctgcgggtcgagaatgtcatcagc

SEQ ID NO: 21115 - DNA, 25 bp, Homo sapiens
tccggcggccacgatagaaagaaga

SEQ ID NO: 21116 - DNA, 25 bp, Homo sapiens
cgagggcggttcatagacaatttca

SEQ ID NO: 21117 - DNA, 25 bp, Homo sapiens
cgcctgaggctccatgtccaatttc

SEQ ID NO: 21118 - DNA, 25 bp, Homo sapiens
ggggtcctcactccaaagaaaaagc

SEQ ID NO: 21119 - DNA, 25 bp, Homo sapiens
ccgttgaaacctgcgggtccctctg

SEQ ID NO: 21120 - DNA, 25 bp, Homo sapiens
tcctctgacaggtaagccgattggc

SEQ ID NO: 21121 - DNA, 25 bp, Homo sapiens
tgcgatcttcccgtgcctgaatatg

SEQ ID NO: 21122 - DNA, 25 bp, Homo sapiens
ggcgcagtaaagtgaagaggactca

SEQ ID NO: 21123 - DNA, 25 bp, Homo sapiens
ctcccagattgcaggcagggtccca

SEQ ID NO: 21124 - DNA, 25 bp, Homo sapiens
gcaacatgtatttgccgagcacctg

SEQ ID NO: 21125 - DNA, 25 bp, Homo sapiens
ggcaccctgatacccatgttaatgg

SEQ ID NO: 21126 - DNA, 25 bp, Homo sapiens
ctaggctttatcaactagaacagta

SEQ ID NO: 21127 - DNA, 25 bp, Homo sapiens
cccaacaggctgtgagttctggtcc

SEQ ID NO: 21128 - DNA, 25 bp, Homo sapiens
taatttcaaatttaaaagtaaaggc

SEQ ID NO: 21129 - DNA, 25 bp, Homo sapiens
acccttcatggtggtgagccgtcct

SEQ ID NO: 21130 - DNA, 25 bp, Homo sapiens
tatcacctctggaaacgctgccggc

SEQ ID NO: 21131 - DNA, 25 bp, Homo sapiens
gggtcctgccctgatggctccatct

SEQ ID NO: 21132 - DNA, 25 bp, Homo sapiens
gtctgcccgccagagattcctgtgc

SEQ ID NO: 21133 - DNA, 25 bp, Homo sapiens
gtgccctctgcccttaatcaagatg

SEQ ID NO: 21134 - DNA, 25 bp, Homo sapiens
gaggcccagcaggtgcaaatttaga

SEQ ID NO: 21135 - DNA, 25 bp, Homo sapiens
agctgccagagccacttgcggatta

SEQ ID NO: 21136 - DNA, 25 bp, Homo sapiens
gccattggctggaagagttctcata

SEQ ID NO: 21137 - DNA, 25 bp, Homo sapiens
gggctcccgctttccattttgcaat

SEQ ID NO: 21138 - DNA, 25 bp, Homo sapiens
ttctcgcttactctgcaggggacgt

SEQ ID NO: 21139 - DNA, 25 bp, Homo sapiens
ccagcgcattttggggatgacctca

SEQ ID NO: 21140 - DNA, 25 bp, Homo sapiens
gccctgtattactgagcacccactg

SEQ ID NO: 21141 - DNA, 25 bp, Homo sapiens
tcctcactggggcagggaatcgaac

SEQ ID NO: 21142 - DNA, 25 bp, Homo sapiens
tgggcacagtatttggccacatgta

SEQ ID NO: 21143 - DNA, 25 bp, Homo sapiens
gccagatgccccagacagatgcctg

SEQ ID NO: 21144 - DNA, 25 bp, Homo sapiens
gagatccaggttgggaggaggccca

SEQ ID NO: 21145 - DNA, 25 bp, Homo sapiens
gggccgccttcaacaacaacgtgag

SEQ ID NO: 21146 - DNA, 25 bp, Homo sapiens
atgtgattgattcccaggcccaggc

SEQ ID NO: 21147 - DNA, 25 bp, Homo sapiens
gtgaatccagaactccagctccagt

SEQ ID NO: 21148 - DNA, 25 bp, Homo sapiens
acaggaatgaatcctggcaaatcgc

SEQ ID NO: 21149 - DNA, 25 bp, Homo sapiens
aggcttccaggagtgaccaatcaga

SEQ ID NO: 21150 - DNA, 25 bp, Homo sapiens
cctcagcgatgggttcagagaaacc

SEQ ID NO: 21151 - DNA, 25 bp, Homo sapiens
acctggaagcctgttctgatgcatc

SEQ ID NO: 21152 - DNA, 25 bp, Homo sapiens
taaggttcttctctgccatgtgatg

SEQ ID NO: 21153 - DNA, 25 bp, Homo sapiens
ctttcctgtgatgccgcctttgttc

SEQ ID NO: 21154 - DNA, 25 bp, Homo sapiens
ccggctccatgatgctggcaatata

SEQ ID NO: 21155 - DNA, 25 bp, Homo sapiens
cccggaatcagctggggtcaagact

SEQ ID NO: 21156 - DNA, 25 bp, Homo sapiens
cagcgcgaccctaggacagacttcg

SEQ ID NO: 21157 - DNA, 25 bp, Homo sapiens
tggacgagggcgatctatacaactg

SEQ ID NO: 21158 - DNA, 25 bp, Homo sapiens
ctgcagctcccgtgggcacgtggca

SEQ ID NO: 21159 - DNA, 25 bp, Homo sapiens
cacgtggcagggcagccctggaagc

SEQ ID NO: 21160 - DNA, 25 bp, Homo sapiens
gaagcccaggtgtgaacgggaatct

SEQ ID NO: 21161 - DNA, 25 bp, Homo sapiens
ggtgtgaacgggaatctccagctcc

SEQ ID NO: 21162 - DNA, 25 bp, Homo sapiens
ggaatctccagctccccagtgcggg

SEQ ID NO: 21163 - DNA, 25 bp, Homo sapiens
cagtgcgggcagcagcttcccggct

SEQ ID NO: 21164 - DNA, 25 bp, Homo sapiens
gggcagcagcttcccggctgtcctg

SEQ ID NO: 21165 - DNA, 25 bp, Homo sapiens
cagcttcccggctgtcctggaaccc

SEQ ID NO: 21166 - DNA, 25 bp, Homo sapiens
ttcccggctgtcctggaaccccagc

SEQ ID NO: 21167 - DNA, 25 bp, Homo sapiens
cctggaaccccagccccacactcga

SEQ ID NO: 21168 - DNA, 25 bp, Homo sapiens
cacactcgagccacccccgggcacc

SEQ ID NO: 21169 - DNA, 25 bp, Homo sapiens
cccgggcacctactccacagttctc

SEQ ID NO: 21170 - DNA, 25 bp, Homo sapiens
cagttctccagaccttgccagtgtg

SEQ ID NO: 21171 - DNA, 25 bp, Homo sapiens
ttctccagaccttgccagtgtggcg

SEQ ID NO: 21172 - DNA, 25 bp, Homo sapiens
tccagaccttgccagtgtggcgggt

SEQ ID NO: 21173 - DNA, 25 bp, Homo sapiens
ggcgggtggagccaaagaatcacac

SEQ ID NO: 21174 - DNA, 25 bp, Homo sapiens
gtggagccaaagaatcacaccagaa

SEQ ID NO: 21175 - DNA, 25 bp, Homo sapiens
tcacaccagaaaaagaacacaggcc

SEQ ID NO: 21176 - DNA, 25 bp, Homo sapiens
acaggccactagttcccattttgga

SEQ ID NO: 21177 - DNA, 25 bp, Homo sapiens
tcccattttggaagaaaagctgccc

SEQ ID NO: 21178 - DNA, 25 bp, Homo sapiens
ttggaagaaaagctgccccaggggc

SEQ ID NO: 21179 - DNA, 25 bp, Homo sapiens
cccaggggccacaggcacccagccg

SEQ ID NO: 21180 - DNA, 25 bp, Homo sapiens
cacaggcacccagccggctctcaca

SEQ ID NO: 21181 - DNA, 25 bp, Homo sapiens
gctctcacaacagcagcccagggca

SEQ ID NO: 21182 - DNA, 25 bp, Homo sapiens
gcagcccagggcaaccacatagagc

SEQ ID NO: 21183 - DNA, 25 bp, Homo sapiens
gcaaccacatagagcccttctcaga

SEQ ID NO: 21184 - DNA, 25 bp, Homo sapiens
tagagcccttctcagataggccgcc

SEQ ID NO: 21185 - DNA, 25 bp, Homo sapiens
agataggccgcctccaccaggcaga

SEQ ID NO: 21186 - DNA, 25 bp, Homo sapiens
ggccgcctccaccaggcagagggaa

SEQ ID NO: 21187 - DNA, 25 bp, Homo sapiens
gcagagggaacagcgagacaagcac

SEQ ID NO: 21188 - DNA, 25 bp, Homo sapiens
cagcgagacaagcactgctgaacca

SEQ ID NO: 21189 - DNA, 25 bp, Homo sapiens
ctgaaccagcaaagacagccaggtg

SEQ ID NO: 21190 - DNA, 25 bp, Homo sapiens
caaagacagccaggtggaggcagct

SEQ ID NO: 21191 - DNA, 25 bp, Homo sapiens
agacagccaggtggaggcagctgga

SEQ ID NO: 21192 - DNA, 25 bp, Homo sapiens
cagctggagggaggggaacacgcag

SEQ ID NO: 21193 - DNA, 25 bp, Homo sapiens
aacacgcagggcttaggctgaacca

SEQ ID NO: 21194 - DNA, 25 bp, Homo sapiens
gcttaggctgaaccacagggcactg

SEQ ID NO: 21195 - DNA, 25 bp, Homo sapiens
aaccacagggcactggggagccatg

SEQ ID NO: 21196 - DNA, 25 bp, Homo sapiens
cactggggagccatgggaggttgtt

SEQ ID NO: 21197 - DNA, 25 bp, Homo sapiens
ccatgggaggttgttgagctggtga

SEQ ID NO: 21198 - DNA, 25 bp, Homo sapiens
gagctggtgagggactttgatttcc

SEQ ID NO: 21199 - DNA, 25 bp, Homo sapiens
agccactgcgccaggcaaaggactt

SEQ ID NO: 21200 - DNA, 25 bp, Homo sapiens
gcgccaggcaaaggactttgatttc

SEQ ID NO: 21201 - DNA, 25 bp, Homo sapiens
gccaggcaaaggactttgatttcta

SEQ ID NO: 21202 - DNA, 25 bp, Homo sapiens
tttctaaatgaaccagcacagtcca

SEQ ID NO: 21203 - DNA, 25 bp, Homo sapiens
taaatgaaccagcacagtccagccc

SEQ ID NO: 21204 - DNA, 25 bp, Homo sapiens
cagcacagtccagcccacccagggg

SEQ ID NO: 21205 - DNA, 25 bp, Homo sapiens
tccagcccacccagggggtcaggaa

SEQ ID NO: 21206 - DNA, 25 bp, Homo sapiens
gtcaggaagggaccctccccaggta

SEQ ID NO: 21207 - DNA, 25 bp, Homo sapiens
cccaggtagcaaggtggctccagca

SEQ ID NO: 21208 - DNA, 25 bp, Homo sapiens
aggtagcaaggtggctccagcagcc

SEQ ID NO: 21209 - DNA, 25 bp, Homo sapiens
agcaaggtggctccagcagcccctt

SEQ ID NO: 21210 - DNA, 25 bp, Homo sapiens
aggtggctccagcagccccttccca

SEQ ID NO: 21211 - DNA, 25 bp, Homo sapiens
gtggctccagcagccccttcccacc

SEQ ID NO: 21212 - DNA, 25 bp, Homo sapiens
tcccacccccatccaaggtcacttc

SEQ ID NO: 21213 - DNA, 25 bp, Homo sapiens
tccaaggtcacttcctggagaccca

SEQ ID NO: 21214 - DNA, 25 bp, Homo sapiens
tcctggagacccatggggaacttca

SEQ ID NO: 21215 - DNA, 25 bp, Homo sapiens
gggaacttcaggtgggcgcacctca

SEQ ID NO: 21216 - DNA, 25 bp, Homo sapiens
gtgggcgcacctcaaacatgatggt

SEQ ID NO: 21217 - DNA, 25 bp, Homo sapiens
cctcaaacatgatggtgatgtctga

SEQ ID NO: 21218 - DNA, 25 bp, Homo sapiens
ggtgatgtctgagtacttggacttc

SEQ ID NO: 21219 - DNA, 25 bp, Homo sapiens
tgagtacttggacttcatcagctcc

SEQ ID NO: 21220 - DNA, 25 bp, Homo sapiens
agtacttggacttcatcagctcccc

SEQ ID NO: 21221 - DNA, 25 bp, Homo sapiens
tccccccaggaggtgaggttgcagt

SEQ ID NO: 21222 - DNA, 25 bp, Homo sapiens
gttgcagtaggtgaggacgcccccc

SEQ ID NO: 21223 - DNA, 25 bp, Homo sapiens
cagtaggtgaggacgccccccggct

SEQ ID NO: 21224 - DNA, 25 bp, Homo sapiens
cccggcttcagcaggcgaaaggcgt

SEQ ID NO: 21225 - DNA, 25 bp, Homo sapiens
ttcagcaggcgaaaggcgtggttct

SEQ ID NO: 21226 - DNA, 25 bp, Homo sapiens
cagcaggcgaaaggcgtggttctgt

SEQ ID NO: 21227 - DNA, 25 bp, Homo sapiens
aggcgaaaggcgtggttctgtggaa

SEQ ID NO: 21228 - DNA, 25 bp, Homo sapiens
tggttctgtggaaggggagtggcca

SEQ ID NO: 21229 - DNA, 25 bp, Homo sapiens
aaggggagtggccagtggtcaggac

SEQ ID NO: 21230 - DNA, 25 bp, Homo sapiens
agtggccagtggtcaggacggaggt

SEQ ID NO: 21231 - DNA, 25 bp, Homo sapiens
tggccagtggtcaggacggaggtgg

SEQ ID NO: 21232 - DNA, 25 bp, Homo sapiens
gccagtggtcaggacggaggtgggg

SEQ ID NO: 21233 - DNA, 25 bp, Homo sapiens
cagtggtcaggacggaggtgggggt

SEQ ID NO: 21234 - DNA, 25 bp, Homo sapiens
ggggtgtgggcagaggggcttcccc

SEQ ID NO: 21235 - DNA, 25 bp, Homo sapiens
ggggcttccccgagggcctcccgca

SEQ ID NO: 21236 - DNA, 25 bp, Homo sapiens
gggcctcccgcatcccagcaagtca

SEQ ID NO: 21237 - DNA, 25 bp, Homo sapiens
tcccagcaagtcagagagaaccacc

SEQ ID NO: 21238 - DNA, 25 bp, Homo sapiens
cagagagaaccaccttgatgaagtt

SEQ ID NO: 21239 - DNA, 25 bp, Homo sapiens
gaaccaccttgatgaagttgaactg

SEQ ID NO: 21240 - DNA, 25 bp, Homo sapiens
atgaagttgaactggtgtgtgtgcc

SEQ ID NO: 21241 - DNA, 25 bp, Homo sapiens
aactggtgtgtgtgccaggtctcct

SEQ ID NO: 21242 - DNA, 25 bp, Homo sapiens
caggtctcctccgagagtgggtacg

SEQ ID NO: 21243 - DNA, 25 bp, Homo sapiens
gtacgtgtcgtacaggatccctgca

SEQ ID NO: 21244 - DNA, 25 bp, Homo sapiens
acaggatccctgcacggagaacaga

SEQ ID NO: 21245 - DNA, 25 bp, Homo sapiens
tgcacggagaacagaagcccacgcg

SEQ ID NO: 21246 - DNA, 25 bp, Homo sapiens
cggagaacagaagcccacgcggtca

SEQ ID NO: 21247 - DNA, 25 bp, Homo sapiens
agaacagaagcccacgcggtcaggg

SEQ ID NO: 21248 - DNA, 25 bp, Homo sapiens
aacagaagcccacgcggtcagggcc

SEQ ID NO: 21249 - DNA, 25 bp, Homo sapiens
aagcccacgcggtcagggccgggct

SEQ ID NO: 21250 - DNA, 25 bp, Homo sapiens
gggctcagcgcctcacccagcctca

SEQ ID NO: 21251 - DNA, 25 bp, Homo sapiens
agcgcctcacccagcctcacccggc

SEQ ID NO: 21252 - DNA, 25 bp, Homo sapiens
gcctcacccagcctcacccggctca

SEQ ID NO: 21253 - DNA, 25 bp, Homo sapiens
ctcacccagcctcacccggctcatc

SEQ ID NO: 21254 - DNA, 25 bp, Homo sapiens
gcctcacccggctcatcccccagcg

SEQ ID NO: 21255 - DNA, 25 bp, Homo sapiens
cccagcgggtggaggtgcagtgaga

SEQ ID NO: 21256 - DNA, 25 bp, Homo sapiens
tggaggtgcagtgagacggggccgt

SEQ ID NO: 21257 - DNA, 25 bp, Homo sapiens
gccgtgggtagaggtggggctccca

SEQ ID NO: 21258 - DNA, 25 bp, Homo sapiens
tggggctcccacacaggcttgagaa

SEQ ID NO: 21259 - DNA, 25 bp, Homo sapiens
gggctcccacacaggcttgagaacc

SEQ ID NO: 21260 - DNA, 25 bp, Homo sapiens
acacaggcttgagaaccccgagatc

SEQ ID NO: 21261 - DNA, 25 bp, Homo sapiens
tgagaaccccgagatcgcctccagg

SEQ ID NO: 21262 - DNA, 25 bp, Homo sapiens
agatcgcctccagggcccctccgtg

SEQ ID NO: 21263 - DNA, 25 bp, Homo sapiens
tccagggcccctccgtgagcatgcc

SEQ ID NO: 21264 - DNA, 25 bp, Homo sapiens
cgtgagcatgcccatccccggtgct

SEQ ID NO: 21265 - DNA, 25 bp, Homo sapiens
cggtgctccgccatcccacagccag

SEQ ID NO: 21266 - DNA, 25 bp, Homo sapiens
cacagccaggcccacacccacttgg

SEQ ID NO: 21267 - DNA, 25 bp, Homo sapiens
ggcccacacccacttgggctctgtc

SEQ ID NO: 21268 - DNA, 25 bp, Homo sapiens
cccacacccacttgggctctgtccc

SEQ ID NO: 21269 - DNA, 25 bp, Homo sapiens
tgtccccccagtgcacatcagaggg

SEQ ID NO: 21270 - DNA, 25 bp, Homo sapiens
agtgcacatcagagggacccccaca

SEQ ID NO: 21271 - DNA, 25 bp, Homo sapiens
agagggacccccacaagcaaaggag

SEQ ID NO: 21272 - DNA, 25 bp, Homo sapiens
acaagcaaaggaggggctgcattgg

SEQ ID NO: 21273 - DNA, 25 bp, Homo sapiens
ctgcattggagctggggaggcccac

SEQ ID NO: 21274 - DNA, 25 bp, Homo sapiens
gggaggcccaccctgtgatacgtcc

SEQ ID NO: 21275 - DNA, 25 bp, Homo sapiens
gcccaccctgtgatacgtcccctca

SEQ ID NO: 21276 - DNA, 25 bp, Homo sapiens
ccaccctgtgatacgtcccctcacc

SEQ ID NO: 21277 - DNA, 25 bp, Homo sapiens
tcacccctcaccatcaaagtgaccg

SEQ ID NO: 21278 - DNA, 25 bp, Homo sapiens
tcaccatcaaagtgaccgtcaggca

SEQ ID NO: 21279 - DNA, 25 bp, Homo sapiens
atcaaagtgaccgtcaggcagggtg

SEQ ID NO: 21280 - DNA, 25 bp, Homo sapiens
agggtgggtgccacatcctcccaca

SEQ ID NO: 21281 - DNA, 25 bp, Homo sapiens
ctcccacaggcctttcaaggggatg

SEQ ID NO: 21282 - DNA, 25 bp, Homo sapiens
cctttcaaggggatgaccttgcaga

SEQ ID NO: 21283 - DNA, 25 bp, Homo sapiens
gatgaccttgcagaggggaaaagaa

SEQ ID NO: 21284 - DNA, 25 bp, Homo sapiens
tgaccttgcagaggggaaaagaaaa

SEQ ID NO: 21285 - DNA, 25 bp, Homo sapiens
ccttgcagaggggaaaagaaaaaga

SEQ ID NO: 21286 - DNA, 25 bp, Homo sapiens
ttgcagaggggaaaagaaaaagaga

SEQ ID NO: 21287 - DNA, 25 bp, Homo sapiens
aaagaaaaagagaggacagggtaga

SEQ ID NO: 21288 - DNA, 25 bp, Homo sapiens
acagggtagagaggtccccaggatc

SEQ ID NO: 21289 - DNA, 25 bp, Homo sapiens
aggatctccccacctgcagaaaggg

SEQ ID NO: 21290 - DNA, 25 bp, Homo sapiens
cccacctgcagaaagggagcggcca

SEQ ID NO: 21291 - DNA, 25 bp, Homo sapiens
cacctgcagaaagggagcggccagg

SEQ ID NO: 21292 - DNA, 25 bp, Homo sapiens
cctgcagaaagggagcggccagggg

SEQ ID NO: 21293 - DNA, 25 bp, Homo sapiens
agggggactcccgagagagaagacc

SEQ ID NO: 21294 - DNA, 25 bp, Homo sapiens
gactcccgagagagaagaccacctc

SEQ ID NO: 21295 - DNA, 25 bp, Homo sapiens
tcccgagagagaagaccacctcctc

SEQ ID NO: 21296 - DNA, 25 bp, Homo sapiens
ccgagagagaagaccacctcctcca

SEQ ID NO: 21297 - DNA, 25 bp, Homo sapiens
gagagagaagaccacctcctccacc

SEQ ID NO: 21298 - DNA, 25 bp, Homo sapiens
ctcctccacctctgacagccccagg

SEQ ID NO: 21299 - DNA, 25 bp, Homo sapiens
ctccacctctgacagccccaggccc

SEQ ID NO: 21300 - DNA, 25 bp, Homo sapiens
ccaggcccccaacccccaggaagca

SEQ ID NO: 21301 - DNA, 25 bp, Homo sapiens
ggaagcagtgccctcaccccaagga

SEQ ID NO: 21302 - DNA, 25 bp, Homo sapiens
agcagtgccctcaccccaaggagtg

SEQ ID NO: 21303 - DNA, 25 bp, Homo sapiens
cagtgccctcaccccaaggagtggg

SEQ ID NO: 21304 - DNA, 25 bp, Homo sapiens
ctcaccccaaggagtgggggtcctg

SEQ ID NO: 21305 - DNA, 25 bp, Homo sapiens
gtcctggagggcctgcgggcagagg

SEQ ID NO: 21306 - DNA, 25 bp, Homo sapiens
cagaggggcaccttgtgtgtctgcc

SEQ ID NO: 21307 - DNA, 25 bp, Homo sapiens
caccttgtgtgtctgccgtggggcc

SEQ ID NO: 21308 - DNA, 25 bp, Homo sapiens
tgtgtctgccgtggggcccagtccc

SEQ ID NO: 21309 - DNA, 25 bp, Homo sapiens
gcccagtcccggagccgctggaaga

SEQ ID NO: 21310 - DNA, 25 bp, Homo sapiens
agccgctggaagacgccgtcattgc

SEQ ID NO: 21311 - DNA, 25 bp, Homo sapiens
gacgccgtcattgcactcgatgatc

SEQ ID NO: 21312 - DNA, 25 bp, Homo sapiens
tgcactcgatgatccaatgctcatc

SEQ ID NO: 21313 - DNA, 25 bp, Homo sapiens
tccaatgctcatcaatgggcgcctc

SEQ ID NO: 21314 - DNA, 25 bp, Homo sapiens
atgctcatcaatgggcgcctcctgc

SEQ ID NO: 21315 - DNA, 25 bp, Homo sapiens
aatgggcgcctcctgcacctttgac

SEQ ID NO: 21316 - DNA, 25 bp, Homo sapiens
tcctgcacctttgacgctgcgatgg

SEQ ID NO: 21317 - DNA, 25 bp, Homo sapiens
ttgacgctgcgatggccatgccaaa

SEQ ID NO: 21318 - DNA, 25 bp, Homo sapiens
gctgcgatggccatgccaaagccca

SEQ ID NO: 21319 - DNA, 25 bp, Homo sapiens
ggccatgccaaagcccacctccagg

SEQ ID NO: 21320 - DNA, 25 bp, Homo sapiens
tgccaaagcccacctccaggacccg

SEQ ID NO: 21321 - DNA, 25 bp, Homo sapiens
aaagcccacctccaggacccggccc

SEQ ID NO: 21322 - DNA, 25 bp, Homo sapiens
ggacccggccccctgggcagacaca

SEQ ID NO: 21323 - DNA, 25 bp, Homo sapiens
gacacagggcgcctggcatcactag

SEQ ID NO: 21324 - DNA, 25 bp, Homo sapiens
cacagggcgcctggcatcactaggt

SEQ ID NO: 21325 - DNA, 25 bp, Homo sapiens
cgcctggcatcactaggtggggcgg

SEQ ID NO: 21326 - DNA, 25 bp, Homo sapiens
gcatcactaggtggggcgggcttag

SEQ ID NO: 21327 - DNA, 25 bp, Homo sapiens
gggcttaggaggctgcctggaggag

SEQ ID NO: 21328 - DNA, 25 bp, Homo sapiens
ctgcctggaggaggggcacagggca

SEQ ID NO: 21329 - DNA, 25 bp, Homo sapiens
tggaggaggggcacagggcagggca

SEQ ID NO: 21330 - DNA, 25 bp, Homo sapiens
cagggcagggctggggagactgcct

SEQ ID NO: 21331 - DNA, 25 bp, Homo sapiens
agggctggggagactgcctggagga

SEQ ID NO: 21332 - DNA, 25 bp, Homo sapiens
ggctggggagactgcctggaggagg

SEQ ID NO: 21333 - DNA, 25 bp, Homo sapiens
agactgcctggaggagggggcgcag

SEQ ID NO: 21334 - DNA, 25 bp, Homo sapiens
actgcctggaggagggggcgcaggg

SEQ ID NO: 21335 - DNA, 25 bp, Homo sapiens
gcagggctgggctgggggtctgcct

SEQ ID NO: 21336 - DNA, 25 bp, Homo sapiens
ggtctgcctggaggggggcgtgcag

SEQ ID NO: 21337 - DNA, 25 bp, Homo sapiens
tgcagagcagggctggagaggctgc

SEQ ID NO: 21338 - DNA, 25 bp, Homo sapiens
cagagcagggctggagaggctgcct

SEQ ID NO: 21339 - DNA, 25 bp, Homo sapiens
agcagggctggagaggctgcctgga

SEQ ID NO: 21340 - DNA, 25 bp, Homo sapiens
cagggctggagaggctgcctggagg

SEQ ID NO: 21341 - DNA, 25 bp, Homo sapiens
gctggagaggctgcctggaggaggg

SEQ ID NO: 21342 - DNA, 25 bp, Homo sapiens
agaggctgcctggaggagggggtgt

SEQ ID NO: 21343 - DNA, 25 bp, Homo sapiens
ggtgtggggcaatgctggggaggct

SEQ ID NO: 21344 - DNA, 25 bp, Homo sapiens
caatgctggggaggctgcctggagg

SEQ ID NO: 21345 - DNA, 25 bp, Homo sapiens
atgctggggaggctgcctggaggag

SEQ ID NO: 21346 - DNA, 25 bp, Homo sapiens
gctggggaggctgcctggaggaggg

SEQ ID NO: 21347 - DNA, 25 bp, Homo sapiens
aggctgcctggaggagggggtgcgg

SEQ ID NO: 21348 - DNA, 25 bp, Homo sapiens
tgcggggcagggctggagaggctgc

SEQ ID NO: 21349 - DNA, 25 bp, Homo sapiens
aggctgccaggaggaggggatgcag

SEQ ID NO: 21350 - DNA, 25 bp, Homo sapiens
ctgccaggaggaggggatgcagggc

SEQ ID NO: 21351 - DNA, 25 bp, Homo sapiens
ggatgcagggctggggaggctgtct

SEQ ID NO: 21352 - DNA, 25 bp, Homo sapiens
cagggctggggaggctgtctggaag

SEQ ID NO: 21353 - DNA, 25 bp, Homo sapiens
ctgtctggaagagggggtgcagagc

SEQ ID NO: 21354 - DNA, 25 bp, Homo sapiens
cagagcagggctggggaggcttcct

SEQ ID NO: 21355 - DNA, 25 bp, Homo sapiens
agcagggctggggaggcttcctgga

SEQ ID NO: 21356 - DNA, 25 bp, Homo sapiens
cagggctggggaggcttcctggagg

SEQ ID NO: 21357 - DNA, 25 bp, Homo sapiens
cttcctggaggagggggcacagggt

SEQ ID NO: 21358 - DNA, 25 bp, Homo sapiens
cacagggtagggcagggctgagctg

SEQ ID NO: 21359 - DNA, 25 bp, Homo sapiens
gcagggctgagctgggggtctgctt

SEQ ID NO: 21360 - DNA, 25 bp, Homo sapiens
ctgagctgggggtctgcttggagga

SEQ ID NO: 21361 - DNA, 25 bp, Homo sapiens
ggtctgcttggaggagggggtgcag

SEQ ID NO: 21362 - DNA, 25 bp, Homo sapiens
tgcagggctgaactaggctatgtga

SEQ ID NO: 21363 - DNA, 25 bp, Homo sapiens
gctgaactaggctatgtgagtcaca

SEQ ID NO: 21364 - DNA, 25 bp, Homo sapiens
gtgagtcacatttgccacaggacgg

SEQ ID NO: 21365 - DNA, 25 bp, Homo sapiens
atttgccacaggacgggagggcacc

SEQ ID NO: 21366 - DNA, 25 bp, Homo sapiens
ggcaccctgggccagcatggacaga

SEQ ID NO: 21367 - DNA, 25 bp, Homo sapiens
accctgggccagcatggacagaggc

SEQ ID NO: 21368 - DNA, 25 bp, Homo sapiens
agaggcgggcggaacacagtagtcc

SEQ ID NO: 21369 - DNA, 25 bp, Homo sapiens
aacacagtagtcctgagcgggaaca

SEQ ID NO: 21370 - DNA, 25 bp, Homo sapiens
cacagtagtcctgagcgggaacagc

SEQ ID NO: 21371 - DNA, 25 bp, Homo sapiens
cagtagtcctgagcgggaacagcgt

SEQ ID NO: 21372 - DNA, 25 bp, Homo sapiens
cctgagcgggaacagcgtgggccct

SEQ ID NO: 21373 - DNA, 25 bp, Homo sapiens
gggccctggccagcggccagagaga

SEQ ID NO: 21374 - DNA, 25 bp, Homo sapiens
cggccagagagaggatgaccagcca

SEQ ID NO: 21375 - DNA, 25 bp, Homo sapiens
atgaccagccagggaggccgaagac

SEQ ID NO: 21376 - DNA, 25 bp, Homo sapiens
agggaggccgaagacggccgctttt

SEQ ID NO: 21377 - DNA, 25 bp, Homo sapiens
ccgaagacggccgcttttggggcca

SEQ ID NO: 21378 - DNA, 25 bp, Homo sapiens
aagacggccgcttttggggccaggc

SEQ ID NO: 21379 - DNA, 25 bp, Homo sapiens
gacggccgcttttggggccaggcct

SEQ ID NO: 21380 - DNA, 25 bp, Homo sapiens
cttttggggccaggcctgtggggag

SEQ ID NO: 21381 - DNA, 25 bp, Homo sapiens
tggggaggcgagagccttggacttt

SEQ ID NO: 21382 - DNA, 25 bp, Homo sapiens
agccttggactttgagcccagccca

SEQ ID NO: 21383 - DNA, 25 bp, Homo sapiens
ttgagcccagcccacgctgtttgtc

SEQ ID NO: 21384 - DNA, 25 bp, Homo sapiens
cacgctgtttgtcccgggtccctta

SEQ ID NO: 21385 - DNA, 25 bp, Homo sapiens
ccgggtcccttatctctcgggttag

SEQ ID NO: 21386 - DNA, 25 bp, Homo sapiens
atctctcgggttagttacttttctc

SEQ ID NO: 21387 - DNA, 25 bp, Homo sapiens
ctctcgggttagttacttttctctc

SEQ ID NO: 21388 - DNA, 25 bp, Homo sapiens
ctcgggttagttacttttctctccc

SEQ ID NO: 21389 - DNA, 25 bp, Homo sapiens
ggttagttacttttctctccccctc

SEQ ID NO: 21390 - DNA, 25 bp, Homo sapiens
ccctccctctatccgaaagttggat

SEQ ID NO: 21391 - DNA, 25 bp, Homo sapiens
tccgaaagttggatttgcaagagtg

SEQ ID NO: 21392 - DNA, 25 bp, Homo sapiens
tgcaagagtggccaggcaagacctg

SEQ ID NO: 21393 - DNA, 25 bp, Homo sapiens
ggcaagacctggacttgagactatc

SEQ ID NO: 21394 - DNA, 25 bp, Homo sapiens
gacctggacttgagactatctggga

SEQ ID NO: 21395 - DNA, 25 bp, Homo sapiens
cctggacttgagactatctgggagg

SEQ ID NO: 21396 - DNA, 25 bp, Homo sapiens
gacttgagactatctgggaggggaa

SEQ ID NO: 21397 - DNA, 25 bp, Homo sapiens
atctgggaggggaaggactggtccc

SEQ ID NO: 21398 - DNA, 25 bp, Homo sapiens
actggtccccagtgggccacacatg

SEQ ID NO: 21399 - DNA, 25 bp, Homo sapiens
tgggccacacatgggccccccgctc

SEQ ID NO: 21400 - DNA, 25 bp, Homo sapiens
ccgctcaatcctgattggcactgga

SEQ ID NO: 21401 - DNA, 25 bp, Homo sapiens
ctgattggcactggacactggacgt

SEQ ID NO: 21402 - DNA, 25 bp, Homo sapiens
ctggacactggacgtgcccattttc

SEQ ID NO: 21403 - DNA, 25 bp, Homo sapiens
cgtgcccattttcagggtgggaaca

SEQ ID NO: 21404 - DNA, 25 bp, Homo sapiens
ttttcagggtgggaacactgaggcc

SEQ ID NO: 21405 - DNA, 25 bp, Homo sapiens
tgggaacactgaggcccgacccctg

SEQ ID NO: 21406 - DNA, 25 bp, Homo sapiens
ggaacactgaggcccgacccctgga

SEQ ID NO: 21407 - DNA, 25 bp, Homo sapiens
cctggacggggcctgtgtggggcca

SEQ ID NO: 21408 - DNA, 25 bp, Homo sapiens
ggccagggagtcctttcttagcagc

SEQ ID NO: 21409 - DNA, 25 bp, Homo sapiens
agtcctttcttagcagcccttagcg

SEQ ID NO: 21410 - DNA, 25 bp, Homo sapiens
ttagcagcccttagcgtctgacgcc

SEQ ID NO: 21411 - DNA, 25 bp, Homo sapiens
cttagcgtctgacgccaggcaggcc

SEQ ID NO: 21412 - DNA, 25 bp, Homo sapiens
tctgacgccaggcaggccagggcca

SEQ ID NO: 21413 - DNA, 25 bp, Homo sapiens
tgacgccaggcaggccagggccacc

SEQ ID NO: 21414 - DNA, 25 bp, Homo sapiens
ggccaccccggggacagctgtctcc

SEQ ID NO: 21415 - DNA, 25 bp, Homo sapiens
gggacagctgtctccctgagctcag

SEQ ID NO: 21416 - DNA, 25 bp, Homo sapiens
cctgagctcagctttccgagtgcta

SEQ ID NO: 21417 - DNA, 25 bp, Homo sapiens
cagctttccgagtgctattcttagc

SEQ ID NO: 21418 - DNA, 25 bp, Homo sapiens
agtgctattcttagccgggcgagtc

SEQ ID NO: 21419 - DNA, 25 bp, Homo sapiens
cgagtcggggctgctctcccaggca

SEQ ID NO: 21420 - DNA, 25 bp, Homo sapiens
gctctcccaggcaggcagaagggca

SEQ ID NO: 21421 - DNA, 25 bp, Homo sapiens
caggcagaagggcagcctctccctg

SEQ ID NO: 21422 - DNA, 25 bp, Homo sapiens
gaagggcagcctctccctggcacga

SEQ ID NO: 21423 - DNA, 25 bp, Homo sapiens
agggcagcctctccctggcacgacc

SEQ ID NO: 21424 - DNA, 25 bp, Homo sapiens
tggcacgaccccttcctcccgacct

SEQ ID NO: 21425 - DNA, 25 bp, Homo sapiens
tcccgacctcagacagggagctggg

SEQ ID NO: 21426 - DNA, 25 bp, Homo sapiens
acctcagacagggagctggggaccc

SEQ ID NO: 21427 - DNA, 25 bp, Homo sapiens
ggggacccggttccacccagtttca

SEQ ID NO: 21428 - DNA, 25 bp, Homo sapiens
agtttcacccaggtctcacgtttga

SEQ ID NO: 21429 - DNA, 25 bp, Homo sapiens
tcacccaggtctcacgtttgaggtc

SEQ ID NO: 21430 - DNA, 25 bp, Homo sapiens
acccaggtctcacgtttgaggtccc

SEQ ID NO: 21431 - DNA, 25 bp, Homo sapiens
cacgtttgaggtccccatctggaga

SEQ ID NO: 21432 - DNA, 25 bp, Homo sapiens
tttgaggtccccatctggagagcgg

SEQ ID NO: 21433 - DNA, 25 bp, Homo sapiens
cccatctggagagcggggggcctca

SEQ ID NO: 21434 - DNA, 25 bp, Homo sapiens
cctcactccccctggagaggaagtt

SEQ ID NO: 21435 - DNA, 25 bp, Homo sapiens
ccctggagaggaagtttctggtact

SEQ ID NO: 21436 - DNA, 25 bp, Homo sapiens
gtttctggtacttaggcggtgccta

SEQ ID NO: 21437 - DNA, 25 bp, Homo sapiens
tacttaggcggtgcctaacgtgtgc

SEQ ID NO: 21438 - DNA, 25 bp, Homo sapiens
gtgcctaacgtgtgcgggccccacg

SEQ ID NO: 21439 - DNA, 25 bp, Homo sapiens
ccacgcctgccgcactccccgtgaa

SEQ ID NO: 21440 - DNA, 25 bp, Homo sapiens
gcactccccgtgaacgcctccgtgt

SEQ ID NO: 21441 - DNA, 25 bp, Homo sapiens
gaacgcctccgtgtgcccccacctg

SEQ ID NO: 21442 - DNA, 25 bp, Homo sapiens
acgcctccgtgtgcccccacctgca

SEQ ID NO: 21443 - DNA, 25 bp, Homo sapiens
ctgcagccccacttcccaggcgagg

SEQ ID NO: 21444 - DNA, 25 bp, Homo sapiens
acttcccaggcgaggagacagaggc

SEQ ID NO: 21445 - DNA, 25 bp, Homo sapiens
tcccaggcgaggagacagaggcgcc

SEQ ID NO: 21446 - DNA, 25 bp, Homo sapiens
ccaggcgaggagacagaggcgcccc

SEQ ID NO: 21447 - DNA, 25 bp, Homo sapiens
aggcgaggagacagaggcgccccgg

SEQ ID NO: 21448 - DNA, 25 bp, Homo sapiens
gcgaggagacagaggcgccccggcg

SEQ ID NO: 21449 - DNA, 25 bp, Homo sapiens
cccggcgggagggtgggctgcagag

SEQ ID NO: 21450 - DNA, 25 bp, Homo sapiens
ggtgggctgcagagtccccgggtcg

SEQ ID NO: 21451 - DNA, 25 bp, Homo sapiens
tgggctgcagagtccccgggtcggg

SEQ ID NO: 21452 - DNA, 25 bp, Homo sapiens
gtcggggcagccccggcctcagttt

SEQ ID NO: 21453 - DNA, 25 bp, Homo sapiens
cccggcctcagtttcccctgcgccc

SEQ ID NO: 21454 - DNA, 25 bp, Homo sapiens
ctcagtttcccctgcgcccccgggg

SEQ ID NO: 21455 - DNA, 25 bp, Homo sapiens
cccgggggcggtgcaggccgggcgg

SEQ ID NO: 21456 - DNA, 25 bp, Homo sapiens
gccgggcgggggctacctttggagg

SEQ ID NO: 21457 - DNA, 25 bp, Homo sapiens
gctacctttggaggaggcggcggcg

SEQ ID NO: 21458 - DNA, 25 bp, Homo sapiens
cggcggcggccagcgcgtgcatata

SEQ ID NO: 21459 - DNA, 25 bp, Homo sapiens
cgcgtgcatatagggggtctcccag

SEQ ID NO: 21460 - DNA, 25 bp, Homo sapiens
tgcatatagggggtctcccagcgct

SEQ ID NO: 21461 - DNA, 25 bp, Homo sapiens
ggtctcccagcgctccatcaccggc

SEQ ID NO: 21462 - DNA, 25 bp, Homo sapiens
accggcttgcccaggatgcgcaggt

SEQ ID NO: 21463 - DNA, 25 bp, Homo sapiens
caggatgcgcaggtgcgtgtccgct

SEQ ID NO: 21464 - DNA, 25 bp, Homo sapiens
gcaggtgcgtgtccgctgcgtcgta

SEQ ID NO: 21465 - DNA, 25 bp, Homo sapiens
tgcagttctcgccgggcgcgaagat

SEQ ID NO: 21466 - DNA, 25 bp, Homo sapiens
cagttctcgccgggcgcgaagatgg

SEQ ID NO: 21467 - DNA, 25 bp, Homo sapiens
cgggcgcgaagatgggggtcgcgct

SEQ ID NO: 21468 - DNA, 25 bp, Homo sapiens
gcgctgggggcgctcatgctgcagg

SEQ ID NO: 21469 - DNA, 25 bp, Homo sapiens
tcatgctgcaggctggacggcgacc

SEQ ID NO: 21470 - DNA, 25 bp, Homo sapiens
ggctggacggcgacccgacctcgat

SEQ ID NO: 21471 - DNA, 25 bp, Homo sapiens
gacccgacctcgatcgcgcgccgcc

SEQ ID NO: 21472 - DNA, 25 bp, Homo sapiens
cccgacctcgatcgcgcgccgcccg

SEQ ID NO: 21473 - DNA, 25 bp, Homo sapiens
acctcgatcgcgcgccgcccgggcc

SEQ ID NO: 21474 - DNA, 25 bp, Homo sapiens
gggcccgctccctgcaggggcttgt

SEQ ID NO: 21475 - DNA, 25 bp, Homo sapiens
ccgctccctgcaggggcttgtgggc

SEQ ID NO: 21476 - DNA, 25 bp, Homo sapiens
tccctgcaggggcttgtgggccggg

SEQ ID NO: 21477 - DNA, 25 bp, Homo sapiens
ccgggggcgggtccaacaggcccgg

SEQ ID NO: 21478 - DNA, 25 bp, Homo sapiens
gcgggtccaacaggcccggggggcg

SEQ ID NO: 21479 - DNA, 25 bp, Homo sapiens
gggcggacccgcgagaggacgcgcg

SEQ ID NO: 21480 - DNA, 25 bp, Homo sapiens
ggacccgcgagaggacgcgcgcgcg

SEQ ID NO: 21481 - DNA, 25 bp, Homo sapiens
acccgcgagaggacgcgcgcgcgcg

SEQ ID NO: 21482 - DNA, 25 bp, Homo sapiens
gcgcggctccgggagcggcctctag

SEQ ID NO: 21483 - DNA, 25 bp, Homo sapiens
ggagcggcctctagcggcggccacg

SEQ ID NO: 21484 - DNA, 25 bp, Homo sapiens
tctagcggcggccacgcgagaggtg

SEQ ID NO: 21485 - DNA, 25 bp, Homo sapiens
cggccacgcgagaggtggcgggagt

SEQ ID NO: 21486 - DNA, 25 bp, Homo sapiens
gccacgcgagaggtggcgggagtgg

SEQ ID NO: 21487 - DNA, 25 bp, Homo sapiens
cacgcgagaggtggcgggagtgggg

SEQ ID NO: 21488 - DNA, 25 bp, Homo sapiens
aggtggcgggagtggggtcggggcc

SEQ ID NO: 21489 - DNA, 25 bp, Homo sapiens
ggtcggggccccggccgccccctcc

SEQ ID NO: 21490 - DNA, 25 bp, Homo sapiens
cccggccgccccctccccaaggagc

SEQ ID NO: 21491 - DNA, 25 bp, Homo sapiens
cccaaggagcctcggtgccccctct

SEQ ID NO: 21492 - DNA, 25 bp, Homo sapiens
caaggagcctcggtgccccctctgc

SEQ ID NO: 21493 - DNA, 25 bp, Homo sapiens
ccctctgcggagcgggcaccgcagc

SEQ ID NO: 21494 - DNA, 25 bp, Homo sapiens
ctctgcggagcgggcaccgcagccc

SEQ ID NO: 21495 - DNA, 25 bp, Homo sapiens
gagcgggcaccgcagccccgcgccc

SEQ ID NO: 21496 - DNA, 25 bp, Homo sapiens
ccgcgcccggggacgcgaacctgca

SEQ ID NO: 21497 - DNA, 25 bp, Homo sapiens
aacctgcaggctggggactggaatc

SEQ ID NO: 21498 - DNA, 25 bp, Homo sapiens
gctggggactggaatccccgccttg

SEQ ID NO: 21499 - DNA, 25 bp, Homo sapiens
ccttgccgcttacgcgccatagatt

SEQ ID NO: 21500 - DNA, 25 bp, Homo sapiens
gcttacgcgccatagattcctcatc

SEQ ID NO: 21501 - DNA, 25 bp, Homo sapiens
agattcctcatctgtcagcaccgca

SEQ ID NO: 21502 - DNA, 25 bp, Homo sapiens
tcatctgtcagcaccgcagaaaggc

SEQ ID NO: 21503 - DNA, 25 bp, Homo sapiens
atctgtcagcaccgcagaaaggccc

SEQ ID NO: 21504 - DNA, 25 bp, Homo sapiens
agaaaggccccctcctcgctggggt

SEQ ID NO: 21505 - DNA, 25 bp, Homo sapiens
ctcctcgctggggtgtgagaatctg

SEQ ID NO: 21506 - DNA, 25 bp, Homo sapiens
cctcgctggggtgtgagaatctgag

SEQ ID NO: 21507 - DNA, 25 bp, Homo sapiens
ccggtggtctggtggccacgagggt

SEQ ID NO: 21508 - DNA, 25 bp, Homo sapiens
ccacgagggtggggacccagcatta

SEQ ID NO: 21509 - DNA, 25 bp, Homo sapiens
gggacccagcattagagctctgatg

SEQ ID NO: 21510 - DNA, 25 bp, Homo sapiens
acccagcattagagctctgatgccc

SEQ ID NO: 21511 - DNA, 25 bp, Homo sapiens
attagagctctgatgcccccctttc

SEQ ID NO: 21512 - DNA, 25 bp, Homo sapiens
tagagctctgatgcccccctttcat

SEQ ID NO: 21513 - DNA, 25 bp, Homo sapiens
gatgcccccctttcatgagcccatg

SEQ ID NO: 21514 - DNA, 25 bp, Homo sapiens
tgagcccatgtcacacccccatagg

SEQ ID NO: 21515 - DNA, 25 bp, Homo sapiens
ataggctgggggtcatctgagaccc

SEQ ID NO: 21516 - DNA, 25 bp, Homo sapiens
ggtcatctgagaccccgggtcccta

SEQ ID NO: 21517 - DNA, 25 bp, Homo sapiens
cccgggtccctaatgggggattccg

SEQ ID NO: 21518 - DNA, 25 bp, Homo sapiens
gggattccgcccaaagacgcctcca

SEQ ID NO: 21519 - DNA, 25 bp, Homo sapiens
ctccagttctggagaccaggactca

SEQ ID NO: 21520 - DNA, 25 bp, Homo sapiens
agaccaggactcaatcccagcagtg

SEQ ID NO: 21521 - DNA, 25 bp, Homo sapiens
ggactcaatcccagcagtgcccttt

SEQ ID NO: 21522 - DNA, 25 bp, Homo sapiens
cagcagtgccctttcctccggcggc

SEQ ID NO: 21523 - DNA, 25 bp, Homo sapiens
cagtgccctttcctccggcggccct

SEQ ID NO: 21524 - DNA, 25 bp, Homo sapiens
gtgccctttcctccggcggccctgc

SEQ ID NO: 21525 - DNA, 25 bp, Homo sapiens
tccggcggccctgcagctggggtgt

SEQ ID NO: 21526 - DNA, 25 bp, Homo sapiens
cggcggccctgcagctggggtgtgc

SEQ ID NO: 21527 - DNA, 25 bp, Homo sapiens
cggccctgcagctggggtgtgcggg

SEQ ID NO: 21528 - DNA, 25 bp, Homo sapiens
gtgcgggggtggaattaggcctccc

SEQ ID NO: 21529 - DNA, 25 bp, Homo sapiens
ggggtggaattaggcctcccccagc

SEQ ID NO: 21530 - DNA, 25 bp, Homo sapiens
ccagcccagggtagccccttagggt

SEQ ID NO: 21531 - DNA, 25 bp, Homo sapiens
cagggtagccccttagggtcaagca

SEQ ID NO: 21532 - DNA, 25 bp, Homo sapiens
gggtagccccttagggtcaagcaca

SEQ ID NO: 21533 - DNA, 25 bp, Homo sapiens
gggtcaagcacaccccccgcctgtt

SEQ ID NO: 21534 - DNA, 25 bp, Homo sapiens
cacaccccccgcctgtttcctgggg

SEQ ID NO: 21535 - DNA, 25 bp, Homo sapiens
ccgcctgtttcctgggggcccccaa

SEQ ID NO: 21536 - DNA, 25 bp, Homo sapiens
cccaagcccgctgcggtggcgtcct

SEQ ID NO: 21537 - DNA, 25 bp, Homo sapiens
gcgtcctggctctgatagccggttt

SEQ ID NO: 21538 - DNA, 25 bp, Homo sapiens
ctggctctgatagccggtttccttc

SEQ ID NO: 21539 - DNA, 25 bp, Homo sapiens
ggctctgatagccggtttccttccc

SEQ ID NO: 21540 - DNA, 25 bp, Homo sapiens
gcctgaaggagctttggaacactga

SEQ ID NO: 21541 - DNA, 25 bp, Homo sapiens
gcctgggctgctgcttcaaataacg

SEQ ID NO: 21542 - DNA, 25 bp, Homo sapiens
cctggtggtgctggaactagtataa

SEQ ID NO: 21543 - DNA, 25 bp, Homo sapiens
tgatgctgtgctcaactaaaaaaga

SEQ ID NO: 21544 - DNA, 25 bp, Homo sapiens
agcatttctctagaccctcctggta

SEQ ID NO: 21545 - DNA, 25 bp, Homo sapiens
ggctatggcactgaagaccaccaca

SEQ ID NO: 21546 - DNA, 25 bp, Homo sapiens
gggttcgcaagcttcactagacatg

SEQ ID NO: 21547 - DNA, 25 bp, Homo sapiens
tggggtaacctcacattaattcatg

SEQ ID NO: 21548 - DNA, 25 bp, Homo sapiens
gcacacagccttctggatcattgta

SEQ ID NO: 21549 - DNA, 25 bp, Homo sapiens
gagccgagtgcaacccttcagtata

SEQ ID NO: 21550 - DNA, 25 bp, Homo sapiens
tgccgggtgacatccaacatctgac

SEQ ID NO: 21551 - DNA, 25 bp, Homo sapiens
cttgacatcctgaaactgggaaatt

SEQ ID NO: 21552 - DNA, 25 bp, Homo sapiens
ggcctgttatctgccacctcttata

SEQ ID NO: 21553 - DNA, 25 bp, Homo sapiens
aaaccgctttcgcttactaagagaa

SEQ ID NO: 21554 - DNA, 25 bp, Homo sapiens
cagtttcgcaatcaccgaggccgga

SEQ ID NO: 21555 - DNA, 25 bp, Homo sapiens
tcccaagtgtcagtggtctcagtgc

SEQ ID NO: 21556 - DNA, 25 bp, Homo sapiens
aatggaggctcagtggtcactgccg

SEQ ID NO: 21557 - DNA, 25 bp, Homo sapiens
tttccaaccaagatcaaggacagtg

SEQ ID NO: 21558 - DNA, 25 bp, Homo sapiens
gcatccctgggtccaaaagacattt

SEQ ID NO: 21559 - DNA, 25 bp, Homo sapiens
acagggtttctctccagtgtgcgtc

SEQ ID NO: 21560 - DNA, 25 bp, Homo sapiens
gcactgtctgcctggtttctatgga

SEQ ID NO: 21561 - DNA, 25 bp, Homo sapiens
atgtctctgtgggtctgaaattgtg

SEQ ID NO: 21562 - DNA, 25 bp, Homo sapiens
gtccctctgagaacttgatccactg

SEQ ID NO: 21563 - DNA, 25 bp, Homo sapiens
cctcctcctcagagaagggtttgtg

SEQ ID NO: 21564 - DNA, 25 bp, Homo sapiens
ttgacttcccagaccaccgatgatg

SEQ ID NO: 21565 - DNA, 25 bp, Homo sapiens
aggttcctgcaggtctccagcatca

SEQ ID NO: 21566 - DNA, 25 bp, Homo sapiens
cttcttcgaagacatggcctggctg

SEQ ID NO: 21567 - DNA, 25 bp, Homo sapiens
ggaattgccgcttctctgtactgtg

SEQ ID NO: 21568 - DNA, 25 bp, Homo sapiens
ctggggctgaaataggaacaatacc

SEQ ID NO: 21569 - DNA, 25 bp, Homo sapiens
ctgtctccctgtggctacagcatta

SEQ ID NO: 21570 - DNA, 25 bp, Homo sapiens
tgaccgtgtctgttcccgcaaactg

SEQ ID NO: 21571 - DNA, 25 bp, Homo sapiens
ggcgctccctgtgttcttaaaactc

SEQ ID NO: 21572 - DNA, 25 bp, Homo sapiens
ccaggctttaggaattgcggctcaa

SEQ ID NO: 21573 - DNA, 25 bp, Homo sapiens
agcttaggatactcacattgtgtca

SEQ ID NO: 21574 - DNA, 25 bp, Homo sapiens
gccaatatctacatagaattatttc

SEQ ID NO: 21575 - DNA, 25 bp, Homo sapiens
tggtctttacagctggtcctccgaa

SEQ ID NO: 21576 - DNA, 25 bp, Homo sapiens
cggtgccaggacttcgccattaaac

SEQ ID NO: 21577 - DNA, 25 bp, Homo sapiens
gatgttcccttctggccactagatg

SEQ ID NO: 21578 - DNA, 25 bp, Homo sapiens
ccgccagatgggttacaaattcctc

SEQ ID NO: 21579 - DNA, 25 bp, Homo sapiens
tgcagctagagttaaggtttagcta

SEQ ID NO: 21580 - DNA, 25 bp, Homo sapiens
gacgtgtgtgtgtgcacacagaaat

SEQ ID NO: 21581 - DNA, 25 bp, Homo sapiens
actttgcattatttttcttcttgta

SEQ ID NO: 21582 - DNA, 25 bp, Homo sapiens
caagtgtggcagcagtacctgcagc

SEQ ID NO: 21583 - DNA, 25 bp, Homo sapiens
gacgggtcatccaaaacaaagttgc

SEQ ID NO: 21584 - DNA, 25 bp, Homo sapiens
ctggggtcagaaatccgcatactta

SEQ ID NO: 21585 - DNA, 25 bp, Homo sapiens
gggtgtagcaaagctccgtcctcta

SEQ ID NO: 21586 - DNA, 25 bp, Homo sapiens
gctttagtattgagagtagcagttc

SEQ ID NO: 21587 - DNA, 25 bp, Homo sapiens
gctcatataacatttgacctgtagg

SEQ ID NO: 21588 - DNA, 25 bp, Homo sapiens
aggtggcctcctctatccgagcaca

SEQ ID NO: 21589 - DNA, 25 bp, Homo sapiens
cttccttttggtgagagccgccatc

SEQ ID NO: 21590 - DNA, 25 bp, Homo sapiens
cgaagagcattgtacaggcaccgtc

SEQ ID NO: 21591 - DNA, 25 bp, Homo sapiens
acccaacaggggagcatttttaaga

SEQ ID NO: 21592 - DNA, 25 bp, Homo sapiens
tccagtattagaaggcacccggttg

SEQ ID NO: 21593 - DNA, 25 bp, Homo sapiens
ggcgtcccgagctcacacacatgga

SEQ ID NO: 21594 - DNA, 25 bp, Homo sapiens
ggtccacagttttaagcccaagcac

SEQ ID NO: 21595 - DNA, 25 bp, Homo sapiens
cgttcacaatatagtccaggagttc

SEQ ID NO: 21596 - DNA, 25 bp, Homo sapiens
tgggcttgccagtgctatgaaaatc

SEQ ID NO: 21597 - DNA, 25 bp, Homo sapiens
gggtgctcactgcttccagctctgt

SEQ ID NO: 21598 - DNA, 25 bp, Homo sapiens
agaggctgctccaaggctcaatttg

SEQ ID NO: 21599 - DNA, 25 bp, Homo sapiens
gctcccaggaggcaccagctttaga

SEQ ID NO: 21600 - DNA, 25 bp, Homo sapiens
agcatgcgtcctgtgtcttaatcca

SEQ ID NO: 21601 - DNA, 25 bp, Homo sapiens
gtcccatcctcgaatcagttgcgtg

SEQ ID NO: 21602 - DNA, 25 bp, Homo sapiens
ccttccctgggatggctttcattca

SEQ ID NO: 21603 - DNA, 25 bp, Homo sapiens
cctggggccgcaatcaatgtttgtt

SEQ ID NO: 21604 - DNA, 25 bp, Homo sapiens
ggataaataacctggacgccgcatc

SEQ ID NO: 21605 - DNA, 25 bp, Homo sapiens
agtgttgtactgtggggatactccc

SEQ ID NO: 21606 - DNA, 25 bp, Homo sapiens
tgccatcctgggaggagctcacaca

SEQ ID NO: 21607 - DNA, 25 bp, Homo sapiens
atcgcacgtttgcagggtgtcaccc

SEQ ID NO: 21608 - DNA, 25 bp, Homo sapiens
tgctgtcataaggacgcccgggata

SEQ ID NO: 21609 - DNA, 25 bp, Homo sapiens
caggcgttcccaacagtggtcaaga

SEQ ID NO: 21610 - DNA, 25 bp, Homo sapiens
gttcaagacggcaggggaaattttc

SEQ ID NO: 21611 - DNA, 25 bp, Homo sapiens
tctaggcctgtgaccttgagaagca

SEQ ID NO: 21612 - DNA, 25 bp, Homo sapiens
gcctgtcgagcgagcattccagata

SEQ ID NO: 21613 - DNA, 25 bp, Homo sapiens
cgtgtgaccgccaccctggaagtaa

SEQ ID NO: 21614 - DNA, 25 bp, Homo sapiens
tggcactgtctcaaggccctgctgt

SEQ ID NO: 21615 - DNA, 25 bp, Homo sapiens
aggctcccatgctctgtacagcgca

SEQ ID NO: 21616 - DNA, 25 bp, Homo sapiens
ggagactccatctggccgtttgcta

SEQ ID NO: 21617 - DNA, 25 bp, Homo sapiens
cctgggcaacaaagtgagacctata

SEQ ID NO: 21618 - DNA, 25 bp, Homo sapiens
gtggactgctccttccatctggaaa

SEQ ID NO: 21619 - DNA, 25 bp, Homo sapiens
tgcccgtgttgacttgcacacattg

SEQ ID NO: 21620 - DNA, 25 bp, Homo sapiens
tccctggttgtctatggacctcctc

SEQ ID NO: 21621 - DNA, 25 bp, Homo sapiens
cgatctcactgcttggggagcctca

SEQ ID NO: 21622 - DNA, 25 bp, Homo sapiens
ggaccggcttctcgcgataacggga

SEQ ID NO: 21623 - DNA, 25 bp, Homo sapiens
ctccgggcatacttccaatcgggta

SEQ ID NO: 21624 - DNA, 25 bp, Homo sapiens
gattggttgctgtatccgtttccta

SEQ ID NO: 21625 - DNA, 25 bp, Homo sapiens
cgggcaatttctcctgtactggtaa

SEQ ID NO: 21626 - DNA, 25 bp, Homo sapiens
cgggcaatttctcctgtactggtga

SEQ ID NO: 21627 - DNA, 25 bp, Homo sapiens
cacaaaacctattctggggagattc

SEQ ID NO: 21628 - DNA, 25 bp, Homo sapiens
gagctccatcttcctgtgtctagtg

SEQ ID NO: 21629 - DNA, 25 bp, Homo sapiens
ttccagggtctcaaagcatcgtgtg

SEQ ID NO: 21630 - DNA, 25 bp, Homo sapiens
ggacaccattttctagtgaaacatg

SEQ ID NO: 21631 - DNA, 25 bp, Homo sapiens
tcgggatcttcctcttagtgttgcc

SEQ ID NO: 21632 - DNA, 25 bp, Homo sapiens
tcagattctgcagggtcttggtggc

SEQ ID NO: 21633 - DNA, 25 bp, Homo sapiens
ttcctaggggttctcttcaaatgta

SEQ ID NO: 21634 - DNA, 25 bp, Homo sapiens
agccagccaggccaaaaggaatttg

SEQ ID NO: 21635 - DNA, 25 bp, Homo sapiens
gtttccctgagaattctagagactc

SEQ ID NO: 21636 - DNA, 25 bp, Homo sapiens
ctctttataatgaatggattgtgaa

SEQ ID NO: 21637 - DNA, 25 bp, Homo sapiens
tcacttgggtcctgagcgactcata

SEQ ID NO: 21638 - DNA, 25 bp, Homo sapiens
cagggcttcctgtttctcttggaca

SEQ ID NO: 21639 - DNA, 25 bp, Homo sapiens
tgcagtcattttattgagcacttac

SEQ ID NO: 21640 - DNA, 25 bp, Homo sapiens
ctcctttggatggactcccagccta

SEQ ID NO: 21641 - DNA, 25 bp, Homo sapiens
cccagacggccaagaggtggaaata

SEQ ID NO: 21642 - DNA, 25 bp, Homo sapiens
gactgttgccttccatcactgttga

SEQ ID NO: 21643 - DNA, 25 bp, Homo sapiens
agctatttaagcgaagtcctgagga

SEQ ID NO: 21644 - DNA, 25 bp, Homo sapiens
tccaggttccagatcaggtaatatc

SEQ ID NO: 21645 - DNA, 25 bp, Homo sapiens
gaagcccgctggttattttaatctc

SEQ ID NO: 21646 - DNA, 25 bp, Homo sapiens
ctaccgctagaggaatgaggtctcc

SEQ ID NO: 21647 - DNA, 25 bp, Homo sapiens
gcatgttgttcttaaactgttacta

SEQ ID NO: 21648 - DNA, 25 bp, Homo sapiens
aggcccatctgtgtttcctggagca

SEQ ID NO: 21649 - DNA, 25 bp, Homo sapiens
ggtgtttccaagagagccgatgata

SEQ ID NO: 21650 - DNA, 25 bp, Homo sapiens
tgctcataagatggtgcctggctta

SEQ ID NO: 21651 - DNA, 25 bp, Homo sapiens
gaagactctcttcctcgccggtata

SEQ ID NO: 21652 - DNA, 25 bp, Homo sapiens
tagtttgctgaacccgcctgttttc

SEQ ID NO: 21653 - DNA, 25 bp, Homo sapiens
gtgacatcctctctcttcctgaaga

SEQ ID NO: 21654 - DNA, 25 bp, Homo sapiens
cgggaccatcctgagcatcatctga

SEQ ID NO: 21655 - DNA, 25 bp, Homo sapiens
ccctgggagggaccataattgtatc

SEQ ID NO: 21656 - DNA, 25 bp, Homo sapiens
cagccctgccagatgatgattcttc

SEQ ID NO: 21657 - DNA, 25 bp, Homo sapiens
cagaggttttgtgctgatgtctatc

SEQ ID NO: 21658 - DNA, 25 bp, Homo sapiens
tagcttctccattgcactcagggtg

SEQ ID NO: 21659 - DNA, 25 bp, Homo sapiens
cgccaggtgtatgtatatcttgctc

SEQ ID NO: 21660 - DNA, 25 bp, Homo sapiens
ctgacctggaccttgtggatcctga

SEQ ID NO: 21661 - DNA, 25 bp, Homo sapiens
gaaacttcagcaaccatcatctagg

SEQ ID NO: 21662 - DNA, 25 bp, Homo sapiens
gtggccacctcagaccattcctgga

SEQ ID NO: 21663 - DNA, 25 bp, Homo sapiens
gggtgcccaccctagttagctcatg

SEQ ID NO: 21664 - DNA, 25 bp, Homo sapiens
gttaagccttgcagaagtccagtga

SEQ ID NO: 21665 - DNA, 25 bp, Homo sapiens
ccctgtagacatgacccttggaatc

SEQ ID NO: 21666 - DNA, 25 bp, Homo sapiens
actccctggagggttgaagcacttg

SEQ ID NO: 21667 - DNA, 25 bp, Homo sapiens
tggaccctttgcatcttctcttaga

SEQ ID NO: 21668 - DNA, 25 bp, Homo sapiens
acgcttggcttatccagagtgctca

SEQ ID NO: 21669 - DNA, 25 bp, Homo sapiens
tgtggtctcatatgtctccgctaga

SEQ ID NO: 21670 - DNA, 25 bp, Homo sapiens
accctaagtggctgcaaatcccatg

SEQ ID NO: 21671 - DNA, 25 bp, Homo sapiens
tactggttctaatggaagtaaactc

SEQ ID NO: 21672 - DNA, 25 bp, Homo sapiens
acttttttttttgaagctcttcatg

SEQ ID NO: 21673 - DNA, 25 bp, Homo sapiens
gttgccttctgatgtgacctttctg

SEQ ID NO: 21674 - DNA, 25 bp, Homo sapiens
cgggcagcaacagtaccagctactc

SEQ ID NO: 21675 - DNA, 25 bp, Homo sapiens
ctgggtctgactcactaactgaaaa

SEQ ID NO: 21676 - DNA, 25 bp, Homo sapiens
cagggaggcaggatttacaaacaca

SEQ ID NO: 21677 - DNA, 25 bp, Homo sapiens
accctttgtctgcaaccctagaaga

SEQ ID NO: 21678 - DNA, 25 bp, Homo sapiens
cttggacaaaagagcctgcgcagtg

SEQ ID NO: 21679 - DNA, 25 bp, Homo sapiens
acgtgccacactactggactctgga

SEQ ID NO: 21680 - DNA, 25 bp, Homo sapiens
ccggaggtcgtttttatcatacaca

SEQ ID NO: 21681 - DNA, 25 bp, Homo sapiens
gccatgcccatgttgattcatttta

SEQ ID NO: 21682 - DNA, 25 bp, Homo sapiens
gccactagcgtcttaactgctggta

SEQ ID NO: 21683 - DNA, 25 bp, Homo sapiens
agactttgggactaggctgatgaca

SEQ ID NO: 21684 - DNA, 25 bp, Homo sapiens
tgaggattctcccatgacaactttc

SEQ ID NO: 21685 - DNA, 25 bp, Homo sapiens
ggtggcactttgaccctcaagaatt

SEQ ID NO: 21686 - DNA, 25 bp, Homo sapiens
cacatgctctttatcgcgtaccaga

SEQ ID NO: 21687 - DNA, 25 bp, Homo sapiens
gccaggagttacttcggtcagaatc

SEQ ID NO: 21688 - DNA, 25 bp, Homo sapiens
tgcaccaggtactctgttgtccaga

SEQ ID NO: 21689 - DNA, 25 bp, Homo sapiens
gttggtcaactcctctaccgttcta

SEQ ID NO: 21690 - DNA, 25 bp, Homo sapiens
ctcttcttgaatctgcccgtgctgg

SEQ ID NO: 21691 - DNA, 25 bp, Homo sapiens
taattctccagatgtgttcacagac

SEQ ID NO: 21692 - DNA, 25 bp, Homo sapiens
tccctgtatgttagagcagattttc

SEQ ID NO: 21693 - DNA, 25 bp, Homo sapiens
ggctcctacatcctggtggtcccta

SEQ ID NO: 21694 - DNA, 25 bp, Homo sapiens
gaagtcctttccactgctgccttga

SEQ ID NO: 21695 - DNA, 25 bp, Homo sapiens
gtaccttccgagcacttaactatgg

SEQ ID NO: 21696 - DNA, 25 bp, Homo sapiens
ggggaagtcacttcaacaggtctta

SEQ ID NO: 21697 - DNA, 25 bp, Homo sapiens
cacctgggtgatcacggtcagcaca

SEQ ID NO: 21698 - DNA, 25 bp, Homo sapiens
tccctcccagtagacacagatatgt

SEQ ID NO: 21699 - DNA, 25 bp, Homo sapiens
ttggcttcaacgtgagaatggcatc

SEQ ID NO: 21700 - DNA, 25 bp, Homo sapiens
cagcgtgtcttgtgtgttctcttac

SEQ ID NO: 21701 - DNA, 25 bp, Homo sapiens
tgcacacaggacacccgtatgatgg

SEQ ID NO: 21702 - DNA, 25 bp, Homo sapiens
agactcggcagctcttttaaaaagg

SEQ ID NO: 21703 - DNA, 25 bp, Homo sapiens
ggcaagctaagcagtttccacagga

SEQ ID NO: 21704 - DNA, 25 bp, Homo sapiens
agctgctgtttaccacggttatacc

SEQ ID NO: 21705 - DNA, 25 bp, Homo sapiens
tcccctagccatggtggcatagcga

SEQ ID NO: 21706 - DNA, 25 bp, Homo sapiens
tgactgtgtcgtcccttgactattg

SEQ ID NO: 21707 - DNA, 25 bp, Homo sapiens
ggtcccaacacatcagggtgacatg

SEQ ID NO: 21708 - DNA, 25 bp, Homo sapiens
tgaatttaaggtgagtgagagatga

SEQ ID NO: 21709 - DNA, 25 bp, Homo sapiens
gttgtttttaagtcacgccatttgc

SEQ ID NO: 21710 - DNA, 25 bp, Homo sapiens
ggcccgaaagccatcttcacaagta

SEQ ID NO: 21711 - DNA, 25 bp, Homo sapiens
ttgtggtgaaggcaaagtatttcct

SEQ ID NO: 21712 - DNA, 25 bp, Homo sapiens
tgcagctgtgtttcccaatttcaga

SEQ ID NO: 21713 - DNA, 25 bp, Homo sapiens
gacgctccaagtgcggacccatttg

SEQ ID NO: 21714 - DNA, 25 bp, Homo sapiens
cccgtggccagtgcttatcaaaatg

SEQ ID NO: 21715 - DNA, 25 bp, Homo sapiens
ctgttttaggaaaatgttagcattc

SEQ ID NO: 21716 - DNA, 25 bp, Homo sapiens
gcgttggcctatggatatcaattta

SEQ ID NO: 21717 - DNA, 25 bp, Homo sapiens
cgcacagttacttgctggccataca

SEQ ID NO: 21718 - DNA, 25 bp, Homo sapiens
gtggcctaagaagacccatcccatg

SEQ ID NO: 21719 - DNA, 25 bp, Homo sapiens
cctgtccaggtaagggcatttcttt

SEQ ID NO: 21720 - DNA, 25 bp, Homo sapiens
tcccagcaggtttcagagtatcaca

SEQ ID NO: 21721 - DNA, 25 bp, Homo sapiens
caacggtttcattagggtggtattc

SEQ ID NO: 21722 - DNA, 25 bp, Homo sapiens
agcctgccattgtcagctgtactga

SEQ ID NO: 21723 - DNA, 25 bp, Homo sapiens
tggcctggtcatttcccaaacttta

SEQ ID NO: 21724 - DNA, 25 bp, Homo sapiens
tttgaccaacatgtggaactgaacc

SEQ ID NO: 21725 - DNA, 25 bp, Homo sapiens
tgacacacggtctttcccagatgta

SEQ ID NO: 21726 - DNA, 25 bp, Homo sapiens
tgggcaacttctgtgtagtcataaa

SEQ ID NO: 21727 - DNA, 25 bp, Homo sapiens
ggattacagagccacgcagttttta

SEQ ID NO: 21728 - DNA, 25 bp, Homo sapiens
catcgtacttttgtcccggggaaca

SEQ ID NO: 21729 - DNA, 25 bp, Homo sapiens
cttgggagatgcttaactgttttca

SEQ ID NO: 21730 - DNA, 25 bp, Homo sapiens
ggcatgagcccttctgatcctgtta

SEQ ID NO: 21731 - DNA, 25 bp, Homo sapiens
ctgtttcccagagcaggcaaatatc

SEQ ID NO: 21732 - DNA, 25 bp, Homo sapiens
tgggatgagtcacactgcacacttg

SEQ ID NO: 21733 - DNA, 25 bp, Homo sapiens
ttcacctgcagtattgggttccttc

SEQ ID NO: 21734 - DNA, 25 bp, Homo sapiens
gaggtcaccctcacatgtcagcaga

SEQ ID NO: 21735 - DNA, 25 bp, Homo sapiens
gatcacccggcgtctggaaagctct

SEQ ID NO: 21736 - DNA, 25 bp, Homo sapiens
caagccttgtttctctcccacgtgg

SEQ ID NO: 21737 - DNA, 25 bp, Homo sapiens
gttaaaaaaaggaaaaatgtaacta

SEQ ID NO: 21738 - DNA, 25 bp, Homo sapiens
tatctgcaggagtcaccaattggcc

SEQ ID NO: 21739 - DNA, 25 bp, Homo sapiens
gctacacagatgctggtgcctccta

SEQ ID NO: 21740 - DNA, 25 bp, Homo sapiens
gaacgcaggttctcccatagctgta

SEQ ID NO: 21741 - DNA, 25 bp, Homo sapiens
gcagccttggtctatgcagtgacta

SEQ ID NO: 21742 - DNA, 25 bp, Homo sapiens
agaccagtgtctccggatgcctacg

SEQ ID NO: 21743 - DNA, 25 bp, Homo sapiens
ggggtctcagattttgcagctcatt

SEQ ID NO: 21744 - DNA, 25 bp, Homo sapiens
gtagtcactgcagagaccaaggctg

SEQ ID NO: 21745 - DNA, 25 bp, Homo sapiens
cagattggccataagcgggagttta

SEQ ID NO: 21746 - DNA, 25 bp, Homo sapiens
attatctcctcattgactgtgaagc

SEQ ID NO: 21747 - DNA, 25 bp, Homo sapiens
caaggttcaagagcaaatattccca

SEQ ID NO: 21748 - DNA, 25 bp, Homo sapiens
gtaatttctttgcaacaactgtgtg

SEQ ID NO: 21749 - DNA, 25 bp, Homo sapiens
aggggttctactgcacagcttggca

SEQ ID NO: 21750 - DNA, 25 bp, Homo sapiens
tgccctgggctttacagaagaaacg

SEQ ID NO: 21751 - DNA, 25 bp, Homo sapiens
ggagacctttacatgtcactgtaca

SEQ ID NO: 21752 - DNA, 25 bp, Homo sapiens
tgcccgctgtttgactttgagtttc

SEQ ID NO: 21753 - DNA, 25 bp, Homo sapiens
taactctgctagagtgaaaacaacc

SEQ ID NO: 21754 - DNA, 25 bp, Homo sapiens
cccaggactgcgcttcatctacatg

SEQ ID NO: 21755 - DNA, 25 bp, Homo sapiens
acacagatgctggtggtgcctccta

SEQ ID NO: 21756 - DNA, 25 bp, Homo sapiens
ggctctcccatagccgtagagtttc

SEQ ID NO: 21757 - DNA, 25 bp, Homo sapiens
gttgttgcaaagaaattactacttt

SEQ ID NO: 21758 - DNA, 25 bp, Homo sapiens
tgggaatatttgctcttgaaccttg

SEQ ID NO: 21759 - DNA, 25 bp, Homo sapiens
cagcttcacagtcaatgaggagata

SEQ ID NO: 21760 - DNA, 25 bp, Homo sapiens
gagactgagatataaactcccgctt

SEQ ID NO: 21761 - DNA, 25 bp, Homo sapiens
gcagccttggtctctgcagtgacta

SEQ ID NO: 21762 - DNA, 25 bp, Homo sapiens
tgggatccagacaccagtcctttta

SEQ ID NO: 21763 - DNA, 25 bp, Homo sapiens
actcccaggtgtgttttctgcaaac

SEQ ID NO: 21764 - DNA, 25 bp, Homo sapiens
accaaggctgctgagactgtatttc

SEQ ID NO: 21765 - DNA, 25 bp, Homo sapiens
ttgttcacggagctatctggggata

SEQ ID NO: 21766 - DNA, 25 bp, Homo sapiens
cctgggtcatgaccttgagcattta

SEQ ID NO: 21767 - DNA, 25 bp, Homo sapiens
ggccaattggtgactcctgcagata

SEQ ID NO: 21768 - DNA, 25 bp, Homo sapiens
ctcaaggcgaagttggtacgtatcc

SEQ ID NO: 21769 - DNA, 25 bp, Homo sapiens
taactctgctagagtgaaaacaacc

SEQ ID NO: 21770 - DNA, 25 bp, Homo sapiens
cccaggactgcgcttcatctacatg

SEQ ID NO: 21771 - DNA, 25 bp, Homo sapiens
acacagatgctggtggtgcctccta

SEQ ID NO: 21772 - DNA, 25 bp, Homo sapiens
ggctctcccatagccgtagagtttc

SEQ ID NO: 21773 - DNA, 25 bp, Homo sapiens
gttgttgcaaagaaattactacttt

SEQ ID NO: 21774 - DNA, 25 bp, Homo sapiens
tgggaatatttgctcttgaaccttg

SEQ ID NO: 21775 - DNA, 25 bp, Homo sapiens
cagcttcacagtcaatgaggagata

SEQ ID NO: 21776 - DNA, 25 bp, Homo sapiens
gagagataaacaagaatctccatgt

SEQ ID NO: 21777 - DNA, 25 bp, Homo sapiens
caggattacaggacgccaggaattc

SEQ ID NO: 21778 - DNA, 25 bp, Homo sapiens
ttttcaaagtacaaggaccaggtca

SEQ ID NO: 21779 - DNA, 25 bp, Homo sapiens
atggtcacctcaaagtcaaattaga

SEQ ID NO: 21780 - DNA, 25 bp, Homo sapiens
gaaaaatttagcacacagatcacca

SEQ ID NO: 21781 - DNA, 25 bp, Homo sapiens
gcatcctgctacctgaacagtttta

SEQ ID NO: 21782 - DNA, 25 bp, Homo sapiens
cttgcagcgtctgggagaatctttc

SEQ ID NO: 21783 - DNA, 25 bp, Homo sapiens
gactccactgtgtagaaaacctgtg

SEQ ID NO: 21784 - DNA, 25 bp, Homo sapiens
tccattgcaatgaagccagaacggc

SEQ ID NO: 21785 - DNA, 25 bp, Homo sapiens
tcgcctgcctgaaaagcctttgctg

SEQ ID NO: 21786 - DNA, 25 bp, Homo sapiens
gcttggctccaagtaccagcgaaca

SEQ ID NO: 21787 - DNA, 25 bp, Homo sapiens
cctagggtctctgatagaaaatggc

SEQ ID NO: 21788 - DNA, 25 bp, Homo sapiens
gttcccagcctctcagcgagaagga

SEQ ID NO: 21789 - DNA, 25 bp, Homo sapiens
gcctcactgggtaagcctaatgtca

SEQ ID NO: 21790 - DNA, 25 bp, Homo sapiens
ctatctgtatgaaatgaagatctcc

SEQ ID NO: 21791 - DNA, 25 bp, Homo sapiens
tcctaagctgcatgtttttcgaaaa

SEQ ID NO: 21792 - DNA, 25 bp, Homo sapiens
tcccttacacggcacaggaagattc

SEQ ID NO: 21793 - DNA, 25 bp, Homo sapiens
gcgggaaatccttcacaagtaactc

SEQ ID NO: 21794 - DNA, 25 bp, Homo sapiens
gtagcattcaatcacccacaggtta

SEQ ID NO: 21795 - DNA, 25 bp, Homo sapiens
ttgggccactagctcgttcattttc

SEQ ID NO: 21796 - DNA, 25 bp, Homo sapiens
aggctttatcccactctgctggcta

SEQ ID NO: 21797 - DNA, 25 bp, Homo sapiens
gtaggggccataccttttcatacca

SEQ ID NO: 21798 - DNA, 25 bp, Homo sapiens
ccagcctcgagttctgcaagaaata

SEQ ID NO: 21799 - DNA, 25 bp, Homo sapiens
ctaaaggacttggttcccagaggga

SEQ ID NO: 21800 - DNA, 25 bp, Homo sapiens
ccaacctggatcctgagggcactta

SEQ ID NO: 21801 - DNA, 25 bp, Homo sapiens
agatcactctatcagggtaaagaat

SEQ ID NO: 21802 - DNA, 25 bp, Homo sapiens
tatgtagggacatgaacttagcgcc

SEQ ID NO: 21803 - DNA, 25 bp, Homo sapiens
tgaactggtcccttaaaactagaga

SEQ ID NO: 21804 - DNA, 25 bp, Homo sapiens
tggtcagaatctcaacaggcagccc

SEQ ID NO: 21805 - DNA, 25 bp, Homo sapiens
ccaagttgttctaaacccggccatg

SEQ ID NO: 21806 - DNA, 25 bp, Homo sapiens
agccgaactgaacgaactgagccga

SEQ ID NO: 21807 - DNA, 25 bp, Homo sapiens
cgaagctgtcaacatggccagagtc

SEQ ID NO: 21808 - DNA, 25 bp, Homo sapiens
ggtcctcctgccctcccggtcctgt

SEQ ID NO: 21809 - DNA, 25 bp, Homo sapiens
tggcagtattgcaccaccctaaatc

SEQ ID NO: 21810 - DNA, 25 bp, Homo sapiens
ggagccactccctttctgatcacag

SEQ ID NO: 21811 - DNA, 25 bp, Homo sapiens
cctctaaggagcctggagatcaaca

SEQ ID NO: 21812 - DNA, 25 bp, Homo sapiens
ttctcaccaaggaagaccaggtttc

SEQ ID NO: 21813 - DNA, 25 bp, Homo sapiens
caccctaaagagcaggtatgtccta

SEQ ID NO: 21814 - DNA, 25 bp, Homo sapiens
gcttttcagctgaggcacgtttacc

SEQ ID NO: 21815 - DNA, 25 bp, Homo sapiens
gtctccgcaagcactggttttaata

SEQ ID NO: 21816 - DNA, 25 bp, Homo sapiens
gcccaaggtgttggacacatctatg

SEQ ID NO: 21817 - DNA, 25 bp, Homo sapiens
aaattaaatccctgggtgggagaga

SEQ ID NO: 21818 - DNA, 25 bp, Homo sapiens
agagttttattccaggccagacttc

SEQ ID NO: 21819 - DNA, 25 bp, Homo sapiens
caaagtgtagaaagtgccacaaaac

SEQ ID NO: 21820 - DNA, 25 bp, Homo sapiens
ggtgcttgcatgtgatacctccata

SEQ ID NO: 21821 - DNA, 25 bp, Homo sapiens
ccctgcaaaaagaggaactaatgtg

SEQ ID NO: 21822 - DNA, 25 bp, Homo sapiens
ggctgtcagcgtagccgccaaatta

SEQ ID NO: 21823 - DNA, 25 bp, Homo sapiens
aaacagtgcttcctccctgagctga

SEQ ID NO: 21824 - DNA, 25 bp, Homo sapiens
gtttttcttttgccttctgagatag

SEQ ID NO: 21825 - DNA, 25 bp, Homo sapiens
ggtgcccaatttagcatcctgtgtc

SEQ ID NO: 21826 - DNA, 25 bp, Homo sapiens
cagcagatctcccacaagaggtgtc

SEQ ID NO: 21827 - DNA, 25 bp, Homo sapiens
cactggtgtcaacttggccatgata

SEQ ID NO: 21828 - DNA, 25 bp, Homo sapiens
gtcacactgatatgcccaatggatt

SEQ ID NO: 21829 - DNA, 25 bp, Homo sapiens
gccactggtccagattatgagtctc

SEQ ID NO: 21830 - DNA, 25 bp, Homo sapiens
ccacctggagttcatggggctgata

SEQ ID NO: 21831 - DNA, 25 bp, Homo sapiens
agctcacatgttgtcaggcattttc

SEQ ID NO: 21832 - DNA, 25 bp, Homo sapiens
gcatcatcttaagtggaatttatcg

SEQ ID NO: 21833 - DNA, 25 bp, Homo sapiens
ttgctccagttacaatttaccaata

SEQ ID NO: 21834 - DNA, 25 bp, Homo sapiens
tcccgctaatgtgtaagtgttcata

SEQ ID NO: 21835 - DNA, 25 bp, Homo sapiens
gaggaccttgtctcccaatgtttta

SEQ ID NO: 21836 - DNA, 25 bp, Homo sapiens
cagatgttttgtgcctatactgaaa

SEQ ID NO: 21837 - DNA, 25 bp, Homo sapiens
gtgttgcccacctttctttcagaga

SEQ ID NO: 21838 - DNA, 25 bp, Homo sapiens
cttggcattctatctgcactgggtg

SEQ ID NO: 21839 - DNA, 25 bp, Homo sapiens
gctttttctgcatgtgtggcccaca

SEQ ID NO: 21840 - DNA, 25 bp, Homo sapiens
gctgacatagctgatattgaataac

SEQ ID NO: 21841 - DNA, 25 bp, Homo sapiens
tcacttatactttgacttgctacat

SEQ ID NO: 21842 - DNA, 25 bp, Homo sapiens
agcctagtgggcttctgttcaacca

SEQ ID NO: 21843 - DNA, 25 bp, Homo sapiens
gggccctgcatttcttctcaatgta

SEQ ID NO: 21844 - DNA, 25 bp, Homo sapiens
acatccatttgggtagtattctagg

SEQ ID NO: 21845 - DNA, 25 bp, Homo sapiens
cctgggctcagctaattggctattt

SEQ ID NO: 21846 - DNA, 25 bp, Homo sapiens
gccctgcttcctttctcactgtatg

SEQ ID NO: 21847 - DNA, 25 bp, Homo sapiens
gaacgacttccattgccttagtgca

SEQ ID NO: 21848 - DNA, 25 bp, Homo sapiens
ggttagtattccagcaccctgcatg

SEQ ID NO: 21849 - DNA, 25 bp, Homo sapiens
gggctgagccttcctcacaaagatt

SEQ ID NO: 21850 - DNA, 25 bp, Homo sapiens
aaaatccccctactgggttttggtc

SEQ ID NO: 21851 - DNA, 25 bp, Homo sapiens
caggtcccaggaaagcacatgttgc

SEQ ID NO: 21852 - DNA, 25 bp, Homo sapiens
tatgcaaaagcaacaagtgtggcag

SEQ ID NO: 21853 - DNA, 25 bp, Homo sapiens
aaagtactgtttttctacttttttc

SEQ ID NO: 21854 - DNA, 25 bp, Homo sapiens
ttggtatcccagaggctgatcattc

SEQ ID NO: 21855 - DNA, 25 bp, Homo sapiens
ttgcaggcagagtgaccacatgttc

SEQ ID NO: 21856 - DNA, 25 bp, Homo sapiens
caccatttgagtaaggccggatagg

SEQ ID NO: 21857 - DNA, 25 bp, Homo sapiens
tgcaggacccttctccaatataagt

SEQ ID NO: 21858 - DNA, 25 bp, Homo sapiens
tgccacattcttcacacttgtaggg

SEQ ID NO: 21859 - DNA, 25 bp, Homo sapiens
ggctttgccacattcttcacatttg

SEQ ID NO: 21860 - DNA, 25 bp, Homo sapiens
tcatgctctgctctggccaaaggtc

SEQ ID NO: 21861 - DNA, 25 bp, Homo sapiens
tgccaggacacagctacattataaa

SEQ ID NO: 21862 - DNA, 25 bp, Homo sapiens
ggtctccagatctcctccttgttta

SEQ ID NO: 21863 - DNA, 25 bp, Homo sapiens
cctggctctgcatcctttggtgtta

SEQ ID NO: 21864 - DNA, 25 bp, Homo sapiens
agaacagggacatattttcagaaga

SEQ ID NO: 21865 - DNA, 25 bp, Homo sapiens
gataactgctaattgctctgaaata

SEQ ID NO: 21866 - DNA, 25 bp, Homo sapiens
ttggacatctgaaattagcacactg

SEQ ID NO: 21867 - DNA, 25 bp, Homo sapiens
aaaaaaaaatccctgcgtgggagag

SEQ ID NO: 21868 - DNA, 25 bp, Homo sapiens
aatacccagagctttgttccaggtc

SEQ ID NO: 21869 - DNA, 25 bp, Homo sapiens
gctggtacttcttcctgttgcaata

SEQ ID NO: 21870 - DNA, 25 bp, Homo sapiens
ttggagtcactaggttcaagcttta

SEQ ID NO: 21871 - DNA, 25 bp, Homo sapiens
ggctgtcagcgcagctgccatttta

SEQ ID NO: 21872 - DNA, 25 bp, Homo sapiens
cctggtccctgcacaatctgggaga

SEQ ID NO: 21873 - DNA, 25 bp, Homo sapiens
ctgtggcaggactcaggcctgccgc

SEQ ID NO: 21874 - DNA, 25 bp, Homo sapiens
ctgggcctgggttttagtactttct

SEQ ID NO: 21875 - DNA, 25 bp, Homo sapiens
ccagagtaagcttaggaattttttc

SEQ ID NO: 21876 - DNA, 25 bp, Homo sapiens
acctagtggcttgaatctaaggcta

SEQ ID NO: 21877 - DNA, 25 bp, Homo sapiens
tttgaggcactttccagattttgta

SEQ ID NO: 21878 - DNA, 25 bp, Homo sapiens
gcccattgtcttgtgattcctccca

SEQ ID NO: 21879 - DNA, 25 bp, Homo sapiens
aaacattctttcaagcgcatctagt

SEQ ID NO: 21880 - DNA, 25 bp, Homo sapiens
ccctgagaaattgctagagtctgtg

SEQ ID NO: 21881 - DNA, 25 bp, Homo sapiens
ttcctattaggaaaaactgtggtcc

SEQ ID NO: 21882 - DNA, 25 bp, Homo sapiens
gtggtaattccagcagtttagtggc

SEQ ID NO: 21883 - DNA, 25 bp, Homo sapiens
agtgaatttcacccaacatctggct

SEQ ID NO: 21884 - DNA, 25 bp, Homo sapiens
ttggggacacacaactatctgcatg

SEQ ID NO: 21885 - DNA, 25 bp, Homo sapiens
tccctacacatttttactttctatt

SEQ ID NO: 21886 - DNA, 25 bp, Homo sapiens
tgtatgctttttagaaaaaccactc

SEQ ID NO: 21887 - DNA, 25 bp, Homo sapiens
atattttccagtttgttattgatat

SEQ ID NO: 21888 - DNA, 25 bp, Homo sapiens
tgctgtccagcaccattttatgttt

SEQ ID NO: 21889 - DNA, 25 bp, Homo sapiens
tgggtatgccacatcacagcagtta

SEQ ID NO: 21890 - DNA, 25 bp, Homo sapiens
ataaaatatttctaggccgggtgca

SEQ ID NO: 21891 - DNA, 25 bp, Homo sapiens
ttaacagatgtttataatcatgtct

SEQ ID NO: 21892 - DNA, 25 bp, Homo sapiens
ttgatggggccatattgttctaata

SEQ ID NO: 21893 - DNA, 25 bp, Homo sapiens
ttggggcccttcacacacttaactc

SEQ ID NO: 21894 - DNA, 25 bp, Homo sapiens
tgtggcaaagcgtttaaccatgctg

SEQ ID NO: 21895 - DNA, 25 bp, Homo sapiens
tttttttcctttttaatatttcttg

SEQ ID NO: 21896 - DNA, 25 bp, Homo sapiens
tggcaaagcgttcaactggtcctca

SEQ ID NO: 21897 - DNA, 25 bp, Homo sapiens
tggttgccacgcttgattgtacata

SEQ ID NO: 21898 - DNA, 25 bp, Homo sapiens
tgctgcatcgagatattagagattc

SEQ ID NO: 21899 - DNA, 25 bp, Homo sapiens
tgtggtctctctgcatgcaatcata

SEQ ID NO: 21900 - DNA, 25 bp, Homo sapiens
attgtcatcattcctgcctcctgga

SEQ ID NO: 21901 - DNA, 25 bp, Homo sapiens
gtggtgcctccactcagcattttct

SEQ ID NO: 21902 - DNA, 25 bp, Homo sapiens
ggtgcatggtacttggccacatttc

SEQ ID NO: 21903 - DNA, 25 bp, Homo sapiens
ggctacgttccattctgacatgtta

SEQ ID NO: 21904 - DNA, 25 bp, Homo sapiens
caggggctcttgtttatttccatga

SEQ ID NO: 21905 - DNA, 25 bp, Homo sapiens
ttcccgggtcatgcacctaaaagtg

SEQ ID NO: 21906 - DNA, 25 bp, Homo sapiens
tgcactaaggccatcgagtcattta

SEQ ID NO: 21907 - DNA, 25 bp, Homo sapiens
cagggtgttttcagatgcttttttc

SEQ ID NO: 21908 - DNA, 25 bp, Homo sapiens
ccaggtgactctaattggccaatta

SEQ ID NO: 21909 - DNA, 25 bp, Homo sapiens
ccagatgtatccaggtttgtaccta

SEQ ID NO: 21910 - DNA, 25 bp, Homo sapiens
ccagttagctcagcccaggtgatta

SEQ ID NO: 21911 - DNA, 25 bp, Homo sapiens
gaatgttcctgtctgtccctgcaaa

SEQ ID NO: 21912 - DNA, 25 bp, Homo sapiens
tctgaataaacaagcctcagattcc

SEQ ID NO: 21913 - DNA, 25 bp, Homo sapiens
ctgaggcctatgctactgaagatta

SEQ ID NO: 21914 - DNA, 25 bp, Homo sapiens
accagcaggtggtggaaatatcagc

SEQ ID NO: 21915 - DNA, 25 bp, Homo sapiens
gctgtcatttgcgagatggctcctc

SEQ ID NO: 21916 - DNA, 25 bp, Homo sapiens
agttcttgaagtttgccctagggca

SEQ ID NO: 21917 - DNA, 25 bp, Homo sapiens
actgacgcgctattctgacaaaaga

SEQ ID NO: 21918 - DNA, 25 bp, Homo sapiens
agtagttctatcttcctagggatca

SEQ ID NO: 21919 - DNA, 25 bp, Homo sapiens
ttaaatgccaaagcagataaagtag

SEQ ID NO: 21920 - DNA, 25 bp, Homo sapiens
ccaagaccttgcctttgaatgtgta

SEQ ID NO: 21921 - DNA, 25 bp, Homo sapiens
gccagttagctcagcccaggtgatt

SEQ ID NO: 21922 - DNA, 25 bp, Homo sapiens
ctggtcttttttgctcactcctgga

SEQ ID NO: 21923 - DNA, 25 bp, Homo sapiens
ctcagcctgtgtgattgcaaaaagc

SEQ ID NO: 21924 - DNA, 25 bp, Homo sapiens
taataaaaacaaccccccgccccca

SEQ ID NO: 21925 - DNA, 25 bp, Homo sapiens
caaatgttttgtatgataaaaagat

SEQ ID NO: 21926 - DNA, 25 bp, Homo sapiens
tgaagtgtcactctccaggatttta

SEQ ID NO: 21927 - DNA, 25 bp, Homo sapiens
agttaccttctaatgctgagcagca

SEQ ID NO: 21928 - DNA, 25 bp, Homo sapiens
ggttatttcattcctgctgccctca

SEQ ID NO: 21929 - DNA, 25 bp, Homo sapiens
caatataggcataaaacatctgtta

SEQ ID NO: 21930 - DNA, 25 bp, Homo sapiens
ctgcatatatgtgggctttagtctc

SEQ ID NO: 21931 - DNA, 25 bp, Homo sapiens
agacggtgtctctgttggattcaac

SEQ ID NO: 21932 - DNA, 25 bp, Homo sapiens
tctctaactctgtgaggataaatgc

SEQ ID NO: 21933 - DNA, 25 bp, Homo sapiens
ctggggacaatagacagctgtaatc

SEQ ID NO: 21934 - DNA, 25 bp, Homo sapiens
atcgttgtttcatctacttaatttc

SEQ ID NO: 21935 - DNA, 25 bp, Homo sapiens
gcattcacaaatactaattttctct

SEQ ID NO: 21936 - DNA, 25 bp, Homo sapiens
tgcctgacaacatgtgagctagata

SEQ ID NO: 21937 - DNA, 25 bp, Homo sapiens
ccaggtgggcacagttgaaactaca

SEQ ID NO: 21938 - DNA, 25 bp, Homo sapiens
tggaccagtggctccaagattttta

SEQ ID NO: 21939 - DNA, 25 bp, Homo sapiens
ccattgggcatatcagtgtgacata

SEQ ID NO: 21940 - DNA, 25 bp, Homo sapiens
gacacctcttgtgggagatctgctg

SEQ ID NO: 21941 - DNA, 25 bp, Homo sapiens
ggatgctaaactgggcacctgtatt

SEQ ID NO: 21942 - DNA, 25 bp, Homo sapiens
gcaggcttcacctttcagtgttcta

SEQ ID NO: 21943 - DNA, 25 bp, Homo sapiens
ctaaattatttctatctcttatagc

SEQ ID NO: 21944 - DNA, 25 bp, Homo sapiens
taagatggcggctacgctgacagcc

SEQ ID NO: 21945 - DNA, 25 bp, Homo sapiens
gggaaaatctctcttccattttggc

SEQ ID NO: 21946 - DNA, 25 bp, Homo sapiens
gcctgcaactggatattgaagactc

SEQ ID NO: 21947 - DNA, 25 bp, Homo sapiens
gggaatgggagctctgctttcccat

SEQ ID NO: 21948 - DNA, 25 bp, Homo sapiens
ttctctcttctcctttttccccata

SEQ ID NO: 21949 - DNA, 25 bp, Homo sapiens
tctgaaaatctgcaccctcctaatg

SEQ ID NO: 21950 - DNA, 25 bp, Homo sapiens
gaccagcaaccaggggaaagcaagc

SEQ ID NO: 21951 - DNA, 25 bp, Homo sapiens
gccttttttaatatatatatagact

SEQ ID NO: 21952 - DNA, 25 bp, Homo sapiens
gcagtcatggttcctacagtccaga

SEQ ID NO: 21953 - DNA, 25 bp, Homo sapiens
ccttggagtctttcctcagagaact

SEQ ID NO: 21954 - DNA, 25 bp, Homo sapiens
ctagctggtaaacatgtggcactga

SEQ ID NO: 21955 - DNA, 25 bp, Homo sapiens
tacctgctttctagggtgttaatga

SEQ ID NO: 21956 - DNA, 25 bp, Homo sapiens
cctggacatggcacagcggaattta

SEQ ID NO: 21957 - DNA, 25 bp, Homo sapiens
ccttcgactatgcagagacatgaga

SEQ ID NO: 21958 - DNA, 25 bp, Homo sapiens
gtgaataattcttctgccacatact

SEQ ID NO: 21959 - DNA, 25 bp, Homo sapiens
ggtcctgcagtttcccacctgacta

SEQ ID NO: 21960 - DNA, 25 bp, Homo sapiens
gccacacagggcatgccaatgattc

SEQ ID NO: 21961 - DNA, 25 bp, Homo sapiens
gtctgtcacaatcaggttacatatg

SEQ ID NO: 21962 - DNA, 25 bp, Homo sapiens
gtgtctttgttttccaccagcaatc

SEQ ID NO: 21963 - DNA, 25 bp, Homo sapiens
taatattttcattatgcatatattc

SEQ ID NO: 21964 - DNA, 25 bp, Homo sapiens
cagtttgtttttgaggtggagttaa

SEQ ID NO: 21965 - DNA, 25 bp, Homo sapiens
cagtagttgcctgtgttcctattta

SEQ ID NO: 21966 - DNA, 25 bp, Homo sapiens
cgccctgttacctatgctgtagttc

SEQ ID NO: 21967 - DNA, 25 bp, Homo sapiens
tggcaaagccttcaaccggtcctca

SEQ ID NO: 21968 - DNA, 25 bp, Homo sapiens
ggcaaagccttcagtcggtcctcta

SEQ ID NO: 21969 - DNA, 25 bp, Homo sapiens
gccaggcatgccaagggttaagtcc

SEQ ID NO: 21970 - DNA, 25 bp, Homo sapiens
caatctaagctgatcccggttgact

SEQ ID NO: 21971 - DNA, 25 bp, Homo sapiens
gtccgcgccaaacccagaagttgtc

SEQ ID NO: 21972 - DNA, 25 bp, Homo sapiens
gttacaagataagataaagaaaatg

SEQ ID NO: 21973 - DNA, 25 bp, Homo sapiens
agaacctgttcgctgtcatccaatc

SEQ ID NO: 21974 - DNA, 25 bp, Homo sapiens
gggaagctgttcattgtcgaccacc

SEQ ID NO: 21975 - DNA, 25 bp, Homo sapiens
cactcatcactgtgggaacctgttc

SEQ ID NO: 21976 - DNA, 25 bp, Homo sapiens
gggaacctgttcactgtcgcacact

SEQ ID NO: 21977 - DNA, 25 bp, Homo sapiens
catcactgtgggaacctgtttacta

SEQ ID NO: 21978 - DNA, 25 bp, Homo sapiens
ggaaacctgttcactgtcacccatg

SEQ ID NO: 21979 - DNA, 25 bp, Homo sapiens
tcagccgctccctcattacattggg

SEQ ID NO: 21980 - DNA, 25 bp, Homo sapiens
gggaacctgttcactgtcaccaatg

SEQ ID NO: 21981 - DNA, 25 bp, Homo sapiens
cagccgctcattcatcacagtggga

SEQ ID NO: 21982 - DNA, 25 bp, Homo sapiens
ggaagagcctgttcactgtcactta

SEQ ID NO: 21983 - DNA, 25 bp, Homo sapiens
cctgttcactgtcgggttgtcattc

SEQ ID NO: 21984 - DNA, 25 bp, Homo sapiens
gtgggaaccttttcactgtcattca

SEQ ID NO: 21985 - DNA, 25 bp, Homo sapiens
tccctgcgggaacctgtttactgtc

SEQ ID NO: 21986 - DNA, 25 bp, Homo sapiens
gggaacctgttcactgtcaccaact

SEQ ID NO: 21987 - DNA, 25 bp, Homo sapiens
taccgcagtagaaacccgtacattg

SEQ ID NO: 21988 - DNA, 25 bp, Homo sapiens
tctccacagtaggaaccggttcagt

SEQ ID NO: 21989 - DNA, 25 bp, Homo sapiens
ccaccgcagtagaaacgtgttcaga

SEQ ID NO: 21990 - DNA, 25 bp, Homo sapiens
caccactgtgggaatctctttgtca

SEQ ID NO: 21991 - DNA, 25 bp, Homo sapiens
gggaacctggtcactgtcaccacta

SEQ ID NO: 21992 - DNA, 25 bp, Homo sapiens
ggaacctgttccctgttgaccactc

SEQ ID NO: 21993 - DNA, 25 bp, Homo sapiens
ggaaactgttcactgtcgcccactc

SEQ ID NO: 21994 - DNA, 25 bp, Homo sapiens
gggaagctcttcactgtcacacatt

SEQ ID NO: 21995 - DNA, 25 bp, Homo sapiens
tgttgcccactcactcatcagcttg

SEQ ID NO: 21996 - DNA, 25 bp, Homo sapiens
ctcagtgggatcctgttaatggtta

SEQ ID NO: 21997 - DNA, 25 bp, Homo sapiens
ggcagccactcatttcccacagttg

SEQ ID NO: 21998 - DNA, 25 bp, Homo sapiens
cttttatcatagtggggacctgttc

SEQ ID NO: 21999 - DNA, 25 bp, Homo sapiens
gggaatctgttcactgtcactcact

SEQ ID NO: 22000 - DNA, 25 bp, Homo sapiens
caccacgatgggaagctgttcactc

SEQ ID NO: 22001 - DNA, 25 bp, Homo sapiens
aaaatgatcatttttattgaaaatg

SEQ ID NO: 22002 - DNA, 25 bp, Homo sapiens
gtcagccgctcattcatcacattgg

SEQ ID NO: 22003 - DNA, 25 bp, Homo sapiens
gtggcatgctgttcactgtcacata

SEQ ID NO: 22004 - DNA, 25 bp, Homo sapiens
tgggaacctgttcactgggaacctg

SEQ ID NO: 22005 - DNA, 25 bp, Homo sapiens
cggttcactgtcagccattcgttca

SEQ ID NO: 22006 - DNA, 25 bp, Homo sapiens
gtggttcagtgtcacccattagttc

SEQ ID NO: 22007 - DNA, 25 bp, Homo sapiens
ggaaacggttcactgtcagccactc

SEQ ID NO: 22008 - DNA, 25 bp, Homo sapiens
tcaccaccgtgggagcctattcact

SEQ ID NO: 22009 - DNA, 25 bp, Homo sapiens
ggaacccgttcaatgtcacccaatc

SEQ ID NO: 22010 - DNA, 25 bp, Homo sapiens
ggaaacctgtttattgtcacccacc

SEQ ID NO: 22011 - DNA, 25 bp, Homo sapiens
gggaacctgttcactgtcaccgata

SEQ ID NO: 22012 - DNA, 25 bp, Homo sapiens
catggggtacctgttcactgtcacc

SEQ ID NO: 22013 - DNA, 25 bp, Homo sapiens
ggaacttgttcactgtcgcccactc

SEQ ID NO: 22014 - DNA, 25 bp, Homo sapiens
cttcatcacggtgggaacctgttca

SEQ ID NO: 22015 - DNA, 25 bp, Homo sapiens
caccacagtgggaagctgttctctc

SEQ ID NO: 22016 - DNA, 25 bp, Homo sapiens
taatgggaccctgttcactgccagc

SEQ ID NO: 22017 - DNA, 25 bp, Homo sapiens
agtgggagcctgttcactgtaaacc

SEQ ID NO: 22018 - DNA, 25 bp, Homo sapiens
ggcagcctgttaattgtcacccact

SEQ ID NO: 22019 - DNA, 25 bp, Homo sapiens
gggaagttgttcctctcagccactc

SEQ ID NO: 22020 - DNA, 25 bp, Homo sapiens
gtggcaacctcttcactgtcaccta

SEQ ID NO: 22021 - DNA, 25 bp, Homo sapiens
ggaacctgttcactgtcagccactc

SEQ ID NO: 22022 - DNA, 25 bp, Homo sapiens
tcaaatttgttctatgataaaaaat

SEQ ID NO: 22023 - DNA, 25 bp, Homo sapiens
agtgtcactctccagggttttaaga

SEQ ID NO: 22024 - DNA, 25 bp, Homo sapiens
tgtgcacccagtgcagatagaatgc

SEQ ID NO: 22025 - DNA, 25 bp, Homo sapiens
agccactatttgtttcaccctcgga

SEQ ID NO: 22026 - DNA, 25 bp, Homo sapiens
agcaccgcgtctctcccagattgag

SEQ ID NO: 22027 - DNA, 25 bp, Homo sapiens
cttccctaggcacagagttcttatc

SEQ ID NO: 22028 - DNA, 25 bp, Homo sapiens
tccctctgtgggtttgtcaccttga

SEQ ID NO: 22029 - DNA, 25 bp, Homo sapiens
agttagttctttctggggagcctcc

SEQ ID NO: 22030 - DNA, 25 bp, Homo sapiens
gtttcatttttccccacctcttttt

SEQ ID NO: 22031 - DNA, 25 bp, Homo sapiens
ccgggaccgctgtctgtagcaaaaa

SEQ ID NO: 22032 - DNA, 25 bp, Homo sapiens
gagtcttgcctcacacaatttgtta

SEQ ID NO: 22033 - DNA, 25 bp, Homo sapiens
caggtgtacatgttgttgccaaatg

SEQ ID NO: 22034 - DNA, 25 bp, Homo sapiens
ggccgcaggactgtttctgtttgga

SEQ ID NO: 22035 - DNA, 25 bp, Homo sapiens
gaggttccatctgtattctccatta

SEQ ID NO: 22036 - DNA, 25 bp, Homo sapiens
cctggacactgcacagcggaattta

SEQ ID NO: 22037 - DNA, 25 bp, Homo sapiens
tctaagccagacctgatcacttgtc

SEQ ID NO: 22038 - DNA, 25 bp, Homo sapiens
tattacttaggatgtgctagaacag

SEQ ID NO: 22039 - DNA, 25 bp, Homo sapiens
tggttggtacccagatgacagtttc

SEQ ID NO: 22040 - DNA, 25 bp, Homo sapiens
gaagcctgctgtctttctagaagtg

SEQ ID NO: 22041 - DNA, 25 bp, Homo sapiens
ggcagtgtggcccatattaccatta

SEQ ID NO: 22042 - DNA, 25 bp, Homo sapiens
gccctggctgcttggtaaatgtgta

SEQ ID NO: 22043 - DNA, 25 bp, Homo sapiens
ttgctctcacatagggacatttctg

SEQ ID NO: 22044 - DNA, 25 bp, Homo sapiens
ttctataagtttttaatttctaatt

SEQ ID NO: 22045 - DNA, 25 bp, Homo sapiens
taagtgtacatttcaggcctaggca

SEQ ID NO: 22046 - DNA, 25 bp, Homo sapiens
ggcccctgagcaagaatatgttgaa

SEQ ID NO: 22047 - DNA, 25 bp, Homo sapiens
cttcctgtgtattcaaaataattta

SEQ ID NO: 22048 - DNA, 25 bp, Homo sapiens
attacaaattatatctaataacaga

SEQ ID NO: 22049 - DNA, 25 bp, Homo sapiens
ttgtgaatcttccatatccggttta

SEQ ID NO: 22050 - DNA, 25 bp, Homo sapiens
gcaagtctggccttgagttttaatg

SEQ ID NO: 22051 - DNA, 25 bp, Homo sapiens
ggccatgttgccctaatattttgta

SEQ ID NO: 22052 - DNA, 25 bp, Homo sapiens
agacctttgcccagagcgagacata

SEQ ID NO: 22053 - DNA, 25 bp, Homo sapiens
gtggcaaagcctttaaccggtcttc

SEQ ID NO: 22054 - DNA, 25 bp, Homo sapiens
tggttttcacacttgattgcaggta

SEQ ID NO: 22055 - DNA, 25 bp, Homo sapiens
ggtgggaattatatacgacctcttc

SEQ ID NO: 22056 - DNA, 25 bp, Homo sapiens
ctacagggtcatttttatggtcata

SEQ ID NO: 22057 - DNA, 25 bp, Homo sapiens
ttttcaggctgcaaagctgacttgc

SEQ ID NO: 22058 - DNA, 25 bp, Homo sapiens
caatgacctgtggatctgaaatttg

SEQ ID NO: 22059 - DNA, 25 bp, Homo sapiens
tctgttagctcgtgatcaatgttga

SEQ ID NO: 22060 - DNA, 25 bp, Homo sapiens
ctgacccaatttcttaacgtttatc

SEQ ID NO: 22061 - DNA, 25 bp, Homo sapiens
gctaatttgtactgagcactaacca

SEQ ID NO: 22062 - DNA, 25 bp, Homo sapiens
cagcctctgggataccggtagtcta

SEQ ID NO: 22063 - DNA, 25 bp, Homo sapiens
ccctagtgacttctggtgaatactg

SEQ ID NO: 22064 - DNA, 25 bp, Homo sapiens
ggcattctcagctctacccacattg

SEQ ID NO: 22065 - DNA, 25 bp, Homo sapiens
gctaagcctctggaatttcagcata

SEQ ID NO: 22066 - DNA, 25 bp, Homo sapiens
ctttgtgtcatctctctcggttata

SEQ ID NO: 22067 - DNA, 25 bp, Homo sapiens
gcgtagttcctatgcagccttcttg

SEQ ID NO: 22068 - DNA, 25 bp, Homo sapiens
gtagtctgtgtttaaaatgtgcata

SEQ ID NO: 22069 - DNA, 25 bp, Homo sapiens
ttcccaacttccaactctgtgatta

SEQ ID NO: 22070 - DNA, 25 bp, Homo sapiens
catggtagctgtaagtattttttac

SEQ ID NO: 22071 - DNA, 25 bp, Homo sapiens
ttttttttttggaataccaggctaa

SEQ ID NO: 22072 - DNA, 25 bp, Homo sapiens
ttttttttttggagtaccaggctaa

SEQ ID NO: 22073 - DNA, 25 bp, Homo sapiens
ctgggccttagagttgaccatccta

SEQ ID NO: 22074 - DNA, 25 bp, Homo sapiens
atgtcattcacatctgctagtttga

SEQ ID NO: 22075 - DNA, 25 bp, Homo sapiens
gggcctgccctgatttctctatttt

SEQ ID NO: 22076 - DNA, 25 bp, Homo sapiens
ggggcctgcttttcttctatctgta

SEQ ID NO: 22077 - DNA, 25 bp, Homo sapiens
tgagtgactcccatggcttaagtgc

SEQ ID NO: 22078 - DNA, 25 bp, Homo sapiens
gcatgttcgctcttgcttcacagga

SEQ ID NO: 22079 - DNA, 25 bp, Homo sapiens
gttggtttatctctggccctatata

SEQ ID NO: 22080 - DNA, 25 bp, Homo sapiens
ggatctacctgtgcaaaactaattg

SEQ ID NO: 22081 - DNA, 25 bp, Homo sapiens
gtcaagtcccagacctcgtgtttta

SEQ ID NO: 22082 - DNA, 25 bp, Homo sapiens
ccagggtgtttttaactcggtctca

SEQ ID NO: 22083 - DNA, 25 bp, Homo sapiens
cacctgggttctgcgaattggctta

SEQ ID NO: 22084 - DNA, 25 bp, Homo sapiens
ggctgatcatatctatctgggctga

SEQ ID NO: 22085 - DNA, 25 bp, Homo sapiens
tgaggtttttagttttctagtaaat

SEQ ID NO: 22086 - DNA, 25 bp, Homo sapiens
catgttttacctacacccttgagta

SEQ ID NO: 22087 - DNA, 25 bp, Homo sapiens
gcaactgccgtagggttttcctcta

SEQ ID NO: 22088 - DNA, 25 bp, Homo sapiens
ctctccagtatggtttgagaactta

SEQ ID NO: 22089 - DNA, 25 bp, Homo sapiens
tccactgaaaagaacatgatgaagg

SEQ ID NO: 22090 - DNA, 25 bp, Homo sapiens
caaatataaacaaatataacagatc

SEQ ID NO: 22091 - DNA, 25 bp, Homo sapiens
cctctgtgaccaacacctatgggta

SEQ ID NO: 22092 - DNA, 25 bp, Homo sapiens
cttaacgtgtaagcaagttgcccca

SEQ ID NO: 22093 - DNA, 25 bp, Homo sapiens
tccagcttgtcaggtagatatcatc

SEQ ID NO: 22094 - DNA, 25 bp, Homo sapiens
tgagctcacctccatgcaaagactt

SEQ ID NO: 22095 - DNA, 25 bp, Homo sapiens
gctgacgattctggtccactggatc

SEQ ID NO: 22096 - DNA, 25 bp, Homo sapiens
atcagtgtcaggtgccggattccaa

SEQ ID NO: 22097 - DNA, 25 bp, Homo sapiens
gagggactcaataacaggacatgtg

SEQ ID NO: 22098 - DNA, 25 bp, Homo sapiens
ctcatctttcaccaatattttaatc

SEQ ID NO: 22099 - DNA, 25 bp, Homo sapiens
ttaccaggggctagaaacttgtttc

SEQ ID NO: 22100 - DNA, 25 bp, Homo sapiens
gtctacagagaggatagtcaactta

SEQ ID NO: 22101 - DNA, 25 bp, Homo sapiens
ggtgatactcccatgccaaaaactg

SEQ ID NO: 22102 - DNA, 25 bp, Homo sapiens
gcaccagagaaaaatgtggctgtta

SEQ ID NO: 22103 - DNA, 25 bp, Homo sapiens
ggggcaattttgactctcaattata

SEQ ID NO: 22104 - DNA, 25 bp, Homo sapiens
atgccttaaggggtgaaaatttgtc

SEQ ID NO: 22105 - DNA, 25 bp, Homo sapiens
tatatttttagacactatagaagga

SEQ ID NO: 22106 - DNA, 25 bp, Homo sapiens
gcaagattcagctttgcagcctgga

SEQ ID NO: 22107 - DNA, 25 bp, Homo sapiens
tgctttcaggcagaggccacatgtg

SEQ ID NO: 22108 - DNA, 25 bp, Homo sapiens
cctacttagattttcatcgtgcatc

SEQ ID NO: 22109 - DNA, 25 bp, Homo sapiens
gttgcccaggctagtatataaatgc

SEQ ID NO: 22110 - DNA, 25 bp, Homo sapiens
aggatctgctgaaggctttgccaca

SEQ ID NO: 22111 - DNA, 25 bp, Homo sapiens
ggctttgccacattcttcacatttg

SEQ ID NO: 22112 - DNA, 25 bp, Homo sapiens
gcactgcagtgccacagagagagta

SEQ ID NO: 22113 - DNA, 25 bp, Homo sapiens
tttctaggaaagatatgcacacaca

SEQ ID NO: 22114 - DNA, 25 bp, Homo sapiens
cacactttaagatatatggtcatat

SEQ ID NO: 22115 - DNA, 25 bp, Homo sapiens
accactactctcacacacttcagag

SEQ ID NO: 22116 - DNA, 25 bp, Homo sapiens
ccaacttagtaatgtgctcagtaaa

SEQ ID NO: 22117 - DNA, 25 bp, Homo sapiens
aaatgaaacctgtagtatatactag

SEQ ID NO: 22118 - DNA, 25 bp, Homo sapiens
ggcagctgtcagattaaatgttttg

SEQ ID NO: 22119 - DNA, 25 bp, Homo sapiens
tgtcaccacatccacaggcagaaga

SEQ ID NO: 22120 - DNA, 25 bp, Homo sapiens
ggctttaaaggacccagcattttta

SEQ ID NO: 22121 - DNA, 25 bp, Homo sapiens
gcccaagttgttttttgcacatcta

SEQ ID NO: 22122 - DNA, 25 bp, Homo sapiens
ccaggcagaggccaggtcttattta

SEQ ID NO: 22123 - DNA, 25 bp, Homo sapiens
cgggtgctatctttttggctattta

SEQ ID NO: 22124 - DNA, 25 bp, Homo sapiens
tgagtagccatatcacctgtcttta

SEQ ID NO: 22125 - DNA, 25 bp, Homo sapiens
gccaggtctctggacaagttcttga

SEQ ID NO: 22126 - DNA, 25 bp, Homo sapiens
aaaatccctcgattggagagagtgc

SEQ ID NO: 22127 - DNA, 25 bp, Homo sapiens
gtacatctagctggttattttaaaa

SEQ ID NO: 22128 - DNA, 25 bp, Homo sapiens
aggaggtacctagtttcatcacata

SEQ ID NO: 22129 - DNA, 25 bp, Homo sapiens
tgtgtcaagtcaggtcatccaatta

SEQ ID NO: 22130 - DNA, 25 bp, Homo sapiens
gtggctgaggacacgtctccctata

SEQ ID NO: 22131 - DNA, 25 bp, Homo sapiens
tccgtgcacaatctgggagagactc

SEQ ID NO: 22132 - DNA, 25 bp, Homo sapiens
ctgcagccttttcaggcagggcttc

SEQ ID NO: 22133 - DNA, 25 bp, Homo sapiens
acttatgggagtttggaggttttta

SEQ ID NO: 22134 - DNA, 25 bp, Homo sapiens
ttgatgttttaattatggtcttttc

SEQ ID NO: 22135 - DNA, 25 bp, Homo sapiens
gacaatatagttttgcattgcattg

SEQ ID NO: 22136 - DNA, 25 bp, Homo sapiens
tcagggctggctcacagttttcttg

SEQ ID NO: 22137 - DNA, 25 bp, Homo sapiens
cagtgcatgccgatgactcaaaata

SEQ ID NO: 22138 - DNA, 25 bp, Homo sapiens
ttgaaggtaattctagaaaagattt

SEQ ID NO: 22139 - DNA, 25 bp, Homo sapiens
tcatgtgtttaatttttatatactt

SEQ ID NO: 22140 - DNA, 25 bp, Homo sapiens
aaagaatgctgaagagtttctttta

SEQ ID NO: 22141 - DNA, 25 bp, Homo sapiens
gaagttcatcttctaccaggttaaa

SEQ ID NO: 22142 - DNA, 25 bp, Homo sapiens
gctctatcttaagtcaaaaaccgtc

SEQ ID NO: 22143 - DNA, 25 bp, Homo sapiens
gccctgttttgtatacattgtaatc

SEQ ID NO: 22144 - DNA, 25 bp, Homo sapiens
aagcgctcagattctgggcagaagc

SEQ ID NO: 22145 - DNA, 25 bp, Homo sapiens
ctattgctgggtcaatgttgcagca

SEQ ID NO: 22146 - DNA, 25 bp, Homo sapiens
agcggtggccagcatctaataatta

SEQ ID NO: 22147 - DNA, 25 bp, Homo sapiens
cttggtgtcaactttctcttgggca

SEQ ID NO: 22148 - DNA, 25 bp, Homo sapiens
cccagcgagtctgagtgattgacaa

SEQ ID NO: 22149 - DNA, 25 bp, Homo sapiens
ggtagatagacattgcccgcctttc

SEQ ID NO: 22150 - DNA, 25 bp, Homo sapiens
ccgcaggttgttggaattctttttc

SEQ ID NO: 22151 - DNA, 25 bp, Homo sapiens
catctgttgagacaatgctgctttc

SEQ ID NO: 22152 - DNA, 25 bp, Homo sapiens
acgtccgtgctgttttatattttga

SEQ ID NO: 22153 - DNA, 25 bp, Homo sapiens
aataaagtcagaaaaactaaccttc

SEQ ID NO: 22154 - DNA, 25 bp, Homo sapiens
agtcagtttccagaatccaaggcta

SEQ ID NO: 22155 - DNA, 25 bp, Homo sapiens
agccccaaagtaatagccccaaagt

SEQ ID NO: 22156 - DNA, 25 bp, Homo sapiens
tctgttgttggcatttgattttcta

SEQ ID NO: 22157 - DNA, 25 bp, Homo sapiens
cactctccaggatttcaagggtcta

SEQ ID NO: 22158 - DNA, 25 bp, Homo sapiens
tgcacccagtgcagacaggatgcca

SEQ ID NO: 22159 - DNA, 25 bp, Homo sapiens
gggttggcctggcttacttagctca

SEQ ID NO: 22160 - DNA, 25 bp, Homo sapiens
cctgactccggatgcgggttcatga

SEQ ID NO: 22161 - DNA, 25 bp, Homo sapiens
tgcagcctatctctggcttgcagta

SEQ ID NO: 22162 - DNA, 25 bp, Homo sapiens
ggggcactcactggggcttaattca

SEQ ID NO: 22163 - DNA, 25 bp, Homo sapiens
tgtaccctctagaagtgttcccata

SEQ ID NO: 22164 - DNA, 25 bp, Homo sapiens
tgatttcagatctcctcccggggtg

SEQ ID NO: 22165 - DNA, 25 bp, Homo sapiens
ttatgtgtaccaatacattttttat

SEQ ID NO: 22166 - DNA, 25 bp, Homo sapiens
aacagcattttcttcagtagtatga

SEQ ID NO: 22167 - DNA, 25 bp, Homo sapiens
agatgatgtggccaccgcaaaacca

SEQ ID NO: 22168 - DNA, 25 bp, Homo sapiens
agctttcagatgtgagccctgtgca

SEQ ID NO: 22169 - DNA, 25 bp, Homo sapiens
ccagagtagtgtctatgatgagatc

SEQ ID NO: 22170 - DNA, 25 bp, Homo sapiens
aacgcttgggctttatttggactac

SEQ ID NO: 22171 - DNA, 25 bp, Homo sapiens
ctacactggtgttgcggatcttatg

SEQ ID NO: 22172 - DNA, 25 bp, Homo sapiens
ggctgtctttaagccagacttgata

SEQ ID NO: 22173 - DNA, 25 bp, Homo sapiens
catattgtgtattcagatttatgca

SEQ ID NO: 22174 - DNA, 25 bp, Homo sapiens
agctgtgctagtggtgatgaacacc

SEQ ID NO: 22175 - DNA, 25 bp, Homo sapiens
ccttataaacctcttgtttagcatg

SEQ ID NO: 22176 - DNA, 25 bp, Homo sapiens
gcattgtgcttacttggggtactta

SEQ ID NO: 22177 - DNA, 25 bp, Homo sapiens
gcttttagccagtcctcaaccctta

SEQ ID NO: 22178 - DNA, 25 bp, Homo sapiens
gtggcaaagcttttaggcaatcctc

SEQ ID NO: 22179 - DNA, 25 bp, Homo sapiens
gggagaaaccctacaaatgcgaaga

SEQ ID NO: 22180 - DNA, 25 bp, Homo sapiens
tgtggcagagctttcaaccatttta

SEQ ID NO: 22181 - DNA, 25 bp, Homo sapiens
gtggcaaagcttctaacgggttctc

SEQ ID NO: 22182 - DNA, 25 bp, Homo sapiens
tcccatgcacggtactgagttcaga

SEQ ID NO: 22183 - DNA, 25 bp, Homo sapiens
gcttgagcacacttttattagtttt

SEQ ID NO: 22184 - DNA, 25 bp, Homo sapiens
gttattgtgacatatgcctctccca

SEQ ID NO: 22185 - DNA, 25 bp, Homo sapiens
acccagctgaaagtaaagatggtca

SEQ ID NO: 22186 - DNA, 25 bp, Homo sapiens
tagaaaagactaataaaagagaata

SEQ ID NO: 22187 - DNA, 25 bp, Homo sapiens
acagtgggtgctgaaatatcagtta

SEQ ID NO: 22188 - DNA, 25 bp, Homo sapiens
acactttgaacaaagggccattata

SEQ ID NO: 22189 - DNA, 25 bp, Homo sapiens
gttattgtactttcatataaacttc

SEQ ID NO: 22190 - DNA, 25 bp, Homo sapiens
tctagtcttctaatggttggcctta

SEQ ID NO: 22191 - DNA, 25 bp, Homo sapiens
ggaaagcctctgaaacgtctacctg

SEQ ID NO: 22192 - DNA, 25 bp, Homo sapiens
ctcagcaggcaagggtgtcacattt

SEQ ID NO: 22193 - DNA, 25 bp, Homo sapiens
ccaggcctggcgtcatcatgattaa

SEQ ID NO: 22194 - DNA, 25 bp, Homo sapiens
cctctgaatgtttgctttggtctcc

SEQ ID NO: 22195 - DNA, 25 bp, Homo sapiens
cggcccaagaaagaaagctgggacc

SEQ ID NO: 22196 - DNA, 25 bp, Homo sapiens
ctgagggccttttgggtgtcttcta

SEQ ID NO: 22197 - DNA, 25 bp, Homo sapiens
tggcagccagaacccacagcgctgg

SEQ ID NO: 22198 - DNA, 25 bp, Homo sapiens
taatatgcatgtatctgtataccaa

SEQ ID NO: 22199 - DNA, 25 bp, Homo sapiens
tttttcttttaaacaacaaagaagc

SEQ ID NO: 22200 - DNA, 25 bp, Homo sapiens
tgctgaatcaggaaagagtttgctt

SEQ ID NO: 22201 - DNA, 25 bp, Homo sapiens
ttggagaccaccgaccacagctctt

SEQ ID NO: 22202 - DNA, 25 bp, Homo sapiens
gctgggccacctcaaacactgtgtg

SEQ ID NO: 22203 - DNA, 25 bp, Homo sapiens
gaacgttgtttctgctctcccatga

SEQ ID NO: 22204 - DNA, 25 bp, Homo sapiens
aggaactttcctcttctgggttttg

SEQ ID NO: 22205 - DNA, 25 bp, Homo sapiens
accttttttatcgtgctgctcagca

SEQ ID NO: 22206 - DNA, 25 bp, Homo sapiens
tggaccttaaacacaggccacatgc

SEQ ID NO: 22207 - DNA, 25 bp, Homo sapiens
atcttctgtcctgcacgcacgtgta

SEQ ID NO: 22208 - DNA, 25 bp, Homo sapiens
accctgtgagctgcagaagtctcga

SEQ ID NO: 22209 - DNA, 25 bp, Homo sapiens
cacagccttgtcagggtgccagaga

SEQ ID NO: 22210 - DNA, 25 bp, Homo sapiens
tgcacttggccatcggaaatattcc

SEQ ID NO: 22211 - DNA, 25 bp, Homo sapiens
ttgatgttgttgtttcctgccagcc

SEQ ID NO: 22212 - DNA, 25 bp, Homo sapiens
cgtcccaagcagaggggtcagcatg

SEQ ID NO: 22213 - DNA, 25 bp, Homo sapiens
ccagaaataataacatcctccccat

SEQ ID NO: 22214 - DNA, 25 bp, Homo sapiens
cccgtgtcagttgcagggcctctaa

SEQ ID NO: 22215 - DNA, 25 bp, Homo sapiens
tgtacctgggcttggtgaacacata

SEQ ID NO: 22216 - DNA, 25 bp, Homo sapiens
ggggccctggacagaactgcaaata

SEQ ID NO: 22217 - DNA, 25 bp, Homo sapiens
ggggcagggtcttcacccattctaa

SEQ ID NO: 22218 - DNA, 25 bp, Homo sapiens
ctgcacggcccttcagcaatatatc

SEQ ID NO: 22219 - DNA, 25 bp, Homo sapiens
ccggggacttgatccaggaagattt

SEQ ID NO: 22220 - DNA, 25 bp, Homo sapiens
tgaaaagcagcattttaaatttaca

SEQ ID NO: 22221 - DNA, 25 bp, Homo sapiens
cccgggcaggggaattcttcagaaa

SEQ ID NO: 22222 - DNA, 25 bp, Homo sapiens
atggctgcattggtaggccctccta

SEQ ID NO: 22223 - DNA, 25 bp, Homo sapiens
agtgctggccagcttccatttatta

SEQ ID NO: 22224 - DNA, 25 bp, Homo sapiens
gggcaaaccctcttcattactgtga

SEQ ID NO: 22225 - DNA, 25 bp, Homo sapiens
gaatattgaatgctgccctcccagg

SEQ ID NO: 22226 - DNA, 25 bp, Homo sapiens
gaggtaacctccagcaatcagaata

SEQ ID NO: 22227 - DNA, 25 bp, Homo sapiens
ctggatcatgtctaccctgagggca

SEQ ID NO: 22228 - DNA, 25 bp, Homo sapiens
acagaagttctgttgggcggaccca

SEQ ID NO: 22229 - DNA, 25 bp, Homo sapiens
gctcatgctgctggtattgtggata

SEQ ID NO: 22230 - DNA, 25 bp, Homo sapiens
tcagagtgctggtttccaatcccta

SEQ ID NO: 22231 - DNA, 25 bp, Homo sapiens
acggtgctcacatggcacttccaca

SEQ ID NO: 22232 - DNA, 25 bp, Homo sapiens
ttgacatgcttgcacacccataggg

SEQ ID NO: 22233 - DNA, 25 bp, Homo sapiens
gcgatgcttctgtgcctaacctgca

SEQ ID NO: 22234 - DNA, 25 bp, Homo sapiens
gtgggtgacagtgaacaggttccta

SEQ ID NO: 22235 - DNA, 25 bp, Homo sapiens
gactggctaagtcctgctgggaacc

SEQ ID NO: 22236 - DNA, 25 bp, Homo sapiens
agctcctgaggatgggcctacacta

SEQ ID NO: 22237 - DNA, 25 bp, Homo sapiens
ttccttctggagctctgacatgacg

SEQ ID NO: 22238 - DNA, 25 bp, Homo sapiens
ctacacttgtatggtgcggcttctc

SEQ ID NO: 22239 - DNA, 25 bp, Homo sapiens
gctgctacactgagggcccataaga

SEQ ID NO: 22240 - DNA, 25 bp, Homo sapiens
gggccctgttcttgagttccatgca

SEQ ID NO: 22241 - DNA, 25 bp, Homo sapiens
ggaaaccttccctgatcctgtgtga

SEQ ID NO: 22242 - DNA, 25 bp, Homo sapiens
ccaccgtatggacatttgagaaatc

SEQ ID NO: 22243 - DNA, 25 bp, Homo sapiens
ggccaccagctgcttactgactttg

SEQ ID NO: 22244 - DNA, 25 bp, Homo sapiens
acgtgagctccattctgttccatta

SEQ ID NO: 22245 - DNA, 25 bp, Homo sapiens
cacttccgggagcatgtcattatca

SEQ ID NO: 22246 - DNA, 25 bp, Homo sapiens
ggtaacaacaccctctctgcgaaga

SEQ ID NO: 22247 - DNA, 25 bp, Homo sapiens
accctcctgggctgtcactgaaaaa

SEQ ID NO: 22248 - DNA, 25 bp, Homo sapiens
tggcttccgtctcattacatcttgg

SEQ ID NO: 22249 - DNA, 25 bp, Homo sapiens
accctgatcgtggagtaagcacatg

SEQ ID NO: 22250 - DNA, 25 bp, Homo sapiens
tcctctacgtaggaactggagcttc

SEQ ID NO: 22251 - DNA, 25 bp, Homo sapiens
tgagatggtcttttgctttacatac

SEQ ID NO: 22252 - DNA, 25 bp, Homo sapiens
ccaccagtaaaaggggttcacctgc

SEQ ID NO: 22253 - DNA, 25 bp, Homo sapiens
taggcccgttgagcaccatgacagt

SEQ ID NO: 22254 - DNA, 25 bp, Homo sapiens
ggtcaccacttgagccagaaatgtt

SEQ ID NO: 22255 - DNA, 25 bp, Homo sapiens
ccaggagtactgaaaccaagttgtt

SEQ ID NO: 22256 - DNA, 25 bp, Homo sapiens
gcttttctgtgctccctaaggccta

SEQ ID NO: 22257 - DNA, 25 bp, Homo sapiens
ggctgggtccataacactggatttc

SEQ ID NO: 22258 - DNA, 25 bp, Homo sapiens
gccgctcagcattcccagagtgata

SEQ ID NO: 22259 - DNA, 25 bp, Homo sapiens
gcagaggcctcatcccgctattcta

SEQ ID NO: 22260 - DNA, 25 bp, Homo sapiens
tctttagcaaggcatgcaggccctc

SEQ ID NO: 22261 - DNA, 25 bp, Homo sapiens
cactcctcaggtttgggtgattaca

SEQ ID NO: 22262 - DNA, 25 bp, Homo sapiens
agtgagtcagaaggccatgtgtttc

SEQ ID NO: 22263 - DNA, 25 bp, Homo sapiens
aaccacctgtgtcagtccgggtcca

SEQ ID NO: 22264 - DNA, 25 bp, Homo sapiens
ctgtgcttctttaagggcggtatcc

SEQ ID NO: 22265 - DNA, 25 bp, Homo sapiens
ccctgagctgcagttccgtaggata

SEQ ID NO: 22266 - DNA, 25 bp, Homo sapiens
gaaccaattcttctcaagtcagatc

SEQ ID NO: 22267 - DNA, 25 bp, Homo sapiens
cccaccgtggaatttgtatgctctg

SEQ ID NO: 22268 - DNA, 25 bp, Homo sapiens
gaagacagaattctcattgggaccc

SEQ ID NO: 22269 - DNA, 25 bp, Homo sapiens
acggagtttcatttggtcaggtaca

SEQ ID NO: 22270 - DNA, 25 bp, Homo sapiens
caggcgctgttttaagtgtccaaaa

SEQ ID NO: 22271 - DNA, 25 bp, Homo sapiens
ctgactctctgggaaggaacacaca

SEQ ID NO: 22272 - DNA, 25 bp, Homo sapiens
agagaggaaaggcaatctgaggaca

SEQ ID NO: 22273 - DNA, 25 bp, Homo sapiens
ctctgggccgtagtagatgataata

SEQ ID NO: 22274 - DNA, 25 bp, Homo sapiens
ccccgactcccaggccagggagaga

SEQ ID NO: 22275 - DNA, 25 bp, Homo sapiens
tggccctgacaatgcaacatcatta

SEQ ID NO: 22276 - DNA, 25 bp, Homo sapiens
cagggagggatgggtgcaagaaata

SEQ ID NO: 22277 - DNA, 25 bp, Homo sapiens
actgagccttgttcctgagcattgc

SEQ ID NO: 22278 - DNA, 25 bp, Homo sapiens
ttcacacatgggtgggcttctctga

SEQ ID NO: 22279 - DNA, 25 bp, Homo sapiens
tgcggcccaagatgcacaggacttc

SEQ ID NO: 22280 - DNA, 25 bp, Homo sapiens
tgacgcattcatctactggggcatg

SEQ ID NO: 22281 - DNA, 25 bp, Homo sapiens
gaggttccatcacacccgaaggttt

SEQ ID NO: 22282 - DNA, 25 bp, Homo sapiens
gactgttacaatctgcctggccatg

SEQ ID NO: 22283 - DNA, 25 bp, Homo sapiens
ctagaaaagctggtgcctgctgctc

SEQ ID NO: 22284 - DNA, 25 bp, Homo sapiens
tcccgttacattagaggcccagttg

SEQ ID NO: 22285 - DNA, 25 bp, Homo sapiens
agagcagccagccttccaaatcgga

SEQ ID NO: 22286 - DNA, 25 bp, Homo sapiens
ggtggttaacctacttgacaaattt

SEQ ID NO: 22287 - DNA, 25 bp, Homo sapiens
gggtccaccgccaaagtaaaacata

SEQ ID NO: 22288 - DNA, 25 bp, Homo sapiens
tgaggacttgccacctgtcagtaga

SEQ ID NO: 22289 - DNA, 25 bp, Homo sapiens
tggctcaaacttggggacctcactc

SEQ ID NO: 22290 - DNA, 25 bp, Homo sapiens
ctgcccatccgtactggattcggta

SEQ ID NO: 22291 - DNA, 25 bp, Homo sapiens
ggtggagacctcaaagcagaaatcg

SEQ ID NO: 22292 - DNA, 25 bp, Homo sapiens
tggggccatgctcaaagttcagtgc

SEQ ID NO: 22293 - DNA, 25 bp, Homo sapiens
ccctgggtatagcagtgcacagatc

SEQ ID NO: 22294 - DNA, 25 bp, Homo sapiens
ctgtggtactttctcaggactttta

SEQ ID NO: 22295 - DNA, 25 bp, Homo sapiens
ttaaaagaatacctgtaaacatcaa

SEQ ID NO: 22296 - DNA, 25 bp, Homo sapiens
cctccctgaggataagctggacttg

SEQ ID NO: 22297 - DNA, 25 bp, Homo sapiens
ctaagctaagttgtttcccacggaa

SEQ ID NO: 22298 - DNA, 25 bp, Homo sapiens
cctggtggccatatttgcagaaagc

SEQ ID NO: 22299 - DNA, 25 bp, Homo sapiens
gatctcttttgtaaagcctccaagg

SEQ ID NO: 22300 - DNA, 25 bp, Homo sapiens
ccctcagctcatttggtaccttgtg

SEQ ID NO: 22301 - DNA, 25 bp, Homo sapiens
gacctggttacccactggctactaa

SEQ ID NO: 22302 - DNA, 25 bp, Homo sapiens
tacacagaaggggataaaatattat

SEQ ID NO: 22303 - DNA, 25 bp, Homo sapiens
gtagagctgataagccaatagtaga

SEQ ID NO: 22304 - DNA, 25 bp, Homo sapiens
ccgggaaatagtccttctggtcaaa

SEQ ID NO: 22305 - DNA, 25 bp, Homo sapiens
tactaaacgattaaaagccacactg

SEQ ID NO: 22306 - DNA, 25 bp, Homo sapiens
tgactcatccatccacagcagacat

SEQ ID NO: 22307 - DNA, 25 bp, Homo sapiens
gctcccatgaggtcatcagtgtttg

SEQ ID NO: 22308 - DNA, 25 bp, Homo sapiens
tgccacactggcactatggtccata

SEQ ID NO: 22309 - DNA, 25 bp, Homo sapiens
gtgcacattgcatcagctcctctgg

SEQ ID NO: 22310 - DNA, 25 bp, Homo sapiens
agaaaaaaaaaagaatctcgatgag

SEQ ID NO: 22311 - DNA, 25 bp, Homo sapiens
ccctgaaggatgacaaggagtactc

SEQ ID NO: 22312 - DNA, 25 bp, Homo sapiens
cttccttgcaacagcgggtccattc

SEQ ID NO: 22313 - DNA, 25 bp, Homo sapiens
tttcagctcggggttatgtgcaaaa

SEQ ID NO: 22314 - DNA, 25 bp, Homo sapiens
aattaaataaaagcaactgagcttt

SEQ ID NO: 22315 - DNA, 25 bp, Homo sapiens
cctaagttgtcatgctgtgtacata

SEQ ID NO: 22316 - DNA, 25 bp, Homo sapiens
caactaggtattcctgtactcaaca

SEQ ID NO: 22317 - DNA, 25 bp, Homo sapiens
ctctgagtgggcttacaaaaacctg

SEQ ID NO: 22318 - DNA, 25 bp, Homo sapiens
actcccagccttgcttccattaaga

SEQ ID NO: 22319 - DNA, 25 bp, Homo sapiens
gtgtcaccttcatagcaggcattta

SEQ ID NO: 22320 - DNA, 25 bp, Homo sapiens
tggatggacaccctttgcttagatg

SEQ ID NO: 22321 - DNA, 25 bp, Homo sapiens
actggaccaccttactggcacttga

SEQ ID NO: 22322 - DNA, 25 bp, Homo sapiens
gtttctccatcaagtgccacagttt

SEQ ID NO: 22323 - DNA, 25 bp, Homo sapiens
aggtttctctgcacttgttcgtttc

SEQ ID NO: 22324 - DNA, 25 bp, Homo sapiens
tcagaagtagtatttattgaccatc

SEQ ID NO: 22325 - DNA, 25 bp, Homo sapiens
ctataacgcctagccatctcttttt

SEQ ID NO: 22326 - DNA, 25 bp, Homo sapiens
cagccatcttttaattcttatggat

SEQ ID NO: 22327 - DNA, 25 bp, Homo sapiens
gtgctctccgtatcctgaatctaga

SEQ ID NO: 22328 - DNA, 25 bp, Homo sapiens
gatcatcctcgagccaattcctttg

SEQ ID NO: 22329 - DNA, 25 bp, Homo sapiens
caggtgctgcattaggggcctcacc

SEQ ID NO: 22330 - DNA, 25 bp, Homo sapiens
tctccttgggcactgacagagcctg

SEQ ID NO: 22331 - DNA, 25 bp, Homo sapiens
atcctgtacctgctgttgtgggccc

SEQ ID NO: 22332 - DNA, 25 bp, Homo sapiens
atattctctcatctggtcgtggtgg

SEQ ID NO: 22333 - DNA, 25 bp, Homo sapiens
ttgccatcctgggacctggtattga

SEQ ID NO: 22334 - DNA, 25 bp, Homo sapiens
ttgattcttcctcctgaccgccata

SEQ ID NO: 22335 - DNA, 25 bp, Homo sapiens
cctgccaggggaaaaacttggtacc

SEQ ID NO: 22336 - DNA, 25 bp, Homo sapiens
cagtaattaccgtgaccaggtgcca

SEQ ID NO: 22337 - DNA, 25 bp, Homo sapiens
cccgttgagttcacagttctctcta

SEQ ID NO: 22338 - DNA, 25 bp, Homo sapiens
ccacttcttcgagctccctgggagg

SEQ ID NO: 22339 - DNA, 25 bp, Homo sapiens
acagtcccagtccttgccttattgg

SEQ ID NO: 22340 - DNA, 25 bp, Homo sapiens
accgagcagtcttcagtaaaacata

SEQ ID NO: 22341 - DNA, 25 bp, Homo sapiens
ggctatttttccatactggtctgga

SEQ ID NO: 22342 - DNA, 25 bp, Homo sapiens
attctttgattgttaaactagttcc

SEQ ID NO: 22343 - DNA, 25 bp, Homo sapiens
tgataatttcttactatcaaatttt

SEQ ID NO: 22344 - DNA, 25 bp, Homo sapiens
tctggctgtcaccataagggtactg

SEQ ID NO: 22345 - DNA, 25 bp, Homo sapiens
ggctgaatattcaactgggctctta

SEQ ID NO: 22346 - DNA, 25 bp, Homo sapiens
cccatagggacaaaggacagagata

SEQ ID NO: 22347 - DNA, 25 bp, Homo sapiens
gaagcttcctgatcattctgcagta

SEQ ID NO: 22348 - DNA, 25 bp, Homo sapiens
ggtttctgtattagggcccatcttg

SEQ ID NO: 22349 - DNA, 25 bp, Homo sapiens
caaggggctctttctactcagtgtc

SEQ ID NO: 22350 - DNA, 25 bp, Homo sapiens
cagccgtgtctgaagattccaagga

SEQ ID NO: 22351 - DNA, 25 bp, Homo sapiens
gcaggtgctgcaggagaaattctca

SEQ ID NO: 22352 - DNA, 25 bp, Homo sapiens
tgtgagttttgcctaaatccagatc

SEQ ID NO: 22353 - DNA, 25 bp, Homo sapiens
tggggaggtcacaccaaaataaatc

SEQ ID NO: 22354 - DNA, 25 bp, Homo sapiens
cctgctctcctggatggatggcatc

SEQ ID NO: 22355 - DNA, 25 bp, Homo sapiens
tcagggacacctggcattgcttctg

SEQ ID NO: 22356 - DNA, 25 bp, Homo sapiens
aaggtaacccacatgtgtatcgtga

SEQ ID NO: 22357 - DNA, 25 bp, Homo sapiens
tgttttggacataagatggcttaga

SEQ ID NO: 22358 - DNA, 25 bp, Homo sapiens
tggaaccttcagaagcatagctaga

SEQ ID NO: 22359 - DNA, 25 bp, Homo sapiens
ggggcgatctctgctgctcaacaaa

SEQ ID NO: 22360 - DNA, 25 bp, Homo sapiens
tggagcagcttatccggcgacatga

SEQ ID NO: 22361 - DNA, 25 bp, Homo sapiens
ggcacgcagagcaattgatttaccc

SEQ ID NO: 22362 - DNA, 25 bp, Homo sapiens
gtgcccgccttatgaccagaaagtg

SEQ ID NO: 22363 - DNA, 25 bp, Homo sapiens
ggcgagaggtttggtcttccattca

SEQ ID NO: 22364 - DNA, 25 bp, Homo sapiens
cgcctccgagacaaatggccctgta

SEQ ID NO: 22365 - DNA, 25 bp, Homo sapiens
caggtttccaaatgagggtctagcc

SEQ ID NO: 22366 - DNA, 25 bp, Homo sapiens
ccctctgtgtggacctcagtaatga

SEQ ID NO: 22367 - DNA, 25 bp, Homo sapiens
tgtctcaggacaggatgggccattt

SEQ ID NO: 22368 - DNA, 25 bp, Homo sapiens
tctgagagaggcaagcataaaggtg

SEQ ID NO: 22369 - DNA, 25 bp, Homo sapiens
tctcttccaaatacggcctctgtgc

SEQ ID NO: 22370 - DNA, 25 bp, Homo sapiens
cgggcgcacactgtatgtacctata

SEQ ID NO: 22371 - DNA, 25 bp, Homo sapiens
tgtcccttccctgcagtcttctgag

SEQ ID NO: 22372 - DNA, 25 bp, Homo sapiens
ggaggtgggccaaagactacatttc

SEQ ID NO: 22373 - DNA, 25 bp, Homo sapiens
ctgagcagttacgatgtactagacc

SEQ ID NO: 22374 - DNA, 25 bp, Homo sapiens
acggcatcgtctagaaggtccctga

SEQ ID NO: 22375 - DNA, 25 bp, Homo sapiens
atggtcagtcatcacccagccagga

SEQ ID NO: 22376 - DNA, 25 bp, Homo sapiens
caggctctgccgtaacttgttcatg

SEQ ID NO: 22377 - DNA, 25 bp, Homo sapiens
ccgagagtgccgttgttgtctatga

SEQ ID NO: 22378 - DNA, 25 bp, Homo sapiens
gagcgtctgtggtcacctgtgaatc

SEQ ID NO: 22379 - DNA, 25 bp, Homo sapiens
gtggccacacccagtgacagctatg

SEQ ID NO: 22380 - DNA, 25 bp, Homo sapiens
atgtgcacagtcaggggccaatctc

SEQ ID NO: 22381 - DNA, 25 bp, Homo sapiens
ttcctcagtcaccagctgcagcgta

SEQ ID NO: 22382 - DNA, 25 bp, Homo sapiens
ccgccgcctgccgtatatgcagaaa

SEQ ID NO: 22383 - DNA, 25 bp, Homo sapiens
gcggcccaaggctccctcaaatgtt

SEQ ID NO: 22384 - DNA, 25 bp, Homo sapiens
ctctacaacagagaagcggccttcg

SEQ ID NO: 22385 - DNA, 25 bp, Homo sapiens
tggaaccgggtcacaccactcacta

SEQ ID NO: 22386 - DNA, 25 bp, Homo sapiens
gcgcagcctctaaaatccgcagtga

SEQ ID NO: 22387 - DNA, 25 bp, Homo sapiens
atggtattctctgcagcctctaaga

SEQ ID NO: 22388 - DNA, 25 bp, Homo sapiens
ccctcactgtctattggggcagcca

SEQ ID NO: 22389 - DNA, 25 bp, Homo sapiens
tgctcaatgaacacctgtaagaatg

SEQ ID NO: 22390 - DNA, 25 bp, Homo sapiens
cctatcacttggagttgggtaaaca

SEQ ID NO: 22391 - DNA, 25 bp, Homo sapiens
ggctaactgccttccaaaagctgta

SEQ ID NO: 22392 - DNA, 25 bp, Homo sapiens
tgtctgccctgggtgatgaccaaca

SEQ ID NO: 22393 - DNA, 25 bp, Homo sapiens
ccggagccatgtggggcatttaatc

SEQ ID NO: 22394 - DNA, 25 bp, Homo sapiens
tgaaattctgggcacaagccgcctc

SEQ ID NO: 22395 - DNA, 25 bp, Homo sapiens
tcgctctgaatgctctgggctatgc

SEQ ID NO: 22396 - DNA, 25 bp, Homo sapiens
caggtcctattcagagtggcccaga

SEQ ID NO: 22397 - DNA, 25 bp, Homo sapiens
ccctctggggagagaacaaccatta

SEQ ID NO: 22398 - DNA, 25 bp, Homo sapiens
gctttggcaaaacatttatttttct

SEQ ID NO: 22399 - DNA, 25 bp, Homo sapiens
agctttctgctcctgctccaagtta

SEQ ID NO: 22400 - DNA, 25 bp, Homo sapiens
agtctctgactctgttcctgcatgg

SEQ ID NO: 22401 - DNA, 25 bp, Homo sapiens
gtctcgggtctctctccttcttttg

SEQ ID NO: 22402 - DNA, 25 bp, Homo sapiens
atgggacactgcacattacaggttc

SEQ ID NO: 22403 - DNA, 25 bp, Homo sapiens
tcttgatttctcttggccttgcagg

SEQ ID NO: 22404 - DNA, 25 bp, Homo sapiens
ggggctacctctccacttctctgaa

SEQ ID NO: 22405 - DNA, 25 bp, Homo sapiens
cgggaatcaggcctctttgtctcta

SEQ ID NO: 22406 - DNA, 25 bp, Homo sapiens
ccctttgaggggagtatcggttaac

SEQ ID NO: 22407 - DNA, 25 bp, Homo sapiens
gcctggcactggtggtttccaaata

SEQ ID NO: 22408 - DNA, 25 bp, Homo sapiens
agtccggagtccatcagcttgccag

SEQ ID NO: 22409 - DNA, 25 bp, Homo sapiens
cctccagtgtgtagatctgttccta

SEQ ID NO: 22410 - DNA, 25 bp, Homo sapiens
ccgagaaagcccagataaaccattg

SEQ ID NO: 22411 - DNA, 25 bp, Homo sapiens
cttcccactgtcaaagagatgtctg

SEQ ID NO: 22412 - DNA, 25 bp, Homo sapiens
tgtggtttcctttgttctctctctc

SEQ ID NO: 22413 - DNA, 25 bp, Homo sapiens
tggggcttccaatatttgacactgg

SEQ ID NO: 22414 - DNA, 25 bp, Homo sapiens
cagggcagagggctattccttgtta

SEQ ID NO: 22415 - DNA, 25 bp, Homo sapiens
cgtgttcagagcatagcaggccttc

SEQ ID NO: 22416 - DNA, 25 bp, Homo sapiens
cccaagacttagtgatggttaaaaa

SEQ ID NO: 22417 - DNA, 25 bp, Homo sapiens
tacagctggccactagaagaaatta

SEQ ID NO: 22418 - DNA, 25 bp, Homo sapiens
tggaagacctcctggctgactttga

SEQ ID NO: 22419 - DNA, 25 bp, Homo sapiens
gtctgcaagaagtgaactctaattg

SEQ ID NO: 22420 - DNA, 25 bp, Homo sapiens
acataatttcctttgtcacatcctc

SEQ ID NO: 22421 - DNA, 25 bp, Homo sapiens
cacaagagctggagggatccctttc

SEQ ID NO: 22422 - DNA, 25 bp, Homo sapiens
gtgtggcagatgacttaggtgggtt

SEQ ID NO: 22423 - DNA, 25 bp, Homo sapiens
tggcttcctcctctggcagcaagtg

SEQ ID NO: 22424 - DNA, 25 bp, Homo sapiens
cgtggcatgcctagaagaacttcgt

SEQ ID NO: 22425 - DNA, 25 bp, Homo sapiens
cctgtcaggaagggaccttggccag

SEQ ID NO: 22426 - DNA, 25 bp, Homo sapiens
tgtgacagtacctcgctcctctgtg

SEQ ID NO: 22427 - DNA, 25 bp, Homo sapiens
aggcctgttcctccttcagagtgga

SEQ ID NO: 22428 - DNA, 25 bp, Homo sapiens
cctggtcgtagtcccacagctgata

SEQ ID NO: 22429 - DNA, 25 bp, Homo sapiens
cctgcccggtgctaatgctaagtgc

SEQ ID NO: 22430 - DNA, 25 bp, Homo sapiens
ggcccagcctgtcaatcctatgtca

SEQ ID NO: 22431 - DNA, 25 bp, Homo sapiens
caagtctgtttcctgggctgttcaa

SEQ ID NO: 22432 - DNA, 25 bp, Homo sapiens
gcggactcagagctcctggttccta

SEQ ID NO: 22433 - DNA, 25 bp, Homo sapiens
ttaaatttgcctcatctcagtgggg

SEQ ID NO: 22434 - DNA, 25 bp, Homo sapiens
ctgggcacttgtgaggacagctttc

SEQ ID NO: 22435 - DNA, 25 bp, Homo sapiens
ttcggaacctttgagctgacctttg

SEQ ID NO: 22436 - DNA, 25 bp, Homo sapiens
acccagggctaaagtcacgtttttc

SEQ ID NO: 22437 - DNA, 25 bp, Homo sapiens
gccacccgtatagaattctgcttag

SEQ ID NO: 22438 - DNA, 25 bp, Homo sapiens
tgtttttagagtgtggtgcccaacc

SEQ ID NO: 22439 - DNA, 25 bp, Homo sapiens
gctgcctccctggtggaatatcctc

SEQ ID NO: 22440 - DNA, 25 bp, Homo sapiens
gggagtccatccttgttgagcttga

SEQ ID NO: 22441 - DNA, 25 bp, Homo sapiens
ggacaggcttatagctcctcaggca

SEQ ID NO: 22442 - DNA, 25 bp, Homo sapiens
gggccaggcctttgtcatcttcaag

SEQ ID NO: 22443 - DNA, 25 bp, Homo sapiens
cctcggtcctttggcctgatgttta

SEQ ID NO: 22444 - DNA, 25 bp, Homo sapiens
tagcgtatccagtatgccaagaccg

SEQ ID NO: 22445 - DNA, 25 bp, Homo sapiens
tgaccaggggaagctccagcaacca

SEQ ID NO: 22446 - DNA, 25 bp, Homo sapiens
ctccgtgtctctctggctttcatga

SEQ ID NO: 22447 - DNA, 25 bp, Homo sapiens
ctgcccagcctgtgagtatctagtc

SEQ ID NO: 22448 - DNA, 25 bp, Homo sapiens
agtccaggctctgggcctcattttc

SEQ ID NO: 22449 - DNA, 25 bp, Homo sapiens
ttccctggcttcaaggaggtccgtc

SEQ ID NO: 22450 - DNA, 25 bp, Homo sapiens
cactcctgggaagctactgacttga

SEQ ID NO: 22451 - DNA, 25 bp, Homo sapiens
ccctgtcctggggaattttaaattg

SEQ ID NO: 22452 - DNA, 25 bp, Homo sapiens
gcgcatgcgcatattacttaagacc

SEQ ID NO: 22453 - DNA, 25 bp, Homo sapiens
tgccctctgcagtaaatgacgttta

SEQ ID NO: 22454 - DNA, 25 bp, Homo sapiens
gtgtgtgtccatcctcttctaaaaa

SEQ ID NO: 22455 - DNA, 25 bp, Homo sapiens
cctctgtcttgctgttgggaaatcc

SEQ ID NO: 22456 - DNA, 25 bp, Homo sapiens
ggcacggttcccacagctgattctt

SEQ ID NO: 22457 - DNA, 25 bp, Homo sapiens
tgaagaaataattttttaaagagtg

SEQ ID NO: 22458 - DNA, 25 bp, Homo sapiens
gggaggggttataatcactcctcct

SEQ ID NO: 22459 - DNA, 25 bp, Homo sapiens
ggccaagtggtgtatgtcttctcca

SEQ ID NO: 22460 - DNA, 25 bp, Homo sapiens
tactatggagatctggctgctcgcc

SEQ ID NO: 22461 - DNA, 25 bp, Homo sapiens
tgggaagtaacctgcgcctatctgc

SEQ ID NO: 22462 - DNA, 25 bp, Homo sapiens
cactgaatggaagctcgggaccctg

SEQ ID NO: 22463 - DNA, 25 bp, Homo sapiens
tcctgggaaccctgagctgtgttta

SEQ ID NO: 22464 - DNA, 25 bp, Homo sapiens
tgaatgcacgaatttacgggaaggc

SEQ ID NO: 22465 - DNA, 25 bp, Homo sapiens
gctacactgggaaggagactccacc

SEQ ID NO: 22466 - DNA, 25 bp, Homo sapiens
gtgacccgaccaaggccaggttttg

SEQ ID NO: 22467 - DNA, 25 bp, Homo sapiens
ccgcaccttcctgggtattggttta

SEQ ID NO: 22468 - DNA, 25 bp, Homo sapiens
ctgattttctgactgtggggccttg

SEQ ID NO: 22469 - DNA, 25 bp, Homo sapiens
gcgttcctcaagtgtgcccgcacta

SEQ ID NO: 22470 - DNA, 25 bp, Homo sapiens
catctgccaggccacagggaatcca

SEQ ID NO: 22471 - DNA, 25 bp, Homo sapiens
ccaaacttcttgacaggctttcaaa

SEQ ID NO: 22472 - DNA, 25 bp, Homo sapiens
ctcagggcttagcagagactctgtc

SEQ ID NO: 22473 - DNA, 25 bp, Homo sapiens
agtggtttcaggactttttcttaat

SEQ ID NO: 22474 - DNA, 25 bp, Homo sapiens
cccagcttggggaacagtgaaatga

SEQ ID NO: 22475 - DNA, 25 bp, Homo sapiens
gggagatgcaggtaccctcagcaca

SEQ ID NO: 22476 - DNA, 25 bp, Homo sapiens
tggggtataccaagcatgatgactc

SEQ ID NO: 22477 - DNA, 25 bp, Homo sapiens
cccagctggccatgcaaatgtcttc

SEQ ID NO: 22478 - DNA, 25 bp, Homo sapiens
ggggcacctttatctctcgtcctgt

SEQ ID NO: 22479 - DNA, 25 bp, Homo sapiens
gtcaggctctccctcagttaccagg

SEQ ID NO: 22480 - DNA, 25 bp, Homo sapiens
cgggccttaatgtgtgcacctgata

SEQ ID NO: 22481 - DNA, 25 bp, Homo sapiens
tttccgggctgctgacaggatcatt

SEQ ID NO: 22482 - DNA, 25 bp, Homo sapiens
tcttagtcgttctgagtggagctcc

SEQ ID NO: 22483 - DNA, 25 bp, Homo sapiens
aggtcttgcccatctctagtcagta

SEQ ID NO: 22484 - DNA, 25 bp, Homo sapiens
ccaagccctgcaatgagtcctgtta

SEQ ID NO: 22485 - DNA, 25 bp, Homo sapiens
ggcgctgcatcacctgtatctatta

SEQ ID NO: 22486 - DNA, 25 bp, Homo sapiens
cgggcagcagccaaagacaagtatc

SEQ ID NO: 22487 - DNA, 25 bp, Homo sapiens
tccagcctggaatgtgaagtgactc

SEQ ID NO: 22488 - DNA, 25 bp, Homo sapiens
gcgcacacctgctgattctggctga

SEQ ID NO: 22489 - DNA, 25 bp, Homo sapiens
cagcattatccagtagccgcacggg

SEQ ID NO: 22490 - DNA, 25 bp, Homo sapiens
agcgttcgaagactgccatggaccc

SEQ ID NO: 22491 - DNA, 25 bp, Homo sapiens
cgatacccgcgacatgcctgcaatt

SEQ ID NO: 22492 - DNA, 25 bp, Homo sapiens
cagggtgcctttctgcatgttgatc

SEQ ID NO: 22493 - DNA, 25 bp, Homo sapiens
cagcgtgcctttccgcatgtttacc

SEQ ID NO: 22494 - DNA, 25 bp, Homo sapiens
ctcccggtctctgttttccaggatc

SEQ ID NO: 22495 - DNA, 25 bp, Homo sapiens
tgcctcccatttcttagtgtcggta

SEQ ID NO: 22496 - DNA, 25 bp, Homo sapiens
gaaacaaaagcccccaaaacaaacc

SEQ ID NO: 22497 - DNA, 25 bp, Homo sapiens
cggcaaattgccaagacctgagctg

SEQ ID NO: 22498 - DNA, 25 bp, Homo sapiens
tagaggcagcacttgacgcacagta

SEQ ID NO: 22499 - DNA, 25 bp, Homo sapiens
ccaagttaaattattaatcaacctc

SEQ ID NO: 22500 - DNA, 25 bp, Homo sapiens
tgcacctcgtggatcaccatgtctg

SEQ ID NO: 22501 - DNA, 25 bp, Homo sapiens
ctgggaggaagtgggtcagtgaggg

SEQ ID NO: 22502 - DNA, 25 bp, Homo sapiens
cctggtgccagcaggaggctatatc

SEQ ID NO: 22503 - DNA, 25 bp, Homo sapiens
agatgcttcagcttctccagggaga

SEQ ID NO: 22504 - DNA, 25 bp, Homo sapiens
gatgtgcagcacaccagacctcatg

SEQ ID NO: 22505 - DNA, 25 bp, Homo sapiens
ggcctgacccattgcaaggctgtta

SEQ ID NO: 22506 - DNA, 25 bp, Homo sapiens
tatttagccgccagtctcttcagca

SEQ ID NO: 22507 - DNA, 25 bp, Homo sapiens
aacccagtttcccttgccaagttga

SEQ ID NO: 22508 - DNA, 25 bp, Homo sapiens
cactcatatttttctgctggggttc

SEQ ID NO: 22509 - DNA, 25 bp, Homo sapiens
cccgtccttggtagaagagtcaaca

SEQ ID NO: 22510 - DNA, 25 bp, Homo sapiens
ggaggccaagcccacacaattagga

SEQ ID NO: 22511 - DNA, 25 bp, Homo sapiens
gccggcagtcgttcttttctcagta

SEQ ID NO: 22512 - DNA, 25 bp, Homo sapiens
ttttggcaaaactaggctggaactc

SEQ ID NO: 22513 - DNA, 25 bp, Homo sapiens
aggtattttcttggctgactggttc

SEQ ID NO: 22514 - DNA, 25 bp, Homo sapiens
cagccactggggaatgtagttctta

SEQ ID NO: 22515 - DNA, 25 bp, Homo sapiens
aaatcgatcatagttctttatttgg

SEQ ID NO: 22516 - DNA, 25 bp, Homo sapiens
gagcttctaagggggacacacacta

SEQ ID NO: 22517 - DNA, 25 bp, Homo sapiens
tggccaggccttctccgaaacagtt

SEQ ID NO: 22518 - DNA, 25 bp, Homo sapiens
catggggtccatgtccttctaggca

SEQ ID NO: 22519 - DNA, 25 bp, Homo sapiens
ttgcaccagtcgaaggggaattttg

SEQ ID NO: 22520 - DNA, 25 bp, Homo sapiens
gttgtgctccaccttcttggctatg

SEQ ID NO: 22521 - DNA, 25 bp, Homo sapiens
cgcagtcacttgtccaggtgttaaa

SEQ ID NO: 22522 - DNA, 25 bp, Homo sapiens
ggattcagcgccattgcccagcaga

SEQ ID NO: 22523 - DNA, 25 bp, Homo sapiens
gggactctgccttagcctccagttg

SEQ ID NO: 22524 - DNA, 25 bp, Homo sapiens
atcctgcctagcttgggacacagcc

SEQ ID NO: 22525 - DNA, 25 bp, Homo sapiens
ccctttggtgagcatggtcgtatac

SEQ ID NO: 22526 - DNA, 25 bp, Homo sapiens
ttgtttctcactggggttggcacta

SEQ ID NO: 22527 - DNA, 25 bp, Homo sapiens
cctggatgcctctgccatgtttatc

SEQ ID NO: 22528 - DNA, 25 bp, Homo sapiens
cctgtgctcatctgtgtttggatta

SEQ ID NO: 22529 - DNA, 25 bp, Homo sapiens
ggccatgaagttcctccctaccagg

SEQ ID NO: 22530 - DNA, 25 bp, Homo sapiens
ccactggtcctttccttaggtaaga

SEQ ID NO: 22531 - DNA, 25 bp, Homo sapiens
ccaaaggtctcactgggctccagta

SEQ ID NO: 22532 - DNA, 25 bp, Homo sapiens
cagaagttttcgaaggtttgtatta

SEQ ID NO: 22533 - DNA, 25 bp, Homo sapiens
cacagggccctggtagttaaatcac

SEQ ID NO: 22534 - DNA, 25 bp, Homo sapiens
tgtattgcctcacccactagatctt

SEQ ID NO: 22535 - DNA, 25 bp, Homo sapiens
gaggccatgttttcacacccagtga

SEQ ID NO: 22536 - DNA, 25 bp, Homo sapiens
ggaggccaagcccacacaattagga

SEQ ID NO: 22537 - DNA, 25 bp, Homo sapiens
tggagtctttccctcagcctgtgca

SEQ ID NO: 22538 - DNA, 25 bp, Homo sapiens
gctggaactccaaaacctgctacgt

SEQ ID NO: 22539 - DNA, 25 bp, Homo sapiens
aggtattttcttggctgactggttc

SEQ ID NO: 22540 - DNA, 25 bp, Homo sapiens
cagccactggggaatgtagttctta

SEQ ID NO: 22541 - DNA, 25 bp, Homo sapiens
tggcatacctagcattacatttggc

SEQ ID NO: 22542 - DNA, 25 bp, Homo sapiens
gagcttctaagggggacacacacta

SEQ ID NO: 22543 - DNA, 25 bp, Homo sapiens
tggccaggccttctccgaaacagtt

SEQ ID NO: 22544 - DNA, 25 bp, Homo sapiens
catggggtccatgtcttgctacgca

SEQ ID NO: 22545 - DNA, 25 bp, Homo sapiens
tgaccgtctcggtgcctgcaatgaa

SEQ ID NO: 22546 - DNA, 25 bp, Homo sapiens
ccagggccacggtctagtaatttag

SEQ ID NO: 22547 - DNA, 25 bp, Homo sapiens
tgctcagcagtgacaggaactcttt

SEQ ID NO: 22548 - DNA, 25 bp, Homo sapiens
ggtgaaacattcttaagctgagctg

SEQ ID NO: 22549 - DNA, 25 bp, Homo sapiens
cctgccttgggacaccttcatgatg

SEQ ID NO: 22550 - DNA, 25 bp, Homo sapiens
agggccatatttcaggggaactttc

SEQ ID NO: 22551 - DNA, 25 bp, Homo sapiens
ctggcctagatcaccctgggagtca

SEQ ID NO: 22552 - DNA, 25 bp, Homo sapiens
gggcctcagtttccctttctgaatg

SEQ ID NO: 22553 - DNA, 25 bp, Homo sapiens
gccaatctgtgtctgtctctgcata

SEQ ID NO: 22554 - DNA, 25 bp, Homo sapiens
atcaccactttggactgctaggccc

SEQ ID NO: 22555 - DNA, 25 bp, Homo sapiens
tctggcagcatcacatttcttagtc

SEQ ID NO: 22556 - DNA, 25 bp, Homo sapiens
ttcccgtctgagtaggaaaaccaga

SEQ ID NO: 22557 - DNA, 25 bp, Homo sapiens
ctggggttcagaggtgatccctaca

SEQ ID NO: 22558 - DNA, 25 bp, Homo sapiens
cccagggtgttcagattttggtata

SEQ ID NO: 22559 - DNA, 25 bp, Homo sapiens
ttcactgtgtacatgggtcccggcc

SEQ ID NO: 22560 - DNA, 25 bp, Homo sapiens
ggtctctgcctccttcacttaggta

SEQ ID NO: 22561 - DNA, 25 bp, Homo sapiens
ctcagtcacgagaagatgggccttg

SEQ ID NO: 22562 - DNA, 25 bp, Homo sapiens
gcctggtctctatgggtgattaaca

SEQ ID NO: 22563 - DNA, 25 bp, Homo sapiens
cccgactttgggaggtcatttaact

SEQ ID NO: 22564 - DNA, 25 bp, Homo sapiens
ctcctggtgcagatgagagatgcta

SEQ ID NO: 22565 - DNA, 25 bp, Homo sapiens
cctgtctcccgatgtctgatgagta

SEQ ID NO: 22566 - DNA, 25 bp, Homo sapiens
cctctggtaggtttctctggtctga

SEQ ID NO: 22567 - DNA, 25 bp, Homo sapiens
gccatcagagaagtagcaggtccta

SEQ ID NO: 22568 - DNA, 25 bp, Homo sapiens
gtttctgccagctgctctccagtga

SEQ ID NO: 22569 - DNA, 25 bp, Homo sapiens
ttccctttccagactccattaactg

SEQ ID NO: 22570 - DNA, 25 bp, Homo sapiens
ctgtcacctccagggaaccttggga

SEQ ID NO: 22571 - DNA, 25 bp, Homo sapiens
gtccctgatcaagagccacacaata

SEQ ID NO: 22572 - DNA, 25 bp, Homo sapiens
gagctacaaacacacctcgcaagta

SEQ ID NO: 22573 - DNA, 25 bp, Homo sapiens
tcctttacagtgacggcccagcata

SEQ ID NO: 22574 - DNA, 25 bp, Homo sapiens
gagcttctaagggggacacacacta

SEQ ID NO: 22575 - DNA, 25 bp, Homo sapiens
tggccaggccttctctgaaacagtt

SEQ ID NO: 22576 - DNA, 25 bp, Homo sapiens
catggggttcatgtcctcttaggca

SEQ ID NO: 22577 - DNA, 25 bp, Homo sapiens
tggtcagcaccaggttcttcaagta

SEQ ID NO: 22578 - DNA, 25 bp, Homo sapiens
tgaggcccagattaaaatgtttaaa

SEQ ID NO: 22579 - DNA, 25 bp, Homo sapiens
tctttgttgcctgagtgatgccaca

SEQ ID NO: 22580 - DNA, 25 bp, Homo sapiens
tagagaaagtacatgctttctctat

SEQ ID NO: 22581 - DNA, 25 bp, Homo sapiens
catgcctccccactggtgcttcacc

SEQ ID NO: 22582 - DNA, 25 bp, Homo sapiens
ccctcagcgctagttagagtgatca

SEQ ID NO: 22583 - DNA, 25 bp, Homo sapiens
tctgcaggcttccaaagagaggggc

SEQ ID NO: 22584 - DNA, 25 bp, Homo sapiens
aggcctcttgctactcctggttcag

SEQ ID NO: 22585 - DNA, 25 bp, Homo sapiens
ctcaggcaataaagatagttcaata

SEQ ID NO: 22586 - DNA, 25 bp, Homo sapiens
ccttggaggttcaattggctacata

SEQ ID NO: 22587 - DNA, 25 bp, Homo sapiens
cctgattttggggaactggctcaca

SEQ ID NO: 22588 - DNA, 25 bp, Homo sapiens
tgaattggaactgcacgggggcact

SEQ ID NO: 22589 - DNA, 25 bp, Homo sapiens
aatattgtttgggtggctcacgacc

SEQ ID NO: 22590 - DNA, 25 bp, Homo sapiens
tccattttctcacagggagggcttg

SEQ ID NO: 22591 - DNA, 25 bp, Homo sapiens
aggtgctaccctcatcttagaagta

SEQ ID NO: 22592 - DNA, 25 bp, Homo sapiens
gcgggctcgtgtctcagattcaatt

SEQ ID NO: 22593 - DNA, 25 bp, Homo sapiens
gcatttgtaagtaaacttaaacatt

SEQ ID NO: 22594 - DNA, 25 bp, Homo sapiens
gcaaaagcaaaaccacagatcataa

SEQ ID NO: 22595 - DNA, 25 bp, Homo sapiens
tcggcgattctctgtgaccaccatg

SEQ ID NO: 22596 - DNA, 25 bp, Homo sapiens
cgggtctctggctagtacctccatc

SEQ ID NO: 22597 - DNA, 25 bp, Homo sapiens
ccctgggatttagctgtattcactc

SEQ ID NO: 22598 - DNA, 25 bp, Homo sapiens
tgatctctgctcttctgctcctgga

SEQ ID NO: 22599 - DNA, 25 bp, Homo sapiens
gtcctaacatgtcagcaggcttatc

SEQ ID NO: 22600 - DNA, 25 bp, Homo sapiens
ccctactgtggacgcaggagaaatc

SEQ ID NO: 22601 - DNA, 25 bp, Homo sapiens
ggtttcacccttatccttccatcag

SEQ ID NO: 22602 - DNA, 25 bp, Homo sapiens
cccacgctgattgctttgaggagta

SEQ ID NO: 22603 - DNA, 25 bp, Homo sapiens
ggcaggtcctatcctcaacttgaga

SEQ ID NO: 22604 - DNA, 25 bp, Homo sapiens
tcagtgacttcagcaacccagggtc

SEQ ID NO: 22605 - DNA, 25 bp, Homo sapiens
ggcccagagacctgcctgtttctaa

SEQ ID NO: 22606 - DNA, 25 bp, Homo sapiens
cacctggtttcagagcagcttccta

SEQ ID NO: 22607 - DNA, 25 bp, Homo sapiens
caaatgagtggaggagtgagattat

SEQ ID NO: 22608 - DNA, 25 bp, Homo sapiens
cactggtgctttggattccctgata

SEQ ID NO: 22609 - DNA, 25 bp, Homo sapiens
tcagccctgagatgctaaccttttg

SEQ ID NO: 22610 - DNA, 25 bp, Homo sapiens
cctctgataatgtttcctcctggta

SEQ ID NO: 22611 - DNA, 25 bp, Homo sapiens
gccacccagctgcatgactatttca

SEQ ID NO: 22612 - DNA, 25 bp, Homo sapiens
tacttctctgactctctcctctgag

SEQ ID NO: 22613 - DNA, 25 bp, Homo sapiens
ccttctggctctctgcctgtgggaa

SEQ ID NO: 22614 - DNA, 25 bp, Homo sapiens
ccagggcagtctatatggcattctc

SEQ ID NO: 22615 - DNA, 25 bp, Homo sapiens
ggctccctcctggtaaaagactgtt

SEQ ID NO: 22616 - DNA, 25 bp, Homo sapiens
ggtctccaggccatctagaatagta

SEQ ID NO: 22617 - DNA, 25 bp, Homo sapiens
cccccacctccctcccggactgggc

SEQ ID NO: 22618 - DNA, 25 bp, Homo sapiens
tcttctctctctttgtctcactttt

SEQ ID NO: 22619 - DNA, 25 bp, Homo sapiens
cagtgaaatatcttgtgaaaccatt

SEQ ID NO: 22620 - DNA, 25 bp, Homo sapiens
gctccacaggttactcaggctcaga

SEQ ID NO: 22621 - DNA, 25 bp, Homo sapiens
cgtaacccatgttgtgtgcccaaaa

SEQ ID NO: 22622 - DNA, 25 bp, Homo sapiens
ggctgttttcctgcagatgccctga

SEQ ID NO: 22623 - DNA, 25 bp, Homo sapiens
gtcacggggctccatatcagatctg

SEQ ID NO: 22624 - DNA, 25 bp, Homo sapiens
acctgaggtattccagggctgtcca

SEQ ID NO: 22625 - DNA, 25 bp, Homo sapiens
gcccatgtttagctccctggacctg

SEQ ID NO: 22626 - DNA, 25 bp, Homo sapiens
agagccttggacctgagaaatagtg

SEQ ID NO: 22627 - DNA, 25 bp, Homo sapiens
ccatggtggcatctttcctaggtca

SEQ ID NO: 22628 - DNA, 25 bp, Homo sapiens
agatgaaacttacagtcacaaagtc

SEQ ID NO: 22629 - DNA, 25 bp, Homo sapiens
cacgtggggctgtcattcctcaaaa

SEQ ID NO: 22630 - DNA, 25 bp, Homo sapiens
ggtgtgtcttccgtggcaatcatta

SEQ ID NO: 22631 - DNA, 25 bp, Homo sapiens
tcactgtggtttgtgcagacagaaa

SEQ ID NO: 22632 - DNA, 25 bp, Homo sapiens
aatagggaagtatagaagtggaagc

SEQ ID NO: 22633 - DNA, 25 bp, Homo sapiens
agtcttatgtatgttgaaaaaggtc

SEQ ID NO: 22634 - DNA, 25 bp, Homo sapiens
agtcttttccctctcccaagcatgg

SEQ ID NO: 22635 - DNA, 25 bp, Homo sapiens
ctcccacaagtagtcagtaaccatg

SEQ ID NO: 22636 - DNA, 25 bp, Homo sapiens
ctaaattgcacacatagaaatagtt

SEQ ID NO: 22637 - DNA, 25 bp, Homo sapiens
gggatccacttaccagagacttcga

SEQ ID NO: 22638 - DNA, 25 bp, Homo sapiens
ctgtgaggccacctgctctgtttta

SEQ ID NO: 22639 - DNA, 25 bp, Homo sapiens
ctcagtgtttgtgttgtggcagtca

SEQ ID NO: 22640 - DNA, 25 bp, Homo sapiens
gcagcctcttttctcctattgtgga

SEQ ID NO: 22641 - DNA, 25 bp, Homo sapiens
gcgcagttttcccaggtgtctcata

SEQ ID NO: 22642 - DNA, 25 bp, Homo sapiens
gctccttaagtagagagtcccgtta

SEQ ID NO: 22643 - DNA, 25 bp, Homo sapiens
ccctggtgagtcagtccatacatta

SEQ ID NO: 22644 - DNA, 25 bp, Homo sapiens
ccctgagaatcctctggtggccaaa

SEQ ID NO: 22645 - DNA, 25 bp, Homo sapiens
ctccagggtctttctcagggtcaaa

SEQ ID NO: 22646 - DNA, 25 bp, Homo sapiens
ctactaggtcaaggtcagcagcgtg

SEQ ID NO: 22647 - DNA, 25 bp, Homo sapiens
gctgtccttcctccttctgtgctga

SEQ ID NO: 22648 - DNA, 25 bp, Homo sapiens
acctggccaagctgctctctgtaga

SEQ ID NO: 22649 - DNA, 25 bp, Homo sapiens
cccagtctgtgtggctctacgttca

SEQ ID NO: 22650 - DNA, 25 bp, Homo sapiens
ggacaggagcttccagctaacttga

SEQ ID NO: 22651 - DNA, 25 bp, Homo sapiens
ttgaaaggtgggaaggccagtgttt

SEQ ID NO: 22652 - DNA, 25 bp, Homo sapiens
gtgggcatctccgttggacacagta

SEQ ID NO: 22653 - DNA, 25 bp, Homo sapiens
gttcatttctattgggagccctgta

SEQ ID NO: 22654 - DNA, 25 bp, Homo sapiens
tgggatccacttaccagagactttg

SEQ ID NO: 22655 - DNA, 25 bp, Homo sapiens
ctgtgaggccacctgctctgtttta

SEQ ID NO: 22656 - DNA, 25 bp, Homo sapiens
caccacgtttctagcttgatgatta

SEQ ID NO: 22657 - DNA, 25 bp, Homo sapiens
gcagcctcttttctcctattgtgga

SEQ ID NO: 22658 - DNA, 25 bp, Homo sapiens
cctgggactgggtacttcagcataa

SEQ ID NO: 22659 - DNA, 25 bp, Homo sapiens
gtgtgccgtgaattccagcaggatc

SEQ ID NO: 22660 - DNA, 25 bp, Homo sapiens
tgtccagcctctgacaccctggtga

SEQ ID NO: 22661 - DNA, 25 bp, Homo sapiens
tgcacctttcctatttcctgggagg

SEQ ID NO: 22662 - DNA, 25 bp, Homo sapiens
ctgcttctggggacattagactttc

SEQ ID NO: 22663 - DNA, 25 bp, Homo sapiens
gcatcctcctgcgtgacattctgga

SEQ ID NO: 22664 - DNA, 25 bp, Homo sapiens
agggtctccaccctctggatgtttc

SEQ ID NO: 22665 - DNA, 25 bp, Homo sapiens
gggacccttcctttctctaatcgtg

SEQ ID NO: 22666 - DNA, 25 bp, Homo sapiens
caggccaggctgcatgttttattcc

SEQ ID NO: 22667 - DNA, 25 bp, Homo sapiens
gagggctccctagtgtctgtaagta

SEQ ID NO: 22668 - DNA, 25 bp, Homo sapiens
ttctgaaaggtggggaggccaatgt

SEQ ID NO: 22669 - DNA, 25 bp, Homo sapiens
gtgggcatctccattggacacagta

SEQ ID NO: 22670 - DNA, 25 bp, Homo sapiens
gtattcatttctattgggagccctg

SEQ ID NO: 22671 - DNA, 25 bp, Homo sapiens
aggctcatgtatgctgaaaaatttc

SEQ ID NO: 22672 - DNA, 25 bp, Homo sapiens
ggcagtcacacacaaggaagatttc

SEQ ID NO: 22673 - DNA, 25 bp, Homo sapiens
ggttgcatctttttctcagtgtgtc

SEQ ID NO: 22674 - DNA, 25 bp, Homo sapiens
gtgtccacagcctcctagtgtttta

SEQ ID NO: 22675 - DNA, 25 bp, Homo sapiens
gtgtctagtactcttaccctctcta

SEQ ID NO: 22676 - DNA, 25 bp, Homo sapiens
ggttattcccattcagcagccaaga

SEQ ID NO: 22677 - DNA, 25 bp, Homo sapiens
cttgggcagattcactgtgcagata

SEQ ID NO: 22678 - DNA, 25 bp, Homo sapiens
gcaccactgatttctccatgagcat

SEQ ID NO: 22679 - DNA, 25 bp, Homo sapiens
gctattgttgatacaaaatattgaa

SEQ ID NO: 22680 - DNA, 25 bp, Homo sapiens
gggctttggaaactgcagatctgtc

SEQ ID NO: 22681 - DNA, 25 bp, Homo sapiens
gacccggggacattgccttattatg

SEQ ID NO: 22682 - DNA, 25 bp, Homo sapiens
gtgcctccaggttagctctcagttt

SEQ ID NO: 22683 - DNA, 25 bp, Homo sapiens
tttctatcttctcttctgatcacaa

SEQ ID NO: 22684 - DNA, 25 bp, Homo sapiens
tcacaggaacattccaagagagtca

SEQ ID NO: 22685 - DNA, 25 bp, Homo sapiens
tgtgagactccactggccaatgctg

SEQ ID NO: 22686 - DNA, 25 bp, Homo sapiens
gggaccactgtacatttgaagaaac

SEQ ID NO: 22687 - DNA, 25 bp, Homo sapiens
agagagtaactctggccagtacacc

SEQ ID NO: 22688 - DNA, 25 bp, Homo sapiens
agccttagaagcaccggagacaatt

SEQ ID NO: 22689 - DNA, 25 bp, Homo sapiens
tcatgacctttgattttagtctctt

SEQ ID NO: 22690 - DNA, 25 bp, Homo sapiens
atgtgtgccacccatccactttgga

SEQ ID NO: 22691 - DNA, 25 bp, Homo sapiens
gcaccagaggatgcagatatatata

SEQ ID NO: 22692 - DNA, 25 bp, Homo sapiens
aattatgggaatagacaaaggtgcc

SEQ ID NO: 22693 - DNA, 25 bp, Homo sapiens
tttcactgtggtttgcgcagacaga

SEQ ID NO: 22694 - DNA, 25 bp, Homo sapiens
tgcatgtctatgttaaattaaaaca

SEQ ID NO: 22695 - DNA, 25 bp, Homo sapiens
cttgaatttcatgaaggtatcagcc

SEQ ID NO: 22696 - DNA, 25 bp, Homo sapiens
gttccgctgtgtgtggcatattgtt

SEQ ID NO: 22697 - DNA, 25 bp, Homo sapiens
ctaaattgcacacatagaaatagtt

SEQ ID NO: 22698 - DNA, 25 bp, Homo sapiens
tgggatccacttaccagagactttg

SEQ ID NO: 22699 - DNA, 25 bp, Homo sapiens
aggccgcctgctctgtcttagggaa

SEQ ID NO: 22700 - DNA, 25 bp, Homo sapiens
ctcagtgtttgtgttgtggcagtca

SEQ ID NO: 22701 - DNA, 25 bp, Homo sapiens
gcagcctcttttctcccattgttga

SEQ ID NO: 22702 - DNA, 25 bp, Homo sapiens
gcagtttgcagttttcccaggtgtc

SEQ ID NO: 22703 - DNA, 25 bp, Homo sapiens
gtgtgccgtgaattccagcaggatc

SEQ ID NO: 22704 - DNA, 25 bp, Homo sapiens
gtgaccagagaatgtgagctccata

SEQ ID NO: 22705 - DNA, 25 bp, Homo sapiens
cccatgttcttgtccacaggtcaga

SEQ ID NO: 22706 - DNA, 25 bp, Homo sapiens
ggaggtttcacacaagcagcattta

SEQ ID NO: 22707 - DNA, 25 bp, Homo sapiens
tcctgcatccttccgggtgacattc

SEQ ID NO: 22708 - DNA, 25 bp, Homo sapiens
ccctgtccctctctggtgtattttc

SEQ ID NO: 22709 - DNA, 25 bp, Homo sapiens
gggacccttcctttctctaatcgtg

SEQ ID NO: 22710 - DNA, 25 bp, Homo sapiens
caggccaggctgcatgttttattcc

SEQ ID NO: 22711 - DNA, 25 bp, Homo sapiens
agcccttgctggagctcttgttttg

SEQ ID NO: 22712 - DNA, 25 bp, Homo sapiens
ttttgaaaggtggggaagccaatgt

SEQ ID NO: 22713 - DNA, 25 bp, Homo sapiens
gtgggcatctccattgcacacagta

SEQ ID NO: 22714 - DNA, 25 bp, Homo sapiens
gttcatttctattgggagccctgta

SEQ ID NO: 22715 - DNA, 25 bp, Homo sapiens
aggcatatgtatgttgaaaaatatc

SEQ ID NO: 22716 - DNA, 25 bp, Homo sapiens
tgctgaccgtggctctacctgaaag

SEQ ID NO: 22717 - DNA, 25 bp, Homo sapiens
tgtagccagtaaccatgtcctagtg

SEQ ID NO: 22718 - DNA, 25 bp, Homo sapiens
ctgagtgcagcatgtccaagatgga

SEQ ID NO: 22719 - DNA, 25 bp, Homo sapiens
gtgtctggtactcttaccctctcta

SEQ ID NO: 22720 - DNA, 25 bp, Homo sapiens
ggttattcccattcagcagccaaga

SEQ ID NO: 22721 - DNA, 25 bp, Homo sapiens
acctgctctgtgtgggagatgcaca

SEQ ID NO: 22722 - DNA, 25 bp, Homo sapiens
tctagggcatgactggaggatatga

SEQ ID NO: 22723 - DNA, 25 bp, Homo sapiens
tgcgacacagtggaagctcattctc

SEQ ID NO: 22724 - DNA, 25 bp, Homo sapiens
tgctggacggtacttcttgaacctg

SEQ ID NO: 22725 - DNA, 25 bp, Homo sapiens
tttctatcttctcttctgatcacaa

SEQ ID NO: 22726 - DNA, 25 bp, Homo sapiens
tcacaagaacattccaagagagtca

SEQ ID NO: 22727 - DNA, 25 bp, Homo sapiens
tgtgagactccactggccaatgctg

SEQ ID NO: 22728 - DNA, 25 bp, Homo sapiens
agggaccactgtacatttgaacaaa

SEQ ID NO: 22729 - DNA, 25 bp, Homo sapiens
agacagtaactccagccagtactcc

SEQ ID NO: 22730 - DNA, 25 bp, Homo sapiens
ttaacggcccaaagatctaagatcg

SEQ ID NO: 22731 - DNA, 25 bp, Homo sapiens
tgtgtgtaaaactggcagcaaaccc

SEQ ID NO: 22732 - DNA, 25 bp, Homo sapiens
gactgtagacatgtccttcctctga

SEQ ID NO: 22733 - DNA, 25 bp, Homo sapiens
cctggtgacctgaagacaatggctc

SEQ ID NO: 22734 - DNA, 25 bp, Homo sapiens
gtcccaggggacactgaactttcta

SEQ ID NO: 22735 - DNA, 25 bp, Homo sapiens
tcctcctcctctgtggcattgaatg

SEQ ID NO: 22736 - DNA, 25 bp, Homo sapiens
agcttctgccagaggatgtgccatc

SEQ ID NO: 22737 - DNA, 25 bp, Homo sapiens
agcctgcgtgaagggactttgctca

SEQ ID NO: 22738 - DNA, 25 bp, Homo sapiens
atctttgtttctcactcccagggga

SEQ ID NO: 22739 - DNA, 25 bp, Homo sapiens
aggcctgaccttccctggtgagata

SEQ ID NO: 22740 - DNA, 25 bp, Homo sapiens
cagccgtgtgtggaaacttaatgga

SEQ ID NO: 22741 - DNA, 25 bp, Homo sapiens
gcagggacaagtttttgtataaagc

SEQ ID NO: 22742 - DNA, 25 bp, Homo sapiens
ccaatcctactagaagcatttccca

SEQ ID NO: 22743 - DNA, 25 bp, Homo sapiens
atgctttggtgtcatttctcagcta

SEQ ID NO: 22744 - DNA, 25 bp, Homo sapiens
ttctttccctggtttctctcaaatc

SEQ ID NO: 22745 - DNA, 25 bp, Homo sapiens
cattagtttatttgccaatgtctga

SEQ ID NO: 22746 - DNA, 25 bp, Homo sapiens
cttctctcagggcaggagcacttcc

SEQ ID NO: 22747 - DNA, 25 bp, Homo sapiens
cctggggatccaaacctggggaatt

SEQ ID NO: 22748 - DNA, 25 bp, Homo sapiens
gtgctgcctccaggtcaactgtgtc

SEQ ID NO: 22749 - DNA, 25 bp, Homo sapiens
aactttagcatgagttgacttcact

SEQ ID NO: 22750 - DNA, 25 bp, Homo sapiens
ggaaacttcttaacctgctctctca

SEQ ID NO: 22751 - DNA, 25 bp, Homo sapiens
cctcttatgggcctgagcacccttt

SEQ ID NO: 22752 - DNA, 25 bp, Homo sapiens
ggtgttttacagagctccattgata

SEQ ID NO: 22753 - DNA, 25 bp, Homo sapiens
agtcgccctgaagatgctgctcttg

SEQ ID NO: 22754 - DNA, 25 bp, Homo sapiens
agtcctgccctgcatctctctatgg

SEQ ID NO: 22755 - DNA, 25 bp, Homo sapiens
tacaataattcctattgttttgcat

SEQ ID NO: 22756 - DNA, 25 bp, Homo sapiens
cgcccgtcccaaggtgggtatttga

SEQ ID NO: 22757 - DNA, 25 bp, Homo sapiens
tgtatctgtctctgtcctcacggca

SEQ ID NO: 22758 - DNA, 25 bp, Homo sapiens
ctgggttactctgcttccctgaaac

SEQ ID NO: 22759 - DNA, 25 bp, Homo sapiens
tggctctccaggcaattcgtgatca

SEQ ID NO: 22760 - DNA, 25 bp, Homo sapiens
tgtggctggccttcacagactctgc

SEQ ID NO: 22761 - DNA, 25 bp, Homo sapiens
gttcgtgaacatgagcatccctgtg

SEQ ID NO: 22762 - DNA, 25 bp, Homo sapiens
tggctgtacacctgaaccctacgtc

SEQ ID NO: 22763 - DNA, 25 bp, Homo sapiens
ggggctgtagcatctgaaataccca

SEQ ID NO: 22764 - DNA, 25 bp, Homo sapiens
cacaggtttttcagggagtttcatc

SEQ ID NO: 22765 - DNA, 25 bp, Homo sapiens
gccggccgagctccttatatggcta

SEQ ID NO: 22766 - DNA, 25 bp, Homo sapiens
cgccgcctcccaggtaagtttttga

SEQ ID NO: 22767 - DNA, 25 bp, Homo sapiens
tccggtgtgtcccaagacaggacta

SEQ ID NO: 22768 - DNA, 25 bp, Homo sapiens
gacctccagtggcttgtgcaaccca

SEQ ID NO: 22769 - DNA, 25 bp, Homo sapiens
cctcccttggtctgagagttccctg

SEQ ID NO: 22770 - DNA, 25 bp, Homo sapiens
cggcttctctctttacacacagtga

SEQ ID NO: 22771 - DNA, 25 bp, Homo sapiens
tgccgtcctgctggagtgatttata

SEQ ID NO: 22772 - DNA, 25 bp, Homo sapiens
tcgggctgacccttttctgatcgtc

SEQ ID NO: 22773 - DNA, 25 bp, Homo sapiens
gcaggcagtgcctcctactagaaaa

SEQ ID NO: 22774 - DNA, 25 bp, Homo sapiens
gtcgctcagacgctttggtaaatca

SEQ ID NO: 22775 - DNA, 25 bp, Homo sapiens
cagccggcttgggaaggaaaataca

SEQ ID NO: 22776 - DNA, 25 bp, Homo sapiens
cccagaactgggtagatgacttttt

SEQ ID NO: 22777 - DNA, 25 bp, Homo sapiens
tggtgcgacacctgctgttctttta

SEQ ID NO: 22778 - DNA, 25 bp, Homo sapiens
aaatcatgatataaaattctgacac

SEQ ID NO: 22779 - DNA, 25 bp, Homo sapiens
ggactccttggaacaccgttatctg

SEQ ID NO: 22780 - DNA, 25 bp, Homo sapiens
tgcacaaacattttaaacgtcaata

SEQ ID NO: 22781 - DNA, 25 bp, Homo sapiens
ttcatcctttccgagtttagttgtc

SEQ ID NO: 22782 - DNA, 25 bp, Homo sapiens
ccgtgggcagtgaaaacatctctga

SEQ ID NO: 22783 - DNA, 25 bp, Homo sapiens
ccctagtgggagtgatcctgacacc

SEQ ID NO: 22784 - DNA, 25 bp, Homo sapiens
tcctgggcacgatggttaatctttg

SEQ ID NO: 22785 - DNA, 25 bp, Homo sapiens
ggcatattatcatgtggctcccagc

SEQ ID NO: 22786 - DNA, 25 bp, Homo sapiens
ctgtccctggctgatgctgataaga

SEQ ID NO: 22787 - DNA, 25 bp, Homo sapiens
cacggcctgcagcactttgcggtaa

SEQ ID NO: 22788 - DNA, 25 bp, Homo sapiens
atacccttagcaacacatgtttcta

SEQ ID NO: 22789 - DNA, 25 bp, Homo sapiens
acaccgctgcttctcggggattttg

SEQ ID NO: 22790 - DNA, 25 bp, Homo sapiens
ggcgtggctccaccgtgaattctaa

SEQ ID NO: 22791 - DNA, 25 bp, Homo sapiens
gtcccagtcctggaatcttagaata

SEQ ID NO: 22792 - DNA, 25 bp, Homo sapiens
cggggctgcctcttggacagaaaac

SEQ ID NO: 22793 - DNA, 25 bp, Homo sapiens
ttcagaaacttttggggcacgcgga

SEQ ID NO: 22794 - DNA, 25 bp, Homo sapiens
cgtctcctctggaccgcttgcaaga

SEQ ID NO: 22795 - DNA, 25 bp, Homo sapiens
acgagttcatgctcctggcctctga

SEQ ID NO: 22796 - DNA, 25 bp, Homo sapiens
ggcctcagaggacatcccagattta

SEQ ID NO: 22797 - DNA, 25 bp, Homo sapiens
gggcccagatagctaaggagaattt

SEQ ID NO: 22798 - DNA, 25 bp, Homo sapiens
gatcctttgcttctctggggcctca

SEQ ID NO: 22799 - DNA, 25 bp, Homo sapiens
aggggagctacttcgggttttttac

SEQ ID NO: 22800 - DNA, 25 bp, Homo sapiens
tcccttcgtatctctggcaactttt

SEQ ID NO: 22801 - DNA, 25 bp, Homo sapiens
tgctcactccgtgcttcagaaaagg

SEQ ID NO: 22802 - DNA, 25 bp, Homo sapiens
tgttgtagtgtaggtggcacccaga

SEQ ID NO: 22803 - DNA, 25 bp, Homo sapiens
tgctgtcctccgcaggcgaaactga

SEQ ID NO: 22804 - DNA, 25 bp, Homo sapiens
cgctcggaggactcccgaattgtta

SEQ ID NO: 22805 - DNA, 25 bp, Homo sapiens
ggggccagagcctgacaatactatc

SEQ ID NO: 22806 - DNA, 25 bp, Homo sapiens
gggctgtgcctcttctccaaggaca

SEQ ID NO: 22807 - DNA, 25 bp, Homo sapiens
cctcatggcagttcgaacaatgata

SEQ ID NO: 22808 - DNA, 25 bp, Homo sapiens
ccgccatgtgctagagttttccaaa

SEQ ID NO: 22809 - DNA, 25 bp, Homo sapiens
tgtcttgggaaacagtctctgcata

SEQ ID NO: 22810 - DNA, 25 bp, Homo sapiens
agcctctgatcaacactaccttgta

SEQ ID NO: 22811 - DNA, 25 bp, Homo sapiens
gtttgcctttttttacagatgtttc

SEQ ID NO: 22812 - DNA, 25 bp, Homo sapiens
gggcccacacagttcccggtggtta

SEQ ID NO: 22813 - DNA, 25 bp, Homo sapiens
agctcctgaactctgcaccagttta

SEQ ID NO: 22814 - DNA, 25 bp, Homo sapiens
tatctctttctgtgtctgcctcttc

SEQ ID NO: 22815 - DNA, 25 bp, Homo sapiens
tccagtgtgaccgtgtgcacctatg

SEQ ID NO: 22816 - DNA, 25 bp, Homo sapiens
ttttaggtgactgccgtgcatctgg

SEQ ID NO: 22817 - DNA, 25 bp, Homo sapiens
gccgctgccagagttccatatgttc

SEQ ID NO: 22818 - DNA, 25 bp, Homo sapiens
ctgtgtttgtttcaggaggcccacc

SEQ ID NO: 22819 - DNA, 25 bp, Homo sapiens
cggagttccagaattctatgcgcta

SEQ ID NO: 22820 - DNA, 25 bp, Homo sapiens
ggggaagcaggtcctctctctaatc

SEQ ID NO: 22821 - DNA, 25 bp, Homo sapiens
ggattcattcctgcaagtcccggta

SEQ ID NO: 22822 - DNA, 25 bp, Homo sapiens
tctggagtgatttgaaggcctgttc

SEQ ID NO: 22823 - DNA, 25 bp, Homo sapiens
gccggtccctagcaaaggcaactga

SEQ ID NO: 22824 - DNA, 25 bp, Homo sapiens
tcctatttctcggacgccggcgcaa

SEQ ID NO: 22825 - DNA, 25 bp, Homo sapiens
gagtgtcagcttttgcatcgttata

SEQ ID NO: 22826 - DNA, 25 bp, Homo sapiens
gtgcaatgctttgtgctgcctgaaa

SEQ ID NO: 22827 - DNA, 25 bp, Homo sapiens
ccactgggaggttttgttgactttc

SEQ ID NO: 22828 - DNA, 25 bp, Homo sapiens
cctttgaggccggtacttaaacatc

SEQ ID NO: 22829 - DNA, 25 bp, Homo sapiens
ctccaagggagttttctgcgaattc

SEQ ID NO: 22830 - DNA, 25 bp, Homo sapiens
gggagggagaatgacgagactaaac

SEQ ID NO: 22831 - DNA, 25 bp, Homo sapiens
ttgctgtttaaacaaacaaaccagg

SEQ ID NO: 22832 - DNA, 25 bp, Homo sapiens
agcgccattgctgttagtctgagtc

SEQ ID NO: 22833 - DNA, 25 bp, Homo sapiens
agccctctgaccttggagtccctga

SEQ ID NO: 22834 - DNA, 25 bp, Homo sapiens
aacgttactattttaggagcaagaa

SEQ ID NO: 22835 - DNA, 25 bp, Homo sapiens
ggataggcctctacttcaaaacaga

SEQ ID NO: 22836 - DNA, 25 bp, Homo sapiens
acgaagttgcccatcacacataaga

SEQ ID NO: 22837 - DNA, 25 bp, Homo sapiens
tctgcttcttattgtggcacgtggc

SEQ ID NO: 22838 - DNA, 25 bp, Homo sapiens
agttgccatgcttctcctctctctg

SEQ ID NO: 22839 - DNA, 25 bp, Homo sapiens
agtgaaccatcctctggcctcttgc

SEQ ID NO: 22840 - DNA, 25 bp, Homo sapiens
ggtccaggccagttttacctcttta

SEQ ID NO: 22841 - DNA, 25 bp, Homo sapiens
tctcagctagcaggaaggccaaatg

SEQ ID NO: 22842 - DNA, 25 bp, Homo sapiens
ctgggtccctgagaaatgctactga

SEQ ID NO: 22843 - DNA, 25 bp, Homo sapiens
ttcatttgccagagtgcccacggtg

SEQ ID NO: 22844 - DNA, 25 bp, Homo sapiens
tccagttgccagatgcttagttccc

SEQ ID NO: 22845 - DNA, 25 bp, Homo sapiens
actacacatttttcatcttcaaagg

SEQ ID NO: 22846 - DNA, 25 bp, Homo sapiens
tcgggtccattctgcatcttgaaca

SEQ ID NO: 22847 - DNA, 25 bp, Homo sapiens
gccatctcctggacagcccatagta

SEQ ID NO: 22848 - DNA, 25 bp, Homo sapiens
cacgaggccggccttaataaatggc

SEQ ID NO: 22849 - DNA, 25 bp, Homo sapiens
gggctcgggagcttatgcacaaata

SEQ ID NO: 22850 - DNA, 25 bp, Homo sapiens
tgctggctactgagaggctaaatcc

SEQ ID NO: 22851 - DNA, 25 bp, Homo sapiens
ctcgactgtgaggaaatggaccttc

SEQ ID NO: 22852 - DNA, 25 bp, Homo sapiens
cccaggattccacaggttaagccta

SEQ ID NO: 22853 - DNA, 25 bp, Homo sapiens
ggggacaaaaccacacctgccactg

SEQ ID NO: 22854 - DNA, 25 bp, Homo sapiens
tataccaaaaaaatcaagtgccaat

SEQ ID NO: 22855 - DNA, 25 bp, Homo sapiens
ctccagttaccagaggggcatgact

SEQ ID NO: 22856 - DNA, 25 bp, Homo sapiens
gcgtctgattaccagtgctacttta

SEQ ID NO: 22857 - DNA, 25 bp, Homo sapiens
cagagggtttcaccaagagtttcca

SEQ ID NO: 22858 - DNA, 25 bp, Homo sapiens
actcctgggcatctactggaagtgc

SEQ ID NO: 22859 - DNA, 25 bp, Homo sapiens
acctggttctacacaaggctgttgc

SEQ ID NO: 22860 - DNA, 25 bp, Homo sapiens
cctgtagcctgtagtagcaaccaga

SEQ ID NO: 22861 - DNA, 25 bp, Homo sapiens
tggccacagagctgagcacttctga

SEQ ID NO: 22862 - DNA, 25 bp, Homo sapiens
ccagtgcgcgccaaaggaataaaca

SEQ ID NO: 22863 - DNA, 25 bp, Homo sapiens
gctggctctaccttgtaaacaaatc

SEQ ID NO: 22864 - DNA, 25 bp, Homo sapiens
tacagcataatgcatacatagtata

SEQ ID NO: 22865 - DNA, 25 bp, Homo sapiens
ccacaacgctaagaatgtcacagtg

SEQ ID NO: 22866 - DNA, 25 bp, Homo sapiens
gtggttctctgacccagccaatgat

SEQ ID NO: 22867 - DNA, 25 bp, Homo sapiens
ggattcccaggccatgtctccagaa

SEQ ID NO: 22868 - DNA, 25 bp, Homo sapiens
gacgtccgttcgctgaatatgcaaa

SEQ ID NO: 22869 - DNA, 25 bp, Homo sapiens
cccagggagctagttcagaaataaa

SEQ ID NO: 22870 - DNA, 25 bp, Homo sapiens
agggacctgcgtttcctcatcttta

SEQ ID NO: 22871 - DNA, 25 bp, Homo sapiens
ggaagactactaggcctcccagatc

SEQ ID NO: 22872 - DNA, 25 bp, Homo sapiens
cctagtcacccttttcctggaatga

SEQ ID NO: 22873 - DNA, 25 bp, Homo sapiens
aaataccctttcttcttgtcccaca

SEQ ID NO: 22874 - DNA, 25 bp, Homo sapiens
gcgccctcgttgaccaggcagtaga

SEQ ID NO: 22875 - DNA, 25 bp, Homo sapiens
gttcatcaggtagacgcccagctcg

SEQ ID NO: 22876 - DNA, 25 bp, Homo sapiens
tcaccgctgactgcagtgcctgttg

SEQ ID NO: 22877 - DNA, 25 bp, Homo sapiens
tggcacaggtatcatatcatgcttc

SEQ ID NO: 22878 - DNA, 25 bp, Homo sapiens
ctgatgtctagagtgcagccatctc

SEQ ID NO: 22879 - DNA, 25 bp, Homo sapiens
cctgagtgagaaccttgagcctgtc

SEQ ID NO: 22880 - DNA, 25 bp, Homo sapiens
taccaaggtcatggtcagggagcac

SEQ ID NO: 22881 - DNA, 25 bp, Homo sapiens
ctgggcaaacctcctgtcgctgtta

SEQ ID NO: 22882 - DNA, 25 bp, Homo sapiens
cgtggctttgtaagtacctacccta

SEQ ID NO: 22883 - DNA, 25 bp, Homo sapiens
tgggcccttccattcaaagatgttc

SEQ ID NO: 22884 - DNA, 25 bp, Homo sapiens
gtctcgccacgagcagggcaaccta

SEQ ID NO: 22885 - DNA, 25 bp, Homo sapiens
tcatggtccttttctcctggcggtc

SEQ ID NO: 22886 - DNA, 25 bp, Homo sapiens
tcaagggacttcagatagatgtggc

SEQ ID NO: 22887 - DNA, 25 bp, Homo sapiens
aaacaaacaaaaacatagctattct

SEQ ID NO: 22888 - DNA, 25 bp, Homo sapiens
atgctcattggtgggcttagagtcc

SEQ ID NO: 22889 - DNA, 25 bp, Homo sapiens
gagttcgcccgtggacaagttcaga

SEQ ID NO: 22890 - DNA, 25 bp, Homo sapiens
tggtccctcatcataagcactgtga

SEQ ID NO: 22891 - DNA, 25 bp, Homo sapiens
agggccatgctgtcatcccacaaga

SEQ ID NO: 22892 - DNA, 25 bp, Homo sapiens
ccagcagggcaactgaattggttta

SEQ ID NO: 22893 - DNA, 25 bp, Homo sapiens
gataacctatgcgttttcgtgtgtg

SEQ ID NO: 22894 - DNA, 25 bp, Homo sapiens
cctcttctgttagaaccagagaatg

SEQ ID NO: 22895 - DNA, 25 bp, Homo sapiens
aatttgttccgacctagcctgtatc

SEQ ID NO: 22896 - DNA, 25 bp, Homo sapiens
ggcatcacatgctggggtcttcaca

SEQ ID NO: 22897 - DNA, 25 bp, Homo sapiens
aaagcagctgctgtcctgggcccaa

SEQ ID NO: 22898 - DNA, 25 bp, Homo sapiens
attgccgtctgtgtggatagccacc

SEQ ID NO: 22899 - DNA, 25 bp, Homo sapiens
gcctcagggccaagtctaatctttg

SEQ ID NO: 22900 - DNA, 25 bp, Homo sapiens
gttgcagcggtcacaccttccttga

SEQ ID NO: 22901 - DNA, 25 bp, Homo sapiens
ccaggtctccagctccaaggatctg

SEQ ID NO: 22902 - DNA, 25 bp, Homo sapiens
tcccggtaggtgagttctttaattg

SEQ ID NO: 22903 - DNA, 25 bp, Homo sapiens
tgatacggttcccacctgcagggtg

SEQ ID NO: 22904 - DNA, 25 bp, Homo sapiens
ctggtctgttagatgaacactatcg

SEQ ID NO: 22905 - DNA, 25 bp, Homo sapiens
aattttttaaaaagagagggcaggc

SEQ ID NO: 22906 - DNA, 25 bp, Homo sapiens
cattggttggagcaagtatttcttc

SEQ ID NO: 22907 - DNA, 25 bp, Homo sapiens
ggcctagaggttctgaccacaattg

SEQ ID NO: 22908 - DNA, 25 bp, Homo sapiens
aggcagcctctgagttctctgatta

SEQ ID NO: 22909 - DNA, 25 bp, Homo sapiens
ggtggccaccaatacagcctcattg

SEQ ID NO: 22910 - DNA, 25 bp, Homo sapiens
agcaggacaagccagcgaagcatta

SEQ ID NO: 22911 - DNA, 25 bp, Homo sapiens
ggccttgattcaaaacccaggtttc

SEQ ID NO: 22912 - DNA, 25 bp, Homo sapiens
taaccactgagattgggaaagtccc

SEQ ID NO: 22913 - DNA, 25 bp, Homo sapiens
tcagaaaaccggtgagggtccaatc

SEQ ID NO: 22914 - DNA, 25 bp, Homo sapiens
ggccctaggcactgggtttaaaatg

SEQ ID NO: 22915 - DNA, 25 bp, Homo sapiens
tggccaggagagcacacttatttaa

SEQ ID NO: 22916 - DNA, 25 bp, Homo sapiens
tcctccacgctgtatagcacggcta

SEQ ID NO: 22917 - DNA, 25 bp, Homo sapiens
tttgcatcacacacactggctgagg

SEQ ID NO: 22918 - DNA, 25 bp, Homo sapiens
tgattgtcaatatacatatatcctg

SEQ ID NO: 22919 - DNA, 25 bp, Homo sapiens
tcagtccctgtgcatggggcacata

SEQ ID NO: 22920 - DNA, 25 bp, Homo sapiens
tctccgatgaaaacggggccgagta

SEQ ID NO: 22921 - DNA, 25 bp, Homo sapiens
tgtgcagcttttgaccttggtcttg

SEQ ID NO: 22922 - DNA, 25 bp, Homo sapiens
cggggcctctcctgtaccttaataa

SEQ ID NO: 22923 - DNA, 25 bp, Homo sapiens
ggaccgccagctcgtcttcctgtaa

SEQ ID NO: 22924 - DNA, 25 bp, Homo sapiens
ggttcgaccctagagccagctgcaa

SEQ ID NO: 22925 - DNA, 25 bp, Homo sapiens
tgtgtgcccagaggactgaacctcc

SEQ ID NO: 22926 - DNA, 25 bp, Homo sapiens
tggtcccgcccacaaccggagtata

SEQ ID NO: 22927 - DNA, 25 bp, Homo sapiens
tccggagccgaaaaagaattccctc

SEQ ID NO: 22928 - DNA, 25 bp, Homo sapiens
taaaagttcaattttaatcaccatt

SEQ ID NO: 22929 - DNA, 25 bp, Homo sapiens
ctagatccagggcagttacctctga

SEQ ID NO: 22930 - DNA, 25 bp, Homo sapiens
tgagtacaatgcctagcacacaatg

SEQ ID NO: 22931 - DNA, 25 bp, Homo sapiens
gggcttacttcttgttgaacaggtc

SEQ ID NO: 22932 - DNA, 25 bp, Homo sapiens
aggaggttttctgccgcccaaatca

SEQ ID NO: 22933 - DNA, 25 bp, Homo sapiens
gcagggctcacagtctctgtctttc

SEQ ID NO: 22934 - DNA, 25 bp, Homo sapiens
ttactgatactaatctcagactctg

SEQ ID NO: 22935 - DNA, 25 bp, Homo sapiens
ctacgtctcattctgtcagctcgtc

SEQ ID NO: 22936 - DNA, 25 bp, Homo sapiens
tagcctagagggaaaggcctaggtt

SEQ ID NO: 22937 - DNA, 25 bp, Homo sapiens
cttaggtcttatctctctgggtgtc

SEQ ID NO: 22938 - DNA, 25 bp, Homo sapiens
agccttcccaacagacaggagagga

SEQ ID NO: 22939 - DNA, 25 bp, Homo sapiens
ggtgcatgctgtttctcggcctgaa

SEQ ID NO: 22940 - DNA, 25 bp, Homo sapiens
tctcttcttgtctttatctgcctcc

SEQ ID NO: 22941 - DNA, 25 bp, Homo sapiens
tgccttcctctgtggagtgacctca

SEQ ID NO: 22942 - DNA, 25 bp, Homo sapiens
catgacattgtgtgtgactttcagc

SEQ ID NO: 22943 - DNA, 25 bp, Homo sapiens
ttctatgtctgcgagtaaccacaca

SEQ ID NO: 22944 - DNA, 25 bp, Homo sapiens
gtgacgccgttgtctgtccttctga

SEQ ID NO: 22945 - DNA, 25 bp, Homo sapiens
cttccctcagcgcaaagagagtttc

SEQ ID NO: 22946 - DNA, 25 bp, Homo sapiens
ggggcctgcacagaaataaaccttg

SEQ ID NO: 22947 - DNA, 25 bp, Homo sapiens
agtctgtcagtctctgggcatctta

SEQ ID NO: 22948 - DNA, 25 bp, Homo sapiens
ggctctctccctctctgttattgtc

SEQ ID NO: 22949 - DNA, 25 bp, Homo sapiens
ctcggcctcagtttgtccagtaaga

SEQ ID NO: 22950 - DNA, 25 bp, Homo sapiens
accaattgttaagaagccgcacgca

SEQ ID NO: 22951 - DNA, 25 bp, Homo sapiens
ctggcagggagttcagttcttagaa

SEQ ID NO: 22952 - DNA, 25 bp, Homo sapiens
gcgcttttcgtcattccctgggtga

SEQ ID NO: 22953 - DNA, 25 bp, Homo sapiens
agtcgttctctggtgcagccactga

SEQ ID NO: 22954 - DNA, 25 bp, Homo sapiens
gccagcagtgctcagctaaccttct

SEQ ID NO: 22955 - DNA, 25 bp, Homo sapiens
gccagccgggagttggaaagttact

SEQ ID NO: 22956 - DNA, 25 bp, Homo sapiens
ggcaggcctcgcagctgaaacttta

SEQ ID NO: 22957 - DNA, 25 bp, Homo sapiens
ttaggacactgcagctccatcttgc

SEQ ID NO: 22958 - DNA, 25 bp, Homo sapiens
tgacctcaggcctgcaaactcttgc

SEQ ID NO: 22959 - DNA, 25 bp, Homo sapiens
ggcactgactgcgttcatcacctgt

SEQ ID NO: 22960 - DNA, 25 bp, Homo sapiens
tccgcaggaccacgatgactgagtc

SEQ ID NO: 22961 - DNA, 25 bp, Homo sapiens
cgcggcccaggagtttcttattgtt

SEQ ID NO: 22962 - DNA, 25 bp, Homo sapiens
cctcccatcctccccccatctcagt

SEQ ID NO: 22963 - DNA, 25 bp, Homo sapiens
ggaccactcccgttatcgtttaaaa

SEQ ID NO: 22964 - DNA, 25 bp, Homo sapiens
tgcgcccgggagatcgaatattttc

SEQ ID NO: 22965 - DNA, 25 bp, Homo sapiens
ccacagcgtctctggagcacttatc

SEQ ID NO: 22966 - DNA, 25 bp, Homo sapiens
ccagcactgtcaagggaatgatttt

SEQ ID NO: 22967 - DNA, 25 bp, Homo sapiens
ggtagtgggctacctccaccttttc

SEQ ID NO: 22968 - DNA, 25 bp, Homo sapiens
agaaaagaaaaacacagatttaatc

SEQ ID NO: 22969 - DNA, 25 bp, Homo sapiens
cctggcccagctcatggagtctata

SEQ ID NO: 22970 - DNA, 25 bp, Homo sapiens
ggctcacccagcctttcctctacct

SEQ ID NO: 22971 - DNA, 25 bp, Homo sapiens
gtgctctgccttcctctgatttgtg

SEQ ID NO: 22972 - DNA, 25 bp, Homo sapiens
ctgcagtggacctgacaaagtctcc

SEQ ID NO: 22973 - DNA, 25 bp, Homo sapiens
gtgatgccacccagctagatgaatt

SEQ ID NO: 22974 - DNA, 25 bp, Homo sapiens
tcagactcagctggggtgctcatta

SEQ ID NO: 22975 - DNA, 25 bp, Homo sapiens
ccagggctgaaactcggggtatcaa

SEQ ID NO: 22976 - DNA, 25 bp, Homo sapiens
gtgcaaattttcactcacagctgtg

SEQ ID NO: 22977 - DNA, 25 bp, Homo sapiens
aggggcaactttatgggccaagcca

SEQ ID NO: 22978 - DNA, 25 bp, Homo sapiens
acggcggagatcaccgacttccaga

SEQ ID NO: 22979 - DNA, 25 bp, Homo sapiens
ctcgagcactggagtagagcagtcc

SEQ ID NO: 22980 - DNA, 25 bp, Homo sapiens
tggtccggccttcttcctaatgaca

SEQ ID NO: 22981 - DNA, 25 bp, Homo sapiens
tgagcatcttctcccacgctgtggc

SEQ ID NO: 22982 - DNA, 25 bp, Homo sapiens
tcctctggggatagcaagtcagtcc

SEQ ID NO: 22983 - DNA, 25 bp, Homo sapiens
cttccaggtccctagtctcagtgtc

SEQ ID NO: 22984 - DNA, 25 bp, Homo sapiens
tgtgtgttgtgtgtgtatactgata

SEQ ID NO: 22985 - DNA, 25 bp, Homo sapiens
atggaggaactaccaaacaaaatct

SEQ ID NO: 22986 - DNA, 25 bp, Homo sapiens
gacatctgtgccctctgctattaga

SEQ ID NO: 22987 - DNA, 25 bp, Homo sapiens
caccaaatgtacccatgaagtgagt

SEQ ID NO: 22988 - DNA, 25 bp, Homo sapiens
tgacttcctcaaagctctggcctta

SEQ ID NO: 22989 - DNA, 25 bp, Homo sapiens
gggtctcataagtctccaaaggttc

SEQ ID NO: 22990 - DNA, 25 bp, Homo sapiens
cttggtgatgtgtgtctacagtctc

SEQ ID NO: 22991 - DNA, 25 bp, Homo sapiens
ttacatatcttaactttttccttac

SEQ ID NO: 22992 - DNA, 25 bp, Homo sapiens
ggcctcctgggtatgctggcaatta

SEQ ID NO: 22993 - DNA, 25 bp, Homo sapiens
gccaggcgagtttgctgcatcaatg

SEQ ID NO: 22994 - DNA, 25 bp, Homo sapiens
tctgccactcttctgtagatgttga

SEQ ID NO: 22995 - DNA, 25 bp, Homo sapiens
gggcgccatctacatgatgatagca

SEQ ID NO: 22996 - DNA, 25 bp, Homo sapiens
cctcaagccagctcaggttagcatc

SEQ ID NO: 22997 - DNA, 25 bp, Homo sapiens
agtgtaataatatcagcttccattc

SEQ ID NO: 22998 - DNA, 25 bp, Homo sapiens
ccctggtcctgagcaagcactatga

SEQ ID NO: 22999 - DNA, 25 bp, Homo sapiens
gctgatgttttctgcccgcctttga

SEQ ID NO: 23000 - DNA, 25 bp, Homo sapiens
tcttgaagaagaggatgaagggaca

SEQ ID NO: 23001 - DNA, 25 bp, Homo sapiens
ggatttcttatgctgttaaaacaga

SEQ ID NO: 23002 - DNA, 25 bp, Homo sapiens
attatttttctagggtttaccagcc

SEQ ID NO: 23003 - DNA, 25 bp, Homo sapiens
gggtcccgggcctaaaaatgttaag

SEQ ID NO: 23004 - DNA, 25 bp, Homo sapiens
ggctctgagctgtggttaccagata

SEQ ID NO: 23005 - DNA, 25 bp, Homo sapiens
ccaggctccttagctcggcattcaa

SEQ ID NO: 23006 - DNA, 25 bp, Homo sapiens
gccccaggctctaggaagtatctta

SEQ ID NO: 23007 - DNA, 25 bp, Homo sapiens
ggggacagggtagctccattttcta

SEQ ID NO: 23008 - DNA, 25 bp, Homo sapiens
tttgggtctcaaatcagcctggccg

SEQ ID NO: 23009 - DNA, 25 bp, Homo sapiens
gaaactttgtcctgggtccctccca

SEQ ID NO: 23010 - DNA, 25 bp, Homo sapiens
ttgggcaaacgggactctctgattc

SEQ ID NO: 23011 - DNA, 25 bp, Homo sapiens
gagctcagcttctgtctctactatg

SEQ ID NO: 23012 - DNA, 25 bp, Homo sapiens
gacctttcgtttctgctgtgcacca

SEQ ID NO: 23013 - DNA, 25 bp, Homo sapiens
tggacctgcactgcccaatatgtgg

SEQ ID NO: 23014 - DNA, 25 bp, Homo sapiens
caagccgtttgcgtctgaagatccc

SEQ ID NO: 23015 - DNA, 25 bp, Homo sapiens
taaatgcccactgcccatagcctgg

SEQ ID NO: 23016 - DNA, 25 bp, Homo sapiens
ctgggctagctccataggtcacaaa

SEQ ID NO: 23017 - DNA, 25 bp, Homo sapiens
gcctttctttcttgggtgcatgaca

SEQ ID NO: 23018 - DNA, 25 bp, Homo sapiens
tacccgggcacatgtctgcagactc

SEQ ID NO: 23019 - DNA, 25 bp, Homo sapiens
gcctcctccggaacgtgttgactga

SEQ ID NO: 23020 - DNA, 25 bp, Homo sapiens
aacctgcagttttgtttgtactttg

SEQ ID NO: 23021 - DNA, 25 bp, Homo sapiens
caatgaggcttatgtctgtaatccc

SEQ ID NO: 23022 - DNA, 25 bp, Homo sapiens
tccgcgtcctttgcagagttttttc

SEQ ID NO: 23023 - DNA, 25 bp, Homo sapiens
cctctcagagccaggaaggcatttc

SEQ ID NO: 23024 - DNA, 25 bp, Homo sapiens
cctccgaggttctggtgtgatattc

SEQ ID NO: 23025 - DNA, 25 bp, Homo sapiens
tagtcactcatccttttaagccctg

SEQ ID NO: 23026 - DNA, 25 bp, Homo sapiens
tggattgacttaagaaccttttagg

SEQ ID NO: 23027 - DNA, 25 bp, Homo sapiens
ctccagggacaccagaaaatctttg

SEQ ID NO: 23028 - DNA, 25 bp, Homo sapiens
gcatctgaggaacagaccatcgtta

SEQ ID NO: 23029 - DNA, 25 bp, Homo sapiens
gggttggagccacttcctcttgcta

SEQ ID NO: 23030 - DNA, 25 bp, Homo sapiens
tgctttttctaccactgaggcgttg

SEQ ID NO: 23031 - DNA, 25 bp, Homo sapiens
tgggcagcccagcagcaaagctctt

SEQ ID NO: 23032 - DNA, 25 bp, Homo sapiens
ctccagggttttccagagcagagaa

SEQ ID NO: 23033 - DNA, 25 bp, Homo sapiens
cacttgggcagacagtggactgttt

SEQ ID NO: 23034 - DNA, 25 bp, Homo sapiens
gctagcctacgtatgacacccactg

SEQ ID NO: 23035 - DNA, 25 bp, Homo sapiens
ggcctggactcttcactgctacctg

SEQ ID NO: 23036 - DNA, 25 bp, Homo sapiens
caaggtttcagtgatacagtgttta

SEQ ID NO: 23037 - DNA, 25 bp, Homo sapiens
ccaatattccaatgtactagggttc

SEQ ID NO: 23038 - DNA, 25 bp, Homo sapiens
ggtgactgccatccggtttcttttt

SEQ ID NO: 23039 - DNA, 25 bp, Homo sapiens
ccaggctccttagctcggcattcaa

SEQ ID NO: 23040 - DNA, 25 bp, Homo sapiens
gccactggctggaatgtccttctga

SEQ ID NO: 23041 - DNA, 25 bp, Homo sapiens
ctctgagtctctggaacacaaggtc

SEQ ID NO: 23042 - DNA, 25 bp, Homo sapiens
tgcgtgaattaagaccaaggctgtc

SEQ ID NO: 23043 - DNA, 25 bp, Homo sapiens
ttgggaccagttgccacttaggagc

SEQ ID NO: 23044 - DNA, 25 bp, Homo sapiens
ttttttagacatagaacttttttct

SEQ ID NO: 23045 - DNA, 25 bp, Homo sapiens
gaccagctctctctttgggttaaaa

SEQ ID NO: 23046 - DNA, 25 bp, Homo sapiens
tcggaaactgatcgtggacactaga

SEQ ID NO: 23047 - DNA, 25 bp, Homo sapiens
ggggcccagcatgcataagcagttt

SEQ ID NO: 23048 - DNA, 25 bp, Homo sapiens
tggttggccatgtgacctacatctc

SEQ ID NO: 23049 - DNA, 25 bp, Homo sapiens
tggaccttctttgaacgcctgcaga

SEQ ID NO: 23050 - DNA, 25 bp, Homo sapiens
ctgcgagggtaattcttgacgatca

SEQ ID NO: 23051 - DNA, 25 bp, Homo sapiens
ttcggcggccaccaagattgtattc

SEQ ID NO: 23052 - DNA, 25 bp, Homo sapiens
cggatgcccatcaatttgccttcta

SEQ ID NO: 23053 - DNA, 25 bp, Homo sapiens
ctagctggagtgtgctgtctgtcac

SEQ ID NO: 23054 - DNA, 25 bp, Homo sapiens
gctgcgcacaggacttgtgtaactc

SEQ ID NO: 23055 - DNA, 25 bp, Homo sapiens
cctctggctgccatgtgagtctaca

SEQ ID NO: 23056 - DNA, 25 bp, Homo sapiens
acgggatccgcttcgtagtagattc

SEQ ID NO: 23057 - DNA, 25 bp, Homo sapiens
ggttgttctgacactggaggaaata

SEQ ID NO: 23058 - DNA, 25 bp, Homo sapiens
ggggactatatcctaactgctggca

SEQ ID NO: 23059 - DNA, 25 bp, Homo sapiens
gccaagccactgaggggaacccatc

SEQ ID NO: 23060 - DNA, 25 bp, Homo sapiens
tcctgcaggaggtgcacactatttt

SEQ ID NO: 23061 - DNA, 25 bp, Homo sapiens
ctcttgtcagcagaaccgggtcata

SEQ ID NO: 23062 - DNA, 25 bp, Homo sapiens
ccatctgctgtaggtgggcccattt

SEQ ID NO: 23063 - DNA, 25 bp, Homo sapiens
caagtctgtttcttccctgggtcca

SEQ ID NO: 23064 - DNA, 25 bp, Homo sapiens
agctgtccctctggccctgggtcag

SEQ ID NO: 23065 - DNA, 25 bp, Homo sapiens
tgcgggctcaaggatgtcaaaactc

SEQ ID NO: 23066 - DNA, 25 bp, Homo sapiens
gccacctttgttttatgaggccagc

SEQ ID NO: 23067 - DNA, 25 bp, Homo sapiens
cgtccaccgtgatgggtcaaaatga

SEQ ID NO: 23068 - DNA, 25 bp, Homo sapiens
tcgactgtacgaaatggccaacctt

SEQ ID NO: 23069 - DNA, 25 bp, Homo sapiens
gacacctccggtaccatttctgggg

SEQ ID NO: 23070 - DNA, 25 bp, Homo sapiens
cctcatttcaggagccgggtttcca

SEQ ID NO: 23071 - DNA, 25 bp, Homo sapiens
ccttccgcatggtggtgatagtcaa

SEQ ID NO: 23072 - DNA, 25 bp, Homo sapiens
ctcctcgagcgtctttgtgatccta

SEQ ID NO: 23073 - DNA, 25 bp, Homo sapiens
cactggactgcttgttgagagaatc

SEQ ID NO: 23074 - DNA, 25 bp, Homo sapiens
cgctgacttccgtcctcacagagga

SEQ ID NO: 23075 - DNA, 25 bp, Homo sapiens
ctcaaggtctgaatggggtcccacc

SEQ ID NO: 23076 - DNA, 25 bp, Homo sapiens
tggagcgccacctctttctgtctgc

SEQ ID NO: 23077 - DNA, 25 bp, Homo sapiens
gcatggttgctcactcccgtaataa

SEQ ID NO: 23078 - DNA, 25 bp, Homo sapiens
ctcaggagaaaaagaaggcacggca

SEQ ID NO: 23079 - DNA, 25 bp, Homo sapiens
tcaacagtcttttaaaatgttcctc

SEQ ID NO: 23080 - DNA, 25 bp, Homo sapiens
ttccctccctctgcagaacaaaggc

SEQ ID NO: 23081 - DNA, 25 bp, Homo sapiens
ttaacagtatcttttgcagagcaga

SEQ ID NO: 23082 - DNA, 25 bp, Homo sapiens
ggttcttctttaatttagcaatatt

SEQ ID NO: 23083 - DNA, 25 bp, Homo sapiens
tgcctggctctgtttcccaatatcc

SEQ ID NO: 23084 - DNA, 25 bp, Homo sapiens
ccactggagggataaagcgctagcc

SEQ ID NO: 23085 - DNA, 25 bp, Homo sapiens
ggatgcaggatcattgccttccctc

SEQ ID NO: 23086 - DNA, 25 bp, Homo sapiens
ctcccactgtaagttctgacctagg

SEQ ID NO: 23087 - DNA, 25 bp, Homo sapiens
aaagtctcatcgtcacagtcaggaa

SEQ ID NO: 23088 - DNA, 25 bp, Homo sapiens
tcccacctgagtcccggggagtttt

SEQ ID NO: 23089 - DNA, 25 bp, Homo sapiens
tggcagcccatgctctcatcctgtg

SEQ ID NO: 23090 - DNA, 25 bp, Homo sapiens
ccgggtctgaaggaaagagctcacc

SEQ ID NO: 23091 - DNA, 25 bp, Homo sapiens
gcctggtggctcgtttgtaatccca

SEQ ID NO: 23092 - DNA, 25 bp, Homo sapiens
agcccatctgtgcaggcctcatcag

SEQ ID NO: 23093 - DNA, 25 bp, Homo sapiens
ggcttttctgctggccctgaattca

SEQ ID NO: 23094 - DNA, 25 bp, Homo sapiens
agatccagaccctacctgaggcatg

SEQ ID NO: 23095 - DNA, 25 bp, Homo sapiens
caggggatccctctaccaggataga

SEQ ID NO: 23096 - DNA, 25 bp, Homo sapiens
tgggccactcaccagttgttgactt

SEQ ID NO: 23097 - DNA, 25 bp, Homo sapiens
cgaatctctgtgtctctctgtttta

SEQ ID NO: 23098 - DNA, 25 bp, Homo sapiens
tctcaccttggtcactggagttgtc

SEQ ID NO: 23099 - DNA, 25 bp, Homo sapiens
tcctgacagtgtgtggccagtattc

SEQ ID NO: 23100 - DNA, 25 bp, Homo sapiens
tgaggaactcaacaatcgggtagga

SEQ ID NO: 23101 - DNA, 25 bp, Homo sapiens
cactgttgttgcgattcctgtgcga

SEQ ID NO: 23102 - DNA, 25 bp, Homo sapiens
ccgcatctgagcctgtgagtctatt

SEQ ID NO: 23103 - DNA, 25 bp, Homo sapiens
cattctgcttcaactccggtgggga

SEQ ID NO: 23104 - DNA, 25 bp, Homo sapiens
cagtccctgcgctcactttggcata

SEQ ID NO: 23105 - DNA, 25 bp, Homo sapiens
aggagatgcccttctgtgtcccaga

SEQ ID NO: 23106 - DNA, 25 bp, Homo sapiens
ctcctgtgccctgaagttgaatcca

SEQ ID NO: 23107 - DNA, 25 bp, Homo sapiens
cccggtctctcccttgtcttgtgga

SEQ ID NO: 23108 - DNA, 25 bp, Homo sapiens
tagcccaggctgattctgaaaccta

SEQ ID NO: 23109 - DNA, 25 bp, Homo sapiens
gatctctcagcggactggcccttca

SEQ ID NO: 23110 - DNA, 25 bp, Homo sapiens
ctgccagtttctcgctgtgcctctg

SEQ ID NO: 23111 - DNA, 25 bp, Homo sapiens
tcggcccagccgtgccttttaaatc

SEQ ID NO: 23112 - DNA, 25 bp, Homo sapiens
ggtggccacccattgccttactgga

SEQ ID NO: 23113 - DNA, 25 bp, Homo sapiens
aacaaagggaaaagagggacctctc

SEQ ID NO: 23114 - DNA, 25 bp, Homo sapiens
tagagctctttgcatccaggtgaga

SEQ ID NO: 23115 - DNA, 25 bp, Homo sapiens
ctctccagagagtgatctacatgcc

SEQ ID NO: 23116 - DNA, 25 bp, Homo sapiens
acaggctgtgtcctttggcacaaca

SEQ ID NO: 23117 - DNA, 25 bp, Homo sapiens
tgcagatggcctaccgacagatgga

SEQ ID NO: 23118 - DNA, 25 bp, Homo sapiens
ctggggacacagaacagggcaatca

SEQ ID NO: 23119 - DNA, 25 bp, Homo sapiens
cgcctgctttctgtgggattcattc

SEQ ID NO: 23120 - DNA, 25 bp, Homo sapiens
actggcctggtttctgtcatgtccc

SEQ ID NO: 23121 - DNA, 25 bp, Homo sapiens
tgggcccaggtgacaaatatttatt

SEQ ID NO: 23122 - DNA, 25 bp, Homo sapiens
gccctaaggcagtgttttgtttacc

SEQ ID NO: 23123 - DNA, 25 bp, Homo sapiens
catgcctggcactcaagacacgata

SEQ ID NO: 23124 - DNA, 25 bp, Homo sapiens
cccgttgttcgtggaatgaacctca

SEQ ID NO: 23125 - DNA, 25 bp, Homo sapiens
tcagagggagatgccactttgtttc

SEQ ID NO: 23126 - DNA, 25 bp, Homo sapiens
gcgctcaccgtaattgcctctaaaa

SEQ ID NO: 23127 - DNA, 25 bp, Homo sapiens
tacatcctggtcctgagctcgcttc

SEQ ID NO: 23128 - DNA, 25 bp, Homo sapiens
ctaggaacactctcgtaaaactttg

SEQ ID NO: 23129 - DNA, 25 bp, Homo sapiens
ctgtgactctcaccttaacatggtc

SEQ ID NO: 23130 - DNA, 25 bp, Homo sapiens
gctggcccagctcaatgaagaaatt

SEQ ID NO: 23131 - DNA, 25 bp, Homo sapiens
ctcatggttgagacaggatttgaac

SEQ ID NO: 23132 - DNA, 25 bp, Homo sapiens
gccactggcaactctttaggctgta

SEQ ID NO: 23133 - DNA, 25 bp, Homo sapiens
acaagacggccatgtggggacatcc

SEQ ID NO: 23134 - DNA, 25 bp, Homo sapiens
agcctcctgttctctgtcttctgaa

SEQ ID NO: 23135 - DNA, 25 bp, Homo sapiens
tgtgtccaatctgtaaacgtctgtc

SEQ ID NO: 23136 - DNA, 25 bp, Homo sapiens
acatggtctcgtcgtcgccaaactc

SEQ ID NO: 23137 - DNA, 25 bp, Homo sapiens
ggactctgtcattcctctgataaaa

SEQ ID NO: 23138 - DNA, 25 bp, Homo sapiens
tctgaaccctgctatgtgatccata

SEQ ID NO: 23139 - DNA, 25 bp, Homo sapiens
tagctagtgatatccacatattaat

SEQ ID NO: 23140 - DNA, 25 bp, Homo sapiens
cactctgtggggagctaaccttttc

SEQ ID NO: 23141 - DNA, 25 bp, Homo sapiens
ataagcagtttttttaatgtcaggc

SEQ ID NO: 23142 - DNA, 25 bp, Homo sapiens
attcagaggtgccttctctgtatct

SEQ ID NO: 23143 - DNA, 25 bp, Homo sapiens
ctcctgggagaagcctcactcagtc

SEQ ID NO: 23144 - DNA, 25 bp, Homo sapiens
attgcgcgcctacatgtgcctacga

SEQ ID NO: 23145 - DNA, 25 bp, Homo sapiens
ctcccgcctgggagtgatggaacca

SEQ ID NO: 23146 - DNA, 25 bp, Homo sapiens
tcctggaaacagatcccgtagcgtc

SEQ ID NO: 23147 - DNA, 25 bp, Homo sapiens
ggcctggattcccacgttctagaga

SEQ ID NO: 23148 - DNA, 25 bp, Homo sapiens
tggggcctcccaatgcatttcctgt

SEQ ID NO: 23149 - DNA, 25 bp, Homo sapiens
gtttggtccctccatcctgatagtg

SEQ ID NO: 23150 - DNA, 25 bp, Homo sapiens
tcatggcctccgctagaaactaaca

SEQ ID NO: 23151 - DNA, 25 bp, Homo sapiens
ggctcccagtcctggtcatcaaaga

SEQ ID NO: 23152 - DNA, 25 bp, Homo sapiens
ctcaactaggggagctggtttcacc

SEQ ID NO: 23153 - DNA, 25 bp, Homo sapiens
gggctcagccaccatctcataaagg

SEQ ID NO: 23154 - DNA, 25 bp, Homo sapiens
ctgcggaacccacgaaaaacctctt

SEQ ID NO: 23155 - DNA, 25 bp, Homo sapiens
agggccacactgctaccgtgacaga

SEQ ID NO: 23156 - DNA, 25 bp, Homo sapiens
tccaggcctagtagagacagcattt

SEQ ID NO: 23157 - DNA, 25 bp, Homo sapiens
ggggccagccctctcaactattttg

SEQ ID NO: 23158 - DNA, 25 bp, Homo sapiens
ctcggttctggggatggctcagaaa

SEQ ID NO: 23159 - DNA, 25 bp, Homo sapiens
cagggcccttcaccaatgcagtaga

SEQ ID NO: 23160 - DNA, 25 bp, Homo sapiens
tatatataaatatattctctgtggt

SEQ ID NO: 23161 - DNA, 25 bp, Homo sapiens
cgtcctggaagtcaacgaagtccta

SEQ ID NO: 23162 - DNA, 25 bp, Homo sapiens
gggcgactctcaccaacaacttttc

SEQ ID NO: 23163 - DNA, 25 bp, Homo sapiens
tgggtctgaccaacacttcctgagg

SEQ ID NO: 23164 - DNA, 25 bp, Homo sapiens
cccattggctctcaggcagacgtca

SEQ ID NO: 23165 - DNA, 25 bp, Homo sapiens
cctgtcccagtggggctgatagagg

SEQ ID NO: 23166 - DNA, 25 bp, Homo sapiens
gcctgccgagctactttcaagttgg

SEQ ID NO: 23167 - DNA, 25 bp, Homo sapiens
cgtctaggaacacagaggtctcaga

SEQ ID NO: 23168 - DNA, 25 bp, Homo sapiens
ttgctgaaggataaaggaggagaaa

SEQ ID NO: 23169 - DNA, 25 bp, Homo sapiens
aacaatcctcttttgacctaatatt

SEQ ID NO: 23170 - DNA, 25 bp, Homo sapiens
aatctaggcgtgtgctaattcagca

SEQ ID NO: 23171 - DNA, 25 bp, Homo sapiens
caattcattgcaaaatttgagtagg

SEQ ID NO: 23172 - DNA, 25 bp, Homo sapiens
aaagtgcaaaactcggtggtaggtg

SEQ ID NO: 23173 - DNA, 25 bp, Homo sapiens
gagagatgctagaattcgtccaact

SEQ ID NO: 23174 - DNA, 25 bp, Homo sapiens
ctgatgaactcatgtcagtgggatt

SEQ ID NO: 23175 - DNA, 25 bp, Homo sapiens
cctccctgggtaaggctgcttttct

SEQ ID NO: 23176 - DNA, 25 bp, Homo sapiens
ggagcatcacttgaatgagccccta

SEQ ID NO: 23177 - DNA, 25 bp, Homo sapiens
cctgttctgagtgtggagcttatta

SEQ ID NO: 23178 - DNA, 25 bp, Homo sapiens
gcgacagtgtttgacgagagccgaa

SEQ ID NO: 23179 - DNA, 25 bp, Homo sapiens
gttctctcctggctccgctttaaaa

SEQ ID NO: 23180 - DNA, 25 bp, Homo sapiens
gcgctcagcgctggaaactttcctg

SEQ ID NO: 23181 - DNA, 25 bp, Homo sapiens
ggcttccaggaaagaactaggcttc

SEQ ID NO: 23182 - DNA, 25 bp, Homo sapiens
cagccgccttcatcaaccatggtga

SEQ ID NO: 23183 - DNA, 25 bp, Homo sapiens
ccagatttttggctccagagtcaga

SEQ ID NO: 23184 - DNA, 25 bp, Homo sapiens
agccgcctcggaatgccacttttag

SEQ ID NO: 23185 - DNA, 25 bp, Homo sapiens
tgagctctctgcctagcctggaacc

SEQ ID NO: 23186 - DNA, 25 bp, Homo sapiens
agccctgaccctttgtgactgctga

SEQ ID NO: 23187 - DNA, 25 bp, Homo sapiens
ttgtttcttcaggtccgctccagga

SEQ ID NO: 23188 - DNA, 25 bp, Homo sapiens
ctgaaattcaggtgctgttgccaca

SEQ ID NO: 23189 - DNA, 25 bp, Homo sapiens
gaggcgttcatgctggcacttccca

SEQ ID NO: 23190 - DNA, 25 bp, Homo sapiens
ggccttggttttctctgacctggga

SEQ ID NO: 23191 - DNA, 25 bp, Homo sapiens
gggctttgtcaagcggcactccttg

SEQ ID NO: 23192 - DNA, 25 bp, Homo sapiens
gccggcgaaaatcccgttcttgatc

SEQ ID NO: 23193 - DNA, 25 bp, Homo sapiens
tcccacccgggtcaggagaaacgca

SEQ ID NO: 23194 - DNA, 25 bp, Homo sapiens
ggtggtttcacctctagatccctgc

SEQ ID NO: 23195 - DNA, 25 bp, Homo sapiens
agatgaggtctcactcttttgccca

SEQ ID NO: 23196 - DNA, 25 bp, Homo sapiens
tctgtctcataaacagcagagctca

SEQ ID NO: 23197 - DNA, 25 bp, Homo sapiens
cagggtcacctccttggtttggcta

SEQ ID NO: 23198 - DNA, 25 bp, Homo sapiens
cctggcctgtggcttcatcagatgc

SEQ ID NO: 23199 - DNA, 25 bp, Homo sapiens
gcccacggcctgagacttgaaactg

SEQ ID NO: 23200 - DNA, 25 bp, Homo sapiens
gccggctcctgaagcaggttgatga

SEQ ID NO: 23201 - DNA, 25 bp, Homo sapiens
aggggctttgtgacctcatcggaca

SEQ ID NO: 23202 - DNA, 25 bp, Homo sapiens
caggctcaatcagcggtcaactttg

SEQ ID NO: 23203 - DNA, 25 bp, Homo sapiens
cacagagctgtctgggtgaccgacc

SEQ ID NO: 23204 - DNA, 25 bp, Homo sapiens
agccgagtcttcagcagcagcagtc

SEQ ID NO: 23205 - DNA, 25 bp, Homo sapiens
ggccctggatctcaaggctgaagtc

SEQ ID NO: 23206 - DNA, 25 bp, Homo sapiens
tcagggtctcagagcaggactgtta

SEQ ID NO: 23207 - DNA, 25 bp, Homo sapiens
acagctgtatctggccacaggctca

SEQ ID NO: 23208 - DNA, 25 bp, Homo sapiens
tctctgccggaatcccagggagtct

SEQ ID NO: 23209 - DNA, 25 bp, Homo sapiens
tttccattcagacggagcggctgcc

SEQ ID NO: 23210 - DNA, 25 bp, Homo sapiens
ggggcagagagtaaaagcctttctc

SEQ ID NO: 23211 - DNA, 25 bp, Homo sapiens
ccgggattcaccacagagcaagcga

SEQ ID NO: 23212 - DNA, 25 bp, Homo sapiens
cccttctgcactttggggagcatgt

SEQ ID NO: 23213 - DNA, 25 bp, Homo sapiens
cactcagtacccaccaggatgttta

SEQ ID NO: 23214 - DNA, 25 bp, Homo sapiens
ttcaggatctccgtttagccgactc

SEQ ID NO: 23215 - DNA, 25 bp, Homo sapiens
gtgaagcccttccacgtccgtagca

SEQ ID NO: 23216 - DNA, 25 bp, Homo sapiens
gggtctgctaccaccagcgtccaga

SEQ ID NO: 23217 - DNA, 25 bp, Homo sapiens
gacggacgtgtgttctcttctctga

SEQ ID NO: 23218 - DNA, 25 bp, Homo sapiens
aggggcagctgcacatctcagtctg

SEQ ID NO: 23219 - DNA, 25 bp, Homo sapiens
cctgtgcagctgtgttagacgttta

SEQ ID NO: 23220 - DNA, 25 bp, Homo sapiens
ggctgggcaaactctgactgtccta

SEQ ID NO: 23221 - DNA, 25 bp, Homo sapiens
gccagtgagtgcttcagtttaacca

SEQ ID NO: 23222 - DNA, 25 bp, Homo sapiens
agatctcgatgttgccggtgtacca

SEQ ID NO: 23223 - DNA, 25 bp, Homo sapiens
gggtggccctgacaacggatcataa

SEQ ID NO: 23224 - DNA, 25 bp, Homo sapiens
tcccgcctgacaagagttctaggtc

SEQ ID NO: 23225 - DNA, 25 bp, Homo sapiens
tgcctcagagccaagggtcctttta

SEQ ID NO: 23226 - DNA, 25 bp, Homo sapiens
gggcctcccactactggttgcaata

SEQ ID NO: 23227 - DNA, 25 bp, Homo sapiens
tggcctgtttgctccctagtgttta

SEQ ID NO: 23228 - DNA, 25 bp, Homo sapiens
ggggtttgtctagcacaccagcata

SEQ ID NO: 23229 - DNA, 25 bp, Homo sapiens
ggggccatctattccagctttattc

SEQ ID NO: 23230 - DNA, 25 bp, Homo sapiens
agcctcctgcccgtgtttgtgaata

SEQ ID NO: 23231 - DNA, 25 bp, Homo sapiens
ttcgatggccatcagcgctgcattg

SEQ ID NO: 23232 - DNA, 25 bp, Homo sapiens
caagtcttttttttaaagggacagg

SEQ ID NO: 23233 - DNA, 25 bp, Homo sapiens
cgaatgcctctggatagtcacaata

SEQ ID NO: 23234 - DNA, 25 bp, Homo sapiens
tggctccctttcattcttgtatctg

SEQ ID NO: 23235 - DNA, 25 bp, Homo sapiens
ctgtatggtattgtttcttaaatat

SEQ ID NO: 23236 - DNA, 25 bp, Homo sapiens
cttgagacgcaggaaggagttaccc

SEQ ID NO: 23237 - DNA, 25 bp, Homo sapiens
tttttattatgcacttcgctaaatt

SEQ ID NO: 23238 - DNA, 25 bp, Homo sapiens
aacaggctttgctgcccacaaggga

SEQ ID NO: 23239 - DNA, 25 bp, Homo sapiens
tcctccgtggaacttgctgggtaac

SEQ ID NO: 23240 - DNA, 25 bp, Homo sapiens
ggtctgtttaccttggagctcaatc

SEQ ID NO: 23241 - DNA, 25 bp, Homo sapiens
tgctcctgggcacttctcaacagta

SEQ ID NO: 23242 - DNA, 25 bp, Homo sapiens
gccaactctgccaacagactggagg

SEQ ID NO: 23243 - DNA, 25 bp, Homo sapiens
tggcagggacccaagtacgcacttt

SEQ ID NO: 23244 - DNA, 25 bp, Homo sapiens
cgaggccagcctgtaatgggtactt

SEQ ID NO: 23245 - DNA, 25 bp, Homo sapiens
agcgcgcacgttccttggttttcga

SEQ ID NO: 23246 - DNA, 25 bp, Homo sapiens
gccctcagtgtcagtaaaaacgtca

SEQ ID NO: 23247 - DNA, 25 bp, Homo sapiens
tgatcttcaattttagcctgctggg

SEQ ID NO: 23248 - DNA, 25 bp, Homo sapiens
aactctgcccttgtagctcctaaga

SEQ ID NO: 23249 - DNA, 25 bp, Homo sapiens
tttttggtaagaatttaaaaagtta

SEQ ID NO: 23250 - DNA, 25 bp, Homo sapiens
aggggcaccctttctttgctaagta

SEQ ID NO: 23251 - DNA, 25 bp, Homo sapiens
tcgtactctctgactgatgggcatc

SEQ ID NO: 23252 - DNA, 25 bp, Homo sapiens
taggctaaggaggttcaggaatgtt

SEQ ID NO: 23253 - DNA, 25 bp, Homo sapiens
tcccagtgaggttgagcatcctttc

SEQ ID NO: 23254 - DNA, 25 bp, Homo sapiens
ctgagagctcatcctaaagaaaatg

SEQ ID NO: 23255 - DNA, 25 bp, Homo sapiens
aaatgctaacgaatacatgtgagaa

SEQ ID NO: 23256 - DNA, 25 bp, Homo sapiens
tgggcttccttcagccaaagcgctg

SEQ ID NO: 23257 - DNA, 25 bp, Homo sapiens
gtcaagaaaagtgaaatgaaaaagc

SEQ ID NO: 23258 - DNA, 25 bp, Homo sapiens
tgccgatacaaaaatccagaagtgc

SEQ ID NO: 23259 - DNA, 25 bp, Homo sapiens
tctttctatatatacagttgggtgc

SEQ ID NO: 23260 - DNA, 25 bp, Homo sapiens
gaccttgtttgtgccgttcactgta

SEQ ID NO: 23261 - DNA, 25 bp, Homo sapiens
ggacacttcagtggacatcaccatg

SEQ ID NO: 23262 - DNA, 25 bp, Homo sapiens
ccctggcctgggaacaaatgcttca

SEQ ID NO: 23263 - DNA, 25 bp, Homo sapiens
ctcctttctggggaagtcacagttg

SEQ ID NO: 23264 - DNA, 25 bp, Homo sapiens
ccgtcacggtacttggctcctaaga

SEQ ID NO: 23265 - DNA, 25 bp, Homo sapiens
ccatagttgtgggtcataggtaatc

SEQ ID NO: 23266 - DNA, 25 bp, Homo sapiens
cgtgtcccaggaagatggctttgtc

SEQ ID NO: 23267 - DNA, 25 bp, Homo sapiens
taggcctcgtccagatccttctcgg

SEQ ID NO: 23268 - DNA, 25 bp, Homo sapiens
attgaaatattaaaggatgagattt

SEQ ID NO: 23269 - DNA, 25 bp, Homo sapiens
tgtgtgtgtctcacgggtcacaata

SEQ ID NO: 23270 - DNA, 25 bp, Homo sapiens
atgtttgaaggctgctccactgtca

SEQ ID NO: 23271 - DNA, 25 bp, Homo sapiens
tgtagcccatcagttccagcagttc

SEQ ID NO: 23272 - DNA, 25 bp, Homo sapiens
tcctggatcaccaaagcagcctctg

SEQ ID NO: 23273 - DNA, 25 bp, Homo sapiens
ggtctggctctctacggagttccta

SEQ ID NO: 23274 - DNA, 25 bp, Homo sapiens
cactgcacatgcttacggactgggc

SEQ ID NO: 23275 - DNA, 25 bp, Homo sapiens
cgtactggcccatgacatcgtagta

SEQ ID NO: 23276 - DNA, 25 bp, Homo sapiens
ttgaagggtctctgtccacagctga

SEQ ID NO: 23277 - DNA, 25 bp, Homo sapiens
gaggctgccatagagcttcccagga

SEQ ID NO: 23278 - DNA, 25 bp, Homo sapiens
acacgtcaaatggcatcaaccactc

SEQ ID NO: 23279 - DNA, 25 bp, Homo sapiens
cgccaggctccatggacacgatttc

SEQ ID NO: 23280 - DNA, 25 bp, Homo sapiens
tgacacagagcacagggcacccaga

SEQ ID NO: 23281 - DNA, 25 bp, Homo sapiens
aggatcccagaagctcagagaaagg

SEQ ID NO: 23282 - DNA, 25 bp, Homo sapiens
cagcgtcctagagaagtggggttca

SEQ ID NO: 23283 - DNA, 25 bp, Homo sapiens
tgttcccagcgcaaaatagactctc

SEQ ID NO: 23284 - DNA, 25 bp, Homo sapiens
ggtttggtccacagccacatatatg

SEQ ID NO: 23285 - DNA, 25 bp, Homo sapiens
gggctctgactcctgcgtgaagaca

SEQ ID NO: 23286 - DNA, 25 bp, Homo sapiens
ggcgggcattacctccttgaactgg

SEQ ID NO: 23287 - DNA, 25 bp, Homo sapiens
cgtcagcatgactggcacctcaagc

SEQ ID NO: 23288 - DNA, 25 bp, Homo sapiens
tcccggttaccatcagcctcagtta

SEQ ID NO: 23289 - DNA, 25 bp, Homo sapiens
ttccactcggtcagagcgtctacgc

SEQ ID NO: 23290 - DNA, 25 bp, Homo sapiens
ggggctgcagtgttctcctagagaa

SEQ ID NO: 23291 - DNA, 25 bp, Homo sapiens
ggagccttttcactgggtcctattc

SEQ ID NO: 23292 - DNA, 25 bp, Homo sapiens
ggtcggtctccaaatagcgccagca

SEQ ID NO: 23293 - DNA, 25 bp, Homo sapiens
cctcctcgggtggtgtttagaataa

SEQ ID NO: 23294 - DNA, 25 bp, Homo sapiens
tttattttcccaggggctgccagga

SEQ ID NO: 23295 - DNA, 25 bp, Homo sapiens
aaaccttctgtggttgggccgcctc

SEQ ID NO: 23296 - DNA, 25 bp, Homo sapiens
cgcgctgattctcctgcctgaagca

SEQ ID NO: 23297 - DNA, 25 bp, Homo sapiens
tctcccatttgtgttccggttcctc

SEQ ID NO: 23298 - DNA, 25 bp, Homo sapiens
cgcatgtcctgcttctgccatttga

SEQ ID NO: 23299 - DNA, 25 bp, Homo sapiens
tgctccctctcatccagtcattgtg

SEQ ID NO: 23300 - DNA, 25 bp, Homo sapiens
cagaggggccaaccctgtcgtattt

SEQ ID NO: 23301 - DNA, 25 bp, Homo sapiens
tcatttccgtgcttctgaggaaggc

SEQ ID NO: 23302 - DNA, 25 bp, Homo sapiens
tcatcgtagaaggtagcagccactc

SEQ ID NO: 23303 - DNA, 25 bp, Homo sapiens
acttcctggttctgtggcttggcca

SEQ ID NO: 23304 - DNA, 25 bp, Homo sapiens
gggcttttccctgcagcactgagca

SEQ ID NO: 23305 - DNA, 25 bp, Homo sapiens
atcccttttgtaatgcctctgcgtg

SEQ ID NO: 23306 - DNA, 25 bp, Homo sapiens
tgaccctcagaaaagccagtgtggc

SEQ ID NO: 23307 - DNA, 25 bp, Homo sapiens
ggccagtgaccgtttcccagacatt

SEQ ID NO: 23308 - DNA, 25 bp, Homo sapiens
agttcttgtagcttgtccgacgggg

SEQ ID NO: 23309 - DNA, 25 bp, Homo sapiens
ctggaggtgaaagggcgcgctggat

SEQ ID NO: 23310 - DNA, 25 bp, Homo sapiens
ggaggtagtccctgtcccttaaaga

SEQ ID NO: 23311 - DNA, 25 bp, Homo sapiens
caaggtcttcgtgtgcgacgcctac

SEQ ID NO: 23312 - DNA, 25 bp, Homo sapiens
agtgcggcctcaccttcaagtggtc

SEQ ID NO: 23313 - DNA, 25 bp, Homo sapiens
ggccagctctccaattccagtgggg

SEQ ID NO: 23314 - DNA, 25 bp, Homo sapiens
gactccagggagtgctacttgttca

SEQ ID NO: 23315 - DNA, 25 bp, Homo sapiens
ccctgacgctgacctacttatgttc

SEQ ID NO: 23316 - DNA, 25 bp, Homo sapiens
gggtctacctcctctctttgtccag

SEQ ID NO: 23317 - DNA, 25 bp, Homo sapiens
ccagagttagggtttgcgactccgc

SEQ ID NO: 23318 - DNA, 25 bp, Homo sapiens
gcctgcctccttggtgagtgatcca

SEQ ID NO: 23319 - DNA, 25 bp, Homo sapiens
aggtggctaactccctcttccaggg

SEQ ID NO: 23320 - DNA, 25 bp, Homo sapiens
gtggactcacctcttcacgggctgc

SEQ ID NO: 23321 - DNA, 25 bp, Homo sapiens
agacctcttgtctctgtggccaacc

SEQ ID NO: 23322 - DNA, 25 bp, Homo sapiens
gaccttcggagcagagttcattgga

SEQ ID NO: 23323 - DNA, 25 bp, Homo sapiens
ttgcagcctgcctgagcatagctta

SEQ ID NO: 23324 - DNA, 25 bp, Homo sapiens
agccagccttctcctctgcataagg

SEQ ID NO: 23325 - DNA, 25 bp, Homo sapiens
ggttctgcctgcctcctttcatata

SEQ ID NO: 23326 - DNA, 25 bp, Homo sapiens
gatcaccattcccagaggtctcgtt

SEQ ID NO: 23327 - DNA, 25 bp, Homo sapiens
gggtggtgaacaactgcatggaaaa

SEQ ID NO: 23328 - DNA, 25 bp, Homo sapiens
aggccctagctatctgttgactcca

SEQ ID NO: 23329 - DNA, 25 bp, Homo sapiens
gaggcatcacctctgctggaagcta

SEQ ID NO: 23330 - DNA, 25 bp, Homo sapiens
ctccctggagccatctgctgagatc

SEQ ID NO: 23331 - DNA, 25 bp, Homo sapiens
tccttgggctcaatggtgacacttc

SEQ ID NO: 23332 - DNA, 25 bp, Homo sapiens
ttctcacactcgtctttatgccgta

SEQ ID NO: 23333 - DNA, 25 bp, Homo sapiens
ttcacggtcggttttgctatatcac

SEQ ID NO: 23334 - DNA, 25 bp, Homo sapiens
actgcgccggtgaaatgaaaagaca

SEQ ID NO: 23335 - DNA, 25 bp, Homo sapiens
ctcacaggggagatgatattatttc

SEQ ID NO: 23336 - DNA, 25 bp, Homo sapiens
gcagcatttcttcaggcttcctgga

SEQ ID NO: 23337 - DNA, 25 bp, Homo sapiens
taccttttaccaggtcggggagctc

SEQ ID NO: 23338 - DNA, 25 bp, Homo sapiens
ggcatggcctgtggactaactccta

SEQ ID NO: 23339 - DNA, 25 bp, Homo sapiens
tccgacagtgcattctgagagtaca

SEQ ID NO: 23340 - DNA, 25 bp, Homo sapiens
acccttgttctatcagcgtgcagtg

SEQ ID NO: 23341 - DNA, 25 bp, Homo sapiens
cagtttttaagaggcctccaggatc

SEQ ID NO: 23342 - DNA, 25 bp, Homo sapiens
accgtttccgtcgttggtagccaaa

SEQ ID NO: 23343 - DNA, 25 bp, Homo sapiens
cctagatggcataagtcactgtgac

SEQ ID NO: 23344 - DNA, 25 bp, Homo sapiens
tgccctgcaggaacaagtggaaatc

SEQ ID NO: 23345 - DNA, 25 bp, Homo sapiens
cccagaagagggtcaggctcctcct

SEQ ID NO: 23346 - DNA, 25 bp, Homo sapiens
acccatgacgtctcgaggctctgtg

SEQ ID NO: 23347 - DNA, 25 bp, Homo sapiens
acctccttggggacagaactctcct

SEQ ID NO: 23348 - DNA, 25 bp, Homo sapiens
gacgtgtgaccctctccaggatttg

SEQ ID NO: 23349 - DNA, 25 bp, Homo sapiens
tcatggtgatgaggcagtgaccatc

SEQ ID NO: 23350 - DNA, 25 bp, Homo sapiens
tgcgaccacgcctgcctgtactttt

SEQ ID NO: 23351 - DNA, 25 bp, Homo sapiens
ggctctggacacctcccatgggaca

SEQ ID NO: 23352 - DNA, 25 bp, Homo sapiens
aagaaagaagcaaaaaagataatac

SEQ ID NO: 23353 - DNA, 25 bp, Homo sapiens
tgggacacattcttggcctaacagc

SEQ ID NO: 23354 - DNA, 25 bp, Homo sapiens
acactcactggcgtacacactcatg

SEQ ID NO: 23355 - DNA, 25 bp, Homo sapiens
gcacacatgcatatagagttccttg

SEQ ID NO: 23356 - DNA, 25 bp, Homo sapiens
aggctgcgccacaccagacaggcta

SEQ ID NO: 23357 - DNA, 25 bp, Homo sapiens
caggtgctccctgatggcgatcaca

SEQ ID NO: 23358 - DNA, 25 bp, Homo sapiens
ccctgtagggcctgtgacttgattg

SEQ ID NO: 23359 - DNA, 25 bp, Homo sapiens
gacctcgtttggcttctcatgacag

SEQ ID NO: 23360 - DNA, 25 bp, Homo sapiens
ggccgtgtgtaactgggataaattc

SEQ ID NO: 23361 - DNA, 25 bp, Homo sapiens
cggtgccctgagcttcttaacgaca

SEQ ID NO: 23362 - DNA, 25 bp, Homo sapiens
ggttgcctccctattttccgtttca

SEQ ID NO: 23363 - DNA, 25 bp, Homo sapiens
ttcctcagactgtttgccgggcatc

SEQ ID NO: 23364 - DNA, 25 bp, Homo sapiens
catcgtgtgatgactcctggaactg

SEQ ID NO: 23365 - DNA, 25 bp, Homo sapiens
ccagtgagtgcctccctgctgtaag

SEQ ID NO: 23366 - DNA, 25 bp, Homo sapiens
tgccgtgtcgtatgtagtgagctca

SEQ ID NO: 23367 - DNA, 25 bp, Homo sapiens
caggttttcagatgtgtgttgctcc

SEQ ID NO: 23368 - DNA, 25 bp, Homo sapiens
aggagccattcacgtgttttaagca

SEQ ID NO: 23369 - DNA, 25 bp, Homo sapiens
tttaacctagcagcaacactggtgg

SEQ ID NO: 23370 - DNA, 25 bp, Homo sapiens
tcttacatttatggctttgtttcta

SEQ ID NO: 23371 - DNA, 25 bp, Homo sapiens
cccaaggggtgatgctttgttgaca

SEQ ID NO: 23372 - DNA, 25 bp, Homo sapiens
cacacctatgtgtagtggcctaata

SEQ ID NO: 23373 - DNA, 25 bp, Homo sapiens
cacctgtgctccagtgctgagaatc

SEQ ID NO: 23374 - DNA, 25 bp, Homo sapiens
ccctgagtctgctggtactgtcttg

SEQ ID NO: 23375 - DNA, 25 bp, Homo sapiens
ccaggatctaaaacgtgtgcccata

SEQ ID NO: 23376 - DNA, 25 bp, Homo sapiens
tggtgaagaatccctgtccaggcag

SEQ ID NO: 23377 - DNA, 25 bp, Homo sapiens
ccatcctcagaagtgactgcagagt

SEQ ID NO: 23378 - DNA, 25 bp, Homo sapiens
cctctgggtgctatgtagagagtca

SEQ ID NO: 23379 - DNA, 25 bp, Homo sapiens
ttctttcagcctgggagcctcgatc

SEQ ID NO: 23380 - DNA, 25 bp, Homo sapiens
gccgccagaggctgatctttgagca

SEQ ID NO: 23381 - DNA, 25 bp, Homo sapiens
cctcaccatcttggcagcatgcatg

SEQ ID NO: 23382 - DNA, 25 bp, Homo sapiens
catcctttacggttttgcagcattc

SEQ ID NO: 23383 - DNA, 25 bp, Homo sapiens
ccaaaacagcaatttgaataaccat

SEQ ID NO: 23384 - DNA, 25 bp, Homo sapiens
ggctccagccattgcatccacagtg

SEQ ID NO: 23385 - DNA, 25 bp, Homo sapiens
tccaccagcagtttggggcacaggc

SEQ ID NO: 23386 - DNA, 25 bp, Homo sapiens
ggaatcccttctagttgtcttgtaa

SEQ ID NO: 23387 - DNA, 25 bp, Homo sapiens
tctctgaaagggtaaaagtggcata

SEQ ID NO: 23388 - DNA, 25 bp, Homo sapiens
ctgcctgttatcagagagtctcctg

SEQ ID NO: 23389 - DNA, 25 bp, Homo sapiens
cagaaggccttgtatcccgtgcatg

SEQ ID NO: 23390 - DNA, 25 bp, Homo sapiens
gtcctgcatgtgttgatgccacctg

SEQ ID NO: 23391 - DNA, 25 bp, Homo sapiens
gtggccctggaaacaaacctgtctc

SEQ ID NO: 23392 - DNA, 25 bp, Homo sapiens
cagggcccaaatagtctgttcagta

SEQ ID NO: 23393 - DNA, 25 bp, Homo sapiens
acagggctgtgcatttaccaaattc

SEQ ID NO: 23394 - DNA, 25 bp, Homo sapiens
cccagagctgggatatggtcagtca

SEQ ID NO: 23395 - DNA, 25 bp, Homo sapiens
ccacagcggtgagaagccgtacata

SEQ ID NO: 23396 - DNA, 25 bp, Homo sapiens
tgaacaggtttcctctcagcagtcc

SEQ ID NO: 23397 - DNA, 25 bp, Homo sapiens
gagccactgctcaatccagatgttg

SEQ ID NO: 23398 - DNA, 25 bp, Homo sapiens
tcctgtgagccttgcaagacaaata

SEQ ID NO: 23399 - DNA, 25 bp, Homo sapiens
ctcggctatgtaaagggcaggaccc

SEQ ID NO: 23400 - DNA, 25 bp, Homo sapiens
tcccacccataatcagagggcacta

SEQ ID NO: 23401 - DNA, 25 bp, Homo sapiens
gctgggccaccaacctctatgtatc

SEQ ID NO: 23402 - DNA, 25 bp, Homo sapiens
tggcctccgtgctgaccaacgtcaa

SEQ ID NO: 23403 - DNA, 25 bp, Homo sapiens
gatggttgccgtttgagacttccta

SEQ ID NO: 23404 - DNA, 25 bp, Homo sapiens
cttgggtaaccatgctcagccttta

SEQ ID NO: 23405 - DNA, 25 bp, Homo sapiens
caaagcaaagtgtcgaggtctccta

SEQ ID NO: 23406 - DNA, 25 bp, Homo sapiens
tgctgtccctgaccagcattcagtg

SEQ ID NO: 23407 - DNA, 25 bp, Homo sapiens
gtgagagaatgaccatgtggctacc

SEQ ID NO: 23408 - DNA, 25 bp, Homo sapiens
gcagcttcacggcacaccagagata

SEQ ID NO: 23409 - DNA, 25 bp, Homo sapiens
ttcagctctgggagaaacaggcctc

SEQ ID NO: 23410 - DNA, 25 bp, Homo sapiens
ctacctggggttctacttgcagaaa

SEQ ID NO: 23411 - DNA, 25 bp, Homo sapiens
ccttacaaagtgtgaccggggccct

SEQ ID NO: 23412 - DNA, 25 bp, Homo sapiens
tccgaaggcctttgcacagagctcc

SEQ ID NO: 23413 - DNA, 25 bp, Homo sapiens
agcacagcttcctgaacagggtata

SEQ ID NO: 23414 - DNA, 25 bp, Homo sapiens
cgggcccattccctctatgtcaaga

SEQ ID NO: 23415 - DNA, 25 bp, Homo sapiens
tcacccatttggtcgttgagacata

SEQ ID NO: 23416 - DNA, 25 bp, Homo sapiens
ctttatgatagaaaacatttgaaga

SEQ ID NO: 23417 - DNA, 25 bp, Homo sapiens
ttatctttaaaatatggctggaggc

SEQ ID NO: 23418 - DNA, 25 bp, Homo sapiens
ctattggttgataatactgatacgc

SEQ ID NO: 23419 - DNA, 25 bp, Homo sapiens
gccctgggagtccaaagacatttta

SEQ ID NO: 23420 - DNA, 25 bp, Homo sapiens
ccaggaccgtggaagtcccagattc

SEQ ID NO: 23421 - DNA, 25 bp, Homo sapiens
tgagcccaggaacccaatcagattt

SEQ ID NO: 23422 - DNA, 25 bp, Homo sapiens
tgctcccagcaaagggtacgacctc

SEQ ID NO: 23423 - DNA, 25 bp, Homo sapiens
tgccgctcagtagtggatttgctcc

SEQ ID NO: 23424 - DNA, 25 bp, Homo sapiens
gaggactctccatggtgcatcagca

SEQ ID NO: 23425 - DNA, 25 bp, Homo sapiens
tgctggggacacaaccatgtattcc

SEQ ID NO: 23426 - DNA, 25 bp, Homo sapiens
ggggttcacctcttttcagactttc

SEQ ID NO: 23427 - DNA, 25 bp, Homo sapiens
gtgacagaacctttcagcccattgg

SEQ ID NO: 23428 - DNA, 25 bp, Homo sapiens
ctccctggggtaagagcccatccta

SEQ ID NO: 23429 - DNA, 25 bp, Homo sapiens
attggagttccagctgaaggccttg

SEQ ID NO: 23430 - DNA, 25 bp, Homo sapiens
cgccagcatcgcagaaggactcaaa

SEQ ID NO: 23431 - DNA, 25 bp, Homo sapiens
tagccactgctcctgcgtgtaggcc

SEQ ID NO: 23432 - DNA, 25 bp, Homo sapiens
ccctccaggaagtgttttaaaaatt

SEQ ID NO: 23433 - DNA, 25 bp, Homo sapiens
aaacgacatctgatttcaataaaaa

SEQ ID NO: 23434 - DNA, 25 bp, Homo sapiens
tgcgtccactaggagcggcctgaaa

SEQ ID NO: 23435 - DNA, 25 bp, Homo sapiens
cgtgggacttctctctgaactgtta

SEQ ID NO: 23436 - DNA, 25 bp, Homo sapiens
ctgagcttgtcctgtgtctcctctt

SEQ ID NO: 23437 - DNA, 25 bp, Homo sapiens
aagggaaccctttctgccgcgacta

SEQ ID NO: 23438 - DNA, 25 bp, Homo sapiens
tgaaggccttttcgcacagtgggca

SEQ ID NO: 23439 - DNA, 25 bp, Homo sapiens
ctcggggataaccagctcagggttc

SEQ ID NO: 23440 - DNA, 25 bp, Homo sapiens
gcctggcgcctgctattactatttt

SEQ ID NO: 23441 - DNA, 25 bp, Homo sapiens
aggtttctcagcctcacacgtgata

SEQ ID NO: 23442 - DNA, 25 bp, Homo sapiens
ccacctggtggcctgaaataacttg

SEQ ID NO: 23443 - DNA, 25 bp, Homo sapiens
caggtcttgaccatgcagcttccca

SEQ ID NO: 23444 - DNA, 25 bp, Homo sapiens
ctaaaacccaacctgaattgtaaaa

SEQ ID NO: 23445 - DNA, 25 bp, Homo sapiens
gcatagtttccacatcagaggctta

SEQ ID NO: 23446 - DNA, 25 bp, Homo sapiens
cagggcaattccttacaggggcaca

SEQ ID NO: 23447 - DNA, 25 bp, Homo sapiens
gtcacccaggatcaggcaggttcca

SEQ ID NO: 23448 - DNA, 25 bp, Homo sapiens
cgcccagcctttctagttgtcctta

SEQ ID NO: 23449 - DNA, 25 bp, Homo sapiens
gggcttcaatgacacccagcacgga

SEQ ID NO: 23450 - DNA, 25 bp, Homo sapiens
gtccggctcctagttgattctaaca

SEQ ID NO: 23451 - DNA, 25 bp, Homo sapiens
cttgagcctatgtggaagaacttcc

SEQ ID NO: 23452 - DNA, 25 bp, Homo sapiens
atcctggatgactcggccacatttc

SEQ ID NO: 23453 - DNA, 25 bp, Homo sapiens
ctggggtcctcatccagtctgaaga

SEQ ID NO: 23454 - DNA, 25 bp, Homo sapiens
tcctggagtcgcctcgtaaaggtta

SEQ ID NO: 23455 - DNA, 25 bp, Homo sapiens
agcgctggccagacttttttcttta

SEQ ID NO: 23456 - DNA, 25 bp, Homo sapiens
cacggcctttcttggtcctttgcga

SEQ ID NO: 23457 - DNA, 25 bp, Homo sapiens
ccgtacggttttacacatacccttt

SEQ ID NO: 23458 - DNA, 25 bp, Homo sapiens
caggggtttatttcggggggtccaa

SEQ ID NO: 23459 - DNA, 25 bp, Homo sapiens
tgggccaaacccttcctggggaatt

SEQ ID NO: 23460 - DNA, 25 bp, Homo sapiens
ctagtctccttagattcccactctt

SEQ ID NO: 23461 - DNA, 25 bp, Homo sapiens
ttcgggaacacatttggcagaggtc

SEQ ID NO: 23462 - DNA, 25 bp, Homo sapiens
tggccaagtccaaccgctgattttc

SEQ ID NO: 23463 - DNA, 25 bp, Homo sapiens
ggtgcctatctctgctcctctgtgg

SEQ ID NO: 23464 - DNA, 25 bp, Homo sapiens
gtctcgggcgtctacatcttcttcc

SEQ ID NO: 23465 - DNA, 25 bp, Homo sapiens
cgtggcttctaggatcctcccaata

SEQ ID NO: 23466 - DNA, 25 bp, Homo sapiens
cccagcctcatagggaagaaacctg

SEQ ID NO: 23467 - DNA, 25 bp, Homo sapiens
gggtctcagagatcctcctcattgc

SEQ ID NO: 23468 - DNA, 25 bp, Homo sapiens
gggttccgccattctttcctcaatg

SEQ ID NO: 23469 - DNA, 25 bp, Homo sapiens
tgaggtcctctcatcccagggagta

SEQ ID NO: 23470 - DNA, 25 bp, Homo sapiens
ctaaaatgaggtccaatgaagtagt

SEQ ID NO: 23471 - DNA, 25 bp, Homo sapiens
attttcaagaacgatttgaggatat

SEQ ID NO: 23472 - DNA, 25 bp, Homo sapiens
ggggtgtccactcagccacttgtta

SEQ ID NO: 23473 - DNA, 25 bp, Homo sapiens
atgtagttcacgtcccgcttcagga

SEQ ID NO: 23474 - DNA, 25 bp, Homo sapiens
cttggccctgcacatagatggcatc

SEQ ID NO: 23475 - DNA, 25 bp, Homo sapiens
ggccaggcttgagccatgaatttta

SEQ ID NO: 23476 - DNA, 25 bp, Homo sapiens
tgtttcttttactacctgtcacccg

SEQ ID NO: 23477 - DNA, 25 bp, Homo sapiens
tttcagcagttctatggagtccttc

SEQ ID NO: 23478 - DNA, 25 bp, Homo sapiens
agcctgtgtgggaaaaccttcacta

SEQ ID NO: 23479 - DNA, 25 bp, Homo sapiens
atggactgtctcatactgctctgga

SEQ ID NO: 23480 - DNA, 25 bp, Homo sapiens
tgtgccttttgtgacccagccagta

SEQ ID NO: 23481 - DNA, 25 bp, Homo sapiens
tcctacctcagcttcacaaaaatcc

SEQ ID NO: 23482 - DNA, 25 bp, Homo sapiens
tgaacctcttttccttataaactat

SEQ ID NO: 23483 - DNA, 25 bp, Homo sapiens
cactgtcggtgtaaagggcttcata

SEQ ID NO: 23484 - DNA, 25 bp, Homo sapiens
tcttggccactcacacagaggattg

SEQ ID NO: 23485 - DNA, 25 bp, Homo sapiens
ggtctgaaccagttatgcctgccta

SEQ ID NO: 23486 - DNA, 25 bp, Homo sapiens
tatcatgagatcttgccaggtggca

SEQ ID NO: 23487 - DNA, 25 bp, Homo sapiens
gcttccctgtgccatgagtactctg

SEQ ID NO: 23488 - DNA, 25 bp, Homo sapiens
gtgcccactctgttggccagcaaga

SEQ ID NO: 23489 - DNA, 25 bp, Homo sapiens
tgagatggccctgcaaaggttcctg

SEQ ID NO: 23490 - DNA, 25 bp, Homo sapiens
tacggtctttctccagtgtgaactc

SEQ ID NO: 23491 - DNA, 25 bp, Homo sapiens
ctcagccaggtgcaaaatgtctttc

SEQ ID NO: 23492 - DNA, 25 bp, Homo sapiens
tctcattgggaaagagacagaatct

SEQ ID NO: 23493 - DNA, 25 bp, Homo sapiens
cgggatccattcctggtccaagcca

SEQ ID NO: 23494 - DNA, 25 bp, Homo sapiens
ctgcatgcagtgtccacacacaagc

SEQ ID NO: 23495 - DNA, 25 bp, Homo sapiens
tgggacagccttccagatctcattc

SEQ ID NO: 23496 - DNA, 25 bp, Homo sapiens
cggagtgtaagacgctggccaatca

SEQ ID NO: 23497 - DNA, 25 bp, Homo sapiens
acttggacttgaccctgacctgagc

SEQ ID NO: 23498 - DNA, 25 bp, Homo sapiens
tcttccaagaatgtggggctcctta

SEQ ID NO: 23499 - DNA, 25 bp, Homo sapiens
tatccctggctgctgcataaacaac

SEQ ID NO: 23500 - DNA, 25 bp, Homo sapiens
cctggacttcgctcactgcatggta

SEQ ID NO: 23501 - DNA, 25 bp, Homo sapiens
cttcaccctggagaaaagccttttg

SEQ ID NO: 23502 - DNA, 25 bp, Homo sapiens
ggtgacttcccagttgctcaatgta

SEQ ID NO: 23503 - DNA, 25 bp, Homo sapiens
accacgttggctagggtcaatcagc

SEQ ID NO: 23504 - DNA, 25 bp, Homo sapiens
ttgcttgaaatgttaataatgcctc

SEQ ID NO: 23505 - DNA, 25 bp, Homo sapiens
acctgctggtgttgccttctggaac

SEQ ID NO: 23506 - DNA, 25 bp, Homo sapiens
tcagtgcaaactcctgcgtccaggg

SEQ ID NO: 23507 - DNA, 25 bp, Homo sapiens
cctatgacgactggtggggatcatc

SEQ ID NO: 23508 - DNA, 25 bp, Homo sapiens
agccctgactcctgctctctgttgg

SEQ ID NO: 23509 - DNA, 25 bp, Homo sapiens
ggcaaccaccgtttctctgcgttta

SEQ ID NO: 23510 - DNA, 25 bp, Homo sapiens
ggcgtccttatgcttgcgcacagtg

SEQ ID NO: 23511 - DNA, 25 bp, Homo sapiens
tgtcagcctcctcctcggaaaaaga

SEQ ID NO: 23512 - DNA, 25 bp, Homo sapiens
gggtcatttgcttcctgtggcctta

SEQ ID NO: 23513 - DNA, 25 bp, Homo sapiens
gcagctgtttcctattgcttgtaac

SEQ ID NO: 23514 - DNA, 25 bp, Homo sapiens
gaatgaaggaacctacaaaccagct

SEQ ID NO: 23515 - DNA, 25 bp, Homo sapiens
cagtcatcttatagctcacacgagg

SEQ ID NO: 23516 - DNA, 25 bp, Homo sapiens
tgcctctaagcatttgatcaaatca

SEQ ID NO: 23517 - DNA, 25 bp, Homo sapiens
gatgagctcccttgctctacaagga

SEQ ID NO: 23518 - DNA, 25 bp, Homo sapiens
cactgctggtgttgcctcttggaac

SEQ ID NO: 23519 - DNA, 25 bp, Homo sapiens
tcagtgcaaactcctgcgtccaggg

SEQ ID NO: 23520 - DNA, 25 bp, Homo sapiens
gccaggacttgttctagcttgcttg

SEQ ID NO: 23521 - DNA, 25 bp, Homo sapiens
tgccctggggatgaatgagctattc

SEQ ID NO: 23522 - DNA, 25 bp, Homo sapiens
agtgcccagtgtagtcagtgccata

SEQ ID NO: 23523 - DNA, 25 bp, Homo sapiens
ggcgtccttatgcttgcgcacagtg

SEQ ID NO: 23524 - DNA, 25 bp, Homo sapiens
atccaagacttcctaggggccagcc

SEQ ID NO: 23525 - DNA, 25 bp, Homo sapiens
cctggacttggcttcaacctgggta

SEQ ID NO: 23526 - DNA, 25 bp, Homo sapiens
ctgcctggggaacaactactgaaga

SEQ ID NO: 23527 - DNA, 25 bp, Homo sapiens
cccactgtacagacgcgcaagttta

SEQ ID NO: 23528 - DNA, 25 bp, Homo sapiens
gcgctggaactctgtgatgactgtc

SEQ ID NO: 23529 - DNA, 25 bp, Homo sapiens
actcctggaggaagtgtggacattc

SEQ ID NO: 23530 - DNA, 25 bp, Homo sapiens
gggtttcttcagaggccacctgtta

SEQ ID NO: 23531 - DNA, 25 bp, Homo sapiens
tgggacctgagccacccactcatgg

SEQ ID NO: 23532 - DNA, 25 bp, Homo sapiens
gctccctgtgtgtgttagaatttta

SEQ ID NO: 23533 - DNA, 25 bp, Homo sapiens
tcacaggggatggtttcaggaaatg

SEQ ID NO: 23534 - DNA, 25 bp, Homo sapiens
cctgcagtacccagtgctatgatta

SEQ ID NO: 23535 - DNA, 25 bp, Homo sapiens
ctgtagctcatggccccttccccca

SEQ ID NO: 23536 - DNA, 25 bp, Homo sapiens
atactaggatatttttaatgattta

SEQ ID NO: 23537 - DNA, 25 bp, Homo sapiens
taacaagtattggttaggcagcaca

SEQ ID NO: 23538 - DNA, 25 bp, Homo sapiens
caccctgttcatggcactgtgagga

SEQ ID NO: 23539 - DNA, 25 bp, Homo sapiens
accaggacctgtgcatatgatgagc

SEQ ID NO: 23540 - DNA, 25 bp, Homo sapiens
ggggctgatctagctacatgatccc

SEQ ID NO: 23541 - DNA, 25 bp, Homo sapiens
ttgagaagtcctgcctaccagtgtc

SEQ ID NO: 23542 - DNA, 25 bp, Homo sapiens
ccatgagggcatccaccgatacttc

SEQ ID NO: 23543 - DNA, 25 bp, Homo sapiens
acagcagcttgggacaggagaaaca

SEQ ID NO: 23544 - DNA, 25 bp, Homo sapiens
ttggttgtcactcctgctgaatgta

SEQ ID NO: 23545 - DNA, 25 bp, Homo sapiens
actcatggggaaagcacctctcttg

SEQ ID NO: 23546 - DNA, 25 bp, Homo sapiens
ttctgtctcaaagtggcccatagcc

SEQ ID NO: 23547 - DNA, 25 bp, Homo sapiens
ttggcgttacacagacagggtcatc

SEQ ID NO: 23548 - DNA, 25 bp, Homo sapiens
taacctgttgcaagaagtccacctg

SEQ ID NO: 23549 - DNA, 25 bp, Homo sapiens
gagcagctcgttccagccaagcaga

SEQ ID NO: 23550 - DNA, 25 bp, Homo sapiens
gcctcacctggggaatgttacacaa

SEQ ID NO: 23551 - DNA, 25 bp, Homo sapiens
tgactcgaagctcaaatcactcttg

SEQ ID NO: 23552 - DNA, 25 bp, Homo sapiens
atggatggctggacagtgacatgca

SEQ ID NO: 23553 - DNA, 25 bp, Homo sapiens
gggaacagagacctacaagcaaata

SEQ ID NO: 23554 - DNA, 25 bp, Homo sapiens
atgataaaagtttgaaaacaaacag

SEQ ID NO: 23555 - DNA, 25 bp, Homo sapiens
atgataatagctggaaaacacaaaa

SEQ ID NO: 23556 - DNA, 25 bp, Homo sapiens
ggtgggtgtcccttctcaaaagtga

SEQ ID NO: 23557 - DNA, 25 bp, Homo sapiens
agggcttctccatgtgatcccagca

SEQ ID NO: 23558 - DNA, 25 bp, Homo sapiens
gctcgaaggcatctacaaaggtgtc

SEQ ID NO: 23559 - DNA, 25 bp, Homo sapiens
tccacctctggctttgacgacgatg

SEQ ID NO: 23560 - DNA, 25 bp, Homo sapiens
caggtgctcacagcttcgtggttta

SEQ ID NO: 23561 - DNA, 25 bp, Homo sapiens
cccgggatcccttgcctatcagaga

SEQ ID NO: 23562 - DNA, 25 bp, Homo sapiens
ggcacctggctcagatcacacactt

SEQ ID NO: 23563 - DNA, 25 bp, Homo sapiens
gtttttccgggagctgaacgtcttg

SEQ ID NO: 23564 - DNA, 25 bp, Homo sapiens
agcgaaccgctgtacaggaactcta

SEQ ID NO: 23565 - DNA, 25 bp, Homo sapiens
gctgcctcagaaccaggtcacctta

SEQ ID NO: 23566 - DNA, 25 bp, Homo sapiens
cttgcgcatcaacccgagagacttg

SEQ ID NO: 23567 - DNA, 25 bp, Homo sapiens
ccctgagctagaccctgtgagattc

SEQ ID NO: 23568 - DNA, 25 bp, Homo sapiens
ccagggcctccacacagtgagagtc

SEQ ID NO: 23569 - DNA, 25 bp, Homo sapiens
ggacccactgggtctgctttcactg

SEQ ID NO: 23570 - DNA, 25 bp, Homo sapiens
ccttttctctctaaagatcttttca

SEQ ID NO: 23571 - DNA, 25 bp, Homo sapiens
ggcgatgtggcctgcaaatattaaa

SEQ ID NO: 23572 - DNA, 25 bp, Homo sapiens
caagttgccgttgggatttaccaga

SEQ ID NO: 23573 - DNA, 25 bp, Homo sapiens
cctggctggttccatcccgaaaaga

SEQ ID NO: 23574 - DNA, 25 bp, Homo sapiens
ccctgcctgctttgtgtttaagata

SEQ ID NO: 23575 - DNA, 25 bp, Homo sapiens
gagctcatcttttaacctcataaag

SEQ ID NO: 23576 - DNA, 25 bp, Homo sapiens
cctcgtctccttctcctttttaaat

SEQ ID NO: 23577 - DNA, 25 bp, Homo sapiens
gagggcacccaccaagtccaggagt

SEQ ID NO: 23578 - DNA, 25 bp, Homo sapiens
ctgtcagccttcaagactggagtga

SEQ ID NO: 23579 - DNA, 25 bp, Homo sapiens
gaggtgctccctgcttgcatctcta

SEQ ID NO: 23580 - DNA, 25 bp, Homo sapiens
aaatgtactttaataatagacacgg

SEQ ID NO: 23581 - DNA, 25 bp, Homo sapiens
gccataccctagagttgtcaccaga

SEQ ID NO: 23582 - DNA, 25 bp, Homo sapiens
aggtgcactagcgtcctgccatata

SEQ ID NO: 23583 - DNA, 25 bp, Homo sapiens
ggctgtggaaagtgctcatcaaata

SEQ ID NO: 23584 - DNA, 25 bp, Homo sapiens
ttcaacgcgctgatagtccctaggc

SEQ ID NO: 23585 - DNA, 25 bp, Homo sapiens
cagactctgcttccctgagacagga

SEQ ID NO: 23586 - DNA, 25 bp, Homo sapiens
tgcttccctcctcagacaggattct

SEQ ID NO: 23587 - DNA, 25 bp, Homo sapiens
gaccctctttccctcagacaggatt

SEQ ID NO: 23588 - DNA, 25 bp, Homo sapiens
gtgggatttcacagactcattgctc

SEQ ID NO: 23589 - DNA, 25 bp, Homo sapiens
ccctcttgggatggagactctcctc

SEQ ID NO: 23590 - DNA, 25 bp, Homo sapiens
tgccctgtttgcactcggcctgtag

SEQ ID NO: 23591 - DNA, 25 bp, Homo sapiens
ccatgtgtgccctcagttgctttta

SEQ ID NO: 23592 - DNA, 25 bp, Homo sapiens
tcctctgggcccttggattgtaaga

SEQ ID NO: 23593 - DNA, 25 bp, Homo sapiens
atccgccaggtgtctgacgtacaga

SEQ ID NO: 23594 - DNA, 25 bp, Homo sapiens
cagagggttctgctttgttcacagc

SEQ ID NO: 23595 - DNA, 25 bp, Homo sapiens
gccatgtgctccctgacctgaagga

SEQ ID NO: 23596 - DNA, 25 bp, Homo sapiens
gggcctggtttattgactgtatcta

SEQ ID NO: 23597 - DNA, 25 bp, Homo sapiens
tccctccgcaggttcttaagccgtt

SEQ ID NO: 23598 - DNA, 25 bp, Homo sapiens
ctggctaacccaatggtcactggtc

SEQ ID NO: 23599 - DNA, 25 bp, Homo sapiens
ttgtctggtccatgcccaactcttg

SEQ ID NO: 23600 - DNA, 25 bp, Homo sapiens
gggtcacgcttctctttctgggatc

SEQ ID NO: 23601 - DNA, 25 bp, Homo sapiens
gttctgctcaaacagccgccggttg

SEQ ID NO: 23602 - DNA, 25 bp, Homo sapiens
atcacacgtcttgggcaggttcagc

SEQ ID NO: 23603 - DNA, 25 bp, Homo sapiens
gagattccgagtccctagtagcaga

SEQ ID NO: 23604 - DNA, 25 bp, Homo sapiens
ttgcaggtcacttccggcgactttc

SEQ ID NO: 23605 - DNA, 25 bp, Homo sapiens
ggtttgctgctgaatctactcctga

SEQ ID NO: 23606 - DNA, 25 bp, Homo sapiens
ctggtctcagtgtcaagggaaaatc

SEQ ID NO: 23607 - DNA, 25 bp, Homo sapiens
gctgctggtccattccctctgtaaa

SEQ ID NO: 23608 - DNA, 25 bp, Homo sapiens
ccaaaggacttgtcgcccgtgtgta

SEQ ID NO: 23609 - DNA, 25 bp, Homo sapiens
ggcttacactacctggacctgcgga

SEQ ID NO: 23610 - DNA, 25 bp, Homo sapiens
ggttctgtgtagctacccaaagatg

SEQ ID NO: 23611 - DNA, 25 bp, Homo sapiens
catgtgtgttttaaaggagaggaat

SEQ ID NO: 23612 - DNA, 25 bp, Homo sapiens
aaggggcattccactgtatactgtc

SEQ ID NO: 23613 - DNA, 25 bp, Homo sapiens
tggcctagccacattgccctatgga

SEQ ID NO: 23614 - DNA, 25 bp, Homo sapiens
cctctggtccgtaatgcttcgatga

SEQ ID NO: 23615 - DNA, 25 bp, Homo sapiens
caggcagcctgagtgagtttccacc

SEQ ID NO: 23616 - DNA, 25 bp, Homo sapiens
caggggcctgccttgtaaataccta

SEQ ID NO: 23617 - DNA, 25 bp, Homo sapiens
cttgggcctgtgcaaagtctctgac

SEQ ID NO: 23618 - DNA, 25 bp, Homo sapiens
ggggccaagcctccactcttcaagg

SEQ ID NO: 23619 - DNA, 25 bp, Homo sapiens
taacctggggacacgactcgacatc

SEQ ID NO: 23620 - DNA, 25 bp, Homo sapiens
ggagtccagatgctgtccagttata

SEQ ID NO: 23621 - DNA, 25 bp, Homo sapiens
gcgtcctccggaaaactgcactgtg

SEQ ID NO: 23622 - DNA, 25 bp, Homo sapiens
tgtgtgctgtgcctccttgtttcaa

SEQ ID NO: 23623 - DNA, 25 bp, Homo sapiens
ccaggtgttacattcacatggttca

SEQ ID NO: 23624 - DNA, 25 bp, Homo sapiens
ttggagacttctgcagcctctgagc

SEQ ID NO: 23625 - DNA, 25 bp, Homo sapiens
ggactggtttttccttacacatgaa

SEQ ID NO: 23626 - DNA, 25 bp, Homo sapiens
ggaagtgagccctgtgaccctaata

SEQ ID NO: 23627 - DNA, 25 bp, Homo sapiens
gcctgccgagaggacgttcattttc

SEQ ID NO: 23628 - DNA, 25 bp, Homo sapiens
cttgccacgctgtcctctgaaatga

SEQ ID NO: 23629 - DNA, 25 bp, Homo sapiens
ctctgggctgtccatcatgggtata

SEQ ID NO: 23630 - DNA, 25 bp, Homo sapiens
cccactggttagtgtgtgccaggca

SEQ ID NO: 23631 - DNA, 25 bp, Homo sapiens
gtggctgctgcacttccagaatctg

SEQ ID NO: 23632 - DNA, 25 bp, Homo sapiens
cccgagcatactggacgaatgtcta

SEQ ID NO: 23633 - DNA, 25 bp, Homo sapiens
cagcccagggtgtttgacttcttcc

SEQ ID NO: 23634 - DNA, 25 bp, Homo sapiens
caaacctgtttgtgagatctccttc

SEQ ID NO: 23635 - DNA, 25 bp, Homo sapiens
ggtcaaggactctgcccattctagg

SEQ ID NO: 23636 - DNA, 25 bp, Homo sapiens
agctttgttctcaggacccacccga

SEQ ID NO: 23637 - DNA, 25 bp, Homo sapiens
gcctcgctgaggaaattgactttga

SEQ ID NO: 23638 - DNA, 25 bp, Homo sapiens
caggactagttaacagtgtcaatta

SEQ ID NO: 23639 - DNA, 25 bp, Homo sapiens
caatacttggcttcttgttccccaa

SEQ ID NO: 23640 - DNA, 25 bp, Homo sapiens
agtgggtagttgtgactttataatc

SEQ ID NO: 23641 - DNA, 25 bp, Homo sapiens
aacctactttacttgcgaaacatgc

SEQ ID NO: 23642 - DNA, 25 bp, Homo sapiens
tcaagtttccgctgaccactgagtc

SEQ ID NO: 23643 - DNA, 25 bp, Homo sapiens
ggtaagctggtttcatgatcgaatc

SEQ ID NO: 23644 - DNA, 25 bp, Homo sapiens
tgtcttgagtaatccgtgggcccta

SEQ ID NO: 23645 - DNA, 25 bp, Homo sapiens
cccacgcggttcatgctagcaatta

SEQ ID NO: 23646 - DNA, 25 bp, Homo sapiens
ggagaccaagcctcatttcagtttg

SEQ ID NO: 23647 - DNA, 25 bp, Homo sapiens
tggcagcacccacctgctgaagatg

SEQ ID NO: 23648 - DNA, 25 bp, Homo sapiens
ggggcccttggttgcaacacaagta

SEQ ID NO: 23649 - DNA, 25 bp, Homo sapiens
cttgagtgctgagggtacaatcatc

SEQ ID NO: 23650 - DNA, 25 bp, Homo sapiens
gtgacggaccacctcttatttagtg

SEQ ID NO: 23651 - DNA, 25 bp, Homo sapiens
ctacccgtgctttctgctctgcaga

SEQ ID NO: 23652 - DNA, 25 bp, Homo sapiens
atgccactgtctcgctggctgcagc

SEQ ID NO: 23653 - DNA, 25 bp, Homo sapiens
gcctggctgtgtcttctcacaaatg

SEQ ID NO: 23654 - DNA, 25 bp, Homo sapiens
ctgacctgccctgagttagacctta

SEQ ID NO: 23655 - DNA, 25 bp, Homo sapiens
cctctgcctgagaacgtgggtttca

SEQ ID NO: 23656 - DNA, 25 bp, Homo sapiens
aggcacctggtgttttacgtacata

SEQ ID NO: 23657 - DNA, 25 bp, Homo sapiens
ggtgcagctggctcattcccatata

SEQ ID NO: 23658 - DNA, 25 bp, Homo sapiens
ggctgaggacctgcactattaattt

SEQ ID NO: 23659 - DNA, 25 bp, Homo sapiens
ttagtccagtaacacagcccagagc

SEQ ID NO: 23660 - DNA, 25 bp, Homo sapiens
tgggagtcacacagcctgtgacgcc

SEQ ID NO: 23661 - DNA, 25 bp, Homo sapiens
ccagtgcttctgctagtctagttca

SEQ ID NO: 23662 - DNA, 25 bp, Homo sapiens
cagcaaagtgctgggttgatctcta

SEQ ID NO: 23663 - DNA, 25 bp, Homo sapiens
tgcttcatgtgtgacaagccactga

SEQ ID NO: 23664 - DNA, 25 bp, Homo sapiens
agaaacaaaaaagctgacattttca

SEQ ID NO: 23665 - DNA, 25 bp, Homo sapiens
aggcagggtttacaggacttcaaga

SEQ ID NO: 23666 - DNA, 25 bp, Homo sapiens
ggggccattccctctgtatgccata

SEQ ID NO: 23667 - DNA, 25 bp, Homo sapiens
ttccttagggcagagagaatcttca

SEQ ID NO: 23668 - DNA, 25 bp, Homo sapiens
cacccgggtattttttcataatgca

SEQ ID NO: 23669 - DNA, 25 bp, Homo sapiens
tggaaaagccctctctctgagtttc

SEQ ID NO: 23670 - DNA, 25 bp, Homo sapiens
cgcatggtaaagaagcactccgtta

SEQ ID NO: 23671 - DNA, 25 bp, Homo sapiens
gtgggcttatatccatagctacctg

SEQ ID NO: 23672 - DNA, 25 bp, Homo sapiens
ttcacaggagactaatcgcccaagg

SEQ ID NO: 23673 - DNA, 25 bp, Homo sapiens
atgttttgcctcttaacatctcagc

SEQ ID NO: 23674 - DNA, 25 bp, Homo sapiens
caggggtatccactaggcttgtctc

SEQ ID NO: 23675 - DNA, 25 bp, Homo sapiens
ggtccctctcctgtgcagctaatta

SEQ ID NO: 23676 - DNA, 25 bp, Homo sapiens
aggaggtctgccttctgattctgac

SEQ ID NO: 23677 - DNA, 25 bp, Homo sapiens
ctctctcaggtgttcataatgtatc

SEQ ID NO: 23678 - DNA, 25 bp, Homo sapiens
tgctcagcagcataaaggacatttc

SEQ ID NO: 23679 - DNA, 25 bp, Homo sapiens
atgctttgtcaactgcctggatgga

SEQ ID NO: 23680 - DNA, 25 bp, Homo sapiens
taggcacatgtaggaaacagctttc

SEQ ID NO: 23681 - DNA, 25 bp, Homo sapiens
tggattcatatcgatgggcaccttc

SEQ ID NO: 23682 - DNA, 25 bp, Homo sapiens
cttcaaagcatttctcgagtcactc

SEQ ID NO: 23683 - DNA, 25 bp, Homo sapiens
tgctggcaacaattgtcgagtcctc

SEQ ID NO: 23684 - DNA, 25 bp, Homo sapiens
ggctggctcttcatggttgctacaa

SEQ ID NO: 23685 - DNA, 25 bp, Homo sapiens
agtgttcagtctctcacctggcaga

SEQ ID NO: 23686 - DNA, 25 bp, Homo sapiens
tctggcagagagacaagcataaata

SEQ ID NO: 23687 - DNA, 25 bp, Homo sapiens
tgaccatccagcatcgccctttaga

SEQ ID NO: 23688 - DNA, 25 bp, Homo sapiens
acctgttccttcctgtgtgacccta

SEQ ID NO: 23689 - DNA, 25 bp, Homo sapiens
tctttccagggagaatcactgagcc

SEQ ID NO: 23690 - DNA, 25 bp, Homo sapiens
cgccatgggagaaaccagtatattc

SEQ ID NO: 23691 - DNA, 25 bp, Homo sapiens
cttagcttctggactacaatgacca

SEQ ID NO: 23692 - DNA, 25 bp, Homo sapiens
gcatacttaaaatggcaaaaacgta

SEQ ID NO: 23693 - DNA, 25 bp, Homo sapiens
caaggatgacagtggaaatacaaaa

SEQ ID NO: 23694 - DNA, 25 bp, Homo sapiens
gcagccaaaatgtaccagaatctga

SEQ ID NO: 23695 - DNA, 25 bp, Homo sapiens
cacacgtgtgtctatacatatccta

SEQ ID NO: 23696 - DNA, 25 bp, Homo sapiens
ggccctgtggccaattttttcttca

SEQ ID NO: 23697 - DNA, 25 bp, Homo sapiens
cagagtgctcgtgttggccagcaaa

SEQ ID NO: 23698 - DNA, 25 bp, Homo sapiens
ggccctatttgaagcaagtttctca

SEQ ID NO: 23699 - DNA, 25 bp, Homo sapiens
gttcccacctcgaggcagctttgta

SEQ ID NO: 23700 - DNA, 25 bp, Homo sapiens
ggcaggtacatcctctcttgagcta

SEQ ID NO: 23701 - DNA, 25 bp, Homo sapiens
ggctgctattcttttgctccttgta

SEQ ID NO: 23702 - DNA, 25 bp, Homo sapiens
ctccatgtgtagagctgagaccatt

SEQ ID NO: 23703 - DNA, 25 bp, Homo sapiens
gacactgggccttttcaatcatcta

SEQ ID NO: 23704 - DNA, 25 bp, Homo sapiens
cctgggctctccacttacaagaaga

SEQ ID NO: 23705 - DNA, 25 bp, Homo sapiens
cccttgctgcctggagattgacatt

SEQ ID NO: 23706 - DNA, 25 bp, Homo sapiens
ttcctagatgggctcagaacataca

SEQ ID NO: 23707 - DNA, 25 bp, Homo sapiens
tcagaacccttagcctgccagatgg

SEQ ID NO: 23708 - DNA, 25 bp, Homo sapiens
cctcgggattattctgtgccaaata

SEQ ID NO: 23709 - DNA, 25 bp, Homo sapiens
agggagctgtccgtgttactgagca

SEQ ID NO: 23710 - DNA, 25 bp, Homo sapiens
tcacatgtgggaaatagctatagca

SEQ ID NO: 23711 - DNA, 25 bp, Homo sapiens
tctgaggggcagttcacttatctcc

SEQ ID NO: 23712 - DNA, 25 bp, Homo sapiens
ccgaggctccccaacaggaactgag

SEQ ID NO: 23713 - DNA, 25 bp, Homo sapiens
ctgttcttcacactaggcccatgga

SEQ ID NO: 23714 - DNA, 25 bp, Homo sapiens
gcagacagcagttcagcagtttata

SEQ ID NO: 23715 - DNA, 25 bp, Homo sapiens
ccaggggcctcacattagatgtttc

SEQ ID NO: 23716 - DNA, 25 bp, Homo sapiens
ccatgtgcagacttgggaggaaaaa

SEQ ID NO: 23717 - DNA, 25 bp, Homo sapiens
ctatgtgctgtgaatggaaactaca

SEQ ID NO: 23718 - DNA, 25 bp, Homo sapiens
tccacattgagatatgagacccacc

SEQ ID NO: 23719 - DNA, 25 bp, Homo sapiens
gctgggaccacacacatttaacctg

SEQ ID NO: 23720 - DNA, 25 bp, Homo sapiens
tgcctatggtctgagattctaatcc

SEQ ID NO: 23721 - DNA, 25 bp, Homo sapiens
tgagcagacatactgagacacactg

SEQ ID NO: 23722 - DNA, 25 bp, Homo sapiens
tgtgcccacactctagactgtcagg

SEQ ID NO: 23723 - DNA, 25 bp, Homo sapiens
cagtttgtccagctcatcctgtagg

SEQ ID NO: 23724 - DNA, 25 bp, Homo sapiens
agcgttgtttgttcttttcatgata

SEQ ID NO: 23725 - DNA, 25 bp, Homo sapiens
gagggatagcagtaattctgagtag

SEQ ID NO: 23726 - DNA, 25 bp, Homo sapiens
gtgtgtttcactagtcagagcaata

SEQ ID NO: 23727 - DNA, 25 bp, Homo sapiens
cgcttgatgtgtgcctcagggtata

SEQ ID NO: 23728 - DNA, 25 bp, Homo sapiens
gcggccattgtgctgctgctacaca

SEQ ID NO: 23729 - DNA, 25 bp, Homo sapiens
ggaatctgttcctcctccaaaacgg

SEQ ID NO: 23730 - DNA, 25 bp, Homo sapiens
gaaccatttgttccctccttagata

SEQ ID NO: 23731 - DNA, 25 bp, Homo sapiens
ggtccattcatgtttgctcccaatt

SEQ ID NO: 23732 - DNA, 25 bp, Homo sapiens
gctggagatgttataccgtgacgta

SEQ ID NO: 23733 - DNA, 25 bp, Homo sapiens
ctgtcaaaactaaaaggaaagatgc

SEQ ID NO: 23734 - DNA, 25 bp, Homo sapiens
ttctgttagcatgaatccctctgtg

SEQ ID NO: 23735 - DNA, 25 bp, Homo sapiens
tactggatccacaagcaagactatg

SEQ ID NO: 23736 - DNA, 25 bp, Homo sapiens
gtcctgcagctgtgaaaccaatgtg

SEQ ID NO: 23737 - DNA, 25 bp, Homo sapiens
acaaaaaaaacaaaacttgaggcct

SEQ ID NO: 23738 - DNA, 25 bp, Homo sapiens
ctcggataccaaggagcagcttctg

SEQ ID NO: 23739 - DNA, 25 bp, Homo sapiens
aaggcgctgtcctcttcactgcatg

SEQ ID NO: 23740 - DNA, 25 bp, Homo sapiens
ttctcccaggtgaagccatttaatc

SEQ ID NO: 23741 - DNA, 25 bp, Homo sapiens
gggcttggcgcagaaactcactcca

SEQ ID NO: 23742 - DNA, 25 bp, Homo sapiens
ctcagctcccgcctgcgtttgtaga

SEQ ID NO: 23743 - DNA, 25 bp, Homo sapiens
aggcaagggctcacactgacctctc

SEQ ID NO: 23744 - DNA, 25 bp, Homo sapiens
gccgcagtgaagcaacagctagctg

SEQ ID NO: 23745 - DNA, 25 bp, Homo sapiens
caccgtgaggcataagctggatgta

SEQ ID NO: 23746 - DNA, 25 bp, Homo sapiens
ttcacagtggtcaagggcagcaacc

SEQ ID NO: 23747 - DNA, 25 bp, Homo sapiens
tgggcttttctgtcacctacctgct

SEQ ID NO: 23748 - DNA, 25 bp, Homo sapiens
ttcaaagacttgtggggagcactta

SEQ ID NO: 23749 - DNA, 25 bp, Homo sapiens
ctggtacccttcctagcatcaattc

SEQ ID NO: 23750 - DNA, 25 bp, Homo sapiens
gagaggtcttctgcacacacattga

SEQ ID NO: 23751 - DNA, 25 bp, Homo sapiens
ggacattggaatcagggccctctcc

SEQ ID NO: 23752 - DNA, 25 bp, Homo sapiens
gacacttgttcttatactgctttaa

SEQ ID NO: 23753 - DNA, 25 bp, Homo sapiens
aaaaaattcaataaagttacagctc

SEQ ID NO: 23754 - DNA, 25 bp, Homo sapiens
ccaacaattggacaggggtctcctc

SEQ ID NO: 23755 - DNA, 25 bp, Homo sapiens
cctttacttggtaggattgggaaaa

SEQ ID NO: 23756 - DNA, 25 bp, Homo sapiens
tcacactggctcttctctcacctgt

SEQ ID NO: 23757 - DNA, 25 bp, Homo sapiens
catgttgcccagtcagtttctcttc

SEQ ID NO: 23758 - DNA, 25 bp, Homo sapiens
tggcccattttctcaactgcaatta

SEQ ID NO: 23759 - DNA, 25 bp, Homo sapiens
gcacctagtaacagctcagtaaata

SEQ ID NO: 23760 - DNA, 25 bp, Homo sapiens
cttgactaatcaaaagggccttctg

SEQ ID NO: 23761 - DNA, 25 bp, Homo sapiens
tctacatactactctgggtggcttg

SEQ ID NO: 23762 - DNA, 25 bp, Homo sapiens
cttcagtgagggcaagttggcaatc

SEQ ID NO: 23763 - DNA, 25 bp, Homo sapiens
cagaggtatcatgttgcccagcact

SEQ ID NO: 23764 - DNA, 25 bp, Homo sapiens
tgggagtatctagacacccgacctc

SEQ ID NO: 23765 - DNA, 25 bp, Homo sapiens
gggctctcacctatttccaaagctg

SEQ ID NO: 23766 - DNA, 25 bp, Homo sapiens
tcaccggacctttggcttttacagc

SEQ ID NO: 23767 - DNA, 25 bp, Homo sapiens
ctgacttgactgaagacgtacctga

SEQ ID NO: 23768 - DNA, 25 bp, Homo sapiens
ccactggttgttgctcttttttagg

SEQ ID NO: 23769 - DNA, 25 bp, Homo sapiens
tgtgtaaacgcccatgaacctaaga

SEQ ID NO: 23770 - DNA, 25 bp, Homo sapiens
accaggagggtgtaacagttttgca

SEQ ID NO: 23771 - DNA, 25 bp, Homo sapiens
acattccattgctgtgggccacgga

SEQ ID NO: 23772 - DNA, 25 bp, Homo sapiens
gcccaggggcctgtagaaaaccaca

SEQ ID NO: 23773 - DNA, 25 bp, Homo sapiens
tccctccctagccatgtagacagtg

SEQ ID NO: 23774 - DNA, 25 bp, Homo sapiens
ccaggcccagagtgttcttttgtca

SEQ ID NO: 23775 - DNA, 25 bp, Homo sapiens
ccctgcagagcatgtggtaactttc

SEQ ID NO: 23776 - DNA, 25 bp, Homo sapiens
gacagctgtcgtgagtgttccatgc

SEQ ID NO: 23777 - DNA, 25 bp, Homo sapiens
agcctaccagggtgcctctcataaa

SEQ ID NO: 23778 - DNA, 25 bp, Homo sapiens
ttgaagatctcacaaacaggtttgg

SEQ ID NO: 23779 - DNA, 25 bp, Homo sapiens
gattctaattaagttgtcattctta

SEQ ID NO: 23780 - DNA, 25 bp, Homo sapiens
cttcgctttggcttcggctttagga

SEQ ID NO: 23781 - DNA, 25 bp, Homo sapiens
gccatctgatgaattttgtcccaca

SEQ ID NO: 23782 - DNA, 25 bp, Homo sapiens
aaaacacagtttttttaacacttcc

SEQ ID NO: 23783 - DNA, 25 bp, Homo sapiens
gcgggacattctacgggtgatttta

SEQ ID NO: 23784 - DNA, 25 bp, Homo sapiens
aactgtcctgatggtggctctaagc

SEQ ID NO: 23785 - DNA, 25 bp, Homo sapiens
attccctctgagtggtatggcttca

SEQ ID NO: 23786 - DNA, 25 bp, Homo sapiens
ggtactctgctctacactggttgta

SEQ ID NO: 23787 - DNA, 25 bp, Homo sapiens
agccaacctgctgcttcctggagga

SEQ ID NO: 23788 - DNA, 25 bp, Homo sapiens
ggcagctacgtcctctcttgagcta

SEQ ID NO: 23789 - DNA, 25 bp, Homo sapiens
ggctgctattcttttgctccttgta

SEQ ID NO: 23790 - DNA, 25 bp, Homo sapiens
ctccatgtgtagagctgagaccatt

SEQ ID NO: 23791 - DNA, 25 bp, Homo sapiens
gacactgggccttttcaatcatcta

SEQ ID NO: 23792 - DNA, 25 bp, Homo sapiens
cctgggctctccacttacaagaaga

SEQ ID NO: 23793 - DNA, 25 bp, Homo sapiens
cccttgctgcctggagattgacatt

SEQ ID NO: 23794 - DNA, 25 bp, Homo sapiens
ttcctagatgggctcagaacataca

SEQ ID NO: 23795 - DNA, 25 bp, Homo sapiens
tcagaacccttagcctgccagatgg

SEQ ID NO: 23796 - DNA, 25 bp, Homo sapiens
cctcgggattattctgtgccaaata

SEQ ID NO: 23797 - DNA, 25 bp, Homo sapiens
agggagctgtccgtgttactgagca

SEQ ID NO: 23798 - DNA, 25 bp, Homo sapiens
tcacatgtgggaaatagctatagca

SEQ ID NO: 23799 - DNA, 25 bp, Homo sapiens
tctgaggggcagttcacttatctcc

SEQ ID NO: 23800 - DNA, 25 bp, Homo sapiens
ccgaggctccccaacaggaactgag

SEQ ID NO: 23801 - DNA, 25 bp, Homo sapiens
ctgttcttcacactaggcccatgga

SEQ ID NO: 23802 - DNA, 25 bp, Homo sapiens
gcagacagcagttcagcagtttata

SEQ ID NO: 23803 - DNA, 25 bp, Homo sapiens
ccaggggcctcacattagatgtttc

SEQ ID NO: 23804 - DNA, 25 bp, Homo sapiens
ctctttcctggctatgtttctgaca

SEQ ID NO: 23805 - DNA, 25 bp, Homo sapiens
cccttaggctgtgtggatgcaaaca

SEQ ID NO: 23806 - DNA, 25 bp, Homo sapiens
accatactaagaatgaggcagctca

SEQ ID NO: 23807 - DNA, 25 bp, Homo sapiens
tccacattgagatatgagacccacc

SEQ ID NO: 23808 - DNA, 25 bp, Homo sapiens
gctgggaccacacacatttaacctg

SEQ ID NO: 23809 - DNA, 25 bp, Homo sapiens
tgcctatggtctgagattctaatcc

SEQ ID NO: 23810 - DNA, 25 bp, Homo sapiens
tgagcagacatactgagacacactg

SEQ ID NO: 23811 - DNA, 25 bp, Homo sapiens
tgtgcccacactctagactgtcagg

SEQ ID NO: 23812 - DNA, 25 bp, Homo sapiens
ttgtccagctcatcctgtaggtgtc

SEQ ID NO: 23813 - DNA, 25 bp, Homo sapiens
agcgttgtttgttcttttcatgata

SEQ ID NO: 23814 - DNA, 25 bp, Homo sapiens
cactaaccattgtagcatgccaata

SEQ ID NO: 23815 - DNA, 25 bp, Homo sapiens
tttacaacatatatataagtgaata

SEQ ID NO: 23816 - DNA, 25 bp, Homo sapiens
tctttaagtcaggtagtgggtatta

SEQ ID NO: 23817 - DNA, 25 bp, Homo sapiens
gtgtgtttcactagtcagagcaata

SEQ ID NO: 23818 - DNA, 25 bp, Homo sapiens
cgcttgatgtgtgcctcagggtata

SEQ ID NO: 23819 - DNA, 25 bp, Homo sapiens
gatctaccatgaaagacttgtgaat

SEQ ID NO: 23820 - DNA, 25 bp, Homo sapiens
agcaggtaggtgacagaaaagccca

SEQ ID NO: 23821 - DNA, 25 bp, Homo sapiens
gtatgttatgaaggttatatgttag

SEQ ID NO: 23822 - DNA, 25 bp, Homo sapiens
caggcacagctccatcgttacaatg

SEQ ID NO: 23823 - DNA, 25 bp, Homo sapiens
gctgtgggatacatactgttgcata

SEQ ID NO: 23824 - DNA, 25 bp, Homo sapiens
tgctgagctctttgccagtgggaaa

SEQ ID NO: 23825 - DNA, 25 bp, Homo sapiens
agctcatgcttcacaagggcctttc

SEQ ID NO: 23826 - DNA, 25 bp, Homo sapiens
cccatggggctcattcctgacaacg

SEQ ID NO: 23827 - DNA, 25 bp, Homo sapiens
tcccacgctgagagaggtcagtgtg

SEQ ID NO: 23828 - DNA, 25 bp, Homo sapiens
ttgatctccagtcggcctttgcagg

SEQ ID NO: 23829 - DNA, 25 bp, Homo sapiens
ggccttactccgtcccaaactgaaa

SEQ ID NO: 23830 - DNA, 25 bp, Homo sapiens
ggagcatcttctcgtcttgcatttg

SEQ ID NO: 23831 - DNA, 25 bp, Homo sapiens
acagaagctgctccttggtatccga

SEQ ID NO: 23832 - DNA, 25 bp, Homo sapiens
ggccgcagagtgaccttccacattc

SEQ ID NO: 23833 - DNA, 25 bp, Homo sapiens
ttccatatctgagtgtttactcctg

SEQ ID NO: 23834 - DNA, 25 bp, Homo sapiens
catagtcttgcttgtggatccagta

SEQ ID NO: 23835 - DNA, 25 bp, Homo sapiens
cgtgcctggcccacaatgactttta

SEQ ID NO: 23836 - DNA, 25 bp, Homo sapiens
cagctccagttttatgtgaaataga

SEQ ID NO: 23837 - DNA, 25 bp, Homo sapiens
ccttttagttttgacagagattttc

SEQ ID NO: 23838 - DNA, 25 bp, Homo sapiens
caatctttcaaggtcagctctggca

SEQ ID NO: 23839 - DNA, 25 bp, Homo sapiens
gccttccttttcatagctgtgctcc

SEQ ID NO: 23840 - DNA, 25 bp, Homo sapiens
ttgtcctgactctcaacaccgtgga

SEQ ID NO: 23841 - DNA, 25 bp, Homo sapiens
ccgttttggaggaggaacagattcc

SEQ ID NO: 23842 - DNA, 25 bp, Homo sapiens
ggccgcagacaaggaaaacagtttc

SEQ ID NO: 23843 - DNA, 25 bp, Homo sapiens
gccctgagtcatcttcctgagctga

SEQ ID NO: 23844 - DNA, 25 bp, Homo sapiens
tagctctgtttaagatccgtcagtc

SEQ ID NO: 23845 - DNA, 25 bp, Homo sapiens
atgctaatacccactacctgactta

SEQ ID NO: 23846 - DNA, 25 bp, Homo sapiens
aagaatatcatgaaaagaacaaaca

SEQ ID NO: 23847 - DNA, 25 bp, Homo sapiens
cctgacagtctagagtgtgggcaca

SEQ ID NO: 23848 - DNA, 25 bp, Homo sapiens
tcagtgtgtctcagtatgtctgctc

SEQ ID NO: 23849 - DNA, 25 bp, Homo sapiens
cagccctcagttgtgtatatttatc

SEQ ID NO: 23850 - DNA, 25 bp, Homo sapiens
caggttaaatgtgtgtggtcccagc

SEQ ID NO: 23851 - DNA, 25 bp, Homo sapiens
ggtgggtctcatatctcaatgtgga

SEQ ID NO: 23852 - DNA, 25 bp, Homo sapiens
gatagaaatatgaagagctcatttg

SEQ ID NO: 23853 - DNA, 25 bp, Homo sapiens
agggtgctctccattgactctttta

SEQ ID NO: 23854 - DNA, 25 bp, Homo sapiens
gatcctgttttttactgcttcatgg

SEQ ID NO: 23855 - DNA, 25 bp, Homo sapiens
gctctggaattcacctttagtcata

SEQ ID NO: 23856 - DNA, 25 bp, Homo sapiens
acctctcgtggggacttttaattaa

SEQ ID NO: 23857 - DNA, 25 bp, Homo sapiens
actggcttcatcctcaattcccggg

SEQ ID NO: 23858 - DNA, 25 bp, Homo sapiens
gccttggctggtcaacacatttgta

SEQ ID NO: 23859 - DNA, 25 bp, Homo sapiens
atcaggcctggtcaacctcaaagtc

SEQ ID NO: 23860 - DNA, 25 bp, Homo sapiens
atgctggctgtaggctgtcttatcc

SEQ ID NO: 23861 - DNA, 25 bp, Homo sapiens
ccaagggcttgagtctttttcaaca

SEQ ID NO: 23862 - DNA, 25 bp, Homo sapiens
catgacaggtggcataggctcctta

SEQ ID NO: 23863 - DNA, 25 bp, Homo sapiens
aggctgcatcgctcaaatcttcttc

SEQ ID NO: 23864 - DNA, 25 bp, Homo sapiens
gatgcagttctcactccttttctga

SEQ ID NO: 23865 - DNA, 25 bp, Homo sapiens
tctggtggaatgacgtcaatgctac

SEQ ID NO: 23866 - DNA, 25 bp, Homo sapiens
acttgttttgggggggatcgatttt

SEQ ID NO: 23867 - DNA, 25 bp, Homo sapiens
acttcagagggtcaggattcatcca

SEQ ID NO: 23868 - DNA, 25 bp, Homo sapiens
agattttttttaaaagtgcaaagaa

SEQ ID NO: 23869 - DNA, 25 bp, Homo sapiens
gttggtacacacacaggcttcctta

SEQ ID NO: 23870 - DNA, 25 bp, Homo sapiens
gctacctgattttagaatatatttc

SEQ ID NO: 23871 - DNA, 25 bp, Homo sapiens
tccacaaggtgggagcgtttcactg

SEQ ID NO: 23872 - DNA, 25 bp, Homo sapiens
aggagatcatgaatcagtgtatata

SEQ ID NO: 23873 - DNA, 25 bp, Homo sapiens
caaaacagggaagtttgcttttgca

SEQ ID NO: 23874 - DNA, 25 bp, Homo sapiens
aaaataatactgtgcagtaaaatta

SEQ ID NO: 23875 - DNA, 25 bp, Homo sapiens
ccagagcaaaagacaaatatggttc

SEQ ID NO: 23876 - DNA, 25 bp, Homo sapiens
ttatcctgtcatcaaagcggcatgg

SEQ ID NO: 23877 - DNA, 25 bp, Homo sapiens
gtttctggtttcctatagtcactca

SEQ ID NO: 23878 - DNA, 25 bp, Homo sapiens
aagagctgacttttggcttcatggc

SEQ ID NO: 23879 - DNA, 25 bp, Homo sapiens
cacggctgtgtccttcatgcatgca

SEQ ID NO: 23880 - DNA, 25 bp, Homo sapiens
ttcagattctggtacattttggcta

SEQ ID NO: 23881 - DNA, 25 bp, Homo sapiens
taatattgatatcaggaagatatca

SEQ ID NO: 23882 - DNA, 25 bp, Homo sapiens
ccatggcctcagttcctgttgggga

SEQ ID NO: 23883 - DNA, 25 bp, Homo sapiens
ctttgaacttcacccgcagggagtt

SEQ ID NO: 23884 - DNA, 25 bp, Homo sapiens
tcagtggctttgcttctccagatgc

SEQ ID NO: 23885 - DNA, 25 bp, Homo sapiens
gtgctatagctatttcccacatgtg

SEQ ID NO: 23886 - DNA, 25 bp, Homo sapiens
ttgacctggcctggtgttaacagcc

SEQ ID NO: 23887 - DNA, 25 bp, Homo sapiens
tcccgagggctaaatgacattgttc

SEQ ID NO: 23888 - DNA, 25 bp, Homo sapiens
tagcctcctggaagcacctgtatga

SEQ ID NO: 23889 - DNA, 25 bp, Homo sapiens
accatgtggtctaatttcttgctga

SEQ ID NO: 23890 - DNA, 25 bp, Homo sapiens
ctccaggcagcaagggaatcatata

SEQ ID NO: 23891 - DNA, 25 bp, Homo sapiens
gcccaggtacctcttatccagcatg

SEQ ID NO: 23892 - DNA, 25 bp, Homo sapiens
cacccacctcctgttcatgttgata

SEQ ID NO: 23893 - DNA, 25 bp, Homo sapiens
tggcaaatggtctcagctctacaca

SEQ ID NO: 23894 - DNA, 25 bp, Homo sapiens
agccctgaattccactgtaagcttc

SEQ ID NO: 23895 - DNA, 25 bp, Homo sapiens
gggccggtagtcctcctttcagaca

SEQ ID NO: 23896 - DNA, 25 bp, Homo sapiens
gctcagctctgcctagacacacgtg

SEQ ID NO: 23897 - DNA, 25 bp, Homo sapiens
aagtactcactaaacaaaactcgtt

SEQ ID NO: 23898 - DNA, 25 bp, Homo sapiens
gtccgtaagcacaaactggatttta

SEQ ID NO: 23899 - DNA, 25 bp, Homo sapiens
gacttcgttccctgcaggttctgta

SEQ ID NO: 23900 - DNA, 25 bp, Homo sapiens
aggtgggctcacttgctctgccata

SEQ ID NO: 23901 - DNA, 25 bp, Homo sapiens
tcatggctgatctggggttcattcc

SEQ ID NO: 23902 - DNA, 25 bp, Homo sapiens
tgatgttgcatctctggccctggaa

SEQ ID NO: 23903 - DNA, 25 bp, Homo sapiens
ttccctcctgttgggccagtactta

SEQ ID NO: 23904 - DNA, 25 bp, Homo sapiens
agttccatgcgcttctgcccagata

SEQ ID NO: 23905 - DNA, 25 bp, Homo sapiens
tcttctgaaaatgccctgaggtgtc

SEQ ID NO: 23906 - DNA, 25 bp, Homo sapiens
tccacaccaggccagttaagtcaga

SEQ ID NO: 23907 - DNA, 25 bp, Homo sapiens
attctgggcctctgctgttatctgg

SEQ ID NO: 23908 - DNA, 25 bp, Homo sapiens
cttgcaagggtgcccctgtgttcct

SEQ ID NO: 23909 - DNA, 25 bp, Homo sapiens
tgggcccttctcatttctggatttg

SEQ ID NO: 23910 - DNA, 25 bp, Homo sapiens
acgctgcttcaataggcctggcttc

SEQ ID NO: 23911 - DNA, 25 bp, Homo sapiens
accctgaagctgatcctctggaatt

SEQ ID NO: 23912 - DNA, 25 bp, Homo sapiens
gccaggccacataggggtttctgta

SEQ ID NO: 23913 - DNA, 25 bp, Homo sapiens
tacctttggggacgatctcactgca

SEQ ID NO: 23914 - DNA, 25 bp, Homo sapiens
tgctggccacagagaacccacgtgc

SEQ ID NO: 23915 - DNA, 25 bp, Homo sapiens
caggggttcaggctttcctttcata

SEQ ID NO: 23916 - DNA, 25 bp, Homo sapiens
gtcgtgcttgcatactctctggtga

SEQ ID NO: 23917 - DNA, 25 bp, Homo sapiens
ggagctgccttcctgcagttcaaga

SEQ ID NO: 23918 - DNA, 25 bp, Homo sapiens
tggctgcctcccagacaagtccata

SEQ ID NO: 23919 - DNA, 25 bp, Homo sapiens
ctccctgtggtttgtcttttgcaga

SEQ ID NO: 23920 - DNA, 25 bp, Homo sapiens
aggctgggacccaatctctgcttca

SEQ ID NO: 23921 - DNA, 25 bp, Homo sapiens
gactcagcagctctccaaccttggg

SEQ ID NO: 23922 - DNA, 25 bp, Homo sapiens
accctccctgtgtgggatagaaaca

SEQ ID NO: 23923 - DNA, 25 bp, Homo sapiens
gcatggatcttcttccgcggtgacc

SEQ ID NO: 23924 - DNA, 25 bp, Homo sapiens
accctaaggtggtcggttatagaca

SEQ ID NO: 23925 - DNA, 25 bp, Homo sapiens
cgtgagctgctgagacggcacccgc

SEQ ID NO: 23926 - DNA, 25 bp, Homo sapiens
ccatgggagtgtcgcagtttctaca

SEQ ID NO: 23927 - DNA, 25 bp, Homo sapiens
acactagtgtgcgtatgatttgggg

SEQ ID NO: 23928 - DNA, 25 bp, Homo sapiens
gccctgctttctcagagtgctccta

SEQ ID NO: 23929 - DNA, 25 bp, Homo sapiens
gccaaggtcccatgccgcaaagatg

SEQ ID NO: 23930 - DNA, 25 bp, Homo sapiens
agcaacggcctctggtcataagtga

SEQ ID NO: 23931 - DNA, 25 bp, Homo sapiens
gtgtcattacttcccaggccctgtg

SEQ ID NO: 23932 - DNA, 25 bp, Homo sapiens
gcccactaggagagtgctgagttta

SEQ ID NO: 23933 - DNA, 25 bp, Homo sapiens
tccttgcaatgactcattttatagg

SEQ ID NO: 23934 - DNA, 25 bp, Homo sapiens
agcctttctacaccattccgggatg

SEQ ID NO: 23935 - DNA, 25 bp, Homo sapiens
ctgggaattgtgatccaaagctttt

SEQ ID NO: 23936 - DNA, 25 bp, Homo sapiens
gcctcgaggtgggaacacaacatta

SEQ ID NO: 23937 - DNA, 25 bp, Homo sapiens
acccttcagactttgagagtttaca

SEQ ID NO: 23938 - DNA, 25 bp, Homo sapiens
gtgctgtcaccctccaaacttttta

SEQ ID NO: 23939 - DNA, 25 bp, Homo sapiens
gcttagagccaccatcaggacagtt

SEQ ID NO: 23940 - DNA, 25 bp, Homo sapiens
agcctcactgaggaaattgactttg

SEQ ID NO: 23941 - DNA, 25 bp, Homo sapiens
caggactagttaacagtgtcaatta

SEQ ID NO: 23942 - DNA, 25 bp, Homo sapiens
caatacttggcttcttgttccccaa

SEQ ID NO: 23943 - DNA, 25 bp, Homo sapiens
cagtgttgaaaggtgtccgcagcca

SEQ ID NO: 23944 - DNA, 25 bp, Homo sapiens
gatccttgaagcgcccccaagggca

SEQ ID NO: 23945 - DNA, 25 bp, Homo sapiens
ggaagctttagggaggtgctctgag

SEQ ID NO: 23946 - DNA, 25 bp, Homo sapiens
taggcagtggccagttacagaaaca

SEQ ID NO: 23947 - DNA, 25 bp, Homo sapiens
aagaaacaagaacttagattttaaa

SEQ ID NO: 23948 - DNA, 25 bp, Homo sapiens
acggcttctcgttatgcatcaatga

SEQ ID NO: 23949 - DNA, 25 bp, Homo sapiens
tgtcacttatgaccagaggccgttg

SEQ ID NO: 23950 - DNA, 25 bp, Homo sapiens
ggagagctcatcgttgccatgcatc

SEQ ID NO: 23951 - DNA, 25 bp, Homo sapiens
ccattccacggggttctgcaggaga

SEQ ID NO: 23952 - DNA, 25 bp, Homo sapiens
ccctcaaatcatacgcacactagtg

SEQ ID NO: 23953 - DNA, 25 bp, Homo sapiens
tcacggtgtggaaactgcgacactc

SEQ ID NO: 23954 - DNA, 25 bp, Homo sapiens
tcacggtgtggaaactgcgacactc

SEQ ID NO: 23955 - DNA, 25 bp, Homo sapiens
cgatctgtatataagtatcatgtaa

SEQ ID NO: 23956 - DNA, 25 bp, Homo sapiens
ggtcaccgcggaagaagatccatgc

SEQ ID NO: 23957 - DNA, 25 bp, Homo sapiens
tttatggtctgaagtgaggcctctc

SEQ ID NO: 23958 - DNA, 25 bp, Homo sapiens
gggccgagcacacagcgcaacactt

SEQ ID NO: 23959 - DNA, 25 bp, Homo sapiens
gaccctgcaggtcaagacttctgtc

SEQ ID NO: 23960 - DNA, 25 bp, Homo sapiens
agtcctgctgctgaacctgctctga

SEQ ID NO: 23961 - DNA, 25 bp, Homo sapiens
ggagctcccagaccatgccaagtgt

SEQ ID NO: 23962 - DNA, 25 bp, Homo sapiens
gtcacaggttcacacagcacgtttt

SEQ ID NO: 23963 - DNA, 25 bp, Homo sapiens
tgaagccttgtaccctgacccactg

SEQ ID NO: 23964 - DNA, 25 bp, Homo sapiens
acacgcgggttctctgtggccagca

SEQ ID NO: 23965 - DNA, 25 bp, Homo sapiens
catgcttctgctgtggtcccattta

SEQ ID NO: 23966 - DNA, 25 bp, Homo sapiens
tgtcctctgtgcatgagtccctgtg

SEQ ID NO: 23967 - DNA, 25 bp, Homo sapiens
ggcctggcctcattggaattttttc

SEQ ID NO: 23968 - DNA, 25 bp, Homo sapiens
tctgctgtcaatgaggagtcccttc

SEQ ID NO: 23969 - DNA, 25 bp, Homo sapiens
agacgtttcctcaccttcggttgca

SEQ ID NO: 23970 - DNA, 25 bp, Homo sapiens
catcctcctgagctctgtgaatggc

SEQ ID NO: 23971 - DNA, 25 bp, Homo sapiens
gaccctactcagcaggcccagatga

SEQ ID NO: 23972 - DNA, 25 bp, Homo sapiens
tgctgtggactcttccctcggaatg

SEQ ID NO: 23973 - DNA, 25 bp, Homo sapiens
ctgtgtcccacctcacttttcagtg

SEQ ID NO: 23974 - DNA, 25 bp, Homo sapiens
acccgatgtatctgagcacctgcta

SEQ ID NO: 23975 - DNA, 25 bp, Homo sapiens
tgcagggcccatcctcttgtctttg

SEQ ID NO: 23976 - DNA, 25 bp, Homo sapiens
tgaccgctgtgaggatggacttcca

SEQ ID NO: 23977 - DNA, 25 bp, Homo sapiens
ttccagggccagagatgcaacatca

SEQ ID NO: 23978 - DNA, 25 bp, Homo sapiens
atgggtcccatccttcctcatgaga

SEQ ID NO: 23979 - DNA, 25 bp, Homo sapiens
gcccagatcagttcaggtgtctatc

SEQ ID NO: 23980 - DNA, 25 bp, Homo sapiens
cctctgtctgtgtgtgcctatatca

SEQ ID NO: 23981 - DNA, 25 bp, Homo sapiens
ggcacagcagcttctaccttatgga

SEQ ID NO: 23982 - DNA, 25 bp, Homo sapiens
cctggcttagcctggatcgtttgaa

SEQ ID NO: 23983 - DNA, 25 bp, Homo sapiens
ggcctgctccttctcacatgacaaa

SEQ ID NO: 23984 - DNA, 25 bp, Homo sapiens
ttcgccgaccgttgactattctcta

SEQ ID NO: 23985 - DNA, 25 bp, Homo sapiens
atctgctgcagtgctctgagcccta

SEQ ID NO: 23986 - DNA, 25 bp, Homo sapiens
gacctgcgactccttgacgttgaca

SEQ ID NO: 23987 - DNA, 25 bp, Homo sapiens
gccgtacgcctaaccgctaacatta

SEQ ID NO: 23988 - DNA, 25 bp, Homo sapiens
tctcctagaaatgggttgaattgcc

SEQ ID NO: 23989 - DNA, 25 bp, Homo sapiens
tgggtctgttctccctcttcaaagc

SEQ ID NO: 23990 - DNA, 25 bp, Homo sapiens
tgcttccgccatcagacagattctc

SEQ ID NO: 23991 - DNA, 25 bp, Homo sapiens
ggctgctattcttttgctccttgta

SEQ ID NO: 23992 - DNA, 25 bp, Homo sapiens
gaagttcacttctgacctctttaga

SEQ ID NO: 23993 - DNA, 25 bp, Homo sapiens
gacactgggccttttcaatcatcta

SEQ ID NO: 23994 - DNA, 25 bp, Homo sapiens
cctgggctctccacttacaagaaga

SEQ ID NO: 23995 - DNA, 25 bp, Homo sapiens
cccttgctgcctggagattgacatt

SEQ ID NO: 23996 - DNA, 25 bp, Homo sapiens
ttcctagatgggctcagaacataca

SEQ ID NO: 23997 - DNA, 25 bp, Homo sapiens
tcagaacccttagcctgccagatgg

SEQ ID NO: 23998 - DNA, 25 bp, Homo sapiens
gccctcgggattattctgtgccaaa

SEQ ID NO: 23999 - DNA, 25 bp, Homo sapiens
agggagctgtccgtgttactgagca

SEQ ID NO: 24000 - DNA, 25 bp, Homo sapiens
tcacatgtgggaaatagctatagca

SEQ ID NO: 24001 - DNA, 25 bp, Homo sapiens
cacaagggcttcacagacagtttta

SEQ ID NO: 24002 - DNA, 25 bp, Homo sapiens
ccgaggctccccaacaggaactgag

SEQ ID NO: 24003 - DNA, 25 bp, Homo sapiens
ctgtgacattattgatatcttcctg

SEQ ID NO: 24004 - DNA, 25 bp, Homo sapiens
gtagccaaaatgtaccagaatctga

SEQ ID NO: 24005 - DNA, 25 bp, Homo sapiens
ccgtgaaaatgcaaggacgcctcta

SEQ ID NO: 24006 - DNA, 25 bp, Homo sapiens
ggggtggcatcttcatcagtaaatc

SEQ ID NO: 24007 - DNA, 25 bp, Homo sapiens
aggacctgcacttcttaccattttg

SEQ ID NO: 24008 - DNA, 25 bp, Homo sapiens
ccatgccgctttgatgacaggataa

SEQ ID NO: 24009 - DNA, 25 bp, Homo sapiens
ggaaccatatttgtcttttgctctg

SEQ ID NO: 24010 - DNA, 25 bp, Homo sapiens
tccttgttaattttactgcacagta

SEQ ID NO: 24011 - DNA, 25 bp, Homo sapiens
ccacaaacaacaatttgcaaaagca

SEQ ID NO: 24012 - DNA, 25 bp, Homo sapiens
ttggttctaacgtttctctaacaac

SEQ ID NO: 24013 - DNA, 25 bp, Homo sapiens
gcactgtacaccatgctttgaaata

SEQ ID NO: 24014 - DNA, 25 bp, Homo sapiens
agaaggaagaagagggtagaggaga

SEQ ID NO: 24015 - DNA, 25 bp, Homo sapiens
gccggtgttctgttccctgtaaata

SEQ ID NO: 24016 - DNA, 25 bp, Homo sapiens
tctcaaacaactcactgaagtgtct

SEQ ID NO: 24017 - DNA, 25 bp, Homo sapiens
ctgggcaatcttggtgaggcatttc

SEQ ID NO: 24018 - DNA, 25 bp, Homo sapiens
ttttcactaatttatattgttattg

SEQ ID NO: 24019 - DNA, 25 bp, Homo sapiens
gctgccttcatctccttattcctga

SEQ ID NO: 24020 - DNA, 25 bp, Homo sapiens
tgtgagctgcaacctgatttaaacc

SEQ ID NO: 24021 - DNA, 25 bp, Homo sapiens
ctgtgtccagatggatactcacctc

SEQ ID NO: 24022 - DNA, 25 bp, Homo sapiens
cctaaggtcatgtttctgtgaagtc

SEQ ID NO: 24023 - DNA, 25 bp, Homo sapiens
ctacggactgtgacattgggttgca

SEQ ID NO: 24024 - DNA, 25 bp, Homo sapiens
tgaggcctacctacataagtgactt

SEQ ID NO: 24025 - DNA, 25 bp, Homo sapiens
gccgatccttatccaacgtgcatta

SEQ ID NO: 24026 - DNA, 25 bp, Homo sapiens
tgtgtaagagtgcataaggtccctg

SEQ ID NO: 24027 - DNA, 25 bp, Homo sapiens
gtcacagaccttggctcaccgattt

SEQ ID NO: 24028 - DNA, 25 bp, Homo sapiens
gcatgcctctgaagagcttgagcta

SEQ ID NO: 24029 - DNA, 25 bp, Homo sapiens
ccatgaagcagtaaaaaacaggatc

SEQ ID NO: 24030 - DNA, 25 bp, Homo sapiens
tggagagcacccttggaaataacac

SEQ ID NO: 24031 - DNA, 25 bp, Homo sapiens
tgaactcattttgcatgtcaagggc

SEQ ID NO: 24032 - DNA, 25 bp, Homo sapiens
gaaaattaaaatctccttatcatct

SEQ ID NO: 24033 - DNA, 25 bp, Homo sapiens
gctgggaccacacacatttaacctg

SEQ ID NO: 24034 - DNA, 25 bp, Homo sapiens
tgcctatggtctgagattctaatcc

SEQ ID NO: 24035 - DNA, 25 bp, Homo sapiens
tgagcagacatactgagacacactg

SEQ ID NO: 24036 - DNA, 25 bp, Homo sapiens
tgtgcccacactctagactgtcagg

SEQ ID NO: 24037 - DNA, 25 bp, Homo sapiens
ttgtccagctcatcctgtaggtgtc

SEQ ID NO: 24038 - DNA, 25 bp, Homo sapiens
agcgttgtttgttcttttcatgata

SEQ ID NO: 24039 - DNA, 25 bp, Homo sapiens
gagggatagcagtaattctgagtag

SEQ ID NO: 24040 - DNA, 25 bp, Homo sapiens
gtcctggcttattcacagatgcaag

SEQ ID NO: 24041 - DNA, 25 bp, Homo sapiens
cgcttgatgtgtgcctcagggtata

SEQ ID NO: 24042 - DNA, 25 bp, Homo sapiens
gcggccattgtgctgctgctacaca

SEQ ID NO: 24043 - DNA, 25 bp, Homo sapiens
ggaatctgttcctcctccaaaacgg

SEQ ID NO: 24044 - DNA, 25 bp, Homo sapiens
gaaccatttgttccctccttagata

SEQ ID NO: 24045 - DNA, 25 bp, Homo sapiens
ggtccattcatgtttgctcccaatt

SEQ ID NO: 24046 - DNA, 25 bp, Homo sapiens
tgccagagctgaccttgaaagattg

SEQ ID NO: 24047 - DNA, 25 bp, Homo sapiens
atgtgctctaaatacctcttaggtc

SEQ ID NO: 24048 - DNA, 25 bp, Homo sapiens
ctctgacgtattaaaactttccatg

SEQ ID NO: 24049 - DNA, 25 bp, Homo sapiens
ctcataccaggtgtggtgactcata

SEQ ID NO: 24050 - DNA, 25 bp, Homo sapiens
gtcctgcagctgtgaaaccaatgtg

SEQ ID NO: 24051 - DNA, 25 bp, Homo sapiens
tggccttctgctcctctccaacctc

SEQ ID NO: 24052 - DNA, 25 bp, Homo sapiens
ctcggataccaaggagcagcttcta

SEQ ID NO: 24053 - DNA, 25 bp, Homo sapiens
aggtggcctgtttcctcccaatgga

SEQ ID NO: 24054 - DNA, 25 bp, Homo sapiens
tcaggctctggcacaaccctggctg

SEQ ID NO: 24055 - DNA, 25 bp, Homo sapiens
gtgccaaaaagttgccatgaccgtc

SEQ ID NO: 24056 - DNA, 25 bp, Homo sapiens
ctcagctcccgcctgcgtttgtaga

SEQ ID NO: 24057 - DNA, 25 bp, Homo sapiens
ggagcccaccgaccggagaccattt

SEQ ID NO: 24058 - DNA, 25 bp, Homo sapiens
tgttctcaagtcaaagctgggcctg

SEQ ID NO: 24059 - DNA, 25 bp, Homo sapiens
ccgtgacatagggtatgggcctaaa

SEQ ID NO: 24060 - DNA, 25 bp, Homo sapiens
tttcccactggcaaagagctcagca

SEQ ID NO: 24061 - DNA, 25 bp, Homo sapiens
acttctggggagacaattcaatcta

SEQ ID NO: 24062 - DNA, 25 bp, Homo sapiens
ggtctgctgggcaaaattccatata

SEQ ID NO: 24063 - DNA, 25 bp, Homo sapiens
ccgtgacgtagggtatgggcctaaa

SEQ ID NO: 24064 - DNA, 25 bp, Homo sapiens
ggtgtatctcctgggacccttccta

SEQ ID NO: 24065 - DNA, 25 bp, Homo sapiens
acttctggggagacaattcaatcta

SEQ ID NO: 24066 - DNA, 25 bp, Homo sapiens
tggctttctggagtttctgacaata

SEQ ID NO: 24067 - DNA, 25 bp, Homo sapiens
ccgtgacgtagggtatgggcctaaa

SEQ ID NO: 24068 - DNA, 25 bp, Homo sapiens
tttcccactggcaaagagctcagca

SEQ ID NO: 24069 - DNA, 25 bp, Homo sapiens
ttacttctggggagacaattcagtc

SEQ ID NO: 24070 - DNA, 25 bp, Homo sapiens
tggctttctggagtttctgacaata

SEQ ID NO: 24071 - DNA, 25 bp, Homo sapiens
ccgtgacgtagggtatgggcctaaa

SEQ ID NO: 24072 - DNA, 25 bp, Homo sapiens
tttcccactggcaaagagctcagca

SEQ ID NO: 24073 - DNA, 25 bp, Homo sapiens
tgggcttttctgtcacctacctgct

SEQ ID NO: 24074 - DNA, 25 bp, Homo sapiens
ttcaaagacttgtggggagcactta

SEQ ID NO: 24075 - DNA, 25 bp, Homo sapiens
ctggtacccttcctagcatcaattc

SEQ ID NO: 24076 - DNA, 25 bp, Homo sapiens
gagaggtcttctgcacacacattga

SEQ ID NO: 24077 - DNA, 25 bp, Homo sapiens
tctccatcctgaggtgcctacaagg

SEQ ID NO: 24078 - DNA, 25 bp, Homo sapiens
gacacttgttcttatactgctttaa

SEQ ID NO: 24079 - DNA, 25 bp, Homo sapiens
aaaaaattcaataaagttacagctc

SEQ ID NO: 24080 - DNA, 25 bp, Homo sapiens
ccaacaattggacaggggtctcctc

SEQ ID NO: 24081 - DNA, 25 bp, Homo sapiens
cctttacttggtaggattgggaaaa

SEQ ID NO: 24082 - DNA, 25 bp, Homo sapiens
acatgaggtcccagcttcatgttca

SEQ ID NO: 24083 - DNA, 25 bp, Homo sapiens
tcacactggctcttctctcacctgt

SEQ ID NO: 24084 - DNA, 25 bp, Homo sapiens
catgttgcccagtcagtttctcttc

SEQ ID NO: 24085 - DNA, 25 bp, Homo sapiens
tggcccattttctcaactgcaatta

SEQ ID NO: 24086 - DNA, 25 bp, Homo sapiens
gcacctagtaacagctcagtaaata

SEQ ID NO: 24087 - DNA, 25 bp, Homo sapiens
cttgactaatcaaaagggccttctg

SEQ ID NO: 24088 - DNA, 25 bp, Homo sapiens
tctacatactactctgggtggcttg

SEQ ID NO: 24089 - DNA, 25 bp, Homo sapiens
cttcagtgagggcaagttggcaatc

SEQ ID NO: 24090 - DNA, 25 bp, Homo sapiens
cagaggtatcatgttgcccagcact

SEQ ID NO: 24091 - DNA, 25 bp, Homo sapiens
gctgggagtatctagacacctgacc

SEQ ID NO: 24092 - DNA, 25 bp, Homo sapiens
gggctctcacctatttccaaagctg

SEQ ID NO: 24093 - DNA, 25 bp, Homo sapiens
tcaccggacctttggcttttacagc

SEQ ID NO: 24094 - DNA, 25 bp, Homo sapiens
ctgacttgactgaagacgtacctga

SEQ ID NO: 24095 - DNA, 25 bp, Homo sapiens
ccactggttgttgctcttttttagg

SEQ ID NO: 24096 - DNA, 25 bp, Homo sapiens
tcctaagatccagggctttgcaata

SEQ ID NO: 24097 - DNA, 25 bp, Homo sapiens
cccgaccttacagatgcaagtttaa

SEQ ID NO: 24098 - DNA, 25 bp, Homo sapiens
tggcagaggcctacccaggagaaac

SEQ ID NO: 24099 - DNA, 25 bp, Homo sapiens
ccctcaggcccaaagggtttaatta

SEQ ID NO: 24100 - DNA, 25 bp, Homo sapiens
ttcccagatacagcgaaggtcctca

SEQ ID NO: 24101 - DNA, 25 bp, Homo sapiens
gagttgcgtctcctccactggattg

SEQ ID NO: 24102 - DNA, 25 bp, Homo sapiens
ccctgcagagcatgtggtaactttc

SEQ ID NO: 24103 - DNA, 25 bp, Homo sapiens
gacagctgtcgtgagtgttccatgc

SEQ ID NO: 24104 - DNA, 25 bp, Homo sapiens
ccagggtgcctctcataaagctaag

SEQ ID NO: 24105 - DNA, 25 bp, Homo sapiens
agggcccagccagcctcatgtttta

SEQ ID NO: 24106 - DNA, 25 bp, Homo sapiens
cctctgacggtcctttgtaatagca

SEQ ID NO: 24107 - DNA, 25 bp, Homo sapiens
gagagcttttcttccagcactcatg

SEQ ID NO: 24108 - DNA, 25 bp, Homo sapiens
tggcatgctctcagtcaaaggggta

SEQ ID NO: 24109 - DNA, 25 bp, Homo sapiens
attctccagagtatccaggtccttc

SEQ ID NO: 24110 - DNA, 25 bp, Homo sapiens
acgtgaacagttctggcctggagta

SEQ ID NO: 24111 - DNA, 25 bp, Homo sapiens
tctctttaaaagttgggatactata

SEQ ID NO: 24112 - DNA, 25 bp, Homo sapiens
attgcaattttctttgagattgccc

SEQ ID NO: 24113 - DNA, 25 bp, Homo sapiens
cccaagggcaggtagtaattttttc

SEQ ID NO: 24114 - DNA, 25 bp, Homo sapiens
acaaagatttttttataccaaacca

SEQ ID NO: 24115 - DNA, 25 bp, Homo sapiens
ggaaccttggaggacctattgctta

SEQ ID NO: 24116 - DNA, 25 bp, Homo sapiens
caatggaatgtggtgggatggattc

SEQ ID NO: 24117 - DNA, 25 bp, Homo sapiens
atgagtttggaatggacttgaatgc

SEQ ID NO: 24118 - DNA, 25 bp, Homo sapiens
ctgtatcagtcagagtccaagtata

SEQ ID NO: 24119 - DNA, 25 bp, Homo sapiens
agtgggctgctgctttcctttaatg

SEQ ID NO: 24120 - DNA, 25 bp, Homo sapiens
cccacaatttccttagagaatatcc

SEQ ID NO: 24121 - DNA, 25 bp, Homo sapiens
ctgtttctcaccaataagaggggtc

SEQ ID NO: 24122 - DNA, 25 bp, Homo sapiens
cacaggggactacagaatggacatc

SEQ ID NO: 24123 - DNA, 25 bp, Homo sapiens
cactgggcagaccaaatcaactttg

SEQ ID NO: 24124 - DNA, 25 bp, Homo sapiens
caccgtcgtcagcaatctatgttca

SEQ ID NO: 24125 - DNA, 25 bp, Homo sapiens
gcagggcctactgaataaattatta

SEQ ID NO: 24126 - DNA, 25 bp, Homo sapiens
ttttttaaaaagtcatatgatgcat

SEQ ID NO: 24127 - DNA, 25 bp, Homo sapiens
atgcccagggacacagaaacttttg

SEQ ID NO: 24128 - DNA, 25 bp, Homo sapiens
cctcctgccttgagtgaagagcatc

SEQ ID NO: 24129 - DNA, 25 bp, Homo sapiens
cacaggttcaggctttaccacagtc

SEQ ID NO: 24130 - DNA, 25 bp, Homo sapiens
ccctgctggccagtgtgtaaatatc

SEQ ID NO: 24131 - DNA, 25 bp, Homo sapiens
cttctcccaaggtgcaatagccatg

SEQ ID NO: 24132 - DNA, 25 bp, Homo sapiens
agcagctggagccatagcacctttg

SEQ ID NO: 24133 - DNA, 25 bp, Homo sapiens
ttcccatcagcatcaggggttcatg

SEQ ID NO: 24134 - DNA, 25 bp, Homo sapiens
cttctgttgctgtgtatagtactcc

SEQ ID NO: 24135 - DNA, 25 bp, Homo sapiens
ggcaatgctggatactgggctgtta

SEQ ID NO: 24136 - DNA, 25 bp, Homo sapiens
tgccggtcatcgttctttgacaaga

SEQ ID NO: 24137 - DNA, 25 bp, Homo sapiens
agcctgggctcacaaatgacaacta

SEQ ID NO: 24138 - DNA, 25 bp, Homo sapiens
cacagggcacaaacgcacttgtata

SEQ ID NO: 24139 - DNA, 25 bp, Homo sapiens
agttgctgataattcccaccctggc

SEQ ID NO: 24140 - DNA, 25 bp, Homo sapiens
actggggtgtccatcagctaactgc

SEQ ID NO: 24141 - DNA, 25 bp, Homo sapiens
acaggcaactttataaaactctttg

SEQ ID NO: 24142 - DNA, 25 bp, Homo sapiens
ccaagcttggtctctgatgatactc

SEQ ID NO: 24143 - DNA, 25 bp, Homo sapiens
tggctcacaggctgcaaaagttctg

SEQ ID NO: 24144 - DNA, 25 bp, Homo sapiens
ggcggcctgagcaatctagattttc

SEQ ID NO: 24145 - DNA, 25 bp, Homo sapiens
gcctggccagtagatccacgctatc

SEQ ID NO: 24146 - DNA, 25 bp, Homo sapiens
ggccagcagattcacccagtctaca

SEQ ID NO: 24147 - DNA, 25 bp, Homo sapiens
ctgcccagaagatgcgccatgtcta

SEQ ID NO: 24148 - DNA, 25 bp, Homo sapiens
ggccagcagatccaccctgtctata

SEQ ID NO: 24149 - DNA, 25 bp, Homo sapiens
ggaggaaccctcagacatttgcaga

SEQ ID NO: 24150 - DNA, 25 bp, Homo sapiens
catggcagctgtgggtatatcaact

SEQ ID NO: 24151 - DNA, 25 bp, Homo sapiens
gccctctctgctactgacggtcaag

SEQ ID NO: 24152 - DNA, 25 bp, Homo sapiens
ctgccagtgtctccgccggttgaaa

SEQ ID NO: 24153 - DNA, 25 bp, Homo sapiens
accaccctggagttcatatagagga

SEQ ID NO: 24154 - DNA, 25 bp, Homo sapiens
gctggtgttctatgcaggtgtatta

SEQ ID NO: 24155 - DNA, 25 bp, Homo sapiens
cctgttgactcctgaccatctgttc

SEQ ID NO: 24156 - DNA, 25 bp, Homo sapiens
tgttggacagatgagctccctctta

SEQ ID NO: 24157 - DNA, 25 bp, Homo sapiens
aggttcgatggccagagttctttca

SEQ ID NO: 24158 - DNA, 25 bp, Homo sapiens
ccactgcttggtttggggcaatttc

SEQ ID NO: 24159 - DNA, 25 bp, Homo sapiens
ctcaagcgagtggaatgacggtttc

SEQ ID NO: 24160 - DNA, 25 bp, Homo sapiens
tacttcacagccaggatccgggatc

SEQ ID NO: 24161 - DNA, 25 bp, Homo sapiens
gctggtgatactccctctgcctgga

SEQ ID NO: 24162 - DNA, 25 bp, Homo sapiens
ctcctgagggatggaactttgtgtc

SEQ ID NO: 24163 - DNA, 25 bp, Homo sapiens
gagtagaattttgggtacataattg

SEQ ID NO: 24164 - DNA, 25 bp, Homo sapiens
agcctgtgcacctctctgacgataa

SEQ ID NO: 24165 - DNA, 25 bp, Homo sapiens
cagggagtcctgcaccattcttcaa

SEQ ID NO: 24166 - DNA, 25 bp, Homo sapiens
gaggccgtgctcatggcaccattta

SEQ ID NO: 24167 - DNA, 25 bp, Homo sapiens
ctgccagtgtggattcgaaccgata

SEQ ID NO: 24168 - DNA, 25 bp, Homo sapiens
aggccgagcctcactctagaagtca

SEQ ID NO: 24169 - DNA, 25 bp, Homo sapiens
agtcacttatctcagggcgctttca

SEQ ID NO: 24170 - DNA, 25 bp, Homo sapiens
ccttggatcagcagtcagttcgtta

SEQ ID NO: 24171 - DNA, 25 bp, Homo sapiens
agcatcttcgctttgaggcctcata

SEQ ID NO: 24172 - DNA, 25 bp, Homo sapiens
aactcgtttctatgtgcccagtagg

SEQ ID NO: 24173 - DNA, 25 bp, Homo sapiens
acagaggacaatttctaaaaggcaa

SEQ ID NO: 24174 - DNA, 25 bp, Homo sapiens
tactgcctcgtttggcctgaaaatg

SEQ ID NO: 24175 - DNA, 25 bp, Homo sapiens
acacggggcttttaagtgcctctcc

SEQ ID NO: 24176 - DNA, 25 bp, Homo sapiens
cgagcgttttcctagcgttactttc

SEQ ID NO: 24177 - DNA, 25 bp, Homo sapiens
tgtttccgttgcatgaaccttcgta

SEQ ID NO: 24178 - DNA, 25 bp, Homo sapiens
ttaacgcagtggagtgccacctgcc

SEQ ID NO: 24179 - DNA, 25 bp, Homo sapiens
tgaatttctatccacatgacgccgg

SEQ ID NO: 24180 - DNA, 25 bp, Homo sapiens
agctggcttctctaccctgtacctg

SEQ ID NO: 24181 - DNA, 25 bp, Homo sapiens
ccacactcggtggatgggcattttg

SEQ ID NO: 24182 - DNA, 25 bp, Homo sapiens
tccctcgctgtgttagtgtgaaaaa

SEQ ID NO: 24183 - DNA, 25 bp, Homo sapiens
gaggcctctcctctgcagcacagtg

SEQ ID NO: 24184 - DNA, 25 bp, Homo sapiens
tgcggccagaagatcctccacaaga

SEQ ID NO: 24185 - DNA, 25 bp, Homo sapiens
cacggggagctttcctcgaagaata

SEQ ID NO: 24186 - DNA, 25 bp, Homo sapiens
ggtctcgcggaaatactcatgcttg

SEQ ID NO: 24187 - DNA, 25 bp, Homo sapiens
atccagttgtcgtgcaggtgtttca

SEQ ID NO: 24188 - DNA, 25 bp, Homo sapiens
ggcagtgcccaaagcgccagcattt

SEQ ID NO: 24189 - DNA, 25 bp, Homo sapiens
ggagcagctcagttctttcaaagtc

SEQ ID NO: 24190 - DNA, 25 bp, Homo sapiens
ggccactggtaccttctcaggcttg

SEQ ID NO: 24191 - DNA, 25 bp, Homo sapiens
ggacataacctcactgcctgtcgga

SEQ ID NO: 24192 - DNA, 25 bp, Homo sapiens
cctgagcctgattccgctgtagaaa

SEQ ID NO: 24193 - DNA, 25 bp, Homo sapiens
cccaggtggaccttctagactgatc

SEQ ID NO: 24194 - DNA, 25 bp, Homo sapiens
ggcaggggcgaaaagcaagcaccgg

SEQ ID NO: 24195 - DNA, 25 bp, Homo sapiens
ttgttaccaccaaggcctgtctggt

SEQ ID NO: 24196 - DNA, 25 bp, Homo sapiens
caagctctactctcgtgggacaaga

SEQ ID NO: 24197 - DNA, 25 bp, Homo sapiens
cccggcgagctttatcctgttcttc

SEQ ID NO: 24198 - DNA, 25 bp, Homo sapiens
cgggctccaggtccaattttcctaa

SEQ ID NO: 24199 - DNA, 25 bp, Homo sapiens
ggtctgtgacacacgcaggctttta

SEQ ID NO: 24200 - DNA, 25 bp, Homo sapiens
cccttctgctgaatggctatgatgc

SEQ ID NO: 24201 - DNA, 25 bp, Homo sapiens
ttgtgcagatggaacgaaatgcctc

SEQ ID NO: 24202 - DNA, 25 bp, Homo sapiens
tgccctgtcacagtaatcctaggtc

SEQ ID NO: 24203 - DNA, 25 bp, Homo sapiens
gttgggtcttgcacatctgtacatc

SEQ ID NO: 24204 - DNA, 25 bp, Homo sapiens
ggctcacctgcgacatttggaagta

SEQ ID NO: 24205 - DNA, 25 bp, Homo sapiens
tgtgctcgcgaacaaggccacctga

SEQ ID NO: 24206 - DNA, 25 bp, Homo sapiens
gcctcaggtctgtgtgtcttgtaaa

SEQ ID NO: 24207 - DNA, 25 bp, Homo sapiens
tcccggaatgaaatgctgcttgctt

SEQ ID NO: 24208 - DNA, 25 bp, Homo sapiens
aaaaatctccagtttacccttcctt

SEQ ID NO: 24209 - DNA, 25 bp, Homo sapiens
cccagcagggcacgtacatacattg

SEQ ID NO: 24210 - DNA, 25 bp, Homo sapiens
gccaccctgggagttgctttcaatc

SEQ ID NO: 24211 - DNA, 25 bp, Homo sapiens
acaagccctggagctctgggtctca

SEQ ID NO: 24212 - DNA, 25 bp, Homo sapiens
gtacacagtgttaggaccgtgcaaa

SEQ ID NO: 24213 - DNA, 25 bp, Homo sapiens
gcggccacttttcctgtctcggaga

SEQ ID NO: 24214 - DNA, 25 bp, Homo sapiens
cccgtttctagagctgcaccgcatg

SEQ ID NO: 24215 - DNA, 25 bp, Homo sapiens
cacgtcctggttgtagctgaagctc

SEQ ID NO: 24216 - DNA, 25 bp, Homo sapiens
gcccagctcagggaactgattatta

SEQ ID NO: 24217 - DNA, 25 bp, Homo sapiens
gaggactcggtcttcccaggtgaaa

SEQ ID NO: 24218 - DNA, 25 bp, Homo sapiens
gcccgtcctcttcggatcagtgatt

SEQ ID NO: 24219 - DNA, 25 bp, Homo sapiens
gccgggccttgtgctgatataaaca

SEQ ID NO: 24220 - DNA, 25 bp, Homo sapiens
tggcggatccttgctcttgagagac

SEQ ID NO: 24221 - DNA, 25 bp, Homo sapiens
gtctcgagatagatccagccctatg

SEQ ID NO: 24222 - DNA, 25 bp, Homo sapiens
ggacagttgtccatgctgccaggca

SEQ ID NO: 24223 - DNA, 25 bp, Homo sapiens
acagaggacaatttctaaaaggcaa

SEQ ID NO: 24224 - DNA, 25 bp, Homo sapiens
tactgcctcgtttggcctgaaaatg

SEQ ID NO: 24225 - DNA, 25 bp, Homo sapiens
acacggggcttttaagtgcctctcc

SEQ ID NO: 24226 - DNA, 25 bp, Homo sapiens
cgagcgttttcctagcgttactttc

SEQ ID NO: 24227 - DNA, 25 bp, Homo sapiens
ttgtgttgattatatgagctttgac

SEQ ID NO: 24228 - DNA, 25 bp, Homo sapiens
agcgcactgcctgtctctgagtgta

SEQ ID NO: 24229 - DNA, 25 bp, Homo sapiens
gatgccgccgtttcaggctcgaaaa

SEQ ID NO: 24230 - DNA, 25 bp, Homo sapiens
cacactcagggtttttggacgctca

SEQ ID NO: 24231 - DNA, 25 bp, Homo sapiens
caggggcttccctgcagaagtttta

SEQ ID NO: 24232 - DNA, 25 bp, Homo sapiens
cccgactgtgatgctgcaagaccca

SEQ ID NO: 24233 - DNA, 25 bp, Homo sapiens
tccgtccaggtagacatccacattg

SEQ ID NO: 24234 - DNA, 25 bp, Homo sapiens
ctcctgtgggctccagaacattcca

SEQ ID NO: 24235 - DNA, 25 bp, Homo sapiens
cgctctaggtgactgctctcgtata

SEQ ID NO: 24236 - DNA, 25 bp, Homo sapiens
cccagcacttgaggtggttcccatg

SEQ ID NO: 24237 - DNA, 25 bp, Homo sapiens
gggattcccattaccacgttagtca

SEQ ID NO: 24238 - DNA, 25 bp, Homo sapiens
tgtgtgaccacaaaccagcgcctcg

SEQ ID NO: 24239 - DNA, 25 bp, Homo sapiens
cgcctcaggcatttggcagcagtga

SEQ ID NO: 24240 - DNA, 25 bp, Homo sapiens
ggcctccaggcagaatgtgttgaca

SEQ ID NO: 24241 - DNA, 25 bp, Homo sapiens
ggccagcctgggatcagaattcctc

SEQ ID NO: 24242 - DNA, 25 bp, Homo sapiens
cggacttgtttacctcagcctttta

SEQ ID NO: 24243 - DNA, 25 bp, Homo sapiens
tcactgggtaagacaacatgctttc

SEQ ID NO: 24244 - DNA, 25 bp, Homo sapiens
tgtaactccaggtctcatcgccgtg

SEQ ID NO: 24245 - DNA, 25 bp, Homo sapiens
tgttgtgaactccatgccttgcatc

SEQ ID NO: 24246 - DNA, 25 bp, Homo sapiens
ggtcggttcaatcccatcaaagctg

SEQ ID NO: 24247 - DNA, 25 bp, Homo sapiens
tgctacggtcaaagccaacgggttc

SEQ ID NO: 24248 - DNA, 25 bp, Homo sapiens
gacataccagtgttttattcaaata

SEQ ID NO: 24249 - DNA, 25 bp, Homo sapiens
tggaaaaagtcttagtggtgtttaa

SEQ ID NO: 24250 - DNA, 25 bp, Homo sapiens
acaaatcaaaatcacaaaatgttaa

SEQ ID NO: 24251 - DNA, 25 bp, Homo sapiens
gtgcattcaaattcctcatagcatg

SEQ ID NO: 24252 - DNA, 25 bp, Homo sapiens
cctggggttacaagctaaagcatta

SEQ ID NO: 24253 - DNA, 25 bp, Homo sapiens
ggtggcacctgtgattcctcaagta

SEQ ID NO: 24254 - DNA, 25 bp, Homo sapiens
tgcttgctgaaaccacccacggaag

SEQ ID NO: 24255 - DNA, 25 bp, Homo sapiens
cgcttccctaattaccgggctgtga

SEQ ID NO: 24256 - DNA, 25 bp, Homo sapiens
cggcctggccaagtcttcctgaaaa

SEQ ID NO: 24257 - DNA, 25 bp, Homo sapiens
caccattacagtttttataaaaaca

SEQ ID NO: 24258 - DNA, 25 bp, Homo sapiens
gcatgttccacaccctgaattaata

SEQ ID NO: 24259 - DNA, 25 bp, Homo sapiens
tgctacaggactgcacacagacatg

SEQ ID NO: 24260 - DNA, 25 bp, Homo sapiens
gcacccaatggtaggcactgacaca

SEQ ID NO: 24261 - DNA, 25 bp, Homo sapiens
gcctgccatatggtcaagccagatt

SEQ ID NO: 24262 - DNA, 25 bp, Homo sapiens
ggggcacaggcacctcagaacttaa

SEQ ID NO: 24263 - DNA, 25 bp, Homo sapiens
aacatcggcgttttccttcaggagc

SEQ ID NO: 24264 - DNA, 25 bp, Homo sapiens
gttattttcccatttcccgacgccg

SEQ ID NO: 24265 - DNA, 25 bp, Homo sapiens
tgtgcgcgtccaaaccgcatcgggc

SEQ ID NO: 24266 - DNA, 25 bp, Homo sapiens
ctctcagctgacgttttccttcttg

SEQ ID NO: 24267 - DNA, 25 bp, Homo sapiens
acctcgtgtagttcaggcctttgcg

SEQ ID NO: 24268 - DNA, 25 bp, Homo sapiens
tggcccaggcagaaatcctatttga

SEQ ID NO: 24269 - DNA, 25 bp, Homo sapiens
ctgcaggggacgtttctagatttcc

SEQ ID NO: 24270 - DNA, 25 bp, Homo sapiens
gggcatgtttcctctccctgctaga

SEQ ID NO: 24271 - DNA, 25 bp, Homo sapiens
cccattcaaggagtgacagaccttt

SEQ ID NO: 24272 - DNA, 25 bp, Homo sapiens
catgcacacatgagctgggtataca

SEQ ID NO: 24273 - DNA, 25 bp, Homo sapiens
ctctcaacacaaaggcagggctgtc

SEQ ID NO: 24274 - DNA, 25 bp, Homo sapiens
tggggctctgaaccctcaagatccc

SEQ ID NO: 24275 - DNA, 25 bp, Homo sapiens
aagcttcctggcctgaggtgtcacc

SEQ ID NO: 24276 - DNA, 25 bp, Homo sapiens
gggttctgcctcatgagctactgta

SEQ ID NO: 24277 - DNA, 25 bp, Homo sapiens
catcacctgttttctgaaaaaagat

SEQ ID NO: 24278 - DNA, 25 bp, Homo sapiens
tctagaatgctgtcctgaggctcca

SEQ ID NO: 24279 - DNA, 25 bp, Homo sapiens
tcaggccttgattgggcaccgagct

SEQ ID NO: 24280 - DNA, 25 bp, Homo sapiens
cacaggctgtgccacgtgaacgtca

SEQ ID NO: 24281 - DNA, 25 bp, Homo sapiens
gcccagggcattgtctctagctatc

SEQ ID NO: 24282 - DNA, 25 bp, Homo sapiens
gccctgccggctctgatttaagtcc

SEQ ID NO: 24283 - DNA, 25 bp, Homo sapiens
aattggcccgtgtgattgcactgta

SEQ ID NO: 24284 - DNA, 25 bp, Homo sapiens
tctttttctgttttcttatggagaa

SEQ ID NO: 24285 - DNA, 25 bp, Homo sapiens
tcttcatgccatcaaggggccagtc

SEQ ID NO: 24286 - DNA, 25 bp, Homo sapiens
accgacatggtaaggctgctctctg

SEQ ID NO: 24287 - DNA, 25 bp, Homo sapiens
agggttcttcaactgcgatggtttc

SEQ ID NO: 24288 - DNA, 25 bp, Homo sapiens
ggagtcccagagtccttcccacata

SEQ ID NO: 24289 - DNA, 25 bp, Homo sapiens
gagcaaggctctaccactggactga

SEQ ID NO: 24290 - DNA, 25 bp, Homo sapiens
cccaacgtgttcagagggcttgtcc

SEQ ID NO: 24291 - DNA, 25 bp, Homo sapiens
gggctctgcctgaagttgcctttca

SEQ ID NO: 24292 - DNA, 25 bp, Homo sapiens
ctgctcacctttgcttggggtcatc

SEQ ID NO: 24293 - DNA, 25 bp, Homo sapiens
gcgacgctgtctatgctgaactcaa

SEQ ID NO: 24294 - DNA, 25 bp, Homo sapiens
agccagagccgcaccttttcaaaga

SEQ ID NO: 24295 - DNA, 25 bp, Homo sapiens
cggtttattgagctgtgtgccaaca

SEQ ID NO: 24296 - DNA, 25 bp, Homo sapiens
gggcccacgtgtgcttcaccttgaa

SEQ ID NO: 24297 - DNA, 25 bp, Homo sapiens
cctgtctttgatgtcgccactggca

SEQ ID NO: 24298 - DNA, 25 bp, Homo sapiens
gtggcgtctgcttcaccagaggata

SEQ ID NO: 24299 - DNA, 25 bp, Homo sapiens
gagcctgcccttgccttgagtttga

SEQ ID NO: 24300 - DNA, 25 bp, Homo sapiens
gcgccgctgacaagtttcgaaaata

SEQ ID NO: 24301 - DNA, 25 bp, Homo sapiens
actcactaaaattatttttgagtgg

SEQ ID NO: 24302 - DNA, 25 bp, Homo sapiens
ggcctcaaacctgatgggtccaaca

SEQ ID NO: 24303 - DNA, 25 bp, Homo sapiens
taggctgtaggtacacacgtgtgta

SEQ ID NO: 24304 - DNA, 25 bp, Homo sapiens
gcattcctgacagtgacgggctctg

SEQ ID NO: 24305 - DNA, 25 bp, Homo sapiens
gaactgggctcccttctgagagtga

SEQ ID NO: 24306 - DNA, 25 bp, Homo sapiens
cgcctggggtccagtttcatctctc

SEQ ID NO: 24307 - DNA, 25 bp, Homo sapiens
caggcctctctgcacccaggtttga

SEQ ID NO: 24308 - DNA, 25 bp, Homo sapiens
tcccactggcttgttctgagacata

SEQ ID NO: 24309 - DNA, 25 bp, Homo sapiens
ctcccgggagcaacacaagtgactg

SEQ ID NO: 24310 - DNA, 25 bp, Homo sapiens
gtacccgtagcaagccagagcctta

SEQ ID NO: 24311 - DNA, 25 bp, Homo sapiens
acggccacaggcctcggttatgaca

SEQ ID NO: 24312 - DNA, 25 bp, Homo sapiens
tctgatgtctggagcccttgccaaa

SEQ ID NO: 24313 - DNA, 25 bp, Homo sapiens
cggctgtggcacttttcatatcata

SEQ ID NO: 24314 - DNA, 25 bp, Homo sapiens
agccgaggactctgaacactgtcga

SEQ ID NO: 24315 - DNA, 25 bp, Homo sapiens
cccagcccttggaggacttactgtc

SEQ ID NO: 24316 - DNA, 25 bp, Homo sapiens
caggactttttgttgactttgcacc

SEQ ID NO: 24317 - DNA, 25 bp, Homo sapiens
tgatgcctgataatacccatgtctg

SEQ ID NO: 24318 - DNA, 25 bp, Homo sapiens
accgcagtactttctgttgtttctg

SEQ ID NO: 24319 - DNA, 25 bp, Homo sapiens
ggttagttcctacagtatagaaaat

SEQ ID NO: 24320 - DNA, 25 bp, Homo sapiens
tgtttccagttctgaggccaattta

SEQ ID NO: 24321 - DNA, 25 bp, Homo sapiens
actttggtattagctgatgccagtg

SEQ ID NO: 24322 - DNA, 25 bp, Homo sapiens
ggcggctttgtcatacaagctttta

SEQ ID NO: 24323 - DNA, 25 bp, Homo sapiens
taccacgtagctgccgaagtcaatg

SEQ ID NO: 24324 - DNA, 25 bp, Homo sapiens
gggcacgtgctccatgatgctgatc

SEQ ID NO: 24325 - DNA, 25 bp, Homo sapiens
ctccacacagagcagggtttgtctc

SEQ ID NO: 24326 - DNA, 25 bp, Homo sapiens
cggttctgcccagcattcaggaata

SEQ ID NO: 24327 - DNA, 25 bp, Homo sapiens
caggccaactgccaggaaatgggac

SEQ ID NO: 24328 - DNA, 25 bp, Homo sapiens
ccctctggagcctgggcagcaaggg

SEQ ID NO: 24329 - DNA, 25 bp, Homo sapiens
tcggacctgagggcttatgcccata

SEQ ID NO: 24330 - DNA, 25 bp, Homo sapiens
cccgggttttccagcgttaaaaagc

SEQ ID NO: 24331 - DNA, 25 bp, Homo sapiens
gcacacactgggctttctcagatga

SEQ ID NO: 24332 - DNA, 25 bp, Homo sapiens
ccctggataagctcactggaaacga

SEQ ID NO: 24333 - DNA, 25 bp, Homo sapiens
gaaaggaccttctctggtgccctga

SEQ ID NO: 24334 - DNA, 25 bp, Homo sapiens
aaggcgttttgctcaccagtgtgta

SEQ ID NO: 24335 - DNA, 25 bp, Homo sapiens
cctgcgccaggctaagggatgtata

SEQ ID NO: 24336 - DNA, 25 bp, Homo sapiens
tggcacggtcccatgcttggaactt

SEQ ID NO: 24337 - DNA, 25 bp, Homo sapiens
aacccgtgggcaaatctgtggcaca

SEQ ID NO: 24338 - DNA, 25 bp, Homo sapiens
agcccgagctccttctgggtgttca

SEQ ID NO: 24339 - DNA, 25 bp, Homo sapiens
tgatcctcagcagtcggttccgctc

SEQ ID NO: 24340 - DNA, 25 bp, Homo sapiens
ttgagccggcatcctcactgcattg

SEQ ID NO: 24341 - DNA, 25 bp, Homo sapiens
tccacgggcgggttatttctattcc

SEQ ID NO: 24342 - DNA, 25 bp, Homo sapiens
gaggctgattgggaaagattgggat

SEQ ID NO: 24343 - DNA, 25 bp, Homo sapiens
ggagagtcctgtgccctttgaaagc

SEQ ID NO: 24344 - DNA, 25 bp, Homo sapiens
cgaggctgcacagaacacgtgtgtc

SEQ ID NO: 24345 - DNA, 25 bp, Homo sapiens
agagactgtatctaagccaccggca

SEQ ID NO: 24346 - DNA, 25 bp, Homo sapiens
acacacccgtgctatttcgtttctg

SEQ ID NO: 24347 - DNA, 25 bp, Homo sapiens
ggacacccagccgtggtcacatgcg

SEQ ID NO: 24348 - DNA, 25 bp, Homo sapiens
tggagcacccagaccaatcctgatg

SEQ ID NO: 24349 - DNA, 25 bp, Homo sapiens
ctggggttcattagccctgtgaagc

SEQ ID NO: 24350 - DNA, 25 bp, Homo sapiens
tgcaggtctctctcgttctccagct

SEQ ID NO: 24351 - DNA, 25 bp, Homo sapiens
ctcccggagcaatgcctgttggtga

SEQ ID NO: 24352 - DNA, 25 bp, Homo sapiens
tcaggcctcaggtacaaacaacgga

SEQ ID NO: 24353 - DNA, 25 bp, Homo sapiens
atgcatcttatccagggcgctcagg

SEQ ID NO: 24354 - DNA, 25 bp, Homo sapiens
cacccggccagtgttaggataaatc

SEQ ID NO: 24355 - DNA, 25 bp, Homo sapiens
atcggccaaaagctcgtcctcaggg

SEQ ID NO: 24356 - DNA, 25 bp, Homo sapiens
aatttcaaaattatcattacacttt

SEQ ID NO: 24357 - DNA, 25 bp, Homo sapiens
ggtggctgttttctattagacctta

SEQ ID NO: 24358 - DNA, 25 bp, Homo sapiens
tgcttgtgaattccatgcggcctcc

SEQ ID NO: 24359 - DNA, 25 bp, Homo sapiens
gccggataggactgtactttaattc

SEQ ID NO: 24360 - DNA, 25 bp, Homo sapiens
ttcactatgggagctactttaaaca

SEQ ID NO: 24361 - DNA, 25 bp, Homo sapiens
tttttctaaaagaaagtctaaataa

SEQ ID NO: 24362 - DNA, 25 bp, Homo sapiens
ggttcggaggaccaggacatgggtt

SEQ ID NO: 24363 - DNA, 25 bp, Homo sapiens
ccaagcctgggagtgatgacatatt

SEQ ID NO: 24364 - DNA, 25 bp, Homo sapiens
tgttaaagaatgtatgtggtattac

SEQ ID NO: 24365 - DNA, 25 bp, Homo sapiens
caggctggcccttgatttttgttta

SEQ ID NO: 24366 - DNA, 25 bp, Homo sapiens
tatgttccagcaaaggctccaactg

SEQ ID NO: 24367 - DNA, 25 bp, Homo sapiens
ccagcccaggttcgcttttataaga

SEQ ID NO: 24368 - DNA, 25 bp, Homo sapiens
tctggggcagaaggacacaggaata

SEQ ID NO: 24369 - DNA, 25 bp, Homo sapiens
attcctgggattgtgctggactaca

SEQ ID NO: 24370 - DNA, 25 bp, Homo sapiens
cacctttggagggtgctggatacta

SEQ ID NO: 24371 - DNA, 25 bp, Homo sapiens
tggccagacgagccccagtgccagg

SEQ ID NO: 24372 - DNA, 25 bp, Homo sapiens
tggggcgcggcccatacagaaacag

SEQ ID NO: 24373 - DNA, 25 bp, Homo sapiens
ggctctgctagaaatccactaccac

SEQ ID NO: 24374 - DNA, 25 bp, Homo sapiens
tcccgttaatgagctgccgcgagtt

SEQ ID NO: 24375 - DNA, 25 bp, Homo sapiens
cttccagagccaaaggtgcacgttc

SEQ ID NO: 24376 - DNA, 25 bp, Homo sapiens
ggaagccgactggttatgcacatca

SEQ ID NO: 24377 - DNA, 25 bp, Homo sapiens
caacgctgcttctcagaggtgatca

SEQ ID NO: 24378 - DNA, 25 bp, Homo sapiens
tcggggacagcttcgccatttttaa

SEQ ID NO: 24379 - DNA, 25 bp, Homo sapiens
tttcaaatggcgtgggcagaactcc

SEQ ID NO: 24380 - DNA, 25 bp, Homo sapiens
tgcagtcactcccatccctggaaga

SEQ ID NO: 24381 - DNA, 25 bp, Homo sapiens
cccgaggtctccgtgacataccaga

SEQ ID NO: 24382 - DNA, 25 bp, Homo sapiens
cgggtttaagatttggacctgctca

SEQ ID NO: 24383 - DNA, 25 bp, Homo sapiens
ccgagctgctccgaggttgagctaa

SEQ ID NO: 24384 - DNA, 25 bp, Homo sapiens
gccggcctcagtccttcttagttct

SEQ ID NO: 24385 - DNA, 25 bp, Homo sapiens
agaagctgcgcggttatttatatcc

SEQ ID NO: 24386 - DNA, 25 bp, Homo sapiens
gaaatccagttcttgacggtcctaa

SEQ ID NO: 24387 - DNA, 25 bp, Homo sapiens
cgcccgcctgtggttttcatgcttt

SEQ ID NO: 24388 - DNA, 25 bp, Homo sapiens
accgcggcgtgtacatcatccaatc

SEQ ID NO: 24389 - DNA, 25 bp, Homo sapiens
ggcccatcgacgcagacaccattga

SEQ ID NO: 24390 - DNA, 25 bp, Homo sapiens
tcctggggctcaacactagacttgg

SEQ ID NO: 24391 - DNA, 25 bp, Homo sapiens
accaggctctgttgtggccacaagc

SEQ ID NO: 24392 - DNA, 25 bp, Homo sapiens
ccatcccagcagagacaagtctttg

SEQ ID NO: 24393 - DNA, 25 bp, Homo sapiens
gagccaaggggaatgtgcctccata

SEQ ID NO: 24394 - DNA, 25 bp, Homo sapiens
tccggcggatgccatgttaagcttg

SEQ ID NO: 24395 - DNA, 25 bp, Homo sapiens
ggctctcctccaaccaatggtcatg

SEQ ID NO: 24396 - DNA, 25 bp, Homo sapiens
ttgctgggacgtgaaatccaccatc

SEQ ID NO: 24397 - DNA, 25 bp, Homo sapiens
tccatggctgcacagaggtcttctc

SEQ ID NO: 24398 - DNA, 25 bp, Homo sapiens
gcgcttttctctcttgccttgctga

SEQ ID NO: 24399 - DNA, 25 bp, Homo sapiens
gctggcttgcatccactgaggctga

SEQ ID NO: 24400 - DNA, 25 bp, Homo sapiens
ctattgcttttcctgctgcctggta

SEQ ID NO: 24401 - DNA, 25 bp, Homo sapiens
gcatggctccttctgtcctagcaga

SEQ ID NO: 24402 - DNA, 25 bp, Homo sapiens
ggccctggcactcagtctttgaata

SEQ ID NO: 24403 - DNA, 25 bp, Homo sapiens
ctgtgccttctggtgagactcagcc

SEQ ID NO: 24404 - DNA, 25 bp, Homo sapiens
gcggggacgacttaaaaacaggatt

SEQ ID NO: 24405 - DNA, 25 bp, Homo sapiens
tctgcactcctgtggttctctgaca

SEQ ID NO: 24406 - DNA, 25 bp, Homo sapiens
ctgaggtggaaaagcctggccttta

SEQ ID NO: 24407 - DNA, 25 bp, Homo sapiens
ggccttgctgcctccttggatcaga

SEQ ID NO: 24408 - DNA, 25 bp, Homo sapiens
gaaccgacggcttgtatttaaaacg

SEQ ID NO: 24409 - DNA, 25 bp, Homo sapiens
ctcgcagcttcagtccgcaagtgtg

SEQ ID NO: 24410 - DNA, 25 bp, Homo sapiens
actcctggcgggtttcttaaaatca

SEQ ID NO: 24411 - DNA, 25 bp, Homo sapiens
cctgtggcaagcacctggaaccttc

SEQ ID NO: 24412 - DNA, 25 bp, Homo sapiens
gggccctctgagcacacttgagatc

SEQ ID NO: 24413 - DNA, 25 bp, Homo sapiens
gtatctctggttgggacatctcaca

SEQ ID NO: 24414 - DNA, 25 bp, Homo sapiens
gggacatcttcatcaccagcgtgga

SEQ ID NO: 24415 - DNA, 25 bp, Homo sapiens
tgcacggtgtcctcccagatggagc

SEQ ID NO: 24416 - DNA, 25 bp, Homo sapiens
ccgggctacctggttacaacactta

SEQ ID NO: 24417 - DNA, 25 bp, Homo sapiens
ttgcctctctatgtggaaagataca

SEQ ID NO: 24418 - DNA, 25 bp, Homo sapiens
gggacttcctccgtgagactgttga

SEQ ID NO: 24419 - DNA, 25 bp, Homo sapiens
accaccaggtggttttggcagcgca

SEQ ID NO: 24420 - DNA, 25 bp, Homo sapiens
gctctccctgatgtcctgtgctttc

SEQ ID NO: 24421 - DNA, 25 bp, Homo sapiens
cctttttatggctggatgaattctg

SEQ ID NO: 24422 - DNA, 25 bp, Homo sapiens
ctggggctgctgtcaactcttgatt

SEQ ID NO: 24423 - DNA, 25 bp, Homo sapiens
cccattggagcgagtgttgatacct

SEQ ID NO: 24424 - DNA, 25 bp, Homo sapiens
tgactactgcctttgcctctgggta

SEQ ID NO: 24425 - DNA, 25 bp, Homo sapiens
tgcctgctgagcctgaatatcctag

SEQ ID NO: 24426 - DNA, 25 bp, Homo sapiens
acttgccagtgatgaccaggtccca

SEQ ID NO: 24427 - DNA, 25 bp, Homo sapiens
cgccgcgcacagagcataaagaatc

SEQ ID NO: 24428 - DNA, 25 bp, Homo sapiens
gcggcgtcctgttttctattctgaa

SEQ ID NO: 24429 - DNA, 25 bp, Homo sapiens
tccgaggctcccagttaatcagatc

SEQ ID NO: 24430 - DNA, 25 bp, Homo sapiens
gcccggcagctcatttctaggattc

SEQ ID NO: 24431 - DNA, 25 bp, Homo sapiens
atcccgtgaggctgtgtcaagtgta

SEQ ID NO: 24432 - DNA, 25 bp, Homo sapiens
cgtcccggctgagaagcaccgcggt

SEQ ID NO: 24433 - DNA, 25 bp, Homo sapiens
tgagctgctgtgtccacctggaaac

SEQ ID NO: 24434 - DNA, 25 bp, Homo sapiens
agccggagctccagcatcatgccaa

SEQ ID NO: 24435 - DNA, 25 bp, Homo sapiens
gcgttcctagcgaccggttttgtga

SEQ ID NO: 24436 - DNA, 25 bp, Homo sapiens
gtctctgattccagctccgggctca

SEQ ID NO: 24437 - DNA, 25 bp, Homo sapiens
cgccgcttcaccatatggcagaaca

SEQ ID NO: 24438 - DNA, 25 bp, Homo sapiens
tgcgcacggtgctttttgccaaacc

SEQ ID NO: 24439 - DNA, 25 bp, Homo sapiens
ggccagggcttctcagcattctttt

SEQ ID NO: 24440 - DNA, 25 bp, Homo sapiens
ccgggtacccactaacagaaaatgc

SEQ ID NO: 24441 - DNA, 25 bp, Homo sapiens
tgctcttgcttgtactccctggtga

SEQ ID NO: 24442 - DNA, 25 bp, Homo sapiens
cacccatggttttgtagccgtcagg

SEQ ID NO: 24443 - DNA, 25 bp, Homo sapiens
ttgttccatgcggacccaccgatta

SEQ ID NO: 24444 - DNA, 25 bp, Homo sapiens
gagggcctcagatcaccacacagtg

SEQ ID NO: 24445 - DNA, 25 bp, Homo sapiens
tgggagcctgcttgtctctagaacc

SEQ ID NO: 24446 - DNA, 25 bp, Homo sapiens
cactgggtcccagatatgccgtctc

SEQ ID NO: 24447 - DNA, 25 bp, Homo sapiens
cagcatgatcggtccctgagtgtca

SEQ ID NO: 24448 - DNA, 25 bp, Homo sapiens
ccctctcagggtctttggaaaagtc

SEQ ID NO: 24449 - DNA, 25 bp, Homo sapiens
ttatgttctacaggagcggtgccgc

SEQ ID NO: 24450 - DNA, 25 bp, Homo sapiens
tctgagaccttttcccagctggagc

SEQ ID NO: 24451 - DNA, 25 bp, Homo sapiens
atactgctggcctttcctgggttta

SEQ ID NO: 24452 - DNA, 25 bp, Homo sapiens
gggctcctggccagttcatctttcg

SEQ ID NO: 24453 - DNA, 25 bp, Homo sapiens
cctggggccttttcacgaggaagga

SEQ ID NO: 24454 - DNA, 25 bp, Homo sapiens
ggggccttaccctttggactcttga

SEQ ID NO: 24455 - DNA, 25 bp, Homo sapiens
ggacgccagctgttcacttgtaatc

SEQ ID NO: 24456 - DNA, 25 bp, Homo sapiens
accctggcttgttgaccttgatctg

SEQ ID NO: 24457 - DNA, 25 bp, Homo sapiens
ggaggtgccacctcatttgcatgtg

SEQ ID NO: 24458 - DNA, 25 bp, Homo sapiens
cggctcggctgtctcagttgtttaa

SEQ ID NO: 24459 - DNA, 25 bp, Homo sapiens
gccgcactcgagtacccgtgtgatc

SEQ ID NO: 24460 - DNA, 25 bp, Homo sapiens
gatggtgcccaaacccagactctga

SEQ ID NO: 24461 - DNA, 25 bp, Homo sapiens
aaagtatgtttgttctcaggcccgc

SEQ ID NO: 24462 - DNA, 25 bp, Homo sapiens
atggttctctctcccactggacaga

SEQ ID NO: 24463 - DNA, 25 bp, Homo sapiens
cgatggtgccttgctcactcaaata

SEQ ID NO: 24464 - DNA, 25 bp, Homo sapiens
gttccaggtcccgacccagagtttg

SEQ ID NO: 24465 - DNA, 25 bp, Homo sapiens
aggcacctgcatcttgctgggcaaa

SEQ ID NO: 24466 - DNA, 25 bp, Homo sapiens
tcactggggatggtagaaacaactc

SEQ ID NO: 24467 - DNA, 25 bp, Homo sapiens
cctctctgagggaacatggtggcca

SEQ ID NO: 24468 - DNA, 25 bp, Homo sapiens
tcccttcctgcagtttgagatgaca

SEQ ID NO: 24469 - DNA, 25 bp, Homo sapiens
ggaggcttagcacctttcgagcaca

SEQ ID NO: 24470 - DNA, 25 bp, Homo sapiens
tgccacctgccgctgtctcagaaaa

SEQ ID NO: 24471 - DNA, 25 bp, Homo sapiens
gcttggtcccaacgctcattctgtg

SEQ ID NO: 24472 - DNA, 25 bp, Homo sapiens
ccgctgggacaacatgagaagcctt

SEQ ID NO: 24473 - DNA, 25 bp, Homo sapiens
ttcaattgttcattcgtttgttcac

SEQ ID NO: 24474 - DNA, 25 bp, Homo sapiens
catgccgtgtaaggacgcgctttta

SEQ ID NO: 24475 - DNA, 25 bp, Homo sapiens
gccactgtaacacaacctgggttga

SEQ ID NO: 24476 - DNA, 25 bp, Homo sapiens
gaaggggctctgtggtgccaatagt

SEQ ID NO: 24477 - DNA, 25 bp, Homo sapiens
ctggcccttgcctttgagaaacatg

SEQ ID NO: 24478 - DNA, 25 bp, Homo sapiens
ggctctgttacacactgctaccttg

SEQ ID NO: 24479 - DNA, 25 bp, Homo sapiens
aacccaattgttcctgcccggagga

SEQ ID NO: 24480 - DNA, 25 bp, Homo sapiens
caccttgtgatgctgcttggggata

SEQ ID NO: 24481 - DNA, 25 bp, Homo sapiens
ctccgtggacctcacagtgctgtca

SEQ ID NO: 24482 - DNA, 25 bp, Homo sapiens
agtgagacctcccaacagtcatctg

SEQ ID NO: 24483 - DNA, 25 bp, Homo sapiens
tgcagctgatgcacccagacccagg

SEQ ID NO: 24484 - DNA, 25 bp, Homo sapiens
agagttgacttctcggtgcacactg

SEQ ID NO: 24485 - DNA, 25 bp, Homo sapiens
ttaccatgggtaagaagcccagtgc

SEQ ID NO: 24486 - DNA, 25 bp, Homo sapiens
ctcctgggacaaaagtgacattatc

SEQ ID NO: 24487 - DNA, 25 bp, Homo sapiens
acatttctctgtgggtgcctgctga

SEQ ID NO: 24488 - DNA, 25 bp, Homo sapiens
gcctctcgctgcatggctggatgaa

SEQ ID NO: 24489 - DNA, 25 bp, Homo sapiens
tgggcccaatgcctgttaagtcata

SEQ ID NO: 24490 - DNA, 25 bp, Homo sapiens
tttgggtccctctgcctgtaaaatg

SEQ ID NO: 24491 - DNA, 25 bp, Homo sapiens
ggacctgccttgcttctctctggaa

SEQ ID NO: 24492 - DNA, 25 bp, Homo sapiens
atactttgcttcttgaggggccgcc

SEQ ID NO: 24493 - DNA, 25 bp, Homo sapiens
tccaccagtgggttcacagcagcca

SEQ ID NO: 24494 - DNA, 25 bp, Homo sapiens
gggccttgggacagtgctatatacc

SEQ ID NO: 24495 - DNA, 25 bp, Homo sapiens
gcctgggttgattcactcgccttca

SEQ ID NO: 24496 - DNA, 25 bp, Homo sapiens
gggccaggcccagcattctaacttg

SEQ ID NO: 24497 - DNA, 25 bp, Homo sapiens
ccacccatttgttgtcaggctgaca

SEQ ID NO: 24498 - DNA, 25 bp, Homo sapiens
ctgccctgacttggaacacgagttc

SEQ ID NO: 24499 - DNA, 25 bp, Homo sapiens
ccgtacctgataactggactcttga

SEQ ID NO: 24500 - DNA, 25 bp, Homo sapiens
aaatttttaatttgtacatgacatg

SEQ ID NO: 24501 - DNA, 25 bp, Homo sapiens
tgccccttatacggtacagcatcta

SEQ ID NO: 24502 - DNA, 25 bp, Homo sapiens
cggggtcctttctgtgcaccagaca

SEQ ID NO: 24503 - DNA, 25 bp, Homo sapiens
aaaaaaaagaaagagccggcctggc

SEQ ID NO: 24504 - DNA, 25 bp, Homo sapiens
gggcacatagggctggctctaaatt

SEQ ID NO: 24505 - DNA, 25 bp, Homo sapiens
ttccgccttggaatgcccgaaaaga

SEQ ID NO: 24506 - DNA, 25 bp, Homo sapiens
cccaggcagtgagttctctctttca

SEQ ID NO: 24507 - DNA, 25 bp, Homo sapiens
cagccctgcctggacttctaaaaca

SEQ ID NO: 24508 - DNA, 25 bp, Homo sapiens
acccgtgtctgtaaatgtgagctca

SEQ ID NO: 24509 - DNA, 25 bp, Homo sapiens
ataccctggcggcacatcatgtttc

SEQ ID NO: 24510 - DNA, 25 bp, Homo sapiens
ttgctgagaagtgcctgtgtgtacc

SEQ ID NO: 24511 - DNA, 25 bp, Homo sapiens
cctaagggtccctcagactggcaga

SEQ ID NO: 24512 - DNA, 25 bp, Homo sapiens
ccacacgcagcagcatggatattta

SEQ ID NO: 24513 - DNA, 25 bp, Homo sapiens
ctcagagcttggtctggatgcagat

SEQ ID NO: 24514 - DNA, 25 bp, Homo sapiens
cctcccttcatgccctgctcatctg

SEQ ID NO: 24515 - DNA, 25 bp, Homo sapiens
gccaggcctttgatcccactgcaga

SEQ ID NO: 24516 - DNA, 25 bp, Homo sapiens
cccggtgtcctgacctaaaactgca

SEQ ID NO: 24517 - DNA, 25 bp, Homo sapiens
gtcgtcacggggctgtaaaatgctc

SEQ ID NO: 24518 - DNA, 25 bp, Homo sapiens
ggaccctcggccaagcagtctttta

SEQ ID NO: 24519 - DNA, 25 bp, Homo sapiens
tttgtgacaaatggcccggacgctg

SEQ ID NO: 24520 - DNA, 25 bp, Homo sapiens
gcctgtcctagtttgcctccatgta

SEQ ID NO: 24521 - DNA, 25 bp, Homo sapiens
tggcagtgccacagtcagaatcctc

SEQ ID NO: 24522 - DNA, 25 bp, Homo sapiens
gaggttccgggactgtctattcaga

SEQ ID NO: 24523 - DNA, 25 bp, Homo sapiens
actccaggctcaggaatttggaccc

SEQ ID NO: 24524 - DNA, 25 bp, Homo sapiens
gtgctgttgtgggctaagcctgcct

SEQ ID NO: 24525 - DNA, 25 bp, Homo sapiens
gtgaagcttctctgcactcgctgga

SEQ ID NO: 24526 - DNA, 25 bp, Homo sapiens
tctgtgctgctcaggtgaaaacctc

SEQ ID NO: 24527 - DNA, 25 bp, Homo sapiens
ccctcatggcattggggtcaccagc

SEQ ID NO: 24528 - DNA, 25 bp, Homo sapiens
tgtcgtgggtgaaaacctgaccatc

SEQ ID NO: 24529 - DNA, 25 bp, Homo sapiens
tgggcctcaccaattcctccaggta

SEQ ID NO: 24530 - DNA, 25 bp, Homo sapiens
ggcggctgcctaacctgattcataa

SEQ ID NO: 24531 - DNA, 25 bp, Homo sapiens
gcggccgaggtaagtgtttccattc

SEQ ID NO: 24532 - DNA, 25 bp, Homo sapiens
ttgtggccaactgaactactgctga

SEQ ID NO: 24533 - DNA, 25 bp, Homo sapiens
caacatgggagtgggttagtcaaca

SEQ ID NO: 24534 - DNA, 25 bp, Homo sapiens
tgggtcccaggaagcagtctaaata

SEQ ID NO: 24535 - DNA, 25 bp, Homo sapiens
gggaccgccttgttttccactctga

SEQ ID NO: 24536 - DNA, 25 bp, Homo sapiens
cacacgcaggagcacaggtttcatg

SEQ ID NO: 24537 - DNA, 25 bp, Homo sapiens
ggaactttcctttggtgccctgaca

SEQ ID NO: 24538 - DNA, 25 bp, Homo sapiens
ccgtgaagttccaagggctgccctt

SEQ ID NO: 24539 - DNA, 25 bp, Homo sapiens
ggctttctgatgctgcccaactcta

SEQ ID NO: 24540 - DNA, 25 bp, Homo sapiens
cggtttctggcctcttgtagtcaca

SEQ ID NO: 24541 - DNA, 25 bp, Homo sapiens
ggggccttttggtttgcacaacacg

SEQ ID NO: 24542 - DNA, 25 bp, Homo sapiens
ctctcatggtggatcccttggctta

SEQ ID NO: 24543 - DNA, 25 bp, Homo sapiens
gtggaaaccgaccatcttgctaata

SEQ ID NO: 24544 - DNA, 25 bp, Homo sapiens
gagttctcccttgatcgccagcata

SEQ ID NO: 24545 - DNA, 25 bp, Homo sapiens
ggacagtcactgctcagggccttta

SEQ ID NO: 24546 - DNA, 25 bp, Homo sapiens
ctgaaacctttgttagtgcctccga

SEQ ID NO: 24547 - DNA, 25 bp, Homo sapiens
aggtagttccctctgcgcccacaga

SEQ ID NO: 24548 - DNA, 25 bp, Homo sapiens
cgctttccagtggtgccttcttaga

SEQ ID NO: 24549 - DNA, 25 bp, Homo sapiens
gggccctgagtcactgtcctttaga

SEQ ID NO: 24550 - DNA, 25 bp, Homo sapiens
cacagctgctcatggggtcctcaag

SEQ ID NO: 24551 - DNA, 25 bp, Homo sapiens
caccagggccagtggctaacatttc

SEQ ID NO: 24552 - DNA, 25 bp, Homo sapiens
tggactttacagaagccctcaagga

SEQ ID NO: 24553 - DNA, 25 bp, Homo sapiens
gtgagcctgctctcgcgaattctag

SEQ ID NO: 24554 - DNA, 25 bp, Homo sapiens
cccagtggaggtcgcagcattaaaa

SEQ ID NO: 24555 - DNA, 25 bp, Homo sapiens
tctcggctttgcattacctatcagg

SEQ ID NO: 24556 - DNA, 25 bp, Homo sapiens
acactgggaccctcgatatctggcc

SEQ ID NO: 24557 - DNA, 25 bp, Homo sapiens
atctccagagagtgagtccaggctc

SEQ ID NO: 24558 - DNA, 25 bp, Homo sapiens
gcgggtttctctcgctcgttactga

SEQ ID NO: 24559 - DNA, 25 bp, Homo sapiens
tgcctcctgaagcacactgatgatg

SEQ ID NO: 24560 - DNA, 25 bp, Homo sapiens
cacttttcacgttcttccaggggca

SEQ ID NO: 24561 - DNA, 25 bp, Homo sapiens
cggctgttccctgcgtttctaagag

SEQ ID NO: 24562 - DNA, 25 bp, Homo sapiens
gagataccgtcctgccagctctgta

SEQ ID NO: 24563 - DNA, 25 bp, Homo sapiens
tcaagttcggggctaatgttcctcc

SEQ ID NO: 24564 - DNA, 25 bp, Homo sapiens
agacctgccaggattgttgagtgcc

SEQ ID NO: 24565 - DNA, 25 bp, Homo sapiens
tgcacgcccgttgcctttgcaatgg

SEQ ID NO: 24566 - DNA, 25 bp, Homo sapiens
ggccataggaactgctcaacacatt

SEQ ID NO: 24567 - DNA, 25 bp, Homo sapiens
cccggggcatacagtgacaaatctt

SEQ ID NO: 24568 - DNA, 25 bp, Homo sapiens
gtgcggcagcccacaaggagaaata

SEQ ID NO: 24569 - DNA, 25 bp, Homo sapiens
ccaggggctcctgagttccaaagca

SEQ ID NO: 24570 - DNA, 25 bp, Homo sapiens
gcaaagtgtaaggtctccggctccc

SEQ ID NO: 24571 - DNA, 25 bp, Homo sapiens
agcgtttagcctgagccctgatctg

SEQ ID NO: 24572 - DNA, 25 bp, Homo sapiens
cccggcagtggaactgtcttgactt

SEQ ID NO: 24573 - DNA, 25 bp, Homo sapiens
cgtcagcagagccagggagtttttt

SEQ ID NO: 24574 - DNA, 25 bp, Homo sapiens
caggcagcctgacttcttgtcattc

SEQ ID NO: 24575 - DNA, 25 bp, Homo sapiens
ggttggcaaacctgctgactctcca

SEQ ID NO: 24576 - DNA, 25 bp, Homo sapiens
ggacggttaccaccagacttttgtc

SEQ ID NO: 24577 - DNA, 25 bp, Homo sapiens
ggtgacacccgcagaatatgaattc

SEQ ID NO: 24578 - DNA, 25 bp, Homo sapiens
gggactttgtcactgccactttgca

SEQ ID NO: 24579 - DNA, 25 bp, Homo sapiens
ctcttaaaaagtcagccagcgggta

SEQ ID NO: 24580 - DNA, 25 bp, Homo sapiens
ctagggactgtgttgaattaccatc

SEQ ID NO: 24581 - DNA, 25 bp, Homo sapiens
tgcggtcatttgctctctttgggca

SEQ ID NO: 24582 - DNA, 25 bp, Homo sapiens
agttatttatattctggaatcttta

SEQ ID NO: 24583 - DNA, 25 bp, Homo sapiens
gttacaccctcctatgggagacaga

SEQ ID NO: 24584 - DNA, 25 bp, Homo sapiens
atggactatttctgtgcgggattac

SEQ ID NO: 24585 - DNA, 25 bp, Homo sapiens
ggaatgtcaactgggccacactgtt

SEQ ID NO: 24586 - DNA, 25 bp, Homo sapiens
gaatagtgcaccctggatttgtccc

SEQ ID NO: 24587 - DNA, 25 bp, Homo sapiens
ccactgatgatgctgagaggccttg

SEQ ID NO: 24588 - DNA, 25 bp, Homo sapiens
gctctttcctgagtggtgatctcta

SEQ ID NO: 24589 - DNA, 25 bp, Homo sapiens
tttccagctatgtcagtccaggccc

SEQ ID NO: 24590 - DNA, 25 bp, Homo sapiens
gcctgtccatccatttcagtgggtc

SEQ ID NO: 24591 - DNA, 25 bp, Homo sapiens
cttcctagggagcatcagatgcgta

SEQ ID NO: 24592 - DNA, 25 bp, Homo sapiens
ggaagctgcacatcggcctttatga

SEQ ID NO: 24593 - DNA, 25 bp, Homo sapiens
caccagagctgtcaaaggggccaca

SEQ ID NO: 24594 - DNA, 25 bp, Homo sapiens
gctgagcacagcctccctttgatgg

SEQ ID NO: 24595 - DNA, 25 bp, Homo sapiens
gccatggcctttcctgggtagaatc

SEQ ID NO: 24596 - DNA, 25 bp, Homo sapiens
cttccttgaagccagtagtgtctcc

SEQ ID NO: 24597 - DNA, 25 bp, Homo sapiens
gataatacactaattctgcgggagc

SEQ ID NO: 24598 - DNA, 25 bp, Homo sapiens
ggaattttaacagcactaagtgatg

SEQ ID NO: 24599 - DNA, 25 bp, Homo sapiens
ttattttatgagtcaacgaacaatt

SEQ ID NO: 24600 - DNA, 25 bp, Homo sapiens
gctggtccatgcctggaactgacta

SEQ ID NO: 24601 - DNA, 25 bp, Homo sapiens
acgtttctctgtttaggcaggccca

SEQ ID NO: 24602 - DNA, 25 bp, Homo sapiens
cagccattaagccaaaaacaaacca

SEQ ID NO: 24603 - DNA, 25 bp, Homo sapiens
atgaacagtaggaattcaaagatca

SEQ ID NO: 24604 - DNA, 25 bp, Homo sapiens
gtgccataagtaggatagaatcaga

SEQ ID NO: 24605 - DNA, 25 bp, Homo sapiens
ttgcataattgcctgaaacacgtca

SEQ ID NO: 24606 - DNA, 25 bp, Homo sapiens
accaaagaaaaatgagtcataaacc

SEQ ID NO: 24607 - DNA, 25 bp, Homo sapiens
tccaaagattcttgtgcccagcttc

SEQ ID NO: 24608 - DNA, 25 bp, Homo sapiens
tcagcgcttcatttggtcatcagga

SEQ ID NO: 24609 - DNA, 25 bp, Homo sapiens
gggtgtctccactctgcatccaact

SEQ ID NO: 24610 - DNA, 25 bp, Homo sapiens
cccagtgggaggtactatgccttta

SEQ ID NO: 24611 - DNA, 25 bp, Homo sapiens
tgtgtagaaacagtggctgcctctg

SEQ ID NO: 24612 - DNA, 25 bp, Homo sapiens
aagggcccatttgctgctgttctca

SEQ ID NO: 24613 - DNA, 25 bp, Homo sapiens
tgacaccactgtttcattcccggta

SEQ ID NO: 24614 - DNA, 25 bp, Homo sapiens
tttggccaggtcaaaccgcccattg

SEQ ID NO: 24615 - DNA, 25 bp, Homo sapiens
gatgggtctccctctgaattctagc

SEQ ID NO: 24616 - DNA, 25 bp, Homo sapiens
tgtgtgtttcagctccctaaggaca

SEQ ID NO: 24617 - DNA, 25 bp, Homo sapiens
gaaacaagatgctgtcatcatcata

SEQ ID NO: 24618 - DNA, 25 bp, Homo sapiens
tgcctgcaactcacgctccattata

SEQ ID NO: 24619 - DNA, 25 bp, Homo sapiens
tgtgggccagtcattccaggtaatc

SEQ ID NO: 24620 - DNA, 25 bp, Homo sapiens
aggctggcttaaagtgagctaaaca

SEQ ID NO: 24621 - DNA, 25 bp, Homo sapiens
tcttattataacacaggctccactc

SEQ ID NO: 24622 - DNA, 25 bp, Homo sapiens
ggccttaatcaaaggaaacactaag

SEQ ID NO: 24623 - DNA, 25 bp, Homo sapiens
gaaatgggaaaaatggttatcttgg

SEQ ID NO: 24624 - DNA, 25 bp, Homo sapiens
tcttaggactcaaggacaaacctta

SEQ ID NO: 24625 - DNA, 25 bp, Homo sapiens
ccagataagtgtggagcctcctacc

SEQ ID NO: 24626 - DNA, 25 bp, Homo sapiens
ccagatggccgatacgtgttgcttg

SEQ ID NO: 24627 - DNA, 25 bp, Homo sapiens
gggtatacaacctccactgtgggca

SEQ ID NO: 24628 - DNA, 25 bp, Homo sapiens
tggccagagagaacctgccctgtta

SEQ ID NO: 24629 - DNA, 25 bp, Homo sapiens
aattatatgtacctaataccatagg

SEQ ID NO: 24630 - DNA, 25 bp, Homo sapiens
gggaaaggagacagaattgttgatc

SEQ ID NO: 24631 - DNA, 25 bp, Homo sapiens
aggcacttgccacctaccattgagt

SEQ ID NO: 24632 - DNA, 25 bp, Homo sapiens
ctctgaggtgctacaaatgaaattc

SEQ ID NO: 24633 - DNA, 25 bp, Homo sapiens
agtcatgttctagtggtggccttta

SEQ ID NO: 24634 - DNA, 25 bp, Homo sapiens
atgtcctcatctttctcggtggttg

SEQ ID NO: 24635 - DNA, 25 bp, Homo sapiens
ctctgtctactgcaaaggcgttatc

SEQ ID NO: 24636 - DNA, 25 bp, Homo sapiens
gaggccttaaggagccaccacattg

SEQ ID NO: 24637 - DNA, 25 bp, Homo sapiens
tcccaaagttcctgcagtgagcatg

SEQ ID NO: 24638 - DNA, 25 bp, Homo sapiens
aacttagactgtgccccccccaaaa

SEQ ID NO: 24639 - DNA, 25 bp, Homo sapiens
gtgcataactgctgtttaacaaata

SEQ ID NO: 24640 - DNA, 25 bp, Homo sapiens
ctgggcctgacggtgatatttccac

SEQ ID NO: 24641 - DNA, 25 bp, Homo sapiens
tgcctgtcagtggtcaaggaccttc

SEQ ID NO: 24642 - DNA, 25 bp, Homo sapiens
tatctatccccccttttgtccattt

SEQ ID NO: 24643 - DNA, 25 bp, Homo sapiens
agctcagccggcttcttcattgtgc

SEQ ID NO: 24644 - DNA, 25 bp, Homo sapiens
ggatgcacctaccacccgtttttaa

SEQ ID NO: 24645 - DNA, 25 bp, Homo sapiens
cctcagaaggggtaggccaaagctc

SEQ ID NO: 24646 - DNA, 25 bp, Homo sapiens
ccgatattgttacgccagggttgtt

SEQ ID NO: 24647 - DNA, 25 bp, Homo sapiens
gcgccagtgttgtgttgttgttaca

SEQ ID NO: 24648 - DNA, 25 bp, Homo sapiens
caccagtgctgttatgttgtcgtta

SEQ ID NO: 24649 - DNA, 25 bp, Homo sapiens
tctcggaggggccttttcattaccc

SEQ ID NO: 24650 - DNA, 25 bp, Homo sapiens
ttcgccgggagcagctttccaaatg

SEQ ID NO: 24651 - DNA, 25 bp, Homo sapiens
agggcgtgcctttcatcctgatgtc

SEQ ID NO: 24652 - DNA, 25 bp, Homo sapiens
ggccaacagcagcttcgacctggtg

SEQ ID NO: 24653 - DNA, 25 bp, Homo sapiens
ggctcctccctgtgtctttgctgtt

SEQ ID NO: 24654 - DNA, 25 bp, Homo sapiens
ggagggctctgacattctttttaaa

SEQ ID NO: 24655 - DNA, 25 bp, Homo sapiens
ccggcccttgatgtgccatttctga

SEQ ID NO: 24656 - DNA, 25 bp, Homo sapiens
cctcctttgggagaccttgtcagtc

SEQ ID NO: 24657 - DNA, 25 bp, Homo sapiens
tgcagtgtcaacctcccagctggtg

SEQ ID NO: 24658 - DNA, 25 bp, Homo sapiens
ggagctcatctttacctgtgccgga

SEQ ID NO: 24659 - DNA, 25 bp, Homo sapiens
tgagcaagccagtgcattccgtttg

SEQ ID NO: 24660 - DNA, 25 bp, Homo sapiens
ggcctcgtttctgggtgcctaaact

SEQ ID NO: 24661 - DNA, 25 bp, Homo sapiens
tgcggaaacccagcctcatgagttc

SEQ ID NO: 24662 - DNA, 25 bp, Homo sapiens
ttccttgttggctctgtccgacttg

SEQ ID NO: 24663 - DNA, 25 bp, Homo sapiens
ggaagtgtcttcctactgagccaca

SEQ ID NO: 24664 - DNA, 25 bp, Homo sapiens
agactctcgagatagcccaggcaca

SEQ ID NO: 24665 - DNA, 25 bp, Homo sapiens
gatttccatgccacacctcactttg

SEQ ID NO: 24666 - DNA, 25 bp, Homo sapiens
cccggaacttgtcactaagcgtcta

SEQ ID NO: 24667 - DNA, 25 bp, Homo sapiens
ctgggcaatcatcagagggtgtctc

SEQ ID NO: 24668 - DNA, 25 bp, Homo sapiens
gcaggctctcacataccagggcttt

SEQ ID NO: 24669 - DNA, 25 bp, Homo sapiens
tccgggcaaacccaccagttgattg

SEQ ID NO: 24670 - DNA, 25 bp, Homo sapiens
cccacttgggcctgtctgaaaagca

SEQ ID NO: 24671 - DNA, 25 bp, Homo sapiens
ccaggtatgagagatgaggagtcac

SEQ ID NO: 24672 - DNA, 25 bp, Homo sapiens
agagtcctcttctgtggccatggca

SEQ ID NO: 24673 - DNA, 25 bp, Homo sapiens
acccttgggagttcagtgggaagca

SEQ ID NO: 24674 - DNA, 25 bp, Homo sapiens
tgtcaatctgacctgggccaacgtg

SEQ ID NO: 24675 - DNA, 25 bp, Homo sapiens
tgttgaccaaacacagcaagccctg

SEQ ID NO: 24676 - DNA, 25 bp, Homo sapiens
gttctggtggatcttgctacaattc

SEQ ID NO: 24677 - DNA, 25 bp, Homo sapiens
tcaggaactgtctttcagggcctta

SEQ ID NO: 24678 - DNA, 25 bp, Homo sapiens
ccacctgactagtctgggttcaaca

SEQ ID NO: 24679 - DNA, 25 bp, Homo sapiens
ggttgctttttctcctccgcacaga

SEQ ID NO: 24680 - DNA, 25 bp, Homo sapiens
ctgcaagtttgtgtctctgagtgtc

SEQ ID NO: 24681 - DNA, 25 bp, Homo sapiens
gggagcactttacccagtagatgga

SEQ ID NO: 24682 - DNA, 25 bp, Homo sapiens
aatggtttcatggtttcacggtgcg

SEQ ID NO: 24683 - DNA, 25 bp, Homo sapiens
ccacccttgggcgtctcttggaaaa

SEQ ID NO: 24684 - DNA, 25 bp, Homo sapiens
tgcagttatggtcgccttaagaatc

SEQ ID NO: 24685 - DNA, 25 bp, Homo sapiens
ccaggtgttccgttctcagaccaga

SEQ ID NO: 24686 - DNA, 25 bp, Homo sapiens
cactgtggctgggtaaataggctgc

SEQ ID NO: 24687 - DNA, 25 bp, Homo sapiens
ttgcagccagcgatcttgttactta

SEQ ID NO: 24688 - DNA, 25 bp, Homo sapiens
agtcctgttgattgggcacctgcta

SEQ ID NO: 24689 - DNA, 25 bp, Homo sapiens
gtgcctggagctcttatctgtcttc

SEQ ID NO: 24690 - DNA, 25 bp, Homo sapiens
ggggccacagcgtgcttaatttatt

SEQ ID NO: 24691 - DNA, 25 bp, Homo sapiens
gagccctgtttcatcctctgccaga

SEQ ID NO: 24692 - DNA, 25 bp, Homo sapiens
agtgcgtgccgattgtccaaagcca

SEQ ID NO: 24693 - DNA, 25 bp, Homo sapiens
ggggatctcgaatctcctgcttttc

SEQ ID NO: 24694 - DNA, 25 bp, Homo sapiens
aggggacacttcctgtggccatttc

SEQ ID NO: 24695 - DNA, 25 bp, Homo sapiens
gcagcctggtttcgaccctctacta

SEQ ID NO: 24696 - DNA, 25 bp, Homo sapiens
tcaggggctgccatttacgaaaggc

SEQ ID NO: 24697 - DNA, 25 bp, Homo sapiens
gtagagattttcagaccaccaggtg

SEQ ID NO: 24698 - DNA, 25 bp, Homo sapiens
gccatgttcctctttgtcctcaaga

SEQ ID NO: 24699 - DNA, 25 bp, Homo sapiens
atgccttccttgtgggactcctggg

SEQ ID NO: 24700 - DNA, 25 bp, Homo sapiens
ctcgctccgtgcatctaagttgttc

SEQ ID NO: 24701 - DNA, 25 bp, Homo sapiens
ttggtgcccgatagagaagtgtctc

SEQ ID NO: 24702 - DNA, 25 bp, Homo sapiens
gggcccttggccagaggcatttaaa

SEQ ID NO: 24703 - DNA, 25 bp, Homo sapiens
ctgtccacaagcaggggcttcattg

SEQ ID NO: 24704 - DNA, 25 bp, Homo sapiens
ggccagcctgtcttgttcctataaa

SEQ ID NO: 24705 - DNA, 25 bp, Homo sapiens
ccctgcttctatgggagcggcattt

SEQ ID NO: 24706 - DNA, 25 bp, Homo sapiens
gggccttcctcattcctgcagttta

SEQ ID NO: 24707 - DNA, 25 bp, Homo sapiens
cacacttacgctttgggaggatttc

SEQ ID NO: 24708 - DNA, 25 bp, Homo sapiens
gcgggccctgcatttgctggaattt

SEQ ID NO: 24709 - DNA, 25 bp, Homo sapiens
aggcatctcttctcactgtagtttg

SEQ ID NO: 24710 - DNA, 25 bp, Homo sapiens
agtggccgcacctctgtcataaata

SEQ ID NO: 24711 - DNA, 25 bp, Homo sapiens
cagtggccttgcaagtgatgactta

SEQ ID NO: 24712 - DNA, 25 bp, Homo sapiens
ggtccaagaatcagcctcccaggtg

SEQ ID NO: 24713 - DNA, 25 bp, Homo sapiens
cccggggaagagcacagtcattttt

SEQ ID NO: 24714 - DNA, 25 bp, Homo sapiens
ctttgtgcctcaaaagaatgttgtg

SEQ ID NO: 24715 - DNA, 25 bp, Homo sapiens
cagtgctctctcatgttgttggttt

SEQ ID NO: 24716 - DNA, 25 bp, Homo sapiens
agttggccctgaagtccctctaaga

SEQ ID NO: 24717 - DNA, 25 bp, Homo sapiens
ctcgcccaggaggaagtatactttc

SEQ ID NO: 24718 - DNA, 25 bp, Homo sapiens
gccactggtgtctaagggacctttg

SEQ ID NO: 24719 - DNA, 25 bp, Homo sapiens
cgcggtctgactttcacacggattc

SEQ ID NO: 24720 - DNA, 25 bp, Homo sapiens
cagccctgaggcacattatttggac

SEQ ID NO: 24721 - DNA, 25 bp, Homo sapiens
tccctccgtgagaatgaagaaatgc

SEQ ID NO: 24722 - DNA, 25 bp, Homo sapiens
actgctgttgaacttttacaagcta

SEQ ID NO: 24723 - DNA, 25 bp, Homo sapiens
caactttggatcttaagctctagcc

SEQ ID NO: 24724 - DNA, 25 bp, Homo sapiens
tgctttgtgaactccatttgtttat

SEQ ID NO: 24725 - DNA, 25 bp, Homo sapiens
accagtattattttttaaacctcaa

SEQ ID NO: 24726 - DNA, 25 bp, Homo sapiens
tgtggccacaggcagtaccctatta

SEQ ID NO: 24727 - DNA, 25 bp, Homo sapiens
gtggggtccctgacagcttcattca

SEQ ID NO: 24728 - DNA, 25 bp, Homo sapiens
gcaggggtctctgattccactacta

SEQ ID NO: 24729 - DNA, 25 bp, Homo sapiens
tgcacctctttgaagccaggagatg

SEQ ID NO: 24730 - DNA, 25 bp, Homo sapiens
caaggtctcttaactgccgccaggc

SEQ ID NO: 24731 - DNA, 25 bp, Homo sapiens
ccctggaaatgactcgtggcagatc

SEQ ID NO: 24732 - DNA, 25 bp, Homo sapiens
tgggaccctgccctgtagtaacaga

SEQ ID NO: 24733 - DNA, 25 bp, Homo sapiens
gcagcgtgtacgacttaagcagaga

SEQ ID NO: 24734 - DNA, 25 bp, Homo sapiens
cctggctggaggagtttatcaaata

SEQ ID NO: 24735 - DNA, 25 bp, Homo sapiens
ccctggctgcatgagagattctgaa

SEQ ID NO: 24736 - DNA, 25 bp, Homo sapiens
ccctggtcacagaaatggggttgtc

SEQ ID NO: 24737 - DNA, 25 bp, Homo sapiens
gaggagaccctttgagtcacctttc

SEQ ID NO: 24738 - DNA, 25 bp, Homo sapiens
ctattaagcttttgcccgggacgga

SEQ ID NO: 24739 - DNA, 25 bp, Homo sapiens
cccagtgactctcagtgacccagtg

SEQ ID NO: 24740 - DNA, 25 bp, Homo sapiens
tggctggaactcctcactggcttgg

SEQ ID NO: 24741 - DNA, 25 bp, Homo sapiens
tccctccatttgtgtgcatagctgc

SEQ ID NO: 24742 - DNA, 25 bp, Homo sapiens
gtcccagcttcaatgccaccagatg

SEQ ID NO: 24743 - DNA, 25 bp, Homo sapiens
cgagaggcatttccatcagtgaacc

SEQ ID NO: 24744 - DNA, 25 bp, Homo sapiens
accacggggagtttaggcaattcta

SEQ ID NO: 24745 - DNA, 25 bp, Homo sapiens
tagccctcgctttccaagattaatg

SEQ ID NO: 24746 - DNA, 25 bp, Homo sapiens
tcggcaaattccaggctcaggtcta

SEQ ID NO: 24747 - DNA, 25 bp, Homo sapiens
cgactctggctggaatgacactgga

SEQ ID NO: 24748 - DNA, 25 bp, Homo sapiens
caacggtgtcactccaggctgaaca

SEQ ID NO: 24749 - DNA, 25 bp, Homo sapiens
ggcgccgatgcaactaggaaatatt

SEQ ID NO: 24750 - DNA, 25 bp, Homo sapiens
tccctgtcactggagacttggcaga

SEQ ID NO: 24751 - DNA, 25 bp, Homo sapiens
agggtggcaccattctcccgtttca

SEQ ID NO: 24752 - DNA, 25 bp, Homo sapiens
cgtgccctttaagtcgccaggagga

SEQ ID NO: 24753 - DNA, 25 bp, Homo sapiens
gcgtggccactctgagcccttaata

SEQ ID NO: 24754 - DNA, 25 bp, Homo sapiens
actgtaggttgtgcctgttccagca

SEQ ID NO: 24755 - DNA, 25 bp, Homo sapiens
cgtacctggggtctataactctttg

SEQ ID NO: 24756 - DNA, 25 bp, Homo sapiens
aaggtcgacaccaacacggagcttg

SEQ ID NO: 24757 - DNA, 25 bp, Homo sapiens
ctcaggaaaaactctggactgggtc

SEQ ID NO: 24758 - DNA, 25 bp, Homo sapiens
tggtgcagtgtctccttacttgata

SEQ ID NO: 24759 - DNA, 25 bp, Homo sapiens
ttttaaagctcacagtttcactttc

SEQ ID NO: 24760 - DNA, 25 bp, Homo sapiens
cctaccggtcccagaaggtgcttta

SEQ ID NO: 24761 - DNA, 25 bp, Homo sapiens
tcagcctggcttcaatggaatagtc

SEQ ID NO: 24762 - DNA, 25 bp, Homo sapiens
agctttgctgaccactccaggcaga

SEQ ID NO: 24763 - DNA, 25 bp, Homo sapiens
ctgcccagagttgatagagagctta

SEQ ID NO: 24764 - DNA, 25 bp, Homo sapiens
gacatgttactcccacagtgtcatc

SEQ ID NO: 24765 - DNA, 25 bp, Homo sapiens
tgcctactatgcacaatggccaaga

SEQ ID NO: 24766 - DNA, 25 bp, Homo sapiens
tatttttgtttattccaaatttctg

SEQ ID NO: 24767 - DNA, 25 bp, Homo sapiens
caagaacctaaacttcccacaaaga

SEQ ID NO: 24768 - DNA, 25 bp, Homo sapiens
gcctggaatctaagctgagcctgca

SEQ ID NO: 24769 - DNA, 25 bp, Homo sapiens
ggaggcttcacttcccactctcagg

SEQ ID NO: 24770 - DNA, 25 bp, Homo sapiens
tcctgccctgggagaatttaatctg

SEQ ID NO: 24771 - DNA, 25 bp, Homo sapiens
aaaaaaaaagtcttgattttaacta

SEQ ID NO: 24772 - DNA, 25 bp, Homo sapiens
ctgtttctctttttaactcatcttt

SEQ ID NO: 24773 - DNA, 25 bp, Homo sapiens
cccactgagctggtttttcaaaagc

SEQ ID NO: 24774 - DNA, 25 bp, Homo sapiens
tttgcccatccttgccctggaagga

SEQ ID NO: 24775 - DNA, 25 bp, Homo sapiens
tgggccttgtaaatcctgtagtcta

SEQ ID NO: 24776 - DNA, 25 bp, Homo sapiens
ggggagggaccatctcacaacattc

SEQ ID NO: 24777 - DNA, 25 bp, Homo sapiens
ctcaggggcccagaagataaatacc

SEQ ID NO: 24778 - DNA, 25 bp, Homo sapiens
atcaacagttaagagctcagattcc

SEQ ID NO: 24779 - DNA, 25 bp, Homo sapiens
tggaaacttctctccgctcggaagg

SEQ ID NO: 24780 - DNA, 25 bp, Homo sapiens
agcgccttaggtgggatttcagtca

SEQ ID NO: 24781 - DNA, 25 bp, Homo sapiens
actggatcctctggcttcactgacc

SEQ ID NO: 24782 - DNA, 25 bp, Homo sapiens
ccatcctctgttggggtgggacaaa

SEQ ID NO: 24783 - DNA, 25 bp, Homo sapiens
gggcagtagccagcacctcactttg

SEQ ID NO: 24784 - DNA, 25 bp, Homo sapiens
agaccctggtgctctctaagctatg

SEQ ID NO: 24785 - DNA, 25 bp, Homo sapiens
tggagaccctcagctgccagaagca

SEQ ID NO: 24786 - DNA, 25 bp, Homo sapiens
gagctccaggctcactcagtggtgg

SEQ ID NO: 24787 - DNA, 25 bp, Homo sapiens
cggcagcaccctgttcctgggcaaa

SEQ ID NO: 24788 - DNA, 25 bp, Homo sapiens
tcctgttcagcatcgaggtcatgtc

SEQ ID NO: 24789 - DNA, 25 bp, Homo sapiens
tccctagcccgtggagcatctaaca

SEQ ID NO: 24790 - DNA, 25 bp, Homo sapiens
gggacccttgccttcttcctggtta

SEQ ID NO: 24791 - DNA, 25 bp, Homo sapiens
cccggcagcagccaggctagttatt

SEQ ID NO: 24792 - DNA, 25 bp, Homo sapiens
aggctgctgggtctgtactccaatc

SEQ ID NO: 24793 - DNA, 25 bp, Homo sapiens
ggccctcaggcctgtttcttcataa

SEQ ID NO: 24794 - DNA, 25 bp, Homo sapiens
gggcgccatctaccctccagtgttt

SEQ ID NO: 24795 - DNA, 25 bp, Homo sapiens
gagagaggttctcccaccaggtcta

SEQ ID NO: 24796 - DNA, 25 bp, Homo sapiens
ctcctcaggtgagggacagctgtca

SEQ ID NO: 24797 - DNA, 25 bp, Homo sapiens
tggcctctgtgatggcaaactgctc

SEQ ID NO: 24798 - DNA, 25 bp, Homo sapiens
agagcatctctgtggctgtgccagc

SEQ ID NO: 24799 - DNA, 25 bp, Homo sapiens
gggagaatctcgctcccaaccacta

SEQ ID NO: 24800 - DNA, 25 bp, Homo sapiens
cgtgacccgcataacccagcatgga

SEQ ID NO: 24801 - DNA, 25 bp, Homo sapiens
tctagtgaccctgagtgacatcttc

SEQ ID NO: 24802 - DNA, 25 bp, Homo sapiens
ctggagccaccctcagactctggga

SEQ ID NO: 24803 - DNA, 25 bp, Homo sapiens
gcccagggtcccagattttaacaat

SEQ ID NO: 24804 - DNA, 25 bp, Homo sapiens
cctgggcagttctgatcggttttca

SEQ ID NO: 24805 - DNA, 25 bp, Homo sapiens
tgccctctgcctttcgggagataca

SEQ ID NO: 24806 - DNA, 25 bp, Homo sapiens
ggccaagggattctgagctctctct

SEQ ID NO: 24807 - DNA, 25 bp, Homo sapiens
tgagtccacagtcgctacgccagtc

SEQ ID NO: 24808 - DNA, 25 bp, Homo sapiens
ggcagcaccctcttcctcgggaaag

SEQ ID NO: 24809 - DNA, 25 bp, Homo sapiens
tcctgttcagcatcgaggtcatgtc

SEQ ID NO: 24810 - DNA, 25 bp, Homo sapiens
tccctttaaaccatgtgtgcccatg

SEQ ID NO: 24811 - DNA, 25 bp, Homo sapiens
gggacccttgccttcttcctggtta

SEQ ID NO: 24812 - DNA, 25 bp, Homo sapiens
tgcccaggctgtggcctcttacaaa

SEQ ID NO: 24813 - DNA, 25 bp, Homo sapiens
gctgggaattcgcaactgggtcatc

SEQ ID NO: 24814 - DNA, 25 bp, Homo sapiens
gggtaaccctgctcactcaaggctg

SEQ ID NO: 24815 - DNA, 25 bp, Homo sapiens
tgagtccctgtttcctcctaatgtg

SEQ ID NO: 24816 - DNA, 25 bp, Homo sapiens
tgggcaccttctaccctccagtgtt

SEQ ID NO: 24817 - DNA, 25 bp, Homo sapiens
ttccacattgcagggagccaatctc

SEQ ID NO: 24818 - DNA, 25 bp, Homo sapiens
ccatttctattttgcccattcaaga

SEQ ID NO: 24819 - DNA, 25 bp, Homo sapiens
tggcagccaagttctggtataatcg

SEQ ID NO: 24820 - DNA, 25 bp, Homo sapiens
gaatcattaagagatccaggcagta

SEQ ID NO: 24821 - DNA, 25 bp, Homo sapiens
gttgccaaaataagccattatcagc

SEQ ID NO: 24822 - DNA, 25 bp, Homo sapiens
ctggctgaaagcttatgatactaca

SEQ ID NO: 24823 - DNA, 25 bp, Homo sapiens
ctcgctagagggaggcctttcaaac

SEQ ID NO: 24824 - DNA, 25 bp, Homo sapiens
ccttgactttggctgcatggttgac

SEQ ID NO: 24825 - DNA, 25 bp, Homo sapiens
ctgctgccagagaggaaactattta

SEQ ID NO: 24826 - DNA, 25 bp, Homo sapiens
tctgacaatcctcttgtggtaaaca

SEQ ID NO: 24827 - DNA, 25 bp, Homo sapiens
cagcatgagggcttctgaggcttta

SEQ ID NO: 24828 - DNA, 25 bp, Homo sapiens
tgccacttacagaattacctttaga

SEQ ID NO: 24829 - DNA, 25 bp, Homo sapiens
gtgctacccaattaagattccctta

SEQ ID NO: 24830 - DNA, 25 bp, Homo sapiens
gataggtctgctctgaaaacattca

SEQ ID NO: 24831 - DNA, 25 bp, Homo sapiens
agtgccactgtgagaaattccaagg

SEQ ID NO: 24832 - DNA, 25 bp, Homo sapiens
cctaacttgtctccacctaggtgaa

SEQ ID NO: 24833 - DNA, 25 bp, Homo sapiens
gtatatgatatcagttgctggttat

SEQ ID NO: 24834 - DNA, 25 bp, Homo sapiens
ctagtctctgctcttgctggccatc

SEQ ID NO: 24835 - DNA, 25 bp, Homo sapiens
tgcatactgtatcaactgtacggta

SEQ ID NO: 24836 - DNA, 25 bp, Homo sapiens
caggcttggtggctctgtctcaaaa

SEQ ID NO: 24837 - DNA, 25 bp, Homo sapiens
gtgtgcctctcctcactctggtcta

SEQ ID NO: 24838 - DNA, 25 bp, Homo sapiens
tgtagctggtatcaacactagatga

SEQ ID NO: 24839 - DNA, 25 bp, Homo sapiens
gctgggcattgtcatccacacttga

SEQ ID NO: 24840 - DNA, 25 bp, Homo sapiens
gaggacctccttccatcacaagtca

SEQ ID NO: 24841 - DNA, 25 bp, Homo sapiens
tcacctagcaggtagatttcctgga

SEQ ID NO: 24842 - DNA, 25 bp, Homo sapiens
agcaccaaccatgagacaacccttg

SEQ ID NO: 24843 - DNA, 25 bp, Homo sapiens
aaaaattctaaggatttagaagaac

SEQ ID NO: 24844 - DNA, 25 bp, Homo sapiens
agcttcaggtattttattagtagta

SEQ ID NO: 24845 - DNA, 25 bp, Homo sapiens
tacaatatagtgatacagaaagtag

SEQ ID NO: 24846 - DNA, 25 bp, Homo sapiens
gtgcgcatcaaagcatcacaagata

SEQ ID NO: 24847 - DNA, 25 bp, Homo sapiens
agccgcaactttagatcactcattt

SEQ ID NO: 24848 - DNA, 25 bp, Homo sapiens
gaaaggttttcccaagactgctgga

SEQ ID NO: 24849 - DNA, 25 bp, Homo sapiens
ctgggacctcagtgttctcataaaa

SEQ ID NO: 24850 - DNA, 25 bp, Homo sapiens
tacgcaacatgcctatggatcaatg

SEQ ID NO: 24851 - DNA, 25 bp, Homo sapiens
ccctttgcagctgcaggttcagaga

SEQ ID NO: 24852 - DNA, 25 bp, Homo sapiens
cccggtggtttgagactaacattta

SEQ ID NO: 24853 - DNA, 25 bp, Homo sapiens
cctcctaggaaatctcatggggcat

SEQ ID NO: 24854 - DNA, 25 bp, Homo sapiens
acactggaccagctattaaatgcta

SEQ ID NO: 24855 - DNA, 25 bp, Homo sapiens
ttaaaatgcaggttccagggcccac

SEQ ID NO: 24856 - DNA, 25 bp, Homo sapiens
ctctctgcagtgtgaaggctgattg

SEQ ID NO: 24857 - DNA, 25 bp, Homo sapiens
tgcacattttcaatattggtaagtt

SEQ ID NO: 24858 - DNA, 25 bp, Homo sapiens
gggcctctgacaatacctgtgtatt

SEQ ID NO: 24859 - DNA, 25 bp, Homo sapiens
accactttgctgttgccaagactca

SEQ ID NO: 24860 - DNA, 25 bp, Homo sapiens
tttcacagcaggaaggttttacttc

SEQ ID NO: 24861 - DNA, 25 bp, Homo sapiens
tcttcctcgggcagacaagacactc

SEQ ID NO: 24862 - DNA, 25 bp, Homo sapiens
ctcccaactgaggtgcaatattatc

SEQ ID NO: 24863 - DNA, 25 bp, Homo sapiens
ggcccgaggcaccattttaaagttc

SEQ ID NO: 24864 - DNA, 25 bp, Homo sapiens
gcaacattttcggtacaggcgttta

SEQ ID NO: 24865 - DNA, 25 bp, Homo sapiens
ttccatcttctacggggtgagtgca

SEQ ID NO: 24866 - DNA, 25 bp, Homo sapiens
tcccagtagattataggcatgtgcc

SEQ ID NO: 24867 - DNA, 25 bp, Homo sapiens
gcggcagttctaatccttggaagta

SEQ ID NO: 24868 - DNA, 25 bp, Homo sapiens
gagacagggtttcgtcctatatccc

SEQ ID NO: 24869 - DNA, 25 bp, Homo sapiens
aggtccggcagcaccttcaggaaga

SEQ ID NO: 24870 - DNA, 25 bp, Homo sapiens
cccaatgctttgtgtagctgctgtc

SEQ ID NO: 24871 - DNA, 25 bp, Homo sapiens
ctaaaactgttggtgcagtcctgca

SEQ ID NO: 24872 - DNA, 25 bp, Homo sapiens
gggtccatcccagaagccttgtagc

SEQ ID NO: 24873 - DNA, 25 bp, Homo sapiens
agcggccatggtgctacactacgga

SEQ ID NO: 24874 - DNA, 25 bp, Homo sapiens
gttgagactaccctgccacgacttc

SEQ ID NO: 24875 - DNA, 25 bp, Homo sapiens
tctgcctgccgcctgaatgatatgt

SEQ ID NO: 24876 - DNA, 25 bp, Homo sapiens
gagtggctcctgctattctattaga

SEQ ID NO: 24877 - DNA, 25 bp, Homo sapiens
taccatctgagagtgggcttccttc

SEQ ID NO: 24878 - DNA, 25 bp, Homo sapiens
ttcgttttatagttccaggccagca

SEQ ID NO: 24879 - DNA, 25 bp, Homo sapiens
ccttggtggacagatatgagttttc

SEQ ID NO: 24880 - DNA, 25 bp, Homo sapiens
ctgtctccagaggatgccaagcata

SEQ ID NO: 24881 - DNA, 25 bp, Homo sapiens
tcctactctatgaagtgccatgagc

SEQ ID NO: 24882 - DNA, 25 bp, Homo sapiens
cctgggtggcacagaggttaaagca

SEQ ID NO: 24883 - DNA, 25 bp, Homo sapiens
tgttgccctatacggcgcctgcata

SEQ ID NO: 24884 - DNA, 25 bp, Homo sapiens
tgcctcccgaggaaacaagtgacta

SEQ ID NO: 24885 - DNA, 25 bp, Homo sapiens
cccagtgttgggtttcttcagagcc

SEQ ID NO: 24886 - DNA, 25 bp, Homo sapiens
cctcgggaatggcaacttggagata

SEQ ID NO: 24887 - DNA, 25 bp, Homo sapiens
ctaggtctcattggaattaagtctc

SEQ ID NO: 24888 - DNA, 25 bp, Homo sapiens
ctaatttgtcaaaagagtcacactg

SEQ ID NO: 24889 - DNA, 25 bp, Homo sapiens
gggcagtgactcctttacaatttta

SEQ ID NO: 24890 - DNA, 25 bp, Homo sapiens
agggactggatccttgttaacacga

SEQ ID NO: 24891 - DNA, 25 bp, Homo sapiens
tgggtcacggtgctatctataaagt

SEQ ID NO: 24892 - DNA, 25 bp, Homo sapiens
cgtgcaggccacatgttacttctta

SEQ ID NO: 24893 - DNA, 25 bp, Homo sapiens
gatgactgcaaaccagccgtcctta

SEQ ID NO: 24894 - DNA, 25 bp, Homo sapiens
tcacaaaacatcgagtggagagttc

SEQ ID NO: 24895 - DNA, 25 bp, Homo sapiens
agcctcaggtatcagcaagacctca

SEQ ID NO: 24896 - DNA, 25 bp, Homo sapiens
ggcggcagtctcacacatgtacatt

SEQ ID NO: 24897 - DNA, 25 bp, Homo sapiens
cccgcaggcaactggagatgtattg

SEQ ID NO: 24898 - DNA, 25 bp, Homo sapiens
gtggtctggtacactgcacccagtt

SEQ ID NO: 24899 - DNA, 25 bp, Homo sapiens
ggctcatccgttcaggttcctcaca

SEQ ID NO: 24900 - DNA, 25 bp, Homo sapiens
ggcccggatcccagtaagttcttta

SEQ ID NO: 24901 - DNA, 25 bp, Homo sapiens
cagtcagacttttcactgactggga

SEQ ID NO: 24902 - DNA, 25 bp, Homo sapiens
ggcggcatcttcacctacgggaatg

SEQ ID NO: 24903 - DNA, 25 bp, Homo sapiens
ttctttgggccgatgacaactcttg

SEQ ID NO: 24904 - DNA, 25 bp, Homo sapiens
cacatgttgggtctgggagtcatta

SEQ ID NO: 24905 - DNA, 25 bp, Homo sapiens
atggctcccaataggcccaggctta

SEQ ID NO: 24906 - DNA, 25 bp, Homo sapiens
tctgtcccaggtagtagtcaatgtc

SEQ ID NO: 24907 - DNA, 25 bp, Homo sapiens
cagctgggccttcagatctttgatg

SEQ ID NO: 24908 - DNA, 25 bp, Homo sapiens
tatagccatgattccacagatgtgg

SEQ ID NO: 24909 - DNA, 25 bp, Homo sapiens
ccagcccttagtctcagatgcattc

SEQ ID NO: 24910 - DNA, 25 bp, Homo sapiens
cccaggttctgaaaacggcattttg

SEQ ID NO: 24911 - DNA, 25 bp, Homo sapiens
ggcgtctctgacttctttccgggta

SEQ ID NO: 24912 - DNA, 25 bp, Homo sapiens
gaggagcctgcatttgccattgata

SEQ ID NO: 24913 - DNA, 25 bp, Homo sapiens
cctgtgatgagctgtgaccaaaaaa

SEQ ID NO: 24914 - DNA, 25 bp, Homo sapiens
caaagatgggttctgggtctccaca

SEQ ID NO: 24915 - DNA, 25 bp, Homo sapiens
ggctgggtgagatgactaggggcag

SEQ ID NO: 24916 - DNA, 25 bp, Homo sapiens
gctctacaatcgtggggctgcaatg

SEQ ID NO: 24917 - DNA, 25 bp, Homo sapiens
ggcccatctccggtagctggaagta

SEQ ID NO: 24918 - DNA, 25 bp, Homo sapiens
cggcctcggtcatgagctcgccaaa

SEQ ID NO: 24919 - DNA, 25 bp, Homo sapiens
tggacagctgggcaccgtaatattc

SEQ ID NO: 24920 - DNA, 25 bp, Homo sapiens
cgtgccaccctgatttccctaaaga

SEQ ID NO: 24921 - DNA, 25 bp, Homo sapiens
tcgcccatcgggaacatcacgttga

SEQ ID NO: 24922 - DNA, 25 bp, Homo sapiens
ctcaggactctcacttctagggacc

SEQ ID NO: 24923 - DNA, 25 bp, Homo sapiens
ggcctctctgaagctggttcgactt

SEQ ID NO: 24924 - DNA, 25 bp, Homo sapiens
ggtgcagcagccgacttcctagacc

SEQ ID NO: 24925 - DNA, 25 bp, Homo sapiens
acgcgacaccgcaggattcgttttc

SEQ ID NO: 24926 - DNA, 25 bp, Homo sapiens
cccttgggtgacactctccgactga

SEQ ID NO: 24927 - DNA, 25 bp, Homo sapiens
tgtgtacacacaagcctgcagtctg

SEQ ID NO: 24928 - DNA, 25 bp, Homo sapiens
gttcctccgggttaagattcaagcc

SEQ ID NO: 24929 - DNA, 25 bp, Homo sapiens
aggtgctctttacctgggcaacagc

SEQ ID NO: 24930 - DNA, 25 bp, Homo sapiens
ctctcttaactgatggggacccacc

SEQ ID NO: 24931 - DNA, 25 bp, Homo sapiens
cgcagggatcgtaccaggttctcca

SEQ ID NO: 24932 - DNA, 25 bp, Homo sapiens
ccgttcttggtttgggcattcactc

SEQ ID NO: 24933 - DNA, 25 bp, Homo sapiens
cgggatgtccactatgtactgaatg

SEQ ID NO: 24934 - DNA, 25 bp, Homo sapiens
ttcaccttttgtgcctaggaggcca

SEQ ID NO: 24935 - DNA, 25 bp, Homo sapiens
gggcccactgggttctttctgcaga

SEQ ID NO: 24936 - DNA, 25 bp, Homo sapiens
cctcactgctgggaactcaggaaca

SEQ ID NO: 24937 - DNA, 25 bp, Homo sapiens
aggtcttcctcctggcccgtaatta

SEQ ID NO: 24938 - DNA, 25 bp, Homo sapiens
gaatgtgtctcaggggcttctccta

SEQ ID NO: 24939 - DNA, 25 bp, Homo sapiens
gcagcattccctgtcagtggccaga

SEQ ID NO: 24940 - DNA, 25 bp, Homo sapiens
tagtgcacagcctcacagagccttg

SEQ ID NO: 24941 - DNA, 25 bp, Homo sapiens
ggcacctgctgaagttgataacatc

SEQ ID NO: 24942 - DNA, 25 bp, Homo sapiens
cgcaagatcatgaagctgggccacc

SEQ ID NO: 24943 - DNA, 25 bp, Homo sapiens
ttcttagcaaggatggaaccaggcc

SEQ ID NO: 24944 - DNA, 25 bp, Homo sapiens
ggaagtctcctttggctgcagcgta

SEQ ID NO: 24945 - DNA, 25 bp, Homo sapiens
cagggtcctgcgagttttgtcacaa

SEQ ID NO: 24946 - DNA, 25 bp, Homo sapiens
ggagttcctgcctgtctgtccaata

SEQ ID NO: 24947 - DNA, 25 bp, Homo sapiens
cagtgcctaggggtttgatttttcc

SEQ ID NO: 24948 - DNA, 25 bp, Homo sapiens
gggtaacatcccaccagtctctggt

SEQ ID NO: 24949 - DNA, 25 bp, Homo sapiens
cgcacacggcgcttagttctggaac

SEQ ID NO: 24950 - DNA, 25 bp, Homo sapiens
tcaagtttatgacgcagcctggacc

SEQ ID NO: 24951 - DNA, 25 bp, Homo sapiens
ctttcatctattcacggggcggatc

SEQ ID NO: 24952 - DNA, 25 bp, Homo sapiens
gccagcttctggagtttagcccaca

SEQ ID NO: 24953 - DNA, 25 bp, Homo sapiens
cacttgagattcatggaagtccttc

SEQ ID NO: 24954 - DNA, 25 bp, Homo sapiens
ctactcctaaccaaaacattcctgg

SEQ ID NO: 24955 - DNA, 25 bp, Homo sapiens
tgtcccacacgttctgtccaaaagg

SEQ ID NO: 24956 - DNA, 25 bp, Homo sapiens
atggggccctctcttactcattaga

SEQ ID NO: 24957 - DNA, 25 bp, Homo sapiens
gattctctattgtaccctctgggga

SEQ ID NO: 24958 - DNA, 25 bp, Homo sapiens
gccgccctgcttatagatctgtttc

SEQ ID NO: 24959 - DNA, 25 bp, Homo sapiens
ggtcttgctgatacctgaggctgga

SEQ ID NO: 24960 - DNA, 25 bp, Homo sapiens
ggagaactctccactcgatgttttg

SEQ ID NO: 24961 - DNA, 25 bp, Homo sapiens
ggacggctggtttgcagtcatctaa

SEQ ID NO: 24962 - DNA, 25 bp, Homo sapiens
ggggagtgtgttctcacctcataga

SEQ ID NO: 24963 - DNA, 25 bp, Homo sapiens
ggcacttggtgcagatctgaaccca

SEQ ID NO: 24964 - DNA, 25 bp, Homo sapiens
gccctccgaggatctaatgatgttc

SEQ ID NO: 24965 - DNA, 25 bp, Homo sapiens
tggtcctggtagtttggtacaataa

SEQ ID NO: 24966 - DNA, 25 bp, Homo sapiens
ggagacttaattccaatgagaccta

SEQ ID NO: 24967 - DNA, 25 bp, Homo sapiens
tggcctcttgctctaacatgtctga

SEQ ID NO: 24968 - DNA, 25 bp, Homo sapiens
tcctcgggaggcaaatttcagtctc

SEQ ID NO: 24969 - DNA, 25 bp, Homo sapiens
gggcaacatctgtgtgcacctctta

SEQ ID NO: 24970 - DNA, 25 bp, Homo sapiens
ttctccagtacaagaagaggttctc

SEQ ID NO: 24971 - DNA, 25 bp, Homo sapiens
gctgagctggccaatccatctttta

SEQ ID NO: 24972 - DNA, 25 bp, Homo sapiens
gtggttgacctttccagagccatta

SEQ ID NO: 24973 - DNA, 25 bp, Homo sapiens
tgcgtctgtccctagcttctgtaca

SEQ ID NO: 24974 - DNA, 25 bp, Homo sapiens
cgctttctgataatggggctgccca

SEQ ID NO: 24975 - DNA, 25 bp, Homo sapiens
ggtaggcccgttcactgattttcaa

SEQ ID NO: 24976 - DNA, 25 bp, Homo sapiens
gccaggcctcagttactaatttcta

SEQ ID NO: 24977 - DNA, 25 bp, Homo sapiens
ttcctttcaggacccagcagttgtg

SEQ ID NO: 24978 - DNA, 25 bp, Homo sapiens
tgtgcctcaccgattccgcaagctg

SEQ ID NO: 24979 - DNA, 25 bp, Homo sapiens
ttctcccgaaggtctctaagcaggc

SEQ ID NO: 24980 - DNA, 25 bp, Homo sapiens
ccatcagggttacggcagaagttct

SEQ ID NO: 24981 - DNA, 25 bp, Homo sapiens
atctgggctctcacctgcacaaagg

SEQ ID NO: 24982 - DNA, 25 bp, Homo sapiens
cattatgtcaattctcagcctcagc

SEQ ID NO: 24983 - DNA, 25 bp, Homo sapiens
gtgccctgtgccaagaaagtttctg

SEQ ID NO: 24984 - DNA, 25 bp, Homo sapiens
ggggagtcccaaccttcatcagaga

SEQ ID NO: 24985 - DNA, 25 bp, Homo sapiens
gctgctgcttctccctttactttta

SEQ ID NO: 24986 - DNA, 25 bp, Homo sapiens
gctgttgacacggacacctttggga

SEQ ID NO: 24987 - DNA, 25 bp, Homo sapiens
gacccgcctggcactattcaaagga

SEQ ID NO: 24988 - DNA, 25 bp, Homo sapiens
gggctgcgattcattccttgggaaa

SEQ ID NO: 24989 - DNA, 25 bp, Homo sapiens
cgacaggactgggttatttttctca

SEQ ID NO: 24990 - DNA, 25 bp, Homo sapiens
aggttcctcaggcaacttggtgttg

SEQ ID NO: 24991 - DNA, 25 bp, Homo sapiens
gacagcttcttagggtcacccagga

SEQ ID NO: 24992 - DNA, 25 bp, Homo sapiens
tgcatccagattcaggctgctcatg

SEQ ID NO: 24993 - DNA, 25 bp, Homo sapiens
ctactaggcgggtagtcatatcaca

SEQ ID NO: 24994 - DNA, 25 bp, Homo sapiens
gagcgtccaccatcttttctgaatg

SEQ ID NO: 24995 - DNA, 25 bp, Homo sapiens
tttcccagctgaggagactgtctgc

SEQ ID NO: 24996 - DNA, 25 bp, Homo sapiens
cccgtgagttcttggttgacctgga

SEQ ID NO: 24997 - DNA, 25 bp, Homo sapiens
cctcctccggcagggaaagtgatta

SEQ ID NO: 24998 - DNA, 25 bp, Homo sapiens
gggggaaggggaaaggcggggagtg

SEQ ID NO: 24999 - DNA, 25 bp, Homo sapiens
agccctggaggagctcatttcatca

SEQ ID NO: 25000 - DNA, 25 bp, Homo sapiens
atgagtggcccttgacgcattgttc

SEQ ID NO: 25001 - DNA, 25 bp, Homo sapiens
ggaatgcctcttctgcctaccatga

SEQ ID NO: 25002 - DNA, 25 bp, Homo sapiens
gggcaagagggtggtaattcttcat

SEQ ID NO: 25003 - DNA, 25 bp, Homo sapiens
tcaagcgggagctgcagaattcctc

SEQ ID NO: 25004 - DNA, 25 bp, Homo sapiens
aagtaagcgttttgggtcctgcctc

SEQ ID NO: 25005 - DNA, 25 bp, Homo sapiens
caacgtgtctttttgggcaactagc

SEQ ID NO: 25006 - DNA, 25 bp, Homo sapiens
aagccatggcttggggcattatctc

SEQ ID NO: 25007 - DNA, 25 bp, Homo sapiens
tgcctcagctctatgggacttcctc

SEQ ID NO: 25008 - DNA, 25 bp, Homo sapiens
tgcaagtggccaaaccctgataatc

SEQ ID NO: 25009 - DNA, 25 bp, Homo sapiens
accaggggacatcccctggaaccag

SEQ ID NO: 25010 - DNA, 25 bp, Homo sapiens
tggcttggcttctccctcttacttc

SEQ ID NO: 25011 - DNA, 25 bp, Homo sapiens
cgcgctgcctccatgtgattaggta

SEQ ID NO: 25012 - DNA, 25 bp, Homo sapiens
ggcttgaggttctccaggcaccata

SEQ ID NO: 25013 - DNA, 25 bp, Homo sapiens
ccactggcctaggtctaatagcgga

SEQ ID NO: 25014 - DNA, 25 bp, Homo sapiens
gaattcagcaaactttcagcaaaca

SEQ ID NO: 25015 - DNA, 25 bp, Homo sapiens
ctgccttgtgagcaaacccaaagtc

SEQ ID NO: 25016 - DNA, 25 bp, Homo sapiens
caggccctgggtgaaaaacctaatc

SEQ ID NO: 25017 - DNA, 25 bp, Homo sapiens
tcagggactctctctcaagtggata

SEQ ID NO: 25018 - DNA, 25 bp, Homo sapiens
tgccaggactcatgccagacaaata

SEQ ID NO: 25019 - DNA, 25 bp, Homo sapiens
ccttttcagtggaggagacctgtca

SEQ ID NO: 25020 - DNA, 25 bp, Homo sapiens
aggctcctcctgtggaaagaaattc

SEQ ID NO: 25021 - DNA, 25 bp, Homo sapiens
gtcctacattcttgtggctatccta

SEQ ID NO: 25022 - DNA, 25 bp, Homo sapiens
actgtctgggcactttctggattga

SEQ ID NO: 25023 - DNA, 25 bp, Homo sapiens
cagacatcaggtggtggttaaaaca

SEQ ID NO: 25024 - DNA, 25 bp, Homo sapiens
cacagggctttggatactctcagtc

SEQ ID NO: 25025 - DNA, 25 bp, Homo sapiens
ggtctgccagcaagaggcctgctta

SEQ ID NO: 25026 - DNA, 25 bp, Homo sapiens
ggcaagcgttcttcatcttttcata

SEQ ID NO: 25027 - DNA, 25 bp, Homo sapiens
ccggtgagtcactgcagttttcata

SEQ ID NO: 25028 - DNA, 25 bp, Homo sapiens
gccagcttctggagtttagcccaca

SEQ ID NO: 25029 - DNA, 25 bp, Homo sapiens
cacttgagattcatggaagtccttc

SEQ ID NO: 25030 - DNA, 25 bp, Homo sapiens
gtcatttttaaaataaatatattgc

SEQ ID NO: 25031 - DNA, 25 bp, Homo sapiens
agaactttctgggatcctgagctgc

SEQ ID NO: 25032 - DNA, 25 bp, Homo sapiens
ggcttcatgcatcttacccggtttc

SEQ ID NO: 25033 - DNA, 25 bp, Homo sapiens
catcaggatatgctgtcacttcatc

SEQ ID NO: 25034 - DNA, 25 bp, Homo sapiens
ctccagaggaggttaggttgacttc

SEQ ID NO: 25035 - DNA, 25 bp, Homo sapiens
agactctcgtgtagctcaatgccca

SEQ ID NO: 25036 - DNA, 25 bp, Homo sapiens
tgagcgtctcgctccggtgtacaca

SEQ ID NO: 25037 - DNA, 25 bp, Homo sapiens
tccctgcaggccatgtgctcatttc

SEQ ID NO: 25038 - DNA, 25 bp, Homo sapiens
attcttgggcagctacaggttcttg

SEQ ID NO: 25039 - DNA, 25 bp, Homo sapiens
cccttgtgtcttgtgcatcccatga

SEQ ID NO: 25040 - DNA, 25 bp, Homo sapiens
tgcactgtcattcactgatgctctg

SEQ ID NO: 25041 - DNA, 25 bp, Homo sapiens
gcgacattagcaaaactctttcagt

SEQ ID NO: 25042 - DNA, 25 bp, Homo sapiens
ccactgcagttgagttcgctaggtc

SEQ ID NO: 25043 - DNA, 25 bp, Homo sapiens
ttctaggtagggtggattacacata

SEQ ID NO: 25044 - DNA, 25 bp, Homo sapiens
ggcctctggattcccttttcccaaa

SEQ ID NO: 25045 - DNA, 25 bp, Homo sapiens
tattcctggagcctggcagtctgca

SEQ ID NO: 25046 - DNA, 25 bp, Homo sapiens
tggctgcaatatgaaggaggctttt

SEQ ID NO: 25047 - DNA, 25 bp, Homo sapiens
catctacagcctgatgcatcggccg

SEQ ID NO: 25048 - DNA, 25 bp, Homo sapiens
tctcccgggcttttgatggatttca

SEQ ID NO: 25049 - DNA, 25 bp, Homo sapiens
cagagttcccagacgcctagttttc

SEQ ID NO: 25050 - DNA, 25 bp, Homo sapiens
gggcccttcccatatcaccagtaga

SEQ ID NO: 25051 - DNA, 25 bp, Homo sapiens
agtatttttcctcagtctgtgcatg

SEQ ID NO: 25052 - DNA, 25 bp, Homo sapiens
gggctcaacctcaaatacacgtgtc

SEQ ID NO: 25053 - DNA, 25 bp, Homo sapiens
ggccaccatgccacagaatctttat

SEQ ID NO: 25054 - DNA, 25 bp, Homo sapiens
cttctggggcagcatagttttctac

SEQ ID NO: 25055 - DNA, 25 bp, Homo sapiens
ggggagtgtgttctcacctcataga

SEQ ID NO: 25056 - DNA, 25 bp, Homo sapiens
ggcacttggtgcagatctgaaccca

SEQ ID NO: 25057 - DNA, 25 bp, Homo sapiens
tgaaggccctccaaggatctaatga

SEQ ID NO: 25058 - DNA, 25 bp, Homo sapiens
ccttatgcttgaaatgtgaggtttc

SEQ ID NO: 25059 - DNA, 25 bp, Homo sapiens
tcagtgtgactcttttgacaaatta

SEQ ID NO: 25060 - DNA, 25 bp, Homo sapiens
gggagattacttccagtgagaccta

SEQ ID NO: 25061 - DNA, 25 bp, Homo sapiens
tcagcagcgtagtagaagtataatg

SEQ ID NO: 25062 - DNA, 25 bp, Homo sapiens
ttgctgatgaaactgcggcctcttt

SEQ ID NO: 25063 - DNA, 25 bp, Homo sapiens
tgagcagcttctctagtttcataga

SEQ ID NO: 25064 - DNA, 25 bp, Homo sapiens
caggctcggtctcagtgattttatg

SEQ ID NO: 25065 - DNA, 25 bp, Homo sapiens
ttgcctcagctcctctgtgcaggtg

SEQ ID NO: 25066 - DNA, 25 bp, Homo sapiens
tccctgtgacctgcagagaagcttc

SEQ ID NO: 25067 - DNA, 25 bp, Homo sapiens
tgaccctcaggttgggcacatttta

SEQ ID NO: 25068 - DNA, 25 bp, Homo sapiens
ccaccgcacccggcctacaaaatgt

SEQ ID NO: 25069 - DNA, 25 bp, Homo sapiens
cccaaggagatgagtatgtgccacc

SEQ ID NO: 25070 - DNA, 25 bp, Homo sapiens
agctgcctctccctttgaaaatgaa

SEQ ID NO: 25071 - DNA, 25 bp, Homo sapiens
gccaggagagcgttcccaacaggct

SEQ ID NO: 25072 - DNA, 25 bp, Homo sapiens
agccagagccaaggggaatcatttc

SEQ ID NO: 25073 - DNA, 25 bp, Homo sapiens
tatataatacacatcggcgtcctgg

SEQ ID NO: 25074 - DNA, 25 bp, Homo sapiens
ctagccctggcaaaaggcaagtttg

SEQ ID NO: 25075 - DNA, 25 bp, Homo sapiens
cagatatgacttcctgggacccaca

SEQ ID NO: 25076 - DNA, 25 bp, Homo sapiens
ggccttgcccttcagtcactcattg

SEQ ID NO: 25077 - DNA, 25 bp, Homo sapiens
tctcagggccctgggatatagggac

SEQ ID NO: 25078 - DNA, 25 bp, Homo sapiens
ggcgccgccggatttaagcttaatc

SEQ ID NO: 25079 - DNA, 25 bp, Homo sapiens
gcagctcagctcagaccagggtttt

SEQ ID NO: 25080 - DNA, 25 bp, Homo sapiens
ggtgctgcagccattcccatctgga

SEQ ID NO: 25081 - DNA, 25 bp, Homo sapiens
atgcactgtctgctttgggcctccg

SEQ ID NO: 25082 - DNA, 25 bp, Homo sapiens
agaaagctccctcctgtggttagtg

SEQ ID NO: 25083 - DNA, 25 bp, Homo sapiens
tgttagccgcacacacagccagatg

SEQ ID NO: 25084 - DNA, 25 bp, Homo sapiens
gtccttgctttgtctgtggctcata

SEQ ID NO: 25085 - DNA, 25 bp, Homo sapiens
gggcaacacctgtgtgcacctctta

SEQ ID NO: 25086 - DNA, 25 bp, Homo sapiens
ttctccagtacaagaagaggtgctc

SEQ ID NO: 25087 - DNA, 25 bp, Homo sapiens
atggccgctgcaacacagctctgtg

SEQ ID NO: 25088 - DNA, 25 bp, Homo sapiens
gcccatggcagccaggggggttgca

SEQ ID NO: 25089 - DNA, 25 bp, Homo sapiens
gatttaacctgtattatggactgaa

SEQ ID NO: 25090 - DNA, 25 bp, Homo sapiens
agtgaccttccagggttatcttaca

SEQ ID NO: 25091 - DNA, 25 bp, Homo sapiens
agcctgtgctctctcccgaagggac

SEQ ID NO: 25092 - DNA, 25 bp, Homo sapiens
gtggtcccgtattcacctctgttgc

SEQ ID NO: 25093 - DNA, 25 bp, Homo sapiens
gtgacctgggactgaactgcaaatg

SEQ ID NO: 25094 - DNA, 25 bp, Homo sapiens
tcagaacccaggagacgagtgtgcc

SEQ ID NO: 25095 - DNA, 25 bp, Homo sapiens
cgccactagctgcatgtgcctatta

SEQ ID NO: 25096 - DNA, 25 bp, Homo sapiens
taggtttccactcccttcctctgtg

SEQ ID NO: 25097 - DNA, 25 bp, Homo sapiens
tatccacttcttagctgccaggttg

SEQ ID NO: 25098 - DNA, 25 bp, Homo sapiens
acgtggcagctcatggcaagtcttt

SEQ ID NO: 25099 - DNA, 25 bp, Homo sapiens
ttacctctcagggacgtgatcgatg

SEQ ID NO: 25100 - DNA, 25 bp, Homo sapiens
ggactgacctctctttatggccgta

SEQ ID NO: 25101 - DNA, 25 bp, Homo sapiens
ctaggcgtcaaagcacagaagttcc

SEQ ID NO: 25102 - DNA, 25 bp, Homo sapiens
gacttttgggaacatcacatctgga

SEQ ID NO: 25103 - DNA, 25 bp, Homo sapiens
cccaggggcagttactaaggagtct

SEQ ID NO: 25104 - DNA, 25 bp, Homo sapiens
cgttcatcggtcatcaggcctgtta

SEQ ID NO: 25105 - DNA, 25 bp, Homo sapiens
cccaacccccattctagaacaataa

SEQ ID NO: 25106 - DNA, 25 bp, Homo sapiens
tctggcatggcaaaactgtggaata

SEQ ID NO: 25107 - DNA, 25 bp, Homo sapiens
accattgttgttcatctcagaagca

SEQ ID NO: 25108 - DNA, 25 bp, Homo sapiens
gtgtcagccatcctcacctattttg

SEQ ID NO: 25109 - DNA, 25 bp, Homo sapiens
gaagctgctacctgatcctgattta

SEQ ID NO: 25110 - DNA, 25 bp, Homo sapiens
gctctgccagcaggaaccaaggtca

SEQ ID NO: 25111 - DNA, 25 bp, Homo sapiens
ctgcacgttttctcagggtgaacaa

SEQ ID NO: 25112 - DNA, 25 bp, Homo sapiens
cccagctggattttgacggtatata

SEQ ID NO: 25113 - DNA, 25 bp, Homo sapiens
attgatggtgatggcactggctcca

SEQ ID NO: 25114 - DNA, 25 bp, Homo sapiens
cttctatctgtgaggctgaggctta

SEQ ID NO: 25115 - DNA, 25 bp, Homo sapiens
ctcccgcttcctcttggcatggata

SEQ ID NO: 25116 - DNA, 25 bp, Homo sapiens
agtcccttggggaaagtagtctaga

SEQ ID NO: 25117 - DNA, 25 bp, Homo sapiens
gtcctggggactcaatagaactatc

SEQ ID NO: 25118 - DNA, 25 bp, Homo sapiens
gcaagctgagttgatcctggtccaa

SEQ ID NO: 25119 - DNA, 25 bp, Homo sapiens
ttacatttcaaagggtggcagcatt

SEQ ID NO: 25120 - DNA, 25 bp, Homo sapiens
gggaggaccatgacagcaactgctt

SEQ ID NO: 25121 - DNA, 25 bp, Homo sapiens
ccttcccagcatcaacttgtaccag

SEQ ID NO: 25122 - DNA, 25 bp, Homo sapiens
ccggtgatcctaggttttgaatgta

SEQ ID NO: 25123 - DNA, 25 bp, Homo sapiens
aactccttagtttggcagagaggcc

SEQ ID NO: 25124 - DNA, 25 bp, Homo sapiens
cccttcccaggcagaaagtaagata

SEQ ID NO: 25125 - DNA, 25 bp, Homo sapiens
aagcagtgtcgctgtcgtccaagca

SEQ ID NO: 25126 - DNA, 25 bp, Homo sapiens
tgcttgcctttgagagccctgctaa

SEQ ID NO: 25127 - DNA, 25 bp, Homo sapiens
gctgtacttcatcacgctgaattta

SEQ ID NO: 25128 - DNA, 25 bp, Homo sapiens
ccggctgcatggttagaactgttta

SEQ ID NO: 25129 - DNA, 25 bp, Homo sapiens
ggccctcctgggcaactcaaagctg

SEQ ID NO: 25130 - DNA, 25 bp, Homo sapiens
gggctctttggatgacctcagactt

SEQ ID NO: 25131 - DNA, 25 bp, Homo sapiens
ggtacttacctgacacaaaggcttt

SEQ ID NO: 25132 - DNA, 25 bp, Homo sapiens
ggattgctacctcctttcctgaaag

SEQ ID NO: 25133 - DNA, 25 bp, Homo sapiens
tgcctgtttgaccaggacctgtttg

SEQ ID NO: 25134 - DNA, 25 bp, Homo sapiens
ggcaatctcctccacaaagtaaata

SEQ ID NO: 25135 - DNA, 25 bp, Homo sapiens
ttagattttttttactacagataat

SEQ ID NO: 25136 - DNA, 25 bp, Homo sapiens
ctcacatgtgggctttattgcagca

SEQ ID NO: 25137 - DNA, 25 bp, Homo sapiens
ccagtgcctgcatttggcctacaca

SEQ ID NO: 25138 - DNA, 25 bp, Homo sapiens
tcccagtagtgtcatgtgtgccaca

SEQ ID NO: 25139 - DNA, 25 bp, Homo sapiens
cgggcattccacagacatagggtta

SEQ ID NO: 25140 - DNA, 25 bp, Homo sapiens
agccttacagagtgtggggaggaga

SEQ ID NO: 25141 - DNA, 25 bp, Homo sapiens
gggctcctcatgacaccttgctaca

SEQ ID NO: 25142 - DNA, 25 bp, Homo sapiens
cccggctttgtggaaacgtagtgta

SEQ ID NO: 25143 - DNA, 25 bp, Homo sapiens
tgccgtcagggagcctaacatgcta

SEQ ID NO: 25144 - DNA, 25 bp, Homo sapiens
ttctgggagcagaaacagccattgc

SEQ ID NO: 25145 - DNA, 25 bp, Homo sapiens
cctgccaggggattccattatggta

SEQ ID NO: 25146 - DNA, 25 bp, Homo sapiens
cagcaagggacactcagggatgaca

SEQ ID NO: 25147 - DNA, 25 bp, Homo sapiens
gaggcatcctcgcttgaattcagtg

SEQ ID NO: 25148 - DNA, 25 bp, Homo sapiens
ttcctctctgagtgctgactgcctg

SEQ ID NO: 25149 - DNA, 25 bp, Homo sapiens
gccaggtgatcataaaggtcccata

SEQ ID NO: 25150 - DNA, 25 bp, Homo sapiens
gcacaggctaaatatcttcccacag

SEQ ID NO: 25151 - DNA, 25 bp, Homo sapiens
tgcagacctgggattaagctgtcct

SEQ ID NO: 25152 - DNA, 25 bp, Homo sapiens
ggggtcactcatccgttgcagaatc

SEQ ID NO: 25153 - DNA, 25 bp, Homo sapiens
aggagccttctcaggggtcaagttc

SEQ ID NO: 25154 - DNA, 25 bp, Homo sapiens
ctctgtaatttaagacccaggtgat

SEQ ID NO: 25155 - DNA, 25 bp, Homo sapiens
gtagccctcaatgtgttttagaaag

SEQ ID NO: 25156 - DNA, 25 bp, Homo sapiens
gctatttgtcaaaaggcactctctg

SEQ ID NO: 25157 - DNA, 25 bp, Homo sapiens
tgggctctcctaaactgggctctga

SEQ ID NO: 25158 - DNA, 25 bp, Homo sapiens
ggagcaaaaatcattcaattactta

SEQ ID NO: 25159 - DNA, 25 bp, Homo sapiens
cccttgattttgtgcagtttcatta

SEQ ID NO: 25160 - DNA, 25 bp, Homo sapiens
aagttaatatgtgtgaaaatatttc

SEQ ID NO: 25161 - DNA, 25 bp, Homo sapiens
acacacttagttggatgcctcggga

SEQ ID NO: 25162 - DNA, 25 bp, Homo sapiens
taaaatgctagataaattctacagg

SEQ ID NO: 25163 - DNA, 25 bp, Homo sapiens
ccaggggacgcactcatatgactta

SEQ ID NO: 25164 - DNA, 25 bp, Homo sapiens
gaaagaaagaaagtgagatccttta

SEQ ID NO: 25165 - DNA, 25 bp, Homo sapiens
ggccaagtgctccaggggttataaa

SEQ ID NO: 25166 - DNA, 25 bp, Homo sapiens
ggtgcctctcgacaggaaagattta

SEQ ID NO: 25167 - DNA, 25 bp, Homo sapiens
ggtggcctaccaagagtcagcattg

SEQ ID NO: 25168 - DNA, 25 bp, Homo sapiens
gtcagctacattgagcttctttttg

SEQ ID NO: 25169 - DNA, 25 bp, Homo sapiens
gtaactttccatcttaagaactatc

SEQ ID NO: 25170 - DNA, 25 bp, Homo sapiens
tgctgagcgacatataaggctctta

SEQ ID NO: 25171 - DNA, 25 bp, Homo sapiens
caaccaagactcatgggactttata

SEQ ID NO: 25172 - DNA, 25 bp, Homo sapiens
ccaggaggggaatcacagcttaatc

SEQ ID NO: 25173 - DNA, 25 bp, Homo sapiens
cagaacggtgagtttggccaaatta

SEQ ID NO: 25174 - DNA, 25 bp, Homo sapiens
acctgttgtctgtcttctgggccaa

SEQ ID NO: 25175 - DNA, 25 bp, Homo sapiens
acgggcacaggggtaacgatatgta

SEQ ID NO: 25176 - DNA, 25 bp, Homo sapiens
ttcccagggtgaacaggtaaccagc

SEQ ID NO: 25177 - DNA, 25 bp, Homo sapiens
tgctccctggacactactaagtaag

SEQ ID NO: 25178 - DNA, 25 bp, Homo sapiens
gtactgatttctccatgtgcacata

SEQ ID NO: 25179 - DNA, 25 bp, Homo sapiens
tggcccaggacttactcatatagga

SEQ ID NO: 25180 - DNA, 25 bp, Homo sapiens
cctgcatctttacaagcctggatta

SEQ ID NO: 25181 - DNA, 25 bp, Homo sapiens
tgacacccgggatgaaaattttatc

SEQ ID NO: 25182 - DNA, 25 bp, Homo sapiens
cagccagcaggatctcaggtagtta

SEQ ID NO: 25183 - DNA, 25 bp, Homo sapiens
aaaggctcctcgagttcccgaaatc

SEQ ID NO: 25184 - DNA, 25 bp, Homo sapiens
ctccaccacaggcttatatgggtaa

SEQ ID NO: 25185 - DNA, 25 bp, Homo sapiens
gggtggccagctctccaaaaacttt

SEQ ID NO: 25186 - DNA, 25 bp, Homo sapiens
ttcacccctcaaagaaaaccacttt

SEQ ID NO: 25187 - DNA, 25 bp, Homo sapiens
ccaagcttctgcctctgtgtccaga

SEQ ID NO: 25188 - DNA, 25 bp, Homo sapiens
aaatagtcttatatcatatttttag

SEQ ID NO: 25189 - DNA, 25 bp, Homo sapiens
agccactgcatttcaaggtctcata

SEQ ID NO: 25190 - DNA, 25 bp, Homo sapiens
gagcactccttgtctccaaatgaga

SEQ ID NO: 25191 - DNA, 25 bp, Homo sapiens
gcacccacattctatctggacctta

SEQ ID NO: 25192 - DNA, 25 bp, Homo sapiens
gtttggataagtactgattgataga

SEQ ID NO: 25193 - DNA, 25 bp, Homo sapiens
caccgggcctgtttagcttattgta

SEQ ID NO: 25194 - DNA, 25 bp, Homo sapiens
tcccagaggcagaattcaacgtatc

SEQ ID NO: 25195 - DNA, 25 bp, Homo sapiens
cactgcatgatgctgaccacattca

SEQ ID NO: 25196 - DNA, 25 bp, Homo sapiens
ggctctctttcttaaattagcaatg

SEQ ID NO: 25197 - DNA, 25 bp, Homo sapiens
agccacttgctctgtccctgatatc

SEQ ID NO: 25198 - DNA, 25 bp, Homo sapiens
cccatgcagaccttgagaaattata

SEQ ID NO: 25199 - DNA, 25 bp, Homo sapiens
agagctccagccagtgccttttgtc

SEQ ID NO: 25200 - DNA, 25 bp, Homo sapiens
catgatgtatgttcaaggtccctga

SEQ ID NO: 25201 - DNA, 25 bp, Homo sapiens
ccaggctgctttgactgcatggaga

SEQ ID NO: 25202 - DNA, 25 bp, Homo sapiens
ttcaagatgatttttctgttgtttg

SEQ ID NO: 25203 - DNA, 25 bp, Homo sapiens
gatcatcctggccaatttattaaga

SEQ ID NO: 25204 - DNA, 25 bp, Homo sapiens
gttcagaatctgagagtgccaagtc

SEQ ID NO: 25205 - DNA, 25 bp, Homo sapiens
ggctctgtagtcctggccacaaaat

SEQ ID NO: 25206 - DNA, 25 bp, Homo sapiens
tatattaatagtagatttataagtg

SEQ ID NO: 25207 - DNA, 25 bp, Homo sapiens
tttgcctcccctccctcccttggtg

SEQ ID NO: 25208 - DNA, 25 bp, Homo sapiens
tttagtttacgttgtcttttgatac

SEQ ID NO: 25209 - DNA, 25 bp, Homo sapiens
aaaacaagtttttgaatagattata

SEQ ID NO: 25210 - DNA, 25 bp, Homo sapiens
aaactttaaaaaccacctccactcg

SEQ ID NO: 25211 - DNA, 25 bp, Homo sapiens
ctcctagcagggtgagcttgttttc

SEQ ID NO: 25212 - DNA, 25 bp, Homo sapiens
ccagttggctgcatggacttcattc

SEQ ID NO: 25213 - DNA, 25 bp, Homo sapiens
tttttttttaactcacatgtatgtt

SEQ ID NO: 25214 - DNA, 25 bp, Homo sapiens
tccaactttgatggggcagagggcc

SEQ ID NO: 25215 - DNA, 25 bp, Homo sapiens
ggaaggctccctgtaatctataaga

SEQ ID NO: 25216 - DNA, 25 bp, Homo sapiens
tccaacaatctagggtatcagtagg

SEQ ID NO: 25217 - DNA, 25 bp, Homo sapiens
tcactttgggatgcttctgaggctc

SEQ ID NO: 25218 - DNA, 25 bp, Homo sapiens
tgacaaggtcccagattcaggcatg

SEQ ID NO: 25219 - DNA, 25 bp, Homo sapiens
tgtctggcacccacacatctgttgg

SEQ ID NO: 25220 - DNA, 25 bp, Homo sapiens
agaggcatccctcttcgtggaacca

SEQ ID NO: 25221 - DNA, 25 bp, Homo sapiens
tgaaggatctaccacactttcgttt

SEQ ID NO: 25222 - DNA, 25 bp, Homo sapiens
aaggatccagttgcagtggctcaca

SEQ ID NO: 25223 - DNA, 25 bp, Homo sapiens
aggcaccttgtcctcccatgtaata

SEQ ID NO: 25224 - DNA, 25 bp, Homo sapiens
tgtgtacccagcactacccatatga

SEQ ID NO: 25225 - DNA, 25 bp, Homo sapiens
gtcgctgctaggtgaggcactcaaa

SEQ ID NO: 25226 - DNA, 25 bp, Homo sapiens
ggagttgccatgtcttcagtttttc

SEQ ID NO: 25227 - DNA, 25 bp, Homo sapiens
gggaccctctgctctgatgcttcta

SEQ ID NO: 25228 - DNA, 25 bp, Homo sapiens
acttggtcctatagcacggtgtgca

SEQ ID NO: 25229 - DNA, 25 bp, Homo sapiens
ctgcggtcttggtctacattacttg

SEQ ID NO: 25230 - DNA, 25 bp, Homo sapiens
tggcagctttcccttggtgtcattg

SEQ ID NO: 25231 - DNA, 25 bp, Homo sapiens
agacttttcctgttcctgggcaata

SEQ ID NO: 25232 - DNA, 25 bp, Homo sapiens
ggcagtcacagttttaccgcgaaga

SEQ ID NO: 25233 - DNA, 25 bp, Homo sapiens
agttctccaatctgcgccgggattc

SEQ ID NO: 25234 - DNA, 25 bp, Homo sapiens
cccgggtcctgcataatctaagata

SEQ ID NO: 25235 - DNA, 25 bp, Homo sapiens
gatcagtcattctttcgggcttgca

SEQ ID NO: 25236 - DNA, 25 bp, Homo sapiens
gccgccctcggagctgaagaaagcc

SEQ ID NO: 25237 - DNA, 25 bp, Homo sapiens
tgtctggctcttctctcttaaaatg

SEQ ID NO: 25238 - DNA, 25 bp, Homo sapiens
gacagcctgcccttgttacattgtg

SEQ ID NO: 25239 - DNA, 25 bp, Homo sapiens
cttggagctctgtgccttgattcta

SEQ ID NO: 25240 - DNA, 25 bp, Homo sapiens
tctcaagtgttgaatcccggtactg

SEQ ID NO: 25241 - DNA, 25 bp, Homo sapiens
ggagtcctgattcctgtggctttta

SEQ ID NO: 25242 - DNA, 25 bp, Homo sapiens
gcacgtggtcctggaaatgctattc

SEQ ID NO: 25243 - DNA, 25 bp, Homo sapiens
ttggggactcactacatcttacttg

SEQ ID NO: 25244 - DNA, 25 bp, Homo sapiens
tcttggctagttcaggggcactttt

SEQ ID NO: 25245 - DNA, 25 bp, Homo sapiens
gtgccaggccactgtaatgcttcta

SEQ ID NO: 25246 - DNA, 25 bp, Homo sapiens
cgctgcttgaattgctacccatatg

SEQ ID NO: 25247 - DNA, 25 bp, Homo sapiens
cttgggtcacagatcctcaccagga

SEQ ID NO: 25248 - DNA, 25 bp, Homo sapiens
gcctagagctctgtcctgtcattcc

SEQ ID NO: 25249 - DNA, 25 bp, Homo sapiens
tccagccgtccttttcagaagcaag

SEQ ID NO: 25250 - DNA, 25 bp, Homo sapiens
cctgaggggctgcttctaaattata

SEQ ID NO: 25251 - DNA, 25 bp, Homo sapiens
ctcttagttcttcggcaatatggca

SEQ ID NO: 25252 - DNA, 25 bp, Homo sapiens
agccacctcatctctgcagtgaatg

SEQ ID NO: 25253 - DNA, 25 bp, Homo sapiens
ctttggtctggagacagattccttc

SEQ ID NO: 25254 - DNA, 25 bp, Homo sapiens
cctgggccgttctttaacttattta

SEQ ID NO: 25255 - DNA, 25 bp, Homo sapiens
gcccagtcctgttgttgaaatgttg

SEQ ID NO: 25256 - DNA, 25 bp, Homo sapiens
atgctgggctagagttcattgttcc

SEQ ID NO: 25257 - DNA, 25 bp, Homo sapiens
ctgccagaaacttagcacttgtgta

SEQ ID NO: 25258 - DNA, 25 bp, Homo sapiens
tcgaccctgaagtgtggtactacta

SEQ ID NO: 25259 - DNA, 25 bp, Homo sapiens
tgcccaggtgaaccagaaaaatctg

SEQ ID NO: 25260 - DNA, 25 bp, Homo sapiens
ctcccagactggatacgagactctc

SEQ ID NO: 25261 - DNA, 25 bp, Homo sapiens
gaagggccctttctggtgccaaaga

SEQ ID NO: 25262 - DNA, 25 bp, Homo sapiens
ccctgtgacaggtgttggtataatc

SEQ ID NO: 25263 - DNA, 25 bp, Homo sapiens
tgcaccagagggatcacagtacact

SEQ ID NO: 25264 - DNA, 25 bp, Homo sapiens
aagaggttccagtagccagctagtc

SEQ ID NO: 25265 - DNA, 25 bp, Homo sapiens
ggtgggacattccttgaacccttta

SEQ ID NO: 25266 - DNA, 25 bp, Homo sapiens
atgaccctggctttatggctagata

SEQ ID NO: 25267 - DNA, 25 bp, Homo sapiens
ccctcatgttgtggggagacctaga

SEQ ID NO: 25268 - DNA, 25 bp, Homo sapiens
ggttgaacctgttgctccacaaaga

SEQ ID NO: 25269 - DNA, 25 bp, Homo sapiens
tgggcggcctctcttatacacagca

SEQ ID NO: 25270 - DNA, 25 bp, Homo sapiens
tggccgtccttcctggctcagttta

SEQ ID NO: 25271 - DNA, 25 bp, Homo sapiens
gacctgtagctctccttaatgatga

SEQ ID NO: 25272 - DNA, 25 bp, Homo sapiens
agaccctccagcttgcctgtgagta

SEQ ID NO: 25273 - DNA, 25 bp, Homo sapiens
aaggcgggaactctcttcatcatga

SEQ ID NO: 25274 - DNA, 25 bp, Homo sapiens
aaggatccctaggtttgccagtgca

SEQ ID NO: 25275 - DNA, 25 bp, Homo sapiens
tgacttcattgactaaaggccattg

SEQ ID NO: 25276 - DNA, 25 bp, Homo sapiens
tgccaatgccctctacctgtgcttg

SEQ ID NO: 25277 - DNA, 25 bp, Homo sapiens
tccagactgtatgaggttcctttgc

SEQ ID NO: 25278 - DNA, 25 bp, Homo sapiens
tggtcttgaaagtgtacctaggata

SEQ ID NO: 25279 - DNA, 25 bp, Homo sapiens
aggatcctcctgtgtttcattagta

SEQ ID NO: 25280 - DNA, 25 bp, Homo sapiens
ggacgctatacccttggctgaaaaa

SEQ ID NO: 25281 - DNA, 25 bp, Homo sapiens
ccctgagagctgagagtaaaatttt

SEQ ID NO: 25282 - DNA, 25 bp, Homo sapiens
ggaagtgcttcctttccatgcagga

SEQ ID NO: 25283 - DNA, 25 bp, Homo sapiens
gtggctctcgactcctccttgaaga

SEQ ID NO: 25284 - DNA, 25 bp, Homo sapiens
agccctggtctgtttggtccaaagc

SEQ ID NO: 25285 - DNA, 25 bp, Homo sapiens
ctagtgcagctcaaaacaggctttg

SEQ ID NO: 25286 - DNA, 25 bp, Homo sapiens
ctctgcttcttggagatggtgctta

SEQ ID NO: 25287 - DNA, 25 bp, Homo sapiens
ctggtctacccacctggaaggcttt

SEQ ID NO: 25288 - DNA, 25 bp, Homo sapiens
cctggctcaaggttcgcacatgata

SEQ ID NO: 25289 - DNA, 25 bp, Homo sapiens
accctttgatgaccctgcccatgga

SEQ ID NO: 25290 - DNA, 25 bp, Homo sapiens
cagagggctcgtgcaatatggaatc

SEQ ID NO: 25291 - DNA, 25 bp, Homo sapiens
ggccagctcatgatcccttctttgc

SEQ ID NO: 25292 - DNA, 25 bp, Homo sapiens
gagaatgacttccacctgcgggctg

SEQ ID NO: 25293 - DNA, 25 bp, Homo sapiens
ccttgctgccttcatgaatactgtc

SEQ ID NO: 25294 - DNA, 25 bp, Homo sapiens
tggcctctcagcagggaataggttg

SEQ ID NO: 25295 - DNA, 25 bp, Homo sapiens
tcctagcctgcagtgagccaaacta

SEQ ID NO: 25296 - DNA, 25 bp, Homo sapiens
aaatatatatttgtagaagtttaaa

SEQ ID NO: 25297 - DNA, 25 bp, Homo sapiens
cccggaggcacactgacaattgatt

SEQ ID NO: 25298 - DNA, 25 bp, Homo sapiens
tggtccctcacctgccagacaaatg

SEQ ID NO: 25299 - DNA, 25 bp, Homo sapiens
aacctcggggaaactctctgctcta

SEQ ID NO: 25300 - DNA, 25 bp, Homo sapiens
ctggcatttgttttggttgagatcc

SEQ ID NO: 25301 - DNA, 25 bp, Homo sapiens
cggtgcctacgccacattctgtttg

SEQ ID NO: 25302 - DNA, 25 bp, Homo sapiens
gagccgcgtgctagagcatacatga

SEQ ID NO: 25303 - DNA, 25 bp, Homo sapiens
ctccttcttcatgctccactagtgg

SEQ ID NO: 25304 - DNA, 25 bp, Homo sapiens
gcctgggcaaggttcatgtaagctg

SEQ ID NO: 25305 - DNA, 25 bp, Homo sapiens
taaaataaatcattgtctggaggtc

SEQ ID NO: 25306 - DNA, 25 bp, Homo sapiens
ttcccggagctcagttgtattaaca

SEQ ID NO: 25307 - DNA, 25 bp, Homo sapiens
ggcaggatggcctaaaacttattta

SEQ ID NO: 25308 - DNA, 25 bp, Homo sapiens
agtgtctaaagcctcctttaatgtt

SEQ ID NO: 25309 - DNA, 25 bp, Homo sapiens
gaaaaccctgctcttagagggttca

SEQ ID NO: 25310 - DNA, 25 bp, Homo sapiens
ttttaaaattttaataaggaacttc

SEQ ID NO: 25311 - DNA, 25 bp, Homo sapiens
ctggccttgggcacacattggatac

SEQ ID NO: 25312 - DNA, 25 bp, Homo sapiens
cccaatatctgcaaaaagcttgatt

SEQ ID NO: 25313 - DNA, 25 bp, Homo sapiens
ggagcctttccagtttccagaggga

SEQ ID NO: 25314 - DNA, 25 bp, Homo sapiens
cctgataattttgagctggtccctg

SEQ ID NO: 25315 - DNA, 25 bp, Homo sapiens
ttaactgcatactcacttcgtggtg

SEQ ID NO: 25316 - DNA, 25 bp, Homo sapiens
ggcgcagtccgttcctctagacagg

SEQ ID NO: 25317 - DNA, 25 bp, Homo sapiens
agctttggctttgctccctcaagta

SEQ ID NO: 25318 - DNA, 25 bp, Homo sapiens
aatcacttgggtttgctgctggaca

SEQ ID NO: 25319 - DNA, 25 bp, Homo sapiens
ttgactatggaatctgtgtgctaca

SEQ ID NO: 25320 - DNA, 25 bp, Homo sapiens
gtggggcctggactttttactatga

SEQ ID NO: 25321 - DNA, 25 bp, Homo sapiens
ccctctgctcctaccagggtatgaa

SEQ ID NO: 25322 - DNA, 25 bp, Homo sapiens
ctccctcagtcaaggttcagaaata

SEQ ID NO: 25323 - DNA, 25 bp, Homo sapiens
ctctaactactccaagacaaaggca

SEQ ID NO: 25324 - DNA, 25 bp, Homo sapiens
tggcaaacagtctggcctctccttg

SEQ ID NO: 25325 - DNA, 25 bp, Homo sapiens
gggacttcctgtcttgccttcctga

SEQ ID NO: 25326 - DNA, 25 bp, Homo sapiens
gggcccatgccaggactgagtcata

SEQ ID NO: 25327 - DNA, 25 bp, Homo sapiens
aggggcttcctcttctcaggccaga

SEQ ID NO: 25328 - DNA, 25 bp, Homo sapiens
ggctgatgccaaatgactacaactg

SEQ ID NO: 25329 - DNA, 25 bp, Homo sapiens
gtggtgccttctccttctgtccaag

SEQ ID NO: 25330 - DNA, 25 bp, Homo sapiens
ggtcttctactccttccactgggca

SEQ ID NO: 25331 - DNA, 25 bp, Homo sapiens
ggcccaggaggctactatgcaaatc

SEQ ID NO: 25332 - DNA, 25 bp, Homo sapiens
tggttggaaacatctgcatgacctc

SEQ ID NO: 25333 - DNA, 25 bp, Homo sapiens
cggtctagatgaatttaaaaggtat

SEQ ID NO: 25334 - DNA, 25 bp, Homo sapiens
tttttccaacacaagtacatatcag

SEQ ID NO: 25335 - DNA, 25 bp, Homo sapiens
cagtctacagtttggttcaggcata

SEQ ID NO: 25336 - DNA, 25 bp, Homo sapiens
caccaggagggttgcatagttattt

SEQ ID NO: 25337 - DNA, 25 bp, Homo sapiens
ctgcttaggggcaactcaggatcta

SEQ ID NO: 25338 - DNA, 25 bp, Homo sapiens
ttactttgagaattctttttcagtg

SEQ ID NO: 25339 - DNA, 25 bp, Homo sapiens
gttcgccctgaacaagcactgcttc

SEQ ID NO: 25340 - DNA, 25 bp, Homo sapiens
aggttgtccatatgtccgctgctcc

SEQ ID NO: 25341 - DNA, 25 bp, Homo sapiens
tccttggtaccactcgggataattc

SEQ ID NO: 25342 - DNA, 25 bp, Homo sapiens
gccacgcctctaaaacccggaagta

SEQ ID NO: 25343 - DNA, 25 bp, Homo sapiens
ggagctcaggctctcatacattttg

SEQ ID NO: 25344 - DNA, 25 bp, Homo sapiens
tggtagcttcttccagcctatactg

SEQ ID NO: 25345 - DNA, 25 bp, Homo sapiens
tgaggcctctggacccatctgtctt

SEQ ID NO: 25346 - DNA, 25 bp, Homo sapiens
ggggtgaaatgaaaagactcgcctc

SEQ ID NO: 25347 - DNA, 25 bp, Homo sapiens
ccggccagatgtcgaagttcctaga

SEQ ID NO: 25348 - DNA, 25 bp, Homo sapiens
caggagtctgctacaccatttttga

SEQ ID NO: 25349 - DNA, 25 bp, Homo sapiens
cccagcttgggccatcattttgata

SEQ ID NO: 25350 - DNA, 25 bp, Homo sapiens
tggggccgtgcctcacttttattta

SEQ ID NO: 25351 - DNA, 25 bp, Homo sapiens
aagcccaccctttggacgagcctga

SEQ ID NO: 25352 - DNA, 25 bp, Homo sapiens
tgccgctctcttggaaccacagctg

SEQ ID NO: 25353 - DNA, 25 bp, Homo sapiens
ctgccctgacctgctggatctgttt

SEQ ID NO: 25354 - DNA, 25 bp, Homo sapiens
gcgctacggcgtctatgtcatcaac

SEQ ID NO: 25355 - DNA, 25 bp, Homo sapiens
ggacatgggtccctcccgtatgatg

SEQ ID NO: 25356 - DNA, 25 bp, Homo sapiens
aaagcgatggtctctccaagggctg

SEQ ID NO: 25357 - DNA, 25 bp, Homo sapiens
cccggtcgagaagctggactagatc

SEQ ID NO: 25358 - DNA, 25 bp, Homo sapiens
ttggtgccctcgaagacctcacttg

SEQ ID NO: 25359 - DNA, 25 bp, Homo sapiens
cagcttgagcaggagggtttttcta

SEQ ID NO: 25360 - DNA, 25 bp, Homo sapiens
ccctgcccttgcacggtgtacttga

SEQ ID NO: 25361 - DNA, 25 bp, Homo sapiens
ttctgactggagcagctgacatctc

SEQ ID NO: 25362 - DNA, 25 bp, Homo sapiens
tgttagccctgatgtggaccatttc

SEQ ID NO: 25363 - DNA, 25 bp, Homo sapiens
ggccggcttgtgtttgtacattgca

SEQ ID NO: 25364 - DNA, 25 bp, Homo sapiens
ggtatcccagctctccttgcaggtg

SEQ ID NO: 25365 - DNA, 25 bp, Homo sapiens
ccaccgccacttgtgatagagatta

SEQ ID NO: 25366 - DNA, 25 bp, Homo sapiens
gcccaggggcacctgcatgtgtata

SEQ ID NO: 25367 - DNA, 25 bp, Homo sapiens
ccttctggaggaggagtgtcacacc

SEQ ID NO: 25368 - DNA, 25 bp, Homo sapiens
tttggcccagccagcttcagatctg

SEQ ID NO: 25369 - DNA, 25 bp, Homo sapiens
cccagctgctatcttggcatccaaa

SEQ ID NO: 25370 - DNA, 25 bp, Homo sapiens
cctggcagtgtgacctcaaattgtc

SEQ ID NO: 25371 - DNA, 25 bp, Homo sapiens
gcccgctgtgcctcaatcttgtgga

SEQ ID NO: 25372 - DNA, 25 bp, Homo sapiens
gaggctgacacgctatcgatattga

SEQ ID NO: 25373 - DNA, 25 bp, Homo sapiens
ctgtgatctaggatactctacttag

SEQ ID NO: 25374 - DNA, 25 bp, Homo sapiens
acaggtggggacttaaattcgggta

SEQ ID NO: 25375 - DNA, 25 bp, Homo sapiens
cccagagggtcactttctcagttta

SEQ ID NO: 25376 - DNA, 25 bp, Homo sapiens
ctccaagtctcaacagggcatactc

SEQ ID NO: 25377 - DNA, 25 bp, Homo sapiens
acccattggggaacctgaatactgc

SEQ ID NO: 25378 - DNA, 25 bp, Homo sapiens
ctttcccaagagtttcctgagtgtc

SEQ ID NO: 25379 - DNA, 25 bp, Homo sapiens
ccagtccatgggcattccaaaattc

SEQ ID NO: 25380 - DNA, 25 bp, Homo sapiens
gaccagtgtggttgttctatataca

SEQ ID NO: 25381 - DNA, 25 bp, Homo sapiens
cccttcatcttggagaggaactctc

SEQ ID NO: 25382 - DNA, 25 bp, Homo sapiens
tgcatttgaactaaacgtaagtata

SEQ ID NO: 25383 - DNA, 25 bp, Homo sapiens
atttagggacccagcagcttactgc

SEQ ID NO: 25384 - DNA, 25 bp, Homo sapiens
ctagttctgagtacaccttctttga

SEQ ID NO: 25385 - DNA, 25 bp, Homo sapiens
tcagcagcccaatgtaggtaataca

SEQ ID NO: 25386 - DNA, 25 bp, Homo sapiens
taggggctccttcttactctgaaaa

SEQ ID NO: 25387 - DNA, 25 bp, Homo sapiens
gagggcaccatccacgtcaactatg

SEQ ID NO: 25388 - DNA, 25 bp, Homo sapiens
ctgcatttggaatgtctttggatta

SEQ ID NO: 25389 - DNA, 25 bp, Homo sapiens
ttgggccaactaagattatctctga

SEQ ID NO: 25390 - DNA, 25 bp, Homo sapiens
caggcaatgctacccttgtaaaata

SEQ ID NO: 25391 - DNA, 25 bp, Homo sapiens
gagtaccttcacaatctcatttaca

SEQ ID NO: 25392 - DNA, 25 bp, Homo sapiens
ctttataaatgtaaaagaaaaaagc

SEQ ID NO: 25393 - DNA, 25 bp, Homo sapiens
tctgtggagtgagtcccacctcttc

SEQ ID NO: 25394 - DNA, 25 bp, Homo sapiens
cccatgtctgtgtctgaagttaaga

SEQ ID NO: 25395 - DNA, 25 bp, Homo sapiens
ctccacagcaggaattgttattttc

SEQ ID NO: 25396 - DNA, 25 bp, Homo sapiens
gtttatttttgttttaacttacaga

SEQ ID NO: 25397 - DNA, 25 bp, Homo sapiens
ctcaggagactgtgggtatatgcaa

SEQ ID NO: 25398 - DNA, 25 bp, Homo sapiens
ccctcatgggatccaggagcttttc

SEQ ID NO: 25399 - DNA, 25 bp, Homo sapiens
ttagtcactgggacatgtcttcatg

SEQ ID NO: 25400 - DNA, 25 bp, Homo sapiens
ggtgcacatggtacctggaatcata

SEQ ID NO: 25401 - DNA, 25 bp, Homo sapiens
agctctgctacttggcagccattta

SEQ ID NO: 25402 - DNA, 25 bp, Homo sapiens
aaagaattatggttttactccaaaa

SEQ ID NO: 25403 - DNA, 25 bp, Homo sapiens
ggaggctgcactgttggctttccta

SEQ ID NO: 25404 - DNA, 25 bp, Homo sapiens
gaagttgaacacttttcaattactc

SEQ ID NO: 25405 - DNA, 25 bp, Homo sapiens
ggcccacgcagaggacaaaaagttc

SEQ ID NO: 25406 - DNA, 25 bp, Homo sapiens
gctgctgctgctattcctttaggaa

SEQ ID NO: 25407 - DNA, 25 bp, Homo sapiens
ttttaaaaaaattgaagctccttag

SEQ ID NO: 25408 - DNA, 25 bp, Homo sapiens
ctgcatttcagccttggagaagata

SEQ ID NO: 25409 - DNA, 25 bp, Homo sapiens
tttcccaaataccatgccagaatga

SEQ ID NO: 25410 - DNA, 25 bp, Homo sapiens
caacttttcttgctgcgctgggtca

SEQ ID NO: 25411 - DNA, 25 bp, Homo sapiens
ccccccccacaaaaaaaaatgactg

SEQ ID NO: 25412 - DNA, 25 bp, Homo sapiens
atctcgatgttgtgaaggtgaccca

SEQ ID NO: 25413 - DNA, 25 bp, Homo sapiens
tggcaaactgctgctgctacctttc

SEQ ID NO: 25414 - DNA, 25 bp, Homo sapiens
tgtcgtaactaaaagcaggccaata

SEQ ID NO: 25415 - DNA, 25 bp, Homo sapiens
ttgccatggccaagtcagataaaca

SEQ ID NO: 25416 - DNA, 25 bp, Homo sapiens
gagtgccacctcttagctttcaatg

SEQ ID NO: 25417 - DNA, 25 bp, Homo sapiens
tctgtcctagaactgccaataactg

SEQ ID NO: 25418 - DNA, 25 bp, Homo sapiens
agtgccaggccagtacattagttta

SEQ ID NO: 25419 - DNA, 25 bp, Homo sapiens
tgccctggccctcaagacttaagtt

SEQ ID NO: 25420 - DNA, 25 bp, Homo sapiens
gcaacctcagagatgaacaatggca

SEQ ID NO: 25421 - DNA, 25 bp, Homo sapiens
gagttcaggggcacagacttcacta

SEQ ID NO: 25422 - DNA, 25 bp, Homo sapiens
ccagtctccagtggctttgcatcca

SEQ ID NO: 25423 - DNA, 25 bp, Homo sapiens
ggggcctacttctttacatccagga

SEQ ID NO: 25424 - DNA, 25 bp, Homo sapiens
caccacattctgtcttgggcaagga

SEQ ID NO: 25425 - DNA, 25 bp, Homo sapiens
ggaaaacagggttaggtcatcaagg

SEQ ID NO: 25426 - DNA, 25 bp, Homo sapiens
catcagtctctgcaagtgttctttc

SEQ ID NO: 25427 - DNA, 25 bp, Homo sapiens
tttcagctgagccaagggaactcta

SEQ ID NO: 25428 - DNA, 25 bp, Homo sapiens
gtgggggaaaggcattcaaagctga

SEQ ID NO: 25429 - DNA, 25 bp, Homo sapiens
ccaggggtcagaataggagcaagtc

SEQ ID NO: 25430 - DNA, 25 bp, Homo sapiens
ccctccaggttgaagctcagattcc

SEQ ID NO: 25431 - DNA, 25 bp, Homo sapiens
cctctgggtcctagtttctgatgtc

SEQ ID NO: 25432 - DNA, 25 bp, Homo sapiens
tctgtgagtttccaagcaggcctgc

SEQ ID NO: 25433 - DNA, 25 bp, Homo sapiens
accacaggttggcagcagctactaa

SEQ ID NO: 25434 - DNA, 25 bp, Homo sapiens
ggattggaatcctcagtcactcttg

SEQ ID NO: 25435 - DNA, 25 bp, Homo sapiens
tgccagctaacagaatgagtgcctc

SEQ ID NO: 25436 - DNA, 25 bp, Homo sapiens
ccactggtatcctacccttttcacc

SEQ ID NO: 25437 - DNA, 25 bp, Homo sapiens
ggggctcaggcctataaaagattca

SEQ ID NO: 25438 - DNA, 25 bp, Homo sapiens
tgagtccctccctacaccatatgtg

SEQ ID NO: 25439 - DNA, 25 bp, Homo sapiens
aggatgttttgacccgaccactttg

SEQ ID NO: 25440 - DNA, 25 bp, Homo sapiens
agccacctgctccaagaagtgtaga

SEQ ID NO: 25441 - DNA, 25 bp, Homo sapiens
ggcctgctctcacccagttattgga

SEQ ID NO: 25442 - DNA, 25 bp, Homo sapiens
gcatctgtgcctagcccaaagtata

SEQ ID NO: 25443 - DNA, 25 bp, Homo sapiens
aaggagctccttagtggcacacaga

SEQ ID NO: 25444 - DNA, 25 bp, Homo sapiens
cactgggataggtcaaaaaggcttt

SEQ ID NO: 25445 - DNA, 25 bp, Homo sapiens
ggaggactcacacccagcttcattc

SEQ ID NO: 25446 - DNA, 25 bp, Homo sapiens
tgtgggcaagccatgtcaagatcca

SEQ ID NO: 25447 - DNA, 25 bp, Homo sapiens
accactggctggaaaggtcaaagtc

SEQ ID NO: 25448 - DNA, 25 bp, Homo sapiens
aggtgtgctctgcaaggctcttcac

SEQ ID NO: 25449 - DNA, 25 bp, Homo sapiens
tattccatatgtatacatatgttca

SEQ ID NO: 25450 - DNA, 25 bp, Homo sapiens
actcacattttgtatataaaaacac

SEQ ID NO: 25451 - DNA, 25 bp, Homo sapiens
ggcggctgctactctcatctgtatt

SEQ ID NO: 25452 - DNA, 25 bp, Homo sapiens
actgccttcagatgtgggtccctta

SEQ ID NO: 25453 - DNA, 25 bp, Homo sapiens
cgcgggctctctctgcaagaaagta

SEQ ID NO: 25454 - DNA, 25 bp, Homo sapiens
ctgtctagcctagggaagatactca

SEQ ID NO: 25455 - DNA, 25 bp, Homo sapiens
cccattgtcacccttaagggtggca

SEQ ID NO: 25456 - DNA, 25 bp, Homo sapiens
aaaaatatttcccaggataaataat

SEQ ID NO: 25457 - DNA, 25 bp, Homo sapiens
ctgagccctgttcctgttgattttc

SEQ ID NO: 25458 - DNA, 25 bp, Homo sapiens
aacacatttgccttttctgggatga

SEQ ID NO: 25459 - DNA, 25 bp, Homo sapiens
tgggctctcaaaagtggtcaacata

SEQ ID NO: 25460 - DNA, 25 bp, Homo sapiens
ggggccaagcatccttctccattta

SEQ ID NO: 25461 - DNA, 25 bp, Homo sapiens
tcctggtgatacagacctttgtcta

SEQ ID NO: 25462 - DNA, 25 bp, Homo sapiens
tatgacctgctttaccaacttgggg

SEQ ID NO: 25463 - DNA, 25 bp, Homo sapiens
tgcctcagtgatatccagcttagtc

SEQ ID NO: 25464 - DNA, 25 bp, Homo sapiens
tgttgtgtaccaccctcctggagtc

SEQ ID NO: 25465 - DNA, 25 bp, Homo sapiens
tctggaggagcatcttggtcaattc

SEQ ID NO: 25466 - DNA, 25 bp, Homo sapiens
cgtcacagaaatagtagggcagatc

SEQ ID NO: 25467 - DNA, 25 bp, Homo sapiens
cactggtgtttatatgcactgaaga

SEQ ID NO: 25468 - DNA, 25 bp, Homo sapiens
gattcaatctccgtgacagacagtg

SEQ ID NO: 25469 - DNA, 25 bp, Homo sapiens
cagagatttcttcatacggtaggta

SEQ ID NO: 25470 - DNA, 25 bp, Homo sapiens
aaggagatagacataacaggagtta

SEQ ID NO: 25471 - DNA, 25 bp, Homo sapiens
gcgtcgacgctctacagagtataaa

SEQ ID NO: 25472 - DNA, 25 bp, Homo sapiens
acacaacttttgctggcctgggaaa

SEQ ID NO: 25473 - DNA, 25 bp, Homo sapiens
ctgccctttttgaacgtgctataga

SEQ ID NO: 25474 - DNA, 25 bp, Homo sapiens
tccatcttggggctgtagaactttc

SEQ ID NO: 25475 - DNA, 25 bp, Homo sapiens
caggcttggagagacagcttccttc

SEQ ID NO: 25476 - DNA, 25 bp, Homo sapiens
ggggactgctttaaacctctgtacc

SEQ ID NO: 25477 - DNA, 25 bp, Homo sapiens
ttagatgttttcaggccttgtattc

SEQ ID NO: 25478 - DNA, 25 bp, Homo sapiens
cacatagatatgtgcaaagaatttc

SEQ ID NO: 25479 - DNA, 25 bp, Homo sapiens
ggtaaagtttatattatcgaacttt

SEQ ID NO: 25480 - DNA, 25 bp, Homo sapiens
aggagtcctggcttcatacattatg

SEQ ID NO: 25481 - DNA, 25 bp, Homo sapiens
agtccattccgtctctcctttgttg

SEQ ID NO: 25482 - DNA, 25 bp, Homo sapiens
tgttcctgccagagggtcaagtttc

SEQ ID NO: 25483 - DNA, 25 bp, Homo sapiens
accttccgggtttctgttatgcagc

SEQ ID NO: 25484 - DNA, 25 bp, Homo sapiens
tggcccagcctgatgtgaaacaatg

SEQ ID NO: 25485 - DNA, 25 bp, Homo sapiens
ttagcccttatgttggacagcagta

SEQ ID NO: 25486 - DNA, 25 bp, Homo sapiens
tgtctgagaattctactatacaatg

SEQ ID NO: 25487 - DNA, 25 bp, Homo sapiens
tgcacctgccacttaagatccgttc

SEQ ID NO: 25488 - DNA, 25 bp, Homo sapiens
cgcggctacgtgcagaatccgtcta

SEQ ID NO: 25489 - DNA, 25 bp, Homo sapiens
ggtgaatttccctcatcatgggctg

SEQ ID NO: 25490 - DNA, 25 bp, Homo sapiens
aacccaggtggtgtcagagatcatc

SEQ ID NO: 25491 - DNA, 25 bp, Homo sapiens
tctccagggcaaacagtgatacata

SEQ ID NO: 25492 - DNA, 25 bp, Homo sapiens
tcagtaggtgttcttgagtgggcta

SEQ ID NO: 25493 - DNA, 25 bp, Homo sapiens
cattcaactagaatttttgaggaaa

SEQ ID NO: 25494 - DNA, 25 bp, Homo sapiens
ttggggctgagctacactgaaatcc

SEQ ID NO: 25495 - DNA, 25 bp, Homo sapiens
agacttcctgtgtgcttaccgtgtg

SEQ ID NO: 25496 - DNA, 25 bp, Homo sapiens
tgagaaccactgtattgcatgaaga

SEQ ID NO: 25497 - DNA, 25 bp, Homo sapiens
caccttcggccttaaagctaccaga

SEQ ID NO: 25498 - DNA, 25 bp, Homo sapiens
atcgtccttctctcctcagtgtgtg

SEQ ID NO: 25499 - DNA, 25 bp, Homo sapiens
cagctctggctgataacaaacctga

SEQ ID NO: 25500 - DNA, 25 bp, Homo sapiens
ggattctcctctccttttctctgta

SEQ ID NO: 25501 - DNA, 25 bp, Homo sapiens
caagctgttagatatggcgagaatg

SEQ ID NO: 25502 - DNA, 25 bp, Homo sapiens
gtgcctcccagtgccattgattctt

SEQ ID NO: 25503 - DNA, 25 bp, Homo sapiens
aagggcctggttccacttctcagta

SEQ ID NO: 25504 - DNA, 25 bp, Homo sapiens
cccgtttgcaaaggacagccctcta

SEQ ID NO: 25505 - DNA, 25 bp, Homo sapiens
tgctggagctcacaggtcgaatttc

SEQ ID NO: 25506 - DNA, 25 bp, Homo sapiens
cccatggggaatctgtcttgtcatc

SEQ ID NO: 25507 - DNA, 25 bp, Homo sapiens
gccctggggtatatcacagctcaaa

SEQ ID NO: 25508 - DNA, 25 bp, Homo sapiens
ttgctgatcttgtctcctcggggtt

SEQ ID NO: 25509 - DNA, 25 bp, Homo sapiens
acctgctgagtgtcgtgtgtcaatc

SEQ ID NO: 25510 - DNA, 25 bp, Homo sapiens
gtgtctcccatatatgccaggcata

SEQ ID NO: 25511 - DNA, 25 bp, Homo sapiens
ggcgcttcttgggaatattcattca

SEQ ID NO: 25512 - DNA, 25 bp, Homo sapiens
atgaccctacctggaactgataaga

SEQ ID NO: 25513 - DNA, 25 bp, Homo sapiens
ccagaaccctggtgagatggctcca

SEQ ID NO: 25514 - DNA, 25 bp, Homo sapiens
tcctctagtgctaactgatcatgtc

SEQ ID NO: 25515 - DNA, 25 bp, Homo sapiens
ccatgtggttcgtgaatcattcatt

SEQ ID NO: 25516 - DNA, 25 bp, Homo sapiens
ggcgtaactggacttggcaacaatg

SEQ ID NO: 25517 - DNA, 25 bp, Homo sapiens
cccatagctacgagttgacagttgt

SEQ ID NO: 25518 - DNA, 25 bp, Homo sapiens
agacctgtgtgagatgggcttaccc

SEQ ID NO: 25519 - DNA, 25 bp, Homo sapiens
gggtttggtcctcacactgtaagtc

SEQ ID NO: 25520 - DNA, 25 bp, Homo sapiens
actggtcgctcatgctttttctata

SEQ ID NO: 25521 - DNA, 25 bp, Homo sapiens
gtcaggtttctccagagggacaagg

SEQ ID NO: 25522 - DNA, 25 bp, Homo sapiens
aagtgcttctcaatttttcacatgg

SEQ ID NO: 25523 - DNA, 25 bp, Homo sapiens
cttgggtttgatgccacgtgttctc

SEQ ID NO: 25524 - DNA, 25 bp, Homo sapiens
gaacccttgattctgcacactgttg

SEQ ID NO: 25525 - DNA, 25 bp, Homo sapiens
agccatgttagagagcctgattttg

SEQ ID NO: 25526 - DNA, 25 bp, Homo sapiens
gtcatctcagccataggagctcttg

SEQ ID NO: 25527 - DNA, 25 bp, Homo sapiens
ggaaggtcccatgtactctgtatta

SEQ ID NO: 25528 - DNA, 25 bp, Homo sapiens
gctgcggttactttgccattaaata

SEQ ID NO: 25529 - DNA, 25 bp, Homo sapiens
tctcgtttctgctaggggattccca

SEQ ID NO: 25530 - DNA, 25 bp, Homo sapiens
tcgtggtggaaggaaaaatcagtta

SEQ ID NO: 25531 - DNA, 25 bp, Homo sapiens
aggtggctcccatttccagatgtta

SEQ ID NO: 25532 - DNA, 25 bp, Homo sapiens
tcattggttcagtgtcagggccttc

SEQ ID NO: 25533 - DNA, 25 bp, Homo sapiens
gcttcccagaggcaatagtttgaca

SEQ ID NO: 25534 - DNA, 25 bp, Homo sapiens
gtccttagcctagagtcagatgtca

SEQ ID NO: 25535 - DNA, 25 bp, Homo sapiens
ccctgtgcttctgtcctcctgataa

SEQ ID NO: 25536 - DNA, 25 bp, Homo sapiens
atcctatttcatggggctggccata

SEQ ID NO: 25537 - DNA, 25 bp, Homo sapiens
cagcgtttgctttgcaggctttgca

SEQ ID NO: 25538 - DNA, 25 bp, Homo sapiens
ttgtagtcatagctaacctttctgg

SEQ ID NO: 25539 - DNA, 25 bp, Homo sapiens
gtccctagcctccagagcaatgttt

SEQ ID NO: 25540 - DNA, 25 bp, Homo sapiens
tgttggccacctctaggagtcatta

SEQ ID NO: 25541 - DNA, 25 bp, Homo sapiens
gacatcattggagcttacctaagta

SEQ ID NO: 25542 - DNA, 25 bp, Homo sapiens
ccgtggcatggacgtacattttttc

SEQ ID NO: 25543 - DNA, 25 bp, Homo sapiens
gggtgtccttcacaaatttctcaga

SEQ ID NO: 25544 - DNA, 25 bp, Homo sapiens
tgatttctgccctcccttctcgatg

SEQ ID NO: 25545 - DNA, 25 bp, Homo sapiens
gattctttgttccacctagccagta

SEQ ID NO: 25546 - DNA, 25 bp, Homo sapiens
ggacccgtgacaaaacatgcaattt

SEQ ID NO: 25547 - DNA, 25 bp, Homo sapiens
aggtgggcacctcttcatgaattaa

SEQ ID NO: 25548 - DNA, 25 bp, Homo sapiens
tggtgtcacactcctgggtaaagtc

SEQ ID NO: 25549 - DNA, 25 bp, Homo sapiens
ctaggccatgaggagatgtcgcacc

SEQ ID NO: 25550 - DNA, 25 bp, Homo sapiens
agggcctgctccttgcactctctaa

SEQ ID NO: 25551 - DNA, 25 bp, Homo sapiens
cacttgtgaatcaggtagcctaata

SEQ ID NO: 25552 - DNA, 25 bp, Homo sapiens
ctgcatgggatcctcacagatgcct

SEQ ID NO: 25553 - DNA, 25 bp, Homo sapiens
ggcctcaaaaaccaatgcttgcttg

SEQ ID NO: 25554 - DNA, 25 bp, Homo sapiens
agatcctgcctccattgttcatgta

SEQ ID NO: 25555 - DNA, 25 bp, Homo sapiens
ctgctcttgcaatcaggtttgtata

SEQ ID NO: 25556 - DNA, 25 bp, Homo sapiens
tcgccaaggagcaaattacaaaagc

SEQ ID NO: 25557 - DNA, 25 bp, Homo sapiens
gctctggaaatctgtgtcaagtctc

SEQ ID NO: 25558 - DNA, 25 bp, Homo sapiens
catgcctttcagtgcttatggagaa

SEQ ID NO: 25559 - DNA, 25 bp, Homo sapiens
cggcacttcggactgttgttataac

SEQ ID NO: 25560 - DNA, 25 bp, Homo sapiens
tacccaattccctgagcctgtgtta

SEQ ID NO: 25561 - DNA, 25 bp, Homo sapiens
tgagcctgctcctctcttgatatgg

SEQ ID NO: 25562 - DNA, 25 bp, Homo sapiens
gctcaggctcaggtcatatatctcc

SEQ ID NO: 25563 - DNA, 25 bp, Homo sapiens
ttagccacagggaatcagcatcatg

SEQ ID NO: 25564 - DNA, 25 bp, Homo sapiens
tattccgggaaatgagcttgctctg

SEQ ID NO: 25565 - DNA, 25 bp, Homo sapiens
tctggctagtggctcaattctgtga

SEQ ID NO: 25566 - DNA, 25 bp, Homo sapiens
ttagcacaattccaggcacgtattc

SEQ ID NO: 25567 - DNA, 25 bp, Homo sapiens
ctgcagggcactaaatattgggttc

SEQ ID NO: 25568 - DNA, 25 bp, Homo sapiens
taagttgctgcatccaagatatctg

SEQ ID NO: 25569 - DNA, 25 bp, Homo sapiens
tatactgcgtgcgtacatgcgtgtg

SEQ ID NO: 25570 - DNA, 25 bp, Homo sapiens
agaggcctgccatctgtctgtagca

SEQ ID NO: 25571 - DNA, 25 bp, Homo sapiens
ggcctagctgctccctgttgaaaac

SEQ ID NO: 25572 - DNA, 25 bp, Homo sapiens
tgaagcctgttctttctctgagaga

SEQ ID NO: 25573 - DNA, 25 bp, Homo sapiens
cggcccagattcaaggtaacagcta

SEQ ID NO: 25574 - DNA, 25 bp, Homo sapiens
actctagtaagagatgggtttgccc

SEQ ID NO: 25575 - DNA, 25 bp, Homo sapiens
ggcatgtttttgtcctgcatcagta

SEQ ID NO: 25576 - DNA, 25 bp, Homo sapiens
ggagagctccactatccatttacta

SEQ ID NO: 25577 - DNA, 25 bp, Homo sapiens
catggcaaggaacgtcctcttctaa

SEQ ID NO: 25578 - DNA, 25 bp, Homo sapiens
aacccgagagttctaagtgcactga

SEQ ID NO: 25579 - DNA, 25 bp, Homo sapiens
gcagtaccttagaaacactccaatg

SEQ ID NO: 25580 - DNA, 25 bp, Homo sapiens
gccacaagctgggtgtaacctgtaa

SEQ ID NO: 25581 - DNA, 25 bp, Homo sapiens
ccactgcggtcagaaaatgctttta

SEQ ID NO: 25582 - DNA, 25 bp, Homo sapiens
gtagtctcttggacccattttcctg

SEQ ID NO: 25583 - DNA, 25 bp, Homo sapiens
cccgtgatggtcaaggccacatttc

SEQ ID NO: 25584 - DNA, 25 bp, Homo sapiens
ggcagtttcctgatcactacatagg

SEQ ID NO: 25585 - DNA, 25 bp, Homo sapiens
tgttaaagtctagcacaataattgg

SEQ ID NO: 25586 - DNA, 25 bp, Homo sapiens
ccagccaatggtttagtagcatcta

SEQ ID NO: 25587 - DNA, 25 bp, Homo sapiens
tgcacatggaactatagtagctttc

SEQ ID NO: 25588 - DNA, 25 bp, Homo sapiens
aagctggccttagttctgtctgcta

SEQ ID NO: 25589 - DNA, 25 bp, Homo sapiens
ggcgacctaccctttgcacttgttg

SEQ ID NO: 25590 - DNA, 25 bp, Homo sapiens
tcaggccctttcaccaaaatatgta

SEQ ID NO: 25591 - DNA, 25 bp, Homo sapiens
tcttcgcagttataagggttctcta

SEQ ID NO: 25592 - DNA, 25 bp, Homo sapiens
ttgcctcttgcatactgaatactcc

SEQ ID NO: 25593 - DNA, 25 bp, Homo sapiens
aatgctctcttactgtttctgctga

SEQ ID NO: 25594 - DNA, 25 bp, Homo sapiens
ctctgtgattctgtgcctcctaata

SEQ ID NO: 25595 - DNA, 25 bp, Homo sapiens
tgtgaaagtcctacagtccttcttg

SEQ ID NO: 25596 - DNA, 25 bp, Homo sapiens
taccacttcaaaataacctcaaatg

SEQ ID NO: 25597 - DNA, 25 bp, Homo sapiens
atcacatccagttgaggctttcata

SEQ ID NO: 25598 - DNA, 25 bp, Homo sapiens
tttcttgaagggatcatttgaagca

SEQ ID NO: 25599 - DNA, 25 bp, Homo sapiens
gagcctaaaattctgcataaagaga

SEQ ID NO: 25600 - DNA, 25 bp, Homo sapiens
attcggacaattaaataaatagcta

SEQ ID NO: 25601 - DNA, 25 bp, Homo sapiens
gtcatttacttcttgtaggcatttg

SEQ ID NO: 25602 - DNA, 25 bp, Homo sapiens
agctttgcatgtccaagtgtatata

SEQ ID NO: 25603 - DNA, 25 bp, Homo sapiens
cctgagcctctcttgataaactgta

SEQ ID NO: 25604 - DNA, 25 bp, Homo sapiens
ggtgtaaacagcttcataactctaa

SEQ ID NO: 25605 - DNA, 25 bp, Homo sapiens
tataaaatgaaataactctatgtta

SEQ ID NO: 25606 - DNA, 25 bp, Homo sapiens
gcttttctgtcaatgaataaaagac

SEQ ID NO: 25607 - DNA, 25 bp, Homo sapiens
tccagggtatcagcaagcctgttta

SEQ ID NO: 25608 - DNA, 25 bp, Homo sapiens
cagcgtcctgttttatgcgtcaata

SEQ ID NO: 25609 - DNA, 25 bp, Homo sapiens
tgccttcaatatagcagagcatgta

SEQ ID NO: 25610 - DNA, 25 bp, Homo sapiens
aattggcaaaatgactgtaatcaat

SEQ ID NO: 25611 - DNA, 25 bp, Homo sapiens
acctaagattttgcaccatgatgtc

SEQ ID NO: 25612 - DNA, 25 bp, Homo sapiens
tgcagtgcatcgtcctcccaaaagg

SEQ ID NO: 25613 - DNA, 25 bp, Homo sapiens
ttcctgagatgtgcagtcctgtttc

SEQ ID NO: 25614 - DNA, 25 bp, Homo sapiens
taaaatatggtgaaatttgtaaaac

SEQ ID NO: 25615 - DNA, 25 bp, Homo sapiens
tgcctccatgtgattcagatctaga

SEQ ID NO: 25616 - DNA, 25 bp, Homo sapiens
ctatatatttatttctactttattc

SEQ ID NO: 25617 - DNA, 25 bp, Homo sapiens
tttagcttagctgcaaaacctgggc

SEQ ID NO: 25618 - DNA, 25 bp, Homo sapiens
acgaaaaacactgcgtaaaagtatt

SEQ ID NO: 25619 - DNA, 25 bp, Homo sapiens
ctgcctctatggtaagaaaacatta

SEQ ID NO: 25620 - DNA, 25 bp, Homo sapiens
cttagcttgaggacaactttctgta

SEQ ID NO: 25621 - DNA, 25 bp, Homo sapiens
aggcatgcattgctcaactcggata

SEQ ID NO: 25622 - DNA, 25 bp, Homo sapiens
tgtactgctgttgccatagtcccta

SEQ ID NO: 25623 - DNA, 25 bp, Homo sapiens
ggatttgttttaatggtacaccagc

SEQ ID NO: 25624 - DNA, 25 bp, Homo sapiens
cctcctcatgttgtttccagaaata

SEQ ID NO: 25625 - DNA, 25 bp, Homo sapiens
ctagccagttggtgccagcattata

SEQ ID NO: 25626 - DNA, 25 bp, Homo sapiens
atctgctgcacagggcaagttgtta

SEQ ID NO: 25627 - DNA, 25 bp, Homo sapiens
gttacttggtatctagagtggtgta

SEQ ID NO: 25628 - DNA, 25 bp, Homo sapiens
gaagtttccttcaagtccctggcta

SEQ ID NO: 25629 - DNA, 25 bp, Homo sapiens
cctgctgacctttggcctctgtaaa

SEQ ID NO: 25630 - DNA, 25 bp, Homo sapiens
ctgcaaagctgggttaagtgccttc

SEQ ID NO: 25631 - DNA, 25 bp, Homo sapiens
ttgggacaccaaattctcgaagctt

SEQ ID NO: 25632 - DNA, 25 bp, Homo sapiens
ggcccatgtgcgctgttattaggta

SEQ ID NO: 25633 - DNA, 25 bp, Homo sapiens
tctgcagacctgatagaatgacata

SEQ ID NO: 25634 - DNA, 25 bp, Homo sapiens
ttttgtgattgttttccattttata

SEQ ID NO: 25635 - DNA, 25 bp, Homo sapiens
tcccacaaccaaatcaagctgaatg

SEQ ID NO: 25636 - DNA, 25 bp, Homo sapiens
ggccttcctgaaatgtagatgtgta

SEQ ID NO: 25637 - DNA, 25 bp, Homo sapiens
ggcctcttgtcttgtcaaagaacta

SEQ ID NO: 25638 - DNA, 25 bp, Homo sapiens
gtggggtcctcatcaaccagtaaga

SEQ ID NO: 25639 - DNA, 25 bp, Homo sapiens
aagttaagcccaatgctctccctgg

SEQ ID NO: 25640 - DNA, 25 bp, Homo sapiens
tctgtattcttgatgataaaaggaa

SEQ ID NO: 25641 - DNA, 25 bp, Homo sapiens
ttgtaaaattgtacatcaaacaatt

SEQ ID NO: 25642 - DNA, 25 bp, Homo sapiens
ggtagcctgggttcatcacaaaatt

SEQ ID NO: 25643 - DNA, 25 bp, Homo sapiens
catggattccggctttacttactaa

SEQ ID NO: 25644 - DNA, 25 bp, Homo sapiens
tggcacccactaacacataaagatg

SEQ ID NO: 25645 - DNA, 25 bp, Homo sapiens
agcttttgcactcctgcctctgaga

SEQ ID NO: 25646 - DNA, 25 bp, Homo sapiens
cttagtgtagcagacccaggttttt

SEQ ID NO: 25647 - DNA, 25 bp, Homo sapiens
tctatgcactgataaggaatgattc

SEQ ID NO: 25648 - DNA, 25 bp, Homo sapiens
gctccctgtcttttgtctctgcata

SEQ ID NO: 25649 - DNA, 25 bp, Homo sapiens
ggcaaattttgactgcttgaccatt

SEQ ID NO: 25650 - DNA, 25 bp, Homo sapiens
ctcacatagtcacagtgttccatat

SEQ ID NO: 25651 - DNA, 25 bp, Homo sapiens
gcctccgcctgagagtactataaga

SEQ ID NO: 25652 - DNA, 25 bp, Homo sapiens
tttagagtatacatgtacataatgc

SEQ ID NO: 25653 - DNA, 25 bp, Homo sapiens
ctacttcatctttttgaaagcccag

SEQ ID NO: 25654 - DNA, 25 bp, Homo sapiens
attcttctaagctgtggaccatgta

SEQ ID NO: 25655 - DNA, 25 bp, Homo sapiens
gtgacttaatccttattctgtaggt

SEQ ID NO: 25656 - DNA, 25 bp, Homo sapiens
cttgggagagattcaggaccttgta

SEQ ID NO: 25657 - DNA, 25 bp, Homo sapiens
ttcttttataccatttgattttttt

SEQ ID NO: 25658 - DNA, 25 bp, Homo sapiens
taagagttaaaaattgttcacttat

SEQ ID NO: 25659 - DNA, 25 bp, Homo sapiens
aacctgtgtgcaccggtggaaactc

SEQ ID NO: 25660 - DNA, 25 bp, Homo sapiens
ggtgctctctttgtccttcacagtg

SEQ ID NO: 25661 - DNA, 25 bp, Homo sapiens
tcttaaaatctgtatatctcttgga

SEQ ID NO: 25662 - DNA, 25 bp, Homo sapiens
ctgtctgtaggataggctgctcttc

SEQ ID NO: 25663 - DNA, 25 bp, Homo sapiens
gactcattcgggtagctctcagctg

SEQ ID NO: 25664 - DNA, 25 bp, Homo sapiens
agggtcaggtatccgcagcatctgc

SEQ ID NO: 25665 - DNA, 25 bp, Homo sapiens
ggcagcagccatcattttgtcccta

SEQ ID NO: 25666 - DNA, 25 bp, Homo sapiens
tatatagttttgaaaaaaccttttt

SEQ ID NO: 25667 - DNA, 25 bp, Homo sapiens
aaggttttcggctgtctcacagagc

SEQ ID NO: 25668 - DNA, 25 bp, Homo sapiens
ggttgtgcccagaagtactccattc

SEQ ID NO: 25669 - DNA, 25 bp, Homo sapiens
ccagcctattaaagagtgggacttc

SEQ ID NO: 25670 - DNA, 25 bp, Homo sapiens
tttcctggacgaggtctaggccacc

SEQ ID NO: 25671 - DNA, 25 bp, Homo sapiens
tcaggagttgcagccatttaaaagc

SEQ ID NO: 25672 - DNA, 25 bp, Homo sapiens
tgccagtttcctcttgcaatgaata

SEQ ID NO: 25673 - DNA, 25 bp, Homo sapiens
actgttcactgcttctttgtatgga

SEQ ID NO: 25674 - DNA, 25 bp, Homo sapiens
gtctccagtctccagtcaagccatg

SEQ ID NO: 25675 - DNA, 25 bp, Homo sapiens
tttggatcctaatttcaagcacttc

SEQ ID NO: 25676 - DNA, 25 bp, Homo sapiens
tgaagtattaccctagctggccata

SEQ ID NO: 25677 - DNA, 25 bp, Homo sapiens
ctgtggactacattagactggcttc

SEQ ID NO: 25678 - DNA, 25 bp, Homo sapiens
gaacctatgtctctggggaaaaaga

SEQ ID NO: 25679 - DNA, 25 bp, Homo sapiens
tttgggcttgcctttgactaaactg

SEQ ID NO: 25680 - DNA, 25 bp, Homo sapiens
gcacaggcaggttgaagttacacac

SEQ ID NO: 25681 - DNA, 25 bp, Homo sapiens
gtggcctgccatcccgtccttatat

SEQ ID NO: 25682 - DNA, 25 bp, Homo sapiens
caccttaaggtgtttggagattcta

SEQ ID NO: 25683 - DNA, 25 bp, Homo sapiens
taactgggtgatctaagctcatggc

SEQ ID NO: 25684 - DNA, 25 bp, Homo sapiens
ccttgggcacactcagagctctctg

SEQ ID NO: 25685 - DNA, 25 bp, Homo sapiens
ccttttcagggacagctttctactc

SEQ ID NO: 25686 - DNA, 25 bp, Homo sapiens
ccacagcttgaggttatgccgcaca

SEQ ID NO: 25687 - DNA, 25 bp, Homo sapiens
ggtggaaaccactctgcaaatgcta

SEQ ID NO: 25688 - DNA, 25 bp, Homo sapiens
tgccctgggttgtccatagcaaaga

SEQ ID NO: 25689 - DNA, 25 bp, Homo sapiens
agcttctctactagcggacacaaga

SEQ ID NO: 25690 - DNA, 25 bp, Homo sapiens
gagtggtctcagttctcttacaaca

SEQ ID NO: 25691 - DNA, 25 bp, Homo sapiens
tttctgtcaggggagttcactcgca

SEQ ID NO: 25692 - DNA, 25 bp, Homo sapiens
ggctcctgatgaaaatccgaagtta

SEQ ID NO: 25693 - DNA, 25 bp, Homo sapiens
actgggactcctaggctctattctc

SEQ ID NO: 25694 - DNA, 25 bp, Homo sapiens
actaggcagaacaccacaatatatg

SEQ ID NO: 25695 - DNA, 25 bp, Homo sapiens
atggctatctgccttgaaagctctc

SEQ ID NO: 25696 - DNA, 25 bp, Homo sapiens
gggccacagccggacttagacttaa

SEQ ID NO: 25697 - DNA, 25 bp, Homo sapiens
tgggtgtgccatccctcttgcatac

SEQ ID NO: 25698 - DNA, 25 bp, Homo sapiens
caaggcctttctggatctgcaaata

SEQ ID NO: 25699 - DNA, 25 bp, Homo sapiens
gcttggcttttgtacgtgaattgga

SEQ ID NO: 25700 - DNA, 25 bp, Homo sapiens
ctgaggttcccttcctgtccaatta

SEQ ID NO: 25701 - DNA, 25 bp, Homo sapiens
cagaagtactcagcaaccagaggac

SEQ ID NO: 25702 - DNA, 25 bp, Homo sapiens
ctaccttaggttttggctttacagc

SEQ ID NO: 25703 - DNA, 25 bp, Homo sapiens
ctccagtctgaaggctgcaagttta

SEQ ID NO: 25704 - DNA, 25 bp, Homo sapiens
agggcactgaggacaccatttttca

SEQ ID NO: 25705 - DNA, 25 bp, Homo sapiens
ccaaggttgtatgagctagttttaa

SEQ ID NO: 25706 - DNA, 25 bp, Homo sapiens
tgctggagtgatggcttcgattacc

SEQ ID NO: 25707 - DNA, 25 bp, Homo sapiens
gctgcaggttcactctctggcatta

SEQ ID NO: 25708 - DNA, 25 bp, Homo sapiens
ctgccgaagattctcctactacgtg

SEQ ID NO: 25709 - DNA, 25 bp, Homo sapiens
gagtcaaaaatttctttagggactt

SEQ ID NO: 25710 - DNA, 25 bp, Homo sapiens
cattcggaatggagcaaatggccta

SEQ ID NO: 25711 - DNA, 25 bp, Homo sapiens
tggcctcaaaattaaggatggactc

SEQ ID NO: 25712 - DNA, 25 bp, Homo sapiens
cttggtgccctaatctggagagttc

SEQ ID NO: 25713 - DNA, 25 bp, Homo sapiens
ggcctttattacaggatgccaactg

SEQ ID NO: 25714 - DNA, 25 bp, Homo sapiens
gggcctggggaaacaccttaaacta

SEQ ID NO: 25715 - DNA, 25 bp, Homo sapiens
cgctagttcacatcacggttcatta

SEQ ID NO: 25716 - DNA, 25 bp, Homo sapiens
tctgggtcatatgtccttggatcac

SEQ ID NO: 25717 - DNA, 25 bp, Homo sapiens
cccaatccacaggagtaggtcttta

SEQ ID NO: 25718 - DNA, 25 bp, Homo sapiens
ctgaccctgtgctctttgacttgaa

SEQ ID NO: 25719 - DNA, 25 bp, Homo sapiens
taggggccctcacgtactctaattg

SEQ ID NO: 25720 - DNA, 25 bp, Homo sapiens
gttccctctgagcaatgtgactttc

SEQ ID NO: 25721 - DNA, 25 bp, Homo sapiens
tggcagtcaccagcaaatcacttta

SEQ ID NO: 25722 - DNA, 25 bp, Homo sapiens
tggttgtttttcctcccagtctgag

SEQ ID NO: 25723 - DNA, 25 bp, Homo sapiens
caggcagcggcacagtaaatgaata

SEQ ID NO: 25724 - DNA, 25 bp, Homo sapiens
gagctgatctcaccctcttttggag

SEQ ID NO: 25725 - DNA, 25 bp, Homo sapiens
ggtgctcctagaaaactgacagatt

SEQ ID NO: 25726 - DNA, 25 bp, Homo sapiens
gtgagtctatttgtagagagacaga

SEQ ID NO: 25727 - DNA, 25 bp, Homo sapiens
ccataagttatctacctaaggaagg

SEQ ID NO: 25728 - DNA, 25 bp, Homo sapiens
gtgagccaactgagcatctgctatc

SEQ ID NO: 25729 - DNA, 25 bp, Homo sapiens
tgaggctgaaccctttaaagctgtg

SEQ ID NO: 25730 - DNA, 25 bp, Homo sapiens
accaaggttgatgcacatgaagaca

SEQ ID NO: 25731 - DNA, 25 bp, Homo sapiens
cgttgcatttcctatcttttttctc

SEQ ID NO: 25732 - DNA, 25 bp, Homo sapiens
catggtttttgcactagtctgtttc

SEQ ID NO: 25733 - DNA, 25 bp, Homo sapiens
catttgaataacacaggatttcttt

SEQ ID NO: 25734 - DNA, 25 bp, Homo sapiens
tgtgttgcatttttataccacattc

SEQ ID NO: 25735 - DNA, 25 bp, Homo sapiens
ggggaactccttcatgatgcatacg

SEQ ID NO: 25736 - DNA, 25 bp, Homo sapiens
gcttggccttgaaacttactgctta

SEQ ID NO: 25737 - DNA, 25 bp, Homo sapiens
ggctggactccagttttatcacata

SEQ ID NO: 25738 - DNA, 25 bp, Homo sapiens
gagctttttcccagtgagtcagaga

SEQ ID NO: 25739 - DNA, 25 bp, Homo sapiens
gcagagtcaaaatatcctcaggtca

SEQ ID NO: 25740 - DNA, 25 bp, Homo sapiens
tcaaagaataagatagaaaaatatc

SEQ ID NO: 25741 - DNA, 25 bp, Homo sapiens
tgggcctcagcttctttggaacaca

SEQ ID NO: 25742 - DNA, 25 bp, Homo sapiens
tgttggaagtcaccgagtaaaagta

SEQ ID NO: 25743 - DNA, 25 bp, Homo sapiens
ctacgtgtggcctttagctttaaca

SEQ ID NO: 25744 - DNA, 25 bp, Homo sapiens
cctgggccctaaatgactgagtttg

SEQ ID NO: 25745 - DNA, 25 bp, Homo sapiens
cgcattgatgtgagtcctgctccta

SEQ ID NO: 25746 - DNA, 25 bp, Homo sapiens
gcatgggtccttctcacagagccta

SEQ ID NO: 25747 - DNA, 25 bp, Homo sapiens
gacaaccatgtccagaggcttatta

SEQ ID NO: 25748 - DNA, 25 bp, Homo sapiens
ctgaggctgctgagtatcacctgta

SEQ ID NO: 25749 - DNA, 25 bp, Homo sapiens
taatattcactacacaggtactgtc

SEQ ID NO: 25750 - DNA, 25 bp, Homo sapiens
cagcccaaggttgtttcagaactta

SEQ ID NO: 25751 - DNA, 25 bp, Homo sapiens
tggggattcaaactggactactggc

SEQ ID NO: 25752 - DNA, 25 bp, Homo sapiens
ctgttagttcagtgtagcccatatc

SEQ ID NO: 25753 - DNA, 25 bp, Homo sapiens
ccacgaacaggaggtgtatttccaa

SEQ ID NO: 25754 - DNA, 25 bp, Homo sapiens
agtcccaggcagtccacatgaagtg

SEQ ID NO: 25755 - DNA, 25 bp, Homo sapiens
agagagatgcaccagcaaacctttc

SEQ ID NO: 25756 - DNA, 25 bp, Homo sapiens
tttgacgggtaaaagtgacataatt

SEQ ID NO: 25757 - DNA, 25 bp, Homo sapiens
catgtggaaaactgttgtgcatttc

SEQ ID NO: 25758 - DNA, 25 bp, Homo sapiens
ttgtgggcaaaatatcaagaatcta

SEQ ID NO: 25759 - DNA, 25 bp, Homo sapiens
attctgggactgactattcaatata

SEQ ID NO: 25760 - DNA, 25 bp, Homo sapiens
tgtcctcaatggtgccctaatagtc

SEQ ID NO: 25761 - DNA, 25 bp, Homo sapiens
gcaaacgccctttctggagtgaata

SEQ ID NO: 25762 - DNA, 25 bp, Homo sapiens
ggtcaagcttcctcagcaaacaatg

SEQ ID NO: 25763 - DNA, 25 bp, Homo sapiens
gcctgcagaggcttttgtttctaaa

SEQ ID NO: 25764 - DNA, 25 bp, Homo sapiens
tggtctttgcatattcctacaggta

SEQ ID NO: 25765 - DNA, 25 bp, Homo sapiens
ccaagccaaaccgtagcaggattta

SEQ ID NO: 25766 - DNA, 25 bp, Homo sapiens
ctctcagcttggttttgcatcctca

SEQ ID NO: 25767 - DNA, 25 bp, Homo sapiens
caagtgactagcatcctcagaaata

SEQ ID NO: 25768 - DNA, 25 bp, Homo sapiens
acaggctccagggtcagtatatctg

SEQ ID NO: 25769 - DNA, 25 bp, Homo sapiens
ctcacccaggtggttagaaactctg

SEQ ID NO: 25770 - DNA, 25 bp, Homo sapiens
tgtgaccttctttgcagagagcctg

SEQ ID NO: 25771 - DNA, 25 bp, Homo sapiens
caggctgcctggtgaaccttcctaa

SEQ ID NO: 25772 - DNA, 25 bp, Homo sapiens
tgcgagggtccattccaaagaaaaa

SEQ ID NO: 25773 - DNA, 25 bp, Homo sapiens
tctgtattactccatccatggtttg

SEQ ID NO: 25774 - DNA, 25 bp, Homo sapiens
cctctaggtcaggtaaagctggctc

SEQ ID NO: 25775 - DNA, 25 bp, Homo sapiens
accctcagtttggttagttcacagg

SEQ ID NO: 25776 - DNA, 25 bp, Homo sapiens
gagccagtgacatcatttgcctcta

SEQ ID NO: 25777 - DNA, 25 bp, Homo sapiens
cctaagtagggagcactgtgcagta

SEQ ID NO: 25778 - DNA, 25 bp, Homo sapiens
ataaaattgtacatgtctttattca

SEQ ID NO: 25779 - DNA, 25 bp, Homo sapiens
gcaatgtttctcaagggaagtgtaa

SEQ ID NO: 25780 - DNA, 25 bp, Homo sapiens
gaccctttgtaattcggctctagtg

SEQ ID NO: 25781 - DNA, 25 bp, Homo sapiens
tcctgcctcagaaagactaaaagct

SEQ ID NO: 25782 - DNA, 25 bp, Homo sapiens
ggcatcattttacccagagttttac

SEQ ID NO: 25783 - DNA, 25 bp, Homo sapiens
ctctctcttgatgtaaattctcttg

SEQ ID NO: 25784 - DNA, 25 bp, Homo sapiens
atggttgaatgtattcaagcccatt

SEQ ID NO: 25785 - DNA, 25 bp, Homo sapiens
tctagaggctctcataggtgaacta

SEQ ID NO: 25786 - DNA, 25 bp, Homo sapiens
ggcccaaatttagttcacgatcata

SEQ ID NO: 25787 - DNA, 25 bp, Homo sapiens
gggtgcttgtctccttccagcttta

SEQ ID NO: 25788 - DNA, 25 bp, Homo sapiens
taagctattttggctcccaattagt

SEQ ID NO: 25789 - DNA, 25 bp, Homo sapiens
gcctaccgtatgcttgggacagtga

SEQ ID NO: 25790 - DNA, 25 bp, Homo sapiens
cagtttaggctgatcactcatgata

SEQ ID NO: 25791 - DNA, 25 bp, Homo sapiens
agtcacaaggacgtctgctctaatc

SEQ ID NO: 25792 - DNA, 25 bp, Homo sapiens
ctctgctgtaggagctcttgaactc

SEQ ID NO: 25793 - DNA, 25 bp, Homo sapiens
catgcacctttctccctgtaagata

SEQ ID NO: 25794 - DNA, 25 bp, Homo sapiens
ttgaagactaactgattgataaaag

SEQ ID NO: 25795 - DNA, 25 bp, Homo sapiens
gaatgtacagttgtgccctacctta

SEQ ID NO: 25796 - DNA, 25 bp, Homo sapiens
ctgggcaagtctaagggcacctttc

SEQ ID NO: 25797 - DNA, 25 bp, Homo sapiens
gtgtgccgagcacctgtcagtagta

SEQ ID NO: 25798 - DNA, 25 bp, Homo sapiens
ccagggcctacatgggagttccaga

SEQ ID NO: 25799 - DNA, 25 bp, Homo sapiens
tgtcaattcctaggcacttactgtc

SEQ ID NO: 25800 - DNA, 25 bp, Homo sapiens
gtggcctttatgtcctctttctaga

SEQ ID NO: 25801 - DNA, 25 bp, Homo sapiens
taacaaggtagagcatttagaattc

SEQ ID NO: 25802 - DNA, 25 bp, Homo sapiens
taaaaaaaaagaattctacctatta

SEQ ID NO: 25803 - DNA, 25 bp, Homo sapiens
tggttccctaaagccacaaatagtc

SEQ ID NO: 25804 - DNA, 25 bp, Homo sapiens
gtttctatttctaaagttacataaa

SEQ ID NO: 25805 - DNA, 25 bp, Homo sapiens
cctaggattaggttctggtcttgac

SEQ ID NO: 25806 - DNA, 25 bp, Homo sapiens
ccctctgagggcaaggtactctacg

SEQ ID NO: 25807 - DNA, 25 bp, Homo sapiens
tctggagtcactcaattgtgcatta

SEQ ID NO: 25808 - DNA, 25 bp, Homo sapiens
atggcctgcctttgttagcacagtg

SEQ ID NO: 25809 - DNA, 25 bp, Homo sapiens
ccagtggtcagggagagacacattc

SEQ ID NO: 25810 - DNA, 25 bp, Homo sapiens
tgcaggtttttggtaacatcacagg

SEQ ID NO: 25811 - DNA, 25 bp, Homo sapiens
gcctgaccacagtgctaccatatta

SEQ ID NO: 25812 - DNA, 25 bp, Homo sapiens
cctttacatgtccaagccagatatc

SEQ ID NO: 25813 - DNA, 25 bp, Homo sapiens
gaggcaatctctgtaaaaatgcaat

SEQ ID NO: 25814 - DNA, 25 bp, Homo sapiens
aaaaaatgtttaattccataagaaa

SEQ ID NO: 25815 - DNA, 25 bp, Homo sapiens
tgttttttaaatcagcaggcatgta

SEQ ID NO: 25816 - DNA, 25 bp, Homo sapiens
ctcttcttatttcagggcaggaata

SEQ ID NO: 25817 - DNA, 25 bp, Homo sapiens
actctgaggttcctttgtaaaattg

SEQ ID NO: 25818 - DNA, 25 bp, Homo sapiens
ctccaggttcttacacagaggcttc

SEQ ID NO: 25819 - DNA, 25 bp, Homo sapiens
atggcctcatgggaagtctgaactc

SEQ ID NO: 25820 - DNA, 25 bp, Homo sapiens
cggccatggaactactctgacaata

SEQ ID NO: 25821 - DNA, 25 bp, Homo sapiens
ctgtaactagggaaataccgctcta

SEQ ID NO: 25822 - DNA, 25 bp, Homo sapiens
tctttatgtaagaaaaggttacaaa

SEQ ID NO: 25823 - DNA, 25 bp, Homo sapiens
tctatcctccaaagcaccatggttc

SEQ ID NO: 25824 - DNA, 25 bp, Homo sapiens
tcactatggagctacaagactatgc

SEQ ID NO: 25825 - DNA, 25 bp, Homo sapiens
ctcttcccattcaagtgaggcatta

SEQ ID NO: 25826 - DNA, 25 bp, Homo sapiens
gtgtttgctaaccatgcctacttca

SEQ ID NO: 25827 - DNA, 25 bp, Homo sapiens
ctctgtactggttggctcttgttta

SEQ ID NO: 25828 - DNA, 25 bp, Homo sapiens
ccctatggatggagatcaactgata

SEQ ID NO: 25829 - DNA, 25 bp, Homo sapiens
aaagcctgagttcccatagataata

SEQ ID NO: 25830 - DNA, 25 bp, Homo sapiens
tctgccctttccgagactatataga

SEQ ID NO: 25831 - DNA, 25 bp, Homo sapiens
cactcgctgtgatggttattactta

SEQ ID NO: 25832 - DNA, 25 bp, Homo sapiens
tgagcgctttcaggagagatatttc

SEQ ID NO: 25833 - DNA, 25 bp, Homo sapiens
ctcttgaaattggagtggcatgccc

SEQ ID NO: 25834 - DNA, 25 bp, Homo sapiens
gtgggcccactgaaatatcacattg

SEQ ID NO: 25835 - DNA, 25 bp, Homo sapiens
gtgtacaagtcatcaggggccctcg

SEQ ID NO: 25836 - DNA, 25 bp, Homo sapiens
tgggatgccttggagtctgttcaca

SEQ ID NO: 25837 - DNA, 25 bp, Homo sapiens
ggatgttgctgctattattcctgca

SEQ ID NO: 25838 - DNA, 25 bp, Homo sapiens
tcaggatttctctgggcaaacaagg

SEQ ID NO: 25839 - DNA, 25 bp, Homo sapiens
agtagtcccagagttaacctttgtc

SEQ ID NO: 25840 - DNA, 25 bp, Homo sapiens
tcctgtatgggtcagatgtgtcaca

SEQ ID NO: 25841 - DNA, 25 bp, Homo sapiens
agactatcctgttgtgatgccaaga

SEQ ID NO: 25842 - DNA, 25 bp, Homo sapiens
ctggcaacccttagcatgtgcatta

SEQ ID NO: 25843 - DNA, 25 bp, Homo sapiens
cctttcagggttcaaatgggccaca

SEQ ID NO: 25844 - DNA, 25 bp, Homo sapiens
gctgcttcttgatcacctagggcta

SEQ ID NO: 25845 - DNA, 25 bp, Homo sapiens
ctgctgatacctctttcaatgattt

SEQ ID NO: 25846 - DNA, 25 bp, Homo sapiens
ggctctatagctctctgaatgtcta

SEQ ID NO: 25847 - DNA, 25 bp, Homo sapiens
ataagtggctcttttgccctgagtc

SEQ ID NO: 25848 - DNA, 25 bp, Homo sapiens
accaccctgggagaaatgctgaatc

SEQ ID NO: 25849 - DNA, 25 bp, Homo sapiens
ggctatatgcttgctaaatccgaaa

SEQ ID NO: 25850 - DNA, 25 bp, Homo sapiens
ctctgggcaatcatctagttgaaca

SEQ ID NO: 25851 - DNA, 25 bp, Homo sapiens
tcagtatgcttgagggtatgaccac

SEQ ID NO: 25852 - DNA, 25 bp, Homo sapiens
ccaagtgttgtcctatgagtgaata

SEQ ID NO: 25853 - DNA, 25 bp, Homo sapiens
tccacagtcaaagggcagaggctct

SEQ ID NO: 25854 - DNA, 25 bp, Homo sapiens
ccaggtgcagcttccagtgacaaca

SEQ ID NO: 25855 - DNA, 25 bp, Homo sapiens
tgctgccacactgattaccaaatgg

SEQ ID NO: 25856 - DNA, 25 bp, Homo sapiens
tctgaacatgtgactcttgggaatg

SEQ ID NO: 25857 - DNA, 25 bp, Homo sapiens
ttgctcaggcaggtgattaataatc

SEQ ID NO: 25858 - DNA, 25 bp, Homo sapiens
cattctttttttgaaagttcttctc

SEQ ID NO: 25859 - DNA, 25 bp, Homo sapiens
ctcctacctaggaatctggtgatta

SEQ ID NO: 25860 - DNA, 25 bp, Homo sapiens
tctctagttttagacagaccaagtc

SEQ ID NO: 25861 - DNA, 25 bp, Homo sapiens
ctagacactgagattggcattgttc

SEQ ID NO: 25862 - DNA, 25 bp, Homo sapiens
tgtgtcacttgtgcctctgaacttg

SEQ ID NO: 25863 - DNA, 25 bp, Homo sapiens
actgggcctcctttgcttgttcata

SEQ ID NO: 25864 - DNA, 25 bp, Homo sapiens
agggcatcttgctggtttcgaaaca

SEQ ID NO: 25865 - DNA, 25 bp, Homo sapiens
gtggttccttccaaagcattagttg

SEQ ID NO: 25866 - DNA, 25 bp, Homo sapiens
cactcatgttccagagggcagtacc

SEQ ID NO: 25867 - DNA, 25 bp, Homo sapiens
tggagacctagcaagccagaatatg

SEQ ID NO: 25868 - DNA, 25 bp, Homo sapiens
gtttcccacattgattcagcgttta

SEQ ID NO: 25869 - DNA, 25 bp, Homo sapiens
gccacgggctccttggctcaagatg

SEQ ID NO: 25870 - DNA, 25 bp, Homo sapiens
ctgaaggccctttctgcttgatttc

SEQ ID NO: 25871 - DNA, 25 bp, Homo sapiens
tgcatctgagggcagctgaagaccc

SEQ ID NO: 25872 - DNA, 25 bp, Homo sapiens
tctgctgctgtgagtttggacaata

SEQ ID NO: 25873 - DNA, 25 bp, Homo sapiens
aggggacttagccagataaatcatc

SEQ ID NO: 25874 - DNA, 25 bp, Homo sapiens
gcaccatgagtagggcatcacctta

SEQ ID NO: 25875 - DNA, 25 bp, Homo sapiens
tttctctccgaaaccatggctagtg

SEQ ID NO: 25876 - DNA, 25 bp, Homo sapiens
caggctggaatatttgggctcaaac

SEQ ID NO: 25877 - DNA, 25 bp, Homo sapiens
cctgcctggtgcatagtttgtcata

SEQ ID NO: 25878 - DNA, 25 bp, Homo sapiens
ataaaggtataactacaattatata

SEQ ID NO: 25879 - DNA, 25 bp, Homo sapiens
tgcctgtctctcatttcctctaagc

SEQ ID NO: 25880 - DNA, 25 bp, Homo sapiens
tcacactactgactggccggattta

SEQ ID NO: 25881 - DNA, 25 bp, Homo sapiens
ctcggagagcttcttggggcattac

SEQ ID NO: 25882 - DNA, 25 bp, Homo sapiens
gccagttcccacagtcaagatgata

SEQ ID NO: 25883 - DNA, 25 bp, Homo sapiens
atggtttccacctcctgcaagttta

SEQ ID NO: 25884 - DNA, 25 bp, Homo sapiens
ttgtgcttgacagtgatgaccctta

SEQ ID NO: 25885 - DNA, 25 bp, Homo sapiens
ggcactctatcttctggacagcttg

SEQ ID NO: 25886 - DNA, 25 bp, Homo sapiens
tacagactgctgctcctagaattgc

SEQ ID NO: 25887 - DNA, 25 bp, Homo sapiens
aggtgatttctgacccttctcggca

SEQ ID NO: 25888 - DNA, 25 bp, Homo sapiens
ggtacctgttctcctcacgtccatg

SEQ ID NO: 25889 - DNA, 25 bp, Homo sapiens
cccaaggggccaagcaggtataatc

SEQ ID NO: 25890 - DNA, 25 bp, Homo sapiens
taggaggtcaccacatgtttgcaga

SEQ ID NO: 25891 - DNA, 25 bp, Homo sapiens
ctgggaggatcactgtggcttcatc

SEQ ID NO: 25892 - DNA, 25 bp, Homo sapiens
gtgtgcccacaaataccaaatgctg

SEQ ID NO: 25893 - DNA, 25 bp, Homo sapiens
ctgcagtcagctagagggatattca

SEQ ID NO: 25894 - DNA, 25 bp, Homo sapiens
gtgtctccatgcctttaccttagtg

SEQ ID NO: 25895 - DNA, 25 bp, Homo sapiens
gcatagtcccatagtgtctgttaca

SEQ ID NO: 25896 - DNA, 25 bp, Homo sapiens
ggggaccacttttgcttttattagg

SEQ ID NO: 25897 - DNA, 25 bp, Homo sapiens
tccaagcatggtgagtgaattcctc

SEQ ID NO: 25898 - DNA, 25 bp, Homo sapiens
ttggatcccaaccacctgtgctttg

SEQ ID NO: 25899 - DNA, 25 bp, Homo sapiens
ttaggaggtttctttttatttcttt

SEQ ID NO: 25900 - DNA, 25 bp, Homo sapiens
cacgttccctgaaagtatgctggca

SEQ ID NO: 25901 - DNA, 25 bp, Homo sapiens
caggtactcagtatcagggtcttta

SEQ ID NO: 25902 - DNA, 25 bp, Homo sapiens
aaccttctctgctgtgactatgctg

SEQ ID NO: 25903 - DNA, 25 bp, Homo sapiens
gcctgtaactgggaaacctattatc

SEQ ID NO: 25904 - DNA, 25 bp, Homo sapiens
ggcttacaagtcaacccgggttttc

SEQ ID NO: 25905 - DNA, 25 bp, Homo sapiens
gcatgcagtgggtttcgcaatgttc

SEQ ID NO: 25906 - DNA, 25 bp, Homo sapiens
ttgccactggcatgttcagggctcc

SEQ ID NO: 25907 - DNA, 25 bp, Homo sapiens
ctcagctctgcgtcgtgcctattaa

SEQ ID NO: 25908 - DNA, 25 bp, Homo sapiens
gccgaccacgtacctaagagccatg

SEQ ID NO: 25909 - DNA, 25 bp, Homo sapiens
ttcacacgagttcaaggattttccc

SEQ ID NO: 25910 - DNA, 25 bp, Homo sapiens
cactgcagctggtcagaacctttta

SEQ ID NO: 25911 - DNA, 25 bp, Homo sapiens
cctggctaaaggttctgctgggatc

SEQ ID NO: 25912 - DNA, 25 bp, Homo sapiens
ggctccttgtcaccaggttgctgta

SEQ ID NO: 25913 - DNA, 25 bp, Homo sapiens
gtggactcaggtaggtaatttcatc

SEQ ID NO: 25914 - DNA, 25 bp, Homo sapiens
tcccaggttccatcagtgtgcttca

SEQ ID NO: 25915 - DNA, 25 bp, Homo sapiens
gccacccgcagtgtttctcatctaa

SEQ ID NO: 25916 - DNA, 25 bp, Homo sapiens
atggagccatgtgacaaaaactttc

SEQ ID NO: 25917 - DNA, 25 bp, Homo sapiens
ggctggttaaagcagtctaagatca

SEQ ID NO: 25918 - DNA, 25 bp, Homo sapiens
aattgtcacattcaggcgaggccta

SEQ ID NO: 25919 - DNA, 25 bp, Homo sapiens
tgtcccagaagtccaagagtcaaga

SEQ ID NO: 25920 - DNA, 25 bp, Homo sapiens
tggaatcccttggacctgcaactga

SEQ ID NO: 25921 - DNA, 25 bp, Homo sapiens
ctctcattctcaggggaaggtcttc

SEQ ID NO: 25922 - DNA, 25 bp, Homo sapiens
ggacagatcttgtgcttggacctaa

SEQ ID NO: 25923 - DNA, 25 bp, Homo sapiens
agcctctgaaggagcgagtcccatc

SEQ ID NO: 25924 - DNA, 25 bp, Homo sapiens
aagatcagccacctttgggccaaca

SEQ ID NO: 25925 - DNA, 25 bp, Homo sapiens
tttttcttacctttaaaataggaga

SEQ ID NO: 25926 - DNA, 25 bp, Homo sapiens
cctacgatggggttgtgctttcata

SEQ ID NO: 25927 - DNA, 25 bp, Homo sapiens
cggcctctttgtcctgttatcctga

SEQ ID NO: 25928 - DNA, 25 bp, Homo sapiens
agggcacctgtgtcaagcttttcaa

SEQ ID NO: 25929 - DNA, 25 bp, Homo sapiens
gctaatacgtttctggacctgggta

SEQ ID NO: 25930 - DNA, 25 bp, Homo sapiens
gtggcacttggccttccagaaagca

SEQ ID NO: 25931 - DNA, 25 bp, Homo sapiens
tgtgcgtcacaggtctaatgcttca

SEQ ID NO: 25932 - DNA, 25 bp, Homo sapiens
gggcccatttctcctgatctgatta

SEQ ID NO: 25933 - DNA, 25 bp, Homo sapiens
ccactgtcagaggaaactagccacc

SEQ ID NO: 25934 - DNA, 25 bp, Homo sapiens
ggcacctgctgcatcaagacctgta

SEQ ID NO: 25935 - DNA, 25 bp, Homo sapiens
agttcccactcagatccaaagatgc

SEQ ID NO: 25936 - DNA, 25 bp, Homo sapiens
cttgacattgtactcaggccctgga

SEQ ID NO: 25937 - DNA, 25 bp, Homo sapiens
tcactgaggatgttttcattgatgg

SEQ ID NO: 25938 - DNA, 25 bp, Homo sapiens
aacactagatgggtgtgtatgtcta

SEQ ID NO: 25939 - DNA, 25 bp, Homo sapiens
tgttgaatccagctccaaggtagtc

SEQ ID NO: 25940 - DNA, 25 bp, Homo sapiens
ctgacaaccaaggtcctccattata

SEQ ID NO: 25941 - DNA, 25 bp, Homo sapiens
ggtagtccctaaccacaattcaaga

SEQ ID NO: 25942 - DNA, 25 bp, Homo sapiens
gcagctgcagtcacaagccctaatg

SEQ ID NO: 25943 - DNA, 25 bp, Homo sapiens
tcctgtggtagaaatggcctgccta

SEQ ID NO: 25944 - DNA, 25 bp, Homo sapiens
tgcctccctagcatcaaattggata

SEQ ID NO: 25945 - DNA, 25 bp, Homo sapiens
ggtgaactttcctccaacgtacaga

SEQ ID NO: 25946 - DNA, 25 bp, Homo sapiens
tggcctctccaatgtcctaagtgtt

SEQ ID NO: 25947 - DNA, 25 bp, Homo sapiens
ggcagattctaccagtgagcatttt

SEQ ID NO: 25948 - DNA, 25 bp, Homo sapiens
cctcatccatgtccagggagcaaga

SEQ ID NO: 25949 - DNA, 25 bp, Homo sapiens
tgatgcctaggcctatccgaaaagc

SEQ ID NO: 25950 - DNA, 25 bp, Homo sapiens
aaatgtttcatgtgtggcctctacc

SEQ ID NO: 25951 - DNA, 25 bp, Homo sapiens
gtcacagaggacagcagttgaatta

SEQ ID NO: 25952 - DNA, 25 bp, Homo sapiens
ttacagccgctgaatgtgcaatatg

SEQ ID NO: 25953 - DNA, 25 bp, Homo sapiens
actgaggctgcttcttggtcacata

SEQ ID NO: 25954 - DNA, 25 bp, Homo sapiens
cctagataggtggtgttttcaaatc

SEQ ID NO: 25955 - DNA, 25 bp, Homo sapiens
gatctagccacacacaaaaatattt

SEQ ID NO: 25956 - DNA, 25 bp, Homo sapiens
ccagggaacttgcttatctataaca

SEQ ID NO: 25957 - DNA, 25 bp, Homo sapiens
aggcactggtttggcaccttacaca

SEQ ID NO: 25958 - DNA, 25 bp, Homo sapiens
agccctcggatgcaaaggcattcta

SEQ ID NO: 25959 - DNA, 25 bp, Homo sapiens
actgctgtttatcctccgtggcata

SEQ ID NO: 25960 - DNA, 25 bp, Homo sapiens
ggctccatctgctgtggaaaacata

SEQ ID NO: 25961 - DNA, 25 bp, Homo sapiens
ggcagtctctgggtcaagtactttc

SEQ ID NO: 25962 - DNA, 25 bp, Homo sapiens
aatttttaaaaattagtggaaggga

SEQ ID NO: 25963 - DNA, 25 bp, Homo sapiens
tgaaatatatttttaaatgcttatg

SEQ ID NO: 25964 - DNA, 25 bp, Homo sapiens
gcatgattttcctcactgcattgaa

SEQ ID NO: 25965 - DNA, 25 bp, Homo sapiens
gccagcctcaaaggttgccaatttg

SEQ ID NO: 25966 - DNA, 25 bp, Homo sapiens
tgccctgtgttcttagactaattta

SEQ ID NO: 25967 - DNA, 25 bp, Homo sapiens
tgagagctcttaaacctattactac

SEQ ID NO: 25968 - DNA, 25 bp, Homo sapiens
gcagtgaaatagctctccaggtatc

SEQ ID NO: 25969 - DNA, 25 bp, Homo sapiens
gcccataggttctcaataaatgctg

SEQ ID NO: 25970 - DNA, 25 bp, Homo sapiens
agggcaatccctacatgagcttata

SEQ ID NO: 25971 - DNA, 25 bp, Homo sapiens
tcagttgactttggcaagctattta

SEQ ID NO: 25972 - DNA, 25 bp, Homo sapiens
tcatgcatagatgaaaacaataaat

SEQ ID NO: 25973 - DNA, 25 bp, Homo sapiens
gttactgttccctaggcattgcaga

SEQ ID NO: 25974 - DNA, 25 bp, Homo sapiens
ctgagctacataggtttgcttaata

SEQ ID NO: 25975 - DNA, 25 bp, Homo sapiens
ctccgggagatccacaacttaaatc

SEQ ID NO: 25976 - DNA, 25 bp, Homo sapiens
ggctctatagcctcctgaaataatg

SEQ ID NO: 25977 - DNA, 25 bp, Homo sapiens
tgtggctaaccaatcatccatcgta

SEQ ID NO: 25978 - DNA, 25 bp, Homo sapiens
cctgcaccatggatctggccagaaa

SEQ ID NO: 25979 - DNA, 25 bp, Homo sapiens
tgggtcccaccacttcatttcaagc

SEQ ID NO: 25980 - DNA, 25 bp, Homo sapiens
cctcatcaggggtttgcattccaaa

SEQ ID NO: 25981 - DNA, 25 bp, Homo sapiens
tggcgactatgctgaagcctctaga

SEQ ID NO: 25982 - DNA, 25 bp, Homo sapiens
aacgtgttgcctgtccctgggaaaa

SEQ ID NO: 25983 - DNA, 25 bp, Homo sapiens
ctctggcgccaagtattaagatatt

SEQ ID NO: 25984 - DNA, 25 bp, Homo sapiens
cctgcgtttctgtgggtattactaa

SEQ ID NO: 25985 - DNA, 25 bp, Homo sapiens
ggtgagcttctgctgcactactgta

SEQ ID NO: 25986 - DNA, 25 bp, Homo sapiens
gccaagtttctcagggcaggcccta

SEQ ID NO: 25987 - DNA, 25 bp, Homo sapiens
ggctgataatggctcctgcacgatc

SEQ ID NO: 25988 - DNA, 25 bp, Homo sapiens
tgcagcaagtgctatcctctatttg

SEQ ID NO: 25989 - DNA, 25 bp, Homo sapiens
gtctgccaggaaagaagctccattt

SEQ ID NO: 25990 - DNA, 25 bp, Homo sapiens
gtcagcctaagcgatgagcacattt

SEQ ID NO: 25991 - DNA, 25 bp, Homo sapiens
ggtcatgtgtcctgtccaagtctga

SEQ ID NO: 25992 - DNA, 25 bp, Homo sapiens
cttgttcgtatgatctctgacctta

SEQ ID NO: 25993 - DNA, 25 bp, Homo sapiens
cctaggactggagtgttgttccata

SEQ ID NO: 25994 - DNA, 25 bp, Homo sapiens
gccagtgaccctcgtatatcttaca

SEQ ID NO: 25995 - DNA, 25 bp, Homo sapiens
aggtgtagtctttccaccactgata

SEQ ID NO: 25996 - DNA, 25 bp, Homo sapiens
gcccatggcaggttcttttaatttt

SEQ ID NO: 25997 - DNA, 25 bp, Homo sapiens
ggcagcctccatcacagcttaagta

SEQ ID NO: 25998 - DNA, 25 bp, Homo sapiens
tctcaatgctgccaaaacgttcttg

SEQ ID NO: 25999 - DNA, 25 bp, Homo sapiens
aaccctgggcctgattatttcttgg

SEQ ID NO: 26000 - DNA, 25 bp, Homo sapiens
agtgcctcgtcattcttgtcaaatc

SEQ ID NO: 26001 - DNA, 25 bp, Homo sapiens
ttgggctcggactgacattcttgtt

SEQ ID NO: 26002 - DNA, 25 bp, Homo sapiens
agagtctgcttgtttgccctataga

SEQ ID NO: 26003 - DNA, 25 bp, Homo sapiens
cgtactatgtacctatggaccttgc

SEQ ID NO: 26004 - DNA, 25 bp, Homo sapiens
ggaactgcttttcctacctgagagg

SEQ ID NO: 26005 - DNA, 25 bp, Homo sapiens
tagccatgattttcctcccaacgtg

SEQ ID NO: 26006 - DNA, 25 bp, Homo sapiens
ccactgccctggagattagaaatga

SEQ ID NO: 26007 - DNA, 25 bp, Homo sapiens
tgggtccaaatctggtacaggagta

SEQ ID NO: 26008 - DNA, 25 bp, Homo sapiens
ttggtccctgctgtcatattctgtg

SEQ ID NO: 26009 - DNA, 25 bp, Homo sapiens
agtcccagagtgctaccaaaggtca

SEQ ID NO: 26010 - DNA, 25 bp, Homo sapiens
tagcaccctggcatttgagaaaaca

SEQ ID NO: 26011 - DNA, 25 bp, Homo sapiens
ggggctccttttgcctgcctgcatt

SEQ ID NO: 26012 - DNA, 25 bp, Homo sapiens
ggggctggaagatcacactagtttc

SEQ ID NO: 26013 - DNA, 25 bp, Homo sapiens
atgcagggccctagaagattctatc

SEQ ID NO: 26014 - DNA, 25 bp, Homo sapiens
catgatgctcatggtactgaaacta

SEQ ID NO: 26015 - DNA, 25 bp, Homo sapiens
gctgcccatagctaggaatttcatt

SEQ ID NO: 26016 - DNA, 25 bp, Homo sapiens
gggccacattttcagtccagcctta

SEQ ID NO: 26017 - DNA, 25 bp, Homo sapiens
agacctgtccaagcataagcattta

SEQ ID NO: 26018 - DNA, 25 bp, Homo sapiens
atcttagcagcagaaggcaccttta

SEQ ID NO: 26019 - DNA, 25 bp, Homo sapiens
tgtgagcacctgaaccaaatttggc

SEQ ID NO: 26020 - DNA, 25 bp, Homo sapiens
attgggctcccaacattagactgga

SEQ ID NO: 26021 - DNA, 25 bp, Homo sapiens
atgcctcctttgatagcctctgatg

SEQ ID NO: 26022 - DNA, 25 bp, Homo sapiens
ttgactgcttcagccacaataaaga

SEQ ID NO: 26023 - DNA, 25 bp, Homo sapiens
caggctgcatctaggttggctatca

SEQ ID NO: 26024 - DNA, 25 bp, Homo sapiens
cagacgcgcgtccttttttaagcta

SEQ ID NO: 26025 - DNA, 25 bp, Homo sapiens
tcatcacaggttggcagcaagctcc

SEQ ID NO: 26026 - DNA, 25 bp, Homo sapiens
tcggtacctgatcctctgctctatg

SEQ ID NO: 26027 - DNA, 25 bp, Homo sapiens
tcctgccctgctctcaagaagtttg

SEQ ID NO: 26028 - DNA, 25 bp, Homo sapiens
tatgttgggttcctccttgtccttc

SEQ ID NO: 26029 - DNA, 25 bp, Homo sapiens
ccaactggtcagtggtcagaaggta

SEQ ID NO: 26030 - DNA, 25 bp, Homo sapiens
tcaggagttcagcttgcccaaaatc

SEQ ID NO: 26031 - DNA, 25 bp, Homo sapiens
aggactgtctcagggactgacttca

SEQ ID NO: 26032 - DNA, 25 bp, Homo sapiens
gctcctctctgggtaacagcctgaa

SEQ ID NO: 26033 - DNA, 25 bp, Homo sapiens
accctggctctaagtgattcatatc

SEQ ID NO: 26034 - DNA, 25 bp, Homo sapiens
ctgcatgagctctgagaacatttta

SEQ ID NO: 26035 - DNA, 25 bp, Homo sapiens
ctttgccagcacagatccattttga

SEQ ID NO: 26036 - DNA, 25 bp, Homo sapiens
tcaagcagtcgtatcagcattccta

SEQ ID NO: 26037 - DNA, 25 bp, Homo sapiens
cctgaccatttagggttgactgaac

SEQ ID NO: 26038 - DNA, 25 bp, Homo sapiens
gggccaaatgaaatatgtagttgtc

SEQ ID NO: 26039 - DNA, 25 bp, Homo sapiens
agccctcgtggcaataatgttatcc

SEQ ID NO: 26040 - DNA, 25 bp, Homo sapiens
ctccttggggagaatactgtcactg

SEQ ID NO: 26041 - DNA, 25 bp, Homo sapiens
gtccagcacattagcagaacaggtc

SEQ ID NO: 26042 - DNA, 25 bp, Homo sapiens
gggacttctcagctaccagtttgga

SEQ ID NO: 26043 - DNA, 25 bp, Homo sapiens
acactgatgggatggcctagcaata

SEQ ID NO: 26044 - DNA, 25 bp, Homo sapiens
ggccacacagtctattttttctaga

SEQ ID NO: 26045 - DNA, 25 bp, Homo sapiens
ctggttcagagtcctaagaggtatc

SEQ ID NO: 26046 - DNA, 25 bp, Homo sapiens
tggagtccctgtatctatgtgaaga

SEQ ID NO: 26047 - DNA, 25 bp, Homo sapiens
gatgttgccatccacacctctgcta

SEQ ID NO: 26048 - DNA, 25 bp, Homo sapiens
taccgggttgcttacaggcactaca

SEQ ID NO: 26049 - DNA, 25 bp, Homo sapiens
tccaaggactcagaacccgctttta

SEQ ID NO: 26050 - DNA, 25 bp, Homo sapiens
gagaagattaccctaggccagaatg

SEQ ID NO: 26051 - DNA, 25 bp, Homo sapiens
agcacgctggcatacatttacattg

SEQ ID NO: 26052 - DNA, 25 bp, Homo sapiens
gggcccgtggatacctctatttaac

SEQ ID NO: 26053 - DNA, 25 bp, Homo sapiens
gggttctttagacgcagctatcata

SEQ ID NO: 26054 - DNA, 25 bp, Homo sapiens
gtgtcaactcttcaggggccaatta

SEQ ID NO: 26055 - DNA, 25 bp, Homo sapiens
tctggtgctcaaaagtaatgttctc

SEQ ID NO: 26056 - DNA, 25 bp, Homo sapiens
tgtctgctgacttcggtgaaacata

SEQ ID NO: 26057 - DNA, 25 bp, Homo sapiens
gaatgagaatagcatctaaacacac

SEQ ID NO: 26058 - DNA, 25 bp, Homo sapiens
aagacttcggagttcaacatggttg

SEQ ID NO: 26059 - DNA, 25 bp, Homo sapiens
gtatttgagtaggcctgtgtgacat

SEQ ID NO: 26060 - DNA, 25 bp, Homo sapiens
agcctctgcttgctgtcccatttta

SEQ ID NO: 26061 - DNA, 25 bp, Homo sapiens
agtccatggctaaggtctacagttc

SEQ ID NO: 26062 - DNA, 25 bp, Homo sapiens
cggttccttttgttagccagttgtg

SEQ ID NO: 26063 - DNA, 25 bp, Homo sapiens
gggaggcacttttggatactatcta

SEQ ID NO: 26064 - DNA, 25 bp, Homo sapiens
gagcagccagctttgtccatgtgga

SEQ ID NO: 26065 - DNA, 25 bp, Homo sapiens
aggagcaatagatacccagttttta

SEQ ID NO: 26066 - DNA, 25 bp, Homo sapiens
gcctctcctcactgatctggtctta

SEQ ID NO: 26067 - DNA, 25 bp, Homo sapiens
tgaaagaaaagatgaaggccactaa

SEQ ID NO: 26068 - DNA, 25 bp, Homo sapiens
tggtgggtctctcaggctaaaattg

SEQ ID NO: 26069 - DNA, 25 bp, Homo sapiens
ccttgactaacaggataaataatta

SEQ ID NO: 26070 - DNA, 25 bp, Homo sapiens
ctctgttagtgacccaatctttatg

SEQ ID NO: 26071 - DNA, 25 bp, Homo sapiens
cctacataaagccaagtaaagaata

SEQ ID NO: 26072 - DNA, 25 bp, Homo sapiens
tcctgggttccagctgagttgagca

SEQ ID NO: 26073 - DNA, 25 bp, Homo sapiens
gccaggggagcaaatgtgttcaacc

SEQ ID NO: 26074 - DNA, 25 bp, Homo sapiens
gggtccatccttggtcacagcctga

SEQ ID NO: 26075 - DNA, 25 bp, Homo sapiens
cgcatctgcctttgttgccctttga

SEQ ID NO: 26076 - DNA, 25 bp, Homo sapiens
tccttaccggaaataggcccatgtc

SEQ ID NO: 26077 - DNA, 25 bp, Homo sapiens
tgcacatagtgtttccagccatttg

SEQ ID NO: 26078 - DNA, 25 bp, Homo sapiens
taggggtctggaatggtcctctgaa

SEQ ID NO: 26079 - DNA, 25 bp, Homo sapiens
cccttcctctatggggacaagttaa

SEQ ID NO: 26080 - DNA, 25 bp, Homo sapiens
agagaactgtcccacgctgtaattg

SEQ ID NO: 26081 - DNA, 25 bp, Homo sapiens
gggctctacctgtctctttctgata

SEQ ID NO: 26082 - DNA, 25 bp, Homo sapiens
aaaaaaaagaaagtcaatgattccg

SEQ ID NO: 26083 - DNA, 25 bp, Homo sapiens
cattgctctgcttctctggagtgga

SEQ ID NO: 26084 - DNA, 25 bp, Homo sapiens
agtacgtaatttctccaagttttga

SEQ ID NO: 26085 - DNA, 25 bp, Homo sapiens
attggactacagcacacagcagatc

SEQ ID NO: 26086 - DNA, 25 bp, Homo sapiens
gcagcagcttgttgatgtaggaata

SEQ ID NO: 26087 - DNA, 25 bp, Homo sapiens
caggctgcccttggtttctatgaga

SEQ ID NO: 26088 - DNA, 25 bp, Homo sapiens
tgggccctaaaagcttcgtttcata

SEQ ID NO: 26089 - DNA, 25 bp, Homo sapiens
ggtgacctgatttgcatttctgttc

SEQ ID NO: 26090 - DNA, 25 bp, Homo sapiens
gtgcttctccctcgtttcctattga

SEQ ID NO: 26091 - DNA, 25 bp, Homo sapiens
ggaccactatccttggcacgtctga

SEQ ID NO: 26092 - DNA, 25 bp, Homo sapiens
ctaatcttctgggagcactaggacc

SEQ ID NO: 26093 - DNA, 25 bp, Homo sapiens
tatggctgcaatggggattctcttc

SEQ ID NO: 26094 - DNA, 25 bp, Homo sapiens
ttcgtctctcattcattgtaaggga

SEQ ID NO: 26095 - DNA, 25 bp, Homo sapiens
ccaggcactggaccctcagatcata

SEQ ID NO: 26096 - DNA, 25 bp, Homo sapiens
tccctgttcatggagctgcactgtc

SEQ ID NO: 26097 - DNA, 25 bp, Homo sapiens
cttcggggaaaactgtcatagattc

SEQ ID NO: 26098 - DNA, 25 bp, Homo sapiens
atctctaggcatgtgcagacacaca

SEQ ID NO: 26099 - DNA, 25 bp, Homo sapiens
cctcccaggcattagagtgtgcttc

SEQ ID NO: 26100 - DNA, 25 bp, Homo sapiens
attctgtttgttaccattgagtaga

SEQ ID NO: 26101 - DNA, 25 bp, Homo sapiens
ctattgtgttgctttgaaaattgct

SEQ ID NO: 26102 - DNA, 25 bp, Homo sapiens
agtagggattcagttgcctctcata

SEQ ID NO: 26103 - DNA, 25 bp, Homo sapiens
tgcctgaggctggttactatctttc

SEQ ID NO: 26104 - DNA, 25 bp, Homo sapiens
aatttttctatatttgaatcttgct

SEQ ID NO: 26105 - DNA, 25 bp, Homo sapiens
gccattctacttcttctccttagtg

SEQ ID NO: 26106 - DNA, 25 bp, Homo sapiens
tttgggacctgtttctgagagcacc

SEQ ID NO: 26107 - DNA, 25 bp, Homo sapiens
tgggttccctaaaaagtacatcctg

SEQ ID NO: 26108 - DNA, 25 bp, Homo sapiens
ggggcccatttaagatgtttgcatc

SEQ ID NO: 26109 - DNA, 25 bp, Homo sapiens
tgtaaacttaatggggcactcagga

SEQ ID NO: 26110 - DNA, 25 bp, Homo sapiens
gccctgttttccctcatgtgtctaa

SEQ ID NO: 26111 - DNA, 25 bp, Homo sapiens
acactgtaggcttcacccggcattg

SEQ ID NO: 26112 - DNA, 25 bp, Homo sapiens
tatgtattgtaccaactgtttaacc

SEQ ID NO: 26113 - DNA, 25 bp, Homo sapiens
gacacatggggactttggcaatatt

SEQ ID NO: 26114 - DNA, 25 bp, Homo sapiens
tgcagtgtgctatgaccgctattca

SEQ ID NO: 26115 - DNA, 25 bp, Homo sapiens
ttgctggactgggtagactaacctc

SEQ ID NO: 26116 - DNA, 25 bp, Homo sapiens
tccagtgctgcacaagacaatattg

SEQ ID NO: 26117 - DNA, 25 bp, Homo sapiens
ttggggcaaccctcaacccgtgata

SEQ ID NO: 26118 - DNA, 25 bp, Homo sapiens
gaaaaataagttttcctattgattg

SEQ ID NO: 26119 - DNA, 25 bp, Homo sapiens
gagtggtgacttactgctttcctta

SEQ ID NO: 26120 - DNA, 25 bp, Homo sapiens
acgtgcccgtggtaactaggtttta

SEQ ID NO: 26121 - DNA, 25 bp, Homo sapiens
tctgggccatgaactcctttgtttc

SEQ ID NO: 26122 - DNA, 25 bp, Homo sapiens
cagctttgctgtcctcattatttga

SEQ ID NO: 26123 - DNA, 25 bp, Homo sapiens
tctgactggagacttgggtaaccca

SEQ ID NO: 26124 - DNA, 25 bp, Homo sapiens
gtgactctctaggaagatatcattg

SEQ ID NO: 26125 - DNA, 25 bp, Homo sapiens
atggggttttccagcttgcatttgc

SEQ ID NO: 26126 - DNA, 25 bp, Homo sapiens
acccaccaggggaagaggtttctta

SEQ ID NO: 26127 - DNA, 25 bp, Homo sapiens
ggtgtatccataccactagtgagtc

SEQ ID NO: 26128 - DNA, 25 bp, Homo sapiens
ctgagtttgaattctgctgagagga

SEQ ID NO: 26129 - DNA, 25 bp, Homo sapiens
cccaggctctggaaaatgtctcttg

SEQ ID NO: 26130 - DNA, 25 bp, Homo sapiens
cgagacgatgcctcccttggtgcaa

SEQ ID NO: 26131 - DNA, 25 bp, Homo sapiens
tgtgtgtaaccttgcagataaatca

SEQ ID NO: 26132 - DNA, 25 bp, Homo sapiens
tagctctggggacataggatcattg

SEQ ID NO: 26133 - DNA, 25 bp, Homo sapiens
gggcctctattcatttgtgtcacag

SEQ ID NO: 26134 - DNA, 25 bp, Homo sapiens
caggagcctatgctttgccacattg

SEQ ID NO: 26135 - DNA, 25 bp, Homo sapiens
aactctgtctgtgggaggaattcta

SEQ ID NO: 26136 - DNA, 25 bp, Homo sapiens
gatttccactaggatttctggttaa

SEQ ID NO: 26137 - DNA, 25 bp, Homo sapiens
ggatcctgactggactgttcccaaa

SEQ ID NO: 26138 - DNA, 25 bp, Homo sapiens
gaaatttctacttggccacgtctta

SEQ ID NO: 26139 - DNA, 25 bp, Homo sapiens
cttcgagatcgcagggacatgtatc

SEQ ID NO: 26140 - DNA, 25 bp, Homo sapiens
ggtgtatataagtttgagcaatgta

SEQ ID NO: 26141 - DNA, 25 bp, Homo sapiens
taggaaatataatgttactgaggta

SEQ ID NO: 26142 - DNA, 25 bp, Homo sapiens
cccttttcgttggtcttatggttaa

SEQ ID NO: 26143 - DNA, 25 bp, Homo sapiens
tgttcaggctcaggtgcacaataca

SEQ ID NO: 26144 - DNA, 25 bp, Homo sapiens
gagcctacagtgtgcctctgacata

SEQ ID NO: 26145 - DNA, 25 bp, Homo sapiens
tcttgatttcctggccctcataatg

SEQ ID NO: 26146 - DNA, 25 bp, Homo sapiens
ccctttctgtggtttgttgtcccta

SEQ ID NO: 26147 - DNA, 25 bp, Homo sapiens
cacccagtgagtggccaaactgtta

SEQ ID NO: 26148 - DNA, 25 bp, Homo sapiens
ggccacagctactacagatatgata

SEQ ID NO: 26149 - DNA, 25 bp, Homo sapiens
gccaggcactttgtatgagctttaa

SEQ ID NO: 26150 - DNA, 25 bp, Homo sapiens
agtagactggcttcctccttgttta

SEQ ID NO: 26151 - DNA, 25 bp, Homo sapiens
cagggatgacttgattggggcattc

SEQ ID NO: 26152 - DNA, 25 bp, Homo sapiens
aggaccagtcagtacagctcatttg

SEQ ID NO: 26153 - DNA, 25 bp, Homo sapiens
gtgtctggaatgaagccctgtaatc

SEQ ID NO: 26154 - DNA, 25 bp, Homo sapiens
gggctttgatctacccaagaccttg

SEQ ID NO: 26155 - DNA, 25 bp, Homo sapiens
atccaggctttctagacagttatga

SEQ ID NO: 26156 - DNA, 25 bp, Homo sapiens
ctttgggcccagcagttgcaatttc

SEQ ID NO: 26157 - DNA, 25 bp, Homo sapiens
gtgtgccaactagaactgcctcaga

SEQ ID NO: 26158 - DNA, 25 bp, Homo sapiens
gcccattgctttctcctctctgata

SEQ ID NO: 26159 - DNA, 25 bp, Homo sapiens
cccactgtaggtggacagcattcca

SEQ ID NO: 26160 - DNA, 25 bp, Homo sapiens
ccgctttgccctttttatgtgtgta

SEQ ID NO: 26161 - DNA, 25 bp, Homo sapiens
tgtgggctgatatttctctcgtctc

SEQ ID NO: 26162 - DNA, 25 bp, Homo sapiens
tgctggccctttccttcagaatgta

SEQ ID NO: 26163 - DNA, 25 bp, Homo sapiens
gctggcctaccttttggaaatcgtc

SEQ ID NO: 26164 - DNA, 25 bp, Homo sapiens
ttcaagtctagtggaccagagagcc

SEQ ID NO: 26165 - DNA, 25 bp, Homo sapiens
cgacccttgcctagtgttaaatatg

SEQ ID NO: 26166 - DNA, 25 bp, Homo sapiens
gtcaggtatcccaagccaatatcta

SEQ ID NO: 26167 - DNA, 25 bp, Homo sapiens
aagggaggggctaatgatacatatc

SEQ ID NO: 26168 - DNA, 25 bp, Homo sapiens
gcatctggtcctcaattccttttgg

SEQ ID NO: 26169 - DNA, 25 bp, Homo sapiens
gttgcttttttgatgctcacctctc

SEQ ID NO: 26170 - DNA, 25 bp, Homo sapiens
ttctgtcttcttccagtcagggatc

SEQ ID NO: 26171 - DNA, 25 bp, Homo sapiens
catcagagaatgcttagtggcccta

SEQ ID NO: 26172 - DNA, 25 bp, Homo sapiens
ttgaatcccgatagccacactggtg

SEQ ID NO: 26173 - DNA, 25 bp, Homo sapiens
tgtccctcaaagcactagcctatga

SEQ ID NO: 26174 - DNA, 25 bp, Homo sapiens
cccggccagggatccaatattttca

SEQ ID NO: 26175 - DNA, 25 bp, Homo sapiens
gggcctcctccttgggttaaaattg

SEQ ID NO: 26176 - DNA, 25 bp, Homo sapiens
gcaggtcatgctaatcggtccctta

SEQ ID NO: 26177 - DNA, 25 bp, Homo sapiens
ctgtccctggtggtaaattcactgg

SEQ ID NO: 26178 - DNA, 25 bp, Homo sapiens
ggagtgtgacccatgaaaacatttc

SEQ ID NO: 26179 - DNA, 25 bp, Homo sapiens
ttggcagaggcctttgacataaatc

SEQ ID NO: 26180 - DNA, 25 bp, Homo sapiens
tgcctggggaacaatgctagtaata

SEQ ID NO: 26181 - DNA, 25 bp, Homo sapiens
gctcctctgggactgttcttatttc

SEQ ID NO: 26182 - DNA, 25 bp, Homo sapiens
cggtggcagtgacagcatgtacttc

SEQ ID NO: 26183 - DNA, 25 bp, Homo sapiens
cccagcatcttaagagacagtgtta

SEQ ID NO: 26184 - DNA, 25 bp, Homo sapiens
ggtcacaaatgcaactggaactctg

SEQ ID NO: 26185 - DNA, 25 bp, Homo sapiens
ggacacctcattctctgcggtggga

SEQ ID NO: 26186 - DNA, 25 bp, Homo sapiens
ttccttttttcataatttttatatg

SEQ ID NO: 26187 - DNA, 25 bp, Homo sapiens
aggccggcacctgttctaatttata

SEQ ID NO: 26188 - DNA, 25 bp, Homo sapiens
agctgccaagtatctcctgaatgta

SEQ ID NO: 26189 - DNA, 25 bp, Homo sapiens
ctgtggtccatggatctaactcttc

SEQ ID NO: 26190 - DNA, 25 bp, Homo sapiens
cttgggcccaaccaccaggattttg

SEQ ID NO: 26191 - DNA, 25 bp, Homo sapiens
cctcttcttgcatgtgggcaggata

SEQ ID NO: 26192 - DNA, 25 bp, Homo sapiens
ttctaattctaggtggcgggaagcc

SEQ ID NO: 26193 - DNA, 25 bp, Homo sapiens
gggaggtcccagcagtaaattattt

SEQ ID NO: 26194 - DNA, 25 bp, Homo sapiens
gcccagcttcttccagtgtaggata

SEQ ID NO: 26195 - DNA, 25 bp, Homo sapiens
gtcttgtctcttctggggccactaa

SEQ ID NO: 26196 - DNA, 25 bp, Homo sapiens
tggcaggtgtgttacctcataaacc

SEQ ID NO: 26197 - DNA, 25 bp, Homo sapiens
gccagggtctacaggatcagtttca

SEQ ID NO: 26198 - DNA, 25 bp, Homo sapiens
gtctgtctctccctaccaagatttc

SEQ ID NO: 26199 - DNA, 25 bp, Homo sapiens
tttcagtcaactgaggtcaccaggg

SEQ ID NO: 26200 - DNA, 25 bp, Homo sapiens
ctgtactgtgggttctagaattttc

SEQ ID NO: 26201 - DNA, 25 bp, Homo sapiens
ggcccactgtgttttatgagcatga

SEQ ID NO: 26202 - DNA, 25 bp, Homo sapiens
ctgctgtgtgcattgagccaaatca

SEQ ID NO: 26203 - DNA, 25 bp, Homo sapiens
gttgtgccttcctctccttattgtg

SEQ ID NO: 26204 - DNA, 25 bp, Homo sapiens
gcacacgtcagggtgattttctgcc

SEQ ID NO: 26205 - DNA, 25 bp, Homo sapiens
cccaagacctgtggggtgtttatca

SEQ ID NO: 26206 - DNA, 25 bp, Homo sapiens
cagggctcattgaccagtgcaactc

SEQ ID NO: 26207 - DNA, 25 bp, Homo sapiens
gcaggttgggaccacaaaagcttta

SEQ ID NO: 26208 - DNA, 25 bp, Homo sapiens
gtatgccttcttgcgtactgccagc

SEQ ID NO: 26209 - DNA, 25 bp, Homo sapiens
gttatttcagagcacgtgtcccaga

SEQ ID NO: 26210 - DNA, 25 bp, Homo sapiens
gatctgctttagactgtattttcag

SEQ ID NO: 26211 - DNA, 25 bp, Homo sapiens
tctggtctgttcagctggctctttc

SEQ ID NO: 26212 - DNA, 25 bp, Homo sapiens
gatcccaggcgattcttctgaacta

SEQ ID NO: 26213 - DNA, 25 bp, Homo sapiens
cgtacctgaagtagtaaactaatgg

SEQ ID NO: 26214 - DNA, 25 bp, Homo sapiens
cctctgctggatttgggcttccttc

SEQ ID NO: 26215 - DNA, 25 bp, Homo sapiens
ggcaagcagacttctccacctggtg

SEQ ID NO: 26216 - DNA, 25 bp, Homo sapiens
ggtagtgcgcctagaatattttaca

SEQ ID NO: 26217 - DNA, 25 bp, Homo sapiens
agagagaagggcaatgtagatcatt

SEQ ID NO: 26218 - DNA, 25 bp, Homo sapiens
aagggcacgggcatattcagttctc

SEQ ID NO: 26219 - DNA, 25 bp, Homo sapiens
agggcctatcccaacatactgtcaa

SEQ ID NO: 26220 - DNA, 25 bp, Homo sapiens
acagttaccctggagtgtttgcaca

SEQ ID NO: 26221 - DNA, 25 bp, Homo sapiens
ccctgtcgatatggcccagcaaatg

SEQ ID NO: 26222 - DNA, 25 bp, Homo sapiens
ttcattatcagcagcagttacggga

SEQ ID NO: 26223 - DNA, 25 bp, Homo sapiens
tcgaattgtaattgagatgctctct

SEQ ID NO: 26224 - DNA, 25 bp, Homo sapiens
tccttgaacaagtggtggaaactca

SEQ ID NO: 26225 - DNA, 25 bp, Homo sapiens
ctggctgggttccttacacaattcc

SEQ ID NO: 26226 - DNA, 25 bp, Homo sapiens
tctggttttccctacgcacgtgaag

SEQ ID NO: 26227 - DNA, 25 bp, Homo sapiens
tggactttgccaccgaacatttctt

SEQ ID NO: 26228 - DNA, 25 bp, Homo sapiens
cccatgctgcttatagaggagttcg

SEQ ID NO: 26229 - DNA, 25 bp, Homo sapiens
agtggtatcctctcctgtagtttag

SEQ ID NO: 26230 - DNA, 25 bp, Homo sapiens
tgacaaaaaggcatagatagttggt

SEQ ID NO: 26231 - DNA, 25 bp, Homo sapiens
gggcactttcccttgctcccataag

SEQ ID NO: 26232 - DNA, 25 bp, Homo sapiens
tctccgatctggaaaagtagttgca

SEQ ID NO: 26233 - DNA, 25 bp, Homo sapiens
tcacaggtcagtcttggattccaca

SEQ ID NO: 26234 - DNA, 25 bp, Homo sapiens
ttacaaacacatgcgtacaaatgtt

SEQ ID NO: 26235 - DNA, 25 bp, Homo sapiens
tctcagcaggattcagatgtttatc

SEQ ID NO: 26236 - DNA, 25 bp, Homo sapiens
ctggttctgaatctaagtgctgctc

SEQ ID NO: 26237 - DNA, 25 bp, Homo sapiens
gagtattcatctgcctcctgagagg

SEQ ID NO: 26238 - DNA, 25 bp, Homo sapiens
tgcagggacctcacaaagctcactg

SEQ ID NO: 26239 - DNA, 25 bp, Homo sapiens
tgtgccacatataaggttccagggg

SEQ ID NO: 26240 - DNA, 25 bp, Homo sapiens
ccagttggcctcttttgtacattta

SEQ ID NO: 26241 - DNA, 25 bp, Homo sapiens
ctatctggcaactaggacattgatc

SEQ ID NO: 26242 - DNA, 25 bp, Homo sapiens
tattttaaaaagtctctgtaagtgt

SEQ ID NO: 26243 - DNA, 25 bp, Homo sapiens
tgcaaaaaaccttttatgctaactt

SEQ ID NO: 26244 - DNA, 25 bp, Homo sapiens
aactaacttcaaggttagtcatgag

SEQ ID NO: 26245 - DNA, 25 bp, Homo sapiens
ttggaactagggcagaagatcctcc

SEQ ID NO: 26246 - DNA, 25 bp, Homo sapiens
ggggctcttccataatgatactttg

SEQ ID NO: 26247 - DNA, 25 bp, Homo sapiens
gtcccacattgcctatttttagttg

SEQ ID NO: 26248 - DNA, 25 bp, Homo sapiens
ctccatgtagcttgtgggcccagca

SEQ ID NO: 26249 - DNA, 25 bp, Homo sapiens
ctggactggctgagtacacggtaca

SEQ ID NO: 26250 - DNA, 25 bp, Homo sapiens
agcctgtcagtcttattcctccaga

SEQ ID NO: 26251 - DNA, 25 bp, Homo sapiens
atgactactgttttctctggggatc

SEQ ID NO: 26252 - DNA, 25 bp, Homo sapiens
tggcaagctagtgtctgaggtcata

SEQ ID NO: 26253 - DNA, 25 bp, Homo sapiens
gctgagctgtttcccattagagatt

SEQ ID NO: 26254 - DNA, 25 bp, Homo sapiens
ttttccagtggggtcgttaaccatc

SEQ ID NO: 26255 - DNA, 25 bp, Homo sapiens
gggcatactactttacagaacacta

SEQ ID NO: 26256 - DNA, 25 bp, Homo sapiens
tgtctaccagcaccagaaaatgttg

SEQ ID NO: 26257 - DNA, 25 bp, Homo sapiens
tcccgtaatggaaaagaatagctct

SEQ ID NO: 26258 - DNA, 25 bp, Homo sapiens
caaaaggcagcgtcaggtacaatta

SEQ ID NO: 26259 - DNA, 25 bp, Homo sapiens
cctggtcttcactgtatgatacttg

SEQ ID NO: 26260 - DNA, 25 bp, Homo sapiens
cccagaaattgtggccgataccatg

SEQ ID NO: 26261 - DNA, 25 bp, Homo sapiens
cttgccactgctaatatcttgattc

SEQ ID NO: 26262 - DNA, 25 bp, Homo sapiens
tctatgaataaaaactgtatgtatg

SEQ ID NO: 26263 - DNA, 25 bp, Homo sapiens
gggtctttccctagttgttcttgta

SEQ ID NO: 26264 - DNA, 25 bp, Homo sapiens
cctgctatctttattctatgattgg

SEQ ID NO: 26265 - DNA, 25 bp, Homo sapiens
ggtcaagttaccatccctgcttatg

SEQ ID NO: 26266 - DNA, 25 bp, Homo sapiens
tgccagggacccacagcaatgccta

SEQ ID NO: 26267 - DNA, 25 bp, Homo sapiens
aaagagaaaataatgaagaagaatc

SEQ ID NO: 26268 - DNA, 25 bp, Homo sapiens
ccatactgctgtctctcctttgtta

SEQ ID NO: 26269 - DNA, 25 bp, Homo sapiens
caactgggtgaaacgtaaatgtctc

SEQ ID NO: 26270 - DNA, 25 bp, Homo sapiens
ccactgtggattttctggcaaggca

SEQ ID NO: 26271 - DNA, 25 bp, Homo sapiens
acctttgcctctggaagttttcaca

SEQ ID NO: 26272 - DNA, 25 bp, Homo sapiens
tagaatggagccaaagtttcttgta

SEQ ID NO: 26273 - DNA, 25 bp, Homo sapiens
tgaccaactttggatgcagttctga

SEQ ID NO: 26274 - DNA, 25 bp, Homo sapiens
aaagtcctccttttcagtgtctgta

SEQ ID NO: 26275 - DNA, 25 bp, Homo sapiens
ccgggtctaccaaagattatcagtg

SEQ ID NO: 26276 - DNA, 25 bp, Homo sapiens
cgcaggcacacaaagctacatgata

SEQ ID NO: 26277 - DNA, 25 bp, Homo sapiens
catcactttcactctggattggatc

SEQ ID NO: 26278 - DNA, 25 bp, Homo sapiens
gggtgattctgtttctatgcttata

SEQ ID NO: 26279 - DNA, 25 bp, Homo sapiens
tggggaagacacaaacaatatgctc

SEQ ID NO: 26280 - DNA, 25 bp, Homo sapiens
agcctggatgttacctctgtatttc

SEQ ID NO: 26281 - DNA, 25 bp, Homo sapiens
tgattgtgtccatttattttctttc

SEQ ID NO: 26282 - DNA, 25 bp, Homo sapiens
ggcagttcttgatctacgggaaata

SEQ ID NO: 26283 - DNA, 25 bp, Homo sapiens
cagtgggaagcacctacatcatatc

SEQ ID NO: 26284 - DNA, 25 bp, Homo sapiens
atgggcatgtattgttgtgtatata

SEQ ID NO: 26285 - DNA, 25 bp, Homo sapiens
gcctttatgtaggtcagcatttccc

SEQ ID NO: 26286 - DNA, 25 bp, Homo sapiens
cgtgcctgcttactgtgtcaaaatg

SEQ ID NO: 26287 - DNA, 25 bp, Homo sapiens
cttcgtggcctctctcatgtgatgc

SEQ ID NO: 26288 - DNA, 25 bp, Homo sapiens
tgcagcgaaacccaaacatttagtg

SEQ ID NO: 26289 - DNA, 25 bp, Homo sapiens
agaaaaataatatatgcatgatgag

SEQ ID NO: 26290 - DNA, 25 bp, Homo sapiens
gagtcaggtatcacccacatgggtt

SEQ ID NO: 26291 - DNA, 25 bp, Homo sapiens
cctgaatagtcggaatggttgctgc

SEQ ID NO: 26292 - DNA, 25 bp, Homo sapiens
gcagataggccattaaaagagtgat

SEQ ID NO: 26293 - DNA, 25 bp, Homo sapiens
ctctctctgtctctgtatgtgtgta

SEQ ID NO: 26294 - DNA, 25 bp, Homo sapiens
ctcactgcgtgggaccaaaaattta

SEQ ID NO: 26295 - DNA, 25 bp, Homo sapiens
cttacaccagtgagttccaggaaaa

SEQ ID NO: 26296 - DNA, 25 bp, Homo sapiens
cactggggaacactctagagcaata

SEQ ID NO: 26297 - DNA, 25 bp, Homo sapiens
caatattccttatgttccaatgaac

SEQ ID NO: 26298 - DNA, 25 bp, Homo sapiens
ttttttacaaagaaaaagcatctat

SEQ ID NO: 26299 - DNA, 25 bp, Homo sapiens
tccacccagaagacagttaaatagc

SEQ ID NO: 26300 - DNA, 25 bp, Homo sapiens
ggtgcaaccactgacttccaagata

SEQ ID NO: 26301 - DNA, 25 bp, Homo sapiens
cgaggaatgggaatcttgtcaaaca

SEQ ID NO: 26302 - DNA, 25 bp, Homo sapiens
ggactcagagggtctatttctaatc

SEQ ID NO: 26303 - DNA, 25 bp, Homo sapiens
cagcattctgcctcctaaaggtgta

SEQ ID NO: 26304 - DNA, 25 bp, Homo sapiens
tacccatgttatagaaatggtgccc

SEQ ID NO: 26305 - DNA, 25 bp, Homo sapiens
gctgtgcccaaccatgtataagaga

SEQ ID NO: 26306 - DNA, 25 bp, Homo sapiens
cagtcagttcttatgtgtgttttca

SEQ ID NO: 26307 - DNA, 25 bp, Homo sapiens
ctgggaattgagaacggtacactac

SEQ ID NO: 26308 - DNA, 25 bp, Homo sapiens
cctctatttaccacttttgggagtg

SEQ ID NO: 26309 - DNA, 25 bp, Homo sapiens
tacactgagtgcatgccttatgttg

SEQ ID NO: 26310 - DNA, 25 bp, Homo sapiens
ctctattactaactatagtggatta

SEQ ID NO: 26311 - DNA, 25 bp, Homo sapiens
cttgagcaggcttaatctaacgtta

SEQ ID NO: 26312 - DNA, 25 bp, Homo sapiens
gtgaccatttacagatgcctgaggg

SEQ ID NO: 26313 - DNA, 25 bp, Homo sapiens
gtggcactgtcttctataatggttg

SEQ ID NO: 26314 - DNA, 25 bp, Homo sapiens
gtcccagggtttcatcacaaggtca

SEQ ID NO: 26315 - DNA, 25 bp, Homo sapiens
cggtggttattttaatggctcaatc

SEQ ID NO: 26316 - DNA, 25 bp, Homo sapiens
agcttgtgctctggttgaattttgc

SEQ ID NO: 26317 - DNA, 25 bp, Homo sapiens
ctgaggctttaacgacaatttgtgc

SEQ ID NO: 26318 - DNA, 25 bp, Homo sapiens
tcctgtagcttaagaagggtccata

SEQ ID NO: 26319 - DNA, 25 bp, Homo sapiens
tgccaggatagccatcttgtaaatg

SEQ ID NO: 26320 - DNA, 25 bp, Homo sapiens
tatatctatatctatgtacaaaaat

SEQ ID NO: 26321 - DNA, 25 bp, Homo sapiens
ctgtggaatggcaaagctgaattta

SEQ ID NO: 26322 - DNA, 25 bp, Homo sapiens
gagaaaaaatgttacataagttgag

SEQ ID NO: 26323 - DNA, 25 bp, Homo sapiens
gctcctctaacagtggctgctatta

SEQ ID NO: 26324 - DNA, 25 bp, Homo sapiens
atgcactttgcttactgtcaccaga

SEQ ID NO: 26325 - DNA, 25 bp, Homo sapiens
tgagagaaaaaaattacagtggtca

SEQ ID NO: 26326 - DNA, 25 bp, Homo sapiens
tggggcttcacttcagatttctata

SEQ ID NO: 26327 - DNA, 25 bp, Homo sapiens
tatgggctgttcctatgacggcatc

SEQ ID NO: 26328 - DNA, 25 bp, Homo sapiens
cagttgattctggtgcataaatgcc

SEQ ID NO: 26329 - DNA, 25 bp, Homo sapiens
ttccaaggacagtagagcacatgct

SEQ ID NO: 26330 - DNA, 25 bp, Homo sapiens
gggttgaaacctactttactgtctg

SEQ ID NO: 26331 - DNA, 25 bp, Homo sapiens
aaatatgaagaacagtaaacaagta

SEQ ID NO: 26332 - DNA, 25 bp, Homo sapiens
ctactgaggcaacatactactgagg

SEQ ID NO: 26333 - DNA, 25 bp, Homo sapiens
cctggggtatccttcagttcatctg

SEQ ID NO: 26334 - DNA, 25 bp, Homo sapiens
tgggagcctatacacactgtgaggc

SEQ ID NO: 26335 - DNA, 25 bp, Homo sapiens
gccaaattaagttgtttccaagtta

SEQ ID NO: 26336 - DNA, 25 bp, Homo sapiens
caacaaatttattaaacctatacca

SEQ ID NO: 26337 - DNA, 25 bp, Homo sapiens
agggaaggtcctcttggcaatttga

SEQ ID NO: 26338 - DNA, 25 bp, Homo sapiens
ttgccctgtgatttccacgtaaatg

SEQ ID NO: 26339 - DNA, 25 bp, Homo sapiens
ttcaacccataaaatggtataaacc

SEQ ID NO: 26340 - DNA, 25 bp, Homo sapiens
accctgcatcttcctatcctgattg

SEQ ID NO: 26341 - DNA, 25 bp, Homo sapiens
tgtgttctaatgagcccagtggttc

SEQ ID NO: 26342 - DNA, 25 bp, Homo sapiens
gcctgccagttacagagatttcata

SEQ ID NO: 26343 - DNA, 25 bp, Homo sapiens
ttcccagtggtgagaaagttgcctc

SEQ ID NO: 26344 - DNA, 25 bp, Homo sapiens
ctcgttttctgcagtttaccttaag

SEQ ID NO: 26345 - DNA, 25 bp, Homo sapiens
tacaacataatgcatactcataaga

SEQ ID NO: 26346 - DNA, 25 bp, Homo sapiens
ttccatgctgagttaccaaatctgc

SEQ ID NO: 26347 - DNA, 25 bp, Homo sapiens
gagagccactgccacattgtttaca

SEQ ID NO: 26348 - DNA, 25 bp, Homo sapiens
tattttcaggtgtgttctctaaagt

SEQ ID NO: 26349 - DNA, 25 bp, Homo sapiens
ggcttctctgactttcctggtatta

SEQ ID NO: 26350 - DNA, 25 bp, Homo sapiens
atccagaatcagagaggcagctaca

SEQ ID NO: 26351 - DNA, 25 bp, Homo sapiens
tcctagagcctgagtaatccaaata

SEQ ID NO: 26352 - DNA, 25 bp, Homo sapiens
ccaaagtttcaatactagggacata

SEQ ID NO: 26353 - DNA, 25 bp, Homo sapiens
ggacctagttgcctacaaacatgtc

SEQ ID NO: 26354 - DNA, 25 bp, Homo sapiens
tccagggttctacggaggaaatttt

SEQ ID NO: 26355 - DNA, 25 bp, Homo sapiens
caggaggtctttgtggtcaaaacta

SEQ ID NO: 26356 - DNA, 25 bp, Homo sapiens
cccatggcatgctaaggctaaaatc

SEQ ID NO: 26357 - DNA, 25 bp, Homo sapiens
tgccctttgccagtgggaattactg

SEQ ID NO: 26358 - DNA, 25 bp, Homo sapiens
gcctctgtggtcagtgaatttgtta

SEQ ID NO: 26359 - DNA, 25 bp, Homo sapiens
tgacaacttattaacagaagaaaaa

SEQ ID NO: 26360 - DNA, 25 bp, Homo sapiens
gtgaggttagtctcctgaatccatg

SEQ ID NO: 26361 - DNA, 25 bp, Homo sapiens
tgcctggaggttctagcctgttata

SEQ ID NO: 26362 - DNA, 25 bp, Homo sapiens
gcagccaggaccactttagagtatt

SEQ ID NO: 26363 - DNA, 25 bp, Homo sapiens
tgctatccatggctggcttccagtg

SEQ ID NO: 26364 - DNA, 25 bp, Homo sapiens
tctgttggaggacatatctgcctta

SEQ ID NO: 26365 - DNA, 25 bp, Homo sapiens
tgactgtgtcttcaataagcgtata

SEQ ID NO: 26366 - DNA, 25 bp, Homo sapiens
agtactcattctatgccagatagtg

SEQ ID NO: 26367 - DNA, 25 bp, Homo sapiens
ctgtagattattgctaataaacttt

SEQ ID NO: 26368 - DNA, 25 bp, Homo sapiens
gcatattgcacaaatgtatagcaaa

SEQ ID NO: 26369 - DNA, 25 bp, Homo sapiens
ctgcttgatgtagtaggtttccata

SEQ ID NO: 26370 - DNA, 25 bp, Homo sapiens
gcaaagtttatggaaatggtccacc

SEQ ID NO: 26371 - DNA, 25 bp, Homo sapiens
aattttagtgaatggcacatttagt

SEQ ID NO: 26372 - DNA, 25 bp, Homo sapiens
tgcaaggtcgtacaatatttcaggc

SEQ ID NO: 26373 - DNA, 25 bp, Homo sapiens
tccaccagggctttcacttcatatg

SEQ ID NO: 26374 - DNA, 25 bp, Homo sapiens
tgtggcctccaagctgaacaagatc

SEQ ID NO: 26375 - DNA, 25 bp, Homo sapiens
acctcactaattctgttaagaggag

SEQ ID NO: 26376 - DNA, 25 bp, Homo sapiens
tagggccatctccacctaagtgttc

SEQ ID NO: 26377 - DNA, 25 bp, Homo sapiens
tttcctgcctcccaagcataatgtg

SEQ ID NO: 26378 - DNA, 25 bp, Homo sapiens
tctcagctctagtacccaccatgtg

SEQ ID NO: 26379 - DNA, 25 bp, Homo sapiens
aggattccctgtgactgttctattc

SEQ ID NO: 26380 - DNA, 25 bp, Homo sapiens
gttcgaacacttggaacacacctta

SEQ ID NO: 26381 - DNA, 25 bp, Homo sapiens
ttcctcttggagcatctaaagtatg

SEQ ID NO: 26382 - DNA, 25 bp, Homo sapiens
agctgctgaccgttctggctatttc

SEQ ID NO: 26383 - DNA, 25 bp, Homo sapiens
ggcttctgcaggcttcccaaatgga

SEQ ID NO: 26384 - DNA, 25 bp, Homo sapiens
gaaaggaaacttctctgattcacgt

SEQ ID NO: 26385 - DNA, 25 bp, Homo sapiens
cttactaggagaaggagaaactact

SEQ ID NO: 26386 - DNA, 25 bp, Homo sapiens
gtcctttagagatgcaaatccttta

SEQ ID NO: 26387 - DNA, 25 bp, Homo sapiens
aagtatcattgaaatccacagagga

SEQ ID NO: 26388 - DNA, 25 bp, Homo sapiens
tcacagaaaaaaagactgaggggcc

SEQ ID NO: 26389 - DNA, 25 bp, Homo sapiens
tggcatggagcagaaacaaaacttc

SEQ ID NO: 26390 - DNA, 25 bp, Homo sapiens
cttcagcaggagtgtattacaagta

SEQ ID NO: 26391 - DNA, 25 bp, Homo sapiens
tgaaactggtacatctgcttgcaca

SEQ ID NO: 26392 - DNA, 25 bp, Homo sapiens
gtactccagctagggcaacaaaatg

SEQ ID NO: 26393 - DNA, 25 bp, Homo sapiens
agggacggcattttagttttcattc

SEQ ID NO: 26394 - DNA, 25 bp, Homo sapiens
caccactatgttatgggagatactg

SEQ ID NO: 26395 - DNA, 25 bp, Homo sapiens
gtggctggacattgtataattcatt

SEQ ID NO: 26396 - DNA, 25 bp, Homo sapiens
ctttcagcaactgtccgatgttgag

SEQ ID NO: 26397 - DNA, 25 bp, Homo sapiens
gggtcatgggttctaggaatatcta

SEQ ID NO: 26398 - DNA, 25 bp, Homo sapiens
tgtgtgttttttctgattattgtca

SEQ ID NO: 26399 - DNA, 25 bp, Homo sapiens
cagttgcctacctagtgaagactta

SEQ ID NO: 26400 - DNA, 25 bp, Homo sapiens
gctgcttgtgttgctaggttttgtg

SEQ ID NO: 26401 - DNA, 25 bp, Homo sapiens
aattttaaggtttttattttatgta

SEQ ID NO: 26402 - DNA, 25 bp, Homo sapiens
cccatggcctggtaatgcaaaggtg

SEQ ID NO: 26403 - DNA, 25 bp, Homo sapiens
gctgccgactaaaagtgcccttgaa

SEQ ID NO: 26404 - DNA, 25 bp, Homo sapiens
gttggatccatgctgtaccattttg

SEQ ID NO: 26405 - DNA, 25 bp, Homo sapiens
caagtctcctcttcaatgttgtcaa

SEQ ID NO: 26406 - DNA, 25 bp, Homo sapiens
gactccacagggtactccagcttta

SEQ ID NO: 26407 - DNA, 25 bp, Homo sapiens
tgttgtaaaagactcatccactgtg

SEQ ID NO: 26408 - DNA, 25 bp, Homo sapiens
acacctactatatgggcaattcaga

SEQ ID NO: 26409 - DNA, 25 bp, Homo sapiens
tgtggactcttaaaccctcaggata

SEQ ID NO: 26410 - DNA, 25 bp, Homo sapiens
tgttgtataggccagtactctcctc

SEQ ID NO: 26411 - DNA, 25 bp, Homo sapiens
caagccctgtgatctctagcatata

SEQ ID NO: 26412 - DNA, 25 bp, Homo sapiens
caataggcatgtgagtggatacttc

SEQ ID NO: 26413 - DNA, 25 bp, Homo sapiens
agacagaactctgggccctctccaa

SEQ ID NO: 26414 - DNA, 25 bp, Homo sapiens
ctaatacatagaaatattttactca

SEQ ID NO: 26415 - DNA, 25 bp, Homo sapiens
gacattagtaaagtcattgaaaatc

SEQ ID NO: 26416 - DNA, 25 bp, Homo sapiens
gtttatatgtgtttttgtgtatata

SEQ ID NO: 26417 - DNA, 25 bp, Homo sapiens
tggggacttatctctattctaagaa

SEQ ID NO: 26418 - DNA, 25 bp, Homo sapiens
ctcagaagtagaattcttgatcata

SEQ ID NO: 26419 - DNA, 25 bp, Homo sapiens
aagtagagcttctatctatgggtag

SEQ ID NO: 26420 - DNA, 25 bp, Homo sapiens
tggcgcatactctgcttagcataga

SEQ ID NO: 26421 - DNA, 25 bp, Homo sapiens
atggctgttttgcactcaggttatc

SEQ ID NO: 26422 - DNA, 25 bp, Homo sapiens
accatgttcaatcctggaagggttg

SEQ ID NO: 26423 - DNA, 25 bp, Homo sapiens
gtctgttctttgcttttctggaata

SEQ ID NO: 26424 - DNA, 25 bp, Homo sapiens
tcagtactttatttgcattggggaa

SEQ ID NO: 26425 - DNA, 25 bp, Homo sapiens
atgtaatcatcgtttctcatgctgt

SEQ ID NO: 26426 - DNA, 25 bp, Homo sapiens
tggagagacccttaatcccaattta

SEQ ID NO: 26427 - DNA, 25 bp, Homo sapiens
cgtcccatcggaacaccttaatttg

SEQ ID NO: 26428 - DNA, 25 bp, Homo sapiens
gtggagcgtacaaggttgaactata

SEQ ID NO: 26429 - DNA, 25 bp, Homo sapiens
gttcttccatcctccctcgcctgct

SEQ ID NO: 26430 - DNA, 25 bp, Homo sapiens
ttggggccaccactttttagtctga

SEQ ID NO: 26431 - DNA, 25 bp, Homo sapiens
ctcggtttaggcctgtctgcggaat

SEQ ID NO: 26432 - DNA, 25 bp, Homo sapiens
ggctctgcccactcacgctaagttg

SEQ ID NO: 26433 - DNA, 25 bp, Homo sapiens
ctctggggaggtttgttttcacttc

SEQ ID NO: 26434 - DNA, 25 bp, Homo sapiens
ccctacttgattgatggggctcaca

SEQ ID NO: 26435 - DNA, 25 bp, Homo sapiens
tgcacacactggtcttaagtccctg

SEQ ID NO: 26436 - DNA, 25 bp, Homo sapiens
cagggatctgcgcattttcataaca

SEQ ID NO: 26437 - DNA, 25 bp, Homo sapiens
tccaattgaagcctgggcactgccc

SEQ ID NO: 26438 - DNA, 25 bp, Homo sapiens
aaggacttcatctcccgctttgagg

SEQ ID NO: 26439 - DNA, 25 bp, Homo sapiens
ggtttcacagcccaggacactttgg

SEQ ID NO: 26440 - DNA, 25 bp, Homo sapiens
tcctcttcctcttttttccctccag

SEQ ID NO: 26441 - DNA, 25 bp, Homo sapiens
tagttcccatcagctctggttctgg

SEQ ID NO: 26442 - DNA, 25 bp, Homo sapiens
accttatctgggcattcaatcctgg

SEQ ID NO: 26443 - DNA, 25 bp, Homo sapiens
ccaagagcctccctgtggaaaagga

SEQ ID NO: 26444 - DNA, 25 bp, Homo sapiens
ccctaagaagctgtgtgatgcctca

SEQ ID NO: 26445 - DNA, 25 bp, Homo sapiens
ctgtcccatgcaggccctttgaagc

SEQ ID NO: 26446 - DNA, 25 bp, Homo sapiens
ttctgctgggcatagtaaggcgctt

SEQ ID NO: 26447 - DNA, 25 bp, Homo sapiens
aggacgttctctctgggtttacttc

SEQ ID NO: 26448 - DNA, 25 bp, Homo sapiens
ggtccagatcgatggccaccaactg

SEQ ID NO: 26449 - DNA, 25 bp, Homo sapiens
agggagtcccttcttctgtgccagt

SEQ ID NO: 26450 - DNA, 25 bp, Homo sapiens
cccttttggcagtggtcaactagga

SEQ ID NO: 26451 - DNA, 25 bp, Homo sapiens
tgtagcgatgctttcccatgcctga

SEQ ID NO: 26452 - DNA, 25 bp, Homo sapiens
tttgttaataggaccacgcatcctg

SEQ ID NO: 26453 - DNA, 25 bp, Homo sapiens
cgggtccaccaaccagctgcatttt

SEQ ID NO: 26454 - DNA, 25 bp, Homo sapiens
cccagccctagtccttttgttgtca

SEQ ID NO: 26455 - DNA, 25 bp, Homo sapiens
ccctgctgtgatgttttgagtatac

SEQ ID NO: 26456 - DNA, 25 bp, Homo sapiens
tctggccctttcctgctgttatata

SEQ ID NO: 26457 - DNA, 25 bp, Homo sapiens
tgttagcccatctctcccagtttga

SEQ ID NO: 26458 - DNA, 25 bp, Homo sapiens
ccaaactgaggtggctcctgagaca

SEQ ID NO: 26459 - DNA, 25 bp, Homo sapiens
acagaagagccatttaggctatgtt

SEQ ID NO: 26460 - DNA, 25 bp, Homo sapiens
tgccgctgctgatgtgagctgatta

SEQ ID NO: 26461 - DNA, 25 bp, Homo sapiens
tagcgcctgtggagaatgaatgttc

SEQ ID NO: 26462 - DNA, 25 bp, Homo sapiens
caccggaatgtgtgaggactcttca

SEQ ID NO: 26463 - DNA, 25 bp, Homo sapiens
cacgtcctgggaaatgaacaactta

SEQ ID NO: 26464 - DNA, 25 bp, Homo sapiens
gctacaataaaatcaggccaggtag

SEQ ID NO: 26465 - DNA, 25 bp, Homo sapiens
atcgaagagcttaggggagaaatta

SEQ ID NO: 26466 - DNA, 25 bp, Homo sapiens
ggggtgatcactcatcttcagaatg

SEQ ID NO: 26467 - DNA, 25 bp, Homo sapiens
ccacagagcccattggaggaattca

SEQ ID NO: 26468 - DNA, 25 bp, Homo sapiens
gcttacaagctcaaggggttcttta

SEQ ID NO: 26469 - DNA, 25 bp, Homo sapiens
gggctccagtccttaaaccactatt

SEQ ID NO: 26470 - DNA, 25 bp, Homo sapiens
tgtccctgttgtggtatctcctagc

SEQ ID NO: 26471 - DNA, 25 bp, Homo sapiens
tggccctactgttcctacctgctga

SEQ ID NO: 26472 - DNA, 25 bp, Homo sapiens
tactcggcctcatcaggttttgttg

SEQ ID NO: 26473 - DNA, 25 bp, Homo sapiens
acccgtccattttgtagagcatctg

SEQ ID NO: 26474 - DNA, 25 bp, Homo sapiens
ttttttgcctgggagctagcagcta

SEQ ID NO: 26475 - DNA, 25 bp, Homo sapiens
cggccagcagctccaagatgatttg

SEQ ID NO: 26476 - DNA, 25 bp, Homo sapiens
ccagcttggatgtgccagcctacta

SEQ ID NO: 26477 - DNA, 25 bp, Homo sapiens
ccctgccataaggtgagctggaata

SEQ ID NO: 26478 - DNA, 25 bp, Homo sapiens
tccagagtctgtaggccattagaaa

SEQ ID NO: 26479 - DNA, 25 bp, Homo sapiens
gggaagggcctctcatttcaatgac

SEQ ID NO: 26480 - DNA, 25 bp, Homo sapiens
gtcaggctccttgaagagatacttg

SEQ ID NO: 26481 - DNA, 25 bp, Homo sapiens
tggctttctctaagtcctatcttga

SEQ ID NO: 26482 - DNA, 25 bp, Homo sapiens
tgcctctagctgatcgtagggccta

SEQ ID NO: 26483 - DNA, 25 bp, Homo sapiens
aggcttcctggcttccctgttaaga

SEQ ID NO: 26484 - DNA, 25 bp, Homo sapiens
ccacggccaacgttcgcattgagga

SEQ ID NO: 26485 - DNA, 25 bp, Homo sapiens
ttgctggctttggaggcaaccaatg

SEQ ID NO: 26486 - DNA, 25 bp, Homo sapiens
tctggggcttcaagtgtatctcatc

SEQ ID NO: 26487 - DNA, 25 bp, Homo sapiens
atcactgggatcaaaaggctacata

SEQ ID NO: 26488 - DNA, 25 bp, Homo sapiens
cttgctttaagacacgggatgaatc

SEQ ID NO: 26489 - DNA, 25 bp, Homo sapiens
ccagcctccctttggccatagagta

SEQ ID NO: 26490 - DNA, 25 bp, Homo sapiens
tgggccgtgttacttctgttcatta

SEQ ID NO: 26491 - DNA, 25 bp, Homo sapiens
gccagctctggtctactgcttgaaa

SEQ ID NO: 26492 - DNA, 25 bp, Homo sapiens
ccatgcaagtctgaaccgggctcta

SEQ ID NO: 26493 - DNA, 25 bp, Homo sapiens
agctcctgggttttcatagttctga

SEQ ID NO: 26494 - DNA, 25 bp, Homo sapiens
tgccctggcttctggtcaaacttgc

SEQ ID NO: 26495 - DNA, 25 bp, Homo sapiens
tgtgcccactctttgctgaggagga

SEQ ID NO: 26496 - DNA, 25 bp, Homo sapiens
gttgaaacttttgctgctgcccgtc

SEQ ID NO: 26497 - DNA, 25 bp, Homo sapiens
tcatgcatcctgttggcccttgtcg

SEQ ID NO: 26498 - DNA, 25 bp, Homo sapiens
actggtctttgtgtgctgcttttta

SEQ ID NO: 26499 - DNA, 25 bp, Homo sapiens
tgcactagtgcatgaatggcagcca

SEQ ID NO: 26500 - DNA, 25 bp, Homo sapiens
tgcctagtgaccaagagggctgcta

SEQ ID NO: 26501 - DNA, 25 bp, Homo sapiens
ggataaattatgttgttaaaaagtt

SEQ ID NO: 26502 - DNA, 25 bp, Homo sapiens
ttgatggttccacgactacacgggc

SEQ ID NO: 26503 - DNA, 25 bp, Homo sapiens
ctaaccagtgtcagagagcagccca

SEQ ID NO: 26504 - DNA, 25 bp, Homo sapiens
tatgcctgccaaatgtgaacgtaca

SEQ ID NO: 26505 - DNA, 25 bp, Homo sapiens
atcgcggctttttactcgccacggc

SEQ ID NO: 26506 - DNA, 25 bp, Homo sapiens
gcccgcacccgcagttaagacatta

SEQ ID NO: 26507 - DNA, 25 bp, Homo sapiens
cgtccgttttggctttctccctgaa

SEQ ID NO: 26508 - DNA, 25 bp, Homo sapiens
ggcccgggccattaaaaagactcaa

SEQ ID NO: 26509 - DNA, 25 bp, Homo sapiens
aagaagttgccccaagaaatatatt

SEQ ID NO: 26510 - DNA, 25 bp, Homo sapiens
cctgctttgaacctctgagctggta

SEQ ID NO: 26511 - DNA, 25 bp, Homo sapiens
atactagcagctgggcaatggcata

SEQ ID NO: 26512 - DNA, 25 bp, Homo sapiens
ctccagagtggtcagcgatcaaata

SEQ ID NO: 26513 - DNA, 25 bp, Homo sapiens
tctctgcaatggagaagtctctaca

SEQ ID NO: 26514 - DNA, 25 bp, Homo sapiens
ctgtcagtgtgtcagggcggaaaat

SEQ ID NO: 26515 - DNA, 25 bp, Homo sapiens
aactagatgtttgatattagacata

SEQ ID NO: 26516 - DNA, 25 bp, Homo sapiens
ggggctaccgtttctgtataaattt

SEQ ID NO: 26517 - DNA, 25 bp, Homo sapiens
agggcacatgatgccagcattttca

SEQ ID NO: 26518 - DNA, 25 bp, Homo sapiens
tttgagtgccaaccagaagtttagc

SEQ ID NO: 26519 - DNA, 25 bp, Homo sapiens
tctaggcgtgttttatgagaaatgc

SEQ ID NO: 26520 - DNA, 25 bp, Homo sapiens
tgggcatcagctcaggtaccttttc

SEQ ID NO: 26521 - DNA, 25 bp, Homo sapiens
gttgctgcagcctctaggttatata

SEQ ID NO: 26522 - DNA, 25 bp, Homo sapiens
tgcccagtagattctgccagctttc

SEQ ID NO: 26523 - DNA, 25 bp, Homo sapiens
tatttttcaccagtcctcactaagg

SEQ ID NO: 26524 - DNA, 25 bp, Homo sapiens
aggacgtattccacgcaggtcgtaa

SEQ ID NO: 26525 - DNA, 25 bp, Homo sapiens
tcccttcaatgtaggtctggacact

SEQ ID NO: 26526 - DNA, 25 bp, Homo sapiens
gttttcattttagggcaagcacatc

SEQ ID NO: 26527 - DNA, 25 bp, Homo sapiens
gtaggtcttcctggggcaaaatgca

SEQ ID NO: 26528 - DNA, 25 bp, Homo sapiens
atgggttgctgttcttgtgacttgc

SEQ ID NO: 26529 - DNA, 25 bp, Homo sapiens
gcctagcttaccctactgaaattga

SEQ ID NO: 26530 - DNA, 25 bp, Homo sapiens
acactgtggcctgtctttaagaaac

SEQ ID NO: 26531 - DNA, 25 bp, Homo sapiens
gttggataaagtcctgccagcctgc

SEQ ID NO: 26532 - DNA, 25 bp, Homo sapiens
acatggatagtctgccctggttttc

SEQ ID NO: 26533 - DNA, 25 bp, Homo sapiens
cagatctgttcccttctatgagaca

SEQ ID NO: 26534 - DNA, 25 bp, Homo sapiens
gctaagggtctattttccaactttc

SEQ ID NO: 26535 - DNA, 25 bp, Homo sapiens
aagaagaaaaggaggtatagaagaa

SEQ ID NO: 26536 - DNA, 25 bp, Homo sapiens
tggcaccgcttgctcaagaactgta

SEQ ID NO: 26537 - DNA, 25 bp, Homo sapiens
ctgtcctgtgaaacatgtcctccta

SEQ ID NO: 26538 - DNA, 25 bp, Homo sapiens
ggatgcttcttgtcagggtctttaa

SEQ ID NO: 26539 - DNA, 25 bp, Homo sapiens
aaccagctgtccttctctttgtgtg

SEQ ID NO: 26540 - DNA, 25 bp, Homo sapiens
ggtgtctccagcatctcctttctga

SEQ ID NO: 26541 - DNA, 25 bp, Homo sapiens
cctggaacctctgaagacaactgta

SEQ ID NO: 26542 - DNA, 25 bp, Homo sapiens
ggccctctgtatcctgctccatttg

SEQ ID NO: 26543 - DNA, 25 bp, Homo sapiens
tgttgagtatgaccctaggaggata

SEQ ID NO: 26544 - DNA, 25 bp, Homo sapiens
ggtcttgattgtgctgatgatactc

SEQ ID NO: 26545 - DNA, 25 bp, Homo sapiens
attccctgtttgtgtagagcttgca

SEQ ID NO: 26546 - DNA, 25 bp, Homo sapiens
cagcaacaacaagtgttagcaataa

SEQ ID NO: 26547 - DNA, 25 bp, Homo sapiens
gtgggaacctctcacccttgaaata

SEQ ID NO: 26548 - DNA, 25 bp, Homo sapiens
cctggtctggatcacattttactgc

SEQ ID NO: 26549 - DNA, 25 bp, Homo sapiens
cagccactgttatttgaaaggatta

SEQ ID NO: 26550 - DNA, 25 bp, Homo sapiens
atccagtcaggtaccaatgctcgtg

SEQ ID NO: 26551 - DNA, 25 bp, Homo sapiens
tgcatctcttgggaatcaacacatg

SEQ ID NO: 26552 - DNA, 25 bp, Homo sapiens
ggcccagtttagcatcttttccatc

SEQ ID NO: 26553 - DNA, 25 bp, Homo sapiens
accgtggcctccattgtttgtcatg

SEQ ID NO: 26554 - DNA, 25 bp, Homo sapiens
acgtagcaatggacttctcttttta

SEQ ID NO: 26555 - DNA, 25 bp, Homo sapiens
aggcattcctttctctaaactattg

SEQ ID NO: 26556 - DNA, 25 bp, Homo sapiens
gctcctccaggccttctaagatatg

SEQ ID NO: 26557 - DNA, 25 bp, Homo sapiens
tccctcaatggcagagagctcggtg

SEQ ID NO: 26558 - DNA, 25 bp, Homo sapiens
gcctctgaaggcttttctatcccaa

SEQ ID NO: 26559 - DNA, 25 bp, Homo sapiens
tggcattcccagcaccacaatactg

SEQ ID NO: 26560 - DNA, 25 bp, Homo sapiens
taagtaacatgcttttgaggaccct

SEQ ID NO: 26561 - DNA, 25 bp, Homo sapiens
aatgtccttcctgagctgcgcttta

SEQ ID NO: 26562 - DNA, 25 bp, Homo sapiens
atatagagcacccaccatgctggta

SEQ ID NO: 26563 - DNA, 25 bp, Homo sapiens
tagagactagttacttttatataac

SEQ ID NO: 26564 - DNA, 25 bp, Homo sapiens
tgtgttatgtcttcccacccatgta

SEQ ID NO: 26565 - DNA, 25 bp, Homo sapiens
ccaggggcatagtggaatttcttca

SEQ ID NO: 26566 - DNA, 25 bp, Homo sapiens
ggggggagggggagagggaagttca

SEQ ID NO: 26567 - DNA, 25 bp, Homo sapiens
aaacaccaggtttgagtgaggctga

SEQ ID NO: 26568 - DNA, 25 bp, Homo sapiens
actatcacatgggtctatatcaata

SEQ ID NO: 26569 - DNA, 25 bp, Homo sapiens
ccaaggatggtctagttttggctga

SEQ ID NO: 26570 - DNA, 25 bp, Homo sapiens
tgcaactcaggcttctgcggaatta

SEQ ID NO: 26571 - DNA, 25 bp, Homo sapiens
aggagacatccttttctgggggatg

SEQ ID NO: 26572 - DNA, 25 bp, Homo sapiens
tctctggaagaaggtgcaactgata

SEQ ID NO: 26573 - DNA, 25 bp, Homo sapiens
cagctggctaaaatggaaccttatc

SEQ ID NO: 26574 - DNA, 25 bp, Homo sapiens
tctctttctctctctgcatggcatc

SEQ ID NO: 26575 - DNA, 25 bp, Homo sapiens
cattccgttgggtttctggacagca

SEQ ID NO: 26576 - DNA, 25 bp, Homo sapiens
gcccattttgttcctggattgcata

SEQ ID NO: 26577 - DNA, 25 bp, Homo sapiens
tatgggcttctactctacagatgtg

SEQ ID NO: 26578 - DNA, 25 bp, Homo sapiens
gttggcgtctccactccatgaacta

SEQ ID NO: 26579 - DNA, 25 bp, Homo sapiens
gggctgattttcatgctaaagctgc

SEQ ID NO: 26580 - DNA, 25 bp, Homo sapiens
aaaaagaaaaactcaagtggcagca

SEQ ID NO: 26581 - DNA, 25 bp, Homo sapiens
ttaccctgcgctgtggaagagcacc

SEQ ID NO: 26582 - DNA, 25 bp, Homo sapiens
agcaatatgcacagaggaaaaaaaa

SEQ ID NO: 26583 - DNA, 25 bp, Homo sapiens
atgatttaaggtcctgtatggggga

SEQ ID NO: 26584 - DNA, 25 bp, Homo sapiens
ttcaccaaggaggaaaaggtcagtt

SEQ ID NO: 26585 - DNA, 25 bp, Homo sapiens
gccctcagagggtcaacagtgtata

SEQ ID NO: 26586 - DNA, 25 bp, Homo sapiens
tgtctggcagctggataaaacctta

SEQ ID NO: 26587 - DNA, 25 bp, Homo sapiens
ggcctactcccttttcttgattcga

SEQ ID NO: 26588 - DNA, 25 bp, Homo sapiens
catcttgggttgcttcagttctaaa

SEQ ID NO: 26589 - DNA, 25 bp, Homo sapiens
tgtcaggcactctcagcttgttttc

SEQ ID NO: 26590 - DNA, 25 bp, Homo sapiens
ggacgtggcttttgcattcccttta

SEQ ID NO: 26591 - DNA, 25 bp, Homo sapiens
cagggtcccagagttcagcaagtta

SEQ ID NO: 26592 - DNA, 25 bp, Homo sapiens
ctgctactttgagattgtttgaaaa

SEQ ID NO: 26593 - DNA, 25 bp, Homo sapiens
ccacagggccattggaagattatta

SEQ ID NO: 26594 - DNA, 25 bp, Homo sapiens
ggcttcttgtccaatagcttccata

SEQ ID NO: 26595 - DNA, 25 bp, Homo sapiens
gacccaatgcagttttctagtgtta

SEQ ID NO: 26596 - DNA, 25 bp, Homo sapiens
gtaggctgtcctgcttttccactta

SEQ ID NO: 26597 - DNA, 25 bp, Homo sapiens
cgcctggcttcctgtccataagtga

SEQ ID NO: 26598 - DNA, 25 bp, Homo sapiens
cctttggaacacagcctattggaga

SEQ ID NO: 26599 - DNA, 25 bp, Homo sapiens
gggcatgcctcttggtaaccgtagc

SEQ ID NO: 26600 - DNA, 25 bp, Homo sapiens
ggaatctatttcttaaacacagaca

SEQ ID NO: 26601 - DNA, 25 bp, Homo sapiens
gcagggcaccgcttactcaaccagt

SEQ ID NO: 26602 - DNA, 25 bp, Homo sapiens
tgttgctctagttccttcccatcga

SEQ ID NO: 26603 - DNA, 25 bp, Homo sapiens
cctctggccattgttgaagttaatc

SEQ ID NO: 26604 - DNA, 25 bp, Homo sapiens
ctgctctcaggggttttaaaacaga

SEQ ID NO: 26605 - DNA, 25 bp, Homo sapiens
gagagtcctgcacatgtttcccatc

SEQ ID NO: 26606 - DNA, 25 bp, Homo sapiens
acatcttgacagttggccccttccc

SEQ ID NO: 26607 - DNA, 25 bp, Homo sapiens
ttggactttcattctttcacatgca

SEQ ID NO: 26608 - DNA, 25 bp, Homo sapiens
gcaaggtgccttatctgtctaaaga

SEQ ID NO: 26609 - DNA, 25 bp, Homo sapiens
atcctttgttccatgcgatgtaacc

SEQ ID NO: 26610 - DNA, 25 bp, Homo sapiens
cgggcactggactcttgttactagg

SEQ ID NO: 26611 - DNA, 25 bp, Homo sapiens
ccagggattacttcgagattttata

SEQ ID NO: 26612 - DNA, 25 bp, Homo sapiens
tgtcccacctgatccgtcctgtatg

SEQ ID NO: 26613 - DNA, 25 bp, Homo sapiens
ctactgcatgtgattcggtgttaca

SEQ ID NO: 26614 - DNA, 25 bp, Homo sapiens
tagcacctgacgtccaatacaaaga

SEQ ID NO: 26615 - DNA, 25 bp, Homo sapiens
tgctcttgctctagtgcacccttgc

SEQ ID NO: 26616 - DNA, 25 bp, Homo sapiens
gaggacctttcagactactttttag

SEQ ID NO: 26617 - DNA, 25 bp, Homo sapiens
cctctgcagccacttgaatgttatg

SEQ ID NO: 26618 - DNA, 25 bp, Homo sapiens
ctacgttggactctgctttgcacta

SEQ ID NO: 26619 - DNA, 25 bp, Homo sapiens
gcattgactcaaggcctaggattta

SEQ ID NO: 26620 - DNA, 25 bp, Homo sapiens
ccctggatcccagtgttgaagtata

SEQ ID NO: 26621 - DNA, 25 bp, Homo sapiens
tcctgctaaagcgtgacccaattgc

SEQ ID NO: 26622 - DNA, 25 bp, Homo sapiens
tgctggcctttcataaattcgtatc

SEQ ID NO: 26623 - DNA, 25 bp, Homo sapiens
ttgggcttctgtctcctgaaacatc

SEQ ID NO: 26624 - DNA, 25 bp, Homo sapiens
tcggtaccaaacattccaggcagtg

SEQ ID NO: 26625 - DNA, 25 bp, Homo sapiens
ggtgccatgcactattccaattaga

SEQ ID NO: 26626 - DNA, 25 bp, Homo sapiens
aggtgtttaaggtagcatgtctctc

SEQ ID NO: 26627 - DNA, 25 bp, Homo sapiens
gttccggattcctccaagccagaga

SEQ ID NO: 26628 - DNA, 25 bp, Homo sapiens
gcccacatttgtagtcctgctctga

SEQ ID NO: 26629 - DNA, 25 bp, Homo sapiens
tctgggccagtgaatacaaaacatc

SEQ ID NO: 26630 - DNA, 25 bp, Homo sapiens
cctggcttcctggtatctatgactg

SEQ ID NO: 26631 - DNA, 25 bp, Homo sapiens
gcgtagcccatctgcagtatgcatt

SEQ ID NO: 26632 - DNA, 25 bp, Homo sapiens
atccctcttttgcatggctgcttga

SEQ ID NO: 26633 - DNA, 25 bp, Homo sapiens
ggggacttattcctcattagtattg

SEQ ID NO: 26634 - DNA, 25 bp, Homo sapiens
tggtcatacatttagcctgcagaga

SEQ ID NO: 26635 - DNA, 25 bp, Homo sapiens
atgattaacctgcaacaactatgta

SEQ ID NO: 26636 - DNA, 25 bp, Homo sapiens
caaaaaaaacctgattttgctattt

SEQ ID NO: 26637 - DNA, 25 bp, Homo sapiens
agacctgggactctagtttaacaca

SEQ ID NO: 26638 - DNA, 25 bp, Homo sapiens
gccatgttagtttaggttgattcag

SEQ ID NO: 26639 - DNA, 25 bp, Homo sapiens
tgtttgaatcaattcattagtctaa

SEQ ID NO: 26640 - DNA, 25 bp, Homo sapiens
tgatagtaccatgagccagcctgtg

SEQ ID NO: 26641 - DNA, 25 bp, Homo sapiens
ctttgagttcactaattctttcctt

SEQ ID NO: 26642 - DNA, 25 bp, Homo sapiens
tctcagttctgtactgtttccaatc

SEQ ID NO: 26643 - DNA, 25 bp, Homo sapiens
cgggcatcagccaccatgttcattt

SEQ ID NO: 26644 - DNA, 25 bp, Homo sapiens
gaatgagttcctacacgctttagtg

SEQ ID NO: 26645 - DNA, 25 bp, Homo sapiens
tcctggatgtcctgggtatagtaca

SEQ ID NO: 26646 - DNA, 25 bp, Homo sapiens
cttcaggaactagggtcagtaactg

SEQ ID NO: 26647 - DNA, 25 bp, Homo sapiens
taaaggcatcctgttgaaattcata

SEQ ID NO: 26648 - DNA, 25 bp, Homo sapiens
gacatgcttccctaaaggctgcatc

SEQ ID NO: 26649 - DNA, 25 bp, Homo sapiens
cccagagatgtggaagatcatgctc

SEQ ID NO: 26650 - DNA, 25 bp, Homo sapiens
gtacgtgccaccttcctaaatgttg

SEQ ID NO: 26651 - DNA, 25 bp, Homo sapiens
tctgacgcaggtgtgtaaaagcttc

SEQ ID NO: 26652 - DNA, 25 bp, Homo sapiens
agcaccagagccacacagaaatttg

SEQ ID NO: 26653 - DNA, 25 bp, Homo sapiens
gttctccgtgccattgccatcctga

SEQ ID NO: 26654 - DNA, 25 bp, Homo sapiens
ggcatgtcccagctcaccacaaagg

SEQ ID NO: 26655 - DNA, 25 bp, Homo sapiens
gacactgtgctgtggtctcataata

SEQ ID NO: 26656 - DNA, 25 bp, Homo sapiens
aaaaaattggattttcaagatgggg

SEQ ID NO: 26657 - DNA, 25 bp, Homo sapiens
aatgttcagttactcagctgattta

SEQ ID NO: 26658 - DNA, 25 bp, Homo sapiens
ctgctctgttagttccactgggtaa

SEQ ID NO: 26659 - DNA, 25 bp, Homo sapiens
ggcttctttaacttgactatgggtc

SEQ ID NO: 26660 - DNA, 25 bp, Homo sapiens
ttggaacgaaggaagttgagatcta

SEQ ID NO: 26661 - DNA, 25 bp, Homo sapiens
ctaaggagaatgatctaaattcaag

SEQ ID NO: 26662 - DNA, 25 bp, Homo sapiens
gatttccaggtcaatgcccacaggg

SEQ ID NO: 26663 - DNA, 25 bp, Homo sapiens
ggcttgctggcttcaaattctctca

SEQ ID NO: 26664 - DNA, 25 bp, Homo sapiens
ctgacttctccacttgtgcttctga

SEQ ID NO: 26665 - DNA, 25 bp, Homo sapiens
cactatacgattactttccattcta

SEQ ID NO: 26666 - DNA, 25 bp, Homo sapiens
ccaaggttggttcagacaccgcaca

SEQ ID NO: 26667 - DNA, 25 bp, Homo sapiens
agtcgttccctttgttgaccattga

SEQ ID NO: 26668 - DNA, 25 bp, Homo sapiens
tctgatcttactgcaggagagtctc

SEQ ID NO: 26669 - DNA, 25 bp, Homo sapiens
ggccgtttaccttttgggtcacaga

SEQ ID NO: 26670 - DNA, 25 bp, Homo sapiens
cttacgtagtcggatattgctcaca

SEQ ID NO: 26671 - DNA, 25 bp, Homo sapiens
cacctgatttgcatgaattactttt

SEQ ID NO: 26672 - DNA, 25 bp, Homo sapiens
tgggccaagcctgatggctattata

SEQ ID NO: 26673 - DNA, 25 bp, Homo sapiens
tcctctgtatcaatatttagatgag

SEQ ID NO: 26674 - DNA, 25 bp, Homo sapiens
cctttcaatgttttgtgattaacca

SEQ ID NO: 26675 - DNA, 25 bp, Homo sapiens
cgtcacggagaagatcacctgtaca

SEQ ID NO: 26676 - DNA, 25 bp, Homo sapiens
tctagggtggtgatcttctgaatcc

SEQ ID NO: 26677 - DNA, 25 bp, Homo sapiens
gctcctaacttctgggctatatttg

SEQ ID NO: 26678 - DNA, 25 bp, Homo sapiens
gcaggatccctctttcgtcagtttt

SEQ ID NO: 26679 - DNA, 25 bp, Homo sapiens
tcctctcaaaggatgaataagaatc

SEQ ID NO: 26680 - DNA, 25 bp, Homo sapiens
ttggccaaggggaaagaaagcagtc

SEQ ID NO: 26681 - DNA, 25 bp, Homo sapiens
taccggtggagacagatgtaaattc

SEQ ID NO: 26682 - DNA, 25 bp, Homo sapiens
atggccatcagcaggacagttatta

SEQ ID NO: 26683 - DNA, 25 bp, Homo sapiens
tcaccaagggcactgggtagtctta

SEQ ID NO: 26684 - DNA, 25 bp, Homo sapiens
gacgtgtcctcagtatccagtattg

SEQ ID NO: 26685 - DNA, 25 bp, Homo sapiens
gggcctgagagctaagtggtaattc

SEQ ID NO: 26686 - DNA, 25 bp, Homo sapiens
taacgcattgctgtggggcttactc

SEQ ID NO: 26687 - DNA, 25 bp, Homo sapiens
attgacagccagtcccatagatgtg

SEQ ID NO: 26688 - DNA, 25 bp, Homo sapiens
gccagctccgatttgtctagagaaa

SEQ ID NO: 26689 - DNA, 25 bp, Homo sapiens
gactgacctcttcttgggataacta

SEQ ID NO: 26690 - DNA, 25 bp, Homo sapiens
ccatcatatggttatgtcatttgta

SEQ ID NO: 26691 - DNA, 25 bp, Homo sapiens
gaattctatcctagaaatagaaagt

SEQ ID NO: 26692 - DNA, 25 bp, Homo sapiens
cctgtgggcattgacctggaaatct

SEQ ID NO: 26693 - DNA, 25 bp, Homo sapiens
cggcgactgctgcaaaccatggata

SEQ ID NO: 26694 - DNA, 25 bp, Homo sapiens
tgtataatttttgtattcaaagaat

SEQ ID NO: 26695 - DNA, 25 bp, Homo sapiens
gacccatagtcaagttaaagaagcc

SEQ ID NO: 26696 - DNA, 25 bp, Homo sapiens
cactggggcccttgggattcatata

SEQ ID NO: 26697 - DNA, 25 bp, Homo sapiens
cccactcaagtgtacagattggtaa

SEQ ID NO: 26698 - DNA, 25 bp, Homo sapiens
ttaaacctcagtagacattttttag

SEQ ID NO: 26699 - DNA, 25 bp, Homo sapiens
ggccttggcccattaaaccctttaa

SEQ ID NO: 26700 - DNA, 25 bp, Homo sapiens
tccatgcttgcttgctgaggcttta

SEQ ID NO: 26701 - DNA, 25 bp, Homo sapiens
tttctgtgtggctctggtgctatta

SEQ ID NO: 26702 - DNA, 25 bp, Homo sapiens
gaagcttttacacacctgcgtcaga

SEQ ID NO: 26703 - DNA, 25 bp, Homo sapiens
ccatggatggcctagccctatttta

SEQ ID NO: 26704 - DNA, 25 bp, Homo sapiens
ctgctttctgtgttacccatgagta

SEQ ID NO: 26705 - DNA, 25 bp, Homo sapiens
gtattttcctaagatgcagcgttta

SEQ ID NO: 26706 - DNA, 25 bp, Homo sapiens
gaccttgccagtcttttaattaagt

SEQ ID NO: 26707 - DNA, 25 bp, Homo sapiens
ggttggggggggctttttaaatgta

SEQ ID NO: 26708 - DNA, 25 bp, Homo sapiens
cattcagaaaataaccacaaggaat

SEQ ID NO: 26709 - DNA, 25 bp, Homo sapiens
ccttgggctaaagatggtaactgtc

SEQ ID NO: 26710 - DNA, 25 bp, Homo sapiens
agcagctccctttcagatacttttc

SEQ ID NO: 26711 - DNA, 25 bp, Homo sapiens
ggcaggtgaagttttggtcccaaca

SEQ ID NO: 26712 - DNA, 25 bp, Homo sapiens
gtgagagtcacttacagagaagata

SEQ ID NO: 26713 - DNA, 25 bp, Homo sapiens
ttcaactattttctaatcaacgtag

SEQ ID NO: 26714 - DNA, 25 bp, Homo sapiens
accagggcctgacattttataaaca

SEQ ID NO: 26715 - DNA, 25 bp, Homo sapiens
tagccgtctgcaatagccgcctgta

SEQ ID NO: 26716 - DNA, 25 bp, Homo sapiens
ggggttcccattacaatactgataa

SEQ ID NO: 26717 - DNA, 25 bp, Homo sapiens
ccctcagtgtgtgccttcaatggaa

SEQ ID NO: 26718 - DNA, 25 bp, Homo sapiens
actagccggtacctcatgcagagta

SEQ ID NO: 26719 - DNA, 25 bp, Homo sapiens
tgcccacacgtgtccggaacatttg

SEQ ID NO: 26720 - DNA, 25 bp, Homo sapiens
agggcaggcttctttttcgatcaaa

SEQ ID NO: 26721 - DNA, 25 bp, Homo sapiens
ggatgggacaaccacttggactatc

SEQ ID NO: 26722 - DNA, 25 bp, Homo sapiens
tgggcccagccttaatgcatgaata

SEQ ID NO: 26723 - DNA, 25 bp, Homo sapiens
tgcctttggccttctggtatcttca

SEQ ID NO: 26724 - DNA, 25 bp, Homo sapiens
ccaaggcactgaggatgtttttaca

SEQ ID NO: 26725 - DNA, 25 bp, Homo sapiens
gtcagtttctttgtccaccagcagg

SEQ ID NO: 26726 - DNA, 25 bp, Homo sapiens
ggggcaactcaactggatatttttt

SEQ ID NO: 26727 - DNA, 25 bp, Homo sapiens
tgcggagtcatctcaccaatgtagg

SEQ ID NO: 26728 - DNA, 25 bp, Homo sapiens
cttgtatgtcaacctaggcaaggga

SEQ ID NO: 26729 - DNA, 25 bp, Homo sapiens
agagtcctcaagtgtcagcctgaca

SEQ ID NO: 26730 - DNA, 25 bp, Homo sapiens
agcccagagggttcttacaagactg

SEQ ID NO: 26731 - DNA, 25 bp, Homo sapiens
cctttctgtttgctcggtgtgtcta

SEQ ID NO: 26732 - DNA, 25 bp, Homo sapiens
cgactacggtggacaagggatgatt

SEQ ID NO: 26733 - DNA, 25 bp, Homo sapiens
tgtccagagtccttgatccgatgta

SEQ ID NO: 26734 - DNA, 25 bp, Homo sapiens
ctcctggggttaagagacgtgcatc

SEQ ID NO: 26735 - DNA, 25 bp, Homo sapiens
gcctctgccgagtctgtgcacttca

SEQ ID NO: 26736 - DNA, 25 bp, Homo sapiens
ttcggcgttttcagccactggtgta

SEQ ID NO: 26737 - DNA, 25 bp, Homo sapiens
tatacacaaacttttgtattagaat

SEQ ID NO: 26738 - DNA, 25 bp, Homo sapiens
agctggctctcctgtgcaacatcca

SEQ ID NO: 26739 - DNA, 25 bp, Homo sapiens
ggcctgcttctgattgctcatctga

SEQ ID NO: 26740 - DNA, 25 bp, Homo sapiens
cctgctcattggacaggccctggta

SEQ ID NO: 26741 - DNA, 25 bp, Homo sapiens
cctcaggccgcaaagatcgaagatg

SEQ ID NO: 26742 - DNA, 25 bp, Homo sapiens
tgtcccaaggctatcttctgcaaga

SEQ ID NO: 26743 - DNA, 25 bp, Homo sapiens
gccagccagtgaggttgccctaacc

SEQ ID NO: 26744 - DNA, 25 bp, Homo sapiens
cttcttctggaacgaggcctcttgc

SEQ ID NO: 26745 - DNA, 25 bp, Homo sapiens
gggcagctccacatccagcaggttc

SEQ ID NO: 26746 - DNA, 25 bp, Homo sapiens
gtgcctgcctttgttgggacctata

SEQ ID NO: 26747 - DNA, 25 bp, Homo sapiens
tgggccctaccacggagtacaactt

SEQ ID NO: 26748 - DNA, 25 bp, Homo sapiens
tgggccattcctttccagctgaggt

SEQ ID NO: 26749 - DNA, 25 bp, Homo sapiens
tgacaggaccagatgatgacaatta

SEQ ID NO: 26750 - DNA, 25 bp, Homo sapiens
caactgccctggtgtatgccgaagg

SEQ ID NO: 26751 - DNA, 25 bp, Homo sapiens
tgcagccgatacagcagggatcttg

SEQ ID NO: 26752 - DNA, 25 bp, Homo sapiens
tcgcccagcttgttgcccacgatgt

SEQ ID NO: 26753 - DNA, 25 bp, Homo sapiens
agcctgcagggtctctaccagatga

SEQ ID NO: 26754 - DNA, 25 bp, Homo sapiens
gagtgaattctgtgactgcgaagaa

SEQ ID NO: 26755 - DNA, 25 bp, Homo sapiens
agccaatcaggctctgcgaggcaga

SEQ ID NO: 26756 - DNA, 25 bp, Homo sapiens
tctcacggcctcatttgggttttca

SEQ ID NO: 26757 - DNA, 25 bp, Homo sapiens
gccttgacatctgcggggtaacttc

SEQ ID NO: 26758 - DNA, 25 bp, Homo sapiens
cccaggttctgcgattgatcctttg

SEQ ID NO: 26759 - DNA, 25 bp, Homo sapiens
cgccgctgccctagcaagctttatg

SEQ ID NO: 26760 - DNA, 25 bp, Homo sapiens
ggttgccagtcctagtccagttctc

SEQ ID NO: 26761 - DNA, 25 bp, Homo sapiens
tggggtccctaactgatagcctgta

SEQ ID NO: 26762 - DNA, 25 bp, Homo sapiens
ctgcagcatctggagctccgtgatc

SEQ ID NO: 26763 - DNA, 25 bp, Homo sapiens
cccagggctcagatacacaccagtg

SEQ ID NO: 26764 - DNA, 25 bp, Homo sapiens
tgcaccggggcttcagttaaaaacg

SEQ ID NO: 26765 - DNA, 25 bp, Homo sapiens
tgtgcagggcctctccttacaggaa

SEQ ID NO: 26766 - DNA, 25 bp, Homo sapiens
ctgtgtcctccctttcacctgtaga

SEQ ID NO: 26767 - DNA, 25 bp, Homo sapiens
ccacggtgatggtgagaagaccttc

SEQ ID NO: 26768 - DNA, 25 bp, Homo sapiens
caggtaactcagtcggccttgttga

SEQ ID NO: 26769 - DNA, 25 bp, Homo sapiens
gggaaaccatacctcctctggcatg

SEQ ID NO: 26770 - DNA, 25 bp, Homo sapiens
gccagaggggctctccaaagacttc

SEQ ID NO: 26771 - DNA, 25 bp, Homo sapiens
aggggcttttacttttaccagattg

SEQ ID NO: 26772 - DNA, 25 bp, Homo sapiens
gacctcctgctgttgctctttctgg

SEQ ID NO: 26773 - DNA, 25 bp, Homo sapiens
tccgggctcccatgcaggatgaaaa

SEQ ID NO: 26774 - DNA, 25 bp, Homo sapiens
aaggtcttccttgctgagtgccaca

SEQ ID NO: 26775 - DNA, 25 bp, Homo sapiens
ccaggcctgtaagggtagcagttta

SEQ ID NO: 26776 - DNA, 25 bp, Homo sapiens
gctctaactgctggatggaacactg

SEQ ID NO: 26777 - DNA, 25 bp, Homo sapiens
ggacctggccacacgcaactgtcta

SEQ ID NO: 26778 - DNA, 25 bp, Homo sapiens
tgggagatcttcacctacggcaagc

SEQ ID NO: 26779 - DNA, 25 bp, Homo sapiens
agccagctatttttcacgcccttta

SEQ ID NO: 26780 - DNA, 25 bp, Homo sapiens
gcaaggtcccgtcatagcaattata

SEQ ID NO: 26781 - DNA, 25 bp, Homo sapiens
tcagggctaatcacatggctgtctc

SEQ ID NO: 26782 - DNA, 25 bp, Homo sapiens
ctgccagggcatgtgaaccattttc

SEQ ID NO: 26783 - DNA, 25 bp, Homo sapiens
ccagcactgggatggggtctctaaa

SEQ ID NO: 26784 - DNA, 25 bp, Homo sapiens
agcctcagaggccatgcgcttttca

SEQ ID NO: 26785 - DNA, 25 bp, Homo sapiens
gacctggagtgcgaaacatgcctta

SEQ ID NO: 26786 - DNA, 25 bp, Homo sapiens
tgggtgtttccagccagaagtttcc

SEQ ID NO: 26787 - DNA, 25 bp, Homo sapiens
ggaccctgtaggcagattcagacca

SEQ ID NO: 26788 - DNA, 25 bp, Homo sapiens
cctctgtgagcccttgcgatgtgct

SEQ ID NO: 26789 - DNA, 25 bp, Homo sapiens
ggggacgtccatccttttagctata

SEQ ID NO: 26790 - DNA, 25 bp, Homo sapiens
acatctcttgcttgtctctgacatc

SEQ ID NO: 26791 - DNA, 25 bp, Homo sapiens
ctcccaggagggatgatactgcttt

SEQ ID NO: 26792 - DNA, 25 bp, Homo sapiens
gcggagaatgcttcccagggtcaca

SEQ ID NO: 26793 - DNA, 25 bp, Homo sapiens
cccggctcctgtttccttgtcaaaa

SEQ ID NO: 26794 - DNA, 25 bp, Homo sapiens
cccgggcaactggatcctcagaaaa

SEQ ID NO: 26795 - DNA, 25 bp, Homo sapiens
ggaggatcttggcttctgtcatcta

SEQ ID NO: 26796 - DNA, 25 bp, Homo sapiens
ggagctgttgtgcactcatcccata

SEQ ID NO: 26797 - DNA, 25 bp, Homo sapiens
aggctgtgtagaacctgggcatttc

SEQ ID NO: 26798 - DNA, 25 bp, Homo sapiens
ctttggactgcgatctcactgctgg

SEQ ID NO: 26799 - DNA, 25 bp, Homo sapiens
tgaggggttatcctatgctacatga

SEQ ID NO: 26800 - DNA, 25 bp, Homo sapiens
cccttgaggggtatatgcaatctct

SEQ ID NO: 26801 - DNA, 25 bp, Homo sapiens
tgtctctagggcactcctgactgtg

SEQ ID NO: 26802 - DNA, 25 bp, Homo sapiens
aggcgggagcttttccttaaatgca

SEQ ID NO: 26803 - DNA, 25 bp, Homo sapiens
gtgatcccaatacctgcagcttctg

SEQ ID NO: 26804 - DNA, 25 bp, Homo sapiens
tcctggcttctagggattcattctg

SEQ ID NO: 26805 - DNA, 25 bp, Homo sapiens
agcaccctgtaatgactggagcctg

SEQ ID NO: 26806 - DNA, 25 bp, Homo sapiens
tgcggcaacaacagctcgtgtgatc

SEQ ID NO: 26807 - DNA, 25 bp, Homo sapiens
tcttgccaaaatggaggtgtcttcc

SEQ ID NO: 26808 - DNA, 25 bp, Homo sapiens
gttttcagaatagcgcggagcctcc

SEQ ID NO: 26809 - DNA, 25 bp, Homo sapiens
gcaacctttaggctggactcggata

SEQ ID NO: 26810 - DNA, 25 bp, Homo sapiens
tctccctgagaatggcaactgcgtg

SEQ ID NO: 26811 - DNA, 25 bp, Homo sapiens
cataggcttagcttgggacattttc

SEQ ID NO: 26812 - DNA, 25 bp, Homo sapiens
catccggggtagcttggaagccttt

SEQ ID NO: 26813 - DNA, 25 bp, Homo sapiens
tctccggggacaaaacagctctctt

SEQ ID NO: 26814 - DNA, 25 bp, Homo sapiens
tccctgagcagtgagaacccatatg

SEQ ID NO: 26815 - DNA, 25 bp, Homo sapiens
ggggtaccttttctgtgcatgctca

SEQ ID NO: 26816 - DNA, 25 bp, Homo sapiens
tgcacttcacaggtagcagaatttt

SEQ ID NO: 26817 - DNA, 25 bp, Homo sapiens
ttactcaaatggggcccaccagggc

SEQ ID NO: 26818 - DNA, 25 bp, Homo sapiens
ctgctccaaggttatggctgaactc

SEQ ID NO: 26819 - DNA, 25 bp, Homo sapiens
ccctacaggtacgaagccagttaca

SEQ ID NO: 26820 - DNA, 25 bp, Homo sapiens
gttggacctgctacaaactttgtgt

SEQ ID NO: 26821 - DNA, 25 bp, Homo sapiens
gctactgttgttctgtaattttgta

SEQ ID NO: 26822 - DNA, 25 bp, Homo sapiens
ctggcaccaggctgctgaatatata

SEQ ID NO: 26823 - DNA, 25 bp, Homo sapiens
ttcatggtcacaactctgcagctgg

SEQ ID NO: 26824 - DNA, 25 bp, Homo sapiens
cttcctggtgtagacttgtaacttg

SEQ ID NO: 26825 - DNA, 25 bp, Homo sapiens
atgtttctgtaaactctggatttcc

SEQ ID NO: 26826 - DNA, 25 bp, Homo sapiens
gggcctctaacgtatgcttctgata

SEQ ID NO: 26827 - DNA, 25 bp, Homo sapiens
ctacacaatctctctactggggttc

SEQ ID NO: 26828 - DNA, 25 bp, Homo sapiens
aatgccagcctgacctgtgtgatca

SEQ ID NO: 26829 - DNA, 25 bp, Homo sapiens
gttgagctcacctggaaaaagtttc

SEQ ID NO: 26830 - DNA, 25 bp, Homo sapiens
tggatctccaagcagcccactgatg

SEQ ID NO: 26831 - DNA, 25 bp, Homo sapiens
ctgggctgtgttctgaggattatta

SEQ ID NO: 26832 - DNA, 25 bp, Homo sapiens
taatttatccttttaatcacctaaa

SEQ ID NO: 26833 - DNA, 25 bp, Homo sapiens
gtgaaggtggaaaaacggaaatgaa

SEQ ID NO: 26834 - DNA, 25 bp, Homo sapiens
tgatggaaagcaggaacaccgtgtc

SEQ ID NO: 26835 - DNA, 25 bp, Homo sapiens
gtgcctgggacaaaaactggttcaa

SEQ ID NO: 26836 - DNA, 25 bp, Homo sapiens
ccgtacatagtgtccaaggtgttca

SEQ ID NO: 26837 - DNA, 25 bp, Homo sapiens
tggcctggcctggacaatgataatg

SEQ ID NO: 26838 - DNA, 25 bp, Homo sapiens
cgcagctgcaatagtggtttccacc

SEQ ID NO: 26839 - DNA, 25 bp, Homo sapiens
tggaggccagatcacacagaagaca

SEQ ID NO: 26840 - DNA, 25 bp, Homo sapiens
tgcctgagactgcatagcccttgtg

SEQ ID NO: 26841 - DNA, 25 bp, Homo sapiens
ctggggacctcacaagccttatttt

SEQ ID NO: 26842 - DNA, 25 bp, Homo sapiens
ggggctgcctagtacaatggacttg

SEQ ID NO: 26843 - DNA, 25 bp, Homo sapiens
tggggcattcactgcaccatccaga

SEQ ID NO: 26844 - DNA, 25 bp, Homo sapiens
aggccttcaggatccacatcagtga

SEQ ID NO: 26845 - DNA, 25 bp, Homo sapiens
gtgggccagtgccctgtccggttct

SEQ ID NO: 26846 - DNA, 25 bp, Homo sapiens
gtggcctagcccatccaagttaaag

SEQ ID NO: 26847 - DNA, 25 bp, Homo sapiens
tcccttgggtaggaagatgaccatc

SEQ ID NO: 26848 - DNA, 25 bp, Homo sapiens
cccaggatacatggaaggtgatgct

SEQ ID NO: 26849 - DNA, 25 bp, Homo sapiens
tacaggttaactctttcaggggttc

SEQ ID NO: 26850 - DNA, 25 bp, Homo sapiens
gcttccagaggcaggcactattatc

SEQ ID NO: 26851 - DNA, 25 bp, Homo sapiens
tgatgagtattagttgcccaagccc

SEQ ID NO: 26852 - DNA, 25 bp, Homo sapiens
tggccacagggacacccagagtttt

SEQ ID NO: 26853 - DNA, 25 bp, Homo sapiens
taggaccaccctcatgtgtagctta

SEQ ID NO: 26854 - DNA, 25 bp, Homo sapiens
ctagtgcctagtggagaaaactcta

SEQ ID NO: 26855 - DNA, 25 bp, Homo sapiens
ttctctcagtgcagcgaaggtagcc

SEQ ID NO: 26856 - DNA, 25 bp, Homo sapiens
aggggtcatcaactctccatacacg

SEQ ID NO: 26857 - DNA, 25 bp, Homo sapiens
cccagccatcctgtgcaaaggcata

SEQ ID NO: 26858 - DNA, 25 bp, Homo sapiens
cgatccacacatacacacaaaaggt

SEQ ID NO: 26859 - DNA, 25 bp, Homo sapiens
gtactaataccaacttaatataaac

SEQ ID NO: 26860 - DNA, 25 bp, Homo sapiens
ggtctcaccttcttagcaaatcatg

SEQ ID NO: 26861 - DNA, 25 bp, Homo sapiens
aataattaaactttagatgtttcta

SEQ ID NO: 26862 - DNA, 25 bp, Homo sapiens
caggtatttttctttccaggggaca

SEQ ID NO: 26863 - DNA, 25 bp, Homo sapiens
tttttttttttgtggaatgcagctt

SEQ ID NO: 26864 - DNA, 25 bp, Homo sapiens
agtacttatagccctaaagcagagc

SEQ ID NO: 26865 - DNA, 25 bp, Homo sapiens
gacaaggctttgtcccagagctata

SEQ ID NO: 26866 - DNA, 25 bp, Homo sapiens
tgcttccaagtgtcagggcctttcc

SEQ ID NO: 26867 - DNA, 25 bp, Homo sapiens
gacccaggtctctttggcagcgcta

SEQ ID NO: 26868 - DNA, 25 bp, Homo sapiens
atggggtccctagctcctgatagaa

SEQ ID NO: 26869 - DNA, 25 bp, Homo sapiens
ttatgcccacttcctctctgttttg

SEQ ID NO: 26870 - DNA, 25 bp, Homo sapiens
tcaccaaatgtcctcagtgagtatc

SEQ ID NO: 26871 - DNA, 25 bp, Homo sapiens
tgtcacccttcttgcactctgaaag

SEQ ID NO: 26872 - DNA, 25 bp, Homo sapiens
ggtgggccttcttcactacttcaga

SEQ ID NO: 26873 - DNA, 25 bp, Homo sapiens
tccgtgggcctagtcacagtacttg

SEQ ID NO: 26874 - DNA, 25 bp, Homo sapiens
cagagccttcttgttgcacactgaa

SEQ ID NO: 26875 - DNA, 25 bp, Homo sapiens
gtacccaccccaagcatttctgaag

SEQ ID NO: 26876 - DNA, 25 bp, Homo sapiens
ggagttgtggtcagagataactctg

SEQ ID NO: 26877 - DNA, 25 bp, Homo sapiens
cctgctcttgtgtgacctgcctaaa

SEQ ID NO: 26878 - DNA, 25 bp, Homo sapiens
ttggtgcctctatgatgctgcaagc

SEQ ID NO: 26879 - DNA, 25 bp, Homo sapiens
ccagaccttggggagcagaaactac

SEQ ID NO: 26880 - DNA, 25 bp, Homo sapiens
ggtgggccttgcagaaactaaaata

SEQ ID NO: 26881 - DNA, 25 bp, Homo sapiens
atcaaatccttttctggcagcgggg

SEQ ID NO: 26882 - DNA, 25 bp, Homo sapiens
caagctaagttgttttctttttaaa

SEQ ID NO: 26883 - DNA, 25 bp, Homo sapiens
gactgcgaccctaggcacacattta

SEQ ID NO: 26884 - DNA, 25 bp, Homo sapiens
ctcaatacttggaaggcgctggtca

SEQ ID NO: 26885 - DNA, 25 bp, Homo sapiens
tcagccctgtttctctggggaagaa

SEQ ID NO: 26886 - DNA, 25 bp, Homo sapiens
tagaaaaataaatacaattactctt

SEQ ID NO: 26887 - DNA, 25 bp, Homo sapiens
caggctcaggtgtgctcagtaaata

SEQ ID NO: 26888 - DNA, 25 bp, Homo sapiens
agagccctccgttgttggtgtcaga

SEQ ID NO: 26889 - DNA, 25 bp, Homo sapiens
catgctgctcctgtgataacgtcta

SEQ ID NO: 26890 - DNA, 25 bp, Homo sapiens
tagaaagtcttttgccaggtgatgc

SEQ ID NO: 26891 - DNA, 25 bp, Homo sapiens
aggctcacatcaatttgcccaaagg

SEQ ID NO: 26892 - DNA, 25 bp, Homo sapiens
agtccttgctccatagctgtcaggg

SEQ ID NO: 26893 - DNA, 25 bp, Homo sapiens
cacttatgctgtatcaccaagattc

SEQ ID NO: 26894 - DNA, 25 bp, Homo sapiens
tcttgtacagataatgtgcgtcctt

SEQ ID NO: 26895 - DNA, 25 bp, Homo sapiens
acgactggactctgaatgacccttc

SEQ ID NO: 26896 - DNA, 25 bp, Homo sapiens
tagtagctattattctggtacttgc

SEQ ID NO: 26897 - DNA, 25 bp, Homo sapiens
gtacctcatagttatctagaaaaaa

SEQ ID NO: 26898 - DNA, 25 bp, Homo sapiens
agccaagtcttccatgtgcctgtcg

SEQ ID NO: 26899 - DNA, 25 bp, Homo sapiens
gctgagaatcccatcttgcattttc

SEQ ID NO: 26900 - DNA, 25 bp, Homo sapiens
tagtgcttcagctgcccaagagttc

SEQ ID NO: 26901 - DNA, 25 bp, Homo sapiens
tctggacattgtaagtcggcccttc

SEQ ID NO: 26902 - DNA, 25 bp, Homo sapiens
tgggcccagcctctaatccagagtt

SEQ ID NO: 26903 - DNA, 25 bp, Homo sapiens
ggctgcctggctcattacacttatg

SEQ ID NO: 26904 - DNA, 25 bp, Homo sapiens
tctcaggtcacgtggtcgcatttta

SEQ ID NO: 26905 - DNA, 25 bp, Homo sapiens
agcgggatgctattcttcacagtaa

SEQ ID NO: 26906 - DNA, 25 bp, Homo sapiens
gagagtaatcctaggctccactttg

SEQ ID NO: 26907 - DNA, 25 bp, Homo sapiens
ctggccacaagcactgttaggtttc

SEQ ID NO: 26908 - DNA, 25 bp, Homo sapiens
ggagacccgtattaacattttgaga

SEQ ID NO: 26909 - DNA, 25 bp, Homo sapiens
ccctgtggaccagaaaggaaatctc

SEQ ID NO: 26910 - DNA, 25 bp, Homo sapiens
tgtccacacttgcatattgtctctg

SEQ ID NO: 26911 - DNA, 25 bp, Homo sapiens
gaggccatgcttcgctttccagaca

SEQ ID NO: 26912 - DNA, 25 bp, Homo sapiens
acacacacttcatgggagaggcgca

SEQ ID NO: 26913 - DNA, 25 bp, Homo sapiens
gtgcaatgctccgactcactgaatt

SEQ ID NO: 26914 - DNA, 25 bp, Homo sapiens
ggctgggtccatgtctatatattta

SEQ ID NO: 26915 - DNA, 25 bp, Homo sapiens
ccctagatgagtgccgaaagatttt

SEQ ID NO: 26916 - DNA, 25 bp, Homo sapiens
tgggcctactgcactatttggagag

SEQ ID NO: 26917 - DNA, 25 bp, Homo sapiens
ttcctgcgataaatgggcctcctga

SEQ ID NO: 26918 - DNA, 25 bp, Homo sapiens
attggtgaaccatgcccttagaggc

SEQ ID NO: 26919 - DNA, 25 bp, Homo sapiens
ggagcatcttcctggcagtcctttg

SEQ ID NO: 26920 - DNA, 25 bp, Homo sapiens
agcccactgaggatggagattttcc

SEQ ID NO: 26921 - DNA, 25 bp, Homo sapiens
ctgctgggtccacttctacgttaaa

SEQ ID NO: 26922 - DNA, 25 bp, Homo sapiens
ctcacaatggtcctcaatggtttgc

SEQ ID NO: 26923 - DNA, 25 bp, Homo sapiens
tgggcaatccacaaagagctgtctt

SEQ ID NO: 26924 - DNA, 25 bp, Homo sapiens
ttttctatagcaggtccagccaggc

SEQ ID NO: 26925 - DNA, 25 bp, Homo sapiens
gctgcgtcatgaatacaaactgtta

SEQ ID NO: 26926 - DNA, 25 bp, Homo sapiens
caggtgacttgacatgccatgctca

SEQ ID NO: 26927 - DNA, 25 bp, Homo sapiens
aatgatcttccaaacgtttctgaca

SEQ ID NO: 26928 - DNA, 25 bp, Homo sapiens
ccacaaggggtgaaaaaagctgcaa

SEQ ID NO: 26929 - DNA, 25 bp, Homo sapiens
aaatatcacaatgtcagaaaaaatt

SEQ ID NO: 26930 - DNA, 25 bp, Homo sapiens
tgggccttctgacttccagttccaa

SEQ ID NO: 26931 - DNA, 25 bp, Homo sapiens
aatagccttgccttcctcgtaaatg

SEQ ID NO: 26932 - DNA, 25 bp, Homo sapiens
ggggcttgtacgtctctatcttttg

SEQ ID NO: 26933 - DNA, 25 bp, Homo sapiens
cccagaggttagctcagactccata

SEQ ID NO: 26934 - DNA, 25 bp, Homo sapiens
ttggcccttgatactagatatttta

SEQ ID NO: 26935 - DNA, 25 bp, Homo sapiens
attttttaaaaagtggtcttggact

SEQ ID NO: 26936 - DNA, 25 bp, Homo sapiens
acggctctggggacagttttttata

SEQ ID NO: 26937 - DNA, 25 bp, Homo sapiens
acagcttttatgatcgaggtatcca

SEQ ID NO: 26938 - DNA, 25 bp, Homo sapiens
ccggggttgtcacacatgaagcctg

SEQ ID NO: 26939 - DNA, 25 bp, Homo sapiens
ctggcttttcaggtctttcacggtg

SEQ ID NO: 26940 - DNA, 25 bp, Homo sapiens
cacctggacgtatctttctagcaca

SEQ ID NO: 26941 - DNA, 25 bp, Homo sapiens
ttcaggagatatcagagcatgcagc

SEQ ID NO: 26942 - DNA, 25 bp, Homo sapiens
gctctttctgtgtgctctgctatca

SEQ ID NO: 26943 - DNA, 25 bp, Homo sapiens
ctacagggtagatcagagaagattc

SEQ ID NO: 26944 - DNA, 25 bp, Homo sapiens
tgtgcatctcttcccagggcagtta

SEQ ID NO: 26945 - DNA, 25 bp, Homo sapiens
ccacgtgtgtgtacaatgtgtccta

SEQ ID NO: 26946 - DNA, 25 bp, Homo sapiens
gccctttcagaagacagcaaatgta

SEQ ID NO: 26947 - DNA, 25 bp, Homo sapiens
ctcctccagggaagtcagaatctca

SEQ ID NO: 26948 - DNA, 25 bp, Homo sapiens
acttcacttaatgtcggggtggatc

SEQ ID NO: 26949 - DNA, 25 bp, Homo sapiens
ctagagtgtatttggaactttcaca

SEQ ID NO: 26950 - DNA, 25 bp, Homo sapiens
tttctcagatgctcctgagggcaga

SEQ ID NO: 26951 - DNA, 25 bp, Homo sapiens
gaccagtttaatagcgtcctctttg

SEQ ID NO: 26952 - DNA, 25 bp, Homo sapiens
caaactttgtgctgatgggacctgc

SEQ ID NO: 26953 - DNA, 25 bp, Homo sapiens
aattacagaagatatatgtgagaga

SEQ ID NO: 26954 - DNA, 25 bp, Homo sapiens
gtagtaatcttctttggcagttact

SEQ ID NO: 26955 - DNA, 25 bp, Homo sapiens
gggaactctctttttagccttacaa

SEQ ID NO: 26956 - DNA, 25 bp, Homo sapiens
tcagcattggcctggaaattccatc

SEQ ID NO: 26957 - DNA, 25 bp, Homo sapiens
atcatttgactggatttagggaacc

SEQ ID NO: 26958 - DNA, 25 bp, Homo sapiens
tggctggagtcatagctaataagtg

SEQ ID NO: 26959 - DNA, 25 bp, Homo sapiens
gtcactgttcccttggtccattgca

SEQ ID NO: 26960 - DNA, 25 bp, Homo sapiens
aacccattgcattgtgtctcagatc

SEQ ID NO: 26961 - DNA, 25 bp, Homo sapiens
ggtagatgcctaagatccttcattg

SEQ ID NO: 26962 - DNA, 25 bp, Homo sapiens
gcctatacctctgtggcgcttagta

SEQ ID NO: 26963 - DNA, 25 bp, Homo sapiens
ggtatctgtaagaaacccatgtaga

SEQ ID NO: 26964 - DNA, 25 bp, Homo sapiens
ttccagatggaagccacagcatttc

SEQ ID NO: 26965 - DNA, 25 bp, Homo sapiens
ttagctgcaggaggccacaacattg

SEQ ID NO: 26966 - DNA, 25 bp, Homo sapiens
tgagcctcaccacaagcctatagtt

SEQ ID NO: 26967 - DNA, 25 bp, Homo sapiens
gcttgcttccatatatcgcattttg

SEQ ID NO: 26968 - DNA, 25 bp, Homo sapiens
tgtttgttttccctgtgaaattagg

SEQ ID NO: 26969 - DNA, 25 bp, Homo sapiens
agcacgtctaatcctgcataagtag

SEQ ID NO: 26970 - DNA, 25 bp, Homo sapiens
cttaccaggggctgtcttgataatc

SEQ ID NO: 26971 - DNA, 25 bp, Homo sapiens
cacaagagtgggtggtcataaatcc

SEQ ID NO: 26972 - DNA, 25 bp, Homo sapiens
cagtggcacctgactatttagcttc

SEQ ID NO: 26973 - DNA, 25 bp, Homo sapiens
ccctgccttggcagcagcaatgatg

SEQ ID NO: 26974 - DNA, 25 bp, Homo sapiens
ttttggtacatgatagggaagtttc

SEQ ID NO: 26975 - DNA, 25 bp, Homo sapiens
aggggtaaatacatgtttcttatgt

SEQ ID NO: 26976 - DNA, 25 bp, Homo sapiens
cactgagaatagtgtctgagatata

SEQ ID NO: 26977 - DNA, 25 bp, Homo sapiens
aggtaaagatctctatgatcattaa

SEQ ID NO: 26978 - DNA, 25 bp, Homo sapiens
aaaaacatgttaaaaatgttaaggg

SEQ ID NO: 26979 - DNA, 25 bp, Homo sapiens
tttttttaaaaagaacatttggact

SEQ ID NO: 26980 - DNA, 25 bp, Homo sapiens
ccttgtacctgtctagaggatctga

SEQ ID NO: 26981 - DNA, 25 bp, Homo sapiens
attgccctgcctccttgatgaagta

SEQ ID NO: 26982 - DNA, 25 bp, Homo sapiens
ccctacagtgtttggccagtaaata

SEQ ID NO: 26983 - DNA, 25 bp, Homo sapiens
tcaatgtctatgtgagtggtcctca

SEQ ID NO: 26984 - DNA, 25 bp, Homo sapiens
aaaggtcttctctccctgggcagtg

SEQ ID NO: 26985 - DNA, 25 bp, Homo sapiens
ctgacttttctgtgacctagctgga

SEQ ID NO: 26986 - DNA, 25 bp, Homo sapiens
gcaagttgtgactttccaggtccca

SEQ ID NO: 26987 - DNA, 25 bp, Homo sapiens
gccacatttttggagcagggtgtta

SEQ ID NO: 26988 - DNA, 25 bp, Homo sapiens
tctctctctaaaggggctgctattc

SEQ ID NO: 26989 - DNA, 25 bp, Homo sapiens
accctaccgaggagcttgtcatatg

SEQ ID NO: 26990 - DNA, 25 bp, Homo sapiens
cagccgtcgtgcaaatggaagaatt

SEQ ID NO: 26991 - DNA, 25 bp, Homo sapiens
caggggttttcagtcataccagtca

SEQ ID NO: 26992 - DNA, 25 bp, Homo sapiens
atccctttaggctgtggctggcaag

SEQ ID NO: 26993 - DNA, 25 bp, Homo sapiens
aaaaaattgtttagcatcttactgg

SEQ ID NO: 26994 - DNA, 25 bp, Homo sapiens
tatagaaaacagaaacagccaacta

SEQ ID NO: 26995 - DNA, 25 bp, Homo sapiens
gagttctttgctccagataagagtg

SEQ ID NO: 26996 - DNA, 25 bp, Homo sapiens
tcaggctattcactcagcataggta

SEQ ID NO: 26997 - DNA, 25 bp, Homo sapiens
ctacttaggtctgttggcaagcatc

SEQ ID NO: 26998 - DNA, 25 bp, Homo sapiens
agaactgccattggtcctcaggaca

SEQ ID NO: 26999 - DNA, 25 bp, Homo sapiens
gggaccctccaagcctttcaaatga

SEQ ID NO: 27000 - DNA, 25 bp, Homo sapiens
ctgcttctgctccttccctagggtg

SEQ ID NO: 27001 - DNA, 25 bp, Homo sapiens
actaggcacttgtctgttctggtaa

SEQ ID NO: 27002 - DNA, 25 bp, Homo sapiens
ggaaactcgttactcctgccaatga

SEQ ID NO: 27003 - DNA, 25 bp, Homo sapiens
tcagtgaaccgaatgaagagatccc

SEQ ID NO: 27004 - DNA, 25 bp, Homo sapiens
tccaaattcccagtgcctagtagtg

SEQ ID NO: 27005 - DNA, 25 bp, Homo sapiens
agggtttctttttctctgcacagta

SEQ ID NO: 27006 - DNA, 25 bp, Homo sapiens
agcctgcgcctgtacattgtttcta

SEQ ID NO: 27007 - DNA, 25 bp, Homo sapiens
cctttaaaggggactgactcagctg

SEQ ID NO: 27008 - DNA, 25 bp, Homo sapiens
ctggggtgtgactgatactctttta

SEQ ID NO: 27009 - DNA, 25 bp, Homo sapiens
tggggcccagcaaacagagtcaatt

SEQ ID NO: 27010 - DNA, 25 bp, Homo sapiens
aggggtccagcactctgatgttttg

SEQ ID NO: 27011 - DNA, 25 bp, Homo sapiens
gagttcccagcacacctattgtttg

SEQ ID NO: 27012 - DNA, 25 bp, Homo sapiens
agccttgccttgcttctgaaagatt

SEQ ID NO: 27013 - DNA, 25 bp, Homo sapiens
cagcccttcactggaatcttggaga

SEQ ID NO: 27014 - DNA, 25 bp, Homo sapiens
caatagcagtgtggtggctaacaca

SEQ ID NO: 27015 - DNA, 25 bp, Homo sapiens
gcatcttgcttaccatccggaaagg

SEQ ID NO: 27016 - DNA, 25 bp, Homo sapiens
atggtgcctggagactgatgttatc

SEQ ID NO: 27017 - DNA, 25 bp, Homo sapiens
gccctctgcctgtgagtcaagtcta

SEQ ID NO: 27018 - DNA, 25 bp, Homo sapiens
ggggacttttctggctgcaagcact

SEQ ID NO: 27019 - DNA, 25 bp, Homo sapiens
tgtgctcctctagtttccgttgata

SEQ ID NO: 27020 - DNA, 25 bp, Homo sapiens
tgtggttacctatcagaactcagta

SEQ ID NO: 27021 - DNA, 25 bp, Homo sapiens
tgtagctatatattttgcccctctc

SEQ ID NO: 27022 - DNA, 25 bp, Homo sapiens
ggtgttttaaggcaacataagactc

SEQ ID NO: 27023 - DNA, 25 bp, Homo sapiens
ggtaaagcagttccacaattcaagg

SEQ ID NO: 27024 - DNA, 25 bp, Homo sapiens
ccctcttgaagtcctgctgctgttg

SEQ ID NO: 27025 - DNA, 25 bp, Homo sapiens
ctgggtcctggttgaagttatcgca

SEQ ID NO: 27026 - DNA, 25 bp, Homo sapiens
gcagttcctcatggctacagattta

SEQ ID NO: 27027 - DNA, 25 bp, Homo sapiens
atctgctcgggtcaatcatatagtg

SEQ ID NO: 27028 - DNA, 25 bp, Homo sapiens
gtagtctgaaagtcctccctggtga

SEQ ID NO: 27029 - DNA, 25 bp, Homo sapiens
agcagctggctattcacttaatata

SEQ ID NO: 27030 - DNA, 25 bp, Homo sapiens
gttgacccattagatttgcctccta

SEQ ID NO: 27031 - DNA, 25 bp, Homo sapiens
gggtcctcaaagtacctagtgtcta

SEQ ID NO: 27032 - DNA, 25 bp, Homo sapiens
ggcatcatctcagttgaaggctttc

SEQ ID NO: 27033 - DNA, 25 bp, Homo sapiens
ggagccactaccctttgatgatttg

SEQ ID NO: 27034 - DNA, 25 bp, Homo sapiens
ggtcctcctagaccactgcagcttg

SEQ ID NO: 27035 - DNA, 25 bp, Homo sapiens
agtgctctctgatcctaatcctgta

SEQ ID NO: 27036 - DNA, 25 bp, Homo sapiens
ggggctctgattctggcacaaatta

SEQ ID NO: 27037 - DNA, 25 bp, Homo sapiens
gaaggccctgtaagaccacgatgga

SEQ ID NO: 27038 - DNA, 25 bp, Homo sapiens
gtttgcccaactaggttccaagatg

SEQ ID NO: 27039 - DNA, 25 bp, Homo sapiens
ttggatcagctgcagccactctttg

SEQ ID NO: 27040 - DNA, 25 bp, Homo sapiens
ctcaggccttttagtgccggttata

SEQ ID NO: 27041 - DNA, 25 bp, Homo sapiens
tccctggttctctgtgttgatgtca

SEQ ID NO: 27042 - DNA, 25 bp, Homo sapiens
actccaggatggatggctcagcaca

SEQ ID NO: 27043 - DNA, 25 bp, Homo sapiens
ccagatccttcagcggtttcagaca

SEQ ID NO: 27044 - DNA, 25 bp, Homo sapiens
gctacttctctcaggggcaattgca

SEQ ID NO: 27045 - DNA, 25 bp, Homo sapiens
ttaccaagtgatctgccgctgtcca

SEQ ID NO: 27046 - DNA, 25 bp, Homo sapiens
ctgcaggccctaatgatcatgcttc

SEQ ID NO: 27047 - DNA, 25 bp, Homo sapiens
ggagacctcgcattactgggcacta

SEQ ID NO: 27048 - DNA, 25 bp, Homo sapiens
cccattgcaaaagctgtggccagca

SEQ ID NO: 27049 - DNA, 25 bp, Homo sapiens
ccatattgaagccagggataccctt

SEQ ID NO: 27050 - DNA, 25 bp, Homo sapiens
actgccttgggacctgctttactca

SEQ ID NO: 27051 - DNA, 25 bp, Homo sapiens
gggttttacagggacacacatagca

SEQ ID NO: 27052 - DNA, 25 bp, Homo sapiens
tcacaaagtgaccatcccagtgttc

SEQ ID NO: 27053 - DNA, 25 bp, Homo sapiens
atcaggagtccaagagcaaagttta

SEQ ID NO: 27054 - DNA, 25 bp, Homo sapiens
gtgctccttcagcacagaattttta

SEQ ID NO: 27055 - DNA, 25 bp, Homo sapiens
cctccatttttctaccctcttttct

SEQ ID NO: 27056 - DNA, 25 bp, Homo sapiens
gaaggcacctgcttcactgcacaga

SEQ ID NO: 27057 - DNA, 25 bp, Homo sapiens
acaaacgtgtttttctctccagcta

SEQ ID NO: 27058 - DNA, 25 bp, Homo sapiens
ccctactcgctgctttgctgaaaca

SEQ ID NO: 27059 - DNA, 25 bp, Homo sapiens
cccagatgcacagatgagatgttcc

SEQ ID NO: 27060 - DNA, 25 bp, Homo sapiens
tcccaccagagaagagtcattgttg

SEQ ID NO: 27061 - DNA, 25 bp, Homo sapiens
tgcctgcctggaacctgaatacatg

SEQ ID NO: 27062 - DNA, 25 bp, Homo sapiens
tcagaaatctttgccctgggaaaga

SEQ ID NO: 27063 - DNA, 25 bp, Homo sapiens
agccaggttctcacttgattatctc

SEQ ID NO: 27064 - DNA, 25 bp, Homo sapiens
caccaacgggagagtagacacaatc

SEQ ID NO: 27065 - DNA, 25 bp, Homo sapiens
ctagcacttttcagagggagccagc

SEQ ID NO: 27066 - DNA, 25 bp, Homo sapiens
gcaatgtctgcatccatggctcaca

SEQ ID NO: 27067 - DNA, 25 bp, Homo sapiens
aggcaccctctctgtttcattggca

SEQ ID NO: 27068 - DNA, 25 bp, Homo sapiens
ggcctgctagtttcaagtatggtaa

SEQ ID NO: 27069 - DNA, 25 bp, Homo sapiens
tttatacataaggagtatactacca

SEQ ID NO: 27070 - DNA, 25 bp, Homo sapiens
gggcgcccttcctagactccaagga

SEQ ID NO: 27071 - DNA, 25 bp, Homo sapiens
tggcagttcctttgctccagtcata

SEQ ID NO: 27072 - DNA, 25 bp, Homo sapiens
gccagccttgggtttagagcccttt

SEQ ID NO: 27073 - DNA, 25 bp, Homo sapiens
ctcgagacaggtggccatacacatc

SEQ ID NO: 27074 - DNA, 25 bp, Homo sapiens
gaccgcctcggtaattgccatttgc

SEQ ID NO: 27075 - DNA, 25 bp, Homo sapiens
caggcatcccttgaagtctatgttc

SEQ ID NO: 27076 - DNA, 25 bp, Homo sapiens
ttctacctactgaggacaggagttc

SEQ ID NO: 27077 - DNA, 25 bp, Homo sapiens
ggggtccctcctattcttggtcatc

SEQ ID NO: 27078 - DNA, 25 bp, Homo sapiens
ctctgtggggaaacaaacgtgtatc

SEQ ID NO: 27079 - DNA, 25 bp, Homo sapiens
gagggcgcatctgaaccaagcttta

SEQ ID NO: 27080 - DNA, 25 bp, Homo sapiens
aattggacgtctttgcctatcaggc

SEQ ID NO: 27081 - DNA, 25 bp, Homo sapiens
catgcaagtgttccctaggcctgta

SEQ ID NO: 27082 - DNA, 25 bp, Homo sapiens
aacctgctgtgtagacccgtgccaa

SEQ ID NO: 27083 - DNA, 25 bp, Homo sapiens
tggcccatattttaaggagacctgc

SEQ ID NO: 27084 - DNA, 25 bp, Homo sapiens
atggggcatctataaacatactgtg

SEQ ID NO: 27085 - DNA, 25 bp, Homo sapiens
ctgccctgacgatagatagaacttg

SEQ ID NO: 27086 - DNA, 25 bp, Homo sapiens
gcaccaggtttccagatcatattta

SEQ ID NO: 27087 - DNA, 25 bp, Homo sapiens
ggtgtacactttctttctgcaaagc

SEQ ID NO: 27088 - DNA, 25 bp, Homo sapiens
ctgggcctgctatgagatgtttctt

SEQ ID NO: 27089 - DNA, 25 bp, Homo sapiens
ttcctaggtttcagcagagttcaga

SEQ ID NO: 27090 - DNA, 25 bp, Homo sapiens
tttgcctaggagaaagtcaggagcc

SEQ ID NO: 27091 - DNA, 25 bp, Homo sapiens
tcacactgtatctgtcccttgcatg

SEQ ID NO: 27092 - DNA, 25 bp, Homo sapiens
ggttcagtgttcaagtatcccatga

SEQ ID NO: 27093 - DNA, 25 bp, Homo sapiens
cagtcctctgacactagcaatgtta

SEQ ID NO: 27094 - DNA, 25 bp, Homo sapiens
ggccctggttctcccaattctcatt

SEQ ID NO: 27095 - DNA, 25 bp, Homo sapiens
acaaggtgtgtgctctaatgctcta

SEQ ID NO: 27096 - DNA, 25 bp, Homo sapiens
ccgattctctgacataagggtttta

SEQ ID NO: 27097 - DNA, 25 bp, Homo sapiens
gacatggcagcctcagttgggatta

SEQ ID NO: 27098 - DNA, 25 bp, Homo sapiens
ccctgtgaaagtgtgaaaaaccgtt

SEQ ID NO: 27099 - DNA, 25 bp, Homo sapiens
agatgtatgtggtatcctatattcc

SEQ ID NO: 27100 - DNA, 25 bp, Homo sapiens
cccagtggtgatgaagtttctattt

SEQ ID NO: 27101 - DNA, 25 bp, Homo sapiens
ttctctaaggtcaaagggcaaactg

SEQ ID NO: 27102 - DNA, 25 bp, Homo sapiens
agacccagctttcctctcgtggaga

SEQ ID NO: 27103 - DNA, 25 bp, Homo sapiens
gttcccttacctctgcgaaggctta

SEQ ID NO: 27104 - DNA, 25 bp, Homo sapiens
tccgctttctgcttggggacctaaa

SEQ ID NO: 27105 - DNA, 25 bp, Homo sapiens
cgtctctgctagctgtgacataata

SEQ ID NO: 27106 - DNA, 25 bp, Homo sapiens
catgatctgaatgctgtgttgggac

SEQ ID NO: 27107 - DNA, 25 bp, Homo sapiens
ctgcccatcatagtaggctgtccta

SEQ ID NO: 27108 - DNA, 25 bp, Homo sapiens
ccagccgctgtgtctcctaatatca

SEQ ID NO: 27109 - DNA, 25 bp, Homo sapiens
cactctctggatgttggcttacttg

SEQ ID NO: 27110 - DNA, 25 bp, Homo sapiens
catctggatgggtgggaaatttcta

SEQ ID NO: 27111 - DNA, 25 bp, Homo sapiens
gcacagcatttaccttttctgcata

SEQ ID NO: 27112 - DNA, 25 bp, Homo sapiens
tttatataatcaagaccaacagaac

SEQ ID NO: 27113 - DNA, 25 bp, Homo sapiens
actccttgtcggtgctatgtctaga

SEQ ID NO: 27114 - DNA, 25 bp, Homo sapiens
agacctgcagagagataaccatata

SEQ ID NO: 27115 - DNA, 25 bp, Homo sapiens
tgtattcaacagaccacccagggta

SEQ ID NO: 27116 - DNA, 25 bp, Homo sapiens
tggcagcaccaatccctaggggaga

SEQ ID NO: 27117 - DNA, 25 bp, Homo sapiens
ccaggcaccagtctccaggaattta

SEQ ID NO: 27118 - DNA, 25 bp, Homo sapiens
tgtttacatctctagtgcagcactc

SEQ ID NO: 27119 - DNA, 25 bp, Homo sapiens
taattatgaatagactttgagtagt

SEQ ID NO: 27120 - DNA, 25 bp, Homo sapiens
agcaatagcattttgatctaacttt

SEQ ID NO: 27121 - DNA, 25 bp, Homo sapiens
ggacctctgtagtagcactttcata

SEQ ID NO: 27122 - DNA, 25 bp, Homo sapiens
ttgggtcttcactggacaagcttca

SEQ ID NO: 27123 - DNA, 25 bp, Homo sapiens
ctagaggtgggagccatcaactttc

SEQ ID NO: 27124 - DNA, 25 bp, Homo sapiens
agtgcgctccgccttcttttgaaac

SEQ ID NO: 27125 - DNA, 25 bp, Homo sapiens
ctgccatgttgtgtggaggacttcc

SEQ ID NO: 27126 - DNA, 25 bp, Homo sapiens
aggcctgtgcctcgatgattttcaa

SEQ ID NO: 27127 - DNA, 25 bp, Homo sapiens
ggactttttccatgagaccggcatt

SEQ ID NO: 27128 - DNA, 25 bp, Homo sapiens
ggggacctttagcacatcttcggca

SEQ ID NO: 27129 - DNA, 25 bp, Homo sapiens
ctgatcggctcctgctagttatgta

SEQ ID NO: 27130 - DNA, 25 bp, Homo sapiens
tccaggccaggatgcttgaaacata

SEQ ID NO: 27131 - DNA, 25 bp, Homo sapiens
cgctgggcaattatggctcttttta

SEQ ID NO: 27132 - DNA, 25 bp, Homo sapiens
ccctggtcctaaaactgaatgtata

SEQ ID NO: 27133 - DNA, 25 bp, Homo sapiens
agcctacgtcacactgggtacaaga

SEQ ID NO: 27134 - DNA, 25 bp, Homo sapiens
gctgctctaacagggatattggtta

SEQ ID NO: 27135 - DNA, 25 bp, Homo sapiens
ttcaagaccgaactcctaggggttg

SEQ ID NO: 27136 - DNA, 25 bp, Homo sapiens
agaagcctccatgtcttgaacagcc

SEQ ID NO: 27137 - DNA, 25 bp, Homo sapiens
ggagccactcgcatttttctctgtg

SEQ ID NO: 27138 - DNA, 25 bp, Homo sapiens
ccctggattgtacttgattgtatac

SEQ ID NO: 27139 - DNA, 25 bp, Homo sapiens
ttgccatttgggacgaccttagatg

SEQ ID NO: 27140 - DNA, 25 bp, Homo sapiens
gggttcctgctctatcctctaagtg

SEQ ID NO: 27141 - DNA, 25 bp, Homo sapiens
tgataaagagggggctgcatttaaa

SEQ ID NO: 27142 - DNA, 25 bp, Homo sapiens
tccttggaaacagaggcatgtcctc

SEQ ID NO: 27143 - DNA, 25 bp, Homo sapiens
aggctgctaccattatactgttgtc

SEQ ID NO: 27144 - DNA, 25 bp, Homo sapiens
ctcagtagcaaaggacagggtctca

SEQ ID NO: 27145 - DNA, 25 bp, Homo sapiens
tggatcctttgtcccagaactagcg

SEQ ID NO: 27146 - DNA, 25 bp, Homo sapiens
caaccttatgttatggcagagcaga

SEQ ID NO: 27147 - DNA, 25 bp, Homo sapiens
agtggcttttcccagttgtctcaca

SEQ ID NO: 27148 - DNA, 25 bp, Homo sapiens
agcccttggctctgtttttctttgg

SEQ ID NO: 27149 - DNA, 25 bp, Homo sapiens
gttggcccaagagttcattataatg

SEQ ID NO: 27150 - DNA, 25 bp, Homo sapiens
cctctggctatgtgtgttgacttca

SEQ ID NO: 27151 - DNA, 25 bp, Homo sapiens
ctttgccaagcatgtaagacttttc

SEQ ID NO: 27152 - DNA, 25 bp, Homo sapiens
gctcatcttttgaagacgatccata

SEQ ID NO: 27153 - DNA, 25 bp, Homo sapiens
accaatgtaccacccccacaccacc

SEQ ID NO: 27154 - DNA, 25 bp, Homo sapiens
actggaacagagactagaagtctag

SEQ ID NO: 27155 - DNA, 25 bp, Homo sapiens
ggctaactctggtggtctcccttta

SEQ ID NO: 27156 - DNA, 25 bp, Homo sapiens
ccgcagctctcctcttgttcaaatg

SEQ ID NO: 27157 - DNA, 25 bp, Homo sapiens
cccgtgggcttcagaaatatttttg

SEQ ID NO: 27158 - DNA, 25 bp, Homo sapiens
ggcccttttgactccttggaattta

SEQ ID NO: 27159 - DNA, 25 bp, Homo sapiens
gtctcactggaataagccagtttcc

SEQ ID NO: 27160 - DNA, 25 bp, Homo sapiens
ttctttcaaaggtccaggcagctgc

SEQ ID NO: 27161 - DNA, 25 bp, Homo sapiens
tcaatgtaaggaagtgcatgccatc

SEQ ID NO: 27162 - DNA, 25 bp, Homo sapiens
acacgtgcactttcttccagtctca

SEQ ID NO: 27163 - DNA, 25 bp, Homo sapiens
acaatgataaaactgtcttatggta

SEQ ID NO: 27164 - DNA, 25 bp, Homo sapiens
gttgagtatggactatatcttccac

SEQ ID NO: 27165 - DNA, 25 bp, Homo sapiens
ctcctaaagtttgtgttaccctata

SEQ ID NO: 27166 - DNA, 25 bp, Homo sapiens
ccagttggtgcttcgtgttcagtaa

SEQ ID NO: 27167 - DNA, 25 bp, Homo sapiens
ctcgctctatgttgctctaccttga

SEQ ID NO: 27168 - DNA, 25 bp, Homo sapiens
gggccaaacgtggatcaagaaaaca

SEQ ID NO: 27169 - DNA, 25 bp, Homo sapiens
cccttgtggcacctgggagatgacg

SEQ ID NO: 27170 - DNA, 25 bp, Homo sapiens
ggagaagccttacccgtagatcata

SEQ ID NO: 27171 - DNA, 25 bp, Homo sapiens
ggacctccttctagtagcattcatc

SEQ ID NO: 27172 - DNA, 25 bp, Homo sapiens
ctgaatgctgtgtttgtgtcgctaa

SEQ ID NO: 27173 - DNA, 25 bp, Homo sapiens
atgtgttgaaacctgtgaaggcatc

SEQ ID NO: 27174 - DNA, 25 bp, Homo sapiens
agcaggcaatcctttagtctctata

SEQ ID NO: 27175 - DNA, 25 bp, Homo sapiens
tctagtttctgtaaaatctctgtaa

SEQ ID NO: 27176 - DNA, 25 bp, Homo sapiens
ccttgtctgattgctgctgtgttga

SEQ ID NO: 27177 - DNA, 25 bp, Homo sapiens
ctgggaccgggactaataagtcttc

SEQ ID NO: 27178 - DNA, 25 bp, Homo sapiens
catacatgtttgtgctagtggtggc

SEQ ID NO: 27179 - DNA, 25 bp, Homo sapiens
cctgaacctttctcatctctttttg

SEQ ID NO: 27180 - DNA, 25 bp, Homo sapiens
ctcagagctctatgggtcccactca

SEQ ID NO: 27181 - DNA, 25 bp, Homo sapiens
gcagcctcttcaccctttcagtgga

SEQ ID NO: 27182 - DNA, 25 bp, Homo sapiens
tggggagtccaaatgtcagcaaaga

SEQ ID NO: 27183 - DNA, 25 bp, Homo sapiens
ttgcctactctgtactgccactaga

SEQ ID NO: 27184 - DNA, 25 bp, Homo sapiens
agtcacattcctccctttgtgtaaa

SEQ ID NO: 27185 - DNA, 25 bp, Homo sapiens
ggctctgatttccaggaccgaagta

SEQ ID NO: 27186 - DNA, 25 bp, Homo sapiens
aggcccactgtgatttgacccagta

SEQ ID NO: 27187 - DNA, 25 bp, Homo sapiens
gttattgcattcaaagcagttgttg

SEQ ID NO: 27188 - DNA, 25 bp, Homo sapiens
tgggcttctatatgaactgtcaatc

SEQ ID NO: 27189 - DNA, 25 bp, Homo sapiens
aggcctgctctttctcaaggaagta

SEQ ID NO: 27190 - DNA, 25 bp, Homo sapiens
gacccgattgtgtcagcgtcacttg

SEQ ID NO: 27191 - DNA, 25 bp, Homo sapiens
tggccatgcatatgtcaccgtgaac

SEQ ID NO: 27192 - DNA, 25 bp, Homo sapiens
ccctggtttgcttaggactggtcaa

SEQ ID NO: 27193 - DNA, 25 bp, Homo sapiens
cgagcaggtgttttgcctcagtctc

SEQ ID NO: 27194 - DNA, 25 bp, Homo sapiens
tgcccggtggtactcaacatctagg

SEQ ID NO: 27195 - DNA, 25 bp, Homo sapiens
ataaataaaataaactggttattgg

SEQ ID NO: 27196 - DNA, 25 bp, Homo sapiens
gggctcaccgtaatgtctgatgaca

SEQ ID NO: 27197 - DNA, 25 bp, Homo sapiens
cccagcccagcaagttggtaactga

SEQ ID NO: 27198 - DNA, 25 bp, Homo sapiens
gtgtcgcttctcttttcttacctga

SEQ ID NO: 27199 - DNA, 25 bp, Homo sapiens
ggcctttctttggtgcctagtaaaa

SEQ ID NO: 27200 - DNA, 25 bp, Homo sapiens
ctccttgtacaggtggggaaaattc

SEQ ID NO: 27201 - DNA, 25 bp, Homo sapiens
gggccattttgattttccagactta

SEQ ID NO: 27202 - DNA, 25 bp, Homo sapiens
tctctcgtctggaagtaaattaaac

SEQ ID NO: 27203 - DNA, 25 bp, Homo sapiens
cagcgctgaacccagaggactgtta

SEQ ID NO: 27204 - DNA, 25 bp, Homo sapiens
aggcctaatgtgtggttcttgtaca

SEQ ID NO: 27205 - DNA, 25 bp, Homo sapiens
ggcaaaagcaactgagactaccctg

SEQ ID NO: 27206 - DNA, 25 bp, Homo sapiens
cctcagttgttcgtaggagcagttc

SEQ ID NO: 27207 - DNA, 25 bp, Homo sapiens
gagggcctacggactaaaataaatt

SEQ ID NO: 27208 - DNA, 25 bp, Homo sapiens
gctgctgcctgacataccaatgtga

SEQ ID NO: 27209 - DNA, 25 bp, Homo sapiens
cctgtgtggctttccgtttattagc

SEQ ID NO: 27210 - DNA, 25 bp, Homo sapiens
ctgaaggtctttcctctgtgcttta

SEQ ID NO: 27211 - DNA, 25 bp, Homo sapiens
tctctctaagggatacaggtaaata

SEQ ID NO: 27212 - DNA, 25 bp, Homo sapiens
aaggctttcccttatggccctagga

SEQ ID NO: 27213 - DNA, 25 bp, Homo sapiens
cctgtctgttaaagagggccctggc

SEQ ID NO: 27214 - DNA, 25 bp, Homo sapiens
caccatggttctaggattgctcaga

SEQ ID NO: 27215 - DNA, 25 bp, Homo sapiens
ggcctccttggctgatctggaatca

SEQ ID NO: 27216 - DNA, 25 bp, Homo sapiens
gtggtagaaaaaataatcccgctcc

SEQ ID NO: 27217 - DNA, 25 bp, Homo sapiens
cagggtgagcacacaggccttccaa

SEQ ID NO: 27218 - DNA, 25 bp, Homo sapiens
gtcagggccagggtcttaaactatg

SEQ ID NO: 27219 - DNA, 25 bp, Homo sapiens
tcattccttaaaggtacatatgaat

SEQ ID NO: 27220 - DNA, 25 bp, Homo sapiens
gggaaatcactccttgcaggcctta

SEQ ID NO: 27221 - DNA, 25 bp, Homo sapiens
ttcaggctatgggagacttcaaatc

SEQ ID NO: 27222 - DNA, 25 bp, Homo sapiens
ttgcctcgggacttaactaccgtta

SEQ ID NO: 27223 - DNA, 25 bp, Homo sapiens
gtggccactgcctccctgtataaaa

SEQ ID NO: 27224 - DNA, 25 bp, Homo sapiens
tgccctttccttcctgtccagtttg

SEQ ID NO: 27225 - DNA, 25 bp, Homo sapiens
gcctccctcggcgtaatgctaatta

SEQ ID NO: 27226 - DNA, 25 bp, Homo sapiens
aaatgctttctatagcctctgaggc

SEQ ID NO: 27227 - DNA, 25 bp, Homo sapiens
tgcgcgacaatgtgtttcagcaaca

SEQ ID NO: 27228 - DNA, 25 bp, Homo sapiens
attgagcatccactccatgttaggc

SEQ ID NO: 27229 - DNA, 25 bp, Homo sapiens
cagcccattgttccagtactttcta

SEQ ID NO: 27230 - DNA, 25 bp, Homo sapiens
atgctccatgagtgccctttgccta

SEQ ID NO: 27231 - DNA, 25 bp, Homo sapiens
ccaggtacagtcttaaggtcccaga

SEQ ID NO: 27232 - DNA, 25 bp, Homo sapiens
gcccgtggaatcttttggtctactc

SEQ ID NO: 27233 - DNA, 25 bp, Homo sapiens
agtctccttgcactgacagctcatg

SEQ ID NO: 27234 - DNA, 25 bp, Homo sapiens
tgacctagttccatagcacctaaga

SEQ ID NO: 27235 - DNA, 25 bp, Homo sapiens
agcctctatgatgctcctgctgcaa

SEQ ID NO: 27236 - DNA, 25 bp, Homo sapiens
agaggtctttttaatcacagtcaca

SEQ ID NO: 27237 - DNA, 25 bp, Homo sapiens
gctaccctgaggcaacacatacaca

SEQ ID NO: 27238 - DNA, 25 bp, Homo sapiens
tggaggctaggcatagacattcata

SEQ ID NO: 27239 - DNA, 25 bp, Homo sapiens
gttctgaaatacaaggcaataacta

SEQ ID NO: 27240 - DNA, 25 bp, Homo sapiens
gatccctgatgtccaactgaccctg

SEQ ID NO: 27241 - DNA, 25 bp, Homo sapiens
gccatatataaaagaatttctcttc

SEQ ID NO: 27242 - DNA, 25 bp, Homo sapiens
ggccagtaagtcatgttcacacaag

SEQ ID NO: 27243 - DNA, 25 bp, Homo sapiens
ggagagtcttcagcctcaaatcaga

SEQ ID NO: 27244 - DNA, 25 bp, Homo sapiens
tcgaatggggtcaactcagcaagct

SEQ ID NO: 27245 - DNA, 25 bp, Homo sapiens
cccatgcccaatccagggtgttcta

SEQ ID NO: 27246 - DNA, 25 bp, Homo sapiens
ggtggcacctgtgaactcttctgta

SEQ ID NO: 27247 - DNA, 25 bp, Homo sapiens
atcaggggtcatgtcttctagtgta

SEQ ID NO: 27248 - DNA, 25 bp, Homo sapiens
ggagcctgctttcctgcacaaaatg

SEQ ID NO: 27249 - DNA, 25 bp, Homo sapiens
atgtgagtccctgtccaagcctttg

SEQ ID NO: 27250 - DNA, 25 bp, Homo sapiens
taggtcctcttggtggcattttgcc

SEQ ID NO: 27251 - DNA, 25 bp, Homo sapiens
ggcactggcccattgaagatactca

SEQ ID NO: 27252 - DNA, 25 bp, Homo sapiens
tcctctataaggctcagggctcctg

SEQ ID NO: 27253 - DNA, 25 bp, Homo sapiens
gggtgacctcctgcaaaaaagtctt

SEQ ID NO: 27254 - DNA, 25 bp, Homo sapiens
ctccaggtataggttccagcatctc

SEQ ID NO: 27255 - DNA, 25 bp, Homo sapiens
tgccactttgagcttaggggagacc

SEQ ID NO: 27256 - DNA, 25 bp, Homo sapiens
cgtttccttcagcacctgggtggta

SEQ ID NO: 27257 - DNA, 25 bp, Homo sapiens
ggcaacgatgctcaagttctgactg

SEQ ID NO: 27258 - DNA, 25 bp, Homo sapiens
gtgccctgggaaaagcttaactgtg

SEQ ID NO: 27259 - DNA, 25 bp, Homo sapiens
ttcggtcaaatctagccctggcgta

SEQ ID NO: 27260 - DNA, 25 bp, Homo sapiens
ggcctctgccagatgctttttagga

SEQ ID NO: 27261 - DNA, 25 bp, Homo sapiens
tctccactgggatatatgcatgttc

SEQ ID NO: 27262 - DNA, 25 bp, Homo sapiens
tgcagtttcgactcagacggatatc

SEQ ID NO: 27263 - DNA, 25 bp, Homo sapiens
tgtctagatcaagaaggtgcatgtc

SEQ ID NO: 27264 - DNA, 25 bp, Homo sapiens
agcattggaaaaggcctattagata

SEQ ID NO: 27265 - DNA, 25 bp, Homo sapiens
ccacttctcttggtgaggcaggtca

SEQ ID NO: 27266 - DNA, 25 bp, Homo sapiens
tcacttaaggccaacaggggatgtc

SEQ ID NO: 27267 - DNA, 25 bp, Homo sapiens
ctgagctgacagcaggcatatcttc

SEQ ID NO: 27268 - DNA, 25 bp, Homo sapiens
gggaaccctctgctctggataaata

SEQ ID NO: 27269 - DNA, 25 bp, Homo sapiens
gcaagttctcctgaagttctcacga

SEQ ID NO: 27270 - DNA, 25 bp, Homo sapiens
tgtgagcctggaactgaaagtcttc

SEQ ID NO: 27271 - DNA, 25 bp, Homo sapiens
ggggcccttgccttcaaacgcattc

SEQ ID NO: 27272 - DNA, 25 bp, Homo sapiens
ctgctgttgaccctgattatctgga

SEQ ID NO: 27273 - DNA, 25 bp, Homo sapiens
ttgatcctgagcaacctgaagcctg

SEQ ID NO: 27274 - DNA, 25 bp, Homo sapiens
gacacattcggactttgccagagta

SEQ ID NO: 27275 - DNA, 25 bp, Homo sapiens
gggccttccaggtgcaaaacattta

SEQ ID NO: 27276 - DNA, 25 bp, Homo sapiens
gggccctgcggtatcatctttgatt

SEQ ID NO: 27277 - DNA, 25 bp, Homo sapiens
gggcttccttacctgaggcacctga

SEQ ID NO: 27278 - DNA, 25 bp, Homo sapiens
ctcagggaatctcaagcaagcaaac

SEQ ID NO: 27279 - DNA, 25 bp, Homo sapiens
gggccgcttacctctggtccagaca

SEQ ID NO: 27280 - DNA, 25 bp, Homo sapiens
ctccttggctgaactggcggaactc

SEQ ID NO: 27281 - DNA, 25 bp, Homo sapiens
gggaaaggacgcaacactcacaatg

SEQ ID NO: 27282 - DNA, 25 bp, Homo sapiens
gaacgcctcaggtttgggaccaaca

SEQ ID NO: 27283 - DNA, 25 bp, Homo sapiens
ccctggcatcactcagcattgctta

SEQ ID NO: 27284 - DNA, 25 bp, Homo sapiens
tgcggcttccagtaacatgatgaca

SEQ ID NO: 27285 - DNA, 25 bp, Homo sapiens
gccttgtatgatccctgagcctcta

SEQ ID NO: 27286 - DNA, 25 bp, Homo sapiens
tcctgagcgtcagctatgtatatgc

SEQ ID NO: 27287 - DNA, 25 bp, Homo sapiens
gcctccgaagttgcgctagccaatc

SEQ ID NO: 27288 - DNA, 25 bp, Homo sapiens
tggttcaccgtagcatgtagtttta

SEQ ID NO: 27289 - DNA, 25 bp, Homo sapiens
ccctagtgcaaagggcgtcaagcta

SEQ ID NO: 27290 - DNA, 25 bp, Homo sapiens
tgcctgccatgacgtcaacgccgaa

SEQ ID NO: 27291 - DNA, 25 bp, Homo sapiens
tccgtcctctggattgcctcagttg

SEQ ID NO: 27292 - DNA, 25 bp, Homo sapiens
cctctagggagcaaatcgttctgtc

SEQ ID NO: 27293 - DNA, 25 bp, Homo sapiens
agcccatttggcctcagacgttaca

SEQ ID NO: 27294 - DNA, 25 bp, Homo sapiens
tggccctacctagaacctgagaatc

SEQ ID NO: 27295 - DNA, 25 bp, Homo sapiens
cacgggcctgcttaatgtcttacca

SEQ ID NO: 27296 - DNA, 25 bp, Homo sapiens
tcctcgctggtgatttgaaaagatc

SEQ ID NO: 27297 - DNA, 25 bp, Homo sapiens
gtgcctccatgtcccgggaagccaa

SEQ ID NO: 27298 - DNA, 25 bp, Homo sapiens
tccagctttgaagtgccagtgtgca

SEQ ID NO: 27299 - DNA, 25 bp, Homo sapiens
ccctggagagccacagcagtttatc

SEQ ID NO: 27300 - DNA, 25 bp, Homo sapiens
tgtccctgccaacctgtggatgcta

SEQ ID NO: 27301 - DNA, 25 bp, Homo sapiens
gcagaggctaggcttccagaaaact

SEQ ID NO: 27302 - DNA, 25 bp, Homo sapiens
gaaaaagcctttctaaatatgaccc

SEQ ID NO: 27303 - DNA, 25 bp, Homo sapiens
ttctgagaggaaaactgggtgacta

SEQ ID NO: 27304 - DNA, 25 bp, Homo sapiens
ttgagcagcggtgagtggtggagag

SEQ ID NO: 27305 - DNA, 25 bp, Homo sapiens
aggctcctcctaagtgtgcaagtgc

SEQ ID NO: 27306 - DNA, 25 bp, Homo sapiens
tcccaggcgatgctccacttttcta

SEQ ID NO: 27307 - DNA, 25 bp, Homo sapiens
gggaccagctgaggagacatcttct

SEQ ID NO: 27308 - DNA, 25 bp, Homo sapiens
gctggtcttctcaagcgttccttca

SEQ ID NO: 27309 - DNA, 25 bp, Homo sapiens
cttggatgcaggtgtaaagaaattc

SEQ ID NO: 27310 - DNA, 25 bp, Homo sapiens
cccagctggcgcatacaataagatt

SEQ ID NO: 27311 - DNA, 25 bp, Homo sapiens
tcgtgagaacttttgctaggccata

SEQ ID NO: 27312 - DNA, 25 bp, Homo sapiens
cccagaggcttcttggagacttttc

SEQ ID NO: 27313 - DNA, 25 bp, Homo sapiens
tccgaacttggagcctgcaggtttc

SEQ ID NO: 27314 - DNA, 25 bp, Homo sapiens
tggggagcccaaagttccatccttg

SEQ ID NO: 27315 - DNA, 25 bp, Homo sapiens
cttactcttgctcagggattccttg

SEQ ID NO: 27316 - DNA, 25 bp, Homo sapiens
ggacccgcctgacttgacgaatttg

SEQ ID NO: 27317 - DNA, 25 bp, Homo sapiens
ccctcttgggtctcatggtcatata

SEQ ID NO: 27318 - DNA, 25 bp, Homo sapiens
tgggatctcaccactccaaagggtt

SEQ ID NO: 27319 - DNA, 25 bp, Homo sapiens
cttgcaaagggcagctcagcattta

SEQ ID NO: 27320 - DNA, 25 bp, Homo sapiens
actggaaatggtaggtgtgctgttc

SEQ ID NO: 27321 - DNA, 25 bp, Homo sapiens
agttctactggccacctctagggtg

SEQ ID NO: 27322 - DNA, 25 bp, Homo sapiens
gccagtcctgggattgttactctta

SEQ ID NO: 27323 - DNA, 25 bp, Homo sapiens
agaagtcactccctgccatttgttg

SEQ ID NO: 27324 - DNA, 25 bp, Homo sapiens
cgttgtttaaaagagcatagcacta

SEQ ID NO: 27325 - DNA, 25 bp, Homo sapiens
ggttctactgttctgcccactgttc

SEQ ID NO: 27326 - DNA, 25 bp, Homo sapiens
gttcctatgggagaaaagccttttc

SEQ ID NO: 27327 - DNA, 25 bp, Homo sapiens
gtccctgcttggcacccggacaaga

SEQ ID NO: 27328 - DNA, 25 bp, Homo sapiens
tcctgggtcaggaagtacacctctc

SEQ ID NO: 27329 - DNA, 25 bp, Homo sapiens
tttaaagtggggatgggttaggaga

SEQ ID NO: 27330 - DNA, 25 bp, Homo sapiens
agcgcctcccaattgttcttctgta

SEQ ID NO: 27331 - DNA, 25 bp, Homo sapiens
actgtctctccactatcatctggtt

SEQ ID NO: 27332 - DNA, 25 bp, Homo sapiens
gagatcaggaaaatacaagacagtt

SEQ ID NO: 27333 - DNA, 25 bp, Homo sapiens
tacccatttaagtcccagagttagc

SEQ ID NO: 27334 - DNA, 25 bp, Homo sapiens
catgtgaagtgaggagctattaaag

SEQ ID NO: 27335 - DNA, 25 bp, Homo sapiens
tcagtggacttctggttgattgaca

SEQ ID NO: 27336 - DNA, 25 bp, Homo sapiens
caccatgtgggccataaacattttc

SEQ ID NO: 27337 - DNA, 25 bp, Homo sapiens
gcgatgagtctactgctggtgcata

SEQ ID NO: 27338 - DNA, 25 bp, Homo sapiens
acttggtctggaagagccctattca

SEQ ID NO: 27339 - DNA, 25 bp, Homo sapiens
tggcttggaccagcactcacttcta

SEQ ID NO: 27340 - DNA, 25 bp, Homo sapiens
agctgcttggctctaaaccatgttc

SEQ ID NO: 27341 - DNA, 25 bp, Homo sapiens
gagctctgttactggtacccttgta

SEQ ID NO: 27342 - DNA, 25 bp, Homo sapiens
gtgcccagccaggtttccaatcatg

SEQ ID NO: 27343 - DNA, 25 bp, Homo sapiens
ggggcataccctgagcattcctgaa

SEQ ID NO: 27344 - DNA, 25 bp, Homo sapiens
ggatgacctgtccttggcacacttc

SEQ ID NO: 27345 - DNA, 25 bp, Homo sapiens
ggtgctctgactcatcctggaaatg

SEQ ID NO: 27346 - DNA, 25 bp, Homo sapiens
ggatgcctgttctctgtaagccttc

SEQ ID NO: 27347 - DNA, 25 bp, Homo sapiens
ggtagtagcagtagaatctctcagc

SEQ ID NO: 27348 - DNA, 25 bp, Homo sapiens
acttaagtattgtcaggcctcccta

SEQ ID NO: 27349 - DNA, 25 bp, Homo sapiens
ggcacctgtggcttgagctctcaaa

SEQ ID NO: 27350 - DNA, 25 bp, Homo sapiens
agttgcccagttgctttccacagaa

SEQ ID NO: 27351 - DNA, 25 bp, Homo sapiens
agagactcctaaggcctcacttgtg

SEQ ID NO: 27352 - DNA, 25 bp, Homo sapiens
ttcttataagccaggggatcccatg

SEQ ID NO: 27353 - DNA, 25 bp, Homo sapiens
tgctggccagaagcatcatctactg

SEQ ID NO: 27354 - DNA, 25 bp, Homo sapiens
cataaagcgtcaattgggaattccc

SEQ ID NO: 27355 - DNA, 25 bp, Homo sapiens
ttttaaaaagtgtcaattatctctc

SEQ ID NO: 27356 - DNA, 25 bp, Homo sapiens
tccctgccattgatcaattccattg

SEQ ID NO: 27357 - DNA, 25 bp, Homo sapiens
taactagtaatctagaattccaaaa

SEQ ID NO: 27358 - DNA, 25 bp, Homo sapiens
gcagatgctcatgtactggtcaaca

SEQ ID NO: 27359 - DNA, 25 bp, Homo sapiens
ctcaggggtacacacagtaagtctc

SEQ ID NO: 27360 - DNA, 25 bp, Homo sapiens
tggggcaggccaatatgaataaata

SEQ ID NO: 27361 - DNA, 25 bp, Homo sapiens
ccagaggatttcacccagttttagc

SEQ ID NO: 27362 - DNA, 25 bp, Homo sapiens
actgcttgccagaagggtaccacta

SEQ ID NO: 27363 - DNA, 25 bp, Homo sapiens
ccctggttacttggctgaaattttc

SEQ ID NO: 27364 - DNA, 25 bp, Homo sapiens
ccaatttggatggattagatttttc

SEQ ID NO: 27365 - DNA, 25 bp, Homo sapiens
tattgacatttagactttgttacat

SEQ ID NO: 27366 - DNA, 25 bp, Homo sapiens
gctcattgttacgtacttcagggaa

SEQ ID NO: 27367 - DNA, 25 bp, Homo sapiens
gcagtccctcaagcagcagtaatta

SEQ ID NO: 27368 - DNA, 25 bp, Homo sapiens
gtgggctaggaacaaagcgcattta

SEQ ID NO: 27369 - DNA, 25 bp, Homo sapiens
ggtcatattcagttttggccactta

SEQ ID NO: 27370 - DNA, 25 bp, Homo sapiens
gccacactgcctatggtagagttta

SEQ ID NO: 27371 - DNA, 25 bp, Homo sapiens
aaaggaatatgtcaactacattaaa

SEQ ID NO: 27372 - DNA, 25 bp, Homo sapiens
ctctggctaggaacgctaatggttt

SEQ ID NO: 27373 - DNA, 25 bp, Homo sapiens
ccctcaggcaggaataagcattttc

SEQ ID NO: 27374 - DNA, 25 bp, Homo sapiens
gagcctataatgtgaatggagttta

SEQ ID NO: 27375 - DNA, 25 bp, Homo sapiens
tcctaattaaaaaagtaagagctgt

SEQ ID NO: 27376 - DNA, 25 bp, Homo sapiens
gctagccggtgctgtgagacaaaca

SEQ ID NO: 27377 - DNA, 25 bp, Homo sapiens
gcacagatcaggtacagaaattatg

SEQ ID NO: 27378 - DNA, 25 bp, Homo sapiens
ggaaacatttttctgcaccctgggg

SEQ ID NO: 27379 - DNA, 25 bp, Homo sapiens
ctgttctggattaatgctctttaga

SEQ ID NO: 27380 - DNA, 25 bp, Homo sapiens
gcctgggactgctgttatgaacatc

SEQ ID NO: 27381 - DNA, 25 bp, Homo sapiens
tggtacgtgaccttaatggaaagca

SEQ ID NO: 27382 - DNA, 25 bp, Homo sapiens
ctatgggtgccaagaaagactattt

SEQ ID NO: 27383 - DNA, 25 bp, Homo sapiens
agaatccctctctgggagcccaatg

SEQ ID NO: 27384 - DNA, 25 bp, Homo sapiens
aaattgctttcctgagtgctctaac

SEQ ID NO: 27385 - DNA, 25 bp, Homo sapiens
tatgagcatattgccagagaagatg

SEQ ID NO: 27386 - DNA, 25 bp, Homo sapiens
ctctaaccatcactaaaattgcagg

SEQ ID NO: 27387 - DNA, 25 bp, Homo sapiens
gtctaggtcctgatatggtagcata

SEQ ID NO: 27388 - DNA, 25 bp, Homo sapiens
attaccaagaagaccagatcctacc

SEQ ID NO: 27389 - DNA, 25 bp, Homo sapiens
cgcatgccctcagaactaaggatta

SEQ ID NO: 27390 - DNA, 25 bp, Homo sapiens
ctatcagcttattgcagatgtatga

SEQ ID NO: 27391 - DNA, 25 bp, Homo sapiens
gccctggcttcaacataatcaggta

SEQ ID NO: 27392 - DNA, 25 bp, Homo sapiens
gacctttctgtttgtactgcctata

SEQ ID NO: 27393 - DNA, 25 bp, Homo sapiens
cagtttaacagagtgatgccttgcc

SEQ ID NO: 27394 - DNA, 25 bp, Homo sapiens
caacaaggttagcagggagattttc

SEQ ID NO: 27395 - DNA, 25 bp, Homo sapiens
tgccgcagatgttcctcaatttatt

SEQ ID NO: 27396 - DNA, 25 bp, Homo sapiens
cctttttgggtgtcatttgaaagca

SEQ ID NO: 27397 - DNA, 25 bp, Homo sapiens
tcctgggcaaaaccatcagaccacg

SEQ ID NO: 27398 - DNA, 25 bp, Homo sapiens
ttcatgaagacaggaggcaacactc

SEQ ID NO: 27399 - DNA, 25 bp, Homo sapiens
tcacaggtagctttttaacaggata

SEQ ID NO: 27400 - DNA, 25 bp, Homo sapiens
gactctgtgtgtatgtgtgtatatg

SEQ ID NO: 27401 - DNA, 25 bp, Homo sapiens
ggatccatgctactgagtgtgttta

SEQ ID NO: 27402 - DNA, 25 bp, Homo sapiens
ctcctaggtgcgattgaaaaatata

SEQ ID NO: 27403 - DNA, 25 bp, Homo sapiens
tagtgactatgacctacaatttgta

SEQ ID NO: 27404 - DNA, 25 bp, Homo sapiens
tggtgtaccttcttggcagctcata

SEQ ID NO: 27405 - DNA, 25 bp, Homo sapiens
ccaaatcagagtgagagaggggaac

SEQ ID NO: 27406 - DNA, 25 bp, Homo sapiens
tctgcaggactgaatattgaccacc

SEQ ID NO: 27407 - DNA, 25 bp, Homo sapiens
gccttggaaaaacttgcacctattg

SEQ ID NO: 27408 - DNA, 25 bp, Homo sapiens
gagagtacctctcatcagtcagata

SEQ ID NO: 27409 - DNA, 25 bp, Homo sapiens
ataatttcaaacttagagaagactt

SEQ ID NO: 27410 - DNA, 25 bp, Homo sapiens
tgtttcactactctacttatttgct

SEQ ID NO: 27411 - DNA, 25 bp, Homo sapiens
atgctttgacaattggacctcctga

SEQ ID NO: 27412 - DNA, 25 bp, Homo sapiens
caacatttttgaactgtggactaga

SEQ ID NO: 27413 - DNA, 25 bp, Homo sapiens
ggagccaattcagctacatgacatt

SEQ ID NO: 27414 - DNA, 25 bp, Homo sapiens
gattcttgtattttattctcaaaat

SEQ ID NO: 27415 - DNA, 25 bp, Homo sapiens
gtcgtgaatttggttctggcaagca

SEQ ID NO: 27416 - DNA, 25 bp, Homo sapiens
tgaccctacctgtagttactctgtg

SEQ ID NO: 27417 - DNA, 25 bp, Homo sapiens
gctgtgattctccacccaaatgtaa

SEQ ID NO: 27418 - DNA, 25 bp, Homo sapiens
ctgttgagtcccttgagagttttgc

SEQ ID NO: 27419 - DNA, 25 bp, Homo sapiens
gggaaagcctgcgaattgtccttga

SEQ ID NO: 27420 - DNA, 25 bp, Homo sapiens
tgactgtgttcccactccttgcttg

SEQ ID NO: 27421 - DNA, 25 bp, Homo sapiens
cttgacttccagatgcctcagatta

SEQ ID NO: 27422 - DNA, 25 bp, Homo sapiens
tccttaggtaacatgctggctggta

SEQ ID NO: 27423 - DNA, 25 bp, Homo sapiens
acggtggggatttttgcatacttta

SEQ ID NO: 27424 - DNA, 25 bp, Homo sapiens
gcagcatcaggtttatgtggaccta

SEQ ID NO: 27425 - DNA, 25 bp, Homo sapiens
gatgccagacctaaaatatatagta

SEQ ID NO: 27426 - DNA, 25 bp, Homo sapiens
aagaaaagataatctactaattttc

SEQ ID NO: 27427 - DNA, 25 bp, Homo sapiens
ggggactggctattgcctcacaaaa

SEQ ID NO: 27428 - DNA, 25 bp, Homo sapiens
gcttctgatccattctaagtagatg

SEQ ID NO: 27429 - DNA, 25 bp, Homo sapiens
tggcccttgtctcctagtgcgtttt

SEQ ID NO: 27430 - DNA, 25 bp, Homo sapiens
tttgcaagatgtcaccctgagggtc

SEQ ID NO: 27431 - DNA, 25 bp, Homo sapiens
cagttttattcagggacagtcaatc

SEQ ID NO: 27432 - DNA, 25 bp, Homo sapiens
ttcccacactggctattctaaaatg

SEQ ID NO: 27433 - DNA, 25 bp, Homo sapiens
cttcctgtgggaggatacttctttc

SEQ ID NO: 27434 - DNA, 25 bp, Homo sapiens
cgccagtttgcctcaatttgttata

SEQ ID NO: 27435 - DNA, 25 bp, Homo sapiens
aatgtggccggttttccttttcaaa

SEQ ID NO: 27436 - DNA, 25 bp, Homo sapiens
agttttaaataaacaacttgaataa

SEQ ID NO: 27437 - DNA, 25 bp, Homo sapiens
cttggcttgtgtttgaggctaacta

SEQ ID NO: 27438 - DNA, 25 bp, Homo sapiens
ttgtgcccacggtacagccatgtta

SEQ ID NO: 27439 - DNA, 25 bp, Homo sapiens
gtaacagtctgggaagcaatatatc

SEQ ID NO: 27440 - DNA, 25 bp, Homo sapiens
tttttccgtccatagagctcttagc

SEQ ID NO: 27441 - DNA, 25 bp, Homo sapiens
cccagatgagatcccaaaatgttgt

SEQ ID NO: 27442 - DNA, 25 bp, Homo sapiens
ggggaatcagtacatatcctgtatc

SEQ ID NO: 27443 - DNA, 25 bp, Homo sapiens
actataggagttttgtatgcttctc

SEQ ID NO: 27444 - DNA, 25 bp, Homo sapiens
cgcaggactgttgaatctctaaata

SEQ ID NO: 27445 - DNA, 25 bp, Homo sapiens
tcccttcggtgctttgttggagata

SEQ ID NO: 27446 - DNA, 25 bp, Homo sapiens
gtcttgtcatcagctgaactcttta

SEQ ID NO: 27447 - DNA, 25 bp, Homo sapiens
cacagttggtttgattttgctagcc

SEQ ID NO: 27448 - DNA, 25 bp, Homo sapiens
tggtcccttgtgtgagcaaaaagta

SEQ ID NO: 27449 - DNA, 25 bp, Homo sapiens
cagtagtacttgtgagggacataca

SEQ ID NO: 27450 - DNA, 25 bp, Homo sapiens
tggctacacaatctcaggtaaaata

SEQ ID NO: 27451 - DNA, 25 bp, Homo sapiens
ctctgtgagcgagacaccttgtcta

SEQ ID NO: 27452 - DNA, 25 bp, Homo sapiens
caagtagctttctcccaaggttcca

SEQ ID NO: 27453 - DNA, 25 bp, Homo sapiens
tacaggctaggtttgtgagagctta

SEQ ID NO: 27454 - DNA, 25 bp, Homo sapiens
tgctatttgcaagcgacaacagatc

SEQ ID NO: 27455 - DNA, 25 bp, Homo sapiens
tgggtgttcagatctaatagtcaac

SEQ ID NO: 27456 - DNA, 25 bp, Homo sapiens
cgaggtgaccatagacgaaaactga

SEQ ID NO: 27457 - DNA, 25 bp, Homo sapiens
ctgggttattagcacatttcaggca

SEQ ID NO: 27458 - DNA, 25 bp, Homo sapiens
agcttctgcttgagccacgggtatg

SEQ ID NO: 27459 - DNA, 25 bp, Homo sapiens
atcatagtctgtaaacctattaaat

SEQ ID NO: 27460 - DNA, 25 bp, Homo sapiens
ctatgaattacctgggctactttta

SEQ ID NO: 27461 - DNA, 25 bp, Homo sapiens
ttgccacatgccaaatggaagagca

SEQ ID NO: 27462 - DNA, 25 bp, Homo sapiens
tctacttgatgcttaaggggctcta

SEQ ID NO: 27463 - DNA, 25 bp, Homo sapiens
gtctctttgatgtgtcagccatgca

SEQ ID NO: 27464 - DNA, 25 bp, Homo sapiens
tttagtaactgctgccaccacttgg

SEQ ID NO: 27465 - DNA, 25 bp, Homo sapiens
tctggcttacaaaatacctgggatg

SEQ ID NO: 27466 - DNA, 25 bp, Homo sapiens
tggctcatctgtcttccacatggta

SEQ ID NO: 27467 - DNA, 25 bp, Homo sapiens
tggcttctcaagtctgggaaaaata

SEQ ID NO: 27468 - DNA, 25 bp, Homo sapiens
cccagctgctgtctttgcaagaacc

SEQ ID NO: 27469 - DNA, 25 bp, Homo sapiens
ggcaggccattaattcctacgcatg

SEQ ID NO: 27470 - DNA, 25 bp, Homo sapiens
ggggctacgtaccatcttaaaactc

SEQ ID NO: 27471 - DNA, 25 bp, Homo sapiens
catggtctccaaagattgatggtta

SEQ ID NO: 27472 - DNA, 25 bp, Homo sapiens
ggccgattgacttcctcactcactg

SEQ ID NO: 27473 - DNA, 25 bp, Homo sapiens
gagtgtctcccagtaccatgtattt

SEQ ID NO: 27474 - DNA, 25 bp, Homo sapiens
cttctagttactgcctgagctgtta

SEQ ID NO: 27475 - DNA, 25 bp, Homo sapiens
tcttggatgctaaaaagggtcaata

SEQ ID NO: 27476 - DNA, 25 bp, Homo sapiens
aggacacgtattattgcttctatta

SEQ ID NO: 27477 - DNA, 25 bp, Homo sapiens
aaaagtatcagagtatttaaaagtg

SEQ ID NO: 27478 - DNA, 25 bp, Homo sapiens
agtgagcttgctcctgcccagaaca

SEQ ID NO: 27479 - DNA, 25 bp, Homo sapiens
ttgcaccaaatgaaagctagggctt

SEQ ID NO: 27480 - DNA, 25 bp, Homo sapiens
ggcagccagtttatttcacgatatg

SEQ ID NO: 27481 - DNA, 25 bp, Homo sapiens
tgcgccagatttaggaaagccagcc

SEQ ID NO: 27482 - DNA, 25 bp, Homo sapiens
ccaggaaaccaagggaagacacttc

SEQ ID NO: 27483 - DNA, 25 bp, Homo sapiens
gctggctctgggaacatgataagta

SEQ ID NO: 27484 - DNA, 25 bp, Homo sapiens
acgacagcgtattatttcccgaaga

SEQ ID NO: 27485 - DNA, 25 bp, Homo sapiens
ggtggtcagattctactttgaagtc

SEQ ID NO: 27486 - DNA, 25 bp, Homo sapiens
cagggctgagtttaaagagcacatt

SEQ ID NO: 27487 - DNA, 25 bp, Homo sapiens
tgttctgcaaagtcctgtgtgtatc

SEQ ID NO: 27488 - DNA, 25 bp, Homo sapiens
gggaactttttaatcggttggcata

SEQ ID NO: 27489 - DNA, 25 bp, Homo sapiens
tcagcgtcagccctcagatctatga

SEQ ID NO: 27490 - DNA, 25 bp, Homo sapiens
cttttgtatgcggtactcagtagtc

SEQ ID NO: 27491 - DNA, 25 bp, Homo sapiens
tgtagcagccaaagccagtattttc

SEQ ID NO: 27492 - DNA, 25 bp, Homo sapiens
tatgggccaaggacatttttctttc

SEQ ID NO: 27493 - DNA, 25 bp, Homo sapiens
aagcctggaggactttccttgccta

SEQ ID NO: 27494 - DNA, 25 bp, Homo sapiens
cctgggaccaaagaggcagttcttc

SEQ ID NO: 27495 - DNA, 25 bp, Homo sapiens
cagactaaaatataaagactttatt

SEQ ID NO: 27496 - DNA, 25 bp, Homo sapiens
taatgctagtaagtctccaaattct

SEQ ID NO: 27497 - DNA, 25 bp, Homo sapiens
gggtgcaagctttctactccataaa

SEQ ID NO: 27498 - DNA, 25 bp, Homo sapiens
agaatacaattttctaacataaaaa

SEQ ID NO: 27499 - DNA, 25 bp, Homo sapiens
acctgagtttcctctgggcacttta

SEQ ID NO: 27500 - DNA, 25 bp, Homo sapiens
cctgactgtgtatatgcctgttgta

SEQ ID NO: 27501 - DNA, 25 bp, Homo sapiens
agcgttcctgagagcttcctaatga

SEQ ID NO: 27502 - DNA, 25 bp, Homo sapiens
ccaggttgtgaagctagttggcatc

SEQ ID NO: 27503 - DNA, 25 bp, Homo sapiens
ctgcgctactcccaaggtttaattc

SEQ ID NO: 27504 - DNA, 25 bp, Homo sapiens
cctgcctgtctcttttggtgatata

SEQ ID NO: 27505 - DNA, 25 bp, Homo sapiens
tgccgctgggaaattttaacctttc

SEQ ID NO: 27506 - DNA, 25 bp, Homo sapiens
ccttatatctgtggttgaactgtca

SEQ ID NO: 27507 - DNA, 25 bp, Homo sapiens
cttgagcatctgacacatggccatc

SEQ ID NO: 27508 - DNA, 25 bp, Homo sapiens
cacctcacattggagactttgttaa

SEQ ID NO: 27509 - DNA, 25 bp, Homo sapiens
gggaaccgttaatatatccttcaca

SEQ ID NO: 27510 - DNA, 25 bp, Homo sapiens
gagacactgtcagctcctattttta

SEQ ID NO: 27511 - DNA, 25 bp, Homo sapiens
gggtgttttcagctctctgtgccta

SEQ ID NO: 27512 - DNA, 25 bp, Homo sapiens
tggggcaaagtcgtagccattaaaa

SEQ ID NO: 27513 - DNA, 25 bp, Homo sapiens
ctctgagggactgaaatactttgga

SEQ ID NO: 27514 - DNA, 25 bp, Homo sapiens
tggacccagggtgttcagagagatt

SEQ ID NO: 27515 - DNA, 25 bp, Homo sapiens
cccagttcttttccttgagttctca

SEQ ID NO: 27516 - DNA, 25 bp, Homo sapiens
cttctgatggtaaagcctgactata

SEQ ID NO: 27517 - DNA, 25 bp, Homo sapiens
atgagggcttctctattgctatagc

SEQ ID NO: 27518 - DNA, 25 bp, Homo sapiens
tagagcttacaaaacccattctctg

SEQ ID NO: 27519 - DNA, 25 bp, Homo sapiens
ggttggagccctgtgacaatataca

SEQ ID NO: 27520 - DNA, 25 bp, Homo sapiens
agcgcaagatttttaaaatgagagt

SEQ ID NO: 27521 - DNA, 25 bp, Homo sapiens
aataattgtctaagattagattctt

SEQ ID NO: 27522 - DNA, 25 bp, Homo sapiens
tttactgacatattcctcccgtgga

SEQ ID NO: 27523 - DNA, 25 bp, Homo sapiens
ctggagcagctatctggaatacctt

SEQ ID NO: 27524 - DNA, 25 bp, Homo sapiens
tcgatggcaggcttattcatattta

SEQ ID NO: 27525 - DNA, 25 bp, Homo sapiens
agttagcaagttggactgtcaaatc

SEQ ID NO: 27526 - DNA, 25 bp, Homo sapiens
cctccctaagaccaaggtagtgtta

SEQ ID NO: 27527 - DNA, 25 bp, Homo sapiens
ggccatcccttgctgtctcctgtaa

SEQ ID NO: 27528 - DNA, 25 bp, Homo sapiens
aaattcatgatcccaattttgttca

SEQ ID NO: 27529 - DNA, 25 bp, Homo sapiens
tacaaaaaaatttaagatacttggg

SEQ ID NO: 27530 - DNA, 25 bp, Homo sapiens
tgcctggggtcattctagccaactg

SEQ ID NO: 27531 - DNA, 25 bp, Homo sapiens
ggcatccagaccttctttaagatta

SEQ ID NO: 27532 - DNA, 25 bp, Homo sapiens
tgctctccctgattgtcttgacatg

SEQ ID NO: 27533 - DNA, 25 bp, Homo sapiens
gctgccaactaatgagtgtttcctc

SEQ ID NO: 27534 - DNA, 25 bp, Homo sapiens
tggtatccattcctagacacagatg

SEQ ID NO: 27535 - DNA, 25 bp, Homo sapiens
gcttcctactccatgactgtgctga

SEQ ID NO: 27536 - DNA, 25 bp, Homo sapiens
tgattctcactagcaaccgtattcc

SEQ ID NO: 27537 - DNA, 25 bp, Homo sapiens
ctgtactgctagcttcctatggata

SEQ ID NO: 27538 - DNA, 25 bp, Homo sapiens
cattggtttgtcacttttgaaagtc

SEQ ID NO: 27539 - DNA, 25 bp, Homo sapiens
tgtggcacctgcatattctatctca

SEQ ID NO: 27540 - DNA, 25 bp, Homo sapiens
cccagcctggatgcttgtggtaaaa

SEQ ID NO: 27541 - DNA, 25 bp, Homo sapiens
cccatttcatcctgtactacacgtg

SEQ ID NO: 27542 - DNA, 25 bp, Homo sapiens
atataaaatataataatggtagtca

SEQ ID NO: 27543 - DNA, 25 bp, Homo sapiens
gtccacacagggctctcaggttttc

SEQ ID NO: 27544 - DNA, 25 bp, Homo sapiens
actggttggaccgtattttcctgca

SEQ ID NO: 27545 - DNA, 25 bp, Homo sapiens
aaacactgttgggaggtcattcatc

SEQ ID NO: 27546 - DNA, 25 bp, Homo sapiens
tattttttgtgattttttaaatgca

SEQ ID NO: 27547 - DNA, 25 bp, Homo sapiens
atgcctatgtttggcctgataattc

SEQ ID NO: 27548 - DNA, 25 bp, Homo sapiens
cctggagatgaaattggtgaactgc

SEQ ID NO: 27549 - DNA, 25 bp, Homo sapiens
tgaggcagtgacaacttcagctata

SEQ ID NO: 27550 - DNA, 25 bp, Homo sapiens
acttatataagggagtgactgcttc

SEQ ID NO: 27551 - DNA, 25 bp, Homo sapiens
gctgcctgtagggagcacaaaattg

SEQ ID NO: 27552 - DNA, 25 bp, Homo sapiens
cagtctagggtgctgtggaaatgca

SEQ ID NO: 27553 - DNA, 25 bp, Homo sapiens
ccaacatcaggtgtacaggtagtca

SEQ ID NO: 27554 - DNA, 25 bp, Homo sapiens
ttaggtgccaagactttccagttgc

SEQ ID NO: 27555 - DNA, 25 bp, Homo sapiens
tgtaatacatgaatcctggcctctg

SEQ ID NO: 27556 - DNA, 25 bp, Homo sapiens
gtagctttctctgcttcacagtaga

SEQ ID NO: 27557 - DNA, 25 bp, Homo sapiens
ttcgggtaatcttcccacagctgtg

SEQ ID NO: 27558 - DNA, 25 bp, Homo sapiens
ggatgttaatctcaatcatataagc

SEQ ID NO: 27559 - DNA, 25 bp, Homo sapiens
aagctccttgtcctggcctccatga

SEQ ID NO: 27560 - DNA, 25 bp, Homo sapiens
acgtgatccctgaagcatctattga

SEQ ID NO: 27561 - DNA, 25 bp, Homo sapiens
tcactgacccagatgaataatttcg

SEQ ID NO: 27562 - DNA, 25 bp, Homo sapiens
ctctcagtagaggttggaatatccc

SEQ ID NO: 27563 - DNA, 25 bp, Homo sapiens
gctcaggaatgtgttggtcccaatg

SEQ ID NO: 27564 - DNA, 25 bp, Homo sapiens
ccagcatggtatcatggtgagctac

SEQ ID NO: 27565 - DNA, 25 bp, Homo sapiens
ggcccattagtaagcacattcttta

SEQ ID NO: 27566 - DNA, 25 bp, Homo sapiens
gaatattaaaaacaaaaccaaatga

SEQ ID NO: 27567 - DNA, 25 bp, Homo sapiens
gaccggggtatgtctcttgttgaaa

SEQ ID NO: 27568 - DNA, 25 bp, Homo sapiens
tctctctcataggacagctgctttc

SEQ ID NO: 27569 - DNA, 25 bp, Homo sapiens
agtgtagtcttattgggcattcaca

SEQ ID NO: 27570 - DNA, 25 bp, Homo sapiens
cccacctggaatcaatagcgttctc

SEQ ID NO: 27571 - DNA, 25 bp, Homo sapiens
tgcttgtcagccagtacttagatcc

SEQ ID NO: 27572 - DNA, 25 bp, Homo sapiens
gtgatgtgtgcctttctctgaaatg

SEQ ID NO: 27573 - DNA, 25 bp, Homo sapiens
acttgggtgacttccttgagacata

SEQ ID NO: 27574 - DNA, 25 bp, Homo sapiens
ttgagaacatcaccaagacctgtgg

SEQ ID NO: 27575 - DNA, 25 bp, Homo sapiens
ttcctcagttaatgctcaaccatgc

SEQ ID NO: 27576 - DNA, 25 bp, Homo sapiens
tacatcgctgcctgttcatcaccaa

SEQ ID NO: 27577 - DNA, 25 bp, Homo sapiens
ctctgtaaaatgcaagttaggctga

SEQ ID NO: 27578 - DNA, 25 bp, Homo sapiens
gccagtttagccttgaatgcagtta

SEQ ID NO: 27579 - DNA, 25 bp, Homo sapiens
gcgagcctacttactggtgtgaatc

SEQ ID NO: 27580 - DNA, 25 bp, Homo sapiens
gaagaaaaaagagaaatattaagag

SEQ ID NO: 27581 - DNA, 25 bp, Homo sapiens
aaaaatttccatattggaatttgga

SEQ ID NO: 27582 - DNA, 25 bp, Homo sapiens
tgtgcaaggacaaagggaagatgta

SEQ ID NO: 27583 - DNA, 25 bp, Homo sapiens
gaggggtaaacatgtctcaaatttc

SEQ ID NO: 27584 - DNA, 25 bp, Homo sapiens
tagcttctctttgggtgtattcacc

SEQ ID NO: 27585 - DNA, 25 bp, Homo sapiens
gtagcctccgttgctctaaaagata

SEQ ID NO: 27586 - DNA, 25 bp, Homo sapiens
cgtctatatccaaactaaatgctga

SEQ ID NO: 27587 - DNA, 25 bp, Homo sapiens
ctaagttagtaaaactctgacaatt

SEQ ID NO: 27588 - DNA, 25 bp, Homo sapiens
tagccactcagatatagcatgttta

SEQ ID NO: 27589 - DNA, 25 bp, Homo sapiens
gtagactactgtgagggccacctta

SEQ ID NO: 27590 - DNA, 25 bp, Homo sapiens
agggacctcagcttcttcacattca

SEQ ID NO: 27591 - DNA, 25 bp, Homo sapiens
tgctggcagtagattaatggtaata

SEQ ID NO: 27592 - DNA, 25 bp, Homo sapiens
gaatgacctctacttgggaatgccc

SEQ ID NO: 27593 - DNA, 25 bp, Homo sapiens
cccagtgctctgaaaaaggttagta

SEQ ID NO: 27594 - DNA, 25 bp, Homo sapiens
tagcacacttccctaatacatggtg

SEQ ID NO: 27595 - DNA, 25 bp, Homo sapiens
tggtagtcttttggaatgcaaacat

SEQ ID NO: 27596 - DNA, 25 bp, Homo sapiens
gcatagttgtcttgaggtctgaata

SEQ ID NO: 27597 - DNA, 25 bp, Homo sapiens
aagcctctgtttcttcatgtgtgaa

SEQ ID NO: 27598 - DNA, 25 bp, Homo sapiens
gtgttgttgctaccaaaaaataaat

SEQ ID NO: 27599 - DNA, 25 bp, Homo sapiens
tatgcctctgtgttcttggctaaga

SEQ ID NO: 27600 - DNA, 25 bp, Homo sapiens
tgcctgaaagggtcagtcatccgta

SEQ ID NO: 27601 - DNA, 25 bp, Homo sapiens
gtgctgctgctccttattctcatga

SEQ ID NO: 27602 - DNA, 25 bp, Homo sapiens
tggctctgtagttatttgcaaatta

SEQ ID NO: 27603 - DNA, 25 bp, Homo sapiens
gcccttgtttctggctacattttta

SEQ ID NO: 27604 - DNA, 25 bp, Homo sapiens
cagcatcagccacagggtctctata

SEQ ID NO: 27605 - DNA, 25 bp, Homo sapiens
tgctagtggctatacgattctgtgc

SEQ ID NO: 27606 - DNA, 25 bp, Homo sapiens
ttgtttcccagccatctagatactc

SEQ ID NO: 27607 - DNA, 25 bp, Homo sapiens
ctactgaacttctagacatttgtca

SEQ ID NO: 27608 - DNA, 25 bp, Homo sapiens
cctgggttgtgtgttcatctgcatt

SEQ ID NO: 27609 - DNA, 25 bp, Homo sapiens
gccatgtttattgggtgacttctca

SEQ ID NO: 27610 - DNA, 25 bp, Homo sapiens
aggctgatgttgtttcctttgttca

SEQ ID NO: 27611 - DNA, 25 bp, Homo sapiens
ccatcagttcgggtgcaaaagtttt

SEQ ID NO: 27612 - DNA, 25 bp, Homo sapiens
cgctgctgagcctgtgaatttacca

SEQ ID NO: 27613 - DNA, 25 bp, Homo sapiens
tgaacccttatcttggcagctgaga

SEQ ID NO: 27614 - DNA, 25 bp, Homo sapiens
gttccacatgatcgaggtgattcta

SEQ ID NO: 27615 - DNA, 25 bp, Homo sapiens
agactatgtggctgtgcatccctga

SEQ ID NO: 27616 - DNA, 25 bp, Homo sapiens
cctcccattggttttcatttggttg

SEQ ID NO: 27617 - DNA, 25 bp, Homo sapiens
tgtggctgttacactgacccagatc

SEQ ID NO: 27618 - DNA, 25 bp, Homo sapiens
aatccttctcgtgtgctttcgcata

SEQ ID NO: 27619 - DNA, 25 bp, Homo sapiens
gcacactgtgcttggggttcataca

SEQ ID NO: 27620 - DNA, 25 bp, Homo sapiens
ggcagcctccatgtcacagtctata

SEQ ID NO: 27621 - DNA, 25 bp, Homo sapiens
tgtgacaatcctagggcaaggcctc

SEQ ID NO: 27622 - DNA, 25 bp, Homo sapiens
cagccttagcgcctgggagatataa

SEQ ID NO: 27623 - DNA, 25 bp, Homo sapiens
gtggccatctatcatctcttttaca

SEQ ID NO: 27624 - DNA, 25 bp, Homo sapiens
gatgccgagcatgaccaacaatagg

SEQ ID NO: 27625 - DNA, 25 bp, Homo sapiens
tttaaaagttcactaaaagtaactt

SEQ ID NO: 27626 - DNA, 25 bp, Homo sapiens
ctgaagtgtcctttgcggtcaacta

SEQ ID NO: 27627 - DNA, 25 bp, Homo sapiens
gtttcatgcgtgcaaagctctgtca

SEQ ID NO: 27628 - DNA, 25 bp, Homo sapiens
tcagcaaactacagtccatggactt

SEQ ID NO: 27629 - DNA, 25 bp, Homo sapiens
ccttgcggtgactgatgctaccata

SEQ ID NO: 27630 - DNA, 25 bp, Homo sapiens
ctctcagtgtgactttaggtgcttg

SEQ ID NO: 27631 - DNA, 25 bp, Homo sapiens
tgatgctaggtagaacacagttgtc

SEQ ID NO: 27632 - DNA, 25 bp, Homo sapiens
ggccactgattccttttgaaacctc

SEQ ID NO: 27633 - DNA, 25 bp, Homo sapiens
ggcagtacctagcatcttctttttc

SEQ ID NO: 27634 - DNA, 25 bp, Homo sapiens
gctacacggcatttcatgttacata

SEQ ID NO: 27635 - DNA, 25 bp, Homo sapiens
cttggtacatgtcagttggagatcc

SEQ ID NO: 27636 - DNA, 25 bp, Homo sapiens
ctaatgtctgggtagtggtgttttc

SEQ ID NO: 27637 - DNA, 25 bp, Homo sapiens
ctgctcttgttctcaccttgaatta

SEQ ID NO: 27638 - DNA, 25 bp, Homo sapiens
gcattgtccagttaggcctctgtta

SEQ ID NO: 27639 - DNA, 25 bp, Homo sapiens
gggccttgctttctgaacatcttga

SEQ ID NO: 27640 - DNA, 25 bp, Homo sapiens
gggtcctgcctcaatagatcctggg

SEQ ID NO: 27641 - DNA, 25 bp, Homo sapiens
tggagaacttctactagcacatacg

SEQ ID NO: 27642 - DNA, 25 bp, Homo sapiens
tgccagggttaatgagtcaacttta

SEQ ID NO: 27643 - DNA, 25 bp, Homo sapiens
caccatggtcttgaggatagttgta

SEQ ID NO: 27644 - DNA, 25 bp, Homo sapiens
gcccacacgtagcaatatcacttta

SEQ ID NO: 27645 - DNA, 25 bp, Homo sapiens
ttctgggactcaataagcatgtgtc

SEQ ID NO: 27646 - DNA, 25 bp, Homo sapiens
tcacctctgtgaatggtctgcatta

SEQ ID NO: 27647 - DNA, 25 bp, Homo sapiens
gtccctaactgatgatgctgaattt

SEQ ID NO: 27648 - DNA, 25 bp, Homo sapiens
tggagccctccaacagacatgacaa

SEQ ID NO: 27649 - DNA, 25 bp, Homo sapiens
gcttatgggctctcaatacctttta

SEQ ID NO: 27650 - DNA, 25 bp, Homo sapiens
ctgctttcaagaggtggggagactt

SEQ ID NO: 27651 - DNA, 25 bp, Homo sapiens
cagatgttcagctaatgggcaatta

SEQ ID NO: 27652 - DNA, 25 bp, Homo sapiens
tctggccgatgaaaaatctaatttg

SEQ ID NO: 27653 - DNA, 25 bp, Homo sapiens
gcccatataacatatacgatcttcc

SEQ ID NO: 27654 - DNA, 25 bp, Homo sapiens
tatatgcctatacattggaaaaatt

SEQ ID NO: 27655 - DNA, 25 bp, Homo sapiens
gagcgccttgtagcagcataatcca

SEQ ID NO: 27656 - DNA, 25 bp, Homo sapiens
tgtgtgactcacactccagggaatc

SEQ ID NO: 27657 - DNA, 25 bp, Homo sapiens
atcaggaataataatgtttcaggca

SEQ ID NO: 27658 - DNA, 25 bp, Homo sapiens
ccttggcgtattttcccgagcatta

SEQ ID NO: 27659 - DNA, 25 bp, Homo sapiens
gggactgtaccatttcgagataaga

SEQ ID NO: 27660 - DNA, 25 bp, Homo sapiens
cgagctggtctcagcatttttcaca

SEQ ID NO: 27661 - DNA, 25 bp, Homo sapiens
ggaggctgacaccattgagcaatta

SEQ ID NO: 27662 - DNA, 25 bp, Homo sapiens
gaccttctgatgcattgctcttata

SEQ ID NO: 27663 - DNA, 25 bp, Homo sapiens
ctcagctgtcaggtgtacgcaaatc

SEQ ID NO: 27664 - DNA, 25 bp, Homo sapiens
gccttgcagaatgttagaagtcatc

SEQ ID NO: 27665 - DNA, 25 bp, Homo sapiens
gtacctttgtgtttctctgcccatg

SEQ ID NO: 27666 - DNA, 25 bp, Homo sapiens
ggtatctgaatccttctgttacagg

SEQ ID NO: 27667 - DNA, 25 bp, Homo sapiens
agttcaggtcttgccattgccatta

SEQ ID NO: 27668 - DNA, 25 bp, Homo sapiens
tgtcttttggatggcctaacctaca

SEQ ID NO: 27669 - DNA, 25 bp, Homo sapiens
cgagtttccagtagcttcatacagg

SEQ ID NO: 27670 - DNA, 25 bp, Homo sapiens
tgggcacctgcaaagaggacaattc

SEQ ID NO: 27671 - DNA, 25 bp, Homo sapiens
atggcctcctctttttctctgtagg

SEQ ID NO: 27672 - DNA, 25 bp, Homo sapiens
ttatagacttacacattgcacattg

SEQ ID NO: 27673 - DNA, 25 bp, Homo sapiens
cccatccgctacgtgaattaagcta

SEQ ID NO: 27674 - DNA, 25 bp, Homo sapiens
tgccaggccttcagttaatcaaatg

SEQ ID NO: 27675 - DNA, 25 bp, Homo sapiens
ttaggtcctctatccaagttaagtg

SEQ ID NO: 27676 - DNA, 25 bp, Homo sapiens
agcagataccttgtagtcacacaca

SEQ ID NO: 27677 - DNA, 25 bp, Homo sapiens
atcatacactttgactgtatgtttt

SEQ ID NO: 27678 - DNA, 25 bp, Homo sapiens
ggcagctgcataccaactcacttta

SEQ ID NO: 27679 - DNA, 25 bp, Homo sapiens
gccttgcctttatgaaaatatactg

SEQ ID NO: 27680 - DNA, 25 bp, Homo sapiens
ggtgtccacaatagagtccctgttc

SEQ ID NO: 27681 - DNA, 25 bp, Homo sapiens
gcaggaactttcttgggctcgttaa

SEQ ID NO: 27682 - DNA, 25 bp, Homo sapiens
gaagtatttttcacgccctagcaga

SEQ ID NO: 27683 - DNA, 25 bp, Homo sapiens
ttcacccattggttaagttgagcca

SEQ ID NO: 27684 - DNA, 25 bp, Homo sapiens
agagtaactcggctttatcaccaca

SEQ ID NO: 27685 - DNA, 25 bp, Homo sapiens
ctgctggggctagaaaaacatggta

SEQ ID NO: 27686 - DNA, 25 bp, Homo sapiens
ctggggtaattacaagaacgactta

SEQ ID NO: 27687 - DNA, 25 bp, Homo sapiens
ttgctttgccaaggagaaaattgtc

SEQ ID NO: 27688 - DNA, 25 bp, Homo sapiens
agacacctttgactatttgaaggta

SEQ ID NO: 27689 - DNA, 25 bp, Homo sapiens
tgcactgctttgcttcagacacata

SEQ ID NO: 27690 - DNA, 25 bp, Homo sapiens
cacagatgcagttttcccagtcata

SEQ ID NO: 27691 - DNA, 25 bp, Homo sapiens
ttgatactctgagccgtggaacctg

SEQ ID NO: 27692 - DNA, 25 bp, Homo sapiens
gtggttttgtaacggcacacacaca

SEQ ID NO: 27693 - DNA, 25 bp, Homo sapiens
actcactgatcttggggaataatta

SEQ ID NO: 27694 - DNA, 25 bp, Homo sapiens
ggctggcatcttcctcttgctgtaa

SEQ ID NO: 27695 - DNA, 25 bp, Homo sapiens
agcccaggctttgtgtcagattttc

SEQ ID NO: 27696 - DNA, 25 bp, Homo sapiens
gctaggcctatgataagcaatatta

SEQ ID NO: 27697 - DNA, 25 bp, Homo sapiens
tgtgggcacacgcattacatttata

SEQ ID NO: 27698 - DNA, 25 bp, Homo sapiens
tggctatgccttcccttcttggttc

SEQ ID NO: 27699 - DNA, 25 bp, Homo sapiens
taggcaccctgttatatgcttcata

SEQ ID NO: 27700 - DNA, 25 bp, Homo sapiens
agggacaccctgcttttataatgag

SEQ ID NO: 27701 - DNA, 25 bp, Homo sapiens
caggtatccagcataaacaggttta

SEQ ID NO: 27702 - DNA, 25 bp, Homo sapiens
tcttgatcacaacactgagctaatc

SEQ ID NO: 27703 - DNA, 25 bp, Homo sapiens
caagttcttttgaccaccagggata

SEQ ID NO: 27704 - DNA, 25 bp, Homo sapiens
actttgtacacataggcactctcga

SEQ ID NO: 27705 - DNA, 25 bp, Homo sapiens
gaagaccctgcagtgtatggacata

SEQ ID NO: 27706 - DNA, 25 bp, Homo sapiens
gttcctactatgactccagagtgtg

SEQ ID NO: 27707 - DNA, 25 bp, Homo sapiens
ctacttggaggcactaaggcatttc

SEQ ID NO: 27708 - DNA, 25 bp, Homo sapiens
cgtttcatagcgctcaagtattctc

SEQ ID NO: 27709 - DNA, 25 bp, Homo sapiens
tgagaccctagagatgaactatttc

SEQ ID NO: 27710 - DNA, 25 bp, Homo sapiens
ccagcagctcttcgaattcctttaa

SEQ ID NO: 27711 - DNA, 25 bp, Homo sapiens
agtggtctctgtggctctccttatt

SEQ ID NO: 27712 - DNA, 25 bp, Homo sapiens
cccacctgggtttgaacaccatatc

SEQ ID NO: 27713 - DNA, 25 bp, Homo sapiens
cagcagcattctcgttgggtagatt

SEQ ID NO: 27714 - DNA, 25 bp, Homo sapiens
tgggccgatcatgtttgagtttaac

SEQ ID NO: 27715 - DNA, 25 bp, Homo sapiens
tcagatgtagaccttggcatgtata

SEQ ID NO: 27716 - DNA, 25 bp, Homo sapiens
aataataataatttgactgcttatt

SEQ ID NO: 27717 - DNA, 25 bp, Homo sapiens
agaagcttcttgtgtgctctgacca

SEQ ID NO: 27718 - DNA, 25 bp, Homo sapiens
accttgcttatgatacgtgtatatg

SEQ ID NO: 27719 - DNA, 25 bp, Homo sapiens
tggtacaaacactattggcaggaga

SEQ ID NO: 27720 - DNA, 25 bp, Homo sapiens
ccacaaaaagtaagatatatccata

SEQ ID NO: 27721 - DNA, 25 bp, Homo sapiens
ggtgtttaaagctgattgtttctca

SEQ ID NO: 27722 - DNA, 25 bp, Homo sapiens
tctggtaggctattcatctctgtta

SEQ ID NO: 27723 - DNA, 25 bp, Homo sapiens
agcctcatatcctccagtttcctgg

SEQ ID NO: 27724 - DNA, 25 bp, Homo sapiens
ctggctctcttctaaatctcacatg

SEQ ID NO: 27725 - DNA, 25 bp, Homo sapiens
aacagttgagcaaggatggaatgaa

SEQ ID NO: 27726 - DNA, 25 bp, Homo sapiens
ccagataataggcagtggttacaca

SEQ ID NO: 27727 - DNA, 25 bp, Homo sapiens
cgtggtctccagatggttctctgta

SEQ ID NO: 27728 - DNA, 25 bp, Homo sapiens
gttcctcattatgctctcatgtatg

SEQ ID NO: 27729 - DNA, 25 bp, Homo sapiens
tgatattcagacttgcagtcatttt

SEQ ID NO: 27730 - DNA, 25 bp, Homo sapiens
ggacatctgtgaaaaatgcgtgttc

SEQ ID NO: 27731 - DNA, 25 bp, Homo sapiens
aatgaagaagaaatactccagtaac

SEQ ID NO: 27732 - DNA, 25 bp, Homo sapiens
cgggtgctctcttttgagaaactta

SEQ ID NO: 27733 - DNA, 25 bp, Homo sapiens
cccaaacccttgaagtacagtagtc

SEQ ID NO: 27734 - DNA, 25 bp, Homo sapiens
actctcttcactaatttgtttttga

SEQ ID NO: 27735 - DNA, 25 bp, Homo sapiens
cccagaggtgtcacttgatgaagtc

SEQ ID NO: 27736 - DNA, 25 bp, Homo sapiens
tcttggcttattaccttgcttggga

SEQ ID NO: 27737 - DNA, 25 bp, Homo sapiens
ggagccaacttgtgctatttgattc

SEQ ID NO: 27738 - DNA, 25 bp, Homo sapiens
ccgacctgcattgccacagaatatg

SEQ ID NO: 27739 - DNA, 25 bp, Homo sapiens
tgggctgatccataagttgtcttta

SEQ ID NO: 27740 - DNA, 25 bp, Homo sapiens
ggtgcctctcacctgccagaaaata

SEQ ID NO: 27741 - DNA, 25 bp, Homo sapiens
ggcacctgggtatttcaagatttta

SEQ ID NO: 27742 - DNA, 25 bp, Homo sapiens
ccagggctccctacaggtgcttata

SEQ ID NO: 27743 - DNA, 25 bp, Homo sapiens
attaggtttttaaacgcttcagaat

SEQ ID NO: 27744 - DNA, 25 bp, Homo sapiens
cttctgcccttaattgtgtatgacc

SEQ ID NO: 27745 - DNA, 25 bp, Homo sapiens
ggatgctttccatcgtcttctttgg

SEQ ID NO: 27746 - DNA, 25 bp, Homo sapiens
ccgaagcaaatgtcatgcaggtgca

SEQ ID NO: 27747 - DNA, 25 bp, Homo sapiens
gtgcctgacctcctacaagataatg

SEQ ID NO: 27748 - DNA, 25 bp, Homo sapiens
atgtggcctgatcccatgactggtc

SEQ ID NO: 27749 - DNA, 25 bp, Homo sapiens
tttcaggggcacataaggcatttgg

SEQ ID NO: 27750 - DNA, 25 bp, Homo sapiens
gggtgcacagcaattctatctaagc

SEQ ID NO: 27751 - DNA, 25 bp, Homo sapiens
cagtgacctttctatgcctgtggca

SEQ ID NO: 27752 - DNA, 25 bp, Homo sapiens
ctttaagtttgaggttgagtgccac

SEQ ID NO: 27753 - DNA, 25 bp, Homo sapiens
atggtgttcctcctcattgctaagc

SEQ ID NO: 27754 - DNA, 25 bp, Homo sapiens
tgtggtcggcatagtccaaactctg

SEQ ID NO: 27755 - DNA, 25 bp, Homo sapiens
tcaccgttaagcaaggacacctgtt

SEQ ID NO: 27756 - DNA, 25 bp, Homo sapiens
cctgggctacccgtttcatctatga

SEQ ID NO: 27757 - DNA, 25 bp, Homo sapiens
tcttcttacggagggagctgtccta

SEQ ID NO: 27758 - DNA, 25 bp, Homo sapiens
cctgatcattgcctagggttacaaa

SEQ ID NO: 27759 - DNA, 25 bp, Homo sapiens
cctagctgtgtgtggccatctttaa

SEQ ID NO: 27760 - DNA, 25 bp, Homo sapiens
actggtgtatgtatgagtagccatc

SEQ ID NO: 27761 - DNA, 25 bp, Homo sapiens
gcaaccacggtccatgtccatgatg

SEQ ID NO: 27762 - DNA, 25 bp, Homo sapiens
cactagattctctctctggtcaaga

SEQ ID NO: 27763 - DNA, 25 bp, Homo sapiens
ttggaattatctactcaggtgcagc

SEQ ID NO: 27764 - DNA, 25 bp, Homo sapiens
ccctcagtgggctatactattcatg

SEQ ID NO: 27765 - DNA, 25 bp, Homo sapiens
ggcctggcagctcagacaaattttg

SEQ ID NO: 27766 - DNA, 25 bp, Homo sapiens
ttgtcaaaaatacacagtagcgccc

SEQ ID NO: 27767 - DNA, 25 bp, Homo sapiens
agtccatatttttcacgggaaattg

SEQ ID NO: 27768 - DNA, 25 bp, Homo sapiens
cttactttcctacacttctgttatc

SEQ ID NO: 27769 - DNA, 25 bp, Homo sapiens
tccaggttaggcagtggcaaaaagc

SEQ ID NO: 27770 - DNA, 25 bp, Homo sapiens
ttccagttgatgcagaagcattata

SEQ ID NO: 27771 - DNA, 25 bp, Homo sapiens
tgacagtaagaattattatgtgcaa

SEQ ID NO: 27772 - DNA, 25 bp, Homo sapiens
tactgttttaaagccctaagatttg

SEQ ID NO: 27773 - DNA, 25 bp, Homo sapiens
ataactatcttttttggttgatact

SEQ ID NO: 27774 - DNA, 25 bp, Homo sapiens
tcctgggatcagcagtcttggaaga

SEQ ID NO: 27775 - DNA, 25 bp, Homo sapiens
aggatgattgacttacccaggtttc

SEQ ID NO: 27776 - DNA, 25 bp, Homo sapiens
ggaccaccataattataaagctttg

SEQ ID NO: 27777 - DNA, 25 bp, Homo sapiens
atgcattttgaaaactgtgtgcaaa

SEQ ID NO: 27778 - DNA, 25 bp, Homo sapiens
agaatttacttatttttaaagaata

SEQ ID NO: 27779 - DNA, 25 bp, Homo sapiens
ggctgccttgacagaagtttccaac

SEQ ID NO: 27780 - DNA, 25 bp, Homo sapiens
accaagtgtatttcctgtactcaga

SEQ ID NO: 27781 - DNA, 25 bp, Homo sapiens
ggcagtccttggcatggcaaaatca

SEQ ID NO: 27782 - DNA, 25 bp, Homo sapiens
cactttatgcattgtaccgtaggga

SEQ ID NO: 27783 - DNA, 25 bp, Homo sapiens
tgtgtccatttcaagcctattagca

SEQ ID NO: 27784 - DNA, 25 bp, Homo sapiens
cccacagatgctgtcagtattttac

SEQ ID NO: 27785 - DNA, 25 bp, Homo sapiens
tgtgtctgtatacctgtcccaatga

SEQ ID NO: 27786 - DNA, 25 bp, Homo sapiens
ccgagacttggtgtttgcttgatcc

SEQ ID NO: 27787 - DNA, 25 bp, Homo sapiens
cctgctaattgtttgtcctggtcta

SEQ ID NO: 27788 - DNA, 25 bp, Homo sapiens
agcaggtttggttcaggtaagcacc

SEQ ID NO: 27789 - DNA, 25 bp, Homo sapiens
agcagattatcttccctattcagtc

SEQ ID NO: 27790 - DNA, 25 bp, Homo sapiens
cagtgtgccctttttcccatgtata

SEQ ID NO: 27791 - DNA, 25 bp, Homo sapiens
ggttctaagggtaaaattattagat

SEQ ID NO: 27792 - DNA, 25 bp, Homo sapiens
cagccacactgtgagcagagttatc

SEQ ID NO: 27793 - DNA, 25 bp, Homo sapiens
cggcagtcttttcaccatgagttca

SEQ ID NO: 27794 - DNA, 25 bp, Homo sapiens
tgaaatcctctctctcgactgaaag

SEQ ID NO: 27795 - DNA, 25 bp, Homo sapiens
ggaatttggggacacctatcactta

SEQ ID NO: 27796 - DNA, 25 bp, Homo sapiens
ccttttgtgaagttatgagccctca

SEQ ID NO: 27797 - DNA, 25 bp, Homo sapiens
cgtttctttatgtgtcaaccagaga

SEQ ID NO: 27798 - DNA, 25 bp, Homo sapiens
ccctgaggagttagacctgtgacca

SEQ ID NO: 27799 - DNA, 25 bp, Homo sapiens
ggctttctgggaatgcacacataga

SEQ ID NO: 27800 - DNA, 25 bp, Homo sapiens
ttaaattctaggtgctctgatgggc

SEQ ID NO: 27801 - DNA, 25 bp, Homo sapiens
ctgggatcaattgcttctctataca

SEQ ID NO: 27802 - DNA, 25 bp, Homo sapiens
ctgtgttcagagcttttcctataga

SEQ ID NO: 27803 - DNA, 25 bp, Homo sapiens
ctggccaccagttatttgaacaacc

SEQ ID NO: 27804 - DNA, 25 bp, Homo sapiens
tgtataaatccctcttctctcttgc

SEQ ID NO: 27805 - DNA, 25 bp, Homo sapiens
tagaataatgtggataggctttccc

SEQ ID NO: 27806 - DNA, 25 bp, Homo sapiens
tggtattcgtcatatataggttttc

SEQ ID NO: 27807 - DNA, 25 bp, Homo sapiens
tgcccaggaatttgcatcatgtgta

SEQ ID NO: 27808 - DNA, 25 bp, Homo sapiens
gcaaacgctatggtcttccttatta

SEQ ID NO: 27809 - DNA, 25 bp, Homo sapiens
gtggctggggtcttaaacaattttg

SEQ ID NO: 27810 - DNA, 25 bp, Homo sapiens
ttccaaattcaagcattctcctgtg

SEQ ID NO: 27811 - DNA, 25 bp, Homo sapiens
cggacactaggtgccaagatctttc

SEQ ID NO: 27812 - DNA, 25 bp, Homo sapiens
ccctcaattcctaaccagttgggtg

SEQ ID NO: 27813 - DNA, 25 bp, Homo sapiens
ctccagaccttaagtgacatttttt

SEQ ID NO: 27814 - DNA, 25 bp, Homo sapiens
tggctaagctcaagtgcagtatatg

SEQ ID NO: 27815 - DNA, 25 bp, Homo sapiens
ggggcctactttgagtttaatctgc

SEQ ID NO: 27816 - DNA, 25 bp, Homo sapiens
gtgatgctttacatttcttcttata

SEQ ID NO: 27817 - DNA, 25 bp, Homo sapiens
acttgccttttagctgggatcttga

SEQ ID NO: 27818 - DNA, 25 bp, Homo sapiens
gagcagttgatgcactttgatccca

SEQ ID NO: 27819 - DNA, 25 bp, Homo sapiens
tttggcaggacctctgaattcagta

SEQ ID NO: 27820 - DNA, 25 bp, Homo sapiens
tacccacgagccctaaagccttttg

SEQ ID NO: 27821 - DNA, 25 bp, Homo sapiens
tttgctttttatctgaaacctcttc

SEQ ID NO: 27822 - DNA, 25 bp, Homo sapiens
gaggtgctgaactaaaccctatgta

SEQ ID NO: 27823 - DNA, 25 bp, Homo sapiens
atggccaatgttccttctgaaaatg

SEQ ID NO: 27824 - DNA, 25 bp, Homo sapiens
gaaaatgctttcctcaccctgtatg

SEQ ID NO: 27825 - DNA, 25 bp, Homo sapiens
atgccctgggtgtgactcattctga

SEQ ID NO: 27826 - DNA, 25 bp, Homo sapiens
ccgtatatgtgttctcatgcttcca

SEQ ID NO: 27827 - DNA, 25 bp, Homo sapiens
cactgcctctgggtagggtagatta

SEQ ID NO: 27828 - DNA, 25 bp, Homo sapiens
ggggtttcacaagtagtcattgagt

SEQ ID NO: 27829 - DNA, 25 bp, Homo sapiens
ggctgataccacaggcaccaactta

SEQ ID NO: 27830 - DNA, 25 bp, Homo sapiens
tgatcaatctgtcaaaagggctaga

SEQ ID NO: 27831 - DNA, 25 bp, Homo sapiens
gctggggctgatatgactcctattc

SEQ ID NO: 27832 - DNA, 25 bp, Homo sapiens
caggcaaacagtaagaaaaacagat

SEQ ID NO: 27833 - DNA, 25 bp, Homo sapiens
ggctagcatctgtaccacatgtcta

SEQ ID NO: 27834 - DNA, 25 bp, Homo sapiens
ttgtacatggtctattgtcacttat

SEQ ID NO: 27835 - DNA, 25 bp, Homo sapiens
ccagcctgtgggagaaatttattta

SEQ ID NO: 27836 - DNA, 25 bp, Homo sapiens
cccaaaattggaaacagtgtctaca

SEQ ID NO: 27837 - DNA, 25 bp, Homo sapiens
gagatgcaggacctatccttatagg

SEQ ID NO: 27838 - DNA, 25 bp, Homo sapiens
gcgtggcctatatttaacgaaaaca

SEQ ID NO: 27839 - DNA, 25 bp, Homo sapiens
acgtggtgcattcttcactagtcaa

SEQ ID NO: 27840 - DNA, 25 bp, Homo sapiens
ggcctacccgtctatcctttagaaa

SEQ ID NO: 27841 - DNA, 25 bp, Homo sapiens
ttagaaagtcttgtcaccagtcgtc

SEQ ID NO: 27842 - DNA, 25 bp, Homo sapiens
ctggggactcttctgtaatctactc

SEQ ID NO: 27843 - DNA, 25 bp, Homo sapiens
agcacttttgtgtaactcctactgg

SEQ ID NO: 27844 - DNA, 25 bp, Homo sapiens
tggccggtatcaaaacgacagttct

SEQ ID NO: 27845 - DNA, 25 bp, Homo sapiens
ggagttcatagacttccacctagca

SEQ ID NO: 27846 - DNA, 25 bp, Homo sapiens
ggggacctggttacttgtggcaaca

SEQ ID NO: 27847 - DNA, 25 bp, Homo sapiens
tacggcaatagcgaactgagatata

SEQ ID NO: 27848 - DNA, 25 bp, Homo sapiens
ggacaaataacctacttatttactt

SEQ ID NO: 27849 - DNA, 25 bp, Homo sapiens
caactcattcctaaattctacatta

SEQ ID NO: 27850 - DNA, 25 bp, Homo sapiens
tcattcagttttacccagagatttc

SEQ ID NO: 27851 - DNA, 25 bp, Homo sapiens
cccatcctgagttttggttctgaaa

SEQ ID NO: 27852 - DNA, 25 bp, Homo sapiens
tgttttgtctccaaggcatcacttc

SEQ ID NO: 27853 - DNA, 25 bp, Homo sapiens
tcaatttgacttggcaggcgcaaca

SEQ ID NO: 27854 - DNA, 25 bp, Homo sapiens
gcctaagatgctacagccagataga

SEQ ID NO: 27855 - DNA, 25 bp, Homo sapiens
agagagcaagatagtgagaaagtaa

SEQ ID NO: 27856 - DNA, 25 bp, Homo sapiens
gctactgtctctatgttgcctggaa

SEQ ID NO: 27857 - DNA, 25 bp, Homo sapiens
ggaagtattaccatccctaggccta

SEQ ID NO: 27858 - DNA, 25 bp, Homo sapiens
tgccttgcgtagacatttggtttcc

SEQ ID NO: 27859 - DNA, 25 bp, Homo sapiens
ccattttgtggtctttgcagagtca

SEQ ID NO: 27860 - DNA, 25 bp, Homo sapiens
tagtcaccactgtcaagcatgtagg

SEQ ID NO: 27861 - DNA, 25 bp, Homo sapiens
ccaggatctgtttctcacacctata

SEQ ID NO: 27862 - DNA, 25 bp, Homo sapiens
tggggctatgtcaacaacatgtgtg

SEQ ID NO: 27863 - DNA, 25 bp, Homo sapiens
tggtcaccccttttgataattctct

SEQ ID NO: 27864 - DNA, 25 bp, Homo sapiens
cattcttagcttgagaggcatctta

SEQ ID NO: 27865 - DNA, 25 bp, Homo sapiens
ttggagcaacccatgagttattttc

SEQ ID NO: 27866 - DNA, 25 bp, Homo sapiens
agcctcaccgggttggaaatatacg

SEQ ID NO: 27867 - DNA, 25 bp, Homo sapiens
ctggtggtcacctactgctgagatg

SEQ ID NO: 27868 - DNA, 25 bp, Homo sapiens
ggtaggccctggaaatggattattc

SEQ ID NO: 27869 - DNA, 25 bp, Homo sapiens
atgattaagctatctgggccatttg

SEQ ID NO: 27870 - DNA, 25 bp, Homo sapiens
attagaaagtagaatcatcatgtca

SEQ ID NO: 27871 - DNA, 25 bp, Homo sapiens
actatagactagagcaagagactca

SEQ ID NO: 27872 - DNA, 25 bp, Homo sapiens
taacaatacacttagaaactgaagt

SEQ ID NO: 27873 - DNA, 25 bp, Homo sapiens
catggcagcttgatgacacattgtg

SEQ ID NO: 27874 - DNA, 25 bp, Homo sapiens
cctaggtattttgaggcattctaaa

SEQ ID NO: 27875 - DNA, 25 bp, Homo sapiens
tccttgggcacctttgtctggacaa

SEQ ID NO: 27876 - DNA, 25 bp, Homo sapiens
tgggccactgccaccatcatataca

SEQ ID NO: 27877 - DNA, 25 bp, Homo sapiens
atattatacttcagagatattataa

SEQ ID NO: 27878 - DNA, 25 bp, Homo sapiens
cccttcctaaagtggtctatgttga

SEQ ID NO: 27879 - DNA, 25 bp, Homo sapiens
gggacatcgcataactgaccctgtt

SEQ ID NO: 27880 - DNA, 25 bp, Homo sapiens
ccaggctactggtttatcacttaag

SEQ ID NO: 27881 - DNA, 25 bp, Homo sapiens
gacaccttcctgactgctacaatgg

SEQ ID NO: 27882 - DNA, 25 bp, Homo sapiens
cctgacagtggagctctgaaccata

SEQ ID NO: 27883 - DNA, 25 bp, Homo sapiens
agacgttttatcttggggtcccaca

SEQ ID NO: 27884 - DNA, 25 bp, Homo sapiens
gctgccttagtcttttctgccctta

SEQ ID NO: 27885 - DNA, 25 bp, Homo sapiens
cccatggtggaaaggtcaactccta

SEQ ID NO: 27886 - DNA, 25 bp, Homo sapiens
ctcatggcccagctatctctttgtc

SEQ ID NO: 27887 - DNA, 25 bp, Homo sapiens
gtcggtactgtagcatatacaattt

SEQ ID NO: 27888 - DNA, 25 bp, Homo sapiens
gtctccctctttcttgacttatatt

SEQ ID NO: 27889 - DNA, 25 bp, Homo sapiens
gtgtcttacagatctcatgagctcc

SEQ ID NO: 27890 - DNA, 25 bp, Homo sapiens
ggcttccgtaccctggattatcata

SEQ ID NO: 27891 - DNA, 25 bp, Homo sapiens
ttgggccactatattctgatctgtc

SEQ ID NO: 27892 - DNA, 25 bp, Homo sapiens
ttcgtgagtgtagatgcaaaactgc

SEQ ID NO: 27893 - DNA, 25 bp, Homo sapiens
acggtaacctttgtcttggggtata

SEQ ID NO: 27894 - DNA, 25 bp, Homo sapiens
tcagcaagtggtgttttcaagatca

SEQ ID NO: 27895 - DNA, 25 bp, Homo sapiens
actttgagtcttcatgctgttgaca

SEQ ID NO: 27896 - DNA, 25 bp, Homo sapiens
ggagagggactgctgtatttcaata

SEQ ID NO: 27897 - DNA, 25 bp, Homo sapiens
atagcatatgtcaaattagtaattt

SEQ ID NO: 27898 - DNA, 25 bp, Homo sapiens
cagtgtcccaggctcgtccaatcaa

SEQ ID NO: 27899 - DNA, 25 bp, Homo sapiens
aggcccgctgtatattaagaaatcc

SEQ ID NO: 27900 - DNA, 25 bp, Homo sapiens
tgattggccaaacccattgacagtt

SEQ ID NO: 27901 - DNA, 25 bp, Homo sapiens
ggatagtcactcaggtacattcata

SEQ ID NO: 27902 - DNA, 25 bp, Homo sapiens
tttgttgcatagacaagatgccttc

SEQ ID NO: 27903 - DNA, 25 bp, Homo sapiens
ctgagtaaccatgggaacgcacttt

SEQ ID NO: 27904 - DNA, 25 bp, Homo sapiens
tttcctggagggctgacaaatgctc

SEQ ID NO: 27905 - DNA, 25 bp, Homo sapiens
ctgccaaactctcatggaaagatgg

SEQ ID NO: 27906 - DNA, 25 bp, Homo sapiens
ctcattattaacatttatatccaca

SEQ ID NO: 27907 - DNA, 25 bp, Homo sapiens
gtacattatatgtttgatcttttta

SEQ ID NO: 27908 - DNA, 25 bp, Homo sapiens
attcctcaaggtatggtattttccc

SEQ ID NO: 27909 - DNA, 25 bp, Homo sapiens
ccttagtgctgatggtacaaaaata

SEQ ID NO: 27910 - DNA, 25 bp, Homo sapiens
ggtggttctatcagctcttatctaa

SEQ ID NO: 27911 - DNA, 25 bp, Homo sapiens
attttactttgcaatcctacccgga

SEQ ID NO: 27912 - DNA, 25 bp, Homo sapiens
acaccaggtatatgccacacaaatg

SEQ ID NO: 27913 - DNA, 25 bp, Homo sapiens
tgcctgcctaccaccaatatattgt

SEQ ID NO: 27914 - DNA, 25 bp, Homo sapiens
tccgtgataactctgctctgctttg

SEQ ID NO: 27915 - DNA, 25 bp, Homo sapiens
ctcccttaggattgtgttcagaatc

SEQ ID NO: 27916 - DNA, 25 bp, Homo sapiens
aagttgtatttcctctgcctctgta

SEQ ID NO: 27917 - DNA, 25 bp, Homo sapiens
tgggctgtatcaagggtgcattatc

SEQ ID NO: 27918 - DNA, 25 bp, Homo sapiens
tgaccgttggtctaggaataagcct

SEQ ID NO: 27919 - DNA, 25 bp, Homo sapiens
tggcgtcttgacctctgaaatctag

SEQ ID NO: 27920 - DNA, 25 bp, Homo sapiens
tggctgctggtgttatgattatctc

SEQ ID NO: 27921 - DNA, 25 bp, Homo sapiens
ctggaggtcttcagaaaatgttttc

SEQ ID NO: 27922 - DNA, 25 bp, Homo sapiens
aggggcctttgttatatttctcagc

SEQ ID NO: 27923 - DNA, 25 bp, Homo sapiens
tgctgcactgccataagatagttga

SEQ ID NO: 27924 - DNA, 25 bp, Homo sapiens
ttgctagccgcatgcctcaaggatc

SEQ ID NO: 27925 - DNA, 25 bp, Homo sapiens
tgggctgggctaactacttaccatc

SEQ ID NO: 27926 - DNA, 25 bp, Homo sapiens
caccgtactgttatctgaatctttc

SEQ ID NO: 27927 - DNA, 25 bp, Homo sapiens
gggaactgtgatgaaatatgggata

SEQ ID NO: 27928 - DNA, 25 bp, Homo sapiens
tcctcagcaattaggggacccagtt

SEQ ID NO: 27929 - DNA, 25 bp, Homo sapiens
agctggtatgctgaagctcctttta

SEQ ID NO: 27930 - DNA, 25 bp, Homo sapiens
atcactgtcagcaactgtgtgttta

SEQ ID NO: 27931 - DNA, 25 bp, Homo sapiens
tcacattttcaagagcgcataagtc

SEQ ID NO: 27932 - DNA, 25 bp, Homo sapiens
aagaaaataagattgaaatagacac

SEQ ID NO: 27933 - DNA, 25 bp, Homo sapiens
gaaaggcctatgtaaccgctaatca

SEQ ID NO: 27934 - DNA, 25 bp, Homo sapiens
gcaatgggcatatggcttacaacga

SEQ ID NO: 27935 - DNA, 25 bp, Homo sapiens
ccataagtcagtaaaagggaatctc

SEQ ID NO: 27936 - DNA, 25 bp, Homo sapiens
gcgccaatgactttccttctttata

SEQ ID NO: 27937 - DNA, 25 bp, Homo sapiens
attttggcatctctgactggagtta

SEQ ID NO: 27938 - DNA, 25 bp, Homo sapiens
tcccgggtttcctcgtaatccttaa

SEQ ID NO: 27939 - DNA, 25 bp, Homo sapiens
ttagtccagagtggcaagtgtcaga

SEQ ID NO: 27940 - DNA, 25 bp, Homo sapiens
ctgtggcattctctggcaatacgta

SEQ ID NO: 27941 - DNA, 25 bp, Homo sapiens
tgacgctgcctaccctggaaacttg

SEQ ID NO: 27942 - DNA, 25 bp, Homo sapiens
gtctgtttgtcctgtaattattttt

SEQ ID NO: 27943 - DNA, 25 bp, Homo sapiens
ggcaggaaattttttgttcatctac

SEQ ID NO: 27944 - DNA, 25 bp, Homo sapiens
ggtgcttagcttcttcctattaaaa

SEQ ID NO: 27945 - DNA, 25 bp, Homo sapiens
acatgggttatctcttcacagtgaa

SEQ ID NO: 27946 - DNA, 25 bp, Homo sapiens
tcaatccggttctgtctgctttata

SEQ ID NO: 27947 - DNA, 25 bp, Homo sapiens
cttaagtgactgaccaatctacgga

SEQ ID NO: 27948 - DNA, 25 bp, Homo sapiens
cggatcctgcatttctccagctgta

SEQ ID NO: 27949 - DNA, 25 bp, Homo sapiens
acctgggctgctcctgtatcatgga

SEQ ID NO: 27950 - DNA, 25 bp, Homo sapiens
agctgtggccagttcattaccttcc

SEQ ID NO: 27951 - DNA, 25 bp, Homo sapiens
caggccagtgataagggaattttta

SEQ ID NO: 27952 - DNA, 25 bp, Homo sapiens
actacatacaaaaataagatattag

SEQ ID NO: 27953 - DNA, 25 bp, Homo sapiens
ccactaactgggagaggccatcaca

SEQ ID NO: 27954 - DNA, 25 bp, Homo sapiens
ctgcattatcaagtaccgggtttca

SEQ ID NO: 27955 - DNA, 25 bp, Homo sapiens
ggtcagtctacattttacctgcaga

SEQ ID NO: 27956 - DNA, 25 bp, Homo sapiens
tcagcgttgcaaacgggagctcttc

SEQ ID NO: 27957 - DNA, 25 bp, Homo sapiens
ccaagtccaagtaaaccagttcagt

SEQ ID NO: 27958 - DNA, 25 bp, Homo sapiens
acagcttgagctactaggaaaattc

SEQ ID NO: 27959 - DNA, 25 bp, Homo sapiens
gcctgaaagggctactggaaaattc

SEQ ID NO: 27960 - DNA, 25 bp, Homo sapiens
ttcggcccagggtctaattaaagtc

SEQ ID NO: 27961 - DNA, 25 bp, Homo sapiens
agttcttcctacctttgagtttata

SEQ ID NO: 27962 - DNA, 25 bp, Homo sapiens
tgttacacacatgaaggtccatgta

SEQ ID NO: 27963 - DNA, 25 bp, Homo sapiens
gacgtatatctcatcctgtagtagg

SEQ ID NO: 27964 - DNA, 25 bp, Homo sapiens
gctctctccttgtcgtgtgtgaata

SEQ ID NO: 27965 - DNA, 25 bp, Homo sapiens
atggtgatatccctacttggactgc

SEQ ID NO: 27966 - DNA, 25 bp, Homo sapiens
aaacacacacaaaaagcccagtatc

SEQ ID NO: 27967 - DNA, 25 bp, Homo sapiens
ttgttaatctattcttcaggaccga

SEQ ID NO: 27968 - DNA, 25 bp, Homo sapiens
tccttctaatatattacacattatt

SEQ ID NO: 27969 - DNA, 25 bp, Homo sapiens
tacaccagggagatagcagttattc

SEQ ID NO: 27970 - DNA, 25 bp, Homo sapiens
tattacatatagctcagaaccagtg

SEQ ID NO: 27971 - DNA, 25 bp, Homo sapiens
gcagaaaccgtttgcaattttggga

SEQ ID NO: 27972 - DNA, 25 bp, Homo sapiens
cagttgtttccttccacagggagta

SEQ ID NO: 27973 - DNA, 25 bp, Homo sapiens
gagggcctatttgaacttactgtga

SEQ ID NO: 27974 - DNA, 25 bp, Homo sapiens
ccatttgtgagaaaccttgtaactg

SEQ ID NO: 27975 - DNA, 25 bp, Homo sapiens
catggactgatgttgcctgcctaca

SEQ ID NO: 27976 - DNA, 25 bp, Homo sapiens
gcccatttgtctgagtgtacatttg

SEQ ID NO: 27977 - DNA, 25 bp, Homo sapiens
ccaggtgacccaaattaatgcattg

SEQ ID NO: 27978 - DNA, 25 bp, Homo sapiens
tatagacattttgcttctatggtgt

SEQ ID NO: 27979 - DNA, 25 bp, Homo sapiens
tgtagtattcagtcgcacagcaatc

SEQ ID NO: 27980 - DNA, 25 bp, Homo sapiens
cttctaaaactttctcatggagctg

SEQ ID NO: 27981 - DNA, 25 bp, Homo sapiens
gcattgcaggcgccaaacacccgac

SEQ ID NO: 27982 - DNA, 25 bp, Homo sapiens
ccatggaggatattgtttaagtact

SEQ ID NO: 27983 - DNA, 25 bp, Homo sapiens
gcctgacttcatgaactgggtaaga

SEQ ID NO: 27984 - DNA, 25 bp, Homo sapiens
ctatatagtttggtatgcacattcc

SEQ ID NO: 27985 - DNA, 25 bp, Homo sapiens
gatgagccttctcctccctctgagg

SEQ ID NO: 27986 - DNA, 25 bp, Homo sapiens
gactggcattttgaccactatttga

SEQ ID NO: 27987 - DNA, 25 bp, Homo sapiens
ttggatggggaactagctctagctc

SEQ ID NO: 27988 - DNA, 25 bp, Homo sapiens
gtatggctgggaacaaattctcatg

SEQ ID NO: 27989 - DNA, 25 bp, Homo sapiens
caagaaccagagaataagtcacatc

SEQ ID NO: 27990 - DNA, 25 bp, Homo sapiens
tgagaagcagttcgagctcccatta

SEQ ID NO: 27991 - DNA, 25 bp, Homo sapiens
cgtggattctgcaggacgatttttc

SEQ ID NO: 27992 - DNA, 25 bp, Homo sapiens
ggcaaatatcaaacttgaatactta

SEQ ID NO: 27993 - DNA, 25 bp, Homo sapiens
catgcagagttgctccggaatcaaa

SEQ ID NO: 27994 - DNA, 25 bp, Homo sapiens
agcagtttctcagcagctggtttac

SEQ ID NO: 27995 - DNA, 25 bp, Homo sapiens
ggattgtgataagactaaagagggc

SEQ ID NO: 27996 - DNA, 25 bp, Homo sapiens
ccctatcgtggtatagatcatggtc

SEQ ID NO: 27997 - DNA, 25 bp, Homo sapiens
ctttatggaacgttcactctatttc

SEQ ID NO: 27998 - DNA, 25 bp, Homo sapiens
ggacatgtttgagtggaaccctcta

SEQ ID NO: 27999 - DNA, 25 bp, Homo sapiens
gctctgggttctagctaatgctgtc

SEQ ID NO: 28000 - DNA, 25 bp, Homo sapiens
cattttgtaatggaggggtcaattc

SEQ ID NO: 28001 - DNA, 25 bp, Homo sapiens
tgcctcatttttcaaaggagaagag

SEQ ID NO: 28002 - DNA, 25 bp, Homo sapiens
tgggccatagctttagatttattta

SEQ ID NO: 28003 - DNA, 25 bp, Homo sapiens
ggcccagcaagtgtccagtgataaa

SEQ ID NO: 28004 - DNA, 25 bp, Homo sapiens
agttggcctgtacccataatttatc

SEQ ID NO: 28005 - DNA, 25 bp, Homo sapiens
agcagttctttattctagtcccgga

SEQ ID NO: 28006 - DNA, 25 bp, Homo sapiens
ctccaggcagggaacagtctgtttt

SEQ ID NO: 28007 - DNA, 25 bp, Homo sapiens
ggcctgtcctagtccaatttagcta

SEQ ID NO: 28008 - DNA, 25 bp, Homo sapiens
gctgacccaggctcactgcatttta

SEQ ID NO: 28009 - DNA, 25 bp, Homo sapiens
gacaacatgtataacgtttatcatg

SEQ ID NO: 28010 - DNA, 25 bp, Homo sapiens
acagggcatttcctctgacagggga

SEQ ID NO: 28011 - DNA, 25 bp, Homo sapiens
agtgaacttttataagtgtagctag

SEQ ID NO: 28012 - DNA, 25 bp, Homo sapiens
cttaggtttttcaggattttgagaa

SEQ ID NO: 28013 - DNA, 25 bp, Homo sapiens
ttctggcaaccacacgtgaacttgg

SEQ ID NO: 28014 - DNA, 25 bp, Homo sapiens
tgtctggctctctcctaggtaggca

SEQ ID NO: 28015 - DNA, 25 bp, Homo sapiens
tcggttaccagctcctgagggttta

SEQ ID NO: 28016 - DNA, 25 bp, Homo sapiens
ttgctccgggaaacacatttgcctg

SEQ ID NO: 28017 - DNA, 25 bp, Homo sapiens
tctcactttatgtagcgctgtctgg

SEQ ID NO: 28018 - DNA, 25 bp, Homo sapiens
tgtgcaatgtgcttccctctctgtg

SEQ ID NO: 28019 - DNA, 25 bp, Homo sapiens
actgcctgggttctacaaatgttgc

SEQ ID NO: 28020 - DNA, 25 bp, Homo sapiens
agccagtcttgtcacggtcttcatg

SEQ ID NO: 28021 - DNA, 25 bp, Homo sapiens
tgcaagtgctctactaccaggaatc

SEQ ID NO: 28022 - DNA, 25 bp, Homo sapiens
tgcaccctggatcctctgactaagc

SEQ ID NO: 28023 - DNA, 25 bp, Homo sapiens
ggagggatagtgcaactgttataca

SEQ ID NO: 28024 - DNA, 25 bp, Homo sapiens
gtggaacaagctacagtctctactg

SEQ ID NO: 28025 - DNA, 25 bp, Homo sapiens
gttctatttctctctttgttcatgt

SEQ ID NO: 28026 - DNA, 25 bp, Homo sapiens
gacccagttcgtatgatctcaagta

SEQ ID NO: 28027 - DNA, 25 bp, Homo sapiens
tcctgttgtgtttacctgggaagta

SEQ ID NO: 28028 - DNA, 25 bp, Homo sapiens
tgcaagctttcagaaggaaccttta

SEQ ID NO: 28029 - DNA, 25 bp, Homo sapiens
actgtgttagtacgtaatgacctcc

SEQ ID NO: 28030 - DNA, 25 bp, Homo sapiens
ataccacttgttgcctttgaatagc

SEQ ID NO: 28031 - DNA, 25 bp, Homo sapiens
cttctgaaaatatctatggctgcac

SEQ ID NO: 28032 - DNA, 25 bp, Homo sapiens
tcctctcttggagtgcaagcatttg

SEQ ID NO: 28033 - DNA, 25 bp, Homo sapiens
gccagctcccttgattacgccagta

SEQ ID NO: 28034 - DNA, 25 bp, Homo sapiens
acccttcttgccctggtgtgacata

SEQ ID NO: 28035 - DNA, 25 bp, Homo sapiens
cctgtcttttagagggctgaaacta

SEQ ID NO: 28036 - DNA, 25 bp, Homo sapiens
agtggccttctagtccctgcaataa

SEQ ID NO: 28037 - DNA, 25 bp, Homo sapiens
ggtcagggtacccacactgtgttaa

SEQ ID NO: 28038 - DNA, 25 bp, Homo sapiens
ttactggaatgggtgttaaactccc

SEQ ID NO: 28039 - DNA, 25 bp, Homo sapiens
ctgcccttggaatgacatgactaca

SEQ ID NO: 28040 - DNA, 25 bp, Homo sapiens
ttgcttgcgtgataacagggacttc

SEQ ID NO: 28041 - DNA, 25 bp, Homo sapiens
aggggctccactctaaggtttcatg

SEQ ID NO: 28042 - DNA, 25 bp, Homo sapiens
tggcaaccgtttaagacagcactga

SEQ ID NO: 28043 - DNA, 25 bp, Homo sapiens
gctcagtttcgtagctccatgaatg

SEQ ID NO: 28044 - DNA, 25 bp, Homo sapiens
gtctctttcatcagcttggttccta

SEQ ID NO: 28045 - DNA, 25 bp, Homo sapiens
tcggttgtttgatcctgcattcaga

SEQ ID NO: 28046 - DNA, 25 bp, Homo sapiens
ggcaacttcgatttctaggacactt

SEQ ID NO: 28047 - DNA, 25 bp, Homo sapiens
ggcctggactgcatgtcactagata

SEQ ID NO: 28048 - DNA, 25 bp, Homo sapiens
tccctgccaaagagtatgtaatgta

SEQ ID NO: 28049 - DNA, 25 bp, Homo sapiens
ccttggaaatgtagaagagcacatg

SEQ ID NO: 28050 - DNA, 25 bp, Homo sapiens
ctcacagatctcatacacaggagtg

SEQ ID NO: 28051 - DNA, 25 bp, Homo sapiens
cacagcccaggagtcagtttcatca

SEQ ID NO: 28052 - DNA, 25 bp, Homo sapiens
ctgtcctacaggattgtaatgcatc

SEQ ID NO: 28053 - DNA, 25 bp, Homo sapiens
gcttaagctgttctgccactgatga

SEQ ID NO: 28054 - DNA, 25 bp, Homo sapiens
catacttctagtttccaggagcaca

SEQ ID NO: 28055 - DNA, 25 bp, Homo sapiens
ggcagccctccatcctacaagtaag

SEQ ID NO: 28056 - DNA, 25 bp, Homo sapiens
tgggtaaaaaaaaggatagctcaat

SEQ ID NO: 28057 - DNA, 25 bp, Homo sapiens
gacagacttcattcctgggagacta

SEQ ID NO: 28058 - DNA, 25 bp, Homo sapiens
ggcaatgctaagttccaattccaga

SEQ ID NO: 28059 - DNA, 25 bp, Homo sapiens
ctcatactcagaccttggatcaact

SEQ ID NO: 28060 - DNA, 25 bp, Homo sapiens
ggagtcctgctatcctacactgcca

SEQ ID NO: 28061 - DNA, 25 bp, Homo sapiens
ggcatgatgttctccacgtcctctc

SEQ ID NO: 28062 - DNA, 25 bp, Homo sapiens
gagcctgggccttgacaaattaagc

SEQ ID NO: 28063 - DNA, 25 bp, Homo sapiens
tgtggaaataactgatccttggatt

SEQ ID NO: 28064 - DNA, 25 bp, Homo sapiens
gagtggtgagccttgttatagcctc

SEQ ID NO: 28065 - DNA, 25 bp, Homo sapiens
gaactggctaactagttagattgct

SEQ ID NO: 28066 - DNA, 25 bp, Homo sapiens
tccctagtctcatttggggtcgata

SEQ ID NO: 28067 - DNA, 25 bp, Homo sapiens
tcccaggatctcaggccagcttaat

SEQ ID NO: 28068 - DNA, 25 bp, Homo sapiens
gacactccaattatgccagttactg

SEQ ID NO: 28069 - DNA, 25 bp, Homo sapiens
cctcatttgtctctccgggaagtca

SEQ ID NO: 28070 - DNA, 25 bp, Homo sapiens
gccctttctgttgctgatttgtcca

SEQ ID NO: 28071 - DNA, 25 bp, Homo sapiens
atgagtgtccctacctatgttgaga

SEQ ID NO: 28072 - DNA, 25 bp, Homo sapiens
gagccattcagtcatagtcattgta

SEQ ID NO: 28073 - DNA, 25 bp, Homo sapiens
gtgccaggcaaccatgactaatcta

SEQ ID NO: 28074 - DNA, 25 bp, Homo sapiens
gtgagcttttctgtgtgcacttaca

SEQ ID NO: 28075 - DNA, 25 bp, Homo sapiens
ccagctcggaattagggtttttcaa

SEQ ID NO: 28076 - DNA, 25 bp, Homo sapiens
gcctgccttgggaagcaattcaaaa

SEQ ID NO: 28077 - DNA, 25 bp, Homo sapiens
gccaccggcttggtttgcacacaca

SEQ ID NO: 28078 - DNA, 25 bp, Homo sapiens
attaaaatgatttccacataagcaa

SEQ ID NO: 28079 - DNA, 25 bp, Homo sapiens
ggagcatgccttaagatataattta

SEQ ID NO: 28080 - DNA, 25 bp, Homo sapiens
gaaacttttcttgactcgggacctg

SEQ ID NO: 28081 - DNA, 25 bp, Homo sapiens
ttttcagttatcgtatcagggcatc

SEQ ID NO: 28082 - DNA, 25 bp, Homo sapiens
acctcttaatagtcacggatcctga

SEQ ID NO: 28083 - DNA, 25 bp, Homo sapiens
taggcttttgctatgtcagtaaatg

SEQ ID NO: 28084 - DNA, 25 bp, Homo sapiens
accaggggttctttctctaaagtca

SEQ ID NO: 28085 - DNA, 25 bp, Homo sapiens
gcccaccaccttgcatgagagtttt

SEQ ID NO: 28086 - DNA, 25 bp, Homo sapiens
gggctgcattctcaaaacgtcttta

SEQ ID NO: 28087 - DNA, 25 bp, Homo sapiens
gtccagagttttcgcttgcccagca

SEQ ID NO: 28088 - DNA, 25 bp, Homo sapiens
tcggaaagccatggaggccaaacta

SEQ ID NO: 28089 - DNA, 25 bp, Homo sapiens
gcctctgactggaaccctggactca

SEQ ID NO: 28090 - DNA, 25 bp, Homo sapiens
gccttccaagagtcaacagtttttt

SEQ ID NO: 28091 - DNA, 25 bp, Homo sapiens
ggggcagctgttcccactgaaagga

SEQ ID NO: 28092 - DNA, 25 bp, Homo sapiens
cccaccaaagctttaagggcaattg

SEQ ID NO: 28093 - DNA, 25 bp, Homo sapiens
gagcccagggccaaaacagtctttc

SEQ ID NO: 28094 - DNA, 25 bp, Homo sapiens
caggcatgcagtccgcgatcattca

SEQ ID NO: 28095 - DNA, 25 bp, Homo sapiens
cagggcagctgtcttattgtaatcc

SEQ ID NO: 28096 - DNA, 25 bp, Homo sapiens
actgccaccaagcagggctgattta

SEQ ID NO: 28097 - DNA, 25 bp, Homo sapiens
tgttctgtggatgctgccttcatta

SEQ ID NO: 28098 - DNA, 25 bp, Homo sapiens
gtggttccaaagtgcctcgtctata

SEQ ID NO: 28099 - DNA, 25 bp, Homo sapiens
tccaggcacagcagagagtttactc

SEQ ID NO: 28100 - DNA, 25 bp, Homo sapiens
cctcaattgggaaatgatctagctc

SEQ ID NO: 28101 - DNA, 25 bp, Homo sapiens
acacgggtcctcactcttcagggga

SEQ ID NO: 28102 - DNA, 25 bp, Homo sapiens
tgagtgcccaattgttagccaaaga

SEQ ID NO: 28103 - DNA, 25 bp, Homo sapiens
agtccctgtcctgaaccactgaagg

SEQ ID NO: 28104 - DNA, 25 bp, Homo sapiens
tgtgcatcctgcctcatgtaagttc

SEQ ID NO: 28105 - DNA, 25 bp, Homo sapiens
ggcaaccacaggagaaggcatttca

SEQ ID NO: 28106 - DNA, 25 bp, Homo sapiens
gccctcacttgctgcctttagatta

SEQ ID NO: 28107 - DNA, 25 bp, Homo sapiens
agcctcacacttagccgggaatatg

SEQ ID NO: 28108 - DNA, 25 bp, Homo sapiens
gcctctgatggtgaactccacctta

SEQ ID NO: 28109 - DNA, 25 bp, Homo sapiens
cggtcccttcacaaaagcagatttc

SEQ ID NO: 28110 - DNA, 25 bp, Homo sapiens
gagtcctgcctgttgcccaataata

SEQ ID NO: 28111 - DNA, 25 bp, Homo sapiens
tcttgccagagtagcggcccatctc

SEQ ID NO: 28112 - DNA, 25 bp, Homo sapiens
gggctgacctcctctgtgtacttgt

SEQ ID NO: 28113 - DNA, 25 bp, Homo sapiens
tctgaggtccataacagccatgcta

SEQ ID NO: 28114 - DNA, 25 bp, Homo sapiens
ggggacccattcctgactttaagaa

SEQ ID NO: 28115 - DNA, 25 bp, Homo sapiens
ctgctcctggcctttaatgcttctt

SEQ ID NO: 28116 - DNA, 25 bp, Homo sapiens
ggagttgtgatttgcagcccaccta

SEQ ID NO: 28117 - DNA, 25 bp, Homo sapiens
tccatctggggagcagtgaagttta

SEQ ID NO: 28118 - DNA, 25 bp, Homo sapiens
gccaactgtggtatctggggtcatc

SEQ ID NO: 28119 - DNA, 25 bp, Homo sapiens
ctggctgttgtcatacccaaaacta

SEQ ID NO: 28120 - DNA, 25 bp, Homo sapiens
ttgaatgctgcaccctcctggtttt

SEQ ID NO: 28121 - DNA, 25 bp, Homo sapiens
gtggggcacttatatccaaatctgc

SEQ ID NO: 28122 - DNA, 25 bp, Homo sapiens
gcctgggatttggaatgcacctcta

SEQ ID NO: 28123 - DNA, 25 bp, Homo sapiens
tgggaagccgtacaaagggtctata

SEQ ID NO: 28124 - DNA, 25 bp, Homo sapiens
gcccaggatgtcactgctgcacata

SEQ ID NO: 28125 - DNA, 25 bp, Homo sapiens
taataataactcaggcaaacaattt

SEQ ID NO: 28126 - DNA, 25 bp, Homo sapiens
ttgaatgggcaggttaatgagaacc

SEQ ID NO: 28127 - DNA, 25 bp, Homo sapiens
ttcatctagtccttccaggggagcc

SEQ ID NO: 28128 - DNA, 25 bp, Homo sapiens
tcaggtgcagacagtatatatcagg

SEQ ID NO: 28129 - DNA, 25 bp, Homo sapiens
aagatggtcctgaggccttttcata

SEQ ID NO: 28130 - DNA, 25 bp, Homo sapiens
gatggcagattagcacaggctccca

SEQ ID NO: 28131 - DNA, 25 bp, Homo sapiens
gtaacccaggaaagttgcagtactg

SEQ ID NO: 28132 - DNA, 25 bp, Homo sapiens
atatgatttaagcatgagaagtgcc

SEQ ID NO: 28133 - DNA, 25 bp, Homo sapiens
atattttttcatctttggtagtagc

SEQ ID NO: 28134 - DNA, 25 bp, Homo sapiens
cgtcatctaaggaggcaaattccca

SEQ ID NO: 28135 - DNA, 25 bp, Homo sapiens
agagtcactgttgggcatcttatta

SEQ ID NO: 28136 - DNA, 25 bp, Homo sapiens
gttatccctactattattcttcatg

SEQ ID NO: 28137 - DNA, 25 bp, Homo sapiens
ccttgacagacttttttctttacac

SEQ ID NO: 28138 - DNA, 25 bp, Homo sapiens
tgggcatttggaggagctttaaacc

SEQ ID NO: 28139 - DNA, 25 bp, Homo sapiens
cctactgatttgtctgatgtacttg

SEQ ID NO: 28140 - DNA, 25 bp, Homo sapiens
tatttgttaaaagttctatttaaga

SEQ ID NO: 28141 - DNA, 25 bp, Homo sapiens
agaggagctggtactaagacaaaga

SEQ ID NO: 28142 - DNA, 25 bp, Homo sapiens
aaaagaaattcaataggataaactc

SEQ ID NO: 28143 - DNA, 25 bp, Homo sapiens
agttcaacttgaggaaggatctgca

SEQ ID NO: 28144 - DNA, 25 bp, Homo sapiens
cctcatttatttgggatggacagta

SEQ ID NO: 28145 - DNA, 25 bp, Homo sapiens
tgttttaaccatattcccttgggtg

SEQ ID NO: 28146 - DNA, 25 bp, Homo sapiens
gttctctgatatattggtttgacca

SEQ ID NO: 28147 - DNA, 25 bp, Homo sapiens
cttgttgcactttgagagcttggta

SEQ ID NO: 28148 - DNA, 25 bp, Homo sapiens
accctgtttcttgtgtgggattata

SEQ ID NO: 28149 - DNA, 25 bp, Homo sapiens
ggagactctctctacctgaagccta

SEQ ID NO: 28150 - DNA, 25 bp, Homo sapiens
tatccaggtacccataatctgaggc

SEQ ID NO: 28151 - DNA, 25 bp, Homo sapiens
gtgcgcacgtgttggtcatccagaa

SEQ ID NO: 28152 - DNA, 25 bp, Homo sapiens
cactgctttgacctctccggggtta

SEQ ID NO: 28153 - DNA, 25 bp, Homo sapiens
tcttcaaagatctggcggaaacttc

SEQ ID NO: 28154 - DNA, 25 bp, Homo sapiens
ctagagggtccaggagcatttgaca

SEQ ID NO: 28155 - DNA, 25 bp, Homo sapiens
tggaatctgtgtatatatgcacatt

SEQ ID NO: 28156 - DNA, 25 bp, Homo sapiens
ttacttttcaaaagtattaacaact

SEQ ID NO: 28157 - DNA, 25 bp, Homo sapiens
atgttttaagttcccaagcctgtta

SEQ ID NO: 28158 - DNA, 25 bp, Homo sapiens
actgtctggcatcctgggaatttgc

SEQ ID NO: 28159 - DNA, 25 bp, Homo sapiens
agctatagcctctggatgatcctca

SEQ ID NO: 28160 - DNA, 25 bp, Homo sapiens
ttcctgtgaccatggcttgggactc

SEQ ID NO: 28161 - DNA, 25 bp, Homo sapiens
cagatatgtatggagcacagccacc

SEQ ID NO: 28162 - DNA, 25 bp, Homo sapiens
ggcaaactggcatgtgagcgctatc

SEQ ID NO: 28163 - DNA, 25 bp, Homo sapiens
caggaccatttcctgatgacattta

SEQ ID NO: 28164 - DNA, 25 bp, Homo sapiens
cttggtcccagttggcatacaggta

SEQ ID NO: 28165 - DNA, 25 bp, Homo sapiens
ccctaactgtgggactttagcccta

SEQ ID NO: 28166 - DNA, 25 bp, Homo sapiens
attgatgcctttgcccatgcttttg

SEQ ID NO: 28167 - DNA, 25 bp, Homo sapiens
tacggaattgggtcctgccctagca

SEQ ID NO: 28168 - DNA, 25 bp, Homo sapiens
agcaaatttccagtagacacgtgtc

SEQ ID NO: 28169 - DNA, 25 bp, Homo sapiens
ggagctctcacttctcctttgtgga

SEQ ID NO: 28170 - DNA, 25 bp, Homo sapiens
ctattcaaatgtgaagatgatcttc

SEQ ID NO: 28171 - DNA, 25 bp, Homo sapiens
ttctagttgtgaaattcaaggcaga

SEQ ID NO: 28172 - DNA, 25 bp, Homo sapiens
atgtgtggacctaccctgccttgtt

SEQ ID NO: 28173 - DNA, 25 bp, Homo sapiens
agagaccgcctccaatgttccaata

SEQ ID NO: 28174 - DNA, 25 bp, Homo sapiens
ggctgactcccaacgcatacacatg

SEQ ID NO: 28175 - DNA, 25 bp, Homo sapiens
agagaggggtttctatttttaaata

SEQ ID NO: 28176 - DNA, 25 bp, Homo sapiens
ctttttataataaaactaattagcc

SEQ ID NO: 28177 - DNA, 25 bp, Homo sapiens
gttttccttatccaaatgtgtgtta

SEQ ID NO: 28178 - DNA, 25 bp, Homo sapiens
ggcctcccttccttgtactgactgt

SEQ ID NO: 28179 - DNA, 25 bp, Homo sapiens
gcatctcatatttacagtctgtggg

SEQ ID NO: 28180 - DNA, 25 bp, Homo sapiens
tcccagtctgagaaaaatttcattc

SEQ ID NO: 28181 - DNA, 25 bp, Homo sapiens
tagggactgtgccttgccaatatgc

SEQ ID NO: 28182 - DNA, 25 bp, Homo sapiens
gcaggatgttaacaaaggctttttc

SEQ ID NO: 28183 - DNA, 25 bp, Homo sapiens
attctgtaattctttgtactatcct

SEQ ID NO: 28184 - DNA, 25 bp, Homo sapiens
tggcatctcttgtgattattatttt

SEQ ID NO: 28185 - DNA, 25 bp, Homo sapiens
tggacattgttttaaaaaagcccgc

SEQ ID NO: 28186 - DNA, 25 bp, Homo sapiens
ctacatctgtctgtatttattattt

SEQ ID NO: 28187 - DNA, 25 bp, Homo sapiens
agagcacttcatttcctattcagga

SEQ ID NO: 28188 - DNA, 25 bp, Homo sapiens
tcgggccactgaaacaaaagcattt

SEQ ID NO: 28189 - DNA, 25 bp, Homo sapiens
tgggccctgtggtatgttagtatca

SEQ ID NO: 28190 - DNA, 25 bp, Homo sapiens
ggaggcatgctctctgacatcttga

SEQ ID NO: 28191 - DNA, 25 bp, Homo sapiens
tcgggtaattccatgccctccatta

SEQ ID NO: 28192 - DNA, 25 bp, Homo sapiens
catccgaatttgctggactccatcc

SEQ ID NO: 28193 - DNA, 25 bp, Homo sapiens
tcaagatctaccacagagttgcaga

SEQ ID NO: 28194 - DNA, 25 bp, Homo sapiens
agggctccaacctgtgcctcagtca

SEQ ID NO: 28195 - DNA, 25 bp, Homo sapiens
aaaataaaatctaaatacagttcag

SEQ ID NO: 28196 - DNA, 25 bp, Homo sapiens
atgggagcaaacaatcttctctttg

SEQ ID NO: 28197 - DNA, 25 bp, Homo sapiens
aagaagtgaagacagttttgagcat

SEQ ID NO: 28198 - DNA, 25 bp, Homo sapiens
agatactgtggaaagacttcttgcc

SEQ ID NO: 28199 - DNA, 25 bp, Homo sapiens
ttctgcatctggctaccctctgttg

SEQ ID NO: 28200 - DNA, 25 bp, Homo sapiens
ttacctaaaacactactgggactgc

SEQ ID NO: 28201 - DNA, 25 bp, Homo sapiens
gtctggatgtgcatctagaaggcgt

SEQ ID NO: 28202 - DNA, 25 bp, Homo sapiens
ctgtgacctttagctcctggagttg

SEQ ID NO: 28203 - DNA, 25 bp, Homo sapiens
ctctgacccaagagataatggagtc

SEQ ID NO: 28204 - DNA, 25 bp, Homo sapiens
aaattaaattgtgtatctgtggcct

SEQ ID NO: 28205 - DNA, 25 bp, Homo sapiens
atggctacgtttgtcaggagaagct

SEQ ID NO: 28206 - DNA, 25 bp, Homo sapiens
cccttaatatgcataagtagtaata

SEQ ID NO: 28207 - DNA, 25 bp, Homo sapiens
gccttggctttagatgcagtacagc

SEQ ID NO: 28208 - DNA, 25 bp, Homo sapiens
agcagtcttacatcgtccctcggta

SEQ ID NO: 28209 - DNA, 25 bp, Homo sapiens
agccgctttcggtcaatcgcagaag

SEQ ID NO: 28210 - DNA, 25 bp, Homo sapiens
cgctggctgcttcttacgacttttc

SEQ ID NO: 28211 - DNA, 25 bp, Homo sapiens
cagtttcagcttgttggtaccgaga

SEQ ID NO: 28212 - DNA, 25 bp, Homo sapiens
tgctgcttttggaaatcacgttgga

SEQ ID NO: 28213 - DNA, 25 bp, Homo sapiens
ttcaggagtttacccactgcagttg

SEQ ID NO: 28214 - DNA, 25 bp, Homo sapiens
cacggcggccaaagcggaattaatt

SEQ ID NO: 28215 - DNA, 25 bp, Homo sapiens
agggtacagtatgagccggcccatc

SEQ ID NO: 28216 - DNA, 25 bp, Homo sapiens
gctgttggaaacctgaatgctttta

SEQ ID NO: 28217 - DNA, 25 bp, Homo sapiens
ggctgcagcctaacgtgtggtttta

SEQ ID NO: 28218 - DNA, 25 bp, Homo sapiens
actgcttggctaatgactggaattc

SEQ ID NO: 28219 - DNA, 25 bp, Homo sapiens
tccctcctttgacatctggctgata

SEQ ID NO: 28220 - DNA, 25 bp, Homo sapiens
aggacctccgcccttgcttacattt

SEQ ID NO: 28221 - DNA, 25 bp, Homo sapiens
ggcagcttacaaggatggatcttta

SEQ ID NO: 28222 - DNA, 25 bp, Homo sapiens
ttccaggggctcatgacaataaacg

SEQ ID NO: 28223 - DNA, 25 bp, Homo sapiens
actccttgctctgggcacatctttg

SEQ ID NO: 28224 - DNA, 25 bp, Homo sapiens
tccgcatcctcaggtgggttttgca

SEQ ID NO: 28225 - DNA, 25 bp, Homo sapiens
gacctgattcctccctgctgacttg

SEQ ID NO: 28226 - DNA, 25 bp, Homo sapiens
ccactggaggctgcttctgttaaaa

SEQ ID NO: 28227 - DNA, 25 bp, Homo sapiens
cagcggcgttcctaggtgttttgaa

SEQ ID NO: 28228 - DNA, 25 bp, Homo sapiens
cccgacagggccttgcctttgaaaa

SEQ ID NO: 28229 - DNA, 25 bp, Homo sapiens
ggggctctttacatatctcaacgaa

SEQ ID NO: 28230 - DNA, 25 bp, Homo sapiens
ttctcccgtgctttcagtgccactg

SEQ ID NO: 28231 - DNA, 25 bp, Homo sapiens
tggacgtgtggctcatcacttttta

SEQ ID NO: 28232 - DNA, 25 bp, Homo sapiens
ccattttcatgggttcgctcctgta

SEQ ID NO: 28233 - DNA, 25 bp, Homo sapiens
gggatctgggcctcatcctagagca

SEQ ID NO: 28234 - DNA, 25 bp, Homo sapiens
ccaggctgcaaaacgggtagtctta

SEQ ID NO: 28235 - DNA, 25 bp, Homo sapiens
cggcgaccggagactgacttaaacc

SEQ ID NO: 28236 - DNA, 25 bp, Homo sapiens
accctggcatgttgcacgaggcttt

SEQ ID NO: 28237 - DNA, 25 bp, Homo sapiens
accgccactgggattggtacttgca

SEQ ID NO: 28238 - DNA, 25 bp, Homo sapiens
tactgttgactgtggagcttactgc

SEQ ID NO: 28239 - DNA, 25 bp, Homo sapiens
gtgtgtcctgatccattacctgtga

SEQ ID NO: 28240 - DNA, 25 bp, Homo sapiens
gccgtccctctgatggttggcagta

SEQ ID NO: 28241 - DNA, 25 bp, Homo sapiens
cacaccagggtgctaaggacttgcc

SEQ ID NO: 28242 - DNA, 25 bp, Homo sapiens
agcacttcttggttgtcctgagtca

SEQ ID NO: 28243 - DNA, 25 bp, Homo sapiens
ctgcacgtgcttcattccatcttta

SEQ ID NO: 28244 - DNA, 25 bp, Homo sapiens
tgtccacgttgtcggggatcagtta

SEQ ID NO: 28245 - DNA, 25 bp, Homo sapiens
ggcagggcccttggtagacacaaaa

SEQ ID NO: 28246 - DNA, 25 bp, Homo sapiens
caggctcaacctacgttacatgtgg

SEQ ID NO: 28247 - DNA, 25 bp, Homo sapiens
ccttggctgctcagatgcgattgca

SEQ ID NO: 28248 - DNA, 25 bp, Homo sapiens
agccctttctccttggtggcccaga

SEQ ID NO: 28249 - DNA, 25 bp, Homo sapiens
ttccctgggatacacacttttgcta

SEQ ID NO: 28250 - DNA, 25 bp, Homo sapiens
atgctcctagcatacattgcgattg

SEQ ID NO: 28251 - DNA, 25 bp, Homo sapiens
tcctgctggagtacatagtccttta

SEQ ID NO: 28252 - DNA, 25 bp, Homo sapiens
gtcactcctggtttgggatcccata

SEQ ID NO: 28253 - DNA, 25 bp, Homo sapiens
agcactctcctaggcactgagaaga

SEQ ID NO: 28254 - DNA, 25 bp, Homo sapiens
ggcctgctgtgaactccatggtaca

SEQ ID NO: 28255 - DNA, 25 bp, Homo sapiens
cagcatttgaagactcgcgcaccga

SEQ ID NO: 28256 - DNA, 25 bp, Homo sapiens
gcccacagtttttccatgcagttca

SEQ ID NO: 28257 - DNA, 25 bp, Homo sapiens
ccgcgaacgttctgacttttgtgca

SEQ ID NO: 28258 - DNA, 25 bp, Homo sapiens
ggcatgggtttctgcatcctgatca

SEQ ID NO: 28259 - DNA, 25 bp, Homo sapiens
ctccgtgcaacgtgaggctttttta

SEQ ID NO: 28260 - DNA, 25 bp, Homo sapiens
ggtttgccaccagatcttccagatg

SEQ ID NO: 28261 - DNA, 25 bp, Homo sapiens
cctgcacgtgctatttctggaagta

SEQ ID NO: 28262 - DNA, 25 bp, Homo sapiens
cgtggaatgtagactgctctgctgc

SEQ ID NO: 28263 - DNA, 25 bp, Homo sapiens
tgcagcagtggcctcagacttcaga

SEQ ID NO: 28264 - DNA, 25 bp, Homo sapiens
ctgcagtgcagctttggcatatatc

SEQ ID NO: 28265 - DNA, 25 bp, Homo sapiens
ctaaggctctggatgcaaagtcggc

SEQ ID NO: 28266 - DNA, 25 bp, Homo sapiens
gctcggcttccctttgcatcaatac

SEQ ID NO: 28267 - DNA, 25 bp, Homo sapiens
tcgcaagccacctgcagtgttaatg

SEQ ID NO: 28268 - DNA, 25 bp, Homo sapiens
ctgagctgggcacaaagcactttgc

SEQ ID NO: 28269 - DNA, 25 bp, Homo sapiens
cctgagactttgaaaggagcctttc

SEQ ID NO: 28270 - DNA, 25 bp, Homo sapiens
cctctctgagatgtgggtgtaagcc

SEQ ID NO: 28271 - DNA, 25 bp, Homo sapiens
agggcaaggtgattcccgctttcca

SEQ ID NO: 28272 - DNA, 25 bp, Homo sapiens
agtgattcatcataggtccgcattc

SEQ ID NO: 28273 - DNA, 25 bp, Homo sapiens
tcacggtgtcggtttctagcttaga

SEQ ID NO: 28274 - DNA, 25 bp, Homo sapiens
aaacttaccctgtgccggaccctta

SEQ ID NO: 28275 - DNA, 25 bp, Homo sapiens
ctccctctgtgaacgtggcccagta

SEQ ID NO: 28276 - DNA, 25 bp, Homo sapiens
gtagttaccctcagtgtgtcccaga

SEQ ID NO: 28277 - DNA, 25 bp, Homo sapiens
tggctcgtctgtttctcttgtgttc

SEQ ID NO: 28278 - DNA, 25 bp, Homo sapiens
caccttctgggtggagatgagtctc

SEQ ID NO: 28279 - DNA, 25 bp, Homo sapiens
tgagcgcttcacctgcatttctttg

SEQ ID NO: 28280 - DNA, 25 bp, Homo sapiens
gccttttcggtgaagcaattactga

SEQ ID NO: 28281 - DNA, 25 bp, Homo sapiens
tgcttatcagcagtccgagggtcca

SEQ ID NO: 28282 - DNA, 25 bp, Homo sapiens
tggtctcatttctaggttcaaggga

SEQ ID NO: 28283 - DNA, 25 bp, Homo sapiens
gtgcctggcccaatttaaaaagctg

SEQ ID NO: 28284 - DNA, 25 bp, Homo sapiens
gtacgggttcgtgctttgtctcata

SEQ ID NO: 28285 - DNA, 25 bp, Homo sapiens
agccttctgcttttggtcatctgtg

SEQ ID NO: 28286 - DNA, 25 bp, Homo sapiens
ggcgccgtcactattccaagagaga

SEQ ID NO: 28287 - DNA, 25 bp, Homo sapiens
cagcttcttgagactggatggcaaa

SEQ ID NO: 28288 - DNA, 25 bp, Homo sapiens
tggcgtcctccttatttctttcatg

SEQ ID NO: 28289 - DNA, 25 bp, Homo sapiens
catgggcttcttataacttagaaac

SEQ ID NO: 28290 - DNA, 25 bp, Homo sapiens
tctgagtgcctctagaacatgttgc

SEQ ID NO: 28291 - DNA, 25 bp, Homo sapiens
agggaactcccgtgatactctgtca

SEQ ID NO: 28292 - DNA, 25 bp, Homo sapiens
tgccccattcatttagttttttgtc

SEQ ID NO: 28293 - DNA, 25 bp, Homo sapiens
cttctgctgtgcactcaggaccata

SEQ ID NO: 28294 - DNA, 25 bp, Homo sapiens
gtggcctgtccatctcccttagtta

SEQ ID NO: 28295 - DNA, 25 bp, Homo sapiens
tcatgtgggtgcagataattcttcc

SEQ ID NO: 28296 - DNA, 25 bp, Homo sapiens
tctgcatgcatcgtgccggttattg

SEQ ID NO: 28297 - DNA, 25 bp, Homo sapiens
accagagttggtcttcgtgacttaa

SEQ ID NO: 28298 - DNA, 25 bp, Homo sapiens
ctctctcggctcagggctttactaa

SEQ ID NO: 28299 - DNA, 25 bp, Homo sapiens
gctgagctcattggttatttaagga

SEQ ID NO: 28300 - DNA, 25 bp, Homo sapiens
cttcggtttaaggaattgacattgc

SEQ ID NO: 28301 - DNA, 25 bp, Homo sapiens
gaggccaccctgctctgtggaatta

SEQ ID NO: 28302 - DNA, 25 bp, Homo sapiens
tctcagcgttggctacctgtaaata

SEQ ID NO: 28303 - DNA, 25 bp, Homo sapiens
ggactgtcgatttcttgcaaggctc

SEQ ID NO: 28304 - DNA, 25 bp, Homo sapiens
gcctcccagggagctgtaaagaatg

SEQ ID NO: 28305 - DNA, 25 bp, Homo sapiens
gccctgccagagatgcccaagagta

SEQ ID NO: 28306 - DNA, 25 bp, Homo sapiens
gcttctgtgcggatagctccatctg

SEQ ID NO: 28307 - DNA, 25 bp, Homo sapiens
atctcaggtctaaagtccgcactcc

SEQ ID NO: 28308 - DNA, 25 bp, Homo sapiens
agctcctactcatcaggctgggtta

SEQ ID NO: 28309 - DNA, 25 bp, Homo sapiens
agctggctgacctcctgttttattc

SEQ ID NO: 28310 - DNA, 25 bp, Homo sapiens
ccggccaaaagcgatctgcacatgc

SEQ ID NO: 28311 - DNA, 25 bp, Homo sapiens
gcctgtgtctagttcaccctcggta

SEQ ID NO: 28312 - DNA, 25 bp, Homo sapiens
gtccttgggtgtatgcagttgccta

SEQ ID NO: 28313 - DNA, 25 bp, Homo sapiens
cgtctttcaggtggagtcatcaata

SEQ ID NO: 28314 - DNA, 25 bp, Homo sapiens
gaagtcctgtattcccagctctgtg

SEQ ID NO: 28315 - DNA, 25 bp, Homo sapiens
tgcctgctcatctacttggactatg

SEQ ID NO: 28316 - DNA, 25 bp, Homo sapiens
agggtcctcatcttttgtgcattca

SEQ ID NO: 28317 - DNA, 25 bp, Homo sapiens
cacatatcagataaatgctgctaaa

SEQ ID NO: 28318 - DNA, 25 bp, Homo sapiens
tagctgggttcaccaaaggcacttc

SEQ ID NO: 28319 - DNA, 25 bp, Homo sapiens
agacgcagtccctgtgctccaaaca

SEQ ID NO: 28320 - DNA, 25 bp, Homo sapiens
ttacagcgcctccaggggtcaaaga

SEQ ID NO: 28321 - DNA, 25 bp, Homo sapiens
tcaaggtcatcgtgcctggattcta

SEQ ID NO: 28322 - DNA, 25 bp, Homo sapiens
ctgtgtgagcacgtctagggaaacc

SEQ ID NO: 28323 - DNA, 25 bp, Homo sapiens
attccagtttggttgcatagcatga

SEQ ID NO: 28324 - DNA, 25 bp, Homo sapiens
tggagtctgtgtctgcctaaaaata

SEQ ID NO: 28325 - DNA, 25 bp, Homo sapiens
tggccaccgtccaagctccttagaa

SEQ ID NO: 28326 - DNA, 25 bp, Homo sapiens
tcttcctccgggtttgcaataagca

SEQ ID NO: 28327 - DNA, 25 bp, Homo sapiens
agggccttctgcttaacagctctga

SEQ ID NO: 28328 - DNA, 25 bp, Homo sapiens
ctggcgcatgaactggagacctttt

SEQ ID NO: 28329 - DNA, 25 bp, Homo sapiens
tttcgagacccaaggcatgcttttg

SEQ ID NO: 28330 - DNA, 25 bp, Homo sapiens
tgcagtgcagccatctcattagttg

SEQ ID NO: 28331 - DNA, 25 bp, Homo sapiens
tgaagggcaaggcagaaatgtttcc

SEQ ID NO: 28332 - DNA, 25 bp, Homo sapiens
acggttcgtgttgagcctatctgta

SEQ ID NO: 28333 - DNA, 25 bp, Homo sapiens
tccatcactgcagggtcttagggtc

SEQ ID NO: 28334 - DNA, 25 bp, Homo sapiens
gagtgctctaatgccctgaattttg

SEQ ID NO: 28335 - DNA, 25 bp, Homo sapiens
cctgtctgtctttggagaacctctg

SEQ ID NO: 28336 - DNA, 25 bp, Homo sapiens
ggcctcacggagctgtgccaattta

SEQ ID NO: 28337 - DNA, 25 bp, Homo sapiens
ggggacccagccttaatcttcagtg

SEQ ID NO: 28338 - DNA, 25 bp, Homo sapiens
tcggtgcctgctcattggttaaatc

SEQ ID NO: 28339 - DNA, 25 bp, Homo sapiens
cggtgccctgaaagtgagtctgaaa

SEQ ID NO: 28340 - DNA, 25 bp, Homo sapiens
gccaagatctcagtacagtgaccta

SEQ ID NO: 28341 - DNA, 25 bp, Homo sapiens
ctggtccagccgcaaaacatttata

SEQ ID NO: 28342 - DNA, 25 bp, Homo sapiens
taggggaaccctaccaggacatgta

SEQ ID NO: 28343 - DNA, 25 bp, Homo sapiens
tggccgcctcccacttagaatttca

SEQ ID NO: 28344 - DNA, 25 bp, Homo sapiens
gaacagggctgccttcctaggaata

SEQ ID NO: 28345 - DNA, 25 bp, Homo sapiens
cgatggctgcttttggtgacctcaa

SEQ ID NO: 28346 - DNA, 25 bp, Homo sapiens
gtggcccagatgcaccctggagtta

SEQ ID NO: 28347 - DNA, 25 bp, Homo sapiens
attttggatttcttatgaacacaat

SEQ ID NO: 28348 - DNA, 25 bp, Homo sapiens
aatgaattttgtgtatgtgtgtata

SEQ ID NO: 28349 - DNA, 25 bp, Homo sapiens
cgcattagccctctcctagtgttta

SEQ ID NO: 28350 - DNA, 25 bp, Homo sapiens
gaagcacggtcccagtccatctttg

SEQ ID NO: 28351 - DNA, 25 bp, Homo sapiens
ggcccagctcggaagactccttatg

SEQ ID NO: 28352 - DNA, 25 bp, Homo sapiens
ctagccagcctctgttgaatgcttc

SEQ ID NO: 28353 - DNA, 25 bp, Homo sapiens
gtcccttggggtaagcaatctttta

SEQ ID NO: 28354 - DNA, 25 bp, Homo sapiens
tcgccctcgtccctaaaatgttcag

SEQ ID NO: 28355 - DNA, 25 bp, Homo sapiens
ctttaagtttctcatcacccgggga

SEQ ID NO: 28356 - DNA, 25 bp, Homo sapiens
tagttgcctgccctttcttgtctgg

SEQ ID NO: 28357 - DNA, 25 bp, Homo sapiens
ctgctgctactgctgctcttttgga

SEQ ID NO: 28358 - DNA, 25 bp, Homo sapiens
gacaggccagtatctttcagcttta

SEQ ID NO: 28359 - DNA, 25 bp, Homo sapiens
catgtttccctggtggtgactgctc

SEQ ID NO: 28360 - DNA, 25 bp, Homo sapiens
tccgtgtgccttctctcagttcatg

SEQ ID NO: 28361 - DNA, 25 bp, Homo sapiens
gagcccttagtgatttgagcccttg

SEQ ID NO: 28362 - DNA, 25 bp, Homo sapiens
accgcctgtgtctgcgaagtgttca

SEQ ID NO: 28363 - DNA, 25 bp, Homo sapiens
tgggccactgttttagcaatattta

SEQ ID NO: 28364 - DNA, 25 bp, Homo sapiens
agcccatcccagtgttgttcgtaca

SEQ ID NO: 28365 - DNA, 25 bp, Homo sapiens
ccttcgagtgaaaaagcaatgcttc

SEQ ID NO: 28366 - DNA, 25 bp, Homo sapiens
tgagggtttcatcccaggggcacac

SEQ ID NO: 28367 - DNA, 25 bp, Homo sapiens
cctgggcagtataaagagctttctc

SEQ ID NO: 28368 - DNA, 25 bp, Homo sapiens
ctccttcttgtcttggcctggaatc

SEQ ID NO: 28369 - DNA, 25 bp, Homo sapiens
cgcccactgtgagaggtgcctatca

SEQ ID NO: 28370 - DNA, 25 bp, Homo sapiens
cccagggtttgtaggtgtttcctta

SEQ ID NO: 28371 - DNA, 25 bp, Homo sapiens
cccaggaagctcatctgcaggttca

SEQ ID NO: 28372 - DNA, 25 bp, Homo sapiens
ccctgggactataacaattactctg

SEQ ID NO: 28373 - DNA, 25 bp, Homo sapiens
gcacggcttcatcctggtctccaga

SEQ ID NO: 28374 - DNA, 25 bp, Homo sapiens
tgccaggatcccagtcaagtaaatt

SEQ ID NO: 28375 - DNA, 25 bp, Homo sapiens
cgggagactacgcaaccacttctgg

SEQ ID NO: 28376 - DNA, 25 bp, Homo sapiens
ccctctctaagtggtttggatccag

SEQ ID NO: 28377 - DNA, 25 bp, Homo sapiens
atctttctttgtcacggagcctgta

SEQ ID NO: 28378 - DNA, 25 bp, Homo sapiens
caactgctggatcatgcggtcttta

SEQ ID NO: 28379 - DNA, 25 bp, Homo sapiens
gctgcctgtgtcttgccaattatta

SEQ ID NO: 28380 - DNA, 25 bp, Homo sapiens
ggttttagctagagaggcggccctt

SEQ ID NO: 28381 - DNA, 25 bp, Homo sapiens
cagctgtggcagtgagaataccgtc

SEQ ID NO: 28382 - DNA, 25 bp, Homo sapiens
ctgcatgtgtgaaacgcgatccgtc

SEQ ID NO: 28383 - DNA, 25 bp, Homo sapiens
cccactaccagctaggaggcattta

SEQ ID NO: 28384 - DNA, 25 bp, Homo sapiens
ggtggcactttcttggtcctgtaca

SEQ ID NO: 28385 - DNA, 25 bp, Homo sapiens
cgtcgcctatctgcagactctgtga

SEQ ID NO: 28386 - DNA, 25 bp, Homo sapiens
ccactagtgctttgggatttcctga

SEQ ID NO: 28387 - DNA, 25 bp, Homo sapiens
ccggtgggatatgcaagaccttctc

SEQ ID NO: 28388 - DNA, 25 bp, Homo sapiens
acactgctgtgggtttcctactttg

SEQ ID NO: 28389 - DNA, 25 bp, Homo sapiens
ctaaccaacgtgcagggccagagtc

SEQ ID NO: 28390 - DNA, 25 bp, Homo sapiens
aggcactcagactatactcagggta

SEQ ID NO: 28391 - DNA, 25 bp, Homo sapiens
ggctttgtctattcaccttggtatg

SEQ ID NO: 28392 - DNA, 25 bp, Homo sapiens
ccctcgtcaagctatggtcaatgca

SEQ ID NO: 28393 - DNA, 25 bp, Homo sapiens
tgttgctcctcctcacacactggaa

SEQ ID NO: 28394 - DNA, 25 bp, Homo sapiens
caggtcccaaggtctgtgatgccta

SEQ ID NO: 28395 - DNA, 25 bp, Homo sapiens
gggtggatcctcctatcaacgtgta

SEQ ID NO: 28396 - DNA, 25 bp, Homo sapiens
tagccaggcctctccatttaagttc

SEQ ID NO: 28397 - DNA, 25 bp, Homo sapiens
tcaggatgggcacactcagttctta

SEQ ID NO: 28398 - DNA, 25 bp, Homo sapiens
ccgcgagtagccttcaagtagttta

SEQ ID NO: 28399 - DNA, 25 bp, Homo sapiens
tggaagcgcagccaacatcctgtga

SEQ ID NO: 28400 - DNA, 25 bp, Homo sapiens
gagtggcagtcccttcttattaatg

SEQ ID NO: 28401 - DNA, 25 bp, Homo sapiens
tgctgggccaagagctcagaatatg

SEQ ID NO: 28402 - DNA, 25 bp, Homo sapiens
tgctgcttccttgtgggctaacctg

SEQ ID NO: 28403 - DNA, 25 bp, Homo sapiens
gcctgcccagaacatgtgctttttc

SEQ ID NO: 28404 - DNA, 25 bp, Homo sapiens
tgtcatctctgaaaggtcgtcgtcc

SEQ ID NO: 28405 - DNA, 25 bp, Homo sapiens
cctgcagggagctatttacaaaaga

SEQ ID NO: 28406 - DNA, 25 bp, Homo sapiens
cagtgcacagcacaggaatccttta

SEQ ID NO: 28407 - DNA, 25 bp, Homo sapiens
agtggaacaggggagagaacaagcc

SEQ ID NO: 28408 - DNA, 25 bp, Homo sapiens
cgtgtctgtggatatgatagcccta

SEQ ID NO: 28409 - DNA, 25 bp, Homo sapiens
accctgaatgtgaattggtttctga

SEQ ID NO: 28410 - DNA, 25 bp, Homo sapiens
tttcaaaagcaaagctaaagctgtt

SEQ ID NO: 28411 - DNA, 25 bp, Homo sapiens
tcactgcaggcttcttactcaccca

SEQ ID NO: 28412 - DNA, 25 bp, Homo sapiens
cacaagcttgtacatgcagagaata

SEQ ID NO: 28413 - DNA, 25 bp, Homo sapiens
ttcacctgtccagagcaaggggtca

SEQ ID NO: 28414 - DNA, 25 bp, Homo sapiens
cccagcacacaggagagggttgcta

SEQ ID NO: 28415 - DNA, 25 bp, Homo sapiens
cccagattctggtgtgtagcacaca

SEQ ID NO: 28416 - DNA, 25 bp, Homo sapiens
ggggaattcctgcacctaataactc

SEQ ID NO: 28417 - DNA, 25 bp, Homo sapiens
gtatgccatccttgcctctcgaaca

SEQ ID NO: 28418 - DNA, 25 bp, Homo sapiens
ggtttccgcctcatcactgtgtagt

SEQ ID NO: 28419 - DNA, 25 bp, Homo sapiens
ctgtggtcaaacgacacccagatga

SEQ ID NO: 28420 - DNA, 25 bp, Homo sapiens
gcttcacggggccagccaatgaata

SEQ ID NO: 28421 - DNA, 25 bp, Homo sapiens
ttctgtttcatgagcacgtggccta

SEQ ID NO: 28422 - DNA, 25 bp, Homo sapiens
tcctgagttaaaagatttgcatttc

SEQ ID NO: 28423 - DNA, 25 bp, Homo sapiens
tttaatgcaaaacaaaaggaaaatt

SEQ ID NO: 28424 - DNA, 25 bp, Homo sapiens
ctgcagtggctaaccctggaatcta

SEQ ID NO: 28425 - DNA, 25 bp, Homo sapiens
ggtcatgcgttttcctcccagaaga

SEQ ID NO: 28426 - DNA, 25 bp, Homo sapiens
gtgttacatctcgaagcctggcttc

SEQ ID NO: 28427 - DNA, 25 bp, Homo sapiens
ggcacacagctttcttcacttagca

SEQ ID NO: 28428 - DNA, 25 bp, Homo sapiens
tacaatgcaataacaagtactgatg

SEQ ID NO: 28429 - DNA, 25 bp, Homo sapiens
aagccagttcagagaattaagtagg

SEQ ID NO: 28430 - DNA, 25 bp, Homo sapiens
ccgccgaggagcaagcccttcttgt

SEQ ID NO: 28431 - DNA, 25 bp, Homo sapiens
gtagttttcctcctttcaaccttta

SEQ ID NO: 28432 - DNA, 25 bp, Homo sapiens
tgtgtccacgtggggctttgactgg

SEQ ID NO: 28433 - DNA, 25 bp, Homo sapiens
aggactccagacatgctcttgctta

SEQ ID NO: 28434 - DNA, 25 bp, Homo sapiens
gagagattcctgcttccctgttttg

SEQ ID NO: 28435 - DNA, 25 bp, Homo sapiens
gttgctctgtccaagtaaagggttt

SEQ ID NO: 28436 - DNA, 25 bp, Homo sapiens
cggggacgccaatcatgtactcttt

SEQ ID NO: 28437 - DNA, 25 bp, Homo sapiens
cactctgggacttttgatgttatac

SEQ ID NO: 28438 - DNA, 25 bp, Homo sapiens
tcagactcctgaacctggcctaaca

SEQ ID NO: 28439 - DNA, 25 bp, Homo sapiens
aggccttctgaggacacaaagcttc

SEQ ID NO: 28440 - DNA, 25 bp, Homo sapiens
cagctggttggccatagatcacttc

SEQ ID NO: 28441 - DNA, 25 bp, Homo sapiens
tcatggttctggctttcaattcaca

SEQ ID NO: 28442 - DNA, 25 bp, Homo sapiens
ttttggacacacagacatatgctcg

SEQ ID NO: 28443 - DNA, 25 bp, Homo sapiens
tttttgaaatgctaatagatgatta

SEQ ID NO: 28444 - DNA, 25 bp, Homo sapiens
ctggcctgttgctgctaataacata

SEQ ID NO: 28445 - DNA, 25 bp, Homo sapiens
gccagcgtaggtacaaaagggatta

SEQ ID NO: 28446 - DNA, 25 bp, Homo sapiens
ctatgctgacaaaccctggactcta

SEQ ID NO: 28447 - DNA, 25 bp, Homo sapiens
atgtatcctgtttgcgggaaccagc

SEQ ID NO: 28448 - DNA, 25 bp, Homo sapiens
tgctacccggaagagttaggaggag

SEQ ID NO: 28449 - DNA, 25 bp, Homo sapiens
ctgccagaccaaagggtgcaaattc

SEQ ID NO: 28450 - DNA, 25 bp, Homo sapiens
catggcctgatcctaagcctggcta

SEQ ID NO: 28451 - DNA, 25 bp, Homo sapiens
acagcgaagtttggtgctcaggacc

SEQ ID NO: 28452 - DNA, 25 bp, Homo sapiens
agcgggtagcaatgaaatgaaattc

SEQ ID NO: 28453 - DNA, 25 bp, Homo sapiens
gacacactggagtggaaaactctca

SEQ ID NO: 28454 - DNA, 25 bp, Homo sapiens
ggacagcaagagacctaggaatact

SEQ ID NO: 28455 - DNA, 25 bp, Homo sapiens
tttcttccagaccaggcccaacatg

SEQ ID NO: 28456 - DNA, 25 bp, Homo sapiens
caggggctcagctaacactgttcta

SEQ ID NO: 28457 - DNA, 25 bp, Homo sapiens
catctcctagtagaggtgacgtaca

SEQ ID NO: 28458 - DNA, 25 bp, Homo sapiens
cctgacaagtgctctggctgccaaa

SEQ ID NO: 28459 - DNA, 25 bp, Homo sapiens
gggatgtcaaccctccagctcatga

SEQ ID NO: 28460 - DNA, 25 bp, Homo sapiens
tgaggctggccttctctactttgga

SEQ ID NO: 28461 - DNA, 25 bp, Homo sapiens
ttgagtgtctgtgaagctcccattc

SEQ ID NO: 28462 - DNA, 25 bp, Homo sapiens
aacatgcatcaacaaatgagtaagc

SEQ ID NO: 28463 - DNA, 25 bp, Homo sapiens
gcccttctgcaagagatgattggag

SEQ ID NO: 28464 - DNA, 25 bp, Homo sapiens
gttgtccattctgttttcccgagca

SEQ ID NO: 28465 - DNA, 25 bp, Homo sapiens
actccctggggtggactttcatcta

SEQ ID NO: 28466 - DNA, 25 bp, Homo sapiens
gggacaagtgccttaaacccttata

SEQ ID NO: 28467 - DNA, 25 bp, Homo sapiens
attttttaaatgaagtagaatcctt

SEQ ID NO: 28468 - DNA, 25 bp, Homo sapiens
ccagtgctgtcttttagtgtaggga

SEQ ID NO: 28469 - DNA, 25 bp, Homo sapiens
tgagatgagtgccttttaattttct

SEQ ID NO: 28470 - DNA, 25 bp, Homo sapiens
cccatgaagaggtagcttagttatt

SEQ ID NO: 28471 - DNA, 25 bp, Homo sapiens
cccttttgtgtgtgctcacctgtga

SEQ ID NO: 28472 - DNA, 25 bp, Homo sapiens
tccagttaatcttggtggcagcttc

SEQ ID NO: 28473 - DNA, 25 bp, Homo sapiens
gttaagacgcttcctgccaagtatg

SEQ ID NO: 28474 - DNA, 25 bp, Homo sapiens
ggaagagactgagaggagaccacta

SEQ ID NO: 28475 - DNA, 25 bp, Homo sapiens
cacgctttcagagttcaaaatagtc

SEQ ID NO: 28476 - DNA, 25 bp, Homo sapiens
gtgatgtcatttcaaggagaatccg

SEQ ID NO: 28477 - DNA, 25 bp, Homo sapiens
cctcctgggacagaagcctattatc

SEQ ID NO: 28478 - DNA, 25 bp, Homo sapiens
gtacagccaaagacgactcccagtg

SEQ ID NO: 28479 - DNA, 25 bp, Homo sapiens
tcgccttgatacagaccagattctc

SEQ ID NO: 28480 - DNA, 25 bp, Homo sapiens
caggcccattgtgcagtcaagtatc

SEQ ID NO: 28481 - DNA, 25 bp, Homo sapiens
ctcccaggcagacagtaaggcgatc

SEQ ID NO: 28482 - DNA, 25 bp, Homo sapiens
gtgggtgctaagtaggagaatccta

SEQ ID NO: 28483 - DNA, 25 bp, Homo sapiens
ggcctgctggttaagagaaatctca

SEQ ID NO: 28484 - DNA, 25 bp, Homo sapiens
cttgtagcacggaaggatcaccctc

SEQ ID NO: 28485 - DNA, 25 bp, Homo sapiens
tgttggctccttactccaaatgaga

SEQ ID NO: 28486 - DNA, 25 bp, Homo sapiens
gctggcatcagcaaagaaaatttca

SEQ ID NO: 28487 - DNA, 25 bp, Homo sapiens
ggaagccctccatctgtgctgatga

SEQ ID NO: 28488 - DNA, 25 bp, Homo sapiens
tgctggccacagaaaggtagtcatg

SEQ ID NO: 28489 - DNA, 25 bp, Homo sapiens
attctttctccctttaattgttgga

SEQ ID NO: 28490 - DNA, 25 bp, Homo sapiens
atgcccaggctagtgaggtccctta

SEQ ID NO: 28491 - DNA, 25 bp, Homo sapiens
ggaggtcatctcatgcgcttacata

SEQ ID NO: 28492 - DNA, 25 bp, Homo sapiens
tggtcgaacgtaagagccttcctgg

SEQ ID NO: 28493 - DNA, 25 bp, Homo sapiens
cagtcatacttgcttgttcctcgga

SEQ ID NO: 28494 - DNA, 25 bp, Homo sapiens
ggtctcctgataaatgccttgctgc

SEQ ID NO: 28495 - DNA, 25 bp, Homo sapiens
cgcccatgagggtcctaacttatta

SEQ ID NO: 28496 - DNA, 25 bp, Homo sapiens
aatgggatttgcacctttcacagtc

SEQ ID NO: 28497 - DNA, 25 bp, Homo sapiens
atcttacgttcattagccttgtggc

SEQ ID NO: 28498 - DNA, 25 bp, Homo sapiens
gttccctctgaagctactgccatga

SEQ ID NO: 28499 - DNA, 25 bp, Homo sapiens
cctccttgatctgacatggcctgaa

SEQ ID NO: 28500 - DNA, 25 bp, Homo sapiens
ccagtgtcttaaataggggttcgta

SEQ ID NO: 28501 - DNA, 25 bp, Homo sapiens
acagagttttgtctcagccgaggca

SEQ ID NO: 28502 - DNA, 25 bp, Homo sapiens
tggcgtctggggtatgctcaataaa

SEQ ID NO: 28503 - DNA, 25 bp, Homo sapiens
ccctgagctagagacacactgttta

SEQ ID NO: 28504 - DNA, 25 bp, Homo sapiens
tctctgcctgtgaaaccctgtctgg

SEQ ID NO: 28505 - DNA, 25 bp, Homo sapiens
tcagctggccaggtgatgaatcatg

SEQ ID NO: 28506 - DNA, 25 bp, Homo sapiens
atgcccaaggcagagttaatcaaga

SEQ ID NO: 28507 - DNA, 25 bp, Homo sapiens
tggctcaggaggctcttcacttatc

SEQ ID NO: 28508 - DNA, 25 bp, Homo sapiens
tgccctttgtggttttagtctctca

SEQ ID NO: 28509 - DNA, 25 bp, Homo sapiens
tcctcacagggagaccagtggccta

SEQ ID NO: 28510 - DNA, 25 bp, Homo sapiens
ggggttttcttcaggctctccctta

SEQ ID NO: 28511 - DNA, 25 bp, Homo sapiens
tctggtaaccctgagccctgaaata

SEQ ID NO: 28512 - DNA, 25 bp, Homo sapiens
gggccttacggacgagtacattgca

SEQ ID NO: 28513 - DNA, 25 bp, Homo sapiens
gggtcccaggggcatatgttaaatt

SEQ ID NO: 28514 - DNA, 25 bp, Homo sapiens
cgcctcctaaactggggcattatta

SEQ ID NO: 28515 - DNA, 25 bp, Homo sapiens
cttgtgtttcagcatggggccctac

SEQ ID NO: 28516 - DNA, 25 bp, Homo sapiens
ggcttctcagcgacagacccatgta

SEQ ID NO: 28517 - DNA, 25 bp, Homo sapiens
gcagagttgtcgctactccagaata

SEQ ID NO: 28518 - DNA, 25 bp, Homo sapiens
tggttaccatgttgcttctctcaga

SEQ ID NO: 28519 - DNA, 25 bp, Homo sapiens
gtggcagcatactccttaaaggtta

SEQ ID NO: 28520 - DNA, 25 bp, Homo sapiens
actgttgatatataggacagaattt

SEQ ID NO: 28521 - DNA, 25 bp, Homo sapiens
ggtgcagcccagagacagatatttt

SEQ ID NO: 28522 - DNA, 25 bp, Homo sapiens
tcaccagagagcaggagtaaccagc

SEQ ID NO: 28523 - DNA, 25 bp, Homo sapiens
ggtcggtttgctgctgcttctttaa

SEQ ID NO: 28524 - DNA, 25 bp, Homo sapiens
aggctgcctttttgttgtgtgaaca

SEQ ID NO: 28525 - DNA, 25 bp, Homo sapiens
gccagtgttggctcttcttgactta

SEQ ID NO: 28526 - DNA, 25 bp, Homo sapiens
agagccctcaggacttttaatggta

SEQ ID NO: 28527 - DNA, 25 bp, Homo sapiens
tttctgattacatcatcaaatttta

SEQ ID NO: 28528 - DNA, 25 bp, Homo sapiens
gttaataaatgcttagactcttgct

SEQ ID NO: 28529 - DNA, 25 bp, Homo sapiens
cgaggcccgtcttgatcagctctta

SEQ ID NO: 28530 - DNA, 25 bp, Homo sapiens
ttgccataaagagcctgaaacagtc

SEQ ID NO: 28531 - DNA, 25 bp, Homo sapiens
cgagtgaagctattgccttttcagg

SEQ ID NO: 28532 - DNA, 25 bp, Homo sapiens
tggcaagtcaggtccctgtgcacca

SEQ ID NO: 28533 - DNA, 25 bp, Homo sapiens
gccctccagtagaccaagtgacttg

SEQ ID NO: 28534 - DNA, 25 bp, Homo sapiens
tggcaaacatttgagtcccaggttc

SEQ ID NO: 28535 - DNA, 25 bp, Homo sapiens
ggcagatccctgagacagtcctttc

SEQ ID NO: 28536 - DNA, 25 bp, Homo sapiens
ttgctcttcagacacaggctcattg

SEQ ID NO: 28537 - DNA, 25 bp, Homo sapiens
ggggaaacttctctaaccacttatt

SEQ ID NO: 28538 - DNA, 25 bp, Homo sapiens
ttgttccagttagctcagagccctg

SEQ ID NO: 28539 - DNA, 25 bp, Homo sapiens
gggaccgtgatttgctacctgaata

SEQ ID NO: 28540 - DNA, 25 bp, Homo sapiens
cctctgcggggaagaaattctcatt

SEQ ID NO: 28541 - DNA, 25 bp, Homo sapiens
agcctcttgttgtttaccagtgtgg

SEQ ID NO: 28542 - DNA, 25 bp, Homo sapiens
tcttctcattcttttaatggaacta

SEQ ID NO: 28543 - DNA, 25 bp, Homo sapiens
ctggctcctggaactcctctactga

SEQ ID NO: 28544 - DNA, 25 bp, Homo sapiens
caccatgcggactttctagtaaaac

SEQ ID NO: 28545 - DNA, 25 bp, Homo sapiens
cttgggccactagtttaaaaatctc

SEQ ID NO: 28546 - DNA, 25 bp, Homo sapiens
gggtcccttgtgtgagaatactttg

SEQ ID NO: 28547 - DNA, 25 bp, Homo sapiens
ggcagtggactcatgattgggaatt

SEQ ID NO: 28548 - DNA, 25 bp, Homo sapiens
ggctggccttcttctgatctaacta

SEQ ID NO: 28549 - DNA, 25 bp, Homo sapiens
gatgatccttgccttctcccacttg

SEQ ID NO: 28550 - DNA, 25 bp, Homo sapiens
aaagacgtaattagatcaggaatag

SEQ ID NO: 28551 - DNA, 25 bp, Homo sapiens
aaagatttaataggcatttcagctg

SEQ ID NO: 28552 - DNA, 25 bp, Homo sapiens
gttagcccttccagttgagaacatg

SEQ ID NO: 28553 - DNA, 25 bp, Homo sapiens
cctttgggtccatggtcctgttaga

SEQ ID NO: 28554 - DNA, 25 bp, Homo sapiens
acttgggacaggactcttggttttc

SEQ ID NO: 28555 - DNA, 25 bp, Homo sapiens
gctgcttccgggttagcacatagta

SEQ ID NO: 28556 - DNA, 25 bp, Homo sapiens
gacccgaaagggtttacaatctgtt

SEQ ID NO: 28557 - DNA, 25 bp, Homo sapiens
tgtgtcagtctttgaggccctcact

SEQ ID NO: 28558 - DNA, 25 bp, Homo sapiens
aattaaactccctgggttttcacat

SEQ ID NO: 28559 - DNA, 25 bp, Homo sapiens
ttagaattttctcccacggtccagg

SEQ ID NO: 28560 - DNA, 25 bp, Homo sapiens
gctctggggatctggtccaacatca

SEQ ID NO: 28561 - DNA, 25 bp, Homo sapiens
gtgctaacccacctcctgtgatgtg

SEQ ID NO: 28562 - DNA, 25 bp, Homo sapiens
cgcacatgctcctttacgtcaaatc

SEQ ID NO: 28563 - DNA, 25 bp, Homo sapiens
tttatctagtatataattgtatcta

SEQ ID NO: 28564 - DNA, 25 bp, Homo sapiens
cctacacacagggtgaatcattttt

SEQ ID NO: 28565 - DNA, 25 bp, Homo sapiens
ggtgcgttctcatatattagaaatc

SEQ ID NO: 28566 - DNA, 25 bp, Homo sapiens
cttactaggtaactggatgactccc

SEQ ID NO: 28567 - DNA, 25 bp, Homo sapiens
ctcaggtccaaaaagaatcccaatc

SEQ ID NO: 28568 - DNA, 25 bp, Homo sapiens
tcgtgacttaaaacaataagcatgg

SEQ ID NO: 28569 - DNA, 25 bp, Homo sapiens
cataattcaacaaagacagatttac

SEQ ID NO: 28570 - DNA, 25 bp, Homo sapiens
tttgaacacacttggctaggaaata

SEQ ID NO: 28571 - DNA, 25 bp, Homo sapiens
gatccagtttttcaacgctttttca

SEQ ID NO: 28572 - DNA, 25 bp, Homo sapiens
ggaatccagtctgcctgcaccttta

SEQ ID NO: 28573 - DNA, 25 bp, Homo sapiens
cctcacttaaataggtacctgtgtg

SEQ ID NO: 28574 - DNA, 25 bp, Homo sapiens
agacctcgatctctttcttggaaga

SEQ ID NO: 28575 - DNA, 25 bp, Homo sapiens
ttaccatagccagatgcctgccagg

SEQ ID NO: 28576 - DNA, 25 bp, Homo sapiens
tttcaccactttagaattgtttgga

SEQ ID NO: 28577 - DNA, 25 bp, Homo sapiens
tttatagaaataactagttgacaca

SEQ ID NO: 28578 - DNA, 25 bp, Homo sapiens
cagcaaagctacatgccaccatgta

SEQ ID NO: 28579 - DNA, 25 bp, Homo sapiens
gaaattcaattcatcattttcaaaa

SEQ ID NO: 28580 - DNA, 25 bp, Homo sapiens
gctctctagccttctatgtacacta

SEQ ID NO: 28581 - DNA, 25 bp, Homo sapiens
tgctaagcccgatgagtttacagcc

SEQ ID NO: 28582 - DNA, 25 bp, Homo sapiens
ccttcttcaagggatgcgttattaa

SEQ ID NO: 28583 - DNA, 25 bp, Homo sapiens
actctgttcaagcaaggattcccta

SEQ ID NO: 28584 - DNA, 25 bp, Homo sapiens
gcttggcgtaccattcgtgttcttc

SEQ ID NO: 28585 - DNA, 25 bp, Homo sapiens
ggcctttccggtttgcttgagtatt

SEQ ID NO: 28586 - DNA, 25 bp, Homo sapiens
ttggctctctgtgccagtgcactga

SEQ ID NO: 28587 - DNA, 25 bp, Homo sapiens
ctgggcctgacttgctcatacattc

SEQ ID NO: 28588 - DNA, 25 bp, Homo sapiens
ccttagggctaagtgatggtcttca

SEQ ID NO: 28589 - DNA, 25 bp, Homo sapiens
gtgcttccatccctgagagttatta

SEQ ID NO: 28590 - DNA, 25 bp, Homo sapiens
gacataagtctgtatttctagacct

SEQ ID NO: 28591 - DNA, 25 bp, Homo sapiens
acggtccattcatgggcactgcaca

SEQ ID NO: 28592 - DNA, 25 bp, Homo sapiens
aaatcgtggataagcaggtgctacc

SEQ ID NO: 28593 - DNA, 25 bp, Homo sapiens
gatagctatcaccatccacagttta

SEQ ID NO: 28594 - DNA, 25 bp, Homo sapiens
gctggtaggtcacagagcaaactta

SEQ ID NO: 28595 - DNA, 25 bp, Homo sapiens
gccaccgtggccaaagatatttttc

SEQ ID NO: 28596 - DNA, 25 bp, Homo sapiens
gcctgggtttctcctaattctttta

SEQ ID NO: 28597 - DNA, 25 bp, Homo sapiens
tcgccttagaatccaggactcctta

SEQ ID NO: 28598 - DNA, 25 bp, Homo sapiens
gggtaccctacccttgtcagaaaag

SEQ ID NO: 28599 - DNA, 25 bp, Homo sapiens
gggaaatttctcatggtcaagccta

SEQ ID NO: 28600 - DNA, 25 bp, Homo sapiens
cagggaatcagccagcccattgtta

SEQ ID NO: 28601 - DNA, 25 bp, Homo sapiens
gggagaaacgacctacctgcactga

SEQ ID NO: 28602 - DNA, 25 bp, Homo sapiens
gctcaggaaggctctttgcaacacc

SEQ ID NO: 28603 - DNA, 25 bp, Homo sapiens
aggctaagtactaggagtccattta

SEQ ID NO: 28604 - DNA, 25 bp, Homo sapiens
gcccgggagtcacatttcctactta

SEQ ID NO: 28605 - DNA, 25 bp, Homo sapiens
gactgtaagtctttgcctacgaatg

SEQ ID NO: 28606 - DNA, 25 bp, Homo sapiens
ggctctgaaacattggtcccttgga

SEQ ID NO: 28607 - DNA, 25 bp, Homo sapiens
ctttagattcggagagaaggcccaa

SEQ ID NO: 28608 - DNA, 25 bp, Homo sapiens
gaagcccttacctgtgccttgaaga

SEQ ID NO: 28609 - DNA, 25 bp, Homo sapiens
cttctgaagtggatactgcacaatc

SEQ ID NO: 28610 - DNA, 25 bp, Homo sapiens
agcttctcagttttgtggacacaca

SEQ ID NO: 28611 - DNA, 25 bp, Homo sapiens
cgaatctgtgaccttgtggccctga

SEQ ID NO: 28612 - DNA, 25 bp, Homo sapiens
tcctgtggtggctatgaattgattc

SEQ ID NO: 28613 - DNA, 25 bp, Homo sapiens
tgggccagaccagagatttactatc

SEQ ID NO: 28614 - DNA, 25 bp, Homo sapiens
ggcctatcggatgggaaccaatttc

SEQ ID NO: 28615 - DNA, 25 bp, Homo sapiens
gcccacgttcccagcagacattata

SEQ ID NO: 28616 - DNA, 25 bp, Homo sapiens
aaaaaacagtacatcttaacagaag

SEQ ID NO: 28617 - DNA, 25 bp, Homo sapiens
gatggcatttgctttggatactgga

SEQ ID NO: 28618 - DNA, 25 bp, Homo sapiens
ggtagctctttacctccagccaggg

SEQ ID NO: 28619 - DNA, 25 bp, Homo sapiens
tgtatgtaaatgacaggcactggcc

SEQ ID NO: 28620 - DNA, 25 bp, Homo sapiens
attataaaaagaattactggaatat

SEQ ID NO: 28621 - DNA, 25 bp, Homo sapiens
agtgaaggcctctggtccctaatgc

SEQ ID NO: 28622 - DNA, 25 bp, Homo sapiens
tggatgagctctgctgttaccaagc

SEQ ID NO: 28623 - DNA, 25 bp, Homo sapiens
gataaaggaaacagagatatgagga

SEQ ID NO: 28624 - DNA, 25 bp, Homo sapiens
tgagactaggcccaagaccactttc

SEQ ID NO: 28625 - DNA, 25 bp, Homo sapiens
caggcagtgcccagtggttttctga

SEQ ID NO: 28626 - DNA, 25 bp, Homo sapiens
gttgttcactttgccagcctgagta

SEQ ID NO: 28627 - DNA, 25 bp, Homo sapiens
agctcatgatggcagtacacgtata

SEQ ID NO: 28628 - DNA, 25 bp, Homo sapiens
ggtgcatgccttcccttcagttgac

SEQ ID NO: 28629 - DNA, 25 bp, Homo sapiens
tagggctacctcagaacacatgtta

SEQ ID NO: 28630 - DNA, 25 bp, Homo sapiens
ctaagactggctcactgatggaatc

SEQ ID NO: 28631 - DNA, 25 bp, Homo sapiens
gagacaaactctttcaccaggattt

SEQ ID NO: 28632 - DNA, 25 bp, Homo sapiens
ttctgtccaagtccaagtaagtcca

SEQ ID NO: 28633 - DNA, 25 bp, Homo sapiens
agagccttttctcctggtctctgga

SEQ ID NO: 28634 - DNA, 25 bp, Homo sapiens
atctccggtaagcatgtcaatgggc

SEQ ID NO: 28635 - DNA, 25 bp, Homo sapiens
agccctaaggggacagtgattcttc

SEQ ID NO: 28636 - DNA, 25 bp, Homo sapiens
gggaagtcctctgcaagcatacgtg

SEQ ID NO: 28637 - DNA, 25 bp, Homo sapiens
ttccagaggagttatgataccagca

SEQ ID NO: 28638 - DNA, 25 bp, Homo sapiens
tgatactgacgctccctcctgcaga

SEQ ID NO: 28639 - DNA, 25 bp, Homo sapiens
tgtgatgaaagaattttgcctgcaa

SEQ ID NO: 28640 - DNA, 25 bp, Homo sapiens
agtagcattagcaaacccaaggggc

SEQ ID NO: 28641 - DNA, 25 bp, Homo sapiens
ttgccaatgatgttggcttctggtg

SEQ ID NO: 28642 - DNA, 25 bp, Homo sapiens
gatgctccagaccttacgttccatg

SEQ ID NO: 28643 - DNA, 25 bp, Homo sapiens
ttacctaaatgaactgtagtttcct

SEQ ID NO: 28644 - DNA, 25 bp, Homo sapiens
acgttaaattcataggaattcacga

SEQ ID NO: 28645 - DNA, 25 bp, Homo sapiens
tggctgcactcctagggcaaaatta

SEQ ID NO: 28646 - DNA, 25 bp, Homo sapiens
ttagaggaaaaaataaattgccatt

SEQ ID NO: 28647 - DNA, 25 bp, Homo sapiens
caacaggttcatatgtcaggagtca

SEQ ID NO: 28648 - DNA, 25 bp, Homo sapiens
tcaagaagcaggtagtgagtcactc

SEQ ID NO: 28649 - DNA, 25 bp, Homo sapiens
gggcacgctgcaaaaaagaagcttc

SEQ ID NO: 28650 - DNA, 25 bp, Homo sapiens
ccctagaagaacatttaggttcctc

SEQ ID NO: 28651 - DNA, 25 bp, Homo sapiens
atcttaaaataaacttttgtatgag

SEQ ID NO: 28652 - DNA, 25 bp, Homo sapiens
cctaactggagagtgaaccgaaact

SEQ ID NO: 28653 - DNA, 25 bp, Homo sapiens
ccgtttacatatggaatagccaaat

SEQ ID NO: 28654 - DNA, 25 bp, Homo sapiens
ttccaggcctgatatgtgaaacgta

SEQ ID NO: 28655 - DNA, 25 bp, Homo sapiens
ttgctggctgatgctgactatttcc

SEQ ID NO: 28656 - DNA, 25 bp, Homo sapiens
ttcttggaagagattgcaatcacta

SEQ ID NO: 28657 - DNA, 25 bp, Homo sapiens
tctctctactttcctcataaccatt

SEQ ID NO: 28658 - DNA, 25 bp, Homo sapiens
gccatttcagcatgagaagggaatc

SEQ ID NO: 28659 - DNA, 25 bp, Homo sapiens
ctccctagagttgtttgcatacacc

SEQ ID NO: 28660 - DNA, 25 bp, Homo sapiens
tccacctcactcagggaatttaagg

SEQ ID NO: 28661 - DNA, 25 bp, Homo sapiens
tctgtcttctcagggaattgccttc

SEQ ID NO: 28662 - DNA, 25 bp, Homo sapiens
tgcagtggtaggcaaggctttatca

SEQ ID NO: 28663 - DNA, 25 bp, Homo sapiens
ttaccatgtttctctaaatcctagc

SEQ ID NO: 28664 - DNA, 25 bp, Homo sapiens
ggaaactgatctggccctgggcaaa

SEQ ID NO: 28665 - DNA, 25 bp, Homo sapiens
acactatgtagtggggtaagagcag

SEQ ID NO: 28666 - DNA, 25 bp, Homo sapiens
gggagacatatgcagatagagaaat

SEQ ID NO: 28667 - DNA, 25 bp, Homo sapiens
tctccttgagacctgggcagcttga

SEQ ID NO: 28668 - DNA, 25 bp, Homo sapiens
ctggagcttttgcaaccagtgtgtc

SEQ ID NO: 28669 - DNA, 25 bp, Homo sapiens
cccagcgcatgtgtattgagaacca

SEQ ID NO: 28670 - DNA, 25 bp, Homo sapiens
cccggctgctctttctggtctttta

SEQ ID NO: 28671 - DNA, 25 bp, Homo sapiens
gcagaggacatcttggcaccactga

SEQ ID NO: 28672 - DNA, 25 bp, Homo sapiens
aggatgctctccaggcctgcaaagg

SEQ ID NO: 28673 - DNA, 25 bp, Homo sapiens
ggcaaggccatcagctcagtgttta

SEQ ID NO: 28674 - DNA, 25 bp, Homo sapiens
gcagctcacggccagtcctctaaga

SEQ ID NO: 28675 - DNA, 25 bp, Homo sapiens
ctcgggtcagctctaaaggcaatga

SEQ ID NO: 28676 - DNA, 25 bp, Homo sapiens
caggcaggcacatccagtaggctca

SEQ ID NO: 28677 - DNA, 25 bp, Homo sapiens
ttacagacagtacccaaagagagcc

SEQ ID NO: 28678 - DNA, 25 bp, Homo sapiens
ggtcagcaagcattcggtcccattc

SEQ ID NO: 28679 - DNA, 25 bp, Homo sapiens
ggctgtcctggatcctcatcaacta

SEQ ID NO: 28680 - DNA, 25 bp, Homo sapiens
ggggacgtttcctctggttttctta

SEQ ID NO: 28681 - DNA, 25 bp, Homo sapiens
gtgtctctcccaggactgcatggta

SEQ ID NO: 28682 - DNA, 25 bp, Homo sapiens
acctggtgctttgtaagtcctatta

SEQ ID NO: 28683 - DNA, 25 bp, Homo sapiens
gcaggatctcggctttcatttcaaa

SEQ ID NO: 28684 - DNA, 25 bp, Homo sapiens
ttgactacggctgacatactggaca

SEQ ID NO: 28685 - DNA, 25 bp, Homo sapiens
gttccctggctctgatggatctaga

SEQ ID NO: 28686 - DNA, 25 bp, Homo sapiens
atgactatgcctttgagattgtaaa

SEQ ID NO: 28687 - DNA, 25 bp, Homo sapiens
ccagcaggagcacccatatttcttg

SEQ ID NO: 28688 - DNA, 25 bp, Homo sapiens
tgggagcccactgcctaagaaacta

SEQ ID NO: 28689 - DNA, 25 bp, Homo sapiens
cacggtttcggcagcttcttcttta

SEQ ID NO: 28690 - DNA, 25 bp, Homo sapiens
ctccgacggccttggttattctaca

SEQ ID NO: 28691 - DNA, 25 bp, Homo sapiens
gccgggcaattagaggctcccacta

SEQ ID NO: 28692 - DNA, 25 bp, Homo sapiens
ccttcctggggcttgatgaaatctg

SEQ ID NO: 28693 - DNA, 25 bp, Homo sapiens
taacggatttctcggcgctactggc

SEQ ID NO: 28694 - DNA, 25 bp, Homo sapiens
ggtcgttggatgcacacctactata

SEQ ID NO: 28695 - DNA, 25 bp, Homo sapiens
ggctatgagaaactaagtaccattc

SEQ ID NO: 28696 - DNA, 25 bp, Homo sapiens
ctgccttatttggacggagccctca

SEQ ID NO: 28697 - DNA, 25 bp, Homo sapiens
ggcatccctggagcacacagcaata

SEQ ID NO: 28698 - DNA, 25 bp, Homo sapiens
ttaaatttctacatgccagcaactg

SEQ ID NO: 28699 - DNA, 25 bp, Homo sapiens
ttacagtaagaaaatgactaataac

SEQ ID NO: 28700 - DNA, 25 bp, Homo sapiens
ttgaggtccgtgtgaaaccagcgtc

SEQ ID NO: 28701 - DNA, 25 bp, Homo sapiens
agaggccctggagtctaaaattatc

SEQ ID NO: 28702 - DNA, 25 bp, Homo sapiens
agccacaaaagaaaggtatatatcc

SEQ ID NO: 28703 - DNA, 25 bp, Homo sapiens
cacatcctgggtcatcgattctgcc

SEQ ID NO: 28704 - DNA, 25 bp, Homo sapiens
cctcctgcttttctggtgtcctaaa

SEQ ID NO: 28705 - DNA, 25 bp, Homo sapiens
ctggacagtggttctagactattta

SEQ ID NO: 28706 - DNA, 25 bp, Homo sapiens
gaatgtgcattctgagtttagcagg

SEQ ID NO: 28707 - DNA, 25 bp, Homo sapiens
gatgtatttttctaaactgccttct

SEQ ID NO: 28708 - DNA, 25 bp, Homo sapiens
aaggtctctttttcctgtgtgcaca

SEQ ID NO: 28709 - DNA, 25 bp, Homo sapiens
ggttttaacccaggcaggatcattc

SEQ ID NO: 28710 - DNA, 25 bp, Homo sapiens
cagctggtcttgactggggtatttc

SEQ ID NO: 28711 - DNA, 25 bp, Homo sapiens
aactccttgggggttgagcttagat

SEQ ID NO: 28712 - DNA, 25 bp, Homo sapiens
tgctgccagagttcccatgattctg

SEQ ID NO: 28713 - DNA, 25 bp, Homo sapiens
aatcctgttgggctgagtcttttga

SEQ ID NO: 28714 - DNA, 25 bp, Homo sapiens
tggacctcggtaccttcagcttctg

SEQ ID NO: 28715 - DNA, 25 bp, Homo sapiens
tgggcaaccgaatctcttaggcttt

SEQ ID NO: 28716 - DNA, 25 bp, Homo sapiens
aggcggcatttgagatgagcttcta

SEQ ID NO: 28717 - DNA, 25 bp, Homo sapiens
gcctgccttccctctttgtgtgtga

SEQ ID NO: 28718 - DNA, 25 bp, Homo sapiens
ggttgtcaaccatcagtcctttagt

SEQ ID NO: 28719 - DNA, 25 bp, Homo sapiens
ctattccactgggatgggcacctcg

SEQ ID NO: 28720 - DNA, 25 bp, Homo sapiens
gtggccacattagttcctctcagga

SEQ ID NO: 28721 - DNA, 25 bp, Homo sapiens
gggcattcagtttccgagccaaata

SEQ ID NO: 28722 - DNA, 25 bp, Homo sapiens
atcagggtgttgcagagctcacatc

SEQ ID NO: 28723 - DNA, 25 bp, Homo sapiens
atgtggtatgaatcctgtaactgta

SEQ ID NO: 28724 - DNA, 25 bp, Homo sapiens
ggggcctacctacctgcctagatga

SEQ ID NO: 28725 - DNA, 25 bp, Homo sapiens
ccagcagggctgaatatagtatctc

SEQ ID NO: 28726 - DNA, 25 bp, Homo sapiens
cgggttgtgcattcacctggcttta

SEQ ID NO: 28727 - DNA, 25 bp, Homo sapiens
acaaggccagcgtccctagggagaa

SEQ ID NO: 28728 - DNA, 25 bp, Homo sapiens
aaggggaagctttttaagcttttta

SEQ ID NO: 28729 - DNA, 25 bp, Homo sapiens
agccaaggccgtttctaggttttga

SEQ ID NO: 28730 - DNA, 25 bp, Homo sapiens
gaggcacctgccttaagcccagatg

SEQ ID NO: 28731 - DNA, 25 bp, Homo sapiens
gcagacgcatacagttggccttttt

SEQ ID NO: 28732 - DNA, 25 bp, Homo sapiens
ggcagaagttcatcagacccagttc

SEQ ID NO: 28733 - DNA, 25 bp, Homo sapiens
tctgtggtcaccagactcaggggtc

SEQ ID NO: 28734 - DNA, 25 bp, Homo sapiens
ccattcccattttgtgagtcttcag

SEQ ID NO: 28735 - DNA, 25 bp, Homo sapiens
tatgccggatccagtctcttgtatg

SEQ ID NO: 28736 - DNA, 25 bp, Homo sapiens
cttggctctgtgtggagatcttaac

SEQ ID NO: 28737 - DNA, 25 bp, Homo sapiens
gtactgttctctttctctctgcatg

SEQ ID NO: 28738 - DNA, 25 bp, Homo sapiens
gggattcttgccatacgctcttcag

SEQ ID NO: 28739 - DNA, 25 bp, Homo sapiens
tcaaaggcatctcaaactcagtggg

SEQ ID NO: 28740 - DNA, 25 bp, Homo sapiens
gggctccatgtcttcttcttactaa

SEQ ID NO: 28741 - DNA, 25 bp, Homo sapiens
taaaaaaaccagcaaaaggaaaaga

SEQ ID NO: 28742 - DNA, 25 bp, Homo sapiens
ccaggggtttccaaaaggagtgctc

SEQ ID NO: 28743 - DNA, 25 bp, Homo sapiens
tggtgcctttctctactttgtcagc

SEQ ID NO: 28744 - DNA, 25 bp, Homo sapiens
ctgttttgcctacagctgctttgta

SEQ ID NO: 28745 - DNA, 25 bp, Homo sapiens
tttctaacatgtgaagattttactc

SEQ ID NO: 28746 - DNA, 25 bp, Homo sapiens
ccctggcgtcagagacagcctttga

SEQ ID NO: 28747 - DNA, 25 bp, Homo sapiens
gggagctcatgtaacctgccaaggc

SEQ ID NO: 28748 - DNA, 25 bp, Homo sapiens
catcatcgggagacagaggcacaca

SEQ ID NO: 28749 - DNA, 25 bp, Homo sapiens
acagaagttcatgtggctcccattt

SEQ ID NO: 28750 - DNA, 25 bp, Homo sapiens
atatggcactatagctgggtttgga

SEQ ID NO: 28751 - DNA, 25 bp, Homo sapiens
cctggaaatttgaccttgcgacttg

SEQ ID NO: 28752 - DNA, 25 bp, Homo sapiens
ctctcttcgccagttcagggtctca

SEQ ID NO: 28753 - DNA, 25 bp, Homo sapiens
tccgaggacacacaggggccctatt

SEQ ID NO: 28754 - DNA, 25 bp, Homo sapiens
gggcccttagaatatgccgccataa

SEQ ID NO: 28755 - DNA, 25 bp, Homo sapiens
ctgacctggcaggagctcattcttc

SEQ ID NO: 28756 - DNA, 25 bp, Homo sapiens
ggtcttgcttcagtgtccatttcta

SEQ ID NO: 28757 - DNA, 25 bp, Homo sapiens
cctgcatctgtgtgaggacatgttc

SEQ ID NO: 28758 - DNA, 25 bp, Homo sapiens
cctccctgagagaatcctgtttgtg

SEQ ID NO: 28759 - DNA, 25 bp, Homo sapiens
gaacactcttaaattcaccaggtta

SEQ ID NO: 28760 - DNA, 25 bp, Homo sapiens
tttaaagatggactctcaggattca

SEQ ID NO: 28761 - DNA, 25 bp, Homo sapiens
ggtcccttgtaattagcataacaat

SEQ ID NO: 28762 - DNA, 25 bp, Homo sapiens
aggacccttgcatggaactttggaa

SEQ ID NO: 28763 - DNA, 25 bp, Homo sapiens
tcagtcagctgtcggttaccaatta

SEQ ID NO: 28764 - DNA, 25 bp, Homo sapiens
ggctttcaggccaacaaatttcagg

SEQ ID NO: 28765 - DNA, 25 bp, Homo sapiens
tcacaccagaaacttcatgtgcttg

SEQ ID NO: 28766 - DNA, 25 bp, Homo sapiens
tctgcaggatgcaccagctgacttc

SEQ ID NO: 28767 - DNA, 25 bp, Homo sapiens
gttgtataccttctgctcaggacca

SEQ ID NO: 28768 - DNA, 25 bp, Homo sapiens
tggtctcctttgtaccctgggcaga

SEQ ID NO: 28769 - DNA, 25 bp, Homo sapiens
ggtgaggcccactgctgagttaaca

SEQ ID NO: 28770 - DNA, 25 bp, Homo sapiens
gtgccacctgccaatctgaaagatg

SEQ ID NO: 28771 - DNA, 25 bp, Homo sapiens
taaaaaatttcaaaatactttcctc

SEQ ID NO: 28772 - DNA, 25 bp, Homo sapiens
ttgcattttgaattttttaatctat

SEQ ID NO: 28773 - DNA, 25 bp, Homo sapiens
ggcccagtgtacaatcctcggaata

SEQ ID NO: 28774 - DNA, 25 bp, Homo sapiens
gtttttattatttaatgtgttgcac

SEQ ID NO: 28775 - DNA, 25 bp, Homo sapiens
tgttcctgtcgcacaataagcctta

SEQ ID NO: 28776 - DNA, 25 bp, Homo sapiens
tcagggagcatgtggaaacacctta

SEQ ID NO: 28777 - DNA, 25 bp, Homo sapiens
ctcacccaggggcttcttatcatga

SEQ ID NO: 28778 - DNA, 25 bp, Homo sapiens
gaggcaatacaaatcatgtggatta

SEQ ID NO: 28779 - DNA, 25 bp, Homo sapiens
acctgatcaggggagttctttgcac

SEQ ID NO: 28780 - DNA, 25 bp, Homo sapiens
cctgtgggcgcgaattattaaaacc

SEQ ID NO: 28781 - DNA, 25 bp, Homo sapiens
tctcaaggctccaagtcaccaggtg

SEQ ID NO: 28782 - DNA, 25 bp, Homo sapiens
tccttcaactgtggctggtcactga

SEQ ID NO: 28783 - DNA, 25 bp, Homo sapiens
tcagggcccagtgatccttatcatc

SEQ ID NO: 28784 - DNA, 25 bp, Homo sapiens
ggcatgctgccatctatcatcatta

SEQ ID NO: 28785 - DNA, 25 bp, Homo sapiens
cctggcgcagggagactattttaaa

SEQ ID NO: 28786 - DNA, 25 bp, Homo sapiens
cttcactgcttggaaaactcatctg

SEQ ID NO: 28787 - DNA, 25 bp, Homo sapiens
gcgcatgatgcctcctagttagaca

SEQ ID NO: 28788 - DNA, 25 bp, Homo sapiens
cccaggctgtgtggggtactattga

SEQ ID NO: 28789 - DNA, 25 bp, Homo sapiens
cctcctgtcacagaggggctggatc

SEQ ID NO: 28790 - DNA, 25 bp, Homo sapiens
gcccatggctgtgacaagagatata

SEQ ID NO: 28791 - DNA, 25 bp, Homo sapiens
cccatggcttccgagtgtccttaaa

SEQ ID NO: 28792 - DNA, 25 bp, Homo sapiens
ccgtccctctccaggttggcttaga

SEQ ID NO: 28793 - DNA, 25 bp, Homo sapiens
gagcagatgtcagttcccaccacga

SEQ ID NO: 28794 - DNA, 25 bp, Homo sapiens
tgcctttgccattcaaggggcctca

SEQ ID NO: 28795 - DNA, 25 bp, Homo sapiens
aggggcactctacccataatataca

SEQ ID NO: 28796 - DNA, 25 bp, Homo sapiens
tatccagcctaggggtcaggtttca

SEQ ID NO: 28797 - DNA, 25 bp, Homo sapiens
ccctagtgctgttctgggttctgca

SEQ ID NO: 28798 - DNA, 25 bp, Homo sapiens
gaagctacccatctccttcttgttc

SEQ ID NO: 28799 - DNA, 25 bp, Homo sapiens
atacatatgtatattatctctctct

SEQ ID NO: 28800 - DNA, 25 bp, Homo sapiens
tggtgcttacactctgctccaaaga

SEQ ID NO: 28801 - DNA, 25 bp, Homo sapiens
accaggtgcctctcagcagttagtc

SEQ ID NO: 28802 - DNA, 25 bp, Homo sapiens
tcgccatgaggttagatgttccagc

SEQ ID NO: 28803 - DNA, 25 bp, Homo sapiens
ttccaaatgggttcagggcaacttc

SEQ ID NO: 28804 - DNA, 25 bp, Homo sapiens
ttatcataaaaaatattgctgccca

SEQ ID NO: 28805 - DNA, 25 bp, Homo sapiens
gtctgtggacctttgggaaactctc

SEQ ID NO: 28806 - DNA, 25 bp, Homo sapiens
tcagtctttgcacttgggttcaggc

SEQ ID NO: 28807 - DNA, 25 bp, Homo sapiens
gggtggagcattccctttgcattta

SEQ ID NO: 28808 - DNA, 25 bp, Homo sapiens
tattacatgagtaagtcaaaataac

SEQ ID NO: 28809 - DNA, 25 bp, Homo sapiens
cctggcccagaagatgcacttgcta

SEQ ID NO: 28810 - DNA, 25 bp, Homo sapiens
agatgctgcctttgatgccattgtc

SEQ ID NO: 28811 - DNA, 25 bp, Homo sapiens
ctgctgtgcatatggagaaactata

SEQ ID NO: 28812 - DNA, 25 bp, Homo sapiens
catagggcagaaggcagcacagttt

SEQ ID NO: 28813 - DNA, 25 bp, Homo sapiens
ggctcctctaaatatcgtgtacatc

SEQ ID NO: 28814 - DNA, 25 bp, Homo sapiens
tttgttacacccatctgagttcagg

SEQ ID NO: 28815 - DNA, 25 bp, Homo sapiens
tgctaagaacagaagccagtgttta

SEQ ID NO: 28816 - DNA, 25 bp, Homo sapiens
tgggacaatgtcacatgtgggacaa

SEQ ID NO: 28817 - DNA, 25 bp, Homo sapiens
aactgtgagatagcactacaactca

SEQ ID NO: 28818 - DNA, 25 bp, Homo sapiens
tgtgttccaccctcatttcagactg

SEQ ID NO: 28819 - DNA, 25 bp, Homo sapiens
agctgtgggacactcttcgcagaga

SEQ ID NO: 28820 - DNA, 25 bp, Homo sapiens
caaggtagcattgtgctgccctaaa

SEQ ID NO: 28821 - DNA, 25 bp, Homo sapiens
ttaagagcaaagcaataatttctta

SEQ ID NO: 28822 - DNA, 25 bp, Homo sapiens
ggtctacggtgtttctggtccattc

SEQ ID NO: 28823 - DNA, 25 bp, Homo sapiens
aggtcttgaggattcagcattcaca

SEQ ID NO: 28824 - DNA, 25 bp, Homo sapiens
gatgcctgtgttgacccagcctttg

SEQ ID NO: 28825 - DNA, 25 bp, Homo sapiens
ttactggcaggtctagaaaaatgtc

SEQ ID NO: 28826 - DNA, 25 bp, Homo sapiens
tgggtatccatggacaatttacata

SEQ ID NO: 28827 - DNA, 25 bp, Homo sapiens
tcactgttgagaaaaagaaaaggcc

SEQ ID NO: 28828 - DNA, 25 bp, Homo sapiens
gaccaactgtgcttccacgatcaga

SEQ ID NO: 28829 - DNA, 25 bp, Homo sapiens
gctctgagcctcaaaacctggtatg

SEQ ID NO: 28830 - DNA, 25 bp, Homo sapiens
ggcttgtagcacaggggacattcta

SEQ ID NO: 28831 - DNA, 25 bp, Homo sapiens
atcatacagacagacagagatcctg

SEQ ID NO: 28832 - DNA, 25 bp, Homo sapiens
tcttctatcgcaattaccagtttgg

SEQ ID NO: 28833 - DNA, 25 bp, Homo sapiens
acccaagaaggtggattcagacata

SEQ ID NO: 28834 - DNA, 25 bp, Homo sapiens
gaaataggcttgtccctgctccgga

SEQ ID NO: 28835 - DNA, 25 bp, Homo sapiens
ttgcctcaacagtcatcatttcgtg

SEQ ID NO: 28836 - DNA, 25 bp, Homo sapiens
ctggggtgaaagcaggcatcaattt

SEQ ID NO: 28837 - DNA, 25 bp, Homo sapiens
agagggcctcccaccaagatgtgca

SEQ ID NO: 28838 - DNA, 25 bp, Homo sapiens
atagagccacgctttcctctgggtc

SEQ ID NO: 28839 - DNA, 25 bp, Homo sapiens
gcgagtcctggcttaaccttctgca

SEQ ID NO: 28840 - DNA, 25 bp, Homo sapiens
ggggccttcaagcagcaagagattt

SEQ ID NO: 28841 - DNA, 25 bp, Homo sapiens
cacctccttgtgtagaagtttggta

SEQ ID NO: 28842 - DNA, 25 bp, Homo sapiens
tgtacctatgtaaatgcatactaag

SEQ ID NO: 28843 - DNA, 25 bp, Homo sapiens
agggctgaaaaaacaatgatgtggc

SEQ ID NO: 28844 - DNA, 25 bp, Homo sapiens
ttattcttgggctctgctgaccaca

SEQ ID NO: 28845 - DNA, 25 bp, Homo sapiens
tgtggctgggacaaggtcatttctc

SEQ ID NO: 28846 - DNA, 25 bp, Homo sapiens
ggctggtcttcatcttaaactggtc

SEQ ID NO: 28847 - DNA, 25 bp, Homo sapiens
cttgcattgaaactggaaactcttg

SEQ ID NO: 28848 - DNA, 25 bp, Homo sapiens
tcctgatctgaaacggcaacttggg

SEQ ID NO: 28849 - DNA, 25 bp, Homo sapiens
gtatattcacaggcaatgtctggaa

SEQ ID NO: 28850 - DNA, 25 bp, Homo sapiens
atctgtctgggtctcactgtgcacc

SEQ ID NO: 28851 - DNA, 25 bp, Homo sapiens
atggtgggaagaacacacttgtgcc

SEQ ID NO: 28852 - DNA, 25 bp, Homo sapiens
taaccacccaaaccaatcggtctgc

SEQ ID NO: 28853 - DNA, 25 bp, Homo sapiens
ggaaatggatcaggaaatagagaca

SEQ ID NO: 28854 - DNA, 25 bp, Homo sapiens
caatctgtcctgtctctgttactat

SEQ ID NO: 28855 - DNA, 25 bp, Homo sapiens
cacgtaactcaacaatctgaaaata

SEQ ID NO: 28856 - DNA, 25 bp, Homo sapiens
tatagtctactttttaaaaggagag

SEQ ID NO: 28857 - DNA, 25 bp, Homo sapiens
cccaggctgctggaacacttggtta

SEQ ID NO: 28858 - DNA, 25 bp, Homo sapiens
tgtacttggtactatggaaagcatc

SEQ ID NO: 28859 - DNA, 25 bp, Homo sapiens
gtcctaagacaggtcttcagttttt

SEQ ID NO: 28860 - DNA, 25 bp, Homo sapiens
tctcacctgggtttgctcatgaagc

SEQ ID NO: 28861 - DNA, 25 bp, Homo sapiens
cacaggccctgactttgagtttcca

SEQ ID NO: 28862 - DNA, 25 bp, Homo sapiens
aggaaaaattatagcaggagctttc

SEQ ID NO: 28863 - DNA, 25 bp, Homo sapiens
tttgctgaactctttgtaccctgta

SEQ ID NO: 28864 - DNA, 25 bp, Homo sapiens
ggcggtaagtaagttgtagtggtaa

SEQ ID NO: 28865 - DNA, 25 bp, Homo sapiens
ctataaactagctgcctaaatagaa

SEQ ID NO: 28866 - DNA, 25 bp, Homo sapiens
gtatatgatttaaattgcttaaaca

SEQ ID NO: 28867 - DNA, 25 bp, Homo sapiens
actccggaagggaagcagtttcttc

SEQ ID NO: 28868 - DNA, 25 bp, Homo sapiens
attttttgtagaaacagggcctttc

SEQ ID NO: 28869 - DNA, 25 bp, Homo sapiens
cccttgcatgaaaactggtgctgga

SEQ ID NO: 28870 - DNA, 25 bp, Homo sapiens
accgcgcccagctgtagaaaggttg

SEQ ID NO: 28871 - DNA, 25 bp, Homo sapiens
agtccttttgggttgctctgatcaa

SEQ ID NO: 28872 - DNA, 25 bp, Homo sapiens
gctggcttgagaaagataacctgta

SEQ ID NO: 28873 - DNA, 25 bp, Homo sapiens
tcagcagtgaatggtagccgcagtg

SEQ ID NO: 28874 - DNA, 25 bp, Homo sapiens
tttgccaggcatgaagtccgtgatc

SEQ ID NO: 28875 - DNA, 25 bp, Homo sapiens
gtcctcctcaaaagataatcttact

SEQ ID NO: 28876 - DNA, 25 bp, Homo sapiens
cccaggggtttttcaggtaagtaca

SEQ ID NO: 28877 - DNA, 25 bp, Homo sapiens
cggagagaaatcagtcaccctagtc

SEQ ID NO: 28878 - DNA, 25 bp, Homo sapiens
agttaccttgccacatattgaaatg

SEQ ID NO: 28879 - DNA, 25 bp, Homo sapiens
ggggaatgatttttattatactacg

SEQ ID NO: 28880 - DNA, 25 bp, Homo sapiens
tggccttagaccacagccttccaga

SEQ ID NO: 28881 - DNA, 25 bp, Homo sapiens
ctggggaaccacacctagaagaggc

SEQ ID NO: 28882 - DNA, 25 bp, Homo sapiens
ctggcccacagataacacttagaga

SEQ ID NO: 28883 - DNA, 25 bp, Homo sapiens
cctaaaaatgtccacttcccagggg

SEQ ID NO: 28884 - DNA, 25 bp, Homo sapiens
tctctagggaaagatgctgggtgtc

SEQ ID NO: 28885 - DNA, 25 bp, Homo sapiens
tgctggcttggaacctcctgaagtt

SEQ ID NO: 28886 - DNA, 25 bp, Homo sapiens
acagtgctttttaatggtgcccgaa

SEQ ID NO: 28887 - DNA, 25 bp, Homo sapiens
acgcctttgcttgctgggttgactc

SEQ ID NO: 28888 - DNA, 25 bp, Homo sapiens
tcacctctggcatagatactgtttg

SEQ ID NO: 28889 - DNA, 25 bp, Homo sapiens
ggctgagggacttacatcgcatttc

SEQ ID NO: 28890 - DNA, 25 bp, Homo sapiens
gctcctaagccaagctgggaaaata

SEQ ID NO: 28891 - DNA, 25 bp, Homo sapiens
ggctgactcttggtatcccatcata

SEQ ID NO: 28892 - DNA, 25 bp, Homo sapiens
gccctcttacagtgggtacttttaa

SEQ ID NO: 28893 - DNA, 25 bp, Homo sapiens
agtgagtgtcaaagcccacattttc

SEQ ID NO: 28894 - DNA, 25 bp, Homo sapiens
accggtctggagttcctttcatata

SEQ ID NO: 28895 - DNA, 25 bp, Homo sapiens
tggccctccagacttcccattgatt

SEQ ID NO: 28896 - DNA, 25 bp, Homo sapiens
ctacctattttccttttttataact

SEQ ID NO: 28897 - DNA, 25 bp, Homo sapiens
gtgggcacctacacagactatcttg

SEQ ID NO: 28898 - DNA, 25 bp, Homo sapiens
gcctgtgtgtgtgtttagtgcttta

SEQ ID NO: 28899 - DNA, 25 bp, Homo sapiens
ctctgggttctcagcatctaacgca

SEQ ID NO: 28900 - DNA, 25 bp, Homo sapiens
atttacactcaacacatctaatact

SEQ ID NO: 28901 - DNA, 25 bp, Homo sapiens
ctgagcggcgagtttccgatttaaa

SEQ ID NO: 28902 - DNA, 25 bp, Homo sapiens
cctcactggcaggatctgggattcc

SEQ ID NO: 28903 - DNA, 25 bp, Homo sapiens
gctcctgtcactagaggttgcttca

SEQ ID NO: 28904 - DNA, 25 bp, Homo sapiens
cgtgagaccctttttctaggcgata

SEQ ID NO: 28905 - DNA, 25 bp, Homo sapiens
cgccagtgacttttggtctacaaca

SEQ ID NO: 28906 - DNA, 25 bp, Homo sapiens
tgccagcctaggtcagtttacagtg

SEQ ID NO: 28907 - DNA, 25 bp, Homo sapiens
cacaccatgttttgagtagctcttg

SEQ ID NO: 28908 - DNA, 25 bp, Homo sapiens
tggtattgttcctccatctcatgca

SEQ ID NO: 28909 - DNA, 25 bp, Homo sapiens
tcgcctgacttcatcacagtatatg

SEQ ID NO: 28910 - DNA, 25 bp, Homo sapiens
cctgtaagcatgaacttgcccagta

SEQ ID NO: 28911 - DNA, 25 bp, Homo sapiens
gcagtggcgtgttcttggctatata

SEQ ID NO: 28912 - DNA, 25 bp, Homo sapiens
agtgtaattattagaaatttctaag

SEQ ID NO: 28913 - DNA, 25 bp, Homo sapiens
gacggccactgtataccctctgata

SEQ ID NO: 28914 - DNA, 25 bp, Homo sapiens
gcatttaacactgcccagggacaga

SEQ ID NO: 28915 - DNA, 25 bp, Homo sapiens
gcagcttttatcttttctacccagg

SEQ ID NO: 28916 - DNA, 25 bp, Homo sapiens
cttgtgaaccacctgcttatgttga

SEQ ID NO: 28917 - DNA, 25 bp, Homo sapiens
ctgactcgagggttgaattctaaaa

SEQ ID NO: 28918 - DNA, 25 bp, Homo sapiens
tgactcacatgcacacgaacaatta

SEQ ID NO: 28919 - DNA, 25 bp, Homo sapiens
agatgggcccaacaactagactaga

SEQ ID NO: 28920 - DNA, 25 bp, Homo sapiens
ctcaggcaccataccatatagatta

SEQ ID NO: 28921 - DNA, 25 bp, Homo sapiens
ttcctttttcttttctcctccccct

SEQ ID NO: 28922 - DNA, 25 bp, Homo sapiens
tcttactcagggtgatactcaactc

SEQ ID NO: 28923 - DNA, 25 bp, Homo sapiens
aggcacgcttatactgctggattca

SEQ ID NO: 28924 - DNA, 25 bp, Homo sapiens
tcctagatctgtaaactggcgtagc

SEQ ID NO: 28925 - DNA, 25 bp, Homo sapiens
ttactgcgtgtgttctctgctcctg

SEQ ID NO: 28926 - DNA, 25 bp, Homo sapiens
gcatataaatgcatggtttccatta

SEQ ID NO: 28927 - DNA, 25 bp, Homo sapiens
tgttcttttacacatacacagtgcc

SEQ ID NO: 28928 - DNA, 25 bp, Homo sapiens
cctaactgggttgtgagcatccttt

SEQ ID NO: 28929 - DNA, 25 bp, Homo sapiens
acaaggtctggctgtgttgcccagg

SEQ ID NO: 28930 - DNA, 25 bp, Homo sapiens
gtccctgcccaaaaaggagcttatt

SEQ ID NO: 28931 - DNA, 25 bp, Homo sapiens
gagccattgcacctgttctatttta

SEQ ID NO: 28932 - DNA, 25 bp, Homo sapiens
ctctgcctccttaaagaagtttgtg

SEQ ID NO: 28933 - DNA, 25 bp, Homo sapiens
gcgttgttgaggatgctgctagcta

SEQ ID NO: 28934 - DNA, 25 bp, Homo sapiens
tatgagagtgcaggagctactaccc

SEQ ID NO: 28935 - DNA, 25 bp, Homo sapiens
gtgagactacttcccagggagtgtg

SEQ ID NO: 28936 - DNA, 25 bp, Homo sapiens
gtgtcacttagaaccctcattcagg

SEQ ID NO: 28937 - DNA, 25 bp, Homo sapiens
ccttgggcattcagtgagtcttttc

SEQ ID NO: 28938 - DNA, 25 bp, Homo sapiens
cacactctgtatttccttgaaaggg

SEQ ID NO: 28939 - DNA, 25 bp, Homo sapiens
cccgtctctttaggctggaactgtt

SEQ ID NO: 28940 - DNA, 25 bp, Homo sapiens
ggccactctgttctgcgtactgctg

SEQ ID NO: 28941 - DNA, 25 bp, Homo sapiens
cagtttccaggtttgcagattcaca

SEQ ID NO: 28942 - DNA, 25 bp, Homo sapiens
ggggtttgaaacacatgggcaatta

SEQ ID NO: 28943 - DNA, 25 bp, Homo sapiens
cctccaggatgtgtgtgtgtttctt

SEQ ID NO: 28944 - DNA, 25 bp, Homo sapiens
ccagttgctgaagcccttgtccata

SEQ ID NO: 28945 - DNA, 25 bp, Homo sapiens
gcagtgtccgatcaagatactttta

SEQ ID NO: 28946 - DNA, 25 bp, Homo sapiens
cactcttgaaatttcaatgaatgca

SEQ ID NO: 28947 - DNA, 25 bp, Homo sapiens
acctgggcttcaagtagactctgga

SEQ ID NO: 28948 - DNA, 25 bp, Homo sapiens
tgcctattttcttgggatgatgatc

SEQ ID NO: 28949 - DNA, 25 bp, Homo sapiens
actgctagtctacaaacccagtcta

SEQ ID NO: 28950 - DNA, 25 bp, Homo sapiens
ttttaatttgtgttggcaaatgagg

SEQ ID NO: 28951 - DNA, 25 bp, Homo sapiens
ttaaaccatgccctcaattcagttg

SEQ ID NO: 28952 - DNA, 25 bp, Homo sapiens
tgctgtatttctagccatggacttg

SEQ ID NO: 28953 - DNA, 25 bp, Homo sapiens
acatggctttcccttatccagaggc

SEQ ID NO: 28954 - DNA, 25 bp, Homo sapiens
acagtcgtgtggttggttcctttta

SEQ ID NO: 28955 - DNA, 25 bp, Homo sapiens
actttgttttgtttgatgtaacata

SEQ ID NO: 28956 - DNA, 25 bp, Homo sapiens
gctgctgtggctccagttgagttta

SEQ ID NO: 28957 - DNA, 25 bp, Homo sapiens
tagggccaggaaaaattgaggaaaa

SEQ ID NO: 28958 - DNA, 25 bp, Homo sapiens
tctgttttcttcaagggcctgtatc

SEQ ID NO: 28959 - DNA, 25 bp, Homo sapiens
gtgcctacagggtattctaaacgta

SEQ ID NO: 28960 - DNA, 25 bp, Homo sapiens
atgttcatttgcagcccgaggggtc

SEQ ID NO: 28961 - DNA, 25 bp, Homo sapiens
ggcgtctgttttcactgcgttatta

SEQ ID NO: 28962 - DNA, 25 bp, Homo sapiens
cagctagcttttcccagtgacagtg

SEQ ID NO: 28963 - DNA, 25 bp, Homo sapiens
caggttcctggtaggcaagccaatc

SEQ ID NO: 28964 - DNA, 25 bp, Homo sapiens
cagggccagaagatcttagaggttc

SEQ ID NO: 28965 - DNA, 25 bp, Homo sapiens
tgtggttggctctccctatatactg

SEQ ID NO: 28966 - DNA, 25 bp, Homo sapiens
ctctgttgagcactgattttggaca

SEQ ID NO: 28967 - DNA, 25 bp, Homo sapiens
aaatacttgctggatggtggactca

SEQ ID NO: 28968 - DNA, 25 bp, Homo sapiens
gctggacatggtggctcactcatat

SEQ ID NO: 28969 - DNA, 25 bp, Homo sapiens
cccagattgcttgtgctggcaaata

SEQ ID NO: 28970 - DNA, 25 bp, Homo sapiens
gtgctacctttccttggcttacaga

SEQ ID NO: 28971 - DNA, 25 bp, Homo sapiens
ttttaattgtagtaaaatttacaga

SEQ ID NO: 28972 - DNA, 25 bp, Homo sapiens
ggtggacttgtcatacgattatatt

SEQ ID NO: 28973 - DNA, 25 bp, Homo sapiens
gctcagtagttcattgcccagagta

SEQ ID NO: 28974 - DNA, 25 bp, Homo sapiens
ctacagccctgtgttggggttgata

SEQ ID NO: 28975 - DNA, 25 bp, Homo sapiens
tcccagactgcggtatcattcattg

SEQ ID NO: 28976 - DNA, 25 bp, Homo sapiens
tgctgttacaccactcaagatgcgt

SEQ ID NO: 28977 - DNA, 25 bp, Homo sapiens
ccttggctggcgcttaacttgcaaa

SEQ ID NO: 28978 - DNA, 25 bp, Homo sapiens
tgctttcaatgtggtggtactactt

SEQ ID NO: 28979 - DNA, 25 bp, Homo sapiens
tccatgattggtttttagattttta

SEQ ID NO: 28980 - DNA, 25 bp, Homo sapiens
tattattagtgctcatgatttctca

SEQ ID NO: 28981 - DNA, 25 bp, Homo sapiens
tgcgcaatgcctccagaaatcaatg

SEQ ID NO: 28982 - DNA, 25 bp, Homo sapiens
gtctgctttctggtgttctgttcta

SEQ ID NO: 28983 - DNA, 25 bp, Homo sapiens
ctgggtctctgctctgtgaaaaata

SEQ ID NO: 28984 - DNA, 25 bp, Homo sapiens
ggctttgattcctaggcgctgagaa

SEQ ID NO: 28985 - DNA, 25 bp, Homo sapiens
ctcctgtaggcaccaagatttagac

SEQ ID NO: 28986 - DNA, 25 bp, Homo sapiens
ctaatgatgtgtgcttgtgtgtcca

SEQ ID NO: 28987 - DNA, 25 bp, Homo sapiens
ctgcctgtggcagtttgaaataata

SEQ ID NO: 28988 - DNA, 25 bp, Homo sapiens
tcttggagaagccagacccagtttc

SEQ ID NO: 28989 - DNA, 25 bp, Homo sapiens
tctagtgaatttggttggaactcta

SEQ ID NO: 28990 - DNA, 25 bp, Homo sapiens
gatgtacttctcctcctctttgcag

SEQ ID NO: 28991 - DNA, 25 bp, Homo sapiens
gccgtgtcgtgttgctagagttaca

SEQ ID NO: 28992 - DNA, 25 bp, Homo sapiens
tctccactgcaaacatggggccatg

SEQ ID NO: 28993 - DNA, 25 bp, Homo sapiens
gggctgatctcctctattcaaacga

SEQ ID NO: 28994 - DNA, 25 bp, Homo sapiens
catgtcgcctgtaagattttgaaac

SEQ ID NO: 28995 - DNA, 25 bp, Homo sapiens
ttcctggggttgcaacatctgagcc

SEQ ID NO: 28996 - DNA, 25 bp, Homo sapiens
tgggcacattctgcagacctacggg

SEQ ID NO: 28997 - DNA, 25 bp, Homo sapiens
caaatgaacgtgtgtgggagcccta

SEQ ID NO: 28998 - DNA, 25 bp, Homo sapiens
gggaaggccctctgctcagcaatca

SEQ ID NO: 28999 - DNA, 25 bp, Homo sapiens
cggggtgctgagtttcacgttcaca

SEQ ID NO: 29000 - DNA, 25 bp, Homo sapiens
ggaatcgatcctttgctccctagtc

SEQ ID NO: 29001 - DNA, 25 bp, Homo sapiens
gggcctgtgtaccactgtgctatga

SEQ ID NO: 29002 - DNA, 25 bp, Homo sapiens
cctggtgcttccgtgtgagtaaatg

SEQ ID NO: 29003 - DNA, 25 bp, Homo sapiens
tcatctgtagactttgggtgccaaa

SEQ ID NO: 29004 - DNA, 25 bp, Homo sapiens
ctggccctcaaatgtccctggaatg

SEQ ID NO: 29005 - DNA, 25 bp, Homo sapiens
ctgcctctggttgcagaagttcctg

SEQ ID NO: 29006 - DNA, 25 bp, Homo sapiens
tgagaccctcagttgcccacaaata

SEQ ID NO: 29007 - DNA, 25 bp, Homo sapiens
tgggtccgaatgagcctctcttctt

SEQ ID NO: 29008 - DNA, 25 bp, Homo sapiens
ctggtccacagtttgagcagctgct

SEQ ID NO: 29009 - DNA, 25 bp, Homo sapiens
ggcattggcccagggtgctctaaca

SEQ ID NO: 29010 - DNA, 25 bp, Homo sapiens
tggctgtgtccttaaccctctgata

SEQ ID NO: 29011 - DNA, 25 bp, Homo sapiens
ccctaatgaggatggacgtctgttc

SEQ ID NO: 29012 - DNA, 25 bp, Homo sapiens
tctgcatacgctgttggtttcctta

SEQ ID NO: 29013 - DNA, 25 bp, Homo sapiens
gggctctgattgcttcctggctaca

SEQ ID NO: 29014 - DNA, 25 bp, Homo sapiens
cgtccgtcagcaccaggatgatgtt

SEQ ID NO: 29015 - DNA, 25 bp, Homo sapiens
tggctcaagcaggtctctaatctcg

SEQ ID NO: 29016 - DNA, 25 bp, Homo sapiens
gctaaggtcctttgagttctgcaga

SEQ ID NO: 29017 - DNA, 25 bp, Homo sapiens
attagagtgatcctaccgctgcagc

SEQ ID NO: 29018 - DNA, 25 bp, Homo sapiens
ttgcagcagccagcgttctaagatg

SEQ ID NO: 29019 - DNA, 25 bp, Homo sapiens
gggacctcatccagacctgtttaga

SEQ ID NO: 29020 - DNA, 25 bp, Homo sapiens
ccctgttagtgctttgaggccacaa

SEQ ID NO: 29021 - DNA, 25 bp, Homo sapiens
tccagggagcctgatcatttctctc

SEQ ID NO: 29022 - DNA, 25 bp, Homo sapiens
tgcagggcttaggaacccagttacc

SEQ ID NO: 29023 - DNA, 25 bp, Homo sapiens
caaacagcctgatacttacttgggg

SEQ ID NO: 29024 - DNA, 25 bp, Homo sapiens
aggtcattcctagttgctctctcac

SEQ ID NO: 29025 - DNA, 25 bp, Homo sapiens
gccgaggtgctaattcttccagata

SEQ ID NO: 29026 - DNA, 25 bp, Homo sapiens
tggccatcccgtaaaacagtcagtc

SEQ ID NO: 29027 - DNA, 25 bp, Homo sapiens
gctgatcgttaacctctgtgctcca

SEQ ID NO: 29028 - DNA, 25 bp, Homo sapiens
cctattttaagcactgagcgggctc

SEQ ID NO: 29029 - DNA, 25 bp, Homo sapiens
tcccaatgtggcttgctgtgcaatc

SEQ ID NO: 29030 - DNA, 25 bp, Homo sapiens
tgctagtaactcctgcgccaaggtc

SEQ ID NO: 29031 - DNA, 25 bp, Homo sapiens
cctggaagtgtagccattgggtaca

SEQ ID NO: 29032 - DNA, 25 bp, Homo sapiens
ggttttgacatccttgccctgagca

SEQ ID NO: 29033 - DNA, 25 bp, Homo sapiens
gggtcctgaccatgagccaataaga

SEQ ID NO: 29034 - DNA, 25 bp, Homo sapiens
caccaggctgcctagtcacctttga

SEQ ID NO: 29035 - DNA, 25 bp, Homo sapiens
tagagcattttccccgccttctgac

SEQ ID NO: 29036 - DNA, 25 bp, Homo sapiens
tctgtaccctgacacccaactgtgg

SEQ ID NO: 29037 - DNA, 25 bp, Homo sapiens
gggcttctggactccttctgcagga

SEQ ID NO: 29038 - DNA, 25 bp, Homo sapiens
ggtgtcccaacacgcacagatgagc

SEQ ID NO: 29039 - DNA, 25 bp, Homo sapiens
aacaggtcatccctctgcggacggc

SEQ ID NO: 29040 - DNA, 25 bp, Homo sapiens
cacttggctggaaacgacgtgaatc

SEQ ID NO: 29041 - DNA, 25 bp, Homo sapiens
ggccctacctttggcatcactgata

SEQ ID NO: 29042 - DNA, 25 bp, Homo sapiens
ttaggtcctcgagttcctgaacatg

SEQ ID NO: 29043 - DNA, 25 bp, Homo sapiens
caaggccggagttgctgttttattc

SEQ ID NO: 29044 - DNA, 25 bp, Homo sapiens
cctgacgccgaaaagtgcacattta

SEQ ID NO: 29045 - DNA, 25 bp, Homo sapiens
gtgctcctgagagagatactccttc

SEQ ID NO: 29046 - DNA, 25 bp, Homo sapiens
ggccagaggcccatgattttaagca

SEQ ID NO: 29047 - DNA, 25 bp, Homo sapiens
tgaccggctttaatgcagttgactc

SEQ ID NO: 29048 - DNA, 25 bp, Homo sapiens
gtaggcatccacagaagcagttttg

SEQ ID NO: 29049 - DNA, 25 bp, Homo sapiens
caatttgtgcttatatccggtcgtc

SEQ ID NO: 29050 - DNA, 25 bp, Homo sapiens
ggtgcagcagccttggacatctttg

SEQ ID NO: 29051 - DNA, 25 bp, Homo sapiens
ccagcccagggagttcttattaaca

SEQ ID NO: 29052 - DNA, 25 bp, Homo sapiens
cctcatttatgtctgcagggcgatg

SEQ ID NO: 29053 - DNA, 25 bp, Homo sapiens
gggtgactcagatcttcttgccata

SEQ ID NO: 29054 - DNA, 25 bp, Homo sapiens
ctggtcgccttttagccttttagca

SEQ ID NO: 29055 - DNA, 25 bp, Homo sapiens
cacgctctggtccttgtcactaaaa

SEQ ID NO: 29056 - DNA, 25 bp, Homo sapiens
gtggcccgagatgaaccctcagatg

SEQ ID NO: 29057 - DNA, 25 bp, Homo sapiens
gggccaagcagtgtctccaccctta

SEQ ID NO: 29058 - DNA, 25 bp, Homo sapiens
attccatgagtacccagagtgctgc

SEQ ID NO: 29059 - DNA, 25 bp, Homo sapiens
ccctcgcctgttgtgggatgtcaca

SEQ ID NO: 29060 - DNA, 25 bp, Homo sapiens
cctggcattgagagagaaatcactc

SEQ ID NO: 29061 - DNA, 25 bp, Homo sapiens
agaactgcccagtaattgcccaata

SEQ ID NO: 29062 - DNA, 25 bp, Homo sapiens
ccatctctaacttaaaaaatatttt

SEQ ID NO: 29063 - DNA, 25 bp, Homo sapiens
ctggggctccatactgcatgctttt

SEQ ID NO: 29064 - DNA, 25 bp, Homo sapiens
ccttgtcaaaatgcagcccgggatc

SEQ ID NO: 29065 - DNA, 25 bp, Homo sapiens
gctggtgcctcagtcccatctttga

SEQ ID NO: 29066 - DNA, 25 bp, Homo sapiens
ctataccctatggaattataccata

SEQ ID NO: 29067 - DNA, 25 bp, Homo sapiens
ggtgtcacttgacctgccttgtctg

SEQ ID NO: 29068 - DNA, 25 bp, Homo sapiens
cctttctggatatctggctcacttg

SEQ ID NO: 29069 - DNA, 25 bp, Homo sapiens
ttcccatccaatgcaagagtgactg

SEQ ID NO: 29070 - DNA, 25 bp, Homo sapiens
tctggcctctgctaaggtcgaattc

SEQ ID NO: 29071 - DNA, 25 bp, Homo sapiens
gcgtcaggtgagtgctcttaaaatc

SEQ ID NO: 29072 - DNA, 25 bp, Homo sapiens
cccacggcacaggtgtatttaattc

SEQ ID NO: 29073 - DNA, 25 bp, Homo sapiens
gctccagggtttcaaaagggcgatg

SEQ ID NO: 29074 - DNA, 25 bp, Homo sapiens
gggtggctcacctttaaagaatgtc

SEQ ID NO: 29075 - DNA, 25 bp, Homo sapiens
gcactcaggtttcacggagccatga

SEQ ID NO: 29076 - DNA, 25 bp, Homo sapiens
gccattgcttgcctgcttacgttag

SEQ ID NO: 29077 - DNA, 25 bp, Homo sapiens
tggcacctgacattcctggagcacc

SEQ ID NO: 29078 - DNA, 25 bp, Homo sapiens
tccggccatctggagacagccaaga

SEQ ID NO: 29079 - DNA, 25 bp, Homo sapiens
agccctcccgctaaacgtgttcaga

SEQ ID NO: 29080 - DNA, 25 bp, Homo sapiens
gtggggttttctttcctctcaattg

SEQ ID NO: 29081 - DNA, 25 bp, Homo sapiens
cactatcatttttggtatgggcata

SEQ ID NO: 29082 - DNA, 25 bp, Homo sapiens
tgggaccaccagtgggcatttatgc

SEQ ID NO: 29083 - DNA, 25 bp, Homo sapiens
agagccagtgactctctttcatgtc

SEQ ID NO: 29084 - DNA, 25 bp, Homo sapiens
gggtccttctgtgacacctactgca

SEQ ID NO: 29085 - DNA, 25 bp, Homo sapiens
gcctccgtaggtttccagttccatg

SEQ ID NO: 29086 - DNA, 25 bp, Homo sapiens
ccctctgacttaaatggtggtagca

SEQ ID NO: 29087 - DNA, 25 bp, Homo sapiens
ctttgcctgtgcagaagtcttgtga

SEQ ID NO: 29088 - DNA, 25 bp, Homo sapiens
ctgcctgtgccgtgtctatgaaaaa

SEQ ID NO: 29089 - DNA, 25 bp, Homo sapiens
tgagacttgtctggcctggattttg

SEQ ID NO: 29090 - DNA, 25 bp, Homo sapiens
ttgacaccgggcactcatgaagaga

SEQ ID NO: 29091 - DNA, 25 bp, Homo sapiens
cctcaggtttctgctgggccagcaa

SEQ ID NO: 29092 - DNA, 25 bp, Homo sapiens
ccctgagcagggagttgaatccacc

SEQ ID NO: 29093 - DNA, 25 bp, Homo sapiens
cgttacagccagcagagcccaagtg

SEQ ID NO: 29094 - DNA, 25 bp, Homo sapiens
gttgctttgcctttgacttgttcca

SEQ ID NO: 29095 - DNA, 25 bp, Homo sapiens
gacagagaggaaaaaaaaggaagga

SEQ ID NO: 29096 - DNA, 25 bp, Homo sapiens
ggctgctgtaggacccatggataaa

SEQ ID NO: 29097 - DNA, 25 bp, Homo sapiens
ggggcttcctacatgagatgcagtg

SEQ ID NO: 29098 - DNA, 25 bp, Homo sapiens
gcagcctggatctcaatttgcaaga

SEQ ID NO: 29099 - DNA, 25 bp, Homo sapiens
gtgcctcgctgcctcacataacgtg

SEQ ID NO: 29100 - DNA, 25 bp, Homo sapiens
gagccacagccttatccctgacgta

SEQ ID NO: 29101 - DNA, 25 bp, Homo sapiens
ggtgataaatgcttgacccggctca

SEQ ID NO: 29102 - DNA, 25 bp, Homo sapiens
gctgagctgggtcaagcatttatca

SEQ ID NO: 29103 - DNA, 25 bp, Homo sapiens
ctgggaaaggcctctctatgaagtc

SEQ ID NO: 29104 - DNA, 25 bp, Homo sapiens
ccctggctgggtgaagtaacatcac

SEQ ID NO: 29105 - DNA, 25 bp, Homo sapiens
ccacgacaaggctggtctttgcatt

SEQ ID NO: 29106 - DNA, 25 bp, Homo sapiens
tgcttccttggaccctgatacatga

SEQ ID NO: 29107 - DNA, 25 bp, Homo sapiens
aataatggctgacatccggtcttgg

SEQ ID NO: 29108 - DNA, 25 bp, Homo sapiens
gtccctttgtggcagctttgaaatg

SEQ ID NO: 29109 - DNA, 25 bp, Homo sapiens
tctggaaactgtgagcaggaccttc

SEQ ID NO: 29110 - DNA, 25 bp, Homo sapiens
ctccacgtggcctgtagtcccaagt

SEQ ID NO: 29111 - DNA, 25 bp, Homo sapiens
ggctctcactgatcaaccgagtgtt

SEQ ID NO: 29112 - DNA, 25 bp, Homo sapiens
ggcactagattccagctatgggtta

SEQ ID NO: 29113 - DNA, 25 bp, Homo sapiens
acctgcccttccaaatgccttcctt

SEQ ID NO: 29114 - DNA, 25 bp, Homo sapiens
ctcttctgggaatggtctctttata

SEQ ID NO: 29115 - DNA, 25 bp, Homo sapiens
cccatcaggtagtgtgtcgttaact

SEQ ID NO: 29116 - DNA, 25 bp, Homo sapiens
gtgcccagcccagacctttacttga

SEQ ID NO: 29117 - DNA, 25 bp, Homo sapiens
agcagaacctgagcacccatgtgtg

SEQ ID NO: 29118 - DNA, 25 bp, Homo sapiens
tcctgacggcagagtgacgataatg

SEQ ID NO: 29119 - DNA, 25 bp, Homo sapiens
caaacgaggagggtgcactgttcta

SEQ ID NO: 29120 - DNA, 25 bp, Homo sapiens
ctgctgcctgtgtgtgccattgaaa

SEQ ID NO: 29121 - DNA, 25 bp, Homo sapiens
ccatgggcataaactcaggggcttc

SEQ ID NO: 29122 - DNA, 25 bp, Homo sapiens
tcttgtggttctccctgacagcttg

SEQ ID NO: 29123 - DNA, 25 bp, Homo sapiens
gggtgagcctgtatatcctgccatg

SEQ ID NO: 29124 - DNA, 25 bp, Homo sapiens
cggccttgtttcattacacgtggtc

SEQ ID NO: 29125 - DNA, 25 bp, Homo sapiens
gaggccgacacaggaccacgtttta

SEQ ID NO: 29126 - DNA, 25 bp, Homo sapiens
tggttcctcctcattcaaacaggtg

SEQ ID NO: 29127 - DNA, 25 bp, Homo sapiens
gtggctctcagacctttccttattg

SEQ ID NO: 29128 - DNA, 25 bp, Homo sapiens
aaaccagaggtgacacgctgcatgg

SEQ ID NO: 29129 - DNA, 25 bp, Homo sapiens
aggcaaggctccgtcttcacagaga

SEQ ID NO: 29130 - DNA, 25 bp, Homo sapiens
ctcatgcatctgtctctcctgcagc

SEQ ID NO: 29131 - DNA, 25 bp, Homo sapiens
gcctgctgaatgtgacctgccatga

SEQ ID NO: 29132 - DNA, 25 bp, Homo sapiens
caggggcttaatgcctcagattttc

SEQ ID NO: 29133 - DNA, 25 bp, Homo sapiens
ctctcctggggctaaaacaacttca

SEQ ID NO: 29134 - DNA, 25 bp, Homo sapiens
gacctgcattgcgttccctagagtg

SEQ ID NO: 29135 - DNA, 25 bp, Homo sapiens
cctcctgcatgtctcgggaagatca

SEQ ID NO: 29136 - DNA, 25 bp, Homo sapiens
ggccgttttctcctctgcgactatg

SEQ ID NO: 29137 - DNA, 25 bp, Homo sapiens
cccacacggagctagctgcatttta

SEQ ID NO: 29138 - DNA, 25 bp, Homo sapiens
gtctctggtctctgctccttgatga

SEQ ID NO: 29139 - DNA, 25 bp, Homo sapiens
gaggcttctctgtcttccacaagga

SEQ ID NO: 29140 - DNA, 25 bp, Homo sapiens
gttccaagtgccaggatagcatcta

SEQ ID NO: 29141 - DNA, 25 bp, Homo sapiens
gtgctgccactgatgtcttagggtc

SEQ ID NO: 29142 - DNA, 25 bp, Homo sapiens
ctggtgctgcctttgaagtctgaga

SEQ ID NO: 29143 - DNA, 25 bp, Homo sapiens
cagggctgcttttctactttgagga

SEQ ID NO: 29144 - DNA, 25 bp, Homo sapiens
gggtgacccagttctttcattcatg

SEQ ID NO: 29145 - DNA, 25 bp, Homo sapiens
cttgggaactcctcaatgctagtga

SEQ ID NO: 29146 - DNA, 25 bp, Homo sapiens
ccttgagtcctatgttgcctgtttc

SEQ ID NO: 29147 - DNA, 25 bp, Homo sapiens
gctgggttcacgcatagttagataa

SEQ ID NO: 29148 - DNA, 25 bp, Homo sapiens
ggtgatatgaccataactggataaa

SEQ ID NO: 29149 - DNA, 25 bp, Homo sapiens
gtcgtacagacagtgagcatccttc

SEQ ID NO: 29150 - DNA, 25 bp, Homo sapiens
ctgggattaactcaacctggggact

SEQ ID NO: 29151 - DNA, 25 bp, Homo sapiens
ggccaaagagctcagtgtcagacga

SEQ ID NO: 29152 - DNA, 25 bp, Homo sapiens
actaggaagacggaaagggatttgc

SEQ ID NO: 29153 - DNA, 25 bp, Homo sapiens
tgaggtcaacacctccctggcaatg

SEQ ID NO: 29154 - DNA, 25 bp, Homo sapiens
ggccgtgcacagacccaaggctgta

SEQ ID NO: 29155 - DNA, 25 bp, Homo sapiens
agaaacagttggcaagaagacaggg

SEQ ID NO: 29156 - DNA, 25 bp, Homo sapiens
ggtggcaactgccccctgagacagg

SEQ ID NO: 29157 - DNA, 25 bp, Homo sapiens
ccctggcaacgtgaatggaaaagtc

SEQ ID NO: 29158 - DNA, 25 bp, Homo sapiens
cccaagtgggagttcagctcaaaca

SEQ ID NO: 29159 - DNA, 25 bp, Homo sapiens
gctgatgcaaatgttcccgctctgg

SEQ ID NO: 29160 - DNA, 25 bp, Homo sapiens
caagtgggcagagtaaacagccgtc

SEQ ID NO: 29161 - DNA, 25 bp, Homo sapiens
tgggcctcacatcgagcctagagtc

SEQ ID NO: 29162 - DNA, 25 bp, Homo sapiens
agccaccgaccttagacgccattta

SEQ ID NO: 29163 - DNA, 25 bp, Homo sapiens
tctactttacatttttaatgtttaa

SEQ ID NO: 29164 - DNA, 25 bp, Homo sapiens
tgtctgcataaaggccaagtgttgt

SEQ ID NO: 29165 - DNA, 25 bp, Homo sapiens
gtgtgataaccggatgccatgaatg

SEQ ID NO: 29166 - DNA, 25 bp, Homo sapiens
atatagtataccctctgcctgcagc

SEQ ID NO: 29167 - DNA, 25 bp, Homo sapiens
agccggctcataaacaggaaatgca

SEQ ID NO: 29168 - DNA, 25 bp, Homo sapiens
tctgtcagagggaaatggctaacta

SEQ ID NO: 29169 - DNA, 25 bp, Homo sapiens
tgctaacattggcttcacaggaagc

SEQ ID NO: 29170 - DNA, 25 bp, Homo sapiens
gcacacggaatcagccaggacactc

SEQ ID NO: 29171 - DNA, 25 bp, Homo sapiens
aatgtttagatccacttctcagtgc

SEQ ID NO: 29172 - DNA, 25 bp, Homo sapiens
tggcagcgcctcaattccgtaaaga

SEQ ID NO: 29173 - DNA, 25 bp, Homo sapiens
gagctcctggatccctgtgcagaca

SEQ ID NO: 29174 - DNA, 25 bp, Homo sapiens
aagccggcagctccatatcaaaaga

SEQ ID NO: 29175 - DNA, 25 bp, Homo sapiens
gactgccctttatcctagaactatg

SEQ ID NO: 29176 - DNA, 25 bp, Homo sapiens
aggtcccatttccagccagtgtctc

SEQ ID NO: 29177 - DNA, 25 bp, Homo sapiens
aatagctgtggtgttccctgactca

SEQ ID NO: 29178 - DNA, 25 bp, Homo sapiens
ggcgtccatgaactcctgggtatga

SEQ ID NO: 29179 - DNA, 25 bp, Homo sapiens
cgccattggactgtgtgaactctgc

SEQ ID NO: 29180 - DNA, 25 bp, Homo sapiens
gagtagaaatgagtcgcccaccctg

SEQ ID NO: 29181 - DNA, 25 bp, Homo sapiens
gtggggagacatcgaatactgaata

SEQ ID NO: 29182 - DNA, 25 bp, Homo sapiens
tcccgaggcacaagaggcacttaca

SEQ ID NO: 29183 - DNA, 25 bp, Homo sapiens
caaaagggtgaactaaatgggatat

SEQ ID NO: 29184 - DNA, 25 bp, Homo sapiens
tctcctgaagtctccacgtgtcgtg

SEQ ID NO: 29185 - DNA, 25 bp, Homo sapiens
actcaggccgtggtcacattccagg

SEQ ID NO: 29186 - DNA, 25 bp, Homo sapiens
agggtttcccagatgctcttccata

SEQ ID NO: 29187 - DNA, 25 bp, Homo sapiens
atggggctcgaaaattcttgctgta

SEQ ID NO: 29188 - DNA, 25 bp, Homo sapiens
gggtcacccacttgtttcacttgtt

SEQ ID NO: 29189 - DNA, 25 bp, Homo sapiens
cccttccaaggtgcccacaggtata

SEQ ID NO: 29190 - DNA, 25 bp, Homo sapiens
aggggcttcggtcttacctataaca

SEQ ID NO: 29191 - DNA, 25 bp, Homo sapiens
ggcgctctgttagaaaccctgctcc

SEQ ID NO: 29192 - DNA, 25 bp, Homo sapiens
gagcttaggcacgtttcattccata

SEQ ID NO: 29193 - DNA, 25 bp, Homo sapiens
gttccgctcctctccattatctgtg

SEQ ID NO: 29194 - DNA, 25 bp, Homo sapiens
aaccctctggctatggcatcttgga

SEQ ID NO: 29195 - DNA, 25 bp, Homo sapiens
cttcctttgataagctagagcatgg

SEQ ID NO: 29196 - DNA, 25 bp, Homo sapiens
ggagagacccaaaccgcaacgtttc

SEQ ID NO: 29197 - DNA, 25 bp, Homo sapiens
ccaccttggagcctgaggagaatct

SEQ ID NO: 29198 - DNA, 25 bp, Homo sapiens
tgccaacactgtgcaggcctcttta

SEQ ID NO: 29199 - DNA, 25 bp, Homo sapiens
tgatgatgctcctgccaccctgaag

SEQ ID NO: 29200 - DNA, 25 bp, Homo sapiens
ggtgtgagcatccatgcaccagata

SEQ ID NO: 29201 - DNA, 25 bp, Homo sapiens
ccagacacgctggagagagttctct

SEQ ID NO: 29202 - DNA, 25 bp, Homo sapiens
ggggctccagctgtttccaatctca

SEQ ID NO: 29203 - DNA, 25 bp, Homo sapiens
agtgagtgtcccttctgcacaaagc

SEQ ID NO: 29204 - DNA, 25 bp, Homo sapiens
cagccagctgacctatcagagtttg

SEQ ID NO: 29205 - DNA, 25 bp, Homo sapiens
ggccacagctgctatctccctgagt

SEQ ID NO: 29206 - DNA, 25 bp, Homo sapiens
ccctctgaggggattctgaagcaca

SEQ ID NO: 29207 - DNA, 25 bp, Homo sapiens
tttgccgtgaaggaggccacatcta

SEQ ID NO: 29208 - DNA, 25 bp, Homo sapiens
ctcactcagggaggcgtagaattca

SEQ ID NO: 29209 - DNA, 25 bp, Homo sapiens
ggcatcatgctgtcaaacggtttta

SEQ ID NO: 29210 - DNA, 25 bp, Homo sapiens
tggcgcttcctttagcaagtgtttg

SEQ ID NO: 29211 - DNA, 25 bp, Homo sapiens
ggtggggacttcagagcctcacata

SEQ ID NO: 29212 - DNA, 25 bp, Homo sapiens
cccatgtttctcgaggccctaggtt

SEQ ID NO: 29213 - DNA, 25 bp, Homo sapiens
ctgcgtgcatgtgctaagtaaactg

SEQ ID NO: 29214 - DNA, 25 bp, Homo sapiens
cagaggctgggttattgttcgtcca

SEQ ID NO: 29215 - DNA, 25 bp, Homo sapiens
ggcttcggcactgcctctctactga

SEQ ID NO: 29216 - DNA, 25 bp, Homo sapiens
ggcccttgccaaaggatccatacta

SEQ ID NO: 29217 - DNA, 25 bp, Homo sapiens
cgatatctctgtttgggtgcactgc

SEQ ID NO: 29218 - DNA, 25 bp, Homo sapiens
ggcacgtggtttgctgctttatgta

SEQ ID NO: 29219 - DNA, 25 bp, Homo sapiens
tggagcttcctgacatgtgacaatg

SEQ ID NO: 29220 - DNA, 25 bp, Homo sapiens
cccgtgggaaactggaagcagcatt

SEQ ID NO: 29221 - DNA, 25 bp, Homo sapiens
cttgtctaggcccacactgaggtga

SEQ ID NO: 29222 - DNA, 25 bp, Homo sapiens
tctttccaggcagacaggccctttc

SEQ ID NO: 29223 - DNA, 25 bp, Homo sapiens
aggaagttccatagcccatacagtg

SEQ ID NO: 29224 - DNA, 25 bp, Homo sapiens
gatgccattcctctcagctaaaagc

SEQ ID NO: 29225 - DNA, 25 bp, Homo sapiens
cacctctgggcatcctgttgtcatg

SEQ ID NO: 29226 - DNA, 25 bp, Homo sapiens
ctgtggctaacaaggggataattta

SEQ ID NO: 29227 - DNA, 25 bp, Homo sapiens
gtttccaagcttctgccctcacggg

SEQ ID NO: 29228 - DNA, 25 bp, Homo sapiens
cactcgaggtctgtgggttattcta

SEQ ID NO: 29229 - DNA, 25 bp, Homo sapiens
aaatccaaagctacctggagttttg

SEQ ID NO: 29230 - DNA, 25 bp, Homo sapiens
cccgcaggaggtagaagactgtttt

SEQ ID NO: 29231 - DNA, 25 bp, Homo sapiens
gacacttgtccctatgcagcaccta

SEQ ID NO: 29232 - DNA, 25 bp, Homo sapiens
ggcagtgtggacgtggagtttgggt

SEQ ID NO: 29233 - DNA, 25 bp, Homo sapiens
agtgcaacttccagtgagccagatg

SEQ ID NO: 29234 - DNA, 25 bp, Homo sapiens
ggtggtcagttccagcagtcagcta

SEQ ID NO: 29235 - DNA, 25 bp, Homo sapiens
gctgagggccttaaacgatgacgca

SEQ ID NO: 29236 - DNA, 25 bp, Homo sapiens
ctgggtacctccagggacttagata

SEQ ID NO: 29237 - DNA, 25 bp, Homo sapiens
tggccaattgctgataccgagttta

SEQ ID NO: 29238 - DNA, 25 bp, Homo sapiens
ctcccgggatctcctgtgttaaaaa

SEQ ID NO: 29239 - DNA, 25 bp, Homo sapiens
gaaacagcctctattcctgacacta

SEQ ID NO: 29240 - DNA, 25 bp, Homo sapiens
gccgcatcttcgtgaccatgacctg

SEQ ID NO: 29241 - DNA, 25 bp, Homo sapiens
gaagctctgtgtttagtttcttttc

SEQ ID NO: 29242 - DNA, 25 bp, Homo sapiens
cccttgggttacagctggttagagt

SEQ ID NO: 29243 - DNA, 25 bp, Homo sapiens
taaactggtttaaaagaataacact

SEQ ID NO: 29244 - DNA, 25 bp, Homo sapiens
aaaaaagcaactgaagtcaccatgg

SEQ ID NO: 29245 - DNA, 25 bp, Homo sapiens
tcccgaagcagggagtgagccaccc

SEQ ID NO: 29246 - DNA, 25 bp, Homo sapiens
gtgcctggagcatgagctgggctct

SEQ ID NO: 29247 - DNA, 25 bp, Homo sapiens
cccagagaccactccaggcatctcc

SEQ ID NO: 29248 - DNA, 25 bp, Homo sapiens
gctgacccagccaggttgcactctg

SEQ ID NO: 29249 - DNA, 25 bp, Homo sapiens
gtgtccagcgcttctccagccaata

SEQ ID NO: 29250 - DNA, 25 bp, Homo sapiens
agtcctgagtgcacaggtggccctg

SEQ ID NO: 29251 - DNA, 25 bp, Homo sapiens
tctagagaatttaaattaaacgacc

SEQ ID NO: 29252 - DNA, 25 bp, Homo sapiens
cctgctcctggggagtcttccagta

SEQ ID NO: 29253 - DNA, 25 bp, Homo sapiens
ccgtggggtcgtggtataaatacca

SEQ ID NO: 29254 - DNA, 25 bp, Homo sapiens
tgggcccaacatgccggttctcctg

SEQ ID NO: 29255 - DNA, 25 bp, Homo sapiens
tctctggctgtctctggcagtttta

SEQ ID NO: 29256 - DNA, 25 bp, Homo sapiens
cggcatgcaggagtccagtctctaa

SEQ ID NO: 29257 - DNA, 25 bp, Homo sapiens
gagtgtccctttaccagtgtccctg

SEQ ID NO: 29258 - DNA, 25 bp, Homo sapiens
tggggcctcactcatgcaaccaaca

SEQ ID NO: 29259 - DNA, 25 bp, Homo sapiens
tttggagcagaaagcaaaggacctc

SEQ ID NO: 29260 - DNA, 25 bp, Homo sapiens
ccttgtttagacagacagagggggc

SEQ ID NO: 29261 - DNA, 25 bp, Homo sapiens
tgtcatctaaatctatcctcaggcc

SEQ ID NO: 29262 - DNA, 25 bp, Homo sapiens
caggctggacttatatctggacaga

SEQ ID NO: 29263 - DNA, 25 bp, Homo sapiens
tcccgcccagaaaagtcacagaagt

SEQ ID NO: 29264 - DNA, 25 bp, Homo sapiens
cgactgagctggaaggtcactgcca

SEQ ID NO: 29265 - DNA, 25 bp, Homo sapiens
ggaaatgctgctggccacactgaca

SEQ ID NO: 29266 - DNA, 25 bp, Homo sapiens
actgtctggggtctaaatccgttga

SEQ ID NO: 29267 - DNA, 25 bp, Homo sapiens
cccaaattctgggaagacgaggttc

SEQ ID NO: 29268 - DNA, 25 bp, Homo sapiens
gacatggcaaagcaggcatcatgac

SEQ ID NO: 29269 - DNA, 25 bp, Homo sapiens
tcacggtccagctgcagaggctcaa

SEQ ID NO: 29270 - DNA, 25 bp, Homo sapiens
tggcgttcatccctcaagagcagaa

SEQ ID NO: 29271 - DNA, 25 bp, Homo sapiens
ctcttactctgcatcgcctggtggc

SEQ ID NO: 29272 - DNA, 25 bp, Homo sapiens
ctctgcaaaatgtccattccccagc

SEQ ID NO: 29273 - DNA, 25 bp, Homo sapiens
agtcatgcttttcagtcttgtccca

SEQ ID NO: 29274 - DNA, 25 bp, Homo sapiens
acacacattgtgctctctgggaaga

SEQ ID NO: 29275 - DNA, 25 bp, Homo sapiens
tggtgccagccacattagcgtttta

SEQ ID NO: 29276 - DNA, 25 bp, Homo sapiens
ctgtatgactcaccttcctgggata

SEQ ID NO: 29277 - DNA, 25 bp, Homo sapiens
cctgatgggcatgatacttggcacc

SEQ ID NO: 29278 - DNA, 25 bp, Homo sapiens
tgcctgatgcctcttgtccataata

SEQ ID NO: 29279 - DNA, 25 bp, Homo sapiens
ctctcatgggaggaggatgctatta

SEQ ID NO: 29280 - DNA, 25 bp, Homo sapiens
cctgtgtgcactctgatgaaattcc

SEQ ID NO: 29281 - DNA, 25 bp, Homo sapiens
agcctgtacctggtgttcgttttcc

SEQ ID NO: 29282 - DNA, 25 bp, Homo sapiens
gtcatctgcagcatgggaccaagca

SEQ ID NO: 29283 - DNA, 25 bp, Homo sapiens
caaaaggggctttgtgccagacttc

SEQ ID NO: 29284 - DNA, 25 bp, Homo sapiens
ctgacactagtggtggtgatggtca

SEQ ID NO: 29285 - DNA, 25 bp, Homo sapiens
ggggttcccacctgatcacactgca

SEQ ID NO: 29286 - DNA, 25 bp, Homo sapiens
tgccgctggaagcagcctcatttta

SEQ ID NO: 29287 - DNA, 25 bp, Homo sapiens
ggagcctctgtagaatacctttgta

SEQ ID NO: 29288 - DNA, 25 bp, Homo sapiens
tggtgcattgcatcctccatgggga

SEQ ID NO: 29289 - DNA, 25 bp, Homo sapiens
tctctacagaggaagagtgctctca

SEQ ID NO: 29290 - DNA, 25 bp, Homo sapiens
tgggcaaaccctgctgctacagatg

SEQ ID NO: 29291 - DNA, 25 bp, Homo sapiens
gtgcctagcacctctctgtaaattg

SEQ ID NO: 29292 - DNA, 25 bp, Homo sapiens
ccctcattttggttctggtgcatta

SEQ ID NO: 29293 - DNA, 25 bp, Homo sapiens
tgcccacaaagagcaggagaccttc

SEQ ID NO: 29294 - DNA, 25 bp, Homo sapiens
ctctttctttctttggctttttaac

SEQ ID NO: 29295 - DNA, 25 bp, Homo sapiens
ttgtctacctcacagcttgactgtc

SEQ ID NO: 29296 - DNA, 25 bp, Homo sapiens
gagagctgcatatcatcctgtttta

SEQ ID NO: 29297 - DNA, 25 bp, Homo sapiens
accttcggggtagtaaatatcattg

SEQ ID NO: 29298 - DNA, 25 bp, Homo sapiens
ccacaactgtggactctgagacata

SEQ ID NO: 29299 - DNA, 25 bp, Homo sapiens
tgggcgagaccagccagtgattttc

SEQ ID NO: 29300 - DNA, 25 bp, Homo sapiens
cccgttgctgggtgaatgctttaaa

SEQ ID NO: 29301 - DNA, 25 bp, Homo sapiens
agcccggcgtgtagcagacataaca

SEQ ID NO: 29302 - DNA, 25 bp, Homo sapiens
tgtttttttgttttatgcaagggtg

SEQ ID NO: 29303 - DNA, 25 bp, Homo sapiens
gtgcccgatgagacatgttccctga

SEQ ID NO: 29304 - DNA, 25 bp, Homo sapiens
catgattgtgccttgctgttacagc

SEQ ID NO: 29305 - DNA, 25 bp, Homo sapiens
aggtcgctgttttctctcttgtggc

SEQ ID NO: 29306 - DNA, 25 bp, Homo sapiens
atcccatgtctgtgcacgcccattg

SEQ ID NO: 29307 - DNA, 25 bp, Homo sapiens
ggcccgtttatcttctgctaatttg

SEQ ID NO: 29308 - DNA, 25 bp, Homo sapiens
gggagacctgcccaactttttgtta

SEQ ID NO: 29309 - DNA, 25 bp, Homo sapiens
tgtgtgcacagcagccctgaagctc

SEQ ID NO: 29310 - DNA, 25 bp, Homo sapiens
gcctcggctcaccatgtgattgtta

SEQ ID NO: 29311 - DNA, 25 bp, Homo sapiens
caaatgcttggagttcacacgggtc

SEQ ID NO: 29312 - DNA, 25 bp, Homo sapiens
ggcacagcccagtgactattattga

SEQ ID NO: 29313 - DNA, 25 bp, Homo sapiens
taccaggggcctccaaaagtacttc

SEQ ID NO: 29314 - DNA, 25 bp, Homo sapiens
aggctgcctgaaatccttgggaaca

SEQ ID NO: 29315 - DNA, 25 bp, Homo sapiens
agtctgccattgtctctctgttgtt

SEQ ID NO: 29316 - DNA, 25 bp, Homo sapiens
ctggcctctctgcaagtttgttttc

SEQ ID NO: 29317 - DNA, 25 bp, Homo sapiens
ggctcttctccttcacaatggctgg

SEQ ID NO: 29318 - DNA, 25 bp, Homo sapiens
gcgatgtttagcaccaggcttttta

SEQ ID NO: 29319 - DNA, 25 bp, Homo sapiens
ccgcttatcctgagaggtcgcccaa

SEQ ID NO: 29320 - DNA, 25 bp, Homo sapiens
cgtgccatgcaagggaaagctcctc

SEQ ID NO: 29321 - DNA, 25 bp, Homo sapiens
ggctctgcttcttccaatgaaaata

SEQ ID NO: 29322 - DNA, 25 bp, Homo sapiens
ggccggttgattttccagttaattg

SEQ ID NO: 29323 - DNA, 25 bp, Homo sapiens
tgtgggccacttctttatctaactg

SEQ ID NO: 29324 - DNA, 25 bp, Homo sapiens
agccattgctcactcgcgttcggaa

SEQ ID NO: 29325 - DNA, 25 bp, Homo sapiens
tggcttccgtgcagaacagcggtta

SEQ ID NO: 29326 - DNA, 25 bp, Homo sapiens
tagcagcctggtggtctactttgtc

SEQ ID NO: 29327 - DNA, 25 bp, Homo sapiens
aggtgagtcaggcaagcatccatta

SEQ ID NO: 29328 - DNA, 25 bp, Homo sapiens
tgtgcctcagatcccgcaggtagta

SEQ ID NO: 29329 - DNA, 25 bp, Homo sapiens
ggacggcccgctttggaatccaatc

SEQ ID NO: 29330 - DNA, 25 bp, Homo sapiens
ctggctttctgggatctatttggta

SEQ ID NO: 29331 - DNA, 25 bp, Homo sapiens
gaccgggctgctcttctgagaagtt

SEQ ID NO: 29332 - DNA, 25 bp, Homo sapiens
cttctgagaggcttgaggccctacc

SEQ ID NO: 29333 - DNA, 25 bp, Homo sapiens
ggatggccttctctacagctgctga

SEQ ID NO: 29334 - DNA, 25 bp, Homo sapiens
tctgccaggagagcttagggtccct

SEQ ID NO: 29335 - DNA, 25 bp, Homo sapiens
cttccatgatttcttatagtaatgt

SEQ ID NO: 29336 - DNA, 25 bp, Homo sapiens
tggacgtgctccctttgcttgttgt

SEQ ID NO: 29337 - DNA, 25 bp, Homo sapiens
accgggaccatcctgacttggactg

SEQ ID NO: 29338 - DNA, 25 bp, Homo sapiens
gccggacctcctgaacttgtgttga

SEQ ID NO: 29339 - DNA, 25 bp, Homo sapiens
tgggtctcgcctattcttgctcaca

SEQ ID NO: 29340 - DNA, 25 bp, Homo sapiens
ctggcttgccaacatccaaggtgtg

SEQ ID NO: 29341 - DNA, 25 bp, Homo sapiens
acgtgtctccttctctgaggccata

SEQ ID NO: 29342 - DNA, 25 bp, Homo sapiens
gcccaggcagtttcccgaaggtgaa

SEQ ID NO: 29343 - DNA, 25 bp, Homo sapiens
tggacccttggatgcacagagctgc

SEQ ID NO: 29344 - DNA, 25 bp, Homo sapiens
gtttctcattagtgtctcccgggcc

SEQ ID NO: 29345 - DNA, 25 bp, Homo sapiens
cccggcctccaagcagttgaaaaag

SEQ ID NO: 29346 - DNA, 25 bp, Homo sapiens
tcccgttgatgtcttgatgctccta

SEQ ID NO: 29347 - DNA, 25 bp, Homo sapiens
gtgccctggggtctttctcataagc

SEQ ID NO: 29348 - DNA, 25 bp, Homo sapiens
cagctgctctctctaggaagcctta

SEQ ID NO: 29349 - DNA, 25 bp, Homo sapiens
aacccagctgtgtgtagggagcctc

SEQ ID NO: 29350 - DNA, 25 bp, Homo sapiens
cggcaaattttcacacgggctgtta

SEQ ID NO: 29351 - DNA, 25 bp, Homo sapiens
ctgcttctgagctgatgaggccctc

SEQ ID NO: 29352 - DNA, 25 bp, Homo sapiens
gccattgagacctgagcttcctgta

SEQ ID NO: 29353 - DNA, 25 bp, Homo sapiens
cactatgtggcactgaggtctcatc

SEQ ID NO: 29354 - DNA, 25 bp, Homo sapiens
tggacgtctcttgcacctacacatc

SEQ ID NO: 29355 - DNA, 25 bp, Homo sapiens
gccgtccagggctttgtttctgaca

SEQ ID NO: 29356 - DNA, 25 bp, Homo sapiens
cccaggcaggagacaaagcattttc

SEQ ID NO: 29357 - DNA, 25 bp, Homo sapiens
aggggctccaagtgccttgttcatc

SEQ ID NO: 29358 - DNA, 25 bp, Homo sapiens
acccacatgagggaagtgttgcttc

SEQ ID NO: 29359 - DNA, 25 bp, Homo sapiens
gctccagaccgaaatgcacccagtt

SEQ ID NO: 29360 - DNA, 25 bp, Homo sapiens
gcagcccagatgaggtcaacaggta

SEQ ID NO: 29361 - DNA, 25 bp, Homo sapiens
tggtccctggccagtctatctaatg

SEQ ID NO: 29362 - DNA, 25 bp, Homo sapiens
cgtgaccctgagtggccagttcatt

SEQ ID NO: 29363 - DNA, 25 bp, Homo sapiens
ccctgtgtgctgacatgagctcatc

SEQ ID NO: 29364 - DNA, 25 bp, Homo sapiens
gctgctgctttgctgttgactctca

SEQ ID NO: 29365 - DNA, 25 bp, Homo sapiens
caaaagaatccagtgataccttcaa

SEQ ID NO: 29366 - DNA, 25 bp, Homo sapiens
gggtcaccagactatattttcaaag

SEQ ID NO: 29367 - DNA, 25 bp, Homo sapiens
atctctaggcaaaaatatttaccaa

SEQ ID NO: 29368 - DNA, 25 bp, Homo sapiens
ggtgactctgaaatagaccaattgc

SEQ ID NO: 29369 - DNA, 25 bp, Homo sapiens
ccgtcacactttctctgcatttttg

SEQ ID NO: 29370 - DNA, 25 bp, Homo sapiens
tgtgggcaaaactgagagtcacttc

SEQ ID NO: 29371 - DNA, 25 bp, Homo sapiens
ttccttttcatgtcgccgggtaagc

SEQ ID NO: 29372 - DNA, 25 bp, Homo sapiens
ggcagcctctgtcccattatcatta

SEQ ID NO: 29373 - DNA, 25 bp, Homo sapiens
aaacctcaaaacaataaagaacgga

SEQ ID NO: 29374 - DNA, 25 bp, Homo sapiens
ttgttttcagacgagcagctactta

SEQ ID NO: 29375 - DNA, 25 bp, Homo sapiens
tctgccacccaacacttgacttagg

SEQ ID NO: 29376 - DNA, 25 bp, Homo sapiens
gggtataacttgagtcccataaatg

SEQ ID NO: 29377 - DNA, 25 bp, Homo sapiens
tcctgggaactcatggggcaaatta

SEQ ID NO: 29378 - DNA, 25 bp, Homo sapiens
tccaggtgttttccacagatctttg

SEQ ID NO: 29379 - DNA, 25 bp, Homo sapiens
atgggccctgtggacatatttgctc

SEQ ID NO: 29380 - DNA, 25 bp, Homo sapiens
cccacttcctgagctgagcaaggta

SEQ ID NO: 29381 - DNA, 25 bp, Homo sapiens
gaggtcagtttatctttcacacagg

SEQ ID NO: 29382 - DNA, 25 bp, Homo sapiens
ccgccccttgccccgtcgcattggt

SEQ ID NO: 29383 - DNA, 25 bp, Homo sapiens
cgggcaacattcctcaatcggcttt

SEQ ID NO: 29384 - DNA, 25 bp, Homo sapiens
ctggctcgggttgtttttgctaatc

SEQ ID NO: 29385 - DNA, 25 bp, Homo sapiens
ccgtggcatgctacaaaataatttt

SEQ ID NO: 29386 - DNA, 25 bp, Homo sapiens
tgaccctgaacttccttcttgaata

SEQ ID NO: 29387 - DNA, 25 bp, Homo sapiens
gctcctttggacattgcagatttta

SEQ ID NO: 29388 - DNA, 25 bp, Homo sapiens
gggcccacaggcctcatctgttgta

SEQ ID NO: 29389 - DNA, 25 bp, Homo sapiens
tgcctccctgagctaacatgtatgt

SEQ ID NO: 29390 - DNA, 25 bp, Homo sapiens
ctctactttctctgaggggaacttc

SEQ ID NO: 29391 - DNA, 25 bp, Homo sapiens
aggtctcagaaagtagggctccaca

SEQ ID NO: 29392 - DNA, 25 bp, Homo sapiens
agggcatggctttttcccggtaatg

SEQ ID NO: 29393 - DNA, 25 bp, Homo sapiens
ttattggggcctgatcacaatggcg

SEQ ID NO: 29394 - DNA, 25 bp, Homo sapiens
aagctccaggattgttgcaagggga

SEQ ID NO: 29395 - DNA, 25 bp, Homo sapiens
cttttgtataaagcttatttttctg

SEQ ID NO: 29396 - DNA, 25 bp, Homo sapiens
gtggccttttcttgaacccgtcaga

SEQ ID NO: 29397 - DNA, 25 bp, Homo sapiens
ttctctcaagtctacagccacagtg

SEQ ID NO: 29398 - DNA, 25 bp, Homo sapiens
ctgcctggccatcctttatcagata

SEQ ID NO: 29399 - DNA, 25 bp, Homo sapiens
gacccaagtgggctttaacttcaca

SEQ ID NO: 29400 - DNA, 25 bp, Homo sapiens
ctgtcaatggacaagcggctgctca

SEQ ID NO: 29401 - DNA, 25 bp, Homo sapiens
cgcagttgagcatgttggcaccatc

SEQ ID NO: 29402 - DNA, 25 bp, Homo sapiens
tcggaactagcaaataccaaacata

SEQ ID NO: 29403 - DNA, 25 bp, Homo sapiens
tactgctgtttattttccaaggggc

SEQ ID NO: 29404 - DNA, 25 bp, Homo sapiens
gaagccttccttcatcttccacagg

SEQ ID NO: 29405 - DNA, 25 bp, Homo sapiens
cctttgggcatagcacagtgcgtga

SEQ ID NO: 29406 - DNA, 25 bp, Homo sapiens
cttctgcccttaagtgagactgcta

SEQ ID NO: 29407 - DNA, 25 bp, Homo sapiens
atgcaccaggttgtagatgttttta

SEQ ID NO: 29408 - DNA, 25 bp, Homo sapiens
cagcctgtagcttgcacatagttta

SEQ ID NO: 29409 - DNA, 25 bp, Homo sapiens
tgcctgctcttgttttgggattaaa

SEQ ID NO: 29410 - DNA, 25 bp, Homo sapiens
tgtgtatacgcagcacccattggta

SEQ ID NO: 29411 - DNA, 25 bp, Homo sapiens
agctagctctactatcaggtggatc

SEQ ID NO: 29412 - DNA, 25 bp, Homo sapiens
tatcgctaagctgcaaagctgggcc

SEQ ID NO: 29413 - DNA, 25 bp, Homo sapiens
tccctgatgctgtgctgataatttc

SEQ ID NO: 29414 - DNA, 25 bp, Homo sapiens
gggctgtaaacacttgccaaaagta

SEQ ID NO: 29415 - DNA, 25 bp, Homo sapiens
agctcctggtctctccttcattctg

SEQ ID NO: 29416 - DNA, 25 bp, Homo sapiens
tgagcctgcccacactgtagaaaga

SEQ ID NO: 29417 - DNA, 25 bp, Homo sapiens
ggagacctcactgctttgcccttta

SEQ ID NO: 29418 - DNA, 25 bp, Homo sapiens
tcctgtgggtaaaagtacatgcttc

SEQ ID NO: 29419 - DNA, 25 bp, Homo sapiens
agcacggctgccactatccttttta

SEQ ID NO: 29420 - DNA, 25 bp, Homo sapiens
tattgatttggccacctcaggatcc

SEQ ID NO: 29421 - DNA, 25 bp, Homo sapiens
aattgatttttctccttttgcctga

SEQ ID NO: 29422 - DNA, 25 bp, Homo sapiens
caacagtgcttacattagggaaata

SEQ ID NO: 29423 - DNA, 25 bp, Homo sapiens
ggttctttttcacggcatcccacaa

SEQ ID NO: 29424 - DNA, 25 bp, Homo sapiens
aatttaaatgactttctttgctata

SEQ ID NO: 29425 - DNA, 25 bp, Homo sapiens
agtctgttctccctgcccttaggta

SEQ ID NO: 29426 - DNA, 25 bp, Homo sapiens
gcgcaaggaatgcacccatgtgata

SEQ ID NO: 29427 - DNA, 25 bp, Homo sapiens
aggctttaagtcgtttctcagatta

SEQ ID NO: 29428 - DNA, 25 bp, Homo sapiens
gcaggttgtctgtaagcctactgta

SEQ ID NO: 29429 - DNA, 25 bp, Homo sapiens
cgcccagtagggtctgtgattattc

SEQ ID NO: 29430 - DNA, 25 bp, Homo sapiens
ggcgctctagctcgaactgcaactc

SEQ ID NO: 29431 - DNA, 25 bp, Homo sapiens
ggggatcattcttctctgttctata

SEQ ID NO: 29432 - DNA, 25 bp, Homo sapiens
gtccgacgtttcagtgctccttctc

SEQ ID NO: 29433 - DNA, 25 bp, Homo sapiens
ggcactgcattagctcacaactata

SEQ ID NO: 29434 - DNA, 25 bp, Homo sapiens
gccgagggtccatctactcattata

SEQ ID NO: 29435 - DNA, 25 bp, Homo sapiens
gtctgggtcacttctcacttgaaaa

SEQ ID NO: 29436 - DNA, 25 bp, Homo sapiens
gtgcattgtcttcccagccttcata

SEQ ID NO: 29437 - DNA, 25 bp, Homo sapiens
accgtggtaaaaaattgccctatca

SEQ ID NO: 29438 - DNA, 25 bp, Homo sapiens
ataaaattgcacctgctgcctgtgg

SEQ ID NO: 29439 - DNA, 25 bp, Homo sapiens
ctgggccatcttctgatgctaggta

SEQ ID NO: 29440 - DNA, 25 bp, Homo sapiens
tgactcacttggaaacatacttttg

SEQ ID NO: 29441 - DNA, 25 bp, Homo sapiens
ccagacatgtagagaagatccagta

SEQ ID NO: 29442 - DNA, 25 bp, Homo sapiens
tccttgctcagtcgatggtatgctc

SEQ ID NO: 29443 - DNA, 25 bp, Homo sapiens
agggctgtgtcctctcctagaatga

SEQ ID NO: 29444 - DNA, 25 bp, Homo sapiens
cacgggaattctttttgcagttaca

SEQ ID NO: 29445 - DNA, 25 bp, Homo sapiens
ggggagcagatacctctttctctta

SEQ ID NO: 29446 - DNA, 25 bp, Homo sapiens
ttaacagttgcttcagggtagacac

SEQ ID NO: 29447 - DNA, 25 bp, Homo sapiens
actccctggcatcagtttttctgta

SEQ ID NO: 29448 - DNA, 25 bp, Homo sapiens
ttcctctgacaatggcgatcggttc

SEQ ID NO: 29449 - DNA, 25 bp, Homo sapiens
tggccctgtcagcttttacaccttg

SEQ ID NO: 29450 - DNA, 25 bp, Homo sapiens
cccagttcccgggagttatctttta

SEQ ID NO: 29451 - DNA, 25 bp, Homo sapiens
ggctgccagacctcaattcaaaagc

SEQ ID NO: 29452 - DNA, 25 bp, Homo sapiens
cggcgttgttctaaaagcagctatt

SEQ ID NO: 29453 - DNA, 25 bp, Homo sapiens
ggatgactgtctctcccaggtccta

SEQ ID NO: 29454 - DNA, 25 bp, Homo sapiens
acggttaccattcagggcttgcttc

SEQ ID NO: 29455 - DNA, 25 bp, Homo sapiens
gttttctgcagctagccctttcttg

SEQ ID NO: 29456 - DNA, 25 bp, Homo sapiens
gctttgttgtaaactagcgtgctta

SEQ ID NO: 29457 - DNA, 25 bp, Homo sapiens
gggtgcccaggattcacaatgtttt

SEQ ID NO: 29458 - DNA, 25 bp, Homo sapiens
ccttaggtaccaaaagcggatgctt

SEQ ID NO: 29459 - DNA, 25 bp, Homo sapiens
cgcttatatccaaaaggcagtaaca

SEQ ID NO: 29460 - DNA, 25 bp, Homo sapiens
tgcagcaccactacttaaaccatgt

SEQ ID NO: 29461 - DNA, 25 bp, Homo sapiens
tatgagctcatgaactgtaaaaggc

SEQ ID NO: 29462 - DNA, 25 bp, Homo sapiens
tcgcctctgtgtgtacaaaatatga

SEQ ID NO: 29463 - DNA, 25 bp, Homo sapiens
tggattcagcagtcaagtgtcattg

SEQ ID NO: 29464 - DNA, 25 bp, Homo sapiens
ctcctaagggagcaaagactgtgtt

SEQ ID NO: 29465 - DNA, 25 bp, Homo sapiens
tcacagcagggaccagtttatctca

SEQ ID NO: 29466 - DNA, 25 bp, Homo sapiens
acacattggttggtatcttcccaga

SEQ ID NO: 29467 - DNA, 25 bp, Homo sapiens
acaggacaatggcaagagggatctc

SEQ ID NO: 29468 - DNA, 25 bp, Homo sapiens
tggactgaaccttcttgcaatatat

SEQ ID NO: 29469 - DNA, 25 bp, Homo sapiens
gggccagacactctatgcttaggta

SEQ ID NO: 29470 - DNA, 25 bp, Homo sapiens
agcattcaattagcaaaaggttcag

SEQ ID NO: 29471 - DNA, 25 bp, Homo sapiens
gggctcccagctgaaaggaagtttc

SEQ ID NO: 29472 - DNA, 25 bp, Homo sapiens
tatgctaatttcactggggatcctc

SEQ ID NO: 29473 - DNA, 25 bp, Homo sapiens
gagactttcgaaaacaattaagccc

SEQ ID NO: 29474 - DNA, 25 bp, Homo sapiens
caccaaaaaagccccagaggcccca

SEQ ID NO: 29475 - DNA, 25 bp, Homo sapiens
ggttcctggaccatctgaatctgaa

SEQ ID NO: 29476 - DNA, 25 bp, Homo sapiens
cccgtgagagaatttggactggcta

SEQ ID NO: 29477 - DNA, 25 bp, Homo sapiens
tcagagccagtgagatgccagatta

SEQ ID NO: 29478 - DNA, 25 bp, Homo sapiens
cagacaaataaaattgcaacttgta

SEQ ID NO: 29479 - DNA, 25 bp, Homo sapiens
tgcagaattcgaaacgcagggtgtc

SEQ ID NO: 29480 - DNA, 25 bp, Homo sapiens
ccctacgtgtggtagactagatacc

SEQ ID NO: 29481 - DNA, 25 bp, Homo sapiens
tcccaaggtttaggtggtcttattc

SEQ ID NO: 29482 - DNA, 25 bp, Homo sapiens
gatccttcatctggggcctaccttg

SEQ ID NO: 29483 - DNA, 25 bp, Homo sapiens
ggtggaatcacttgggcactgctca

SEQ ID NO: 29484 - DNA, 25 bp, Homo sapiens
ctaacgtcacgttgggaggtatctg

SEQ ID NO: 29485 - DNA, 25 bp, Homo sapiens
gcccgaaagtgcttacatgcccatg

SEQ ID NO: 29486 - DNA, 25 bp, Homo sapiens
tctcggactccagaagcaatattcg

SEQ ID NO: 29487 - DNA, 25 bp, Homo sapiens
tcatcataagtgttctgggtggtcc

SEQ ID NO: 29488 - DNA, 25 bp, Homo sapiens
ggtttatattcataaagctcttaga

SEQ ID NO: 29489 - DNA, 25 bp, Homo sapiens
ctccaacctggtgtactgaggcatg

SEQ ID NO: 29490 - DNA, 25 bp, Homo sapiens
ttgcttcacagttgggtaaagagcc

SEQ ID NO: 29491 - DNA, 25 bp, Homo sapiens
acctagggttaaatgctgtggcagc

SEQ ID NO: 29492 - DNA, 25 bp, Homo sapiens
ggccttccctatatgtcttccagtc

SEQ ID NO: 29493 - DNA, 25 bp, Homo sapiens
caactcttgcctcgatcgtggatca

SEQ ID NO: 29494 - DNA, 25 bp, Homo sapiens
ggtctatgacataaattgggccctc

SEQ ID NO: 29495 - DNA, 25 bp, Homo sapiens
gacctaggaattccaaactattttg

SEQ ID NO: 29496 - DNA, 25 bp, Homo sapiens
ggagactcttttgagccctgaccta

SEQ ID NO: 29497 - DNA, 25 bp, Homo sapiens
tggccttgacctttgcagttttgta

SEQ ID NO: 29498 - DNA, 25 bp, Homo sapiens
tactcccgatttctgtgtcacctgg

SEQ ID NO: 29499 - DNA, 25 bp, Homo sapiens
tccatgtataagaaaagctcagccc

SEQ ID NO: 29500 - DNA, 25 bp, Homo sapiens
ggcaaatgttcccagccatgtttta

SEQ ID NO: 29501 - DNA, 25 bp, Homo sapiens
cctgatgcactccttctcgaagatg

SEQ ID NO: 29502 - DNA, 25 bp, Homo sapiens
atggctcacttagagtgtgtacgtg

SEQ ID NO: 29503 - DNA, 25 bp, Homo sapiens
aattagctgttcaaaataattgaat

SEQ ID NO: 29504 - DNA, 25 bp, Homo sapiens
tgctgcttgcagagacactcggata

SEQ ID NO: 29505 - DNA, 25 bp, Homo sapiens
aggtgaccagttttccaagcaaatg

SEQ ID NO: 29506 - DNA, 25 bp, Homo sapiens
cctcagggacgtttggttcttgttc

SEQ ID NO: 29507 - DNA, 25 bp, Homo sapiens
tttcaggctcaagtaccacaggata

SEQ ID NO: 29508 - DNA, 25 bp, Homo sapiens
ctcagacagtaatgggagacctctc

SEQ ID NO: 29509 - DNA, 25 bp, Homo sapiens
gcacaaacaactaggcatgttttta

SEQ ID NO: 29510 - DNA, 25 bp, Homo sapiens
ggctatttaaaaggaaaaaatatga

SEQ ID NO: 29511 - DNA, 25 bp, Homo sapiens
cccaaatgagtctggcaatgttttc

SEQ ID NO: 29512 - DNA, 25 bp, Homo sapiens
gttaatgttaatataccaaatgcca

SEQ ID NO: 29513 - DNA, 25 bp, Homo sapiens
cggagattcaattgcgcaagccacc

SEQ ID NO: 29514 - DNA, 25 bp, Homo sapiens
gagcaactgctcagtcatacctctg

SEQ ID NO: 29515 - DNA, 25 bp, Homo sapiens
gctggaacttccttaccatactttc

SEQ ID NO: 29516 - DNA, 25 bp, Homo sapiens
tcccagtagttaagcgccaggtgtg

SEQ ID NO: 29517 - DNA, 25 bp, Homo sapiens
tcagctggagctggcttagaaagtc

SEQ ID NO: 29518 - DNA, 25 bp, Homo sapiens
catctaggtagtttgaaggctcttc

SEQ ID NO: 29519 - DNA, 25 bp, Homo sapiens
gcggcttctgttccatccactgatg

SEQ ID NO: 29520 - DNA, 25 bp, Homo sapiens
atccattcgaatgcagggtcctgaa

SEQ ID NO: 29521 - DNA, 25 bp, Homo sapiens
gtgggtatcatggagagagggaaaa

SEQ ID NO: 29522 - DNA, 25 bp, Homo sapiens
tcacatcgccgagttggaaagcaga

SEQ ID NO: 29523 - DNA, 25 bp, Homo sapiens
ttggggttcactttagcagacagga

SEQ ID NO: 29524 - DNA, 25 bp, Homo sapiens
cttgagacttggacgtagggacaca

SEQ ID NO: 29525 - DNA, 25 bp, Homo sapiens
ccaagtctggctgtaggaaaatgtc

SEQ ID NO: 29526 - DNA, 25 bp, Homo sapiens
tgctgaggattgctaaaaaatgtta

SEQ ID NO: 29527 - DNA, 25 bp, Homo sapiens
cacgcactcatggtcctgtgttata

SEQ ID NO: 29528 - DNA, 25 bp, Homo sapiens
cttagtatgtgcacaagtttcagca

SEQ ID NO: 29529 - DNA, 25 bp, Homo sapiens
atgctttggagctaaacttctgttc

SEQ ID NO: 29530 - DNA, 25 bp, Homo sapiens
tcggaagggaggagtatctacattc

SEQ ID NO: 29531 - DNA, 25 bp, Homo sapiens
caccataaggtgtagagctgtctca

SEQ ID NO: 29532 - DNA, 25 bp, Homo sapiens
gtgtgtgtactctaacaccttgaga

SEQ ID NO: 29533 - DNA, 25 bp, Homo sapiens
gggctgtttttccttcacctgaatt

SEQ ID NO: 29534 - DNA, 25 bp, Homo sapiens
tcgctctctaggctcgataggaaga

SEQ ID NO: 29535 - DNA, 25 bp, Homo sapiens
tgcagcagtgcctcatgaacatagt

SEQ ID NO: 29536 - DNA, 25 bp, Homo sapiens
gcctctgcaggctggaccttaaata

SEQ ID NO: 29537 - DNA, 25 bp, Homo sapiens
tgagaatccatttcagcaccctatg

SEQ ID NO: 29538 - DNA, 25 bp, Homo sapiens
ggttggtgctaatctatgatgctcc

SEQ ID NO: 29539 - DNA, 25 bp, Homo sapiens
ctttttattagtttcctatttctgc

SEQ ID NO: 29540 - DNA, 25 bp, Homo sapiens
cagccttaattgtgttctgatggtc

SEQ ID NO: 29541 - DNA, 25 bp, Homo sapiens
cccttctgtgaaattgctgactatg

SEQ ID NO: 29542 - DNA, 25 bp, Homo sapiens
gtcagtcgcaacaacatagtcaggg

SEQ ID NO: 29543 - DNA, 25 bp, Homo sapiens
aggttgcagtcataaagaatatttt

SEQ ID NO: 29544 - DNA, 25 bp, Homo sapiens
ctttgatactcaggggacttttttc

SEQ ID NO: 29545 - DNA, 25 bp, Homo sapiens
gtggattttgagtgcctccgtaata

SEQ ID NO: 29546 - DNA, 25 bp, Homo sapiens
cctggagctctggatcatgtatttc

SEQ ID NO: 29547 - DNA, 25 bp, Homo sapiens
cccaggcaccctaagtattactttg

SEQ ID NO: 29548 - DNA, 25 bp, Homo sapiens
tgagcctgctcttcctaatcatgtg

SEQ ID NO: 29549 - DNA, 25 bp, Homo sapiens
gaaagggaataatgccagaagcatt

SEQ ID NO: 29550 - DNA, 25 bp, Homo sapiens
gggaaggtgcattttcatcttaaga

SEQ ID NO: 29551 - DNA, 25 bp, Homo sapiens
ttttcatgatcttcattggtttatc

SEQ ID NO: 29552 - DNA, 25 bp, Homo sapiens
gattgttttgtgggctatttgtcgt

SEQ ID NO: 29553 - DNA, 25 bp, Homo sapiens
caaccaggcctgaatgtattttcta

SEQ ID NO: 29554 - DNA, 25 bp, Homo sapiens
cgtactttatctggagagactcttg

SEQ ID NO: 29555 - DNA, 25 bp, Homo sapiens
ccacaaaatagttttcaaaatccat

SEQ ID NO: 29556 - DNA, 25 bp, Homo sapiens
tggctgcttaaattcattgcaagga

SEQ ID NO: 29557 - DNA, 25 bp, Homo sapiens
ttgtgcctccttatagaatacttga

SEQ ID NO: 29558 - DNA, 25 bp, Homo sapiens
attgagcttttgacatcacaggttt

SEQ ID NO: 29559 - DNA, 25 bp, Homo sapiens
ttgacatcaggggagaagacttttc

SEQ ID NO: 29560 - DNA, 25 bp, Homo sapiens
ataaaaaaaaagagccatcacaata

SEQ ID NO: 29561 - DNA, 25 bp, Homo sapiens
atgccatccacacagtacttaagtc

SEQ ID NO: 29562 - DNA, 25 bp, Homo sapiens
ccctcctggggtaactgcatatttg

SEQ ID NO: 29563 - DNA, 25 bp, Homo sapiens
ttacacggggtttcaatggcaactg

SEQ ID NO: 29564 - DNA, 25 bp, Homo sapiens
gagctccgtgatagcttgcctcata

SEQ ID NO: 29565 - DNA, 25 bp, Homo sapiens
agaggcagccaaaccacaattttta

SEQ ID NO: 29566 - DNA, 25 bp, Homo sapiens
gtgtgtgctgccaatcttagaaata

SEQ ID NO: 29567 - DNA, 25 bp, Homo sapiens
gttggcttccatctacgaacatata

SEQ ID NO: 29568 - DNA, 25 bp, Homo sapiens
ttttttaggggaaatcacactggta

SEQ ID NO: 29569 - DNA, 25 bp, Homo sapiens
cacctgctagtggaaatattgtcaa

SEQ ID NO: 29570 - DNA, 25 bp, Homo sapiens
gtttgaaaatgagaagcactgaccc

SEQ ID NO: 29571 - DNA, 25 bp, Homo sapiens
catgtaaacatatatcattcagggg

SEQ ID NO: 29572 - DNA, 25 bp, Homo sapiens
tgctccctggtgatcttttgaaata

SEQ ID NO: 29573 - DNA, 25 bp, Homo sapiens
cccatggttatgttatctgtacgta

SEQ ID NO: 29574 - DNA, 25 bp, Homo sapiens
actgtgcaaaagaaagacatagaag

SEQ ID NO: 29575 - DNA, 25 bp, Homo sapiens
ttcggctcttagttggtatcttgtg

SEQ ID NO: 29576 - DNA, 25 bp, Homo sapiens
cctactgtggagtaagctgttccta

SEQ ID NO: 29577 - DNA, 25 bp, Homo sapiens
gcgtgcatgtgcatatagacttgtg

SEQ ID NO: 29578 - DNA, 25 bp, Homo sapiens
ttacttcatgttttttaaaagttga

SEQ ID NO: 29579 - DNA, 25 bp, Homo sapiens
tcggggattatcactacatttttca

SEQ ID NO: 29580 - DNA, 25 bp, Homo sapiens
ttcaaggcaccacaaggctatagtt

SEQ ID NO: 29581 - DNA, 25 bp, Homo sapiens
gttgcaagggtacagggatccattc

SEQ ID NO: 29582 - DNA, 25 bp, Homo sapiens
gtggccctctcctatagattcaatt

SEQ ID NO: 29583 - DNA, 25 bp, Homo sapiens
tctgagcaacacaactggggatatt

SEQ ID NO: 29584 - DNA, 25 bp, Homo sapiens
gttcattgccctttgtgttcgatta

SEQ ID NO: 29585 - DNA, 25 bp, Homo sapiens
tggcactaccggctattaccctttg

SEQ ID NO: 29586 - DNA, 25 bp, Homo sapiens
tcccatttggaaccctagagaaagt

SEQ ID NO: 29587 - DNA, 25 bp, Homo sapiens
cgctccagaactgaaaccaatgtca

SEQ ID NO: 29588 - DNA, 25 bp, Homo sapiens
gtctccactctttagcaaccctttg

SEQ ID NO: 29589 - DNA, 25 bp, Homo sapiens
tgccagagtgtttctatccctaatg

SEQ ID NO: 29590 - DNA, 25 bp, Homo sapiens
atctcttgcactgtgggatgcccta

SEQ ID NO: 29591 - DNA, 25 bp, Homo sapiens
tggacttgtgcatgtacatttcgaa

SEQ ID NO: 29592 - DNA, 25 bp, Homo sapiens
cttggtcagcctccagaaagtgaga

SEQ ID NO: 29593 - DNA, 25 bp, Homo sapiens
gcactggcttctcatgctttagtta

SEQ ID NO: 29594 - DNA, 25 bp, Homo sapiens
gcaactttgcctgctcttctgtaaa

SEQ ID NO: 29595 - DNA, 25 bp, Homo sapiens
ccctgaggacttaatgaacgtggca

SEQ ID NO: 29596 - DNA, 25 bp, Homo sapiens
cttccatttggctactaggtgattc

SEQ ID NO: 29597 - DNA, 25 bp, Homo sapiens
ggccgattggtgttggaatttttta

SEQ ID NO: 29598 - DNA, 25 bp, Homo sapiens
tgcaagagtgcacaaataaatgacc

SEQ ID NO: 29599 - DNA, 25 bp, Homo sapiens
agtcttgactgcaaatgtttctgtg

SEQ ID NO: 29600 - DNA, 25 bp, Homo sapiens
tactactcagtataaaaattttatt

SEQ ID NO: 29601 - DNA, 25 bp, Homo sapiens
caaacttcttaatctcaaatagagt

SEQ ID NO: 29602 - DNA, 25 bp, Homo sapiens
cctctgcagatgtgtctgaatccta

SEQ ID NO: 29603 - DNA, 25 bp, Homo sapiens
aggtgagttctcctttgccaagtgg

SEQ ID NO: 29604 - DNA, 25 bp, Homo sapiens
tccacgtgatttgtttgagacagtc

SEQ ID NO: 29605 - DNA, 25 bp, Homo sapiens
gtcagtggagacctttgctgtaata

SEQ ID NO: 29606 - DNA, 25 bp, Homo sapiens
tctcagtgttaggatgctgtctctc

SEQ ID NO: 29607 - DNA, 25 bp, Homo sapiens
ccctggaaaactcggtagtcttctc

SEQ ID NO: 29608 - DNA, 25 bp, Homo sapiens
agggcacgtgcattgacctaattcc

SEQ ID NO: 29609 - DNA, 25 bp, Homo sapiens
gctactgtgtttgacctctacttta

SEQ ID NO: 29610 - DNA, 25 bp, Homo sapiens
ccttgtgctccgaattaaacagata

SEQ ID NO: 29611 - DNA, 25 bp, Homo sapiens
catgctttacatgttgttcagagta

SEQ ID NO: 29612 - DNA, 25 bp, Homo sapiens
ggctaatcatctctcttctgggcta

SEQ ID NO: 29613 - DNA, 25 bp, Homo sapiens
gctctatgtcagttagttccatgta

SEQ ID NO: 29614 - DNA, 25 bp, Homo sapiens
ctagtgctgataccaagtttgctgc

SEQ ID NO: 29615 - DNA, 25 bp, Homo sapiens
tgaatccctgcataaaaaactcttg

SEQ ID NO: 29616 - DNA, 25 bp, Homo sapiens
ctgcctattgactggggacaatctc

SEQ ID NO: 29617 - DNA, 25 bp, Homo sapiens
gaaggcttttctgttggcactactc

SEQ ID NO: 29618 - DNA, 25 bp, Homo sapiens
gtggcggcagaaccaaatatgcatg

SEQ ID NO: 29619 - DNA, 25 bp, Homo sapiens
tgtcaagtcctcacagggcaatgtg

SEQ ID NO: 29620 - DNA, 25 bp, Homo sapiens
acctggcaagtgaagagagttgaca

SEQ ID NO: 29621 - DNA, 25 bp, Homo sapiens
tctgtgcctttcgatactgaatcta

SEQ ID NO: 29622 - DNA, 25 bp, Homo sapiens
aattattatgatttgatttctcaaa

SEQ ID NO: 29623 - DNA, 25 bp, Homo sapiens
aatacattatcaattcaaattcatg

SEQ ID NO: 29624 - DNA, 25 bp, Homo sapiens
ccgttgtttccaaagtgcctcgtga

SEQ ID NO: 29625 - DNA, 25 bp, Homo sapiens
ctagtgctagggaaaaacagagacc

SEQ ID NO: 29626 - DNA, 25 bp, Homo sapiens
gacttcctctttccagtgttcatga

SEQ ID NO: 29627 - DNA, 25 bp, Homo sapiens
aactgccgagatgcgttacgtacca

SEQ ID NO: 29628 - DNA, 25 bp, Homo sapiens
caggttttatgaaaagaacaataaa

SEQ ID NO: 29629 - DNA, 25 bp, Homo sapiens
gcctagcgtttctccatcagcattc

SEQ ID NO: 29630 - DNA, 25 bp, Homo sapiens
ctggaaacccatcttgcaattgaga

SEQ ID NO: 29631 - DNA, 25 bp, Homo sapiens
cgctgaagtatgcatagctctatta

SEQ ID NO: 29632 - DNA, 25 bp, Homo sapiens
gctgggtcaccttggatcttatcta

SEQ ID NO: 29633 - DNA, 25 bp, Homo sapiens
tgtgtcactgaaagcaagtacctta

SEQ ID NO: 29634 - DNA, 25 bp, Homo sapiens
gactcaccttctggctcttggatga

SEQ ID NO: 29635 - DNA, 25 bp, Homo sapiens
cagccaactaggagcaggtgcacta

SEQ ID NO: 29636 - DNA, 25 bp, Homo sapiens
ggggataacgacctaactttgtgga

SEQ ID NO: 29637 - DNA, 25 bp, Homo sapiens
ttacatctgtactatgaagtgggcc

SEQ ID NO: 29638 - DNA, 25 bp, Homo sapiens
tggaactcatctgaccctaaaagga

SEQ ID NO: 29639 - DNA, 25 bp, Homo sapiens
ctcagcagtgcagttcttgggaacc

SEQ ID NO: 29640 - DNA, 25 bp, Homo sapiens
tggaggtccacttcttgcaccagaa

SEQ ID NO: 29641 - DNA, 25 bp, Homo sapiens
gggctggctgcattcctatagagtc

SEQ ID NO: 29642 - DNA, 25 bp, Homo sapiens
ctgccattctctgtgggtagtcaga

SEQ ID NO: 29643 - DNA, 25 bp, Homo sapiens
agaaatatggtaggctaaattttta

SEQ ID NO: 29644 - DNA, 25 bp, Homo sapiens
ccggagagggacagcttttttgaca

SEQ ID NO: 29645 - DNA, 25 bp, Homo sapiens
ttggctgatccagcatcacggtttc

SEQ ID NO: 29646 - DNA, 25 bp, Homo sapiens
tggtgctaccgtctctgagctgata

SEQ ID NO: 29647 - DNA, 25 bp, Homo sapiens
tccagaaagggtacagcattcattg

SEQ ID NO: 29648 - DNA, 25 bp, Homo sapiens
ggtatcactgcttcatttccagagc

SEQ ID NO: 29649 - DNA, 25 bp, Homo sapiens
ccttgcccagtcagcatatagccta

SEQ ID NO: 29650 - DNA, 25 bp, Homo sapiens
ctccagtgacggaagatgtctactc

SEQ ID NO: 29651 - DNA, 25 bp, Homo sapiens
aaagtgtaggctcatgagttccttc

SEQ ID NO: 29652 - DNA, 25 bp, Homo sapiens
cctaatacatctttgagaccttagt

SEQ ID NO: 29653 - DNA, 25 bp, Homo sapiens
ccagtttttccggttgtacatgcaa

SEQ ID NO: 29654 - DNA, 25 bp, Homo sapiens
atggattgctctgaaccctgcttgc

SEQ ID NO: 29655 - DNA, 25 bp, Homo sapiens
cagtctgactacctgctgcataaaa

SEQ ID NO: 29656 - DNA, 25 bp, Homo sapiens
tgtcctccaaagttgcattgttttc

SEQ ID NO: 29657 - DNA, 25 bp, Homo sapiens
tcgttcataagttcagtctcctggg

SEQ ID NO: 29658 - DNA, 25 bp, Homo sapiens
ccagggaactctcaacgcatgcatg

SEQ ID NO: 29659 - DNA, 25 bp, Homo sapiens
cattgtgtcatgtattgaggtttac

SEQ ID NO: 29660 - DNA, 25 bp, Homo sapiens
attgctgtgcgtgaattaatgtttc

SEQ ID NO: 29661 - DNA, 25 bp, Homo sapiens
ccatgtggctctcaaagggattgta

SEQ ID NO: 29662 - DNA, 25 bp, Homo sapiens
tggggttaggagaggataagatagt

SEQ ID NO: 29663 - DNA, 25 bp, Homo sapiens
tatgccttcacgatacctggtaata

SEQ ID NO: 29664 - DNA, 25 bp, Homo sapiens
accagctgagcctttgttttccata

SEQ ID NO: 29665 - DNA, 25 bp, Homo sapiens
tcatggctgcatctaagcttaatcc

SEQ ID NO: 29666 - DNA, 25 bp, Homo sapiens
gggcccgggctcatcccttgaaaat

SEQ ID NO: 29667 - DNA, 25 bp, Homo sapiens
tcaagctttgctgggagttactacg

SEQ ID NO: 29668 - DNA, 25 bp, Homo sapiens
cagaacttgttcgtggtatcctata

SEQ ID NO: 29669 - DNA, 25 bp, Homo sapiens
cttcaatgggtctgcaatgacactg

SEQ ID NO: 29670 - DNA, 25 bp, Homo sapiens
aggggaggccttataattttcttca

SEQ ID NO: 29671 - DNA, 25 bp, Homo sapiens
gcagtttttatgctcacagagtctc

SEQ ID NO: 29672 - DNA, 25 bp, Homo sapiens
cagtcttccaccctaggcttgcata

SEQ ID NO: 29673 - DNA, 25 bp, Homo sapiens
tgagagattcctcaaaatcaacaga

SEQ ID NO: 29674 - DNA, 25 bp, Homo sapiens
cagcctcacgggagcattctgctta

SEQ ID NO: 29675 - DNA, 25 bp, Homo sapiens
tattagagacaatcaatttacactg

SEQ ID NO: 29676 - DNA, 25 bp, Homo sapiens
taagacacaaacaactggattccac

SEQ ID NO: 29677 - DNA, 25 bp, Homo sapiens
ccctatggcccggtttattatacaa

SEQ ID NO: 29678 - DNA, 25 bp, Homo sapiens
agtcctgccatgctaccctagtgga

SEQ ID NO: 29679 - DNA, 25 bp, Homo sapiens
cccgccaaccaaagcttgtggtgta

SEQ ID NO: 29680 - DNA, 25 bp, Homo sapiens
tcagcaggtgtagagagagataatc

SEQ ID NO: 29681 - DNA, 25 bp, Homo sapiens
tcgcccgctgtgcttaattatgtta

SEQ ID NO: 29682 - DNA, 25 bp, Homo sapiens
cgagggaaattccaagagttcgcta

SEQ ID NO: 29683 - DNA, 25 bp, Homo sapiens
aggcatcccattcattctttgctgg

SEQ ID NO: 29684 - DNA, 25 bp, Homo sapiens
tcactgtttcctagggagaaaaatg

SEQ ID NO: 29685 - DNA, 25 bp, Homo sapiens
caacatctgggttatatgcctaagc

SEQ ID NO: 29686 - DNA, 25 bp, Homo sapiens
taaccctcttaatgccgtgagtgtc

SEQ ID NO: 29687 - DNA, 25 bp, Homo sapiens
ctagaattccggttcagaatttttt

SEQ ID NO: 29688 - DNA, 25 bp, Homo sapiens
tagtgttcctctcttcagcaagttg

SEQ ID NO: 29689 - DNA, 25 bp, Homo sapiens
tgtgcctcactgaaaagtattcttg

SEQ ID NO: 29690 - DNA, 25 bp, Homo sapiens
gcagccaactcacaagagatccatg

SEQ ID NO: 29691 - DNA, 25 bp, Homo sapiens
gccctgtgcttcactgttccacatg

SEQ ID NO: 29692 - DNA, 25 bp, Homo sapiens
caaggatgatgcttacgtgagtaaa

SEQ ID NO: 29693 - DNA, 25 bp, Homo sapiens
ttcttaatacagctgatggcccatc

SEQ ID NO: 29694 - DNA, 25 bp, Homo sapiens
catggcccttgtctcttctctagtc

SEQ ID NO: 29695 - DNA, 25 bp, Homo sapiens
aaagggcttctcagagatcttcacg

SEQ ID NO: 29696 - DNA, 25 bp, Homo sapiens
ttggcccttgaactcatgaagcgta

SEQ ID NO: 29697 - DNA, 25 bp, Homo sapiens
ggcttgtaaagcttcttgcaaaata

SEQ ID NO: 29698 - DNA, 25 bp, Homo sapiens
cctatgtggtgctcttcttgtaaaa

SEQ ID NO: 29699 - DNA, 25 bp, Homo sapiens
agaattaagaaaatatgtatatgta

SEQ ID NO: 29700 - DNA, 25 bp, Homo sapiens
acctttggctgttgatggacctttc

SEQ ID NO: 29701 - DNA, 25 bp, Homo sapiens
gaaggcatatgtcaatagacacctt

SEQ ID NO: 29702 - DNA, 25 bp, Homo sapiens
tgtgcctaatgtagtggaaactctc

SEQ ID NO: 29703 - DNA, 25 bp, Homo sapiens
tactttcacttataatttttacttt

SEQ ID NO: 29704 - DNA, 25 bp, Homo sapiens
attgggctgctccactcaggttaca

SEQ ID NO: 29705 - DNA, 25 bp, Homo sapiens
gccctcatttttggggggcttgata

SEQ ID NO: 29706 - DNA, 25 bp, Homo sapiens
tcgttttcattttggcgctacttta

SEQ ID NO: 29707 - DNA, 25 bp, Homo sapiens
ggcagccgcatggttttaaaaaaga

SEQ ID NO: 29708 - DNA, 25 bp, Homo sapiens
gcagttgcaatacgttgttcttaca

SEQ ID NO: 29709 - DNA, 25 bp, Homo sapiens
agttttctgctcctcagggtctctg

SEQ ID NO: 29710 - DNA, 25 bp, Homo sapiens
ttggctcctacgtacaattgtgatc

SEQ ID NO: 29711 - DNA, 25 bp, Homo sapiens
ccacacaaggatagcagggaaatga

SEQ ID NO: 29712 - DNA, 25 bp, Homo sapiens
tcatcatgtgtgttttctgactccc

SEQ ID NO: 29713 - DNA, 25 bp, Homo sapiens
tttcagaacgagcaaagggcaagta

SEQ ID NO: 29714 - DNA, 25 bp, Homo sapiens
tttcggggtttccatggcatttaaa

SEQ ID NO: 29715 - DNA, 25 bp, Homo sapiens
gtcagtttcatgaggccattcagtc

SEQ ID NO: 29716 - DNA, 25 bp, Homo sapiens
cattgatttaatatagaaaaactgg

SEQ ID NO: 29717 - DNA, 25 bp, Homo sapiens
gttgctgactttctcacatctctga

SEQ ID NO: 29718 - DNA, 25 bp, Homo sapiens
tttgttgctcacactatgaatgcga

SEQ ID NO: 29719 - DNA, 25 bp, Homo sapiens
aatctctaagatgtctattttctga

SEQ ID NO: 29720 - DNA, 25 bp, Homo sapiens
tgcctggtccaagatacatataaca

SEQ ID NO: 29721 - DNA, 25 bp, Homo sapiens
gaatgttcagtgtttgacaacatat

SEQ ID NO: 29722 - DNA, 25 bp, Homo sapiens
aacttgcagaagaaacaggtcactc

SEQ ID NO: 29723 - DNA, 25 bp, Homo sapiens
atgaagagataaggactttccaaat

SEQ ID NO: 29724 - DNA, 25 bp, Homo sapiens
gtattttttaaatttgttcttgttt

SEQ ID NO: 29725 - DNA, 25 bp, Homo sapiens
tatgaccaaaaagcccagcaggttt

SEQ ID NO: 29726 - DNA, 25 bp, Homo sapiens
gcagagcagctgacacttcttatta

SEQ ID NO: 29727 - DNA, 25 bp, Homo sapiens
acaagtatctttcaaaatagataga

SEQ ID NO: 29728 - DNA, 25 bp, Homo sapiens
aaatcactggataaattgaaaacta

SEQ ID NO: 29729 - DNA, 25 bp, Homo sapiens
ctggattttgtaactagaaatgttt

SEQ ID NO: 29730 - DNA, 25 bp, Homo sapiens
gtggaccaatgacatctcaggcttg

SEQ ID NO: 29731 - DNA, 25 bp, Homo sapiens
cccgcctttaattggttcctctgga

SEQ ID NO: 29732 - DNA, 25 bp, Homo sapiens
tcgcctcatatattgacaacttaga

SEQ ID NO: 29733 - DNA, 25 bp, Homo sapiens
tagtaagcagtcctcccagtttttg

SEQ ID NO: 29734 - DNA, 25 bp, Homo sapiens
cattgcaatgtatgtgtttactacc

SEQ ID NO: 29735 - DNA, 25 bp, Homo sapiens
ttcgataacatataccggaaaatta

SEQ ID NO: 29736 - DNA, 25 bp, Homo sapiens
ttcactatttttattaggagtaaaa

SEQ ID NO: 29737 - DNA, 25 bp, Homo sapiens
tacttcttttggagcctactacagg

SEQ ID NO: 29738 - DNA, 25 bp, Homo sapiens
gaatgatttgatttattttacttca

SEQ ID NO: 29739 - DNA, 25 bp, Homo sapiens
ccagagaaatggaacttgagcctta

SEQ ID NO: 29740 - DNA, 25 bp, Homo sapiens
tcagagatgaagtcttgggtcaaga

SEQ ID NO: 29741 - DNA, 25 bp, Homo sapiens
gagtgcatttgaactcgttgtaatg

SEQ ID NO: 29742 - DNA, 25 bp, Homo sapiens
tgcatatttccaagatggtgaaaaa

SEQ ID NO: 29743 - DNA, 25 bp, Homo sapiens
ttgacttattcctgtggccaacatg

SEQ ID NO: 29744 - DNA, 25 bp, Homo sapiens
acagcagcgtttttcctctgggaaa

SEQ ID NO: 29745 - DNA, 25 bp, Homo sapiens
gcagattgtgttcgccagggtttaa

SEQ ID NO: 29746 - DNA, 25 bp, Homo sapiens
aagttatttacatgtgggtggatta

SEQ ID NO: 29747 - DNA, 25 bp, Homo sapiens
gcttctccattgtgtgcctttagtg

SEQ ID NO: 29748 - DNA, 25 bp, Homo sapiens
tcctatgccatgagaggttagtccc

SEQ ID NO: 29749 - DNA, 25 bp, Homo sapiens
tacagctgtttaccagagagaaacc

SEQ ID NO: 29750 - DNA, 25 bp, Homo sapiens
gtgcctgcgtggtacttaaattttc

SEQ ID NO: 29751 - DNA, 25 bp, Homo sapiens
gttcaacatgtacacagcagataag

SEQ ID NO: 29752 - DNA, 25 bp, Homo sapiens
tgccactttccacatgccaatttaa

SEQ ID NO: 29753 - DNA, 25 bp, Homo sapiens
ctggcctttctttgttgagctaacc

SEQ ID NO: 29754 - DNA, 25 bp, Homo sapiens
ggcatcagggctttttctcttggaa

SEQ ID NO: 29755 - DNA, 25 bp, Homo sapiens
ctaccggtgtattagggttctttta

SEQ ID NO: 29756 - DNA, 25 bp, Homo sapiens
tggcagctgggtcctgaatttcacc

SEQ ID NO: 29757 - DNA, 25 bp, Homo sapiens
gcaaggcgctatgttcgggtatcca

SEQ ID NO: 29758 - DNA, 25 bp, Homo sapiens
atttggaacggaatacagcctgacc

SEQ ID NO: 29759 - DNA, 25 bp, Homo sapiens
gcagtactttcttaggctctcccaa

SEQ ID NO: 29760 - DNA, 25 bp, Homo sapiens
tcccaagtttagtgtagggcttaga

SEQ ID NO: 29761 - DNA, 25 bp, Homo sapiens
ttaagttattgaacgaaggtccata

SEQ ID NO: 29762 - DNA, 25 bp, Homo sapiens
attaactagacaagaagatggacta

SEQ ID NO: 29763 - DNA, 25 bp, Homo sapiens
acacctgttcagtattgccttaata

SEQ ID NO: 29764 - DNA, 25 bp, Homo sapiens
ctcatcactacaaggtactgtatta

SEQ ID NO: 29765 - DNA, 25 bp, Homo sapiens
cactttgctttgttcctccttggaa

SEQ ID NO: 29766 - DNA, 25 bp, Homo sapiens
ccttgggatggggaatagaccattc

SEQ ID NO: 29767 - DNA, 25 bp, Homo sapiens
cccacggactcgaggtgcttgctaa

SEQ ID NO: 29768 - DNA, 25 bp, Homo sapiens
gggagagcgcttcttctgctgttaa

SEQ ID NO: 29769 - DNA, 25 bp, Homo sapiens
ggggcagcagctctgcagacattta

SEQ ID NO: 29770 - DNA, 25 bp, Homo sapiens
tttgccggttagaaaggctctttgc

SEQ ID NO: 29771 - DNA, 25 bp, Homo sapiens
ggaacagctatcaggaggaatcatg

SEQ ID NO: 29772 - DNA, 25 bp, Homo sapiens
ccaagtctgtggcatattcctcata

SEQ ID NO: 29773 - DNA, 25 bp, Homo sapiens
ccctacagtgggtgaactttgatga

SEQ ID NO: 29774 - DNA, 25 bp, Homo sapiens
ttgaagtacatatacatgacaaata

SEQ ID NO: 29775 - DNA, 25 bp, Homo sapiens
ggacatcaaagctatgccagccatt

SEQ ID NO: 29776 - DNA, 25 bp, Homo sapiens
tttgcatggctgtatcttgtatctg

SEQ ID NO: 29777 - DNA, 25 bp, Homo sapiens
aattgttatttgtgtggcctctgcc

SEQ ID NO: 29778 - DNA, 25 bp, Homo sapiens
tttcttggcaatctgtgacagtctg

SEQ ID NO: 29779 - DNA, 25 bp, Homo sapiens
ctacagggaggagtttctttacaca

SEQ ID NO: 29780 - DNA, 25 bp, Homo sapiens
gtgataaactgaaccctaaagcgta

SEQ ID NO: 29781 - DNA, 25 bp, Homo sapiens
tggggcaattactcagcatgcactt

SEQ ID NO: 29782 - DNA, 25 bp, Homo sapiens
taaaatgcggtcagagcccacaatc

SEQ ID NO: 29783 - DNA, 25 bp, Homo sapiens
ccaattgtgtacttgcgtggaggta

SEQ ID NO: 29784 - DNA, 25 bp, Homo sapiens
tagctgctgtggctaaatataaatc

SEQ ID NO: 29785 - DNA, 25 bp, Homo sapiens
gttccattaattatctggcactttg

SEQ ID NO: 29786 - DNA, 25 bp, Homo sapiens
gccatgttctgtactgactttagga

SEQ ID NO: 29787 - DNA, 25 bp, Homo sapiens
gagtaccattagtttcagctgtgtc

SEQ ID NO: 29788 - DNA, 25 bp, Homo sapiens
agagggcttccaaccactttaaata

SEQ ID NO: 29789 - DNA, 25 bp, Homo sapiens
tgttgcatgctttgaagaccttaga

SEQ ID NO: 29790 - DNA, 25 bp, Homo sapiens
gtgcacacccatgtgaagacagata

SEQ ID NO: 29791 - DNA, 25 bp, Homo sapiens
tggcccggtattctataaagctttg

SEQ ID NO: 29792 - DNA, 25 bp, Homo sapiens
cagaagtgttctgtatttgctaacc

SEQ ID NO: 29793 - DNA, 25 bp, Homo sapiens
ctgcaactttttaaagttaccaatt

SEQ ID NO: 29794 - DNA, 25 bp, Homo sapiens
actacggcccttctttatattttaa

SEQ ID NO: 29795 - DNA, 25 bp, Homo sapiens
tctcggcagcagcactacacaactg

SEQ ID NO: 29796 - DNA, 25 bp, Homo sapiens
tgtgccacagccaccagcagagatg

SEQ ID NO: 29797 - DNA, 25 bp, Homo sapiens
aagtggtgcttcttctccctaaaga

SEQ ID NO: 29798 - DNA, 25 bp, Homo sapiens
aaaccagactggcagagtgagaggt

SEQ ID NO: 29799 - DNA, 25 bp, Homo sapiens
aaacaaagaagaaatgtactaagaa

SEQ ID NO: 29800 - DNA, 25 bp, Homo sapiens
aaggttccttgctgctctgcttata

SEQ ID NO: 29801 - DNA, 25 bp, Homo sapiens
gccaagttgtgttccaacagagaga

SEQ ID NO: 29802 - DNA, 25 bp, Homo sapiens
tgtagcatatgataccagagccctg

SEQ ID NO: 29803 - DNA, 25 bp, Homo sapiens
caggaacacttgcttacatggtaca

SEQ ID NO: 29804 - DNA, 25 bp, Homo sapiens
gtttgtattccctgcttgctcatgg

SEQ ID NO: 29805 - DNA, 25 bp, Homo sapiens
cactttagagctttaggtaaagaaa

SEQ ID NO: 29806 - DNA, 25 bp, Homo sapiens
gttttaattatgaggcattttcttt

SEQ ID NO: 29807 - DNA, 25 bp, Homo sapiens
tgctcactgttatcctttcccaata

SEQ ID NO: 29808 - DNA, 25 bp, Homo sapiens
gcctgtagagctaggcttcagactc

SEQ ID NO: 29809 - DNA, 25 bp, Homo sapiens
tagggctgtcattgaaaggcatttc

SEQ ID NO: 29810 - DNA, 25 bp, Homo sapiens
cactactggagaggggaactaatca

SEQ ID NO: 29811 - DNA, 25 bp, Homo sapiens
tcaggcgcttactacttgagtgtta

SEQ ID NO: 29812 - DNA, 25 bp, Homo sapiens
atcccttattagctaagtgaactga

SEQ ID NO: 29813 - DNA, 25 bp, Homo sapiens
aaaccttgggaaaagatatagacat

SEQ ID NO: 29814 - DNA, 25 bp, Homo sapiens
tgggaagacaaaactttacttgctg

SEQ ID NO: 29815 - DNA, 25 bp, Homo sapiens
tttaaaatgtatatgtatttcaata

SEQ ID NO: 29816 - DNA, 25 bp, Homo sapiens
acatgctccctctctagttgtttga

SEQ ID NO: 29817 - DNA, 25 bp, Homo sapiens
cggatttttgttggcattcagagta

SEQ ID NO: 29818 - DNA, 25 bp, Homo sapiens
cgtcttatcacccaaggaggcctta

SEQ ID NO: 29819 - DNA, 25 bp, Homo sapiens
gggctgctccagaaataatctcttc

SEQ ID NO: 29820 - DNA, 25 bp, Homo sapiens
tgccctatgtctggtttaacctaag

SEQ ID NO: 29821 - DNA, 25 bp, Homo sapiens
atttcaagcaatggcccgggtcttc

SEQ ID NO: 29822 - DNA, 25 bp, Homo sapiens
ggggaagaggcccaatgaattttca

SEQ ID NO: 29823 - DNA, 25 bp, Homo sapiens
ccaggttcactaaagcctccttctg

SEQ ID NO: 29824 - DNA, 25 bp, Homo sapiens
gagctctaagatccagtcacccacg

SEQ ID NO: 29825 - DNA, 25 bp, Homo sapiens
gccacatagtggtgtttatccgcta

SEQ ID NO: 29826 - DNA, 25 bp, Homo sapiens
cactgtgtgtcctgttctttgcaga

SEQ ID NO: 29827 - DNA, 25 bp, Homo sapiens
ccacttctgaattggactttttgta

SEQ ID NO: 29828 - DNA, 25 bp, Homo sapiens
ctcagaggcttccattcagggtaaa

SEQ ID NO: 29829 - DNA, 25 bp, Homo sapiens
tgccactgggaaatagagacacaca

SEQ ID NO: 29830 - DNA, 25 bp, Homo sapiens
ctgaagccaagattgcctgttattc

SEQ ID NO: 29831 - DNA, 25 bp, Homo sapiens
gctgacagccagtttctacatgttt

SEQ ID NO: 29832 - DNA, 25 bp, Homo sapiens
ttgcccacgattttgctagaaattc

SEQ ID NO: 29833 - DNA, 25 bp, Homo sapiens
cttcttcattctggtgatgggttta

SEQ ID NO: 29834 - DNA, 25 bp, Homo sapiens
atctacaaatgactcatttggagat

SEQ ID NO: 29835 - DNA, 25 bp, Homo sapiens
ttaccagggacagtgaaagtttttc

SEQ ID NO: 29836 - DNA, 25 bp, Homo sapiens
gaagaactgaaaaattcctgcatta

SEQ ID NO: 29837 - DNA, 25 bp, Homo sapiens
agcatggccggcaaagttctactca

SEQ ID NO: 29838 - DNA, 25 bp, Homo sapiens
aagtttccttaagtctggtccatga

SEQ ID NO: 29839 - DNA, 25 bp, Homo sapiens
cctattcagtctggagagtgctgta

SEQ ID NO: 29840 - DNA, 25 bp, Homo sapiens
tcccaataaagaaggagttgtcaca

SEQ ID NO: 29841 - DNA, 25 bp, Homo sapiens
cccatgtcatatagcgtaggtcaaa

SEQ ID NO: 29842 - DNA, 25 bp, Homo sapiens
tcatactgtaaaccaactctattca

SEQ ID NO: 29843 - DNA, 25 bp, Homo sapiens
tggagtattgctgcacatgcccatc

SEQ ID NO: 29844 - DNA, 25 bp, Homo sapiens
ggtccacgtgttctgggtcattata

SEQ ID NO: 29845 - DNA, 25 bp, Homo sapiens
atcacaaggtaacaaggaggcactg

SEQ ID NO: 29846 - DNA, 25 bp, Homo sapiens
gggacattcaaacgtgcgtctctta

SEQ ID NO: 29847 - DNA, 25 bp, Homo sapiens
cctcttggctccagaagtttgaagc

SEQ ID NO: 29848 - DNA, 25 bp, Homo sapiens
ccttccatggttgttagctgcagca

SEQ ID NO: 29849 - DNA, 25 bp, Homo sapiens
ttgttgtgtaaatgaggccttgcta

SEQ ID NO: 29850 - DNA, 25 bp, Homo sapiens
ttgcagatatctatttcaacctgga

SEQ ID NO: 29851 - DNA, 25 bp, Homo sapiens
agtccatggtgttttcttgatcata

SEQ ID NO: 29852 - DNA, 25 bp, Homo sapiens
tgtttatgaatatgctctgaaaatc

SEQ ID NO: 29853 - DNA, 25 bp, Homo sapiens
ggctttcttcaggacgtttctagta

SEQ ID NO: 29854 - DNA, 25 bp, Homo sapiens
tggactgcttcaaatatagtgaggc

SEQ ID NO: 29855 - DNA, 25 bp, Homo sapiens
caggtccctggcttcagtcaccata

SEQ ID NO: 29856 - DNA, 25 bp, Homo sapiens
cggggcagttgatggattgacaaaa

SEQ ID NO: 29857 - DNA, 25 bp, Homo sapiens
gttcatttctgttgggaaaaggcca

SEQ ID NO: 29858 - DNA, 25 bp, Homo sapiens
gctccttgatgtgaaacttcgatta

SEQ ID NO: 29859 - DNA, 25 bp, Homo sapiens
ttgtgtgactacagccaagcagatc

SEQ ID NO: 29860 - DNA, 25 bp, Homo sapiens
tcacctagtactactagattggttt

SEQ ID NO: 29861 - DNA, 25 bp, Homo sapiens
gagggatcttgagcagttgaacaca

SEQ ID NO: 29862 - DNA, 25 bp, Homo sapiens
gtgcatggcctggagaactctttta

SEQ ID NO: 29863 - DNA, 25 bp, Homo sapiens
tttaacctcaggacaacacgtattt

SEQ ID NO: 29864 - DNA, 25 bp, Homo sapiens
ctgtcttaataaccatatagccttg

SEQ ID NO: 29865 - DNA, 25 bp, Homo sapiens
gtcaaacatatttttgataagctat

SEQ ID NO: 29866 - DNA, 25 bp, Homo sapiens
gtccagtagttgttagtctttccca

SEQ ID NO: 29867 - DNA, 25 bp, Homo sapiens
gagaacctcgtgtctggcagctatt

SEQ ID NO: 29868 - DNA, 25 bp, Homo sapiens
cccaccagttgttgtttggcctaaa

SEQ ID NO: 29869 - DNA, 25 bp, Homo sapiens
agacaattaccagcatcagagtttg

SEQ ID NO: 29870 - DNA, 25 bp, Homo sapiens
tgcaagcatctttgatctttgcagc

SEQ ID NO: 29871 - DNA, 25 bp, Homo sapiens
agttttatggttcctatgcttcgtc

SEQ ID NO: 29872 - DNA, 25 bp, Homo sapiens
ttaactaggttgcttatctgaaaga

SEQ ID NO: 29873 - DNA, 25 bp, Homo sapiens
gctgtcttttcgatctagaacgctc

SEQ ID NO: 29874 - DNA, 25 bp, Homo sapiens
ggcctcaaaccacagcagcgtaatt

SEQ ID NO: 29875 - DNA, 25 bp, Homo sapiens
cgttccatgcaaaaatgtgagtgtt

SEQ ID NO: 29876 - DNA, 25 bp, Homo sapiens
tactattctagattaccgggatttg

SEQ ID NO: 29877 - DNA, 25 bp, Homo sapiens
agacagcttcttcctttaagagtcg

SEQ ID NO: 29878 - DNA, 25 bp, Homo sapiens
cccatttacttgtacaaattaaaaa

SEQ ID NO: 29879 - DNA, 25 bp, Homo sapiens
agaaccatttgctgggatttaatca

SEQ ID NO: 29880 - DNA, 25 bp, Homo sapiens
aactctcgagctatgccaggcaata

SEQ ID NO: 29881 - DNA, 25 bp, Homo sapiens
tatgctggattctagtgaccacttc

SEQ ID NO: 29882 - DNA, 25 bp, Homo sapiens
cagtgagtctttctgacaggtcgta

SEQ ID NO: 29883 - DNA, 25 bp, Homo sapiens
tttagtagcatatctctcggttttc

SEQ ID NO: 29884 - DNA, 25 bp, Homo sapiens
tcctggctgttcacgaaatgtaatg

SEQ ID NO: 29885 - DNA, 25 bp, Homo sapiens
ggacaaactcttctctctgtgactc

SEQ ID NO: 29886 - DNA, 25 bp, Homo sapiens
atcctccctgctttgacatattgtg

SEQ ID NO: 29887 - DNA, 25 bp, Homo sapiens
ccttttaccacattggctggggaca

SEQ ID NO: 29888 - DNA, 25 bp, Homo sapiens
tcctactgcaggttgtgagccaagc

SEQ ID NO: 29889 - DNA, 25 bp, Homo sapiens
ggaggacaccgatcagggcaagtta

SEQ ID NO: 29890 - DNA, 25 bp, Homo sapiens
acctaccggagaaggaaggtcttta

SEQ ID NO: 29891 - DNA, 25 bp, Homo sapiens
gttctccctggcttcccatcagagg

SEQ ID NO: 29892 - DNA, 25 bp, Homo sapiens
gttacctgaggcagcagctatgcta

SEQ ID NO: 29893 - DNA, 25 bp, Homo sapiens
aggtgtgctattcctcctagccaga

SEQ ID NO: 29894 - DNA, 25 bp, Homo sapiens
agcgatggtctgtttaggaattcta

SEQ ID NO: 29895 - DNA, 25 bp, Homo sapiens
ttctggcagcctgatgcttaattga

SEQ ID NO: 29896 - DNA, 25 bp, Homo sapiens
tggcccatgggactctatcagaaga

SEQ ID NO: 29897 - DNA, 25 bp, Homo sapiens
gtaacatgctttctggcaataattg

SEQ ID NO: 29898 - DNA, 25 bp, Homo sapiens
cccagttgcaagcaggacctgtttt

SEQ ID NO: 29899 - DNA, 25 bp, Homo sapiens
aagactatctgcgtccacctttttt

SEQ ID NO: 29900 - DNA, 25 bp, Homo sapiens
aaccttgttagctggtgatttctca

SEQ ID NO: 29901 - DNA, 25 bp, Homo sapiens
cctctcttctttctaagggtccaaa

SEQ ID NO: 29902 - DNA, 25 bp, Homo sapiens
cggaatgcctagtttctaccaggga

SEQ ID NO: 29903 - DNA, 25 bp, Homo sapiens
actttaaaaaaatgaaagagaagtt

SEQ ID NO: 29904 - DNA, 25 bp, Homo sapiens
tcttggaggaacagcagaaagcatc

SEQ ID NO: 29905 - DNA, 25 bp, Homo sapiens
acttgggacttcgtaattcttggtc

SEQ ID NO: 29906 - DNA, 25 bp, Homo sapiens
cctccaaaggtgaagaataagaatt

SEQ ID NO: 29907 - DNA, 25 bp, Homo sapiens
ttgtttattcaaatctggaccagtg

SEQ ID NO: 29908 - DNA, 25 bp, Homo sapiens
taattcctttttcctgtactgtgca

SEQ ID NO: 29909 - DNA, 25 bp, Homo sapiens
agacccaggctcttagtagacaata

SEQ ID NO: 29910 - DNA, 25 bp, Homo sapiens
cactgagtgatttttcccatttata

SEQ ID NO: 29911 - DNA, 25 bp, Homo sapiens
cactttctgagataggtggagataa

SEQ ID NO: 29912 - DNA, 25 bp, Homo sapiens
tgaacacagcctcccaatgccttgg

SEQ ID NO: 29913 - DNA, 25 bp, Homo sapiens
catctgacagatagaggctaactta

SEQ ID NO: 29914 - DNA, 25 bp, Homo sapiens
cccaagccaggacatgtgagttatt

SEQ ID NO: 29915 - DNA, 25 bp, Homo sapiens
ccaacttgtgtgtgcttgagagcta

SEQ ID NO: 29916 - DNA, 25 bp, Homo sapiens
cttctttatttgttgtccgtgggta

SEQ ID NO: 29917 - DNA, 25 bp, Homo sapiens
ttatagctggtgttaaatgtattca

SEQ ID NO: 29918 - DNA, 25 bp, Homo sapiens
ccctatctcagatgtggcttctaca

SEQ ID NO: 29919 - DNA, 25 bp, Homo sapiens
ctctgtatagtgtcagtcagggata

SEQ ID NO: 29920 - DNA, 25 bp, Homo sapiens
gctgccagcacaattccttgaactg

SEQ ID NO: 29921 - DNA, 25 bp, Homo sapiens
tttctccaaaggatcagttctgctg

SEQ ID NO: 29922 - DNA, 25 bp, Homo sapiens
gggagtacaaccacctcagagcatg

SEQ ID NO: 29923 - DNA, 25 bp, Homo sapiens
ttgccctgcatcacatggatgtgta

SEQ ID NO: 29924 - DNA, 25 bp, Homo sapiens
tccagggtgtcaaggcaatgctaaa

SEQ ID NO: 29925 - DNA, 25 bp, Homo sapiens
tttcatagacatgcatccctatttc

SEQ ID NO: 29926 - DNA, 25 bp, Homo sapiens
aatctgctctcctcatatgtttgtg

SEQ ID NO: 29927 - DNA, 25 bp, Homo sapiens
tgctgcatgcacaaggccaatcctt

SEQ ID NO: 29928 - DNA, 25 bp, Homo sapiens
gggtggcatttggttgtctcctatc

SEQ ID NO: 29929 - DNA, 25 bp, Homo sapiens
gagggatacctacaccattgatttg

SEQ ID NO: 29930 - DNA, 25 bp, Homo sapiens
gtctcctagacttggtgcattagta

SEQ ID NO: 29931 - DNA, 25 bp, Homo sapiens
gagccaaggggccactcttctaata

SEQ ID NO: 29932 - DNA, 25 bp, Homo sapiens
cgtagccttggctgggtaaagaatt

SEQ ID NO: 29933 - DNA, 25 bp, Homo sapiens
attagaacatgcattcaattgttca

SEQ ID NO: 29934 - DNA, 25 bp, Homo sapiens
atgctgtttacatgccaaatcttgg

SEQ ID NO: 29935 - DNA, 25 bp, Homo sapiens
ggcaaatttggcctatgaaacactg

SEQ ID NO: 29936 - DNA, 25 bp, Homo sapiens
ggtcggttatcaccaagttacatta

SEQ ID NO: 29937 - DNA, 25 bp, Homo sapiens
cagagcctgttcctgagtcacggta

SEQ ID NO: 29938 - DNA, 25 bp, Homo sapiens
cactgtggttgcattctcattgatg

SEQ ID NO: 29939 - DNA, 25 bp, Homo sapiens
tgctttactttttgtttcccacttg

SEQ ID NO: 29940 - DNA, 25 bp, Homo sapiens
gacctctgtcttaggatgccatgta

SEQ ID NO: 29941 - DNA, 25 bp, Homo sapiens
tgctccttggccagctgcaataata

SEQ ID NO: 29942 - DNA, 25 bp, Homo sapiens
tttcttaatcatcttaaattcttac

SEQ ID NO: 29943 - DNA, 25 bp, Homo sapiens
ggaaatctctcttgcctgtgaaata

SEQ ID NO: 29944 - DNA, 25 bp, Homo sapiens
gactgcagggaacacacctagttta

SEQ ID NO: 29945 - DNA, 25 bp, Homo sapiens
acttcagctgtcaactgtttcagta

SEQ ID NO: 29946 - DNA, 25 bp, Homo sapiens
aagaaatacaacaaagttttttatt

SEQ ID NO: 29947 - DNA, 25 bp, Homo sapiens
gggtagtggctgtctccaaaccttc

SEQ ID NO: 29948 - DNA, 25 bp, Homo sapiens
gcgattcatgaacagcagctcctga

SEQ ID NO: 29949 - DNA, 25 bp, Homo sapiens
gtgggtgttaacgtggcatcacttc

SEQ ID NO: 29950 - DNA, 25 bp, Homo sapiens
gtagttgactttcctaaaatgctcc

SEQ ID NO: 29951 - DNA, 25 bp, Homo sapiens
cagtttgctgagtgattggtatttc

SEQ ID NO: 29952 - DNA, 25 bp, Homo sapiens
ggcccattttgacagccttgtgcta

SEQ ID NO: 29953 - DNA, 25 bp, Homo sapiens
agtgattctacttcccaacatgagg

SEQ ID NO: 29954 - DNA, 25 bp, Homo sapiens
agttcatccttgttggggcagcatc

SEQ ID NO: 29955 - DNA, 25 bp, Homo sapiens
gccagtgaatgttttctaaaagagg

SEQ ID NO: 29956 - DNA, 25 bp, Homo sapiens
acactgagatgagatgccctgaaca

SEQ ID NO: 29957 - DNA, 25 bp, Homo sapiens
tcagcctggttcaactgagagtttc

SEQ ID NO: 29958 - DNA, 25 bp, Homo sapiens
ctagggtgatttccagcgtttgcaa

SEQ ID NO: 29959 - DNA, 25 bp, Homo sapiens
gtgggagcaccgagacattatattc

SEQ ID NO: 29960 - DNA, 25 bp, Homo sapiens
tgctaggtaagttaaacacatttca

SEQ ID NO: 29961 - DNA, 25 bp, Homo sapiens
tggtagcacttggcagttctagcag

SEQ ID NO: 29962 - DNA, 25 bp, Homo sapiens
gccatatacctgtgtgtttacggga

SEQ ID NO: 29963 - DNA, 25 bp, Homo sapiens
cctggctcctttccaaatctcatgt

SEQ ID NO: 29964 - DNA, 25 bp, Homo sapiens
ccactgacttatggggaatccctta

SEQ ID NO: 29965 - DNA, 25 bp, Homo sapiens
tcccgaattggctcttattctaacc

SEQ ID NO: 29966 - DNA, 25 bp, Homo sapiens
gctctgtttctccactcatagcagt

SEQ ID NO: 29967 - DNA, 25 bp, Homo sapiens
ggcaccatgccttgttaggaaaata

SEQ ID NO: 29968 - DNA, 25 bp, Homo sapiens
gtaaggaatctgctgtctcactata

SEQ ID NO: 29969 - DNA, 25 bp, Homo sapiens
aaattcagatttatcacattgccta

SEQ ID NO: 29970 - DNA, 25 bp, Homo sapiens
cagtatcaaaaagcattattacaac

SEQ ID NO: 29971 - DNA, 25 bp, Homo sapiens
gactgggctcttctacttctggatg

SEQ ID NO: 29972 - DNA, 25 bp, Homo sapiens
gaaaccttaaggctcaaagaaatgt

SEQ ID NO: 29973 - DNA, 25 bp, Homo sapiens
gggcagcagaaattattgtccacta

SEQ ID NO: 29974 - DNA, 25 bp, Homo sapiens
ttacaaatgcatgaagggctgcaaa

SEQ ID NO: 29975 - DNA, 25 bp, Homo sapiens
catgctgttactgcaagtttactta

SEQ ID NO: 29976 - DNA, 25 bp, Homo sapiens
gagcctccagcactcactaggaaga

SEQ ID NO: 29977 - DNA, 25 bp, Homo sapiens
tgcccacagctagcaaggcttgata

SEQ ID NO: 29978 - DNA, 25 bp, Homo sapiens
tgggcgagtaccgtttaaagcatgc

SEQ ID NO: 29979 - DNA, 25 bp, Homo sapiens
tgcctctcccagcatagctcagata

SEQ ID NO: 29980 - DNA, 25 bp, Homo sapiens
ctggggtacttctactggcatttgc

SEQ ID NO: 29981 - DNA, 25 bp, Homo sapiens
ttaataataataacaactttgcttt

SEQ ID NO: 29982 - DNA, 25 bp, Homo sapiens
ctccctggtcctgcatagctatttg

SEQ ID NO: 29983 - DNA, 25 bp, Homo sapiens
gtgaagctctctgcatctgaacagc

SEQ ID NO: 29984 - DNA, 25 bp, Homo sapiens
ctcttaggctgctgtggactgtaaa

SEQ ID NO: 29985 - DNA, 25 bp, Homo sapiens
gaggcttccctacatccaaattgtg

SEQ ID NO: 29986 - DNA, 25 bp, Homo sapiens
gcctgtgtgtagtttgccttagata

SEQ ID NO: 29987 - DNA, 25 bp, Homo sapiens
ggcagaggcccggtttttgacattt

SEQ ID NO: 29988 - DNA, 25 bp, Homo sapiens
tgccagaagagttgctaccagagtt

SEQ ID NO: 29989 - DNA, 25 bp, Homo sapiens
tgctgatcatatgaaatattaagag

SEQ ID NO: 29990 - DNA, 25 bp, Homo sapiens
actcagatatgtgggaacttcctta

SEQ ID NO: 29991 - DNA, 25 bp, Homo sapiens
gacgcctcataccatttttgcttga

SEQ ID NO: 29992 - DNA, 25 bp, Homo sapiens
tctgatgtctgcaaaaatagtcttc

SEQ ID NO: 29993 - DNA, 25 bp, Homo sapiens
taggcattgtgcttatctctggatc

SEQ ID NO: 29994 - DNA, 25 bp, Homo sapiens
gctgcaatccactttcacttacgtg

SEQ ID NO: 29995 - DNA, 25 bp, Homo sapiens
tggccatgacgtgaagcattttctc

SEQ ID NO: 29996 - DNA, 25 bp, Homo sapiens
ggccctggctgttttcccttcagta

SEQ ID NO: 29997 - DNA, 25 bp, Homo sapiens
ttaagcttgctgtacacgaggatgc

SEQ ID NO: 29998 - DNA, 25 bp, Homo sapiens
cagggtattttctgaggcccaaaga

SEQ ID NO: 29999 - DNA, 25 bp, Homo sapiens
acgtgcgtcacatcaaatcaaattg

SEQ ID NO: 30000 - DNA, 25 bp, Homo sapiens
cttgcagtatctcgacctaggcctc

SEQ ID NO: 30001 - DNA, 25 bp, Homo sapiens
aggggctgttttattatgttgcaca

SEQ ID NO: 30002 - DNA, 25 bp, Homo sapiens
ttctaactacattaaggataaatcc

SEQ ID NO: 30003 - DNA, 25 bp, Homo sapiens
gtatcttctttttcatgggaataaa

SEQ ID NO: 30004 - DNA, 25 bp, Homo sapiens
attgcctgtcccatagagtaattga

SEQ ID NO: 30005 - DNA, 25 bp, Homo sapiens
gcccaagtctgtggtttctctatta

SEQ ID NO: 30006 - DNA, 25 bp, Homo sapiens
tcggcattggccaaaaggagaattc

SEQ ID NO: 30007 - DNA, 25 bp, Homo sapiens
gggagctgcgtgcaatttgttcata

SEQ ID NO: 30008 - DNA, 25 bp, Homo sapiens
aatcatgatgtttccctgacgggca

SEQ ID NO: 30009 - DNA, 25 bp, Homo sapiens
gactctagcttgtgccattgacatg

SEQ ID NO: 30010 - DNA, 25 bp, Homo sapiens
ctatttgacagaggagaagagtttc

SEQ ID NO: 30011 - DNA, 25 bp, Homo sapiens
gttatccttgcgacatctattattc

SEQ ID NO: 30012 - DNA, 25 bp, Homo sapiens
ggactcacacaggatgtgcctattg

SEQ ID NO: 30013 - DNA, 25 bp, Homo sapiens
gtgcggataaaatgctagctgtttc

SEQ ID NO: 30014 - DNA, 25 bp, Homo sapiens
atgactttccttggtacttagttta

SEQ ID NO: 30015 - DNA, 25 bp, Homo sapiens
attctccttgatgcacacgtgtaac

SEQ ID NO: 30016 - DNA, 25 bp, Homo sapiens
agtctgcaactggattttaatttta

SEQ ID NO: 30017 - DNA, 25 bp, Homo sapiens
agggctgtaatttctcctttaattc

SEQ ID NO: 30018 - DNA, 25 bp, Homo sapiens
agtaaccttctctgcttggctagta

SEQ ID NO: 30019 - DNA, 25 bp, Homo sapiens
cccaggggccctttgattattcagg

SEQ ID NO: 30020 - DNA, 25 bp, Homo sapiens
tgacctgggacatgaaattctttgc

SEQ ID NO: 30021 - DNA, 25 bp, Homo sapiens
gctctcttgtaaaactagtggtttg

SEQ ID NO: 30022 - DNA, 25 bp, Homo sapiens
aggacctactagacatcagaaaatg

SEQ ID NO: 30023 - DNA, 25 bp, Homo sapiens
gtagccctgggtctttatatcgatg

SEQ ID NO: 30024 - DNA, 25 bp, Homo sapiens
ttaacatgtaaatgtcaggtgattt

SEQ ID NO: 30025 - DNA, 25 bp, Homo sapiens
ccaatcattggaaaggcactgcatc

SEQ ID NO: 30026 - DNA, 25 bp, Homo sapiens
tggctctgcttcaccctgatgctaa

SEQ ID NO: 30027 - DNA, 25 bp, Homo sapiens
tgagtcacagcattttctctgaatg

SEQ ID NO: 30028 - DNA, 25 bp, Homo sapiens
gtttcttttgtttattgttaaattc

SEQ ID NO: 30029 - DNA, 25 bp, Homo sapiens
ccagggtgagtttagaatgagtata

SEQ ID NO: 30030 - DNA, 25 bp, Homo sapiens
ggtgctccgtaaatgggtccatatc

SEQ ID NO: 30031 - DNA, 25 bp, Homo sapiens
gccgagccagcttgttgtcatccaa

SEQ ID NO: 30032 - DNA, 25 bp, Homo sapiens
ggagattcagcatgcatgtatcaca

SEQ ID NO: 30033 - DNA, 25 bp, Homo sapiens
cagtcctgtactgcaatgaacgtta

SEQ ID NO: 30034 - DNA, 25 bp, Homo sapiens
cagcttctctggaactgagcatcta

SEQ ID NO: 30035 - DNA, 25 bp, Homo sapiens
ggctgtactacgaatgcacctaaag

SEQ ID NO: 30036 - DNA, 25 bp, Homo sapiens
ctagtgtccaccagttaagttttca

SEQ ID NO: 30037 - DNA, 25 bp, Homo sapiens
cagcagggtcctccataattgtttc

SEQ ID NO: 30038 - DNA, 25 bp, Homo sapiens
ttctctttgggaaccttggaactga

SEQ ID NO: 30039 - DNA, 25 bp, Homo sapiens
ggttatccatcattcagagtacatg

SEQ ID NO: 30040 - DNA, 25 bp, Homo sapiens
ggggaccacatcagtggctaagata

SEQ ID NO: 30041 - DNA, 25 bp, Homo sapiens
agtccactgtcctcgtatctatgta

SEQ ID NO: 30042 - DNA, 25 bp, Homo sapiens
cgctgtactaaatattcggggaaga

SEQ ID NO: 30043 - DNA, 25 bp, Homo sapiens
gggtgggcaccaactaaatcaattc

SEQ ID NO: 30044 - DNA, 25 bp, Homo sapiens
gctgatactgtattggcctgcacca

SEQ ID NO: 30045 - DNA, 25 bp, Homo sapiens
tatgccctgagctttgaatgagttc

SEQ ID NO: 30046 - DNA, 25 bp, Homo sapiens
gggtcacgtggctaagttcttgcta

SEQ ID NO: 30047 - DNA, 25 bp, Homo sapiens
agtctcaccagcaggttgtcccttg

SEQ ID NO: 30048 - DNA, 25 bp, Homo sapiens
ctcccactgtgagagcaaaattctg

SEQ ID NO: 30049 - DNA, 25 bp, Homo sapiens
tgggcacttagatgacttccaaatg

SEQ ID NO: 30050 - DNA, 25 bp, Homo sapiens
aagatgtgaacatttttgagaaatt

SEQ ID NO: 30051 - DNA, 25 bp, Homo sapiens
ccgtcatacatatgctttgagaata

SEQ ID NO: 30052 - DNA, 25 bp, Homo sapiens
tgggcttggatactagtctctactg

SEQ ID NO: 30053 - DNA, 25 bp, Homo sapiens
tactgtgccaagagatgctaatgtc

SEQ ID NO: 30054 - DNA, 25 bp, Homo sapiens
ctagcatgttttgtgtatgtatgta

SEQ ID NO: 30055 - DNA, 25 bp, Homo sapiens
tctatggaaactgttgaggttcatc

SEQ ID NO: 30056 - DNA, 25 bp, Homo sapiens
aatcggcttttcctggtgacaaatc

SEQ ID NO: 30057 - DNA, 25 bp, Homo sapiens
accttgatccctgtgagcttcctga

SEQ ID NO: 30058 - DNA, 25 bp, Homo sapiens
gaccttggcagctgtaaatacttac

SEQ ID NO: 30059 - DNA, 25 bp, Homo sapiens
cactcatgtgtttgttacttcgcta

SEQ ID NO: 30060 - DNA, 25 bp, Homo sapiens
cccaaattggcaatgatgagtatca

SEQ ID NO: 30061 - DNA, 25 bp, Homo sapiens
atactctttttcagtttacagaata

SEQ ID NO: 30062 - DNA, 25 bp, Homo sapiens
ttataggcactagataaaaaagtaa

SEQ ID NO: 30063 - DNA, 25 bp, Homo sapiens
aagagaaattctgctagaattctct

SEQ ID NO: 30064 - DNA, 25 bp, Homo sapiens
tttggccacatgtagtcactttttg

SEQ ID NO: 30065 - DNA, 25 bp, Homo sapiens
agagaccttcactgtcctggggaca

SEQ ID NO: 30066 - DNA, 25 bp, Homo sapiens
cctcttagtgtggatgagaactctc

SEQ ID NO: 30067 - DNA, 25 bp, Homo sapiens
ttacagtgggtttggtccgtatctc

SEQ ID NO: 30068 - DNA, 25 bp, Homo sapiens
gcatgaagggtttgtctgtcacaca

SEQ ID NO: 30069 - DNA, 25 bp, Homo sapiens
ctggatttgcctcacatacgtcgta

SEQ ID NO: 30070 - DNA, 25 bp, Homo sapiens
catggccgcaaaccttactgaagtc

SEQ ID NO: 30071 - DNA, 25 bp, Homo sapiens
cttgcctgccttcttccttttgtga

SEQ ID NO: 30072 - DNA, 25 bp, Homo sapiens
cattgttctgagccaagcacatatt

SEQ ID NO: 30073 - DNA, 25 bp, Homo sapiens
taggctcttctagttacacatattg

SEQ ID NO: 30074 - DNA, 25 bp, Homo sapiens
gtgttacctagttccacaaagctgc

SEQ ID NO: 30075 - DNA, 25 bp, Homo sapiens
gcttcgggccattgaagtcattata

SEQ ID NO: 30076 - DNA, 25 bp, Homo sapiens
ccatatgactgtgagccttttgata

SEQ ID NO: 30077 - DNA, 25 bp, Homo sapiens
tgggttctgaactgagctactttga

SEQ ID NO: 30078 - DNA, 25 bp, Homo sapiens
taataataagcagggtttaatttga

SEQ ID NO: 30079 - DNA, 25 bp, Homo sapiens
ctgaagccattgagaagacactatt

SEQ ID NO: 30080 - DNA, 25 bp, Homo sapiens
gggcagtgtctgtattcctagctac

SEQ ID NO: 30081 - DNA, 25 bp, Homo sapiens
tgtgggcacactgacctgaatttga

SEQ ID NO: 30082 - DNA, 25 bp, Homo sapiens
atcttcaaataatatcatagattta

SEQ ID NO: 30083 - DNA, 25 bp, Homo sapiens
gcgagctgcacctgttttaccctga

SEQ ID NO: 30084 - DNA, 25 bp, Homo sapiens
agagaacttttacggtcttgagaaa

SEQ ID NO: 30085 - DNA, 25 bp, Homo sapiens
gccaatctgctagacattttacttg

SEQ ID NO: 30086 - DNA, 25 bp, Homo sapiens
gtgagtcactactgcattcctgaaa

SEQ ID NO: 30087 - DNA, 25 bp, Homo sapiens
ctgtaggggcatgacactaaatttt

SEQ ID NO: 30088 - DNA, 25 bp, Homo sapiens
tatgtcatttttagttaccttttac

SEQ ID NO: 30089 - DNA, 25 bp, Homo sapiens
cgtaccttctgtgtgtgagtgataa

SEQ ID NO: 30090 - DNA, 25 bp, Homo sapiens
tgttaataggcactgtcccagcacc

SEQ ID NO: 30091 - DNA, 25 bp, Homo sapiens
ccacatggtccctttgaactgaaca

SEQ ID NO: 30092 - DNA, 25 bp, Homo sapiens
ggagcccatacgtgaccattcttaa

SEQ ID NO: 30093 - DNA, 25 bp, Homo sapiens
tgagagggcacacttttcagatttc

SEQ ID NO: 30094 - DNA, 25 bp, Homo sapiens
gccctttgttgcttgtatctattga

SEQ ID NO: 30095 - DNA, 25 bp, Homo sapiens
accctgtacatgtgtgttatttcta

SEQ ID NO: 30096 - DNA, 25 bp, Homo sapiens
tggggccattccttgctcacatagc

SEQ ID NO: 30097 - DNA, 25 bp, Homo sapiens
gactgctctggatgatgcactttta

SEQ ID NO: 30098 - DNA, 25 bp, Homo sapiens
gaaactaggagtaatattctgtcaa

SEQ ID NO: 30099 - DNA, 25 bp, Homo sapiens
tcacactgaggacttctgacagctc

SEQ ID NO: 30100 - DNA, 25 bp, Homo sapiens
tgctagcttgtggatatgaatattc

SEQ ID NO: 30101 - DNA, 25 bp, Homo sapiens
ccaccttctgggatacaaggaaaga

SEQ ID NO: 30102 - DNA, 25 bp, Homo sapiens
gccagcatttttagctaggtaatga

SEQ ID NO: 30103 - DNA, 25 bp, Homo sapiens
ccctgatttagaaggtcatgtaata

SEQ ID NO: 30104 - DNA, 25 bp, Homo sapiens
tccacccttgttcacagagaagcta

SEQ ID NO: 30105 - DNA, 25 bp, Homo sapiens
ctgggtgcccagtgttgaaagttta

SEQ ID NO: 30106 - DNA, 25 bp, Homo sapiens
tgcctcgaacttgctctgataattg

SEQ ID NO: 30107 - DNA, 25 bp, Homo sapiens
cctctggaaattactggcatgctta

SEQ ID NO: 30108 - DNA, 25 bp, Homo sapiens
ggggcaaaagtacactcactgaata

SEQ ID NO: 30109 - DNA, 25 bp, Homo sapiens
gtggctcccggactcatattttcta

SEQ ID NO: 30110 - DNA, 25 bp, Homo sapiens
acctgcagatgagggtgttccaata

SEQ ID NO: 30111 - DNA, 25 bp, Homo sapiens
gtcaggcctcctggttgcacatata

SEQ ID NO: 30112 - DNA, 25 bp, Homo sapiens
aaatgctcattttcagaccataggg

SEQ ID NO: 30113 - DNA, 25 bp, Homo sapiens
attttacataattttgtattgattc

SEQ ID NO: 30114 - DNA, 25 bp, Homo sapiens
gccaggcatgtgtcccttaatagta

SEQ ID NO: 30115 - DNA, 25 bp, Homo sapiens
tggtgcaaagaagcctagtaaaatc

SEQ ID NO: 30116 - DNA, 25 bp, Homo sapiens
tgtgtatgcctagatccattctttg

SEQ ID NO: 30117 - DNA, 25 bp, Homo sapiens
cacaggatgccctttctgaaggata

SEQ ID NO: 30118 - DNA, 25 bp, Homo sapiens
tttgcagatccagaaaagggcctta

SEQ ID NO: 30119 - DNA, 25 bp, Homo sapiens
gcttggatttttctatgctatacta

SEQ ID NO: 30120 - DNA, 25 bp, Homo sapiens
ctaatgagtgtatttgcaatgtgtc

SEQ ID NO: 30121 - DNA, 25 bp, Homo sapiens
cctattctgatgtcccagtttggta

SEQ ID NO: 30122 - DNA, 25 bp, Homo sapiens
tgttctacctgatatgggccattga

SEQ ID NO: 30123 - DNA, 25 bp, Homo sapiens
tggaaaaatgtacacgaattttggg

SEQ ID NO: 30124 - DNA, 25 bp, Homo sapiens
agtaaaacatagttactttaaaata

SEQ ID NO: 30125 - DNA, 25 bp, Homo sapiens
agaatgattctttagccatctctct

SEQ ID NO: 30126 - DNA, 25 bp, Homo sapiens
ggagctgagcctttatcacccactg

SEQ ID NO: 30127 - DNA, 25 bp, Homo sapiens
tgacacatacatgcggggacagcct

SEQ ID NO: 30128 - DNA, 25 bp, Homo sapiens
ggcttagactacctgacttgaaata

SEQ ID NO: 30129 - DNA, 25 bp, Homo sapiens
ccatgagctcttttttccttgactg

SEQ ID NO: 30130 - DNA, 25 bp, Homo sapiens
tgcattttagaatccaagtaacagg

SEQ ID NO: 30131 - DNA, 25 bp, Homo sapiens
atgtcatatgacaaattttagaaga

SEQ ID NO: 30132 - DNA, 25 bp, Homo sapiens
gcagtttacttgacgtcacagttta

SEQ ID NO: 30133 - DNA, 25 bp, Homo sapiens
ccatgtctgcacgcagttttggagc

SEQ ID NO: 30134 - DNA, 25 bp, Homo sapiens
agagggattttcactgcactcaaca

SEQ ID NO: 30135 - DNA, 25 bp, Homo sapiens
gctcctgtgtgttgtctgtttaatc

SEQ ID NO: 30136 - DNA, 25 bp, Homo sapiens
ccttgaggatgacttgcaggcaaaa

SEQ ID NO: 30137 - DNA, 25 bp, Homo sapiens
agggggtttgatccttggctttatt

SEQ ID NO: 30138 - DNA, 25 bp, Homo sapiens
gctggtgttaccttcagagacctta

SEQ ID NO: 30139 - DNA, 25 bp, Homo sapiens
tgccttgccttcttgacctgtttta

SEQ ID NO: 30140 - DNA, 25 bp, Homo sapiens
gaaccatctgctgggtaacctctga

SEQ ID NO: 30141 - DNA, 25 bp, Homo sapiens
ccttggtttacctgagacgcttctg

SEQ ID NO: 30142 - DNA, 25 bp, Homo sapiens
caccagtgtcttgctccgtcttaac

SEQ ID NO: 30143 - DNA, 25 bp, Homo sapiens
agcactttgctgtccctcttggatg

SEQ ID NO: 30144 - DNA, 25 bp, Homo sapiens
tcgggtctgggactcctcagaatta

SEQ ID NO: 30145 - DNA, 25 bp, Homo sapiens
ccagagccactgaggaaatttttaa

SEQ ID NO: 30146 - DNA, 25 bp, Homo sapiens
gcctggaactgtagaatcccgaata

SEQ ID NO: 30147 - DNA, 25 bp, Homo sapiens
cgtggatttctctttgacttgcatt

SEQ ID NO: 30148 - DNA, 25 bp, Homo sapiens
tcatgggaaaaggatcagtaggaaa

SEQ ID NO: 30149 - DNA, 25 bp, Homo sapiens
ctatgcagcgatgttatgaatgacc

SEQ ID NO: 30150 - DNA, 25 bp, Homo sapiens
gtgggcaccatttccagactcgctg

SEQ ID NO: 30151 - DNA, 25 bp, Homo sapiens
ctctggcaactgcaccctgtgtgtg

SEQ ID NO: 30152 - DNA, 25 bp, Homo sapiens
ggtcccgggaacttctcagaatctg

SEQ ID NO: 30153 - DNA, 25 bp, Homo sapiens
atatcccagaggtcagtcacgtgtc

SEQ ID NO: 30154 - DNA, 25 bp, Homo sapiens
ttgtcatcttttccagtagctggga

SEQ ID NO: 30155 - DNA, 25 bp, Homo sapiens
gagggccttcctttctacttttttg

SEQ ID NO: 30156 - DNA, 25 bp, Homo sapiens
ggccgctgtgtatttgctctccaaa

SEQ ID NO: 30157 - DNA, 25 bp, Homo sapiens
acaggctgttgtctccttgtcaaga

SEQ ID NO: 30158 - DNA, 25 bp, Homo sapiens
tacacggattttgggagcttacagc

SEQ ID NO: 30159 - DNA, 25 bp, Homo sapiens
ctggctttgctcaaggaatctactc

SEQ ID NO: 30160 - DNA, 25 bp, Homo sapiens
tggatcggggattacttttacttgc

SEQ ID NO: 30161 - DNA, 25 bp, Homo sapiens
gctgcctcctttcggcctatctata

SEQ ID NO: 30162 - DNA, 25 bp, Homo sapiens
tcctgttcctttgcctgttaatttc

SEQ ID NO: 30163 - DNA, 25 bp, Homo sapiens
tccctggtaaactctaagcttatca

SEQ ID NO: 30164 - DNA, 25 bp, Homo sapiens
tgacctctggctgattgaaaacata

SEQ ID NO: 30165 - DNA, 25 bp, Homo sapiens
catgactttctaccaagagaggatc

SEQ ID NO: 30166 - DNA, 25 bp, Homo sapiens
ttccacgcttagtatcagaactctc

SEQ ID NO: 30167 - DNA, 25 bp, Homo sapiens
tgtacccttcaggattcagctcagg

SEQ ID NO: 30168 - DNA, 25 bp, Homo sapiens
acacctacttttcggactttcaata

SEQ ID NO: 30169 - DNA, 25 bp, Homo sapiens
gtggttcaccacagcactgcctttt

SEQ ID NO: 30170 - DNA, 25 bp, Homo sapiens
ctcaaagtgcagagtggatttcttc

SEQ ID NO: 30171 - DNA, 25 bp, Homo sapiens
gcatttgcgtttgtagacctcagga

SEQ ID NO: 30172 - DNA, 25 bp, Homo sapiens
ccctccggatctttgaaaggcttta

SEQ ID NO: 30173 - DNA, 25 bp, Homo sapiens
ccaggaaggcttgcatcagaataca

SEQ ID NO: 30174 - DNA, 25 bp, Homo sapiens
ttctccctgggttgtggaaatatga

SEQ ID NO: 30175 - DNA, 25 bp, Homo sapiens
gacggctcagtggttctttgaaata

SEQ ID NO: 30176 - DNA, 25 bp, Homo sapiens
attggctcatgctgcctaaggagtc

SEQ ID NO: 30177 - DNA, 25 bp, Homo sapiens
ggacaccttcagattttcttcattg

SEQ ID NO: 30178 - DNA, 25 bp, Homo sapiens
cacagactgtgcctggatttccatg

SEQ ID NO: 30179 - DNA, 25 bp, Homo sapiens
gccctgtgctcttgaaactggattc

SEQ ID NO: 30180 - DNA, 25 bp, Homo sapiens
ggccctaatgccctcgaaatgatgt

SEQ ID NO: 30181 - DNA, 25 bp, Homo sapiens
gccagcagcagggtgttttttcatc

SEQ ID NO: 30182 - DNA, 25 bp, Homo sapiens
ttgacctctgttggggaaagctctg

SEQ ID NO: 30183 - DNA, 25 bp, Homo sapiens
ctggtctacaggaactcgtctctct

SEQ ID NO: 30184 - DNA, 25 bp, Homo sapiens
ctaaacgtgaaaggggagctgtctc

SEQ ID NO: 30185 - DNA, 25 bp, Homo sapiens
gatcctttctctgtgctacttgcca

SEQ ID NO: 30186 - DNA, 25 bp, Homo sapiens
gctgagctgaccaagacaggaaatg

SEQ ID NO: 30187 - DNA, 25 bp, Homo sapiens
ttcagctcaggaagaacgtagttca

SEQ ID NO: 30188 - DNA, 25 bp, Homo sapiens
acaggaatctgggtctcttaactca

SEQ ID NO: 30189 - DNA, 25 bp, Homo sapiens
ctactggagccatggagtctacaca

SEQ ID NO: 30190 - DNA, 25 bp, Homo sapiens
gggttatcgcagcacgaggctacta

SEQ ID NO: 30191 - DNA, 25 bp, Homo sapiens
cttctcaccactaacaaaatagatg

SEQ ID NO: 30192 - DNA, 25 bp, Homo sapiens
cagcaccagaagtctttgcatattg

SEQ ID NO: 30193 - DNA, 25 bp, Homo sapiens
ctgacccacgggatgacaatctttg

SEQ ID NO: 30194 - DNA, 25 bp, Homo sapiens
atagtcgcatcgcttctcctgaagg

SEQ ID NO: 30195 - DNA, 25 bp, Homo sapiens
cacctagtgagcttggcctgaaaca

SEQ ID NO: 30196 - DNA, 25 bp, Homo sapiens
gcttgccagtttctgtagccagata

SEQ ID NO: 30197 - DNA, 25 bp, Homo sapiens
ctgggccctgtgattttgatgctca

SEQ ID NO: 30198 - DNA, 25 bp, Homo sapiens
gtcaactctacatatcttaacttgg

SEQ ID NO: 30199 - DNA, 25 bp, Homo sapiens
gcttatttcttgcatatttaatgat

SEQ ID NO: 30200 - DNA, 25 bp, Homo sapiens
gaccactgtcttcccttagcttctg

SEQ ID NO: 30201 - DNA, 25 bp, Homo sapiens
atggctcatgtgctcctcattagga

SEQ ID NO: 30202 - DNA, 25 bp, Homo sapiens
cccttgggcaaaatgagatacagaa

SEQ ID NO: 30203 - DNA, 25 bp, Homo sapiens
ggaatagtcattattatattgatta

SEQ ID NO: 30204 - DNA, 25 bp, Homo sapiens
aaacaaggttgctagctggtcccta

SEQ ID NO: 30205 - DNA, 25 bp, Homo sapiens
ggcccattttccctaactcctgttg

SEQ ID NO: 30206 - DNA, 25 bp, Homo sapiens
cttgcctgcgtttctagaatgcttc

SEQ ID NO: 30207 - DNA, 25 bp, Homo sapiens
ggcagtcatcataatctttcaaaag

SEQ ID NO: 30208 - DNA, 25 bp, Homo sapiens
ggggtcatcctctgcagcttcttca

SEQ ID NO: 30209 - DNA, 25 bp, Homo sapiens
tcccactctgggaacgtgaagatgg

SEQ ID NO: 30210 - DNA, 25 bp, Homo sapiens
gtgtcatcccgatcttgcctttagg

SEQ ID NO: 30211 - DNA, 25 bp, Homo sapiens
tttggagacatcgttgcacttggcc

SEQ ID NO: 30212 - DNA, 25 bp, Homo sapiens
tgcctctggaaacaaagctgctatc

SEQ ID NO: 30213 - DNA, 25 bp, Homo sapiens
tggcctttcaaaccttcctatgata

SEQ ID NO: 30214 - DNA, 25 bp, Homo sapiens
tgggagttttcctagacgctaaatc

SEQ ID NO: 30215 - DNA, 25 bp, Homo sapiens
cttagtctgtaagtcccacgagaga

SEQ ID NO: 30216 - DNA, 25 bp, Homo sapiens
tggttaaatgtgcacctccagtgga

SEQ ID NO: 30217 - DNA, 25 bp, Homo sapiens
gtgaggaccaattgcccagtctatg

SEQ ID NO: 30218 - DNA, 25 bp, Homo sapiens
tctggccaggggtacgatcaaatta

SEQ ID NO: 30219 - DNA, 25 bp, Homo sapiens
tccgcaagttttagccagtgaacca

SEQ ID NO: 30220 - DNA, 25 bp, Homo sapiens
ctggcccagagcaaagctagagtca

SEQ ID NO: 30221 - DNA, 25 bp, Homo sapiens
gcttagtgtcgaccaggattcagta

SEQ ID NO: 30222 - DNA, 25 bp, Homo sapiens
aagtgcttggcattagggtcctccc

SEQ ID NO: 30223 - DNA, 25 bp, Homo sapiens
agcagcgcctttttccacgagaaga

SEQ ID NO: 30224 - DNA, 25 bp, Homo sapiens
ggctggattatcattgcacacacta

SEQ ID NO: 30225 - DNA, 25 bp, Homo sapiens
gcagcctcttgcagaagtgtctttc

SEQ ID NO: 30226 - DNA, 25 bp, Homo sapiens
ggaattgcttcccacccttgccagg

SEQ ID NO: 30227 - DNA, 25 bp, Homo sapiens
gagcatcctggctaccgcttttttg

SEQ ID NO: 30228 - DNA, 25 bp, Homo sapiens
tttagaattacttagcccagctgtg

SEQ ID NO: 30229 - DNA, 25 bp, Homo sapiens
atgtgctcccatcaattggtgtgta

SEQ ID NO: 30230 - DNA, 25 bp, Homo sapiens
gccacatgatgtcaaggcttcaaca

SEQ ID NO: 30231 - DNA, 25 bp, Homo sapiens
aattccataatgattccagcattat

SEQ ID NO: 30232 - DNA, 25 bp, Homo sapiens
gtgttttcagtgtctatcgccatga

SEQ ID NO: 30233 - DNA, 25 bp, Homo sapiens
agcatcatcagcagttccagcagtg

SEQ ID NO: 30234 - DNA, 25 bp, Homo sapiens
aggtttcatacttgcctgacggaca

SEQ ID NO: 30235 - DNA, 25 bp, Homo sapiens
ggccatccttcttttacctcattta

SEQ ID NO: 30236 - DNA, 25 bp, Homo sapiens
cctggggcagctctaagtatgaaaa

SEQ ID NO: 30237 - DNA, 25 bp, Homo sapiens
aacagctccctagtttgcatgcagc

SEQ ID NO: 30238 - DNA, 25 bp, Homo sapiens
gccaacctagcctgatgatgcctta

SEQ ID NO: 30239 - DNA, 25 bp, Homo sapiens
ctatttctggccgttacgtgcttta

SEQ ID NO: 30240 - DNA, 25 bp, Homo sapiens
tactctgtgttctgtcctggcattc

SEQ ID NO: 30241 - DNA, 25 bp, Homo sapiens
ggagcctagcttttcctcaagtata

SEQ ID NO: 30242 - DNA, 25 bp, Homo sapiens
gacccctaacaacctcttcctccca

SEQ ID NO: 30243 - DNA, 25 bp, Homo sapiens
tcagccctgtcatttttcaccggtc

SEQ ID NO: 30244 - DNA, 25 bp, Homo sapiens
tggagcacttcctgtcaccttagtg

SEQ ID NO: 30245 - DNA, 25 bp, Homo sapiens
tgaggtcactcttccgcccaactaa

SEQ ID NO: 30246 - DNA, 25 bp, Homo sapiens
aaacttggggctcgactcactgata

SEQ ID NO: 30247 - DNA, 25 bp, Homo sapiens
ggatctgcctctgcccacttcagga

SEQ ID NO: 30248 - DNA, 25 bp, Homo sapiens
tttcatttctcaacaggggcctaga

SEQ ID NO: 30249 - DNA, 25 bp, Homo sapiens
gggacaattttctcacatcttaaca

SEQ ID NO: 30250 - DNA, 25 bp, Homo sapiens
atctgtttgtgtagcagtgtctcta

SEQ ID NO: 30251 - DNA, 25 bp, Homo sapiens
gtcctggactcaatgtgttcacctg

SEQ ID NO: 30252 - DNA, 25 bp, Homo sapiens
gacctccttatagagctgtcaagta

SEQ ID NO: 30253 - DNA, 25 bp, Homo sapiens
gtaaattatcatcctgttactttct

SEQ ID NO: 30254 - DNA, 25 bp, Homo sapiens
ggtagtcattaattcttcatcagca

SEQ ID NO: 30255 - DNA, 25 bp, Homo sapiens
ctcccagagtagcagcaatgatatc

SEQ ID NO: 30256 - DNA, 25 bp, Homo sapiens
ggctttggcaaagcaaacatgcatt

SEQ ID NO: 30257 - DNA, 25 bp, Homo sapiens
cgcaaatgcacagaccagccaaggt

SEQ ID NO: 30258 - DNA, 25 bp, Homo sapiens
cccaaatgcagctggttttcttaca

SEQ ID NO: 30259 - DNA, 25 bp, Homo sapiens
ttacccatggtgctgagaaaactag

SEQ ID NO: 30260 - DNA, 25 bp, Homo sapiens
tggggtcttatcttctcagcactga

SEQ ID NO: 30261 - DNA, 25 bp, Homo sapiens
agctggcctttcctattcttgaata

SEQ ID NO: 30262 - DNA, 25 bp, Homo sapiens
agggactctggccactctaagaaca

SEQ ID NO: 30263 - DNA, 25 bp, Homo sapiens
ctgccgaggttgatatgaggacttc

SEQ ID NO: 30264 - DNA, 25 bp, Homo sapiens
ggacagctgcatcctctttcataga

SEQ ID NO: 30265 - DNA, 25 bp, Homo sapiens
ggcccaggtggtataatgcctcata

SEQ ID NO: 30266 - DNA, 25 bp, Homo sapiens
atctgctggcaatctggttaacctg

SEQ ID NO: 30267 - DNA, 25 bp, Homo sapiens
gaattcctccgtgtctgtcttataa

SEQ ID NO: 30268 - DNA, 25 bp, Homo sapiens
acgtggtgcccagaactatatgatg

SEQ ID NO: 30269 - DNA, 25 bp, Homo sapiens
ctttgctcttttccatgtttaatga

SEQ ID NO: 30270 - DNA, 25 bp, Homo sapiens
aggtggcttgattggactcttcttc

SEQ ID NO: 30271 - DNA, 25 bp, Homo sapiens
gtattgctatcactcttctttttca

SEQ ID NO: 30272 - DNA, 25 bp, Homo sapiens
ctttgccaccaccagcactatgatg

SEQ ID NO: 30273 - DNA, 25 bp, Homo sapiens
gttggcttcccacagactacacatt

SEQ ID NO: 30274 - DNA, 25 bp, Homo sapiens
ctcgagcagaagatgttacctatta

SEQ ID NO: 30275 - DNA, 25 bp, Homo sapiens
caggtaggacccaaaaactctttta

SEQ ID NO: 30276 - DNA, 25 bp, Homo sapiens
ctgcctctggacaatagtttcttca

SEQ ID NO: 30277 - DNA, 25 bp, Homo sapiens
tggccatttctgcatcctcactgta

SEQ ID NO: 30278 - DNA, 25 bp, Homo sapiens
cagtggctgccttggataataggta

SEQ ID NO: 30279 - DNA, 25 bp, Homo sapiens
gtccctctctattagaggaagttta

SEQ ID NO: 30280 - DNA, 25 bp, Homo sapiens
agggtaaatgttatttaagaattcc

SEQ ID NO: 30281 - DNA, 25 bp, Homo sapiens
ccagagttcgttttttgcctcaagc

SEQ ID NO: 30282 - DNA, 25 bp, Homo sapiens
aagcactgctttcctttgtggcaaa

SEQ ID NO: 30283 - DNA, 25 bp, Homo sapiens
agcactgggcttctcagagtcatga

SEQ ID NO: 30284 - DNA, 25 bp, Homo sapiens
tatgagcgcctccactataagcagc

SEQ ID NO: 30285 - DNA, 25 bp, Homo sapiens
agccttgcttcctgctcttgtgcca

SEQ ID NO: 30286 - DNA, 25 bp, Homo sapiens
tggtgtcagcctctgcaatgctttc

SEQ ID NO: 30287 - DNA, 25 bp, Homo sapiens
gctgatggcagttcaatccctttga

SEQ ID NO: 30288 - DNA, 25 bp, Homo sapiens
tgagtagtgtacctttgcattgctg

SEQ ID NO: 30289 - DNA, 25 bp, Homo sapiens
agtctaatttgatccggtgcccatg

SEQ ID NO: 30290 - DNA, 25 bp, Homo sapiens
ggggcatcacttatcctattggttt

SEQ ID NO: 30291 - DNA, 25 bp, Homo sapiens
ataaaaaggaaataaaacagaatgt

SEQ ID NO: 30292 - DNA, 25 bp, Homo sapiens
tacagttcttaccaaacttctacct

SEQ ID NO: 30293 - DNA, 25 bp, Homo sapiens
atatatataaaaggttgctcagaca

SEQ ID NO: 30294 - DNA, 25 bp, Homo sapiens
ggtgagctagctttgtaaatatcca

SEQ ID NO: 30295 - DNA, 25 bp, Homo sapiens
gtgttttgatcagatagctcttcta

SEQ ID NO: 30296 - DNA, 25 bp, Homo sapiens
actagcacgtttcctggctaaaatg

SEQ ID NO: 30297 - DNA, 25 bp, Homo sapiens
cagcatctttctgtctctgttaaga

SEQ ID NO: 30298 - DNA, 25 bp, Homo sapiens
tgaagttttattcaatgtttactct

SEQ ID NO: 30299 - DNA, 25 bp, Homo sapiens
gggtccattattaacagttgcttta

SEQ ID NO: 30300 - DNA, 25 bp, Homo sapiens
tggttaactcccattaaaactgtgg

SEQ ID NO: 30301 - DNA, 25 bp, Homo sapiens
gttgcagctgtagagtaattccata

SEQ ID NO: 30302 - DNA, 25 bp, Homo sapiens
ctccacaaaaactcggcaaatgtaa

SEQ ID NO: 30303 - DNA, 25 bp, Homo sapiens
tatatgaatcctaaactttgtaaga

SEQ ID NO: 30304 - DNA, 25 bp, Homo sapiens
caatccttcatttgtgttgcaatga

SEQ ID NO: 30305 - DNA, 25 bp, Homo sapiens
cagtcctctcatcgtgttgcttaaa

SEQ ID NO: 30306 - DNA, 25 bp, Homo sapiens
gctttgcttgaaaatttggtactta

SEQ ID NO: 30307 - DNA, 25 bp, Homo sapiens
cccagttcccattatactaaagttt

SEQ ID NO: 30308 - DNA, 25 bp, Homo sapiens
gtgggacccacttctgaaagagatc

SEQ ID NO: 30309 - DNA, 25 bp, Homo sapiens
tctgagagctgccaactgcgtcatc

SEQ ID NO: 30310 - DNA, 25 bp, Homo sapiens
tcctacagcctatcatgtgaattta

SEQ ID NO: 30311 - DNA, 25 bp, Homo sapiens
ggtaaattttgcctacagctactta

SEQ ID NO: 30312 - DNA, 25 bp, Homo sapiens
acattctttctttttacatctcaat

SEQ ID NO: 30313 - DNA, 25 bp, Homo sapiens
ctggcactgtgctcaactcagagtc

SEQ ID NO: 30314 - DNA, 25 bp, Homo sapiens
agcactactgttcaatccctgcaga

SEQ ID NO: 30315 - DNA, 25 bp, Homo sapiens
ctcattttgggattttctgtaagca

SEQ ID NO: 30316 - DNA, 25 bp, Homo sapiens
gttctcaggaactttcatcaattga

SEQ ID NO: 30317 - DNA, 25 bp, Homo sapiens
gcccgtgtgagacatcgatgcatca

SEQ ID NO: 30318 - DNA, 25 bp, Homo sapiens
atgaggaatcctatactgcattgta

SEQ ID NO: 30319 - DNA, 25 bp, Homo sapiens
tctgaccctggagttctgataccca

SEQ ID NO: 30320 - DNA, 25 bp, Homo sapiens
tgttccctggctagacgctcttttg

SEQ ID NO: 30321 - DNA, 25 bp, Homo sapiens
ttttcctgaacagaaccctggctga

SEQ ID NO: 30322 - DNA, 25 bp, Homo sapiens
gccctacggagttaacagcacaatt

SEQ ID NO: 30323 - DNA, 25 bp, Homo sapiens
gaccctgggactcatttaaactcta

SEQ ID NO: 30324 - DNA, 25 bp, Homo sapiens
tcctttcagtttattcagttttggc

SEQ ID NO: 30325 - DNA, 25 bp, Homo sapiens
atctctttcctttggtatggctcca

SEQ ID NO: 30326 - DNA, 25 bp, Homo sapiens
aactttaccatgagcttctgtgcgg

SEQ ID NO: 30327 - DNA, 25 bp, Homo sapiens
tcccaaagaaatgcagtcagtaatg

SEQ ID NO: 30328 - DNA, 25 bp, Homo sapiens
tgacactgttcccttcctctaaaga

SEQ ID NO: 30329 - DNA, 25 bp, Homo sapiens
tccttgcagccttggtgagactctc

SEQ ID NO: 30330 - DNA, 25 bp, Homo sapiens
cccatggttggcatttcagcagtga

SEQ ID NO: 30331 - DNA, 25 bp, Homo sapiens
cgggtaccctgttttgtataggaac

SEQ ID NO: 30332 - DNA, 25 bp, Homo sapiens
accatgcctggggacttttaagacc

SEQ ID NO: 30333 - DNA, 25 bp, Homo sapiens
ggtcagattctggactagcttacta

SEQ ID NO: 30334 - DNA, 25 bp, Homo sapiens
ccacgagtgcatctgtcagggatca

SEQ ID NO: 30335 - DNA, 25 bp, Homo sapiens
ggcctacagtgtactctgcagttga

SEQ ID NO: 30336 - DNA, 25 bp, Homo sapiens
tgtctagccctggattgaattctta

SEQ ID NO: 30337 - DNA, 25 bp, Homo sapiens
ccagggctctgtatggcttgcaata

SEQ ID NO: 30338 - DNA, 25 bp, Homo sapiens
cacgatgtttgccataggagtcata

SEQ ID NO: 30339 - DNA, 25 bp, Homo sapiens
aggggtttctcacagtttctcgtca

SEQ ID NO: 30340 - DNA, 25 bp, Homo sapiens
gattgtgtctgttccaggtacctga

SEQ ID NO: 30341 - DNA, 25 bp, Homo sapiens
ctgaggtgacacatccactttagtg

SEQ ID NO: 30342 - DNA, 25 bp, Homo sapiens
cagtccctcagtggcagcattaaga

SEQ ID NO: 30343 - DNA, 25 bp, Homo sapiens
gtttgggttgtagtctgtgctctgg

SEQ ID NO: 30344 - DNA, 25 bp, Homo sapiens
tggcctccacagactctaaactatg

SEQ ID NO: 30345 - DNA, 25 bp, Homo sapiens
tcactgagctgtggtcagaaacttt

SEQ ID NO: 30346 - DNA, 25 bp, Homo sapiens
cttagaagtggaattagattagaat

SEQ ID NO: 30347 - DNA, 25 bp, Homo sapiens
atttaaaaggcggtgagggtgggta

SEQ ID NO: 30348 - DNA, 25 bp, Homo sapiens
agtcagtcacagtaggccagtttta

SEQ ID NO: 30349 - DNA, 25 bp, Homo sapiens
gactaaggctcccaaagttctcaga

SEQ ID NO: 30350 - DNA, 25 bp, Homo sapiens
ttgcatcttttagatttcagcttcc

SEQ ID NO: 30351 - DNA, 25 bp, Homo sapiens
ccacttttgccgaaggggtgcatca

SEQ ID NO: 30352 - DNA, 25 bp, Homo sapiens
ctgtgttccgccttcaacatgtgta

SEQ ID NO: 30353 - DNA, 25 bp, Homo sapiens
gccctctattagacgaagcctgaaa

SEQ ID NO: 30354 - DNA, 25 bp, Homo sapiens
gtgttccaaaaccactagcccggta

SEQ ID NO: 30355 - DNA, 25 bp, Homo sapiens
tcctgcccaggaagttaatctaaga

SEQ ID NO: 30356 - DNA, 25 bp, Homo sapiens
ggctcaccttgaccctgcttttagg

SEQ ID NO: 30357 - DNA, 25 bp, Homo sapiens
ccaagttctctggttctagccctga

SEQ ID NO: 30358 - DNA, 25 bp, Homo sapiens
ttaggcaagtaaccaaggaattctc

SEQ ID NO: 30359 - DNA, 25 bp, Homo sapiens
ggctgcagccttcactctgggacta

SEQ ID NO: 30360 - DNA, 25 bp, Homo sapiens
tggaggaccctttgccttcaactgc

SEQ ID NO: 30361 - DNA, 25 bp, Homo sapiens
ccagtattcacgattgccgccctta

SEQ ID NO: 30362 - DNA, 25 bp, Homo sapiens
gtgttactcacccaaagcttcatta

SEQ ID NO: 30363 - DNA, 25 bp, Homo sapiens
cccagggctgcagtaaagttccttc

SEQ ID NO: 30364 - DNA, 25 bp, Homo sapiens
atagtggtccctagcaagttgtcga

SEQ ID NO: 30365 - DNA, 25 bp, Homo sapiens
caacttctttgatgcgtccactaga

SEQ ID NO: 30366 - DNA, 25 bp, Homo sapiens
taccaactctttagttccttgtatt

SEQ ID NO: 30367 - DNA, 25 bp, Homo sapiens
ggcgaagcacctggaatatctcata

SEQ ID NO: 30368 - DNA, 25 bp, Homo sapiens
gcttcttgagcaaccagctagtatg

SEQ ID NO: 30369 - DNA, 25 bp, Homo sapiens
cacaggttttctagtacggcagttc

SEQ ID NO: 30370 - DNA, 25 bp, Homo sapiens
cccatgtttgctatgacacactgga

SEQ ID NO: 30371 - DNA, 25 bp, Homo sapiens
cgttgtcaggatttggcaacttttc

SEQ ID NO: 30372 - DNA, 25 bp, Homo sapiens
ttcacagctggcaaatgagataata

SEQ ID NO: 30373 - DNA, 25 bp, Homo sapiens
agtcttggtacccagagctctttta

SEQ ID NO: 30374 - DNA, 25 bp, Homo sapiens
catgcctgccctgtagactagtgta

SEQ ID NO: 30375 - DNA, 25 bp, Homo sapiens
tgctgtgatactctagagaatttca

SEQ ID NO: 30376 - DNA, 25 bp, Homo sapiens
ggatttgtccattacctgtaccttg

SEQ ID NO: 30377 - DNA, 25 bp, Homo sapiens
tacccagctgactagagactccttg

SEQ ID NO: 30378 - DNA, 25 bp, Homo sapiens
ccatccctcatgaaaagaaaaagtg

SEQ ID NO: 30379 - DNA, 25 bp, Homo sapiens
tgtcgttgccaatcacctagagaga

SEQ ID NO: 30380 - DNA, 25 bp, Homo sapiens
taccacgtgtaaggagctcttcata

SEQ ID NO: 30381 - DNA, 25 bp, Homo sapiens
tgccagtgtggttctctattaattc

SEQ ID NO: 30382 - DNA, 25 bp, Homo sapiens
agctagtttccatccactctaatga

SEQ ID NO: 30383 - DNA, 25 bp, Homo sapiens
aatggtcctgttgtcttgtatctca

SEQ ID NO: 30384 - DNA, 25 bp, Homo sapiens
ctgtaccctgggaagctgatgttca

SEQ ID NO: 30385 - DNA, 25 bp, Homo sapiens
gcagtgttttcaactggcagcattt

SEQ ID NO: 30386 - DNA, 25 bp, Homo sapiens
agggacagctattagacatttgttc

SEQ ID NO: 30387 - DNA, 25 bp, Homo sapiens
tcttcctattgactactggtgcaca

SEQ ID NO: 30388 - DNA, 25 bp, Homo sapiens
tcctcttgacaacatggagctctgg

SEQ ID NO: 30389 - DNA, 25 bp, Homo sapiens
tccctcctgggcttgtttaaaaata

SEQ ID NO: 30390 - DNA, 25 bp, Homo sapiens
ggcacagtgacccaacgcacacatt

SEQ ID NO: 30391 - DNA, 25 bp, Homo sapiens
agtccttccttacatcttatcctac

SEQ ID NO: 30392 - DNA, 25 bp, Homo sapiens
gtagcatccaagcaaatatatgtat

SEQ ID NO: 30393 - DNA, 25 bp, Homo sapiens
gtgactcggaggtgctcaaaaactc

SEQ ID NO: 30394 - DNA, 25 bp, Homo sapiens
gggcttcgacaccactcttagggca

SEQ ID NO: 30395 - DNA, 25 bp, Homo sapiens
ggcgctcccagcttttttcttagga

SEQ ID NO: 30396 - DNA, 25 bp, Homo sapiens
actgtgagatgactaggccaaccta

SEQ ID NO: 30397 - DNA, 25 bp, Homo sapiens
acggacagttagagtgtacagctca

SEQ ID NO: 30398 - DNA, 25 bp, Homo sapiens
ccctttataggtattgccgaatttg

SEQ ID NO: 30399 - DNA, 25 bp, Homo sapiens
catggcgctttctggcatgttttgc

SEQ ID NO: 30400 - DNA, 25 bp, Homo sapiens
ggcacatgtgtttcaactccaaata

SEQ ID NO: 30401 - DNA, 25 bp, Homo sapiens
cctgctgacagaacctctactaata

SEQ ID NO: 30402 - DNA, 25 bp, Homo sapiens
gggcgctgctgactccagaacttca

SEQ ID NO: 30403 - DNA, 25 bp, Homo sapiens
agcctttgcgtgtcctaactctgaa

SEQ ID NO: 30404 - DNA, 25 bp, Homo sapiens
gagctcttctgcttctgacattgaa

SEQ ID NO: 30405 - DNA, 25 bp, Homo sapiens
ttatctttttgtcagggcccggctc

SEQ ID NO: 30406 - DNA, 25 bp, Homo sapiens
agccaccttgctgccctgtaaatga

SEQ ID NO: 30407 - DNA, 25 bp, Homo sapiens
gtatctcccgtttgttctgttcctc

SEQ ID NO: 30408 - DNA, 25 bp, Homo sapiens
cgaaaagcttctctgggtacacgca

SEQ ID NO: 30409 - DNA, 25 bp, Homo sapiens
tccggtcagtccagctgcttatttg

SEQ ID NO: 30410 - DNA, 25 bp, Homo sapiens
ggatcaccttccctaacttatatgg

SEQ ID NO: 30411 - DNA, 25 bp, Homo sapiens
cctcttgttaagatggaccatggta

SEQ ID NO: 30412 - DNA, 25 bp, Homo sapiens
cggattcctgtgcaccttcgagcaa

SEQ ID NO: 30413 - DNA, 25 bp, Homo sapiens
gtccacctgtgtctctacgctcatg

SEQ ID NO: 30414 - DNA, 25 bp, Homo sapiens
tcacgcttttggttcactgagagcc

SEQ ID NO: 30415 - DNA, 25 bp, Homo sapiens
tgagcctgctccacagccttgaatg

SEQ ID NO: 30416 - DNA, 25 bp, Homo sapiens
ctggtttgtctgtgatgcctactcc

SEQ ID NO: 30417 - DNA, 25 bp, Homo sapiens
caccacatgttatgaggagggaatc

SEQ ID NO: 30418 - DNA, 25 bp, Homo sapiens
tcagactgaaagctcccagatggtc

SEQ ID NO: 30419 - DNA, 25 bp, Homo sapiens
tgtatttttcaattttgctcttggc

SEQ ID NO: 30420 - DNA, 25 bp, Homo sapiens
caaatgccttagtgtatgctgcaga

SEQ ID NO: 30421 - DNA, 25 bp, Homo sapiens
ccctggtgaccaagagaaagtgatc

SEQ ID NO: 30422 - DNA, 25 bp, Homo sapiens
cccagtcctggatattttaagcaga

SEQ ID NO: 30423 - DNA, 25 bp, Homo sapiens
aatcggtctcttctcagccactgca

SEQ ID NO: 30424 - DNA, 25 bp, Homo sapiens
cgagagggcttgtttttcatggata

SEQ ID NO: 30425 - DNA, 25 bp, Homo sapiens
tggcccactcactttagaactgtta

SEQ ID NO: 30426 - DNA, 25 bp, Homo sapiens
gctggtgattcccactttcaggaca

SEQ ID NO: 30427 - DNA, 25 bp, Homo sapiens
ggcatcccaggaacttgagcatata

SEQ ID NO: 30428 - DNA, 25 bp, Homo sapiens
gcatgggcttcatccttggttgaca

SEQ ID NO: 30429 - DNA, 25 bp, Homo sapiens
ctccatgatggggtcagcttcttca

SEQ ID NO: 30430 - DNA, 25 bp, Homo sapiens
cctaaactgggctaaggagacaatc

SEQ ID NO: 30431 - DNA, 25 bp, Homo sapiens
ctctccgtggaagactttgggacca

SEQ ID NO: 30432 - DNA, 25 bp, Homo sapiens
caaactggatcaataagtaatttgc

SEQ ID NO: 30433 - DNA, 25 bp, Homo sapiens
tcaaaatacacttctatgattaaaa

SEQ ID NO: 30434 - DNA, 25 bp, Homo sapiens
tgccactgtggctcaaagggagaca

SEQ ID NO: 30435 - DNA, 25 bp, Homo sapiens
cattcttggcttgtgggtaatttta

SEQ ID NO: 30436 - DNA, 25 bp, Homo sapiens
agggattttctttcccttccagcta

SEQ ID NO: 30437 - DNA, 25 bp, Homo sapiens
ttccagctatctgcacccggaagag

SEQ ID NO: 30438 - DNA, 25 bp, Homo sapiens
ctgggcagttctcagcacagctgga

SEQ ID NO: 30439 - DNA, 25 bp, Homo sapiens
gcactcggtggctcggaaatcatta

SEQ ID NO: 30440 - DNA, 25 bp, Homo sapiens
agtcttttcctgttgggacaccatg

SEQ ID NO: 30441 - DNA, 25 bp, Homo sapiens
gtcagcatcattgtgtgtagatgtg

SEQ ID NO: 30442 - DNA, 25 bp, Homo sapiens
acggtcattctgtctctctgttgca

SEQ ID NO: 30443 - DNA, 25 bp, Homo sapiens
acccaggttaccttgattccagaga

SEQ ID NO: 30444 - DNA, 25 bp, Homo sapiens
gtcacttcggggcagacatttccta

SEQ ID NO: 30445 - DNA, 25 bp, Homo sapiens
ctgggaactgtctctgctgaggatc

SEQ ID NO: 30446 - DNA, 25 bp, Homo sapiens
gtccaggaattggtaccgacttttc

SEQ ID NO: 30447 - DNA, 25 bp, Homo sapiens
gatggcttttccttccgttcctgta

SEQ ID NO: 30448 - DNA, 25 bp, Homo sapiens
tttgaggcatgctctgtccagcgca

SEQ ID NO: 30449 - DNA, 25 bp, Homo sapiens
tcggccttgtgattcctacagaata

SEQ ID NO: 30450 - DNA, 25 bp, Homo sapiens
tgccagccacacagggtgcttctcg

SEQ ID NO: 30451 - DNA, 25 bp, Homo sapiens
cggtgctaccgaggtgaatctaata

SEQ ID NO: 30452 - DNA, 25 bp, Homo sapiens
ggccttcgttgccttccactcagaa

SEQ ID NO: 30453 - DNA, 25 bp, Homo sapiens
acccgcactgggagcattgttgaaa

SEQ ID NO: 30454 - DNA, 25 bp, Homo sapiens
tctgttttctccaggccagcgctga

SEQ ID NO: 30455 - DNA, 25 bp, Homo sapiens
gggcggaagcctagacaaactcatc

SEQ ID NO: 30456 - DNA, 25 bp, Homo sapiens
ggcatgtccattaacgcagcttgtc

SEQ ID NO: 30457 - DNA, 25 bp, Homo sapiens
aaaactaagaaggacaagctgcgtt

SEQ ID NO: 30458 - DNA, 25 bp, Homo sapiens
ggagaacacggaccttagaatagca

SEQ ID NO: 30459 - DNA, 25 bp, Homo sapiens
gggccgcacgacttctttagagctg

SEQ ID NO: 30460 - DNA, 25 bp, Homo sapiens
ctctggctgagaaactccacgtgca

SEQ ID NO: 30461 - DNA, 25 bp, Homo sapiens
agccagaccggactcacatgtattc

SEQ ID NO: 30462 - DNA, 25 bp, Homo sapiens
cagggcagcctttggtttgctatca

SEQ ID NO: 30463 - DNA, 25 bp, Homo sapiens
cgatgtctgccgattcctgaggtta

SEQ ID NO: 30464 - DNA, 25 bp, Homo sapiens
gtctctccctgaatggccgctttgg

SEQ ID NO: 30465 - DNA, 25 bp, Homo sapiens
ctgcgtccctgactcgagagcttga

SEQ ID NO: 30466 - DNA, 25 bp, Homo sapiens
accctcgctgggctcatcctaaaga

SEQ ID NO: 30467 - DNA, 25 bp, Homo sapiens
acatcccagagagtcggtgccagca

SEQ ID NO: 30468 - DNA, 25 bp, Homo sapiens
ctgggcccactctgtttctaactga

SEQ ID NO: 30469 - DNA, 25 bp, Homo sapiens
gctgcattgctacctctgggctttg

SEQ ID NO: 30470 - DNA, 25 bp, Homo sapiens
tggcttggcctgagaacagctccca

SEQ ID NO: 30471 - DNA, 25 bp, Homo sapiens
ttgcccagccttgcaggaaaacagc

SEQ ID NO: 30472 - DNA, 25 bp, Homo sapiens
acggatcacgcgctgttgacatgca

SEQ ID NO: 30473 - DNA, 25 bp, Homo sapiens
cactggacagctgactggcttcttc

SEQ ID NO: 30474 - DNA, 25 bp, Homo sapiens
ctgtgtgtacaaggcccagccatga

SEQ ID NO: 30475 - DNA, 25 bp, Homo sapiens
ccacccatgctgtaagaggagacca

SEQ ID NO: 30476 - DNA, 25 bp, Homo sapiens
ccctgccctggagaaacaatgaact

SEQ ID NO: 30477 - DNA, 25 bp, Homo sapiens
gtcaccttcgtgttttctgccatca

SEQ ID NO: 30478 - DNA, 25 bp, Homo sapiens
tgaaatgtgactctaccaggcagcc

SEQ ID NO: 30479 - DNA, 25 bp, Homo sapiens
ctgagctcatggtccgctgacgaca

SEQ ID NO: 30480 - DNA, 25 bp, Homo sapiens
tcagtgttcaggtagccacaacttg

SEQ ID NO: 30481 - DNA, 25 bp, Homo sapiens
ccatcgtgtgtgtcagagtcactca

SEQ ID NO: 30482 - DNA, 25 bp, Homo sapiens
gagaccgatgccagtgcctctttcc

SEQ ID NO: 30483 - DNA, 25 bp, Homo sapiens
cccagctcggggcagaagcctaatt

SEQ ID NO: 30484 - DNA, 25 bp, Homo sapiens
gatttcccaacacaagcacggcagg

SEQ ID NO: 30485 - DNA, 25 bp, Homo sapiens
aaggtccagaccaggccacacagtg

SEQ ID NO: 30486 - DNA, 25 bp, Homo sapiens
ggacccatccgtgaacccagtcttg

SEQ ID NO: 30487 - DNA, 25 bp, Homo sapiens
cctattggtggcctaacagcttgga

SEQ ID NO: 30488 - DNA, 25 bp, Homo sapiens
ggtgtgtcgcttcccactggatttt

SEQ ID NO: 30489 - DNA, 25 bp, Homo sapiens
ggcacctgtgtaagctcttgaactc

SEQ ID NO: 30490 - DNA, 25 bp, Homo sapiens
ggcggtccaaaaactccctctgcgg

SEQ ID NO: 30491 - DNA, 25 bp, Homo sapiens
atcgtcggcttcctatgaacgctta

SEQ ID NO: 30492 - DNA, 25 bp, Homo sapiens
gttcccaggaagtgtgctttacgta

SEQ ID NO: 30493 - DNA, 25 bp, Homo sapiens
acctcagaacccagaagccgttgtg

SEQ ID NO: 30494 - DNA, 25 bp, Homo sapiens
ctgggcccacagtttctaggaaaga

SEQ ID NO: 30495 - DNA, 25 bp, Homo sapiens
ccggctctggcttcaaggctttatc

SEQ ID NO: 30496 - DNA, 25 bp, Homo sapiens
gccgggacattttgccctgggtttg

SEQ ID NO: 30497 - DNA, 25 bp, Homo sapiens
tgctctgtcctgaatttgccccact

SEQ ID NO: 30498 - DNA, 25 bp, Homo sapiens
gccatgatttctcgctcagggaagt

SEQ ID NO: 30499 - DNA, 25 bp, Homo sapiens
acatgttccttggtacccgagcctc

SEQ ID NO: 30500 - DNA, 25 bp, Homo sapiens
ggccttcctcccgtgcaggtgataa

SEQ ID NO: 30501 - DNA, 25 bp, Homo sapiens
tgctggtaatccttaggggccctta

SEQ ID NO: 30502 - DNA, 25 bp, Homo sapiens
tggggaccctccctgctattagaga

SEQ ID NO: 30503 - DNA, 25 bp, Homo sapiens
gcatcaggactttggggacagagca

SEQ ID NO: 30504 - DNA, 25 bp, Homo sapiens
ctgttcctgggtttggtgacaactc

SEQ ID NO: 30505 - DNA, 25 bp, Homo sapiens
cggggcactgctgagtcataagttc

SEQ ID NO: 30506 - DNA, 25 bp, Homo sapiens
gccggccgcaccagaaggatttctg

SEQ ID NO: 30507 - DNA, 25 bp, Homo sapiens
gtggcacaacctccttctggcagtg

SEQ ID NO: 30508 - DNA, 25 bp, Homo sapiens
aagtccttgtccttgggatcccatg

SEQ ID NO: 30509 - DNA, 25 bp, Homo sapiens
aggtgcccaccttgtgcttgcagga

SEQ ID NO: 30510 - DNA, 25 bp, Homo sapiens
cgcccacatggcaccgcttgttgaa

SEQ ID NO: 30511 - DNA, 25 bp, Homo sapiens
ttaatttaatgctcaaaacaccctt

SEQ ID NO: 30512 - DNA, 25 bp, Homo sapiens
gggagcatgagccaccagtaaaatc

SEQ ID NO: 30513 - DNA, 25 bp, Homo sapiens
ccaagaggatgttgccactggctca

SEQ ID NO: 30514 - DNA, 25 bp, Homo sapiens
aggctccctcgatcttcctcatgga

SEQ ID NO: 30515 - DNA, 25 bp, Homo sapiens
gggttggcctagttcagcccgaata

SEQ ID NO: 30516 - DNA, 25 bp, Homo sapiens
gatggctcccttgttcaactgcacc

SEQ ID NO: 30517 - DNA, 25 bp, Homo sapiens
gtccacggctgaaaatcccatcttg

SEQ ID NO: 30518 - DNA, 25 bp, Homo sapiens
gccgcctgattccttctcatcattg

SEQ ID NO: 30519 - DNA, 25 bp, Homo sapiens
ggtgcccatcccagaacagaagctc

SEQ ID NO: 30520 - DNA, 25 bp, Homo sapiens
gtggccaagacaagccgatcccttc

SEQ ID NO: 30521 - DNA, 25 bp, Homo sapiens
cgcgtctgtgtcttctcagcatatc

SEQ ID NO: 30522 - DNA, 25 bp, Homo sapiens
ggaatcctgtccctgctaaagctga

SEQ ID NO: 30523 - DNA, 25 bp, Homo sapiens
agcctgtgccctgtgcatgaccgaa

SEQ ID NO: 30524 - DNA, 25 bp, Homo sapiens
ttcggggattttgtgaccatggcca

SEQ ID NO: 30525 - DNA, 25 bp, Homo sapiens
cagtacctgcttccctccttgtgga

SEQ ID NO: 30526 - DNA, 25 bp, Homo sapiens
ctgacctgaggcacccattcgatga

SEQ ID NO: 30527 - DNA, 25 bp, Homo sapiens
cccagaggtctttgttgtccgaagc

SEQ ID NO: 30528 - DNA, 25 bp, Homo sapiens
tggagcaccctctcggactctaata

SEQ ID NO: 30529 - DNA, 25 bp, Homo sapiens
gggcccagtgcttctgttcaccagc

SEQ ID NO: 30530 - DNA, 25 bp, Homo sapiens
tggacgagcctcttcactgagaaca

SEQ ID NO: 30531 - DNA, 25 bp, Homo sapiens
gtgagtggccttccctgagtttcca

SEQ ID NO: 30532 - DNA, 25 bp, Homo sapiens
acgctttgccggtgtcatctgagaa

SEQ ID NO: 30533 - DNA, 25 bp, Homo sapiens
cctcggtgtgaactccctatctatg

SEQ ID NO: 30534 - DNA, 25 bp, Homo sapiens
gcctctgtatttctaggggagacta

SEQ ID NO: 30535 - DNA, 25 bp, Homo sapiens
ccgtaggccagggttgtttcaccca

SEQ ID NO: 30536 - DNA, 25 bp, Homo sapiens
tggcatttgcagcaattacaatttt

SEQ ID NO: 30537 - DNA, 25 bp, Homo sapiens
ctccagctttactggtcacatgtgg

SEQ ID NO: 30538 - DNA, 25 bp, Homo sapiens
ccaggtaagcagtcacatgtgtttc

SEQ ID NO: 30539 - DNA, 25 bp, Homo sapiens
gactacgctgtttggtccaggcata

SEQ ID NO: 30540 - DNA, 25 bp, Homo sapiens
ggcagcggtgttcaccttccgcata

SEQ ID NO: 30541 - DNA, 25 bp, Homo sapiens
cgtctccgcgtttccaacctgttga

SEQ ID NO: 30542 - DNA, 25 bp, Homo sapiens
acgcgagctttggtgagatgcaatc

SEQ ID NO: 30543 - DNA, 25 bp, Homo sapiens
gggcactcctgttttcctgtaaatg

SEQ ID NO: 30544 - DNA, 25 bp, Homo sapiens
tgggcgcccttatacgatgatgata

SEQ ID NO: 30545 - DNA, 25 bp, Homo sapiens
cggcttccagaaggccagcaggctt

SEQ ID NO: 30546 - DNA, 25 bp, Homo sapiens
tggggatagcccagccactgttctt

SEQ ID NO: 30547 - DNA, 25 bp, Homo sapiens
tggccctgccactttgctcatctgt

SEQ ID NO: 30548 - DNA, 25 bp, Homo sapiens
tggatcccgtccacgctaaccttgg

SEQ ID NO: 30549 - DNA, 25 bp, Homo sapiens
cacaggggacgtctggcattttaac

SEQ ID NO: 30550 - DNA, 25 bp, Homo sapiens
tcacgccttgcctggccttcagaga

SEQ ID NO: 30551 - DNA, 25 bp, Homo sapiens
tggtcacccggcatctcttagattc

SEQ ID NO: 30552 - DNA, 25 bp, Homo sapiens
ttggcccaaatcctctgcatccgtt

SEQ ID NO: 30553 - DNA, 25 bp, Homo sapiens
ggcctccaaggctgtctctgcttta

SEQ ID NO: 30554 - DNA, 25 bp, Homo sapiens
ggtacagtgtttccctcagcagatt

SEQ ID NO: 30555 - DNA, 25 bp, Homo sapiens
tcagctcatgacaccggacaatttg

SEQ ID NO: 30556 - DNA, 25 bp, Homo sapiens
cccatcctggcttgtcatgctgtta

SEQ ID NO: 30557 - DNA, 25 bp, Homo sapiens
cccagccgtcggttggtgaaaaacg

SEQ ID NO: 30558 - DNA, 25 bp, Homo sapiens
aggtcggcctctcttgaatcccagc

SEQ ID NO: 30559 - DNA, 25 bp, Homo sapiens
actcggccagtggtgcctccaattt

SEQ ID NO: 30560 - DNA, 25 bp, Homo sapiens
tggcccaaggcctctgaaaaccgtc

SEQ ID NO: 30561 - DNA, 25 bp, Homo sapiens
cctcgccgagatggagaagcccaaa

SEQ ID NO: 30562 - DNA, 25 bp, Homo sapiens
cacctctgcggtgtgtctggacaca

SEQ ID NO: 30563 - DNA, 25 bp, Homo sapiens
tctctgggatcaggagacttcagta

SEQ ID NO: 30564 - DNA, 25 bp, Homo sapiens
cccaggctcggctgcatagaacatg

SEQ ID NO: 30565 - DNA, 25 bp, Homo sapiens
gctctgggaggacacagccttttca

SEQ ID NO: 30566 - DNA, 25 bp, Homo sapiens
agggtggactcattctgaccgattc

SEQ ID NO: 30567 - DNA, 25 bp, Homo sapiens
gctgggagccacattgccatttttc

SEQ ID NO: 30568 - DNA, 25 bp, Homo sapiens
ttgatccaacagatgccggcccagg

SEQ ID NO: 30569 - DNA, 25 bp, Homo sapiens
ggcagccattaacaggtccaggtga

SEQ ID NO: 30570 - DNA, 25 bp, Homo sapiens
tctgagcacagacccaccaggaatg

SEQ ID NO: 30571 - DNA, 25 bp, Homo sapiens
tcggttcggcaaaaaagtcgtcttt

SEQ ID NO: 30572 - DNA, 25 bp, Homo sapiens
gtgggttctattgccaaggttctgc

SEQ ID NO: 30573 - DNA, 25 bp, Homo sapiens
gggtttacttttcctgccggctgca

SEQ ID NO: 30574 - DNA, 25 bp, Homo sapiens
acttcggtgcctgctgagaaatgcc

SEQ ID NO: 30575 - DNA, 25 bp, Homo sapiens
gctgcgttctccaagctctgcaaga

SEQ ID NO: 30576 - DNA, 25 bp, Homo sapiens
cccttcagggttcatcgaggtctta

SEQ ID NO: 30577 - DNA, 25 bp, Homo sapiens
tggccatgactggataccaccggtg

SEQ ID NO: 30578 - DNA, 25 bp, Homo sapiens
tgccctggggccttccatgagaaaa

SEQ ID NO: 30579 - DNA, 25 bp, Homo sapiens
gccaggttttgttctccagcgcatc

SEQ ID NO: 30580 - DNA, 25 bp, Homo sapiens
ctccgtgtccataccctagttttta

SEQ ID NO: 30581 - DNA, 25 bp, Homo sapiens
ctcttggctctcgaacttcttagag

SEQ ID NO: 30582 - DNA, 25 bp, Homo sapiens
cactggcctgcgtatcttttgggca

SEQ ID NO: 30583 - DNA, 25 bp, Homo sapiens
tcccggccaagcagcagagatgtca

SEQ ID NO: 30584 - DNA, 25 bp, Homo sapiens
tggtctccctcgtcctctgaaactg

SEQ ID NO: 30585 - DNA, 25 bp, Homo sapiens
aaggtcgatctcaggcctcaaggca

SEQ ID NO: 30586 - DNA, 25 bp, Homo sapiens
tgaccttgtgtatgcatgagtattc

SEQ ID NO: 30587 - DNA, 25 bp, Homo sapiens
agagttcccttcctgagatgcgctg

SEQ ID NO: 30588 - DNA, 25 bp, Homo sapiens
cttgggcagccattgcaacagtgga

SEQ ID NO: 30589 - DNA, 25 bp, Homo sapiens
aaccctggtcctggagactcctgtg

SEQ ID NO: 30590 - DNA, 25 bp, Homo sapiens
gaatctctacgttcaggggcccgtg

SEQ ID NO: 30591 - DNA, 25 bp, Homo sapiens
aggccagtgaccgtttctctcagca

SEQ ID NO: 30592 - DNA, 25 bp, Homo sapiens
cctgatggggacttttcactgaaca

SEQ ID NO: 30593 - DNA, 25 bp, Homo sapiens
ggccctctggactttgctctctaca

SEQ ID NO: 30594 - DNA, 25 bp, Homo sapiens
acagggcttcctgcaggtcctttta

SEQ ID NO: 30595 - DNA, 25 bp, Homo sapiens
agggctcttccttgtcctgcatctg

SEQ ID NO: 30596 - DNA, 25 bp, Homo sapiens
cagaatcattttcaaacacgtttct

SEQ ID NO: 30597 - DNA, 25 bp, Homo sapiens
ccatgggtttgtgccaatttgcata

SEQ ID NO: 30598 - DNA, 25 bp, Homo sapiens
tggcgcactcttcaagctctggatc

SEQ ID NO: 30599 - DNA, 25 bp, Homo sapiens
tccagcatcttagggccgggcattt

SEQ ID NO: 30600 - DNA, 25 bp, Homo sapiens
tgaccgacagcgctgggtgaaatcc

SEQ ID NO: 30601 - DNA, 25 bp, Homo sapiens
cttcgtcggccagtggacacactta

SEQ ID NO: 30602 - DNA, 25 bp, Homo sapiens
ttctgggaacctttggctgggaaca

SEQ ID NO: 30603 - DNA, 25 bp, Homo sapiens
ggcctggagaagacaccatgactta

SEQ ID NO: 30604 - DNA, 25 bp, Homo sapiens
gcagcgtgtcgggaagcattttaca

SEQ ID NO: 30605 - DNA, 25 bp, Homo sapiens
cgcgtgcatacgtgatctcatgttt

SEQ ID NO: 30606 - DNA, 25 bp, Homo sapiens
ccagccgggtgctttccacatgaaa

SEQ ID NO: 30607 - DNA, 25 bp, Homo sapiens
actcaggggcccagatcacaacatg

SEQ ID NO: 30608 - DNA, 25 bp, Homo sapiens
aagagctccctctatgccacgaaga

SEQ ID NO: 30609 - DNA, 25 bp, Homo sapiens
gggccagggtctcttgtaacaaatt

SEQ ID NO: 30610 - DNA, 25 bp, Homo sapiens
gcgccggaggagtcatttcccatca

SEQ ID NO: 30611 - DNA, 25 bp, Homo sapiens
ggggcccacccactgcaacagggta

SEQ ID NO: 30612 - DNA, 25 bp, Homo sapiens
taggcttgtcttgtgttcccaggga

SEQ ID NO: 30613 - DNA, 25 bp, Homo sapiens
cccatggttctaggggtgctgacca

SEQ ID NO: 30614 - DNA, 25 bp, Homo sapiens
tgggaaccagcaccacaccatgtgg

SEQ ID NO: 30615 - DNA, 25 bp, Homo sapiens
gcttcggcccttgtcacttttgtga

SEQ ID NO: 30616 - DNA, 25 bp, Homo sapiens
tcaggagctcctcaccttggctgga

SEQ ID NO: 30617 - DNA, 25 bp, Homo sapiens
ggggcatgtgcacacgcatctctta

SEQ ID NO: 30618 - DNA, 25 bp, Homo sapiens
ggtgcccacctgttaagacccagcg

SEQ ID NO: 30619 - DNA, 25 bp, Homo sapiens
tctgtgtggctgaaatcgtgtcgta

SEQ ID NO: 30620 - DNA, 25 bp, Homo sapiens
gggccacccttgttcttcggagatg

SEQ ID NO: 30621 - DNA, 25 bp, Homo sapiens
ttccagcgttaaggggccattgtcc

SEQ ID NO: 30622 - DNA, 25 bp, Homo sapiens
tgactgcgtcaggaacatggccttc

SEQ ID NO: 30623 - DNA, 25 bp, Homo sapiens
ccggagcgccaggagttaagtataa

SEQ ID NO: 30624 - DNA, 25 bp, Homo sapiens
caggggccagtgtttttacgtcaaa

SEQ ID NO: 30625 - DNA, 25 bp, Homo sapiens
gtcgctcgagtccagttgaatttta

SEQ ID NO: 30626 - DNA, 25 bp, Homo sapiens
gacctcctgccattccagggtgaga

SEQ ID NO: 30627 - DNA, 25 bp, Homo sapiens
ggtccctggctttctctgcactgag

SEQ ID NO: 30628 - DNA, 25 bp, Homo sapiens
tgtggccacacagcactggtcatgc

SEQ ID NO: 30629 - DNA, 25 bp, Homo sapiens
ccagggactcctgtttacgacagca

SEQ ID NO: 30630 - DNA, 25 bp, Homo sapiens
agtcctccctggcacattcctgatg

SEQ ID NO: 30631 - DNA, 25 bp, Homo sapiens
catacctgctcttgctggggctgca

SEQ ID NO: 30632 - DNA, 25 bp, Homo sapiens
tggtgtcccatcgtcagtgcaatta

SEQ ID NO: 30633 - DNA, 25 bp, Homo sapiens
ctttcagcccagggagatctgaaca

SEQ ID NO: 30634 - DNA, 25 bp, Homo sapiens
gggccgtctaaggtcccacctggaa

SEQ ID NO: 30635 - DNA, 25 bp, Homo sapiens
cacaagtggatctgcaggtgaactc

SEQ ID NO: 30636 - DNA, 25 bp, Homo sapiens
gcagggcagtttccgtttgactttc

SEQ ID NO: 30637 - DNA, 25 bp, Homo sapiens
agggtttaggcccatcagtcctgaa

SEQ ID NO: 30638 - DNA, 25 bp, Homo sapiens
tgttttctaagcaaaggccactaga

SEQ ID NO: 30639 - DNA, 25 bp, Homo sapiens
tgtctgacagcagtttttattatgg

SEQ ID NO: 30640 - DNA, 25 bp, Homo sapiens
tccgaggccatgtgtttctactata

SEQ ID NO: 30641 - DNA, 25 bp, Homo sapiens
aggggcctctttctcttggacatgc

SEQ ID NO: 30642 - DNA, 25 bp, Homo sapiens
gagcggggcctcaaaccctcttttt

SEQ ID NO: 30643 - DNA, 25 bp, Homo sapiens
acctggtctttggtcaaggaatcac

SEQ ID NO: 30644 - DNA, 25 bp, Homo sapiens
tttaggtgagtcactaagttcacct

SEQ ID NO: 30645 - DNA, 25 bp, Homo sapiens
ttatgcggttctgatggtgccattg

SEQ ID NO: 30646 - DNA, 25 bp, Homo sapiens
ccatatcagcttgttggcttgaaca

SEQ ID NO: 30647 - DNA, 25 bp, Homo sapiens
gatgttgtcagggctggagaaatgg

SEQ ID NO: 30648 - DNA, 25 bp, Homo sapiens
gagaacaaatatgattaatatgttt

SEQ ID NO: 30649 - DNA, 25 bp, Homo sapiens
tatcaagagtagccagcaccccaat

SEQ ID NO: 30650 - DNA, 25 bp, Homo sapiens
ttactctaaatactctaaatatctt

SEQ ID NO: 30651 - DNA, 25 bp, Homo sapiens
gctaccaggacagggcttttcaata

SEQ ID NO: 30652 - DNA, 25 bp, Homo sapiens
gggcactgactcctgcgattgattc

SEQ ID NO: 30653 - DNA, 25 bp, Homo sapiens
tgcccttaggccctgaaaaatcctg

SEQ ID NO: 30654 - DNA, 25 bp, Homo sapiens
agtgggtctccatggttcttcacca

SEQ ID NO: 30655 - DNA, 25 bp, Homo sapiens
ggtggctttgcagttgtcacatgag

SEQ ID NO: 30656 - DNA, 25 bp, Homo sapiens
gcgctgctgtctgctgaatacatga

SEQ ID NO: 30657 - DNA, 25 bp, Homo sapiens
actgacttggccatggtgctcacta

SEQ ID NO: 30658 - DNA, 25 bp, Homo sapiens
cagtgggactgacatctaggaatta

SEQ ID NO: 30659 - DNA, 25 bp, Homo sapiens
cctgcctgaacttggactcctggga

SEQ ID NO: 30660 - DNA, 25 bp, Homo sapiens
cccgtaggagcatttgcactgttca

SEQ ID NO: 30661 - DNA, 25 bp, Homo sapiens
tgagagctgctgttttcccaacatg

SEQ ID NO: 30662 - DNA, 25 bp, Homo sapiens
tttgatgtgtttaatgtggtgagcc

SEQ ID NO: 30663 - DNA, 25 bp, Homo sapiens
ccagggcctgcttttgaatgttgtc

SEQ ID NO: 30664 - DNA, 25 bp, Homo sapiens
gcctatgctctgtgttttcgttctc

SEQ ID NO: 30665 - DNA, 25 bp, Homo sapiens
cacgtggctggtgaagatatgtaca

SEQ ID NO: 30666 - DNA, 25 bp, Homo sapiens
tgccatctgcgtcctatgttttata

SEQ ID NO: 30667 - DNA, 25 bp, Homo sapiens
gaaacctgttctggcctgagggaca

SEQ ID NO: 30668 - DNA, 25 bp, Homo sapiens
gggccctttcagctgccactttgtg

SEQ ID NO: 30669 - DNA, 25 bp, Homo sapiens
tcactttgcgtgtctcagaggacta

SEQ ID NO: 30670 - DNA, 25 bp, Homo sapiens
gggcaggcctctgaagaactaattc

SEQ ID NO: 30671 - DNA, 25 bp, Homo sapiens
cccggtgttaccctgagttatgaga

SEQ ID NO: 30672 - DNA, 25 bp, Homo sapiens
gggcctcgcagcaagcttatcctta

SEQ ID NO: 30673 - DNA, 25 bp, Homo sapiens
ggcttgctccactctatcctgggtg

SEQ ID NO: 30674 - DNA, 25 bp, Homo sapiens
acagtgtgctaagacatgagacata

SEQ ID NO: 30675 - DNA, 25 bp, Homo sapiens
atatatttttagagacagaggcttg

SEQ ID NO: 30676 - DNA, 25 bp, Homo sapiens
cagctgaccatggtccaggctttct

SEQ ID NO: 30677 - DNA, 25 bp, Homo sapiens
acttggagcctactgcacgagccta

SEQ ID NO: 30678 - DNA, 25 bp, Homo sapiens
cagtgagttcatcctgtggcatgtc

SEQ ID NO: 30679 - DNA, 25 bp, Homo sapiens
ttcccatgtcttggaggactcttcc

SEQ ID NO: 30680 - DNA, 25 bp, Homo sapiens
ttcctgtccacggtcctctgggtag

SEQ ID NO: 30681 - DNA, 25 bp, Homo sapiens
cgtctaatttcacagccaagggctt

SEQ ID NO: 30682 - DNA, 25 bp, Homo sapiens
cccacgtcttgggaatggcgttact

SEQ ID NO: 30683 - DNA, 25 bp, Homo sapiens
tggggaaattccagtccagactgtc

SEQ ID NO: 30684 - DNA, 25 bp, Homo sapiens
cccagttgagtcgtgcactttttca

SEQ ID NO: 30685 - DNA, 25 bp, Homo sapiens
ccagtatcttattgggactagaata

SEQ ID NO: 30686 - DNA, 25 bp, Homo sapiens
cctgtctaggaggactattcttttg

SEQ ID NO: 30687 - DNA, 25 bp, Homo sapiens
tgggctcagccaaagctctgtcttc

SEQ ID NO: 30688 - DNA, 25 bp, Homo sapiens
cagcatcgccgtgtcagtccattga

SEQ ID NO: 30689 - DNA, 25 bp, Homo sapiens
atgggttcccaaatactgcagtgga

SEQ ID NO: 30690 - DNA, 25 bp, Homo sapiens
ggctttgtatgctctgtctaaaata

SEQ ID NO: 30691 - DNA, 25 bp, Homo sapiens
ccgccttattgctgaggtccggccg

SEQ ID NO: 30692 - DNA, 25 bp, Homo sapiens
tctgcccgtacaggatgatgctgtc

SEQ ID NO: 30693 - DNA, 25 bp, Homo sapiens
tgcccgggttagaaagccgttcctg

SEQ ID NO: 30694 - DNA, 25 bp, Homo sapiens
gcaacagttacaaggcctcctcgtg

SEQ ID NO: 30695 - DNA, 25 bp, Homo sapiens
tggatgtcaccactcaaaggaacgg

SEQ ID NO: 30696 - DNA, 25 bp, Homo sapiens
acttctcagagttgtgcctggtccc

SEQ ID NO: 30697 - DNA, 25 bp, Homo sapiens
caagtgctgcctccgcagatgggct

SEQ ID NO: 30698 - DNA, 25 bp, Homo sapiens
cgtcgatgtcggcatagaggttcca

SEQ ID NO: 30699 - DNA, 25 bp, Homo sapiens
agctccgtcaggtgcagcttccagc

SEQ ID NO: 30700 - DNA, 25 bp, Homo sapiens
cgcaaccacaggtctccatgtcgtg

SEQ ID NO: 30701 - DNA, 25 bp, Homo sapiens
tatgtgccagattgaaaagctttta

SEQ ID NO: 30702 - DNA, 25 bp, Homo sapiens
gcattgtatcatgatatgtgactaa

SEQ ID NO: 30703 - DNA, 25 bp, Homo sapiens
tgtggaaagccacattctgtatatc

SEQ ID NO: 30704 - DNA, 25 bp, Homo sapiens
taaactttctttaccacgtggcaca

SEQ ID NO: 30705 - DNA, 25 bp, Homo sapiens
ctgagagcacgttatgtatagctac

SEQ ID NO: 30706 - DNA, 25 bp, Homo sapiens
ctgaggtcgttcacccagattaaca

SEQ ID NO: 30707 - DNA, 25 bp, Homo sapiens
tttccagagtagcaaggtgtcctta

SEQ ID NO: 30708 - DNA, 25 bp, Homo sapiens
ttgcctctaaatccttcaggtactg

SEQ ID NO: 30709 - DNA, 25 bp, Homo sapiens
tccaggagaaggaagaagccacttc

SEQ ID NO: 30710 - DNA, 25 bp, Homo sapiens
tcgggtatgactagaagccaggcct

SEQ ID NO: 30711 - DNA, 25 bp, Homo sapiens
tcctttcaggagaaacccactgttc

SEQ ID NO: 30712 - DNA, 25 bp, Homo sapiens
gccatttcctcaatttggcttcctt

SEQ ID NO: 30713 - DNA, 25 bp, Homo sapiens
tgggtcctagcaaactgtcgccttg

SEQ ID NO: 30714 - DNA, 25 bp, Homo sapiens
gtgcagtcgtccattaacccttgtg

SEQ ID NO: 30715 - DNA, 25 bp, Homo sapiens
agcctatcccagttgacccagtttg

SEQ ID NO: 30716 - DNA, 25 bp, Homo sapiens
ggccctcctgttgagtagcttccca

SEQ ID NO: 30717 - DNA, 25 bp, Homo sapiens
ctggggccttttctgatcttgttaa

SEQ ID NO: 30718 - DNA, 25 bp, Homo sapiens
tggcctggccctttaagcacgagta

SEQ ID NO: 30719 - DNA, 25 bp, Homo sapiens
tgcctggacataccctcatcactga

SEQ ID NO: 30720 - DNA, 25 bp, Homo sapiens
tggaaggctcccacaggtgctgaac

SEQ ID NO: 30721 - DNA, 25 bp, Homo sapiens
gtgtagtttctccttctgacccttg

SEQ ID NO: 30722 - DNA, 25 bp, Homo sapiens
tccacgagttttacacaggcagttc

SEQ ID NO: 30723 - DNA, 25 bp, Homo sapiens
ccatgaggcttatgtttagattttc

SEQ ID NO: 30724 - DNA, 25 bp, Homo sapiens
ctgtccgtttctaatgggagcatta

SEQ ID NO: 30725 - DNA, 25 bp, Homo sapiens
tggccggtgttcacttaaaggaaaa

SEQ ID NO: 30726 - DNA, 25 bp, Homo sapiens
caacgtctgggtttcggtgcttata

SEQ ID NO: 30727 - DNA, 25 bp, Homo sapiens
gccctgatcatgagtgccctgagtt

SEQ ID NO: 30728 - DNA, 25 bp, Homo sapiens
tgtggaattactggcataagccact

SEQ ID NO: 30729 - DNA, 25 bp, Homo sapiens
cttggtaggattctgcacactgctc

SEQ ID NO: 30730 - DNA, 25 bp, Homo sapiens
tagatttcttgattagtggctcctg

SEQ ID NO: 30731 - DNA, 25 bp, Homo sapiens
gagctgcctggtgctttcccttgaa

SEQ ID NO: 30732 - DNA, 25 bp, Homo sapiens
tgaagttgttttcctcagtggaggc

SEQ ID NO: 30733 - DNA, 25 bp, Homo sapiens
tggctcactcccatggcagtatttc

SEQ ID NO: 30734 - DNA, 25 bp, Homo sapiens
cccaggggagcatttcttatgagtc

SEQ ID NO: 30735 - DNA, 25 bp, Homo sapiens
gcacttgctgcattgactgtttata

SEQ ID NO: 30736 - DNA, 25 bp, Homo sapiens
cttgggtcctgagtagagtcacatc

SEQ ID NO: 30737 - DNA, 25 bp, Homo sapiens
gcctccatgtgacctggcatcaggc

SEQ ID NO: 30738 - DNA, 25 bp, Homo sapiens
ggatcaggaacccaccagagcatgc

SEQ ID NO: 30739 - DNA, 25 bp, Homo sapiens
tgtgaccccaccagagccttgcatt

SEQ ID NO: 30740 - DNA, 25 bp, Homo sapiens
cagatggccacacccagatatcact

SEQ ID NO: 30741 - DNA, 25 bp, Homo sapiens
caggtctgtggacaaactgactcac

SEQ ID NO: 30742 - DNA, 25 bp, Homo sapiens
cttaatgacagagacctgtgggatc

SEQ ID NO: 30743 - DNA, 25 bp, Homo sapiens
gctaagacttaaccatacggaccga

SEQ ID NO: 30744 - DNA, 25 bp, Homo sapiens
cctgatctggtgttgaggttcattc

SEQ ID NO: 30745 - DNA, 25 bp, Homo sapiens
gggcctgagctgaagttaacgtctc

SEQ ID NO: 30746 - DNA, 25 bp, Homo sapiens
ctacgccctagtgaagacatttcct

SEQ ID NO: 30747 - DNA, 25 bp, Homo sapiens
cccgtgcatgtggtgttatttaatc

SEQ ID NO: 30748 - DNA, 25 bp, Homo sapiens
catacacatctactctaagatcaca

SEQ ID NO: 30749 - DNA, 25 bp, Homo sapiens
gagggcgttagtcttttccattatg

SEQ ID NO: 30750 - DNA, 25 bp, Homo sapiens
ttgacatgcaaaagagagagatttc

SEQ ID NO: 30751 - DNA, 25 bp, Homo sapiens
tggacttcagaggagtaagcatacc

SEQ ID NO: 30752 - DNA, 25 bp, Homo sapiens
ttaaccattctaaaagacttctctg

SEQ ID NO: 30753 - DNA, 25 bp, Homo sapiens
cctcactatgggcaggtggcatttt

SEQ ID NO: 30754 - DNA, 25 bp, Homo sapiens
gtggccactgctcccagagtgacta

SEQ ID NO: 30755 - DNA, 25 bp, Homo sapiens
cggccgtctaacaatgctttatttc

SEQ ID NO: 30756 - DNA, 25 bp, Homo sapiens
ttacattcttaataatgtctgttta

SEQ ID NO: 30757 - DNA, 25 bp, Homo sapiens
aagctcttgttctgtgcaaccgtga

SEQ ID NO: 30758 - DNA, 25 bp, Homo sapiens
gaggagccacaggctatgaagatat

SEQ ID NO: 30759 - DNA, 25 bp, Homo sapiens
tacttctgatgtccaggggcccacg

SEQ ID NO: 30760 - DNA, 25 bp, Homo sapiens
ggctggagcacttttcttcattttg

SEQ ID NO: 30761 - DNA, 25 bp, Homo sapiens
ttctccggtccagctcatgccaatg

SEQ ID NO: 30762 - DNA, 25 bp, Homo sapiens
gtgtgcacacacgtaaccctgatta

SEQ ID NO: 30763 - DNA, 25 bp, Homo sapiens
gccctgcagacagcgactgtaagta

SEQ ID NO: 30764 - DNA, 25 bp, Homo sapiens
gtacctttgatatgattttcctcca

SEQ ID NO: 30765 - DNA, 25 bp, Homo sapiens
gtgtgcttgtgaggtggagtggtcc

SEQ ID NO: 30766 - DNA, 25 bp, Homo sapiens
ccagaaagcatttgaggaagcacca

SEQ ID NO: 30767 - DNA, 25 bp, Homo sapiens
gaggctcctcaaagctactctcagc

SEQ ID NO: 30768 - DNA, 25 bp, Homo sapiens
ccgagtggccataatagggtcctga

SEQ ID NO: 30769 - DNA, 25 bp, Homo sapiens
gggtgcctctgggaaaaccttgtaa

SEQ ID NO: 30770 - DNA, 25 bp, Homo sapiens
ccctgttgttctttgagctgccttc

SEQ ID NO: 30771 - DNA, 25 bp, Homo sapiens
cttggagacctgactggatgggata

SEQ ID NO: 30772 - DNA, 25 bp, Homo sapiens
tgccaagcagatgcccgggagccaa

SEQ ID NO: 30773 - DNA, 25 bp, Homo sapiens
tgatttcctctcctccatttgctct

SEQ ID NO: 30774 - DNA, 25 bp, Homo sapiens
ggtgctcggggttcccatctgacat

SEQ ID NO: 30775 - DNA, 25 bp, Homo sapiens
gaagcgggctgagcaccttgaggaa

SEQ ID NO: 30776 - DNA, 25 bp, Homo sapiens
ctctgggtcctgattgtgtgaattc

SEQ ID NO: 30777 - DNA, 25 bp, Homo sapiens
cacttaggacaaagatgccggagca

SEQ ID NO: 30778 - DNA, 25 bp, Homo sapiens
gattgctgctacctgtgtcctgcta

SEQ ID NO: 30779 - DNA, 25 bp, Homo sapiens
tggaggagccaatcttaaacccttg

SEQ ID NO: 30780 - DNA, 25 bp, Homo sapiens
caggtgactgctaccggctcacatc

SEQ ID NO: 30781 - DNA, 25 bp, Homo sapiens
gtatcctcctgaccacagcagctgg

SEQ ID NO: 30782 - DNA, 25 bp, Homo sapiens
gggctcagctccacctccgataggt

SEQ ID NO: 30783 - DNA, 25 bp, Homo sapiens
gcctcgttaggacggagcctgaatc

SEQ ID NO: 30784 - DNA, 25 bp, Homo sapiens
gggccctctctcagtaggtcttaga

SEQ ID NO: 30785 - DNA, 25 bp, Homo sapiens
ggccacagaataagacccagctcta

SEQ ID NO: 30786 - DNA, 25 bp, Homo sapiens
aaactgggaccttctctgggctcta

SEQ ID NO: 30787 - DNA, 25 bp, Homo sapiens
tctacagggtcacttggttcatctc

SEQ ID NO: 30788 - DNA, 25 bp, Homo sapiens
aggatgggcctcagtctctaaggaa

SEQ ID NO: 30789 - DNA, 25 bp, Homo sapiens
ccaactctgggatgtgtgacttata

SEQ ID NO: 30790 - DNA, 25 bp, Homo sapiens
cctgcacctgtgaaggaggccattc

SEQ ID NO: 30791 - DNA, 25 bp, Homo sapiens
cagagtggccacctttgcagagacc

SEQ ID NO: 30792 - DNA, 25 bp, Homo sapiens
cccaggggatatcctcttgactaga

SEQ ID NO: 30793 - DNA, 25 bp, Homo sapiens
ccctgctgcccaaagtgactgaagt

SEQ ID NO: 30794 - DNA, 25 bp, Homo sapiens
cccagtaggtgcttcctgcccaaga

SEQ ID NO: 30795 - DNA, 25 bp, Homo sapiens
tgtaggctcacacacccatgtatgc

SEQ ID NO: 30796 - DNA, 25 bp, Homo sapiens
atgtctatttcctgcaccgcccttg

SEQ ID NO: 30797 - DNA, 25 bp, Homo sapiens
ccagagccttgcatggagaatcaca

SEQ ID NO: 30798 - DNA, 25 bp, Homo sapiens
gttgcctcaggttcagagatctgtg

SEQ ID NO: 30799 - DNA, 25 bp, Homo sapiens
cagggcctgttttctctaggagcaa

SEQ ID NO: 30800 - DNA, 25 bp, Homo sapiens
ggttttgtctttgccacccagagtg

SEQ ID NO: 30801 - DNA, 25 bp, Homo sapiens
tgctcaaacgcagctggggcaattg

SEQ ID NO: 30802 - DNA, 25 bp, Homo sapiens
gtgtcctactgggaaactaccttta

SEQ ID NO: 30803 - DNA, 25 bp, Homo sapiens
cgcacttagaatattcccaatggcc

SEQ ID NO: 30804 - DNA, 25 bp, Homo sapiens
tatataaccttcttcaaataaaatt

SEQ ID NO: 30805 - DNA, 25 bp, Homo sapiens
tgcattcccgtcgtcgtagccagag

SEQ ID NO: 30806 - DNA, 25 bp, Homo sapiens
acacgaatcccagtcaggctctttg

SEQ ID NO: 30807 - DNA, 25 bp, Homo sapiens
tttagtgaaaagagagcccagtccc

SEQ ID NO: 30808 - DNA, 25 bp, Homo sapiens
ctcctttgggacacaggggtctttc

SEQ ID NO: 30809 - DNA, 25 bp, Homo sapiens
ttgccacaagctcaggggatgctcc

SEQ ID NO: 30810 - DNA, 25 bp, Homo sapiens
ctgcaccgcacgctaaaggagattc

SEQ ID NO: 30811 - DNA, 25 bp, Homo sapiens
ctgctgcttctgaatgggccacctc

SEQ ID NO: 30812 - DNA, 25 bp, Homo sapiens
agtgctggtctctcctccaatggta

SEQ ID NO: 30813 - DNA, 25 bp, Homo sapiens
gggctgtgttgacttcctgataatc

SEQ ID NO: 30814 - DNA, 25 bp, Homo sapiens
tcgctggatccacacacactgcttg

SEQ ID NO: 30815 - DNA, 25 bp, Homo sapiens
tctacagggtcacttggttcatctc

SEQ ID NO: 30816 - DNA, 25 bp, Homo sapiens
aggatgggcctcagtctctaaggaa

SEQ ID NO: 30817 - DNA, 25 bp, Homo sapiens
gctcctgggcagaaacgactcactg

SEQ ID NO: 30818 - DNA, 25 bp, Homo sapiens
acttcccggaaacgcactgaggttg

SEQ ID NO: 30819 - DNA, 25 bp, Homo sapiens
gagtcctgcgtctttccttatagta

SEQ ID NO: 30820 - DNA, 25 bp, Homo sapiens
agctttccaggctcatcccaggtgg

SEQ ID NO: 30821 - DNA, 25 bp, Homo sapiens
tgacctaccttgttcctgggcacag

SEQ ID NO: 30822 - DNA, 25 bp, Homo sapiens
agagagcagcacactggaatggctg

SEQ ID NO: 30823 - DNA, 25 bp, Homo sapiens
gacccggcttcaccaggaccatgtt

SEQ ID NO: 30824 - DNA, 25 bp, Homo sapiens
ctgctattgggctttcctgctaatg

SEQ ID NO: 30825 - DNA, 25 bp, Homo sapiens
ctggtaggaacgcttgtcactgtta

SEQ ID NO: 30826 - DNA, 25 bp, Homo sapiens
cggaagctctgtaatgtgtgcacta

SEQ ID NO: 30827 - DNA, 25 bp, Homo sapiens
tttccaatgagttcagggtaggctg

SEQ ID NO: 30828 - DNA, 25 bp, Homo sapiens
aagccctcttaattcccagccgttg

SEQ ID NO: 30829 - DNA, 25 bp, Homo sapiens
ctgagacttccgctctgtgctgtta

SEQ ID NO: 30830 - DNA, 25 bp, Homo sapiens
tccagcattgggctagaggtttctg

SEQ ID NO: 30831 - DNA, 25 bp, Homo sapiens
atcatatactgatgattctatatat

SEQ ID NO: 30832 - DNA, 25 bp, Homo sapiens
ggcaagtggctcatgcctgcaatta

SEQ ID NO: 30833 - DNA, 25 bp, Homo sapiens
cctatctgccttcaggtggtagcca

SEQ ID NO: 30834 - DNA, 25 bp, Homo sapiens
agacacttgcttccaccgcttgatg

SEQ ID NO: 30835 - DNA, 25 bp, Homo sapiens
agctgggaactcgaggcacacctaa

SEQ ID NO: 30836 - DNA, 25 bp, Homo sapiens
agatcaggtacctctgcacgctttg

SEQ ID NO: 30837 - DNA, 25 bp, Homo sapiens
ctgcctgggaaggaagcaaaaattc

SEQ ID NO: 30838 - DNA, 25 bp, Homo sapiens
tgccagaattcacgcatgaggctct

SEQ ID NO: 30839 - DNA, 25 bp, Homo sapiens
ctgcaccgcacgctaaaggagattc

SEQ ID NO: 30840 - DNA, 25 bp, Homo sapiens
cactcagtgatcaaggtcccaattg

SEQ ID NO: 30841 - DNA, 25 bp, Homo sapiens
aggctctttgccctgctatgtggtc

SEQ ID NO: 30842 - DNA, 25 bp, Homo sapiens
gctcagaccctcacagcacttagga

SEQ ID NO: 30843 - DNA, 25 bp, Homo sapiens
ctgcctgggaaagcagcagacattc

SEQ ID NO: 30844 - DNA, 25 bp, Homo sapiens
ctgccctgattcctcgatgtcaagg

SEQ ID NO: 30845 - DNA, 25 bp, Homo sapiens
aagccctggggcctagtatgtaccc

SEQ ID NO: 30846 - DNA, 25 bp, Homo sapiens
gggcctcatggtctgtctcctctag

SEQ ID NO: 30847 - DNA, 25 bp, Homo sapiens
ctcaaccgaaatgggtatgaaagtt

SEQ ID NO: 30848 - DNA, 25 bp, Homo sapiens
gggccaggtgcccacatgaataatg

SEQ ID NO: 30849 - DNA, 25 bp, Homo sapiens
gtgcccacactagaggtctcattta

SEQ ID NO: 30850 - DNA, 25 bp, Homo sapiens
gggcaacatggcaacaagccacagt

SEQ ID NO: 30851 - DNA, 25 bp, Homo sapiens
tcaaccttcaactccacgggacaat

SEQ ID NO: 30852 - DNA, 25 bp, Homo sapiens
cctggtacacatcttggagcccttg

SEQ ID NO: 30853 - DNA, 25 bp, Homo sapiens
gccaagcgaatttgtgcccacacta

SEQ ID NO: 30854 - DNA, 25 bp, Homo sapiens
tgaaatccctcccagcagtgcagct

SEQ ID NO: 30855 - DNA, 25 bp, Homo sapiens
gcatcccttgtgtaatttgtaggtc

SEQ ID NO: 30856 - DNA, 25 bp, Homo sapiens
cctggtgctccagacaaagatctta

SEQ ID NO: 30857 - DNA, 25 bp, Homo sapiens
tttagtaagaagagagcccggtccc

SEQ ID NO: 30858 - DNA, 25 bp, Homo sapiens
cgcaaagatctttcgaggccaggta

SEQ ID NO: 30859 - DNA, 25 bp, Homo sapiens
gctagaattcacacacgaggccatg

SEQ ID NO: 30860 - DNA, 25 bp, Homo sapiens
tccgcgtgccaccatgaagatcatg

SEQ ID NO: 30861 - DNA, 25 bp, Homo sapiens
gcccggcagtcagaagctttgagca

SEQ ID NO: 30862 - DNA, 25 bp, Homo sapiens
cagatgttcctgtgtgcttcaccca

SEQ ID NO: 30863 - DNA, 25 bp, Homo sapiens
aggggctttctatgcaaccaggtga

SEQ ID NO: 30864 - DNA, 25 bp, Homo sapiens
ccctggctggagaggccaaattctg

SEQ ID NO: 30865 - DNA, 25 bp, Homo sapiens
cccttttggaagctggacctggacc

SEQ ID NO: 30866 - DNA, 25 bp, Homo sapiens
ccattctccaggtgagggcttcttc

SEQ ID NO: 30867 - DNA, 25 bp, Homo sapiens
agcagccagtctccctgttggaaag

SEQ ID NO: 30868 - DNA, 25 bp, Homo sapiens
cctgcacctgtgaaggaggccattc

SEQ ID NO: 30869 - DNA, 25 bp, Homo sapiens
cccgagctgttcctgggtaagacca

SEQ ID NO: 30870 - DNA, 25 bp, Homo sapiens
gtggcctctgtggtcaaagtctgaa

SEQ ID NO: 30871 - DNA, 25 bp, Homo sapiens
aggcacgcgtgcacatcatgtcttc

SEQ ID NO: 30872 - DNA, 25 bp, Homo sapiens
ccctggcagatctttcttggacaaa

SEQ ID NO: 30873 - DNA, 25 bp, Homo sapiens
gggactcccgcctgtaacgtcttca

SEQ ID NO: 30874 - DNA, 25 bp, Homo sapiens
gtcctcctggagataacacctaagc

SEQ ID NO: 30875 - DNA, 25 bp, Homo sapiens
catctctgacctgggaggcccttta

SEQ ID NO: 30876 - DNA, 25 bp, Homo sapiens
aggtgagccacctccatcagacttc

SEQ ID NO: 30877 - DNA, 25 bp, Homo sapiens
gggcagcctcacgtgagctcagatc

SEQ ID NO: 30878 - DNA, 25 bp, Homo sapiens
tcccttggtgacaacagcttttctg

SEQ ID NO: 30879 - DNA, 25 bp, Homo sapiens
gaaggccctcttgtgttaccagctg

SEQ ID NO: 30880 - DNA, 25 bp, Homo sapiens
cctgggagctggttgacttcatcaa

SEQ ID NO: 30881 - DNA, 25 bp, Homo sapiens
ttgtgttctcctctcgcaccagggg

SEQ ID NO: 30882 - DNA, 25 bp, Homo sapiens
tccgtgtttttctccaggccttctg

SEQ ID NO: 30883 - DNA, 25 bp, Homo sapiens
ctctgttgagtctagaatcgctgca

SEQ ID NO: 30884 - DNA, 25 bp, Homo sapiens
cccatgtaacaaaccattcgttgtc

SEQ ID NO: 30885 - DNA, 25 bp, Homo sapiens
gtttgtagtgtaatgcctaactttg

SEQ ID NO: 30886 - DNA, 25 bp, Homo sapiens
ctggcataggaatagacaggcaaat

SEQ ID NO: 30887 - DNA, 25 bp, Homo sapiens
accgaaggcttcttctcaaaggtta

SEQ ID NO: 30888 - DNA, 25 bp, Homo sapiens
tcttttttttttaatgggagaagga

SEQ ID NO: 30889 - DNA, 25 bp, Homo sapiens
tgctcatgcacaagtacctatgttc

SEQ ID NO: 30890 - DNA, 25 bp, Homo sapiens
cacggcctgacgatgaaaggtctcc

SEQ ID NO: 30891 - DNA, 25 bp, Homo sapiens
taggctcttcctctctggcaaagtg

SEQ ID NO: 30892 - DNA, 25 bp, Homo sapiens
cgcctgctttccttcgtgctgtatg

SEQ ID NO: 30893 - DNA, 25 bp, Homo sapiens
tatactgagcacgtgtaccagggca

SEQ ID NO: 30894 - DNA, 25 bp, Homo sapiens
ggtgtctgacccttgcataacaatg

SEQ ID NO: 30895 - DNA, 25 bp, Homo sapiens
ttgtgaactgcttgtgggaccactc

SEQ ID NO: 30896 - DNA, 25 bp, Homo sapiens
catgatgcactgaaatgcagacgtg

SEQ ID NO: 30897 - DNA, 25 bp, Homo sapiens
gtgcccacgggtctctacattcaaa

SEQ ID NO: 30898 - DNA, 25 bp, Homo sapiens
tggggaaagaatcaccctctccttg

SEQ ID NO: 30899 - DNA, 25 bp, Homo sapiens
tccctgggaaggatagaagcctctc

SEQ ID NO: 30900 - DNA, 25 bp, Homo sapiens
tgtcttcagtcagctcagggcctca

SEQ ID NO: 30901 - DNA, 25 bp, Homo sapiens
cgcgtcccagcgtttactcctttga

SEQ ID NO: 30902 - DNA, 25 bp, Homo sapiens
cagggtcttctacgtccttggcaac

SEQ ID NO: 30903 - DNA, 25 bp, Homo sapiens
atcctgcctggtgggtcttattaca

SEQ ID NO: 30904 - DNA, 25 bp, Homo sapiens
aggggtctgacattccaaggctgta

SEQ ID NO: 30905 - DNA, 25 bp, Homo sapiens
ccattgcctggctggggccataaca

SEQ ID NO: 30906 - DNA, 25 bp, Homo sapiens
tgacaatgccacgaagctacacatg

SEQ ID NO: 30907 - DNA, 25 bp, Homo sapiens
cctcctagcacacagggcatctttg

SEQ ID NO: 30908 - DNA, 25 bp, Homo sapiens
agtgtgccttcaccctgtcctggta

SEQ ID NO: 30909 - DNA, 25 bp, Homo sapiens
ccgggtaatgctacaggggatcttc

SEQ ID NO: 30910 - DNA, 25 bp, Homo sapiens
aaagcgatgccctatggtcctggcc

SEQ ID NO: 30911 - DNA, 25 bp, Homo sapiens
gggcggcaccagcatcttaattgtt

SEQ ID NO: 30912 - DNA, 25 bp, Homo sapiens
gcgtaaaagtctgcggctcctaact

SEQ ID NO: 30913 - DNA, 25 bp, Homo sapiens
gctggcacctgtacctgataatgtc

SEQ ID NO: 30914 - DNA, 25 bp, Homo sapiens
ggtggcctcagcatgttaagaaaca

SEQ ID NO: 30915 - DNA, 25 bp, Homo sapiens
gaggtctcagatacagctccctgcc

SEQ ID NO: 30916 - DNA, 25 bp, Homo sapiens
tgcacaggtgggaacgcttactttc

SEQ ID NO: 30917 - DNA, 25 bp, Homo sapiens
tgaccttcacccttggcccgagatg

SEQ ID NO: 30918 - DNA, 25 bp, Homo sapiens
tagcatcctggagcgacaacttttg

SEQ ID NO: 30919 - DNA, 25 bp, Homo sapiens
caaaaggcttcccaccgtgtccgga

SEQ ID NO: 30920 - DNA, 25 bp, Homo sapiens
cgtcttttctctggaccacagcaga

SEQ ID NO: 30921 - DNA, 25 bp, Homo sapiens
ctcttccgctgtcgccgtgggaatg

SEQ ID NO: 30922 - DNA, 25 bp, Homo sapiens
atgtggccctaccatgagcttgatg

SEQ ID NO: 30923 - DNA, 25 bp, Homo sapiens
tatatataaagtgaacagaaaagaa

SEQ ID NO: 30924 - DNA, 25 bp, Homo sapiens
taatgacgtgtgtatccatataata

SEQ ID NO: 30925 - DNA, 25 bp, Homo sapiens
ggtcaccaggtactgcgagttattc

SEQ ID NO: 30926 - DNA, 25 bp, Homo sapiens
aggattctctctgcccaccaggtgg

SEQ ID NO: 30927 - DNA, 25 bp, Homo sapiens
aggcatgtcttttccgggtcccacc

SEQ ID NO: 30928 - DNA, 25 bp, Homo sapiens
ggcgtcaccctaaattacccggctg

SEQ ID NO: 30929 - DNA, 25 bp, Homo sapiens
tgagctagctgcctccacggaattt

SEQ ID NO: 30930 - DNA, 25 bp, Homo sapiens
cggctgggatcctgtttacctgacc

SEQ ID NO: 30931 - DNA, 25 bp, Homo sapiens
agggccggactctgcatctctaaga

SEQ ID NO: 30932 - DNA, 25 bp, Homo sapiens
gcattgctgcccttgtcacgctcta

SEQ ID NO: 30933 - DNA, 25 bp, Homo sapiens
cttctgcctgcccttgagaggatta

SEQ ID NO: 30934 - DNA, 25 bp, Homo sapiens
cgctggttgcacgagctcagtttaa

SEQ ID NO: 30935 - DNA, 25 bp, Homo sapiens
tcccacagagccataggtgacagcc

SEQ ID NO: 30936 - DNA, 25 bp, Homo sapiens
agggttttctttttgcttcggttca

SEQ ID NO: 30937 - DNA, 25 bp, Homo sapiens
ctaaggcatttctgcagggacaaga

SEQ ID NO: 30938 - DNA, 25 bp, Homo sapiens
ggcggctcccaatcggtctagatct

SEQ ID NO: 30939 - DNA, 25 bp, Homo sapiens
tcagagctatttcctgccaccagta

SEQ ID NO: 30940 - DNA, 25 bp, Homo sapiens
tgtccagcccgactgtgtccagatc

SEQ ID NO: 30941 - DNA, 25 bp, Homo sapiens
cacacagtgacatgggtgcgtctca

SEQ ID NO: 30942 - DNA, 25 bp, Homo sapiens
ggtatttctttacagtcacgcaaca

SEQ ID NO: 30943 - DNA, 25 bp, Homo sapiens
tgggaagccatatgcacctccattg

SEQ ID NO: 30944 - DNA, 25 bp, Homo sapiens
ccagggccatctttgattatactgc

SEQ ID NO: 30945 - DNA, 25 bp, Homo sapiens
ggcccaggaatgaaaaagagatttt

SEQ ID NO: 30946 - DNA, 25 bp, Homo sapiens
agtttctcgatgacaagatctgata

SEQ ID NO: 30947 - DNA, 25 bp, Homo sapiens
tgcccagcttccacagaccgagttg

SEQ ID NO: 30948 - DNA, 25 bp, Homo sapiens
ccctgcgtctgggaaatgctttgtc

SEQ ID NO: 30949 - DNA, 25 bp, Homo sapiens
tggttgcacacagagggtcctatta

SEQ ID NO: 30950 - DNA, 25 bp, Homo sapiens
ctgcctgtgccagcccggaaaacaa

SEQ ID NO: 30951 - DNA, 25 bp, Homo sapiens
accgctgattttggtggtcatgtta

SEQ ID NO: 30952 - DNA, 25 bp, Homo sapiens
tgcttcccaggccatagacaggtgg

SEQ ID NO: 30953 - DNA, 25 bp, Homo sapiens
cacttgtggacttggaaacttcttc

SEQ ID NO: 30954 - DNA, 25 bp, Homo sapiens
tggcatgggaacatagaaactagtt

SEQ ID NO: 30955 - DNA, 25 bp, Homo sapiens
ctatgaagctgtgatgttcgagaca

SEQ ID NO: 30956 - DNA, 25 bp, Homo sapiens
cccagtgatctgtgtgagtaaacta

SEQ ID NO: 30957 - DNA, 25 bp, Homo sapiens
ctggctttccctgcagctaaacata

SEQ ID NO: 30958 - DNA, 25 bp, Homo sapiens
gtacacactggcaatttcgagaaag

SEQ ID NO: 30959 - DNA, 25 bp, Homo sapiens
atgccggtggaaaaagcctgtcttt

SEQ ID NO: 30960 - DNA, 25 bp, Homo sapiens
tgggttctgagccacatcctggaaa

SEQ ID NO: 30961 - DNA, 25 bp, Homo sapiens
tcagactttgctacctcctggatta

SEQ ID NO: 30962 - DNA, 25 bp, Homo sapiens
ggtcactgtaagtaaagccgtttta

SEQ ID NO: 30963 - DNA, 25 bp, Homo sapiens
cgtctggcttcttcctcctttgata

SEQ ID NO: 30964 - DNA, 25 bp, Homo sapiens
tctggcgaagcatcctcaaaagatc

SEQ ID NO: 30965 - DNA, 25 bp, Homo sapiens
cacagtgtttaggtttcagacggac

SEQ ID NO: 30966 - DNA, 25 bp, Homo sapiens
ccactgcaggcttccaaacaaagta

SEQ ID NO: 30967 - DNA, 25 bp, Homo sapiens
tttcaactcgcccaaaccaggacta

SEQ ID NO: 30968 - DNA, 25 bp, Homo sapiens
tgtgtattgcattaacaacataagc

SEQ ID NO: 30969 - DNA, 25 bp, Homo sapiens
cttttaccttttaagcagctgtcta

SEQ ID NO: 30970 - DNA, 25 bp, Homo sapiens
ccatgttaacttcacagggctgatt

SEQ ID NO: 30971 - DNA, 25 bp, Homo sapiens
tgaattcccatttcctagcccattt

SEQ ID NO: 30972 - DNA, 25 bp, Homo sapiens
acaggatcttagtctggcaggtcta

SEQ ID NO: 30973 - DNA, 25 bp, Homo sapiens
gctctgactaggacgaagattggta

SEQ ID NO: 30974 - DNA, 25 bp, Homo sapiens
ctgcccgagacataacctttgctta

SEQ ID NO: 30975 - DNA, 25 bp, Homo sapiens
gtatgtggtctaaccagacaccttc

SEQ ID NO: 30976 - DNA, 25 bp, Homo sapiens
cacaagacttatggggaacacgtta

SEQ ID NO: 30977 - DNA, 25 bp, Homo sapiens
tgcgttacagtgcaagcagtcacac

SEQ ID NO: 30978 - DNA, 25 bp, Homo sapiens
cttgacgcatgactgacaaactata

SEQ ID NO: 30979 - DNA, 25 bp, Homo sapiens
atttaagtcactttaataaaaatca

SEQ ID NO: 30980 - DNA, 25 bp, Homo sapiens
ggttgcttccctgttacttaaaaaa

SEQ ID NO: 30981 - DNA, 25 bp, Homo sapiens
tgtctctcaacttcagctactggta

SEQ ID NO: 30982 - DNA, 25 bp, Homo sapiens
tcccagaggaaaagaggcagatatg

SEQ ID NO: 30983 - DNA, 25 bp, Homo sapiens
cagagcttgagcacagcaggacacc

SEQ ID NO: 30984 - DNA, 25 bp, Homo sapiens
ggcttaagtctctccctctttgtga

SEQ ID NO: 30985 - DNA, 25 bp, Homo sapiens
tgcacggcacccatccagctatcgt

SEQ ID NO: 30986 - DNA, 25 bp, Homo sapiens
ggcctgcaggggacacattactggc

SEQ ID NO: 30987 - DNA, 25 bp, Homo sapiens
cccaagcctatttccgaggtgaata

SEQ ID NO: 30988 - DNA, 25 bp, Homo sapiens
ggtccagggtcgctccataaaaatg

SEQ ID NO: 30989 - DNA, 25 bp, Homo sapiens
tcagtctctggaacgctatgtaagc

SEQ ID NO: 30990 - DNA, 25 bp, Homo sapiens
ttgactgtctctctagctgtgcgtg

SEQ ID NO: 30991 - DNA, 25 bp, Homo sapiens
cacctgtggtggtctacactgccta

SEQ ID NO: 30992 - DNA, 25 bp, Homo sapiens
gcgcaagtctacacggtctcacctg

SEQ ID NO: 30993 - DNA, 25 bp, Homo sapiens
tgcttacattactggatctcggatc

SEQ ID NO: 30994 - DNA, 25 bp, Homo sapiens
ttcctggtaacctgctgggctcttt

SEQ ID NO: 30995 - DNA, 25 bp, Homo sapiens
gcttaggtctccctgacaaggcaga

SEQ ID NO: 30996 - DNA, 25 bp, Homo sapiens
ttgaatcccgttggcctacccagta

SEQ ID NO: 30997 - DNA, 25 bp, Homo sapiens
gcaagctccagggtcagaggtcata

SEQ ID NO: 30998 - DNA, 25 bp, Homo sapiens
ccatctgacaggtagagggagtttc

SEQ ID NO: 30999 - DNA, 25 bp, Homo sapiens
gtgggtcctacccttatccctggga

SEQ ID NO: 31000 - DNA, 25 bp, Homo sapiens
tcacaagggcttctgggatcaatta

SEQ ID NO: 31001 - DNA, 25 bp, Homo sapiens
tttgggccagtaggagccaatcaga

SEQ ID NO: 31002 - DNA, 25 bp, Homo sapiens
cccgatcctatggacagtggaaacc

SEQ ID NO: 31003 - DNA, 25 bp, Homo sapiens
acctgttcttctgtgggcttcccta

SEQ ID NO: 31004 - DNA, 25 bp, Homo sapiens
ggctgaggccatcattctgaccaca

SEQ ID NO: 31005 - DNA, 25 bp, Homo sapiens
tcacatccgtccgtcctggaaggtc

SEQ ID NO: 31006 - DNA, 25 bp, Homo sapiens
cctgggtgggtctcaaaagcaattt

SEQ ID NO: 31007 - DNA, 25 bp, Homo sapiens
gctaaagccctccttgccatgtgtg

SEQ ID NO: 31008 - DNA, 25 bp, Homo sapiens
agagggagcttcaggccattcattc

SEQ ID NO: 31009 - DNA, 25 bp, Homo sapiens
tagccagagggcaacagatcacttc

SEQ ID NO: 31010 - DNA, 25 bp, Homo sapiens
gcctgaggccctatcatgacaatca

SEQ ID NO: 31011 - DNA, 25 bp, Homo sapiens
ccctgcatgatacctgtggccactg

SEQ ID NO: 31012 - DNA, 25 bp, Homo sapiens
agcctttccttcctgagtgtacgtg

SEQ ID NO: 31013 - DNA, 25 bp, Homo sapiens
agccttggcaacaggacaccctttg

SEQ ID NO: 31014 - DNA, 25 bp, Homo sapiens
gccaggaggctctagattgacaata

SEQ ID NO: 31015 - DNA, 25 bp, Homo sapiens
tgacccttggtgagaggggaacctc

SEQ ID NO: 31016 - DNA, 25 bp, Homo sapiens
tttttttaaaacaaattgaagtagt

SEQ ID NO: 31017 - DNA, 25 bp, Homo sapiens
tgagagtactcattcaacagttttg

SEQ ID NO: 31018 - DNA, 25 bp, Homo sapiens
tccatgtccttattgatccttatta

SEQ ID NO: 31019 - DNA, 25 bp, Homo sapiens
taccatcatcgttgtgactgtcact

SEQ ID NO: 31020 - DNA, 25 bp, Homo sapiens
ctggcactgggtggcatttcttctt

SEQ ID NO: 31021 - DNA, 25 bp, Homo sapiens
cccgcatccgcttctgtagggagaa

SEQ ID NO: 31022 - DNA, 25 bp, Homo sapiens
aaccctcttttgtgagactgatgca

SEQ ID NO: 31023 - DNA, 25 bp, Homo sapiens
ctcatctcagggcagaagctaatta

SEQ ID NO: 31024 - DNA, 25 bp, Homo sapiens
tcttgtcaaggcagctggggaccta

SEQ ID NO: 31025 - DNA, 25 bp, Homo sapiens
tccaggtcctcgcatgcatttatcc

SEQ ID NO: 31026 - DNA, 25 bp, Homo sapiens
gcctgctctgggaacaccactttga

SEQ ID NO: 31027 - DNA, 25 bp, Homo sapiens
gggatcccaggtgccgaaatacaga

SEQ ID NO: 31028 - DNA, 25 bp, Homo sapiens
gtgatggcacacacgagacactttg

SEQ ID NO: 31029 - DNA, 25 bp, Homo sapiens
cccagacgttggctcacagaaggca

SEQ ID NO: 31030 - DNA, 25 bp, Homo sapiens
cacataaattcccgtggaagagagc

SEQ ID NO: 31031 - DNA, 25 bp, Homo sapiens
agagccctggtttcttgcaacaaga

SEQ ID NO: 31032 - DNA, 25 bp, Homo sapiens
ggggcctcttcttttccctgtgtga

SEQ ID NO: 31033 - DNA, 25 bp, Homo sapiens
gcccaggctttggtttctcctcaga

SEQ ID NO: 31034 - DNA, 25 bp, Homo sapiens
gcaggctgctcacgtcatctcatta

SEQ ID NO: 31035 - DNA, 25 bp, Homo sapiens
ctcacagctcagtacggtcggaatt

SEQ ID NO: 31036 - DNA, 25 bp, Homo sapiens
aggctgggcctctttccacagagtc

SEQ ID NO: 31037 - DNA, 25 bp, Homo sapiens
cctgccaggcaaattgggacctttt

SEQ ID NO: 31038 - DNA, 25 bp, Homo sapiens
agaatcgcaggctttgtcacccaga

SEQ ID NO: 31039 - DNA, 25 bp, Homo sapiens
ggggacattcttgctgttattctga

SEQ ID NO: 31040 - DNA, 25 bp, Homo sapiens
gctcccattagctgtgtccgtctca

SEQ ID NO: 31041 - DNA, 25 bp, Homo sapiens
cagaaagagctttaggtcggcacca

SEQ ID NO: 31042 - DNA, 25 bp, Homo sapiens
ccggccagtcacgagtgcgaactca

SEQ ID NO: 31043 - DNA, 25 bp, Homo sapiens
cgaacctctgctctctggaatccta

SEQ ID NO: 31044 - DNA, 25 bp, Homo sapiens
tccagacgttccctgccctaggtga

SEQ ID NO: 31045 - DNA, 25 bp, Homo sapiens
ttgccctgccctgtctaagagagtc

SEQ ID NO: 31046 - DNA, 25 bp, Homo sapiens
gccacgcaggggtaacccttttaca

SEQ ID NO: 31047 - DNA, 25 bp, Homo sapiens
cgcacacaggtaaggtcagctctca

SEQ ID NO: 31048 - DNA, 25 bp, Homo sapiens
ggcgtggcagcttcacctcttactg

SEQ ID NO: 31049 - DNA, 25 bp, Homo sapiens
ccaggccatctgctgagggtgatta

SEQ ID NO: 31050 - DNA, 25 bp, Homo sapiens
gtgggcccacaaaaacgtcttaatt

SEQ ID NO: 31051 - DNA, 25 bp, Homo sapiens
ctgcaggaagtccgtgcaggagtct

SEQ ID NO: 31052 - DNA, 25 bp, Homo sapiens
cctgccgttccctaggcctcctccc

SEQ ID NO: 31053 - DNA, 25 bp, Homo sapiens
acccacgtcttggaagggcttccta

SEQ ID NO: 31054 - DNA, 25 bp, Homo sapiens
gggacccgctcacaaaacacagttg

SEQ ID NO: 31055 - DNA, 25 bp, Homo sapiens
tcacaccggggtctatgagctaacc

SEQ ID NO: 31056 - DNA, 25 bp, Homo sapiens
atctttgggtagacacgtgcagcta

SEQ ID NO: 31057 - DNA, 25 bp, Homo sapiens
ccaccaccacccacaacaaaaaaca

SEQ ID NO: 31058 - DNA, 25 bp, Homo sapiens
atctttgggtagacacgtgcagcta

SEQ ID NO: 31059 - DNA, 25 bp, Homo sapiens
ctggccactggggatgatagaattt

SEQ ID NO: 31060 - DNA, 25 bp, Homo sapiens
gacaactgctatttttatacttaaa

SEQ ID NO: 31061 - DNA, 25 bp, Homo sapiens
gttctaagaaatacaggggggaaac

SEQ ID NO: 31062 - DNA, 25 bp, Homo sapiens
tcttaaagcaggtggtgaaaatagg

SEQ ID NO: 31063 - DNA, 25 bp, Homo sapiens
gttttagataaatacatgactggga

SEQ ID NO: 31064 - DNA, 25 bp, Homo sapiens
taacactctcattaatgactgtaca

SEQ ID NO: 31065 - DNA, 25 bp, Homo sapiens
ttcaccgacgtagcttaggggcctt

SEQ ID NO: 31066 - DNA, 25 bp, Homo sapiens
ctggcgcccaggcataaatttggtg

SEQ ID NO: 31067 - DNA, 25 bp, Homo sapiens
ctgtactgtagctcgccactcatga

SEQ ID NO: 31068 - DNA, 25 bp, Homo sapiens
agtggttgtggtagtgggggtgggt

SEQ ID NO: 31069 - DNA, 25 bp, Homo sapiens
gctcaccccaaacatcctcttcata

SEQ ID NO: 31070 - DNA, 25 bp, Homo sapiens
gcccacccacctggttgggacagta

SEQ ID NO: 31071 - DNA, 25 bp, Homo sapiens
acccggctgtgtctttcaggtctga

SEQ ID NO: 31072 - DNA, 25 bp, Homo sapiens
gggaatgtcacccacagctcttttg

SEQ ID NO: 31073 - DNA, 25 bp, Homo sapiens
cgaatgcctttgcactgtgtccaca

SEQ ID NO: 31074 - DNA, 25 bp, Homo sapiens
gccagtccctttctgccactgagaa

SEQ ID NO: 31075 - DNA, 25 bp, Homo sapiens
cctgccgctgtaaacatgcaatcga

SEQ ID NO: 31076 - DNA, 25 bp, Homo sapiens
cccaggttactgaagagcaatagcc

SEQ ID NO: 31077 - DNA, 25 bp, Homo sapiens
cagctcagtgatcttgggacagtcc

SEQ ID NO: 31078 - DNA, 25 bp, Homo sapiens
atgtaggttcctcccaaatgcttcc

SEQ ID NO: 31079 - DNA, 25 bp, Homo sapiens
ggggaggctcaaatctttctcataa

SEQ ID NO: 31080 - DNA, 25 bp, Homo sapiens
gattttcgcatctgacgggaccgtc

SEQ ID NO: 31081 - DNA, 25 bp, Homo sapiens
tgacctcctgctattcttacctgtg

SEQ ID NO: 31082 - DNA, 25 bp, Homo sapiens
ggcctgtgtcactggagcacttgta

SEQ ID NO: 31083 - DNA, 25 bp, Homo sapiens
ttgtgttttaaaagttcgatttttc

SEQ ID NO: 31084 - DNA, 25 bp, Homo sapiens
gggtggtcctccctacccactaagg

SEQ ID NO: 31085 - DNA, 25 bp, Homo sapiens
gaacacgcaggccttgggaacagta

SEQ ID NO: 31086 - DNA, 25 bp, Homo sapiens
ctgcactgtggtcccagcaagtttc

SEQ ID NO: 31087 - DNA, 25 bp, Homo sapiens
gggcatgcccaggtaaggctccata

SEQ ID NO: 31088 - DNA, 25 bp, Homo sapiens
aggagtccctgtcgttcatgataga

SEQ ID NO: 31089 - DNA, 25 bp, Homo sapiens
cacgggtacctcttctgatacaatc

SEQ ID NO: 31090 - DNA, 25 bp, Homo sapiens
ctgttggacgcgatggccttcaacc

SEQ ID NO: 31091 - DNA, 25 bp, Homo sapiens
aggctgggcctctttccacagagtc

SEQ ID NO: 31092 - DNA, 25 bp, Homo sapiens
tacaagttcaaccagggccaactac

SEQ ID NO: 31093 - DNA, 25 bp, Homo sapiens
gggtggtttctctccaggatctaca

SEQ ID NO: 31094 - DNA, 25 bp, Homo sapiens
ctgggacctgcacaccatgagtctc

SEQ ID NO: 31095 - DNA, 25 bp, Homo sapiens
tcggtcatcaacagaaaggtccttc

SEQ ID NO: 31096 - DNA, 25 bp, Homo sapiens
ggatctcctacacctgggcactgga

SEQ ID NO: 31097 - DNA, 25 bp, Homo sapiens
ctgggctaccagaagtccacttgga

SEQ ID NO: 31098 - DNA, 25 bp, Homo sapiens
tagcagcccatcgaacgctctgttc

SEQ ID NO: 31099 - DNA, 25 bp, Homo sapiens
gggagaaatctgtaaattcacttcc

SEQ ID NO: 31100 - DNA, 25 bp, Homo sapiens
ggggaccagttcagccaagttgaaa

SEQ ID NO: 31101 - DNA, 25 bp, Homo sapiens
cccgtctccttgaatggcacagtct

SEQ ID NO: 31102 - DNA, 25 bp, Homo sapiens
tgattgtgaaagcagccgagccagc

SEQ ID NO: 31103 - DNA, 25 bp, Homo sapiens
ctggaatcctgagccaacctggaca

SEQ ID NO: 31104 - DNA, 25 bp, Homo sapiens
agcacagccacacccacagccctgg

SEQ ID NO: 31105 - DNA, 25 bp, Homo sapiens
agttccctgatggagcacttgagtg

SEQ ID NO: 31106 - DNA, 25 bp, Homo sapiens
ggcagtcctcagtcaacaccaaatg

SEQ ID NO: 31107 - DNA, 25 bp, Homo sapiens
gcaccgggtacctctgtcagaaaga

SEQ ID NO: 31108 - DNA, 25 bp, Homo sapiens
tgtggagctcgagttcccttggact

SEQ ID NO: 31109 - DNA, 25 bp, Homo sapiens
gacccgtgatcacctcgctagtgta

SEQ ID NO: 31110 - DNA, 25 bp, Homo sapiens
tctgtgtgcacagtcatactgattc

SEQ ID NO: 31111 - DNA, 25 bp, Homo sapiens
tctgtgtgcacagtcatactgactc

SEQ ID NO: 31112 - DNA, 25 bp, Homo sapiens
cgctcagtcattatattcacaggac

SEQ ID NO: 31113 - DNA, 25 bp, Homo sapiens
ccaggcagtgtgaagagcagtcatc

SEQ ID NO: 31114 - DNA, 25 bp, Homo sapiens
ggctcacctggccagcaccaatttg

SEQ ID NO: 31115 - DNA, 25 bp, Homo sapiens
tcccagcgtttagcaaagaggcctc

SEQ ID NO: 31116 - DNA, 25 bp, Homo sapiens
ggacctgtggtcctctcactgagaa

SEQ ID NO: 31117 - DNA, 25 bp, Homo sapiens
gctgctccctgactgtggccatgat

SEQ ID NO: 31118 - DNA, 25 bp, Homo sapiens
tgccgtgtgcacgatcccaatgtca

SEQ ID NO: 31119 - DNA, 25 bp, Homo sapiens
tggctggtcatccttggcaaacttc

SEQ ID NO: 31120 - DNA, 25 bp, Homo sapiens
gaccaggggatattcgctcaccaga

SEQ ID NO: 31121 - DNA, 25 bp, Homo sapiens
ctgtgtctaccatgagagtgtgttc

SEQ ID NO: 31122 - DNA, 25 bp, Homo sapiens
tggggatgctcctaaatgaacctgc

SEQ ID NO: 31123 - DNA, 25 bp, Homo sapiens
ctgagtgtcaatatgccctgtcttc

SEQ ID NO: 31124 - DNA, 25 bp, Homo sapiens
gactctctctctggaagccttcagg

SEQ ID NO: 31125 - DNA, 25 bp, Homo sapiens
tctgcagttttctctggaggcctca

SEQ ID NO: 31126 - DNA, 25 bp, Homo sapiens
ggctggcagcttgttccttctattt

SEQ ID NO: 31127 - DNA, 25 bp, Homo sapiens
gtggacttaaaacaacggggctttc

SEQ ID NO: 31128 - DNA, 25 bp, Homo sapiens
tcagcgttcacaggaggcttcccta

SEQ ID NO: 31129 - DNA, 25 bp, Homo sapiens
cctctcaacagcttggcgggaagta

SEQ ID NO: 31130 - DNA, 25 bp, Homo sapiens
cagaatcgagctagcttccaccaaa

SEQ ID NO: 31131 - DNA, 25 bp, Homo sapiens
ctagtagttctttcagccatgtcaa

SEQ ID NO: 31132 - DNA, 25 bp, Homo sapiens
agccaggtctcagctcctcttgtga

SEQ ID NO: 31133 - DNA, 25 bp, Homo sapiens
ggacttgccctgtcgaaattaaaag

SEQ ID NO: 31134 - DNA, 25 bp, Homo sapiens
accagctccagtgctttatcagata

SEQ ID NO: 31135 - DNA, 25 bp, Homo sapiens
agcctggctggattacgttctattc

SEQ ID NO: 31136 - DNA, 25 bp, Homo sapiens
tacccacggagctgcactaatttgc

SEQ ID NO: 31137 - DNA, 25 bp, Homo sapiens
gcccatgacggcaggattcaggtta

SEQ ID NO: 31138 - DNA, 25 bp, Homo sapiens
cttggctgttggcacttgactgaca

SEQ ID NO: 31139 - DNA, 25 bp, Homo sapiens
cgcgacggggtctgaaaacctattc

SEQ ID NO: 31140 - DNA, 25 bp, Homo sapiens
ggctgagctgtttccttctgatgta

SEQ ID NO: 31141 - DNA, 25 bp, Homo sapiens
agcaggcgttattagatcccacaga

SEQ ID NO: 31142 - DNA, 25 bp, Homo sapiens
gcttgtgacaaagtcataaactgta

SEQ ID NO: 31143 - DNA, 25 bp, Homo sapiens
gggcatcgctcttgagtcttaccta

SEQ ID NO: 31144 - DNA, 25 bp, Homo sapiens
gccgcctaggcattgggtatctcta

SEQ ID NO: 31145 - DNA, 25 bp, Homo sapiens
gccgattctcacagctcactgctta

SEQ ID NO: 31146 - DNA, 25 bp, Homo sapiens
tatgcccaggcttcccagaaagtcg

SEQ ID NO: 31147 - DNA, 25 bp, Homo sapiens
aggtgtccctggctattctgcatcc

SEQ ID NO: 31148 - DNA, 25 bp, Homo sapiens
cggaggctccatgttcacttgcaaa

SEQ ID NO: 31149 - DNA, 25 bp, Homo sapiens
gcctcagctctggtgactgtccttc

SEQ ID NO: 31150 - DNA, 25 bp, Homo sapiens
tacatccaaatgacacaggttagag

SEQ ID NO: 31151 - DNA, 25 bp, Homo sapiens
ctcaagagattaaaagaaaagacat

SEQ ID NO: 31152 - DNA, 25 bp, Homo sapiens
tccctgtctgggaaggtcaccagta

SEQ ID NO: 31153 - DNA, 25 bp, Homo sapiens
gatgagccgttctccacgtctgtga

SEQ ID NO: 31154 - DNA, 25 bp, Homo sapiens
tttctgagtcaggagaggcctttcc

SEQ ID NO: 31155 - DNA, 25 bp, Homo sapiens
tgggtcatcccaacaacactgtgtc

SEQ ID NO: 31156 - DNA, 25 bp, Homo sapiens
acctatgtgcttttcgattgcgacc

SEQ ID NO: 31157 - DNA, 25 bp, Homo sapiens
atgcagtgacctcgcgtttatatcc

SEQ ID NO: 31158 - DNA, 25 bp, Homo sapiens
tgagcaccagctatgtccagaatgt

SEQ ID NO: 31159 - DNA, 25 bp, Homo sapiens
ccggaccttcttctcgtgcgtacaa

SEQ ID NO: 31160 - DNA, 25 bp, Homo sapiens
tctgctgaatcggtcctccctatgc

SEQ ID NO: 31161 - DNA, 25 bp, Homo sapiens
tagtcaccacagaggcaggatcttc

SEQ ID NO: 31162 - DNA, 25 bp, Homo sapiens
ctagctcagtgtttctggaccatta

SEQ ID NO: 31163 - DNA, 25 bp, Homo sapiens
ctgcaagattcccatagccagtttg

SEQ ID NO: 31164 - DNA, 25 bp, Homo sapiens
acacactgtttgaaggtcatcctga

SEQ ID NO: 31165 - DNA, 25 bp, Homo sapiens
tgagctctgcttgctctagcttaga

SEQ ID NO: 31166 - DNA, 25 bp, Homo sapiens
atgccggctattcctgtgattacta

SEQ ID NO: 31167 - DNA, 25 bp, Homo sapiens
ctctgttcccagaaaggggtctctg

SEQ ID NO: 31168 - DNA, 25 bp, Homo sapiens
atgtggttcctaataagcgagagta

SEQ ID NO: 31169 - DNA, 25 bp, Homo sapiens
gcagtctggagccattatcttcaca

SEQ ID NO: 31170 - DNA, 25 bp, Homo sapiens
gccaacggctgttatccttagtata

SEQ ID NO: 31171 - DNA, 25 bp, Homo sapiens
aatgcctgaaacactcttggtcctc

SEQ ID NO: 31172 - DNA, 25 bp, Homo sapiens
tagacccttgtggtaggattccttc

SEQ ID NO: 31173 - DNA, 25 bp, Homo sapiens
tggcagccataagcaccctgatttg

SEQ ID NO: 31174 - DNA, 25 bp, Homo sapiens
caggccagtgacttcagctatgata

SEQ ID NO: 31175 - DNA, 25 bp, Homo sapiens
cacttacctgcggatctctggtgca

SEQ ID NO: 31176 - DNA, 25 bp, Homo sapiens
aactcttgtggcaggatttcctcta

SEQ ID NO: 31177 - DNA, 25 bp, Homo sapiens
ctgtcaaggccatggagaatcaatc

SEQ ID NO: 31178 - DNA, 25 bp, Homo sapiens
gatggcctgtgtgaatcttccctca

SEQ ID NO: 31179 - DNA, 25 bp, Homo sapiens
agagcctcctgtcttggtccctaag

SEQ ID NO: 31180 - DNA, 25 bp, Homo sapiens
caaatcctccattcggtggtggtga

SEQ ID NO: 31181 - DNA, 25 bp, Homo sapiens
tggctggaatccctcaaacatgctg

SEQ ID NO: 31182 - DNA, 25 bp, Homo sapiens
tggaatctggtgaaggcaaccactc

SEQ ID NO: 31183 - DNA, 25 bp, Homo sapiens
gctagcctcctgcagaagtctttca

SEQ ID NO: 31184 - DNA, 25 bp, Homo sapiens
ctcgccactggtaaggttctccttt

SEQ ID NO: 31185 - DNA, 25 bp, Homo sapiens
tggcatgtttccagctaacttcagc

SEQ ID NO: 31186 - DNA, 25 bp, Homo sapiens
ctatcacataggagagctggacata

SEQ ID NO: 31187 - DNA, 25 bp, Homo sapiens
ggggcagtcatctgtcctgtctatg

SEQ ID NO: 31188 - DNA, 25 bp, Homo sapiens
ggtaagccctcaagatgtcctcaga

SEQ ID NO: 31189 - DNA, 25 bp, Homo sapiens
gcgcgaatcctcctcggggaaaata

SEQ ID NO: 31190 - DNA, 25 bp, Homo sapiens
tcatggtgcagatggaagctctctc

SEQ ID NO: 31191 - DNA, 25 bp, Homo sapiens
caaatttgtttctctaacagacgtt

SEQ ID NO: 31192 - DNA, 25 bp, Homo sapiens
ccacactggagggtagccaactttg

SEQ ID NO: 31193 - DNA, 25 bp, Homo sapiens
ctgctgaaacatggagtctctattg

SEQ ID NO: 31194 - DNA, 25 bp, Homo sapiens
gcccagcttaagtcatttggtatga

SEQ ID NO: 31195 - DNA, 25 bp, Homo sapiens
ccctgcgctcggtagacacgtttaa

SEQ ID NO: 31196 - DNA, 25 bp, Homo sapiens
ccctgtgaaatttgaaggccacttc

SEQ ID NO: 31197 - DNA, 25 bp, Homo sapiens
ctggagacttctgagcaacctgcta

SEQ ID NO: 31198 - DNA, 25 bp, Homo sapiens
aggccagcttaaacccagatcagta

SEQ ID NO: 31199 - DNA, 25 bp, Homo sapiens
ttctccttgacccagcaggtgcatg

SEQ ID NO: 31200 - DNA, 25 bp, Homo sapiens
gcctggcctttcctgctatgtcatg

SEQ ID NO: 31201 - DNA, 25 bp, Homo sapiens
gggttctcccaaagcctgccttcta

SEQ ID NO: 31202 - DNA, 25 bp, Homo sapiens
ggtctgcccagctccatgtgttatg

SEQ ID NO: 31203 - DNA, 25 bp, Homo sapiens
tcctgggtggttaacaaaatgccta

SEQ ID NO: 31204 - DNA, 25 bp, Homo sapiens
cctgacgttacctggcatagcaatc

SEQ ID NO: 31205 - DNA, 25 bp, Homo sapiens
cctgagatctgaatgctggtttcta

SEQ ID NO: 31206 - DNA, 25 bp, Homo sapiens
tggcccggccgactttaagcaattg

SEQ ID NO: 31207 - DNA, 25 bp, Homo sapiens
tgagagcctcggcacaggtcaaatg

SEQ ID NO: 31208 - DNA, 25 bp, Homo sapiens
gggctccatgttctcgtctttattg

SEQ ID NO: 31209 - DNA, 25 bp, Homo sapiens
gtgtactataaaattaacctttatt

SEQ ID NO: 31210 - DNA, 25 bp, Homo sapiens
acccgtcatgagcacaagttacctg

SEQ ID NO: 31211 - DNA, 25 bp, Homo sapiens
tttcaaagagataagaaagagaaat

SEQ ID NO: 31212 - DNA, 25 bp, Homo sapiens
ctggcccggggaacaggctaaatac

SEQ ID NO: 31213 - DNA, 25 bp, Homo sapiens
aggggaatgctggtcccgacttcta

SEQ ID NO: 31214 - DNA, 25 bp, Homo sapiens
ccagagccacgacagatcagagttc

SEQ ID NO: 31215 - DNA, 25 bp, Homo sapiens
gagatccaatgctttgatagctaag

SEQ ID NO: 31216 - DNA, 25 bp, Homo sapiens
gaggcatcccattccagtacacttg

SEQ ID NO: 31217 - DNA, 25 bp, Homo sapiens
ctcatgtgtcaaggaatagggccca

SEQ ID NO: 31218 - DNA, 25 bp, Homo sapiens
gactgagtccgagggtgacttccca

SEQ ID NO: 31219 - DNA, 25 bp, Homo sapiens
agcaggacacgggtacatcagattc

SEQ ID NO: 31220 - DNA, 25 bp, Homo sapiens
agagcgtccctgagtcctagtttaa

SEQ ID NO: 31221 - DNA, 25 bp, Homo sapiens
gccacctgggagctaggcagaatct

SEQ ID NO: 31222 - DNA, 25 bp, Homo sapiens
gaccctgggttatcgctcctcttta

SEQ ID NO: 31223 - DNA, 25 bp, Homo sapiens
agtgagcctctctccctgtcaggga

SEQ ID NO: 31224 - DNA, 25 bp, Homo sapiens
cggacccgttatcgcagcacatagc

SEQ ID NO: 31225 - DNA, 25 bp, Homo sapiens
ggccgtcacaacacttcacaagaga

SEQ ID NO: 31226 - DNA, 25 bp, Homo sapiens
ggtcggttttatcccttaatagatc

SEQ ID NO: 31227 - DNA, 25 bp, Homo sapiens
gacaatcatatcttaggcgttaaca

SEQ ID NO: 31228 - DNA, 25 bp, Homo sapiens
atcgaaatgatttactctcaaaaga

SEQ ID NO: 31229 - DNA, 25 bp, Homo sapiens
acagcctgtctgttgagagccactc

SEQ ID NO: 31230 - DNA, 25 bp, Homo sapiens
tcaccgcctggtaggatgccttcaa

SEQ ID NO: 31231 - DNA, 25 bp, Homo sapiens
gtgaggctcacccagagtgaatttg

SEQ ID NO: 31232 - DNA, 25 bp, Homo sapiens
tcagctccgtcctcatgcaagtgtg

SEQ ID NO: 31233 - DNA, 25 bp, Homo sapiens
tttcctcgcccaacataagctcatg

SEQ ID NO: 31234 - DNA, 25 bp, Homo sapiens
acccgagcctgagcctaagaagcga

SEQ ID NO: 31235 - DNA, 25 bp, Homo sapiens
tgagtaaatgtgggaggaaaggtga

SEQ ID NO: 31236 - DNA, 25 bp, Homo sapiens
ttgcaaggcctggaaagcccaaaga

SEQ ID NO: 31237 - DNA, 25 bp, Homo sapiens
gattagattcaaataaaactaaatg

SEQ ID NO: 31238 - DNA, 25 bp, Homo sapiens
cctgaaagactatgacccaatggta

SEQ ID NO: 31239 - DNA, 25 bp, Homo sapiens
cccagagaccataaaagagtgaaca

SEQ ID NO: 31240 - DNA, 25 bp, Homo sapiens
tgaggatgttttcccacttgtcaga

SEQ ID NO: 31241 - DNA, 25 bp, Homo sapiens
ggtcctcctttttccacgctctgtg

SEQ ID NO: 31242 - DNA, 25 bp, Homo sapiens
cgattcagtgtgttcactccttgca

SEQ ID NO: 31243 - DNA, 25 bp, Homo sapiens
aggcttagttcctctttgttggtta

SEQ ID NO: 31244 - DNA, 25 bp, Homo sapiens
cctctttgagcaagaacacagcata

SEQ ID NO: 31245 - DNA, 25 bp, Homo sapiens
ggtgttgacatgactcccttctttg

SEQ ID NO: 31246 - DNA, 25 bp, Homo sapiens
tggtggtcataggtagcaatagata

SEQ ID NO: 31247 - DNA, 25 bp, Homo sapiens
tgctgccatagctcaataccatgtc

SEQ ID NO: 31248 - DNA, 25 bp, Homo sapiens
ctgtgtgtgctgacatgatgtgaca

SEQ ID NO: 31249 - DNA, 25 bp, Homo sapiens
tcacagctgaatggcagtacccaaa

SEQ ID NO: 31250 - DNA, 25 bp, Homo sapiens
cctgccagtaccttgtcactgaaga

SEQ ID NO: 31251 - DNA, 25 bp, Homo sapiens
gcctctgattgtgtggaagttacta

SEQ ID NO: 31252 - DNA, 25 bp, Homo sapiens
tgggcgacaacagaaatcagtatta

SEQ ID NO: 31253 - DNA, 25 bp, Homo sapiens
gttcctcagagtgttcaactgaagc

SEQ ID NO: 31254 - DNA, 25 bp, Homo sapiens
gacgacttctatatccaggccctga

SEQ ID NO: 31255 - DNA, 25 bp, Homo sapiens
agcacttgccatggcattttgctaa

SEQ ID NO: 31256 - DNA, 25 bp, Homo sapiens
gtcataggtaattcaggcaactgtt

SEQ ID NO: 31257 - DNA, 25 bp, Homo sapiens
gtgctgctggccaaaaccactatgc

SEQ ID NO: 31258 - DNA, 25 bp, Homo sapiens
aagcttcttcttttgtttggggagg

SEQ ID NO: 31259 - DNA, 25 bp, Homo sapiens
tgatgcctcacatgtccagtttatg

SEQ ID NO: 31260 - DNA, 25 bp, Homo sapiens
ctcagctggcagattgtaacacgga

SEQ ID NO: 31261 - DNA, 25 bp, Homo sapiens
gccacttagttggatttaaccttta

SEQ ID NO: 31262 - DNA, 25 bp, Homo sapiens
tcagttatcttctcctggcacaggg

SEQ ID NO: 31263 - DNA, 25 bp, Homo sapiens
tccagttgtctttcaggggccatta

SEQ ID NO: 31264 - DNA, 25 bp, Homo sapiens
ccttcagtgggatttgccatattcc

SEQ ID NO: 31265 - DNA, 25 bp, Homo sapiens
gggtacttgcaatctggccttctca

SEQ ID NO: 31266 - DNA, 25 bp, Homo sapiens
ctgtccctggagcaataaacttttc

SEQ ID NO: 31267 - DNA, 25 bp, Homo sapiens
tctgaggagtaaatgaaagaagtga

SEQ ID NO: 31268 - DNA, 25 bp, Homo sapiens
agggcactctcttccaaagttgtgg

SEQ ID NO: 31269 - DNA, 25 bp, Homo sapiens
gagaggatatctaatgcccatatga

SEQ ID NO: 31270 - DNA, 25 bp, Homo sapiens
ttgtcttgttcccactgtcagggga

SEQ ID NO: 31271 - DNA, 25 bp, Homo sapiens
cctgcagaggcacagggaattatta

SEQ ID NO: 31272 - DNA, 25 bp, Homo sapiens
cagggttcacagttttccaagttca

SEQ ID NO: 31273 - DNA, 25 bp, Homo sapiens
cccatactctgagggagactgaata

SEQ ID NO: 31274 - DNA, 25 bp, Homo sapiens
tgccgaggccctaagtggattttta

SEQ ID NO: 31275 - DNA, 25 bp, Homo sapiens
ttctacttcaaagtatttgtggaaa

SEQ ID NO: 31276 - DNA, 25 bp, Homo sapiens
gaggccactatgaccaaactttctg

SEQ ID NO: 31277 - DNA, 25 bp, Homo sapiens
tgtagcctgtcagtatggacccatg

SEQ ID NO: 31278 - DNA, 25 bp, Homo sapiens
gccgtgcaacccaacataagaattt

SEQ ID NO: 31279 - DNA, 25 bp, Homo sapiens
ggagcaaagaaataagcagatatca

SEQ ID NO: 31280 - DNA, 25 bp, Homo sapiens
tgagagttttcagcatatttccttg

SEQ ID NO: 31281 - DNA, 25 bp, Homo sapiens
tagccttgttcatgctggggccaca

SEQ ID NO: 31282 - DNA, 25 bp, Homo sapiens
ctactttggcaaggcagatctgttt

SEQ ID NO: 31283 - DNA, 25 bp, Homo sapiens
acctgtggtgatagaactactctgc

SEQ ID NO: 31284 - DNA, 25 bp, Homo sapiens
tcgttgtctatttgctaataattct

SEQ ID NO: 31285 - DNA, 25 bp, Homo sapiens
cctcctgtagcgagcctgataaaga

SEQ ID NO: 31286 - DNA, 25 bp, Homo sapiens
ggcccttaaaccaggctatgactta

SEQ ID NO: 31287 - DNA, 25 bp, Homo sapiens
aaaactattaatttacaaacgcata

SEQ ID NO: 31288 - DNA, 25 bp, Homo sapiens
tgaggtatccacaagccaccaagtt

SEQ ID NO: 31289 - DNA, 25 bp, Homo sapiens
cttgtccagaggttcagaatgtatc

SEQ ID NO: 31290 - DNA, 25 bp, Homo sapiens
ttggcatagtcagagagagcttttc

SEQ ID NO: 31291 - DNA, 25 bp, Homo sapiens
ataagcctgtgagtggcaaacctcc

SEQ ID NO: 31292 - DNA, 25 bp, Homo sapiens
tagggcgtcattctctcttagcagc

SEQ ID NO: 31293 - DNA, 25 bp, Homo sapiens
gcttggcttgttctctcactcaaaa

SEQ ID NO: 31294 - DNA, 25 bp, Homo sapiens
ccaaatgttgtccatgcagagtagc

SEQ ID NO: 31295 - DNA, 25 bp, Homo sapiens
gtgtttcagtctttctcccatcaga

SEQ ID NO: 31296 - DNA, 25 bp, Homo sapiens
cacctatcaaactaagtcacttaaa

SEQ ID NO: 31297 - DNA, 25 bp, Homo sapiens
aaagagactagagctagtgtatact

SEQ ID NO: 31298 - DNA, 25 bp, Homo sapiens
ggctgaccaaccctctcaaaatatg

SEQ ID NO: 31299 - DNA, 25 bp, Homo sapiens
ttggcctgtttaatctctgcactgc

SEQ ID NO: 31300 - DNA, 25 bp, Homo sapiens
agaccttaacaaccctcaagtgaga

SEQ ID NO: 31301 - DNA, 25 bp, Homo sapiens
agtctccttagtgaatccgcagttg

SEQ ID NO: 31302 - DNA, 25 bp, Homo sapiens
ggccacgttcaagggtatcatttta

SEQ ID NO: 31303 - DNA, 25 bp, Homo sapiens
ggaggggtcccaattactttctgta

SEQ ID NO: 31304 - DNA, 25 bp, Homo sapiens
tgcccttagttccaagcattgcaga

SEQ ID NO: 31305 - DNA, 25 bp, Homo sapiens
gggcagcagtcaaagtcctgaaatc

SEQ ID NO: 31306 - DNA, 25 bp, Homo sapiens
tggctttatcccagagtccaacttg

SEQ ID NO: 31307 - DNA, 25 bp, Homo sapiens
ctgaaaaactattttaagtggtaaa

SEQ ID NO: 31308 - DNA, 25 bp, Homo sapiens
gccggacctactgttgagtctcata

SEQ ID NO: 31309 - DNA, 25 bp, Homo sapiens
cctctctggggacagtgctttatcc

SEQ ID NO: 31310 - DNA, 25 bp, Homo sapiens
ggggcaggtaaaattccaacaaatg

SEQ ID NO: 31311 - DNA, 25 bp, Homo sapiens
gctgagtccaatccaagcttttgca

SEQ ID NO: 31312 - DNA, 25 bp, Homo sapiens
gtctgtttactgaccctttttaatc

SEQ ID NO: 31313 - DNA, 25 bp, Homo sapiens
tgtagctgtgattatatgatctttc

SEQ ID NO: 31314 - DNA, 25 bp, Homo sapiens
ctctattctattgcagcttttaaca

SEQ ID NO: 31315 - DNA, 25 bp, Homo sapiens
gggccgacaaaacacagaagcattc

SEQ ID NO: 31316 - DNA, 25 bp, Homo sapiens
gcttggactcctggttatgggttca

SEQ ID NO: 31317 - DNA, 25 bp, Homo sapiens
gttttgaatactgtgccagggacta

SEQ ID NO: 31318 - DNA, 25 bp, Homo sapiens
acctccgggacgagtgccaaatcta

SEQ ID NO: 31319 - DNA, 25 bp, Homo sapiens
ttctgtacctttcgcttccttctta

SEQ ID NO: 31320 - DNA, 25 bp, Homo sapiens
acattgccaaaagtagatacaagtt

SEQ ID NO: 31321 - DNA, 25 bp, Homo sapiens
tgcgtaaggcccactagtttaatac

SEQ ID NO: 31322 - DNA, 25 bp, Homo sapiens
cttgctctggattgtggcccaaagc

SEQ ID NO: 31323 - DNA, 25 bp, Homo sapiens
cagccagtggctaggtgaagttatc

SEQ ID NO: 31324 - DNA, 25 bp, Homo sapiens
gctgtactcactgcctgtagctata

SEQ ID NO: 31325 - DNA, 25 bp, Homo sapiens
gtgacctcttctttctttcctaatg

SEQ ID NO: 31326 - DNA, 25 bp, Homo sapiens
tggctgtctttgcaataaacgagta

SEQ ID NO: 31327 - DNA, 25 bp, Homo sapiens
cttccactagtggattacagaagtg

SEQ ID NO: 31328 - DNA, 25 bp, Homo sapiens
tgtacgtccgacatatatgttttga

SEQ ID NO: 31329 - DNA, 25 bp, Homo sapiens
gccttgaagttatcccgtccatgta

SEQ ID NO: 31330 - DNA, 25 bp, Homo sapiens
gtgactctgtacacacctgtctgta

SEQ ID NO: 31331 - DNA, 25 bp, Homo sapiens
cttatatgtaacccatctcctgtct

SEQ ID NO: 31332 - DNA, 25 bp, Homo sapiens
caaactggggttgttgtcaataaga

SEQ ID NO: 31333 - DNA, 25 bp, Homo sapiens
aactttcagtccagcctatcgggtg

SEQ ID NO: 31334 - DNA, 25 bp, Homo sapiens
catctactgactgtgggctctgttc

SEQ ID NO: 31335 - DNA, 25 bp, Homo sapiens
ccgtttcctggaggctcacacagta

SEQ ID NO: 31336 - DNA, 25 bp, Homo sapiens
cctactcatgggtcagctctatctg

SEQ ID NO: 31337 - DNA, 25 bp, Homo sapiens
tgctttatcatttttttttcctgca

SEQ ID NO: 31338 - DNA, 25 bp, Homo sapiens
gtcaagtcccatgtatctgtgcaga

SEQ ID NO: 31339 - DNA, 25 bp, Homo sapiens
tggccgggcttctatagacatgata

SEQ ID NO: 31340 - DNA, 25 bp, Homo sapiens
tctctgctctggaagatcaataatg

SEQ ID NO: 31341 - DNA, 25 bp, Homo sapiens
ggtggcactcaacctctcctttgtg

SEQ ID NO: 31342 - DNA, 25 bp, Homo sapiens
aaactgggctgtgaatctttaccta

SEQ ID NO: 31343 - DNA, 25 bp, Homo sapiens
acacactgtggtgctctctgaggca

SEQ ID NO: 31344 - DNA, 25 bp, Homo sapiens
tgcggttaatctcctgtgtacaatg

SEQ ID NO: 31345 - DNA, 25 bp, Homo sapiens
agtgcggctgcctcttggtaataac

SEQ ID NO: 31346 - DNA, 25 bp, Homo sapiens
gtcagctgtctgtatttttgtccca

SEQ ID NO: 31347 - DNA, 25 bp, Homo sapiens
ctcgcctttgtctctgtaattaatg

SEQ ID NO: 31348 - DNA, 25 bp, Homo sapiens
tgcctctgaaaacactggaccatgc

SEQ ID NO: 31349 - DNA, 25 bp, Homo sapiens
cttgacccgctggatgggcactaca

SEQ ID NO: 31350 - DNA, 25 bp, Homo sapiens
gttgttaatctgaaacagtatagaa

SEQ ID NO: 31351 - DNA, 25 bp, Homo sapiens
ggcgcacattgccaacaaaaacctg

SEQ ID NO: 31352 - DNA, 25 bp, Homo sapiens
cagattgtaatagaagacaaatata

SEQ ID NO: 31353 - DNA, 25 bp, Homo sapiens
gctaaacctaacatccattccaaaa

SEQ ID NO: 31354 - DNA, 25 bp, Homo sapiens
cgaacgtcttgccatgtgctgtcta

SEQ ID NO: 31355 - DNA, 25 bp, Homo sapiens
gctatgtttttcaggagggctcaga

SEQ ID NO: 31356 - DNA, 25 bp, Homo sapiens
ggtgcagccttacggtcacagacta

SEQ ID NO: 31357 - DNA, 25 bp, Homo sapiens
agttgtctttcactcatttaaacta

SEQ ID NO: 31358 - DNA, 25 bp, Homo sapiens
gaacgcatggggagcactttgaatc

SEQ ID NO: 31359 - DNA, 25 bp, Homo sapiens
gtcctgtctgggtgttgctaaaata

SEQ ID NO: 31360 - DNA, 25 bp, Homo sapiens
tccatcaatgtctgcagtttcaatc

SEQ ID NO: 31361 - DNA, 25 bp, Homo sapiens
ggtagctttgcttcagagacttgga

SEQ ID NO: 31362 - DNA, 25 bp, Homo sapiens
ggggtatctctccttagattttagc

SEQ ID NO: 31363 - DNA, 25 bp, Homo sapiens
tccttaggaagctctgctgtcatta

SEQ ID NO: 31364 - DNA, 25 bp, Homo sapiens
gagtagtaaaataagaaggtagcat

SEQ ID NO: 31365 - DNA, 25 bp, Homo sapiens
tatttgctgccatatggaagttccc

SEQ ID NO: 31366 - DNA, 25 bp, Homo sapiens
gattgcacaggcactggaagcctta

SEQ ID NO: 31367 - DNA, 25 bp, Homo sapiens
gcccttttcagtgtgcagtccaaca

SEQ ID NO: 31368 - DNA, 25 bp, Homo sapiens
ctggggctgcgatcgcattgcctag

SEQ ID NO: 31369 - DNA, 25 bp, Homo sapiens
ggggccttccaatcaaacaaatctg

SEQ ID NO: 31370 - DNA, 25 bp, Homo sapiens
cctggcatcactgggactctttgga

SEQ ID NO: 31371 - DNA, 25 bp, Homo sapiens
tccctgaaggttgtttgagagccca

SEQ ID NO: 31372 - DNA, 25 bp, Homo sapiens
ttcctgctctttagggccatcttta

SEQ ID NO: 31373 - DNA, 25 bp, Homo sapiens
ctgaggcccggtactaagctgattt

SEQ ID NO: 31374 - DNA, 25 bp, Homo sapiens
gccctgtgattctgtacttgattga

SEQ ID NO: 31375 - DNA, 25 bp, Homo sapiens
aacagactatacctatggggccaga

SEQ ID NO: 31376 - DNA, 25 bp, Homo sapiens
ggctccagagtaatttgaacttgta

SEQ ID NO: 31377 - DNA, 25 bp, Homo sapiens
ccgaaggtctctttttccaaggata

SEQ ID NO: 31378 - DNA, 25 bp, Homo sapiens
ggccaccattggtgacattttctaa

SEQ ID NO: 31379 - DNA, 25 bp, Homo sapiens
tatagcagataccagaacaccagtg

SEQ ID NO: 31380 - DNA, 25 bp, Homo sapiens
agcctgcctggagtttttctaacaa

SEQ ID NO: 31381 - DNA, 25 bp, Homo sapiens
atgtggccctcagctagatgtagtc

SEQ ID NO: 31382 - DNA, 25 bp, Homo sapiens
ctgggagcagtagggtcacaatcta

SEQ ID NO: 31383 - DNA, 25 bp, Homo sapiens
actggggactggactgcgttttcca

SEQ ID NO: 31384 - DNA, 25 bp, Homo sapiens
gggacgtggcttttcccattacttc

SEQ ID NO: 31385 - DNA, 25 bp, Homo sapiens
acaggccctctgacattttaatttg

SEQ ID NO: 31386 - DNA, 25 bp, Homo sapiens
gctgccagttaccttgaccctcaaa

SEQ ID NO: 31387 - DNA, 25 bp, Homo sapiens
ccctgcctgtgagttagtgttgaaa

SEQ ID NO: 31388 - DNA, 25 bp, Homo sapiens
ggtcattttgtttttcctgaaaagg

SEQ ID NO: 31389 - DNA, 25 bp, Homo sapiens
caccaccaggaccaacagatttatg

SEQ ID NO: 31390 - DNA, 25 bp, Homo sapiens
gatctggctcctgctcaattctcta

SEQ ID NO: 31391 - DNA, 25 bp, Homo sapiens
ctaagcttgtgtttgggaggatccc

SEQ ID NO: 31392 - DNA, 25 bp, Homo sapiens
gtgtggactctacttcatcatagtg

SEQ ID NO: 31393 - DNA, 25 bp, Homo sapiens
tctccagggaaaccagcacattagg

SEQ ID NO: 31394 - DNA, 25 bp, Homo sapiens
ttttttggggctctttgtgtatttg

SEQ ID NO: 31395 - DNA, 25 bp, Homo sapiens
catgacttacatttggcccagggta

SEQ ID NO: 31396 - DNA, 25 bp, Homo sapiens
cagtgggccctgaactaacttgacc

SEQ ID NO: 31397 - DNA, 25 bp, Homo sapiens
cacgtactgcatgtagtgggcactc

SEQ ID NO: 31398 - DNA, 25 bp, Homo sapiens
tagccgcttgtgtgttgtgattcca

SEQ ID NO: 31399 - DNA, 25 bp, Homo sapiens
cagtgcccatccttgtgttccgtca

SEQ ID NO: 31400 - DNA, 25 bp, Homo sapiens
gccagtttctgcatctgaccaatta

SEQ ID NO: 31401 - DNA, 25 bp, Homo sapiens
cataaaggcttggaaactcagtgtc

SEQ ID NO: 31402 - DNA, 25 bp, Homo sapiens
cctgggttgctgcagctgaaaaaga

SEQ ID NO: 31403 - DNA, 25 bp, Homo sapiens
ggtgttcagaattccaagtccctca

SEQ ID NO: 31404 - DNA, 25 bp, Homo sapiens
tcctcctcagaccagcaagaaattg

SEQ ID NO: 31405 - DNA, 25 bp, Homo sapiens
ggggccctgacttgaacacgaaatc

SEQ ID NO: 31406 - DNA, 25 bp, Homo sapiens
actgtatcttccctggtcctgagga

SEQ ID NO: 31407 - DNA, 25 bp, Homo sapiens
caagttccccataattggcatatca

SEQ ID NO: 31408 - DNA, 25 bp, Homo sapiens
tggggccatccattgaactctgctg

SEQ ID NO: 31409 - DNA, 25 bp, Homo sapiens
gacctcttgctcttggtggcaaata

SEQ ID NO: 31410 - DNA, 25 bp, Homo sapiens
gggtattgtctctctcctccactgc

SEQ ID NO: 31411 - DNA, 25 bp, Homo sapiens
cgccaataggaacagggcccttttt

SEQ ID NO: 31412 - DNA, 25 bp, Homo sapiens
ggtcagggttctcacattcaggttg

SEQ ID NO: 31413 - DNA, 25 bp, Homo sapiens
ccagtgcccagaaaatacatgtttg

SEQ ID NO: 31414 - DNA, 25 bp, Homo sapiens
ctactgctgtttgctggggatgatc

SEQ ID NO: 31415 - DNA, 25 bp, Homo sapiens
tgcttccctggtgtcgctctacttt

SEQ ID NO: 31416 - DNA, 25 bp, Homo sapiens
tcaatgcgttgctgtggaccataca

SEQ ID NO: 31417 - DNA, 25 bp, Homo sapiens
cttggcagcaaaacatccctatgga

SEQ ID NO: 31418 - DNA, 25 bp, Homo sapiens
cccagaaatagaaggagcggcttta

SEQ ID NO: 31419 - DNA, 25 bp, Homo sapiens
ctctggatctgctttcaagggaata

SEQ ID NO: 31420 - DNA, 25 bp, Homo sapiens
ggcactctaactgggctggggaaaa

SEQ ID NO: 31421 - DNA, 25 bp, Homo sapiens
cccaggtttttcactttatttggca

SEQ ID NO: 31422 - DNA, 25 bp, Homo sapiens
ttacagctctgggaatttgaaggcc

SEQ ID NO: 31423 - DNA, 25 bp, Homo sapiens
tccatttttccctgagataagtatc

SEQ ID NO: 31424 - DNA, 25 bp, Homo sapiens
gtttgtatagaactcagataggtta

SEQ ID NO: 31425 - DNA, 25 bp, Homo sapiens
gcagcttgtgcctggggtttttata

SEQ ID NO: 31426 - DNA, 25 bp, Homo sapiens
tcccacatgggagaaactgaaatct

SEQ ID NO: 31427 - DNA, 25 bp, Homo sapiens
tcttggcaactgattgtatgtgaca

SEQ ID NO: 31428 - DNA, 25 bp, Homo sapiens
tcgcccagggacattctaagatcta

SEQ ID NO: 31429 - DNA, 25 bp, Homo sapiens
ggcacctctatcctactgctgctag

SEQ ID NO: 31430 - DNA, 25 bp, Homo sapiens
ctttcatgtctaccatgtttaccgg

SEQ ID NO: 31431 - DNA, 25 bp, Homo sapiens
ggggtctctgtttcttctccatgga

SEQ ID NO: 31432 - DNA, 25 bp, Homo sapiens
gcctcacctctttgttgcatctcag

SEQ ID NO: 31433 - DNA, 25 bp, Homo sapiens
aactgtccttgtctactgtggaaca

SEQ ID NO: 31434 - DNA, 25 bp, Homo sapiens
tacagactggaagatacggcaactc

SEQ ID NO: 31435 - DNA, 25 bp, Homo sapiens
gggaatcttcctaccaactgtcagg

SEQ ID NO: 31436 - DNA, 25 bp, Homo sapiens
ccctctgcaagtacatcaggtagtc

SEQ ID NO: 31437 - DNA, 25 bp, Homo sapiens
tcctcctcttgtgccctctctttct

SEQ ID NO: 31438 - DNA, 25 bp, Homo sapiens
atcagcagttgcgtatcaggtagta

SEQ ID NO: 31439 - DNA, 25 bp, Homo sapiens
tctggatcttcctgtgctggctttc

SEQ ID NO: 31440 - DNA, 25 bp, Homo sapiens
ccgctttgtgcttgtagatggtctc

SEQ ID NO: 31441 - DNA, 25 bp, Homo sapiens
ctctgagtttggtcttcggttgaaa

SEQ ID NO: 31442 - DNA, 25 bp, Homo sapiens
agatgaacgtttggcctagacactc

SEQ ID NO: 31443 - DNA, 25 bp, Homo sapiens
ctgctaagcagtggatctctaccta

SEQ ID NO: 31444 - DNA, 25 bp, Homo sapiens
atcctgggctgtgatggcaacagta

SEQ ID NO: 31445 - DNA, 25 bp, Homo sapiens
tgggttacagacacatacgatttgc

SEQ ID NO: 31446 - DNA, 25 bp, Homo sapiens
taatatgataagtttttattgtggt

SEQ ID NO: 31447 - DNA, 25 bp, Homo sapiens
gtagcagtgagtagatcccttatta

SEQ ID NO: 31448 - DNA, 25 bp, Homo sapiens
ttttgaacagttgagtgcaaagaca

SEQ ID NO: 31449 - DNA, 25 bp, Homo sapiens
ttggacacaggctaatttcatgttc

SEQ ID NO: 31450 - DNA, 25 bp, Homo sapiens
actgggaggagactgacctgccaaa

SEQ ID NO: 31451 - DNA, 25 bp, Homo sapiens
tgcccttagtattttgcgccattca

SEQ ID NO: 31452 - DNA, 25 bp, Homo sapiens
ataaatggggtaaggctaaacctca

SEQ ID NO: 31453 - DNA, 25 bp, Homo sapiens
tcagggacttcaaacagcagatatg

SEQ ID NO: 31454 - DNA, 25 bp, Homo sapiens
tctggccgcttcctctaataaagtg

SEQ ID NO: 31455 - DNA, 25 bp, Homo sapiens
ccaaggattgtgtgaggaccagctc

SEQ ID NO: 31456 - DNA, 25 bp, Homo sapiens
ccactttgttcttgacctgggtata

SEQ ID NO: 31457 - DNA, 25 bp, Homo sapiens
actgtatccactttctctctgggta

SEQ ID NO: 31458 - DNA, 25 bp, Homo sapiens
cttggtgctgaagtgagaattatcc

SEQ ID NO: 31459 - DNA, 25 bp, Homo sapiens
ccatgctctctctcagacagtggga

SEQ ID NO: 31460 - DNA, 25 bp, Homo sapiens
cccacggacaggaaggatactgcca

SEQ ID NO: 31461 - DNA, 25 bp, Homo sapiens
ttcccgtggtgcttatgagtaatcc

SEQ ID NO: 31462 - DNA, 25 bp, Homo sapiens
tgggcccttggcactacttaacgtg

SEQ ID NO: 31463 - DNA, 25 bp, Homo sapiens
ggcttgctgcatgctttctccagga

SEQ ID NO: 31464 - DNA, 25 bp, Homo sapiens
tggaaaatagaaacatattttagaa

SEQ ID NO: 31465 - DNA, 25 bp, Homo sapiens
tgttgcttttaagtatagccctctc

SEQ ID NO: 31466 - DNA, 25 bp, Homo sapiens
tgcgaacgctatcaccaaaagcatg

SEQ ID NO: 31467 - DNA, 25 bp, Homo sapiens
tatttgaaatgtcctttactcccag

SEQ ID NO: 31468 - DNA, 25 bp, Homo sapiens
ggtggtcccggatagcttttctaga

SEQ ID NO: 31469 - DNA, 25 bp, Homo sapiens
ccgtttctctcgcatggtgtggaca

SEQ ID NO: 31470 - DNA, 25 bp, Homo sapiens
cctctttggttgttgggaatgctat

SEQ ID NO: 31471 - DNA, 25 bp, Homo sapiens
tgtgccctgaagagctgagtcattc

SEQ ID NO: 31472 - DNA, 25 bp, Homo sapiens
aaagtttgatgtatcaaaatttttg

SEQ ID NO: 31473 - DNA, 25 bp, Homo sapiens
tatgccctcacaacagggaccttgg

SEQ ID NO: 31474 - DNA, 25 bp, Homo sapiens
gccgtgtttattgcttatgactatg

SEQ ID NO: 31475 - DNA, 25 bp, Homo sapiens
tcctagttctaaggctctgggcagc

SEQ ID NO: 31476 - DNA, 25 bp, Homo sapiens
ctgcgatggctcaaaggagtgcttc

SEQ ID NO: 31477 - DNA, 25 bp, Homo sapiens
cacgggatgatttcttgaagtgaga

SEQ ID NO: 31478 - DNA, 25 bp, Homo sapiens
tctcaggctccttggcataaaaacc

SEQ ID NO: 31479 - DNA, 25 bp, Homo sapiens
gcctgtgactggttctccactgata

SEQ ID NO: 31480 - DNA, 25 bp, Homo sapiens
ccacttcacttgcagctggtagaaa

SEQ ID NO: 31481 - DNA, 25 bp, Homo sapiens
acctggctgccttgtaaaaagtcgc

SEQ ID NO: 31482 - DNA, 25 bp, Homo sapiens
caggcctacatcagggcatgtctta

SEQ ID NO: 31483 - DNA, 25 bp, Homo sapiens
tgtgtgtccttaaacctctgtccta

SEQ ID NO: 31484 - DNA, 25 bp, Homo sapiens
gcctctattgatgagtgcgcctcta

SEQ ID NO: 31485 - DNA, 25 bp, Homo sapiens
taaatcggaaggaaataactaatta

SEQ ID NO: 31486 - DNA, 25 bp, Homo sapiens
ccatgtgaccgtggacttgctttta

SEQ ID NO: 31487 - DNA, 25 bp, Homo sapiens
tcgtgggcgctagctttatctctta

SEQ ID NO: 31488 - DNA, 25 bp, Homo sapiens
gtggccatttccagtgtcatagctg

SEQ ID NO: 31489 - DNA, 25 bp, Homo sapiens
gaatgaatgaattaagccaagaaca

SEQ ID NO: 31490 - DNA, 25 bp, Homo sapiens
tgacctagactgtggctcaagattc

SEQ ID NO: 31491 - DNA, 25 bp, Homo sapiens
gcctttaatgggacagaactacttg

SEQ ID NO: 31492 - DNA, 25 bp, Homo sapiens
tcttccatttacctgcctgctatta

SEQ ID NO: 31493 - DNA, 25 bp, Homo sapiens
ccgtggcatattgagcgggctaatt

SEQ ID NO: 31494 - DNA, 25 bp, Homo sapiens
tgcttagggcagctttatcaccata

SEQ ID NO: 31495 - DNA, 25 bp, Homo sapiens
gatactttgaaatgtggccccctaa

SEQ ID NO: 31496 - DNA, 25 bp, Homo sapiens
ctccagacatgatcagtaagaagcg

SEQ ID NO: 31497 - DNA, 25 bp, Homo sapiens
atgtagttcaaataagcgagttgtt

SEQ ID NO: 31498 - DNA, 25 bp, Homo sapiens
cttctgtccttccatgtgtgctcta

SEQ ID NO: 31499 - DNA, 25 bp, Homo sapiens
ggacatgcacttcctatcccagaga

SEQ ID NO: 31500 - DNA, 25 bp, Homo sapiens
cctaagctacattgctgggacagca

SEQ ID NO: 31501 - DNA, 25 bp, Homo sapiens
atggcctggcacctcctttgcaagg

SEQ ID NO: 31502 - DNA, 25 bp, Homo sapiens
ttctgatgggaaagctgcaatatgc

SEQ ID NO: 31503 - DNA, 25 bp, Homo sapiens
ctttacccatgtagcagtgccctga

SEQ ID NO: 31504 - DNA, 25 bp, Homo sapiens
ttcagttctctaaaaggcttggcta

SEQ ID NO: 31505 - DNA, 25 bp, Homo sapiens
ccactgaggcacacagagccattta

SEQ ID NO: 31506 - DNA, 25 bp, Homo sapiens
cacctttaaaatgcctggggactga

SEQ ID NO: 31507 - DNA, 25 bp, Homo sapiens
ggagctcaggcctacagtgtaacta

SEQ ID NO: 31508 - DNA, 25 bp, Homo sapiens
ccatcgtcagtggacagtctgcttc

SEQ ID NO: 31509 - DNA, 25 bp, Homo sapiens
ttctctaataatgctactgtggatc

SEQ ID NO: 31510 - DNA, 25 bp, Homo sapiens
gtctaggtggttacacaaacacaca

SEQ ID NO: 31511 - DNA, 25 bp, Homo sapiens
tcataaaagcatcccaaataaacac

SEQ ID NO: 31512 - DNA, 25 bp, Homo sapiens
tcatgtcttagtggtggggcaagtc

SEQ ID NO: 31513 - DNA, 25 bp, Homo sapiens
ggcagtcttgcaacacctgtcattg

SEQ ID NO: 31514 - DNA, 25 bp, Homo sapiens
tgcaggccactccttttcagtgaga

SEQ ID NO: 31515 - DNA, 25 bp, Homo sapiens
gctgtgccctcttcccaattagttc

SEQ ID NO: 31516 - DNA, 25 bp, Homo sapiens
ggcagtcccttcttccctttcattt

SEQ ID NO: 31517 - DNA, 25 bp, Homo sapiens
tctagtatcttaataaagtctgtcc

SEQ ID NO: 31518 - DNA, 25 bp, Homo sapiens
ggcaagccatttgacactctccata

SEQ ID NO: 31519 - DNA, 25 bp, Homo sapiens
tgccaccaccagatgctgtgttata

SEQ ID NO: 31520 - DNA, 25 bp, Homo sapiens
tggcctgatggtggcagcaatttta

SEQ ID NO: 31521 - DNA, 25 bp, Homo sapiens
ggggccctcctagtcttacagtttc

SEQ ID NO: 31522 - DNA, 25 bp, Homo sapiens
acgtgccatcctctggagtcctaga

SEQ ID NO: 31523 - DNA, 25 bp, Homo sapiens
accctccctgtctagtcaagtctta

SEQ ID NO: 31524 - DNA, 25 bp, Homo sapiens
ataacttgggctctacctcctcctg

SEQ ID NO: 31525 - DNA, 25 bp, Homo sapiens
gtgctagccctaccttcattcagta

SEQ ID NO: 31526 - DNA, 25 bp, Homo sapiens
gcctggcacaggtttttacattgga

SEQ ID NO: 31527 - DNA, 25 bp, Homo sapiens
ccacggttaattttgggcccatgta

SEQ ID NO: 31528 - DNA, 25 bp, Homo sapiens
gtggtcctctcagtagctatgcatt

SEQ ID NO: 31529 - DNA, 25 bp, Homo sapiens
tgttttaatttttcatggctgtgtc

SEQ ID NO: 31530 - DNA, 25 bp, Homo sapiens
cccgaatggccacagtaggtataca

SEQ ID NO: 31531 - DNA, 25 bp, Homo sapiens
cctgactgtggaataggagccttta

SEQ ID NO: 31532 - DNA, 25 bp, Homo sapiens
gacttgtttaactatcaccactgag

SEQ ID NO: 31533 - DNA, 25 bp, Homo sapiens
gaaaatacagtgaaatatattttta

SEQ ID NO: 31534 - DNA, 25 bp, Homo sapiens
aaataatattaagcagcactatata

SEQ ID NO: 31535 - DNA, 25 bp, Homo sapiens
tggactgcacatctctggccaaatc

SEQ ID NO: 31536 - DNA, 25 bp, Homo sapiens
acctgggcaagacagctaattttta

SEQ ID NO: 31537 - DNA, 25 bp, Homo sapiens
catgtctttaatgccatttatcttc

SEQ ID NO: 31538 - DNA, 25 bp, Homo sapiens
tataatttttattattctccctttc

SEQ ID NO: 31539 - DNA, 25 bp, Homo sapiens
cagctgccagaggaaatgttgcttt

SEQ ID NO: 31540 - DNA, 25 bp, Homo sapiens
gggctatcctgaacctggaaatgta

SEQ ID NO: 31541 - DNA, 25 bp, Homo sapiens
gcatttttcctttgacaccttgttg

SEQ ID NO: 31542 - DNA, 25 bp, Homo sapiens
agggctgggctctctgattcagata

SEQ ID NO: 31543 - DNA, 25 bp, Homo sapiens
tgtggctgacgaaactctactttta

SEQ ID NO: 31544 - DNA, 25 bp, Homo sapiens
cagggctcccacctaaccaaaaggg

SEQ ID NO: 31545 - DNA, 25 bp, Homo sapiens
aggtgggcctcaattcttgttctcc

SEQ ID NO: 31546 - DNA, 25 bp, Homo sapiens
ggagcccattaattttctttcaaga

SEQ ID NO: 31547 - DNA, 25 bp, Homo sapiens
tgcctagcctgaccatgaagaagtt

SEQ ID NO: 31548 - DNA, 25 bp, Homo sapiens
ttcagccagttttgtagcacccaga

SEQ ID NO: 31549 - DNA, 25 bp, Homo sapiens
aaacataggcacttggctcggggca

SEQ ID NO: 31550 - DNA, 25 bp, Homo sapiens
aataggcatgtttggctcacgagtc

SEQ ID NO: 31551 - DNA, 25 bp, Homo sapiens
ccatggcaatgagggtaatacaagt

SEQ ID NO: 31552 - DNA, 25 bp, Homo sapiens
gcagtctagggatcatagtctcaca

SEQ ID NO: 31553 - DNA, 25 bp, Homo sapiens
gcagcgtagaagtgacagtggcatc

SEQ ID NO: 31554 - DNA, 25 bp, Homo sapiens
gcaatctattggatagtgcagtgta

SEQ ID NO: 31555 - DNA, 25 bp, Homo sapiens
aactaacttgtgggtttatattcct

SEQ ID NO: 31556 - DNA, 25 bp, Homo sapiens
acgtgtgcgtgaacaagcttaaaga

SEQ ID NO: 31557 - DNA, 25 bp, Homo sapiens
gagtttaaataaagtaaccatgaat

SEQ ID NO: 31558 - DNA, 25 bp, Homo sapiens
cagggcaggatatttacgtggtata

SEQ ID NO: 31559 - DNA, 25 bp, Homo sapiens
tgtgtagcgactcaagcagttcttc

SEQ ID NO: 31560 - DNA, 25 bp, Homo sapiens
tcagacgtgtacttgggcacaaaca

SEQ ID NO: 31561 - DNA, 25 bp, Homo sapiens
tttggccggactcttgatctaactc

SEQ ID NO: 31562 - DNA, 25 bp, Homo sapiens
ctgggccaggttgaagaatagaatc

SEQ ID NO: 31563 - DNA, 25 bp, Homo sapiens
atgtgcactcagtctgcctacgtta

SEQ ID NO: 31564 - DNA, 25 bp, Homo sapiens
gtgggaaggcatctcaaactaaaac

SEQ ID NO: 31565 - DNA, 25 bp, Homo sapiens
atacggaccctaggacttaagtgtg

SEQ ID NO: 31566 - DNA, 25 bp, Homo sapiens
gggtgaaatccctggccaagtaata

SEQ ID NO: 31567 - DNA, 25 bp, Homo sapiens
agacacttttgcctgtaaacctaga

SEQ ID NO: 31568 - DNA, 25 bp, Homo sapiens
ttggcccatagacaaattgatgatc

SEQ ID NO: 31569 - DNA, 25 bp, Homo sapiens
ccagggtgtctcaaccacatggtta

SEQ ID NO: 31570 - DNA, 25 bp, Homo sapiens
gcaacgtgggtgtgatgtacataca

SEQ ID NO: 31571 - DNA, 25 bp, Homo sapiens
atgtcagttttttgaagttaaaaaa

SEQ ID NO: 31572 - DNA, 25 bp, Homo sapiens
ctggagtcaaaggtcaacaagcctc

SEQ ID NO: 31573 - DNA, 25 bp, Homo sapiens
ttccagtgaggcataaatgtcattc

SEQ ID NO: 31574 - DNA, 25 bp, Homo sapiens
cctctttagaggctagctccaggta

SEQ ID NO: 31575 - DNA, 25 bp, Homo sapiens
gtggtagcatgccaccatttcctgc

SEQ ID NO: 31576 - DNA, 25 bp, Homo sapiens
gataagtcttatacctacaacccat

SEQ ID NO: 31577 - DNA, 25 bp, Homo sapiens
ccagtgctgacacctgccttagata

SEQ ID NO: 31578 - DNA, 25 bp, Homo sapiens
gagccacacttacctcttctgtatg

SEQ ID NO: 31579 - DNA, 25 bp, Homo sapiens
gactcaagctctccgagcaagaatg

SEQ ID NO: 31580 - DNA, 25 bp, Homo sapiens
ggcaatcacttttggaagctctctt

SEQ ID NO: 31581 - DNA, 25 bp, Homo sapiens
ggctaaaaactctggggatctcacg

SEQ ID NO: 31582 - DNA, 25 bp, Homo sapiens
gggttgttcctgtctccatcatgca

SEQ ID NO: 31583 - DNA, 25 bp, Homo sapiens
ccaggttcagagatgtcccttcatg

SEQ ID NO: 31584 - DNA, 25 bp, Homo sapiens
ctgcagtttgccaccaggaggcata

SEQ ID NO: 31585 - DNA, 25 bp, Homo sapiens
cccatggcttcggaggtcaaaacct

SEQ ID NO: 31586 - DNA, 25 bp, Homo sapiens
tccagttcccacacagagtcctttg

SEQ ID NO: 31587 - DNA, 25 bp, Homo sapiens
acgacccattgtgaagcctggctta

SEQ ID NO: 31588 - DNA, 25 bp, Homo sapiens
cccaagtaggtgttcacagtcagtc

SEQ ID NO: 31589 - DNA, 25 bp, Homo sapiens
ccacagccataaggtagatttctca

SEQ ID NO: 31590 - DNA, 25 bp, Homo sapiens
ggggcagcttttccaagaggagtta

SEQ ID NO: 31591 - DNA, 25 bp, Homo sapiens
ttctgactagccttggggcaacttc

SEQ ID NO: 31592 - DNA, 25 bp, Homo sapiens
caagcctggcatgcattttaactga

SEQ ID NO: 31593 - DNA, 25 bp, Homo sapiens
ctctcactgttatgggttgcctatc

SEQ ID NO: 31594 - DNA, 25 bp, Homo sapiens
gagctctttgatccaaggtgacatg

SEQ ID NO: 31595 - DNA, 25 bp, Homo sapiens
ctaggtctctggcacactaatttcc

SEQ ID NO: 31596 - DNA, 25 bp, Homo sapiens
tcacttgatatactggcactggaca

SEQ ID NO: 31597 - DNA, 25 bp, Homo sapiens
ggctctacttctctcattctgtgtg

SEQ ID NO: 31598 - DNA, 25 bp, Homo sapiens
tctgccgagtaaccacttaagtatc

SEQ ID NO: 31599 - DNA, 25 bp, Homo sapiens
atccagagccacttaggtaactagc

SEQ ID NO: 31600 - DNA, 25 bp, Homo sapiens
gacatagcaccttacagcgagtttg

SEQ ID NO: 31601 - DNA, 25 bp, Homo sapiens
gctttaaacatcaggcctgtcagga

SEQ ID NO: 31602 - DNA, 25 bp, Homo sapiens
tgctcccagggaggaaagtcttttc

SEQ ID NO: 31603 - DNA, 25 bp, Homo sapiens
tgggacttaccactaatgagacttg

SEQ ID NO: 31604 - DNA, 25 bp, Homo sapiens
tagttacaataagttccataatatt

SEQ ID NO: 31605 - DNA, 25 bp, Homo sapiens
ggggcatcatttcttatctctcatt

SEQ ID NO: 31606 - DNA, 25 bp, Homo sapiens
catgcttaggaatgtatgtgtagca

SEQ ID NO: 31607 - DNA, 25 bp, Homo sapiens
cctggcgctggacacaagatatgtc

SEQ ID NO: 31608 - DNA, 25 bp, Homo sapiens
gagtgttcctctagtccagtgttga

SEQ ID NO: 31609 - DNA, 25 bp, Homo sapiens
gcggcagacccatgtttttgaaatg

SEQ ID NO: 31610 - DNA, 25 bp, Homo sapiens
ctgctgaccttgagatttggaaata

SEQ ID NO: 31611 - DNA, 25 bp, Homo sapiens
gcattctatatcttcaggcaccaga

SEQ ID NO: 31612 - DNA, 25 bp, Homo sapiens
tttatgaatattattatgagtttac

SEQ ID NO: 31613 - DNA, 25 bp, Homo sapiens
ttccaggctataagttcagagtttc

SEQ ID NO: 31614 - DNA, 25 bp, Homo sapiens
tttgcttcaaaccacggctgctgtc

SEQ ID NO: 31615 - DNA, 25 bp, Homo sapiens
aaagcatgccttcagtgttactcac

SEQ ID NO: 31616 - DNA, 25 bp, Homo sapiens
acatcagcgtttctagggttacaca

SEQ ID NO: 31617 - DNA, 25 bp, Homo sapiens
tcttgggcatgtgtgagtcatctta

SEQ ID NO: 31618 - DNA, 25 bp, Homo sapiens
gtccgccttgcaagtattctcattg

SEQ ID NO: 31619 - DNA, 25 bp, Homo sapiens
ctcttcggagggaattgggtcaact

SEQ ID NO: 31620 - DNA, 25 bp, Homo sapiens
aggggttttcagagcatccggattc

SEQ ID NO: 31621 - DNA, 25 bp, Homo sapiens
ggcttttcaaaggatcctcatgttt

SEQ ID NO: 31622 - DNA, 25 bp, Homo sapiens
cacgcacacattggagctttgatta

SEQ ID NO: 31623 - DNA, 25 bp, Homo sapiens
tacagcacatactactttcctctgg

SEQ ID NO: 31624 - DNA, 25 bp, Homo sapiens
gctccagcttccttctcatgtttta

SEQ ID NO: 31625 - DNA, 25 bp, Homo sapiens
gttgcctacttcttcaggggaatta

SEQ ID NO: 31626 - DNA, 25 bp, Homo sapiens
tctggccctaacgattgaaagagta

SEQ ID NO: 31627 - DNA, 25 bp, Homo sapiens
tctgtgctaaaattgcctatgtatc

SEQ ID NO: 31628 - DNA, 25 bp, Homo sapiens
tgtactcaggggcacgttaagctta

SEQ ID NO: 31629 - DNA, 25 bp, Homo sapiens
ctgatctctttcaagtcatgggcta

SEQ ID NO: 31630 - DNA, 25 bp, Homo sapiens
caattggtcttttccgtggtattca

SEQ ID NO: 31631 - DNA, 25 bp, Homo sapiens
tggctctagatgactgcctgttcta

SEQ ID NO: 31632 - DNA, 25 bp, Homo sapiens
gcacccaggaaacgactcactttta

SEQ ID NO: 31633 - DNA, 25 bp, Homo sapiens
tcctgtgactctctgctgcattgca

SEQ ID NO: 31634 - DNA, 25 bp, Homo sapiens
ctacattggctgaatctaagggctc

SEQ ID NO: 31635 - DNA, 25 bp, Homo sapiens
cgtaagtcagaaacacaggcaggga

SEQ ID NO: 31636 - DNA, 25 bp, Homo sapiens
ggtacttgtaatgctccactagaca

SEQ ID NO: 31637 - DNA, 25 bp, Homo sapiens
gggcctgtggcagcaatattctgtc

SEQ ID NO: 31638 - DNA, 25 bp, Homo sapiens
ttgggaccatctgccgtaaattatt

SEQ ID NO: 31639 - DNA, 25 bp, Homo sapiens
acattcatggttgtcagtattttgg

SEQ ID NO: 31640 - DNA, 25 bp, Homo sapiens
cacacctatggcgaatgagttaata

SEQ ID NO: 31641 - DNA, 25 bp, Homo sapiens
ttctgacttgatctgtaccctgggg

SEQ ID NO: 31642 - DNA, 25 bp, Homo sapiens
gttcctctggaaatattttgccttc

SEQ ID NO: 31643 - DNA, 25 bp, Homo sapiens
gctactttagtggagactcagttta

SEQ ID NO: 31644 - DNA, 25 bp, Homo sapiens
aagcaataaaagcaacaaatctttg

SEQ ID NO: 31645 - DNA, 25 bp, Homo sapiens
ggagggctccatttcacttatttta

SEQ ID NO: 31646 - DNA, 25 bp, Homo sapiens
ttctggtaactaggatcaaggatgc

SEQ ID NO: 31647 - DNA, 25 bp, Homo sapiens
tctctgtcccagtatcttcaaagtg

SEQ ID NO: 31648 - DNA, 25 bp, Homo sapiens
agtgtgctgaagtccctgaaatttc

SEQ ID NO: 31649 - DNA, 25 bp, Homo sapiens
tcagccttcagttgggaaagaatcc

SEQ ID NO: 31650 - DNA, 25 bp, Homo sapiens
caagccagttgacagagttaatacc

SEQ ID NO: 31651 - DNA, 25 bp, Homo sapiens
gcttggttttattgactggtcctta

SEQ ID NO: 31652 - DNA, 25 bp, Homo sapiens
cactgtggtctgctctgtggaaaaa

SEQ ID NO: 31653 - DNA, 25 bp, Homo sapiens
cttggtcaacaaaacctatcaggtc

SEQ ID NO: 31654 - DNA, 25 bp, Homo sapiens
gccaaacatttgtgaactgctcaga

SEQ ID NO: 31655 - DNA, 25 bp, Homo sapiens
ttggggatctatcttatcaggttta

SEQ ID NO: 31656 - DNA, 25 bp, Homo sapiens
ttctggcccacataggcattttgtg

SEQ ID NO: 31657 - DNA, 25 bp, Homo sapiens
acggtgggcacactcgttttctatg

SEQ ID NO: 31658 - DNA, 25 bp, Homo sapiens
gggacattcaggtttcattccaata

SEQ ID NO: 31659 - DNA, 25 bp, Homo sapiens
gatgacttctagagctccagccaca

SEQ ID NO: 31660 - DNA, 25 bp, Homo sapiens
ggcagactgccagaagttttaagac

SEQ ID NO: 31661 - DNA, 25 bp, Homo sapiens
ggccctcatagccttattgaaatta

SEQ ID NO: 31662 - DNA, 25 bp, Homo sapiens
cacagcagtaggtcagagtgatcta

SEQ ID NO: 31663 - DNA, 25 bp, Homo sapiens
cccggagggagattaatatgcattc

SEQ ID NO: 31664 - DNA, 25 bp, Homo sapiens
ggaatgccactctttgaccctgaaa

SEQ ID NO: 31665 - DNA, 25 bp, Homo sapiens
tacaatgctgtgactcctgtgaggc

SEQ ID NO: 31666 - DNA, 25 bp, Homo sapiens
ggctccttctctgggtgtagtgtac

SEQ ID NO: 31667 - DNA, 25 bp, Homo sapiens
gccagccctagttgttgtttgataa

SEQ ID NO: 31668 - DNA, 25 bp, Homo sapiens
aggtcagctaactatcccatttttg

SEQ ID NO: 31669 - DNA, 25 bp, Homo sapiens
attttgaggaacaccgcttcactta

SEQ ID NO: 31670 - DNA, 25 bp, Homo sapiens
agctaactgtggatagggacaaaca

SEQ ID NO: 31671 - DNA, 25 bp, Homo sapiens
ttcatctttactgggaacatcctgg

SEQ ID NO: 31672 - DNA, 25 bp, Homo sapiens
ggcccagtggattataagagaatta

SEQ ID NO: 31673 - DNA, 25 bp, Homo sapiens
tgtgtgctgcgtgtataattatatg

SEQ ID NO: 31674 - DNA, 25 bp, Homo sapiens
tcctccaaggcaactaagattagta

SEQ ID NO: 31675 - DNA, 25 bp, Homo sapiens
caggcagagccatgaggattctttc

SEQ ID NO: 31676 - DNA, 25 bp, Homo sapiens
gggcttcccagtgctcccagagaaa

SEQ ID NO: 31677 - DNA, 25 bp, Homo sapiens
gcttcctgggcatgcattctttata

SEQ ID NO: 31678 - DNA, 25 bp, Homo sapiens
agttcctgacagtgacgcgtttcta

SEQ ID NO: 31679 - DNA, 25 bp, Homo sapiens
tgactttatgccgaaacagccgtta

SEQ ID NO: 31680 - DNA, 25 bp, Homo sapiens
aactgtcctactcattttatttgtg

SEQ ID NO: 31681 - DNA, 25 bp, Homo sapiens
actaagccttccaagtgagattttc

SEQ ID NO: 31682 - DNA, 25 bp, Homo sapiens
gctgctcggccttgaaacattctta

SEQ ID NO: 31683 - DNA, 25 bp, Homo sapiens
ctctgatgcttttccttctgggtga

SEQ ID NO: 31684 - DNA, 25 bp, Homo sapiens
actttactggatattcatggctgca

SEQ ID NO: 31685 - DNA, 25 bp, Homo sapiens
cacaggtaaaatttttataattaag

SEQ ID NO: 31686 - DNA, 25 bp, Homo sapiens
taattttcaccttatttttgtaatt

SEQ ID NO: 31687 - DNA, 25 bp, Homo sapiens
gggtttgacacccaatgtactattc

SEQ ID NO: 31688 - DNA, 25 bp, Homo sapiens
actgaagagtgcttgtaacattttg

SEQ ID NO: 31689 - DNA, 25 bp, Homo sapiens
ctgagccgctgaagtataaaattgc

SEQ ID NO: 31690 - DNA, 25 bp, Homo sapiens
ccctggcatggagcaataatagtct

SEQ ID NO: 31691 - DNA, 25 bp, Homo sapiens
ggccagagcattgtttcattaccta

SEQ ID NO: 31692 - DNA, 25 bp, Homo sapiens
cacgagctgtgatgtcctaaagaaa

SEQ ID NO: 31693 - DNA, 25 bp, Homo sapiens
tcctgagttcccgtgagtctttatc

SEQ ID NO: 31694 - DNA, 25 bp, Homo sapiens
gtcgaggatcaccagcactttaagg

SEQ ID NO: 31695 - DNA, 25 bp, Homo sapiens
gtaggcactttgtctctggaactta

SEQ ID NO: 31696 - DNA, 25 bp, Homo sapiens
ccattttgatttgcaatctcatgtt

SEQ ID NO: 31697 - DNA, 25 bp, Homo sapiens
ccctggaaactgtaacaagacgatc

SEQ ID NO: 31698 - DNA, 25 bp, Homo sapiens
tcatgctcacatggaggccaatttg

SEQ ID NO: 31699 - DNA, 25 bp, Homo sapiens
ccaaggtttggggtagctaatgcac

SEQ ID NO: 31700 - DNA, 25 bp, Homo sapiens
gggtccagtttgcaagtgttttctc

SEQ ID NO: 31701 - DNA, 25 bp, Homo sapiens
acctgtgtgtgtttgtagtgcttca

SEQ ID NO: 31702 - DNA, 25 bp, Homo sapiens
agtccctgcctatttgagatccctc

SEQ ID NO: 31703 - DNA, 25 bp, Homo sapiens
tgttcgttactgcagaagccacata

SEQ ID NO: 31704 - DNA, 25 bp, Homo sapiens
gggagtttcagcctctcatcacagg

SEQ ID NO: 31705 - DNA, 25 bp, Homo sapiens
atcctatgcttctggggacatccga

SEQ ID NO: 31706 - DNA, 25 bp, Homo sapiens
acaagtggcagatggcaagatgtca

SEQ ID NO: 31707 - DNA, 25 bp, Homo sapiens
cagccacgttgtgactcttagaatc

SEQ ID NO: 31708 - DNA, 25 bp, Homo sapiens
gctagcttcaattctcttatgaggg

SEQ ID NO: 31709 - DNA, 25 bp, Homo sapiens
ggccattccttctacgcatgtcgta

SEQ ID NO: 31710 - DNA, 25 bp, Homo sapiens
gtttggtaccctgcccataatggga

SEQ ID NO: 31711 - DNA, 25 bp, Homo sapiens
tgagtgccataagttgccctacctg

SEQ ID NO: 31712 - DNA, 25 bp, Homo sapiens
acctggggcacctatgtcgaatata

SEQ ID NO: 31713 - DNA, 25 bp, Homo sapiens
cctcagttgcagagagcacccagta

SEQ ID NO: 31714 - DNA, 25 bp, Homo sapiens
cacacactggctgaaagggataata

SEQ ID NO: 31715 - DNA, 25 bp, Homo sapiens
atgacgtcagtgttcccttccaatg

SEQ ID NO: 31716 - DNA, 25 bp, Homo sapiens
ctgggagccaccctttgcacaattc

SEQ ID NO: 31717 - DNA, 25 bp, Homo sapiens
cctgcagcctgactttgggcaaatc

SEQ ID NO: 31718 - DNA, 25 bp, Homo sapiens
ctcaactctgcctggggagaacatg

SEQ ID NO: 31719 - DNA, 25 bp, Homo sapiens
tgcactgctctgtgatcccatgtta

SEQ ID NO: 31720 - DNA, 25 bp, Homo sapiens
tctagaggcagaaggataacatcgc

SEQ ID NO: 31721 - DNA, 25 bp, Homo sapiens
aaggcaagttgtttggacagcatca

SEQ ID NO: 31722 - DNA, 25 bp, Homo sapiens
tgtctgtgggaaataagccaattcc

SEQ ID NO: 31723 - DNA, 25 bp, Homo sapiens
ttgacttgaaacagtttattaaggt

SEQ ID NO: 31724 - DNA, 25 bp, Homo sapiens
tgtggccctccacctagaaatatta

SEQ ID NO: 31725 - DNA, 25 bp, Homo sapiens
gggaggatccattagcttttcactg

SEQ ID NO: 31726 - DNA, 25 bp, Homo sapiens
ggcagattctccttcccacagttta

SEQ ID NO: 31727 - DNA, 25 bp, Homo sapiens
ggaacccttggtcttgcaccctaga

SEQ ID NO: 31728 - DNA, 25 bp, Homo sapiens
ggctcctaagttttcccagactcta

SEQ ID NO: 31729 - DNA, 25 bp, Homo sapiens
ccaatgaaccttacttttgctttaa

SEQ ID NO: 31730 - DNA, 25 bp, Homo sapiens
gactgccaatagtgtagcgttattc

SEQ ID NO: 31731 - DNA, 25 bp, Homo sapiens
aggtcaagtagcttccctgtcattg

SEQ ID NO: 31732 - DNA, 25 bp, Homo sapiens
gcagcaagcatgacctcctcacagg

SEQ ID NO: 31733 - DNA, 25 bp, Homo sapiens
ctgagtcttacttcctccagcaagc

SEQ ID NO: 31734 - DNA, 25 bp, Homo sapiens
ctaactcttgattcctttgagatgt

SEQ ID NO: 31735 - DNA, 25 bp, Homo sapiens
tagcaaatacaaaatcattcaggtt

SEQ ID NO: 31736 - DNA, 25 bp, Homo sapiens
ctcagagcgacttcagtgggaaata

SEQ ID NO: 31737 - DNA, 25 bp, Homo sapiens
cattgccttaatggttttacatcta

SEQ ID NO: 31738 - DNA, 25 bp, Homo sapiens
tagggattttatttaacttggatga

SEQ ID NO: 31739 - DNA, 25 bp, Homo sapiens
catgcagttttctcccaggcagtaa

SEQ ID NO: 31740 - DNA, 25 bp, Homo sapiens
gtctctggttggagaaaaactagta

SEQ ID NO: 31741 - DNA, 25 bp, Homo sapiens
agagtgtttactgacttcaaggcca

SEQ ID NO: 31742 - DNA, 25 bp, Homo sapiens
ccctggaaggctgaataagttaagc

SEQ ID NO: 31743 - DNA, 25 bp, Homo sapiens
aaaaacctgataaatgtgtaccaaa

SEQ ID NO: 31744 - DNA, 25 bp, Homo sapiens
ctactgttcttttacttggtctgca

SEQ ID NO: 31745 - DNA, 25 bp, Homo sapiens
gcacattgcgggaaaagctcacttc

SEQ ID NO: 31746 - DNA, 25 bp, Homo sapiens
ctcctgtgggctagatttgctttga

SEQ ID NO: 31747 - DNA, 25 bp, Homo sapiens
catggcccagcttgatgcttcatta

SEQ ID NO: 31748 - DNA, 25 bp, Homo sapiens
tctggcatgtgctgacctagttctc

SEQ ID NO: 31749 - DNA, 25 bp, Homo sapiens
tctggctccctctgtgatatatgca

SEQ ID NO: 31750 - DNA, 25 bp, Homo sapiens
catagcccccaacagactgaatgag

SEQ ID NO: 31751 - DNA, 25 bp, Homo sapiens
agggtaatggtatcaaaaaaggatt

SEQ ID NO: 31752 - DNA, 25 bp, Homo sapiens
ccagactttgttcatgggcatctca

SEQ ID NO: 31753 - DNA, 25 bp, Homo sapiens
cagccctgctgtaattgaaagaagt

SEQ ID NO: 31754 - DNA, 25 bp, Homo sapiens
ccaggattgtggtgttcatagcata

SEQ ID NO: 31755 - DNA, 25 bp, Homo sapiens
ggcctgcctgccatatgatcctgaa

SEQ ID NO: 31756 - DNA, 25 bp, Homo sapiens
gcacacactgtgaggtctaatgaaa

SEQ ID NO: 31757 - DNA, 25 bp, Homo sapiens
gcactcagcctgaaaagattatttt

SEQ ID NO: 31758 - DNA, 25 bp, Homo sapiens
ctgtggacctgtatcagctgatatc

SEQ ID NO: 31759 - DNA, 25 bp, Homo sapiens
atgcagtttccctccttcttgtgcg

SEQ ID NO: 31760 - DNA, 25 bp, Homo sapiens
agggcactctccattgtcttgtcag

SEQ ID NO: 31761 - DNA, 25 bp, Homo sapiens
ggaaggctgtcctctacttgagaga

SEQ ID NO: 31762 - DNA, 25 bp, Homo sapiens
gtagtagtgggaagacaaggaagaa

SEQ ID NO: 31763 - DNA, 25 bp, Homo sapiens
actgggcacacaagggcagcatttg

SEQ ID NO: 31764 - DNA, 25 bp, Homo sapiens
ccttctcctgttgttgccactgtta

SEQ ID NO: 31765 - DNA, 25 bp, Homo sapiens
tgccactgaatcatgcttctctttg

SEQ ID NO: 31766 - DNA, 25 bp, Homo sapiens
gggcttcttgccctttgtgagctta

SEQ ID NO: 31767 - DNA, 25 bp, Homo sapiens
tgaccatgttggcttctacgtccca

SEQ ID NO: 31768 - DNA, 25 bp, Homo sapiens
cctaagtgtggctaacgggcattta

SEQ ID NO: 31769 - DNA, 25 bp, Homo sapiens
gcactcgtgtgtacaccagaacttg

SEQ ID NO: 31770 - DNA, 25 bp, Homo sapiens
cctgtgttgcctgtcctgtaaagta

SEQ ID NO: 31771 - DNA, 25 bp, Homo sapiens
ggcctaggggaacgcaatctgattc

SEQ ID NO: 31772 - DNA, 25 bp, Homo sapiens
gtggtatggcacaactctactcaga

SEQ ID NO: 31773 - DNA, 25 bp, Homo sapiens
ctatcataggaagaaacagctcatc

SEQ ID NO: 31774 - DNA, 25 bp, Homo sapiens
gcaaggcttttcacctccagtcatc

SEQ ID NO: 31775 - DNA, 25 bp, Homo sapiens
ctgcaaccatgtgtgtcctataatg

SEQ ID NO: 31776 - DNA, 25 bp, Homo sapiens
tctgacagcaaaacattggagtttc

SEQ ID NO: 31777 - DNA, 25 bp, Homo sapiens
atatatggattgatattaatttaac

SEQ ID NO: 31778 - DNA, 25 bp, Homo sapiens
ctttgtcggtaattttgactatatt

SEQ ID NO: 31779 - DNA, 25 bp, Homo sapiens
tttaccatgtcacgctttataactg

SEQ ID NO: 31780 - DNA, 25 bp, Homo sapiens
accagttcttacagcccagagtaga

SEQ ID NO: 31781 - DNA, 25 bp, Homo sapiens
gcctaagggtctataatactgcaga

SEQ ID NO: 31782 - DNA, 25 bp, Homo sapiens
cccactgggttctacgttcttcaca

SEQ ID NO: 31783 - DNA, 25 bp, Homo sapiens
ggtgacttagccctaccctgaacta

SEQ ID NO: 31784 - DNA, 25 bp, Homo sapiens
gaggccttggcagtgttctatttga

SEQ ID NO: 31785 - DNA, 25 bp, Homo sapiens
tgtagtcctatgttgccagaacctg

SEQ ID NO: 31786 - DNA, 25 bp, Homo sapiens
tcagcactggttatattttttgcct

SEQ ID NO: 31787 - DNA, 25 bp, Homo sapiens
tggccgatagtgatagcaattgatg

SEQ ID NO: 31788 - DNA, 25 bp, Homo sapiens
gagccagcttgggagactacacata

SEQ ID NO: 31789 - DNA, 25 bp, Homo sapiens
cactcctgatttctgggtatatatc

SEQ ID NO: 31790 - DNA, 25 bp, Homo sapiens
tcatagaggacacagctgtaaagtg

SEQ ID NO: 31791 - DNA, 25 bp, Homo sapiens
agatgcctaggtctccataactgtc

SEQ ID NO: 31792 - DNA, 25 bp, Homo sapiens
taatagagtcgttttccaggcaaca

SEQ ID NO: 31793 - DNA, 25 bp, Homo sapiens
ggcaagcccttgtgtacccaattta

SEQ ID NO: 31794 - DNA, 25 bp, Homo sapiens
tacacttatgagacagcagagccca

SEQ ID NO: 31795 - DNA, 25 bp, Homo sapiens
ggaatactgctattgccacccatgg

SEQ ID NO: 31796 - DNA, 25 bp, Homo sapiens
tcagcttggctgtgtatcatatcca

SEQ ID NO: 31797 - DNA, 25 bp, Homo sapiens
gtcccagcaggaattagtcaaaaga

SEQ ID NO: 31798 - DNA, 25 bp, Homo sapiens
gtcggtctccacacgcaagctaatt

SEQ ID NO: 31799 - DNA, 25 bp, Homo sapiens
atgccggacactgcttaagcattta

SEQ ID NO: 31800 - DNA, 25 bp, Homo sapiens
ggactcagtcacatgcccaatttgg

SEQ ID NO: 31801 - DNA, 25 bp, Homo sapiens
tgcacaatctgcacagcaagccttg

SEQ ID NO: 31802 - DNA, 25 bp, Homo sapiens
ctaggcctacagaaatgacccattc

SEQ ID NO: 31803 - DNA, 25 bp, Homo sapiens
tatgctacagcaaataaaatagatt

SEQ ID NO: 31804 - DNA, 25 bp, Homo sapiens
atattaaaaatatgagaaaagtacc

SEQ ID NO: 31805 - DNA, 25 bp, Homo sapiens
tccaggatttgacatgagtagcgtc

SEQ ID NO: 31806 - DNA, 25 bp, Homo sapiens
tgagatgctctatctaacacagaga

SEQ ID NO: 31807 - DNA, 25 bp, Homo sapiens
cctcattggcttgaagttgaattcc

SEQ ID NO: 31808 - DNA, 25 bp, Homo sapiens
agagatcccagacccagaatgttgc

SEQ ID NO: 31809 - DNA, 25 bp, Homo sapiens
tcagatgcccagtgaatactaagcc

SEQ ID NO: 31810 - DNA, 25 bp, Homo sapiens
ctgctgctgaataacaactgcttta

SEQ ID NO: 31811 - DNA, 25 bp, Homo sapiens
tctgccagatactgctgagaaacca

SEQ ID NO: 31812 - DNA, 25 bp, Homo sapiens
gacttgttgctcttcccgccatttg

SEQ ID NO: 31813 - DNA, 25 bp, Homo sapiens
tgtggtcagtgccagtaaacccatc

SEQ ID NO: 31814 - DNA, 25 bp, Homo sapiens
tcttttttccaagcctagaggactc

SEQ ID NO: 31815 - DNA, 25 bp, Homo sapiens
agactgtctcctccttgactgagta

SEQ ID NO: 31816 - DNA, 25 bp, Homo sapiens
gtgtaaagttccaaaaggcaggaca

SEQ ID NO: 31817 - DNA, 25 bp, Homo sapiens
ccatgcccagtttctgttactttga

SEQ ID NO: 31818 - DNA, 25 bp, Homo sapiens
atctggattttgcattgggcatatg

SEQ ID NO: 31819 - DNA, 25 bp, Homo sapiens
taaattaagtaggggctttgttttc

SEQ ID NO: 31820 - DNA, 25 bp, Homo sapiens
gctgtgggttactgacacgcagtta

SEQ ID NO: 31821 - DNA, 25 bp, Homo sapiens
ggagagccatacttacagctgggta

SEQ ID NO: 31822 - DNA, 25 bp, Homo sapiens
cccttgacaaaggtggggtggtatc

SEQ ID NO: 31823 - DNA, 25 bp, Homo sapiens
gtcgttttgacaggcatactcttgg

SEQ ID NO: 31824 - DNA, 25 bp, Homo sapiens
ctgtgccatggttccacaaaggcta

SEQ ID NO: 31825 - DNA, 25 bp, Homo sapiens
agatgccacctcaccagaagctgta

SEQ ID NO: 31826 - DNA, 25 bp, Homo sapiens
ggctgaccctctcagcaccaaagta

SEQ ID NO: 31827 - DNA, 25 bp, Homo sapiens
catacggttagccacttattaaata

SEQ ID NO: 31828 - DNA, 25 bp, Homo sapiens
caatagcattaagtagtggggcaca

SEQ ID NO: 31829 - DNA, 25 bp, Homo sapiens
agtcactgtcttacctccttaattg

SEQ ID NO: 31830 - DNA, 25 bp, Homo sapiens
acccagtgtggcaagaaaattcatg

SEQ ID NO: 31831 - DNA, 25 bp, Homo sapiens
caccagctgggatgtggcaatttta

SEQ ID NO: 31832 - DNA, 25 bp, Homo sapiens
tttacccaaggaaggcaagtctagc

SEQ ID NO: 31833 - DNA, 25 bp, Homo sapiens
aggcacctttggtccctatttgaag

SEQ ID NO: 31834 - DNA, 25 bp, Homo sapiens
ggggccggtgtgacatccacaattt

SEQ ID NO: 31835 - DNA, 25 bp, Homo sapiens
aggctttctgcttcctgtgttggca

SEQ ID NO: 31836 - DNA, 25 bp, Homo sapiens
gtggtatcttctaaatgtaattatc

SEQ ID NO: 31837 - DNA, 25 bp, Homo sapiens
ggcaattctgccttgggccaccata

SEQ ID NO: 31838 - DNA, 25 bp, Homo sapiens
gatagaatcttgaggatacaaaaaa

SEQ ID NO: 31839 - DNA, 25 bp, Homo sapiens
gaggcacagccatttagaatcattg

SEQ ID NO: 31840 - DNA, 25 bp, Homo sapiens
ctaggccttcccaggtaggtgattt

SEQ ID NO: 31841 - DNA, 25 bp, Homo sapiens
aggaattcagtcaagtctagtcatc

SEQ ID NO: 31842 - DNA, 25 bp, Homo sapiens
tgatgtataaagcaatattagggta

SEQ ID NO: 31843 - DNA, 25 bp, Homo sapiens
cccacccttggagtggagtgtgtta

SEQ ID NO: 31844 - DNA, 25 bp, Homo sapiens
tgcccttgctatagactggaatttc

SEQ ID NO: 31845 - DNA, 25 bp, Homo sapiens
ggccttgtctgcttccaaacactga

SEQ ID NO: 31846 - DNA, 25 bp, Homo sapiens
gggcacaatgtctcctctctaaatg

SEQ ID NO: 31847 - DNA, 25 bp, Homo sapiens
tcaaattttccctgaggctgccagc

SEQ ID NO: 31848 - DNA, 25 bp, Homo sapiens
tggcagggcacagctctagttgaca

SEQ ID NO: 31849 - DNA, 25 bp, Homo sapiens
cctccaggtagttgtacagaaattc

SEQ ID NO: 31850 - DNA, 25 bp, Homo sapiens
ttcaggcatagggtcatcaatcatc

SEQ ID NO: 31851 - DNA, 25 bp, Homo sapiens
tggtggtccctgagtacgatcctca

SEQ ID NO: 31852 - DNA, 25 bp, Homo sapiens
cagtctcagtggaagggcctcttaa

SEQ ID NO: 31853 - DNA, 25 bp, Homo sapiens
atagcctctctttgggaaatccgtc

SEQ ID NO: 31854 - DNA, 25 bp, Homo sapiens
gaggtgccactactgcccgcatttt

SEQ ID NO: 31855 - DNA, 25 bp, Homo sapiens
ggaattaaaaaaatttcctttggaa

SEQ ID NO: 31856 - DNA, 25 bp, Homo sapiens
aggctgaccctgctttgaccatatc

SEQ ID NO: 31857 - DNA, 25 bp, Homo sapiens
cccatagaggcaccaggatcagata

SEQ ID NO: 31858 - DNA, 25 bp, Homo sapiens
gtcagccttatacatttgtgccata

SEQ ID NO: 31859 - DNA, 25 bp, Homo sapiens
taggttcctccattcgtccacactg

SEQ ID NO: 31860 - DNA, 25 bp, Homo sapiens
gagcagcctattgcctacaagaaac

SEQ ID NO: 31861 - DNA, 25 bp, Homo sapiens
gggctgatgagctatgccttcacta

SEQ ID NO: 31862 - DNA, 25 bp, Homo sapiens
ggtatcactgataattttatagaaa

SEQ ID NO: 31863 - DNA, 25 bp, Homo sapiens
ctcggtcccagaaattgtctcttta

SEQ ID NO: 31864 - DNA, 25 bp, Homo sapiens
ttccagtgggttacaaacaccggtc

SEQ ID NO: 31865 - DNA, 25 bp, Homo sapiens
tggctagtcagagaggaagaacata

SEQ ID NO: 31866 - DNA, 25 bp, Homo sapiens
cccagttcttgtgggatgataacca

SEQ ID NO: 31867 - DNA, 25 bp, Homo sapiens
catcgcaggggtcttagttatcaac

SEQ ID NO: 31868 - DNA, 25 bp, Homo sapiens
tgtcctggagaaaactgaacatctg

SEQ ID NO: 31869 - DNA, 25 bp, Homo sapiens
tcccaggagaattaacaggctatca

SEQ ID NO: 31870 - DNA, 25 bp, Homo sapiens
ggcacctggaactgggatctagaga

SEQ ID NO: 31871 - DNA, 25 bp, Homo sapiens
gcatttgcacacaatggcccgtatg

SEQ ID NO: 31872 - DNA, 25 bp, Homo sapiens
tcactattgacccagagttgaattg

SEQ ID NO: 31873 - DNA, 25 bp, Homo sapiens
attccctgtcttaacaaatagcatt

SEQ ID NO: 31874 - DNA, 25 bp, Homo sapiens
gggttctttcccaccagactgttga

SEQ ID NO: 31875 - DNA, 25 bp, Homo sapiens
gggatttgggttgagcggagttagg

SEQ ID NO: 31876 - DNA, 25 bp, Homo sapiens
tgctgtactgtttctccagaggcta

SEQ ID NO: 31877 - DNA, 25 bp, Homo sapiens
agcaacagctttcaccttttgaaga

SEQ ID NO: 31878 - DNA, 25 bp, Homo sapiens
gttaggtgggctatcttcaagacta

SEQ ID NO: 31879 - DNA, 25 bp, Homo sapiens
acagggctggaactagcgttatgca

SEQ ID NO: 31880 - DNA, 25 bp, Homo sapiens
ccctttcgggcaagatcatgctttg

SEQ ID NO: 31881 - DNA, 25 bp, Homo sapiens
acgggtttctttcaggtatttggca

SEQ ID NO: 31882 - DNA, 25 bp, Homo sapiens
ccaggggctgactctcagttaaatg

SEQ ID NO: 31883 - DNA, 25 bp, Homo sapiens
cctggagcccagtgttgaagaatga

SEQ ID NO: 31884 - DNA, 25 bp, Homo sapiens
ctggacacctcctgaattcttaata

SEQ ID NO: 31885 - DNA, 25 bp, Homo sapiens
gtgcctgcagccctttctcaagatg

SEQ ID NO: 31886 - DNA, 25 bp, Homo sapiens
ttggcctttaggtacgaggagtttc

SEQ ID NO: 31887 - DNA, 25 bp, Homo sapiens
attgctgagtagaccactgtccttg

SEQ ID NO: 31888 - DNA, 25 bp, Homo sapiens
cctttccggcagagaagcaacatta

SEQ ID NO: 31889 - DNA, 25 bp, Homo sapiens
gttgggaaaatattctcctatgctc

SEQ ID NO: 31890 - DNA, 25 bp, Homo sapiens
ttttagaatacagaaggaaaagtat

SEQ ID NO: 31891 - DNA, 25 bp, Homo sapiens
catccacgtggcaagaattttcaga

SEQ ID NO: 31892 - DNA, 25 bp, Homo sapiens
gtcttggaccttacgatctagcatg

SEQ ID NO: 31893 - DNA, 25 bp, Homo sapiens
ccagagagcgggcttatagtaattc

SEQ ID NO: 31894 - DNA, 25 bp, Homo sapiens
ggctgcccgactacatgatacaatt

SEQ ID NO: 31895 - DNA, 25 bp, Homo sapiens
ttgccacctggtagaatgtatcttg

SEQ ID NO: 31896 - DNA, 25 bp, Homo sapiens
ctcttggcaactacccagaagtttc

SEQ ID NO: 31897 - DNA, 25 bp, Homo sapiens
tcggagtgagctacgcaattaggca

SEQ ID NO: 31898 - DNA, 25 bp, Homo sapiens
ggcaaactgcttattctacctctta

SEQ ID NO: 31899 - DNA, 25 bp, Homo sapiens
cttctactggcatagttctggatta

SEQ ID NO: 31900 - DNA, 25 bp, Homo sapiens
atgtgcattcccttctctccagtca

SEQ ID NO: 31901 - DNA, 25 bp, Homo sapiens
atcgctgtgttgaaatgccattggc

SEQ ID NO: 31902 - DNA, 25 bp, Homo sapiens
cttcaccaagagcaaccagtgtttc

SEQ ID NO: 31903 - DNA, 25 bp, Homo sapiens
ctggctccactttgtattagaaagg

SEQ ID NO: 31904 - DNA, 25 bp, Homo sapiens
tgccctggggttaatcaaatatttc

SEQ ID NO: 31905 - DNA, 25 bp, Homo sapiens
ggacaatttcctgaagacagtgttc

SEQ ID NO: 31906 - DNA, 25 bp, Homo sapiens
tcttactcagagttggcaatgctgc

SEQ ID NO: 31907 - DNA, 25 bp, Homo sapiens
gtttgatgggaacagacaagcgaga

SEQ ID NO: 31908 - DNA, 25 bp, Homo sapiens
actggctgtgtctcctatgaactca

SEQ ID NO: 31909 - DNA, 25 bp, Homo sapiens
cttcgggtctgggttaatttatata

SEQ ID NO: 31910 - DNA, 25 bp, Homo sapiens
tggtggccatttctattttctttga

SEQ ID NO: 31911 - DNA, 25 bp, Homo sapiens
ctctgtgacatctttccttgactta

SEQ ID NO: 31912 - DNA, 25 bp, Homo sapiens
tgggcctactccacagttttagata

SEQ ID NO: 31913 - DNA, 25 bp, Homo sapiens
gtgacaggtacttcaattttctctc

SEQ ID NO: 31914 - DNA, 25 bp, Homo sapiens
atcccttgaagagctgcactgactg

SEQ ID NO: 31915 - DNA, 25 bp, Homo sapiens
gctgacactgtctttcctcaacctg

SEQ ID NO: 31916 - DNA, 25 bp, Homo sapiens
gcctccctagaattctgtgcattga

SEQ ID NO: 31917 - DNA, 25 bp, Homo sapiens
ccaggtcaatagaaggcggtgcaaa

SEQ ID NO: 31918 - DNA, 25 bp, Homo sapiens
tggtcacctcaaacaatcctctgcg

SEQ ID NO: 31919 - DNA, 25 bp, Homo sapiens
atgttcaatgggctcctcaggtcta

SEQ ID NO: 31920 - DNA, 25 bp, Homo sapiens
cactgctcctgatgcctggtttaaa

SEQ ID NO: 31921 - DNA, 25 bp, Homo sapiens
gttgccagtggctcctaaaacccta

SEQ ID NO: 31922 - DNA, 25 bp, Homo sapiens
cggctggtaaagtcaagagtgcata

SEQ ID NO: 31923 - DNA, 25 bp, Homo sapiens
cctctgatggcatgttccttgagta

SEQ ID NO: 31924 - DNA, 25 bp, Homo sapiens
atccttactaggtaggcaccttttg

SEQ ID NO: 31925 - DNA, 25 bp, Homo sapiens
tgcgtgcgtgtgtgtataatttcta

SEQ ID NO: 31926 - DNA, 25 bp, Homo sapiens
ttacttcaatactggagggcagatg

SEQ ID NO: 31927 - DNA, 25 bp, Homo sapiens
tacagctggctggaagatccttttc

SEQ ID NO: 31928 - DNA, 25 bp, Homo sapiens
gcttgctgctataaaggggacttta

SEQ ID NO: 31929 - DNA, 25 bp, Homo sapiens
cagagtgtcacctttaacaacaata

SEQ ID NO: 31930 - DNA, 25 bp, Homo sapiens
agaaagagctgttactcccaaagga

SEQ ID NO: 31931 - DNA, 25 bp, Homo sapiens
ctgagggtccttcctataatatcta

SEQ ID NO: 31932 - DNA, 25 bp, Homo sapiens
gggcaaacttgcattcagctacaga

SEQ ID NO: 31933 - DNA, 25 bp, Homo sapiens
cctggcaagctttcgctattatatc

SEQ ID NO: 31934 - DNA, 25 bp, Homo sapiens
tggctcaggcacagacgcaaacttc

SEQ ID NO: 31935 - DNA, 25 bp, Homo sapiens
tttaagccaggttcccacaatgata

SEQ ID NO: 31936 - DNA, 25 bp, Homo sapiens
actcttgtcaggaaacttaaatcta

SEQ ID NO: 31937 - DNA, 25 bp, Homo sapiens
ccacagtgcttcctcacctatagga

SEQ ID NO: 31938 - DNA, 25 bp, Homo sapiens
tttctggaacgagagcgccactttc

SEQ ID NO: 31939 - DNA, 25 bp, Homo sapiens
gcacacttatgattccttggcttta

SEQ ID NO: 31940 - DNA, 25 bp, Homo sapiens
tgtgctttgctgattacctatattc

SEQ ID NO: 31941 - DNA, 25 bp, Homo sapiens
agcctggtctgcattctcacacaaa

SEQ ID NO: 31942 - DNA, 25 bp, Homo sapiens
tggtgccggcaatggatatcagttc

SEQ ID NO: 31943 - DNA, 25 bp, Homo sapiens
tctagagcccactgaaccctgaagg

SEQ ID NO: 31944 - DNA, 25 bp, Homo sapiens
aaatgtgctctagtggtttttacca

SEQ ID NO: 31945 - DNA, 25 bp, Homo sapiens
atccaagcagcttctaggcattaga

SEQ ID NO: 31946 - DNA, 25 bp, Homo sapiens
tgccgaagacatgccacagctgctc

SEQ ID NO: 31947 - DNA, 25 bp, Homo sapiens
ggggccttttgccacagtatttttt

SEQ ID NO: 31948 - DNA, 25 bp, Homo sapiens
tacaaagttcaagcatggtcatatc

SEQ ID NO: 31949 - DNA, 25 bp, Homo sapiens
taacaattataatgataccaacaga

SEQ ID NO: 31950 - DNA, 25 bp, Homo sapiens
agttgttgctccattccctggtgca

SEQ ID NO: 31951 - DNA, 25 bp, Homo sapiens
ggggtggggaatcacatatttttca

SEQ ID NO: 31952 - DNA, 25 bp, Homo sapiens
agcactctaggccaaaggaactcta

SEQ ID NO: 31953 - DNA, 25 bp, Homo sapiens
ccaggacctacgttggggtatcaca

SEQ ID NO: 31954 - DNA, 25 bp, Homo sapiens
aggccaatcttttttctttgtgaaa

SEQ ID NO: 31955 - DNA, 25 bp, Homo sapiens
gaatgatcttttctcaatttctgtg

SEQ ID NO: 31956 - DNA, 25 bp, Homo sapiens
atggcagttaaagtcctgtacattc

SEQ ID NO: 31957 - DNA, 25 bp, Homo sapiens
caagactctagttggccagtttgcc

SEQ ID NO: 31958 - DNA, 25 bp, Homo sapiens
atgattcctgtcttaatttctgtga

SEQ ID NO: 31959 - DNA, 25 bp, Homo sapiens
tccttagtgcattagggcattacca

SEQ ID NO: 31960 - DNA, 25 bp, Homo sapiens
tgtcagggcagatttacgaacttcc

SEQ ID NO: 31961 - DNA, 25 bp, Homo sapiens
tctgactggccctaagagacacttg

SEQ ID NO: 31962 - DNA, 25 bp, Homo sapiens
tgtcactctctttgttctagctgta

SEQ ID NO: 31963 - DNA, 25 bp, Homo sapiens
tgatagagtgcctagtatgatgcgc

SEQ ID NO: 31964 - DNA, 25 bp, Homo sapiens
ctggcggacacctttagcttgttta

SEQ ID NO: 31965 - DNA, 25 bp, Homo sapiens
caggtctcaggtctcaggtcaaagc

SEQ ID NO: 31966 - DNA, 25 bp, Homo sapiens
caggcttagcaaactgatgtcctta

SEQ ID NO: 31967 - DNA, 25 bp, Homo sapiens
ccaggatgccatctttaagtgtcta

SEQ ID NO: 31968 - DNA, 25 bp, Homo sapiens
gtggccttcctttgcacagtaagtc

SEQ ID NO: 31969 - DNA, 25 bp, Homo sapiens
cttcgggtggaaattcagaggacta

SEQ ID NO: 31970 - DNA, 25 bp, Homo sapiens
ctgcccttgtggtgaaacatgtatc

SEQ ID NO: 31971 - DNA, 25 bp, Homo sapiens
gctccagcacgaccttccaaagtta

SEQ ID NO: 31972 - DNA, 25 bp, Homo sapiens
acactgctggttttcacttagggta

SEQ ID NO: 31973 - DNA, 25 bp, Homo sapiens
acctggttagtcttgattgcactga

SEQ ID NO: 31974 - DNA, 25 bp, Homo sapiens
ctctctgagtactgggtagtcccta

SEQ ID NO: 31975 - DNA, 25 bp, Homo sapiens
gagccgttctgcacacctgtctaga

SEQ ID NO: 31976 - DNA, 25 bp, Homo sapiens
gcgccagatttgttttctccacttg

SEQ ID NO: 31977 - DNA, 25 bp, Homo sapiens
tctggacttggaaatgcataaactc

SEQ ID NO: 31978 - DNA, 25 bp, Homo sapiens
cagtacatcttacagcgggctaata

SEQ ID NO: 31979 - DNA, 25 bp, Homo sapiens
aggtctttttactacttctggaata

SEQ ID NO: 31980 - DNA, 25 bp, Homo sapiens
tgaccctccacgcagaaatcctgtg

SEQ ID NO: 31981 - DNA, 25 bp, Homo sapiens
agtgctgcctctgattctgtttata

SEQ ID NO: 31982 - DNA, 25 bp, Homo sapiens
gctgtggccatgactgttcctaaaa

SEQ ID NO: 31983 - DNA, 25 bp, Homo sapiens
cgttgactgtttaagagcaagaagg

SEQ ID NO: 31984 - DNA, 25 bp, Homo sapiens
tgctaagcaatatgagaccacagtg

SEQ ID NO: 31985 - DNA, 25 bp, Homo sapiens
tcctgccagtggaaatgtaaactcc

SEQ ID NO: 31986 - DNA, 25 bp, Homo sapiens
ttagcagcatgtcgcaggttccacc

SEQ ID NO: 31987 - DNA, 25 bp, Homo sapiens
actgatgtcttacaacccagatagg

SEQ ID NO: 31988 - DNA, 25 bp, Homo sapiens
ggagggtgtacagatattcatatta

SEQ ID NO: 31989 - DNA, 25 bp, Homo sapiens
cacagtatttggaaaccaactgttc

SEQ ID NO: 31990 - DNA, 25 bp, Homo sapiens
gagcctattattgactcctcaaaga

SEQ ID NO: 31991 - DNA, 25 bp, Homo sapiens
ctcgtccagggttcggtacatagca

SEQ ID NO: 31992 - DNA, 25 bp, Homo sapiens
agcagccaccaagagacccggatgc

SEQ ID NO: 31993 - DNA, 25 bp, Homo sapiens
cttgcacttagggacagcatccttc

SEQ ID NO: 31994 - DNA, 25 bp, Homo sapiens
ttggaactccctggctactgactga

SEQ ID NO: 31995 - DNA, 25 bp, Homo sapiens
tggaaactatgttgtcgaaaccctc

SEQ ID NO: 31996 - DNA, 25 bp, Homo sapiens
ggtagtcatctcctctgtggcacta

SEQ ID NO: 31997 - DNA, 25 bp, Homo sapiens
gcacagctctgtttgctagtgaata

SEQ ID NO: 31998 - DNA, 25 bp, Homo sapiens
catgttttccaaatgccaaataggg

SEQ ID NO: 31999 - DNA, 25 bp, Homo sapiens
ccattctctcgccaaggggttcttg

SEQ ID NO: 32000 - DNA, 25 bp, Homo sapiens
tccaagaaacagctgaaaccacaga

SEQ ID NO: 32001 - DNA, 25 bp, Homo sapiens
cacggcctgtgtggttttcagataa

SEQ ID NO: 32002 - DNA, 25 bp, Homo sapiens
acaccctgggcaatgcaatgttgga

SEQ ID NO: 32003 - DNA, 25 bp, Homo sapiens
aggctgcgtactttgaggttcatgc

SEQ ID NO: 32004 - DNA, 25 bp, Homo sapiens
gagggctgtgcagaaaattcaatta

SEQ ID NO: 32005 - DNA, 25 bp, Homo sapiens
tatttgttaaattcttactccgaat

SEQ ID NO: 32006 - DNA, 25 bp, Homo sapiens
gctggctgagtttcatgcttcctga

SEQ ID NO: 32007 - DNA, 25 bp, Homo sapiens
cgaaatagctagtggtatttcattt

SEQ ID NO: 32008 - DNA, 25 bp, Homo sapiens
ttgggactatttcaccaggctgttg

SEQ ID NO: 32009 - DNA, 25 bp, Homo sapiens
ccttggaagtggtggcttggtaaca

SEQ ID NO: 32010 - DNA, 25 bp, Homo sapiens
cgggccatgtctagccacaccaaga

SEQ ID NO: 32011 - DNA, 25 bp, Homo sapiens
tagctgctcctaggccatgtgattg

SEQ ID NO: 32012 - DNA, 25 bp, Homo sapiens
tgtacatctgctaagtcacctgggg

SEQ ID NO: 32013 - DNA, 25 bp, Homo sapiens
tagtccaccagtgataaccagaatg

SEQ ID NO: 32014 - DNA, 25 bp, Homo sapiens
gtgtatatgtacatgtgtgcacatc

SEQ ID NO: 32015 - DNA, 25 bp, Homo sapiens
tttgagagatcaatgaggtctagtc

SEQ ID NO: 32016 - DNA, 25 bp, Homo sapiens
ctttctttaaacagagtgtctcata

SEQ ID NO: 32017 - DNA, 25 bp, Homo sapiens
cttggaacagtgatatagctgctgc

SEQ ID NO: 32018 - DNA, 25 bp, Homo sapiens
gtccgcctgagaaagtgatgataca

SEQ ID NO: 32019 - DNA, 25 bp, Homo sapiens
gaaacctccatttcccttatgaact

SEQ ID NO: 32020 - DNA, 25 bp, Homo sapiens
gctacaccagtgagggctattttta

SEQ ID NO: 32021 - DNA, 25 bp, Homo sapiens
ccaggaggagtggactgaatttttc

SEQ ID NO: 32022 - DNA, 25 bp, Homo sapiens
cagctctgtcattctgtggggattt

SEQ ID NO: 32023 - DNA, 25 bp, Homo sapiens
gccactgagcctggtgccatgtata

SEQ ID NO: 32024 - DNA, 25 bp, Homo sapiens
ggtccagcctaacagcctgcatatg

SEQ ID NO: 32025 - DNA, 25 bp, Homo sapiens
caggccttctctctcgctggaaaga

SEQ ID NO: 32026 - DNA, 25 bp, Homo sapiens
gcggtggtcctaatgggttattcta

SEQ ID NO: 32027 - DNA, 25 bp, Homo sapiens
ccaggcccaggacagaagaaatata

SEQ ID NO: 32028 - DNA, 25 bp, Homo sapiens
gccttttgagcctcctacgggaata

SEQ ID NO: 32029 - DNA, 25 bp, Homo sapiens
cccaggactgtttagactttgctta

SEQ ID NO: 32030 - DNA, 25 bp, Homo sapiens
cattcctgaatgtaggtcctgaggc

SEQ ID NO: 32031 - DNA, 25 bp, Homo sapiens
gactgggctgttttcttttgtttaa

SEQ ID NO: 32032 - DNA, 25 bp, Homo sapiens
cataaaacaagaagggacaaaaata

SEQ ID NO: 32033 - DNA, 25 bp, Homo sapiens
cctgagacctaccattgagtaaatg

SEQ ID NO: 32034 - DNA, 25 bp, Homo sapiens
tccctgataaggtgaagatagcctc

SEQ ID NO: 32035 - DNA, 25 bp, Homo sapiens
caggtggcccagtgtatgttgatac

SEQ ID NO: 32036 - DNA, 25 bp, Homo sapiens
ctcaaggaggccctgttgttctttc

SEQ ID NO: 32037 - DNA, 25 bp, Homo sapiens
gtgcagccctcatacctgctgagca

SEQ ID NO: 32038 - DNA, 25 bp, Homo sapiens
ggcagccctgcatccctaaatatca

SEQ ID NO: 32039 - DNA, 25 bp, Homo sapiens
tgtccctttgcaatcctccttagta

SEQ ID NO: 32040 - DNA, 25 bp, Homo sapiens
acagaggccttgtgtgtaattccta

SEQ ID NO: 32041 - DNA, 25 bp, Homo sapiens
cgacattggttatttctgagcaaca

SEQ ID NO: 32042 - DNA, 25 bp, Homo sapiens
tctggaaaatcagggcaggagcctc

SEQ ID NO: 32043 - DNA, 25 bp, Homo sapiens
gccctgggcttgtcactaattccta

SEQ ID NO: 32044 - DNA, 25 bp, Homo sapiens
gaccacaggttgctttctacagttc

SEQ ID NO: 32045 - DNA, 25 bp, Homo sapiens
gggccatggcaaggttatacatttc

SEQ ID NO: 32046 - DNA, 25 bp, Homo sapiens
atctggtgtcattcgaggtctttta

SEQ ID NO: 32047 - DNA, 25 bp, Homo sapiens
ggacgcttctcccacaccataatta

SEQ ID NO: 32048 - DNA, 25 bp, Homo sapiens
tgtcatcgtttctcccagggcagtt

SEQ ID NO: 32049 - DNA, 25 bp, Homo sapiens
ctgaggccttgctacatggagattc

SEQ ID NO: 32050 - DNA, 25 bp, Homo sapiens
ctgtcttgagaataatggagccgga

SEQ ID NO: 32051 - DNA, 25 bp, Homo sapiens
ctctaggggcctctattgcaataaa

SEQ ID NO: 32052 - DNA, 25 bp, Homo sapiens
ggcttggcctatggatcctactgtg

SEQ ID NO: 32053 - DNA, 25 bp, Homo sapiens
tctgcccaggtgatgtttatcctcc

SEQ ID NO: 32054 - DNA, 25 bp, Homo sapiens
ctgcccatgtgctgtgctttggatc

SEQ ID NO: 32055 - DNA, 25 bp, Homo sapiens
cacaagtggtgtcctgctgaccaaa

SEQ ID NO: 32056 - DNA, 25 bp, Homo sapiens
cctccagaggaggttgatccatgtc

SEQ ID NO: 32057 - DNA, 25 bp, Homo sapiens
ctatagcagtgcaaggtggccctcc

SEQ ID NO: 32058 - DNA, 25 bp, Homo sapiens
tggtacaagccagccatgaaatgtt

SEQ ID NO: 32059 - DNA, 25 bp, Homo sapiens
ctcatcggtcccagtgcacagaatg

SEQ ID NO: 32060 - DNA, 25 bp, Homo sapiens
cagggttctcttctgatactccatc

SEQ ID NO: 32061 - DNA, 25 bp, Homo sapiens
acctgttattttttagctatgtcat

SEQ ID NO: 32062 - DNA, 25 bp, Homo sapiens
caaccagatcttgtgcatccagaga

SEQ ID NO: 32063 - DNA, 25 bp, Homo sapiens
caggcaccctactaagctctttata

SEQ ID NO: 32064 - DNA, 25 bp, Homo sapiens
gcaggcagcagcgttgtttgaatta

SEQ ID NO: 32065 - DNA, 25 bp, Homo sapiens
ggcttcggtgtagtcataatcatta

SEQ ID NO: 32066 - DNA, 25 bp, Homo sapiens
tccacctggcctggtagctgtacta

SEQ ID NO: 32067 - DNA, 25 bp, Homo sapiens
ctttacattgtatttcctaacgtcc

SEQ ID NO: 32068 - DNA, 25 bp, Homo sapiens
ggcctgctgcttgtccactcattgc

SEQ ID NO: 32069 - DNA, 25 bp, Homo sapiens
ggcagtgtatttccttatcagagca

SEQ ID NO: 32070 - DNA, 25 bp, Homo sapiens
gtctgatacctccaaggaacttgtg

SEQ ID NO: 32071 - DNA, 25 bp, Homo sapiens
cgtgctcttgctctggataaatcca

SEQ ID NO: 32072 - DNA, 25 bp, Homo sapiens
acatgagagcatttcccagggagtc

SEQ ID NO: 32073 - DNA, 25 bp, Homo sapiens
tgtctccaatgtgtccagaatgttg

SEQ ID NO: 32074 - DNA, 25 bp, Homo sapiens
ggcagggatccactttctctttttc

SEQ ID NO: 32075 - DNA, 25 bp, Homo sapiens
cacgtgggctgttaaagaatgtttc

SEQ ID NO: 32076 - DNA, 25 bp, Homo sapiens
ccaggagtgtgtggtgcatctattc

SEQ ID NO: 32077 - DNA, 25 bp, Homo sapiens
aagactcctttgcttctggggaaga

SEQ ID NO: 32078 - DNA, 25 bp, Homo sapiens
acctggctcttatgcatactcattg

SEQ ID NO: 32079 - DNA, 25 bp, Homo sapiens
gtgcattctttgttgtgaggcttca

SEQ ID NO: 32080 - DNA, 25 bp, Homo sapiens
tagagtgctaagatctcatgttctc

SEQ ID NO: 32081 - DNA, 25 bp, Homo sapiens
ttttatttctcaagtaatctaacct

SEQ ID NO: 32082 - DNA, 25 bp, Homo sapiens
atggcctggatctgtcttactaagc

SEQ ID NO: 32083 - DNA, 25 bp, Homo sapiens
tctgcttctaagatggtgccttgta

SEQ ID NO: 32084 - DNA, 25 bp, Homo sapiens
tgtaggtagtaaggacagcctatgt

SEQ ID NO: 32085 - DNA, 25 bp, Homo sapiens
tacttctctggtgatggcggatatc

SEQ ID NO: 32086 - DNA, 25 bp, Homo sapiens
aggtggtacccagtgacatgtcttc

SEQ ID NO: 32087 - DNA, 25 bp, Homo sapiens
ctgccagtggcagacagcactaatc

SEQ ID NO: 32088 - DNA, 25 bp, Homo sapiens
cattttacaaccagaagctctggac

SEQ ID NO: 32089 - DNA, 25 bp, Homo sapiens
tgagtttccagtacctagggctgta

SEQ ID NO: 32090 - DNA, 25 bp, Homo sapiens
cctgtcaagtacctaagcaagtggg

SEQ ID NO: 32091 - DNA, 25 bp, Homo sapiens
ggtgactcaatgctaaagggtatta

SEQ ID NO: 32092 - DNA, 25 bp, Homo sapiens
ctacaggagatgctaggagacataa

SEQ ID NO: 32093 - DNA, 25 bp, Homo sapiens
tccttcagtggtcaattagagcata

SEQ ID NO: 32094 - DNA, 25 bp, Homo sapiens
tgacaggctcaatttaaaactcatt

SEQ ID NO: 32095 - DNA, 25 bp, Homo sapiens
agaggtctctctgcccatggtttta

SEQ ID NO: 32096 - DNA, 25 bp, Homo sapiens
acgtggtctccagagtcaggaaatc

SEQ ID NO: 32097 - DNA, 25 bp, Homo sapiens
tctggctcgaaaccttaatgctttg

SEQ ID NO: 32098 - DNA, 25 bp, Homo sapiens
tttgggagctgcacaacgatctttg

SEQ ID NO: 32099 - DNA, 25 bp, Homo sapiens
cccagctgcgccatgaaaatttatt

SEQ ID NO: 32100 - DNA, 25 bp, Homo sapiens
tggttagttattgggaatcttacat

SEQ ID NO: 32101 - DNA, 25 bp, Homo sapiens
tgtcaggaagcttgctcagagcatc

SEQ ID NO: 32102 - DNA, 25 bp, Homo sapiens
actctttggtagcttcacgaacttc

SEQ ID NO: 32103 - DNA, 25 bp, Homo sapiens
ctcttattatgtttgtggcccttcc

SEQ ID NO: 32104 - DNA, 25 bp, Homo sapiens
acttgtctggctcgtttgatatctg

SEQ ID NO: 32105 - DNA, 25 bp, Homo sapiens
tggtgctcactaaggctctgctgtc

SEQ ID NO: 32106 - DNA, 25 bp, Homo sapiens
gtccatccttgtaagctgccaaata

SEQ ID NO: 32107 - DNA, 25 bp, Homo sapiens
taatatctgaggtccaatatagaga

SEQ ID NO: 32108 - DNA, 25 bp, Homo sapiens
acttgcttcaatatgggtgctctca

SEQ ID NO: 32109 - DNA, 25 bp, Homo sapiens
gcccgcctattagatacacagaatt

SEQ ID NO: 32110 - DNA, 25 bp, Homo sapiens
tgtgtagctcctaggcctcatcttc

SEQ ID NO: 32111 - DNA, 25 bp, Homo sapiens
ggtatccacgtttccctttagtcca

SEQ ID NO: 32112 - DNA, 25 bp, Homo sapiens
tgccctgctttgttagaccacattg

SEQ ID NO: 32113 - DNA, 25 bp, Homo sapiens
tcaggtgcagctaagagaaattccc

SEQ ID NO: 32114 - DNA, 25 bp, Homo sapiens
gacccaaatggctctgtactcagta

SEQ ID NO: 32115 - DNA, 25 bp, Homo sapiens
ttttttgactgaaaatgtatttaat

SEQ ID NO: 32116 - DNA, 25 bp, Homo sapiens
tgatcctatgttttaaagccctgag

SEQ ID NO: 32117 - DNA, 25 bp, Homo sapiens
ccctgagagctgtggctatttctta

SEQ ID NO: 32118 - DNA, 25 bp, Homo sapiens
agacccagtctcctgctgctgaaga

SEQ ID NO: 32119 - DNA, 25 bp, Homo sapiens
taagtggccaaactagcttcaagtc

SEQ ID NO: 32120 - DNA, 25 bp, Homo sapiens
cgaggatttcctgggaaccaaatta

SEQ ID NO: 32121 - DNA, 25 bp, Homo sapiens
tagaaaaataagaaagataaggaga

SEQ ID NO: 32122 - DNA, 25 bp, Homo sapiens
tgttgccctccagattcagtttttg

SEQ ID NO: 32123 - DNA, 25 bp, Homo sapiens
ggacactcacaggagaccagttttt

SEQ ID NO: 32124 - DNA, 25 bp, Homo sapiens
ggcctggcagtcctgaactgtaaca

SEQ ID NO: 32125 - DNA, 25 bp, Homo sapiens
agctgcagctctttgtgatgtttca

SEQ ID NO: 32126 - DNA, 25 bp, Homo sapiens
tcggcactaggcaggtctttccatg

SEQ ID NO: 32127 - DNA, 25 bp, Homo sapiens
cctgtggcatccctgtgaattctgt

SEQ ID NO: 32128 - DNA, 25 bp, Homo sapiens
gctttcaacatgaggatggccacta

SEQ ID NO: 32129 - DNA, 25 bp, Homo sapiens
ggggaaccttctgtcctagttttga

SEQ ID NO: 32130 - DNA, 25 bp, Homo sapiens
actggctggccctcctattagtgca

SEQ ID NO: 32131 - DNA, 25 bp, Homo sapiens
acaactttggttgggtcttggagtc

SEQ ID NO: 32132 - DNA, 25 bp, Homo sapiens
agtgagtccttcctttgctggtaca

SEQ ID NO: 32133 - DNA, 25 bp, Homo sapiens
ctgtcatgtaaaacttctgccctgg

SEQ ID NO: 32134 - DNA, 25 bp, Homo sapiens
gccagactctttagccttatcagga

SEQ ID NO: 32135 - DNA, 25 bp, Homo sapiens
gggtaacctatcctcaaacctcgta

SEQ ID NO: 32136 - DNA, 25 bp, Homo sapiens
tcttcatactggacaaaggcctgta

SEQ ID NO: 32137 - DNA, 25 bp, Homo sapiens
atgttttctttcactttaaaaagtt

SEQ ID NO: 32138 - DNA, 25 bp, Homo sapiens
gtgctagagccgttgtcaccaagtc

SEQ ID NO: 32139 - DNA, 25 bp, Homo sapiens
tgactcctgaggaagaggccctttt

SEQ ID NO: 32140 - DNA, 25 bp, Homo sapiens
cccttgagtcagatggatgtttacc

SEQ ID NO: 32141 - DNA, 25 bp, Homo sapiens
gtttaaagaagtagtactatttagg

SEQ ID NO: 32142 - DNA, 25 bp, Homo sapiens
ggttgaagtctcttagccaatgtgg

SEQ ID NO: 32143 - DNA, 25 bp, Homo sapiens
agtttttaacagactatacaagaat

SEQ ID NO: 32144 - DNA, 25 bp, Homo sapiens
agggccattccttgggtaataactg

SEQ ID NO: 32145 - DNA, 25 bp, Homo sapiens
caaggctttctgttttctgctgaca

SEQ ID NO: 32146 - DNA, 25 bp, Homo sapiens
aggaccctgttgcttctgtttctta

SEQ ID NO: 32147 - DNA, 25 bp, Homo sapiens
accaccttttggagaggccgactca

SEQ ID NO: 32148 - DNA, 25 bp, Homo sapiens
gcaaccattgcttcctttctgaggg

SEQ ID NO: 32149 - DNA, 25 bp, Homo sapiens
gctggactgaaagccaagcatcttg

SEQ ID NO: 32150 - DNA, 25 bp, Homo sapiens
gccgggtccatgcagagaactttgg

SEQ ID NO: 32151 - DNA, 25 bp, Homo sapiens
agcactgtcctgttggtaatccatg

SEQ ID NO: 32152 - DNA, 25 bp, Homo sapiens
ttggggcactgactagagaattttc

SEQ ID NO: 32153 - DNA, 25 bp, Homo sapiens
tctcgggtcctgaaaccttggtcca

SEQ ID NO: 32154 - DNA, 25 bp, Homo sapiens
tgcccattattgatcgcctgctgta

SEQ ID NO: 32155 - DNA, 25 bp, Homo sapiens
ggtcctcactgaactgggtcacttg

SEQ ID NO: 32156 - DNA, 25 bp, Homo sapiens
cctctttcagaagggccaactcagg

SEQ ID NO: 32157 - DNA, 25 bp, Homo sapiens
gccgtccgtcctgagttggagagaa

SEQ ID NO: 32158 - DNA, 25 bp, Homo sapiens
ctctgagcgcccttggaactttgta

SEQ ID NO: 32159 - DNA, 25 bp, Homo sapiens
tgccattgctctgcatcaggactga

SEQ ID NO: 32160 - DNA, 25 bp, Homo sapiens
ggcgcacccagcattttgtacatta

SEQ ID NO: 32161 - DNA, 25 bp, Homo sapiens
tgctgacggaactcccagggaatcc

SEQ ID NO: 32162 - DNA, 25 bp, Homo sapiens
ggctgtcagcaggtcttagccttta

SEQ ID NO: 32163 - DNA, 25 bp, Homo sapiens
ggccaggttcaccagcacacaatta

SEQ ID NO: 32164 - DNA, 25 bp, Homo sapiens
ccgggccagttccatgtcccttatg

SEQ ID NO: 32165 - DNA, 25 bp, Homo sapiens
tcccagggttttctcagggcacaga

SEQ ID NO: 32166 - DNA, 25 bp, Homo sapiens
gagatagtctcctggctccctggga

SEQ ID NO: 32167 - DNA, 25 bp, Homo sapiens
gggcggtcttcagcacctcttgtaa

SEQ ID NO: 32168 - DNA, 25 bp, Homo sapiens
ggagctccttccaggttcctcgaca

SEQ ID NO: 32169 - DNA, 25 bp, Homo sapiens
agttctaccattcttttcaatctgc

SEQ ID NO: 32170 - DNA, 25 bp, Homo sapiens
gcagccatttgtcaagcagcacttg

SEQ ID NO: 32171 - DNA, 25 bp, Homo sapiens
gcctctggggccatctaacaaaata

SEQ ID NO: 32172 - DNA, 25 bp, Homo sapiens
gggcctcatcttgctctcagatata

SEQ ID NO: 32173 - DNA, 25 bp, Homo sapiens
aatgcactttcacctggatgtcagc

SEQ ID NO: 32174 - DNA, 25 bp, Homo sapiens
gccaaattggcactttcgtttaagg

SEQ ID NO: 32175 - DNA, 25 bp, Homo sapiens
acacacctgaatggcattttctgca

SEQ ID NO: 32176 - DNA, 25 bp, Homo sapiens
tactacctgggatctactaacactc

SEQ ID NO: 32177 - DNA, 25 bp, Homo sapiens
aaatcccagtttctagcgcctccgg

SEQ ID NO: 32178 - DNA, 25 bp, Homo sapiens
gtccagttactgaaagggaacccta

SEQ ID NO: 32179 - DNA, 25 bp, Homo sapiens
ccatctggggaaaggagctcttgtc

SEQ ID NO: 32180 - DNA, 25 bp, Homo sapiens
ggggtatcctagctcccatataata

SEQ ID NO: 32181 - DNA, 25 bp, Homo sapiens
aagggatctattgttccagcccaga

SEQ ID NO: 32182 - DNA, 25 bp, Homo sapiens
gcccagcacctgttgtctagaatca

SEQ ID NO: 32183 - DNA, 25 bp, Homo sapiens
aggcggaggctccacatccatttcc

SEQ ID NO: 32184 - DNA, 25 bp, Homo sapiens
ttccagaaggtctccgaaagaggtc

SEQ ID NO: 32185 - DNA, 25 bp, Homo sapiens
gcacagcctcatccagttcatagga

SEQ ID NO: 32186 - DNA, 25 bp, Homo sapiens
tttctccacacagcccgatagaggg

SEQ ID NO: 32187 - DNA, 25 bp, Homo sapiens
ctcctccttaggatgcagaagctga

SEQ ID NO: 32188 - DNA, 25 bp, Homo sapiens
gtctagctcctgtccagccatggta

SEQ ID NO: 32189 - DNA, 25 bp, Homo sapiens
cggaacgtctttgcgctctataaaa

SEQ ID NO: 32190 - DNA, 25 bp, Homo sapiens
gaggtctaaattccctgctccctga

SEQ ID NO: 32191 - DNA, 25 bp, Homo sapiens
aattatgcctctgcctccctcggga

SEQ ID NO: 32192 - DNA, 25 bp, Homo sapiens
cagagtcctgtgattggttgcccta

SEQ ID NO: 32193 - DNA, 25 bp, Homo sapiens
ggcaaagtttcctctcatacgtgtg

SEQ ID NO: 32194 - DNA, 25 bp, Homo sapiens
atggccacctggaacctgaattcta

SEQ ID NO: 32195 - DNA, 25 bp, Homo sapiens
tgttgttgacacctcagactttttg

SEQ ID NO: 32196 - DNA, 25 bp, Homo sapiens
ggcctgctttgttgagccctacaca

SEQ ID NO: 32197 - DNA, 25 bp, Homo sapiens
ggcatgcctagttaacaccttctta

SEQ ID NO: 32198 - DNA, 25 bp, Homo sapiens
gcagcatattttcttcccagcagca

SEQ ID NO: 32199 - DNA, 25 bp, Homo sapiens
cccggtaagattttcagtttccaga

SEQ ID NO: 32200 - DNA, 25 bp, Homo sapiens
tccctggggcacatagagaaattct

SEQ ID NO: 32201 - DNA, 25 bp, Homo sapiens
atatacagagtctaattaactgtaa

SEQ ID NO: 32202 - DNA, 25 bp, Homo sapiens
aaaaacatggttttctaagtacaat

SEQ ID NO: 32203 - DNA, 25 bp, Homo sapiens
ggcccactggtgatcttgttttaca

SEQ ID NO: 32204 - DNA, 25 bp, Homo sapiens
ccctggggcatacatagtggtgttc

SEQ ID NO: 32205 - DNA, 25 bp, Homo sapiens
tgtgccattgacatgcctgaacata

SEQ ID NO: 32206 - DNA, 25 bp, Homo sapiens
tagggcctcaccatacttcttgttg

SEQ ID NO: 32207 - DNA, 25 bp, Homo sapiens
ggtgctggtgccctcttttacctta

SEQ ID NO: 32208 - DNA, 25 bp, Homo sapiens
ccactggcctaggatgtgactctga

SEQ ID NO: 32209 - DNA, 25 bp, Homo sapiens
gccgagggtcagtagtcactcatca

SEQ ID NO: 32210 - DNA, 25 bp, Homo sapiens
gtgtacactctacatgtatgttatt

SEQ ID NO: 32211 - DNA, 25 bp, Homo sapiens
ggacccttagtccttgttgctcaga

SEQ ID NO: 32212 - DNA, 25 bp, Homo sapiens
ctgtcccatggcaaaagagcagatg

SEQ ID NO: 32213 - DNA, 25 bp, Homo sapiens
tggatttcagaagcccacagcaaga

SEQ ID NO: 32214 - DNA, 25 bp, Homo sapiens
ccaagtgaaagtgctcctgcaagtg

SEQ ID NO: 32215 - DNA, 25 bp, Homo sapiens
aggactggctcctctttgtcaatga

SEQ ID NO: 32216 - DNA, 25 bp, Homo sapiens
cagcccagttgcacacccagatgta

SEQ ID NO: 32217 - DNA, 25 bp, Homo sapiens
ctgcaggcaacagtccaggggttcc

SEQ ID NO: 32218 - DNA, 25 bp, Homo sapiens
ccttcagagaggcatacgtgcatcc

SEQ ID NO: 32219 - DNA, 25 bp, Homo sapiens
tgacccgtctgcctcgtgtctttta

SEQ ID NO: 32220 - DNA, 25 bp, Homo sapiens
gcagttctgtgcctgtagacctgta

SEQ ID NO: 32221 - DNA, 25 bp, Homo sapiens
ccaccctgggtttgcactgttacca

SEQ ID NO: 32222 - DNA, 25 bp, Homo sapiens
taatattactaagtgtaacgtttac

SEQ ID NO: 32223 - DNA, 25 bp, Homo sapiens
tgctagagctccatggctgccactg

SEQ ID NO: 32224 - DNA, 25 bp, Homo sapiens
agccacagttcctattcatcacaga

SEQ ID NO: 32225 - DNA, 25 bp, Homo sapiens
ataaaatctcgacatggatacatag

SEQ ID NO: 32226 - DNA, 25 bp, Homo sapiens
ctgcaggcccaagtcttcaaggttg

SEQ ID NO: 32227 - DNA, 25 bp, Homo sapiens
agctgggctcgaccaagtatgaacc

SEQ ID NO: 32228 - DNA, 25 bp, Homo sapiens
ttcgagctcacacctagtaaagatg

SEQ ID NO: 32229 - DNA, 25 bp, Homo sapiens
gggaactttaccttgacgccgatta

SEQ ID NO: 32230 - DNA, 25 bp, Homo sapiens
ggagccacatgggacacttctgaca

SEQ ID NO: 32231 - DNA, 25 bp, Homo sapiens
actgtgcttgcagctggtgacttga

SEQ ID NO: 32232 - DNA, 25 bp, Homo sapiens
ccactacttttctgggtgccgacca

SEQ ID NO: 32233 - DNA, 25 bp, Homo sapiens
tggcatcagacaccagcagggatta

SEQ ID NO: 32234 - DNA, 25 bp, Homo sapiens
cctggaggcccaagtcagctctttt

SEQ ID NO: 32235 - DNA, 25 bp, Homo sapiens
ttcctgatcatcctgcgtctggctg

SEQ ID NO: 32236 - DNA, 25 bp, Homo sapiens
gccagcctcctttctcttggacata

SEQ ID NO: 32237 - DNA, 25 bp, Homo sapiens
ccaggtgtaggccagtgcttttatc

SEQ ID NO: 32238 - DNA, 25 bp, Homo sapiens
cactcccggctgaagaaagactcta

SEQ ID NO: 32239 - DNA, 25 bp, Homo sapiens
ttcggttacacaccagcagggcttc

SEQ ID NO: 32240 - DNA, 25 bp, Homo sapiens
tgacaaagtgtcttggccagctctc

SEQ ID NO: 32241 - DNA, 25 bp, Homo sapiens
gacatcccggccttcagtttcacta

SEQ ID NO: 32242 - DNA, 25 bp, Homo sapiens
ctaactggacttggagactggctca

SEQ ID NO: 32243 - DNA, 25 bp, Homo sapiens
ctgctgctcaccctaagtgtttgta

SEQ ID NO: 32244 - DNA, 25 bp, Homo sapiens
tcccagtgtcagaggaaaaagcctt

SEQ ID NO: 32245 - DNA, 25 bp, Homo sapiens
cagcctggtcttttgtcagtgcacc

SEQ ID NO: 32246 - DNA, 25 bp, Homo sapiens
ctgtgctcagcaggtcactgaattc

SEQ ID NO: 32247 - DNA, 25 bp, Homo sapiens
ccctgccctggctgtgcacaaaaaa

SEQ ID NO: 32248 - DNA, 25 bp, Homo sapiens
tctgccaatcgtgaaaaagtgatcc

SEQ ID NO: 32249 - DNA, 25 bp, Homo sapiens
agataatctcctgctgctgccatgg

SEQ ID NO: 32250 - DNA, 25 bp, Homo sapiens
gtgtggtttccatgctgttccctta

SEQ ID NO: 32251 - DNA, 25 bp, Homo sapiens
ccggcaagtgggaatgtgatctaca

SEQ ID NO: 32252 - DNA, 25 bp, Homo sapiens
cgccctgcctactgttttggtatca

SEQ ID NO: 32253 - DNA, 25 bp, Homo sapiens
gctctacctgggaagtctggaactg

SEQ ID NO: 32254 - DNA, 25 bp, Homo sapiens
accactgttcttcttggcaggcaac

SEQ ID NO: 32255 - DNA, 25 bp, Homo sapiens
gcgcggccctatccctgctgataag

SEQ ID NO: 32256 - DNA, 25 bp, Homo sapiens
gccgcaggaagctgatgcccattta

SEQ ID NO: 32257 - DNA, 25 bp, Homo sapiens
ctctcttgtgcgtgtttcaggtttc

SEQ ID NO: 32258 - DNA, 25 bp, Homo sapiens
tgtgtcctagtcctgacctgatgtc

SEQ ID NO: 32259 - DNA, 25 bp, Homo sapiens
gggctctgacttttacggcctgaga

SEQ ID NO: 32260 - DNA, 25 bp, Homo sapiens
gtcttatagccagaaaatctatcta

SEQ ID NO: 32261 - DNA, 25 bp, Homo sapiens
tggctcccttcagtgctacctaaga

SEQ ID NO: 32262 - DNA, 25 bp, Homo sapiens
tgcctctttcctcctcctgaatttg

SEQ ID NO: 32263 - DNA, 25 bp, Homo sapiens
ccattgcacaataacgcggggtcta

SEQ ID NO: 32264 - DNA, 25 bp, Homo sapiens
gggcctggcagactatttttcaatt

SEQ ID NO: 32265 - DNA, 25 bp, Homo sapiens
cggtcctgaagaaagagcaacaatg

SEQ ID NO: 32266 - DNA, 25 bp, Homo sapiens
aggggctaccatatgaatcagttta

SEQ ID NO: 32267 - DNA, 25 bp, Homo sapiens
actctgcagacatgtggcactgtta

SEQ ID NO: 32268 - DNA, 25 bp, Homo sapiens
gggtaagcttttaggtccagcaaca

SEQ ID NO: 32269 - DNA, 25 bp, Homo sapiens
tatctgtcgatagctggcaggtctg

SEQ ID NO: 32270 - DNA, 25 bp, Homo sapiens
aggtggctatgtcttgcttattcaa

SEQ ID NO: 32271 - DNA, 25 bp, Homo sapiens
tggagcagctctttgtgttatttaa

SEQ ID NO: 32272 - DNA, 25 bp, Homo sapiens
ctccttgctgttatgtaggctatta

SEQ ID NO: 32273 - DNA, 25 bp, Homo sapiens
tggagactttcgaacacagcctttg

SEQ ID NO: 32274 - DNA, 25 bp, Homo sapiens
cctcctagagtgttaaatccagtta

SEQ ID NO: 32275 - DNA, 25 bp, Homo sapiens
ctggggtgtgttttcagttgatgcc

SEQ ID NO: 32276 - DNA, 25 bp, Homo sapiens
gtcttccgaaagactattaggaaaa

SEQ ID NO: 32277 - DNA, 25 bp, Homo sapiens
tcttgggattgacctgctgtgtatc

SEQ ID NO: 32278 - DNA, 25 bp, Homo sapiens
tatgtcttcaaccactctgccaagt

SEQ ID NO: 32279 - DNA, 25 bp, Homo sapiens
tgggtcctgaacaaactattactgg

SEQ ID NO: 32280 - DNA, 25 bp, Homo sapiens
acctcaagttgtgctcagtacctcc

SEQ ID NO: 32281 - DNA, 25 bp, Homo sapiens
cagtccagtctgcttgtttgccaaa

SEQ ID NO: 32282 - DNA, 25 bp, Homo sapiens
tctagatgttcagggagcagaaacc

SEQ ID NO: 32283 - DNA, 25 bp, Homo sapiens
ccgctgcagcaagctctggagtctc

SEQ ID NO: 32284 - DNA, 25 bp, Homo sapiens
tacctgagggtcactgctttctttg

SEQ ID NO: 32285 - DNA, 25 bp, Homo sapiens
ctggatctcagtgcagaccattatc

SEQ ID NO: 32286 - DNA, 25 bp, Homo sapiens
caatttgttgaaaaatatccactct

SEQ ID NO: 32287 - DNA, 25 bp, Homo sapiens
gcagttccattccagggctctgaga

SEQ ID NO: 32288 - DNA, 25 bp, Homo sapiens
gaacgatgtgtagctctggagtccc

SEQ ID NO: 32289 - DNA, 25 bp, Homo sapiens
cttgcctgggctagaattgagttta

SEQ ID NO: 32290 - DNA, 25 bp, Homo sapiens
tcccagtttgagtatctccaagttg

SEQ ID NO: 32291 - DNA, 25 bp, Homo sapiens
gtcctctattcagccatgcaacata

SEQ ID NO: 32292 - DNA, 25 bp, Homo sapiens
tctttctgaatggacacactggtta

SEQ ID NO: 32293 - DNA, 25 bp, Homo sapiens
gctacctctacctgatgtggcattg

SEQ ID NO: 32294 - DNA, 25 bp, Homo sapiens
ggctatggaattgacccaaggttta

SEQ ID NO: 32295 - DNA, 25 bp, Homo sapiens
ctgtgtgcgtctggcatataaattc

SEQ ID NO: 32296 - DNA, 25 bp, Homo sapiens
ctctaggtctttacagggctctgca

SEQ ID NO: 32297 - DNA, 25 bp, Homo sapiens
tttacttttattaataaaccttttg

SEQ ID NO: 32298 - DNA, 25 bp, Homo sapiens
cagatgtcccaccttgtcctagaga

SEQ ID NO: 32299 - DNA, 25 bp, Homo sapiens
tcacaggaatagtcagaggattatc

SEQ ID NO: 32300 - DNA, 25 bp, Homo sapiens
ggtggacctacctctgcagaagatg

SEQ ID NO: 32301 - DNA, 25 bp, Homo sapiens
atgagctctctcttctactgggttc

SEQ ID NO: 32302 - DNA, 25 bp, Homo sapiens
ctcgcctggtcgttcttgtttaaca

SEQ ID NO: 32303 - DNA, 25 bp, Homo sapiens
ttttttttgccaattaaggaattta

SEQ ID NO: 32304 - DNA, 25 bp, Homo sapiens
aaaagtttggaaaaatggagaaata

SEQ ID NO: 32305 - DNA, 25 bp, Homo sapiens
tccacagttgttacccgaagagtta

SEQ ID NO: 32306 - DNA, 25 bp, Homo sapiens
ctaagactaaagcagaaggaaccga

SEQ ID NO: 32307 - DNA, 25 bp, Homo sapiens
tgatggctataggatctgacaatga

SEQ ID NO: 32308 - DNA, 25 bp, Homo sapiens
ctaatgactttaattcattcagact

SEQ ID NO: 32309 - DNA, 25 bp, Homo sapiens
gagttaccaccagcttttcacattg

SEQ ID NO: 32310 - DNA, 25 bp, Homo sapiens
ccagctgcttctatatagtgccata

SEQ ID NO: 32311 - DNA, 25 bp, Homo sapiens
ctgagccggtacaggccatacatca

SEQ ID NO: 32312 - DNA, 25 bp, Homo sapiens
tggccttccaaccagcaataaagtt

SEQ ID NO: 32313 - DNA, 25 bp, Homo sapiens
cgaaactctggcattttgatcaact

SEQ ID NO: 32314 - DNA, 25 bp, Homo sapiens
agaattatgagatttttaaagcctt

SEQ ID NO: 32315 - DNA, 25 bp, Homo sapiens
tcagtttaatcaatgagttccagtg

SEQ ID NO: 32316 - DNA, 25 bp, Homo sapiens
aggagcctcctgcaacactctaatg

SEQ ID NO: 32317 - DNA, 25 bp, Homo sapiens
ttcgggtctgagagcctactctgga

SEQ ID NO: 32318 - DNA, 25 bp, Homo sapiens
agctaataattgcttctgtgttttg

SEQ ID NO: 32319 - DNA, 25 bp, Homo sapiens
tgttttctgactttggccttcctag

SEQ ID NO: 32320 - DNA, 25 bp, Homo sapiens
gggactgtggcctatctgatgttta

SEQ ID NO: 32321 - DNA, 25 bp, Homo sapiens
ggcttgatcccttgcctgtgtttga

SEQ ID NO: 32322 - DNA, 25 bp, Homo sapiens
tgagatcccatccaagtagtgtagc

SEQ ID NO: 32323 - DNA, 25 bp, Homo sapiens
gtcattctatttggaaacaatcagg

SEQ ID NO: 32324 - DNA, 25 bp, Homo sapiens
caggtgtttgttattggccagtctc

SEQ ID NO: 32325 - DNA, 25 bp, Homo sapiens
ttcctagtttccagccatgtggttg

SEQ ID NO: 32326 - DNA, 25 bp, Homo sapiens
ccaagcagggccaatctatcttaga

SEQ ID NO: 32327 - DNA, 25 bp, Homo sapiens
accaggccatccagtctgggtctca

SEQ ID NO: 32328 - DNA, 25 bp, Homo sapiens
catttggttatcagcaggtatgccc

SEQ ID NO: 32329 - DNA, 25 bp, Homo sapiens
gaccctgcctattgcgatttatttg

SEQ ID NO: 32330 - DNA, 25 bp, Homo sapiens
tggtagctgagaagcacacgttttc

SEQ ID NO: 32331 - DNA, 25 bp, Homo sapiens
ggaggaggtttcttggcatcacaca

SEQ ID NO: 32332 - DNA, 25 bp, Homo sapiens
tttcggcaaccaggacctcagtttc

SEQ ID NO: 32333 - DNA, 25 bp, Homo sapiens
accctaggggataaattgataactc

SEQ ID NO: 32334 - DNA, 25 bp, Homo sapiens
tccttgtttatgaagccaatggttc

SEQ ID NO: 32335 - DNA, 25 bp, Homo sapiens
atggtggcatctcccagaattctgg

SEQ ID NO: 32336 - DNA, 25 bp, Homo sapiens
cctgcaccgttttccttcttgggta

SEQ ID NO: 32337 - DNA, 25 bp, Homo sapiens
tctgaaccgggacacttaactcttg

SEQ ID NO: 32338 - DNA, 25 bp, Homo sapiens
ttcggtcctgaaaaagtagtattgc

SEQ ID NO: 32339 - DNA, 25 bp, Homo sapiens
ggcatattttagttggcaccgatga

SEQ ID NO: 32340 - DNA, 25 bp, Homo sapiens
ggggactcaaatacactcaactctg

SEQ ID NO: 32341 - DNA, 25 bp, Homo sapiens
ctgtacttagttctgcccagcctga

SEQ ID NO: 32342 - DNA, 25 bp, Homo sapiens
tctttgtatcagtgccagggtaccc

SEQ ID NO: 32343 - DNA, 25 bp, Homo sapiens
atcgcaggcatatgaggcaactcca

SEQ ID NO: 32344 - DNA, 25 bp, Homo sapiens
cagtgtcacaagagtggcattgttc

SEQ ID NO: 32345 - DNA, 25 bp, Homo sapiens
actcagagctggtgtttggccctcc

SEQ ID NO: 32346 - DNA, 25 bp, Homo sapiens
gtgctgccaagcaagtcacactgta

SEQ ID NO: 32347 - DNA, 25 bp, Homo sapiens
taggaacctcctgtgcatagcaatg

SEQ ID NO: 32348 - DNA, 25 bp, Homo sapiens
ctctaaaaggcagtttggcaatatc

SEQ ID NO: 32349 - DNA, 25 bp, Homo sapiens
accctgagagtttaagatgatccca

SEQ ID NO: 32350 - DNA, 25 bp, Homo sapiens
tgccagctgcactaggaacaagtcc

SEQ ID NO: 32351 - DNA, 25 bp, Homo sapiens
ctctccttctctatgcgcatgtctt

SEQ ID NO: 32352 - DNA, 25 bp, Homo sapiens
cttctctatgcgcatgtcttttatc

SEQ ID NO: 32353 - DNA, 25 bp, Homo sapiens
cctctcttgggtggctcctgcagta

SEQ ID NO: 32354 - DNA, 25 bp, Homo sapiens
ggctcctgcagtagcgggtgctatt

SEQ ID NO: 32355 - DNA, 25 bp, Homo sapiens
tggagtagtgtatgctccagccctc

SEQ ID NO: 32356 - DNA, 25 bp, Homo sapiens
gtgtatgctccagccctctctcgga

SEQ ID NO: 32357 - DNA, 25 bp, Homo sapiens
agccctctctcggactgcagccctg

SEQ ID NO: 32358 - DNA, 25 bp, Homo sapiens
cagccctgggggacactgttctgct

SEQ ID NO: 32359 - DNA, 25 bp, Homo sapiens
ctcctgtccggggagttgctgctct

SEQ ID NO: 32360 - DNA, 25 bp, Homo sapiens
tgctgctctgccctagggtcaaatg

SEQ ID NO: 32361 - DNA, 25 bp, Homo sapiens
ccctagggtcaaatgcagactggtc

SEQ ID NO: 32362 - DNA, 25 bp, Homo sapiens
ctggtcagggacaatctggaaatac

SEQ ID NO: 32363 - DNA, 25 bp, Homo sapiens
tctggaaatactgtagggatgcatg

SEQ ID NO: 32364 - DNA, 25 bp, Homo sapiens
tggggtaggtaaaaaccatgcttcc

SEQ ID NO: 32365 - DNA, 25 bp, Homo sapiens
accatgcttcctctgtctggaaaca

SEQ ID NO: 32366 - DNA, 25 bp, Homo sapiens
ctgtctggaaacaacactgactgtg

SEQ ID NO: 32367 - DNA, 25 bp, Homo sapiens
cactgactgtggcttttttatttta

SEQ ID NO: 32368 - DNA, 25 bp, Homo sapiens
gggacatgatgtcactcttctgttt

SEQ ID NO: 32369 - DNA, 25 bp, Homo sapiens
tgatgtcactcttctgtttcaaaag

SEQ ID NO: 32370 - DNA, 25 bp, Homo sapiens
atgtcactcttctgtttcaaaagtg

SEQ ID NO: 32371 - DNA, 25 bp, Homo sapiens
gcgtcttatagtcagtggcatctta

SEQ ID NO: 32372 - DNA, 25 bp, Homo sapiens
cccttgggcatattcagctttagct

SEQ ID NO: 32373 - DNA, 25 bp, Homo sapiens
cctgttcaaggggtattcttagctc

SEQ ID NO: 32374 - DNA, 25 bp, Homo sapiens
ttcacagaagggttcccggccggtg

SEQ ID NO: 32375 - DNA, 25 bp, Homo sapiens
ggggttttatagctgccttgtaaca

SEQ ID NO: 32376 - DNA, 25 bp, Homo sapiens
ttagaggatcatgcaggccaggtca

SEQ ID NO: 32377 - DNA, 25 bp, Homo sapiens
ttttggggcccttcaagtcatcctc

SEQ ID NO: 32378 - DNA, 25 bp, Homo sapiens
taccgcatttactacagtgaagatc

SEQ ID NO: 32379 - DNA, 25 bp, Homo sapiens
gcagtgtttacctggtggtctccca

SEQ ID NO: 32380 - DNA, 25 bp, Homo sapiens
ctggtcgatgtgcactagctgcttc

SEQ ID NO: 32381 - DNA, 25 bp, Homo sapiens
tgctccctggcttccatgaaattta

SEQ ID NO: 32382 - DNA, 25 bp, Homo sapiens
ggagtttaagcagcatggacctata

SEQ ID NO: 32383 - DNA, 25 bp, Homo sapiens
ctcccaggcatgcaaggtatccaca

SEQ ID NO: 32384 - DNA, 25 bp, Homo sapiens
tctggaggacatgaacttgaactta

SEQ ID NO: 32385 - DNA, 25 bp, Homo sapiens
ggaccatgttatttgcaggagactc

SEQ ID NO: 32386 - DNA, 25 bp, Homo sapiens
gcccatcaatgtaaaatctctcttg

SEQ ID NO: 32387 - DNA, 25 bp, Homo sapiens
caaaggaacgcacattttctgtcaa

SEQ ID NO: 32388 - DNA, 25 bp, Homo sapiens
ttcaggacagttcgctagggatcta

SEQ ID NO: 32389 - DNA, 25 bp, Homo sapiens
ggtcgcacttcccttcagaaacatg

SEQ ID NO: 32390 - DNA, 25 bp, Homo sapiens
agttgtgcctttgcctgatgtacca

SEQ ID NO: 32391 - DNA, 25 bp, Homo sapiens
gagctccctctgcaccattaaaata

SEQ ID NO: 32392 - DNA, 25 bp, Homo sapiens
acaggctggtttctggcttcctcta

SEQ ID NO: 32393 - DNA, 25 bp, Homo sapiens
gacttcccatccactgcagcagttg

SEQ ID NO: 32394 - DNA, 25 bp, Homo sapiens
gctctgactagaaaaggtttggccc

SEQ ID NO: 32395 - DNA, 25 bp, Homo sapiens
gagactggataatggtcaaacccta

SEQ ID NO: 32396 - DNA, 25 bp, Homo sapiens
ctaaaggcaaatatcaaatagactt

SEQ ID NO: 32397 - DNA, 25 bp, Homo sapiens
agaagtcccacctctctgtgaaagg

SEQ ID NO: 32398 - DNA, 25 bp, Homo sapiens
ttccctaaatgtctgtaccacaagc

SEQ ID NO: 32399 - DNA, 25 bp, Homo sapiens
gtctccctgtgtgcatcatctcctg

SEQ ID NO: 32400 - DNA, 25 bp, Homo sapiens
ctctgtgctacaaaaacgcttctgg

SEQ ID NO: 32401 - DNA, 25 bp, Homo sapiens
tgctgcactcaggaccaggcatttc

SEQ ID NO: 32402 - DNA, 25 bp, Homo sapiens
taacaatttaaaaagacagagcacc

SEQ ID NO: 32403 - DNA, 25 bp, Homo sapiens
gtggcagcagatcttgacaagtttt

SEQ ID NO: 32404 - DNA, 25 bp, Homo sapiens
aagccaccgttagtccagttccctg

SEQ ID NO: 32405 - DNA, 25 bp, Homo sapiens
agttttttttttatgtgtgtggggt

SEQ ID NO: 32406 - DNA, 25 bp, Homo sapiens
cacctggtgactttggactttttta

SEQ ID NO: 32407 - DNA, 25 bp, Homo sapiens
agccaaatctcttccggggttcata

SEQ ID NO: 32408 - DNA, 25 bp, Homo sapiens
cagatgtttcttcagtgggtactta

SEQ ID NO: 32409 - DNA, 25 bp, Homo sapiens
atgacggctagttctggattttccc

SEQ ID NO: 32410 - DNA, 25 bp, Homo sapiens
gggctgcttttatcttgctggaatg

SEQ ID NO: 32411 - DNA, 25 bp, Homo sapiens
cactctggctaatgttgataacttc

SEQ ID NO: 32412 - DNA, 25 bp, Homo sapiens
actgccttctgtgtagtggatctac

SEQ ID NO: 32413 - DNA, 25 bp, Homo sapiens
tgggactggtcatcctcaacattgc

SEQ ID NO: 32414 - DNA, 25 bp, Homo sapiens
tggttccctagtcttgccttcagta

SEQ ID NO: 32415 - DNA, 25 bp, Homo sapiens
tttcaggggccggtaaataacactc

SEQ ID NO: 32416 - DNA, 25 bp, Homo sapiens
gtctgctctgagacattttgttaag

SEQ ID NO: 32417 - DNA, 25 bp, Homo sapiens
tggcatggcacctatacctcaggga

SEQ ID NO: 32418 - DNA, 25 bp, Homo sapiens
cactactagtggagtctcgtgaatc

SEQ ID NO: 32419 - DNA, 25 bp, Homo sapiens
ctgcggtcagggtacattttggata

SEQ ID NO: 32420 - DNA, 25 bp, Homo sapiens
gtgctgccttcccagaagatccttg

SEQ ID NO: 32421 - DNA, 25 bp, Homo sapiens
tgacccagcattggagctgcaagtc

SEQ ID NO: 32422 - DNA, 25 bp, Homo sapiens
cacaggtgtgtgatttttgccaaga

SEQ ID NO: 32423 - DNA, 25 bp, Homo sapiens
ataaaaacctgcctgcccccaaggg

SEQ ID NO: 32424 - DNA, 25 bp, Homo sapiens
tcaatttctgtagtgggaggcaacc

SEQ ID NO: 32425 - DNA, 25 bp, Homo sapiens
gccctgtactaactccaattctata

SEQ ID NO: 32426 - DNA, 25 bp, Homo sapiens
aaagtcattttctcacttctttccc

SEQ ID NO: 32427 - DNA, 25 bp, Homo sapiens
gctgtcagttcttgcctaggttatt

SEQ ID NO: 32428 - DNA, 25 bp, Homo sapiens
tctgtggtgcttctaattgttattc

SEQ ID NO: 32429 - DNA, 25 bp, Homo sapiens
tttggctcctaaaaacagtaatatg

SEQ ID NO: 32430 - DNA, 25 bp, Homo sapiens
ctcattggctctgcagtgaaccttc

SEQ ID NO: 32431 - DNA, 25 bp, Homo sapiens
gcacctatatagagccgggtaagca

SEQ ID NO: 32432 - DNA, 25 bp, Homo sapiens
tcctgagagagccagccaatttctt

SEQ ID NO: 32433 - DNA, 25 bp, Homo sapiens
ctattacatgatataactgtgctga

SEQ ID NO: 32434 - DNA, 25 bp, Homo sapiens
gtgcactttaacaactagacccaaa

SEQ ID NO: 32435 - DNA, 25 bp, Homo sapiens
tgcagtaatgagtaaaaggataaac

SEQ ID NO: 32436 - DNA, 25 bp, Homo sapiens
gcaacctttttacttcctcaatatg

SEQ ID NO: 32437 - DNA, 25 bp, Homo sapiens
gttcatagtcataatattgaaagga

SEQ ID NO: 32438 - DNA, 25 bp, Homo sapiens
cagggtcaggtctctttgtgttgca

SEQ ID NO: 32439 - DNA, 25 bp, Homo sapiens
cctgcctgtcgctaatgaagctgta

SEQ ID NO: 32440 - DNA, 25 bp, Homo sapiens
gttaccagaagacgcagatcacgtg

SEQ ID NO: 32441 - DNA, 25 bp, Homo sapiens
gcaacttttagctgcattgacctag

SEQ ID NO: 32442 - DNA, 25 bp, Homo sapiens
gaagtgcagagtaccatttttgatg

SEQ ID NO: 32443 - DNA, 25 bp, Homo sapiens
ggcaccgctatatgccctagaatta

SEQ ID NO: 32444 - DNA, 25 bp, Homo sapiens
gctgaccacttttgcacgtcgaatc

SEQ ID NO: 32445 - DNA, 25 bp, Homo sapiens
aaaacgcattgggttggcatcaaca

SEQ ID NO: 32446 - DNA, 25 bp, Homo sapiens
ccacctcaggcttcagtgcttattc

SEQ ID NO: 32447 - DNA, 25 bp, Homo sapiens
ggctccagacagtatcacaataata

SEQ ID NO: 32448 - DNA, 25 bp, Homo sapiens
tagtcattgccctcatccatttttg

SEQ ID NO: 32449 - DNA, 25 bp, Homo sapiens
ccctgctgtctgttaggagtagtga

SEQ ID NO: 32450 - DNA, 25 bp, Homo sapiens
cgctaggtctgaaagatccaatttg

SEQ ID NO: 32451 - DNA, 25 bp, Homo sapiens
gatatagcctagttttctgaccaga

SEQ ID NO: 32452 - DNA, 25 bp, Homo sapiens
taaactatttaatggtacctattcc

SEQ ID NO: 32453 - DNA, 25 bp, Homo sapiens
tgctgtgggccatgtcaatcttgaa

SEQ ID NO: 32454 - DNA, 25 bp, Homo sapiens
gggttacacccacaccattattcag

SEQ ID NO: 32455 - DNA, 25 bp, Homo sapiens
tattaccattgcgtctattagcata

SEQ ID NO: 32456 - DNA, 25 bp, Homo sapiens
gcctgattcctctatctgtctaatg

SEQ ID NO: 32457 - DNA, 25 bp, Homo sapiens
gtgactttcctcctgcttctacata

SEQ ID NO: 32458 - DNA, 25 bp, Homo sapiens
gaatataacctagaaacgacccaaa

SEQ ID NO: 32459 - DNA, 25 bp, Homo sapiens
cagggttgcctttaccaatgttgta

SEQ ID NO: 32460 - DNA, 25 bp, Homo sapiens
ggaaaatatgctacgaaagtctgtt

SEQ ID NO: 32461 - DNA, 25 bp, Homo sapiens
ccgtgctggcagaaaataattgttt

SEQ ID NO: 32462 - DNA, 25 bp, Homo sapiens
tgagactctgcatatccttgaaagg

SEQ ID NO: 32463 - DNA, 25 bp, Homo sapiens
tgggtcatcactggctctttaaaca

SEQ ID NO: 32464 - DNA, 25 bp, Homo sapiens
actgtgtgcatgttgtgaacactca

SEQ ID NO: 32465 - DNA, 25 bp, Homo sapiens
catgaatagatgtaagaaaaaaagt

SEQ ID NO: 32466 - DNA, 25 bp, Homo sapiens
tcacagatttggcagttgactccta

SEQ ID NO: 32467 - DNA, 25 bp, Homo sapiens
gctgtgattctagatgaccaaactg

SEQ ID NO: 32468 - DNA, 25 bp, Homo sapiens
ggtgtgtctacatactgccaagata

SEQ ID NO: 32469 - DNA, 25 bp, Homo sapiens
cctatgttgaacatgcatgcgtaca

SEQ ID NO: 32470 - DNA, 25 bp, Homo sapiens
tctcaatttgttggtttacagtctg

SEQ ID NO: 32471 - DNA, 25 bp, Homo sapiens
gtaatcatggaaatacacccctctg

SEQ ID NO: 32472 - DNA, 25 bp, Homo sapiens
tgggcccttccaatagtgcagactg

SEQ ID NO: 32473 - DNA, 25 bp, Homo sapiens
gatttactataaagcaaattcttct

SEQ ID NO: 32474 - DNA, 25 bp, Homo sapiens
aaatattgaacttatactgatactt

SEQ ID NO: 32475 - DNA, 25 bp, Homo sapiens
caatatatctgaagcaatgtctctg

SEQ ID NO: 32476 - DNA, 25 bp, Homo sapiens
tggtctaggcatccaaagcttcaga

SEQ ID NO: 32477 - DNA, 25 bp, Homo sapiens
ggtgtctccacaccagacatgttta

SEQ ID NO: 32478 - DNA, 25 bp, Homo sapiens
tgcaacctgcccatgacttctttgg

SEQ ID NO: 32479 - DNA, 25 bp, Homo sapiens
ctgggcctacttctcctattaaaca

SEQ ID NO: 32480 - DNA, 25 bp, Homo sapiens
ctctgcttacagttgggtcaatatc

SEQ ID NO: 32481 - DNA, 25 bp, Homo sapiens
ccagagaggttccttgccttgtgga

SEQ ID NO: 32482 - DNA, 25 bp, Homo sapiens
caggttttgttctttctccaaggga

SEQ ID NO: 32483 - DNA, 25 bp, Homo sapiens
ctgtacccagatgagcttgaatttg

SEQ ID NO: 32484 - DNA, 25 bp, Homo sapiens
acttttgtggtgtaatctaagaaca

SEQ ID NO: 32485 - DNA, 25 bp, Homo sapiens
ctattcctcgctgacatgatatttt

SEQ ID NO: 32486 - DNA, 25 bp, Homo sapiens
agctcatgtggctcaggactttata

SEQ ID NO: 32487 - DNA, 25 bp, Homo sapiens
ctcaggcatacttcagctttaattg

SEQ ID NO: 32488 - DNA, 25 bp, Homo sapiens
gccctttgattctaagtttccatgg

SEQ ID NO: 32489 - DNA, 25 bp, Homo sapiens
aacaggcaggtcactcttttgagta

SEQ ID NO: 32490 - DNA, 25 bp, Homo sapiens
ctgtatatgctttgtgctctcaaca

SEQ ID NO: 32491 - DNA, 25 bp, Homo sapiens
gcagagttatttttgacatgtccta

SEQ ID NO: 32492 - DNA, 25 bp, Homo sapiens
ctgtcgtgataagatgggttacctc

SEQ ID NO: 32493 - DNA, 25 bp, Homo sapiens
tggcttgcagcaactagagaatctg

SEQ ID NO: 32494 - DNA, 25 bp, Homo sapiens
ctagtgatttaatactggcagtatg

SEQ ID NO: 32495 - DNA, 25 bp, Homo sapiens
tctcaatgagcttttataatgaatc

SEQ ID NO: 32496 - DNA, 25 bp, Homo sapiens
gtctgccagatcaagtttatttacc

SEQ ID NO: 32497 - DNA, 25 bp, Homo sapiens
ccttcattttgttttgagttctcga

SEQ ID NO: 32498 - DNA, 25 bp, Homo sapiens
tcccgagttgtggacacgatattgt

SEQ ID NO: 32499 - DNA, 25 bp, Homo sapiens
gaggagccttttccttagcaacatg

SEQ ID NO: 32500 - DNA, 25 bp, Homo sapiens
tctttctctcctgatactgtgatta

SEQ ID NO: 32501 - DNA, 25 bp, Homo sapiens
tctatgcacctactcttgctctttt

SEQ ID NO: 32502 - DNA, 25 bp, Homo sapiens
tctcaggctagggaaacataagttc

SEQ ID NO: 32503 - DNA, 25 bp, Homo sapiens
gttggctagactctaacagctgttc

SEQ ID NO: 32504 - DNA, 25 bp, Homo sapiens
gacagcactcttttcctgggaacga

SEQ ID NO: 32505 - DNA, 25 bp, Homo sapiens
ttcatggatatttggtggcactctg

SEQ ID NO: 32506 - DNA, 25 bp, Homo sapiens
cacaagtttttcactgttgcgctta

SEQ ID NO: 32507 - DNA, 25 bp, Homo sapiens
cggggctaatgacactatgttgatc

SEQ ID NO: 32508 - DNA, 25 bp, Homo sapiens
tcgggagctgagaatgacacatttg

SEQ ID NO: 32509 - DNA, 25 bp, Homo sapiens
atgaaaatgttcttttttaattttg

SEQ ID NO: 32510 - DNA, 25 bp, Homo sapiens
attatttaaaatttgtttatccatg

SEQ ID NO: 32511 - DNA, 25 bp, Homo sapiens
cagatagccatagacaggtttttcc

SEQ ID NO: 32512 - DNA, 25 bp, Homo sapiens
acagggctggtcaaggttttcttca

SEQ ID NO: 32513 - DNA, 25 bp, Homo sapiens
gggttcccttatccagcttatgttc

SEQ ID NO: 32514 - DNA, 25 bp, Homo sapiens
tgcggacttccaggctttatgacta

SEQ ID NO: 32515 - DNA, 25 bp, Homo sapiens
cgtgggctttcctgcttggcataat

SEQ ID NO: 32516 - DNA, 25 bp, Homo sapiens
caaatttcaggtacatcatatctta

SEQ ID NO: 32517 - DNA, 25 bp, Homo sapiens
tctgcccgtgagaaagaacttgcca

SEQ ID NO: 32518 - DNA, 25 bp, Homo sapiens
tcacaggcctgcatagagtttgtta

SEQ ID NO: 32519 - DNA, 25 bp, Homo sapiens
tgggatgttatttgcgctcacttca

SEQ ID NO: 32520 - DNA, 25 bp, Homo sapiens
ggtgcttattcccactgctgattgg

SEQ ID NO: 32521 - DNA, 25 bp, Homo sapiens
cggtcgcatggaactgagcaatctg

SEQ ID NO: 32522 - DNA, 25 bp, Homo sapiens
ttgcagtcaagctttccaggacata

SEQ ID NO: 32523 - DNA, 25 bp, Homo sapiens
ccatagggtccatagcaagtcaata

SEQ ID NO: 32524 - DNA, 25 bp, Homo sapiens
tagagcttttaacttttattaaaat

SEQ ID NO: 32525 - DNA, 25 bp, Homo sapiens
ggtggctcacctttctacttatgtt

SEQ ID NO: 32526 - DNA, 25 bp, Homo sapiens
tccggtgtctcctttaccgaatata

SEQ ID NO: 32527 - DNA, 25 bp, Homo sapiens
ggctcctcattctaaaaatctcttg

SEQ ID NO: 32528 - DNA, 25 bp, Homo sapiens
gaacttcagcatgtgtattcctgtc

SEQ ID NO: 32529 - DNA, 25 bp, Homo sapiens
gacagcgacagaacccagtagtttt

SEQ ID NO: 32530 - DNA, 25 bp, Homo sapiens
catggctccggactgactcagactc

SEQ ID NO: 32531 - DNA, 25 bp, Homo sapiens
gggaaggcctcctggacttaaatta

SEQ ID NO: 32532 - DNA, 25 bp, Homo sapiens
aggtgaactctttccctgttatttc

SEQ ID NO: 32533 - DNA, 25 bp, Homo sapiens
gctcccaatctagtgcccttaaatg

SEQ ID NO: 32534 - DNA, 25 bp, Homo sapiens
tctgttgcctacaggctcataggtc

SEQ ID NO: 32535 - DNA, 25 bp, Homo sapiens
tggattcctgcccacatcttacata

SEQ ID NO: 32536 - DNA, 25 bp, Homo sapiens
ccagaggacatgctttatccgctta

SEQ ID NO: 32537 - DNA, 25 bp, Homo sapiens
tcacgccatgaacatcgtcaggttc

SEQ ID NO: 32538 - DNA, 25 bp, Homo sapiens
ctgctgtggcagtccatctggatta

SEQ ID NO: 32539 - DNA, 25 bp, Homo sapiens
gtccttgctttccaggggcctgata

SEQ ID NO: 32540 - DNA, 25 bp, Homo sapiens
ccttgcagtttagcaggccctcttg

SEQ ID NO: 32541 - DNA, 25 bp, Homo sapiens
ctggccatagcctgctcagtactta

SEQ ID NO: 32542 - DNA, 25 bp, Homo sapiens
gtggtcacgcagtgcccttaataca

SEQ ID NO: 32543 - DNA, 25 bp, Homo sapiens
cactgagcatggtttggaggccttc

SEQ ID NO: 32544 - DNA, 25 bp, Homo sapiens
gtcacttgtttatcactccagaatc

SEQ ID NO: 32545 - DNA, 25 bp, Homo sapiens
aggcttatcaagttccaggctatta

SEQ ID NO: 32546 - DNA, 25 bp, Homo sapiens
cagtctctgctaagtccatggtttc

SEQ ID NO: 32547 - DNA, 25 bp, Homo sapiens
ctgccagcaggtggaagaacactta

SEQ ID NO: 32548 - DNA, 25 bp, Homo sapiens
gctctgactccctgatgacactttg

SEQ ID NO: 32549 - DNA, 25 bp, Homo sapiens
aggactcccttttaggtaactagtg

SEQ ID NO: 32550 - DNA, 25 bp, Homo sapiens
agggccactcaacctctgttgtttc

SEQ ID NO: 32551 - DNA, 25 bp, Homo sapiens
aactagcctctgtttcctggcagga

SEQ ID NO: 32552 - DNA, 25 bp, Homo sapiens
gtacagctctttggtgccttcttaa

SEQ ID NO: 32553 - DNA, 25 bp, Homo sapiens
tgatctcagcaggacaagcttgttg

SEQ ID NO: 32554 - DNA, 25 bp, Homo sapiens
cccaggaggtgacctggtttctaca

SEQ ID NO: 32555 - DNA, 25 bp, Homo sapiens
gggaggatccttatgcaccacaaca

SEQ ID NO: 32556 - DNA, 25 bp, Homo sapiens
gtcccttgtgctgggtactacatca

SEQ ID NO: 32557 - DNA, 25 bp, Homo sapiens
gcccaagaaaagctggtgctgattc

SEQ ID NO: 32558 - DNA, 25 bp, Homo sapiens
ccgtacttttgtgagattatgccta

SEQ ID NO: 32559 - DNA, 25 bp, Homo sapiens
cccagcttttggtcatgctgcaata

SEQ ID NO: 32560 - DNA, 25 bp, Homo sapiens
acctcaggggttggtacttggaaaa

SEQ ID NO: 32561 - DNA, 25 bp, Homo sapiens
cctgaacagtgtccaacatttaata

SEQ ID NO: 32562 - DNA, 25 bp, Homo sapiens
agggcctagagtcgcaagtgattca

SEQ ID NO: 32563 - DNA, 25 bp, Homo sapiens
gttcaggtgctttcatgggagtccc

SEQ ID NO: 32564 - DNA, 25 bp, Homo sapiens
gatcattgttcccattttagcacca

SEQ ID NO: 32565 - DNA, 25 bp, Homo sapiens
gcctcaggagcacgtcagaaggtta

SEQ ID NO: 32566 - DNA, 25 bp, Homo sapiens
gtttaggtattctaagtctttagta

SEQ ID NO: 32567 - DNA, 25 bp, Homo sapiens
tatctattattgctactctctcctg

SEQ ID NO: 32568 - DNA, 25 bp, Homo sapiens
ataagatactctgtggccctaaagg

SEQ ID NO: 32569 - DNA, 25 bp, Homo sapiens
tctgaaggcatgtgatcaatttggc

SEQ ID NO: 32570 - DNA, 25 bp, Homo sapiens
cctgcgggtagaataggcctctttt

SEQ ID NO: 32571 - DNA, 25 bp, Homo sapiens
cttatcactgggagatggctttgga

SEQ ID NO: 32572 - DNA, 25 bp, Homo sapiens
ggacactgtatataaatgctcggta

SEQ ID NO: 32573 - DNA, 25 bp, Homo sapiens
tttactagtgaaaccagccctgata

SEQ ID NO: 32574 - DNA, 25 bp, Homo sapiens
tgaccagcacttcagcgaggcaaga

SEQ ID NO: 32575 - DNA, 25 bp, Homo sapiens
ggcactgtgtttagcattggattta

SEQ ID NO: 32576 - DNA, 25 bp, Homo sapiens
tgaccgctttcagatggtttatata

SEQ ID NO: 32577 - DNA, 25 bp, Homo sapiens
ataagaatttgcttaagtcctctaa

SEQ ID NO: 32578 - DNA, 25 bp, Homo sapiens
tacctacaggtggaaagactttctg

SEQ ID NO: 32579 - DNA, 25 bp, Homo sapiens
ctcggttgttgatgaatttgcttgc

SEQ ID NO: 32580 - DNA, 25 bp, Homo sapiens
catctgtcctagagagtgtccctga

SEQ ID NO: 32581 - DNA, 25 bp, Homo sapiens
gagttgctcctaccctttccatctg

SEQ ID NO: 32582 - DNA, 25 bp, Homo sapiens
gattggtaaattccagtgtatgtaa

SEQ ID NO: 32583 - DNA, 25 bp, Homo sapiens
ccacaggatggccacacaggtttta

SEQ ID NO: 32584 - DNA, 25 bp, Homo sapiens
tgtcagtttaatcgatgctttcatg

SEQ ID NO: 32585 - DNA, 25 bp, Homo sapiens
gtgtcctgagacacttgaaaataga

SEQ ID NO: 32586 - DNA, 25 bp, Homo sapiens
aaagtattgtgattgcatttgtgtg

SEQ ID NO: 32587 - DNA, 25 bp, Homo sapiens
tctgacattttattggatgtagttt

SEQ ID NO: 32588 - DNA, 25 bp, Homo sapiens
tgccatgtgagggattcagactctt

SEQ ID NO: 32589 - DNA, 25 bp, Homo sapiens
ttactgagttaccaaagatgctttc

SEQ ID NO: 32590 - DNA, 25 bp, Homo sapiens
tatgttataatgttatgaaaatttc

SEQ ID NO: 32591 - DNA, 25 bp, Homo sapiens
atagccgatggctccagtaatcttg

SEQ ID NO: 32592 - DNA, 25 bp, Homo sapiens
aggctctccctcagttttatattag

SEQ ID NO: 32593 - DNA, 25 bp, Homo sapiens
caccgtctggtgatagttgcaattc

SEQ ID NO: 32594 - DNA, 25 bp, Homo sapiens
tgggagacatagactttacggcttg

SEQ ID NO: 32595 - DNA, 25 bp, Homo sapiens
ccagtggcagacctgtgaagcagtc

SEQ ID NO: 32596 - DNA, 25 bp, Homo sapiens
gggttacctgtggacctcatcaaaa

SEQ ID NO: 32597 - DNA, 25 bp, Homo sapiens
tgctctgggactctggttactctta

SEQ ID NO: 32598 - DNA, 25 bp, Homo sapiens
ctcagactgtgaatctgtgccattc

SEQ ID NO: 32599 - DNA, 25 bp, Homo sapiens
agactgctgagttttctctaaaatc

SEQ ID NO: 32600 - DNA, 25 bp, Homo sapiens
agcaggcagtgtattctgaaggaaa

SEQ ID NO: 32601 - DNA, 25 bp, Homo sapiens
ggaagggagagtacaagtaaaactc

SEQ ID NO: 32602 - DNA, 25 bp, Homo sapiens
tgggctctcttcctttatcttgtga

SEQ ID NO: 32603 - DNA, 25 bp, Homo sapiens
agcaggtctttgtatgaagccaata

SEQ ID NO: 32604 - DNA, 25 bp, Homo sapiens
ttttttggaacttttctttgtttgt

SEQ ID NO: 32605 - DNA, 25 bp, Homo sapiens
caatcatatctcagctgcatttttc

SEQ ID NO: 32606 - DNA, 25 bp, Homo sapiens
gccagacctgtctttcctttattta

SEQ ID NO: 32607 - DNA, 25 bp, Homo sapiens
taaattgtgatctaataccacaaac

SEQ ID NO: 32608 - DNA, 25 bp, Homo sapiens
atgatgggtttattcttttttaaaa

SEQ ID NO: 32609 - DNA, 25 bp, Homo sapiens
taaaatttgtttaaaaaagagtgag

SEQ ID NO: 32610 - DNA, 25 bp, Homo sapiens
ggtacttttgctgtggtgaactgaa

SEQ ID NO: 32611 - DNA, 25 bp, Homo sapiens
gtgccatctgtgtaaacgtctctcc

SEQ ID NO: 32612 - DNA, 25 bp, Homo sapiens
gcactacacttcttctcgccattgg

SEQ ID NO: 32613 - DNA, 25 bp, Homo sapiens
caaataaattcatgttgtcacactc

SEQ ID NO: 32614 - DNA, 25 bp, Homo sapiens
catattaacatgccacgtaggtttg

SEQ ID NO: 32615 - DNA, 25 bp, Homo sapiens
cttttcaatgagaaactatgtttta

SEQ ID NO: 32616 - DNA, 25 bp, Homo sapiens
ggcactggactgtggtatcactttc

SEQ ID NO: 32617 - DNA, 25 bp, Homo sapiens
ccagcagcccatggtgagtcaccga

SEQ ID NO: 32618 - DNA, 25 bp, Homo sapiens
tcataagtgatgttcggagacccta

SEQ ID NO: 32619 - DNA, 25 bp, Homo sapiens
cacacattttcctagcggcgtcagg

SEQ ID NO: 32620 - DNA, 25 bp, Homo sapiens
tgactccgtaccaccagaattgttc

SEQ ID NO: 32621 - DNA, 25 bp, Homo sapiens
tggggtacaagtgaccgaagattca

SEQ ID NO: 32622 - DNA, 25 bp, Homo sapiens
agaccttgttgcctgagagtgccga

SEQ ID NO: 32623 - DNA, 25 bp, Homo sapiens
ttctcagaggctcctgaggatgata

SEQ ID NO: 32624 - DNA, 25 bp, Homo sapiens
cactgagtgctttctagataaatgc

SEQ ID NO: 32625 - DNA, 25 bp, Homo sapiens
aggaaagagcaaacttttatgtagt

SEQ ID NO: 32626 - DNA, 25 bp, Homo sapiens
ttgtgatacctctccatgggtctta

SEQ ID NO: 32627 - DNA, 25 bp, Homo sapiens
tacctctttgggatagttgtgacca

SEQ ID NO: 32628 - DNA, 25 bp, Homo sapiens
tgggccctctagatctatataattg

SEQ ID NO: 32629 - DNA, 25 bp, Homo sapiens
ctatagtgatatatatactctttct

SEQ ID NO: 32630 - DNA, 25 bp, Homo sapiens
ttaaaaagagagaatctttaatacc

SEQ ID NO: 32631 - DNA, 25 bp, Homo sapiens
cccaagggtggtattttatatatta

SEQ ID NO: 32632 - DNA, 25 bp, Homo sapiens
gagacattactttgctgggaccctg

SEQ ID NO: 32633 - DNA, 25 bp, Homo sapiens
atgtgtctcaagtatatgtgcctaa

SEQ ID NO: 32634 - DNA, 25 bp, Homo sapiens
cttggctaggtctaattctagactg

SEQ ID NO: 32635 - DNA, 25 bp, Homo sapiens
gagagacctctgtcctttgaaaaga

SEQ ID NO: 32636 - DNA, 25 bp, Homo sapiens
tggtaccataccttcacaaaagctg

SEQ ID NO: 32637 - DNA, 25 bp, Homo sapiens
ggagaagtatcccacagctgtagta

SEQ ID NO: 32638 - DNA, 25 bp, Homo sapiens
ggtgctggcctttttcttataacta

SEQ ID NO: 32639 - DNA, 25 bp, Homo sapiens
tgggcagccatcagcaccattattg

SEQ ID NO: 32640 - DNA, 25 bp, Homo sapiens
gctcgcattggcctcagtctgatga

SEQ ID NO: 32641 - DNA, 25 bp, Homo sapiens
ggtctctagtaaagcctccatggtg

SEQ ID NO: 32642 - DNA, 25 bp, Homo sapiens
cctgactgttttgagagagaattta

SEQ ID NO: 32643 - DNA, 25 bp, Homo sapiens
tagatgatgagatttggcaggggta

SEQ ID NO: 32644 - DNA, 25 bp, Homo sapiens
tggaactgcctctaaaatatatctg

SEQ ID NO: 32645 - DNA, 25 bp, Homo sapiens
gtgatctgatcctcctggcaaattt

SEQ ID NO: 32646 - DNA, 25 bp, Homo sapiens
tgtctgcagtgttcacttaacctga

SEQ ID NO: 32647 - DNA, 25 bp, Homo sapiens
atccttggaggtaccctagttttta

SEQ ID NO: 32648 - DNA, 25 bp, Homo sapiens
ttggcctcagaaatcacaaatcctg

SEQ ID NO: 32649 - DNA, 25 bp, Homo sapiens
gtaaggttcttctcaaattcatttg

SEQ ID NO: 32650 - DNA, 25 bp, Homo sapiens
ttcactaggacaaagcttacaactg

SEQ ID NO: 32651 - DNA, 25 bp, Homo sapiens
gctgctgagaaactcggaagtatta

SEQ ID NO: 32652 - DNA, 25 bp, Homo sapiens
accctctcggtgcagtcagaattta

SEQ ID NO: 32653 - DNA, 25 bp, Homo sapiens
acccaagtggtatgctctctgatta

SEQ ID NO: 32654 - DNA, 25 bp, Homo sapiens
cagggctctctggtcaggtctaaaa

SEQ ID NO: 32655 - DNA, 25 bp, Homo sapiens
aattactgccaccagagttgctgtc

SEQ ID NO: 32656 - DNA, 25 bp, Homo sapiens
gtctgcacagaatccacagctgctg

SEQ ID NO: 32657 - DNA, 25 bp, Homo sapiens
ccctggtgcctagcatgttaaaata

SEQ ID NO: 32658 - DNA, 25 bp, Homo sapiens
tcctagctgctgaggtaataactga

SEQ ID NO: 32659 - DNA, 25 bp, Homo sapiens
ctcaaggatcacgagaattatattc

SEQ ID NO: 32660 - DNA, 25 bp, Homo sapiens
cgctcagactgcacttggggaaata

SEQ ID NO: 32661 - DNA, 25 bp, Homo sapiens
cctggttctgagtgtagtccacata

SEQ ID NO: 32662 - DNA, 25 bp, Homo sapiens
ttggtaactctcacacatggcactg

SEQ ID NO: 32663 - DNA, 25 bp, Homo sapiens
gcttttggagatgaactaattcacc

SEQ ID NO: 32664 - DNA, 25 bp, Homo sapiens
ggcatcatcacaaaaagcaggtctg

SEQ ID NO: 32665 - DNA, 25 bp, Homo sapiens
cttctggacatgttgactttctgga

SEQ ID NO: 32666 - DNA, 25 bp, Homo sapiens
aatgtaccccctttatagtttattt

SEQ ID NO: 32667 - DNA, 25 bp, Homo sapiens
gtaccagggtcactagccaaaacag

SEQ ID NO: 32668 - DNA, 25 bp, Homo sapiens
tgataaataaatccaggccatttta

SEQ ID NO: 32669 - DNA, 25 bp, Homo sapiens
tgcgtacctctatgcagcagcagta

SEQ ID NO: 32670 - DNA, 25 bp, Homo sapiens
agctttccaacttgctctcttagta

SEQ ID NO: 32671 - DNA, 25 bp, Homo sapiens
agggaccaagctgattacctagttg

SEQ ID NO: 32672 - DNA, 25 bp, Homo sapiens
cctctgtcatgtctggccctaattg

SEQ ID NO: 32673 - DNA, 25 bp, Homo sapiens
tgaaggccgtagcaaaacatgaagc

SEQ ID NO: 32674 - DNA, 25 bp, Homo sapiens
tggtacatttacagaaaacagtgcc

SEQ ID NO: 32675 - DNA, 25 bp, Homo sapiens
gagagaccactgttagcttgaccta

SEQ ID NO: 32676 - DNA, 25 bp, Homo sapiens
aagcttccttctgcagggccaggga

SEQ ID NO: 32677 - DNA, 25 bp, Homo sapiens
tcctgctgcattgtagtcaagaatg

SEQ ID NO: 32678 - DNA, 25 bp, Homo sapiens
aatagaaaaccatgagagatacgac

SEQ ID NO: 32679 - DNA, 25 bp, Homo sapiens
tctgataacccagcagtgtcacttc

SEQ ID NO: 32680 - DNA, 25 bp, Homo sapiens
ataccatttatatacatttttaaac

SEQ ID NO: 32681 - DNA, 25 bp, Homo sapiens
gctcccatttgtacactattagttg

SEQ ID NO: 32682 - DNA, 25 bp, Homo sapiens
tgtgaacctgaaagccctagtcttg

SEQ ID NO: 32683 - DNA, 25 bp, Homo sapiens
atccattgggtgaggccatcactta

SEQ ID NO: 32684 - DNA, 25 bp, Homo sapiens
aatcactttttgactcacccatgga

SEQ ID NO: 32685 - DNA, 25 bp, Homo sapiens
tgagagcagcgttatcttgaccaga

SEQ ID NO: 32686 - DNA, 25 bp, Homo sapiens
tcctcaaggagttcatggccaaata

SEQ ID NO: 32687 - DNA, 25 bp, Homo sapiens
tgtcccaccagcagaagttcccaat

SEQ ID NO: 32688 - DNA, 25 bp, Homo sapiens
tctggttctacaaggccacggttgc

SEQ ID NO: 32689 - DNA, 25 bp, Homo sapiens
gccacctggcagttgtgtcacatca

SEQ ID NO: 32690 - DNA, 25 bp, Homo sapiens
ccaacagatggggtgtggtaaattc

SEQ ID NO: 32691 - DNA, 25 bp, Homo sapiens
ttgtgctacccttactgtctgaatg

SEQ ID NO: 32692 - DNA, 25 bp, Homo sapiens
aggggttctgcatccaattattgtc

SEQ ID NO: 32693 - DNA, 25 bp, Homo sapiens
gcatgtaggcaaatacccgggaatt

SEQ ID NO: 32694 - DNA, 25 bp, Homo sapiens
cttccctgggaagcaagttctgata

SEQ ID NO: 32695 - DNA, 25 bp, Homo sapiens
gctttggcaagttttctgactccta

SEQ ID NO: 32696 - DNA, 25 bp, Homo sapiens
ttaccgcttgatgcacttgagagca

SEQ ID NO: 32697 - DNA, 25 bp, Homo sapiens
gggagcttgcaattcacctgtttac

SEQ ID NO: 32698 - DNA, 25 bp, Homo sapiens
ggctggcctaagcaccttctttttc

SEQ ID NO: 32699 - DNA, 25 bp, Homo sapiens
tgggaggcacacagcaaacactctg

SEQ ID NO: 32700 - DNA, 25 bp, Homo sapiens
cttgactagattttgggaattgtcc

SEQ ID NO: 32701 - DNA, 25 bp, Homo sapiens
ccttatctagggtggagttaactta

SEQ ID NO: 32702 - DNA, 25 bp, Homo sapiens
agggctctgtaccactagctgtgta

SEQ ID NO: 32703 - DNA, 25 bp, Homo sapiens
ctggtgtcactcaaaaactaaggcc

SEQ ID NO: 32704 - DNA, 25 bp, Homo sapiens
ggctctttctgctgagtttgcatta

SEQ ID NO: 32705 - DNA, 25 bp, Homo sapiens
gggctgcctttataaatctttgaga

SEQ ID NO: 32706 - DNA, 25 bp, Homo sapiens
aggttcattaagggttagcatttta

SEQ ID NO: 32707 - DNA, 25 bp, Homo sapiens
gtcttaacccacagatcaagcaacc

SEQ ID NO: 32708 - DNA, 25 bp, Homo sapiens
gataaatatgtttcttacttttaga

SEQ ID NO: 32709 - DNA, 25 bp, Homo sapiens
gccattgtaaatgagtagtcattct

SEQ ID NO: 32710 - DNA, 25 bp, Homo sapiens
cagcctaagttcaaaaacgtgcttt

SEQ ID NO: 32711 - DNA, 25 bp, Homo sapiens
agggtttacgctacatttacatttg

SEQ ID NO: 32712 - DNA, 25 bp, Homo sapiens
ctgccctataaaacatcaaacttca

SEQ ID NO: 32713 - DNA, 25 bp, Homo sapiens
ataaaattatagcttttatagttgt

SEQ ID NO: 32714 - DNA, 25 bp, Homo sapiens
atcattagtctggatagcagggcta

SEQ ID NO: 32715 - DNA, 25 bp, Homo sapiens
tgagttcacactctgttgcacacaa

SEQ ID NO: 32716 - DNA, 25 bp, Homo sapiens
taggagtgtatgactgactaacatc

SEQ ID NO: 32717 - DNA, 25 bp, Homo sapiens
acgaaagagtaaatcctgacgttca

SEQ ID NO: 32718 - DNA, 25 bp, Homo sapiens
ttccaggtacagaaggcagtattca

SEQ ID NO: 32719 - DNA, 25 bp, Homo sapiens
gaagacacacgctttcccacacatg

SEQ ID NO: 32720 - DNA, 25 bp, Homo sapiens
ttggaaggaagcacacaagtatttc

SEQ ID NO: 32721 - DNA, 25 bp, Homo sapiens
tttaagcctgctgctgcatattgtc

SEQ ID NO: 32722 - DNA, 25 bp, Homo sapiens
aaggatgctttgtgtttccaatgta

SEQ ID NO: 32723 - DNA, 25 bp, Homo sapiens
tcaggcctttccactctcaatctta

SEQ ID NO: 32724 - DNA, 25 bp, Homo sapiens
tgcctttccttggaagtccactgtg

SEQ ID NO: 32725 - DNA, 25 bp, Homo sapiens
ggcagcatctgtcacttttcacttg

SEQ ID NO: 32726 - DNA, 25 bp, Homo sapiens
tcgttgttgcctcctgaagctgcta

SEQ ID NO: 32727 - DNA, 25 bp, Homo sapiens
catttcaaaaaaccaaaattcagga

SEQ ID NO: 32728 - DNA, 25 bp, Homo sapiens
tgttgacctgtatgagctatgaatc

SEQ ID NO: 32729 - DNA, 25 bp, Homo sapiens
agggatctcttaaaatgctagtagc

SEQ ID NO: 32730 - DNA, 25 bp, Homo sapiens
tgctatgcctcctaaaatcaagtgg

SEQ ID NO: 32731 - DNA, 25 bp, Homo sapiens
ttttgttaaaacagcctgaatccta

SEQ ID NO: 32732 - DNA, 25 bp, Homo sapiens
ttcttttaaaaagaatttgaaatga

SEQ ID NO: 32733 - DNA, 25 bp, Homo sapiens
tatggagtcatttcaaagctggagg

SEQ ID NO: 32734 - DNA, 25 bp, Homo sapiens
ccttcttggatctacctgggatatg

SEQ ID NO: 32735 - DNA, 25 bp, Homo sapiens
tctctgcattgtagccaggtcaata

SEQ ID NO: 32736 - DNA, 25 bp, Homo sapiens
tggaaagagcctgagaccctgaatc

SEQ ID NO: 32737 - DNA, 25 bp, Homo sapiens
cctactttttatctctgaagggtaa

SEQ ID NO: 32738 - DNA, 25 bp, Homo sapiens
tcttaaatttcagggcaggctgccc

SEQ ID NO: 32739 - DNA, 25 bp, Homo sapiens
tgcaagaggagctcgatatcacatc

SEQ ID NO: 32740 - DNA, 25 bp, Homo sapiens
atgtcagctacgtggagtttattcc

SEQ ID NO: 32741 - DNA, 25 bp, Homo sapiens
gcaggcttgtgcatctaggtatata

SEQ ID NO: 32742 - DNA, 25 bp, Homo sapiens
gccttgctcgatgaacgtgtattga

SEQ ID NO: 32743 - DNA, 25 bp, Homo sapiens
ggggtattttagctccagttaactg

SEQ ID NO: 32744 - DNA, 25 bp, Homo sapiens
gtgtgggctgagataaatggttttc

SEQ ID NO: 32745 - DNA, 25 bp, Homo sapiens
tctacgctgatgtgtgtgcggcatg

SEQ ID NO: 32746 - DNA, 25 bp, Homo sapiens
tcaatagtgcttaaagtgtccttcc

SEQ ID NO: 32747 - DNA, 25 bp, Homo sapiens
tgtagaggtacacttctggccaatg

SEQ ID NO: 32748 - DNA, 25 bp, Homo sapiens
tgcatttgatccagtgagggccctc

SEQ ID NO: 32749 - DNA, 25 bp, Homo sapiens
aggccctggggattgtacaattctc

SEQ ID NO: 32750 - DNA, 25 bp, Homo sapiens
gcgtttccaggcaagagatcaggta

SEQ ID NO: 32751 - DNA, 25 bp, Homo sapiens
ctagcctcagtcacttacatgttga

SEQ ID NO: 32752 - DNA, 25 bp, Homo sapiens
ggccagtccttaatttttccttcaa

SEQ ID NO: 32753 - DNA, 25 bp, Homo sapiens
agcctcgtctctctagcatttaatg

SEQ ID NO: 32754 - DNA, 25 bp, Homo sapiens
ggacagactcttccagccatgttta

SEQ ID NO: 32755 - DNA, 25 bp, Homo sapiens
tggctctctgcccatttctatctgg

SEQ ID NO: 32756 - DNA, 25 bp, Homo sapiens
tgtgctgttgcctacatacactgta

SEQ ID NO: 32757 - DNA, 25 bp, Homo sapiens
ggggcccaggtactcacttttaaga

SEQ ID NO: 32758 - DNA, 25 bp, Homo sapiens
gtcctccttcactagctcacattta

SEQ ID NO: 32759 - DNA, 25 bp, Homo sapiens
tttagtacagtgcaaacgtctttta

SEQ ID NO: 32760 - DNA, 25 bp, Homo sapiens
cctttagcctgtgtgagagtttcaa

SEQ ID NO: 32761 - DNA, 25 bp, Homo sapiens
cctgctgtttatgcttgcccacaaa

SEQ ID NO: 32762 - DNA, 25 bp, Homo sapiens
tttctacgaatcatggcaactcagg

SEQ ID NO: 32763 - DNA, 25 bp, Homo sapiens
gaccagcacaggagagacaatcatc

SEQ ID NO: 32764 - DNA, 25 bp, Homo sapiens
acccagctgttggttatgacacctg

SEQ ID NO: 32765 - DNA, 25 bp, Homo sapiens
ttaaattcatttcttaatcatctgt

SEQ ID NO: 32766 - DNA, 25 bp, Homo sapiens
agagcgtcctctgtggccaaaagca

SEQ ID NO: 32767 - DNA, 25 bp, Homo sapiens
cccaggccctggttgttagacattc

SEQ ID NO: 32768 - DNA, 25 bp, Homo sapiens
tgtcaactggtccttttaataggcg

SEQ ID NO: 32769 - DNA, 25 bp, Homo sapiens
gaaatttctctcctctgctgctgta

SEQ ID NO: 32770 - DNA, 25 bp, Homo sapiens
tatatagaccaaggacctagtgtat

SEQ ID NO: 32771 - DNA, 25 bp, Homo sapiens
gatctttgcttgtcagatacaattt

SEQ ID NO: 32772 - DNA, 25 bp, Homo sapiens
acggtgcttggtaaatgtgcttttc

SEQ ID NO: 32773 - DNA, 25 bp, Homo sapiens
gtttcccttagcacagctctgattg

SEQ ID NO: 32774 - DNA, 25 bp, Homo sapiens
cactcagtggagtattgcagttttc

SEQ ID NO: 32775 - DNA, 25 bp, Homo sapiens
acctctggcaacttaattatatctg

SEQ ID NO: 32776 - DNA, 25 bp, Homo sapiens
acccagggtcaaagtagtcattatc

SEQ ID NO: 32777 - DNA, 25 bp, Homo sapiens
catcttgatttcttgggctttcacc

SEQ ID NO: 32778 - DNA, 25 bp, Homo sapiens
cttggcatcaggttcacactaaata

SEQ ID NO: 32779 - DNA, 25 bp, Homo sapiens
ttctgtgtaagcaatggcccgtgtc

SEQ ID NO: 32780 - DNA, 25 bp, Homo sapiens
aagactgtgtttttccctccaaggg

SEQ ID NO: 32781 - DNA, 25 bp, Homo sapiens
atgctgagggcttgctaatccttta

SEQ ID NO: 32782 - DNA, 25 bp, Homo sapiens
tgtagatgacctcactgccaatatg

SEQ ID NO: 32783 - DNA, 25 bp, Homo sapiens
tgctgctctagctttgccaagttac

SEQ ID NO: 32784 - DNA, 25 bp, Homo sapiens
cctaacctcagtgatgcaatgcagc

SEQ ID NO: 32785 - DNA, 25 bp, Homo sapiens
aaaaatcaaaacactgatcttgaga

SEQ ID NO: 32786 - DNA, 25 bp, Homo sapiens
ggaatcttgcactatgcccattttc

SEQ ID NO: 32787 - DNA, 25 bp, Homo sapiens
cttggccctgatttctgatactctc

SEQ ID NO: 32788 - DNA, 25 bp, Homo sapiens
aggagtcaccgtttatccaccttga

SEQ ID NO: 32789 - DNA, 25 bp, Homo sapiens
agtggctgtcttccagtcatcaagg

SEQ ID NO: 32790 - DNA, 25 bp, Homo sapiens
tggatgggccttctatgtgtgtttt

SEQ ID NO: 32791 - DNA, 25 bp, Homo sapiens
ccacctggtaagattgcagtgcatg

SEQ ID NO: 32792 - DNA, 25 bp, Homo sapiens
gcctcgagaaatggggacaaagaac

SEQ ID NO: 32793 - DNA, 25 bp, Homo sapiens
tatctaaaatataaggaaacatttt

SEQ ID NO: 32794 - DNA, 25 bp, Homo sapiens
gtaaattatatagactctttgcctt

SEQ ID NO: 32795 - DNA, 25 bp, Homo sapiens
acttgcagcgacatgtggacttttc

SEQ ID NO: 32796 - DNA, 25 bp, Homo sapiens
tattttaatacatacatacatgaaa

SEQ ID NO: 32797 - DNA, 25 bp, Homo sapiens
tgtagaaatgtcagaggaagtcctc

SEQ ID NO: 32798 - DNA, 25 bp, Homo sapiens
ggctcagcctctgttgacatttcca

SEQ ID NO: 32799 - DNA, 25 bp, Homo sapiens
tgctacaagatacaaccacagggag

SEQ ID NO: 32800 - DNA, 25 bp, Homo sapiens
tggctacttattggctttccaggaa

SEQ ID NO: 32801 - DNA, 25 bp, Homo sapiens
atcttgtctgtagacagtgctcatt

SEQ ID NO: 32802 - DNA, 25 bp, Homo sapiens
tcatccaaagtaagtgggtttcctc

SEQ ID NO: 32803 - DNA, 25 bp, Homo sapiens
ctgacatctgctttgggttcactta

SEQ ID NO: 32804 - DNA, 25 bp, Homo sapiens
gtttcctgaatagatcctgggatta

SEQ ID NO: 32805 - DNA, 25 bp, Homo sapiens
gacatagcctgcatttgataccatg

SEQ ID NO: 32806 - DNA, 25 bp, Homo sapiens
atgtcatcttgaggctgggcatcca

SEQ ID NO: 32807 - DNA, 25 bp, Homo sapiens
tgccatctcattgccttttactgtg

SEQ ID NO: 32808 - DNA, 25 bp, Homo sapiens
ttgggtcccacagaactgagcaatc

SEQ ID NO: 32809 - DNA, 25 bp, Homo sapiens
ccctcctaaggtatattgacaagta

SEQ ID NO: 32810 - DNA, 25 bp, Homo sapiens
ctggggacagtcatggtaatatatc

SEQ ID NO: 32811 - DNA, 25 bp, Homo sapiens
tcttagaacagaatgatgataatct

SEQ ID NO: 32812 - DNA, 25 bp, Homo sapiens
gtcttttaaaacagctgccaagttg

SEQ ID NO: 32813 - DNA, 25 bp, Homo sapiens
gcttgctaaattcttggttgctatg

SEQ ID NO: 32814 - DNA, 25 bp, Homo sapiens
taccctcatttcctggagttcctga

SEQ ID NO: 32815 - DNA, 25 bp, Homo sapiens
ccaagtttgcttcatgtgccacaga

SEQ ID NO: 32816 - DNA, 25 bp, Homo sapiens
tgaaaaaatctctgaataagtactg

SEQ ID NO: 32817 - DNA, 25 bp, Homo sapiens
tgccgcctcaaatctgttcaggagt

SEQ ID NO: 32818 - DNA, 25 bp, Homo sapiens
tgttttcagtaaaggggaatcgccc

SEQ ID NO: 32819 - DNA, 25 bp, Homo sapiens
tgcactttgtcatactagggagaga

SEQ ID NO: 32820 - DNA, 25 bp, Homo sapiens
ccctcggtctacgtacatattttag

SEQ ID NO: 32821 - DNA, 25 bp, Homo sapiens
ctgctgcctgcagtgaacttgccta

SEQ ID NO: 32822 - DNA, 25 bp, Homo sapiens
gagagcctttggtacagtatacaca

SEQ ID NO: 32823 - DNA, 25 bp, Homo sapiens
atgccctgagggaccagcccaatta

SEQ ID NO: 32824 - DNA, 25 bp, Homo sapiens
atcacgggatttgcgctggaacata

SEQ ID NO: 32825 - DNA, 25 bp, Homo sapiens
gaccagtctacgtttccttgtcatg

SEQ ID NO: 32826 - DNA, 25 bp, Homo sapiens
ggccgggttccaaaatgctaaatac

SEQ ID NO: 32827 - DNA, 25 bp, Homo sapiens
cagccaccttcactctacggaaaaa

SEQ ID NO: 32828 - DNA, 25 bp, Homo sapiens
taataaagatgcacacatataaagt

SEQ ID NO: 32829 - DNA, 25 bp, Homo sapiens
ttggcagcctctttcatgagcttta

SEQ ID NO: 32830 - DNA, 25 bp, Homo sapiens
ggcagcttggccttgaacataacta

SEQ ID NO: 32831 - DNA, 25 bp, Homo sapiens
tctatgggactctggccaaggaacc

SEQ ID NO: 32832 - DNA, 25 bp, Homo sapiens
gtggcaaatgtgtcctgcaaggata

SEQ ID NO: 32833 - DNA, 25 bp, Homo sapiens
ctccagaaggttagcagttgacttc

SEQ ID NO: 32834 - DNA, 25 bp, Homo sapiens
ttactgaacctgaaatattttccag

SEQ ID NO: 32835 - DNA, 25 bp, Homo sapiens
gtgacacgactatttaattcatctg

SEQ ID NO: 32836 - DNA, 25 bp, Homo sapiens
gacacaattttaaaaaactttagca

SEQ ID NO: 32837 - DNA, 25 bp, Homo sapiens
cgttgtttgactacccaagggcttt

SEQ ID NO: 32838 - DNA, 25 bp, Homo sapiens
gaatgtgcttattttggtacccata

SEQ ID NO: 32839 - DNA, 25 bp, Homo sapiens
tctgaaattctctgttaactttgca

SEQ ID NO: 32840 - DNA, 25 bp, Homo sapiens
tcctagcctgttccctggatagttt

SEQ ID NO: 32841 - DNA, 25 bp, Homo sapiens
tccttttcagtgtgtgggcagtgta

SEQ ID NO: 32842 - DNA, 25 bp, Homo sapiens
ccttctggtttgttttgcttgagcc

SEQ ID NO: 32843 - DNA, 25 bp, Homo sapiens
ggaagctaccgtgacctgtttacta

SEQ ID NO: 32844 - DNA, 25 bp, Homo sapiens
ccggaaattgtggaggttactagaa

SEQ ID NO: 32845 - DNA, 25 bp, Homo sapiens
cccacttaatgcaggttgagaaata

SEQ ID NO: 32846 - DNA, 25 bp, Homo sapiens
acctgtgggcactaacattttgtta

SEQ ID NO: 32847 - DNA, 25 bp, Homo sapiens
gctctgtcatgttaggagaactctc

SEQ ID NO: 32848 - DNA, 25 bp, Homo sapiens
ccctagttttagttcaggacccaga

SEQ ID NO: 32849 - DNA, 25 bp, Homo sapiens
ttcctgggcacaagatactgttcta

SEQ ID NO: 32850 - DNA, 25 bp, Homo sapiens
tgacttctctgtacttgccttagga

SEQ ID NO: 32851 - DNA, 25 bp, Homo sapiens
ccctcttcctgcatatctgtgttta

SEQ ID NO: 32852 - DNA, 25 bp, Homo sapiens
ggctgactggacaccctgttcaatc

SEQ ID NO: 32853 - DNA, 25 bp, Homo sapiens
gttcagcatgacagggttcaaacca

SEQ ID NO: 32854 - DNA, 25 bp, Homo sapiens
gcccttaagctccttggcccagtga

SEQ ID NO: 32855 - DNA, 25 bp, Homo sapiens
tgggcagcgagacattatcaaagtt

SEQ ID NO: 32856 - DNA, 25 bp, Homo sapiens
tgtcctctctgaatacactgcactg

SEQ ID NO: 32857 - DNA, 25 bp, Homo sapiens
tccaggtgaattacttagtactatc

SEQ ID NO: 32858 - DNA, 25 bp, Homo sapiens
gggcactctcactagctctctgtta

SEQ ID NO: 32859 - DNA, 25 bp, Homo sapiens
gccatgggtgctgaagaaaacatta

SEQ ID NO: 32860 - DNA, 25 bp, Homo sapiens
gggccattaaaatacttccaggata

SEQ ID NO: 32861 - DNA, 25 bp, Homo sapiens
ggacccgtgtactttacctataagg

SEQ ID NO: 32862 - DNA, 25 bp, Homo sapiens
atgggaagttagcagccagtcctta

SEQ ID NO: 32863 - DNA, 25 bp, Homo sapiens
tttatactggagagagaccctgtga

SEQ ID NO: 32864 - DNA, 25 bp, Homo sapiens
ccctacgcatgtaagaaatgtggta

SEQ ID NO: 32865 - DNA, 25 bp, Homo sapiens
aagaccctggggtatgcgtttcgac

SEQ ID NO: 32866 - DNA, 25 bp, Homo sapiens
tttggggtatatctgcatgcggtta

SEQ ID NO: 32867 - DNA, 25 bp, Homo sapiens
atcccaagactgactgtgtacgttc

SEQ ID NO: 32868 - DNA, 25 bp, Homo sapiens
ctcagcaatttctgtggccacatta

SEQ ID NO: 32869 - DNA, 25 bp, Homo sapiens
tgcttgcctctggaacacactggta

SEQ ID NO: 32870 - DNA, 25 bp, Homo sapiens
ctcctggggagggactttttacatt

SEQ ID NO: 32871 - DNA, 25 bp, Homo sapiens
agacctactgtgatcttctgactta

SEQ ID NO: 32872 - DNA, 25 bp, Homo sapiens
caagtcctggacatctttagtcaca

SEQ ID NO: 32873 - DNA, 25 bp, Homo sapiens
ttgtgtgtacagttagcatttgtta

SEQ ID NO: 32874 - DNA, 25 bp, Homo sapiens
gagaggctgttctgctttaataata

SEQ ID NO: 32875 - DNA, 25 bp, Homo sapiens
tatgagggtatcacctaattgtgtc

SEQ ID NO: 32876 - DNA, 25 bp, Homo sapiens
aaattaatgattctggttagatttt

SEQ ID NO: 32877 - DNA, 25 bp, Homo sapiens
ggactagatgttttatgtgattgta

SEQ ID NO: 32878 - DNA, 25 bp, Homo sapiens
aaaatacagctgttttacattaatt

SEQ ID NO: 32879 - DNA, 25 bp, Homo sapiens
tcccagtgttcctaaccagcataca

SEQ ID NO: 32880 - DNA, 25 bp, Homo sapiens
ctctctcttggtctaaatcagtgca

SEQ ID NO: 32881 - DNA, 25 bp, Homo sapiens
tgggacaccagcacgaaaactcaga

SEQ ID NO: 32882 - DNA, 25 bp, Homo sapiens
tttgtttgttttaaattattttgtc

SEQ ID NO: 32883 - DNA, 25 bp, Homo sapiens
tctatttaaaccaactttcttgaag

SEQ ID NO: 32884 - DNA, 25 bp, Homo sapiens
gtggaaattgtcattgcatatacta

SEQ ID NO: 32885 - DNA, 25 bp, Homo sapiens
caacaacaacgaccaaaaaaaccca

SEQ ID NO: 32886 - DNA, 25 bp, Homo sapiens
tgggccactgaccaacaatatcttg

SEQ ID NO: 32887 - DNA, 25 bp, Homo sapiens
gccagaggcgtcataggaagacata

SEQ ID NO: 32888 - DNA, 25 bp, Homo sapiens
gaggagagccatccacttagtgtaa

SEQ ID NO: 32889 - DNA, 25 bp, Homo sapiens
tgtcagcagaagaacccagcgtttg

SEQ ID NO: 32890 - DNA, 25 bp, Homo sapiens
gcctggcagtagaatagatacttta

SEQ ID NO: 32891 - DNA, 25 bp, Homo sapiens
aagactgtcaattggccaacatgga

SEQ ID NO: 32892 - DNA, 25 bp, Homo sapiens
tgcaaacctgaatgttcggcttgtc

SEQ ID NO: 32893 - DNA, 25 bp, Homo sapiens
gcatggtgatcaaaggccacatttg

SEQ ID NO: 32894 - DNA, 25 bp, Homo sapiens
tgcatatatatgcatttacccacac

SEQ ID NO: 32895 - DNA, 25 bp, Homo sapiens
aaataaaaaataaatcttgtgcttg

SEQ ID NO: 32896 - DNA, 25 bp, Homo sapiens
gagaagggctgactttaagtcaaag

SEQ ID NO: 32897 - DNA, 25 bp, Homo sapiens
tgctccacgtggttgataatacatc

SEQ ID NO: 32898 - DNA, 25 bp, Homo sapiens
gcctgcttcccaacaactggatgta

SEQ ID NO: 32899 - DNA, 25 bp, Homo sapiens
ctgctgcctccaaccagaagatata

SEQ ID NO: 32900 - DNA, 25 bp, Homo sapiens
gcacggttatatatgtccagtagta

SEQ ID NO: 32901 - DNA, 25 bp, Homo sapiens
tggattgtcctgcttcttcactgta

SEQ ID NO: 32902 - DNA, 25 bp, Homo sapiens
cttgtggtcatcaaaaggtctgatc

SEQ ID NO: 32903 - DNA, 25 bp, Homo sapiens
agcctgtttgcctacttgggaaata

SEQ ID NO: 32904 - DNA, 25 bp, Homo sapiens
cactctctgaggttgtttttgacac

SEQ ID NO: 32905 - DNA, 25 bp, Homo sapiens
cccttagtgtcttggggactttcca

SEQ ID NO: 32906 - DNA, 25 bp, Homo sapiens
ggctgctgagaactagttgccatca

SEQ ID NO: 32907 - DNA, 25 bp, Homo sapiens
ggccaggctaccaccattgcaaata

SEQ ID NO: 32908 - DNA, 25 bp, Homo sapiens
ctgtgaccatcagtattgatagttg

SEQ ID NO: 32909 - DNA, 25 bp, Homo sapiens
tatgccacagcttgaccaggacaga

SEQ ID NO: 32910 - DNA, 25 bp, Homo sapiens
gatctgggcgattttcacatctgca

SEQ ID NO: 32911 - DNA, 25 bp, Homo sapiens
tcagcttttatcattagccattttc

SEQ ID NO: 32912 - DNA, 25 bp, Homo sapiens
tgttagccatctaggggttctccgc

SEQ ID NO: 32913 - DNA, 25 bp, Homo sapiens
ggccggcctcagctctgttttatta

SEQ ID NO: 32914 - DNA, 25 bp, Homo sapiens
ttacggttcgataacagggtctttc

SEQ ID NO: 32915 - DNA, 25 bp, Homo sapiens
tggtgtcctgcccagttatttcatg

SEQ ID NO: 32916 - DNA, 25 bp, Homo sapiens
gaaggaaaagaaagtcaatccccca

SEQ ID NO: 32917 - DNA, 25 bp, Homo sapiens
cgagtgtgcctcttgctgtaaataa

SEQ ID NO: 32918 - DNA, 25 bp, Homo sapiens
atgctggcttctcagccctttgaaa

SEQ ID NO: 32919 - DNA, 25 bp, Homo sapiens
ccaacatttggggtgacgaagccga

SEQ ID NO: 32920 - DNA, 25 bp, Homo sapiens
ctcctaggagagatttgaagccatc

SEQ ID NO: 32921 - DNA, 25 bp, Homo sapiens
catgatgtccctatgttggctgata

SEQ ID NO: 32922 - DNA, 25 bp, Homo sapiens
tccacaggcaagacacagatgcttc

SEQ ID NO: 32923 - DNA, 25 bp, Homo sapiens
aaatttacagacatggaaacgagtc

SEQ ID NO: 32924 - DNA, 25 bp, Homo sapiens
tgggaccagggcttagatcaatctt

SEQ ID NO: 32925 - DNA, 25 bp, Homo sapiens
gatttcacgatccttcactgctaga

SEQ ID NO: 32926 - DNA, 25 bp, Homo sapiens
gctgaatgtagtcccacaggctatg

SEQ ID NO: 32927 - DNA, 25 bp, Homo sapiens
ttctggtcactgtcaaagcagcaca

SEQ ID NO: 32928 - DNA, 25 bp, Homo sapiens
ggccatttggactctactttctttc

SEQ ID NO: 32929 - DNA, 25 bp, Homo sapiens
gctgaaggctttgcgttgtccaatc

SEQ ID NO: 32930 - DNA, 25 bp, Homo sapiens
tgctcagaaactgggtggctccttc

SEQ ID NO: 32931 - DNA, 25 bp, Homo sapiens
cgtctctggaggatgctatgatttt

SEQ ID NO: 32932 - DNA, 25 bp, Homo sapiens
tcctgtggtcagtcagcctcatatg

SEQ ID NO: 32933 - DNA, 25 bp, Homo sapiens
atcagtttcacttcctccttcctta

SEQ ID NO: 32934 - DNA, 25 bp, Homo sapiens
tatcctatccttcaaaatgtctgcc

SEQ ID NO: 32935 - DNA, 25 bp, Homo sapiens
ctgaaaatattaagaaatgataatg

SEQ ID NO: 32936 - DNA, 25 bp, Homo sapiens
ggcatctggagcttgtacccttcaa

SEQ ID NO: 32937 - DNA, 25 bp, Homo sapiens
ctctatcaaagaataagtaattttt

SEQ ID NO: 32938 - DNA, 25 bp, Homo sapiens
cgttcttacagagtacatgcatgca

SEQ ID NO: 32939 - DNA, 25 bp, Homo sapiens
ttgctaacgtcacaccaatggtttc

SEQ ID NO: 32940 - DNA, 25 bp, Homo sapiens
attgctatttttgcagctgactctg

SEQ ID NO: 32941 - DNA, 25 bp, Homo sapiens
tccgtctcagtgctatggaagatgg

SEQ ID NO: 32942 - DNA, 25 bp, Homo sapiens
tctatttttgcctatgtcaatgaca

SEQ ID NO: 32943 - DNA, 25 bp, Homo sapiens
agcttttaaaatgaagaagtgcttt

SEQ ID NO: 32944 - DNA, 25 bp, Homo sapiens
gtgcccattgtttcttctatgctgc

SEQ ID NO: 32945 - DNA, 25 bp, Homo sapiens
accgttgtgggtactagaagatttc

SEQ ID NO: 32946 - DNA, 25 bp, Homo sapiens
tgtggggcacatattactaaactta

SEQ ID NO: 32947 - DNA, 25 bp, Homo sapiens
gcctggcattttgtgtaacacttta

SEQ ID NO: 32948 - DNA, 25 bp, Homo sapiens
ggggtcacaaacaagtagcagctta

SEQ ID NO: 32949 - DNA, 25 bp, Homo sapiens
tgtctcccttttgcacccatgatag

SEQ ID NO: 32950 - DNA, 25 bp, Homo sapiens
agcacccagtttgagattttgtcca

SEQ ID NO: 32951 - DNA, 25 bp, Homo sapiens
cagctaagctctggcacactaatta

SEQ ID NO: 32952 - DNA, 25 bp, Homo sapiens
tgataggcttgatatttcagatccc

SEQ ID NO: 32953 - DNA, 25 bp, Homo sapiens
ttgttaaccagatacaatctcttgc

SEQ ID NO: 32954 - DNA, 25 bp, Homo sapiens
ttgccttgggtggtaaattcacata

SEQ ID NO: 32955 - DNA, 25 bp, Homo sapiens
ctccttggagaactgctagatgcta

SEQ ID NO: 32956 - DNA, 25 bp, Homo sapiens
aaaacatgttacttctggctccaga

SEQ ID NO: 32957 - DNA, 25 bp, Homo sapiens
acctgaggatgctggctattcacta

SEQ ID NO: 32958 - DNA, 25 bp, Homo sapiens
gcctcttgatgatatgaacactctg

SEQ ID NO: 32959 - DNA, 25 bp, Homo sapiens
gtgtcctgagggcacagatccaaga

SEQ ID NO: 32960 - DNA, 25 bp, Homo sapiens
tcaggaaacaggacgctattgtatc

SEQ ID NO: 32961 - DNA, 25 bp, Homo sapiens
ggccgtatccctgttgtatgagaaa

SEQ ID NO: 32962 - DNA, 25 bp, Homo sapiens
aggtgccaggcagatccagttaatc

SEQ ID NO: 32963 - DNA, 25 bp, Homo sapiens
ccctgtgggtatctagtaagtatta

SEQ ID NO: 32964 - DNA, 25 bp, Homo sapiens
tcataggacctggaaaacaagcttc

SEQ ID NO: 32965 - DNA, 25 bp, Homo sapiens
gttgagtgctcataaatattatcta

SEQ ID NO: 32966 - DNA, 25 bp, Homo sapiens
ggcaagcaacagaccacactgtcta

SEQ ID NO: 32967 - DNA, 25 bp, Homo sapiens
ctgggtctgccctcaaggttttaca

SEQ ID NO: 32968 - DNA, 25 bp, Homo sapiens
cctcagtcagagagccatgtggtta

SEQ ID NO: 32969 - DNA, 25 bp, Homo sapiens
ttgaggccacttgttttccatgatc

SEQ ID NO: 32970 - DNA, 25 bp, Homo sapiens
gaggtaacttccagcccacaatgtc

SEQ ID NO: 32971 - DNA, 25 bp, Homo sapiens
tggccactaccttgctgggaaaaga

SEQ ID NO: 32972 - DNA, 25 bp, Homo sapiens
tccttgcacagcacagaataaattg

SEQ ID NO: 32973 - DNA, 25 bp, Homo sapiens
acgttgacctgctcagcggaattta

SEQ ID NO: 32974 - DNA, 25 bp, Homo sapiens
ccacaatgtaagtagcaacgtttta

SEQ ID NO: 32975 - DNA, 25 bp, Homo sapiens
ccaagagttctggttgtataccttt

SEQ ID NO: 32976 - DNA, 25 bp, Homo sapiens
cggttccgtagcattcgaagctgta

SEQ ID NO: 32977 - DNA, 25 bp, Homo sapiens
ttacacagtggtaggggttctgatc

SEQ ID NO: 32978 - DNA, 25 bp, Homo sapiens
tccctggcacaaggaagagcacatg

SEQ ID NO: 32979 - DNA, 25 bp, Homo sapiens
aggtgagtctttctctctgctagca

SEQ ID NO: 32980 - DNA, 25 bp, Homo sapiens
cctcaattggtttcttgcaacactg

SEQ ID NO: 32981 - DNA, 25 bp, Homo sapiens
gcaacaatctagatgcccagggata

SEQ ID NO: 32982 - DNA, 25 bp, Homo sapiens
taattttttttctagttttatacct

SEQ ID NO: 32983 - DNA, 25 bp, Homo sapiens
agaggtggcctttttcaatactgtc

SEQ ID NO: 32984 - DNA, 25 bp, Homo sapiens
cagaaatagctttggctggctctca

SEQ ID NO: 32985 - DNA, 25 bp, Homo sapiens
tgtacctcccaagaagctgaatgcc

SEQ ID NO: 32986 - DNA, 25 bp, Homo sapiens
caggggttcaatacaatttagtttc

SEQ ID NO: 32987 - DNA, 25 bp, Homo sapiens
aagaataatatattttcatggaagc

SEQ ID NO: 32988 - DNA, 25 bp, Homo sapiens
ctgctgcattcttgggtttatcacc

SEQ ID NO: 32989 - DNA, 25 bp, Homo sapiens
caagggcctgcactgtattctcatg

SEQ ID NO: 32990 - DNA, 25 bp, Homo sapiens
gaagtccacaaccattcttgccctg

SEQ ID NO: 32991 - DNA, 25 bp, Homo sapiens
atcgctttgctggaggggaatttca

SEQ ID NO: 32992 - DNA, 25 bp, Homo sapiens
aggcctctctgactttctttgtata

SEQ ID NO: 32993 - DNA, 25 bp, Homo sapiens
ctagtctgccagtgaaaaatttgta

SEQ ID NO: 32994 - DNA, 25 bp, Homo sapiens
ggtgattcccagtaagcctcatgta

SEQ ID NO: 32995 - DNA, 25 bp, Homo sapiens
cctaaatcggtaccaggagtgatcc

SEQ ID NO: 32996 - DNA, 25 bp, Homo sapiens
gatttgtttcctttgtttgaatatc

SEQ ID NO: 32997 - DNA, 25 bp, Homo sapiens
taagagaatctatgactaagcagta

SEQ ID NO: 32998 - DNA, 25 bp, Homo sapiens
tacagaagcaaaactcaaagaatta

SEQ ID NO: 32999 - DNA, 25 bp, Homo sapiens
aggctccctctttgcttagtttgta

SEQ ID NO: 33000 - DNA, 25 bp, Homo sapiens
gttatatttttgtaacgtgttactt

SEQ ID NO: 33001 - DNA, 25 bp, Homo sapiens
gctgtggggttaggtttctcaataa

SEQ ID NO: 33002 - DNA, 25 bp, Homo sapiens
catggctgtacgatatctgccttta

SEQ ID NO: 33003 - DNA, 25 bp, Homo sapiens
tggccatgaagcactacccactgta

SEQ ID NO: 33004 - DNA, 25 bp, Homo sapiens
cctatggttttgcatcttggaattc

SEQ ID NO: 33005 - DNA, 25 bp, Homo sapiens
tcagcagcagagacagtggcccttt

SEQ ID NO: 33006 - DNA, 25 bp, Homo sapiens
ggccttgctggagtagttttctttc

SEQ ID NO: 33007 - DNA, 25 bp, Homo sapiens
gcagttgcctcagatgaaaagatta

SEQ ID NO: 33008 - DNA, 25 bp, Homo sapiens
gagtcccagagagtattgccctaaa

SEQ ID NO: 33009 - DNA, 25 bp, Homo sapiens
gagtggctgtagcaattccaagtta

SEQ ID NO: 33010 - DNA, 25 bp, Homo sapiens
gggtctttcatgcaatttctgctga

SEQ ID NO: 33011 - DNA, 25 bp, Homo sapiens
gtctcagggcacatcaggaatcagg

SEQ ID NO: 33012 - DNA, 25 bp, Homo sapiens
ctctatagtatctcatcagttagaa

SEQ ID NO: 33013 - DNA, 25 bp, Homo sapiens
cctaccctggagaacatggatttga

SEQ ID NO: 33014 - DNA, 25 bp, Homo sapiens
ctgttgaggctgaaaaacttctttt

SEQ ID NO: 33015 - DNA, 25 bp, Homo sapiens
tgcggtcctgaatgctattattttg

SEQ ID NO: 33016 - DNA, 25 bp, Homo sapiens
ctatttgggagagatgatacgaatt

SEQ ID NO: 33017 - DNA, 25 bp, Homo sapiens
ggagctatttagtaaggtacaaacc

SEQ ID NO: 33018 - DNA, 25 bp, Homo sapiens
gagtgacaggagagaaagataagtg

SEQ ID NO: 33019 - DNA, 25 bp, Homo sapiens
tggcaatgggacatatcttctcttc

SEQ ID NO: 33020 - DNA, 25 bp, Homo sapiens
atgacctaacccacagctttgatgc

SEQ ID NO: 33021 - DNA, 25 bp, Homo sapiens
gcatgaattagtttaccacacaccc

SEQ ID NO: 33022 - DNA, 25 bp, Homo sapiens
ataagttttttgactattcatctat

SEQ ID NO: 33023 - DNA, 25 bp, Homo sapiens
agtaatagcttggggtaatcactct

SEQ ID NO: 33024 - DNA, 25 bp, Homo sapiens
ccaaaggggtatgtgtgtgcatgca

SEQ ID NO: 33025 - DNA, 25 bp, Homo sapiens
ggagacttttttacttcgctgggca

SEQ ID NO: 33026 - DNA, 25 bp, Homo sapiens
tctgagtaggccaatctaaggtttc

SEQ ID NO: 33027 - DNA, 25 bp, Homo sapiens
tgtcacctgcctgatgatgaaagtc

SEQ ID NO: 33028 - DNA, 25 bp, Homo sapiens
caccgggtacagagagaatatcttc

SEQ ID NO: 33029 - DNA, 25 bp, Homo sapiens
ttggaacttttgctcactgactaga

SEQ ID NO: 33030 - DNA, 25 bp, Homo sapiens
gggtatgctcttgtccaccagtatg

SEQ ID NO: 33031 - DNA, 25 bp, Homo sapiens
gcctgcacttgagagaagaaataca

SEQ ID NO: 33032 - DNA, 25 bp, Homo sapiens
cctgtgctgatacccaagtagtgtg

SEQ ID NO: 33033 - DNA, 25 bp, Homo sapiens
ttgccacagcctagtgtcctgagtg

SEQ ID NO: 33034 - DNA, 25 bp, Homo sapiens
ttcttctaagggagtggtccaaacc

SEQ ID NO: 33035 - DNA, 25 bp, Homo sapiens
ggactgacaccacatgattgtactg

SEQ ID NO: 33036 - DNA, 25 bp, Homo sapiens
gtccataacaacctctcagtagata

SEQ ID NO: 33037 - DNA, 25 bp, Homo sapiens
tggtgctatgtgaaaggcaaatatc

SEQ ID NO: 33038 - DNA, 25 bp, Homo sapiens
tgccctttccagttgcaaataacta

SEQ ID NO: 33039 - DNA, 25 bp, Homo sapiens
cacactgctcgtggaaggtgacaca

SEQ ID NO: 33040 - DNA, 25 bp, Homo sapiens
gtcctggactttttcacctctgttc

SEQ ID NO: 33041 - DNA, 25 bp, Homo sapiens
tatgctatatgtattagcatttcta

SEQ ID NO: 33042 - DNA, 25 bp, Homo sapiens
attcataactgcactcttgtgttga

SEQ ID NO: 33043 - DNA, 25 bp, Homo sapiens
ggcagcagtggcaagtatatttaaa

SEQ ID NO: 33044 - DNA, 25 bp, Homo sapiens
tgcccggccctataggaaatttgtt

SEQ ID NO: 33045 - DNA, 25 bp, Homo sapiens
ccactcaatgtcaaacacaaggtta

SEQ ID NO: 33046 - DNA, 25 bp, Homo sapiens
cacctaaggcttacccaagagtttt

SEQ ID NO: 33047 - DNA, 25 bp, Homo sapiens
cccaggtttccgtcaacattttttg

SEQ ID NO: 33048 - DNA, 25 bp, Homo sapiens
tctgcctcatgtttggtatccaatg

SEQ ID NO: 33049 - DNA, 25 bp, Homo sapiens
agcgtgataccaggcactctttgtc

SEQ ID NO: 33050 - DNA, 25 bp, Homo sapiens
ggctctttgatcttggttccaggca

SEQ ID NO: 33051 - DNA, 25 bp, Homo sapiens
ctctgttgcagtgaggccacatttg

SEQ ID NO: 33052 - DNA, 25 bp, Homo sapiens
cccttgctatggatgaaagctcctg

SEQ ID NO: 33053 - DNA, 25 bp, Homo sapiens
ccctgccactggagctcatatgttc

SEQ ID NO: 33054 - DNA, 25 bp, Homo sapiens
ttccttaccgttgctcctgacactg

SEQ ID NO: 33055 - DNA, 25 bp, Homo sapiens
aggtcccagctgacagtattcaagg

SEQ ID NO: 33056 - DNA, 25 bp, Homo sapiens
tctgggctaagatctttctggactc

SEQ ID NO: 33057 - DNA, 25 bp, Homo sapiens
ggggctagcaccttctcagtctttc

SEQ ID NO: 33058 - DNA, 25 bp, Homo sapiens
agttgttcatatcgagcccagttta

SEQ ID NO: 33059 - DNA, 25 bp, Homo sapiens
tccaggaagatccaggtcttaatta

SEQ ID NO: 33060 - DNA, 25 bp, Homo sapiens
cctactaaatagaaatccccttacc

SEQ ID NO: 33061 - DNA, 25 bp, Homo sapiens
ccagttctgggtgtgaagttctaca

SEQ ID NO: 33062 - DNA, 25 bp, Homo sapiens
gttgttccttatctacaccatccag

SEQ ID NO: 33063 - DNA, 25 bp, Homo sapiens
ctcacttgtgaagaagctaactctc

SEQ ID NO: 33064 - DNA, 25 bp, Homo sapiens
ccttggtgggagaagatacaatttc

SEQ ID NO: 33065 - DNA, 25 bp, Homo sapiens
tggcctggcttcatcaatgttcctg

SEQ ID NO: 33066 - DNA, 25 bp, Homo sapiens
ggcccacttagctttcctttgttta

SEQ ID NO: 33067 - DNA, 25 bp, Homo sapiens
tttcggcctgctacccaaagcttca

SEQ ID NO: 33068 - DNA, 25 bp, Homo sapiens
cagtgttgggtatttaggcagttta

SEQ ID NO: 33069 - DNA, 25 bp, Homo sapiens
gttggcttcacttttcccagaaata

SEQ ID NO: 33070 - DNA, 25 bp, Homo sapiens
gaccggccctgactctaactagaga

SEQ ID NO: 33071 - DNA, 25 bp, Homo sapiens
ggcaccaggcttttacccaatggta

SEQ ID NO: 33072 - DNA, 25 bp, Homo sapiens
tcagggcctacacccaggacattgg

SEQ ID NO: 33073 - DNA, 25 bp, Homo sapiens
cgaagctttctctcctacacagtga

SEQ ID NO: 33074 - DNA, 25 bp, Homo sapiens
cccagcctacatcgtgctttaattt

SEQ ID NO: 33075 - DNA, 25 bp, Homo sapiens
tatcaaatgaacgcatacatgaaag

SEQ ID NO: 33076 - DNA, 25 bp, Homo sapiens
ccttggccagggaaaacatatttac

SEQ ID NO: 33077 - DNA, 25 bp, Homo sapiens
ggctagctgtgattcctcctcctta

SEQ ID NO: 33078 - DNA, 25 bp, Homo sapiens
atcctgggaggcaaacggtttatta

SEQ ID NO: 33079 - DNA, 25 bp, Homo sapiens
gtggaacactttctgctgctcagta

SEQ ID NO: 33080 - DNA, 25 bp, Homo sapiens
ctctttcagtggagatacggcctcg

SEQ ID NO: 33081 - DNA, 25 bp, Homo sapiens
cgtggccctgtcgagtcattttatt

SEQ ID NO: 33082 - DNA, 25 bp, Homo sapiens
ccagggactgcacttttagggttta

SEQ ID NO: 33083 - DNA, 25 bp, Homo sapiens
cttaggacctcatgatgcaacagta

SEQ ID NO: 33084 - DNA, 25 bp, Homo sapiens
gggcgactctgcctcactgaggaaa

SEQ ID NO: 33085 - DNA, 25 bp, Homo sapiens
ccctgtcctggtggcattttcaata

SEQ ID NO: 33086 - DNA, 25 bp, Homo sapiens
accctgtcctatattgctgctctgc

SEQ ID NO: 33087 - DNA, 25 bp, Homo sapiens
gagtgcctatcataacccagagctg

SEQ ID NO: 33088 - DNA, 25 bp, Homo sapiens
acccagcctggtttttcttaaatga

SEQ ID NO: 33089 - DNA, 25 bp, Homo sapiens
tccaccagcttgaggaggattcatg

SEQ ID NO: 33090 - DNA, 25 bp, Homo sapiens
cccttggggtttcttggtgatgaac

SEQ ID NO: 33091 - DNA, 25 bp, Homo sapiens
gctctggacttattctcattggttc

SEQ ID NO: 33092 - DNA, 25 bp, Homo sapiens
aataacctaatttattaattttctg

SEQ ID NO: 33093 - DNA, 25 bp, Homo sapiens
gtgccaggcctgtaaatgtatttta

SEQ ID NO: 33094 - DNA, 25 bp, Homo sapiens
cctggctggcaaggaagtagacaga

SEQ ID NO: 33095 - DNA, 25 bp, Homo sapiens
tctaggcagaggcaagagctcttca

SEQ ID NO: 33096 - DNA, 25 bp, Homo sapiens
gaggcccaggtactttgtttaaatc

SEQ ID NO: 33097 - DNA, 25 bp, Homo sapiens
acccagccatgtgttactagtccta

SEQ ID NO: 33098 - DNA, 25 bp, Homo sapiens
ttccattgtcaacgagagcatcaga

SEQ ID NO: 33099 - DNA, 25 bp, Homo sapiens
ggatggccattgctttcgactcatg

SEQ ID NO: 33100 - DNA, 25 bp, Homo sapiens
tttgaacacattgagggtgaccagc

SEQ ID NO: 33101 - DNA, 25 bp, Homo sapiens
cctctgtgttccagggaaacccttc

SEQ ID NO: 33102 - DNA, 25 bp, Homo sapiens
atggcctattctttctactttctca

SEQ ID NO: 33103 - DNA, 25 bp, Homo sapiens
tcccatctggaaaatgatgcatttg

SEQ ID NO: 33104 - DNA, 25 bp, Homo sapiens
gaatcgggttttcagggtcttctaa

SEQ ID NO: 33105 - DNA, 25 bp, Homo sapiens
tgttctgcaagggaagcagcccttc

SEQ ID NO: 33106 - DNA, 25 bp, Homo sapiens
tggaagctatccttgtaccatcttg

SEQ ID NO: 33107 - DNA, 25 bp, Homo sapiens
ctctccttctggatggcacacagta

SEQ ID NO: 33108 - DNA, 25 bp, Homo sapiens
gtgatcctttgtggcaacaccattg

SEQ ID NO: 33109 - DNA, 25 bp, Homo sapiens
gtctgcctacatgtggacctcctca

SEQ ID NO: 33110 - DNA, 25 bp, Homo sapiens
tgggcttcttcagagggcagtcata

SEQ ID NO: 33111 - DNA, 25 bp, Homo sapiens
cggccattagcttcccagacagaga

SEQ ID NO: 33112 - DNA, 25 bp, Homo sapiens
tcagctccttacatgggctttggtg

SEQ ID NO: 33113 - DNA, 25 bp, Homo sapiens
tgtccagcctgagcaagaaaagatc

SEQ ID NO: 33114 - DNA, 25 bp, Homo sapiens
ggttcatagatgaagccagtgtttc

SEQ ID NO: 33115 - DNA, 25 bp, Homo sapiens
ggcattgacctgctagtttcattca

SEQ ID NO: 33116 - DNA, 25 bp, Homo sapiens
aggagcccgtacgttattcaccaga

SEQ ID NO: 33117 - DNA, 25 bp, Homo sapiens
tcttgggaaaactagagctgctctc

SEQ ID NO: 33118 - DNA, 25 bp, Homo sapiens
tgaaactgggctacttggcatcctc

SEQ ID NO: 33119 - DNA, 25 bp, Homo sapiens
tggcctctgcagatgcccttatctc

SEQ ID NO: 33120 - DNA, 25 bp, Homo sapiens
cgctgatccgtaggagcagctcttc

SEQ ID NO: 33121 - DNA, 25 bp, Homo sapiens
tgcaaatagtactttgactcaaatc

SEQ ID NO: 33122 - DNA, 25 bp, Homo sapiens
ggatcactcatggttggcttgcaaa

SEQ ID NO: 33123 - DNA, 25 bp, Homo sapiens
atattttattttaaaggaatctttt

SEQ ID NO: 33124 - DNA, 25 bp, Homo sapiens
aaatctaatttttgttctcacactg

SEQ ID NO: 33125 - DNA, 25 bp, Homo sapiens
tcccgaggcaacttctttgaacagt

SEQ ID NO: 33126 - DNA, 25 bp, Homo sapiens
ggatggttcccttcacctgctgttc

SEQ ID NO: 33127 - DNA, 25 bp, Homo sapiens
tcctatgccagtcaaagaatgtttc

SEQ ID NO: 33128 - DNA, 25 bp, Homo sapiens
cctccaagactgcatgtgaatcatc

SEQ ID NO: 33129 - DNA, 25 bp, Homo sapiens
tggaactctgtacaatgagctgatg

SEQ ID NO: 33130 - DNA, 25 bp, Homo sapiens
ggtgttcctaacatcttaaccttgg

SEQ ID NO: 33131 - DNA, 25 bp, Homo sapiens
agagcctcccactatgtacctttgg

SEQ ID NO: 33132 - DNA, 25 bp, Homo sapiens
caagctgaggcatggggtataattc

SEQ ID NO: 33133 - DNA, 25 bp, Homo sapiens
gcaaaaagcttcctatgtccacgta

SEQ ID NO: 33134 - DNA, 25 bp, Homo sapiens
cagacattgcactggtcaaggttta

SEQ ID NO: 33135 - DNA, 25 bp, Homo sapiens
cccggataggctccttgcttccata

SEQ ID NO: 33136 - DNA, 25 bp, Homo sapiens
gtgaatctgctcatgcaccacattg

SEQ ID NO: 33137 - DNA, 25 bp, Homo sapiens
ctgctttagctgagacctgggactg

SEQ ID NO: 33138 - DNA, 25 bp, Homo sapiens
tgggtcctgcactttcaacataatg

SEQ ID NO: 33139 - DNA, 25 bp, Homo sapiens
tgctggcagacacagcaaatttttc

SEQ ID NO: 33140 - DNA, 25 bp, Homo sapiens
ccgagagtgtcttgactatagttta

SEQ ID NO: 33141 - DNA, 25 bp, Homo sapiens
ggctcaattccttcctgactgtaca

SEQ ID NO: 33142 - DNA, 25 bp, Homo sapiens
agaagcgcctcccacctaaagtatg

SEQ ID NO: 33143 - DNA, 25 bp, Homo sapiens
gtgtttatggaacctcggttggtgg

SEQ ID NO: 33144 - DNA, 25 bp, Homo sapiens
ggaagagagtacatgcccactattg

SEQ ID NO: 33145 - DNA, 25 bp, Homo sapiens
accctcctgtatggaaaattgatca

SEQ ID NO: 33146 - DNA, 25 bp, Homo sapiens
tgctttaccagctctcaggggaata

SEQ ID NO: 33147 - DNA, 25 bp, Homo sapiens
caggctggtggcttgttttcatatc

SEQ ID NO: 33148 - DNA, 25 bp, Homo sapiens
ccaaacttcaggcacagggaggcta

SEQ ID NO: 33149 - DNA, 25 bp, Homo sapiens
gctgtcttgaaagtcccaaccagtg

SEQ ID NO: 33150 - DNA, 25 bp, Homo sapiens
tccacccagtttgtcaagaagtatg

SEQ ID NO: 33151 - DNA, 25 bp, Homo sapiens
agctaccatatcctgctccagtttc

SEQ ID NO: 33152 - DNA, 25 bp, Homo sapiens
tttttaaaaaaaattcagttggcac

SEQ ID NO: 33153 - DNA, 25 bp, Homo sapiens
cttgagattctttccagaactttga

SEQ ID NO: 33154 - DNA, 25 bp, Homo sapiens
acgactggggcctagaaataattta

SEQ ID NO: 33155 - DNA, 25 bp, Homo sapiens
cgtgcatcagatctgtggtacccta

SEQ ID NO: 33156 - DNA, 25 bp, Homo sapiens
ccatccgctgtgacttcccagtgta

SEQ ID NO: 33157 - DNA, 25 bp, Homo sapiens
gggcccagttctctatgtatcaata

SEQ ID NO: 33158 - DNA, 25 bp, Homo sapiens
tgccaagtatactcaactgtacctg

SEQ ID NO: 33159 - DNA, 25 bp, Homo sapiens
ggcagttttctacttggcgctagtc

SEQ ID NO: 33160 - DNA, 25 bp, Homo sapiens
ttcagggccacgtcttacatcagtc

SEQ ID NO: 33161 - DNA, 25 bp, Homo sapiens
gtgccaagtccagagccaacagaaa

SEQ ID NO: 33162 - DNA, 25 bp, Homo sapiens
ttagcagtcttaagggcaatgcagc

SEQ ID NO: 33163 - DNA, 25 bp, Homo sapiens
gtccagggcccaagtaattctcatt

SEQ ID NO: 33164 - DNA, 25 bp, Homo sapiens
ttgggactttcgttgtacagaactg

SEQ ID NO: 33165 - DNA, 25 bp, Homo sapiens
atatttcctctcactgttctttttg

SEQ ID NO: 33166 - DNA, 25 bp, Homo sapiens
tgctttttaattgggcattctcttg

SEQ ID NO: 33167 - DNA, 25 bp, Homo sapiens
aagtcttcaacatgagtcctagttg

SEQ ID NO: 33168 - DNA, 25 bp, Homo sapiens
tgcatcacacaacctgtctgtcatg

SEQ ID NO: 33169 - DNA, 25 bp, Homo sapiens
gccggctttccttacaatcatattt

SEQ ID NO: 33170 - DNA, 25 bp, Homo sapiens
ggttgtcttggccttttcctcatgg

SEQ ID NO: 33171 - DNA, 25 bp, Homo sapiens
tcttcccaggccatgaaaatgtgga

SEQ ID NO: 33172 - DNA, 25 bp, Homo sapiens
cagctgaccctgacaacaagttttc

SEQ ID NO: 33173 - DNA, 25 bp, Homo sapiens
gagctgatgattgcgcatgtactta

SEQ ID NO: 33174 - DNA, 25 bp, Homo sapiens
gttggaattctaacaccaggcttta

SEQ ID NO: 33175 - DNA, 25 bp, Homo sapiens
ccaagttttgtcaattatgagactg

SEQ ID NO: 33176 - DNA, 25 bp, Homo sapiens
gtttattttttatgtaatcttaaag

SEQ ID NO: 33177 - DNA, 25 bp, Homo sapiens
tgggatcatgccacacatattattc

SEQ ID NO: 33178 - DNA, 25 bp, Homo sapiens
tgggtcaaaggctgtctgcaattta

SEQ ID NO: 33179 - DNA, 25 bp, Homo sapiens
cctctgctaggtgctaaggggcata

SEQ ID NO: 33180 - DNA, 25 bp, Homo sapiens
gtgctattgtccatccctggcagta

SEQ ID NO: 33181 - DNA, 25 bp, Homo sapiens
caagggcgtatagcaagctcaggta

SEQ ID NO: 33182 - DNA, 25 bp, Homo sapiens
agctcagtattctctcttctattgg

SEQ ID NO: 33183 - DNA, 25 bp, Homo sapiens
caagagggtattgtttgccaggatc

SEQ ID NO: 33184 - DNA, 25 bp, Homo sapiens
aaacacttgttggtaggcaccggca

SEQ ID NO: 33185 - DNA, 25 bp, Homo sapiens
gctggccattcattgttagttagta

SEQ ID NO: 33186 - DNA, 25 bp, Homo sapiens
gagatcctcctgtttgccctgtcaa

SEQ ID NO: 33187 - DNA, 25 bp, Homo sapiens
gtggcaatcttttggacactgtatt

SEQ ID NO: 33188 - DNA, 25 bp, Homo sapiens
ccacatgaaccgtgagttagaaacc

SEQ ID NO: 33189 - DNA, 25 bp, Homo sapiens
tgctcaccttcgtttggatcctaca

SEQ ID NO: 33190 - DNA, 25 bp, Homo sapiens
tgacacttggtgatacttggttgcc

SEQ ID NO: 33191 - DNA, 25 bp, Homo sapiens
ggggcgagctgttacccatccacta

SEQ ID NO: 33192 - DNA, 25 bp, Homo sapiens
tgttggccttggttgaatttccttc

SEQ ID NO: 33193 - DNA, 25 bp, Homo sapiens
tttactgattatcaaactaatacat

SEQ ID NO: 33194 - DNA, 25 bp, Homo sapiens
catgcttagttgctcagtgcctgga

SEQ ID NO: 33195 - DNA, 25 bp, Homo sapiens
catcatgtagacttaaaaggatttc

SEQ ID NO: 33196 - DNA, 25 bp, Homo sapiens
agtgcagacctgtgaccaaatgtag

SEQ ID NO: 33197 - DNA, 25 bp, Homo sapiens
gatctctttacttaggttaaccttg

SEQ ID NO: 33198 - DNA, 25 bp, Homo sapiens
ccactggttctcctgactagtagta

SEQ ID NO: 33199 - DNA, 25 bp, Homo sapiens
gacagccttgtctcttgggcctgga

SEQ ID NO: 33200 - DNA, 25 bp, Homo sapiens
cacagtaatgacctcaaatatttta

SEQ ID NO: 33201 - DNA, 25 bp, Homo sapiens
cctggccaggacttccagttatata

SEQ ID NO: 33202 - DNA, 25 bp, Homo sapiens
acatccattctatgccaggtctatg

SEQ ID NO: 33203 - DNA, 25 bp, Homo sapiens
ccaagtcttagagttagtgagggcc

SEQ ID NO: 33204 - DNA, 25 bp, Homo sapiens
ttggcagcctgaatgtgtacgttta

SEQ ID NO: 33205 - DNA, 25 bp, Homo sapiens
aagaggccttccactgctatcagca

SEQ ID NO: 33206 - DNA, 25 bp, Homo sapiens
cagcactggcgtaggcttcacactc

SEQ ID NO: 33207 - DNA, 25 bp, Homo sapiens
ttctgaccagtaatgtttccttctt

SEQ ID NO: 33208 - DNA, 25 bp, Homo sapiens
agagacctccattccctgtttgtca

SEQ ID NO: 33209 - DNA, 25 bp, Homo sapiens
gctttttcatccaggaggcacgtta

SEQ ID NO: 33210 - DNA, 25 bp, Homo sapiens
atggacctccgcagatcttctcaga

SEQ ID NO: 33211 - DNA, 25 bp, Homo sapiens
tgtcctttttcccaaatgagccatg

SEQ ID NO: 33212 - DNA, 25 bp, Homo sapiens
gcgaagtagtactggtggaattttc

SEQ ID NO: 33213 - DNA, 25 bp, Homo sapiens
tctgtcatgcgggacccacgctgat

SEQ ID NO: 33214 - DNA, 25 bp, Homo sapiens
aggaaatccaactcaacaaggcttg

SEQ ID NO: 33215 - DNA, 25 bp, Homo sapiens
actggaatactcttctaataccccc

SEQ ID NO: 33216 - DNA, 25 bp, Homo sapiens
ggcaccttctccttgagttttcgta

SEQ ID NO: 33217 - DNA, 25 bp, Homo sapiens
gccttgggctcagtatatcgttgta

SEQ ID NO: 33218 - DNA, 25 bp, Homo sapiens
tccatccatattgttcggggcaggc

SEQ ID NO: 33219 - DNA, 25 bp, Homo sapiens
ccaggtttagatttggcagcagcta

SEQ ID NO: 33220 - DNA, 25 bp, Homo sapiens
ggctctcctgcttttgaaggtatca

SEQ ID NO: 33221 - DNA, 25 bp, Homo sapiens
agccctgaggccaagttctaaattg

SEQ ID NO: 33222 - DNA, 25 bp, Homo sapiens
gtagtgtttatccattgcctccata

SEQ ID NO: 33223 - DNA, 25 bp, Homo sapiens
ttatgaaatgtgtctgagatacata

SEQ ID NO: 33224 - DNA, 25 bp, Homo sapiens
aagctcttggcttccttcgacagga

SEQ ID NO: 33225 - DNA, 25 bp, Homo sapiens
ccttctttgtctgatataaatatag

SEQ ID NO: 33226 - DNA, 25 bp, Homo sapiens
ggaagagttctctacaggaagtaaa

SEQ ID NO: 33227 - DNA, 25 bp, Homo sapiens
cccgctactgcccatgtattttgta

SEQ ID NO: 33228 - DNA, 25 bp, Homo sapiens
cctttgtagcctggagaactcattc

SEQ ID NO: 33229 - DNA, 25 bp, Homo sapiens
tcaaggcatgataccctgggctttc

SEQ ID NO: 33230 - DNA, 25 bp, Homo sapiens
tcctgtgacgtcaactgaaggcttg

SEQ ID NO: 33231 - DNA, 25 bp, Homo sapiens
ggagattagccctttgtctgtgata

SEQ ID NO: 33232 - DNA, 25 bp, Homo sapiens
gagttgttcgtcttttcctcactga

SEQ ID NO: 33233 - DNA, 25 bp, Homo sapiens
atgtatactttagaatttgtttgtc

SEQ ID NO: 33234 - DNA, 25 bp, Homo sapiens
acttctgggacttcacgtgtattgc

SEQ ID NO: 33235 - DNA, 25 bp, Homo sapiens
gggcaaccatgtccattaacactta

SEQ ID NO: 33236 - DNA, 25 bp, Homo sapiens
gggactcctgggactgccaataatg

SEQ ID NO: 33237 - DNA, 25 bp, Homo sapiens
gggcgttgaaagtatcttctatctc

SEQ ID NO: 33238 - DNA, 25 bp, Homo sapiens
tggcccatgcctagataattcagtg

SEQ ID NO: 33239 - DNA, 25 bp, Homo sapiens
ttcagtgacatgcttcaattttacc

SEQ ID NO: 33240 - DNA, 25 bp, Homo sapiens
cccagtgtaaattctaggcccgatt

SEQ ID NO: 33241 - DNA, 25 bp, Homo sapiens
ttcgcttagaaggatgtgacccatc

SEQ ID NO: 33242 - DNA, 25 bp, Homo sapiens
ctggcttctcatccactggggctga

SEQ ID NO: 33243 - DNA, 25 bp, Homo sapiens
gcgtcaacgttcctcacacaaaatg

SEQ ID NO: 33244 - DNA, 25 bp, Homo sapiens
ggcaagtgctgtatcactcatcatg

SEQ ID NO: 33245 - DNA, 25 bp, Homo sapiens
tatatcaccactacctttcgataaa

SEQ ID NO: 33246 - DNA, 25 bp, Homo sapiens
accagggcatgggaaatgatttacc

SEQ ID NO: 33247 - DNA, 25 bp, Homo sapiens
tccactttattgaacggtctttgaa

SEQ ID NO: 33248 - DNA, 25 bp, Homo sapiens
ggaagccagcttcagtcatcaaatc

SEQ ID NO: 33249 - DNA, 25 bp, Homo sapiens
tgcccaaaaagggatgccggtctgg

SEQ ID NO: 33250 - DNA, 25 bp, Homo sapiens
tccttttgacaatggatgaggcagc

SEQ ID NO: 33251 - DNA, 25 bp, Homo sapiens
tctcaaaagcattcttgggacagtg

SEQ ID NO: 33252 - DNA, 25 bp, Homo sapiens
gcctccctggggtaacaaaaattta

SEQ ID NO: 33253 - DNA, 25 bp, Homo sapiens
aagccttgattttctgccagccata

SEQ ID NO: 33254 - DNA, 25 bp, Homo sapiens
ggtgactcccacagcgtgttcctca

SEQ ID NO: 33255 - DNA, 25 bp, Homo sapiens
ttctggagactagagcagcatcata

SEQ ID NO: 33256 - DNA, 25 bp, Homo sapiens
cacccttttttgtggctatgttaaa

SEQ ID NO: 33257 - DNA, 25 bp, Homo sapiens
gtggcttccttcacgaccagtggtc

SEQ ID NO: 33258 - DNA, 25 bp, Homo sapiens
ccctagaaggcatagaatctgtaga

SEQ ID NO: 33259 - DNA, 25 bp, Homo sapiens
atgcacggtttctccaacatggata

SEQ ID NO: 33260 - DNA, 25 bp, Homo sapiens
ggatgtgcttcccaaggctttgaca

SEQ ID NO: 33261 - DNA, 25 bp, Homo sapiens
tggatgtcattacctcccagctaga

SEQ ID NO: 33262 - DNA, 25 bp, Homo sapiens
ccctcctaggagacagctactttta

SEQ ID NO: 33263 - DNA, 25 bp, Homo sapiens
gccagggttacatcttttagcaaga

SEQ ID NO: 33264 - DNA, 25 bp, Homo sapiens
cattttcacgtctctggaagcccta

SEQ ID NO: 33265 - DNA, 25 bp, Homo sapiens
tccactgagtgggtagcatcattga

SEQ ID NO: 33266 - DNA, 25 bp, Homo sapiens
gagctagactctggtgaaaccctta

SEQ ID NO: 33267 - DNA, 25 bp, Homo sapiens
ctgctctaagcagatggcccttgtg

SEQ ID NO: 33268 - DNA, 25 bp, Homo sapiens
ccgtgacttcgtagtgccttctgga

SEQ ID NO: 33269 - DNA, 25 bp, Homo sapiens
cctggatcctggtttgctacttcta

SEQ ID NO: 33270 - DNA, 25 bp, Homo sapiens
tacaaagagtccccccatcagggac

SEQ ID NO: 33271 - DNA, 25 bp, Homo sapiens
gacagcttccaacttctcagtgatt

SEQ ID NO: 33272 - DNA, 25 bp, Homo sapiens
tattgttgccaatcctgctagaagg

SEQ ID NO: 33273 - DNA, 25 bp, Homo sapiens
tccctgagacatgaaatacccgttt

SEQ ID NO: 33274 - DNA, 25 bp, Homo sapiens
cctgctatctgtgggctgcaaaatc

SEQ ID NO: 33275 - DNA, 25 bp, Homo sapiens
ccgtggtacttgatttggcttaaca

SEQ ID NO: 33276 - DNA, 25 bp, Homo sapiens
tggcaatttcccactcctcaatgtc

SEQ ID NO: 33277 - DNA, 25 bp, Homo sapiens
tgccctctatggactaaattacagc

SEQ ID NO: 33278 - DNA, 25 bp, Homo sapiens
cccgtagtctacagttgattgccca

SEQ ID NO: 33279 - DNA, 25 bp, Homo sapiens
tgtgactgtcactgtactttctgca

SEQ ID NO: 33280 - DNA, 25 bp, Homo sapiens
ttgggcccacagtaagcactaaata

SEQ ID NO: 33281 - DNA, 25 bp, Homo sapiens
ctgtgaacggacaaaacctgagttg

SEQ ID NO: 33282 - DNA, 25 bp, Homo sapiens
agaacattcattgatactactactg

SEQ ID NO: 33283 - DNA, 25 bp, Homo sapiens
agtgtgtctgtaccagctggctgta

SEQ ID NO: 33284 - DNA, 25 bp, Homo sapiens
ctaagggccaccatctactagagga

SEQ ID NO: 33285 - DNA, 25 bp, Homo sapiens
gtgctcatcccactgcctgaatgtt

SEQ ID NO: 33286 - DNA, 25 bp, Homo sapiens
gagcacctttgatgtagcagaccca

SEQ ID NO: 33287 - DNA, 25 bp, Homo sapiens
ctgtgctgcaggatagagtgactct

SEQ ID NO: 33288 - DNA, 25 bp, Homo sapiens
gggaaatcctcttgaccagccgaaa

SEQ ID NO: 33289 - DNA, 25 bp, Homo sapiens
gcaagccagggttcagtttgtaata

SEQ ID NO: 33290 - DNA, 25 bp, Homo sapiens
ttgtacctgcagttgggagatccta

SEQ ID NO: 33291 - DNA, 25 bp, Homo sapiens
ggattcgatccagttacccataaaa

SEQ ID NO: 33292 - DNA, 25 bp, Homo sapiens
cggcaaggcctagccaagaaaccta

SEQ ID NO: 33293 - DNA, 25 bp, Homo sapiens
ggaaacagttctctatgagtatatt

SEQ ID NO: 33294 - DNA, 25 bp, Homo sapiens
ttgggattggtgttgcgggtaggaa

SEQ ID NO: 33295 - DNA, 25 bp, Homo sapiens
ggcagatctctgtgcagtacatata

SEQ ID NO: 33296 - DNA, 25 bp, Homo sapiens
tccagtatttggcagctatagctcc

SEQ ID NO: 33297 - DNA, 25 bp, Homo sapiens
cacctaagcctatgaaaaatgactc

SEQ ID NO: 33298 - DNA, 25 bp, Homo sapiens
aagctgggtctcatcattttgcata

SEQ ID NO: 33299 - DNA, 25 bp, Homo sapiens
tggacaataggtaacatgctccttt

SEQ ID NO: 33300 - DNA, 25 bp, Homo sapiens
acggtgccttgcctcagttcaaata

SEQ ID NO: 33301 - DNA, 25 bp, Homo sapiens
tctcttccaggcaggctagtctatg

SEQ ID NO: 33302 - DNA, 25 bp, Homo sapiens
agattccaagagagtgctgtcaccc

SEQ ID NO: 33303 - DNA, 25 bp, Homo sapiens
agcaggcagttacactacttgattc

SEQ ID NO: 33304 - DNA, 25 bp, Homo sapiens
tctctgtgtctcatggtaaatctgc

SEQ ID NO: 33305 - DNA, 25 bp, Homo sapiens
ccgagaatccgtacgctgggcatca

SEQ ID NO: 33306 - DNA, 25 bp, Homo sapiens
gggctccctcacgaactggtacttg

SEQ ID NO: 33307 - DNA, 25 bp, Homo sapiens
gccttgcctgctggactcttacatg

SEQ ID NO: 33308 - DNA, 25 bp, Homo sapiens
gccatggggaatcactggcaaattc

SEQ ID NO: 33309 - DNA, 25 bp, Homo sapiens
ggctgttgctgctctaccacaatta

SEQ ID NO: 33310 - DNA, 25 bp, Homo sapiens
gctcttgaacacaggccagtcattt

SEQ ID NO: 33311 - DNA, 25 bp, Homo sapiens
gcgtgctaagttgttgtccctatca

SEQ ID NO: 33312 - DNA, 25 bp, Homo sapiens
accaagtggtcactgtctttaaaca

SEQ ID NO: 33313 - DNA, 25 bp, Homo sapiens
ggatgcccactctgtttattaaagc

SEQ ID NO: 33314 - DNA, 25 bp, Homo sapiens
aggcctcagggactgattcatgatc

SEQ ID NO: 33315 - DNA, 25 bp, Homo sapiens
tgtgctgatctcgacatcccaagga

SEQ ID NO: 33316 - DNA, 25 bp, Homo sapiens
tgggcatggggcaatacagttaaca

SEQ ID NO: 33317 - DNA, 25 bp, Homo sapiens
gtggacctccaatactaaagaatgt

SEQ ID NO: 33318 - DNA, 25 bp, Homo sapiens
aggaaccctcaatttttaacagtgt

SEQ ID NO: 33319 - DNA, 25 bp, Homo sapiens
atcccagaccaactacagcactttg

SEQ ID NO: 33320 - DNA, 25 bp, Homo sapiens
ttcagcattctacgggagttttttc

SEQ ID NO: 33321 - DNA, 25 bp, Homo sapiens
ttttacaatgtggatgtcatgcttc

SEQ ID NO: 33322 - DNA, 25 bp, Homo sapiens
tgaagggatcaactttgcagtaacc

SEQ ID NO: 33323 - DNA, 25 bp, Homo sapiens
atctagataatgactaacacatttt

SEQ ID NO: 33324 - DNA, 25 bp, Homo sapiens
ccagtggtttcgatggcagagacta

SEQ ID NO: 33325 - DNA, 25 bp, Homo sapiens
ggggtctcttgcttgtgatctacaa

SEQ ID NO: 33326 - DNA, 25 bp, Homo sapiens
ccgcagtgcctgtggttgtcaaaaa

SEQ ID NO: 33327 - DNA, 25 bp, Homo sapiens
agcacgtgcctaatgatattcgata

SEQ ID NO: 33328 - DNA, 25 bp, Homo sapiens
gctttctggggacatttgctgattc

SEQ ID NO: 33329 - DNA, 25 bp, Homo sapiens
atttaaaagaaagaaataatggttt

SEQ ID NO: 33330 - DNA, 25 bp, Homo sapiens
cattgtgcctgggtggttaactcac

SEQ ID NO: 33331 - DNA, 25 bp, Homo sapiens
gccctgtctgaatactgctgaaatg

SEQ ID NO: 33332 - DNA, 25 bp, Homo sapiens
gggcatatgacccttctgtctttta

SEQ ID NO: 33333 - DNA, 25 bp, Homo sapiens
cctgcctttttgctaatcaagattg

SEQ ID NO: 33334 - DNA, 25 bp, Homo sapiens
gtgttttacccaccaagctgcatta

SEQ ID NO: 33335 - DNA, 25 bp, Homo sapiens
cctatttaaaatggggactagatcc

SEQ ID NO: 33336 - DNA, 25 bp, Homo sapiens
gtgtgtgtgcgtagacataacagga

SEQ ID NO: 33337 - DNA, 25 bp, Homo sapiens
ccctgactgggaatataaagttgta

SEQ ID NO: 33338 - DNA, 25 bp, Homo sapiens
aactttcttaaataagttttccaaa

SEQ ID NO: 33339 - DNA, 25 bp, Homo sapiens
cagggcagtttattggtctcccatc

SEQ ID NO: 33340 - DNA, 25 bp, Homo sapiens
ggacacctggggcatggaacatttt

SEQ ID NO: 33341 - DNA, 25 bp, Homo sapiens
ctctctaccctttatcttattttcc

SEQ ID NO: 33342 - DNA, 25 bp, Homo sapiens
tctgtcagaggccacacccaattgt

SEQ ID NO: 33343 - DNA, 25 bp, Homo sapiens
cttccggaggaagccctgagtcatt

SEQ ID NO: 33344 - DNA, 25 bp, Homo sapiens
accatggtttccgagtgacctccta

SEQ ID NO: 33345 - DNA, 25 bp, Homo sapiens
cttccaagtgatttttgattcctca

SEQ ID NO: 33346 - DNA, 25 bp, Homo sapiens
aaagctttggaacactggtactcta

SEQ ID NO: 33347 - DNA, 25 bp, Homo sapiens
aggccatctcccagctgttactatc

SEQ ID NO: 33348 - DNA, 25 bp, Homo sapiens
ctagagactgactttaaatttttga

SEQ ID NO: 33349 - DNA, 25 bp, Homo sapiens
gggctgtttccttggtggtccatta

SEQ ID NO: 33350 - DNA, 25 bp, Homo sapiens
ctcatggtagcttctcaggaaattc

SEQ ID NO: 33351 - DNA, 25 bp, Homo sapiens
atctgctgcttctctttggtcctgg

SEQ ID NO: 33352 - DNA, 25 bp, Homo sapiens
tccctctttttctacgtctcacaga

SEQ ID NO: 33353 - DNA, 25 bp, Homo sapiens
ttcctatttttcttgctgagcattg

SEQ ID NO: 33354 - DNA, 25 bp, Homo sapiens
cccttgctgttttattttgtggagt

SEQ ID NO: 33355 - DNA, 25 bp, Homo sapiens
ttaagcagacccagcattggcagtg

SEQ ID NO: 33356 - DNA, 25 bp, Homo sapiens
tctgcatgactctggaaagcctgta

SEQ ID NO: 33357 - DNA, 25 bp, Homo sapiens
ttcaggtctgcagcgtttccaagtg

SEQ ID NO: 33358 - DNA, 25 bp, Homo sapiens
tattccctggggagaaaactgtttc

SEQ ID NO: 33359 - DNA, 25 bp, Homo sapiens
tctgagggcgcatatacgtccattt

SEQ ID NO: 33360 - DNA, 25 bp, Homo sapiens
ccactggctagtttggaggaaattc

SEQ ID NO: 33361 - DNA, 25 bp, Homo sapiens
tgctggaacctgaccctgaagctcc

SEQ ID NO: 33362 - DNA, 25 bp, Homo sapiens
gggtccatgcagtccagtgtaagta

SEQ ID NO: 33363 - DNA, 25 bp, Homo sapiens
aggcacgttcctcctctgaagcttc

SEQ ID NO: 33364 - DNA, 25 bp, Homo sapiens
ccggggcactatgtttttgtcatca

SEQ ID NO: 33365 - DNA, 25 bp, Homo sapiens
cggggcctcatttctaattgtttca

SEQ ID NO: 33366 - DNA, 25 bp, Homo sapiens
ttcgaggctcctgaaagctcatgcc

SEQ ID NO: 33367 - DNA, 25 bp, Homo sapiens
ggccctagctcatggaaccctgaaa

SEQ ID NO: 33368 - DNA, 25 bp, Homo sapiens
gggcaaccttgctcccagactgctg

SEQ ID NO: 33369 - DNA, 25 bp, Homo sapiens
gggtctccggcttacacacacatag

SEQ ID NO: 33370 - DNA, 25 bp, Homo sapiens
ccgtatttctgctaggtgggatttc

SEQ ID NO: 33371 - DNA, 25 bp, Homo sapiens
aaccaggactattcagtcaccacct

SEQ ID NO: 33372 - DNA, 25 bp, Homo sapiens
atcaaaggaaaacaaagaggtggcc

SEQ ID NO: 33373 - DNA, 25 bp, Homo sapiens
ttaattaaaaaaaagaaagaggtgg

SEQ ID NO: 33374 - DNA, 25 bp, Homo sapiens
ggccttcagggtggcctcacatttt

SEQ ID NO: 33375 - DNA, 25 bp, Homo sapiens
tagaaatacatctggaaaaatacat

SEQ ID NO: 33376 - DNA, 25 bp, Homo sapiens
gtccaagagtcatgcaaaagtcctg

SEQ ID NO: 33377 - DNA, 25 bp, Homo sapiens
caaaccagtggtaaaagatatcaga

SEQ ID NO: 33378 - DNA, 25 bp, Homo sapiens
tagttctcactctccagttttgttg

SEQ ID NO: 33379 - DNA, 25 bp, Homo sapiens
caccggtatgtgttcagttcaattc

SEQ ID NO: 33380 - DNA, 25 bp, Homo sapiens
ggggtccaaggccactcagtaataa

SEQ ID NO: 33381 - DNA, 25 bp, Homo sapiens
ctgatacattcacctcttgctgggc

SEQ ID NO: 33382 - DNA, 25 bp, Homo sapiens
gcctctcttgcctggactctgacta

SEQ ID NO: 33383 - DNA, 25 bp, Homo sapiens
tcgagcctggtacggatgcaaatta

SEQ ID NO: 33384 - DNA, 25 bp, Homo sapiens
ctgaggcaatagcactgcaccattt

SEQ ID NO: 33385 - DNA, 25 bp, Homo sapiens
agtcctggttgcatcagcttacaca

SEQ ID NO: 33386 - DNA, 25 bp, Homo sapiens
gtcccgctttgtgaaggtcagctaa

SEQ ID NO: 33387 - DNA, 25 bp, Homo sapiens
ggacgtaggtactttgctcccaata

SEQ ID NO: 33388 - DNA, 25 bp, Homo sapiens
agaaagaaaataagactctagattg

SEQ ID NO: 33389 - DNA, 25 bp, Homo sapiens
atctgtctgcctgtgtgcttcatca

SEQ ID NO: 33390 - DNA, 25 bp, Homo sapiens
gcctaaggatcacaccgggaaagtc

SEQ ID NO: 33391 - DNA, 25 bp, Homo sapiens
ggacaccattttgatcactgcactg

SEQ ID NO: 33392 - DNA, 25 bp, Homo sapiens
ccactgcttgggctaaatccgtctt

SEQ ID NO: 33393 - DNA, 25 bp, Homo sapiens
accgggtctttgattcctgattctc

SEQ ID NO: 33394 - DNA, 25 bp, Homo sapiens
ctccatgtagggtatcaggatcatc

SEQ ID NO: 33395 - DNA, 25 bp, Homo sapiens
ggtgcagacttttcaatcagccttg

SEQ ID NO: 33396 - DNA, 25 bp, Homo sapiens
cagcgggactcctgtgcttaacttc

SEQ ID NO: 33397 - DNA, 25 bp, Homo sapiens
accgggcttcagtgcataattaaga

SEQ ID NO: 33398 - DNA, 25 bp, Homo sapiens
gagccagtttccaccaccttgcagg

SEQ ID NO: 33399 - DNA, 25 bp, Homo sapiens
gcccaggctgcaaagattgctatta

SEQ ID NO: 33400 - DNA, 25 bp, Homo sapiens
ggtattgaaagtccagtccctgctc

SEQ ID NO: 33401 - DNA, 25 bp, Homo sapiens
aggccctgtgtgcatgtgttatctc

SEQ ID NO: 33402 - DNA, 25 bp, Homo sapiens
tggctctatgctcttctcctccaga

SEQ ID NO: 33403 - DNA, 25 bp, Homo sapiens
gagattacagacacagcctttcatg

SEQ ID NO: 33404 - DNA, 25 bp, Homo sapiens
tattaggcaaatcaattcctgttct

SEQ ID NO: 33405 - DNA, 25 bp, Homo sapiens
tggggacctccaatttagcaaaata

SEQ ID NO: 33406 - DNA, 25 bp, Homo sapiens
acctgcttgggatcattcactatta

SEQ ID NO: 33407 - DNA, 25 bp, Homo sapiens
caccacccagggaaaggagacatta

SEQ ID NO: 33408 - DNA, 25 bp, Homo sapiens
attcattgcccagctttctagttta

SEQ ID NO: 33409 - DNA, 25 bp, Homo sapiens
aaagcatcctattcctagcatctaa

SEQ ID NO: 33410 - DNA, 25 bp, Homo sapiens
gaagttgatgggttttatccaccta

SEQ ID NO: 33411 - DNA, 25 bp, Homo sapiens
tcagctggtgtccttttgaaagaac

SEQ ID NO: 33412 - DNA, 25 bp, Homo sapiens
ctctgcctggggacttcacaaggta

SEQ ID NO: 33413 - DNA, 25 bp, Homo sapiens
atcatgatttacttgaggagccata

SEQ ID NO: 33414 - DNA, 25 bp, Homo sapiens
agcgtacagaagagctggcccatca

SEQ ID NO: 33415 - DNA, 25 bp, Homo sapiens
ctgagagcgaacaccaccaagtagg

SEQ ID NO: 33416 - DNA, 25 bp, Homo sapiens
agggttcttgctcacaaattctgta

SEQ ID NO: 33417 - DNA, 25 bp, Homo sapiens
tccctgtaggatcaacatgtacatg

SEQ ID NO: 33418 - DNA, 25 bp, Homo sapiens
gcggccagaggtccaaacgttttaa

SEQ ID NO: 33419 - DNA, 25 bp, Homo sapiens
cgccctctatggagaagccggagta

SEQ ID NO: 33420 - DNA, 25 bp, Homo sapiens
cgactgggaccttgaaataatttta

SEQ ID NO: 33421 - DNA, 25 bp, Homo sapiens
caggagcagcccagtgcttgacata

SEQ ID NO: 33422 - DNA, 25 bp, Homo sapiens
gaggctttctccttcaggttgcata

SEQ ID NO: 33423 - DNA, 25 bp, Homo sapiens
tggcaccattgcctcatgaagattt

SEQ ID NO: 33424 - DNA, 25 bp, Homo sapiens
ccttgaggaggcattagctagattc

SEQ ID NO: 33425 - DNA, 25 bp, Homo sapiens
ggcagtgactcatttcctcttaaga

SEQ ID NO: 33426 - DNA, 25 bp, Homo sapiens
gggcactttcctcatggtgaagatc

SEQ ID NO: 33427 - DNA, 25 bp, Homo sapiens
ggctgaacatgcctctcagtttgaa

SEQ ID NO: 33428 - DNA, 25 bp, Homo sapiens
gctccttggaagctgaatttcatta

SEQ ID NO: 33429 - DNA, 25 bp, Homo sapiens
tgtggagaacacctagaaccatttc

SEQ ID NO: 33430 - DNA, 25 bp, Homo sapiens
ccaagctctggactggatttatttc

SEQ ID NO: 33431 - DNA, 25 bp, Homo sapiens
ggtgacctcgtgcaaccaggatttc

SEQ ID NO: 33432 - DNA, 25 bp, Homo sapiens
tgctgagacaggaggtttgaacact

SEQ ID NO: 33433 - DNA, 25 bp, Homo sapiens
tcttttttttaactaggcaaagaac

SEQ ID NO: 33434 - DNA, 25 bp, Homo sapiens
ccagctgagattgggtgtacacacc

SEQ ID NO: 33435 - DNA, 25 bp, Homo sapiens
aagagctggattttacataatataa

SEQ ID NO: 33436 - DNA, 25 bp, Homo sapiens
ctttagcactttcggttcatcagta

SEQ ID NO: 33437 - DNA, 25 bp, Homo sapiens
ggtctcatctctctgccttgcaatt

SEQ ID NO: 33438 - DNA, 25 bp, Homo sapiens
tcttaaaagctttttagtaattgag

SEQ ID NO: 33439 - DNA, 25 bp, Homo sapiens
cagttttgggcagtttggtaacacc

SEQ ID NO: 33440 - DNA, 25 bp, Homo sapiens
ggcttgtctgactgaactccctttg

SEQ ID NO: 33441 - DNA, 25 bp, Homo sapiens
acctggcatgcatgatcagtcttga

SEQ ID NO: 33442 - DNA, 25 bp, Homo sapiens
agtcccttgcttgggcagttctaca

SEQ ID NO: 33443 - DNA, 25 bp, Homo sapiens
aggggcctcattcacctggaaaatc

SEQ ID NO: 33444 - DNA, 25 bp, Homo sapiens
ggccagcaacccagatttagaccga

SEQ ID NO: 33445 - DNA, 25 bp, Homo sapiens
tgcttgcagcccacctctggtttta

SEQ ID NO: 33446 - DNA, 25 bp, Homo sapiens
gtgtctcacttacaaacaatgtgtg

SEQ ID NO: 33447 - DNA, 25 bp, Homo sapiens
gcagcctgcttggtgctagctcaca

SEQ ID NO: 33448 - DNA, 25 bp, Homo sapiens
ttcagcctaggagacacagagactt

SEQ ID NO: 33449 - DNA, 25 bp, Homo sapiens
cagccaggtctcacagcatttgttc

SEQ ID NO: 33450 - DNA, 25 bp, Homo sapiens
ttgtagcttgaaagtagggtaaata

SEQ ID NO: 33451 - DNA, 25 bp, Homo sapiens
gaaagaagggcaaataatttttttt

SEQ ID NO: 33452 - DNA, 25 bp, Homo sapiens
ttttaaaaaaggaaagaacattcaa

SEQ ID NO: 33453 - DNA, 25 bp, Homo sapiens
ttctccagggtctggttgtggccta

SEQ ID NO: 33454 - DNA, 25 bp, Homo sapiens
gacgtttcatgagcccttgtgtaca

SEQ ID NO: 33455 - DNA, 25 bp, Homo sapiens
ctgcactgtcttggttgggtactta

SEQ ID NO: 33456 - DNA, 25 bp, Homo sapiens
agggactcctttggtttctgtagta

SEQ ID NO: 33457 - DNA, 25 bp, Homo sapiens
gctggtgtatttcttcctaacagga

SEQ ID NO: 33458 - DNA, 25 bp, Homo sapiens
acatatacttgatggacttttataa

SEQ ID NO: 33459 - DNA, 25 bp, Homo sapiens
ggcatcatggccagacaaattaaga

SEQ ID NO: 33460 - DNA, 25 bp, Homo sapiens
aggctcttaccaagtccctagtgca

SEQ ID NO: 33461 - DNA, 25 bp, Homo sapiens
gtgagtcaccgtgcctggcctgtaa

SEQ ID NO: 33462 - DNA, 25 bp, Homo sapiens
gcaagagccaatcctgtaaatattc

SEQ ID NO: 33463 - DNA, 25 bp, Homo sapiens
gctcctcggggaagagcctctatta

SEQ ID NO: 33464 - DNA, 25 bp, Homo sapiens
ccagctccactatgagggtagtatc

SEQ ID NO: 33465 - DNA, 25 bp, Homo sapiens
ttccctgaggtaaatcattgtgtcc

SEQ ID NO: 33466 - DNA, 25 bp, Homo sapiens
cctggtcctcagaaataaatctttg

SEQ ID NO: 33467 - DNA, 25 bp, Homo sapiens
ccgggaggccttctgattgcagata

SEQ ID NO: 33468 - DNA, 25 bp, Homo sapiens
tatcctgagattagtgacacttcgc

SEQ ID NO: 33469 - DNA, 25 bp, Homo sapiens
tttccaagatgccattttacagttg

SEQ ID NO: 33470 - DNA, 25 bp, Homo sapiens
agatttaaggcaaaaatatatagtc

SEQ ID NO: 33471 - DNA, 25 bp, Homo sapiens
agtacctgtagactccctgtggaga

SEQ ID NO: 33472 - DNA, 25 bp, Homo sapiens
tccctaaggagagacagccattact

SEQ ID NO: 33473 - DNA, 25 bp, Homo sapiens
ctgcatcgtggttgctcctggaata

SEQ ID NO: 33474 - DNA, 25 bp, Homo sapiens
gtggtcccactctcttacaattagg

SEQ ID NO: 33475 - DNA, 25 bp, Homo sapiens
cctgtgaaatcacccatttggagtc

SEQ ID NO: 33476 - DNA, 25 bp, Homo sapiens
ggtgacttgctcttcttccattata

SEQ ID NO: 33477 - DNA, 25 bp, Homo sapiens
ctgtttcaggggtgcacatggcata

SEQ ID NO: 33478 - DNA, 25 bp, Homo sapiens
actctgcaggcaagagccctttgtc

SEQ ID NO: 33479 - DNA, 25 bp, Homo sapiens
gtaaggttcagatgccatgagtagc

SEQ ID NO: 33480 - DNA, 25 bp, Homo sapiens
ggttggtccaacctctctaaaagtg

SEQ ID NO: 33481 - DNA, 25 bp, Homo sapiens
gtccctggatgctcaacaaaacaag

SEQ ID NO: 33482 - DNA, 25 bp, Homo sapiens
cacccttgctggcttgaaaagttac

SEQ ID NO: 33483 - DNA, 25 bp, Homo sapiens
tcttttcagaaatgccttaggaata

SEQ ID NO: 33484 - DNA, 25 bp, Homo sapiens
gtcagttatacctggtaaagatgta

SEQ ID NO: 33485 - DNA, 25 bp, Homo sapiens
ggtctgccctctggtgatctaaatc

SEQ ID NO: 33486 - DNA, 25 bp, Homo sapiens
ccacagtgggtgcacaagatgatcc

SEQ ID NO: 33487 - DNA, 25 bp, Homo sapiens
cctttgccgttatatgagccaaata

SEQ ID NO: 33488 - DNA, 25 bp, Homo sapiens
ccttgttgcttaggtgtctagtaca

SEQ ID NO: 33489 - DNA, 25 bp, Homo sapiens
caagagatttcctagggctgcagca

SEQ ID NO: 33490 - DNA, 25 bp, Homo sapiens
tgcaggcctgaaggaatccacattg

SEQ ID NO: 33491 - DNA, 25 bp, Homo sapiens
ctgctggaatctatcccttggaata

SEQ ID NO: 33492 - DNA, 25 bp, Homo sapiens
cctctgggccaatggtctgaaaatg

SEQ ID NO: 33493 - DNA, 25 bp, Homo sapiens
aggaattcctttcaccctgccaatg

SEQ ID NO: 33494 - DNA, 25 bp, Homo sapiens
gcctggtcactttcagtaacattta

SEQ ID NO: 33495 - DNA, 25 bp, Homo sapiens
tctgtctccacaggtgctctgaata

SEQ ID NO: 33496 - DNA, 25 bp, Homo sapiens
ctctgggtagcagaagagttgtacc

SEQ ID NO: 33497 - DNA, 25 bp, Homo sapiens
ttagcagatccacagtcagtagttc

SEQ ID NO: 33498 - DNA, 25 bp, Homo sapiens
gggatatgttgctactacccaagta

SEQ ID NO: 33499 - DNA, 25 bp, Homo sapiens
ggcctagaagaggttgccttgacta

SEQ ID NO: 33500 - DNA, 25 bp, Homo sapiens
tgttattggtatgcccacattaatg

SEQ ID NO: 33501 - DNA, 25 bp, Homo sapiens
tgagaaccctgttttaaaggctatt

SEQ ID NO: 33502 - DNA, 25 bp, Homo sapiens
aggtgtccatcctttttctggctta

SEQ ID NO: 33503 - DNA, 25 bp, Homo sapiens
cctgctcttgttcccttcttgtgta

SEQ ID NO: 33504 - DNA, 25 bp, Homo sapiens
cacagcatggggcattttacttaca

SEQ ID NO: 33505 - DNA, 25 bp, Homo sapiens
aagggacacctttgagagcagtttc

SEQ ID NO: 33506 - DNA, 25 bp, Homo sapiens
ggtctttttacacccgcatcatagg

SEQ ID NO: 33507 - DNA, 25 bp, Homo sapiens
ttcagctagggttcattcagagttc

SEQ ID NO: 33508 - DNA, 25 bp, Homo sapiens
gtgcctggccaactttttatacttc

SEQ ID NO: 33509 - DNA, 25 bp, Homo sapiens
cgtatagtcctcaagtttccgtgta

SEQ ID NO: 33510 - DNA, 25 bp, Homo sapiens
ttgagattagtgtgatgtttaccca

SEQ ID NO: 33511 - DNA, 25 bp, Homo sapiens
cacccattaattttaaggagttaga

SEQ ID NO: 33512 - DNA, 25 bp, Homo sapiens
ccaagggtctggagagcttttcttc

SEQ ID NO: 33513 - DNA, 25 bp, Homo sapiens
tcctggcttagagcatgcgagcatt

SEQ ID NO: 33514 - DNA, 25 bp, Homo sapiens
acactgagccttttagtttcgaaca

SEQ ID NO: 33515 - DNA, 25 bp, Homo sapiens
cctgttgaaggagatgccaccactg

SEQ ID NO: 33516 - DNA, 25 bp, Homo sapiens
ctgcctgagggtagtcgtttaaaga

SEQ ID NO: 33517 - DNA, 25 bp, Homo sapiens
gccattgacccgcatttgtttagaa

SEQ ID NO: 33518 - DNA, 25 bp, Homo sapiens
cggggtgtacttcccttcaactacc

SEQ ID NO: 33519 - DNA, 25 bp, Homo sapiens
ggctagctcgctgaccaaaagaaca

SEQ ID NO: 33520 - DNA, 25 bp, Homo sapiens
tctggtataaaaaggcaccaatctg

SEQ ID NO: 33521 - DNA, 25 bp, Homo sapiens
agccaccatgctcggcttcatcata

SEQ ID NO: 33522 - DNA, 25 bp, Homo sapiens
agcagggcactactctctaagtcca

SEQ ID NO: 33523 - DNA, 25 bp, Homo sapiens
aacattataataaatgcacattcta

SEQ ID NO: 33524 - DNA, 25 bp, Homo sapiens
ggtgcttaacttctgtcaactcctg

SEQ ID NO: 33525 - DNA, 25 bp, Homo sapiens
gtgcccagcccaaacattcttaatg

SEQ ID NO: 33526 - DNA, 25 bp, Homo sapiens
acctaccttggtggctgttactgac

SEQ ID NO: 33527 - DNA, 25 bp, Homo sapiens
gcctttgtttcctaagaacttttga

SEQ ID NO: 33528 - DNA, 25 bp, Homo sapiens
ttgtggtatctagcacatacatcta

SEQ ID NO: 33529 - DNA, 25 bp, Homo sapiens
catctgaaagccaggggaagtttta

SEQ ID NO: 33530 - DNA, 25 bp, Homo sapiens
ggggacgccttaccctcctattcaa

SEQ ID NO: 33531 - DNA, 25 bp, Homo sapiens
tcagaggctggctttcacacacaca

SEQ ID NO: 33532 - DNA, 25 bp, Homo sapiens
actgccctccagattgtttatgaca

SEQ ID NO: 33533 - DNA, 25 bp, Homo sapiens
ttcccttggtgatgtaacgattata

SEQ ID NO: 33534 - DNA, 25 bp, Homo sapiens
gggcaacccaccatgagctaagatt

SEQ ID NO: 33535 - DNA, 25 bp, Homo sapiens
ggctcctgatgccagatgccaatca

SEQ ID NO: 33536 - DNA, 25 bp, Homo sapiens
gaggcacaattctacactgctggta

SEQ ID NO: 33537 - DNA, 25 bp, Homo sapiens
acactggtacttttacatttggtga

SEQ ID NO: 33538 - DNA, 25 bp, Homo sapiens
ggatgtttctttctctgcttgcagg

SEQ ID NO: 33539 - DNA, 25 bp, Homo sapiens
aggcagactctccagaagcatatta

SEQ ID NO: 33540 - DNA, 25 bp, Homo sapiens
ccctgaggctttggttgatacattc

SEQ ID NO: 33541 - DNA, 25 bp, Homo sapiens
ccttgaccctcaatgctgtatgtgg

SEQ ID NO: 33542 - DNA, 25 bp, Homo sapiens
catacttaccgggacaaattgtgtt

SEQ ID NO: 33543 - DNA, 25 bp, Homo sapiens
agccaacagggagtatatgagtgtc

SEQ ID NO: 33544 - DNA, 25 bp, Homo sapiens
ccttagtgtgtaatactgtttgcca

SEQ ID NO: 33545 - DNA, 25 bp, Homo sapiens
gtctctctctctctgcagtgtattg

SEQ ID NO: 33546 - DNA, 25 bp, Homo sapiens
agcgcctcctagctcaggatcagta

SEQ ID NO: 33547 - DNA, 25 bp, Homo sapiens
tcctgattctaagctggcatctcta

SEQ ID NO: 33548 - DNA, 25 bp, Homo sapiens
taaaggtcaccaccagcccagtatg

SEQ ID NO: 33549 - DNA, 25 bp, Homo sapiens
agctctctgttcattttgtccttaa

SEQ ID NO: 33550 - DNA, 25 bp, Homo sapiens
tagcagctgatctgacttgcaaatc

SEQ ID NO: 33551 - DNA, 25 bp, Homo sapiens
ctaaccctgtgttgcagcatgaatc

SEQ ID NO: 33552 - DNA, 25 bp, Homo sapiens
ggtgccaggatactctgaaatgatg

SEQ ID NO: 33553 - DNA, 25 bp, Homo sapiens
tggcaaacggcaatcacaatcacta

SEQ ID NO: 33554 - DNA, 25 bp, Homo sapiens
ctgtagcctcatctgttaattgtgc

SEQ ID NO: 33555 - DNA, 25 bp, Homo sapiens
agtgctaatttctacaggcgttgtc

SEQ ID NO: 33556 - DNA, 25 bp, Homo sapiens
taactgtggttactgcttgctgata

SEQ ID NO: 33557 - DNA, 25 bp, Homo sapiens
ctgcagcctgaacatccatcttttg

SEQ ID NO: 33558 - DNA, 25 bp, Homo sapiens
tgtggctgcttttctggacaacata

SEQ ID NO: 33559 - DNA, 25 bp, Homo sapiens
ccgctaatcctgctgggctaatttt

SEQ ID NO: 33560 - DNA, 25 bp, Homo sapiens
gagaccactggccacaatcttattt

SEQ ID NO: 33561 - DNA, 25 bp, Homo sapiens
tgtgactctgtccaatctcctaaga

SEQ ID NO: 33562 - DNA, 25 bp, Homo sapiens
tagtagctgctcaataaacttagtg

SEQ ID NO: 33563 - DNA, 25 bp, Homo sapiens
tttagaaacacaaatactaaattgt

SEQ ID NO: 33564 - DNA, 25 bp, Homo sapiens
gagagccagcttttccctacggata

SEQ ID NO: 33565 - DNA, 25 bp, Homo sapiens
tatcgtcatcccttacagctgctgc

SEQ ID NO: 33566 - DNA, 25 bp, Homo sapiens
tgctgggctatcagagtgctatcta

SEQ ID NO: 33567 - DNA, 25 bp, Homo sapiens
ggcccatgctgcagttatttgaata

SEQ ID NO: 33568 - DNA, 25 bp, Homo sapiens
ccacaaaaatttctaggacgaatac

SEQ ID NO: 33569 - DNA, 25 bp, Homo sapiens
ggctagtaggctctgactcatgtta

SEQ ID NO: 33570 - DNA, 25 bp, Homo sapiens
ctgtgttctaccttcttcctggcta

SEQ ID NO: 33571 - DNA, 25 bp, Homo sapiens
ttagagccttcctcaaaatagcttc

SEQ ID NO: 33572 - DNA, 25 bp, Homo sapiens
gttgggtatgagactatagaaataa

SEQ ID NO: 33573 - DNA, 25 bp, Homo sapiens
ggtaactgagcaccttttcatcatc

SEQ ID NO: 33574 - DNA, 25 bp, Homo sapiens
gaccagccagaagcagcactcgatg

SEQ ID NO: 33575 - DNA, 25 bp, Homo sapiens
acctgcttaacttcccactttctgg

SEQ ID NO: 33576 - DNA, 25 bp, Homo sapiens
ctgcaatgaggattttcttaaaccc

SEQ ID NO: 33577 - DNA, 25 bp, Homo sapiens
ctccttttaggctcacaatttggta

SEQ ID NO: 33578 - DNA, 25 bp, Homo sapiens
caacagacttcatgtgatatttgga

SEQ ID NO: 33579 - DNA, 25 bp, Homo sapiens
cagagttctcttatacacctgaatg

SEQ ID NO: 33580 - DNA, 25 bp, Homo sapiens
agtgggcactgacgctgtaaatgta

SEQ ID NO: 33581 - DNA, 25 bp, Homo sapiens
ccgacagtggctcaatccaaaaatg

SEQ ID NO: 33582 - DNA, 25 bp, Homo sapiens
ctggggcccgttggtacaatttttt

SEQ ID NO: 33583 - DNA, 25 bp, Homo sapiens
gccgccgcggtaactactacagatc

SEQ ID NO: 33584 - DNA, 25 bp, Homo sapiens
ggcggggagctactttcctaacata

SEQ ID NO: 33585 - DNA, 25 bp, Homo sapiens
acagggctcagtgcttatccaagtc

SEQ ID NO: 33586 - DNA, 25 bp, Homo sapiens
gtctttgtctcctgccactcataga

SEQ ID NO: 33587 - DNA, 25 bp, Homo sapiens
aatggaatactattcttttccttcc

SEQ ID NO: 33588 - DNA, 25 bp, Homo sapiens
atcctatccacccctatatgttatg

SEQ ID NO: 33589 - DNA, 25 bp, Homo sapiens
ctggccttcttcagggtgatctttc

SEQ ID NO: 33590 - DNA, 25 bp, Homo sapiens
tgccttttgggctctacacttttta

SEQ ID NO: 33591 - DNA, 25 bp, Homo sapiens
ttaccaagtggtgcaagaaaacaga

SEQ ID NO: 33592 - DNA, 25 bp, Homo sapiens
agtcccgaggttagcttttcaaagc

SEQ ID NO: 33593 - DNA, 25 bp, Homo sapiens
cctggcctgttttataccaatttaa

SEQ ID NO: 33594 - DNA, 25 bp, Homo sapiens
tcccatgcaggataaagtcagagta

SEQ ID NO: 33595 - DNA, 25 bp, Homo sapiens
gtgcccagcccactttttctgaata

SEQ ID NO: 33596 - DNA, 25 bp, Homo sapiens
acagggtgtgacttggcttccataa

SEQ ID NO: 33597 - DNA, 25 bp, Homo sapiens
aggctgttggctgttgtatcttgta

SEQ ID NO: 33598 - DNA, 25 bp, Homo sapiens
agaatgctatgcttggctgaactga

SEQ ID NO: 33599 - DNA, 25 bp, Homo sapiens
ctttgtgtcagttcaggtttctgga

SEQ ID NO: 33600 - DNA, 25 bp, Homo sapiens
ccgaaagtcatgatccttcagctct

SEQ ID NO: 33601 - DNA, 25 bp, Homo sapiens
ggctgggtcacgtccaaagtatttc

SEQ ID NO: 33602 - DNA, 25 bp, Homo sapiens
tcttacgtcagtgcccaaatcatgg

SEQ ID NO: 33603 - DNA, 25 bp, Homo sapiens
atggaccctctgtgcttactgtata

SEQ ID NO: 33604 - DNA, 25 bp, Homo sapiens
gaggagttctccactactaatctta

SEQ ID NO: 33605 - DNA, 25 bp, Homo sapiens
gcagtaccgcagtcatatttggata

SEQ ID NO: 33606 - DNA, 25 bp, Homo sapiens
caagctcttctagctggtcaaaaaa

SEQ ID NO: 33607 - DNA, 25 bp, Homo sapiens
ctgctcctgctgtaagtgcaaaata

SEQ ID NO: 33608 - DNA, 25 bp, Homo sapiens
cgcttactcttacgaggggtgaata

SEQ ID NO: 33609 - DNA, 25 bp, Homo sapiens
tagccaccaggtccaacaaattttg

SEQ ID NO: 33610 - DNA, 25 bp, Homo sapiens
ggcgtgtattcatgtgtcccaaaaa

SEQ ID NO: 33611 - DNA, 25 bp, Homo sapiens
tgccagctattttgaagtccatgtc

SEQ ID NO: 33612 - DNA, 25 bp, Homo sapiens
tcaggatcggttttggtgaccaatc

SEQ ID NO: 33613 - DNA, 25 bp, Homo sapiens
tggtaaattcttccagcctgaactc

SEQ ID NO: 33614 - DNA, 25 bp, Homo sapiens
ctcctgcattctttggttgaaagca

SEQ ID NO: 33615 - DNA, 25 bp, Homo sapiens
tgtggctttcttgaggcactgcctc

SEQ ID NO: 33616 - DNA, 25 bp, Homo sapiens
aaaaaaaatcctatttctgtataaa

SEQ ID NO: 33617 - DNA, 25 bp, Homo sapiens
gaactgcataccttgtatcggccca

SEQ ID NO: 33618 - DNA, 25 bp, Homo sapiens
atctgactttgagttttactaaaac

SEQ ID NO: 33619 - DNA, 25 bp, Homo sapiens
tgactgcaccgtaccttgacccatg

SEQ ID NO: 33620 - DNA, 25 bp, Homo sapiens
ttttccatagcaaagcccacattta

SEQ ID NO: 33621 - DNA, 25 bp, Homo sapiens
cccaaatatctgtaattccagatta

SEQ ID NO: 33622 - DNA, 25 bp, Homo sapiens
ataatggcccatatccttctccagc

SEQ ID NO: 33623 - DNA, 25 bp, Homo sapiens
gacgtgtatacaggcatgacttttt

SEQ ID NO: 33624 - DNA, 25 bp, Homo sapiens
gctacaatgcttctcccagtcaata

SEQ ID NO: 33625 - DNA, 25 bp, Homo sapiens
tcacaacgtggcttgggattcgaca

SEQ ID NO: 33626 - DNA, 25 bp, Homo sapiens
agtacgctgaggaagccttaataca

SEQ ID NO: 33627 - DNA, 25 bp, Homo sapiens
tttaacatgcatttataaactttga

SEQ ID NO: 33628 - DNA, 25 bp, Homo sapiens
ttatgcagtgaccatgttgactggc

SEQ ID NO: 33629 - DNA, 25 bp, Homo sapiens
acctgtgtttgtcctctttgaaata

SEQ ID NO: 33630 - DNA, 25 bp, Homo sapiens
ggatcggcttctggaaatttttcta

SEQ ID NO: 33631 - DNA, 25 bp, Homo sapiens
ctgacagttttaagagtagacaccc

SEQ ID NO: 33632 - DNA, 25 bp, Homo sapiens
cccagagggtcgtgaagatattcta

SEQ ID NO: 33633 - DNA, 25 bp, Homo sapiens
ctggagagctaaattacctaagttc

SEQ ID NO: 33634 - DNA, 25 bp, Homo sapiens
tcctacagatgtgatgcctttcctc

SEQ ID NO: 33635 - DNA, 25 bp, Homo sapiens
cccaggggaaaccacatgtagtatc

SEQ ID NO: 33636 - DNA, 25 bp, Homo sapiens
tctgcagaggcttccaacatgacta

SEQ ID NO: 33637 - DNA, 25 bp, Homo sapiens
gcagtgatcctgtttcaagtaagcc

SEQ ID NO: 33638 - DNA, 25 bp, Homo sapiens
gcaccaggcctgaagaaatttcttc

SEQ ID NO: 33639 - DNA, 25 bp, Homo sapiens
cactccttacagttgagtctacaga

SEQ ID NO: 33640 - DNA, 25 bp, Homo sapiens
agctgacagcatggagtaactattc

SEQ ID NO: 33641 - DNA, 25 bp, Homo sapiens
agagtctcattcttccctcctgtga

SEQ ID NO: 33642 - DNA, 25 bp, Homo sapiens
tttgctcaaggctccgagatgctca

SEQ ID NO: 33643 - DNA, 25 bp, Homo sapiens
tggcccatggtcaatgcatttcttc

SEQ ID NO: 33644 - DNA, 25 bp, Homo sapiens
ggtgctccagcaaccactaaattta

SEQ ID NO: 33645 - DNA, 25 bp, Homo sapiens
cgccattaattgctaggacatcagg

SEQ ID NO: 33646 - DNA, 25 bp, Homo sapiens
tttctgtttataagcatagatgaaa

SEQ ID NO: 33647 - DNA, 25 bp, Homo sapiens
agcggtctaattgaacgatctgcca

SEQ ID NO: 33648 - DNA, 25 bp, Homo sapiens
tgggaattctacctgctgcagcagc

SEQ ID NO: 33649 - DNA, 25 bp, Homo sapiens
cttcttgtcaacttacgcacctgga

SEQ ID NO: 33650 - DNA, 25 bp, Homo sapiens
tgcagtgctctggactctggttgtc

SEQ ID NO: 33651 - DNA, 25 bp, Homo sapiens
tctcaccttgttgactacagtaatg

SEQ ID NO: 33652 - DNA, 25 bp, Homo sapiens
gtgtcttatatacatgaaataggca

SEQ ID NO: 33653 - DNA, 25 bp, Homo sapiens
ttctactctactaacggggctactg

SEQ ID NO: 33654 - DNA, 25 bp, Homo sapiens
agttagagtgcgagacctggattca

SEQ ID NO: 33655 - DNA, 25 bp, Homo sapiens
cgtcaactcgttattcctaggtgga

SEQ ID NO: 33656 - DNA, 25 bp, Homo sapiens
tgggccttggaaagagatctccttc

SEQ ID NO: 33657 - DNA, 25 bp, Homo sapiens
ccttgagttgccacagagttttcca

SEQ ID NO: 33658 - DNA, 25 bp, Homo sapiens
gaactccttgaactccttgaatcgg

SEQ ID NO: 33659 - DNA, 25 bp, Homo sapiens
agtatcagcagtccctgaagtgttc

SEQ ID NO: 33660 - DNA, 25 bp, Homo sapiens
agggagaggctgcatggctatgaag

SEQ ID NO: 33661 - DNA, 25 bp, Homo sapiens
tctgtttcttccctgagctgcaatc

SEQ ID NO: 33662 - DNA, 25 bp, Homo sapiens
tgtttttgttgctctaagagtgggg

SEQ ID NO: 33663 - DNA, 25 bp, Homo sapiens
ggtagcctctgtcttccaaattctc

SEQ ID NO: 33664 - DNA, 25 bp, Homo sapiens
cctgggcttggcttctaactcatga

SEQ ID NO: 33665 - DNA, 25 bp, Homo sapiens
tgaattagtttccttccctctctcc

SEQ ID NO: 33666 - DNA, 25 bp, Homo sapiens
tgaattatagcaatgaggataaaaa

SEQ ID NO: 33667 - DNA, 25 bp, Homo sapiens
gctctgtgtcatgctaccgccaatg

SEQ ID NO: 33668 - DNA, 25 bp, Homo sapiens
ctcggggataatgtggaaaccattc

SEQ ID NO: 33669 - DNA, 25 bp, Homo sapiens
tgcatggagcctatatcattacgtg

SEQ ID NO: 33670 - DNA, 25 bp, Homo sapiens
ttgaggtctatacacactgaaattg

SEQ ID NO: 33671 - DNA, 25 bp, Homo sapiens
tgcagacttggcctaatataaattc

SEQ ID NO: 33672 - DNA, 25 bp, Homo sapiens
agcctacccgagtctaccgagtttc

SEQ ID NO: 33673 - DNA, 25 bp, Homo sapiens
gccatggtatgcttctcttaaacgg

SEQ ID NO: 33674 - DNA, 25 bp, Homo sapiens
tcctgaaagtgagatggcatgaaca

SEQ ID NO: 33675 - DNA, 25 bp, Homo sapiens
ctggcccgactcattgtatcctgtg

SEQ ID NO: 33676 - DNA, 25 bp, Homo sapiens
actggggttgtgtctctaatgagca

SEQ ID NO: 33677 - DNA, 25 bp, Homo sapiens
gggcgctcaggtgttgcttaattca

SEQ ID NO: 33678 - DNA, 25 bp, Homo sapiens
ggggcaccagtccatagaccattca

SEQ ID NO: 33679 - DNA, 25 bp, Homo sapiens
tcacacaggggtcttttgagccaga

SEQ ID NO: 33680 - DNA, 25 bp, Homo sapiens
tgcactgaggcactaactttgaaac

SEQ ID NO: 33681 - DNA, 25 bp, Homo sapiens
agaaagttttccaccaaggtcttgg

SEQ ID NO: 33682 - DNA, 25 bp, Homo sapiens
gggtgccctgaggaccatctacaga

SEQ ID NO: 33683 - DNA, 25 bp, Homo sapiens
tgacctgccgggatgctaagacatc

SEQ ID NO: 33684 - DNA, 25 bp, Homo sapiens
cagcgtagctgggaagtcacatttg

SEQ ID NO: 33685 - DNA, 25 bp, Homo sapiens
tctgtcctataggatttcttattta

SEQ ID NO: 33686 - DNA, 25 bp, Homo sapiens
ctgccagattgtggagggccttttg

SEQ ID NO: 33687 - DNA, 25 bp, Homo sapiens
ttaatctgccagcaaactgttggga

SEQ ID NO: 33688 - DNA, 25 bp, Homo sapiens
tgcctgcctgtacacatgagtcttg

SEQ ID NO: 33689 - DNA, 25 bp, Homo sapiens
ttgccagtctcagtgctaagtaata

SEQ ID NO: 33690 - DNA, 25 bp, Homo sapiens
gaccctctctctgcccttgattttg

SEQ ID NO: 33691 - DNA, 25 bp, Homo sapiens
gactggtcctctgttttatgcctga

SEQ ID NO: 33692 - DNA, 25 bp, Homo sapiens
caggcaggttttctagtgtcccata

SEQ ID NO: 33693 - DNA, 25 bp, Homo sapiens
tgacttagagactgggcatgacttc

SEQ ID NO: 33694 - DNA, 25 bp, Homo sapiens
ggattccattcctacgcatgtatta

SEQ ID NO: 33695 - DNA, 25 bp, Homo sapiens
aggactttgattttacatggcaata

SEQ ID NO: 33696 - DNA, 25 bp, Homo sapiens
cttgcagctcccagaatattgtttc

SEQ ID NO: 33697 - DNA, 25 bp, Homo sapiens
tctgctgaccagttgctaagctgta

SEQ ID NO: 33698 - DNA, 25 bp, Homo sapiens
attaagtccacacttgctgggtgga

SEQ ID NO: 33699 - DNA, 25 bp, Homo sapiens
aatttattaatagtatttcatttcc

SEQ ID NO: 33700 - DNA, 25 bp, Homo sapiens
tttttccaacttcctttccattctc

SEQ ID NO: 33701 - DNA, 25 bp, Homo sapiens
gggagtggcccaaaacatgaattta

SEQ ID NO: 33702 - DNA, 25 bp, Homo sapiens
atcccaggggcaaagattaaaatgc

SEQ ID NO: 33703 - DNA, 25 bp, Homo sapiens
tctctgtgtgcatgtcctaatcttg

SEQ ID NO: 33704 - DNA, 25 bp, Homo sapiens
gggtagcactttgcctgttaggatc

SEQ ID NO: 33705 - DNA, 25 bp, Homo sapiens
aagtcgaatttcttgaatgctgaga

SEQ ID NO: 33706 - DNA, 25 bp, Homo sapiens
caagtcctggtgtcagagatgtctc

SEQ ID NO: 33707 - DNA, 25 bp, Homo sapiens
tcactgcttggcaattaggttaacc

SEQ ID NO: 33708 - DNA, 25 bp, Homo sapiens
ctttactttgtgacttctggggatg

SEQ ID NO: 33709 - DNA, 25 bp, Homo sapiens
ggcccaggcacaaatagttcccttc

SEQ ID NO: 33710 - DNA, 25 bp, Homo sapiens
acctcttcttttgggactgttctga

SEQ ID NO: 33711 - DNA, 25 bp, Homo sapiens
ggccataacatctgccctcagggtg

SEQ ID NO: 33712 - DNA, 25 bp, Homo sapiens
cagcctggctcatggtagaagctta

SEQ ID NO: 33713 - DNA, 25 bp, Homo sapiens
tcagggctaccttagaggctgtttc

SEQ ID NO: 33714 - DNA, 25 bp, Homo sapiens
ccaaggcttttttgtagctacagta

SEQ ID NO: 33715 - DNA, 25 bp, Homo sapiens
atcgatggtgttccttggctgtgca

SEQ ID NO: 33716 - DNA, 25 bp, Homo sapiens
gtcctttcttattttgggtgacatt

SEQ ID NO: 33717 - DNA, 25 bp, Homo sapiens
cctctgtaggaggtagaattctgta

SEQ ID NO: 33718 - DNA, 25 bp, Homo sapiens
ttacggttggtttttcctgagcatc

SEQ ID NO: 33719 - DNA, 25 bp, Homo sapiens
ccaggagagcttggtgtcatgccta

SEQ ID NO: 33720 - DNA, 25 bp, Homo sapiens
ggggctcggaaacttgctaacttgc

SEQ ID NO: 33721 - DNA, 25 bp, Homo sapiens
ccttcaataggtcgttcttgctatc

SEQ ID NO: 33722 - DNA, 25 bp, Homo sapiens
ctagctgttggttgtgtatatcctc

SEQ ID NO: 33723 - DNA, 25 bp, Homo sapiens
aggctctgccctggactcattttac

SEQ ID NO: 33724 - DNA, 25 bp, Homo sapiens
taggctagcaaaaggaggcgatttc

SEQ ID NO: 33725 - DNA, 25 bp, Homo sapiens
cccaagctttggctctgaggcatta

SEQ ID NO: 33726 - DNA, 25 bp, Homo sapiens
tctctctgtggtgtgtgacacttta

SEQ ID NO: 33727 - DNA, 25 bp, Homo sapiens
agaaaatactcgctaaactgaagaa

SEQ ID NO: 33728 - DNA, 25 bp, Homo sapiens
cgaaccggtgtttttggacttaata

SEQ ID NO: 33729 - DNA, 25 bp, Homo sapiens
ccatcataaattttggttgaatcta

SEQ ID NO: 33730 - DNA, 25 bp, Homo sapiens
ttcaagaattctctttcaaggaatt

SEQ ID NO: 33731 - DNA, 25 bp, Homo sapiens
gccttctgttctgtatctcttaaaa

SEQ ID NO: 33732 - DNA, 25 bp, Homo sapiens
gccttggatgtgtttctcttgcaga

SEQ ID NO: 33733 - DNA, 25 bp, Homo sapiens
gggattaaaaaggcgaatttgaggg

SEQ ID NO: 33734 - DNA, 25 bp, Homo sapiens
gctgtgcccttccaaacctgatatt

SEQ ID NO: 33735 - DNA, 25 bp, Homo sapiens
cttcttgtatgcagggttcgaacta

SEQ ID NO: 33736 - DNA, 25 bp, Homo sapiens
cctgcccaggaagatgccagacttt

SEQ ID NO: 33737 - DNA, 25 bp, Homo sapiens
aagcttcaggcttccattttggtga

SEQ ID NO: 33738 - DNA, 25 bp, Homo sapiens
tagggaccctgcatttctgagaaaa

SEQ ID NO: 33739 - DNA, 25 bp, Homo sapiens
tgactctttctgtgtgcattccatg

SEQ ID NO: 33740 - DNA, 25 bp, Homo sapiens
gagcacttcttcattcaagccagga

SEQ ID NO: 33741 - DNA, 25 bp, Homo sapiens
ttgcattgtcaaagaggatgctttc

SEQ ID NO: 33742 - DNA, 25 bp, Homo sapiens
agcgggtaaccacctattctgggca

SEQ ID NO: 33743 - DNA, 25 bp, Homo sapiens
cccgggccgaatatgcaaagctttg

SEQ ID NO: 33744 - DNA, 25 bp, Homo sapiens
aagggatcttcttagctgctcaatg

SEQ ID NO: 33745 - DNA, 25 bp, Homo sapiens
ccctgggattcctctggtgagactt

SEQ ID NO: 33746 - DNA, 25 bp, Homo sapiens
agcatgcagaggtagcagtttttgc

SEQ ID NO: 33747 - DNA, 25 bp, Homo sapiens
atgtgtgcagaaacttggtcaaaga

SEQ ID NO: 33748 - DNA, 25 bp, Homo sapiens
attataatgatttagtgaaatttac

SEQ ID NO: 33749 - DNA, 25 bp, Homo sapiens
aaggcaataaaaaatgcagagtaaa

SEQ ID NO: 33750 - DNA, 25 bp, Homo sapiens
aaaggccgcttgagaattgtgagtc

SEQ ID NO: 33751 - DNA, 25 bp, Homo sapiens
tggatccctctacttaagatggctg

SEQ ID NO: 33752 - DNA, 25 bp, Homo sapiens
tattattgttttttattgtaccact

SEQ ID NO: 33753 - DNA, 25 bp, Homo sapiens
agctgactctttctcctgcctgaag

SEQ ID NO: 33754 - DNA, 25 bp, Homo sapiens
cctcccttttgggtaagtgatgtca

SEQ ID NO: 33755 - DNA, 25 bp, Homo sapiens
ttgctctttctctggtgttagctgg

SEQ ID NO: 33756 - DNA, 25 bp, Homo sapiens
ttcttgggagggcaaaatacacata

SEQ ID NO: 33757 - DNA, 25 bp, Homo sapiens
aactgtcaagatctggggcccaagc

SEQ ID NO: 33758 - DNA, 25 bp, Homo sapiens
gcaaagtggccctaacgtgtctata

SEQ ID NO: 33759 - DNA, 25 bp, Homo sapiens
atgatgtcttccagccctacttttg

SEQ ID NO: 33760 - DNA, 25 bp, Homo sapiens
gctgaaggcaatgatgcataacctg

SEQ ID NO: 33761 - DNA, 25 bp, Homo sapiens
ttatattcagcaattttagggttta

SEQ ID NO: 33762 - DNA, 25 bp, Homo sapiens
tctattccttctagtagtaattttc

SEQ ID NO: 33763 - DNA, 25 bp, Homo sapiens
ctgcttgtttggtgtctggtacttc

SEQ ID NO: 33764 - DNA, 25 bp, Homo sapiens
gacccggctgtgatttcctgtcata

SEQ ID NO: 33765 - DNA, 25 bp, Homo sapiens
tcctgccgtccttagacatgaagta

SEQ ID NO: 33766 - DNA, 25 bp, Homo sapiens
tatactgtagccagccttatctgtg

SEQ ID NO: 33767 - DNA, 25 bp, Homo sapiens
acaacgaggtttacgaggtttcttg

SEQ ID NO: 33768 - DNA, 25 bp, Homo sapiens
agggccacttcctgtacctacaata

SEQ ID NO: 33769 - DNA, 25 bp, Homo sapiens
aagggctactcattctatttagtac

SEQ ID NO: 33770 - DNA, 25 bp, Homo sapiens
aaggggtctgtgctccgttaacata

SEQ ID NO: 33771 - DNA, 25 bp, Homo sapiens
ccaggggagtgttagactcattcta

SEQ ID NO: 33772 - DNA, 25 bp, Homo sapiens
agcccaggccacaggtattacaaca

SEQ ID NO: 33773 - DNA, 25 bp, Homo sapiens
tcatctatgggagcaggcttaaatc

SEQ ID NO: 33774 - DNA, 25 bp, Homo sapiens
ggccagggcttagcataaacatttc

SEQ ID NO: 33775 - DNA, 25 bp, Homo sapiens
ccgagtttgcttcttcaggtcagtt

SEQ ID NO: 33776 - DNA, 25 bp, Homo sapiens
tgtcagcatctccaggtccacgata

SEQ ID NO: 33777 - DNA, 25 bp, Homo sapiens
ctcatgagcagcttgcaaccctctg

SEQ ID NO: 33778 - DNA, 25 bp, Homo sapiens
tgccctctgcacaagtagaatttta

SEQ ID NO: 33779 - DNA, 25 bp, Homo sapiens
caaactgcttggtagggtgccatca

SEQ ID NO: 33780 - DNA, 25 bp, Homo sapiens
gcagttctcggcacatggcatttga

SEQ ID NO: 33781 - DNA, 25 bp, Homo sapiens
cctcaggctggacaaagattgactt

SEQ ID NO: 33782 - DNA, 25 bp, Homo sapiens
aaaaagtgtcttcttgggctggcta

SEQ ID NO: 33783 - DNA, 25 bp, Homo sapiens
ggtcggatcccaccgtgcattaatc

SEQ ID NO: 33784 - DNA, 25 bp, Homo sapiens
gggagctgcctcttccacttacgta

SEQ ID NO: 33785 - DNA, 25 bp, Homo sapiens
cggccttcattttggactctgcaga

SEQ ID NO: 33786 - DNA, 25 bp, Homo sapiens
ttcccatgggtaagcgtttgttttc

SEQ ID NO: 33787 - DNA, 25 bp, Homo sapiens
cactgctgattgactggtgtatgta

SEQ ID NO: 33788 - DNA, 25 bp, Homo sapiens
tgttccagcctgtgtccttctcata

SEQ ID NO: 33789 - DNA, 25 bp, Homo sapiens
cgaaacttcacactaattaagagca

SEQ ID NO: 33790 - DNA, 25 bp, Homo sapiens
agggctgtgaccgtatgttccatta

SEQ ID NO: 33791 - DNA, 25 bp, Homo sapiens
taccagtgtgttagcgcgatggccc

SEQ ID NO: 33792 - DNA, 25 bp, Homo sapiens
ccctgtagctgtttgtttttgcaaa

SEQ ID NO: 33793 - DNA, 25 bp, Homo sapiens
gcgatggtgcaacaatcctgctttg

SEQ ID NO: 33794 - DNA, 25 bp, Homo sapiens
tctcccaggagtgttgatgacagtc

SEQ ID NO: 33795 - DNA, 25 bp, Homo sapiens
acgtgctccctcctagtgatttata

SEQ ID NO: 33796 - DNA, 25 bp, Homo sapiens
gctcccaatcctttctagagacagg

SEQ ID NO: 33797 - DNA, 25 bp, Homo sapiens
ctgtcttaatcgatggccagcagta

SEQ ID NO: 33798 - DNA, 25 bp, Homo sapiens
tttgctccagagtggctcagtacta

SEQ ID NO: 33799 - DNA, 25 bp, Homo sapiens
cctcagggcccttatttgcactaaa

SEQ ID NO: 33800 - DNA, 25 bp, Homo sapiens
tgccagcccataagaaggcccatag

SEQ ID NO: 33801 - DNA, 25 bp, Homo sapiens
tctgaccctgtgagtgttgcaattc

SEQ ID NO: 33802 - DNA, 25 bp, Homo sapiens
gaaaacctttggcttcaggcacata

SEQ ID NO: 33803 - DNA, 25 bp, Homo sapiens
gctacagaatcgcttcatggcaatg

SEQ ID NO: 33804 - DNA, 25 bp, Homo sapiens
gctccaagacctgcctgtgactgtg

SEQ ID NO: 33805 - DNA, 25 bp, Homo sapiens
cccaggcacgtatcagtggcctata

SEQ ID NO: 33806 - DNA, 25 bp, Homo sapiens
acctagtctggggttttgtgctatc

SEQ ID NO: 33807 - DNA, 25 bp, Homo sapiens
ctgtttcacacagcagaagctgctc

SEQ ID NO: 33808 - DNA, 25 bp, Homo sapiens
cctaggcttctagtacagtttgaac

SEQ ID NO: 33809 - DNA, 25 bp, Homo sapiens
tacctggctgtgaggcacccattta

SEQ ID NO: 33810 - DNA, 25 bp, Homo sapiens
gtgctactgaccacacccattaggc

SEQ ID NO: 33811 - DNA, 25 bp, Homo sapiens
ccgtaattacccatgtcagtgcctg

SEQ ID NO: 33812 - DNA, 25 bp, Homo sapiens
tcagctactggaagacaggttctgc

SEQ ID NO: 33813 - DNA, 25 bp, Homo sapiens
ctgttacccagttgtgatctttgtg

SEQ ID NO: 33814 - DNA, 25 bp, Homo sapiens
gcctgttcctgactttgatactgta

SEQ ID NO: 33815 - DNA, 25 bp, Homo sapiens
tggctccctccctggattaagattc

SEQ ID NO: 33816 - DNA, 25 bp, Homo sapiens
cactgccctttgtcattctggtata

SEQ ID NO: 33817 - DNA, 25 bp, Homo sapiens
agccttgagtttcttcgcagtatca

SEQ ID NO: 33818 - DNA, 25 bp, Homo sapiens
ggggacctctcctgggaaatcattc

SEQ ID NO: 33819 - DNA, 25 bp, Homo sapiens
gttacccgggcttgcaattctactc

SEQ ID NO: 33820 - DNA, 25 bp, Homo sapiens
cctgctgcaggagagtgatcatact

SEQ ID NO: 33821 - DNA, 25 bp, Homo sapiens
tgcaggttctaatgtccaggcatcc

SEQ ID NO: 33822 - DNA, 25 bp, Homo sapiens
agcgttactggctcccacagcatga

SEQ ID NO: 33823 - DNA, 25 bp, Homo sapiens
tgtgtgcacacagtcaacaggtatg

SEQ ID NO: 33824 - DNA, 25 bp, Homo sapiens
tggaccctttccattggcccacgtg

SEQ ID NO: 33825 - DNA, 25 bp, Homo sapiens
ttccgccggatgacaaagttatttc

SEQ ID NO: 33826 - DNA, 25 bp, Homo sapiens
ggtgttcctcctagcagttcccagc

SEQ ID NO: 33827 - DNA, 25 bp, Homo sapiens
ctgagagctgcttatgtacacaatg

SEQ ID NO: 33828 - DNA, 25 bp, Homo sapiens
ggatacgagcccattcttctgaaaa

SEQ ID NO: 33829 - DNA, 25 bp, Homo sapiens
cggagttgcacacattacgttttaa

SEQ ID NO: 33830 - DNA, 25 bp, Homo sapiens
tggggctgcaaaactctgttctcta

SEQ ID NO: 33831 - DNA, 25 bp, Homo sapiens
cagggcagttctcgggtactcaaca

SEQ ID NO: 33832 - DNA, 25 bp, Homo sapiens
cgtgcatgtgtatatgagcccattc

SEQ ID NO: 33833 - DNA, 25 bp, Homo sapiens
gggcatttcactttcacctttcata

SEQ ID NO: 33834 - DNA, 25 bp, Homo sapiens
gttcccagccacttttccagaaaaa

SEQ ID NO: 33835 - DNA, 25 bp, Homo sapiens
atgctttatattactgaaacaagtc

SEQ ID NO: 33836 - DNA, 25 bp, Homo sapiens
tccggaaacttcatttggctaatca

SEQ ID NO: 33837 - DNA, 25 bp, Homo sapiens
atgctgggatcagaaagaacttttc

SEQ ID NO: 33838 - DNA, 25 bp, Homo sapiens
cctcacctgtctgggagctgaaatt

SEQ ID NO: 33839 - DNA, 25 bp, Homo sapiens
aggtggtttccaagtctctcaatga

SEQ ID NO: 33840 - DNA, 25 bp, Homo sapiens
gggagctggttttctgtctcctata

SEQ ID NO: 33841 - DNA, 25 bp, Homo sapiens
aggactgtttgttctcccaattgga

SEQ ID NO: 33842 - DNA, 25 bp, Homo sapiens
gagactgcttgcttaatgcttaatg

SEQ ID NO: 33843 - DNA, 25 bp, Homo sapiens
ctgctatgcagagataccactttta

SEQ ID NO: 33844 - DNA, 25 bp, Homo sapiens
tcaggccaagggaggaaatggcttc

SEQ ID NO: 33845 - DNA, 25 bp, Homo sapiens
cctgtgctgcaggttctatgttgtc

SEQ ID NO: 33846 - DNA, 25 bp, Homo sapiens
gagactctgagcctgcctgttaaga

SEQ ID NO: 33847 - DNA, 25 bp, Homo sapiens
tccggggtcaggcaaaatctactta

SEQ ID NO: 33848 - DNA, 25 bp, Homo sapiens
aggtctcaaccacataaattcagtc

SEQ ID NO: 33849 - DNA, 25 bp, Homo sapiens
aggcacttcctccttctctgctgtg

SEQ ID NO: 33850 - DNA, 25 bp, Homo sapiens
accaggtcacttgtagagttttctg

SEQ ID NO: 33851 - DNA, 25 bp, Homo sapiens
aatataaaataataatggctaaagg

SEQ ID NO: 33852 - DNA, 25 bp, Homo sapiens
ccctctttggcacttctggatttta

SEQ ID NO: 33853 - DNA, 25 bp, Homo sapiens
cccaccctggagataaagaagagtt

SEQ ID NO: 33854 - DNA, 25 bp, Homo sapiens
gggcttggctttatcagcatctgga

SEQ ID NO: 33855 - DNA, 25 bp, Homo sapiens
actacgggaggatttgcatttcacc

SEQ ID NO: 33856 - DNA, 25 bp, Homo sapiens
catggatgagccctggaacctgaca

SEQ ID NO: 33857 - DNA, 25 bp, Homo sapiens
ggttcattcttcctgctgctgcgta

SEQ ID NO: 33858 - DNA, 25 bp, Homo sapiens
gtgggatagcatttctctgtgattc

SEQ ID NO: 33859 - DNA, 25 bp, Homo sapiens
acccggagctcagcgaatgacattg

SEQ ID NO: 33860 - DNA, 25 bp, Homo sapiens
ggcactcttcttgggcacatctttg

SEQ ID NO: 33861 - DNA, 25 bp, Homo sapiens
ggtggatcctgccttgtgaaattca

SEQ ID NO: 33862 - DNA, 25 bp, Homo sapiens
gcccagggccaactctcttttattg

SEQ ID NO: 33863 - DNA, 25 bp, Homo sapiens
tcgttacggcgatagagctccctta

SEQ ID NO: 33864 - DNA, 25 bp, Homo sapiens
gacctcccaccgtttagctcagtga

SEQ ID NO: 33865 - DNA, 25 bp, Homo sapiens
acggctttttggtctctgggatttc

SEQ ID NO: 33866 - DNA, 25 bp, Homo sapiens
tgggaggacctcttgatgacacaga

SEQ ID NO: 33867 - DNA, 25 bp, Homo sapiens
tgcacatagggctcaaaggcttatc

SEQ ID NO: 33868 - DNA, 25 bp, Homo sapiens
gcttaccactcttgatccagggaga

SEQ ID NO: 33869 - DNA, 25 bp, Homo sapiens
acctcattgggctctgctgaaaaca

SEQ ID NO: 33870 - DNA, 25 bp, Homo sapiens
acttggtgtgagatcagataccttc

SEQ ID NO: 33871 - DNA, 25 bp, Homo sapiens
tggggctagagtttccatatctaca

SEQ ID NO: 33872 - DNA, 25 bp, Homo sapiens
tctcctgggtggtatcttgcacatg

SEQ ID NO: 33873 - DNA, 25 bp, Homo sapiens
tgacatcccagtatggtaggcagtg

SEQ ID NO: 33874 - DNA, 25 bp, Homo sapiens
tatgggccgcttctagtgttctttc

SEQ ID NO: 33875 - DNA, 25 bp, Homo sapiens
ctgccagggaacatacgtcacaatt

SEQ ID NO: 33876 - DNA, 25 bp, Homo sapiens
tcatatgaaaggcaccggtggtgac

SEQ ID NO: 33877 - DNA, 25 bp, Homo sapiens
gcctgaagacctaactagaagggtt

SEQ ID NO: 33878 - DNA, 25 bp, Homo sapiens
agtagccttttctcccttcagggaa

SEQ ID NO: 33879 - DNA, 25 bp, Homo sapiens
tgggacctgagaaaggatcactatc

SEQ ID NO: 33880 - DNA, 25 bp, Homo sapiens
atactatatggtaagtatccacaca

SEQ ID NO: 33881 - DNA, 25 bp, Homo sapiens
cttgggctcacctctcttgaagaaa

SEQ ID NO: 33882 - DNA, 25 bp, Homo sapiens
tgtggtggccaaacctataattctg

SEQ ID NO: 33883 - DNA, 25 bp, Homo sapiens
cagggcaggagtcttgtcataattt

SEQ ID NO: 33884 - DNA, 25 bp, Homo sapiens
agtgggactttctgggcattcaata

SEQ ID NO: 33885 - DNA, 25 bp, Homo sapiens
tcctcttggttggaatctgcctatc

SEQ ID NO: 33886 - DNA, 25 bp, Homo sapiens
gggatatgtgccagtcaagaccttg

SEQ ID NO: 33887 - DNA, 25 bp, Homo sapiens
ctgcctcaggtggaagcacatcttc

SEQ ID NO: 33888 - DNA, 25 bp, Homo sapiens
agtctcccttttttggcacctgtaa

SEQ ID NO: 33889 - DNA, 25 bp, Homo sapiens
tgggtgcaccgcaatgtatgcattt

SEQ ID NO: 33890 - DNA, 25 bp, Homo sapiens
gggactctgtatcctccaaggtttg

SEQ ID NO: 33891 - DNA, 25 bp, Homo sapiens
ggaggtgctctttctgcagaccaga

SEQ ID NO: 33892 - DNA, 25 bp, Homo sapiens
tgcctgactggaactcaatggcttc

SEQ ID NO: 33893 - DNA, 25 bp, Homo sapiens
cctcaggcagggacaatacatactc

SEQ ID NO: 33894 - DNA, 25 bp, Homo sapiens
caggctctgggttttgcagatatca

SEQ ID NO: 33895 - DNA, 25 bp, Homo sapiens
ggcgtctactttagccaatgggtta

SEQ ID NO: 33896 - DNA, 25 bp, Homo sapiens
ctgcgcccaggaaggaaaatgatca

SEQ ID NO: 33897 - DNA, 25 bp, Homo sapiens
atgcacatttaggtaatttatttcc

SEQ ID NO: 33898 - DNA, 25 bp, Homo sapiens
tactgggccagactaaaataatttc

SEQ ID NO: 33899 - DNA, 25 bp, Homo sapiens
gtgacatcacatttgcctgcagaga

SEQ ID NO: 33900 - DNA, 25 bp, Homo sapiens
gtccgggttacgtccaaatttatgt

SEQ ID NO: 33901 - DNA, 25 bp, Homo sapiens
ctcctgaacctgaacttacaagatg

SEQ ID NO: 33902 - DNA, 25 bp, Homo sapiens
ttgatgactttactttttaagatga

SEQ ID NO: 33903 - DNA, 25 bp, Homo sapiens
aggggtcataacctcgtgaactttc

SEQ ID NO: 33904 - DNA, 25 bp, Homo sapiens
agcgttcttcatgggtttgcaaaca

SEQ ID NO: 33905 - DNA, 25 bp, Homo sapiens
gctgtggctccatgaatacggattc

SEQ ID NO: 33906 - DNA, 25 bp, Homo sapiens
tcctgccagagatggacttaatttc

SEQ ID NO: 33907 - DNA, 25 bp, Homo sapiens
gaaagcctgggtttatgaatccaca

SEQ ID NO: 33908 - DNA, 25 bp, Homo sapiens
agccattttgacagccctaaccttg

SEQ ID NO: 33909 - DNA, 25 bp, Homo sapiens
tcgcacgtccagaaggtgattttgc

SEQ ID NO: 33910 - DNA, 25 bp, Homo sapiens
gggctgcttgaagtgtccatgcata

SEQ ID NO: 33911 - DNA, 25 bp, Homo sapiens
gttctgagttcgagtcctgctacca

SEQ ID NO: 33912 - DNA, 25 bp, Homo sapiens
ttgccgtcaaaagcgtcccaggaga

SEQ ID NO: 33913 - DNA, 25 bp, Homo sapiens
caagctgtctgtctttgaaatggtc

SEQ ID NO: 33914 - DNA, 25 bp, Homo sapiens
gaggtgcctttggtgctgaatgtta

SEQ ID NO: 33915 - DNA, 25 bp, Homo sapiens
gctgggacaccattagtttctgata

SEQ ID NO: 33916 - DNA, 25 bp, Homo sapiens
gtgcacacggtctcaattttctctg

SEQ ID NO: 33917 - DNA, 25 bp, Homo sapiens
agtatgttgtagctccactggccta

SEQ ID NO: 33918 - DNA, 25 bp, Homo sapiens
gggagcaggccttcccttgtcaata

SEQ ID NO: 33919 - DNA, 25 bp, Homo sapiens
tgctggtcagcaaaattctcctttc

SEQ ID NO: 33920 - DNA, 25 bp, Homo sapiens
tcaggggcttaagcaactcggtttc

SEQ ID NO: 33921 - DNA, 25 bp, Homo sapiens
cctgatgctgatttggatggaaaca

SEQ ID NO: 33922 - DNA, 25 bp, Homo sapiens
tggggtctttatttcagtgccctta

SEQ ID NO: 33923 - DNA, 25 bp, Homo sapiens
tctcatcatgtgcttgggctccctg

SEQ ID NO: 33924 - DNA, 25 bp, Homo sapiens
tggggtttactcaggtttgtcacta

SEQ ID NO: 33925 - DNA, 25 bp, Homo sapiens
ctcacgcacatctcaggcctttttg

SEQ ID NO: 33926 - DNA, 25 bp, Homo sapiens
gctagtctcgttcagtcattcactg

SEQ ID NO: 33927 - DNA, 25 bp, Homo sapiens
ggggacctcctcacttcatagatta

SEQ ID NO: 33928 - DNA, 25 bp, Homo sapiens
cggggctgtctctaatgtcttatag

SEQ ID NO: 33929 - DNA, 25 bp, Homo sapiens
tcccatggtggaaagtgatctaaca

SEQ ID NO: 33930 - DNA, 25 bp, Homo sapiens
aggtgcatgcagtcggcttttttca

SEQ ID NO: 33931 - DNA, 25 bp, Homo sapiens
gctttggagaaatgccagcctcttc

SEQ ID NO: 33932 - DNA, 25 bp, Homo sapiens
gcatgggcgctcagtttctatacta

SEQ ID NO: 33933 - DNA, 25 bp, Homo sapiens
tggacacccttgtgctggcagatca

SEQ ID NO: 33934 - DNA, 25 bp, Homo sapiens
actgctctcagcacgccgaggagta

SEQ ID NO: 33935 - DNA, 25 bp, Homo sapiens
agcctgcagctctgatcttactgga

SEQ ID NO: 33936 - DNA, 25 bp, Homo sapiens
tcctttgacttgcacgtgggccact

SEQ ID NO: 33937 - DNA, 25 bp, Homo sapiens
ttgccagatgctttgacctaatacg

SEQ ID NO: 33938 - DNA, 25 bp, Homo sapiens
gacgtatgcctccttcagtttctga

SEQ ID NO: 33939 - DNA, 25 bp, Homo sapiens
ggtctgctctcatttccctcatcta

SEQ ID NO: 33940 - DNA, 25 bp, Homo sapiens
ccctgggcttaacctgctgtgtgaa

SEQ ID NO: 33941 - DNA, 25 bp, Homo sapiens
gcaggtggttaagctcagacattga

SEQ ID NO: 33942 - DNA, 25 bp, Homo sapiens
tgcagcgttggccttcgtctttata

SEQ ID NO: 33943 - DNA, 25 bp, Homo sapiens
tggcatcagtgttcctcatcaaagg

SEQ ID NO: 33944 - DNA, 25 bp, Homo sapiens
ttgcctcattgctggagaacacttg

SEQ ID NO: 33945 - DNA, 25 bp, Homo sapiens
tgctgtccaaaggagcatcccaata

SEQ ID NO: 33946 - DNA, 25 bp, Homo sapiens
tgtggccagccctttgagtgtttag

SEQ ID NO: 33947 - DNA, 25 bp, Homo sapiens
cagaggccctttttgccagctggga

SEQ ID NO: 33948 - DNA, 25 bp, Homo sapiens
acagggctgtcccaacttatcggca

SEQ ID NO: 33949 - DNA, 25 bp, Homo sapiens
ccagaataatttagaggaggcctcc

SEQ ID NO: 33950 - DNA, 25 bp, Homo sapiens
ctgggtattccctagctatttcatc

SEQ ID NO: 33951 - DNA, 25 bp, Homo sapiens
accatgggaaaacttactgttagag

SEQ ID NO: 33952 - DNA, 25 bp, Homo sapiens
tgagtctagagtccagccataagtg

SEQ ID NO: 33953 - DNA, 25 bp, Homo sapiens
gatgcctgctcttggtaatcaaaac

SEQ ID NO: 33954 - DNA, 25 bp, Homo sapiens
agggtcttccttacaactatacgtg

SEQ ID NO: 33955 - DNA, 25 bp, Homo sapiens
tcctggggatatgttgaaccaagta

SEQ ID NO: 33956 - DNA, 25 bp, Homo sapiens
aggctgccacccatgatgttttctg

SEQ ID NO: 33957 - DNA, 25 bp, Homo sapiens
tgcggcttctcttgtactctgaata

SEQ ID NO: 33958 - DNA, 25 bp, Homo sapiens
gtgatgttgtccatgcccttgaaga

SEQ ID NO: 33959 - DNA, 25 bp, Homo sapiens
agccgtagttgattcctggtataca

SEQ ID NO: 33960 - DNA, 25 bp, Homo sapiens
taaataaagttttacaaagcgaaat

SEQ ID NO: 33961 - DNA, 25 bp, Homo sapiens
gcccagggtttagctttcccacaga

SEQ ID NO: 33962 - DNA, 25 bp, Homo sapiens
tagggttcccttcttgctcatgctg

SEQ ID NO: 33963 - DNA, 25 bp, Homo sapiens
ccttgttggcttactttggggcttc

SEQ ID NO: 33964 - DNA, 25 bp, Homo sapiens
aggcggagagtatactggatccttt

SEQ ID NO: 33965 - DNA, 25 bp, Homo sapiens
ggttcccagctgagaagatttttga

SEQ ID NO: 33966 - DNA, 25 bp, Homo sapiens
ctgaagttcctgtgcctgaaatggc

SEQ ID NO: 33967 - DNA, 25 bp, Homo sapiens
ccgcatagaacacagaagggcattt

SEQ ID NO: 33968 - DNA, 25 bp, Homo sapiens
gggcagtcttcgcagtgtcatttta

SEQ ID NO: 33969 - DNA, 25 bp, Homo sapiens
tttcgggtcatctgtaagggctcta

SEQ ID NO: 33970 - DNA, 25 bp, Homo sapiens
gaagagctgtctgtcctaccactgc

SEQ ID NO: 33971 - DNA, 25 bp, Homo sapiens
taggaacgtttgagaattgaaaaaa

SEQ ID NO: 33972 - DNA, 25 bp, Homo sapiens
cgtatcagatacacctggtccagtt

SEQ ID NO: 33973 - DNA, 25 bp, Homo sapiens
gacagtatgcttccttcttcaatga

SEQ ID NO: 33974 - DNA, 25 bp, Homo sapiens
gctccctagagtagttcaaaacaga

SEQ ID NO: 33975 - DNA, 25 bp, Homo sapiens
gtcctagctgcaggcacatgtaata

SEQ ID NO: 33976 - DNA, 25 bp, Homo sapiens
agactgtggcatacagacacacttc

SEQ ID NO: 33977 - DNA, 25 bp, Homo sapiens
ctcctgggtccaagctggctaatga

SEQ ID NO: 33978 - DNA, 25 bp, Homo sapiens
gccgctgtgtgcagagccttatctg

SEQ ID NO: 33979 - DNA, 25 bp, Homo sapiens
agcaatggggctaaatctgacttca

SEQ ID NO: 33980 - DNA, 25 bp, Homo sapiens
gtcctaggggaatttagtagcctcc

SEQ ID NO: 33981 - DNA, 25 bp, Homo sapiens
ctggggtttgtgaccgctgaaaatt

SEQ ID NO: 33982 - DNA, 25 bp, Homo sapiens
aggtgctcctgctccattcagattc

SEQ ID NO: 33983 - DNA, 25 bp, Homo sapiens
tgcctcctgtttgcctccagtcatg

SEQ ID NO: 33984 - DNA, 25 bp, Homo sapiens
gggatgtgtccactcacagatcata

SEQ ID NO: 33985 - DNA, 25 bp, Homo sapiens
tggtcctcaggcatccagggataac

SEQ ID NO: 33986 - DNA, 25 bp, Homo sapiens
cgagcttccgtgtctgtgtgattga

SEQ ID NO: 33987 - DNA, 25 bp, Homo sapiens
aatgctttgctcacagtagatactg

SEQ ID NO: 33988 - DNA, 25 bp, Homo sapiens
ctgctcccacataggaagtgtttga

SEQ ID NO: 33989 - DNA, 25 bp, Homo sapiens
cctaaggcagggcttcccaggtata

SEQ ID NO: 33990 - DNA, 25 bp, Homo sapiens
ggccatacgagttccataagcaagc

SEQ ID NO: 33991 - DNA, 25 bp, Homo sapiens
ccttgttagaggactgtggcatgta

SEQ ID NO: 33992 - DNA, 25 bp, Homo sapiens
ggggctctccatagtttgcgtttca

SEQ ID NO: 33993 - DNA, 25 bp, Homo sapiens
cagattcatggacaccgttgggttc

SEQ ID NO: 33994 - DNA, 25 bp, Homo sapiens
ctccaccttggatgcagaggttcta

SEQ ID NO: 33995 - DNA, 25 bp, Homo sapiens
agaggctcccatgtcctgctgaata

SEQ ID NO: 33996 - DNA, 25 bp, Homo sapiens
ggaccttgggtcatgaactttcttt

SEQ ID NO: 33997 - DNA, 25 bp, Homo sapiens
tttttttttctgtagaggttcattt

SEQ ID NO: 33998 - DNA, 25 bp, Homo sapiens
cagcctgctctctgcatgattcttg

SEQ ID NO: 33999 - DNA, 25 bp, Homo sapiens
ccagtggcagcgtcaataagatctc

SEQ ID NO: 34000 - DNA, 25 bp, Homo sapiens
tccgctacctgtgtctcttggagta

SEQ ID NO: 34001 - DNA, 25 bp, Homo sapiens
cacagcagtcttcctcatgggttta

SEQ ID NO: 34002 - DNA, 25 bp, Homo sapiens
cccaacctgggagtcagatggcata

SEQ ID NO: 34003 - DNA, 25 bp, Homo sapiens
gggtcctttcccatctcagttactg

SEQ ID NO: 34004 - DNA, 25 bp, Homo sapiens
ggcgttcccactgcaaaaaagaatg

SEQ ID NO: 34005 - DNA, 25 bp, Homo sapiens
ggcttcccaaggcagtaatatcagg

SEQ ID NO: 34006 - DNA, 25 bp, Homo sapiens
ccagagttcctttgggaggtcagtc

SEQ ID NO: 34007 - DNA, 25 bp, Homo sapiens
ggctgggctccttttcctttcatta

SEQ ID NO: 34008 - DNA, 25 bp, Homo sapiens
tccttggaaggacccgacaattata

SEQ ID NO: 34009 - DNA, 25 bp, Homo sapiens
tgggcccaccatctatgagatttct

SEQ ID NO: 34010 - DNA, 25 bp, Homo sapiens
ttaaagagaatgatctctctccctc

SEQ ID NO: 34011 - DNA, 25 bp, Homo sapiens
tcctccatcttcgtgtttgattttt

SEQ ID NO: 34012 - DNA, 25 bp, Homo sapiens
tcctaggtacagtgcctcatgatga

SEQ ID NO: 34013 - DNA, 25 bp, Homo sapiens
tagagcctgattgttgggccaaaga

SEQ ID NO: 34014 - DNA, 25 bp, Homo sapiens
gccaagctttgggactacatgcagg

SEQ ID NO: 34015 - DNA, 25 bp, Homo sapiens
cctcttggaatggtagtctggcaca

SEQ ID NO: 34016 - DNA, 25 bp, Homo sapiens
gttggcccatctttactgttctcta

SEQ ID NO: 34017 - DNA, 25 bp, Homo sapiens
tgcttcccatcaccaaaggatattg

SEQ ID NO: 34018 - DNA, 25 bp, Homo sapiens
ggccatccagtgtaccaaagacatt

SEQ ID NO: 34019 - DNA, 25 bp, Homo sapiens
ggccaggacctttgatcatgattta

SEQ ID NO: 34020 - DNA, 25 bp, Homo sapiens
tgctgacatacaggccaagagtttg

SEQ ID NO: 34021 - DNA, 25 bp, Homo sapiens
tggacacgtgctcttaccagtcttg

SEQ ID NO: 34022 - DNA, 25 bp, Homo sapiens
gtcgccattggggacaaaaacatta

SEQ ID NO: 34023 - DNA, 25 bp, Homo sapiens
gttgactcatgacccaaagttcttg

SEQ ID NO: 34024 - DNA, 25 bp, Homo sapiens
agacatctggtcttacacgttgttc

SEQ ID NO: 34025 - DNA, 25 bp, Homo sapiens
ttacatcaagccagtggttcaaaat

SEQ ID NO: 34026 - DNA, 25 bp, Homo sapiens
tctgtaaacagggaagcatatcatt

SEQ ID NO: 34027 - DNA, 25 bp, Homo sapiens
gcatgaaaataatttttttcatgcc

SEQ ID NO: 34028 - DNA, 25 bp, Homo sapiens
ccaaatgtttttggagtgcttcctc

SEQ ID NO: 34029 - DNA, 25 bp, Homo sapiens
gagattccagttacccaagaagtga

SEQ ID NO: 34030 - DNA, 25 bp, Homo sapiens
acggcatgccttatttggatactga

SEQ ID NO: 34031 - DNA, 25 bp, Homo sapiens
gcaccctgtctgtggctggtaaaca

SEQ ID NO: 34032 - DNA, 25 bp, Homo sapiens
gggccagtgactacaccttaaaata

SEQ ID NO: 34033 - DNA, 25 bp, Homo sapiens
cctgtggggcacttaacgcagatta

SEQ ID NO: 34034 - DNA, 25 bp, Homo sapiens
acaggggtcccacatgttctactga

SEQ ID NO: 34035 - DNA, 25 bp, Homo sapiens
attaggactcctttcccaggtgaca

SEQ ID NO: 34036 - DNA, 25 bp, Homo sapiens
tgactccttttctgtcactttcaga

SEQ ID NO: 34037 - DNA, 25 bp, Homo sapiens
atgggcaccacagagactgagcttc

SEQ ID NO: 34038 - DNA, 25 bp, Homo sapiens
ggtgccaccctcattttgctgctca

SEQ ID NO: 34039 - DNA, 25 bp, Homo sapiens
ggggaattcccagctacttactagt

SEQ ID NO: 34040 - DNA, 25 bp, Homo sapiens
tgccagcagtaacttgcaaagatac

SEQ ID NO: 34041 - DNA, 25 bp, Homo sapiens
agacgccttttgagacctcttcaga

SEQ ID NO: 34042 - DNA, 25 bp, Homo sapiens
ccatcaggactaaagacgtagggtc

SEQ ID NO: 34043 - DNA, 25 bp, Homo sapiens
cgactcttgaagaacccgtgatgga

SEQ ID NO: 34044 - DNA, 25 bp, Homo sapiens
agggcatccacctctttaggcaaaa

SEQ ID NO: 34045 - DNA, 25 bp, Homo sapiens
tccgctctgcaaatcgaaggctttc

SEQ ID NO: 34046 - DNA, 25 bp, Homo sapiens
gggcacgcgaacctttcatttctta

SEQ ID NO: 34047 - DNA, 25 bp, Homo sapiens
cccgaggccgaaagtcattgtcata

SEQ ID NO: 34048 - DNA, 25 bp, Homo sapiens
ttactctttggagaggccagccttc

SEQ ID NO: 34049 - DNA, 25 bp, Homo sapiens
tgctctgacccagtatcccagttgg

SEQ ID NO: 34050 - DNA, 25 bp, Homo sapiens
ggccagaggcctggagctttatatg

SEQ ID NO: 34051 - DNA, 25 bp, Homo sapiens
cggttcgcaagaccaaagatttttc

SEQ ID NO: 34052 - DNA, 25 bp, Homo sapiens
caagcaagtgaatcatcactcatgc

SEQ ID NO: 34053 - DNA, 25 bp, Homo sapiens
gggacctctgctgtttcctggatga

SEQ ID NO: 34054 - DNA, 25 bp, Homo sapiens
ggagcccggagcatcttcagaaaca

SEQ ID NO: 34055 - DNA, 25 bp, Homo sapiens
aggcagtgctaaacctgagctttta

SEQ ID NO: 34056 - DNA, 25 bp, Homo sapiens
cctcatagcttattgcctggataca

SEQ ID NO: 34057 - DNA, 25 bp, Homo sapiens
taggcattcaggcatttgtccattc

SEQ ID NO: 34058 - DNA, 25 bp, Homo sapiens
gcaggctgtttctcccaatgaactc

SEQ ID NO: 34059 - DNA, 25 bp, Homo sapiens
tgccggcaatgctaatgggtatttc

SEQ ID NO: 34060 - DNA, 25 bp, Homo sapiens
gtctggcatcctgtcacataagcta

SEQ ID NO: 34061 - DNA, 25 bp, Homo sapiens
ccttaggctctacgacttacttttg

SEQ ID NO: 34062 - DNA, 25 bp, Homo sapiens
gtgccgttcaagtgtttccaataga

SEQ ID NO: 34063 - DNA, 25 bp, Homo sapiens
ccctgatctaggctgtatgtagcta

SEQ ID NO: 34064 - DNA, 25 bp, Homo sapiens
gcctgggctgttgaaccactcttga

SEQ ID NO: 34065 - DNA, 25 bp, Homo sapiens
gccagagtctgcacagccaggtata

SEQ ID NO: 34066 - DNA, 25 bp, Homo sapiens
cctggacttctgacatggagcaatg

SEQ ID NO: 34067 - DNA, 25 bp, Homo sapiens
ggcaccaggctcttcgtatgtttta

SEQ ID NO: 34068 - DNA, 25 bp, Homo sapiens
tcaaggccagattacctagggaatg

SEQ ID NO: 34069 - DNA, 25 bp, Homo sapiens
accctttggcttgtctagtgcagta

SEQ ID NO: 34070 - DNA, 25 bp, Homo sapiens
gaggtcacatgtctgctttcaattc

SEQ ID NO: 34071 - DNA, 25 bp, Homo sapiens
cccagggtctggtctaactcaagca

SEQ ID NO: 34072 - DNA, 25 bp, Homo sapiens
tccaggcatgccacttgagcttata

SEQ ID NO: 34073 - DNA, 25 bp, Homo sapiens
gcatggacttacagtgcaaacttcc

SEQ ID NO: 34074 - DNA, 25 bp, Homo sapiens
ctggctgcttgcttctgagtacttg

SEQ ID NO: 34075 - DNA, 25 bp, Homo sapiens
ctctagtcttggttagggctccata

SEQ ID NO: 34076 - DNA, 25 bp, Homo sapiens
ccaagatatggcagcagacgtgttc

SEQ ID NO: 34077 - DNA, 25 bp, Homo sapiens
ttctctttgaacttcatcacttttt

SEQ ID NO: 34078 - DNA, 25 bp, Homo sapiens
ctgtggtcatggagaactatttgcc

SEQ ID NO: 34079 - DNA, 25 bp, Homo sapiens
gctcctgctgaggtttggcgacata

SEQ ID NO: 34080 - DNA, 25 bp, Homo sapiens
acacttccttttcctgggcgcctta

SEQ ID NO: 34081 - DNA, 25 bp, Homo sapiens
cgtgcatatatttgtcagtacaggc

SEQ ID NO: 34082 - DNA, 25 bp, Homo sapiens
ttggcccactggattggacaacatg

SEQ ID NO: 34083 - DNA, 25 bp, Homo sapiens
ggaatattccctgttagacccactg

SEQ ID NO: 34084 - DNA, 25 bp, Homo sapiens
tgcaacctgatatgcttagcctgta

SEQ ID NO: 34085 - DNA, 25 bp, Homo sapiens
attttgaatggatgagagggtggat

SEQ ID NO: 34086 - DNA, 25 bp, Homo sapiens
tttcgggctacgtagatggcatgtc

SEQ ID NO: 34087 - DNA, 25 bp, Homo sapiens
tccctcattgggcatcagagaataa

SEQ ID NO: 34088 - DNA, 25 bp, Homo sapiens
ggacctagtccctttggcaattttg

SEQ ID NO: 34089 - DNA, 25 bp, Homo sapiens
agcccagcatattcagtagtctttg

SEQ ID NO: 34090 - DNA, 25 bp, Homo sapiens
tctgactctgtaggatctgatgata

SEQ ID NO: 34091 - DNA, 25 bp, Homo sapiens
gacgggtctctctataatgttatca

SEQ ID NO: 34092 - DNA, 25 bp, Homo sapiens
acgggtcacattggatcactcacta

SEQ ID NO: 34093 - DNA, 25 bp, Homo sapiens
caagggctgggttgtttctcaagca

SEQ ID NO: 34094 - DNA, 25 bp, Homo sapiens
ccatgtagctataagcctgcgtata

SEQ ID NO: 34095 - DNA, 25 bp, Homo sapiens
tcctgctggagggaaagccaccaac

SEQ ID NO: 34096 - DNA, 25 bp, Homo sapiens
cccttccctgtaagaatgatgattc

SEQ ID NO: 34097 - DNA, 25 bp, Homo sapiens
tatgggatgcctattcggaatggtc

SEQ ID NO: 34098 - DNA, 25 bp, Homo sapiens
gggcccagtctacataaaaccagtc

SEQ ID NO: 34099 - DNA, 25 bp, Homo sapiens
ttccagatccttccagtggcagtta

SEQ ID NO: 34100 - DNA, 25 bp, Homo sapiens
aattagcttaggtttgaacatctta

SEQ ID NO: 34101 - DNA, 25 bp, Homo sapiens
gggccaatcttttgctggtactata

SEQ ID NO: 34102 - DNA, 25 bp, Homo sapiens
cttccgacaaggcagaggctcaaca

SEQ ID NO: 34103 - DNA, 25 bp, Homo sapiens
ccaggccctgccatagctatattta

SEQ ID NO: 34104 - DNA, 25 bp, Homo sapiens
agacctttcttaaggcagccctgtg

SEQ ID NO: 34105 - DNA, 25 bp, Homo sapiens
gtttccctggctgtatcatcaacta

SEQ ID NO: 34106 - DNA, 25 bp, Homo sapiens
gctgctttagagatttttgtctaga

SEQ ID NO: 34107 - DNA, 25 bp, Homo sapiens
tcggagggttcccagcagtttctct

SEQ ID NO: 34108 - DNA, 25 bp, Homo sapiens
cccagagtgatttgttggctgctaa

SEQ ID NO: 34109 - DNA, 25 bp, Homo sapiens
tcctggttggaattgactacacatc

SEQ ID NO: 34110 - DNA, 25 bp, Homo sapiens
actctccatggctcagtgtatgata

SEQ ID NO: 34111 - DNA, 25 bp, Homo sapiens
gggtcccacagcaaacctgcaggta

SEQ ID NO: 34112 - DNA, 25 bp, Homo sapiens
tatgactttttcctgcagcgattgc

SEQ ID NO: 34113 - DNA, 25 bp, Homo sapiens
tgctgtccctgaaacaccattggtc

SEQ ID NO: 34114 - DNA, 25 bp, Homo sapiens
aggtagtttataagcccaggtgttc

SEQ ID NO: 34115 - DNA, 25 bp, Homo sapiens
agtctcctgtggctgtgcaattacc

SEQ ID NO: 34116 - DNA, 25 bp, Homo sapiens
gtgacctttcttgggcactgtgaca

SEQ ID NO: 34117 - DNA, 25 bp, Homo sapiens
tgacgtagacacttgagcagccttc

SEQ ID NO: 34118 - DNA, 25 bp, Homo sapiens
tgacctgtgatgctagactttgctc

SEQ ID NO: 34119 - DNA, 25 bp, Homo sapiens
cccataatcttcttcctccaaaaaa

SEQ ID NO: 34120 - DNA, 25 bp, Homo sapiens
tggggcgccaacatagctcgagcat

SEQ ID NO: 34121 - DNA, 25 bp, Homo sapiens
taaggctttcacatatatatcagga

SEQ ID NO: 34122 - DNA, 25 bp, Homo sapiens
ctcaggctcacattcagttgtcgta

SEQ ID NO: 34123 - DNA, 25 bp, Homo sapiens
taggcagtttatgcagtccaccatg

SEQ ID NO: 34124 - DNA, 25 bp, Homo sapiens
taggaggtctccgttgctgaacaac

SEQ ID NO: 34125 - DNA, 25 bp, Homo sapiens
aaaaggcctttttctgactgactgc

SEQ ID NO: 34126 - DNA, 25 bp, Homo sapiens
cccaacccttgtagatcattcatga

SEQ ID NO: 34127 - DNA, 25 bp, Homo sapiens
cctgctggccttgaatgaatgtatc

SEQ ID NO: 34128 - DNA, 25 bp, Homo sapiens
gggctagcctcatgatgtttcctca

SEQ ID NO: 34129 - DNA, 25 bp, Homo sapiens
actgctttgagctgctgggactctc

SEQ ID NO: 34130 - DNA, 25 bp, Homo sapiens
tgctggcctagagctcaggacatta

SEQ ID NO: 34131 - DNA, 25 bp, Homo sapiens
ccctctcttctggtctgtgtctgta

SEQ ID NO: 34132 - DNA, 25 bp, Homo sapiens
tgcacttgtgctggcctagcatcta

SEQ ID NO: 34133 - DNA, 25 bp, Homo sapiens
tgttggagccaccagaaatcctaga

SEQ ID NO: 34134 - DNA, 25 bp, Homo sapiens
acattctttgtggaatgcatattag

SEQ ID NO: 34135 - DNA, 25 bp, Homo sapiens
atgcatttcatctcctggggccctg

SEQ ID NO: 34136 - DNA, 25 bp, Homo sapiens
cacgctggcagtaaagtatgatatc

SEQ ID NO: 34137 - DNA, 25 bp, Homo sapiens
tggcactttcctctatacagttatc

SEQ ID NO: 34138 - DNA, 25 bp, Homo sapiens
caggcacattctgagatgcagtata

SEQ ID NO: 34139 - DNA, 25 bp, Homo sapiens
taggtcccgttagctgtctaccaga

SEQ ID NO: 34140 - DNA, 25 bp, Homo sapiens
ctgaccttgatctaggaatggcttc

SEQ ID NO: 34141 - DNA, 25 bp, Homo sapiens
tggcaagtgcttggctcctacaaaa

SEQ ID NO: 34142 - DNA, 25 bp, Homo sapiens
acacctgggttgtacatctggggca

SEQ ID NO: 34143 - DNA, 25 bp, Homo sapiens
tctgttgcaggggaaagccttttcc

SEQ ID NO: 34144 - DNA, 25 bp, Homo sapiens
ttcagggctcagctaaatttgagtc

SEQ ID NO: 34145 - DNA, 25 bp, Homo sapiens
ctggagcccagacgtcttttgtttc

SEQ ID NO: 34146 - DNA, 25 bp, Homo sapiens
gcatgctgctgcctgactttcaaga

SEQ ID NO: 34147 - DNA, 25 bp, Homo sapiens
gctaaggcaggaagcagacatttta

SEQ ID NO: 34148 - DNA, 25 bp, Homo sapiens
ttccgtctctgtagccagtctagtg

SEQ ID NO: 34149 - DNA, 25 bp, Homo sapiens
gttcgtcatctcaggtaaagccaga

SEQ ID NO: 34150 - DNA, 25 bp, Homo sapiens
gggttcacctactgctcactctcta

SEQ ID NO: 34151 - DNA, 25 bp, Homo sapiens
ctcacaggcagcaggattaggtttc

SEQ ID NO: 34152 - DNA, 25 bp, Homo sapiens
gtagcctcatgcaattaacgaccca

SEQ ID NO: 34153 - DNA, 25 bp, Homo sapiens
ggctccttgcagtctccctacattg

SEQ ID NO: 34154 - DNA, 25 bp, Homo sapiens
gaggtctggacccattcagtgtaca

SEQ ID NO: 34155 - DNA, 25 bp, Homo sapiens
gcttcacagaccctagttggcatta

SEQ ID NO: 34156 - DNA, 25 bp, Homo sapiens
ctggtactcagtcctgtcaattgca

SEQ ID NO: 34157 - DNA, 25 bp, Homo sapiens
gtctcaatgcctcaacctgtttatt

SEQ ID NO: 34158 - DNA, 25 bp, Homo sapiens
gggccctttgtataatcagtatgta

SEQ ID NO: 34159 - DNA, 25 bp, Homo sapiens
ggggcttccctctctttttccaggc

SEQ ID NO: 34160 - DNA, 25 bp, Homo sapiens
tgcctgccatttgagcatacccatg

SEQ ID NO: 34161 - DNA, 25 bp, Homo sapiens
ggactgacccttacaggctgattta

SEQ ID NO: 34162 - DNA, 25 bp, Homo sapiens
tgaggacccacacaaaggaactttg

SEQ ID NO: 34163 - DNA, 25 bp, Homo sapiens
aaggctgtctctcctgtcttgcaaa

SEQ ID NO: 34164 - DNA, 25 bp, Homo sapiens
ggcctgtgacactctgcgtgacttt

SEQ ID NO: 34165 - DNA, 25 bp, Homo sapiens
tgtagtcctagatctgccgtcatga

SEQ ID NO: 34166 - DNA, 25 bp, Homo sapiens
ttgggcaccacacacaaagtgacta

SEQ ID NO: 34167 - DNA, 25 bp, Homo sapiens
agaactcagttgcagagatattgaa

SEQ ID NO: 34168 - DNA, 25 bp, Homo sapiens
tggtgatgctccctatagctatgta

SEQ ID NO: 34169 - DNA, 25 bp, Homo sapiens
ttctcagagcccataagattttgtg

SEQ ID NO: 34170 - DNA, 25 bp, Homo sapiens
acttcaaggtcagcaggaattttcc

SEQ ID NO: 34171 - DNA, 25 bp, Homo sapiens
cccttcctgtggtgagtatgcattt

SEQ ID NO: 34172 - DNA, 25 bp, Homo sapiens
tgctcagctttctaaggttcaaggc

SEQ ID NO: 34173 - DNA, 25 bp, Homo sapiens
gccatctgttgtttcatagccagta

SEQ ID NO: 34174 - DNA, 25 bp, Homo sapiens
ctgtcctgggagcacagaactttca

SEQ ID NO: 34175 - DNA, 25 bp, Homo sapiens
gcccttttgatatggactgctgccc

SEQ ID NO: 34176 - DNA, 25 bp, Homo sapiens
cccaccactggttgaatctgacatc

SEQ ID NO: 34177 - DNA, 25 bp, Homo sapiens
agattcctgtctcaagctgctgtca

SEQ ID NO: 34178 - DNA, 25 bp, Homo sapiens
aactgtcatctcttttgggtaggca

SEQ ID NO: 34179 - DNA, 25 bp, Homo sapiens
catggccactatagtcttccagata

SEQ ID NO: 34180 - DNA, 25 bp, Homo sapiens
tcctgctttgaaaatgggcctgaga

SEQ ID NO: 34181 - DNA, 25 bp, Homo sapiens
tgtgttccagtacccaaaaggcttc

SEQ ID NO: 34182 - DNA, 25 bp, Homo sapiens
tcccagcccatatttgcagtgaatg

SEQ ID NO: 34183 - DNA, 25 bp, Homo sapiens
ttaggggctccaaacacttaggtgc

SEQ ID NO: 34184 - DNA, 25 bp, Homo sapiens
gctgtgtacctttcactgcacctga

SEQ ID NO: 34185 - DNA, 25 bp, Homo sapiens
gccctgttctaagtgtgcgtgattt

SEQ ID NO: 34186 - DNA, 25 bp, Homo sapiens
agtggcactttttccaggatgttta

SEQ ID NO: 34187 - DNA, 25 bp, Homo sapiens
cctaaggcccttgactgaaaacatc

SEQ ID NO: 34188 - DNA, 25 bp, Homo sapiens
ggtaccagttgcagctactcctata

SEQ ID NO: 34189 - DNA, 25 bp, Homo sapiens
ccatggtgtgtactgtgtcctgcaa

SEQ ID NO: 34190 - DNA, 25 bp, Homo sapiens
cagtggctcccttaatccgttcata

SEQ ID NO: 34191 - DNA, 25 bp, Homo sapiens
acccggaactgcctgctgtcatata

SEQ ID NO: 34192 - DNA, 25 bp, Homo sapiens
ggccacgctgctgattaaacatatt

SEQ ID NO: 34193 - DNA, 25 bp, Homo sapiens
agctgtcctcctcctctgtggttca

SEQ ID NO: 34194 - DNA, 25 bp, Homo sapiens
gttggtgccttctgtatcctttaca

SEQ ID NO: 34195 - DNA, 25 bp, Homo sapiens
ggggttactctacctcactggattc

SEQ ID NO: 34196 - DNA, 25 bp, Homo sapiens
agggaccacatgttatctcatattg

SEQ ID NO: 34197 - DNA, 25 bp, Homo sapiens
taacagtgttctccatgggcccagc

SEQ ID NO: 34198 - DNA, 25 bp, Homo sapiens
ccaaggcaggtgtgtcttaatgtca

SEQ ID NO: 34199 - DNA, 25 bp, Homo sapiens
ttgagccctaaatagccacttgtga

SEQ ID NO: 34200 - DNA, 25 bp, Homo sapiens
cctctgcgtagtattggggtctgaa

SEQ ID NO: 34201 - DNA, 25 bp, Homo sapiens
gtcatcccaaaacctgctctgagtt

SEQ ID NO: 34202 - DNA, 25 bp, Homo sapiens
gcctcggggaacttactactggtta

SEQ ID NO: 34203 - DNA, 25 bp, Homo sapiens
gctagcattggccattcatttaatc

SEQ ID NO: 34204 - DNA, 25 bp, Homo sapiens
ccatttagcttttttagtctcccag

SEQ ID NO: 34205 - DNA, 25 bp, Homo sapiens
cgctccgtgtcctacttgtgctttc

SEQ ID NO: 34206 - DNA, 25 bp, Homo sapiens
ccttcttacggcatgggagatttcc

SEQ ID NO: 34207 - DNA, 25 bp, Homo sapiens
accaggcccacagttagtatcttta

SEQ ID NO: 34208 - DNA, 25 bp, Homo sapiens
ctgcctgccgaggagtctgtacata

SEQ ID NO: 34209 - DNA, 25 bp, Homo sapiens
atcctgtgggcaacatgtcctcata

SEQ ID NO: 34210 - DNA, 25 bp, Homo sapiens
aaagtatctgccttgccctgtaata

SEQ ID NO: 34211 - DNA, 25 bp, Homo sapiens
tcctgaggactaaaggctatgactc

SEQ ID NO: 34212 - DNA, 25 bp, Homo sapiens
ggctggcccagaacacacttttcta

SEQ ID NO: 34213 - DNA, 25 bp, Homo sapiens
tcactggtgccaatttaataggttc

SEQ ID NO: 34214 - DNA, 25 bp, Homo sapiens
tccctagctacaggtgcatgttaca

SEQ ID NO: 34215 - DNA, 25 bp, Homo sapiens
gtccatggctcccaaagctagtttg

SEQ ID NO: 34216 - DNA, 25 bp, Homo sapiens
cccacaggggattgggtctgttcta

SEQ ID NO: 34217 - DNA, 25 bp, Homo sapiens
gtggcctgcacatgtcaaattaatc

SEQ ID NO: 34218 - DNA, 25 bp, Homo sapiens
gtcgcttgttcgctgtagtctagta

SEQ ID NO: 34219 - DNA, 25 bp, Homo sapiens
cagaagattttgctccctcaggata

SEQ ID NO: 34220 - DNA, 25 bp, Homo sapiens
tttattagaaaactggggacccttg

SEQ ID NO: 34221 - DNA, 25 bp, Homo sapiens
gagccagtgcttctctttgatacta

SEQ ID NO: 34222 - DNA, 25 bp, Homo sapiens
gctttcagttgttgacccaaactca

SEQ ID NO: 34223 - DNA, 25 bp, Homo sapiens
gaggtcattctccagtgtttgtcca

SEQ ID NO: 34224 - DNA, 25 bp, Homo sapiens
ggctcttgtaaattccctgaggaca

SEQ ID NO: 34225 - DNA, 25 bp, Homo sapiens
gtggcccagcttctaacatattgta

SEQ ID NO: 34226 - DNA, 25 bp, Homo sapiens
ccctcaagctgatattctgtgtctc

SEQ ID NO: 34227 - DNA, 25 bp, Homo sapiens
ggcctgtgaccgaatgctacgtttt

SEQ ID NO: 34228 - DNA, 25 bp, Homo sapiens
gacgtgtcctaatgctcctatgtga

SEQ ID NO: 34229 - DNA, 25 bp, Homo sapiens
ttcctggaaaggatctgcctacctc

SEQ ID NO: 34230 - DNA, 25 bp, Homo sapiens
ctccatgggccagcagttatgatga

SEQ ID NO: 34231 - DNA, 25 bp, Homo sapiens
gtgtgcgtgtatacatgggtcattg

SEQ ID NO: 34232 - DNA, 25 bp, Homo sapiens
ctgtgatcacaggtcccgttatata

SEQ ID NO: 34233 - DNA, 25 bp, Homo sapiens
cggtcatgccacagaaggagaagta

SEQ ID NO: 34234 - DNA, 25 bp, Homo sapiens
cccacggagaagtatgcccaggata

SEQ ID NO: 34235 - DNA, 25 bp, Homo sapiens
gtgtccctcctcttgcattgctctg

SEQ ID NO: 34236 - DNA, 25 bp, Homo sapiens
ttagcgaccaacacccacgtaagta

SEQ ID NO: 34237 - DNA, 25 bp, Homo sapiens
caacctatacttttaaattagagtt

SEQ ID NO: 34238 - DNA, 25 bp, Homo sapiens
ctcacccatgttcggacccagatta

SEQ ID NO: 34239 - DNA, 25 bp, Homo sapiens
gctttagcagaattcagtgggccca

SEQ ID NO: 34240 - DNA, 25 bp, Homo sapiens
ttgcaaatgcgctgggaaatatcta

SEQ ID NO: 34241 - DNA, 25 bp, Homo sapiens
gcttggggccctcttgtattttacc

SEQ ID NO: 34242 - DNA, 25 bp, Homo sapiens
gggagactttcttccacttggctga

SEQ ID NO: 34243 - DNA, 25 bp, Homo sapiens
gagagctccattagtacttccattg

SEQ ID NO: 34244 - DNA, 25 bp, Homo sapiens
tcctgctgctgttgaatcttcctga

SEQ ID NO: 34245 - DNA, 25 bp, Homo sapiens
tgcggctgatatagacctccacaca

SEQ ID NO: 34246 - DNA, 25 bp, Homo sapiens
tccaagtattttgctagggcttacc

SEQ ID NO: 34247 - DNA, 25 bp, Homo sapiens
gcggcctacgtatttcaccctgata

SEQ ID NO: 34248 - DNA, 25 bp, Homo sapiens
agaggcttgttcctgcccaatttta

SEQ ID NO: 34249 - DNA, 25 bp, Homo sapiens
catttgggaagggtgagctcattta

SEQ ID NO: 34250 - DNA, 25 bp, Homo sapiens
tcatggttcagtgggggctcttgtc

SEQ ID NO: 34251 - DNA, 25 bp, Homo sapiens
ttagaacaatttatatagagagagg

SEQ ID NO: 34252 - DNA, 25 bp, Homo sapiens
ttcagccctggctaatgtgacagtg

SEQ ID NO: 34253 - DNA, 25 bp, Homo sapiens
tttgattttgaatttggacctttta

SEQ ID NO: 34254 - DNA, 25 bp, Homo sapiens
taggatctggggacatacatctaag

SEQ ID NO: 34255 - DNA, 25 bp, Homo sapiens
ggtcctggtccaaaaagctgtggtc

SEQ ID NO: 34256 - DNA, 25 bp, Homo sapiens
ggggtgtcttcaggccaccatttta

SEQ ID NO: 34257 - DNA, 25 bp, Homo sapiens
ggggctgaggtccaaatacaacatt

SEQ ID NO: 34258 - DNA, 25 bp, Homo sapiens
tcccaacatgaagtgagtgctgctc

SEQ ID NO: 34259 - DNA, 25 bp, Homo sapiens
cagctaatgcagatccctcctttgg

SEQ ID NO: 34260 - DNA, 25 bp, Homo sapiens
ggaaaatttctttttattggtaata

SEQ ID NO: 34261 - DNA, 25 bp, Homo sapiens
ggaagcagggcactttatttatatc

SEQ ID NO: 34262 - DNA, 25 bp, Homo sapiens
cccttgatttctgtgtgccaaagtt

SEQ ID NO: 34263 - DNA, 25 bp, Homo sapiens
tgcaatgtactggagctctagcctg

SEQ ID NO: 34264 - DNA, 25 bp, Homo sapiens
cccaggtgggtgtcaaaactcctta

SEQ ID NO: 34265 - DNA, 25 bp, Homo sapiens
tgtgagacttatgagccactgtttg

SEQ ID NO: 34266 - DNA, 25 bp, Homo sapiens
ttgggtccagatacttgtcttaggc

SEQ ID NO: 34267 - DNA, 25 bp, Homo sapiens
tctggtgtcagtttccacgcgatta

SEQ ID NO: 34268 - DNA, 25 bp, Homo sapiens
ttctccaagtggaaagcaggaattc

SEQ ID NO: 34269 - DNA, 25 bp, Homo sapiens
accaggtgcttctcatgctgaatta

SEQ ID NO: 34270 - DNA, 25 bp, Homo sapiens
agtgaagactctatatccctgttga

SEQ ID NO: 34271 - DNA, 25 bp, Homo sapiens
cgccagctgtcctgaggatcaattt

SEQ ID NO: 34272 - DNA, 25 bp, Homo sapiens
tgcccttaggtacagccatcttcta

SEQ ID NO: 34273 - DNA, 25 bp, Homo sapiens
gcttcacagctaattggtcagtaaa

SEQ ID NO: 34274 - DNA, 25 bp, Homo sapiens
gacacttctgtttgctgctctccaa

SEQ ID NO: 34275 - DNA, 25 bp, Homo sapiens
acgcactgggatatcacttctgagc

SEQ ID NO: 34276 - DNA, 25 bp, Homo sapiens
gctgatgcctcctaccctttttgta

SEQ ID NO: 34277 - DNA, 25 bp, Homo sapiens
cctggctgcccattaagtcaacgtc

SEQ ID NO: 34278 - DNA, 25 bp, Homo sapiens
tacctgctggccacacttgcttctg

SEQ ID NO: 34279 - DNA, 25 bp, Homo sapiens
gtgtgcgcccttaacatatcttaga

SEQ ID NO: 34280 - DNA, 25 bp, Homo sapiens
tttgacctcaacacatggcactggg

SEQ ID NO: 34281 - DNA, 25 bp, Homo sapiens
tttgggcattgactcttacggttta

SEQ ID NO: 34282 - DNA, 25 bp, Homo sapiens
acagtgactaatccaacttgtacta

SEQ ID NO: 34283 - DNA, 25 bp, Homo sapiens
gactaatttgatacataatgcacta

SEQ ID NO: 34284 - DNA, 25 bp, Homo sapiens
ccctttaggtactatgcgggtgaca

SEQ ID NO: 34285 - DNA, 25 bp, Homo sapiens
caagattatagctgatgagtcatta

SEQ ID NO: 34286 - DNA, 25 bp, Homo sapiens
ctgggtgaactgcaaccacatttta

SEQ ID NO: 34287 - DNA, 25 bp, Homo sapiens
tttgggcctctcagtgacactttta

SEQ ID NO: 34288 - DNA, 25 bp, Homo sapiens
cccagggaagtgtgatttcaggttc

SEQ ID NO: 34289 - DNA, 25 bp, Homo sapiens
gctggcactgaccaaaagctcatca

SEQ ID NO: 34290 - DNA, 25 bp, Homo sapiens
gtgaattagtctgttcttgcactgc

SEQ ID NO: 34291 - DNA, 25 bp, Homo sapiens
ggcccacttggatactccctgtgta

SEQ ID NO: 34292 - DNA, 25 bp, Homo sapiens
ccaaccttggctatgcatgttcttc

SEQ ID NO: 34293 - DNA, 25 bp, Homo sapiens
cacagaggcacatgggcttttcttc

SEQ ID NO: 34294 - DNA, 25 bp, Homo sapiens
tgttgccagcatccactcttccagg

SEQ ID NO: 34295 - DNA, 25 bp, Homo sapiens
cttggcactactgagttggactatc

SEQ ID NO: 34296 - DNA, 25 bp, Homo sapiens
atagggtcctcaatgctccagatca

SEQ ID NO: 34297 - DNA, 25 bp, Homo sapiens
gcaaaagtgacaattaacttagtaa

SEQ ID NO: 34298 - DNA, 25 bp, Homo sapiens
atacttggaatttgtctcaattttg

SEQ ID NO: 34299 - DNA, 25 bp, Homo sapiens
cttggggacctcttgggcttacaaa

SEQ ID NO: 34300 - DNA, 25 bp, Homo sapiens
ctgaccaccttttgaggagctgaca

SEQ ID NO: 34301 - DNA, 25 bp, Homo sapiens
ggaggacaactctatcactttggta

SEQ ID NO: 34302 - DNA, 25 bp, Homo sapiens
cccagtagagccgtcttgaaatata

SEQ ID NO: 34303 - DNA, 25 bp, Homo sapiens
ttttcctggaagcacagccagtaca

SEQ ID NO: 34304 - DNA, 25 bp, Homo sapiens
ggactccagaacatgccacaaagtt

SEQ ID NO: 34305 - DNA, 25 bp, Homo sapiens
ttaaatagaaagataagaaaaagtc

SEQ ID NO: 34306 - DNA, 25 bp, Homo sapiens
atctatatctatctatctgtgtata

SEQ ID NO: 34307 - DNA, 25 bp, Homo sapiens
acctctctggggagtgggcataaaa

SEQ ID NO: 34308 - DNA, 25 bp, Homo sapiens
ccactaggttggtttctggcattaa

SEQ ID NO: 34309 - DNA, 25 bp, Homo sapiens
ctgttactaacagcaaggccctaga

SEQ ID NO: 34310 - DNA, 25 bp, Homo sapiens
cttcaggttagcatagaggcctctc

SEQ ID NO: 34311 - DNA, 25 bp, Homo sapiens
tttggccaccctcaggcaatgatta

SEQ ID NO: 34312 - DNA, 25 bp, Homo sapiens
ggggtctcatctagttgccttttaa

SEQ ID NO: 34313 - DNA, 25 bp, Homo sapiens
ccctgcagctgtttggcctttgtca

SEQ ID NO: 34314 - DNA, 25 bp, Homo sapiens
tcggcatctgcctcggaagatattc

SEQ ID NO: 34315 - DNA, 25 bp, Homo sapiens
agcacctctgctaggctatttttta

SEQ ID NO: 34316 - DNA, 25 bp, Homo sapiens
ggaagcaactttagtctcccaatag

SEQ ID NO: 34317 - DNA, 25 bp, Homo sapiens
ccatcacggtgcttggtctcatgta

SEQ ID NO: 34318 - DNA, 25 bp, Homo sapiens
atccgggcttcttttcatgtatcta

SEQ ID NO: 34319 - DNA, 25 bp, Homo sapiens
cccagtggcaacaaacctcagattg

SEQ ID NO: 34320 - DNA, 25 bp, Homo sapiens
agccatgctgacctctctctgagga

SEQ ID NO: 34321 - DNA, 25 bp, Homo sapiens
ctgtctggcgctgttactacatttc

SEQ ID NO: 34322 - DNA, 25 bp, Homo sapiens
ccaggcagggctttatagaggacta

SEQ ID NO: 34323 - DNA, 25 bp, Homo sapiens
actgtggcacacctagctgagatca

SEQ ID NO: 34324 - DNA, 25 bp, Homo sapiens
aaccctcatggtcatcctggagaca

SEQ ID NO: 34325 - DNA, 25 bp, Homo sapiens
atgcctgtcctgctgtgtacttgtg

SEQ ID NO: 34326 - DNA, 25 bp, Homo sapiens
gtttggtttacctcgcacttactga

SEQ ID NO: 34327 - DNA, 25 bp, Homo sapiens
gggttcgtcactccttgagcaaata

SEQ ID NO: 34328 - DNA, 25 bp, Homo sapiens
ccatcatggtttctatgagctccta

SEQ ID NO: 34329 - DNA, 25 bp, Homo sapiens
tgctctgggttggacatgttttaca

SEQ ID NO: 34330 - DNA, 25 bp, Homo sapiens
cattggtgaattccttttgagcaga

SEQ ID NO: 34331 - DNA, 25 bp, Homo sapiens
tatggtgtcctgatggcctgaaata

SEQ ID NO: 34332 - DNA, 25 bp, Homo sapiens
ctggcctccagctgcgttcaactaa

SEQ ID NO: 34333 - DNA, 25 bp, Homo sapiens
tcagtagcctgtgtgaccagtggta

SEQ ID NO: 34334 - DNA, 25 bp, Homo sapiens
tctgggttgcctgacttgatatttc

SEQ ID NO: 34335 - DNA, 25 bp, Homo sapiens
gctgtgccattttcttttccggagg

SEQ ID NO: 34336 - DNA, 25 bp, Homo sapiens
actgtgtttctgtctgctttccatg

SEQ ID NO: 34337 - DNA, 25 bp, Homo sapiens
aacaggtggctcatgcatactaatg

SEQ ID NO: 34338 - DNA, 25 bp, Homo sapiens
cagaaagtacataaaaaaagttcca

SEQ ID NO: 34339 - DNA, 25 bp, Homo sapiens
ctgacactggtgtttgtattacata

SEQ ID NO: 34340 - DNA, 25 bp, Homo sapiens
actctaggaggtagtgtagtactga

SEQ ID NO: 34341 - DNA, 25 bp, Homo sapiens
tgacctggtcttcctgcttgcagtg

SEQ ID NO: 34342 - DNA, 25 bp, Homo sapiens
ttccagtctgaagttataagctagc

SEQ ID NO: 34343 - DNA, 25 bp, Homo sapiens
ccttgaagtcagcatctggatttgc

SEQ ID NO: 34344 - DNA, 25 bp, Homo sapiens
gcctgctgcagaaatcaatgtcata

SEQ ID NO: 34345 - DNA, 25 bp, Homo sapiens
ggtctttccacactgctcacattta

SEQ ID NO: 34346 - DNA, 25 bp, Homo sapiens
cctgctgcttaagatgctcaaaatg

SEQ ID NO: 34347 - DNA, 25 bp, Homo sapiens
cttgtgccgtaagtattgcgaagta

SEQ ID NO: 34348 - DNA, 25 bp, Homo sapiens
cctgagtcctgagttgtctgaattg

SEQ ID NO: 34349 - DNA, 25 bp, Homo sapiens
tggccttggctaattggatactaca

SEQ ID NO: 34350 - DNA, 25 bp, Homo sapiens
catgattgaaccagtaagagtctta

SEQ ID NO: 34351 - DNA, 25 bp, Homo sapiens
tgcttcctctagtaccatatgcttg

SEQ ID NO: 34352 - DNA, 25 bp, Homo sapiens
ttaacatctggtgaaggcttggctg

SEQ ID NO: 34353 - DNA, 25 bp, Homo sapiens
tgatccagaatgcagtttactcttc

SEQ ID NO: 34354 - DNA, 25 bp, Homo sapiens
cctaggttgttgctgatgtctttga

SEQ ID NO: 34355 - DNA, 25 bp, Homo sapiens
agtgattgtggtaatagtgtgattc

SEQ ID NO: 34356 - DNA, 25 bp, Homo sapiens
aaactgaaggtttaaaacaaaaatg

SEQ ID NO: 34357 - DNA, 25 bp, Homo sapiens
tgttgtcctagcaaaagtaccttta

SEQ ID NO: 34358 - DNA, 25 bp, Homo sapiens
ttccctacccagagaaaaactactg

SEQ ID NO: 34359 - DNA, 25 bp, Homo sapiens
gttccgagtttcttatgtgtatcca

SEQ ID NO: 34360 - DNA, 25 bp, Homo sapiens
cggctgttggtctctctttgaagga

SEQ ID NO: 34361 - DNA, 25 bp, Homo sapiens
gtgccacaccaaggctttctgtctt

SEQ ID NO: 34362 - DNA, 25 bp, Homo sapiens
tctatgtctttatagttatgcctta

SEQ ID NO: 34363 - DNA, 25 bp, Homo sapiens
gcattgcctaactcgcgaggaacta

SEQ ID NO: 34364 - DNA, 25 bp, Homo sapiens
tggccatctgcctgttcgactgaag

SEQ ID NO: 34365 - DNA, 25 bp, Homo sapiens
gggacttgttttgcttcagtggtaa

SEQ ID NO: 34366 - DNA, 25 bp, Homo sapiens
tgtgtctggcttgtaatagttcctc

SEQ ID NO: 34367 - DNA, 25 bp, Homo sapiens
tcctgagattacattgagacttagc

SEQ ID NO: 34368 - DNA, 25 bp, Homo sapiens
tggcacccaagagtggaattatctc

SEQ ID NO: 34369 - DNA, 25 bp, Homo sapiens
atcttggtcttttgggtattgtccc

SEQ ID NO: 34370 - DNA, 25 bp, Homo sapiens
ggcttactgggacttctgttgtaca

SEQ ID NO: 34371 - DNA, 25 bp, Homo sapiens
aggactctggctaaatcatctctga

SEQ ID NO: 34372 - DNA, 25 bp, Homo sapiens
tatctccagtttgttggggtgaaca

SEQ ID NO: 34373 - DNA, 25 bp, Homo sapiens
ccttgctcacagaggttatttgacc

SEQ ID NO: 34374 - DNA, 25 bp, Homo sapiens
agctgttccactgctggccttggga

SEQ ID NO: 34375 - DNA, 25 bp, Homo sapiens
tggtagaaacaaactcattgggttt

SEQ ID NO: 34376 - DNA, 25 bp, Homo sapiens
taggggaggcacacattccaaaagc

SEQ ID NO: 34377 - DNA, 25 bp, Homo sapiens
tgtgcacagaagctagccctagatt

SEQ ID NO: 34378 - DNA, 25 bp, Homo sapiens
cttgggcattattcttagcaggaaa

SEQ ID NO: 34379 - DNA, 25 bp, Homo sapiens
ctaaggtacttctctctcattaata

SEQ ID NO: 34380 - DNA, 25 bp, Homo sapiens
cccctttaggatttttaagaaataa

SEQ ID NO: 34381 - DNA, 25 bp, Homo sapiens
ccatctattgtcctgaagagcagtc

SEQ ID NO: 34382 - DNA, 25 bp, Homo sapiens
gttgggctccaaagcaagctaaata

SEQ ID NO: 34383 - DNA, 25 bp, Homo sapiens
gtcagacatcttgatccagggaagc

SEQ ID NO: 34384 - DNA, 25 bp, Homo sapiens
aagctgagagtgtgttacttggaat

SEQ ID NO: 34385 - DNA, 25 bp, Homo sapiens
ggcttgcagcgagaatcatctgtta

SEQ ID NO: 34386 - DNA, 25 bp, Homo sapiens
gccaggcccttctgctttcctttta

SEQ ID NO: 34387 - DNA, 25 bp, Homo sapiens
tgctttgctttgagacacagggtta

SEQ ID NO: 34388 - DNA, 25 bp, Homo sapiens
ggttagttgtatgacccaagtgttc

SEQ ID NO: 34389 - DNA, 25 bp, Homo sapiens
agtatatgtgctgccaaagagaggc

SEQ ID NO: 34390 - DNA, 25 bp, Homo sapiens
agaatttcaaaataagtcttttaga

SEQ ID NO: 34391 - DNA, 25 bp, Homo sapiens
cttttcgtgccattttggacaagtg

SEQ ID NO: 34392 - DNA, 25 bp, Homo sapiens
caaagagtacagcatccccaactcc

SEQ ID NO: 34393 - DNA, 25 bp, Homo sapiens
cccgccctgcactctaaaaaggtta

SEQ ID NO: 34394 - DNA, 25 bp, Homo sapiens
cctggggcaatttcctgcttgaata

SEQ ID NO: 34395 - DNA, 25 bp, Homo sapiens
gcagctgttgatagcggaacctata

SEQ ID NO: 34396 - DNA, 25 bp, Homo sapiens
ggctggctagagaactgcaaattta

SEQ ID NO: 34397 - DNA, 25 bp, Homo sapiens
taggactttccttttgcttcagagc

SEQ ID NO: 34398 - DNA, 25 bp, Homo sapiens
attagaatgaatcatccattttcta

SEQ ID NO: 34399 - DNA, 25 bp, Homo sapiens
ggtgacatccctgaaaattggccta

SEQ ID NO: 34400 - DNA, 25 bp, Homo sapiens
gggacgtcaaaaggatagctcattt

SEQ ID NO: 34401 - DNA, 25 bp, Homo sapiens
ggcttgccttttcccatttcagtga

SEQ ID NO: 34402 - DNA, 25 bp, Homo sapiens
ggaggcagattctagtccctttgca

SEQ ID NO: 34403 - DNA, 25 bp, Homo sapiens
aaattatgtcctgtggctactggta

SEQ ID NO: 34404 - DNA, 25 bp, Homo sapiens
cttggcaactcagtatgggcatttc

SEQ ID NO: 34405 - DNA, 25 bp, Homo sapiens
ggcagttagttttgatatttctttc

SEQ ID NO: 34406 - DNA, 25 bp, Homo sapiens
tgctttctcttttccacttacgtat

SEQ ID NO: 34407 - DNA, 25 bp, Homo sapiens
cctgttccctggagctgaaggttga

SEQ ID NO: 34408 - DNA, 25 bp, Homo sapiens
gggctacatcgttcccaatgagaga

SEQ ID NO: 34409 - DNA, 25 bp, Homo sapiens
gccaccatggtgctgctttgtctga

SEQ ID NO: 34410 - DNA, 25 bp, Homo sapiens
ccctttgaagccaggaatgttagcc

SEQ ID NO: 34411 - DNA, 25 bp, Homo sapiens
tgcgagctaccctaacccaatttgt

SEQ ID NO: 34412 - DNA, 25 bp, Homo sapiens
tcctctggatagctggcctagattc

SEQ ID NO: 34413 - DNA, 25 bp, Homo sapiens
tccctcagtgatctacaatacattg

SEQ ID NO: 34414 - DNA, 25 bp, Homo sapiens
tcccaggtgtgaagactgacagttc

SEQ ID NO: 34415 - DNA, 25 bp, Homo sapiens
gaatttcatatcatccaactggcta

SEQ ID NO: 34416 - DNA, 25 bp, Homo sapiens
ggcaaactgctctcttctgataaca

SEQ ID NO: 34417 - DNA, 25 bp, Homo sapiens
ccaggccctgggacaataggatgca

SEQ ID NO: 34418 - DNA, 25 bp, Homo sapiens
caggttttctttagtggcacaattc

SEQ ID NO: 34419 - DNA, 25 bp, Homo sapiens
ggggtaagctctcttctgctagtta

SEQ ID NO: 34420 - DNA, 25 bp, Homo sapiens
ccttggtgccactgcaacttgtatc

SEQ ID NO: 34421 - DNA, 25 bp, Homo sapiens
tgggatatcttttgctctcagcctg

SEQ ID NO: 34422 - DNA, 25 bp, Homo sapiens
taccaagaaggctggcagtgacact

SEQ ID NO: 34423 - DNA, 25 bp, Homo sapiens
gactgcagattgctgtcttacatca

SEQ ID NO: 34424 - DNA, 25 bp, Homo sapiens
ccataattcttgaggaggatgctta

SEQ ID NO: 34425 - DNA, 25 bp, Homo sapiens
ttggcctcaactgcggtgtattgta

SEQ ID NO: 34426 - DNA, 25 bp, Homo sapiens
ggaagaccatctaacatacctgtat

SEQ ID NO: 34427 - DNA, 25 bp, Homo sapiens
gtggttcccactgcccagactgatt

SEQ ID NO: 34428 - DNA, 25 bp, Homo sapiens
gtttcttgcctttctgttcccaata

SEQ ID NO: 34429 - DNA, 25 bp, Homo sapiens
tgcctgggccctattctttacatgg

SEQ ID NO: 34430 - DNA, 25 bp, Homo sapiens
ccacttgcctggaaaccctgtttga

SEQ ID NO: 34431 - DNA, 25 bp, Homo sapiens
agagcacagtttctcctgtaaggta

SEQ ID NO: 34432 - DNA, 25 bp, Homo sapiens
tcattttgcaacgtgggagctgggc

SEQ ID NO: 34433 - DNA, 25 bp, Homo sapiens
ctgagtggggagtttctgataattc

SEQ ID NO: 34434 - DNA, 25 bp, Homo sapiens
aatttaatattatgactaagttata

SEQ ID NO: 34435 - DNA, 25 bp, Homo sapiens
ttgagtactgcaccttgagaaaatg

SEQ ID NO: 34436 - DNA, 25 bp, Homo sapiens
tggcttgcttgcgagctgctcataa

SEQ ID NO: 34437 - DNA, 25 bp, Homo sapiens
agagatgaggttccacttagccttc

SEQ ID NO: 34438 - DNA, 25 bp, Homo sapiens
tgcctgctgcctgagttaataagta

SEQ ID NO: 34439 - DNA, 25 bp, Homo sapiens
gtaacacatctgttggcagtgaaca

SEQ ID NO: 34440 - DNA, 25 bp, Homo sapiens
ccttgcatctgggttgacgtttttc

SEQ ID NO: 34441 - DNA, 25 bp, Homo sapiens
tctgcaatgcaatcgtggtgaaata

SEQ ID NO: 34442 - DNA, 25 bp, Homo sapiens
cttaagcactttgtgtagggaatcc

SEQ ID NO: 34443 - DNA, 25 bp, Homo sapiens
ggtgttctggcctccttaataaagc

SEQ ID NO: 34444 - DNA, 25 bp, Homo sapiens
aagaatagatattttcttaattttc

SEQ ID NO: 34445 - DNA, 25 bp, Homo sapiens
tccttggcaaagtgaaggcctcttc

SEQ ID NO: 34446 - DNA, 25 bp, Homo sapiens
cttcatgcagttgtaggcctaggta

SEQ ID NO: 34447 - DNA, 25 bp, Homo sapiens
ccagggcttttgcagctaagtcttg

SEQ ID NO: 34448 - DNA, 25 bp, Homo sapiens
tggcctgtgctggaatgaattactg

SEQ ID NO: 34449 - DNA, 25 bp, Homo sapiens
gcctctggagctttagatctacatg

SEQ ID NO: 34450 - DNA, 25 bp, Homo sapiens
gtctcaactcatcctgtggtgtcta

SEQ ID NO: 34451 - DNA, 25 bp, Homo sapiens
ttaaagacctgagatataatcttct

SEQ ID NO: 34452 - DNA, 25 bp, Homo sapiens
gccttcttttttctaactgtccttg

SEQ ID NO: 34453 - DNA, 25 bp, Homo sapiens
ttaaagtatattttatgtttatctc

SEQ ID NO: 34454 - DNA, 25 bp, Homo sapiens
tcagttattcccactcaggtagata

SEQ ID NO: 34455 - DNA, 25 bp, Homo sapiens
ctggcaacatttgactgatgagttc

SEQ ID NO: 34456 - DNA, 25 bp, Homo sapiens
tgcccgtattgtatagtgctcagta

SEQ ID NO: 34457 - DNA, 25 bp, Homo sapiens
ggggccaatgtgtactcagaaattt

SEQ ID NO: 34458 - DNA, 25 bp, Homo sapiens
gttcttttaaaggagagtcccacta

SEQ ID NO: 34459 - DNA, 25 bp, Homo sapiens
gcaggtttcctcttagatgcagtta

SEQ ID NO: 34460 - DNA, 25 bp, Homo sapiens
ggggctatctcaagtacctcatctc

SEQ ID NO: 34461 - DNA, 25 bp, Homo sapiens
atctctcagccacagggtcacgttg

SEQ ID NO: 34462 - DNA, 25 bp, Homo sapiens
gagctaccttttttggtgcccatga

SEQ ID NO: 34463 - DNA, 25 bp, Homo sapiens
gtcctgtccacgaggccatattgtc

SEQ ID NO: 34464 - DNA, 25 bp, Homo sapiens
gggccaacctctggagccctcagaa

SEQ ID NO: 34465 - DNA, 25 bp, Homo sapiens
gggccagctttcttgactatgatca

SEQ ID NO: 34466 - DNA, 25 bp, Homo sapiens
tagctatagctttcctgcccaggtt

SEQ ID NO: 34467 - DNA, 25 bp, Homo sapiens
cccaggcttttaggcagtagttcca

SEQ ID NO: 34468 - DNA, 25 bp, Homo sapiens
ctcctggggtaagcagagaaatatc

SEQ ID NO: 34469 - DNA, 25 bp, Homo sapiens
cccagtttttcctaaggggacagca

SEQ ID NO: 34470 - DNA, 25 bp, Homo sapiens
ggcagctgaccacctttctcagata

SEQ ID NO: 34471 - DNA, 25 bp, Homo sapiens
taccctgttggactgaagtattctc

SEQ ID NO: 34472 - DNA, 25 bp, Homo sapiens
gtctgacagccagtaggaccatcta

SEQ ID NO: 34473 - DNA, 25 bp, Homo sapiens
aggttgtaccttcctgcaggctcta

SEQ ID NO: 34474 - DNA, 25 bp, Homo sapiens
gtttgggtaccagcaccttaaggtg

SEQ ID NO: 34475 - DNA, 25 bp, Homo sapiens
gtttacttttcttaacccaagtatt

SEQ ID NO: 34476 - DNA, 25 bp, Homo sapiens
tccacaaacctccatagctggggta

SEQ ID NO: 34477 - DNA, 25 bp, Homo sapiens
ccctcttctgtattgaggtactata

SEQ ID NO: 34478 - DNA, 25 bp, Homo sapiens
tgcctggcttcctacatctcttctg

SEQ ID NO: 34479 - DNA, 25 bp, Homo sapiens
ggcctgtggcacattcctgaatttc

SEQ ID NO: 34480 - DNA, 25 bp, Homo sapiens
tggccttaccaatatgtcctactga

SEQ ID NO: 34481 - DNA, 25 bp, Homo sapiens
tcattattacaataggtaacactga

SEQ ID NO: 34482 - DNA, 25 bp, Homo sapiens
ggctccttctctactatggtccata

SEQ ID NO: 34483 - DNA, 25 bp, Homo sapiens
actgcctattcctttgggtgtacta

SEQ ID NO: 34484 - DNA, 25 bp, Homo sapiens
ccagtgtccttgcatgtgtccaatc

SEQ ID NO: 34485 - DNA, 25 bp, Homo sapiens
ctctgttggtaagtcctagttttta

SEQ ID NO: 34486 - DNA, 25 bp, Homo sapiens
ggccatctttcctagtgtaacatta

SEQ ID NO: 34487 - DNA, 25 bp, Homo sapiens
tgttccctcaggctctcccagagta

SEQ ID NO: 34488 - DNA, 25 bp, Homo sapiens
ttcagcagcaggcagtgaattccta

SEQ ID NO: 34489 - DNA, 25 bp, Homo sapiens
tgtggccactccagttgacctttgg

SEQ ID NO: 34490 - DNA, 25 bp, Homo sapiens
tcatggattgcttgaggacctaata

SEQ ID NO: 34491 - DNA, 25 bp, Homo sapiens
ccaagagtttctcaacatgtgttcc

SEQ ID NO: 34492 - DNA, 25 bp, Homo sapiens
ggaggcatcattttctcagtgagca

SEQ ID NO: 34493 - DNA, 25 bp, Homo sapiens
tgcccaggtctcaaggactcatctg

SEQ ID NO: 34494 - DNA, 25 bp, Homo sapiens
gccaggatttctagcagtgcttata

SEQ ID NO: 34495 - DNA, 25 bp, Homo sapiens
gggccataccttctgtagctcaaga

SEQ ID NO: 34496 - DNA, 25 bp, Homo sapiens
ttggccagaggcgagtcaaccactt

SEQ ID NO: 34497 - DNA, 25 bp, Homo sapiens
aagaactcactttgggcctggtata

SEQ ID NO: 34498 - DNA, 25 bp, Homo sapiens
ttccctcgccgtatacagttcagtg

SEQ ID NO: 34499 - DNA, 25 bp, Homo sapiens
gtatacattacttcagcggactgca

SEQ ID NO: 34500 - DNA, 25 bp, Homo sapiens
ggacaccatttctgccactctgaag

SEQ ID NO: 34501 - DNA, 25 bp, Homo sapiens
tgggccttctgacccttacaaaata

SEQ ID NO: 34502 - DNA, 25 bp, Homo sapiens
tgagcaggtctgtcacttacaaaga

SEQ ID NO: 34503 - DNA, 25 bp, Homo sapiens
tctgcttgccacaggattagaattg

SEQ ID NO: 34504 - DNA, 25 bp, Homo sapiens
gttaaaaaagtaaaacagtgtatct

SEQ ID NO: 34505 - DNA, 25 bp, Homo sapiens
tcaagtcccgggaagtgcttctgtc

SEQ ID NO: 34506 - DNA, 25 bp, Homo sapiens
agagagaggccatgtcgactccata

SEQ ID NO: 34507 - DNA, 25 bp, Homo sapiens
gtcctggacagtgaatacaatttgc

SEQ ID NO: 34508 - DNA, 25 bp, Homo sapiens
tctacataggtgttgtgctacaatc

SEQ ID NO: 34509 - DNA, 25 bp, Homo sapiens
ggagtgcctagctgagtgccattca

SEQ ID NO: 34510 - DNA, 25 bp, Homo sapiens
accgactgcctgtggatatatttca

SEQ ID NO: 34511 - DNA, 25 bp, Homo sapiens
tcgcctgtctttgatctggtagcca

SEQ ID NO: 34512 - DNA, 25 bp, Homo sapiens
atgctgaggtctagtgctgtttccc

SEQ ID NO: 34513 - DNA, 25 bp, Homo sapiens
cacctatatatgtgaaactgattcc

SEQ ID NO: 34514 - DNA, 25 bp, Homo sapiens
tgtgatccacagtatgaaaagcctc

SEQ ID NO: 34515 - DNA, 25 bp, Homo sapiens
caggctgctgctctcaggacaatga

SEQ ID NO: 34516 - DNA, 25 bp, Homo sapiens
atccctgtgagtagtttgtaacttc

SEQ ID NO: 34517 - DNA, 25 bp, Homo sapiens
gctggtcccatttttcatacattga

SEQ ID NO: 34518 - DNA, 25 bp, Homo sapiens
ttggatatactaaggcacagtaatt

SEQ ID NO: 34519 - DNA, 25 bp, Homo sapiens
caataacagagaatgggaaaattta

SEQ ID NO: 34520 - DNA, 25 bp, Homo sapiens
cagaggggacttctatcatcaatta

SEQ ID NO: 34521 - DNA, 25 bp, Homo sapiens
actggtgaattgtttgtgtagactc

SEQ ID NO: 34522 - DNA, 25 bp, Homo sapiens
caaccttttggagtctttctgcagc

SEQ ID NO: 34523 - DNA, 25 bp, Homo sapiens
gaccttgcattagcagtgagcttta

SEQ ID NO: 34524 - DNA, 25 bp, Homo sapiens
ttccacaagcaagggtcataccatc

SEQ ID NO: 34525 - DNA, 25 bp, Homo sapiens
ccacacggtggtattactttcttga

SEQ ID NO: 34526 - DNA, 25 bp, Homo sapiens
cagctgtgtgtttgtgagccactta

SEQ ID NO: 34527 - DNA, 25 bp, Homo sapiens
cccagtagatgcttaggattgaaac

SEQ ID NO: 34528 - DNA, 25 bp, Homo sapiens
gaaatgcaaaaaaaaattatactta

SEQ ID NO: 34529 - DNA, 25 bp, Homo sapiens
ggtgcaagtctttctagcccatatg

SEQ ID NO: 34530 - DNA, 25 bp, Homo sapiens
cactactttgggcatggtgtttcaa

SEQ ID NO: 34531 - DNA, 25 bp, Homo sapiens
tgaggctcactgtgtcacaactgtg

SEQ ID NO: 34532 - DNA, 25 bp, Homo sapiens
tctaaggctgcatgtgatactactc

SEQ ID NO: 34533 - DNA, 25 bp, Homo sapiens
gttaaactgccacaccatgaaatga

SEQ ID NO: 34534 - DNA, 25 bp, Homo sapiens
tgcattgctttattctattaccaga

SEQ ID NO: 34535 - DNA, 25 bp, Homo sapiens
ttcaacactttgtgggcagaccata

SEQ ID NO: 34536 - DNA, 25 bp, Homo sapiens
gcgtgtatgtaaacagagagtccta

SEQ ID NO: 34537 - DNA, 25 bp, Homo sapiens
ctgtgccaaggccacaaaggctcta

SEQ ID NO: 34538 - DNA, 25 bp, Homo sapiens
accctgcagttgtctctggacttca

SEQ ID NO: 34539 - DNA, 25 bp, Homo sapiens
ggttgcccaccaggagaagctcaca

SEQ ID NO: 34540 - DNA, 25 bp, Homo sapiens
gcttgaggtagagccacgaaccatc

SEQ ID NO: 34541 - DNA, 25 bp, Homo sapiens
tgtcccactgcatttcactgttttg

SEQ ID NO: 34542 - DNA, 25 bp, Homo sapiens
ctttcttctgctggggctgctatta

SEQ ID NO: 34543 - DNA, 25 bp, Homo sapiens
gtcttctttcaatggccctgattta

SEQ ID NO: 34544 - DNA, 25 bp, Homo sapiens
tctgatgtctcggtgttaactgtga

SEQ ID NO: 34545 - DNA, 25 bp, Homo sapiens
atgccttggctctgaatctttactc

SEQ ID NO: 34546 - DNA, 25 bp, Homo sapiens
atttcggagcatctgagggcaagcc

SEQ ID NO: 34547 - DNA, 25 bp, Homo sapiens
cagcagcgtggggttcctatagtaa

SEQ ID NO: 34548 - DNA, 25 bp, Homo sapiens
cttgtaatgagagacctggtaatcc

SEQ ID NO: 34549 - DNA, 25 bp, Homo sapiens
aggttatgacagacttgagactttc

SEQ ID NO: 34550 - DNA, 25 bp, Homo sapiens
caattatctgaacctgtggcttatc

SEQ ID NO: 34551 - DNA, 25 bp, Homo sapiens
tatcccgcaaggtgagcatgccatg

SEQ ID NO: 34552 - DNA, 25 bp, Homo sapiens
cccagaagtgatgtgattagctata

SEQ ID NO: 34553 - DNA, 25 bp, Homo sapiens
ccaaaggaaaagggtttcaccttat

SEQ ID NO: 34554 - DNA, 25 bp, Homo sapiens
tgtcagcttgcttttgggaaccact

SEQ ID NO: 34555 - DNA, 25 bp, Homo sapiens
tggccgtccttccatgtttcctatg

SEQ ID NO: 34556 - DNA, 25 bp, Homo sapiens
ccacgtgcttgtgagagttactaga

SEQ ID NO: 34557 - DNA, 25 bp, Homo sapiens
cagctttctagagtgcatgtgggca

SEQ ID NO: 34558 - DNA, 25 bp, Homo sapiens
ccggaaagccacaaaccctgtagta

SEQ ID NO: 34559 - DNA, 25 bp, Homo sapiens
tggtctctacttggatatcagctga

SEQ ID NO: 34560 - DNA, 25 bp, Homo sapiens
ggatggactgttcattcctcagcta

SEQ ID NO: 34561 - DNA, 25 bp, Homo sapiens
aatgttcttgctctccagggaatga

SEQ ID NO: 34562 - DNA, 25 bp, Homo sapiens
gggaatacgaatcttgccacatata

SEQ ID NO: 34563 - DNA, 25 bp, Homo sapiens
cacccaagtaacgagtagatatttt

SEQ ID NO: 34564 - DNA, 25 bp, Homo sapiens
tctgcagcatctagaatacttccta

SEQ ID NO: 34565 - DNA, 25 bp, Homo sapiens
gcagggctgtgctagcataatctca

SEQ ID NO: 34566 - DNA, 25 bp, Homo sapiens
tcaggtctccctcttatatatagtc

SEQ ID NO: 34567 - DNA, 25 bp, Homo sapiens
tgtgtctgaccagcaacctcctgtc

SEQ ID NO: 34568 - DNA, 25 bp, Homo sapiens
gtcctcactggattttctacctaaa

SEQ ID NO: 34569 - DNA, 25 bp, Homo sapiens
ttgattccttgatcatactgaaaat

SEQ ID NO: 34570 - DNA, 25 bp, Homo sapiens
gttaaaaatcagctcaactttgatc

SEQ ID NO: 34571 - DNA, 25 bp, Homo sapiens
ataattagctctgtgcttagacctg

SEQ ID NO: 34572 - DNA, 25 bp, Homo sapiens
agctacttagttttccttaggagaa

SEQ ID NO: 34573 - DNA, 25 bp, Homo sapiens
cgcttggccaaatttatatgctaaa

SEQ ID NO: 34574 - DNA, 25 bp, Homo sapiens
ctttccaaaggaggcgcaagctcta

SEQ ID NO: 34575 - DNA, 25 bp, Homo sapiens
cctaaacctagcagaagtgttaaga

SEQ ID NO: 34576 - DNA, 25 bp, Homo sapiens
gggaaacttgtttcacatgaggcaa

SEQ ID NO: 34577 - DNA, 25 bp, Homo sapiens
cggaagtaccagtcagcatgcagtt

SEQ ID NO: 34578 - DNA, 25 bp, Homo sapiens
tctgatgtggttctctaaagctggc

SEQ ID NO: 34579 - DNA, 25 bp, Homo sapiens
cgttctgtggcagtatccttaacta

SEQ ID NO: 34580 - DNA, 25 bp, Homo sapiens
gtgcctccagctcccaaattcattg

SEQ ID NO: 34581 - DNA, 25 bp, Homo sapiens
ggtcccaaagggtctcattacagtt

SEQ ID NO: 34582 - DNA, 25 bp, Homo sapiens
gccctttggcaattcacatctactg

SEQ ID NO: 34583 - DNA, 25 bp, Homo sapiens
ctgggttctctgtgcagcatccaaa

SEQ ID NO: 34584 - DNA, 25 bp, Homo sapiens
cttaatttgtgtgcatgctctggta

SEQ ID NO: 34585 - DNA, 25 bp, Homo sapiens
aagacctatattgggatctaatttc

SEQ ID NO: 34586 - DNA, 25 bp, Homo sapiens
tgtgcaggctgttgatttttttgtt

SEQ ID NO: 34587 - DNA, 25 bp, Homo sapiens
gtgtattcgtatatgaccctccctc

SEQ ID NO: 34588 - DNA, 25 bp, Homo sapiens
gtctcatatgtgaggcttcttattt

SEQ ID NO: 34589 - DNA, 25 bp, Homo sapiens
ttggcctagaatttgttgctgaccc

SEQ ID NO: 34590 - DNA, 25 bp, Homo sapiens
ccatgggaaagaacgcgaaagaata

SEQ ID NO: 34591 - DNA, 25 bp, Homo sapiens
ttcagacagtgacaggattagttcc

SEQ ID NO: 34592 - DNA, 25 bp, Homo sapiens
aaagacggcttttccttgggctatc

SEQ ID NO: 34593 - DNA, 25 bp, Homo sapiens
ggacttagcccactatctattgtga

SEQ ID NO: 34594 - DNA, 25 bp, Homo sapiens
cactatattttagtggtagagactc

SEQ ID NO: 34595 - DNA, 25 bp, Homo sapiens
tcctgggcaattctggtctatactg

SEQ ID NO: 34596 - DNA, 25 bp, Homo sapiens
tgcacatggcagatcgtagaagttg

SEQ ID NO: 34597 - DNA, 25 bp, Homo sapiens
cagaacatgttttgggaatcccttg

SEQ ID NO: 34598 - DNA, 25 bp, Homo sapiens
tgctactgccctcctttataaaatg

SEQ ID NO: 34599 - DNA, 25 bp, Homo sapiens
accttgcatctggagtgttctatga

SEQ ID NO: 34600 - DNA, 25 bp, Homo sapiens
aggtaatatgtgcatttgttctgat

SEQ ID NO: 34601 - DNA, 25 bp, Homo sapiens
gctcttatccaatctagggcatatt

SEQ ID NO: 34602 - DNA, 25 bp, Homo sapiens
ccctttctgtgtggtcatttgtgga

SEQ ID NO: 34603 - DNA, 25 bp, Homo sapiens
tgtccttgtcaaatattagcttacc

SEQ ID NO: 34604 - DNA, 25 bp, Homo sapiens
taccctgttcttttcaaggaacatt

SEQ ID NO: 34605 - DNA, 25 bp, Homo sapiens
ctgcctctgcatatccaagttagtg

SEQ ID NO: 34606 - DNA, 25 bp, Homo sapiens
caaacagtttcttttcagagtggtg

SEQ ID NO: 34607 - DNA, 25 bp, Homo sapiens
tgagagtctgagtatggcttccaca

SEQ ID NO: 34608 - DNA, 25 bp, Homo sapiens
gacactgctgtacctggacaaacta

SEQ ID NO: 34609 - DNA, 25 bp, Homo sapiens
acaggggctcttcaatctgaacatc

SEQ ID NO: 34610 - DNA, 25 bp, Homo sapiens
ccgtggatatcttggcctagtaatt

SEQ ID NO: 34611 - DNA, 25 bp, Homo sapiens
ggagccagtcagttctcttcagata

SEQ ID NO: 34612 - DNA, 25 bp, Homo sapiens
gcctcactgagttaacttcaccttg

SEQ ID NO: 34613 - DNA, 25 bp, Homo sapiens
atcctgactgtgtgtgtcgtggcca

SEQ ID NO: 34614 - DNA, 25 bp, Homo sapiens
ggttcctcatactgatgcaactgtg

SEQ ID NO: 34615 - DNA, 25 bp, Homo sapiens
tggtgtatttaacgagccctgatga

SEQ ID NO: 34616 - DNA, 25 bp, Homo sapiens
tacaaaaattagattttcttcttcc

SEQ ID NO: 34617 - DNA, 25 bp, Homo sapiens
tattttcagcatcacctgagtcaga

SEQ ID NO: 34618 - DNA, 25 bp, Homo sapiens
gcccttccatttgcagtcgagattc

SEQ ID NO: 34619 - DNA, 25 bp, Homo sapiens
agcttctgcttggtaactcaattta

SEQ ID NO: 34620 - DNA, 25 bp, Homo sapiens
tggtaatttctcaagctcctaaatg

SEQ ID NO: 34621 - DNA, 25 bp, Homo sapiens
cggctgtggctgcaatgtttaaaga

SEQ ID NO: 34622 - DNA, 25 bp, Homo sapiens
gggttactgtctccctccaatagtg

SEQ ID NO: 34623 - DNA, 25 bp, Homo sapiens
tgctctaagaaagtaccgtaattcc

SEQ ID NO: 34624 - DNA, 25 bp, Homo sapiens
tgcttaccacaagtcagttgccaga

SEQ ID NO: 34625 - DNA, 25 bp, Homo sapiens
taaatatattttgagaggcactgac

SEQ ID NO: 34626 - DNA, 25 bp, Homo sapiens
tcagggagagctatgctgactttca

SEQ ID NO: 34627 - DNA, 25 bp, Homo sapiens
cctgcaggcatctcagtcatggtta

SEQ ID NO: 34628 - DNA, 25 bp, Homo sapiens
agtgactattttgctacgatgtaga

SEQ ID NO: 34629 - DNA, 25 bp, Homo sapiens
agggccagttcttctcacacaatga

SEQ ID NO: 34630 - DNA, 25 bp, Homo sapiens
acagcttctttttctgcctttgaga

SEQ ID NO: 34631 - DNA, 25 bp, Homo sapiens
ctcaggattcttgtttgcacatatc

SEQ ID NO: 34632 - DNA, 25 bp, Homo sapiens
tgggagccctgaatctacagcttta

SEQ ID NO: 34633 - DNA, 25 bp, Homo sapiens
gctgccaggaaagagtgagataata

SEQ ID NO: 34634 - DNA, 25 bp, Homo sapiens
cagggatgttctccatgattatagc

SEQ ID NO: 34635 - DNA, 25 bp, Homo sapiens
ggccactatcatcctttgagagata

SEQ ID NO: 34636 - DNA, 25 bp, Homo sapiens
tatggccatgggctggataaaatgc

SEQ ID NO: 34637 - DNA, 25 bp, Homo sapiens
gatcagctttttagctatcttgaca

SEQ ID NO: 34638 - DNA, 25 bp, Homo sapiens
gcagatgcaaccagactccaaagtg

SEQ ID NO: 34639 - DNA, 25 bp, Homo sapiens
ccaggttgaaagtctcatttaggtc

SEQ ID NO: 34640 - DNA, 25 bp, Homo sapiens
gggtaggttagatgccctcttctta

SEQ ID NO: 34641 - DNA, 25 bp, Homo sapiens
aggagatgtctgctgccttttactg

SEQ ID NO: 34642 - DNA, 25 bp, Homo sapiens
tccaggtggcaccaactaaaatttg

SEQ ID NO: 34643 - DNA, 25 bp, Homo sapiens
gactgacctcacttccctgcaagta

SEQ ID NO: 34644 - DNA, 25 bp, Homo sapiens
agattcacagatgcacagattttta

SEQ ID NO: 34645 - DNA, 25 bp, Homo sapiens
tacgggtacctcaatggaatgttta

SEQ ID NO: 34646 - DNA, 25 bp, Homo sapiens
gtgctcactctgtacctctttagga

SEQ ID NO: 34647 - DNA, 25 bp, Homo sapiens
ggcaagtttcactgggcttttctaa

SEQ ID NO: 34648 - DNA, 25 bp, Homo sapiens
tctcccaggtttctctttaaaaaca

SEQ ID NO: 34649 - DNA, 25 bp, Homo sapiens
ttaaagactttagttttgcacctga

SEQ ID NO: 34650 - DNA, 25 bp, Homo sapiens
ccactggaatgtaatctgccctgta

SEQ ID NO: 34651 - DNA, 25 bp, Homo sapiens
agcctgagtggcagcttgccctata

SEQ ID NO: 34652 - DNA, 25 bp, Homo sapiens
ctctgaaattcccagttttgtagca

SEQ ID NO: 34653 - DNA, 25 bp, Homo sapiens
tgagaaggaaactttgagggtataa

SEQ ID NO: 34654 - DNA, 25 bp, Homo sapiens
ggtgggctttgagaacttaccatta

SEQ ID NO: 34655 - DNA, 25 bp, Homo sapiens
ggtgttcttctccaaaaggtcttca

SEQ ID NO: 34656 - DNA, 25 bp, Homo sapiens
caatgtgattcactgaagagtttta

SEQ ID NO: 34657 - DNA, 25 bp, Homo sapiens
aaataattcagaaaaaagtaccatt

SEQ ID NO: 34658 - DNA, 25 bp, Homo sapiens
cctaccttctggagtataacattta

SEQ ID NO: 34659 - DNA, 25 bp, Homo sapiens
aataaaatttctctattacatcttt

SEQ ID NO: 34660 - DNA, 25 bp, Homo sapiens
cacaggtgttcaggtttgttctttc

SEQ ID NO: 34661 - DNA, 25 bp, Homo sapiens
gacacattggctgaaatcctcctta

SEQ ID NO: 34662 - DNA, 25 bp, Homo sapiens
ctgcctccttggctatagctgattg

SEQ ID NO: 34663 - DNA, 25 bp, Homo sapiens
ctgctagcagagctccagaaaggtg

SEQ ID NO: 34664 - DNA, 25 bp, Homo sapiens
tctcctattggacatgcttagtaga

SEQ ID NO: 34665 - DNA, 25 bp, Homo sapiens
gggaggctgtctttctcaattcgca

SEQ ID NO: 34666 - DNA, 25 bp, Homo sapiens
ggcaaccaaatgtctcagtctccga

SEQ ID NO: 34667 - DNA, 25 bp, Homo sapiens
ggtgccactcatttggacaaggcta

SEQ ID NO: 34668 - DNA, 25 bp, Homo sapiens
cctgtgcctgcctttgtttaagata

SEQ ID NO: 34669 - DNA, 25 bp, Homo sapiens
gactttgactttaacaagcacaagt

SEQ ID NO: 34670 - DNA, 25 bp, Homo sapiens
cctgtgccatagagtaaacgttgta

SEQ ID NO: 34671 - DNA, 25 bp, Homo sapiens
ctgtggcgtcacttcaatgtcattc

SEQ ID NO: 34672 - DNA, 25 bp, Homo sapiens
atctattttaaatttattgtaactg

SEQ ID NO: 34673 - DNA, 25 bp, Homo sapiens
gtcagacaggtttttcctcccaata

SEQ ID NO: 34674 - DNA, 25 bp, Homo sapiens
ttctccctggaagcaaagcctgtga

SEQ ID NO: 34675 - DNA, 25 bp, Homo sapiens
tggaagagagctaccctggcctttc

SEQ ID NO: 34676 - DNA, 25 bp, Homo sapiens
ggtgatttttacagctccatattta

SEQ ID NO: 34677 - DNA, 25 bp, Homo sapiens
tccagatttcttttacaggggcaac

SEQ ID NO: 34678 - DNA, 25 bp, Homo sapiens
ggtagtctctcctgtctcttataaa

SEQ ID NO: 34679 - DNA, 25 bp, Homo sapiens
cctgtctaggagtaggcctaaattc

SEQ ID NO: 34680 - DNA, 25 bp, Homo sapiens
aggcaaggagaataagctttgagaa

SEQ ID NO: 34681 - DNA, 25 bp, Homo sapiens
accaagtgatgtattagtgattatc

SEQ ID NO: 34682 - DNA, 25 bp, Homo sapiens
ctgtgccctttccatgcaatatgta

SEQ ID NO: 34683 - DNA, 25 bp, Homo sapiens
tctccaggaagagtgaccctaatga

SEQ ID NO: 34684 - DNA, 25 bp, Homo sapiens
tcggtatgacgtactctgaagtttc

SEQ ID NO: 34685 - DNA, 25 bp, Homo sapiens
gggccagctccaagcaggttcaatg

SEQ ID NO: 34686 - DNA, 25 bp, Homo sapiens
cctggtccaggtagatcgaacaaaa

SEQ ID NO: 34687 - DNA, 25 bp, Homo sapiens
tagataaataaattctaagtggctc

SEQ ID NO: 34688 - DNA, 25 bp, Homo sapiens
ttcataaaaatagatataacaatta

SEQ ID NO: 34689 - DNA, 25 bp, Homo sapiens
aggcatatatgcagagaccactcaa

SEQ ID NO: 34690 - DNA, 25 bp, Homo sapiens
actcaaaatattttcaaagtgcttt

SEQ ID NO: 34691 - DNA, 25 bp, Homo sapiens
aacacaaaacaaaaaacacccatgc

SEQ ID NO: 34692 - DNA, 25 bp, Homo sapiens
cccagccagtatttgtggattccta

SEQ ID NO: 34693 - DNA, 25 bp, Homo sapiens
gctgccgcattttagattgttctta

SEQ ID NO: 34694 - DNA, 25 bp, Homo sapiens
ggctagctttgtttttccatgtgaa

SEQ ID NO: 34695 - DNA, 25 bp, Homo sapiens
cttaaagtgttgtattcaggtcctc

SEQ ID NO: 34696 - DNA, 25 bp, Homo sapiens
ggttttgggcaaagtcaccttcttc

SEQ ID NO: 34697 - DNA, 25 bp, Homo sapiens
gttcatagtcttaacgtgactattt

SEQ ID NO: 34698 - DNA, 25 bp, Homo sapiens
atcatgttgtatgtcttaagtatat

SEQ ID NO: 34699 - DNA, 25 bp, Homo sapiens
gccagccttgctaagcgggtcatta

SEQ ID NO: 34700 - DNA, 25 bp, Homo sapiens
tgtctccgccactgaaaatatcttg

SEQ ID NO: 34701 - DNA, 25 bp, Homo sapiens
agccactgctacctagttttgttga

SEQ ID NO: 34702 - DNA, 25 bp, Homo sapiens
tctggcagctgtcaagtaggcaata

SEQ ID NO: 34703 - DNA, 25 bp, Homo sapiens
ccctggttcagctggttcttaaata

SEQ ID NO: 34704 - DNA, 25 bp, Homo sapiens
cacgcacacatatacattttatata

SEQ ID NO: 34705 - DNA, 25 bp, Homo sapiens
ctctgggatgctgggttaaaaaatc

SEQ ID NO: 34706 - DNA, 25 bp, Homo sapiens
tgagtcagtttatcaacccaagggc

SEQ ID NO: 34707 - DNA, 25 bp, Homo sapiens
gtgtccttgaccttggccatgctga

SEQ ID NO: 34708 - DNA, 25 bp, Homo sapiens
agagtgcatctcatcctatatagga

SEQ ID NO: 34709 - DNA, 25 bp, Homo sapiens
attttattcttattttccctctgaa

SEQ ID NO: 34710 - DNA, 25 bp, Homo sapiens
tggctcgcggagtcttctatgatcc

SEQ ID NO: 34711 - DNA, 25 bp, Homo sapiens
agctgctttctgtgttggatgcaaa

SEQ ID NO: 34712 - DNA, 25 bp, Homo sapiens
cagtggggtttagacatcagttata

SEQ ID NO: 34713 - DNA, 25 bp, Homo sapiens
gtcccttccatataatccgtgtgta

SEQ ID NO: 34714 - DNA, 25 bp, Homo sapiens
gagggcatcacaatctccctctttt

SEQ ID NO: 34715 - DNA, 25 bp, Homo sapiens
gggctccagtcagggcttaccatta

SEQ ID NO: 34716 - DNA, 25 bp, Homo sapiens
cctgtcttttggcaagtagtcaata

SEQ ID NO: 34717 - DNA, 25 bp, Homo sapiens
tgggaatgcagcatgccttttttgc

SEQ ID NO: 34718 - DNA, 25 bp, Homo sapiens
tttctcacccagcagtagttgtatc

SEQ ID NO: 34719 - DNA, 25 bp, Homo sapiens
ttagtgccaactaggaagtattgtc

SEQ ID NO: 34720 - DNA, 25 bp, Homo sapiens
ccctttgggagagggtacagtttca

SEQ ID NO: 34721 - DNA, 25 bp, Homo sapiens
aggcttaggagcaaacccattcttg

SEQ ID NO: 34722 - DNA, 25 bp, Homo sapiens
tgcacttctacatcaggccattttg

SEQ ID NO: 34723 - DNA, 25 bp, Homo sapiens
ccctgaaggacaatggtggcaatgc

SEQ ID NO: 34724 - DNA, 25 bp, Homo sapiens
ggagcagcttttaccttagagcatc

SEQ ID NO: 34725 - DNA, 25 bp, Homo sapiens
ggcatggtagatagcttccttcaaa

SEQ ID NO: 34726 - DNA, 25 bp, Homo sapiens
ccctgtaatttttgctggtttcata

SEQ ID NO: 34727 - DNA, 25 bp, Homo sapiens
gaattatgattttttggctttatga

SEQ ID NO: 34728 - DNA, 25 bp, Homo sapiens
gcaagttgctttgtcaagatattca

SEQ ID NO: 34729 - DNA, 25 bp, Homo sapiens
aaaatgtatacttaaatgttgcctg

SEQ ID NO: 34730 - DNA, 25 bp, Homo sapiens
ccacacaggttgcttgtaataatgc

SEQ ID NO: 34731 - DNA, 25 bp, Homo sapiens
tggcttctcctcatcgcatggaatg

SEQ ID NO: 34732 - DNA, 25 bp, Homo sapiens
tcacggatttcctccaaagacctag

SEQ ID NO: 34733 - DNA, 25 bp, Homo sapiens
ccattaatttgctttagtgctgatt

SEQ ID NO: 34734 - DNA, 25 bp, Homo sapiens
tcgtgagtgacacaggctcaaccta

SEQ ID NO: 34735 - DNA, 25 bp, Homo sapiens
tactggggttttcaattgcacaatc

SEQ ID NO: 34736 - DNA, 25 bp, Homo sapiens
atcccgtcgttttattcctagctca

SEQ ID NO: 34737 - DNA, 25 bp, Homo sapiens
gcagtgttaatataaattatttttt

SEQ ID NO: 34738 - DNA, 25 bp, Homo sapiens
ggtcgatgaaacctcctaacccttt

SEQ ID NO: 34739 - DNA, 25 bp, Homo sapiens
tggcagcttttttatggacagttac

SEQ ID NO: 34740 - DNA, 25 bp, Homo sapiens
gcctatttgaagcacccttatctga

SEQ ID NO: 34741 - DNA, 25 bp, Homo sapiens
ttggtaccaagcacagagtctaata

SEQ ID NO: 34742 - DNA, 25 bp, Homo sapiens
ttccccattattttatttttctaga

SEQ ID NO: 34743 - DNA, 25 bp, Homo sapiens
gtcccacagcggcaatctcatttag

SEQ ID NO: 34744 - DNA, 25 bp, Homo sapiens
gctgtaggcctcgtcatgttgatta

SEQ ID NO: 34745 - DNA, 25 bp, Homo sapiens
gcctttgtcctctgcaaaagtatta

SEQ ID NO: 34746 - DNA, 25 bp, Homo sapiens
tggggtacttcctggcagcttttta

SEQ ID NO: 34747 - DNA, 25 bp, Homo sapiens
tttgccgggtaacagtaaaaaatgc

SEQ ID NO: 34748 - DNA, 25 bp, Homo sapiens
ggaaagtttccaggcccttacagta

SEQ ID NO: 34749 - DNA, 25 bp, Homo sapiens
tgcattccctcagccttccttgtaa

SEQ ID NO: 34750 - DNA, 25 bp, Homo sapiens
ccctggggctaagagataaaacatc

SEQ ID NO: 34751 - DNA, 25 bp, Homo sapiens
tgcttttccggcaagtgactatttc

SEQ ID NO: 34752 - DNA, 25 bp, Homo sapiens
attttagaaaacatagtcatttact

SEQ ID NO: 34753 - DNA, 25 bp, Homo sapiens
acagcttctcccttggcctctaata

SEQ ID NO: 34754 - DNA, 25 bp, Homo sapiens
ggataatctgtaatgcctctgcttg

SEQ ID NO: 34755 - DNA, 25 bp, Homo sapiens
catgcatgccctggttgtggaaata

SEQ ID NO: 34756 - DNA, 25 bp, Homo sapiens
gggccatgtcctgaaatgacttata

SEQ ID NO: 34757 - DNA, 25 bp, Homo sapiens
ttttaatgtttattttttacagttc

SEQ ID NO: 34758 - DNA, 25 bp, Homo sapiens
actggagttgcaactgggagtctct

SEQ ID NO: 34759 - DNA, 25 bp, Homo sapiens
ccattggttggctgcttatctcata

SEQ ID NO: 34760 - DNA, 25 bp, Homo sapiens
accatatgggtcttgaatgtttgca

SEQ ID NO: 34761 - DNA, 25 bp, Homo sapiens
gtgcaagagtcctggttcaaaaata

SEQ ID NO: 34762 - DNA, 25 bp, Homo sapiens
agtcactctggcaaacaacatatgg

SEQ ID NO: 34763 - DNA, 25 bp, Homo sapiens
tgtacccagggagacagaaaattta

SEQ ID NO: 34764 - DNA, 25 bp, Homo sapiens
tagggcttatttcatggactgtctg

SEQ ID NO: 34765 - DNA, 25 bp, Homo sapiens
ctctgcaggcataactcaacttgtg

SEQ ID NO: 34766 - DNA, 25 bp, Homo sapiens
gtgggccagtagtgttcaaaatctt

SEQ ID NO: 34767 - DNA, 25 bp, Homo sapiens
agtttgtcacccacccaaacatggg

SEQ ID NO: 34768 - DNA, 25 bp, Homo sapiens
ttaaaaagttccttcagtcattctg

SEQ ID NO: 34769 - DNA, 25 bp, Homo sapiens
tggcacatggatggcctctagaaaa

SEQ ID NO: 34770 - DNA, 25 bp, Homo sapiens
tacaaaagaaagaaatctgcaatgc

SEQ ID NO: 34771 - DNA, 25 bp, Homo sapiens
cctggggtgtcagtgatgtcttcaa

SEQ ID NO: 34772 - DNA, 25 bp, Homo sapiens
tggccttcgtggatcatgacccata

SEQ ID NO: 34773 - DNA, 25 bp, Homo sapiens
ttgagcatcctaaaatgtctccctt

SEQ ID NO: 34774 - DNA, 25 bp, Homo sapiens
ggatagctacctccctcattgatga

SEQ ID NO: 34775 - DNA, 25 bp, Homo sapiens
gtggctccagcagtagttcaatttc

SEQ ID NO: 34776 - DNA, 25 bp, Homo sapiens
gctacctctcaactgtatgctaaga

SEQ ID NO: 34777 - DNA, 25 bp, Homo sapiens
agactgtcctgctttcactcatgtg

SEQ ID NO: 34778 - DNA, 25 bp, Homo sapiens
ttggtattagacaagacctctctta

SEQ ID NO: 34779 - DNA, 25 bp, Homo sapiens
ccattgaaatctgaatgtgtggcat

SEQ ID NO: 34780 - DNA, 25 bp, Homo sapiens
ttgctcttaggaatgcactcccatc

SEQ ID NO: 34781 - DNA, 25 bp, Homo sapiens
tggagccagcatatggacacaatta

SEQ ID NO: 34782 - DNA, 25 bp, Homo sapiens
agggtcactggtacatatgctaatg

SEQ ID NO: 34783 - DNA, 25 bp, Homo sapiens
caggaagccgttctgtcccttatca

SEQ ID NO: 34784 - DNA, 25 bp, Homo sapiens
gtggctgccctgattttgaaatata

SEQ ID NO: 34785 - DNA, 25 bp, Homo sapiens
ggaaaatccataggatgccttaata

SEQ ID NO: 34786 - DNA, 25 bp, Homo sapiens
catctaactagtgctgctggtgcca

SEQ ID NO: 34787 - DNA, 25 bp, Homo sapiens
acagtggctgccctttctgtcacta

SEQ ID NO: 34788 - DNA, 25 bp, Homo sapiens
agtgagagagacaaaagggaaataa

SEQ ID NO: 34789 - DNA, 25 bp, Homo sapiens
acaggcatcctcttatcatgggtca

SEQ ID NO: 34790 - DNA, 25 bp, Homo sapiens
tgggtcacatcagataaacagtttc

SEQ ID NO: 34791 - DNA, 25 bp, Homo sapiens
accagcattgggtcatgtgttaata

SEQ ID NO: 34792 - DNA, 25 bp, Homo sapiens
agccatcctggccagcttacaaata

SEQ ID NO: 34793 - DNA, 25 bp, Homo sapiens
aagggtccaacaaggcgttctagta

SEQ ID NO: 34794 - DNA, 25 bp, Homo sapiens
caataaaacatttgttctttaaatg

SEQ ID NO: 34795 - DNA, 25 bp, Homo sapiens
ctctctgaatctatgaacctctgca

SEQ ID NO: 34796 - DNA, 25 bp, Homo sapiens
gccagaatctggacccatgtgttca

SEQ ID NO: 34797 - DNA, 25 bp, Homo sapiens
ggaaccaagaaactcaaaatcgtac

SEQ ID NO: 34798 - DNA, 25 bp, Homo sapiens
gcgcctccccacccaccaaatacca

SEQ ID NO: 34799 - DNA, 25 bp, Homo sapiens
ttggctccagagcagataaacttta

SEQ ID NO: 34800 - DNA, 25 bp, Homo sapiens
tctgagacccaaagagcagctgata

SEQ ID NO: 34801 - DNA, 25 bp, Homo sapiens
actggtctattatgcttggcctata

SEQ ID NO: 34802 - DNA, 25 bp, Homo sapiens
ttaagtctatattcttctttaaaat

SEQ ID NO: 34803 - DNA, 25 bp, Homo sapiens
gctccactagtgacagaacctatta

SEQ ID NO: 34804 - DNA, 25 bp, Homo sapiens
gtgtaccagtgcagctcatcgattt

SEQ ID NO: 34805 - DNA, 25 bp, Homo sapiens
cctctactggaggacacttatcgtc

SEQ ID NO: 34806 - DNA, 25 bp, Homo sapiens
cggatgacattttcgatagctgagc

SEQ ID NO: 34807 - DNA, 25 bp, Homo sapiens
catgtgtgtttgcagccattcctca

SEQ ID NO: 34808 - DNA, 25 bp, Homo sapiens
ggcgagtgacttccctacatatatt

SEQ ID NO: 34809 - DNA, 25 bp, Homo sapiens
ttctaggggtaattgatgctctgga

SEQ ID NO: 34810 - DNA, 25 bp, Homo sapiens
tttacaacaactccaggaaggctgg

SEQ ID NO: 34811 - DNA, 25 bp, Homo sapiens
agcctctaatcgtaggtagtatctg

SEQ ID NO: 34812 - DNA, 25 bp, Homo sapiens
ttccattatgggcagctgtctcacc

SEQ ID NO: 34813 - DNA, 25 bp, Homo sapiens
gtttggctctaatcttctctgcata

SEQ ID NO: 34814 - DNA, 25 bp, Homo sapiens
gcagagtctcaatggggccttcaga

SEQ ID NO: 34815 - DNA, 25 bp, Homo sapiens
ctatcctaaggcctgcgtgtgaccc

SEQ ID NO: 34816 - DNA, 25 bp, Homo sapiens
tcacttaggatgctcgtcaactttc

SEQ ID NO: 34817 - DNA, 25 bp, Homo sapiens
gagctgcatgttctgtctgtaaaaa

SEQ ID NO: 34818 - DNA, 25 bp, Homo sapiens
gcttgcctaaagagatgaatttttc

SEQ ID NO: 34819 - DNA, 25 bp, Homo sapiens
agaagtaaggaacaagacaaaattc

SEQ ID NO: 34820 - DNA, 25 bp, Homo sapiens
taaatcacatcctgtgagaaacatt

SEQ ID NO: 34821 - DNA, 25 bp, Homo sapiens
taacactttctctgaactgccaaga

SEQ ID NO: 34822 - DNA, 25 bp, Homo sapiens
cacaacaaagaaaaaaattgtattt

SEQ ID NO: 34823 - DNA, 25 bp, Homo sapiens
tcacgatgtgtctcaatgacaaccc

SEQ ID NO: 34824 - DNA, 25 bp, Homo sapiens
cctgagtcctgaagtacctataccc

SEQ ID NO: 34825 - DNA, 25 bp, Homo sapiens
tgtacgccttcccagaggtcattta

SEQ ID NO: 34826 - DNA, 25 bp, Homo sapiens
gtgctcagagactgccttgaaaata

SEQ ID NO: 34827 - DNA, 25 bp, Homo sapiens
agaggactccatgtagctatgtcta

SEQ ID NO: 34828 - DNA, 25 bp, Homo sapiens
ctgagtgaaagtaactgtatttgct

SEQ ID NO: 34829 - DNA, 25 bp, Homo sapiens
gagacggcccatctacattttagta

SEQ ID NO: 34830 - DNA, 25 bp, Homo sapiens
gagaggcctcacactgaaacattta

SEQ ID NO: 34831 - DNA, 25 bp, Homo sapiens
cactttaaatttttgtttgttaatt

SEQ ID NO: 34832 - DNA, 25 bp, Homo sapiens
caagttatggccatattcatacgtc

SEQ ID NO: 34833 - DNA, 25 bp, Homo sapiens
agtttggtttttggtaacattaata

SEQ ID NO: 34834 - DNA, 25 bp, Homo sapiens
gtcttctgatttctccactctttgg

SEQ ID NO: 34835 - DNA, 25 bp, Homo sapiens
ttttatatttcacacattctcccaa

SEQ ID NO: 34836 - DNA, 25 bp, Homo sapiens
gctgaattgtgttgccctaaaaatg

SEQ ID NO: 34837 - DNA, 25 bp, Homo sapiens
aggctgaaatgctctgcttcttcta

SEQ ID NO: 34838 - DNA, 25 bp, Homo sapiens
tcccttgtctgaaacgtttaaattg

SEQ ID NO: 34839 - DNA, 25 bp, Homo sapiens
agttttcagccctcaatctttggta

SEQ ID NO: 34840 - DNA, 25 bp, Homo sapiens
agggtttggcattttcccagtgata

SEQ ID NO: 34841 - DNA, 25 bp, Homo sapiens
catcttaagcgtgtgtttgtatata

SEQ ID NO: 34842 - DNA, 25 bp, Homo sapiens
ggtgccacatgtattctcctagtta

SEQ ID NO: 34843 - DNA, 25 bp, Homo sapiens
cctgagattatgctttctggaaaga

SEQ ID NO: 34844 - DNA, 25 bp, Homo sapiens
gtcaactccccatgtacttcaaggt

SEQ ID NO: 34845 - DNA, 25 bp, Homo sapiens
tgtttaatacacattacttttaggg

SEQ ID NO: 34846 - DNA, 25 bp, Homo sapiens
ttttatacatcaaaaaaaagaatgg

SEQ ID NO: 34847 - DNA, 25 bp, Homo sapiens
gaggcttattccctaacattggtgt

SEQ ID NO: 34848 - DNA, 25 bp, Homo sapiens
ttaccagatattatgtttgacacct

SEQ ID NO: 34849 - DNA, 25 bp, Homo sapiens
caggaactgataagggtggctataa

SEQ ID NO: 34850 - DNA, 25 bp, Homo sapiens
gcccacttatgtggcagataccata

SEQ ID NO: 34851 - DNA, 25 bp, Homo sapiens
cctggggactcttacacttttcaga

SEQ ID NO: 34852 - DNA, 25 bp, Homo sapiens
cactgggcatatgttgatttaggca

SEQ ID NO: 34853 - DNA, 25 bp, Homo sapiens
tggctaacaaataacgatccattga

SEQ ID NO: 34854 - DNA, 25 bp, Homo sapiens
ggctacctctggaatcaactgaata

SEQ ID NO: 34855 - DNA, 25 bp, Homo sapiens
tggagttcatgacttcaatacagga

SEQ ID NO: 34856 - DNA, 25 bp, Homo sapiens
ggattcttttccctaggtgcacttg

SEQ ID NO: 34857 - DNA, 25 bp, Homo sapiens
tctcctctgtgtatgtccttgttta

SEQ ID NO: 34858 - DNA, 25 bp, Homo sapiens
aacactgttgcaagggtctttcata

SEQ ID NO: 34859 - DNA, 25 bp, Homo sapiens
taccagtcttatgtatactggggca

SEQ ID NO: 34860 - DNA, 25 bp, Homo sapiens
tggccatggcctcttacgtaacttg

SEQ ID NO: 34861 - DNA, 25 bp, Homo sapiens
tcgcaggtgcttctgtcatcagtca

SEQ ID NO: 34862 - DNA, 25 bp, Homo sapiens
atacataatatatttccttttgctc

SEQ ID NO: 34863 - DNA, 25 bp, Homo sapiens
ttttaagaattctcacaaatcaatg

SEQ ID NO: 34864 - DNA, 25 bp, Homo sapiens
ttctctctgacatagcggtgtaaga

SEQ ID NO: 34865 - DNA, 25 bp, Homo sapiens
cgctgggtcctgaatattcctttta

SEQ ID NO: 34866 - DNA, 25 bp, Homo sapiens
gctaccactggctttctgacaatca

SEQ ID NO: 34867 - DNA, 25 bp, Homo sapiens
catcccgagagaggcattgtttatc

SEQ ID NO: 34868 - DNA, 25 bp, Homo sapiens
caagggaatggtttctcagtgatac

SEQ ID NO: 34869 - DNA, 25 bp, Homo sapiens
aacctacttctttgatgtcttcatg

SEQ ID NO: 34870 - DNA, 25 bp, Homo sapiens
aaaatctgttgtattgggaaaggca

SEQ ID NO: 34871 - DNA, 25 bp, Homo sapiens
catgctgcttggttcttgctctaaa

SEQ ID NO: 34872 - DNA, 25 bp, Homo sapiens
ctggactctctgattccttgcaaga

SEQ ID NO: 34873 - DNA, 25 bp, Homo sapiens
cctcgttttcgtcttgtgccatgca

SEQ ID NO: 34874 - DNA, 25 bp, Homo sapiens
gctctgcagcttgacataaactcta

SEQ ID NO: 34875 - DNA, 25 bp, Homo sapiens
ggtttcggccatactgaatcaatga

SEQ ID NO: 34876 - DNA, 25 bp, Homo sapiens
tgactgataataatttgaagagcca

SEQ ID NO: 34877 - DNA, 25 bp, Homo sapiens
gaatttaaaactatctttaagtaag

SEQ ID NO: 34878 - DNA, 25 bp, Homo sapiens
ctcatggatgtgcaagtaggctaca

SEQ ID NO: 34879 - DNA, 25 bp, Homo sapiens
tggaagtacctaaaacgcaggcatc

SEQ ID NO: 34880 - DNA, 25 bp, Homo sapiens
tcttctgtctcagagaagaacaata

SEQ ID NO: 34881 - DNA, 25 bp, Homo sapiens
ccttcgcccttcaatttcctggttg

SEQ ID NO: 34882 - DNA, 25 bp, Homo sapiens
taaagtcctttcacattctctccag

SEQ ID NO: 34883 - DNA, 25 bp, Homo sapiens
gtaagcctctaagttccaatcccag

SEQ ID NO: 34884 - DNA, 25 bp, Homo sapiens
tgactctttgtccaagtgccatttc

SEQ ID NO: 34885 - DNA, 25 bp, Homo sapiens
tcctatagggtgagatggcatttcc

SEQ ID NO: 34886 - DNA, 25 bp, Homo sapiens
tgagtgcattcattcctagggaaaa

SEQ ID NO: 34887 - DNA, 25 bp, Homo sapiens
ccgctttgggtaaaagtgcaaactt

SEQ ID NO: 34888 - DNA, 25 bp, Homo sapiens
acccagtcaactgcagtacttttta

SEQ ID NO: 34889 - DNA, 25 bp, Homo sapiens
tggaccgtgatgtacctagcacttc

SEQ ID NO: 34890 - DNA, 25 bp, Homo sapiens
cccaaatactcctattcttagatat

SEQ ID NO: 34891 - DNA, 25 bp, Homo sapiens
accaggtcctggctcttaaagaaca

SEQ ID NO: 34892 - DNA, 25 bp, Homo sapiens
ggattgcctgtctttgcagagtcta

SEQ ID NO: 34893 - DNA, 25 bp, Homo sapiens
ctgtggctatgttgttcagcacata

SEQ ID NO: 34894 - DNA, 25 bp, Homo sapiens
gtttctgtatgttgcacttgtccca

SEQ ID NO: 34895 - DNA, 25 bp, Homo sapiens
aaaatttcattttgtagaatggaaa

SEQ ID NO: 34896 - DNA, 25 bp, Homo sapiens
tgatctccagtgtccagcaaaaatg

SEQ ID NO: 34897 - DNA, 25 bp, Homo sapiens
gcctgtcatagagtagagattcttc

SEQ ID NO: 34898 - DNA, 25 bp, Homo sapiens
gagtgtgcccactaggatttcttta

SEQ ID NO: 34899 - DNA, 25 bp, Homo sapiens
gaccactggcgacaaggaaatcttt

SEQ ID NO: 34900 - DNA, 25 bp, Homo sapiens
gactgtatagatatataaccattag

SEQ ID NO: 34901 - DNA, 25 bp, Homo sapiens
aggtcaagcgacatcaaacaatata

SEQ ID NO: 34902 - DNA, 25 bp, Homo sapiens
tctagcatgatcaaccaagatgtct

SEQ ID NO: 34903 - DNA, 25 bp, Homo sapiens
aaaactaactttttgcctttatgtt

SEQ ID NO: 34904 - DNA, 25 bp, Homo sapiens
tttttcagtcaataaataggcaaaa

SEQ ID NO: 34905 - DNA, 25 bp, Homo sapiens
gccctgttttgcttctctgttttaa

SEQ ID NO: 34906 - DNA, 25 bp, Homo sapiens
ttctttcaatgtgcaggctatcctg

SEQ ID NO: 34907 - DNA, 25 bp, Homo sapiens
ggatgagctgccaagatttctttta

SEQ ID NO: 34908 - DNA, 25 bp, Homo sapiens
gcaacttttagccagatcactcgaa

SEQ ID NO: 34909 - DNA, 25 bp, Homo sapiens
gaaaatatattttctgccttgactc

SEQ ID NO: 34910 - DNA, 25 bp, Homo sapiens
aatatcaaaaattaaaaagggaaca

SEQ ID NO: 34911 - DNA, 25 bp, Homo sapiens
ttgatctataactcatgccagactc

SEQ ID NO: 34912 - DNA, 25 bp, Homo sapiens
aatgcatagaatatatatttctaac

SEQ ID NO: 34913 - DNA, 25 bp, Homo sapiens
atccttcccaaggtgaaactacgta

SEQ ID NO: 34914 - DNA, 25 bp, Homo sapiens
atggctttgtagtggtcttatagga

SEQ ID NO: 34915 - DNA, 25 bp, Homo sapiens
aggactgggtattgcaactgttgta

SEQ ID NO: 34916 - DNA, 25 bp, Homo sapiens
ctgctgagtgcgtgtcttgtaaatc

SEQ ID NO: 34917 - DNA, 25 bp, Homo sapiens
ctggtgattctgcaaggtcctacga

SEQ ID NO: 34918 - DNA, 25 bp, Homo sapiens
agctgtctttgccaggagctcctga

SEQ ID NO: 34919 - DNA, 25 bp, Homo sapiens
accctgctgtttaccacaaagtctg

SEQ ID NO: 34920 - DNA, 25 bp, Homo sapiens
gacggaggtctgaaagcatatacta

SEQ ID NO: 34921 - DNA, 25 bp, Homo sapiens
aaccatcttgtatcttgggctagaa

SEQ ID NO: 34922 - DNA, 25 bp, Homo sapiens
tctagtctgaacttggattgccatc

SEQ ID NO: 34923 - DNA, 25 bp, Homo sapiens
tatgcagctatcttggaacaggccc

SEQ ID NO: 34924 - DNA, 25 bp, Homo sapiens
gtaccttcacctattctcacatgtg

SEQ ID NO: 34925 - DNA, 25 bp, Homo sapiens
aaagctcctgtttccacatagttgg

SEQ ID NO: 34926 - DNA, 25 bp, Homo sapiens
tgtgccaaattgtactccaaacaga

SEQ ID NO: 34927 - DNA, 25 bp, Homo sapiens
tctgacctcagggaaagcagctacc

SEQ ID NO: 34928 - DNA, 25 bp, Homo sapiens
ttacctgtagtattatcttcataat

SEQ ID NO: 34929 - DNA, 25 bp, Homo sapiens
cttgtctggcatcctgctgagatta

SEQ ID NO: 34930 - DNA, 25 bp, Homo sapiens
actggagcgtttgcgtatgtgtgtt

SEQ ID NO: 34931 - DNA, 25 bp, Homo sapiens
ctcagatggtacaaatttgtgatta

SEQ ID NO: 34932 - DNA, 25 bp, Homo sapiens
gtatgtctatacttcctttctccaa

SEQ ID NO: 34933 - DNA, 25 bp, Homo sapiens
atgagctctttaagattaagtgctt

SEQ ID NO: 34934 - DNA, 25 bp, Homo sapiens
ctacaaagtttctaagccaggttcc

SEQ ID NO: 34935 - DNA, 25 bp, Homo sapiens
gatgtctcatatgttgcactgccca

SEQ ID NO: 34936 - DNA, 25 bp, Homo sapiens
gatgtttaacttccctttctagagg

SEQ ID NO: 34937 - DNA, 25 bp, Homo sapiens
tgctgatccataggcacacgtagga

SEQ ID NO: 34938 - DNA, 25 bp, Homo sapiens
ggccttggtccctgctatcactatt

SEQ ID NO: 34939 - DNA, 25 bp, Homo sapiens
ctcaggcagggcatcccaatttgta

SEQ ID NO: 34940 - DNA, 25 bp, Homo sapiens
gaggctgcttcatttctagtatctg

SEQ ID NO: 34941 - DNA, 25 bp, Homo sapiens
aaatcacaaaaacaaatatatagtg

SEQ ID NO: 34942 - DNA, 25 bp, Homo sapiens
ccttggctccattctacagctagta

SEQ ID NO: 34943 - DNA, 25 bp, Homo sapiens
tggcttttccgttcctctgtgttta

SEQ ID NO: 34944 - DNA, 25 bp, Homo sapiens
gcttgctgttgaaatacctgtttta

SEQ ID NO: 34945 - DNA, 25 bp, Homo sapiens
tgtctcttttgcctagggcccgaaa

SEQ ID NO: 34946 - DNA, 25 bp, Homo sapiens
ctggagggtagataataaataaact

SEQ ID NO: 34947 - DNA, 25 bp, Homo sapiens
atcctctcttgacctggcaactttg

SEQ ID NO: 34948 - DNA, 25 bp, Homo sapiens
ggtctatctgccagttgcatacttg

SEQ ID NO: 34949 - DNA, 25 bp, Homo sapiens
ttgaagcaacctctgtcagcctaga

SEQ ID NO: 34950 - DNA, 25 bp, Homo sapiens
caataagtggttaacaaacatatat

SEQ ID NO: 34951 - DNA, 25 bp, Homo sapiens
ggccctgccctgaattctatttgtc

SEQ ID NO: 34952 - DNA, 25 bp, Homo sapiens
atgcacagcctctcagcctagttta

SEQ ID NO: 34953 - DNA, 25 bp, Homo sapiens
agtcactgctttgctgaggcattta

SEQ ID NO: 34954 - DNA, 25 bp, Homo sapiens
caggatgaagctctcttgtctgatc

SEQ ID NO: 34955 - DNA, 25 bp, Homo sapiens
ctgggaactttaacagtatggtctc

SEQ ID NO: 34956 - DNA, 25 bp, Homo sapiens
gggatgatcaacagtaaccaatttc

SEQ ID NO: 34957 - DNA, 25 bp, Homo sapiens
gtgccctggctcagaatttaaaatc

SEQ ID NO: 34958 - DNA, 25 bp, Homo sapiens
gaaggcctgtgctcaatttatctgc

SEQ ID NO: 34959 - DNA, 25 bp, Homo sapiens
cccttgcaatgaataaagcatgata

SEQ ID NO: 34960 - DNA, 25 bp, Homo sapiens
ccaactagggcttgattatttcacc

SEQ ID NO: 34961 - DNA, 25 bp, Homo sapiens
ctctgcattccgctaactgtagtga

SEQ ID NO: 34962 - DNA, 25 bp, Homo sapiens
gggctgagctcctttccagaacttt

SEQ ID NO: 34963 - DNA, 25 bp, Homo sapiens
aaagcatttgttcaggcccagagca

SEQ ID NO: 34964 - DNA, 25 bp, Homo sapiens
taaaccattttgatgcggcagtgac

SEQ ID NO: 34965 - DNA, 25 bp, Homo sapiens
atgttaattattttttcttcctcca

SEQ ID NO: 34966 - DNA, 25 bp, Homo sapiens
gatgggcaattctctcctgatatga

SEQ ID NO: 34967 - DNA, 25 bp, Homo sapiens
gcactgtctgtcagcatgctcactg

SEQ ID NO: 34968 - DNA, 25 bp, Homo sapiens
ctcttctattggacaggaggtcttg

SEQ ID NO: 34969 - DNA, 25 bp, Homo sapiens
tgtctctgacatctcttggtttttg

SEQ ID NO: 34970 - DNA, 25 bp, Homo sapiens
tcacacagtgacaggtaagttcctc

SEQ ID NO: 34971 - DNA, 25 bp, Homo sapiens
ggcaagagccatcacccagtggtaa

SEQ ID NO: 34972 - DNA, 25 bp, Homo sapiens
caagggtctggagaaaatctttaca

SEQ ID NO: 34973 - DNA, 25 bp, Homo sapiens
tgtcctgacaggaaagccactcatg

SEQ ID NO: 34974 - DNA, 25 bp, Homo sapiens
cacagtgtggctccttttttactca

SEQ ID NO: 34975 - DNA, 25 bp, Homo sapiens
tctcaggcagggaaaggtcaatgtt

SEQ ID NO: 34976 - DNA, 25 bp, Homo sapiens
gtgccctcttgtaaacaggatcttg

SEQ ID NO: 34977 - DNA, 25 bp, Homo sapiens
gactctgtgaggtgatttctataaa

SEQ ID NO: 34978 - DNA, 25 bp, Homo sapiens
aaaggtagatattctgaaggaatta

SEQ ID NO: 34979 - DNA, 25 bp, Homo sapiens
ggactcaggcagaaaactctatatg

SEQ ID NO: 34980 - DNA, 25 bp, Homo sapiens
tattcattctactgggcaaagcaga

SEQ ID NO: 34981 - DNA, 25 bp, Homo sapiens
tggtgccctttcaggacctttccta

SEQ ID NO: 34982 - DNA, 25 bp, Homo sapiens
agtttcttatatgtttttcacttga

SEQ ID NO: 34983 - DNA, 25 bp, Homo sapiens
aggcatccctggtatctgaggcaga

SEQ ID NO: 34984 - DNA, 25 bp, Homo sapiens
gcagaagagtgcatcaggatgctta

SEQ ID NO: 34985 - DNA, 25 bp, Homo sapiens
ggtgacagttttaagaagctctaat

SEQ ID NO: 34986 - DNA, 25 bp, Homo sapiens
agcccagctgcatttttggacaaga

SEQ ID NO: 34987 - DNA, 25 bp, Homo sapiens
aatcggctgggcttctttgacttca

SEQ ID NO: 34988 - DNA, 25 bp, Homo sapiens
actccggattgactacactgaaaga

SEQ ID NO: 34989 - DNA, 25 bp, Homo sapiens
cccaatggctgtgtccttgaaatcc

SEQ ID NO: 34990 - DNA, 25 bp, Homo sapiens
tgtcttggattcagggcaggttttc

SEQ ID NO: 34991 - DNA, 25 bp, Homo sapiens
agctcttgctgtagtccctggttgc

SEQ ID NO: 34992 - DNA, 25 bp, Homo sapiens
cacgtgctttcccagagtaaggttc

SEQ ID NO: 34993 - DNA, 25 bp, Homo sapiens
aaaataaaaaagcttctgtttccac

SEQ ID NO: 34994 - DNA, 25 bp, Homo sapiens
tgtggccactgtcctcataaagttg

SEQ ID NO: 34995 - DNA, 25 bp, Homo sapiens
gtgaggcttttctccaactccttgg

SEQ ID NO: 34996 - DNA, 25 bp, Homo sapiens
tctatgggccaacagcaaaatcgtg

SEQ ID NO: 34997 - DNA, 25 bp, Homo sapiens
tggatctcctctacctctctgtata

SEQ ID NO: 34998 - DNA, 25 bp, Homo sapiens
taccaacaaagctccaaaatactgt

SEQ ID NO: 34999 - DNA, 25 bp, Homo sapiens
gggaattggtacacagacccatatc

SEQ ID NO: 35000 - DNA, 25 bp, Homo sapiens
gcttccctccaagaaatgacataga

SEQ ID NO: 35001 - DNA, 25 bp, Homo sapiens
ttggctctctctgctgctgacatga

SEQ ID NO: 35002 - DNA, 25 bp, Homo sapiens
tgcccattgaagtcgccaaagaaac

SEQ ID NO: 35003 - DNA, 25 bp, Homo sapiens
tgttctttaccagcggaccgtttga

SEQ ID NO: 35004 - DNA, 25 bp, Homo sapiens
atcctgagtgctcgcgaagaacttc

SEQ ID NO: 35005 - DNA, 25 bp, Homo sapiens
atcggcagtctttgctggagacatc

SEQ ID NO: 35006 - DNA, 25 bp, Homo sapiens
cgttacaccgtaggggaagtactca

SEQ ID NO: 35007 - DNA, 25 bp, Homo sapiens
tttcagcctttcgatggagaacatg

SEQ ID NO: 35008 - DNA, 25 bp, Homo sapiens
ctggcacccagaggactagtactga

SEQ ID NO: 35009 - DNA, 25 bp, Homo sapiens
ttggaacctgacagccacgattgtg

SEQ ID NO: 35010 - DNA, 25 bp, Homo sapiens
gggagcaggtttccaagtcagttta

SEQ ID NO: 35011 - DNA, 25 bp, Homo sapiens
tggcccatcaaagtacatgctgttc

SEQ ID NO: 35012 - DNA, 25 bp, Homo sapiens
ggtctgtcacctcagctccacgatg

SEQ ID NO: 35013 - DNA, 25 bp, Homo sapiens
tcccaggttgacaataagatgcttc

SEQ ID NO: 35014 - DNA, 25 bp, Homo sapiens
gtccggtaagcttttgcacatcata

SEQ ID NO: 35015 - DNA, 25 bp, Homo sapiens
gtgtccatacagactccttatcgtg

SEQ ID NO: 35016 - DNA, 25 bp, Homo sapiens
taggttctggattacggatctcatc

SEQ ID NO: 35017 - DNA, 25 bp, Homo sapiens
ggcaccattgggtctctactccata

SEQ ID NO: 35018 - DNA, 25 bp, Homo sapiens
aggaagcattgcatctgacatcaga

SEQ ID NO: 35019 - DNA, 25 bp, Homo sapiens
gttgaagactccaatacctgcaaac

SEQ ID NO: 35020 - DNA, 25 bp, Homo sapiens
agctgctgctgacattctccttctc

SEQ ID NO: 35021 - DNA, 25 bp, Homo sapiens
tggccttcacggatggagctctcaa

SEQ ID NO: 35022 - DNA, 25 bp, Homo sapiens
ggggatcatacggattccagtacta

SEQ ID NO: 35023 - DNA, 25 bp, Homo sapiens
cagaccttgggcttgattgtatatg

SEQ ID NO: 35024 - DNA, 25 bp, Homo sapiens
caacggctcctgtcatccatgtagt

SEQ ID NO: 35025 - DNA, 25 bp, Homo sapiens
gatgggcaccatctcagcagcagca

SEQ ID NO: 35026 - DNA, 25 bp, Homo sapiens
tagagcaaaccctcaatttcagtgg

SEQ ID NO: 35027 - DNA, 25 bp, Homo sapiens
gccaggggcttctctttcaggttaa

SEQ ID NO: 35028 - DNA, 25 bp, Homo sapiens
catgggtacctttgtgtcaaaattc

SEQ ID NO: 35029 - DNA, 25 bp, Homo sapiens
aatggcacaatgctggctccctgca

SEQ ID NO: 35030 - DNA, 25 bp, Homo sapiens
tgtggaccagagtatcagattgatc

SEQ ID NO: 35031 - DNA, 25 bp, Homo sapiens
ctgtatttcttgctctttgaccgga

SEQ ID NO: 35032 - DNA, 25 bp, Homo sapiens
taaaatagtttgtatatttgttctc

SEQ ID NO: 35033 - DNA, 25 bp, Homo sapiens
cctcctcccaatactgactaaaatt

SEQ ID NO: 35034 - DNA, 25 bp, Homo sapiens
ctctctctgggttttaggttgtata

SEQ ID NO: 35035 - DNA, 25 bp, Homo sapiens
ctaaatagagtcctatctctcttgg

SEQ ID NO: 35036 - DNA, 25 bp, Homo sapiens
ccaagcctgatctggtgtcctatga

SEQ ID NO: 35037 - DNA, 25 bp, Homo sapiens
ctgaggcaaaattagagagtgtata

SEQ ID NO: 35038 - DNA, 25 bp, Homo sapiens
cgttcttgcattcctacaaattctt

SEQ ID NO: 35039 - DNA, 25 bp, Homo sapiens
caccatgtcattttaaactgcccag

SEQ ID NO: 35040 - DNA, 25 bp, Homo sapiens
tggcaaggggtctgttcttaaatcc

SEQ ID NO: 35041 - DNA, 25 bp, Homo sapiens
ttgccaatgatgtgagacctccctg

SEQ ID NO: 35042 - DNA, 25 bp, Homo sapiens
gcatttgattacaggtggattgttt

SEQ ID NO: 35043 - DNA, 25 bp, Homo sapiens
tgtgcctttcacagcagatgtcttc

SEQ ID NO: 35044 - DNA, 25 bp, Homo sapiens
tgcaaccctggtaaactgctcaaga

SEQ ID NO: 35045 - DNA, 25 bp, Homo sapiens
gggctaaattactcacaggtgcttc

SEQ ID NO: 35046 - DNA, 25 bp, Homo sapiens
tgagaactatccctctctgtttgcc

SEQ ID NO: 35047 - DNA, 25 bp, Homo sapiens
tgctctagcaagggaaaatctgtag

SEQ ID NO: 35048 - DNA, 25 bp, Homo sapiens
gcttgcatgcacacacacgtttgta

SEQ ID NO: 35049 - DNA, 25 bp, Homo sapiens
ggtttaaccacaatcttctgctgca

SEQ ID NO: 35050 - DNA, 25 bp, Homo sapiens
tggatgtagcccaaccctgtcaatc

SEQ ID NO: 35051 - DNA, 25 bp, Homo sapiens
aaggggtaatgctcacagctgtttc

SEQ ID NO: 35052 - DNA, 25 bp, Homo sapiens
ccagggttaccggttagttctaata

SEQ ID NO: 35053 - DNA, 25 bp, Homo sapiens
tggaggcccactgatctatgaaaca

SEQ ID NO: 35054 - DNA, 25 bp, Homo sapiens
ccctgcccatattgagaagacgata

SEQ ID NO: 35055 - DNA, 25 bp, Homo sapiens
ctctctgtggtctctgatactagta

SEQ ID NO: 35056 - DNA, 25 bp, Homo sapiens
gcttagatagctaggtgccataacc

SEQ ID NO: 35057 - DNA, 25 bp, Homo sapiens
tccaggactgttttcgttacaactc

SEQ ID NO: 35058 - DNA, 25 bp, Homo sapiens
gcttcacattgtattaccgtcttga

SEQ ID NO: 35059 - DNA, 25 bp, Homo sapiens
taggagcagcaaaagtactgttttt

SEQ ID NO: 35060 - DNA, 25 bp, Homo sapiens
ctgggaacctcataagtcacaagta

SEQ ID NO: 35061 - DNA, 25 bp, Homo sapiens
tccctcccaggcaagcaatgaaagc

SEQ ID NO: 35062 - DNA, 25 bp, Homo sapiens
ggggctgatgctgacttgaaagttc

SEQ ID NO: 35063 - DNA, 25 bp, Homo sapiens
cctgaaatatggctgacaaatggta

SEQ ID NO: 35064 - DNA, 25 bp, Homo sapiens
tgcccggactatggaaacagaactg

SEQ ID NO: 35065 - DNA, 25 bp, Homo sapiens
tggagcccatatttgtgccatattc

SEQ ID NO: 35066 - DNA, 25 bp, Homo sapiens
ccatggccatctatgctgctgaaca

SEQ ID NO: 35067 - DNA, 25 bp, Homo sapiens
gcctgattctttggagtcttactga

SEQ ID NO: 35068 - DNA, 25 bp, Homo sapiens
actggggctttctttcatatatgtc

SEQ ID NO: 35069 - DNA, 25 bp, Homo sapiens
cccattgtaagttgaggagcatttc

SEQ ID NO: 35070 - DNA, 25 bp, Homo sapiens
aaccaactggtattttatgattatc

SEQ ID NO: 35071 - DNA, 25 bp, Homo sapiens
gaccaaaagaacttcccaatataga

SEQ ID NO: 35072 - DNA, 25 bp, Homo sapiens
gggtttgctacttcctcacagttta

SEQ ID NO: 35073 - DNA, 25 bp, Homo sapiens
gctcagctggcaggtacctttgcta

SEQ ID NO: 35074 - DNA, 25 bp, Homo sapiens
tttcccgcaagtggtagtaatttcc

SEQ ID NO: 35075 - DNA, 25 bp, Homo sapiens
tccaggttcttcaagtgttaaaggc

SEQ ID NO: 35076 - DNA, 25 bp, Homo sapiens
tgcagtaatatttccaagggcatta

SEQ ID NO: 35077 - DNA, 25 bp, Homo sapiens
agtccacacactggggcgcttctta

SEQ ID NO: 35078 - DNA, 25 bp, Homo sapiens
ggagtcccttatgagatacgtgatt

SEQ ID NO: 35079 - DNA, 25 bp, Homo sapiens
ggctagtgtcccttgcaattccata

SEQ ID NO: 35080 - DNA, 25 bp, Homo sapiens
cacacatatgtatatattccccatg

SEQ ID NO: 35081 - DNA, 25 bp, Homo sapiens
attgaaactcatttactgaatacaa

SEQ ID NO: 35082 - DNA, 25 bp, Homo sapiens
tgtacccttgttcttaaaattttta

SEQ ID NO: 35083 - DNA, 25 bp, Homo sapiens
tcttaggaacctagccatttggatc

SEQ ID NO: 35084 - DNA, 25 bp, Homo sapiens
ttcttcaatataggggagctggctt

SEQ ID NO: 35085 - DNA, 25 bp, Homo sapiens
tcctggggacttgacattgtattta

SEQ ID NO: 35086 - DNA, 25 bp, Homo sapiens
aagatctgctttggctggacatacc

SEQ ID NO: 35087 - DNA, 25 bp, Homo sapiens
ggcagtttctttgtccatgtgaatc

SEQ ID NO: 35088 - DNA, 25 bp, Homo sapiens
gcccatgcttttgtgccaatctcaa

SEQ ID NO: 35089 - DNA, 25 bp, Homo sapiens
gcaaggcagaaagctacggtacaca

SEQ ID NO: 35090 - DNA, 25 bp, Homo sapiens
gcccttgttctgttgggtcctcaca

SEQ ID NO: 35091 - DNA, 25 bp, Homo sapiens
tccgctaaagggagtgctcagtact

SEQ ID NO: 35092 - DNA, 25 bp, Homo sapiens
accatgttgataagaatagaacttt

SEQ ID NO: 35093 - DNA, 25 bp, Homo sapiens
taaagttttatgggaacacacacac

SEQ ID NO: 35094 - DNA, 25 bp, Homo sapiens
tggtcctgtcagaaaccctcagttc

SEQ ID NO: 35095 - DNA, 25 bp, Homo sapiens
agtgctgaaatcctctgtgcatttg

SEQ ID NO: 35096 - DNA, 25 bp, Homo sapiens
catcgttgtggtttttggtgctctc

SEQ ID NO: 35097 - DNA, 25 bp, Homo sapiens
gagacgttaaggtacagggaaaatc

SEQ ID NO: 35098 - DNA, 25 bp, Homo sapiens
gctctgcggtaccaagattcacata

SEQ ID NO: 35099 - DNA, 25 bp, Homo sapiens
cagtctgctgggaaacctataatta

SEQ ID NO: 35100 - DNA, 25 bp, Homo sapiens
gggtgctgacctagccagtaaaatc

SEQ ID NO: 35101 - DNA, 25 bp, Homo sapiens
ctttgagtttaaccagggaaatccc

SEQ ID NO: 35102 - DNA, 25 bp, Homo sapiens
ggggtccatgacactattacctgtt

SEQ ID NO: 35103 - DNA, 25 bp, Homo sapiens
ttttaaagtgtattgcaggagttcc

SEQ ID NO: 35104 - DNA, 25 bp, Homo sapiens
tattatggcattggagcagagcagc

SEQ ID NO: 35105 - DNA, 25 bp, Homo sapiens
tggctaaattaaccctgcatgagac

SEQ ID NO: 35106 - DNA, 25 bp, Homo sapiens
catgctatctggcttctggagtccc

SEQ ID NO: 35107 - DNA, 25 bp, Homo sapiens
tccaccaggtgccattatttttaga

SEQ ID NO: 35108 - DNA, 25 bp, Homo sapiens
gttttctctaggctggggacacata

SEQ ID NO: 35109 - DNA, 25 bp, Homo sapiens
cctaggtgtcttgttgggcaatctg

SEQ ID NO: 35110 - DNA, 25 bp, Homo sapiens
tggctcacaactctggatatccttc

SEQ ID NO: 35111 - DNA, 25 bp, Homo sapiens
cccagctctgtggagccagaatctc

SEQ ID NO: 35112 - DNA, 25 bp, Homo sapiens
ggaccctgtttatatcaccaagcta

SEQ ID NO: 35113 - DNA, 25 bp, Homo sapiens
aatacagttatgttaaagtctacca

SEQ ID NO: 35114 - DNA, 25 bp, Homo sapiens
ggctcttgactttcaggcgaatata

SEQ ID NO: 35115 - DNA, 25 bp, Homo sapiens
ggagctggctaaggtacaatattta

SEQ ID NO: 35116 - DNA, 25 bp, Homo sapiens
ctcaggccgtgcagtctttaaaagg

SEQ ID NO: 35117 - DNA, 25 bp, Homo sapiens
cttcgtctaaggcaagctagttcca

SEQ ID NO: 35118 - DNA, 25 bp, Homo sapiens
tggtctacagatgaagcctattgtc

SEQ ID NO: 35119 - DNA, 25 bp, Homo sapiens
tagaagtactctccatccaaggatg

SEQ ID NO: 35120 - DNA, 25 bp, Homo sapiens
tcccaaatttggtctgtgtcaaacc

SEQ ID NO: 35121 - DNA, 25 bp, Homo sapiens
taaggctctcttgccagctccagta

SEQ ID NO: 35122 - DNA, 25 bp, Homo sapiens
tgggtccacatgaaactagagtctc

SEQ ID NO: 35123 - DNA, 25 bp, Homo sapiens
tggggtaaatttgcagaatgtaggc

SEQ ID NO: 35124 - DNA, 25 bp, Homo sapiens
acatttccctatttattttgtttta

SEQ ID NO: 35125 - DNA, 25 bp, Homo sapiens
tgtattttggatatggggatggggt

SEQ ID NO: 35126 - DNA, 25 bp, Homo sapiens
tggccatcatacagacacaggaagg

SEQ ID NO: 35127 - DNA, 25 bp, Homo sapiens
gttatgggagttctgcccctttagt

SEQ ID NO: 35128 - DNA, 25 bp, Homo sapiens
acctgctgctgctctaagtgctatg

SEQ ID NO: 35129 - DNA, 25 bp, Homo sapiens
atcctgtgctggcttcatacttgaa

SEQ ID NO: 35130 - DNA, 25 bp, Homo sapiens
tcaaagcattttgggatctaactcc

SEQ ID NO: 35131 - DNA, 25 bp, Homo sapiens
aggcagagcctcagaaagttcttga

SEQ ID NO: 35132 - DNA, 25 bp, Homo sapiens
ggctttctggttcttgtcatgctta

SEQ ID NO: 35133 - DNA, 25 bp, Homo sapiens
ggctggcatccctgatcattaatta

SEQ ID NO: 35134 - DNA, 25 bp, Homo sapiens
tcctaagggtttgttgaggcaccac

SEQ ID NO: 35135 - DNA, 25 bp, Homo sapiens
tataaatgttgcaacctttgctatg

SEQ ID NO: 35136 - DNA, 25 bp, Homo sapiens
cctggactcctcatagcatgggatg

SEQ ID NO: 35137 - DNA, 25 bp, Homo sapiens
tggtttcccaaacagtcactgcaga

SEQ ID NO: 35138 - DNA, 25 bp, Homo sapiens
acggcttccactaacttttccttga

SEQ ID NO: 35139 - DNA, 25 bp, Homo sapiens
ttcttggttacatatctaggaatag

SEQ ID NO: 35140 - DNA, 25 bp, Homo sapiens
gcaggaaatttctccatagccacta

SEQ ID NO: 35141 - DNA, 25 bp, Homo sapiens
caccagaaaagcttgggcaccatca

SEQ ID NO: 35142 - DNA, 25 bp, Homo sapiens
acacctgggcaacggaaattttctg

SEQ ID NO: 35143 - DNA, 25 bp, Homo sapiens
gggcaagccgtttctctagtcaatt

SEQ ID NO: 35144 - DNA, 25 bp, Homo sapiens
aatggcccttgaaagctggtgtttc

SEQ ID NO: 35145 - DNA, 25 bp, Homo sapiens
gactgcctgagagtgaactgatatg

SEQ ID NO: 35146 - DNA, 25 bp, Homo sapiens
ttggccgggcatcaaaattaccttg

SEQ ID NO: 35147 - DNA, 25 bp, Homo sapiens
gtatcgattggggaacaccgttgca

SEQ ID NO: 35148 - DNA, 25 bp, Homo sapiens
taaaaattattgatattcaactgat

SEQ ID NO: 35149 - DNA, 25 bp, Homo sapiens
tcagctatggctcaaagataatccc

SEQ ID NO: 35150 - DNA, 25 bp, Homo sapiens
tgcttctgaccaagtgtggacttca

SEQ ID NO: 35151 - DNA, 25 bp, Homo sapiens
agatgcatttagctgtgtacttgta

SEQ ID NO: 35152 - DNA, 25 bp, Homo sapiens
aatgatcttttatgtgaaatttttg

SEQ ID NO: 35153 - DNA, 25 bp, Homo sapiens
gaggtcagtagtccatcagttcttt

SEQ ID NO: 35154 - DNA, 25 bp, Homo sapiens
tggaggctccattcagtgtatttta

SEQ ID NO: 35155 - DNA, 25 bp, Homo sapiens
gttgctaagattcacttgcttcata

SEQ ID NO: 35156 - DNA, 25 bp, Homo sapiens
ctcttgcaactcctctgcctagcta

SEQ ID NO: 35157 - DNA, 25 bp, Homo sapiens
tgaactgacattcccacataatatg

SEQ ID NO: 35158 - DNA, 25 bp, Homo sapiens
ctgttttcttgatcctctcttggga

SEQ ID NO: 35159 - DNA, 25 bp, Homo sapiens
agtcatctcactcttggacacaaga

SEQ ID NO: 35160 - DNA, 25 bp, Homo sapiens
ggtgccaaacccttgagccagtatt

SEQ ID NO: 35161 - DNA, 25 bp, Homo sapiens
cccaggtttggcgttctgaagatca

SEQ ID NO: 35162 - DNA, 25 bp, Homo sapiens
gtgactctgaaactccctaaattgg

SEQ ID NO: 35163 - DNA, 25 bp, Homo sapiens
tcccttggcatgtgcttgagctata

SEQ ID NO: 35164 - DNA, 25 bp, Homo sapiens
ccagtctgttgtgcgggttcatcaa

SEQ ID NO: 35165 - DNA, 25 bp, Homo sapiens
tgggcctacatagcaaaaggcttta

SEQ ID NO: 35166 - DNA, 25 bp, Homo sapiens
ctgtcagcatcaatgtgggccttta

SEQ ID NO: 35167 - DNA, 25 bp, Homo sapiens
agctggaggctcctttgggaacata

SEQ ID NO: 35168 - DNA, 25 bp, Homo sapiens
gtgaatgttttcagccttcctcatg

SEQ ID NO: 35169 - DNA, 25 bp, Homo sapiens
taagttcccttgattgctgcctaga

SEQ ID NO: 35170 - DNA, 25 bp, Homo sapiens
cagagccattcgtgctttgccagca

SEQ ID NO: 35171 - DNA, 25 bp, Homo sapiens
cagtgcagtttggtcctcctggaga

SEQ ID NO: 35172 - DNA, 25 bp, Homo sapiens
atctcgctggctcaacccaaggttg

SEQ ID NO: 35173 - DNA, 25 bp, Homo sapiens
ttccatgcgtgcctaagccagttga

SEQ ID NO: 35174 - DNA, 25 bp, Homo sapiens
gagtttagtccacatgccaatcctg

SEQ ID NO: 35175 - DNA, 25 bp, Homo sapiens
ctctgagacctgtggagattttttc

SEQ ID NO: 35176 - DNA, 25 bp, Homo sapiens
tctgttatgcgccactgaaggattc

SEQ ID NO: 35177 - DNA, 25 bp, Homo sapiens
ctcagtagacattggcggttgcttt

SEQ ID NO: 35178 - DNA, 25 bp, Homo sapiens
tccacttgactaggaggaattcagc

SEQ ID NO: 35179 - DNA, 25 bp, Homo sapiens
tactaaagtgcttgaggtcaaggtt

SEQ ID NO: 35180 - DNA, 25 bp, Homo sapiens
aggctctggtctcatcgcatactca

SEQ ID NO: 35181 - DNA, 25 bp, Homo sapiens
gatgctgccttctaacgtgacactg

SEQ ID NO: 35182 - DNA, 25 bp, Homo sapiens
acctgggtgctcagtaaacatgaca

SEQ ID NO: 35183 - DNA, 25 bp, Homo sapiens
tctctttttggggagagggctactc

SEQ ID NO: 35184 - DNA, 25 bp, Homo sapiens
cgtgggcacagactcacaaaagttt

SEQ ID NO: 35185 - DNA, 25 bp, Homo sapiens
gcaggctcctttatcactccagaga

SEQ ID NO: 35186 - DNA, 25 bp, Homo sapiens
cctgctcgttttggattattgccct

SEQ ID NO: 35187 - DNA, 25 bp, Homo sapiens
cagcgtccctgtatctaattttgta

SEQ ID NO: 35188 - DNA, 25 bp, Homo sapiens
cacatgacaatgaagggcaccaact

SEQ ID NO: 35189 - DNA, 25 bp, Homo sapiens
tggctggacatgtcacccaaatatg

SEQ ID NO: 35190 - DNA, 25 bp, Homo sapiens
ttaagtgattctgaataaagtaata

SEQ ID NO: 35191 - DNA, 25 bp, Homo sapiens
cggacttcgtggaaaacttattctc

SEQ ID NO: 35192 - DNA, 25 bp, Homo sapiens
ggctatcagctcttactcttcagga

SEQ ID NO: 35193 - DNA, 25 bp, Homo sapiens
gggagcacttgccttgaccagaaaa

SEQ ID NO: 35194 - DNA, 25 bp, Homo sapiens
tcccaggctgaagtatccaatgata

SEQ ID NO: 35195 - DNA, 25 bp, Homo sapiens
tgttgccctaactcaaagatgactg

SEQ ID NO: 35196 - DNA, 25 bp, Homo sapiens
gggcactggttgtctacacaatatt

SEQ ID NO: 35197 - DNA, 25 bp, Homo sapiens
ctgggttgcccgaagtctttgtcaa

SEQ ID NO: 35198 - DNA, 25 bp, Homo sapiens
tcttgatcaaaaccagtgtgggtta

SEQ ID NO: 35199 - DNA, 25 bp, Homo sapiens
agcctaggttgacatcatctcattc

SEQ ID NO: 35200 - DNA, 25 bp, Homo sapiens
gccgctgcctccctggttttaatga

SEQ ID NO: 35201 - DNA, 25 bp, Homo sapiens
gcctccttcaggtgactagtagtca

SEQ ID NO: 35202 - DNA, 25 bp, Homo sapiens
agttagaccgatcccaccatttttg

SEQ ID NO: 35203 - DNA, 25 bp, Homo sapiens
gtagctgccaattgtgctctcttga

SEQ ID NO: 35204 - DNA, 25 bp, Homo sapiens
tgggcatccactctacacaccagga

SEQ ID NO: 35205 - DNA, 25 bp, Homo sapiens
ttgctccaaagggtactagtctgtc

SEQ ID NO: 35206 - DNA, 25 bp, Homo sapiens
aaatccctgtttttagctactgtgc

SEQ ID NO: 35207 - DNA, 25 bp, Homo sapiens
tgagggtacctgcattgaactgtta

SEQ ID NO: 35208 - DNA, 25 bp, Homo sapiens
tgagcctgccagctctattctgtta

SEQ ID NO: 35209 - DNA, 25 bp, Homo sapiens
tgtccttctgatctggcctttcatg

SEQ ID NO: 35210 - DNA, 25 bp, Homo sapiens
agcttcctgggatctgggtaatttc

SEQ ID NO: 35211 - DNA, 25 bp, Homo sapiens
ccatggctgtttctgcaatttcttc

SEQ ID NO: 35212 - DNA, 25 bp, Homo sapiens
ctcagttttgccagagtatgttctc

SEQ ID NO: 35213 - DNA, 25 bp, Homo sapiens
gaaggtccttcatgtccagttagta

SEQ ID NO: 35214 - DNA, 25 bp, Homo sapiens
tgtcagtgcccttctctatagttta

SEQ ID NO: 35215 - DNA, 25 bp, Homo sapiens
tgcaggtgccaccatcaggaaaaga

SEQ ID NO: 35216 - DNA, 25 bp, Homo sapiens
gtctctcttggggtaattctcctac

SEQ ID NO: 35217 - DNA, 25 bp, Homo sapiens
ctatggtgatatgacagtgggttcc

SEQ ID NO: 35218 - DNA, 25 bp, Homo sapiens
ttggtgcgcacagagacagactatc

SEQ ID NO: 35219 - DNA, 25 bp, Homo sapiens
ttcgggtaaaaatggggctgtcatc

SEQ ID NO: 35220 - DNA, 25 bp, Homo sapiens
cccagggctctgattcttctatgca

SEQ ID NO: 35221 - DNA, 25 bp, Homo sapiens
ggaaggtacccaactcccaggaact

SEQ ID NO: 35222 - DNA, 25 bp, Homo sapiens
ggctggtggctttcacatggcaata

SEQ ID NO: 35223 - DNA, 25 bp, Homo sapiens
cttcaggtggttccttgcagttaca

SEQ ID NO: 35224 - DNA, 25 bp, Homo sapiens
gtggggccctggttatctatctaaa

SEQ ID NO: 35225 - DNA, 25 bp, Homo sapiens
ggcgctgttccagttctgaagatta

SEQ ID NO: 35226 - DNA, 25 bp, Homo sapiens
gggctcctgaaccagttgtcatttc

SEQ ID NO: 35227 - DNA, 25 bp, Homo sapiens
taggccttcagcgttttccaagatc

SEQ ID NO: 35228 - DNA, 25 bp, Homo sapiens
gtaaagtaacttcagggtggccaca

SEQ ID NO: 35229 - DNA, 25 bp, Homo sapiens
aggctatgccttgttttcccaaata

SEQ ID NO: 35230 - DNA, 25 bp, Homo sapiens
gcttgattttcagctccagcagtta

SEQ ID NO: 35231 - DNA, 25 bp, Homo sapiens
ttccctttccttcctcagactgtta

SEQ ID NO: 35232 - DNA, 25 bp, Homo sapiens
ccgggctagtctaccattatgctca

SEQ ID NO: 35233 - DNA, 25 bp, Homo sapiens
cttgtgtagtgtctaagtaaaaccc

SEQ ID NO: 35234 - DNA, 25 bp, Homo sapiens
ccactcacctagcaaggatgtctta

SEQ ID NO: 35235 - DNA, 25 bp, Homo sapiens
tggtgggcagcttccagtattctaa

SEQ ID NO: 35236 - DNA, 25 bp, Homo sapiens
gcagggcttcatgtactgaatctta

SEQ ID NO: 35237 - DNA, 25 bp, Homo sapiens
tctgacacatggatagctcttggta

SEQ ID NO: 35238 - DNA, 25 bp, Homo sapiens
cctgtggtaggcaagcggtacattt

SEQ ID NO: 35239 - DNA, 25 bp, Homo sapiens
tgcatgttctgctgtgttggcttca

SEQ ID NO: 35240 - DNA, 25 bp, Homo sapiens
aagacattagaacttgatcaaattt

SEQ ID NO: 35241 - DNA, 25 bp, Homo sapiens
attattccctcaaattagaattcta

SEQ ID NO: 35242 - DNA, 25 bp, Homo sapiens
tgggtccaaacaaggccagattgta

SEQ ID NO: 35243 - DNA, 25 bp, Homo sapiens
gggctcacaatccaagaaattcttc

SEQ ID NO: 35244 - DNA, 25 bp, Homo sapiens
gaggcactatccttgtttctctaga

SEQ ID NO: 35245 - DNA, 25 bp, Homo sapiens
ccaggtggtcctgagttttcctcta

SEQ ID NO: 35246 - DNA, 25 bp, Homo sapiens
tgaccatgaagatgcaatgtctctg

SEQ ID NO: 35247 - DNA, 25 bp, Homo sapiens
tccctctgttgatttttaattttat

SEQ ID NO: 35248 - DNA, 25 bp, Homo sapiens
tgtctcaggtctcagcaaactttta

SEQ ID NO: 35249 - DNA, 25 bp, Homo sapiens
gccctccctctgtgtagtatgaatg

SEQ ID NO: 35250 - DNA, 25 bp, Homo sapiens
caacagagccttagtgagaaaaatc

SEQ ID NO: 35251 - DNA, 25 bp, Homo sapiens
agacccactctgatctacttatttg

SEQ ID NO: 35252 - DNA, 25 bp, Homo sapiens
ccgttttcggcttggatcccattca

SEQ ID NO: 35253 - DNA, 25 bp, Homo sapiens
aaggtgcagcgccaataattttatg

SEQ ID NO: 35254 - DNA, 25 bp, Homo sapiens
tgcatgatgttgatccaggctgaga

SEQ ID NO: 35255 - DNA, 25 bp, Homo sapiens
ttcaaacagccttggggcagccatc

SEQ ID NO: 35256 - DNA, 25 bp, Homo sapiens
gtggggcagagctcaatttaaaacc

SEQ ID NO: 35257 - DNA, 25 bp, Homo sapiens
attttgagatcctgagcccacctga

SEQ ID NO: 35258 - DNA, 25 bp, Homo sapiens
gaagctgttgctagcactggacata

SEQ ID NO: 35259 - DNA, 25 bp, Homo sapiens
tgagcatctgcaggtttccactgga

SEQ ID NO: 35260 - DNA, 25 bp, Homo sapiens
ggtgagaactacaggcacgaacttg

SEQ ID NO: 35261 - DNA, 25 bp, Homo sapiens
gaggttcccaagaatgccaagttta

SEQ ID NO: 35262 - DNA, 25 bp, Homo sapiens
tccctattccatactgatatttaag

SEQ ID NO: 35263 - DNA, 25 bp, Homo sapiens
attgtgaatgtcagaagaaaaatca

SEQ ID NO: 35264 - DNA, 25 bp, Homo sapiens
ccaaagtagatgaccttttgtttcc

SEQ ID NO: 35265 - DNA, 25 bp, Homo sapiens
ttagagattcaaaaggaagcttctt

SEQ ID NO: 35266 - DNA, 25 bp, Homo sapiens
tagtggtatcattaaagcctttggc

SEQ ID NO: 35267 - DNA, 25 bp, Homo sapiens
ataagccctgaaggtccatgtccta

SEQ ID NO: 35268 - DNA, 25 bp, Homo sapiens
taaatacaaaagccaaagtttggct

SEQ ID NO: 35269 - DNA, 25 bp, Homo sapiens
caatctaccagtctaattcaccttt

SEQ ID NO: 35270 - DNA, 25 bp, Homo sapiens
gtttacctttaggaaaagtaaaaca

SEQ ID NO: 35271 - DNA, 25 bp, Homo sapiens
tcctgccctcctagccaaagtaagg

SEQ ID NO: 35272 - DNA, 25 bp, Homo sapiens
aggcaggccaaaccatctgaacttc

SEQ ID NO: 35273 - DNA, 25 bp, Homo sapiens
tatgaagtactagtgaaggcacaga

SEQ ID NO: 35274 - DNA, 25 bp, Homo sapiens
ttatattgaggaatcaggaagtaaa

SEQ ID NO: 35275 - DNA, 25 bp, Homo sapiens
gagccatcattattttcctagagtg

SEQ ID NO: 35276 - DNA, 25 bp, Homo sapiens
ttccaccctcagttagcagtcagta

SEQ ID NO: 35277 - DNA, 25 bp, Homo sapiens
gaaacgtttgttgagcagctgcatg

SEQ ID NO: 35278 - DNA, 25 bp, Homo sapiens
ggcacgtataccagaggctacagca

SEQ ID NO: 35279 - DNA, 25 bp, Homo sapiens
tcctccacaggcttcagagttatta

SEQ ID NO: 35280 - DNA, 25 bp, Homo sapiens
cctgcccttcttagtaggtattatc

SEQ ID NO: 35281 - DNA, 25 bp, Homo sapiens
tatcagcttgctaaaagtttgccca

SEQ ID NO: 35282 - DNA, 25 bp, Homo sapiens
catgcttggtggctgcgtgcaggtg

SEQ ID NO: 35283 - DNA, 25 bp, Homo sapiens
gcacagagcttcttcccgaggtaca

SEQ ID NO: 35284 - DNA, 25 bp, Homo sapiens
taatgaggtttcatctccagggcca

SEQ ID NO: 35285 - DNA, 25 bp, Homo sapiens
catgctggacctggtaaaaagtgtt

SEQ ID NO: 35286 - DNA, 25 bp, Homo sapiens
tggaccacattcacatagatttagc

SEQ ID NO: 35287 - DNA, 25 bp, Homo sapiens
tttcagtatatgttaacgtactcaa

SEQ ID NO: 35288 - DNA, 25 bp, Homo sapiens
tgctagctgttctcacttgacctta

SEQ ID NO: 35289 - DNA, 25 bp, Homo sapiens
tagactgtggaagcaaactgtgatc

SEQ ID NO: 35290 - DNA, 25 bp, Homo sapiens
tttgcctgaatggaagactgtcatc

SEQ ID NO: 35291 - DNA, 25 bp, Homo sapiens
tactggagatgggaagctgtctttc

SEQ ID NO: 35292 - DNA, 25 bp, Homo sapiens
caggatgcatgttttggtacctaca

SEQ ID NO: 35293 - DNA, 25 bp, Homo sapiens
cctggatttggggtatctgcattca

SEQ ID NO: 35294 - DNA, 25 bp, Homo sapiens
ccatagcctatgtggaaactgttca

SEQ ID NO: 35295 - DNA, 25 bp, Homo sapiens
taccctggggttccatattcaaatc

SEQ ID NO: 35296 - DNA, 25 bp, Homo sapiens
tgcacaggtgaagaacagggaatcc

SEQ ID NO: 35297 - DNA, 25 bp, Homo sapiens
tgctcagagcggaggttattaatcc

SEQ ID NO: 35298 - DNA, 25 bp, Homo sapiens
ccactcggttgcaggtttaagctta

SEQ ID NO: 35299 - DNA, 25 bp, Homo sapiens
ccaggatattttggctcgtatttca

SEQ ID NO: 35300 - DNA, 25 bp, Homo sapiens
cccaatgcagagcaaggcttagtcc

SEQ ID NO: 35301 - DNA, 25 bp, Homo sapiens
aggacccttattcttggccacagtt

SEQ ID NO: 35302 - DNA, 25 bp, Homo sapiens
cctgggctcactcttaatggaaata

SEQ ID NO: 35303 - DNA, 25 bp, Homo sapiens
agtttctctcttacggccctgttta

SEQ ID NO: 35304 - DNA, 25 bp, Homo sapiens
ctcaagatttgggtgacattcatcc

SEQ ID NO: 35305 - DNA, 25 bp, Homo sapiens
gctggcccgccatcttgcaaattta

SEQ ID NO: 35306 - DNA, 25 bp, Homo sapiens
tttctatatataggcctgcagcggg

SEQ ID NO: 35307 - DNA, 25 bp, Homo sapiens
cggccgtatctgtatcaccaaagtc

SEQ ID NO: 35308 - DNA, 25 bp, Homo sapiens
ctttttcgaggtagacagcagattc

SEQ ID NO: 35309 - DNA, 25 bp, Homo sapiens
tgccactggctttaactcggaattc

SEQ ID NO: 35310 - DNA, 25 bp, Homo sapiens
cccaacgtgtcagagttatttcagc

SEQ ID NO: 35311 - DNA, 25 bp, Homo sapiens
tcccagtgcccataaagtcagtttg

SEQ ID NO: 35312 - DNA, 25 bp, Homo sapiens
gcccatagcactaccataggaaact

SEQ ID NO: 35313 - DNA, 25 bp, Homo sapiens
ccagggctagtagctctcgaattta

SEQ ID NO: 35314 - DNA, 25 bp, Homo sapiens
tgagagccatcctgcaagctgcact

SEQ ID NO: 35315 - DNA, 25 bp, Homo sapiens
cacctccatggctgggacattgata

SEQ ID NO: 35316 - DNA, 25 bp, Homo sapiens
ggtgcacatcgcatgaggtttcttc

SEQ ID NO: 35317 - DNA, 25 bp, Homo sapiens
aggcgccagtggtttcacagatcta

SEQ ID NO: 35318 - DNA, 25 bp, Homo sapiens
ttggcacctctctttgggcacagtg

SEQ ID NO: 35319 - DNA, 25 bp, Homo sapiens
tgtcacctttgtgctcaacaggccc

SEQ ID NO: 35320 - DNA, 25 bp, Homo sapiens
tgtcaggaatcacccacaggccttc

SEQ ID NO: 35321 - DNA, 25 bp, Homo sapiens
tggagccagacaaggggacttcttc

SEQ ID NO: 35322 - DNA, 25 bp, Homo sapiens
ggactctgagcccattccacatagg

SEQ ID NO: 35323 - DNA, 25 bp, Homo sapiens
tttggggactttccacaagttttgc

SEQ ID NO: 35324 - DNA, 25 bp, Homo sapiens
cggcccaggtttcatcacaggtgca

SEQ ID NO: 35325 - DNA, 25 bp, Homo sapiens
tccacaatgtcctgggtatgccctt

SEQ ID NO: 35326 - DNA, 25 bp, Homo sapiens
ttagccattgcgacctcagttcctg

SEQ ID NO: 35327 - DNA, 25 bp, Homo sapiens
gctgagtccctctgaagaactacta

SEQ ID NO: 35328 - DNA, 25 bp, Homo sapiens
tccctgtgccacaaaagactaagtc

SEQ ID NO: 35329 - DNA, 25 bp, Homo sapiens
ttggacagtgttgcccaccgagacc

SEQ ID NO: 35330 - DNA, 25 bp, Homo sapiens
acaactttttagcaggccggattca

SEQ ID NO: 35331 - DNA, 25 bp, Homo sapiens
ccgccatgtgcattcggcattaaga

SEQ ID NO: 35332 - DNA, 25 bp, Homo sapiens
gcctgtgtctccatcctaaaattcg

SEQ ID NO: 35333 - DNA, 25 bp, Homo sapiens
agtctgcctggtgcaccaactggta

SEQ ID NO: 35334 - DNA, 25 bp, Homo sapiens
ctctctgcttccatggctctttaga

SEQ ID NO: 35335 - DNA, 25 bp, Homo sapiens
gtggggcctccctttctaattttga

SEQ ID NO: 35336 - DNA, 25 bp, Homo sapiens
acttctctgattgtcctcatgggga

SEQ ID NO: 35337 - DNA, 25 bp, Homo sapiens
gaggcatccacactaccatatttta

SEQ ID NO: 35338 - DNA, 25 bp, Homo sapiens
cctttggtaaaactcgctgtcaaga

SEQ ID NO: 35339 - DNA, 25 bp, Homo sapiens
tatggcccaggaacacagagtttgc

SEQ ID NO: 35340 - DNA, 25 bp, Homo sapiens
gcagggcttgtcaattgatacatta

SEQ ID NO: 35341 - DNA, 25 bp, Homo sapiens
tctggcagccaaatagcttctggta

SEQ ID NO: 35342 - DNA, 25 bp, Homo sapiens
gtggcctagctagatatctccctga

SEQ ID NO: 35343 - DNA, 25 bp, Homo sapiens
ctggtgcctcatctccttaggtaaa

SEQ ID NO: 35344 - DNA, 25 bp, Homo sapiens
agtggcaagttttatcagcatgttc

SEQ ID NO: 35345 - DNA, 25 bp, Homo sapiens
cttcaggttagcctataagttttga

SEQ ID NO: 35346 - DNA, 25 bp, Homo sapiens
ccagggtagcatactgaactgctta

SEQ ID NO: 35347 - DNA, 25 bp, Homo sapiens
ctttctggccaggaaggtactgacc

SEQ ID NO: 35348 - DNA, 25 bp, Homo sapiens
cagctaggggctacagagtcaaata

SEQ ID NO: 35349 - DNA, 25 bp, Homo sapiens
catggggacacagttagtgaccttc

SEQ ID NO: 35350 - DNA, 25 bp, Homo sapiens
agcaactgctagttcccatagggaa

SEQ ID NO: 35351 - DNA, 25 bp, Homo sapiens
ctcttctaaggatagctgatccatc

SEQ ID NO: 35352 - DNA, 25 bp, Homo sapiens
cttttcctatccttaggtatgtgct

SEQ ID NO: 35353 - DNA, 25 bp, Homo sapiens
gccatgggaccaaactaaaacttta

SEQ ID NO: 35354 - DNA, 25 bp, Homo sapiens
cagggtctttactctggggttcata

SEQ ID NO: 35355 - DNA, 25 bp, Homo sapiens
ccatctagtagctggaaaaggcctc

SEQ ID NO: 35356 - DNA, 25 bp, Homo sapiens
ggctgcacagagcacatttcctttg

SEQ ID NO: 35357 - DNA, 25 bp, Homo sapiens
agagcactgtccacactataacatg

SEQ ID NO: 35358 - DNA, 25 bp, Homo sapiens
gattcccagggtactttagctctta

SEQ ID NO: 35359 - DNA, 25 bp, Homo sapiens
ccttgcagggccatgttcgatgata

SEQ ID NO: 35360 - DNA, 25 bp, Homo sapiens
ctagacttagtcttttggccgagga

SEQ ID NO: 35361 - DNA, 25 bp, Homo sapiens
aattcgttaattcatgcatcaggta

SEQ ID NO: 35362 - DNA, 25 bp, Homo sapiens
cttggcaatgggcaggaatgtctaa

SEQ ID NO: 35363 - DNA, 25 bp, Homo sapiens
gccttctggatgtttgctagcttac

SEQ ID NO: 35364 - DNA, 25 bp, Homo sapiens
agccctgtatgttggtagtctaaca

SEQ ID NO: 35365 - DNA, 25 bp, Homo sapiens
gtttctggtccttagatggcctcta

SEQ ID NO: 35366 - DNA, 25 bp, Homo sapiens
ttctgcaaaaatagaagggctctga

SEQ ID NO: 35367 - DNA, 25 bp, Homo sapiens
tataaaggcagagagaaattgataa

SEQ ID NO: 35368 - DNA, 25 bp, Homo sapiens
tctgttgccagctttgacctgctta

SEQ ID NO: 35369 - DNA, 25 bp, Homo sapiens
gtgggcttttcaacactagaccaga

SEQ ID NO: 35370 - DNA, 25 bp, Homo sapiens
catggggtaacagagacagcctata

SEQ ID NO: 35371 - DNA, 25 bp, Homo sapiens
tgagcaccctgcagcattaaaaata

SEQ ID NO: 35372 - DNA, 25 bp, Homo sapiens
ctgcaggttccaggctcacttttga

SEQ ID NO: 35373 - DNA, 25 bp, Homo sapiens
aggatctcaggcactcaggcattga

SEQ ID NO: 35374 - DNA, 25 bp, Homo sapiens
ggggtcgttgccattcatcctattt

SEQ ID NO: 35375 - DNA, 25 bp, Homo sapiens
tgagcattgatcatccgagccctgg

SEQ ID NO: 35376 - DNA, 25 bp, Homo sapiens
tctcttccgagaggagcaacatgta

SEQ ID NO: 35377 - DNA, 25 bp, Homo sapiens
ggtcatctatgctgtctcccactgt

SEQ ID NO: 35378 - DNA, 25 bp, Homo sapiens
cgtgggctaggaactatgatcaacc

SEQ ID NO: 35379 - DNA, 25 bp, Homo sapiens
gtgtgctattcattccctctcaaaa

SEQ ID NO: 35380 - DNA, 25 bp, Homo sapiens
tatagtctttagtgctccaggaacc

SEQ ID NO: 35381 - DNA, 25 bp, Homo sapiens
ctccacagctaagggtgagtcctgg

SEQ ID NO: 35382 - DNA, 25 bp, Homo sapiens
tcagcattgtgaccagccagacttc

SEQ ID NO: 35383 - DNA, 25 bp, Homo sapiens
catgtgatcagcaggagagagtcta

SEQ ID NO: 35384 - DNA, 25 bp, Homo sapiens
ttcaccacagggagcaagacgtttc

SEQ ID NO: 35385 - DNA, 25 bp, Homo sapiens
gccaggtttcccttaccattaaaga

SEQ ID NO: 35386 - DNA, 25 bp, Homo sapiens
gccgaggtctttcagcttcgctata

SEQ ID NO: 35387 - DNA, 25 bp, Homo sapiens
gatcttggcttgaattctttgtgga

SEQ ID NO: 35388 - DNA, 25 bp, Homo sapiens
tcctctgggaggctcacaattcctg

SEQ ID NO: 35389 - DNA, 25 bp, Homo sapiens
cttttggccctatagataatcattc

SEQ ID NO: 35390 - DNA, 25 bp, Homo sapiens
tgggccatcaaagcagcagtaaatt

SEQ ID NO: 35391 - DNA, 25 bp, Homo sapiens
tttgagagatcaggtaggctataca

SEQ ID NO: 35392 - DNA, 25 bp, Homo sapiens
ggctctgacccccttcctccatctc

SEQ ID NO: 35393 - DNA, 25 bp, Homo sapiens
tttctactttaagagtattgtttaa

SEQ ID NO: 35394 - DNA, 25 bp, Homo sapiens
catgtgatccctcaggccaagtatc

SEQ ID NO: 35395 - DNA, 25 bp, Homo sapiens
accctgccaaactgccatataagta

SEQ ID NO: 35396 - DNA, 25 bp, Homo sapiens
ttccttttagcaaaagcaagctgga

SEQ ID NO: 35397 - DNA, 25 bp, Homo sapiens
gatgtccgcctttgtaacctactta

SEQ ID NO: 35398 - DNA, 25 bp, Homo sapiens
aaaaaaactcatttcattttcatac

SEQ ID NO: 35399 - DNA, 25 bp, Homo sapiens
ggtggctcactactctgtctaattt

SEQ ID NO: 35400 - DNA, 25 bp, Homo sapiens
attgttgaccttggccatcctctgg

SEQ ID NO: 35401 - DNA, 25 bp, Homo sapiens
atcagtgaacccatgagcagtcttc

SEQ ID NO: 35402 - DNA, 25 bp, Homo sapiens
gtctagtttagggtggcaataatta

SEQ ID NO: 35403 - DNA, 25 bp, Homo sapiens
cctgggaaggttagatacatctttc

SEQ ID NO: 35404 - DNA, 25 bp, Homo sapiens
tttgccaggagaacagcctttacta

SEQ ID NO: 35405 - DNA, 25 bp, Homo sapiens
acaaaataaagaagagttggttaac

SEQ ID NO: 35406 - DNA, 25 bp, Homo sapiens
ggcctaagaatatcctcagtgatgg

SEQ ID NO: 35407 - DNA, 25 bp, Homo sapiens
tgctgactgggacatactggctaca

SEQ ID NO: 35408 - DNA, 25 bp, Homo sapiens
ggggatctcagaacacttgggttca

SEQ ID NO: 35409 - DNA, 25 bp, Homo sapiens
agctccctgctcttaaactattgta

SEQ ID NO: 35410 - DNA, 25 bp, Homo sapiens
gcttctgtgatgactctgtacaaga

SEQ ID NO: 35411 - DNA, 25 bp, Homo sapiens
catacctttgtgtgactagaattta

SEQ ID NO: 35412 - DNA, 25 bp, Homo sapiens
gggcttattgcccttcttgcttaaa

SEQ ID NO: 35413 - DNA, 25 bp, Homo sapiens
agccactgtgtattctctgaagatg

SEQ ID NO: 35414 - DNA, 25 bp, Homo sapiens
ccaggtcagcctgtagggatttata

SEQ ID NO: 35415 - DNA, 25 bp, Homo sapiens
cattcagtgagataggaggtaaaca

SEQ ID NO: 35416 - DNA, 25 bp, Homo sapiens
cactaaagacagctactgataataa

SEQ ID NO: 35417 - DNA, 25 bp, Homo sapiens
ggaagtgtgcactatttttacagtc

SEQ ID NO: 35418 - DNA, 25 bp, Homo sapiens
ccgtgactcttttggttggaatata

SEQ ID NO: 35419 - DNA, 25 bp, Homo sapiens
caagttgtgtctggtgtgcttttcc

SEQ ID NO: 35420 - DNA, 25 bp, Homo sapiens
ttaccattatgcagccaggtttttc

SEQ ID NO: 35421 - DNA, 25 bp, Homo sapiens
ccactttctcacagcagggatttaa

SEQ ID NO: 35422 - DNA, 25 bp, Homo sapiens
agtcctcttgtgtggctacatcaga

SEQ ID NO: 35423 - DNA, 25 bp, Homo sapiens
acactcttgcagaatgtctaatttg

SEQ ID NO: 35424 - DNA, 25 bp, Homo sapiens
tgatgttgcccacctcagccagttg

SEQ ID NO: 35425 - DNA, 25 bp, Homo sapiens
cctccaggctagctaagaatacatc

SEQ ID NO: 35426 - DNA, 25 bp, Homo sapiens
cctggcttcttagttctggtgtaaa

SEQ ID NO: 35427 - DNA, 25 bp, Homo sapiens
agctggcatgagacactttccattg

SEQ ID NO: 35428 - DNA, 25 bp, Homo sapiens
tgttatgcaaaggactcagccagta

SEQ ID NO: 35429 - DNA, 25 bp, Homo sapiens
cagtgctgatgctacgtagacatta

SEQ ID NO: 35430 - DNA, 25 bp, Homo sapiens
aagcctaccctctgcctaaaaattg

SEQ ID NO: 35431 - DNA, 25 bp, Homo sapiens
gccagcctatccacagatccattta

SEQ ID NO: 35432 - DNA, 25 bp, Homo sapiens
aggatgcccttctgttttggaatgc

SEQ ID NO: 35433 - DNA, 25 bp, Homo sapiens
ggctggcatcgaaagggaaatcttt

SEQ ID NO: 35434 - DNA, 25 bp, Homo sapiens
tgtccagcatgggaggccaaagaga

SEQ ID NO: 35435 - DNA, 25 bp, Homo sapiens
agccaggtgaggtgtctatttgata

SEQ ID NO: 35436 - DNA, 25 bp, Homo sapiens
gaggcctcctttagctctcatcagc

SEQ ID NO: 35437 - DNA, 25 bp, Homo sapiens
ctgtgggtaccaactgagcaaaagc

SEQ ID NO: 35438 - DNA, 25 bp, Homo sapiens
tagttgatctaagtgtcccggtatg

SEQ ID NO: 35439 - DNA, 25 bp, Homo sapiens
agaaggattttctgcttatcacagc

SEQ ID NO: 35440 - DNA, 25 bp, Homo sapiens
tggccttagggcatgagagcatctc

SEQ ID NO: 35441 - DNA, 25 bp, Homo sapiens
tcagatgagacccaaccacgttatg

SEQ ID NO: 35442 - DNA, 25 bp, Homo sapiens
cctgctcaagtctccagtgattttc

SEQ ID NO: 35443 - DNA, 25 bp, Homo sapiens
gtgggccaataccttcctactcaag

SEQ ID NO: 35444 - DNA, 25 bp, Homo sapiens
cactactacaggtgctgatgaaata

SEQ ID NO: 35445 - DNA, 25 bp, Homo sapiens
tggcttcctgagatcactccttgtc

SEQ ID NO: 35446 - DNA, 25 bp, Homo sapiens
agcctttgcttctgtgtggaccaca

SEQ ID NO: 35447 - DNA, 25 bp, Homo sapiens
ggcagcagggttctacaaattaata

SEQ ID NO: 35448 - DNA, 25 bp, Homo sapiens
tactagctcttctttggcaggcaaa

SEQ ID NO: 35449 - DNA, 25 bp, Homo sapiens
ggtttacctgctcctgttgccattt

SEQ ID NO: 35450 - DNA, 25 bp, Homo sapiens
ccattcctggggctttagattagta

SEQ ID NO: 35451 - DNA, 25 bp, Homo sapiens
tttcttctcaaaagggagccgggga

SEQ ID NO: 35452 - DNA, 25 bp, Homo sapiens
gccatttggaagctcgtagtactca

SEQ ID NO: 35453 - DNA, 25 bp, Homo sapiens
aggctgtcgtttcccttggcagatg

SEQ ID NO: 35454 - DNA, 25 bp, Homo sapiens
tgtgtcttcccaatccaatcctgtg

SEQ ID NO: 35455 - DNA, 25 bp, Homo sapiens
catttcttaattgggctctactgga

SEQ ID NO: 35456 - DNA, 25 bp, Homo sapiens
ctgagctatagccttgaattccata

SEQ ID NO: 35457 - DNA, 25 bp, Homo sapiens
agccagggcctttcggtaatcagca

SEQ ID NO: 35458 - DNA, 25 bp, Homo sapiens
gccacattcttttgaaggctgatta

SEQ ID NO: 35459 - DNA, 25 bp, Homo sapiens
gcagtacccagttatctatcagtta

SEQ ID NO: 35460 - DNA, 25 bp, Homo sapiens
gaggacttcccttgtttcttttaaa

SEQ ID NO: 35461 - DNA, 25 bp, Homo sapiens
ggcacgcttccttctgatcacttta

SEQ ID NO: 35462 - DNA, 25 bp, Homo sapiens
tgctttcaggcagtcactcacagtg

SEQ ID NO: 35463 - DNA, 25 bp, Homo sapiens
agcatgcctgctaccacttgtttga

SEQ ID NO: 35464 - DNA, 25 bp, Homo sapiens
tcagattgacaaggcatagagcatc

SEQ ID NO: 35465 - DNA, 25 bp, Homo sapiens
tgtctactctagcagaaagcttttg

SEQ ID NO: 35466 - DNA, 25 bp, Homo sapiens
caaccctttagggaagctcaaaatg

SEQ ID NO: 35467 - DNA, 25 bp, Homo sapiens
aagggttctggtctcctgtcccatg

SEQ ID NO: 35468 - DNA, 25 bp, Homo sapiens
gagaacaactgtccctcacctattt

SEQ ID NO: 35469 - DNA, 25 bp, Homo sapiens
tttggagggtttttaacagtgttac

SEQ ID NO: 35470 - DNA, 25 bp, Homo sapiens
attaagtcctgcttaggctatatct

SEQ ID NO: 35471 - DNA, 25 bp, Homo sapiens
cagatgatagtgtttatcattagtt

SEQ ID NO: 35472 - DNA, 25 bp, Homo sapiens
agcccgtaaggctgcagaattttta

SEQ ID NO: 35473 - DNA, 25 bp, Homo sapiens
attaatttctatttatgtcatcatt

SEQ ID NO: 35474 - DNA, 25 bp, Homo sapiens
atgtgcagcccatattagatgctta

SEQ ID NO: 35475 - DNA, 25 bp, Homo sapiens
tgttcatatgaagcacccgtctcta

SEQ ID NO: 35476 - DNA, 25 bp, Homo sapiens
ccttgggactattgcatgggtaaaa

SEQ ID NO: 35477 - DNA, 25 bp, Homo sapiens
cccacattttggatctatatgattc

SEQ ID NO: 35478 - DNA, 25 bp, Homo sapiens
ctcagtgcttctagtaagtgttctc

SEQ ID NO: 35479 - DNA, 25 bp, Homo sapiens
gtcaaggtcctttacatcatgttta

SEQ ID NO: 35480 - DNA, 25 bp, Homo sapiens
cctctgttttatggatctggtctga

SEQ ID NO: 35481 - DNA, 25 bp, Homo sapiens
atcttgaagtaaaggactgccactg

SEQ ID NO: 35482 - DNA, 25 bp, Homo sapiens
cctgcaattaggtatccgaatggta

SEQ ID NO: 35483 - DNA, 25 bp, Homo sapiens
ttggctactgggctatcaggaatta

SEQ ID NO: 35484 - DNA, 25 bp, Homo sapiens
gaaccatcaaaatccagtgggagta

SEQ ID NO: 35485 - DNA, 25 bp, Homo sapiens
tttaaagagttaaatgattgagtct

SEQ ID NO: 35486 - DNA, 25 bp, Homo sapiens
tttaaacttaaagctctcttattca

SEQ ID NO: 35487 - DNA, 25 bp, Homo sapiens
tttatgtgtttttttaaatctttca

SEQ ID NO: 35488 - DNA, 25 bp, Homo sapiens
gtacttacagaagtgatacgtctta

SEQ ID NO: 35489 - DNA, 25 bp, Homo sapiens
acagtgccttcttgattcctggcga

SEQ ID NO: 35490 - DNA, 25 bp, Homo sapiens
tccttccttgtgaggttctgctgta

SEQ ID NO: 35491 - DNA, 25 bp, Homo sapiens
actcactgggtagaactggttgtta

SEQ ID NO: 35492 - DNA, 25 bp, Homo sapiens
ccttctcaaaagctgttaaagcatc

SEQ ID NO: 35493 - DNA, 25 bp, Homo sapiens
tgttttctaaaacccagatgcatac

SEQ ID NO: 35494 - DNA, 25 bp, Homo sapiens
cgcagtaatagaggcacagcttttc

SEQ ID NO: 35495 - DNA, 25 bp, Homo sapiens
tcccagtggacagtgacatttgttc

SEQ ID NO: 35496 - DNA, 25 bp, Homo sapiens
cacatgctctggttgccctcttgta

SEQ ID NO: 35497 - DNA, 25 bp, Homo sapiens
ccagagagaggatttcacagggttc

SEQ ID NO: 35498 - DNA, 25 bp, Homo sapiens
aaaacccttggacaggctggcctta

SEQ ID NO: 35499 - DNA, 25 bp, Homo sapiens
tgatggtattttctagccttccctc

SEQ ID NO: 35500 - DNA, 25 bp, Homo sapiens
ggtcaaattaatttgtcaacatttt

SEQ ID NO: 35501 - DNA, 25 bp, Homo sapiens
gcacaacccagaggcctgtagctta

SEQ ID NO: 35502 - DNA, 25 bp, Homo sapiens
tgttttcagacagccttgcaagtta

SEQ ID NO: 35503 - DNA, 25 bp, Homo sapiens
cagagcctcctcaactgtgtgaata

SEQ ID NO: 35504 - DNA, 25 bp, Homo sapiens
gtggaaatctctcccagtcgccttt

SEQ ID NO: 35505 - DNA, 25 bp, Homo sapiens
aggttcttaagcattggcccagtta

SEQ ID NO: 35506 - DNA, 25 bp, Homo sapiens
gtcaggtctatttcttggtcaggcc

SEQ ID NO: 35507 - DNA, 25 bp, Homo sapiens
ttttgccaattgctacggtatgtga

SEQ ID NO: 35508 - DNA, 25 bp, Homo sapiens
cagtgctgcagcttagatatccaga

SEQ ID NO: 35509 - DNA, 25 bp, Homo sapiens
tgccactgaagaaccctatgtatta

SEQ ID NO: 35510 - DNA, 25 bp, Homo sapiens
ggcctcttgtgtgtagcttatatca

SEQ ID NO: 35511 - DNA, 25 bp, Homo sapiens
gcctgctgctgcttatatctaaaaa

SEQ ID NO: 35512 - DNA, 25 bp, Homo sapiens
gcaccaggtctgaagggatacatta

SEQ ID NO: 35513 - DNA, 25 bp, Homo sapiens
tgggtcaagtcaaaacacagtgatg

SEQ ID NO: 35514 - DNA, 25 bp, Homo sapiens
tgcccagtggagaacaatgcacata

SEQ ID NO: 35515 - DNA, 25 bp, Homo sapiens
gagggttctcctctacttctgctta

SEQ ID NO: 35516 - DNA, 25 bp, Homo sapiens
agcatctgtttccatctggttgaga

SEQ ID NO: 35517 - DNA, 25 bp, Homo sapiens
cccagatgccctgaattgtacaaga

SEQ ID NO: 35518 - DNA, 25 bp, Homo sapiens
ccacgttagcttcatgttcccagga

SEQ ID NO: 35519 - DNA, 25 bp, Homo sapiens
gcccaatttttggtatgtgctcata

SEQ ID NO: 35520 - DNA, 25 bp, Homo sapiens
cacacgtgttcatgagccaagaatg

SEQ ID NO: 35521 - DNA, 25 bp, Homo sapiens
tgggctcaccatatgtggctaaact

SEQ ID NO: 35522 - DNA, 25 bp, Homo sapiens
ggctcctgagttagcaccgccaatc

SEQ ID NO: 35523 - DNA, 25 bp, Homo sapiens
ggctcccagggcaaaaactcttaaa

SEQ ID NO: 35524 - DNA, 25 bp, Homo sapiens
ggagaccctttgtttcacactaatg

SEQ ID NO: 35525 - DNA, 25 bp, Homo sapiens
cactcccagcaaaggttaataatga

SEQ ID NO: 35526 - DNA, 25 bp, Homo sapiens
agcggccagcaccagttatcataga

SEQ ID NO: 35527 - DNA, 25 bp, Homo sapiens
tcctttttggctgtggtggcaatga

SEQ ID NO: 35528 - DNA, 25 bp, Homo sapiens
ttttgtagtggtggatttatatttt

SEQ ID NO: 35529 - DNA, 25 bp, Homo sapiens
acagagctttctagttagggagatg

SEQ ID NO: 35530 - DNA, 25 bp, Homo sapiens
ggtgggatgcttactctttcttgtc

SEQ ID NO: 35531 - DNA, 25 bp, Homo sapiens
ttggcctagtctgcagtaaatctta

SEQ ID NO: 35532 - DNA, 25 bp, Homo sapiens
cccagccttgcacatgtgagctata

SEQ ID NO: 35533 - DNA, 25 bp, Homo sapiens
tggcctactgacgtggtttaaaaga

SEQ ID NO: 35534 - DNA, 25 bp, Homo sapiens
gttagtagtcctctcagccactgca

SEQ ID NO: 35535 - DNA, 25 bp, Homo sapiens
tccacctcgggtaaacctatgaagc

SEQ ID NO: 35536 - DNA, 25 bp, Homo sapiens
gggtgtttccttttccactcaaata

SEQ ID NO: 35537 - DNA, 25 bp, Homo sapiens
tgctcagcttaattcccaggggttt

SEQ ID NO: 35538 - DNA, 25 bp, Homo sapiens
tgtactggactacagcgtaagtttc

SEQ ID NO: 35539 - DNA, 25 bp, Homo sapiens
cacagccattttatagtcgagaaca

SEQ ID NO: 35540 - DNA, 25 bp, Homo sapiens
agtagtcgactctccctgcttcaca

SEQ ID NO: 35541 - DNA, 25 bp, Homo sapiens
cactgtgctggattcaactgttcta

SEQ ID NO: 35542 - DNA, 25 bp, Homo sapiens
ccctggaactagaagttacttggta

SEQ ID NO: 35543 - DNA, 25 bp, Homo sapiens
accttctcattttttaacataagcg

SEQ ID NO: 35544 - DNA, 25 bp, Homo sapiens
tttgttataactgagaaagctgacc

SEQ ID NO: 35545 - DNA, 25 bp, Homo sapiens
gcaactctgaataatgtgtctactg

SEQ ID NO: 35546 - DNA, 25 bp, Homo sapiens
ggactacgttggcttctctgatata

SEQ ID NO: 35547 - DNA, 25 bp, Homo sapiens
gcagaagcctctcagctaagcctta

SEQ ID NO: 35548 - DNA, 25 bp, Homo sapiens
ccgtatacgggcttgtccatgaaaa

SEQ ID NO: 35549 - DNA, 25 bp, Homo sapiens
aggagtcagtagtttggcttgtaca

SEQ ID NO: 35550 - DNA, 25 bp, Homo sapiens
atgtggttgagtaaaaagtgctgca

SEQ ID NO: 35551 - DNA, 25 bp, Homo sapiens
ccttgaaaaatctagaacgtgtgta

SEQ ID NO: 35552 - DNA, 25 bp, Homo sapiens
ccagtcattctgatttatgaacagt

SEQ ID NO: 35553 - DNA, 25 bp, Homo sapiens
gggtatctgcccacaggaccaaatg

SEQ ID NO: 35554 - DNA, 25 bp, Homo sapiens
tccacatccacgtagcctggtgaga

SEQ ID NO: 35555 - DNA, 25 bp, Homo sapiens
agagagctttgccattccacaagta

SEQ ID NO: 35556 - DNA, 25 bp, Homo sapiens
aggtcaaatgactgctacgcttata

SEQ ID NO: 35557 - DNA, 25 bp, Homo sapiens
ccttgcccttggtgctgatttctta

SEQ ID NO: 35558 - DNA, 25 bp, Homo sapiens
gctggtaccatccaaagtccttatg

SEQ ID NO: 35559 - DNA, 25 bp, Homo sapiens
ggggtcaggtcttagctattcttaa

SEQ ID NO: 35560 - DNA, 25 bp, Homo sapiens
tggcattttggccttgacaagacta

SEQ ID NO: 35561 - DNA, 25 bp, Homo sapiens
ttacctgaggtgtccaggaggcaca

SEQ ID NO: 35562 - DNA, 25 bp, Homo sapiens
ggcagtcatgaggacaaaccaagtt

SEQ ID NO: 35563 - DNA, 25 bp, Homo sapiens
tgtgcacttgaaacctctgtgggtc

SEQ ID NO: 35564 - DNA, 25 bp, Homo sapiens
gcccaccctctgatgcatatatgta

SEQ ID NO: 35565 - DNA, 25 bp, Homo sapiens
gttgcaaaactgaccctggaaaata

SEQ ID NO: 35566 - DNA, 25 bp, Homo sapiens
gaggcataacctctgcaaattctta

SEQ ID NO: 35567 - DNA, 25 bp, Homo sapiens
tggaacctttggcacacacagcatg

SEQ ID NO: 35568 - DNA, 25 bp, Homo sapiens
cccaggctgatagtaagacccattg

SEQ ID NO: 35569 - DNA, 25 bp, Homo sapiens
tggcaaaaatgcagtgttcaggata

SEQ ID NO: 35570 - DNA, 25 bp, Homo sapiens
tcctggtcactttgtttggggcaca

SEQ ID NO: 35571 - DNA, 25 bp, Homo sapiens
ggacgtctcactttagacaacagga

SEQ ID NO: 35572 - DNA, 25 bp, Homo sapiens
gtgtcagtgtaccatgttccatgta

SEQ ID NO: 35573 - DNA, 25 bp, Homo sapiens
cccagttcgcacatcagatttagta

SEQ ID NO: 35574 - DNA, 25 bp, Homo sapiens
taaagtgatatgtatttcttccaaa

SEQ ID NO: 35575 - DNA, 25 bp, Homo sapiens
gcggggccttaaacagtagcaattc

SEQ ID NO: 35576 - DNA, 25 bp, Homo sapiens
gtggtgttatgtacccagccctgtc

SEQ ID NO: 35577 - DNA, 25 bp, Homo sapiens
gctgctagggcatctcaactttttg

SEQ ID NO: 35578 - DNA, 25 bp, Homo sapiens
actgaagtctgaatagccaagggca

SEQ ID NO: 35579 - DNA, 25 bp, Homo sapiens
agggatccagaatacaggactttga

SEQ ID NO: 35580 - DNA, 25 bp, Homo sapiens
gtatggcccactcagtcaaatttta

SEQ ID NO: 35581 - DNA, 25 bp, Homo sapiens
ggatgattcttacaaaccctagttg

SEQ ID NO: 35582 - DNA, 25 bp, Homo sapiens
ggctagattacagtcccgttccttg

SEQ ID NO: 35583 - DNA, 25 bp, Homo sapiens
aggtacatagcggaaaggcttcaca

SEQ ID NO: 35584 - DNA, 25 bp, Homo sapiens
ctgctgctaggaataaaatggtctc

SEQ ID NO: 35585 - DNA, 25 bp, Homo sapiens
accacgtggatcctcatgtaatata

SEQ ID NO: 35586 - DNA, 25 bp, Homo sapiens
tgtccctcatgcagttcaagaaatg

SEQ ID NO: 35587 - DNA, 25 bp, Homo sapiens
gtctagcaaatctaacaacctcatc

SEQ ID NO: 35588 - DNA, 25 bp, Homo sapiens
tcctcttgataacttgctggtgaaa

SEQ ID NO: 35589 - DNA, 25 bp, Homo sapiens
tcgatttcaacacaaaggctgcctg

SEQ ID NO: 35590 - DNA, 25 bp, Homo sapiens
gacctctgttgtgctcccgatacta

SEQ ID NO: 35591 - DNA, 25 bp, Homo sapiens
tggggtggtacctaaattttcagtc

SEQ ID NO: 35592 - DNA, 25 bp, Homo sapiens
gtgggcctctaacttttttgaaatc

SEQ ID NO: 35593 - DNA, 25 bp, Homo sapiens
tgtcacatgccacgatactttcctg

SEQ ID NO: 35594 - DNA, 25 bp, Homo sapiens
tgacaaaattatatagttgataaac

SEQ ID NO: 35595 - DNA, 25 bp, Homo sapiens
taatagagacaacacctaaaactga

SEQ ID NO: 35596 - DNA, 25 bp, Homo sapiens
tgggtgtacttgtttcctaaaaggc

SEQ ID NO: 35597 - DNA, 25 bp, Homo sapiens
agcggcgcttctcaaacctttagtc

SEQ ID NO: 35598 - DNA, 25 bp, Homo sapiens
tgacagcgcttgcaatatgtttttc

SEQ ID NO: 35599 - DNA, 25 bp, Homo sapiens
actcggtaattaaggacggccatgc

SEQ ID NO: 35600 - DNA, 25 bp, Homo sapiens
tatagcccagttgaagtcagccacc

SEQ ID NO: 35601 - DNA, 25 bp, Homo sapiens
acactcccttggtaggtaggtttta

SEQ ID NO: 35602 - DNA, 25 bp, Homo sapiens
cataggtgcctaggtgatgctgaaa

SEQ ID NO: 35603 - DNA, 25 bp, Homo sapiens
tcagaggtcctttcgaacactagcc

SEQ ID NO: 35604 - DNA, 25 bp, Homo sapiens
gattttcttttgagcaagtaccaca

SEQ ID NO: 35605 - DNA, 25 bp, Homo sapiens
aatgatttctgaggttgtttgcaac

SEQ ID NO: 35606 - DNA, 25 bp, Homo sapiens
gctgggcttctaaatgaaaaccgga

SEQ ID NO: 35607 - DNA, 25 bp, Homo sapiens
ttctcgacaagatggccacaccggc

SEQ ID NO: 35608 - DNA, 25 bp, Homo sapiens
ggccgcttcctgatgagcctggtta

SEQ ID NO: 35609 - DNA, 25 bp, Homo sapiens
tttgcaacagcagtccaagtggatg

SEQ ID NO: 35610 - DNA, 25 bp, Homo sapiens
ttacctcatgactggcaaacttcta

SEQ ID NO: 35611 - DNA, 25 bp, Homo sapiens
cttgattccaggcagacataatttc

SEQ ID NO: 35612 - DNA, 25 bp, Homo sapiens
gtagctcctactctctgctctctaa

SEQ ID NO: 35613 - DNA, 25 bp, Homo sapiens
taatgttagtattattatagttata

SEQ ID NO: 35614 - DNA, 25 bp, Homo sapiens
ctctaagggtagtcgatacaggatc

SEQ ID NO: 35615 - DNA, 25 bp, Homo sapiens
ttgtctgtgccaaaattgaatctcc

SEQ ID NO: 35616 - DNA, 25 bp, Homo sapiens
tcctgatttgaacacaccagctctg

SEQ ID NO: 35617 - DNA, 25 bp, Homo sapiens
cccttggcctcatttggtgaaataa

SEQ ID NO: 35618 - DNA, 25 bp, Homo sapiens
taaagaatttaggagataaggaagt

SEQ ID NO: 35619 - DNA, 25 bp, Homo sapiens
taaagagatttgatgtgatggtaac

SEQ ID NO: 35620 - DNA, 25 bp, Homo sapiens
tctttgcaggagaccctttaccatg

SEQ ID NO: 35621 - DNA, 25 bp, Homo sapiens
tgatgtctgaaactggccatgcctg

SEQ ID NO: 35622 - DNA, 25 bp, Homo sapiens
tggggccttcttatgaactgaatcc

SEQ ID NO: 35623 - DNA, 25 bp, Homo sapiens
tgctccaggttgctactttatgttg

SEQ ID NO: 35624 - DNA, 25 bp, Homo sapiens
cccagcagtgccctatatatatata

SEQ ID NO: 35625 - DNA, 25 bp, Homo sapiens
gcacctattctgagcaggacctatg

SEQ ID NO: 35626 - DNA, 25 bp, Homo sapiens
tctcacccaggcatagagtcatgtc

SEQ ID NO: 35627 - DNA, 25 bp, Homo sapiens
agcccgttgaatgtctccagtgata

SEQ ID NO: 35628 - DNA, 25 bp, Homo sapiens
gccagcttatcaagaagggacctga

SEQ ID NO: 35629 - DNA, 25 bp, Homo sapiens
agcccagatctgacctccaggtttg

SEQ ID NO: 35630 - DNA, 25 bp, Homo sapiens
tcagcaaggggcttcatataccatg

SEQ ID NO: 35631 - DNA, 25 bp, Homo sapiens
ttgccgatcgtagccaaccaggatg

SEQ ID NO: 35632 - DNA, 25 bp, Homo sapiens
gcagcactgagattttattccaata

SEQ ID NO: 35633 - DNA, 25 bp, Homo sapiens
agaatcagctcctgctttcaagggg

SEQ ID NO: 35634 - DNA, 25 bp, Homo sapiens
caaaatgcgtgggttctactagata

SEQ ID NO: 35635 - DNA, 25 bp, Homo sapiens
tcttgctctttgcagaatgatagtc

SEQ ID NO: 35636 - DNA, 25 bp, Homo sapiens
ccctgccctcatgaacactagttga

SEQ ID NO: 35637 - DNA, 25 bp, Homo sapiens
agtgtgtcctgaaccctgtcaaagg

SEQ ID NO: 35638 - DNA, 25 bp, Homo sapiens
ccaaagcggtttacttccaaaggca

SEQ ID NO: 35639 - DNA, 25 bp, Homo sapiens
tctttcacttgggaacaaaaatgtc

SEQ ID NO: 35640 - DNA, 25 bp, Homo sapiens
ccatcatgctgggaggccctaaagc

SEQ ID NO: 35641 - DNA, 25 bp, Homo sapiens
agcccatctgtttctttcaaccatg

SEQ ID NO: 35642 - DNA, 25 bp, Homo sapiens
ctagtcaggtgcacagggaaagtca

SEQ ID NO: 35643 - DNA, 25 bp, Homo sapiens
ccaaacagaacgtagtcagtgctta

SEQ ID NO: 35644 - DNA, 25 bp, Homo sapiens
gctgaatttcagcagggaggccatt

SEQ ID NO: 35645 - DNA, 25 bp, Homo sapiens
ctcctctgtaggtggtctctgtttc

SEQ ID NO: 35646 - DNA, 25 bp, Homo sapiens
tggcaactgccctctgtctacatga

SEQ ID NO: 35647 - DNA, 25 bp, Homo sapiens
cggtgctgccagacatatgttaatt

SEQ ID NO: 35648 - DNA, 25 bp, Homo sapiens
ccatgactgcttcccactgtggtga

SEQ ID NO: 35649 - DNA, 25 bp, Homo sapiens
gctgtctggttgacaagggacatta

SEQ ID NO: 35650 - DNA, 25 bp, Homo sapiens
gggctctctttctaacatcctatta

SEQ ID NO: 35651 - DNA, 25 bp, Homo sapiens
caggaggtttgtctgcctattcgtc

SEQ ID NO: 35652 - DNA, 25 bp, Homo sapiens
agacatctgctgaacacctggtttg

SEQ ID NO: 35653 - DNA, 25 bp, Homo sapiens
acgtctcccaggttacttccattca

SEQ ID NO: 35654 - DNA, 25 bp, Homo sapiens
ccctactgtggcttattaaaaaata

SEQ ID NO: 35655 - DNA, 25 bp, Homo sapiens
tggacactgtgccagcctagctcta

SEQ ID NO: 35656 - DNA, 25 bp, Homo sapiens
caataaatgtgtgtactatatatac

SEQ ID NO: 35657 - DNA, 25 bp, Homo sapiens
gagctggtccagtacaattcaattg

SEQ ID NO: 35658 - DNA, 25 bp, Homo sapiens
cataatgttgccttcccgagttgtc

SEQ ID NO: 35659 - DNA, 25 bp, Homo sapiens
gtggttcccattgtccctcctttga

SEQ ID NO: 35660 - DNA, 25 bp, Homo sapiens
aacagggacatagtgaatgaccgac

SEQ ID NO: 35661 - DNA, 25 bp, Homo sapiens
ccaccatggagttgtcaaggtcaaa

SEQ ID NO: 35662 - DNA, 25 bp, Homo sapiens
aacagagtaaatgtgaaaaagttag

SEQ ID NO: 35663 - DNA, 25 bp, Homo sapiens
ggttccctggaagttctcataaaga

SEQ ID NO: 35664 - DNA, 25 bp, Homo sapiens
tggactccactgaggatactttctc

SEQ ID NO: 35665 - DNA, 25 bp, Homo sapiens
cttggcatttatgggcagcaaacta

SEQ ID NO: 35666 - DNA, 25 bp, Homo sapiens
ttcagcctagggagaaaatcggttc

SEQ ID NO: 35667 - DNA, 25 bp, Homo sapiens
ccatgtccagattgagtgtaacttg

SEQ ID NO: 35668 - DNA, 25 bp, Homo sapiens
tccctttgtctgctgacctaggata

SEQ ID NO: 35669 - DNA, 25 bp, Homo sapiens
cacacacatactgaaataaaataat

SEQ ID NO: 35670 - DNA, 25 bp, Homo sapiens
tgagggcctttagtcatgtccagaa

SEQ ID NO: 35671 - DNA, 25 bp, Homo sapiens
cagcttcctgtgagttcatatttca

SEQ ID NO: 35672 - DNA, 25 bp, Homo sapiens
ctcccttcagtggaaactcagtgtc

SEQ ID NO: 35673 - DNA, 25 bp, Homo sapiens
agcttcccatcctacgttcttgata

SEQ ID NO: 35674 - DNA, 25 bp, Homo sapiens
ggctgcaattgctcttccatcctga

SEQ ID NO: 35675 - DNA, 25 bp, Homo sapiens
tagtctggcatgagaacacaccttc

SEQ ID NO: 35676 - DNA, 25 bp, Homo sapiens
cctgtgacagcattatgagtggtta

SEQ ID NO: 35677 - DNA, 25 bp, Homo sapiens
gtgaatcactttggtcttggcaatg

SEQ ID NO: 35678 - DNA, 25 bp, Homo sapiens
tacagatgggagtggcttcaagatg

SEQ ID NO: 35679 - DNA, 25 bp, Homo sapiens
gcaataataataatcatcatcatca

SEQ ID NO: 35680 - DNA, 25 bp, Homo sapiens
atgatttttaaagttagaagaaata

SEQ ID NO: 35681 - DNA, 25 bp, Homo sapiens
ttttttcgaaattaattgatggtta

SEQ ID NO: 35682 - DNA, 25 bp, Homo sapiens
gtcaggaccctgataactagcaagg

SEQ ID NO: 35683 - DNA, 25 bp, Homo sapiens
cttgcaactgtttttcttgagctgc

SEQ ID NO: 35684 - DNA, 25 bp, Homo sapiens
gcctggggtctgctctttacataaa

SEQ ID NO: 35685 - DNA, 25 bp, Homo sapiens
gtgcaccacctttgttcccttagta

SEQ ID NO: 35686 - DNA, 25 bp, Homo sapiens
cccgattagtgtgcagcctttccta

SEQ ID NO: 35687 - DNA, 25 bp, Homo sapiens
ggagcaagatcttccactgcaacta

SEQ ID NO: 35688 - DNA, 25 bp, Homo sapiens
ccctggaagggttactgctattgaa

SEQ ID NO: 35689 - DNA, 25 bp, Homo sapiens
tgtttctacagctaggccatttttg

SEQ ID NO: 35690 - DNA, 25 bp, Homo sapiens
ttggtgccaggatcagtcatttgtc

SEQ ID NO: 35691 - DNA, 25 bp, Homo sapiens
gctaggccatgctcatcttcaggta

SEQ ID NO: 35692 - DNA, 25 bp, Homo sapiens
ggcttggctggtacctctactttaa

SEQ ID NO: 35693 - DNA, 25 bp, Homo sapiens
gccgactctgtttcttaattcctga

SEQ ID NO: 35694 - DNA, 25 bp, Homo sapiens
gtgttactcctcttggccttccctg

SEQ ID NO: 35695 - DNA, 25 bp, Homo sapiens
agtcctgcctgaactgttggttttc

SEQ ID NO: 35696 - DNA, 25 bp, Homo sapiens
tagggacttatccacgcagcgctca

SEQ ID NO: 35697 - DNA, 25 bp, Homo sapiens
ccttctgtctggatctacggtattc

SEQ ID NO: 35698 - DNA, 25 bp, Homo sapiens
tcttctgagctctgaacttcattta

SEQ ID NO: 35699 - DNA, 25 bp, Homo sapiens
ccctgagcttggctactttgagaaa

SEQ ID NO: 35700 - DNA, 25 bp, Homo sapiens
cttatgttttaaagtatatattata

SEQ ID NO: 35701 - DNA, 25 bp, Homo sapiens
gtgctacatttttcaactgccagtg

SEQ ID NO: 35702 - DNA, 25 bp, Homo sapiens
gggagcccatcaccctacaagcgta

SEQ ID NO: 35703 - DNA, 25 bp, Homo sapiens
ggcctgcccttcagcattttgcaaa

SEQ ID NO: 35704 - DNA, 25 bp, Homo sapiens
tcaccgaatggttcatccatgttgg

SEQ ID NO: 35705 - DNA, 25 bp, Homo sapiens
gctctgcgttcacaggtatcaaaca

SEQ ID NO: 35706 - DNA, 25 bp, Homo sapiens
cacagcaggaaggtgggcatctatc

SEQ ID NO: 35707 - DNA, 25 bp, Homo sapiens
tttgtttgtacatagtccgcttctg

SEQ ID NO: 35708 - DNA, 25 bp, Homo sapiens
agtagaacaaggaggataaagaaga

SEQ ID NO: 35709 - DNA, 25 bp, Homo sapiens
tgacggtctataagccaaactttta

SEQ ID NO: 35710 - DNA, 25 bp, Homo sapiens
cccgggtatggctttctcggcaaca

SEQ ID NO: 35711 - DNA, 25 bp, Homo sapiens
accaatgcaaaactaggaattgtta

SEQ ID NO: 35712 - DNA, 25 bp, Homo sapiens
ggcttccctgaacaccctaaatgag

SEQ ID NO: 35713 - DNA, 25 bp, Homo sapiens
tccctgatattgtgcattagtttcc

SEQ ID NO: 35714 - DNA, 25 bp, Homo sapiens
tggaagtgttctatacttaaaccaa

SEQ ID NO: 35715 - DNA, 25 bp, Homo sapiens
aaaaaacatgaatgagctagaacgg

SEQ ID NO: 35716 - DNA, 25 bp, Homo sapiens
tggctttgcttctctaactgatata

SEQ ID NO: 35717 - DNA, 25 bp, Homo sapiens
ggattcctggtcctgaaatgttatg

SEQ ID NO: 35718 - DNA, 25 bp, Homo sapiens
gggctacatttccatccagctttgt

SEQ ID NO: 35719 - DNA, 25 bp, Homo sapiens
tgtacttacttggtgtttttcagta

SEQ ID NO: 35720 - DNA, 25 bp, Homo sapiens
attcattgtctctgatagtttgaaa

SEQ ID NO: 35721 - DNA, 25 bp, Homo sapiens
tgctgcccactagaaagccagaatg

SEQ ID NO: 35722 - DNA, 25 bp, Homo sapiens
ccctcagggcttataggtcagttta

SEQ ID NO: 35723 - DNA, 25 bp, Homo sapiens
cctactggaattgcagagacttacg

SEQ ID NO: 35724 - DNA, 25 bp, Homo sapiens
aagccacctatttactaccctaggg

SEQ ID NO: 35725 - DNA, 25 bp, Homo sapiens
tcagagctgggcagtagcaagtctg

SEQ ID NO: 35726 - DNA, 25 bp, Homo sapiens
ccctgctgctgttctagtaattata

SEQ ID NO: 35727 - DNA, 25 bp, Homo sapiens
ccagtatttctgtgagcctcagttc

SEQ ID NO: 35728 - DNA, 25 bp, Homo sapiens
cccttggtgcttgttgtagaaactc

SEQ ID NO: 35729 - DNA, 25 bp, Homo sapiens
ttctgaggatgtaacactgagctta

SEQ ID NO: 35730 - DNA, 25 bp, Homo sapiens
acgtgggcctcatgttgttttcaaa

SEQ ID NO: 35731 - DNA, 25 bp, Homo sapiens
tgggttccatgcagatcttgtgttc

SEQ ID NO: 35732 - DNA, 25 bp, Homo sapiens
ggtatctattgactgctgactccac

SEQ ID NO: 35733 - DNA, 25 bp, Homo sapiens
ggtgcctgcctaaacctggtacttg

SEQ ID NO: 35734 - DNA, 25 bp, Homo sapiens
cgcaatggtcaaaagcaggctaata

SEQ ID NO: 35735 - DNA, 25 bp, Homo sapiens
cagtcagaggaggtcacaaagtttc

SEQ ID NO: 35736 - DNA, 25 bp, Homo sapiens
ggcctgcattataaagtggatcttc

SEQ ID NO: 35737 - DNA, 25 bp, Homo sapiens
cgttcatggaataaatggcttcatt

SEQ ID NO: 35738 - DNA, 25 bp, Homo sapiens
tcaaagactgtttctccgatggagc

SEQ ID NO: 35739 - DNA, 25 bp, Homo sapiens
ttcatgcttctgcaccagttggttc

SEQ ID NO: 35740 - DNA, 25 bp, Homo sapiens
acaagcgtatgcgtcactgaacaga

SEQ ID NO: 35741 - DNA, 25 bp, Homo sapiens
aaaatccttttgtggctctcagagc

SEQ ID NO: 35742 - DNA, 25 bp, Homo sapiens
cccaggtcctttggtgcctaattca

SEQ ID NO: 35743 - DNA, 25 bp, Homo sapiens
caaggagtgtcggaatgtgattaca

SEQ ID NO: 35744 - DNA, 25 bp, Homo sapiens
cttgcatgagggaatggactagacc

SEQ ID NO: 35745 - DNA, 25 bp, Homo sapiens
tgcgccttcctgcagttggacatca

SEQ ID NO: 35746 - DNA, 25 bp, Homo sapiens
cactcgtttgttgcctcttggggtc

SEQ ID NO: 35747 - DNA, 25 bp, Homo sapiens
caggcccagttgcttctcttgcata

SEQ ID NO: 35748 - DNA, 25 bp, Homo sapiens
tgttgattaactcatggctgccatc

SEQ ID NO: 35749 - DNA, 25 bp, Homo sapiens
ttgataaccttaccatgggcattga

SEQ ID NO: 35750 - DNA, 25 bp, Homo sapiens
agctcttgtcatcgctgggttttca

SEQ ID NO: 35751 - DNA, 25 bp, Homo sapiens
gaggctctatgaatctctaagaata

SEQ ID NO: 35752 - DNA, 25 bp, Homo sapiens
gtcttcagcctagcgagccctcagg

SEQ ID NO: 35753 - DNA, 25 bp, Homo sapiens
tcctttgtcaagtgtgaggcctgca

SEQ ID NO: 35754 - DNA, 25 bp, Homo sapiens
gcccacaatgtttgccatgggaatg

SEQ ID NO: 35755 - DNA, 25 bp, Homo sapiens
acctgaagatgccaccgaataatga

SEQ ID NO: 35756 - DNA, 25 bp, Homo sapiens
ctgtggcagctttgggagataattt

SEQ ID NO: 35757 - DNA, 25 bp, Homo sapiens
tatccttggagtgagattccacctg

SEQ ID NO: 35758 - DNA, 25 bp, Homo sapiens
ttctgactggagcacactttacttg

SEQ ID NO: 35759 - DNA, 25 bp, Homo sapiens
tgttagctgccgaagtcctactttc

SEQ ID NO: 35760 - DNA, 25 bp, Homo sapiens
actgattccttgtccatgctctgca

SEQ ID NO: 35761 - DNA, 25 bp, Homo sapiens
cttgttctctttggggtcagttctc

SEQ ID NO: 35762 - DNA, 25 bp, Homo sapiens
ggggcatattcgtgtaggctatata

SEQ ID NO: 35763 - DNA, 25 bp, Homo sapiens
cccagtgcacatttggaatcagaca

SEQ ID NO: 35764 - DNA, 25 bp, Homo sapiens
atccgctctgctgttgtttcaccca

SEQ ID NO: 35765 - DNA, 25 bp, Homo sapiens
gagagatttcttccctgcagtgtta

SEQ ID NO: 35766 - DNA, 25 bp, Homo sapiens
gcctcaatggaggtttatctaaatt

SEQ ID NO: 35767 - DNA, 25 bp, Homo sapiens
tggctggaggccatgctgaaaatta

SEQ ID NO: 35768 - DNA, 25 bp, Homo sapiens
ttgcctctgttgttttccctaattc

SEQ ID NO: 35769 - DNA, 25 bp, Homo sapiens
cacgtgatttcgagcagcctgcttg

SEQ ID NO: 35770 - DNA, 25 bp, Homo sapiens
ttagcctgcgcccaactctttcatg

SEQ ID NO: 35771 - DNA, 25 bp, Homo sapiens
tgcagagatgtttggggacttcaca

SEQ ID NO: 35772 - DNA, 25 bp, Homo sapiens
tgccatttattggttgttgctggtc

SEQ ID NO: 35773 - DNA, 25 bp, Homo sapiens
tgagtattctgtaggttttttggtg

SEQ ID NO: 35774 - DNA, 25 bp, Homo sapiens
ggtgtttacagtcttcctcagtatg

SEQ ID NO: 35775 - DNA, 25 bp, Homo sapiens
gctcacattatactggactctactg

SEQ ID NO: 35776 - DNA, 25 bp, Homo sapiens
ggttttccgcccttcagacattttg

SEQ ID NO: 35777 - DNA, 25 bp, Homo sapiens
tgcggcccagacgtgttttaaattc

SEQ ID NO: 35778 - DNA, 25 bp, Homo sapiens
tcctggggtctgcaagcattctata

SEQ ID NO: 35779 - DNA, 25 bp, Homo sapiens
aatctgtttttggtggttgacggaa

SEQ ID NO: 35780 - DNA, 25 bp, Homo sapiens
gggatgacgactttataaaccgata

SEQ ID NO: 35781 - DNA, 25 bp, Homo sapiens
ggagtagtgacctgcctctcaaagg

SEQ ID NO: 35782 - DNA, 25 bp, Homo sapiens
ttggctcatgcactaaactaaactg

SEQ ID NO: 35783 - DNA, 25 bp, Homo sapiens
aggccctttcctcactggcaaatta

SEQ ID NO: 35784 - DNA, 25 bp, Homo sapiens
aggtggtgtcctgcatgtaaaatca

SEQ ID NO: 35785 - DNA, 25 bp, Homo sapiens
gagactgaagcttcctgccttttta

SEQ ID NO: 35786 - DNA, 25 bp, Homo sapiens
gcctgttctaaatgtggagccctcc

SEQ ID NO: 35787 - DNA, 25 bp, Homo sapiens
ccttttccatggtgatggtgccata

SEQ ID NO: 35788 - DNA, 25 bp, Homo sapiens
cgcaactccatgtgtgtgaaatatc

SEQ ID NO: 35789 - DNA, 25 bp, Homo sapiens
caagcattttggttggactttggca

SEQ ID NO: 35790 - DNA, 25 bp, Homo sapiens
ggttgcagttttccctctagtcttc

SEQ ID NO: 35791 - DNA, 25 bp, Homo sapiens
gactgcattttctaggacagacatg

SEQ ID NO: 35792 - DNA, 25 bp, Homo sapiens
tcctccttttgggaattacccttga

SEQ ID NO: 35793 - DNA, 25 bp, Homo sapiens
gtgccagatgtcaggagtatatata

SEQ ID NO: 35794 - DNA, 25 bp, Homo sapiens
tgctattccaggcagaggtattacc

SEQ ID NO: 35795 - DNA, 25 bp, Homo sapiens
ttcatcacagtcttgggagctccta

SEQ ID NO: 35796 - DNA, 25 bp, Homo sapiens
gacttggtggatagcagccttctta

SEQ ID NO: 35797 - DNA, 25 bp, Homo sapiens
actggatggtgtttttgctctcata

SEQ ID NO: 35798 - DNA, 25 bp, Homo sapiens
ccaagcaccgtagcatggcagtgaa

SEQ ID NO: 35799 - DNA, 25 bp, Homo sapiens
agctcggaaatgaccttgggcaaga

SEQ ID NO: 35800 - DNA, 25 bp, Homo sapiens
tttcggaagagcaaggctacacctt

SEQ ID NO: 35801 - DNA, 25 bp, Homo sapiens
tggcccatctttcttcacattcata

SEQ ID NO: 35802 - DNA, 25 bp, Homo sapiens
ctgctagttcctcaataatcatttc

SEQ ID NO: 35803 - DNA, 25 bp, Homo sapiens
gggcccattgaagtatcacctcatt

SEQ ID NO: 35804 - DNA, 25 bp, Homo sapiens
ttctcctgcctgttatgcctgaagg

SEQ ID NO: 35805 - DNA, 25 bp, Homo sapiens
gtctctagtaacattgggtaagtca

SEQ ID NO: 35806 - DNA, 25 bp, Homo sapiens
gtgcctcccatagaaccttaaagta

SEQ ID NO: 35807 - DNA, 25 bp, Homo sapiens
ctaaggttttcattttggctgaata

SEQ ID NO: 35808 - DNA, 25 bp, Homo sapiens
gggatcccaggaccttactcctttc

SEQ ID NO: 35809 - DNA, 25 bp, Homo sapiens
tgtgctttgcaactgacgatctgga

SEQ ID NO: 35810 - DNA, 25 bp, Homo sapiens
tgtcacacgagtcagaaattatatc

SEQ ID NO: 35811 - DNA, 25 bp, Homo sapiens
gaccttacccgctagcaaattgaga

SEQ ID NO: 35812 - DNA, 25 bp, Homo sapiens
tgggcgaataccctctagagcctta

SEQ ID NO: 35813 - DNA, 25 bp, Homo sapiens
agtgtggattccctatctgcctgga

SEQ ID NO: 35814 - DNA, 25 bp, Homo sapiens
ggtaccacctcgaactatccttttg

SEQ ID NO: 35815 - DNA, 25 bp, Homo sapiens
ccagggcagccttcttgaccaaatt

SEQ ID NO: 35816 - DNA, 25 bp, Homo sapiens
gtctctgtagggagatacatttgcc

SEQ ID NO: 35817 - DNA, 25 bp, Homo sapiens
agtggctcctactccaagctaagta

SEQ ID NO: 35818 - DNA, 25 bp, Homo sapiens
ccaaggagctggaataccgtctgta

SEQ ID NO: 35819 - DNA, 25 bp, Homo sapiens
tcaccaggtggctgctaggtaaaca

SEQ ID NO: 35820 - DNA, 25 bp, Homo sapiens
gctactactcttggatcagatgctg

SEQ ID NO: 35821 - DNA, 25 bp, Homo sapiens
actaatcatgattgtgttatactta

SEQ ID NO: 35822 - DNA, 25 bp, Homo sapiens
gggagactgcatgtagctcttcata

SEQ ID NO: 35823 - DNA, 25 bp, Homo sapiens
gaccaggggtctctttacttcagga

SEQ ID NO: 35824 - DNA, 25 bp, Homo sapiens
taacctctgggttgagcatgcagtc

SEQ ID NO: 35825 - DNA, 25 bp, Homo sapiens
gaagcgttttcaggcagccattgta

SEQ ID NO: 35826 - DNA, 25 bp, Homo sapiens
ttggctctcaacacctaacttatgg

SEQ ID NO: 35827 - DNA, 25 bp, Homo sapiens
gttttggttctatctgcattggtgc

SEQ ID NO: 35828 - DNA, 25 bp, Homo sapiens
tccgggatagtgtgtacagtttttc

SEQ ID NO: 35829 - DNA, 25 bp, Homo sapiens
ctggccttgttcaccttagtactga

SEQ ID NO: 35830 - DNA, 25 bp, Homo sapiens
gccaatgcctttgttgctcttaata

SEQ ID NO: 35831 - DNA, 25 bp, Homo sapiens
gcatctgcctgtgggacagacatta

SEQ ID NO: 35832 - DNA, 25 bp, Homo sapiens
aaatgctctaaccagagagatctgt

SEQ ID NO: 35833 - DNA, 25 bp, Homo sapiens
ctgagaccactgatagagctttttt

SEQ ID NO: 35834 - DNA, 25 bp, Homo sapiens
gccactgagctaacataacttttta

SEQ ID NO: 35835 - DNA, 25 bp, Homo sapiens
gtctggggcttcctctaagaaaaga

SEQ ID NO: 35836 - DNA, 25 bp, Homo sapiens
cagggtcctattctgcctttgctga

SEQ ID NO: 35837 - DNA, 25 bp, Homo sapiens
ctggcatcttgcaatccactgttga

SEQ ID NO: 35838 - DNA, 25 bp, Homo sapiens
gcagccaagttgagtcctgtgaata

SEQ ID NO: 35839 - DNA, 25 bp, Homo sapiens
ccactttattagaggagcagcatta

SEQ ID NO: 35840 - DNA, 25 bp, Homo sapiens
tgcccatgagatcaccagctctatg

SEQ ID NO: 35841 - DNA, 25 bp, Homo sapiens
ctcgtgccagtaccattgcttcttg

SEQ ID NO: 35842 - DNA, 25 bp, Homo sapiens
gctgcccatttttgagagacactga

SEQ ID NO: 35843 - DNA, 25 bp, Homo sapiens
cagggacactcaactacacttaatc

SEQ ID NO: 35844 - DNA, 25 bp, Homo sapiens
tgggctagccacagaagtctcactt

SEQ ID NO: 35845 - DNA, 25 bp, Homo sapiens
tggcctctcctagatattcactgta

SEQ ID NO: 35846 - DNA, 25 bp, Homo sapiens
atctgacgttccaagagacttaacc

SEQ ID NO: 35847 - DNA, 25 bp, Homo sapiens
ggggtctgctttactgcattacagt

SEQ ID NO: 35848 - DNA, 25 bp, Homo sapiens
ggtggccactatgcactcagaaatg

SEQ ID NO: 35849 - DNA, 25 bp, Homo sapiens
gatctgtatgaagtcacgctgaata

SEQ ID NO: 35850 - DNA, 25 bp, Homo sapiens
cgtgtggcttggagcatatatacca

SEQ ID NO: 35851 - DNA, 25 bp, Homo sapiens
cccatcctgaggttggcagttagcc

SEQ ID NO: 35852 - DNA, 25 bp, Homo sapiens
agccaagtttgctgttcgcttccga

SEQ ID NO: 35853 - DNA, 25 bp, Homo sapiens
ctggcctgccaacaagcttagtttc

SEQ ID NO: 35854 - DNA, 25 bp, Homo sapiens
acagcccgtctggtatcatagttta

SEQ ID NO: 35855 - DNA, 25 bp, Homo sapiens
gcccagtattttttcctcctagata

SEQ ID NO: 35856 - DNA, 25 bp, Homo sapiens
atttcctgctgtgagggcttttgca

SEQ ID NO: 35857 - DNA, 25 bp, Homo sapiens
tctggggcctagcatgcaaatgagc

SEQ ID NO: 35858 - DNA, 25 bp, Homo sapiens
gaggaaccctcgacaacccacgtga

SEQ ID NO: 35859 - DNA, 25 bp, Homo sapiens
acgtgcatgcacacagatatgtttg

SEQ ID NO: 35860 - DNA, 25 bp, Homo sapiens
gcagcaggtgccacattattatgta

SEQ ID NO: 35861 - DNA, 25 bp, Homo sapiens
taggccttcacatgctttctcattg

SEQ ID NO: 35862 - DNA, 25 bp, Homo sapiens
cccacgttaagtgttgtcatgcata

SEQ ID NO: 35863 - DNA, 25 bp, Homo sapiens
gttctacattctagggcgcccattt

SEQ ID NO: 35864 - DNA, 25 bp, Homo sapiens
tggagcctctgtatgtctggatgca

SEQ ID NO: 35865 - DNA, 25 bp, Homo sapiens
ggtggaacgccctttgtcaaaactc

SEQ ID NO: 35866 - DNA, 25 bp, Homo sapiens
gagtcttaatacacgtggacattta

SEQ ID NO: 35867 - DNA, 25 bp, Homo sapiens
atcagttcactcaagcggacctagc

SEQ ID NO: 35868 - DNA, 25 bp, Homo sapiens
gcctcctactagatgacagacaacg

SEQ ID NO: 35869 - DNA, 25 bp, Homo sapiens
gagggtcctcattcagtttgcttta

SEQ ID NO: 35870 - DNA, 25 bp, Homo sapiens
cctgtgaggggtaaatagtccatta

SEQ ID NO: 35871 - DNA, 25 bp, Homo sapiens
cccttggagaagcatgtgacctgta

SEQ ID NO: 35872 - DNA, 25 bp, Homo sapiens
agctgaattttggtagcatctcttc

SEQ ID NO: 35873 - DNA, 25 bp, Homo sapiens
cccaatggtgtcagaggtgtttttc

SEQ ID NO: 35874 - DNA, 25 bp, Homo sapiens
agggctatcttcagtctacattgca

SEQ ID NO: 35875 - DNA, 25 bp, Homo sapiens
cctgctgtgggagcgctaaatgata

SEQ ID NO: 35876 - DNA, 25 bp, Homo sapiens
gaggccactcctattctcaggcttg

SEQ ID NO: 35877 - DNA, 25 bp, Homo sapiens
atggccatatttctttccgttgtta

SEQ ID NO: 35878 - DNA, 25 bp, Homo sapiens
caaactggtctgtggtcatggatta

SEQ ID NO: 35879 - DNA, 25 bp, Homo sapiens
tcagcaccagagagagaattaccta

SEQ ID NO: 35880 - DNA, 25 bp, Homo sapiens
cccactggtcactgaggatctgtaa

SEQ ID NO: 35881 - DNA, 25 bp, Homo sapiens
gtcttgtctgcaacccacacttaga

SEQ ID NO: 35882 - DNA, 25 bp, Homo sapiens
tctgacaggctgctcctaagaattc

SEQ ID NO: 35883 - DNA, 25 bp, Homo sapiens
ggcctttgaaagcagtgagtatatg

SEQ ID NO: 35884 - DNA, 25 bp, Homo sapiens
cccgtgggacaacatgctgcatttg

SEQ ID NO: 35885 - DNA, 25 bp, Homo sapiens
cccttgggtccacagtcacactttt

SEQ ID NO: 35886 - DNA, 25 bp, Homo sapiens
cttggccctcatgttccggatagca

SEQ ID NO: 35887 - DNA, 25 bp, Homo sapiens
gcctgtcatcttgtggtcctggata

SEQ ID NO: 35888 - DNA, 25 bp, Homo sapiens
gagctcctggctttgctttcttcta

SEQ ID NO: 35889 - DNA, 25 bp, Homo sapiens
ctgccttactcagcccattgggttg

SEQ ID NO: 35890 - DNA, 25 bp, Homo sapiens
gacctctgtgtacacctggctaatt

SEQ ID NO: 35891 - DNA, 25 bp, Homo sapiens
tgtggcttcaaagtcaccctcctga

SEQ ID NO: 35892 - DNA, 25 bp, Homo sapiens
taccctgggaagttggttcatatcc

SEQ ID NO: 35893 - DNA, 25 bp, Homo sapiens
tttgaaaagatatgtttccagggcg

SEQ ID NO: 35894 - DNA, 25 bp, Homo sapiens
ggacctttagctctttgcccttgaa

SEQ ID NO: 35895 - DNA, 25 bp, Homo sapiens
agggcatcttcttttctgatacaaa

SEQ ID NO: 35896 - DNA, 25 bp, Homo sapiens
ctccagcgtaccatgcagccttgtg

SEQ ID NO: 35897 - DNA, 25 bp, Homo sapiens
atggatctgcatgcctctgtacata

SEQ ID NO: 35898 - DNA, 25 bp, Homo sapiens
gcctaggaattttgcgccacattta

SEQ ID NO: 35899 - DNA, 25 bp, Homo sapiens
cgcacctcggcaggagtaataacta

SEQ ID NO: 35900 - DNA, 25 bp, Homo sapiens
gaaggcagcattcttaacaaaaaag

SEQ ID NO: 35901 - DNA, 25 bp, Homo sapiens
cttggtctatctcttgaaggttttc

SEQ ID NO: 35902 - DNA, 25 bp, Homo sapiens
tgcctggtcccagaagcagaatgcc

SEQ ID NO: 35903 - DNA, 25 bp, Homo sapiens
tgctggcccttctcacatgtatagg

SEQ ID NO: 35904 - DNA, 25 bp, Homo sapiens
gtggtgtagcctgttggattcctta

SEQ ID NO: 35905 - DNA, 25 bp, Homo sapiens
ccagagagtctgttgtgtcttccaa

SEQ ID NO: 35906 - DNA, 25 bp, Homo sapiens
cccttctttatgtggctgaggcaaa

SEQ ID NO: 35907 - DNA, 25 bp, Homo sapiens
ttcacagattcctgagggagagccc

SEQ ID NO: 35908 - DNA, 25 bp, Homo sapiens
tcccatgatgaccttgagggcttca

SEQ ID NO: 35909 - DNA, 25 bp, Homo sapiens
ggagctaccttttatttgccatatg

SEQ ID NO: 35910 - DNA, 25 bp, Homo sapiens
ctactctatcttggctggggttttc

SEQ ID NO: 35911 - DNA, 25 bp, Homo sapiens
tcaggtccttatctatgccctaaga

SEQ ID NO: 35912 - DNA, 25 bp, Homo sapiens
gtacccttttagactgcagcagatg

SEQ ID NO: 35913 - DNA, 25 bp, Homo sapiens
tgccctgctgaccatggcacttata

SEQ ID NO: 35914 - DNA, 25 bp, Homo sapiens
gtttgatgatagagtcccagttcca

SEQ ID NO: 35915 - DNA, 25 bp, Homo sapiens
agccagatgtacctaccagtaattg

SEQ ID NO: 35916 - DNA, 25 bp, Homo sapiens
cagggcctgaatatgctttgacaca

SEQ ID NO: 35917 - DNA, 25 bp, Homo sapiens
ggttacatgtcttcttccctgcaga

SEQ ID NO: 35918 - DNA, 25 bp, Homo sapiens
ggccactttgtgtccgctctcatca

SEQ ID NO: 35919 - DNA, 25 bp, Homo sapiens
tgctgacactggaagccatcgcatg

SEQ ID NO: 35920 - DNA, 25 bp, Homo sapiens
gaggcttgttatcctgtggcccaaa

SEQ ID NO: 35921 - DNA, 25 bp, Homo sapiens
ctccagtccttagaggcaagcaaga

SEQ ID NO: 35922 - DNA, 25 bp, Homo sapiens
ccagcctgatacacttcgtagaatc

SEQ ID NO: 35923 - DNA, 25 bp, Homo sapiens
gtggccagttttcagcttcgtattc

SEQ ID NO: 35924 - DNA, 25 bp, Homo sapiens
ctctgtgactggtaataggctggta

SEQ ID NO: 35925 - DNA, 25 bp, Homo sapiens
ctcggtgttttaggtgcaattcaga

SEQ ID NO: 35926 - DNA, 25 bp, Homo sapiens
cccatggctcctagtgctgtgatac

SEQ ID NO: 35927 - DNA, 25 bp, Homo sapiens
cacttgagtgtcctaactggtttga

SEQ ID NO: 35928 - DNA, 25 bp, Homo sapiens
ctgggtcaacaaaaagccgtcttct

SEQ ID NO: 35929 - DNA, 25 bp, Homo sapiens
ctaaatttcccaaaacaggcggtta

SEQ ID NO: 35930 - DNA, 25 bp, Homo sapiens
gaggtcatcctcacagagatccgga

SEQ ID NO: 35931 - DNA, 25 bp, Homo sapiens
cagacagggtgagaagaacatacta

SEQ ID NO: 35932 - DNA, 25 bp, Homo sapiens
ctgccctttatgctgatcgaaaata

SEQ ID NO: 35933 - DNA, 25 bp, Homo sapiens
agcttttggcccacttgctacaaga

SEQ ID NO: 35934 - DNA, 25 bp, Homo sapiens
ttatagtgagggtaaaagagttatg

SEQ ID NO: 35935 - DNA, 25 bp, Homo sapiens
gatacgtcatcactttccttagagg

SEQ ID NO: 35936 - DNA, 25 bp, Homo sapiens
tgttcctagcttttacctaccatgg

SEQ ID NO: 35937 - DNA, 25 bp, Homo sapiens
ggccaatatgttcatcccaggggtg

SEQ ID NO: 35938 - DNA, 25 bp, Homo sapiens
cgtagtattgttccctgatgtttca

SEQ ID NO: 35939 - DNA, 25 bp, Homo sapiens
gtcattcagtcaaaagcagggcttc

SEQ ID NO: 35940 - DNA, 25 bp, Homo sapiens
ccgtctgcactctttgggatgaatc

SEQ ID NO: 35941 - DNA, 25 bp, Homo sapiens
aggcggctacttttctgttgacttg

SEQ ID NO: 35942 - DNA, 25 bp, Homo sapiens
cttcaccagtttgtagcagccatta

SEQ ID NO: 35943 - DNA, 25 bp, Homo sapiens
ttatgcgccatccaaactcctgttg

SEQ ID NO: 35944 - DNA, 25 bp, Homo sapiens
tgtgacctgtatgtctccatggatg

SEQ ID NO: 35945 - DNA, 25 bp, Homo sapiens
gtttggagccaccagtgccctttca

SEQ ID NO: 35946 - DNA, 25 bp, Homo sapiens
cccagggcttttgtactttttacta

SEQ ID NO: 35947 - DNA, 25 bp, Homo sapiens
aggccctttccattttatcaccaga

SEQ ID NO: 35948 - DNA, 25 bp, Homo sapiens
gggttgcaggaagcacacacatgta

SEQ ID NO: 35949 - DNA, 25 bp, Homo sapiens
tggggtgcacaattctgaggctgta

SEQ ID NO: 35950 - DNA, 25 bp, Homo sapiens
gcagcagcagggatcaaacagttta

SEQ ID NO: 35951 - DNA, 25 bp, Homo sapiens
cagtggtctgtagtagcctcatatg

SEQ ID NO: 35952 - DNA, 25 bp, Homo sapiens
cctgtgaccactactggctgggaga

SEQ ID NO: 35953 - DNA, 25 bp, Homo sapiens
ctcacctagagtggcaagattctca

SEQ ID NO: 35954 - DNA, 25 bp, Homo sapiens
tgctctcctgcaaaaagatgtgttc

SEQ ID NO: 35955 - DNA, 25 bp, Homo sapiens
atggctgtcagcctgtaattcttgc

SEQ ID NO: 35956 - DNA, 25 bp, Homo sapiens
tctgcctctgcctgaaaattctgtc

SEQ ID NO: 35957 - DNA, 25 bp, Homo sapiens
cgggtgccatttcccagagtgtatt

SEQ ID NO: 35958 - DNA, 25 bp, Homo sapiens
cctgtggtcaagcagaagccttagc

SEQ ID NO: 35959 - DNA, 25 bp, Homo sapiens
caccctgttgtatcactggagttta

SEQ ID NO: 35960 - DNA, 25 bp, Homo sapiens
cacacaagttcgtcctcagtctata

SEQ ID NO: 35961 - DNA, 25 bp, Homo sapiens
cgtgggtagtgcatctcaaaggatc

SEQ ID NO: 35962 - DNA, 25 bp, Homo sapiens
gttcccaaggctgtatctatgagtc

SEQ ID NO: 35963 - DNA, 25 bp, Homo sapiens
caaaggctagcgtgagttctctcca

SEQ ID NO: 35964 - DNA, 25 bp, Homo sapiens
atggcctccatgcattccctggttg

SEQ ID NO: 35965 - DNA, 25 bp, Homo sapiens
cttccattaggaggcaacaacatcg

SEQ ID NO: 35966 - DNA, 25 bp, Homo sapiens
tcactccgtgtatggggcttgtaca

SEQ ID NO: 35967 - DNA, 25 bp, Homo sapiens
cccgaacgcaggtgtaatttttgtc

SEQ ID NO: 35968 - DNA, 25 bp, Homo sapiens
cgtgtgtgcatgtttgtgtcagtca

SEQ ID NO: 35969 - DNA, 25 bp, Homo sapiens
ggaatccttctctgtgcccactttg

SEQ ID NO: 35970 - DNA, 25 bp, Homo sapiens
gtgcatttgcaaggccagttctata

SEQ ID NO: 35971 - DNA, 25 bp, Homo sapiens
tcttgcaaattactagtagccggtg

SEQ ID NO: 35972 - DNA, 25 bp, Homo sapiens
cactggtgctggacaaaatgtaata

SEQ ID NO: 35973 - DNA, 25 bp, Homo sapiens
gaccctcgggacttaactactttaa

SEQ ID NO: 35974 - DNA, 25 bp, Homo sapiens
ggcatttggcctgcattgcaatcta

SEQ ID NO: 35975 - DNA, 25 bp, Homo sapiens
tgaaaagaaaactctgccaggtgca

SEQ ID NO: 35976 - DNA, 25 bp, Homo sapiens
cttggaataatcacgcctgctgcta

SEQ ID NO: 35977 - DNA, 25 bp, Homo sapiens
agccagatgctcagacttgatcata

SEQ ID NO: 35978 - DNA, 25 bp, Homo sapiens
cagagccctgaggtatttaaccatg

SEQ ID NO: 35979 - DNA, 25 bp, Homo sapiens
tgcaagagcatattgttggcctaaa

SEQ ID NO: 35980 - DNA, 25 bp, Homo sapiens
tcctcctcacttagaattaaatttc

SEQ ID NO: 35981 - DNA, 25 bp, Homo sapiens
cttccggactcctctgtgtactgta

SEQ ID NO: 35982 - DNA, 25 bp, Homo sapiens
gtaacagcatctggcactcaaaaat

SEQ ID NO: 35983 - DNA, 25 bp, Homo sapiens
cttcctaatctaaattatttcatat

SEQ ID NO: 35984 - DNA, 25 bp, Homo sapiens
aacccggtgatgtaagccctcttga

SEQ ID NO: 35985 - DNA, 25 bp, Homo sapiens
catggctgctcttgtggttttaaaa

SEQ ID NO: 35986 - DNA, 25 bp, Homo sapiens
tccatggctacagctgttttgaagc

SEQ ID NO: 35987 - DNA, 25 bp, Homo sapiens
tcccacagatgacagccagctttta

SEQ ID NO: 35988 - DNA, 25 bp, Homo sapiens
tcccaggatggaacaccctctagtg

SEQ ID NO: 35989 - DNA, 25 bp, Homo sapiens
cagtgctgtttgtgaccctattgta

SEQ ID NO: 35990 - DNA, 25 bp, Homo sapiens
ctgccatatatttgcacagctgtta

SEQ ID NO: 35991 - DNA, 25 bp, Homo sapiens
tggcctcttgtattgagaatctttg

SEQ ID NO: 35992 - DNA, 25 bp, Homo sapiens
ctggcaggccttgttatagaatctc

SEQ ID NO: 35993 - DNA, 25 bp, Homo sapiens
ggtgtggcccatgtctatttctctt

SEQ ID NO: 35994 - DNA, 25 bp, Homo sapiens
ttaactcagtatagcccagaatagg

SEQ ID NO: 35995 - DNA, 25 bp, Homo sapiens
cgcccagaccaaagatcaaaggatg

SEQ ID NO: 35996 - DNA, 25 bp, Homo sapiens
ggccctacctttgtgcagtgaacta

SEQ ID NO: 35997 - DNA, 25 bp, Homo sapiens
cctgattcaggtccacgtatttgtc

SEQ ID NO: 35998 - DNA, 25 bp, Homo sapiens
ttcgtcatgttctgtccaaagctgg

SEQ ID NO: 35999 - DNA, 25 bp, Homo sapiens
aaaaattaatttgtacttggttgag

SEQ ID NO: 36000 - DNA, 25 bp, Homo sapiens
ggtactctttgcttatagccatatg

SEQ ID NO: 36001 - DNA, 25 bp, Homo sapiens
aatgcctttgttgggagtactttca

SEQ ID NO: 36002 - DNA, 25 bp, Homo sapiens
ccctgagagatctggttggataatg

SEQ ID NO: 36003 - DNA, 25 bp, Homo sapiens
tccactttgcactgagaggcagttc

SEQ ID NO: 36004 - DNA, 25 bp, Homo sapiens
ggcagggcacatgtaccaaattata

SEQ ID NO: 36005 - DNA, 25 bp, Homo sapiens
ctccagcagccaccaggaatcattg

SEQ ID NO: 36006 - DNA, 25 bp, Homo sapiens
cctaccaagttgtgatgacctgcta

SEQ ID NO: 36007 - DNA, 25 bp, Homo sapiens
agctcagcttccctgtgtgccattg

SEQ ID NO: 36008 - DNA, 25 bp, Homo sapiens
ctagagatggcacctgctccagttg

SEQ ID NO: 36009 - DNA, 25 bp, Homo sapiens
tccagggatgggcttgcaacatttt

SEQ ID NO: 36010 - DNA, 25 bp, Homo sapiens
caggatctcagcactacttcattgg

SEQ ID NO: 36011 - DNA, 25 bp, Homo sapiens
tgacgctaggaggtttgcaataatc

SEQ ID NO: 36012 - DNA, 25 bp, Homo sapiens
cccaggaggcaaacgctgtgactca

SEQ ID NO: 36013 - DNA, 25 bp, Homo sapiens
caattctgtggcttctccttgagga

SEQ ID NO: 36014 - DNA, 25 bp, Homo sapiens
agggctgctcatggtcttgttcaga

SEQ ID NO: 36015 - DNA, 25 bp, Homo sapiens
gacggtggcccatgctatgataata

SEQ ID NO: 36016 - DNA, 25 bp, Homo sapiens
ttctcaaaagcaagggatggtgttc

SEQ ID NO: 36017 - DNA, 25 bp, Homo sapiens
catgtacacaccacaagactcggga

SEQ ID NO: 36018 - DNA, 25 bp, Homo sapiens
agcctaatgtcttccactacaatga

SEQ ID NO: 36019 - DNA, 25 bp, Homo sapiens
acctcctggttttgtttgtcttttc

SEQ ID NO: 36020 - DNA, 25 bp, Homo sapiens
ctgcatgtgcacctagtattggctt

SEQ ID NO: 36021 - DNA, 25 bp, Homo sapiens
ctcctggaggaggtctgattatcta

SEQ ID NO: 36022 - DNA, 25 bp, Homo sapiens
tggggccactactctgagactcttg

SEQ ID NO: 36023 - DNA, 25 bp, Homo sapiens
gggaaacactccacgctaacactta

SEQ ID NO: 36024 - DNA, 25 bp, Homo sapiens
tcccatgcaatgaaagcctccttta

SEQ ID NO: 36025 - DNA, 25 bp, Homo sapiens
gcacgctgaatggtctcttggttta

SEQ ID NO: 36026 - DNA, 25 bp, Homo sapiens
gggtcagcctcgtttctcatgtaaa

SEQ ID NO: 36027 - DNA, 25 bp, Homo sapiens
gatgcccggcagaacactatgatta

SEQ ID NO: 36028 - DNA, 25 bp, Homo sapiens
gcacagattttccagcttcagtttg

SEQ ID NO: 36029 - DNA, 25 bp, Homo sapiens
gggcagatgcatagaccctctcaga

SEQ ID NO: 36030 - DNA, 25 bp, Homo sapiens
gcccagtgtatcatcaggaagtgta

SEQ ID NO: 36031 - DNA, 25 bp, Homo sapiens
agtgggagctttatcatcaaataca

SEQ ID NO: 36032 - DNA, 25 bp, Homo sapiens
gcgctatgtttcatcgtttcgtgga

SEQ ID NO: 36033 - DNA, 25 bp, Homo sapiens
atcctaagtccctgagtccctgagc

SEQ ID NO: 36034 - DNA, 25 bp, Homo sapiens
tggtggtcccttgaacccagagaca

SEQ ID NO: 36035 - DNA, 25 bp, Homo sapiens
ggggcgcaagtcaatttaacaacta

SEQ ID NO: 36036 - DNA, 25 bp, Homo sapiens
cactgtggcccattttgtcttagca

SEQ ID NO: 36037 - DNA, 25 bp, Homo sapiens
gggttcatcagtaagcacaggttta

SEQ ID NO: 36038 - DNA, 25 bp, Homo sapiens
tgccaggtgcttggggaataatact

SEQ ID NO: 36039 - DNA, 25 bp, Homo sapiens
cccagtagctgtgtgcctgttgaca

SEQ ID NO: 36040 - DNA, 25 bp, Homo sapiens
agatgttactggttccctcggtccc

SEQ ID NO: 36041 - DNA, 25 bp, Homo sapiens
ggctagatgctcactggtactttca

SEQ ID NO: 36042 - DNA, 25 bp, Homo sapiens
gcccttcattgttttgagtcaaaga

SEQ ID NO: 36043 - DNA, 25 bp, Homo sapiens
gggcctccactacagttacggttta

SEQ ID NO: 36044 - DNA, 25 bp, Homo sapiens
tctggggactatactcagaactttc

SEQ ID NO: 36045 - DNA, 25 bp, Homo sapiens
tccagggaggctctttagcaatagc

SEQ ID NO: 36046 - DNA, 25 bp, Homo sapiens
ggtctgccaatccacaatttccatg

SEQ ID NO: 36047 - DNA, 25 bp, Homo sapiens
gagggttccaacaccaagccaggta

SEQ ID NO: 36048 - DNA, 25 bp, Homo sapiens
tgctcactattttcctagggtggta

SEQ ID NO: 36049 - DNA, 25 bp, Homo sapiens
gaaggatctcttgctgccacatgtg

SEQ ID NO: 36050 - DNA, 25 bp, Homo sapiens
ggctgtgagttccagacatcccttc

SEQ ID NO: 36051 - DNA, 25 bp, Homo sapiens
aacctgctgtgattcttgtctaatg

SEQ ID NO: 36052 - DNA, 25 bp, Homo sapiens
aggtcttacaaagcagggtctcaca

SEQ ID NO: 36053 - DNA, 25 bp, Homo sapiens
gccagtcattagagccaccatcttg

SEQ ID NO: 36054 - DNA, 25 bp, Homo sapiens
tttggcagcttggatgaaaactttc

SEQ ID NO: 36055 - DNA, 25 bp, Homo sapiens
ccagtctgtgcagtgttgcttcatg

SEQ ID NO: 36056 - DNA, 25 bp, Homo sapiens
cccttctagttaattttcttcttat

SEQ ID NO: 36057 - DNA, 25 bp, Homo sapiens
agggtgctgtccataaaatgcagtc

SEQ ID NO: 36058 - DNA, 25 bp, Homo sapiens
agctgggtcctcacatgcacatttg

SEQ ID NO: 36059 - DNA, 25 bp, Homo sapiens
tagggcttctactacagggattttg

SEQ ID NO: 36060 - DNA, 25 bp, Homo sapiens
ggctaaactttgcttcctgtggtca

SEQ ID NO: 36061 - DNA, 25 bp, Homo sapiens
gtgggtactctcaggcatgtcattc

SEQ ID NO: 36062 - DNA, 25 bp, Homo sapiens
cttggatgtacccaaagttcattga

SEQ ID NO: 36063 - DNA, 25 bp, Homo sapiens
tggggcatggaagtacaagtcattc

SEQ ID NO: 36064 - DNA, 25 bp, Homo sapiens
gccagggctgcaagactgttcattc

SEQ ID NO: 36065 - DNA, 25 bp, Homo sapiens
tgcccacaaatggtcctggctgttg

SEQ ID NO: 36066 - DNA, 25 bp, Homo sapiens
ggcatgttgatttccagaccagaga

SEQ ID NO: 36067 - DNA, 25 bp, Homo sapiens
accctccagtcccaggtagaaattg

SEQ ID NO: 36068 - DNA, 25 bp, Homo sapiens
tacaccagcagtaggaggatcttgc

SEQ ID NO: 36069 - DNA, 25 bp, Homo sapiens
tactggcaaggagcaagacgttaac

SEQ ID NO: 36070 - DNA, 25 bp, Homo sapiens
tgcagcgggctcactttttgattaa

SEQ ID NO: 36071 - DNA, 25 bp, Homo sapiens
cgctccctgactgacggctttttca

SEQ ID NO: 36072 - DNA, 25 bp, Homo sapiens
gccctgcctgttagctacttatatg

SEQ ID NO: 36073 - DNA, 25 bp, Homo sapiens
catcgtgcctttttgttcccttaaa

SEQ ID NO: 36074 - DNA, 25 bp, Homo sapiens
ttccacagtggaagatgctttgcta

SEQ ID NO: 36075 - DNA, 25 bp, Homo sapiens
gctgtgttacaccttaagttctctc

SEQ ID NO: 36076 - DNA, 25 bp, Homo sapiens
gcttcctgtagttcgggacacactc

SEQ ID NO: 36077 - DNA, 25 bp, Homo sapiens
ctgagaaaagatgcctatgaacatg

SEQ ID NO: 36078 - DNA, 25 bp, Homo sapiens
ttattgaccaaaatcaagcagagga

SEQ ID NO: 36079 - DNA, 25 bp, Homo sapiens
acctcttattgttgatgattagaca

SEQ ID NO: 36080 - DNA, 25 bp, Homo sapiens
caggctgcgccttcatagattcaga

SEQ ID NO: 36081 - DNA, 25 bp, Homo sapiens
tgcatagtgttgtcctctggcaata

SEQ ID NO: 36082 - DNA, 25 bp, Homo sapiens
tctggatgccactaaggtcaggttc

SEQ ID NO: 36083 - DNA, 25 bp, Homo sapiens
ccgggcatctctagtgtgcatgttt

SEQ ID NO: 36084 - DNA, 25 bp, Homo sapiens
cacaggcctggcttgtggtacaaga

SEQ ID NO: 36085 - DNA, 25 bp, Homo sapiens
gcacagcattcaggacatatttatt

SEQ ID NO: 36086 - DNA, 25 bp, Homo sapiens
gtggcccaccaaaccagaatatttt

SEQ ID NO: 36087 - DNA, 25 bp, Homo sapiens
ggtcgcagtgagattgcatacttcc

SEQ ID NO: 36088 - DNA, 25 bp, Homo sapiens
ggtaacccatccctgtctgtggctg

SEQ ID NO: 36089 - DNA, 25 bp, Homo sapiens
aggggtcaacatctgcttctatgta

SEQ ID NO: 36090 - DNA, 25 bp, Homo sapiens
tccagctcctggtaagtatgactca

SEQ ID NO: 36091 - DNA, 25 bp, Homo sapiens
cccgattggtcagcgatgtcttata

SEQ ID NO: 36092 - DNA, 25 bp, Homo sapiens
agtgcacggtgtacagcagctttca

SEQ ID NO: 36093 - DNA, 25 bp, Homo sapiens
ggggtatcaaacctggaacatcaga

SEQ ID NO: 36094 - DNA, 25 bp, Homo sapiens
gccgcaaagggctcacaaatgattg

SEQ ID NO: 36095 - DNA, 25 bp, Homo sapiens
cctccaggccatggaaatgaatatc

SEQ ID NO: 36096 - DNA, 25 bp, Homo sapiens
gcacagggtatctgatgctcaaata

SEQ ID NO: 36097 - DNA, 25 bp, Homo sapiens
ccctcagtgtggctttttggcttcc

SEQ ID NO: 36098 - DNA, 25 bp, Homo sapiens
gcttgtctctatccagtcaccctga

SEQ ID NO: 36099 - DNA, 25 bp, Homo sapiens
accacagtttcaggaccaggcttga

SEQ ID NO: 36100 - DNA, 25 bp, Homo sapiens
tcaggcagggagctaatacttctta

SEQ ID NO: 36101 - DNA, 25 bp, Homo sapiens
ttccgtcaagactggctgaagattg

SEQ ID NO: 36102 - DNA, 25 bp, Homo sapiens
ctagagaaagctccacaagcgtatc

SEQ ID NO: 36103 - DNA, 25 bp, Homo sapiens
tagggagccgaattactgtcacttc

SEQ ID NO: 36104 - DNA, 25 bp, Homo sapiens
aggaccagttcagctctcattatga

SEQ ID NO: 36105 - DNA, 25 bp, Homo sapiens
gtcttgtcagatgaggccaccttca

SEQ ID NO: 36106 - DNA, 25 bp, Homo sapiens
tcgtcgcagtatcaggaaggtactc

SEQ ID NO: 36107 - DNA, 25 bp, Homo sapiens
ttggcaggcgtcacttggaattagc

SEQ ID NO: 36108 - DNA, 25 bp, Homo sapiens
ttgatcgtaaatgcccaccatgtgg

SEQ ID NO: 36109 - DNA, 25 bp, Homo sapiens
ccaccggcctgtgaggaaacttcca

SEQ ID NO: 36110 - DNA, 25 bp, Homo sapiens
agagatcagctctcaaggccctata

SEQ ID NO: 36111 - DNA, 25 bp, Homo sapiens
tttttctgagaagtggcctaggcca

SEQ ID NO: 36112 - DNA, 25 bp, Homo sapiens
ttggggtgacatccacacttgtgta

SEQ ID NO: 36113 - DNA, 25 bp, Homo sapiens
gccgtggtgcctcattcttattgtg

SEQ ID NO: 36114 - DNA, 25 bp, Homo sapiens
gttcctgctcgagttgccaaagata

SEQ ID NO: 36115 - DNA, 25 bp, Homo sapiens
atgtggtcacctctcactcagaaga

SEQ ID NO: 36116 - DNA, 25 bp, Homo sapiens
cctcggtcagaatccagtctttttg

SEQ ID NO: 36117 - DNA, 25 bp, Homo sapiens
gctgggctggtagattcatcacata

SEQ ID NO: 36118 - DNA, 25 bp, Homo sapiens
tgtaggtacccagaaatctcatctt

SEQ ID NO: 36119 - DNA, 25 bp, Homo sapiens
ggaaggcctccgctttaaaatatta

SEQ ID NO: 36120 - DNA, 25 bp, Homo sapiens
tacccttcagatcaaaaggacctgg

SEQ ID NO: 36121 - DNA, 25 bp, Homo sapiens
ttgcccagggctattcttccacatc

SEQ ID NO: 36122 - DNA, 25 bp, Homo sapiens
ggagtgccttcttgccattaccctg

SEQ ID NO: 36123 - DNA, 25 bp, Homo sapiens
agcaaagtttccagctccttgggga

SEQ ID NO: 36124 - DNA, 25 bp, Homo sapiens
aaggaaaaaaggtatatactttaat

SEQ ID NO: 36125 - DNA, 25 bp, Homo sapiens
tgttttggagttgactcggaccaaa

SEQ ID NO: 36126 - DNA, 25 bp, Homo sapiens
gtgcccacctttatcaccaggaaag

SEQ ID NO: 36127 - DNA, 25 bp, Homo sapiens
gtagggcagttccacctgttgtttc

SEQ ID NO: 36128 - DNA, 25 bp, Homo sapiens
gctcagctgcaaggaagattcattc

SEQ ID NO: 36129 - DNA, 25 bp, Homo sapiens
agctgctggccatcttttcaaaaca

SEQ ID NO: 36130 - DNA, 25 bp, Homo sapiens
gtcatggcccacctgcagagaactg

SEQ ID NO: 36131 - DNA, 25 bp, Homo sapiens
ctgggtctcactgatcaacaggcta

SEQ ID NO: 36132 - DNA, 25 bp, Homo sapiens
ctttgccattttgcccaggttagga

SEQ ID NO: 36133 - DNA, 25 bp, Homo sapiens
ggagcctggcattaacaaacactga

SEQ ID NO: 36134 - DNA, 25 bp, Homo sapiens
tctctgctgaaagaatgcgttgttc

SEQ ID NO: 36135 - DNA, 25 bp, Homo sapiens
gcagggcctgccatctttgcattca

SEQ ID NO: 36136 - DNA, 25 bp, Homo sapiens
gcccgtgtggtagacctgcaacttc

SEQ ID NO: 36137 - DNA, 25 bp, Homo sapiens
ccggatgctctaggaaaagtgcttc

SEQ ID NO: 36138 - DNA, 25 bp, Homo sapiens
tccctgccctgactgtattagaagc

SEQ ID NO: 36139 - DNA, 25 bp, Homo sapiens
tacaggtcagagcattcatagtttc

SEQ ID NO: 36140 - DNA, 25 bp, Homo sapiens
ggctcctccagtaacagaatcgcta

SEQ ID NO: 36141 - DNA, 25 bp, Homo sapiens
ggtgcctcctagacatcaaaaattt

SEQ ID NO: 36142 - DNA, 25 bp, Homo sapiens
agccagatattcaggcctcttcaga

SEQ ID NO: 36143 - DNA, 25 bp, Homo sapiens
ggcctgtctgtctagctatcaatta

SEQ ID NO: 36144 - DNA, 25 bp, Homo sapiens
tatctcactgggtactctggcaatg

SEQ ID NO: 36145 - DNA, 25 bp, Homo sapiens
gcttggtagcatctcggccacagga

SEQ ID NO: 36146 - DNA, 25 bp, Homo sapiens
tgcagggcctctcctaacttacata

SEQ ID NO: 36147 - DNA, 25 bp, Homo sapiens
tgcccgcggcctatttagaaatgtg

SEQ ID NO: 36148 - DNA, 25 bp, Homo sapiens
tcggaagctcgtcaaaacaaatgtg

SEQ ID NO: 36149 - DNA, 25 bp, Homo sapiens
agcctcctccctgaagaatgtgtgg

SEQ ID NO: 36150 - DNA, 25 bp, Homo sapiens
ttggccacaggaaacagagaccttc

SEQ ID NO: 36151 - DNA, 25 bp, Homo sapiens
tcagtctctgggtataaggaaaatc

SEQ ID NO: 36152 - DNA, 25 bp, Homo sapiens
agtgctacactctctttgaacatgg

SEQ ID NO: 36153 - DNA, 25 bp, Homo sapiens
aggtggcattcctcacagtagcaga

SEQ ID NO: 36154 - DNA, 25 bp, Homo sapiens
gggcctagggctcattctacataaa

SEQ ID NO: 36155 - DNA, 25 bp, Homo sapiens
ccaggctgggttacttgggttacta

SEQ ID NO: 36156 - DNA, 25 bp, Homo sapiens
ccgtggctccgtgttttgaggaata

SEQ ID NO: 36157 - DNA, 25 bp, Homo sapiens
agtctagtcattctgcctgtggggc

SEQ ID NO: 36158 - DNA, 25 bp, Homo sapiens
tcctgtagggacttgctgctgttaa

SEQ ID NO: 36159 - DNA, 25 bp, Homo sapiens
gggtcctcaaacctaccatgaattt

SEQ ID NO: 36160 - DNA, 25 bp, Homo sapiens
gcagagcagtgcttccattcttatg

SEQ ID NO: 36161 - DNA, 25 bp, Homo sapiens
ccctggggcttatgcgttttgaaaa

SEQ ID NO: 36162 - DNA, 25 bp, Homo sapiens
tgccgcccacgttgtagaaattctg

SEQ ID NO: 36163 - DNA, 25 bp, Homo sapiens
gcatttacctgattgcctgcctgta

SEQ ID NO: 36164 - DNA, 25 bp, Homo sapiens
aatgcgtggccagtgaagtgcttca

SEQ ID NO: 36165 - DNA, 25 bp, Homo sapiens
ccagccatttgggttgaagcatcaa

SEQ ID NO: 36166 - DNA, 25 bp, Homo sapiens
gctatcttgctgtctccctacctgg

SEQ ID NO: 36167 - DNA, 25 bp, Homo sapiens
actgctgggatgctttcacttgaca

SEQ ID NO: 36168 - DNA, 25 bp, Homo sapiens
cctacttactgtgtggggacattta

SEQ ID NO: 36169 - DNA, 25 bp, Homo sapiens
aggtgttcccttattgcccaatgtg

SEQ ID NO: 36170 - DNA, 25 bp, Homo sapiens
aaccgcagacctggggcctattata

SEQ ID NO: 36171 - DNA, 25 bp, Homo sapiens
aggcaccaccaccatttcattttga

SEQ ID NO: 36172 - DNA, 25 bp, Homo sapiens
tcccagcagtacaaaaacgaagttc

SEQ ID NO: 36173 - DNA, 25 bp, Homo sapiens
ggctcctcagtgactcctaccatgg

SEQ ID NO: 36174 - DNA, 25 bp, Homo sapiens
gtgctgtactaactctgccttttta

SEQ ID NO: 36175 - DNA, 25 bp, Homo sapiens
tggcagcagagcaaagacttatcta

SEQ ID NO: 36176 - DNA, 25 bp, Homo sapiens
cacacgttttgcttgggacatttta

SEQ ID NO: 36177 - DNA, 25 bp, Homo sapiens
cagaggcagggctaaagtttatatc

SEQ ID NO: 36178 - DNA, 25 bp, Homo sapiens
cttagctctgtgtcacctggtattc

SEQ ID NO: 36179 - DNA, 25 bp, Homo sapiens
tgcgactgcacctgactgtaatttg

SEQ ID NO: 36180 - DNA, 25 bp, Homo sapiens
acggctcctccttctgttgttaaga

SEQ ID NO: 36181 - DNA, 25 bp, Homo sapiens
gtggaacctcctttttgtcatgatg

SEQ ID NO: 36182 - DNA, 25 bp, Homo sapiens
ccctttgacctagcttccagtgata

SEQ ID NO: 36183 - DNA, 25 bp, Homo sapiens
cttgtggctgaatgtctcatcctga

SEQ ID NO: 36184 - DNA, 25 bp, Homo sapiens
tgaccgtggtcttgctgattacttc

SEQ ID NO: 36185 - DNA, 25 bp, Homo sapiens
aatgaacttctactatccctgaggc

SEQ ID NO: 36186 - DNA, 25 bp, Homo sapiens
gggctctctccattcagaagttttg

SEQ ID NO: 36187 - DNA, 25 bp, Homo sapiens
ccacccggactctgaaggcagtttg

SEQ ID NO: 36188 - DNA, 25 bp, Homo sapiens
agccgcagccttctgcctaagatta

SEQ ID NO: 36189 - DNA, 25 bp, Homo sapiens
tgggcatgtctctcacctccgatag

SEQ ID NO: 36190 - DNA, 25 bp, Homo sapiens
aataactgttgtgggagatcctgtc

SEQ ID NO: 36191 - DNA, 25 bp, Homo sapiens
atgccacctacctggcttctgtaga

SEQ ID NO: 36192 - DNA, 25 bp, Homo sapiens
taccatccatcgctgagaaaaattg

SEQ ID NO: 36193 - DNA, 25 bp, Homo sapiens
gtccctgcgatttctccctctgtga

SEQ ID NO: 36194 - DNA, 25 bp, Homo sapiens
cactcccggagtcgctgcttaacta

SEQ ID NO: 36195 - DNA, 25 bp, Homo sapiens
gggtgcctcctcctccttttattga

SEQ ID NO: 36196 - DNA, 25 bp, Homo sapiens
cctggctttgaactcacttacacta

SEQ ID NO: 36197 - DNA, 25 bp, Homo sapiens
cctggcccttgtcctacagatagta

SEQ ID NO: 36198 - DNA, 25 bp, Homo sapiens
ctgtggcacaggagtctgatgattc

SEQ ID NO: 36199 - DNA, 25 bp, Homo sapiens
gaagcctgaaggttgcctctgccta

SEQ ID NO: 36200 - DNA, 25 bp, Homo sapiens
agcaggtcttttctgggctcctaaa

SEQ ID NO: 36201 - DNA, 25 bp, Homo sapiens
caggtgcctaaggtgacatatttta

SEQ ID NO: 36202 - DNA, 25 bp, Homo sapiens
gggcaacttcttgtcatcttggata

SEQ ID NO: 36203 - DNA, 25 bp, Homo sapiens
cagttgccttccttgcctggtatta

SEQ ID NO: 36204 - DNA, 25 bp, Homo sapiens
ggaacctttttctatgccacgaagc

SEQ ID NO: 36205 - DNA, 25 bp, Homo sapiens
agccctttgtgtctgcctgtgattg

SEQ ID NO: 36206 - DNA, 25 bp, Homo sapiens
tggcaggcctcttgactgagaaatc

SEQ ID NO: 36207 - DNA, 25 bp, Homo sapiens
tccctgctggctgctgcatattcca

SEQ ID NO: 36208 - DNA, 25 bp, Homo sapiens
gcccttgggtggatctcaaatgcta

SEQ ID NO: 36209 - DNA, 25 bp, Homo sapiens
ccagaccattcttgcagccggagta

SEQ ID NO: 36210 - DNA, 25 bp, Homo sapiens
ccgtcttcaatgtttgcgtgtcaca

SEQ ID NO: 36211 - DNA, 25 bp, Homo sapiens
ccagcccttagtcatccagtgcaaa

SEQ ID NO: 36212 - DNA, 25 bp, Homo sapiens
agaggaccctctttgtgtaactgca

SEQ ID NO: 36213 - DNA, 25 bp, Homo sapiens
cccttgtcccagtgtttgcctatta

SEQ ID NO: 36214 - DNA, 25 bp, Homo sapiens
ttgccctgctcaaagaccatcttgg

SEQ ID NO: 36215 - DNA, 25 bp, Homo sapiens
ctctatagtggctggtacagggctc

SEQ ID NO: 36216 - DNA, 25 bp, Homo sapiens
agggtgctcccatcatctcattttg

SEQ ID NO: 36217 - DNA, 25 bp, Homo sapiens
tcctagcctggagatcatcaaatga

SEQ ID NO: 36218 - DNA, 25 bp, Homo sapiens
ttacagcacacgttgggccatcatc

SEQ ID NO: 36219 - DNA, 25 bp, Homo sapiens
ttttggagccagttcgaggactttc

SEQ ID NO: 36220 - DNA, 25 bp, Homo sapiens
attcctgcatgctttcttgaagaga

SEQ ID NO: 36221 - DNA, 25 bp, Homo sapiens
gcggctcttttcttaccggaatagc

SEQ ID NO: 36222 - DNA, 25 bp, Homo sapiens
cagggttgccattttgccacacata

SEQ ID NO: 36223 - DNA, 25 bp, Homo sapiens
cccagaggtctcgatagcaataact

SEQ ID NO: 36224 - DNA, 25 bp, Homo sapiens
ggggactgccacctgaaattcctga

SEQ ID NO: 36225 - DNA, 25 bp, Homo sapiens
tcgccttggctggacaatacttgtg

SEQ ID NO: 36226 - DNA, 25 bp, Homo sapiens
agtagggtcccacattagctttata

SEQ ID NO: 36227 - DNA, 25 bp, Homo sapiens
tgtctgagcagttcaagttagcctc

SEQ ID NO: 36228 - DNA, 25 bp, Homo sapiens
aggtcagtttcccagcacattagca

SEQ ID NO: 36229 - DNA, 25 bp, Homo sapiens
cgtcaccagtccatagcacaaagtc

SEQ ID NO: 36230 - DNA, 25 bp, Homo sapiens
ttactcctggtttggactgtgcatc

SEQ ID NO: 36231 - DNA, 25 bp, Homo sapiens
gccacctctgtaggggttcaccatt

SEQ ID NO: 36232 - DNA, 25 bp, Homo sapiens
gcactctcttgtatatcccttcctg

SEQ ID NO: 36233 - DNA, 25 bp, Homo sapiens
gggatctccttcatggctctttgca

SEQ ID NO: 36234 - DNA, 25 bp, Homo sapiens
atgtcaagttaacattcttgttgct

SEQ ID NO: 36235 - DNA, 25 bp, Homo sapiens
cccatgtctagggtacaactacgta

SEQ ID NO: 36236 - DNA, 25 bp, Homo sapiens
ggcctgctgagcaagtccttagaga

SEQ ID NO: 36237 - DNA, 25 bp, Homo sapiens
ggctcgtttcattacgctctcagga

SEQ ID NO: 36238 - DNA, 25 bp, Homo sapiens
ctggagtctctaccacgctgttggc

SEQ ID NO: 36239 - DNA, 25 bp, Homo sapiens
tcagggaattcgcagggcattcatc

SEQ ID NO: 36240 - DNA, 25 bp, Homo sapiens
cctgtgcgtgaacaaatccagcttt

SEQ ID NO: 36241 - DNA, 25 bp, Homo sapiens
tgtcagaccttctcctcagtgatgg

SEQ ID NO: 36242 - DNA, 25 bp, Homo sapiens
gcccgcaggggatcctagttattta

SEQ ID NO: 36243 - DNA, 25 bp, Homo sapiens
tttcatgtacatcgggcccaaaggg

SEQ ID NO: 36244 - DNA, 25 bp, Homo sapiens
tgctgcctcttctggggaacattta

SEQ ID NO: 36245 - DNA, 25 bp, Homo sapiens
ttgacccaggacaacatcgtctgtg

SEQ ID NO: 36246 - DNA, 25 bp, Homo sapiens
tacccaaagttagagtgttcctgca

SEQ ID NO: 36247 - DNA, 25 bp, Homo sapiens
ttggacttggctatcggccctgaca

SEQ ID NO: 36248 - DNA, 25 bp, Homo sapiens
catccagtatgtgcgttgtatcatc

SEQ ID NO: 36249 - DNA, 25 bp, Homo sapiens
atgtatgtgtgtgtgcatgggtata

SEQ ID NO: 36250 - DNA, 25 bp, Homo sapiens
gggaacttccctagtatctttaatg

SEQ ID NO: 36251 - DNA, 25 bp, Homo sapiens
gcaagtcccagagtaaagctatgta

SEQ ID NO: 36252 - DNA, 25 bp, Homo sapiens
atgccctcattggggccgttcataa

SEQ ID NO: 36253 - DNA, 25 bp, Homo sapiens
tctccctttgcagaagacgcccttt

SEQ ID NO: 36254 - DNA, 25 bp, Homo sapiens
gcatgttgtacagaccacgcattta

SEQ ID NO: 36255 - DNA, 25 bp, Homo sapiens
tttacaaggctgtgaattttctctc

SEQ ID NO: 36256 - DNA, 25 bp, Homo sapiens
ggcgctcctgtgtcattccctgaaa

SEQ ID NO: 36257 - DNA, 25 bp, Homo sapiens
ttgtctcacaatgctgggctgcctc

SEQ ID NO: 36258 - DNA, 25 bp, Homo sapiens
ggaaactgtgctctcatcctctttg

SEQ ID NO: 36259 - DNA, 25 bp, Homo sapiens
acccagggcgtcaaagtcagtctta

SEQ ID NO: 36260 - DNA, 25 bp, Homo sapiens
cctgtcagttcaatgggctccaata

SEQ ID NO: 36261 - DNA, 25 bp, Homo sapiens
tggctcctacgcagtgatgtcctta

SEQ ID NO: 36262 - DNA, 25 bp, Homo sapiens
cggcgtgcctctgtaaaagctttta

SEQ ID NO: 36263 - DNA, 25 bp, Homo sapiens
ccagtcatctgcgagagccttcatc

SEQ ID NO: 36264 - DNA, 25 bp, Homo sapiens
ttctgccttggggtggaatctaacc

SEQ ID NO: 36265 - DNA, 25 bp, Homo sapiens
cgtgtggatgcaacctgacctgttc

SEQ ID NO: 36266 - DNA, 25 bp, Homo sapiens
ctccgttggcttctcatcgcattga

SEQ ID NO: 36267 - DNA, 25 bp, Homo sapiens
ccgatgactgccttgtgaactaaga

SEQ ID NO: 36268 - DNA, 25 bp, Homo sapiens
cttgtccggaatactctatactgtg

SEQ ID NO: 36269 - DNA, 25 bp, Homo sapiens
tccgattttaataggcgagagctgc

SEQ ID NO: 36270 - DNA, 25 bp, Homo sapiens
ctacctggtgaattggagtgtctcc

SEQ ID NO: 36271 - DNA, 25 bp, Homo sapiens
gattcatatttttctgttctttttc

SEQ ID NO: 36272 - DNA, 25 bp, Homo sapiens
tgtccctctgtttgtaatgtgaaga

SEQ ID NO: 36273 - DNA, 25 bp, Homo sapiens
ggctatatgatgtaacctttaaggg

SEQ ID NO: 36274 - DNA, 25 bp, Homo sapiens
gagtgtgtgtgtctatgttcatccc

SEQ ID NO: 36275 - DNA, 25 bp, Homo sapiens
ctgcccagcttttcctgtggcataa

SEQ ID NO: 36276 - DNA, 25 bp, Homo sapiens
tttggccactcactacatgatgatg

SEQ ID NO: 36277 - DNA, 25 bp, Homo sapiens
gtctagcacagtctttcaaatcagg

SEQ ID NO: 36278 - DNA, 25 bp, Homo sapiens
ggccttttcctgatgagtccacgat

SEQ ID NO: 36279 - DNA, 25 bp, Homo sapiens
tttctaaggggaagtcaaacctttc

SEQ ID NO: 36280 - DNA, 25 bp, Homo sapiens
gagtggcgggatttacacagtttta

SEQ ID NO: 36281 - DNA, 25 bp, Homo sapiens
cctttggaattcatgctggtgtaga

SEQ ID NO: 36282 - DNA, 25 bp, Homo sapiens
cttgctgagtgctattatgtctttc

SEQ ID NO: 36283 - DNA, 25 bp, Homo sapiens
gggccaagctcctgtattcatgata

SEQ ID NO: 36284 - DNA, 25 bp, Homo sapiens
tccagggctgccatgacataatatg

SEQ ID NO: 36285 - DNA, 25 bp, Homo sapiens
acagacccttcctcatggtacagta

SEQ ID NO: 36286 - DNA, 25 bp, Homo sapiens
tctcagggagactgactgacaaatc

SEQ ID NO: 36287 - DNA, 25 bp, Homo sapiens
ccatatttagctttgttggagcaac

SEQ ID NO: 36288 - DNA, 25 bp, Homo sapiens
cactctggggttggtggttcatata

SEQ ID NO: 36289 - DNA, 25 bp, Homo sapiens
ccctggtctgttgatgatgttttta

SEQ ID NO: 36290 - DNA, 25 bp, Homo sapiens
gtcagtcagtagcaacatccaagtc

SEQ ID NO: 36291 - DNA, 25 bp, Homo sapiens
aggggcccatcaggaacttcatata

SEQ ID NO: 36292 - DNA, 25 bp, Homo sapiens
tgtttcttcagccagtagtagcctc

SEQ ID NO: 36293 - DNA, 25 bp, Homo sapiens
ttcggctcttatacagcttctattc

SEQ ID NO: 36294 - DNA, 25 bp, Homo sapiens
cctccttgtgtcttccagaaatatg

SEQ ID NO: 36295 - DNA, 25 bp, Homo sapiens
ctgaggcggataactagctagcttc

SEQ ID NO: 36296 - DNA, 25 bp, Homo sapiens
ctccctcacgtacaatgggaatata

SEQ ID NO: 36297 - DNA, 25 bp, Homo sapiens
tgagcgagagctaccagttttattc

SEQ ID NO: 36298 - DNA, 25 bp, Homo sapiens
tcagtgcactgctgcccggaataaa

SEQ ID NO: 36299 - DNA, 25 bp, Homo sapiens
gactctctggtccatgctgaacata

SEQ ID NO: 36300 - DNA, 25 bp, Homo sapiens
gacccagctccagtctttttgtaga

SEQ ID NO: 36301 - DNA, 25 bp, Homo sapiens
tggtgaactgcccactaaaaggatg

SEQ ID NO: 36302 - DNA, 25 bp, Homo sapiens
ctggccatgccgagatccatctatt

SEQ ID NO: 36303 - DNA, 25 bp, Homo sapiens
agggaaccagtgcagccttttcaga

SEQ ID NO: 36304 - DNA, 25 bp, Homo sapiens
cggcctcgaagggttacacatttaa

SEQ ID NO: 36305 - DNA, 25 bp, Homo sapiens
aggccttatgaagctctgagttttc

SEQ ID NO: 36306 - DNA, 25 bp, Homo sapiens
tgcctttggggaggaatcatttacc

SEQ ID NO: 36307 - DNA, 25 bp, Homo sapiens
gatcctctggatggtgactttaaag

SEQ ID NO: 36308 - DNA, 25 bp, Homo sapiens
ggtcaccctaactttctgagcattg

SEQ ID NO: 36309 - DNA, 25 bp, Homo sapiens
caggtggtggctaagtctccttcta

SEQ ID NO: 36310 - DNA, 25 bp, Homo sapiens
tgccatggcccagagcagtttcctc

SEQ ID NO: 36311 - DNA, 25 bp, Homo sapiens
gccatggggctatgcctctgtaatc

SEQ ID NO: 36312 - DNA, 25 bp, Homo sapiens
cacagcctgtgtgttcagtccgatc

SEQ ID NO: 36313 - DNA, 25 bp, Homo sapiens
cgagaccacgtattgcaagaattta

SEQ ID NO: 36314 - DNA, 25 bp, Homo sapiens
tcctccagagaaaggccttggtttc

SEQ ID NO: 36315 - DNA, 25 bp, Homo sapiens
tggctcaggcatgttcgtctcttta

SEQ ID NO: 36316 - DNA, 25 bp, Homo sapiens
tggctgctaggacttggaatctatc

SEQ ID NO: 36317 - DNA, 25 bp, Homo sapiens
ttaatgcctgtttgagagccgtccg

SEQ ID NO: 36318 - DNA, 25 bp, Homo sapiens
ttcacaccgggaagaccagtagctc

SEQ ID NO: 36319 - DNA, 25 bp, Homo sapiens
ggcccatgcactaccactttactga

SEQ ID NO: 36320 - DNA, 25 bp, Homo sapiens
tcctcttcctagctgggtggcatca

SEQ ID NO: 36321 - DNA, 25 bp, Homo sapiens
atctcagtttctcaggtggcaagca

SEQ ID NO: 36322 - DNA, 25 bp, Homo sapiens
gttgcatctgcataggcctcctgga

SEQ ID NO: 36323 - DNA, 25 bp, Homo sapiens
taagggaaaacaaatgtcattaaaa

SEQ ID NO: 36324 - DNA, 25 bp, Homo sapiens
tggggactcaacaaacacctctttt

SEQ ID NO: 36325 - DNA, 25 bp, Homo sapiens
ctatgccagtcagtccagtggtttc

SEQ ID NO: 36326 - DNA, 25 bp, Homo sapiens
agtctccctagaccagctatctgga

SEQ ID NO: 36327 - DNA, 25 bp, Homo sapiens
ctgcaagttacataggaaaaaaggt

SEQ ID NO: 36328 - DNA, 25 bp, Homo sapiens
gagtttcaatgttaactagcaattg

SEQ ID NO: 36329 - DNA, 25 bp, Homo sapiens
tccctgggcttctcggagctaaatg

SEQ ID NO: 36330 - DNA, 25 bp, Homo sapiens
tgctccgtcctgtgctgctattgta

SEQ ID NO: 36331 - DNA, 25 bp, Homo sapiens
ccactgttccactagaaggtcttta

SEQ ID NO: 36332 - DNA, 25 bp, Homo sapiens
agggtcccttgtgcttatcttctga

SEQ ID NO: 36333 - DNA, 25 bp, Homo sapiens
ctccgtgtggtaggtagcttcaata

SEQ ID NO: 36334 - DNA, 25 bp, Homo sapiens
agcttggcaggatttctcccttaga

SEQ ID NO: 36335 - DNA, 25 bp, Homo sapiens
ctcctcttaacacagagctgagatg

SEQ ID NO: 36336 - DNA, 25 bp, Homo sapiens
tactgctctaggatgctgcaatctc

SEQ ID NO: 36337 - DNA, 25 bp, Homo sapiens
ttcagcttggccacttctgcatttg

SEQ ID NO: 36338 - DNA, 25 bp, Homo sapiens
ctgctgcatacgtaacactgttttc

SEQ ID NO: 36339 - DNA, 25 bp, Homo sapiens
tccctcagagccagaatgcaatgcc

SEQ ID NO: 36340 - DNA, 25 bp, Homo sapiens
tacttaccacacagaggcaggaggc

SEQ ID NO: 36341 - DNA, 25 bp, Homo sapiens
ggccttttccagaatagcaaatgtc

SEQ ID NO: 36342 - DNA, 25 bp, Homo sapiens
tgtgccacagcagaagcaagttgtg

SEQ ID NO: 36343 - DNA, 25 bp, Homo sapiens
gtggaccttggacattttgcatttc

SEQ ID NO: 36344 - DNA, 25 bp, Homo sapiens
ccactggacatgctaaggtacttta

SEQ ID NO: 36345 - DNA, 25 bp, Homo sapiens
catgaagcccttccagacttgttta

SEQ ID NO: 36346 - DNA, 25 bp, Homo sapiens
gccctgcccttgtcactggatgaga

SEQ ID NO: 36347 - DNA, 25 bp, Homo sapiens
tccacagtccgttggttgaattgtc

SEQ ID NO: 36348 - DNA, 25 bp, Homo sapiens
tcagcagcagcttgggatgttatca

SEQ ID NO: 36349 - DNA, 25 bp, Homo sapiens
gtcaggcactcatatgtactcttca

SEQ ID NO: 36350 - DNA, 25 bp, Homo sapiens
agtgctcacctacaagctcttttgc

SEQ ID NO: 36351 - DNA, 25 bp, Homo sapiens
actgggtttcttgatgcttagactc

SEQ ID NO: 36352 - DNA, 25 bp, Homo sapiens
cctgttcctgtctgcccatagctga

SEQ ID NO: 36353 - DNA, 25 bp, Homo sapiens
tggcatgcccatttcccataaagaa

SEQ ID NO: 36354 - DNA, 25 bp, Homo sapiens
ccctctaatgtggaaactgccttta

SEQ ID NO: 36355 - DNA, 25 bp, Homo sapiens
gaaaaaatacagaaacagacaagac

SEQ ID NO: 36356 - DNA, 25 bp, Homo sapiens
gcctggtgctgtttgcttgattgta

SEQ ID NO: 36357 - DNA, 25 bp, Homo sapiens
ggacctgggtacactcgagactttc

SEQ ID NO: 36358 - DNA, 25 bp, Homo sapiens
tatccatgcttctgcctgtgtgttc

SEQ ID NO: 36359 - DNA, 25 bp, Homo sapiens
ggctggtttcctgcaaggtatatta

SEQ ID NO: 36360 - DNA, 25 bp, Homo sapiens
ggtgcataatatcctggcggtcata

SEQ ID NO: 36361 - DNA, 25 bp, Homo sapiens
aagggttcaccaggtctagtctgca

SEQ ID NO: 36362 - DNA, 25 bp, Homo sapiens
gctggatggcctcaaacaaagtgtc

SEQ ID NO: 36363 - DNA, 25 bp, Homo sapiens
ctcagaaggtttatcagggtacaca

SEQ ID NO: 36364 - DNA, 25 bp, Homo sapiens
cttttcaggattttgcccagggccc

SEQ ID NO: 36365 - DNA, 25 bp, Homo sapiens
gtgccgtatctcctcacatagctga

SEQ ID NO: 36366 - DNA, 25 bp, Homo sapiens
cccagagtctgtttgtgtattaatc

SEQ ID NO: 36367 - DNA, 25 bp, Homo sapiens
cagcagccagtgttggactatttca

SEQ ID NO: 36368 - DNA, 25 bp, Homo sapiens
tccacctagtagtcatgccattatc

SEQ ID NO: 36369 - DNA, 25 bp, Homo sapiens
gcggcaacagcaattcttaatgaat

SEQ ID NO: 36370 - DNA, 25 bp, Homo sapiens
cagcttcttttctgcccggttggga

SEQ ID NO: 36371 - DNA, 25 bp, Homo sapiens
cttgaagcaaacctgtgtacccatt

SEQ ID NO: 36372 - DNA, 25 bp, Homo sapiens
cagactgtagtgttgggttcaaacc

SEQ ID NO: 36373 - DNA, 25 bp, Homo sapiens
tccagacctagcctttgtagtagtc

SEQ ID NO: 36374 - DNA, 25 bp, Homo sapiens
tcctgagacagggagattatttatc

SEQ ID NO: 36375 - DNA, 25 bp, Homo sapiens
cattaccacactctctgatcagaca

SEQ ID NO: 36376 - DNA, 25 bp, Homo sapiens
gaagtgttaagagtcttagtttctt

SEQ ID NO: 36377 - DNA, 25 bp, Homo sapiens
gcatacccttaccaacacttgatat

SEQ ID NO: 36378 - DNA, 25 bp, Homo sapiens
gctgagctccagcattcctaggaga

SEQ ID NO: 36379 - DNA, 25 bp, Homo sapiens
tggtgaactgcttaactcctttgta

SEQ ID NO: 36380 - DNA, 25 bp, Homo sapiens
ccagttgcttctgtttagttgctta

SEQ ID NO: 36381 - DNA, 25 bp, Homo sapiens
accctgttgctctctctttgtatga

SEQ ID NO: 36382 - DNA, 25 bp, Homo sapiens
tgttggccttttaatacgttattcc

SEQ ID NO: 36383 - DNA, 25 bp, Homo sapiens
gcgttggcaccctcatttaaaattc

SEQ ID NO: 36384 - DNA, 25 bp, Homo sapiens
tgggttcaaagcatcacaaatctgg

SEQ ID NO: 36385 - DNA, 25 bp, Homo sapiens
gtggtctctcacagggctcaattta

SEQ ID NO: 36386 - DNA, 25 bp, Homo sapiens
ggccagcctcagaaatggtataatc

SEQ ID NO: 36387 - DNA, 25 bp, Homo sapiens
cctggcatttctgggctgtttaaca

SEQ ID NO: 36388 - DNA, 25 bp, Homo sapiens
cagggttccctgtgttacatgttca

SEQ ID NO: 36389 - DNA, 25 bp, Homo sapiens
aggatgcgccctttctctgagcttc

SEQ ID NO: 36390 - DNA, 25 bp, Homo sapiens
ctacaggagtgggttcaagcaaatg

SEQ ID NO: 36391 - DNA, 25 bp, Homo sapiens
ggacttggttcctttctcctaaata

SEQ ID NO: 36392 - DNA, 25 bp, Homo sapiens
tacatataggggagagcacacattc

SEQ ID NO: 36393 - DNA, 25 bp, Homo sapiens
cgttttccgaaagctgcgtgcaata

SEQ ID NO: 36394 - DNA, 25 bp, Homo sapiens
ctggttagccagagagaagtccttc

SEQ ID NO: 36395 - DNA, 25 bp, Homo sapiens
gccttgtggctaaacttcagctttg

SEQ ID NO: 36396 - DNA, 25 bp, Homo sapiens
tggggcgttcacatagcagtacttg

SEQ ID NO: 36397 - DNA, 25 bp, Homo sapiens
gcccatttcttacctagtcagtgca

SEQ ID NO: 36398 - DNA, 25 bp, Homo sapiens
agcactggtccttgagctcccaata

SEQ ID NO: 36399 - DNA, 25 bp, Homo sapiens
aggagccaattttatgtacgtttta

SEQ ID NO: 36400 - DNA, 25 bp, Homo sapiens
gcagggctccaatgaaaccactatg

SEQ ID NO: 36401 - DNA, 25 bp, Homo sapiens
cttagagtatcttatttcacaacgt

SEQ ID NO: 36402 - DNA, 25 bp, Homo sapiens
atagttcatcgtgttcttaccaata

SEQ ID NO: 36403 - DNA, 25 bp, Homo sapiens
ccctggggatgcctttaaattatct

SEQ ID NO: 36404 - DNA, 25 bp, Homo sapiens
cccatctttatgtgaggtctgactt

SEQ ID NO: 36405 - DNA, 25 bp, Homo sapiens
cctggacttcaggaacataaatgcc

SEQ ID NO: 36406 - DNA, 25 bp, Homo sapiens
tacctggggttttcaagattatgca

SEQ ID NO: 36407 - DNA, 25 bp, Homo sapiens
ctgtagcctcctgtgaaaaactgtg

SEQ ID NO: 36408 - DNA, 25 bp, Homo sapiens
accgagttcctgagtgctgaatttc

SEQ ID NO: 36409 - DNA, 25 bp, Homo sapiens
aggctggcacttacatgtatcttta

SEQ ID NO: 36410 - DNA, 25 bp, Homo sapiens
tccgtagacatttccacagaaaatg

SEQ ID NO: 36411 - DNA, 25 bp, Homo sapiens
ctatggcagccagcttccttgttgg

SEQ ID NO: 36412 - DNA, 25 bp, Homo sapiens
tggtgtcctggttcctcagatttta

SEQ ID NO: 36413 - DNA, 25 bp, Homo sapiens
agtggctctacattacaggacctta

SEQ ID NO: 36414 - DNA, 25 bp, Homo sapiens
gtagcaccactgaccctagacaatg

SEQ ID NO: 36415 - DNA, 25 bp, Homo sapiens
ctgaccatccggcttctgagagaga

SEQ ID NO: 36416 - DNA, 25 bp, Homo sapiens
ggtgtcactgtagcatcatcatatt

SEQ ID NO: 36417 - DNA, 25 bp, Homo sapiens
gtccaataacaatcacttttagttg

SEQ ID NO: 36418 - DNA, 25 bp, Homo sapiens
tccaggctgcctgtcctctaatttg

SEQ ID NO: 36419 - DNA, 25 bp, Homo sapiens
gcgcacccatttgcggtaatcatta

SEQ ID NO: 36420 - DNA, 25 bp, Homo sapiens
ggccaggtccctccaaatgtttgtg

SEQ ID NO: 36421 - DNA, 25 bp, Homo sapiens
gcctggctagacgaaagacactgta

SEQ ID NO: 36422 - DNA, 25 bp, Homo sapiens
ggtgagtacccaatgtttcaaaatg

SEQ ID NO: 36423 - DNA, 25 bp, Homo sapiens
gtgagtcctcttgcccttttgttta

SEQ ID NO: 36424 - DNA, 25 bp, Homo sapiens
tggcctgaagtctggtgtatacaaa

SEQ ID NO: 36425 - DNA, 25 bp, Homo sapiens
ctcaccaagaagtagatgggctttt

SEQ ID NO: 36426 - DNA, 25 bp, Homo sapiens
cccgtgtgtgtttatgacctatgta

SEQ ID NO: 36427 - DNA, 25 bp, Homo sapiens
gaggaatatagtggcaagtcatctt

SEQ ID NO: 36428 - DNA, 25 bp, Homo sapiens
tcgggctcaggtcacacttacatag

SEQ ID NO: 36429 - DNA, 25 bp, Homo sapiens
ttctaaaaacaaagagaaaagaaag

SEQ ID NO: 36430 - DNA, 25 bp, Homo sapiens
gtcagcttctgtggcctcctcaaga

SEQ ID NO: 36431 - DNA, 25 bp, Homo sapiens
tcctctcatttgacgtcagacgtgc

SEQ ID NO: 36432 - DNA, 25 bp, Homo sapiens
cggtgaggtttcgaccaagagttta

SEQ ID NO: 36433 - DNA, 25 bp, Homo sapiens
agtgtcgggcatctctgaatctcta

SEQ ID NO: 36434 - DNA, 25 bp, Homo sapiens
cttgccggttgctacaggaatactc

SEQ ID NO: 36435 - DNA, 25 bp, Homo sapiens
cccaggggaggagttaaaccatttt

SEQ ID NO: 36436 - DNA, 25 bp, Homo sapiens
tcccaccgaggcctgtaatctttgt

SEQ ID NO: 36437 - DNA, 25 bp, Homo sapiens
cctggccacagcttttggtgtagga

SEQ ID NO: 36438 - DNA, 25 bp, Homo sapiens
gtggactcttctgctgacatgtttc

SEQ ID NO: 36439 - DNA, 25 bp, Homo sapiens
atttctcctcctcctctcactcttc

SEQ ID NO: 36440 - DNA, 25 bp, Homo sapiens
cctagccctcttgggaatgatttta

SEQ ID NO: 36441 - DNA, 25 bp, Homo sapiens
tgggtgtctacttgtcatctaatta

SEQ ID NO: 36442 - DNA, 25 bp, Homo sapiens
ttcaattggcaaggaggctctgttc

SEQ ID NO: 36443 - DNA, 25 bp, Homo sapiens
ggtgtctacaatatatcaggttctt

SEQ ID NO: 36444 - DNA, 25 bp, Homo sapiens
ggtgtgattgccatcttccgaagta

SEQ ID NO: 36445 - DNA, 25 bp, Homo sapiens
tctgaagtactagtggccgagccca

SEQ ID NO: 36446 - DNA, 25 bp, Homo sapiens
gagactcctcccatatcacatgatg

SEQ ID NO: 36447 - DNA, 25 bp, Homo sapiens
ggctgctcagctgggatgaattact

SEQ ID NO: 36448 - DNA, 25 bp, Homo sapiens
catcttcctttctggggctgtgtca

SEQ ID NO: 36449 - DNA, 25 bp, Homo sapiens
ctggctctgctcctactgttgtatc

SEQ ID NO: 36450 - DNA, 25 bp, Homo sapiens
gaggccactggactttgagacaaga

SEQ ID NO: 36451 - DNA, 25 bp, Homo sapiens
ggatctttctcctcccttcagtatg

SEQ ID NO: 36452 - DNA, 25 bp, Homo sapiens
tttaggttcatctcagtctgtggtc

SEQ ID NO: 36453 - DNA, 25 bp, Homo sapiens
ctctgttctttttggtgtcgttata

SEQ ID NO: 36454 - DNA, 25 bp, Homo sapiens
tgagcccttcgatagcattaaactg

SEQ ID NO: 36455 - DNA, 25 bp, Homo sapiens
ggtgtgctcctctgtcttgtgaaga

SEQ ID NO: 36456 - DNA, 25 bp, Homo sapiens
ggaattcttgccctagctctcatta

SEQ ID NO: 36457 - DNA, 25 bp, Homo sapiens
gggctacctatgctctcctgccata

SEQ ID NO: 36458 - DNA, 25 bp, Homo sapiens
cccagctgccctttgcgtttgcata

SEQ ID NO: 36459 - DNA, 25 bp, Homo sapiens
ctcctcttcactgggcgggaatata

SEQ ID NO: 36460 - DNA, 25 bp, Homo sapiens
ggggtcccgtccacttaccagcaaa

SEQ ID NO: 36461 - DNA, 25 bp, Homo sapiens
tggtgtcatcccagccaggcatctt

SEQ ID NO: 36462 - DNA, 25 bp, Homo sapiens
catagctgaacctattgaatgcata

SEQ ID NO: 36463 - DNA, 25 bp, Homo sapiens
tggtgagcccacaaaagatctatta

SEQ ID NO: 36464 - DNA, 25 bp, Homo sapiens
aagccatgcatatttccctaggaga

SEQ ID NO: 36465 - DNA, 25 bp, Homo sapiens
gttttagcactctcttcgggcctgg

SEQ ID NO: 36466 - DNA, 25 bp, Homo sapiens
ggggcaatctcctatgtggcttgaa

SEQ ID NO: 36467 - DNA, 25 bp, Homo sapiens
ttcttcagacaaggcacccagggtt

SEQ ID NO: 36468 - DNA, 25 bp, Homo sapiens
gctgttgttagcacacctgggacta

SEQ ID NO: 36469 - DNA, 25 bp, Homo sapiens
tcccaaggcaattaagagatgattc

SEQ ID NO: 36470 - DNA, 25 bp, Homo sapiens
ggcaggccattagtttgtgaaaata

SEQ ID NO: 36471 - DNA, 25 bp, Homo sapiens
tgtctgcatagttctaagtcccttg

SEQ ID NO: 36472 - DNA, 25 bp, Homo sapiens
ttctgcctcagtacaatctagtagg

SEQ ID NO: 36473 - DNA, 25 bp, Homo sapiens
ctaaattgataaacatttaaacatg

SEQ ID NO: 36474 - DNA, 25 bp, Homo sapiens
gtctgccggtagtgccaaattactg

SEQ ID NO: 36475 - DNA, 25 bp, Homo sapiens
atggtctttccactcctacttaatg

SEQ ID NO: 36476 - DNA, 25 bp, Homo sapiens
tccgcgattgttgggttagtgatcc

SEQ ID NO: 36477 - DNA, 25 bp, Homo sapiens
tgcagagctgccttcatgattggtc

SEQ ID NO: 36478 - DNA, 25 bp, Homo sapiens
aggcaggcagtaatttcagttttca

SEQ ID NO: 36479 - DNA, 25 bp, Homo sapiens
tgatccctggctactctttttaaga

SEQ ID NO: 36480 - DNA, 25 bp, Homo sapiens
cctctgggttttgttgtttggagca

SEQ ID NO: 36481 - DNA, 25 bp, Homo sapiens
cagccgggagctttcattcaaggtc

SEQ ID NO: 36482 - DNA, 25 bp, Homo sapiens
catctctggtcctgggcaaattata

SEQ ID NO: 36483 - DNA, 25 bp, Homo sapiens
caaatgttgcgttgctgcttaaata

SEQ ID NO: 36484 - DNA, 25 bp, Homo sapiens
agatggcctcacctccttgctctga

SEQ ID NO: 36485 - DNA, 25 bp, Homo sapiens
cggcatgatttctctggcttgacga

SEQ ID NO: 36486 - DNA, 25 bp, Homo sapiens
cagcctagagcagtggttgtcaaac

SEQ ID NO: 36487 - DNA, 25 bp, Homo sapiens
aaccgcatgcagttagccctttagc

SEQ ID NO: 36488 - DNA, 25 bp, Homo sapiens
agtggaattgctccctgacctgctc

SEQ ID NO: 36489 - DNA, 25 bp, Homo sapiens
gccctagggactggtgattaatatc

SEQ ID NO: 36490 - DNA, 25 bp, Homo sapiens
tccctggcacatagctgatgcatca

SEQ ID NO: 36491 - DNA, 25 bp, Homo sapiens
atggcactcactctacaagctttgg

SEQ ID NO: 36492 - DNA, 25 bp, Homo sapiens
gaggcattgtcaccattcactattg

SEQ ID NO: 36493 - DNA, 25 bp, Homo sapiens
ggggtgcttccatatcactctaaca

SEQ ID NO: 36494 - DNA, 25 bp, Homo sapiens
ctaagggtgttttctctggccagta

SEQ ID NO: 36495 - DNA, 25 bp, Homo sapiens
gctaacagtgctgggccataaagtt

SEQ ID NO: 36496 - DNA, 25 bp, Homo sapiens
gtctgcttccttcccattgctggta

SEQ ID NO: 36497 - DNA, 25 bp, Homo sapiens
ctggggtcctgccaatttcatctgc

SEQ ID NO: 36498 - DNA, 25 bp, Homo sapiens
ccacacagtcctttcttggggaata

SEQ ID NO: 36499 - DNA, 25 bp, Homo sapiens
ttgtttctctccaaagccctaggtg

SEQ ID NO: 36500 - DNA, 25 bp, Homo sapiens
cctgcctctagaaaagctgtgatta

SEQ ID NO: 36501 - DNA, 25 bp, Homo sapiens
tcgttcgctaatgctgtggcctgta

SEQ ID NO: 36502 - DNA, 25 bp, Homo sapiens
ggaggggcccttcttctctttgaaa

SEQ ID NO: 36503 - DNA, 25 bp, Homo sapiens
gtggcacaccttcgtggaatttaca

SEQ ID NO: 36504 - DNA, 25 bp, Homo sapiens
tgcgagttctcttcctcactaagtg

SEQ ID NO: 36505 - DNA, 25 bp, Homo sapiens
gtgctgccatgtatctgccaaagtg

SEQ ID NO: 36506 - DNA, 25 bp, Homo sapiens
gacagctctactctactctgtatgg

SEQ ID NO: 36507 - DNA, 25 bp, Homo sapiens
tcttctcatccgaaagtatggctta

SEQ ID NO: 36508 - DNA, 25 bp, Homo sapiens
tccctgcttaggcttgtccaagtta

SEQ ID NO: 36509 - DNA, 25 bp, Homo sapiens
gggcaacctagcacaacagttttca

SEQ ID NO: 36510 - DNA, 25 bp, Homo sapiens
tggtgcctccagaacagacttcctc

SEQ ID NO: 36511 - DNA, 25 bp, Homo sapiens
cctggtgccataatgtactgagtta

SEQ ID NO: 36512 - DNA, 25 bp, Homo sapiens
gtgatgttttatgtccaagtcccaa

SEQ ID NO: 36513 - DNA, 25 bp, Homo sapiens
ctgtgcccaaagagagacttaaata

SEQ ID NO: 36514 - DNA, 25 bp, Homo sapiens
gtctccaagtgctaggccctgtgta

SEQ ID NO: 36515 - DNA, 25 bp, Homo sapiens
tcacattgagggaggctaactaacc

SEQ ID NO: 36516 - DNA, 25 bp, Homo sapiens
ggcggctcatgcctaaggatctcta

SEQ ID NO: 36517 - DNA, 25 bp, Homo sapiens
aagtgttttgcctctgttcctataa

SEQ ID NO: 36518 - DNA, 25 bp, Homo sapiens
tggaagcacagaaactcatagcatg

SEQ ID NO: 36519 - DNA, 25 bp, Homo sapiens
ctggacctgattggatgatttcttc

SEQ ID NO: 36520 - DNA, 25 bp, Homo sapiens
tacctgatcaacatacgcctagctg

SEQ ID NO: 36521 - DNA, 25 bp, Homo sapiens
tcatggaaccctataaagagtgcta

SEQ ID NO: 36522 - DNA, 25 bp, Homo sapiens
aacagttgtggagtttgagtagaag

SEQ ID NO: 36523 - DNA, 25 bp, Homo sapiens
ctgtcgggctgactgataattccta

SEQ ID NO: 36524 - DNA, 25 bp, Homo sapiens
ttcacttttctggactggcattggc

SEQ ID NO: 36525 - DNA, 25 bp, Homo sapiens
tccctttgaggccagtttctccaga

SEQ ID NO: 36526 - DNA, 25 bp, Homo sapiens
tgctgtttggctgacttaattctta

SEQ ID NO: 36527 - DNA, 25 bp, Homo sapiens
gggccaacagccctatgatactttg

SEQ ID NO: 36528 - DNA, 25 bp, Homo sapiens
cccaaccactggtttgacagttgtt

SEQ ID NO: 36529 - DNA, 25 bp, Homo sapiens
ggcccatcccggctgataaatagtt

SEQ ID NO: 36530 - DNA, 25 bp, Homo sapiens
cagctgcccgggacttctaaaattg

SEQ ID NO: 36531 - DNA, 25 bp, Homo sapiens
ttggccactcatggtgctattctga

SEQ ID NO: 36532 - DNA, 25 bp, Homo sapiens
actctatgcaagtggtggccttctc

SEQ ID NO: 36533 - DNA, 25 bp, Homo sapiens
cggctttctgaggtcacgtggtaca

SEQ ID NO: 36534 - DNA, 25 bp, Homo sapiens
ctcatgggtcggcttcacagaaata

SEQ ID NO: 36535 - DNA, 25 bp, Homo sapiens
ctgaactcttctgtgaatttaaata

SEQ ID NO: 36536 - DNA, 25 bp, Homo sapiens
cctgcagggcgatcttcattattta

SEQ ID NO: 36537 - DNA, 25 bp, Homo sapiens
gcaccctctggttccctttcaaaaa

SEQ ID NO: 36538 - DNA, 25 bp, Homo sapiens
ggccgctgtgcctcttcaaacaatg

SEQ ID NO: 36539 - DNA, 25 bp, Homo sapiens
accatgtgggattctgacatctcta

SEQ ID NO: 36540 - DNA, 25 bp, Homo sapiens
gctgtcctctgaaaacatggcctga

SEQ ID NO: 36541 - DNA, 25 bp, Homo sapiens
cctcctggtgggtttgacatttgta

SEQ ID NO: 36542 - DNA, 25 bp, Homo sapiens
tcagttctcaatatcaggtcccagg

SEQ ID NO: 36543 - DNA, 25 bp, Homo sapiens
tgtccctgtcacatagatgcaagtg

SEQ ID NO: 36544 - DNA, 25 bp, Homo sapiens
gtcggaatcaactgtgagccctttc

SEQ ID NO: 36545 - DNA, 25 bp, Homo sapiens
aggacctctttagaagccaccagtg

SEQ ID NO: 36546 - DNA, 25 bp, Homo sapiens
cagccagtggttaaggaaatttttc

SEQ ID NO: 36547 - DNA, 25 bp, Homo sapiens
ggtgccttactctctgctccacagg

SEQ ID NO: 36548 - DNA, 25 bp, Homo sapiens
gacctgctgtatgtgagcctctcca

SEQ ID NO: 36549 - DNA, 25 bp, Homo sapiens
agtggctccttgaataacctttgtc

SEQ ID NO: 36550 - DNA, 25 bp, Homo sapiens
tggctggctccgtagcattttctta

SEQ ID NO: 36551 - DNA, 25 bp, Homo sapiens
ggccaggttccttccacaatcatta

SEQ ID NO: 36552 - DNA, 25 bp, Homo sapiens
gtcttgcttgggaactatctggtca

SEQ ID NO: 36553 - DNA, 25 bp, Homo sapiens
cctcttctgggatctggcattagtg

SEQ ID NO: 36554 - DNA, 25 bp, Homo sapiens
agccctgggctgacttcaatacaaa

SEQ ID NO: 36555 - DNA, 25 bp, Homo sapiens
ccctcctaaggagatgttttgcttc

SEQ ID NO: 36556 - DNA, 25 bp, Homo sapiens
gatctaattggcgaaacagtttttg

SEQ ID NO: 36557 - DNA, 25 bp, Homo sapiens
ccagcaggtggtgcaagagtttcca

SEQ ID NO: 36558 - DNA, 25 bp, Homo sapiens
ggcctgccttactgtctctaaaatt

SEQ ID NO: 36559 - DNA, 25 bp, Homo sapiens
gtggtatttctcctcctcataaggc

SEQ ID NO: 36560 - DNA, 25 bp, Homo sapiens
gttagcctgttgaggactctcttcc

SEQ ID NO: 36561 - DNA, 25 bp, Homo sapiens
tctgtgcttctactccatcaaatgg

SEQ ID NO: 36562 - DNA, 25 bp, Homo sapiens
tgtgccacttactttgcaggaaatg

SEQ ID NO: 36563 - DNA, 25 bp, Homo sapiens
tgctcacatggagggcacactgtta

SEQ ID NO: 36564 - DNA, 25 bp, Homo sapiens
aggtggcagtcatctctagtctttc

SEQ ID NO: 36565 - DNA, 25 bp, Homo sapiens
ttgctttgcttgttcctctttcaaa

SEQ ID NO: 36566 - DNA, 25 bp, Homo sapiens
ctcccagctgtttctaaggttcaca

SEQ ID NO: 36567 - DNA, 25 bp, Homo sapiens
cctctgcctgcggtttgttaaaatt

SEQ ID NO: 36568 - DNA, 25 bp, Homo sapiens
cttctgcctgagagtggctcttata

SEQ ID NO: 36569 - DNA, 25 bp, Homo sapiens
ccctgaaagttttgatgagccatga

SEQ ID NO: 36570 - DNA, 25 bp, Homo sapiens
agcatgtcccagtcatcagccaatc

SEQ ID NO: 36571 - DNA, 25 bp, Homo sapiens
tgtcagctatcaggaattatcataa

SEQ ID NO: 36572 - DNA, 25 bp, Homo sapiens
aggtgaaagctgaccctggcccatc

SEQ ID NO: 36573 - DNA, 25 bp, Homo sapiens
gtctggacctagtgcttttgggata

SEQ ID NO: 36574 - DNA, 25 bp, Homo sapiens
gcaatgtatttctttcagcaaagta

SEQ ID NO: 36575 - DNA, 25 bp, Homo sapiens
agcaggaaagagaaccaccctattc

SEQ ID NO: 36576 - DNA, 25 bp, Homo sapiens
ctgcagccagaacccactcgatatg

SEQ ID NO: 36577 - DNA, 25 bp, Homo sapiens
aaaaaaaaagacattgataaagttg

SEQ ID NO: 36578 - DNA, 25 bp, Homo sapiens
ccgtccgtctaaaggccgtgattga

SEQ ID NO: 36579 - DNA, 25 bp, Homo sapiens
gtctctggattaacacctgcttcta

SEQ ID NO: 36580 - DNA, 25 bp, Homo sapiens
ccttgccagattagaaaaacaatta

SEQ ID NO: 36581 - DNA, 25 bp, Homo sapiens
tgtggttaacccttatcacgaaaca

SEQ ID NO: 36582 - DNA, 25 bp, Homo sapiens
tgggctgtcccaagaactataggtc

SEQ ID NO: 36583 - DNA, 25 bp, Homo sapiens
cccaggggacttttttctcaacttg

SEQ ID NO: 36584 - DNA, 25 bp, Homo sapiens
ccctgagggcttttccacttgagta

SEQ ID NO: 36585 - DNA, 25 bp, Homo sapiens
gaaaccagctactccatttgaaaga

SEQ ID NO: 36586 - DNA, 25 bp, Homo sapiens
ccaactgctgtactgaagaaaacta

SEQ ID NO: 36587 - DNA, 25 bp, Homo sapiens
ggcagctcctttacagggaatgata

SEQ ID NO: 36588 - DNA, 25 bp, Homo sapiens
gacccttgctagctgagttatcttg

SEQ ID NO: 36589 - DNA, 25 bp, Homo sapiens
ctagaggtcccttccgtcaagtatg

SEQ ID NO: 36590 - DNA, 25 bp, Homo sapiens
catgtgctgcataaagtaacccttc

SEQ ID NO: 36591 - DNA, 25 bp, Homo sapiens
atgtggagccctttagagaatgatc

SEQ ID NO: 36592 - DNA, 25 bp, Homo sapiens
tgagtctcccttcttcctacgttag

SEQ ID NO: 36593 - DNA, 25 bp, Homo sapiens
ctggtggtcctatgttctaaaaatg

SEQ ID NO: 36594 - DNA, 25 bp, Homo sapiens
ggtgtatacatttcccaattgactg

SEQ ID NO: 36595 - DNA, 25 bp, Homo sapiens
ttgaaaaatattcagccaatcaggg

SEQ ID NO: 36596 - DNA, 25 bp, Homo sapiens
gctgtggggtcctcaattcatccta

SEQ ID NO: 36597 - DNA, 25 bp, Homo sapiens
gcagagccctgagtccaacgataga

SEQ ID NO: 36598 - DNA, 25 bp, Homo sapiens
ggtggctctaatccagcagactatg

SEQ ID NO: 36599 - DNA, 25 bp, Homo sapiens
gcaggagaccaaagctctttacata

SEQ ID NO: 36600 - DNA, 25 bp, Homo sapiens
cccgcaaaaaatgttaggctactat

SEQ ID NO: 36601 - DNA, 25 bp, Homo sapiens
ccctgtcatgtaaacgatgtaacca

SEQ ID NO: 36602 - DNA, 25 bp, Homo sapiens
tgtccctagaaagattcaacgattc

SEQ ID NO: 36603 - DNA, 25 bp, Homo sapiens
cggggatgcaaataatactgtcttc

SEQ ID NO: 36604 - DNA, 25 bp, Homo sapiens
tttaaaatattatagtgagtgtgac

SEQ ID NO: 36605 - DNA, 25 bp, Homo sapiens
gcagcttttgctattactatgttta

SEQ ID NO: 36606 - DNA, 25 bp, Homo sapiens
gtcagtcatgcttagattggattta

SEQ ID NO: 36607 - DNA, 25 bp, Homo sapiens
tgcaaggctctactatcatgtgatc

SEQ ID NO: 36608 - DNA, 25 bp, Homo sapiens
gcaactgtggtattatggcagaaca

SEQ ID NO: 36609 - DNA, 25 bp, Homo sapiens
gcagatgcatcaatggtgtctaata

SEQ ID NO: 36610 - DNA, 25 bp, Homo sapiens
gcaagtacttttcagttaccgcaca

SEQ ID NO: 36611 - DNA, 25 bp, Homo sapiens
ttctccataggcagatgattttccg

SEQ ID NO: 36612 - DNA, 25 bp, Homo sapiens
aggtacctggtagctctatcatttg

SEQ ID NO: 36613 - DNA, 25 bp, Homo sapiens
cattggcccgctctttcattgtaca

SEQ ID NO: 36614 - DNA, 25 bp, Homo sapiens
ctacctgtctgtgttgccattagca

SEQ ID NO: 36615 - DNA, 25 bp, Homo sapiens
ttgttacgcctgctctccacttaga

SEQ ID NO: 36616 - DNA, 25 bp, Homo sapiens
ctgggaaagtctaactgcagcattc

SEQ ID NO: 36617 - DNA, 25 bp, Homo sapiens
gtgaaaagagttttcttagaatctt

SEQ ID NO: 36618 - DNA, 25 bp, Homo sapiens
ctgcccaggccataagaacaacttg

SEQ ID NO: 36619 - DNA, 25 bp, Homo sapiens
tgccagcatgtgttttcgtatatca

SEQ ID NO: 36620 - DNA, 25 bp, Homo sapiens
tggacttcccagagctgatggtatg

SEQ ID NO: 36621 - DNA, 25 bp, Homo sapiens
cagggccagaaccttgggctggtta

SEQ ID NO: 36622 - DNA, 25 bp, Homo sapiens
cgactgcatggctggttccaacata

SEQ ID NO: 36623 - DNA, 25 bp, Homo sapiens
cccaagagctgggatttgctgtgta

SEQ ID NO: 36624 - DNA, 25 bp, Homo sapiens
gggttttgtacagggcccagctcta

SEQ ID NO: 36625 - DNA, 25 bp, Homo sapiens
acggcataccttctctgattcagga

SEQ ID NO: 36626 - DNA, 25 bp, Homo sapiens
ggcccttctgtggtattgatgtttc

SEQ ID NO: 36627 - DNA, 25 bp, Homo sapiens
tcctgtccatttgcacggttgtgaa

SEQ ID NO: 36628 - DNA, 25 bp, Homo sapiens
tgccctggggagaactaacctcttc

SEQ ID NO: 36629 - DNA, 25 bp, Homo sapiens
gggcattccaagtaccaggatcctg

SEQ ID NO: 36630 - DNA, 25 bp, Homo sapiens
gcccaccatgggttgttccactata

SEQ ID NO: 36631 - DNA, 25 bp, Homo sapiens
gctagcctgctcctcagcaaaactg

SEQ ID NO: 36632 - DNA, 25 bp, Homo sapiens
gttcatatatatggtatttgtaaaa

SEQ ID NO: 36633 - DNA, 25 bp, Homo sapiens
acccaacagattccctgcccttatt

SEQ ID NO: 36634 - DNA, 25 bp, Homo sapiens
tgctggtggcggtaaaaacgctttc

SEQ ID NO: 36635 - DNA, 25 bp, Homo sapiens
gttccaccaggagcttatgcatata

SEQ ID NO: 36636 - DNA, 25 bp, Homo sapiens
agtcccttgggttctaagagacacc

SEQ ID NO: 36637 - DNA, 25 bp, Homo sapiens
tctagaggactttcaaaaaacttta

SEQ ID NO: 36638 - DNA, 25 bp, Homo sapiens
aacgtcctctgttgcagcatttgca

SEQ ID NO: 36639 - DNA, 25 bp, Homo sapiens
tgggaaaagtccacgtgcactgcta

SEQ ID NO: 36640 - DNA, 25 bp, Homo sapiens
ttagcatgactctagcgggctcttc

SEQ ID NO: 36641 - DNA, 25 bp, Homo sapiens
ttgctttgacaacctccagtggcta

SEQ ID NO: 36642 - DNA, 25 bp, Homo sapiens
gttaacccacgttcaccaagcttgc

SEQ ID NO: 36643 - DNA, 25 bp, Homo sapiens
ttactgctagcgttggggttacaca

SEQ ID NO: 36644 - DNA, 25 bp, Homo sapiens
gctctgtgctctgccagggacaata

SEQ ID NO: 36645 - DNA, 25 bp, Homo sapiens
gggcacatctggctttcggaaatca

SEQ ID NO: 36646 - DNA, 25 bp, Homo sapiens
ggtaaggtcccttccagacttgaga

SEQ ID NO: 36647 - DNA, 25 bp, Homo sapiens
ctgcccaatgtaatgctgaactgtt

SEQ ID NO: 36648 - DNA, 25 bp, Homo sapiens
ctcaggatggcgtatgtgttttcta

SEQ ID NO: 36649 - DNA, 25 bp, Homo sapiens
gatgagaaatattgattatattctg

SEQ ID NO: 36650 - DNA, 25 bp, Homo sapiens
tgaggcccatggttctccaaagtcc

SEQ ID NO: 36651 - DNA, 25 bp, Homo sapiens
tactaccggggagcacattttctca

SEQ ID NO: 36652 - DNA, 25 bp, Homo sapiens
ttggcctgtgccaagccctacatgg

SEQ ID NO: 36653 - DNA, 25 bp, Homo sapiens
ccagtctttgtggtgatgcttaaaa

SEQ ID NO: 36654 - DNA, 25 bp, Homo sapiens
tggcagttccacaggttcaatattc

SEQ ID NO: 36655 - DNA, 25 bp, Homo sapiens
acacgggattacatgcaggggaaca

SEQ ID NO: 36656 - DNA, 25 bp, Homo sapiens
aggccctgatgtgacttgcaaagtg

SEQ ID NO: 36657 - DNA, 25 bp, Homo sapiens
ttattctgtatatgtgcggtggccc

SEQ ID NO: 36658 - DNA, 25 bp, Homo sapiens
agctggctatttctctaatgttaga

SEQ ID NO: 36659 - DNA, 25 bp, Homo sapiens
agcactttttctctccaaaaccagc

SEQ ID NO: 36660 - DNA, 25 bp, Homo sapiens
ttcaaccccactgcaaaaacaaaac

SEQ ID NO: 36661 - DNA, 25 bp, Homo sapiens
tcagagagctggtaaggtgcatgtc

SEQ ID NO: 36662 - DNA, 25 bp, Homo sapiens
accatggttttgtaagcagtctgtg

SEQ ID NO: 36663 - DNA, 25 bp, Homo sapiens
cctctggtcccatgtagattctgaa

SEQ ID NO: 36664 - DNA, 25 bp, Homo sapiens
gctcgtgcaaggcactgacctaata

SEQ ID NO: 36665 - DNA, 25 bp, Homo sapiens
gctccatggtacactcagactaaga

SEQ ID NO: 36666 - DNA, 25 bp, Homo sapiens
gctggcaatcagctgacttatctta

SEQ ID NO: 36667 - DNA, 25 bp, Homo sapiens
ctcatgtttttaaaataacttcagg

SEQ ID NO: 36668 - DNA, 25 bp, Homo sapiens
ctacatgctgttgtcgtggcgcaaa

SEQ ID NO: 36669 - DNA, 25 bp, Homo sapiens
ctactcagtggtggaagcattttcc

SEQ ID NO: 36670 - DNA, 25 bp, Homo sapiens
caagaccctgagtgctagttagatt

SEQ ID NO: 36671 - DNA, 25 bp, Homo sapiens
tgctgggccctgaacaataccgtta

SEQ ID NO: 36672 - DNA, 25 bp, Homo sapiens
tcagccctgggtggagtaaaaaatg

SEQ ID NO: 36673 - DNA, 25 bp, Homo sapiens
ctgagccctgctattgcacaattta

SEQ ID NO: 36674 - DNA, 25 bp, Homo sapiens
cttcagaaaacaatcagggcgctta

SEQ ID NO: 36675 - DNA, 25 bp, Homo sapiens
agctgcatgttcgtcttgctctgga

SEQ ID NO: 36676 - DNA, 25 bp, Homo sapiens
agccggctcctctctgaatttcagg

SEQ ID NO: 36677 - DNA, 25 bp, Homo sapiens
ggctgtttcattttcctcgcagtga

SEQ ID NO: 36678 - DNA, 25 bp, Homo sapiens
tagcttcaggtcattctgccaatta

SEQ ID NO: 36679 - DNA, 25 bp, Homo sapiens
aagggacctggttgatgcaagcata

SEQ ID NO: 36680 - DNA, 25 bp, Homo sapiens
agaatgcatctatagaatacttgaa

SEQ ID NO: 36681 - DNA, 25 bp, Homo sapiens
tggttggataatgttaattttaatg

SEQ ID NO: 36682 - DNA, 25 bp, Homo sapiens
ggttgcccaaaggtctgatagatga

SEQ ID NO: 36683 - DNA, 25 bp, Homo sapiens
gataatttttttctggaataaaata

SEQ ID NO: 36684 - DNA, 25 bp, Homo sapiens
cagctcctagagataccagacagta

SEQ ID NO: 36685 - DNA, 25 bp, Homo sapiens
gagaggagctcttcaatggggatta

SEQ ID NO: 36686 - DNA, 25 bp, Homo sapiens
gctacaagcccgaaccactgtctta

SEQ ID NO: 36687 - DNA, 25 bp, Homo sapiens
ctgtctcccaggctgccaagttttg

SEQ ID NO: 36688 - DNA, 25 bp, Homo sapiens
tcagcctggctaatgactgtctttc

SEQ ID NO: 36689 - DNA, 25 bp, Homo sapiens
tcccatcttggcagtagcttcaatg

SEQ ID NO: 36690 - DNA, 25 bp, Homo sapiens
gacccaggttttcatgtggcagaga

SEQ ID NO: 36691 - DNA, 25 bp, Homo sapiens
gcacatggtttctggctttcctatg

SEQ ID NO: 36692 - DNA, 25 bp, Homo sapiens
ctatgcaattgctccctaaaatggg

SEQ ID NO: 36693 - DNA, 25 bp, Homo sapiens
cctatcagggtctgtagcagcatta

SEQ ID NO: 36694 - DNA, 25 bp, Homo sapiens
ggtccatccaacaggcctaacattg

SEQ ID NO: 36695 - DNA, 25 bp, Homo sapiens
tagcaactgcgccataaatatcacg

SEQ ID NO: 36696 - DNA, 25 bp, Homo sapiens
ataaaatattcactattaagaaatg

SEQ ID NO: 36697 - DNA, 25 bp, Homo sapiens
acctggagaaaacctgctgcgtcta

SEQ ID NO: 36698 - DNA, 25 bp, Homo sapiens
gttactcagcgacgtcatttgccca

SEQ ID NO: 36699 - DNA, 25 bp, Homo sapiens
ctgggtccttagagcagaaaatatc

SEQ ID NO: 36700 - DNA, 25 bp, Homo sapiens
ttaggactatgcttggccgacactg

SEQ ID NO: 36701 - DNA, 25 bp, Homo sapiens
ggccctccagtgtgcttccatctaa

SEQ ID NO: 36702 - DNA, 25 bp, Homo sapiens
tggctgagcttccactctaagtgtc

SEQ ID NO: 36703 - DNA, 25 bp, Homo sapiens
agccaagtgtgttaggaatagtacc

SEQ ID NO: 36704 - DNA, 25 bp, Homo sapiens
gggtggccctgcataagatttgttc

SEQ ID NO: 36705 - DNA, 25 bp, Homo sapiens
agggccctctctgcatgctacatca

SEQ ID NO: 36706 - DNA, 25 bp, Homo sapiens
tccaccttttgctcctcgagtagta

SEQ ID NO: 36707 - DNA, 25 bp, Homo sapiens
gaaagaaaggcgtatgttttccctt

SEQ ID NO: 36708 - DNA, 25 bp, Homo sapiens
acagtgtgatactagaccatgagca

SEQ ID NO: 36709 - DNA, 25 bp, Homo sapiens
actgataagatcgattgtgctagcc

SEQ ID NO: 36710 - DNA, 25 bp, Homo sapiens
gatattgaggtaacttaacaattga

SEQ ID NO: 36711 - DNA, 25 bp, Homo sapiens
tccaatggaagtctagaaaagattc

SEQ ID NO: 36712 - DNA, 25 bp, Homo sapiens
tgcctctgtgtcagtgtatcgaatg

SEQ ID NO: 36713 - DNA, 25 bp, Homo sapiens
ctagttcgcagaaaagcagataaac

SEQ ID NO: 36714 - DNA, 25 bp, Homo sapiens
tagcattattccagagcagagcgtg

SEQ ID NO: 36715 - DNA, 25 bp, Homo sapiens
ggtctcgctctgcaacatcaaagtg

SEQ ID NO: 36716 - DNA, 25 bp, Homo sapiens
tgtcagtgtaacctcatggcacaga

SEQ ID NO: 36717 - DNA, 25 bp, Homo sapiens
gcatgcgcacacacaacccagatgg

SEQ ID NO: 36718 - DNA, 25 bp, Homo sapiens
caggcactggtggtacttggaacaa

SEQ ID NO: 36719 - DNA, 25 bp, Homo sapiens
aggcatcttcacactgggtttcagg

SEQ ID NO: 36720 - DNA, 25 bp, Homo sapiens
ccgggcatctcagctctgttaatta

SEQ ID NO: 36721 - DNA, 25 bp, Homo sapiens
tgcttgtgcatgtggcttgtaaacc

SEQ ID NO: 36722 - DNA, 25 bp, Homo sapiens
acctctctgagaagggtgatgcctc

SEQ ID NO: 36723 - DNA, 25 bp, Homo sapiens
agatggttcctcattgccaggtacc

SEQ ID NO: 36724 - DNA, 25 bp, Homo sapiens
caggtgatggtgaaaaatactcgct

SEQ ID NO: 36725 - DNA, 25 bp, Homo sapiens
agtcagtctctggatgtggctaata

SEQ ID NO: 36726 - DNA, 25 bp, Homo sapiens
aggggcacttactccaatgtcagca

SEQ ID NO: 36727 - DNA, 25 bp, Homo sapiens
ccatgggagggctcaaattcatctc

SEQ ID NO: 36728 - DNA, 25 bp, Homo sapiens
tgcccagatgggaacgaacttatga

SEQ ID NO: 36729 - DNA, 25 bp, Homo sapiens
gctcctttgcttccctttattgtta

SEQ ID NO: 36730 - DNA, 25 bp, Homo sapiens
ccatgcctccttttattcagtagaa

SEQ ID NO: 36731 - DNA, 25 bp, Homo sapiens
gtctcttgaaacctagcctcggata

SEQ ID NO: 36732 - DNA, 25 bp, Homo sapiens
tagcagctctccacctttatgttcg

SEQ ID NO: 36733 - DNA, 25 bp, Homo sapiens
acttgtagtgtttgaaaagcaacaa

SEQ ID NO: 36734 - DNA, 25 bp, Homo sapiens
gggtcttgccactgtctttttaatc

SEQ ID NO: 36735 - DNA, 25 bp, Homo sapiens
actcatcaggatggaagtcattctg

SEQ ID NO: 36736 - DNA, 25 bp, Homo sapiens
agggcaagtcatacctgtgtactca

SEQ ID NO: 36737 - DNA, 25 bp, Homo sapiens
ctggagacctttacccaatgaatta

SEQ ID NO: 36738 - DNA, 25 bp, Homo sapiens
ggtcaggctcttacagcttggctta

SEQ ID NO: 36739 - DNA, 25 bp, Homo sapiens
ggcacagtgtcttggttctaccctc

SEQ ID NO: 36740 - DNA, 25 bp, Homo sapiens
aggctgcttcctccctgtgtttgca

SEQ ID NO: 36741 - DNA, 25 bp, Homo sapiens
tggactgccaggaacattgcacttc

SEQ ID NO: 36742 - DNA, 25 bp, Homo sapiens
ttgccctttgggatgtcacagaatg

SEQ ID NO: 36743 - DNA, 25 bp, Homo sapiens
gctgcggtctttaattctggcttca

SEQ ID NO: 36744 - DNA, 25 bp, Homo sapiens
tatgccttggttagctgcctctgcc

SEQ ID NO: 36745 - DNA, 25 bp, Homo sapiens
ttagaccgtttttggatgggaatcc

SEQ ID NO: 36746 - DNA, 25 bp, Homo sapiens
gagccgaccgtgtgtctccatctga

SEQ ID NO: 36747 - DNA, 25 bp, Homo sapiens
tcgtttgtacaaggtggcactctaa

SEQ ID NO: 36748 - DNA, 25 bp, Homo sapiens
ttttccctgtagacaagccaatggc

SEQ ID NO: 36749 - DNA, 25 bp, Homo sapiens
ccccaggatgcagttgtgcatctca

SEQ ID NO: 36750 - DNA, 25 bp, Homo sapiens
ccttttcaaggctttcgggtgaatc

SEQ ID NO: 36751 - DNA, 25 bp, Homo sapiens
gggcacagcaccagttcctggaata

SEQ ID NO: 36752 - DNA, 25 bp, Homo sapiens
gcacgtcgcatcctagcaagcaagc

SEQ ID NO: 36753 - DNA, 25 bp, Homo sapiens
gccaagctctgtctagggcatcaga

SEQ ID NO: 36754 - DNA, 25 bp, Homo sapiens
tcccacattaggataccaggttttc

SEQ ID NO: 36755 - DNA, 25 bp, Homo sapiens
tagctctgacgagtcctggtctttg

SEQ ID NO: 36756 - DNA, 25 bp, Homo sapiens
aggccctgagggctcccattgaata

SEQ ID NO: 36757 - DNA, 25 bp, Homo sapiens
ctggggctgttcaccaaggagcaaa

SEQ ID NO: 36758 - DNA, 25 bp, Homo sapiens
ggctgcctgccacttctgatagaaa

SEQ ID NO: 36759 - DNA, 25 bp, Homo sapiens
cttcagcagctgttatggagccacc

SEQ ID NO: 36760 - DNA, 25 bp, Homo sapiens
tccacttgggttaccttgatcctta

SEQ ID NO: 36761 - DNA, 25 bp, Homo sapiens
tactctattgaggtgctttggaaca

SEQ ID NO: 36762 - DNA, 25 bp, Homo sapiens
tgggtcccattcaggcaaaaatttc

SEQ ID NO: 36763 - DNA, 25 bp, Homo sapiens
acttctggtcctaggtgaaactctg

SEQ ID NO: 36764 - DNA, 25 bp, Homo sapiens
gtgacagctgtccaactaaattaga

SEQ ID NO: 36765 - DNA, 25 bp, Homo sapiens
tgggtcagcttactggttccaagag

SEQ ID NO: 36766 - DNA, 25 bp, Homo sapiens
ttgcacaatgcctaactgatacctt

SEQ ID NO: 36767 - DNA, 25 bp, Homo sapiens
tgccggtcactgaatgtgcacttta

SEQ ID NO: 36768 - DNA, 25 bp, Homo sapiens
tccttgtatgaagggcgcactccta

SEQ ID NO: 36769 - DNA, 25 bp, Homo sapiens
aaggcttatgtgtgtgttctgtcta

SEQ ID NO: 36770 - DNA, 25 bp, Homo sapiens
tgtcacttgtgatccagaggccatc

SEQ ID NO: 36771 - DNA, 25 bp, Homo sapiens
ctaagggttctctgaaggtaaaatc

SEQ ID NO: 36772 - DNA, 25 bp, Homo sapiens
gagtccagcccagatcagtcaactt

SEQ ID NO: 36773 - DNA, 25 bp, Homo sapiens
aggtccagtgctttagacttgtttc

SEQ ID NO: 36774 - DNA, 25 bp, Homo sapiens
accactcagcgcttttctttggaga

SEQ ID NO: 36775 - DNA, 25 bp, Homo sapiens
gtgcagtaaaatgccctccagtata

SEQ ID NO: 36776 - DNA, 25 bp, Homo sapiens
ccgtcgtcgttcacctctgagcaga

SEQ ID NO: 36777 - DNA, 25 bp, Homo sapiens
ctgtgatcatgcaccctctgtggga

SEQ ID NO: 36778 - DNA, 25 bp, Homo sapiens
tcaggcatcagtttccgggtgtttt

SEQ ID NO: 36779 - DNA, 25 bp, Homo sapiens
gctggccttggaacttactaacatc

SEQ ID NO: 36780 - DNA, 25 bp, Homo sapiens
ggccactgaagtaaccctacctttg

SEQ ID NO: 36781 - DNA, 25 bp, Homo sapiens
ttcagtggcaaggtcaaagtctata

SEQ ID NO: 36782 - DNA, 25 bp, Homo sapiens
gtcctgattctctgggataacagca

SEQ ID NO: 36783 - DNA, 25 bp, Homo sapiens
ggcccagccttacccaatcaagatg

SEQ ID NO: 36784 - DNA, 25 bp, Homo sapiens
tcactcctgggtctatctttggctc

SEQ ID NO: 36785 - DNA, 25 bp, Homo sapiens
ctgccaggattctagactgaagata

SEQ ID NO: 36786 - DNA, 25 bp, Homo sapiens
ccttggcccagcagtgacctttata

SEQ ID NO: 36787 - DNA, 25 bp, Homo sapiens
gccagcaactcactaggagagtcta

SEQ ID NO: 36788 - DNA, 25 bp, Homo sapiens
cctccatggcactattggattgaca

SEQ ID NO: 36789 - DNA, 25 bp, Homo sapiens
gtcccacacgtgcagccagcttata

SEQ ID NO: 36790 - DNA, 25 bp, Homo sapiens
tagccacctcacacattagtctctg

SEQ ID NO: 36791 - DNA, 25 bp, Homo sapiens
ctatgttagtaatatattatgttac

SEQ ID NO: 36792 - DNA, 25 bp, Homo sapiens
tagagtggcccacccttgggttgtt

SEQ ID NO: 36793 - DNA, 25 bp, Homo sapiens
ggcgtctctgggcatgacaaatcta

SEQ ID NO: 36794 - DNA, 25 bp, Homo sapiens
cactatcaattgagttgtctctctc

SEQ ID NO: 36795 - DNA, 25 bp, Homo sapiens
tatgcttatgcaagtgtcacatttg

SEQ ID NO: 36796 - DNA, 25 bp, Homo sapiens
gcatatataaagtgagtttgtcaaa

SEQ ID NO: 36797 - DNA, 25 bp, Homo sapiens
tatacataaactgttttcttatatt

SEQ ID NO: 36798 - DNA, 25 bp, Homo sapiens
tcctaaatggaatggtgacctcttc

SEQ ID NO: 36799 - DNA, 25 bp, Homo sapiens
cgtccatgaagaaatgcagaggtcc

SEQ ID NO: 36800 - DNA, 25 bp, Homo sapiens
tggaagctccaagccactggccata

SEQ ID NO: 36801 - DNA, 25 bp, Homo sapiens
gcttgcccagtacctagatttgttg

SEQ ID NO: 36802 - DNA, 25 bp, Homo sapiens
ggctgattcctcaactcctctgatg

SEQ ID NO: 36803 - DNA, 25 bp, Homo sapiens
ttcatcagagaaagggctcggcttc

SEQ ID NO: 36804 - DNA, 25 bp, Homo sapiens
ggggtacccaccaactttctgtttc

SEQ ID NO: 36805 - DNA, 25 bp, Homo sapiens
gccctagagaattggtgaaacctta

SEQ ID NO: 36806 - DNA, 25 bp, Homo sapiens
tgggacataccctcaactctaaatg

SEQ ID NO: 36807 - DNA, 25 bp, Homo sapiens
gctcagaggcttcagtagtcatatg

SEQ ID NO: 36808 - DNA, 25 bp, Homo sapiens
atccacatgtaattcagtaataagg

SEQ ID NO: 36809 - DNA, 25 bp, Homo sapiens
actggctctccttgtttgctgacta

SEQ ID NO: 36810 - DNA, 25 bp, Homo sapiens
catgaagcactatcacattctgaga

SEQ ID NO: 36811 - DNA, 25 bp, Homo sapiens
acatccttgaggtgcttcttacagc

SEQ ID NO: 36812 - DNA, 25 bp, Homo sapiens
aaggctcctagttttccagtgtgta

SEQ ID NO: 36813 - DNA, 25 bp, Homo sapiens
gttcccatgtaggtctccaattcca

SEQ ID NO: 36814 - DNA, 25 bp, Homo sapiens
gcatcttctgcattttgtcctatta

SEQ ID NO: 36815 - DNA, 25 bp, Homo sapiens
tccaatttggggatcaagtatagca

SEQ ID NO: 36816 - DNA, 25 bp, Homo sapiens
ttgtcattctttgtcctaattcctg

SEQ ID NO: 36817 - DNA, 25 bp, Homo sapiens
aagaaaatctatttccatttaaatg

SEQ ID NO: 36818 - DNA, 25 bp, Homo sapiens
ggtccagcatgttgcaaaaaccgta

SEQ ID NO: 36819 - DNA, 25 bp, Homo sapiens
agcaacgctgcttctattcaacgga

SEQ ID NO: 36820 - DNA, 25 bp, Homo sapiens
cccatcgagatctcggctgccatta

SEQ ID NO: 36821 - DNA, 25 bp, Homo sapiens
ggactccacagaggcaccctgcttg

SEQ ID NO: 36822 - DNA, 25 bp, Homo sapiens
aggtccctcagaatccatggtttta

SEQ ID NO: 36823 - DNA, 25 bp, Homo sapiens
agcccttcagtggtcggagtaattg

SEQ ID NO: 36824 - DNA, 25 bp, Homo sapiens
ggagccagtccagtacatatttgta

SEQ ID NO: 36825 - DNA, 25 bp, Homo sapiens
tgaggcaatcctatgtccagaattc

SEQ ID NO: 36826 - DNA, 25 bp, Homo sapiens
gcctcctgggagcagacaacttatg

SEQ ID NO: 36827 - DNA, 25 bp, Homo sapiens
ggccatgttccctaaaggatgctta

SEQ ID NO: 36828 - DNA, 25 bp, Homo sapiens
ggccggctgacacttacatctaaga

SEQ ID NO: 36829 - DNA, 25 bp, Homo sapiens
tgtagaagcctcattcagtcccttg

SEQ ID NO: 36830 - DNA, 25 bp, Homo sapiens
gcacctttaggccagatgtagcttg

SEQ ID NO: 36831 - DNA, 25 bp, Homo sapiens
atccgggcaggagaacagttttgta

SEQ ID NO: 36832 - DNA, 25 bp, Homo sapiens
agcctgcctatgtctgtctccacta

SEQ ID NO: 36833 - DNA, 25 bp, Homo sapiens
ctgggctttctcctgagctctgata

SEQ ID NO: 36834 - DNA, 25 bp, Homo sapiens
ctgccttatgctggctctagaatac

SEQ ID NO: 36835 - DNA, 25 bp, Homo sapiens
atgcttgccactttagagacttctg

SEQ ID NO: 36836 - DNA, 25 bp, Homo sapiens
tgcggaatttccaaggcctctgata

SEQ ID NO: 36837 - DNA, 25 bp, Homo sapiens
cggcattatctcagtgggacgcatt

SEQ ID NO: 36838 - DNA, 25 bp, Homo sapiens
cccaccaggatatttgagaatgctc

SEQ ID NO: 36839 - DNA, 25 bp, Homo sapiens
agactatttctgagtggagcactgc

SEQ ID NO: 36840 - DNA, 25 bp, Homo sapiens
tgcccacaggcagattgataaaagg

SEQ ID NO: 36841 - DNA, 25 bp, Homo sapiens
acccaggcctaccaggtcagttaga

SEQ ID NO: 36842 - DNA, 25 bp, Homo sapiens
ctgtgcagagctggacatgtccttc

SEQ ID NO: 36843 - DNA, 25 bp, Homo sapiens
aaacctctccttgtgtgactcagca

SEQ ID NO: 36844 - DNA, 25 bp, Homo sapiens
ccggctgcaggttttcacatttgta

SEQ ID NO: 36845 - DNA, 25 bp, Homo sapiens
gcctggcacggaatacatagcatga

SEQ ID NO: 36846 - DNA, 25 bp, Homo sapiens
aacctcggagatctttggcacctga

SEQ ID NO: 36847 - DNA, 25 bp, Homo sapiens
actttccttgggtacatggagttca

SEQ ID NO: 36848 - DNA, 25 bp, Homo sapiens
gctatggcaaagaagccagactata

SEQ ID NO: 36849 - DNA, 25 bp, Homo sapiens
ctcttcttcaaagatactttcttta

SEQ ID NO: 36850 - DNA, 25 bp, Homo sapiens
aagacttgtttcctgtgggtgatca

SEQ ID NO: 36851 - DNA, 25 bp, Homo sapiens
gggacgctacatgctcattctgtta

SEQ ID NO: 36852 - DNA, 25 bp, Homo sapiens
ctggcttcttagctttcccaaagga

SEQ ID NO: 36853 - DNA, 25 bp, Homo sapiens
gtcctcaaaggtccagaatctagta

SEQ ID NO: 36854 - DNA, 25 bp, Homo sapiens
tgataatcatgaagaactataaatt

SEQ ID NO: 36855 - DNA, 25 bp, Homo sapiens
gctctagctcgttgacctcctttta

SEQ ID NO: 36856 - DNA, 25 bp, Homo sapiens
gggccttctcacataacctcgatgg

SEQ ID NO: 36857 - DNA, 25 bp, Homo sapiens
ccagggcccatttggagaaagcatt

SEQ ID NO: 36858 - DNA, 25 bp, Homo sapiens
gtttcaggcagatactgagagcata

SEQ ID NO: 36859 - DNA, 25 bp, Homo sapiens
tgtaacatgcctcccttaataattg

SEQ ID NO: 36860 - DNA, 25 bp, Homo sapiens
agagaaagagactactgagaagatc

SEQ ID NO: 36861 - DNA, 25 bp, Homo sapiens
taaaaaaaaaacagttaaggcaata

SEQ ID NO: 36862 - DNA, 25 bp, Homo sapiens
ccaggccagtattacaagatacact

SEQ ID NO: 36863 - DNA, 25 bp, Homo sapiens
agatgtttctctttcttgcctatgg

SEQ ID NO: 36864 - DNA, 25 bp, Homo sapiens
cctgagggcttatagttcttacaaa

SEQ ID NO: 36865 - DNA, 25 bp, Homo sapiens
tgcgtgctgacctctagaagtaata

SEQ ID NO: 36866 - DNA, 25 bp, Homo sapiens
gctggcatgacagaatagatctttc

SEQ ID NO: 36867 - DNA, 25 bp, Homo sapiens
ccatagtatagctttgataggcaga

SEQ ID NO: 36868 - DNA, 25 bp, Homo sapiens
ggccagttttatatccatgacctta

SEQ ID NO: 36869 - DNA, 25 bp, Homo sapiens
cgggtgcaccaatcctcaaaggagc

SEQ ID NO: 36870 - DNA, 25 bp, Homo sapiens
tgaccaagttggtgagcctctcatt

SEQ ID NO: 36871 - DNA, 25 bp, Homo sapiens
ctatgtatgtagttcaggccagctc

SEQ ID NO: 36872 - DNA, 25 bp, Homo sapiens
gagacatctacactttccttggagg

SEQ ID NO: 36873 - DNA, 25 bp, Homo sapiens
gccatgttggtacgctgtctgctca

SEQ ID NO: 36874 - DNA, 25 bp, Homo sapiens
tgctctcttttagactggacccaaa

SEQ ID NO: 36875 - DNA, 25 bp, Homo sapiens
ttcctgcccaaagtgctgaatgttg

SEQ ID NO: 36876 - DNA, 25 bp, Homo sapiens
ggagcgtcggacacattctttaatg

SEQ ID NO: 36877 - DNA, 25 bp, Homo sapiens
ggctgcccacaggtattgatgctca

SEQ ID NO: 36878 - DNA, 25 bp, Homo sapiens
tccttgccgttcatcttagagtccc

SEQ ID NO: 36879 - DNA, 25 bp, Homo sapiens
caggtcatgggatctcactcattta

SEQ ID NO: 36880 - DNA, 25 bp, Homo sapiens
agtcatttgaatgcaggggcctata

SEQ ID NO: 36881 - DNA, 25 bp, Homo sapiens
gtcttctgtgatttcatggtctcca

SEQ ID NO: 36882 - DNA, 25 bp, Homo sapiens
tgatgtttgcccagctgcagcagcc

SEQ ID NO: 36883 - DNA, 25 bp, Homo sapiens
gggcaatgcccacgcccttttgcta

SEQ ID NO: 36884 - DNA, 25 bp, Homo sapiens
cccttgtgagccagagatgacctca

SEQ ID NO: 36885 - DNA, 25 bp, Homo sapiens
ggtggcccttgcaacacttcctagc

SEQ ID NO: 36886 - DNA, 25 bp, Homo sapiens
ctggagggcccttgaatcctactta

SEQ ID NO: 36887 - DNA, 25 bp, Homo sapiens
aggcattgtctgcatacggtatgtc

SEQ ID NO: 36888 - DNA, 25 bp, Homo sapiens
cttgctgggtcattccctgtcatga

SEQ ID NO: 36889 - DNA, 25 bp, Homo sapiens
gatggcagctctcaccatggggtta

SEQ ID NO: 36890 - DNA, 25 bp, Homo sapiens
tagttgaatgttgccacctgaaatc

SEQ ID NO: 36891 - DNA, 25 bp, Homo sapiens
ctctgggaactgtatattggcaaca

SEQ ID NO: 36892 - DNA, 25 bp, Homo sapiens
tcctccagtgtctagtgagtgacta

SEQ ID NO: 36893 - DNA, 25 bp, Homo sapiens
tttgagcctgaagcattcctgacgg

SEQ ID NO: 36894 - DNA, 25 bp, Homo sapiens
gagataacccttagcattgaaatgg

SEQ ID NO: 36895 - DNA, 25 bp, Homo sapiens
aggggttgtatacctccagaaatta

SEQ ID NO: 36896 - DNA, 25 bp, Homo sapiens
caccatgtgtgcaaagaccttgtca

SEQ ID NO: 36897 - DNA, 25 bp, Homo sapiens
gcagttcactcctgtctcccatgga

SEQ ID NO: 36898 - DNA, 25 bp, Homo sapiens
ggaccacgcatcgtcccattttgtg

SEQ ID NO: 36899 - DNA, 25 bp, Homo sapiens
tcagtccgggacacagatatattta

SEQ ID NO: 36900 - DNA, 25 bp, Homo sapiens
ggagcccagttccatatcagtgtca

SEQ ID NO: 36901 - DNA, 25 bp, Homo sapiens
tttgcctctgtgacattcctaatga

SEQ ID NO: 36902 - DNA, 25 bp, Homo sapiens
tttctggttgggagcatcacccatc

SEQ ID NO: 36903 - DNA, 25 bp, Homo sapiens
gccagctggaggtatcacaatcatg

SEQ ID NO: 36904 - DNA, 25 bp, Homo sapiens
tacgtgtagtgtccagtgtcctttc

SEQ ID NO: 36905 - DNA, 25 bp, Homo sapiens
tccactggaaggtcaatggggcctc

SEQ ID NO: 36906 - DNA, 25 bp, Homo sapiens
tctggctcctgattggcaaatgata

SEQ ID NO: 36907 - DNA, 25 bp, Homo sapiens
ggtctgccatcccatccaaagcatg

SEQ ID NO: 36908 - DNA, 25 bp, Homo sapiens
ctctggcatgctgagcagtatacta

SEQ ID NO: 36909 - DNA, 25 bp, Homo sapiens
gtgctaggcccatttgatttattta

SEQ ID NO: 36910 - DNA, 25 bp, Homo sapiens
tgacctcctgtcctgaaatatatgc

SEQ ID NO: 36911 - DNA, 25 bp, Homo sapiens
tatccctggctcgtgctgctttatg

SEQ ID NO: 36912 - DNA, 25 bp, Homo sapiens
tgctgggccttttatgtcacttgta

SEQ ID NO: 36913 - DNA, 25 bp, Homo sapiens
ggggagcttctcaagggctttcaga

SEQ ID NO: 36914 - DNA, 25 bp, Homo sapiens
tgtggccttgcctgacagtcttgca

SEQ ID NO: 36915 - DNA, 25 bp, Homo sapiens
tcctgtgctgcctccaaattaagtg

SEQ ID NO: 36916 - DNA, 25 bp, Homo sapiens
gggctctgtaagaacctgtcctttg

SEQ ID NO: 36917 - DNA, 25 bp, Homo sapiens
ggcactggtttgcacagaattatta

SEQ ID NO: 36918 - DNA, 25 bp, Homo sapiens
agcagtttggcctgtatccttcaag

SEQ ID NO: 36919 - DNA, 25 bp, Homo sapiens
gttcatgaagtaaatgagaaaattt

SEQ ID NO: 36920 - DNA, 25 bp, Homo sapiens
atggcccaacatgtgatcttatcta

SEQ ID NO: 36921 - DNA, 25 bp, Homo sapiens
ttcttgattttcagggaccacattg

SEQ ID NO: 36922 - DNA, 25 bp, Homo sapiens
gttgaaagtcattgtagaagacata

SEQ ID NO: 36923 - DNA, 25 bp, Homo sapiens
tctgctgcatactacggaaacattg

SEQ ID NO: 36924 - DNA, 25 bp, Homo sapiens
tgacctgccgctgtgatctgatata

SEQ ID NO: 36925 - DNA, 25 bp, Homo sapiens
gagcagctctcaccacaacgttagg

SEQ ID NO: 36926 - DNA, 25 bp, Homo sapiens
catttttacatgttttgataggtca

SEQ ID NO: 36927 - DNA, 25 bp, Homo sapiens
ccatccttatctggagggcatgtca

SEQ ID NO: 36928 - DNA, 25 bp, Homo sapiens
cccagtggtcaaaccctgaattacg

SEQ ID NO: 36929 - DNA, 25 bp, Homo sapiens
cagcaggtttccaatggtctatttc

SEQ ID NO: 36930 - DNA, 25 bp, Homo sapiens
ctggcactaagcagtccctggtgtt

SEQ ID NO: 36931 - DNA, 25 bp, Homo sapiens
cggtacacagatacagggttccatt

SEQ ID NO: 36932 - DNA, 25 bp, Homo sapiens
gggccctggcccaagtattttaata

SEQ ID NO: 36933 - DNA, 25 bp, Homo sapiens
ccactgggtccatggcataactgta

SEQ ID NO: 36934 - DNA, 25 bp, Homo sapiens
ccacagtttcagaggacggaggtca

SEQ ID NO: 36935 - DNA, 25 bp, Homo sapiens
cccacaggcactcagtattgaaata

SEQ ID NO: 36936 - DNA, 25 bp, Homo sapiens
tgcaggatgcagtctccaggaatta

SEQ ID NO: 36937 - DNA, 25 bp, Homo sapiens
caaactggggtttggatattcctca

SEQ ID NO: 36938 - DNA, 25 bp, Homo sapiens
atggtggaaggcctggaaatttttc

SEQ ID NO: 36939 - DNA, 25 bp, Homo sapiens
ccaaggctgttctcataaggttttc

SEQ ID NO: 36940 - DNA, 25 bp, Homo sapiens
attactgacttgagccttggcctgg

SEQ ID NO: 36941 - DNA, 25 bp, Homo sapiens
cctactctagagaaaggagcctatg

SEQ ID NO: 36942 - DNA, 25 bp, Homo sapiens
cctcagctttaaaattcattaaatc

SEQ ID NO: 36943 - DNA, 25 bp, Homo sapiens
ctaggctcaggctgcttccgataga

SEQ ID NO: 36944 - DNA, 25 bp, Homo sapiens
ttgggccctccaataggtcatgttc

SEQ ID NO: 36945 - DNA, 25 bp, Homo sapiens
acagagtttgccctatgtttggatc

SEQ ID NO: 36946 - DNA, 25 bp, Homo sapiens
tccaaccctggagaccttgaattca

SEQ ID NO: 36947 - DNA, 25 bp, Homo sapiens
ggcctgacggactcactgtagtttc

SEQ ID NO: 36948 - DNA, 25 bp, Homo sapiens
cggaactatctctgctctatttgtg

SEQ ID NO: 36949 - DNA, 25 bp, Homo sapiens
tagagacctctcctgctgaaatgaa

SEQ ID NO: 36950 - DNA, 25 bp, Homo sapiens
ctgattttcattttgctgggaccca

SEQ ID NO: 36951 - DNA, 25 bp, Homo sapiens
cactggtcctgagtaatgggccttc

SEQ ID NO: 36952 - DNA, 25 bp, Homo sapiens
gcagccagtctttctatcaagcatg

SEQ ID NO: 36953 - DNA, 25 bp, Homo sapiens
ggaacgcccttgcaaatgtgtgaca

SEQ ID NO: 36954 - DNA, 25 bp, Homo sapiens
gggctattctattctgctaccatgg

SEQ ID NO: 36955 - DNA, 25 bp, Homo sapiens
ggcccagtggataaacaaagtctta

SEQ ID NO: 36956 - DNA, 25 bp, Homo sapiens
ctccgaccttcagtggtgttaaatc

SEQ ID NO: 36957 - DNA, 25 bp, Homo sapiens
agctctgtggtgcatctgtgactta

SEQ ID NO: 36958 - DNA, 25 bp, Homo sapiens
ggcctccagaggacactttgacttg

SEQ ID NO: 36959 - DNA, 25 bp, Homo sapiens
ctcctgcagtttgggatgatgactc

SEQ ID NO: 36960 - DNA, 25 bp, Homo sapiens
accaggcttactttacaggaggatg

SEQ ID NO: 36961 - DNA, 25 bp, Homo sapiens
ttgccatttagggactggtcacttg

SEQ ID NO: 36962 - DNA, 25 bp, Homo sapiens
gtgactccatccacatgcaaaattg

SEQ ID NO: 36963 - DNA, 25 bp, Homo sapiens
tgctcctgggagaaactgaatgtca

SEQ ID NO: 36964 - DNA, 25 bp, Homo sapiens
tggccaagatctaggtcacaatgtg

SEQ ID NO: 36965 - DNA, 25 bp, Homo sapiens
gtggtctctgctggtccaatctgta

SEQ ID NO: 36966 - DNA, 25 bp, Homo sapiens
ccctcagctgaggatttgtttgaca

SEQ ID NO: 36967 - DNA, 25 bp, Homo sapiens
gtcctggcctgtgacttgtcaacta

SEQ ID NO: 36968 - DNA, 25 bp, Homo sapiens
ctgaggccactcaagaaggttttta

SEQ ID NO: 36969 - DNA, 25 bp, Homo sapiens
ctcttgctgctgtgtctggatctta

SEQ ID NO: 36970 - DNA, 25 bp, Homo sapiens
gttcggttctccaaagtgcatgttg

SEQ ID NO: 36971 - DNA, 25 bp, Homo sapiens
cggtggcaagtgctcagcctttatg

SEQ ID NO: 36972 - DNA, 25 bp, Homo sapiens
acagagccctgctgcccagatgtta

SEQ ID NO: 36973 - DNA, 25 bp, Homo sapiens
tcagcctggaagcactatttatgta

SEQ ID NO: 36974 - DNA, 25 bp, Homo sapiens
cttctaagggatggggccacagtca

SEQ ID NO: 36975 - DNA, 25 bp, Homo sapiens
tgggtgcctcaggtagctatgtatc

SEQ ID NO: 36976 - DNA, 25 bp, Homo sapiens
agctgtaattacctcgtgccctttg

SEQ ID NO: 36977 - DNA, 25 bp, Homo sapiens
tgcagacaccggttttcaatagagc

SEQ ID NO: 36978 - DNA, 25 bp, Homo sapiens
ctgctggcatgttagacggcatagc

SEQ ID NO: 36979 - DNA, 25 bp, Homo sapiens
ggtctcaggtctcatttaaaggata

SEQ ID NO: 36980 - DNA, 25 bp, Homo sapiens
gcttggcattctatcaacagtttga

SEQ ID NO: 36981 - DNA, 25 bp, Homo sapiens
tgtcactgcccagaacaccaggatg

SEQ ID NO: 36982 - DNA, 25 bp, Homo sapiens
ggccctctggccaaaactgtagctg

SEQ ID NO: 36983 - DNA, 25 bp, Homo sapiens
tccgggttgtgcttgtgtcttcaaa

SEQ ID NO: 36984 - DNA, 25 bp, Homo sapiens
gcttgctcatagtggtccagggtta

SEQ ID NO: 36985 - DNA, 25 bp, Homo sapiens
ggagtttaaatggtcatttagagag

SEQ ID NO: 36986 - DNA, 25 bp, Homo sapiens
agctgcccttaagtcaccctatatg

SEQ ID NO: 36987 - DNA, 25 bp, Homo sapiens
cccttctgtggcttggaaactcatg

SEQ ID NO: 36988 - DNA, 25 bp, Homo sapiens
aggccctaggtggtcctgaatccaa

SEQ ID NO: 36989 - DNA, 25 bp, Homo sapiens
aggatgtccctgatattgagcacga

SEQ ID NO: 36990 - DNA, 25 bp, Homo sapiens
gtggctaccaccagtcaagtctgtt

SEQ ID NO: 36991 - DNA, 25 bp, Homo sapiens
cccgtctagggcaggatgaaaacta

SEQ ID NO: 36992 - DNA, 25 bp, Homo sapiens
atagtagtacacataaatatagaca

SEQ ID NO: 36993 - DNA, 25 bp, Homo sapiens
atggtatctggcacatcaaaattta

SEQ ID NO: 36994 - DNA, 25 bp, Homo sapiens
tgcactctgtaaggccaagacattc

SEQ ID NO: 36995 - DNA, 25 bp, Homo sapiens
gggcattgcctacctgagcattttc

SEQ ID NO: 36996 - DNA, 25 bp, Homo sapiens
cagggcagctcttgcagcataaaca

SEQ ID NO: 36997 - DNA, 25 bp, Homo sapiens
tgctcggccctacaagaagattgtg

SEQ ID NO: 36998 - DNA, 25 bp, Homo sapiens
ctgacttacattgatccggaactgc

SEQ ID NO: 36999 - DNA, 25 bp, Homo sapiens
cttgaggcccaccaacctgtgtgta

SEQ ID NO: 37000 - DNA, 25 bp, Homo sapiens
caggttctagtcaggagcccaagta

SEQ ID NO: 37001 - DNA, 25 bp, Homo sapiens
gggctggccttgagcaaaattttga

SEQ ID NO: 37002 - DNA, 25 bp, Homo sapiens
aggccagtcccttatgttgaaaaca

SEQ ID NO: 37003 - DNA, 25 bp, Homo sapiens
ttgacgtggatctacagctgctctc

SEQ ID NO: 37004 - DNA, 25 bp, Homo sapiens
cccaaatgtaatagagatgcctcca

SEQ ID NO: 37005 - DNA, 25 bp, Homo sapiens
ggctgctctcttgggtataataata

SEQ ID NO: 37006 - DNA, 25 bp, Homo sapiens
tttccgaggagaacaagacagacta

SEQ ID NO: 37007 - DNA, 25 bp, Homo sapiens
gcaaagttgtcctccgcagatctta

SEQ ID NO: 37008 - DNA, 25 bp, Homo sapiens
ctttcctgagggcacaaacagctgc

SEQ ID NO: 37009 - DNA, 25 bp, Homo sapiens
gggaggctgttctgactcactcaca

SEQ ID NO: 37010 - DNA, 25 bp, Homo sapiens
ggtgccctaacccagtcactgcaga

SEQ ID NO: 37011 - DNA, 25 bp, Homo sapiens
gagctggcttccctgcaagaacctg

SEQ ID NO: 37012 - DNA, 25 bp, Homo sapiens
gactggcaccttaagcaggactttg

SEQ ID NO: 37013 - DNA, 25 bp, Homo sapiens
aaggaaggctctccatgccaggatc

SEQ ID NO: 37014 - DNA, 25 bp, Homo sapiens
gaggggaagtggaaagctgctgttt

SEQ ID NO: 37015 - DNA, 25 bp, Homo sapiens
acttccagaggaggcacagacttta

SEQ ID NO: 37016 - DNA, 25 bp, Homo sapiens
tggccacaccctgcttttaaaacgg

SEQ ID NO: 37017 - DNA, 25 bp, Homo sapiens
gggctgcatctatctgggtactctg

SEQ ID NO: 37018 - DNA, 25 bp, Homo sapiens
catatttcccttccagcttaaggtc

SEQ ID NO: 37019 - DNA, 25 bp, Homo sapiens
gaaggagttcctcagggcctgcata

SEQ ID NO: 37020 - DNA, 25 bp, Homo sapiens
ccctctgggatctgtgggataaatc

SEQ ID NO: 37021 - DNA, 25 bp, Homo sapiens
gaacgtccaggcaggtgcaagatca

SEQ ID NO: 37022 - DNA, 25 bp, Homo sapiens
catggcccagggtcattcaaggaga

SEQ ID NO: 37023 - DNA, 25 bp, Homo sapiens
actgctggcccaactgatctaaatc

SEQ ID NO: 37024 - DNA, 25 bp, Homo sapiens
ctctttaagagggtggacagaactc

SEQ ID NO: 37025 - DNA, 25 bp, Homo sapiens
ggcctcgtttgagcccattttggta

SEQ ID NO: 37026 - DNA, 25 bp, Homo sapiens
gcccgaccactagtaccttgataag

SEQ ID NO: 37027 - DNA, 25 bp, Homo sapiens
agggttcccatgacctcacggcata

SEQ ID NO: 37028 - DNA, 25 bp, Homo sapiens
tgtcgctctgcaaacaagcccttgt

SEQ ID NO: 37029 - DNA, 25 bp, Homo sapiens
atatccttgagtggccctgaccttg

SEQ ID NO: 37030 - DNA, 25 bp, Homo sapiens
atggatgggacacggaacacttttc

SEQ ID NO: 37031 - DNA, 25 bp, Homo sapiens
cacgaggccctgtgtctgttcacta

SEQ ID NO: 37032 - DNA, 25 bp, Homo sapiens
ggtcctatcttcctctgacttcata

SEQ ID NO: 37033 - DNA, 25 bp, Homo sapiens
catgcccttgcagatccagctaagg

SEQ ID NO: 37034 - DNA, 25 bp, Homo sapiens
ggtctcacttggaggccctaccaca

SEQ ID NO: 37035 - DNA, 25 bp, Homo sapiens
cttgtattctttctgggttcactcc

SEQ ID NO: 37036 - DNA, 25 bp, Homo sapiens
acagttgtgctatatgtggggatac

SEQ ID NO: 37037 - DNA, 25 bp, Homo sapiens
tctgggcacccaagcttcactgagg

SEQ ID NO: 37038 - DNA, 25 bp, Homo sapiens
agtgctggccctgtttgaaagattg

SEQ ID NO: 37039 - DNA, 25 bp, Homo sapiens
ccagggagatctacacctcttttta

SEQ ID NO: 37040 - DNA, 25 bp, Homo sapiens
cctggcaggacagctgaaaaacttc

SEQ ID NO: 37041 - DNA, 25 bp, Homo sapiens
cccagtagcgcattgtttgttcagg

SEQ ID NO: 37042 - DNA, 25 bp, Homo sapiens
gtctgcctggaatgaaaaacttgtc

SEQ ID NO: 37043 - DNA, 25 bp, Homo sapiens
ccatgggtcagtcatcctagaagca

SEQ ID NO: 37044 - DNA, 25 bp, Homo sapiens
tgtgtgcccaattacccattttgtg

SEQ ID NO: 37045 - DNA, 25 bp, Homo sapiens
gtgcaagcctgttgccacctacatg

SEQ ID NO: 37046 - DNA, 25 bp, Homo sapiens
cactggtggcttttgtggctagaca

SEQ ID NO: 37047 - DNA, 25 bp, Homo sapiens
cccacttcaatggattcggtgagca

SEQ ID NO: 37048 - DNA, 25 bp, Homo sapiens
acagggacacctctcttgaagcaca

SEQ ID NO: 37049 - DNA, 25 bp, Homo sapiens
gccactctctatgcaggaactatga

SEQ ID NO: 37050 - DNA, 25 bp, Homo sapiens
tggaggggaattgctatcacagttc

SEQ ID NO: 37051 - DNA, 25 bp, Homo sapiens
tacagtggtctaagggtaggtttcc

SEQ ID NO: 37052 - DNA, 25 bp, Homo sapiens
gcaggatgttgccagggatttttta

SEQ ID NO: 37053 - DNA, 25 bp, Homo sapiens
gggagtctgcctttacagtcatgta

SEQ ID NO: 37054 - DNA, 25 bp, Homo sapiens
agtccttgtaattgcctgtcctaga

SEQ ID NO: 37055 - DNA, 25 bp, Homo sapiens
cgtgcgtgccttgccaaaaataata

SEQ ID NO: 37056 - DNA, 25 bp, Homo sapiens
ggccacccgctttatgctgaaaatt

SEQ ID NO: 37057 - DNA, 25 bp, Homo sapiens
ggcctcaggcttcaacactccagta

SEQ ID NO: 37058 - DNA, 25 bp, Homo sapiens
catgttcaagtcgacaggtttcctc

SEQ ID NO: 37059 - DNA, 25 bp, Homo sapiens
ggcactttctccctgagtacctagg

SEQ ID NO: 37060 - DNA, 25 bp, Homo sapiens
ggggctgcctctgatttccatgtaa

SEQ ID NO: 37061 - DNA, 25 bp, Homo sapiens
acaccaagctttgacgtgagcgatg

SEQ ID NO: 37062 - DNA, 25 bp, Homo sapiens
tcctgtctctgcagatggggctaaa

SEQ ID NO: 37063 - DNA, 25 bp, Homo sapiens
tcagagggcggtagctttttatata

SEQ ID NO: 37064 - DNA, 25 bp, Homo sapiens
tcctggggacaaagctccatatctg

SEQ ID NO: 37065 - DNA, 25 bp, Homo sapiens
atagcgacctgtcttccactgtgga

SEQ ID NO: 37066 - DNA, 25 bp, Homo sapiens
cgtggccacattgtcccattgcatg

SEQ ID NO: 37067 - DNA, 25 bp, Homo sapiens
gaggccacctgagccatgctgtgaa

SEQ ID NO: 37068 - DNA, 25 bp, Homo sapiens
agacacatacttcaggggccagcga

SEQ ID NO: 37069 - DNA, 25 bp, Homo sapiens
gcagcagattctttctcccaggagt

SEQ ID NO: 37070 - DNA, 25 bp, Homo sapiens
gggaagcatgctcttgcctatcata

SEQ ID NO: 37071 - DNA, 25 bp, Homo sapiens
ccagcctctccaaagactgtgtatg

SEQ ID NO: 37072 - DNA, 25 bp, Homo sapiens
tggggcacgtccacatcctgacaaa

SEQ ID NO: 37073 - DNA, 25 bp, Homo sapiens
ctgcgattgatactggtgctgcttc

SEQ ID NO: 37074 - DNA, 25 bp, Homo sapiens
agcctgcagcttggaatcttgattc

SEQ ID NO: 37075 - DNA, 25 bp, Homo sapiens
gccgtatatgctgtgggcctctgta

SEQ ID NO: 37076 - DNA, 25 bp, Homo sapiens
tgtcccaaggctatttctgccatga

SEQ ID NO: 37077 - DNA, 25 bp, Homo sapiens
catagatggtatacagctggaattc

SEQ ID NO: 37078 - DNA, 25 bp, Homo sapiens
ccggtttgccggcacatcctaatga

SEQ ID NO: 37079 - DNA, 25 bp, Homo sapiens
tatgggtcagcttgatggcacctcc

SEQ ID NO: 37080 - DNA, 25 bp, Homo sapiens
tttccttgaagggagtctagccacc

SEQ ID NO: 37081 - DNA, 25 bp, Homo sapiens
gagaggccgcatttgattttcagta

SEQ ID NO: 37082 - DNA, 25 bp, Homo sapiens
agagatgcctttccctccatggaca

SEQ ID NO: 37083 - DNA, 25 bp, Homo sapiens
gccagtctttgtcaagcctcgtctg

SEQ ID NO: 37084 - DNA, 25 bp, Homo sapiens
gccttgttttccctgagctccaaag

SEQ ID NO: 37085 - DNA, 25 bp, Homo sapiens
gaccctaaatgcatggcctctgaga

SEQ ID NO: 37086 - DNA, 25 bp, Homo sapiens
acacagggccagcatgcagtactta

SEQ ID NO: 37087 - DNA, 25 bp, Homo sapiens
ctctgggataaaaatgtcttggctc

SEQ ID NO: 37088 - DNA, 25 bp, Homo sapiens
ctgcgtctctctgggaaaatacaac

SEQ ID NO: 37089 - DNA, 25 bp, Homo sapiens
tgtggcacacctcagacctactttg

SEQ ID NO: 37090 - DNA, 25 bp, Homo sapiens
gggtcagattctccgtgctcatttc

SEQ ID NO: 37091 - DNA, 25 bp, Homo sapiens
gggcagcacttcagggactcattca

SEQ ID NO: 37092 - DNA, 25 bp, Homo sapiens
ctcggcttgcctgaccctttttcaa

SEQ ID NO: 37093 - DNA, 25 bp, Homo sapiens
ggggtagttctccactccaacagta

SEQ ID NO: 37094 - DNA, 25 bp, Homo sapiens
cagtctgcttccaacggtggtctta

SEQ ID NO: 37095 - DNA, 25 bp, Homo sapiens
ggacccatagttgaccttcagcttg

SEQ ID NO: 37096 - DNA, 25 bp, Homo sapiens
ttgggccactcctcctagacttact

SEQ ID NO: 37097 - DNA, 25 bp, Homo sapiens
aggcacatggttccttcacgaggga

SEQ ID NO: 37098 - DNA, 25 bp, Homo sapiens
tggctgctctcaatgggacaaaatg

SEQ ID NO: 37099 - DNA, 25 bp, Homo sapiens
tcctgcaaggatccctggaataatg

SEQ ID NO: 37100 - DNA, 25 bp, Homo sapiens
agctagcctggactcttaacactca

SEQ ID NO: 37101 - DNA, 25 bp, Homo sapiens
ttcagtaacctgtcaggcccgtgtc

SEQ ID NO: 37102 - DNA, 25 bp, Homo sapiens
cgagactgcgtagacctttggattc

SEQ ID NO: 37103 - DNA, 25 bp, Homo sapiens
tccggcgagtttatccagcatcatc

SEQ ID NO: 37104 - DNA, 25 bp, Homo sapiens
ccagtcaggttttatcccaaggaga

SEQ ID NO: 37105 - DNA, 25 bp, Homo sapiens
tggctacttcactggctttgtcaaa

SEQ ID NO: 37106 - DNA, 25 bp, Homo sapiens
gtgaccaggttgaaactactactta

SEQ ID NO: 37107 - DNA, 25 bp, Homo sapiens
atcaaaaattgcccaaagaatgacc

SEQ ID NO: 37108 - DNA, 25 bp, Homo sapiens
acctgtatggatcgctaagaccaga

SEQ ID NO: 37109 - DNA, 25 bp, Homo sapiens
tcccatccctggaggactgtgcata

SEQ ID NO: 37110 - DNA, 25 bp, Homo sapiens
gaggctcagctcctatacaggcatg

SEQ ID NO: 37111 - DNA, 25 bp, Homo sapiens
ctcccatggaattgcctaaggctct

SEQ ID NO: 37112 - DNA, 25 bp, Homo sapiens
catctggggaacgattgaacctttc

SEQ ID NO: 37113 - DNA, 25 bp, Homo sapiens
tgtgatcccactctttgaaccaaac

SEQ ID NO: 37114 - DNA, 25 bp, Homo sapiens
aacatatatctagaatatatatgga

SEQ ID NO: 37115 - DNA, 25 bp, Homo sapiens
cccattggaaggagaactggaatta

SEQ ID NO: 37116 - DNA, 25 bp, Homo sapiens
caaggcatggctgactttgtctaca

SEQ ID NO: 37117 - DNA, 25 bp, Homo sapiens
cctagggagcaaacttcgttcattc

SEQ ID NO: 37118 - DNA, 25 bp, Homo sapiens
ggactcctgtaccttggtggcaaca

SEQ ID NO: 37119 - DNA, 25 bp, Homo sapiens
cttctgcagggtacgtaacttgatc

SEQ ID NO: 37120 - DNA, 25 bp, Homo sapiens
tccttcgccatctagggctctggta

SEQ ID NO: 37121 - DNA, 25 bp, Homo sapiens
ggggcctaaggctcccaagcttttc

SEQ ID NO: 37122 - DNA, 25 bp, Homo sapiens
cagcctgtctgagtgtatggaatta

SEQ ID NO: 37123 - DNA, 25 bp, Homo sapiens
gtgtcccaggtcacagcaagcttca

SEQ ID NO: 37124 - DNA, 25 bp, Homo sapiens
agatcctctggcacctttgttataa

SEQ ID NO: 37125 - DNA, 25 bp, Homo sapiens
agtataggctccatcccagtccata

SEQ ID NO: 37126 - DNA, 25 bp, Homo sapiens
aagtgtctgccctgttttcccaagg

SEQ ID NO: 37127 - DNA, 25 bp, Homo sapiens
ggggaaccagctccgctcagaaata

SEQ ID NO: 37128 - DNA, 25 bp, Homo sapiens
gtagccagctgtgaatgtccacata

SEQ ID NO: 37129 - DNA, 25 bp, Homo sapiens
gcgaattgactgctttccctccaca

SEQ ID NO: 37130 - DNA, 25 bp, Homo sapiens
taccctttgggacttactgcatgaa

SEQ ID NO: 37131 - DNA, 25 bp, Homo sapiens
tccctgccgtgttttcctgtgtaag

SEQ ID NO: 37132 - DNA, 25 bp, Homo sapiens
ggcctgccaatcaatgacctctatg

SEQ ID NO: 37133 - DNA, 25 bp, Homo sapiens
ttgccctataccttgccatgcagtg

SEQ ID NO: 37134 - DNA, 25 bp, Homo sapiens
cgctgcaattagttcctcggtaagt

SEQ ID NO: 37135 - DNA, 25 bp, Homo sapiens
tctgggagacggactgaattttttc

SEQ ID NO: 37136 - DNA, 25 bp, Homo sapiens
ggccctaattagtgtctccaaaaag

SEQ ID NO: 37137 - DNA, 25 bp, Homo sapiens
gaggcacccattcacacttgtatta

SEQ ID NO: 37138 - DNA, 25 bp, Homo sapiens
cagcccagctggacatctcatcaga

SEQ ID NO: 37139 - DNA, 25 bp, Homo sapiens
ctccctggtaactttgcgagtatta

SEQ ID NO: 37140 - DNA, 25 bp, Homo sapiens
gcagcggcccactgaagtgttcttc

SEQ ID NO: 37141 - DNA, 25 bp, Homo sapiens
ccattacatatagaaggcccttgtc

SEQ ID NO: 37142 - DNA, 25 bp, Homo sapiens
gcctgcaacagatctttgtgccaga

SEQ ID NO: 37143 - DNA, 25 bp, Homo sapiens
acccagctcatgtgtggttcaagca

SEQ ID NO: 37144 - DNA, 25 bp, Homo sapiens
agctagctctggttcccttgggata

SEQ ID NO: 37145 - DNA, 25 bp, Homo sapiens
ccaagctggctagtcgaaatgatac

SEQ ID NO: 37146 - DNA, 25 bp, Homo sapiens
cctcgcactgactatggctttttta

SEQ ID NO: 37147 - DNA, 25 bp, Homo sapiens
ttgcccagtggcttgctaattccca

SEQ ID NO: 37148 - DNA, 25 bp, Homo sapiens
aaacttttcccaaggctagccactc

SEQ ID NO: 37149 - DNA, 25 bp, Homo sapiens
tctcagatgggaactgggaccaatc

SEQ ID NO: 37150 - DNA, 25 bp, Homo sapiens
tgttgggaaatgaagacctgctctc

SEQ ID NO: 37151 - DNA, 25 bp, Homo sapiens
gtggggctgtcatttaaactctgtg

SEQ ID NO: 37152 - DNA, 25 bp, Homo sapiens
acttggctactctttcctctctggg

SEQ ID NO: 37153 - DNA, 25 bp, Homo sapiens
caatgaaggcaaatttttgtccttg

SEQ ID NO: 37154 - DNA, 25 bp, Homo sapiens
ttgggacctgaatgacaacctctga

SEQ ID NO: 37155 - DNA, 25 bp, Homo sapiens
tcccagatatggttggaaatagccc

SEQ ID NO: 37156 - DNA, 25 bp, Homo sapiens
cgtttctgcttcgttgccacactca

SEQ ID NO: 37157 - DNA, 25 bp, Homo sapiens
aagtcaagaactcatattttcattt

SEQ ID NO: 37158 - DNA, 25 bp, Homo sapiens
cctcatctcactcaagcaatttgac

SEQ ID NO: 37159 - DNA, 25 bp, Homo sapiens
gggagccagatcctatcacagtatg

SEQ ID NO: 37160 - DNA, 25 bp, Homo sapiens
gcctggcagctttgctcagttattc

SEQ ID NO: 37161 - DNA, 25 bp, Homo sapiens
ctagtccttgtgtcttctggtgata

SEQ ID NO: 37162 - DNA, 25 bp, Homo sapiens
tctacactgtagagggacatccgtc

SEQ ID NO: 37163 - DNA, 25 bp, Homo sapiens
tttgatggccagaagcacctgtttg

SEQ ID NO: 37164 - DNA, 25 bp, Homo sapiens
ctgggatcctcacctgccatctgtg

SEQ ID NO: 37165 - DNA, 25 bp, Homo sapiens
ccgcaaaatttctggggaggtgctc

SEQ ID NO: 37166 - DNA, 25 bp, Homo sapiens
gaccagcttggccagatattatata

SEQ ID NO: 37167 - DNA, 25 bp, Homo sapiens
tcagctttgttgtgaggctctcctc

SEQ ID NO: 37168 - DNA, 25 bp, Homo sapiens
cagcctcttggggtagctttacaga

SEQ ID NO: 37169 - DNA, 25 bp, Homo sapiens
tcacaggaggcttgcatgcatacta

SEQ ID NO: 37170 - DNA, 25 bp, Homo sapiens
tttgggtatggattcatgttcacag

SEQ ID NO: 37171 - DNA, 25 bp, Homo sapiens
cagggattctgtgccattgctcatg

SEQ ID NO: 37172 - DNA, 25 bp, Homo sapiens
ccagctagccgatgtgaccattttg

SEQ ID NO: 37173 - DNA, 25 bp, Homo sapiens
taagacttcaacgtaattaaattcc

SEQ ID NO: 37174 - DNA, 25 bp, Homo sapiens
tgggtctgttctataccagctgaaa

SEQ ID NO: 37175 - DNA, 25 bp, Homo sapiens
aggtgctccactttgcccttgatta

SEQ ID NO: 37176 - DNA, 25 bp, Homo sapiens
cccacggtttgttgatgtccttcag

SEQ ID NO: 37177 - DNA, 25 bp, Homo sapiens
ggagggtcttctgcacaaatatttc

SEQ ID NO: 37178 - DNA, 25 bp, Homo sapiens
acaggcctacagccatgttcccaat

SEQ ID NO: 37179 - DNA, 25 bp, Homo sapiens
ccctctcagggatggacagcagtaa

SEQ ID NO: 37180 - DNA, 25 bp, Homo sapiens
ggcctcagggacttgatgttctaaa

SEQ ID NO: 37181 - DNA, 25 bp, Homo sapiens
atgagggccctttgatgactttttc

SEQ ID NO: 37182 - DNA, 25 bp, Homo sapiens
gttccatattccactcctaattttg

SEQ ID NO: 37183 - DNA, 25 bp, Homo sapiens
cctgcctggggatcacttagtaaaa

SEQ ID NO: 37184 - DNA, 25 bp, Homo sapiens
cttgcctggaaatgctgcctgatga

SEQ ID NO: 37185 - DNA, 25 bp, Homo sapiens
ggcccaggcctctcgtctgatataa

SEQ ID NO: 37186 - DNA, 25 bp, Homo sapiens
ttccaaccaggtgggtccagacgtc

SEQ ID NO: 37187 - DNA, 25 bp, Homo sapiens
acctgctgaggccaacgtgtgaata

SEQ ID NO: 37188 - DNA, 25 bp, Homo sapiens
gtcagatgtaggcagactccactca

SEQ ID NO: 37189 - DNA, 25 bp, Homo sapiens
aggttgagtttagccagctttcata

SEQ ID NO: 37190 - DNA, 25 bp, Homo sapiens
gaaagggctcctcatctcatgttga

SEQ ID NO: 37191 - DNA, 25 bp, Homo sapiens
gctcatgccgatgtaggccaaccta

SEQ ID NO: 37192 - DNA, 25 bp, Homo sapiens
agcttccttgctctcccttgtggca

SEQ ID NO: 37193 - DNA, 25 bp, Homo sapiens
tcctatgaaagggatatggctcttc

SEQ ID NO: 37194 - DNA, 25 bp, Homo sapiens
ggacctgttctactgcaccactgga

SEQ ID NO: 37195 - DNA, 25 bp, Homo sapiens
gtcagtgaggccagattcccatttt

SEQ ID NO: 37196 - DNA, 25 bp, Homo sapiens
ggaacagacttttgggctgcacctg

SEQ ID NO: 37197 - DNA, 25 bp, Homo sapiens
caccctggaggttgcttttgctgca

SEQ ID NO: 37198 - DNA, 25 bp, Homo sapiens
gtgcccactcctgaaaacaaactta

SEQ ID NO: 37199 - DNA, 25 bp, Homo sapiens
aagccgccgcaggagttacagaatc

SEQ ID NO: 37200 - DNA, 25 bp, Homo sapiens
gggcctcatgaccagtttctctaaa

SEQ ID NO: 37201 - DNA, 25 bp, Homo sapiens
ggagcgcacttaagacccatggttc

SEQ ID NO: 37202 - DNA, 25 bp, Homo sapiens
tgtcccactctgctgaataaggttg

SEQ ID NO: 37203 - DNA, 25 bp, Homo sapiens
gcctgcaagctagctgagattaata

SEQ ID NO: 37204 - DNA, 25 bp, Homo sapiens
agactccgagcgctgcttctctgaa

SEQ ID NO: 37205 - DNA, 25 bp, Homo sapiens
ggttgcctcttgtcccgctggaaag

SEQ ID NO: 37206 - DNA, 25 bp, Homo sapiens
gactatggtgcctctcccaactgta

SEQ ID NO: 37207 - DNA, 25 bp, Homo sapiens
gagggcctctgcaacaccatcatga

SEQ ID NO: 37208 - DNA, 25 bp, Homo sapiens
gcctgccctgacttttccctttgaa

SEQ ID NO: 37209 - DNA, 25 bp, Homo sapiens
gtgatcctttctcatggcatgtctg

SEQ ID NO: 37210 - DNA, 25 bp, Homo sapiens
gccacccattgtttgcatcagtgta

SEQ ID NO: 37211 - DNA, 25 bp, Homo sapiens
aaggctgctttgtcccactgagata

SEQ ID NO: 37212 - DNA, 25 bp, Homo sapiens
gggaattccagtctgttgaccagta

SEQ ID NO: 37213 - DNA, 25 bp, Homo sapiens
cctggagtggttttactagcataaa

SEQ ID NO: 37214 - DNA, 25 bp, Homo sapiens
gcttggctctctctcccttcatata

SEQ ID NO: 37215 - DNA, 25 bp, Homo sapiens
cgagggaacatcatacgcctcttta

SEQ ID NO: 37216 - DNA, 25 bp, Homo sapiens
tggagaaaatgaaaaactacctggt

SEQ ID NO: 37217 - DNA, 25 bp, Homo sapiens
ccagtttctgtgcaatcgggagttc

SEQ ID NO: 37218 - DNA, 25 bp, Homo sapiens
taggcgcacacaccactgataaatc

SEQ ID NO: 37219 - DNA, 25 bp, Homo sapiens
ggtgcgctcaagttcctatcatgtg

SEQ ID NO: 37220 - DNA, 25 bp, Homo sapiens
ggtggcgctggagaataaaccatta

SEQ ID NO: 37221 - DNA, 25 bp, Homo sapiens
gcagggctctgtcgataaagtcttc

SEQ ID NO: 37222 - DNA, 25 bp, Homo sapiens
acgtggcctgtcttatcctgttctc

SEQ ID NO: 37223 - DNA, 25 bp, Homo sapiens
gctgtctctgatctactggtcctta

SEQ ID NO: 37224 - DNA, 25 bp, Homo sapiens
tggacccggctctcacaaagatttc

SEQ ID NO: 37225 - DNA, 25 bp, Homo sapiens
tgttcagccggcaaaccctctcaag

SEQ ID NO: 37226 - DNA, 25 bp, Homo sapiens
ggccgttagtcgcacctgtcactca

SEQ ID NO: 37227 - DNA, 25 bp, Homo sapiens
atggatctttgaatccctcccagga

SEQ ID NO: 37228 - DNA, 25 bp, Homo sapiens
cccgctgtgactgaaaaatccaatg

SEQ ID NO: 37229 - DNA, 25 bp, Homo sapiens
tgtgccattgcatgcccaacaagta

SEQ ID NO: 37230 - DNA, 25 bp, Homo sapiens
ctccgggtggtagtgcagtaataaa

SEQ ID NO: 37231 - DNA, 25 bp, Homo sapiens
gggcagtttgctctcacgtcatgta

SEQ ID NO: 37232 - DNA, 25 bp, Homo sapiens
ggggtcccttgaggtcagcctacaa

SEQ ID NO: 37233 - DNA, 25 bp, Homo sapiens
tggagttgtgcaaacccagctctga

SEQ ID NO: 37234 - DNA, 25 bp, Homo sapiens
cagcatattgattgtatagcatttc

SEQ ID NO: 37235 - DNA, 25 bp, Homo sapiens
gaaaagtgtgggctgttcatcaata

SEQ ID NO: 37236 - DNA, 25 bp, Homo sapiens
agagggccctttagaattccaattc

SEQ ID NO: 37237 - DNA, 25 bp, Homo sapiens
tgagtctggccctcttgtgtcccaa

SEQ ID NO: 37238 - DNA, 25 bp, Homo sapiens
tggagcaaactggtacctagacttc

SEQ ID NO: 37239 - DNA, 25 bp, Homo sapiens
ataacatatatgtgtacaatatata

SEQ ID NO: 37240 - DNA, 25 bp, Homo sapiens
ggggcctgtggacctgaaaaataaa

SEQ ID NO: 37241 - DNA, 25 bp, Homo sapiens
aagtgtgtttatgagtaaattaaga

SEQ ID NO: 37242 - DNA, 25 bp, Homo sapiens
aaaggactaatgcaagtgacacagc

SEQ ID NO: 37243 - DNA, 25 bp, Homo sapiens
taacatacgaaagtgaggaaagaga

SEQ ID NO: 37244 - DNA, 25 bp, Homo sapiens
cacgctttgaatactgccacctgga

SEQ ID NO: 37245 - DNA, 25 bp, Homo sapiens
gtcctcacatgcctcggaaaaatgt

SEQ ID NO: 37246 - DNA, 25 bp, Homo sapiens
ccactgttggaaggcatgtctgctc

SEQ ID NO: 37247 - DNA, 25 bp, Homo sapiens
gactgtgtcggctccctcaaacgaa

SEQ ID NO: 37248 - DNA, 25 bp, Homo sapiens
ccacatactgggctggatgagttac

SEQ ID NO: 37249 - DNA, 25 bp, Homo sapiens
ttgtcaccagagctagcgccaatta

SEQ ID NO: 37250 - DNA, 25 bp, Homo sapiens
cgtgtatctccctcggcaacataga

SEQ ID NO: 37251 - DNA, 25 bp, Homo sapiens
ctggctgttgacctagctgttgctc

SEQ ID NO: 37252 - DNA, 25 bp, Homo sapiens
agattcattctcacgtgctccagga

SEQ ID NO: 37253 - DNA, 25 bp, Homo sapiens
aggcagatcttgtgtccgtacagtc

SEQ ID NO: 37254 - DNA, 25 bp, Homo sapiens
ctaaatccttcccactgttttgttg

SEQ ID NO: 37255 - DNA, 25 bp, Homo sapiens
tggtctccatgacctaaacctggac

SEQ ID NO: 37256 - DNA, 25 bp, Homo sapiens
ccctgaggaaggcttgtatttttac

SEQ ID NO: 37257 - DNA, 25 bp, Homo sapiens
cccaggcagggcttcatctctataa

SEQ ID NO: 37258 - DNA, 25 bp, Homo sapiens
ttcccaggggaaagcagaccaattg

SEQ ID NO: 37259 - DNA, 25 bp, Homo sapiens
cccagctcttgttggctagtccaga

SEQ ID NO: 37260 - DNA, 25 bp, Homo sapiens
ctgggctcttgttgaacttctagca

SEQ ID NO: 37261 - DNA, 25 bp, Homo sapiens
gcttcacaggctcaaagggtgctca

SEQ ID NO: 37262 - DNA, 25 bp, Homo sapiens
aggtgattcccaaggcccgacaatg

SEQ ID NO: 37263 - DNA, 25 bp, Homo sapiens
ccacccgttggtgggaaattttacc

SEQ ID NO: 37264 - DNA, 25 bp, Homo sapiens
cccttgctaagtgagagctgatcca

SEQ ID NO: 37265 - DNA, 25 bp, Homo sapiens
agcgctatggcttctaatttgtcta

SEQ ID NO: 37266 - DNA, 25 bp, Homo sapiens
tgcccaggctctcttctgaattagt

SEQ ID NO: 37267 - DNA, 25 bp, Homo sapiens
tacaatgtcaagtcggcaaagattc

SEQ ID NO: 37268 - DNA, 25 bp, Homo sapiens
gctgagtctcatgtggtgtttacca

SEQ ID NO: 37269 - DNA, 25 bp, Homo sapiens
aacatgttatgtcaggccagtacta

SEQ ID NO: 37270 - DNA, 25 bp, Homo sapiens
aaagtaagttgaaaggagtatcctc

SEQ ID NO: 37271 - DNA, 25 bp, Homo sapiens
ggcttccttgtgatcatgcttaaga

SEQ ID NO: 37272 - DNA, 25 bp, Homo sapiens
ttcagggagccacgttcacaaggtc

SEQ ID NO: 37273 - DNA, 25 bp, Homo sapiens
ggcagtttctggttccctgacctca

SEQ ID NO: 37274 - DNA, 25 bp, Homo sapiens
gagtgcctcctatgaatgctcatgg

SEQ ID NO: 37275 - DNA, 25 bp, Homo sapiens
ggctcaccctcctggcatgtagtaa

SEQ ID NO: 37276 - DNA, 25 bp, Homo sapiens
gggcctgtcctgtggctgcataatt

SEQ ID NO: 37277 - DNA, 25 bp, Homo sapiens
accgggttgcttcataccaatcata

SEQ ID NO: 37278 - DNA, 25 bp, Homo sapiens
ggctgagccacctagagccatttta

SEQ ID NO: 37279 - DNA, 25 bp, Homo sapiens
tgatcacatcccacaaacaggtatg

SEQ ID NO: 37280 - DNA, 25 bp, Homo sapiens
cccatgttagctgttgaaggttttc

SEQ ID NO: 37281 - DNA, 25 bp, Homo sapiens
ggcaggcaccgctttcatgagttca

SEQ ID NO: 37282 - DNA, 25 bp, Homo sapiens
ctgagcacttgtcctcccagaaatg

SEQ ID NO: 37283 - DNA, 25 bp, Homo sapiens
tcggtcctactcaagatgaagctga

SEQ ID NO: 37284 - DNA, 25 bp, Homo sapiens
tgggtttcgccatctatgcacattg

SEQ ID NO: 37285 - DNA, 25 bp, Homo sapiens
ttagactcagggcaacagggaactc

SEQ ID NO: 37286 - DNA, 25 bp, Homo sapiens
gaggcagcccactttccttagtttc

SEQ ID NO: 37287 - DNA, 25 bp, Homo sapiens
tccaaaggcccttgagcacctcata

SEQ ID NO: 37288 - DNA, 25 bp, Homo sapiens
tctgacattccagttaggggcaaga

SEQ ID NO: 37289 - DNA, 25 bp, Homo sapiens
tcagaaatattggactctatgtagt

SEQ ID NO: 37290 - DNA, 25 bp, Homo sapiens
acataataggatgcttacacattgt

SEQ ID NO: 37291 - DNA, 25 bp, Homo sapiens
ctcagctgagaaaaactagggccca

SEQ ID NO: 37292 - DNA, 25 bp, Homo sapiens
acgtccacagcttcccagagatttg

SEQ ID NO: 37293 - DNA, 25 bp, Homo sapiens
cagcaccagggtctcagtttcaaaa

SEQ ID NO: 37294 - DNA, 25 bp, Homo sapiens
aagggccttttccagccagggtttc

SEQ ID NO: 37295 - DNA, 25 bp, Homo sapiens
ttgccattgggaactagtactgctc

SEQ ID NO: 37296 - DNA, 25 bp, Homo sapiens
agaacaaggttctgaaaagttgaaa

SEQ ID NO: 37297 - DNA, 25 bp, Homo sapiens
aagaacaatgaaaaaaaaattctgc

SEQ ID NO: 37298 - DNA, 25 bp, Homo sapiens
ctttattatgttctgaaaatcaaat

SEQ ID NO: 37299 - DNA, 25 bp, Homo sapiens
ccaggtttcatttttaagcagttca

SEQ ID NO: 37300 - DNA, 25 bp, Homo sapiens
gagcgcagccgagaaaccgttatca

SEQ ID NO: 37301 - DNA, 25 bp, Homo sapiens
gccaggaatccgttagctgtaatta

SEQ ID NO: 37302 - DNA, 25 bp, Homo sapiens
cagggctctacaagacgagatatga

SEQ ID NO: 37303 - DNA, 25 bp, Homo sapiens
cttgcggtatgaagggaacctgtcc

SEQ ID NO: 37304 - DNA, 25 bp, Homo sapiens
gctcccttaaaatgcctacagtctg

SEQ ID NO: 37305 - DNA, 25 bp, Homo sapiens
tgtgggatccaaaaaggggcctctc

SEQ ID NO: 37306 - DNA, 25 bp, Homo sapiens
cacagctctgggctctcatttgtta

SEQ ID NO: 37307 - DNA, 25 bp, Homo sapiens
ccctgctgccaaccgagaactattg

SEQ ID NO: 37308 - DNA, 25 bp, Homo sapiens
tctctagcatggtactcaaggtctc

SEQ ID NO: 37309 - DNA, 25 bp, Homo sapiens
agtggcaccagcaacctacctgttc

SEQ ID NO: 37310 - DNA, 25 bp, Homo sapiens
cattgcaggctggtgagcatttcta

SEQ ID NO: 37311 - DNA, 25 bp, Homo sapiens
ctgctttggcatcatgggcactata

SEQ ID NO: 37312 - DNA, 25 bp, Homo sapiens
aaggcggttcctgttttctcctcca

SEQ ID NO: 37313 - DNA, 25 bp, Homo sapiens
gctagccaggccagatgattatttg

SEQ ID NO: 37314 - DNA, 25 bp, Homo sapiens
ttgagctctacaacacggactcttg

SEQ ID NO: 37315 - DNA, 25 bp, Homo sapiens
ctcaggctgctgacgctcataatca

SEQ ID NO: 37316 - DNA, 25 bp, Homo sapiens
ctcctgcagggttaggagagcccta

SEQ ID NO: 37317 - DNA, 25 bp, Homo sapiens
gggtcgctcccaagcaaggcatttg

SEQ ID NO: 37318 - DNA, 25 bp, Homo sapiens
aggtgtgatggacctctctcctatc

SEQ ID NO: 37319 - DNA, 25 bp, Homo sapiens
gcaggtcaggcattataaaggtttc

SEQ ID NO: 37320 - DNA, 25 bp, Homo sapiens
ctacaaggatcacgggtctaccatc

SEQ ID NO: 37321 - DNA, 25 bp, Homo sapiens
tctgactgtgataaatagccctggg

SEQ ID NO: 37322 - DNA, 25 bp, Homo sapiens
ggtattaatatagctagtcaccagt

SEQ ID NO: 37323 - DNA, 25 bp, Homo sapiens
ggcctgcagctgtaagaactctatt

SEQ ID NO: 37324 - DNA, 25 bp, Homo sapiens
gaggttaatcccagacccagtgtta

SEQ ID NO: 37325 - DNA, 25 bp, Homo sapiens
catccctcttaccttaatgagtctc

SEQ ID NO: 37326 - DNA, 25 bp, Homo sapiens
cctatatacctcatttttcactgtt

SEQ ID NO: 37327 - DNA, 25 bp, Homo sapiens
agcagttcctatatctgtccatgta

SEQ ID NO: 37328 - DNA, 25 bp, Homo sapiens
agcaaagggttctctggcaggaata

SEQ ID NO: 37329 - DNA, 25 bp, Homo sapiens
ttgctccctggcttctgaacatttc

SEQ ID NO: 37330 - DNA, 25 bp, Homo sapiens
ggggagaatactgccttgcttagga

SEQ ID NO: 37331 - DNA, 25 bp, Homo sapiens
ggaggccctgttccttcatcacttg

SEQ ID NO: 37332 - DNA, 25 bp, Homo sapiens
tgccatgccttcgtgtgtcccaagg

SEQ ID NO: 37333 - DNA, 25 bp, Homo sapiens
tggagggctatatacaataacagtc

SEQ ID NO: 37334 - DNA, 25 bp, Homo sapiens
agtcccaccctttagaacctgtttc

SEQ ID NO: 37335 - DNA, 25 bp, Homo sapiens
tgttgtcctctgctcctttgtaata

SEQ ID NO: 37336 - DNA, 25 bp, Homo sapiens
ggcccatatgtctgctcaccaaggt

SEQ ID NO: 37337 - DNA, 25 bp, Homo sapiens
ttttaaatgacaattcccctctcct

SEQ ID NO: 37338 - DNA, 25 bp, Homo sapiens
cagcggtttcttctgagccattaaa

SEQ ID NO: 37339 - DNA, 25 bp, Homo sapiens
catctgtgatttgcgctggtctgga

SEQ ID NO: 37340 - DNA, 25 bp, Homo sapiens
cctgggtcctgcctaaatactactg

SEQ ID NO: 37341 - DNA, 25 bp, Homo sapiens
cctggccctttgcacatttttagga

SEQ ID NO: 37342 - DNA, 25 bp, Homo sapiens
cctggaggcaggatctttcatgtta

SEQ ID NO: 37343 - DNA, 25 bp, Homo sapiens
ggtgtccctgcctggcaaaataatg

SEQ ID NO: 37344 - DNA, 25 bp, Homo sapiens
ggcatccacagtcaccttcaagttg

SEQ ID NO: 37345 - DNA, 25 bp, Homo sapiens
cctcttcggtggagttgcagaattc

SEQ ID NO: 37346 - DNA, 25 bp, Homo sapiens
cgaccaggactgaacgtgaactaca

SEQ ID NO: 37347 - DNA, 25 bp, Homo sapiens
ccaccaggtatttgggactttcttc

SEQ ID NO: 37348 - DNA, 25 bp, Homo sapiens
ccagaggaccacttgcggttgattc

SEQ ID NO: 37349 - DNA, 25 bp, Homo sapiens
ctcccttggagtttagtgcattttc

SEQ ID NO: 37350 - DNA, 25 bp, Homo sapiens
ggggttcccatcttcctctgaaagg

SEQ ID NO: 37351 - DNA, 25 bp, Homo sapiens
gcactgattgctcagaggcacctta

SEQ ID NO: 37352 - DNA, 25 bp, Homo sapiens
tacccaggcctgtgtgcactcattc

SEQ ID NO: 37353 - DNA, 25 bp, Homo sapiens
gccacagatggtgagttgcctatta

SEQ ID NO: 37354 - DNA, 25 bp, Homo sapiens
ggatgcttctattgggccctgaatg

SEQ ID NO: 37355 - DNA, 25 bp, Homo sapiens
ggctctcaggagacacccactgttc

SEQ ID NO: 37356 - DNA, 25 bp, Homo sapiens
agcgaaagcccaccttgtctacata

SEQ ID NO: 37357 - DNA, 25 bp, Homo sapiens
gaggccatcctcagtgcatgccaga

SEQ ID NO: 37358 - DNA, 25 bp, Homo sapiens
ggtcccttgtatggcctttgtaaaa

SEQ ID NO: 37359 - DNA, 25 bp, Homo sapiens
tctcgtggggaattctcatcagctg

SEQ ID NO: 37360 - DNA, 25 bp, Homo sapiens
tttgccattgccagtagcctcagtg

SEQ ID NO: 37361 - DNA, 25 bp, Homo sapiens
tctgtaccctcaacaacactggatg

SEQ ID NO: 37362 - DNA, 25 bp, Homo sapiens
gccacggcaacaggatctaaaggta

SEQ ID NO: 37363 - DNA, 25 bp, Homo sapiens
cccaggcacatggtcgccataatca

SEQ ID NO: 37364 - DNA, 25 bp, Homo sapiens
gccagcaagccagccactcaaagtt

SEQ ID NO: 37365 - DNA, 25 bp, Homo sapiens
agggcacgctcttcttccacatctg

SEQ ID NO: 37366 - DNA, 25 bp, Homo sapiens
gcaggacatgcacttgggctcattc

SEQ ID NO: 37367 - DNA, 25 bp, Homo sapiens
ccggtccaacttcacagagggaata

SEQ ID NO: 37368 - DNA, 25 bp, Homo sapiens
tggctcctcacactctgcctttgga

SEQ ID NO: 37369 - DNA, 25 bp, Homo sapiens
tcctatatttcctgcagggtgcttc

SEQ ID NO: 37370 - DNA, 25 bp, Homo sapiens
ggcaatgctaccttttcagtccaga

SEQ ID NO: 37371 - DNA, 25 bp, Homo sapiens
ctgacatccgtgagctccctgaagg

SEQ ID NO: 37372 - DNA, 25 bp, Homo sapiens
gtggaagccctgcatcattaattga

SEQ ID NO: 37373 - DNA, 25 bp, Homo sapiens
ctggttctagcacaaggtccctttc

SEQ ID NO: 37374 - DNA, 25 bp, Homo sapiens
ccctgacggacttggagaatatgcc

SEQ ID NO: 37375 - DNA, 25 bp, Homo sapiens
gctgtctcaacactgctgactaata

SEQ ID NO: 37376 - DNA, 25 bp, Homo sapiens
cattgtcatcagtgggaagggtccc

SEQ ID NO: 37377 - DNA, 25 bp, Homo sapiens
cctgcccgcctgaacatgaaaactg

SEQ ID NO: 37378 - DNA, 25 bp, Homo sapiens
tggcggctgcaggttagatttaatc

SEQ ID NO: 37379 - DNA, 25 bp, Homo sapiens
ccctgccttcctgtcctgtggtaaa

SEQ ID NO: 37380 - DNA, 25 bp, Homo sapiens
gggcctcctctaacggggaatttta

SEQ ID NO: 37381 - DNA, 25 bp, Homo sapiens
gcttgtgctcctccacccatgtgta

SEQ ID NO: 37382 - DNA, 25 bp, Homo sapiens
agcctagggttgacctcctctgaga

SEQ ID NO: 37383 - DNA, 25 bp, Homo sapiens
cccaagaggcagtttacacccagta

SEQ ID NO: 37384 - DNA, 25 bp, Homo sapiens
gtggaaacccacactggcctgcatg

SEQ ID NO: 37385 - DNA, 25 bp, Homo sapiens
cacatccagcttttggggagggtcc

SEQ ID NO: 37386 - DNA, 25 bp, Homo sapiens
cactgagggtggagctctatcaatc

SEQ ID NO: 37387 - DNA, 25 bp, Homo sapiens
gtgaggctctcaaagtgtctccttc

SEQ ID NO: 37388 - DNA, 25 bp, Homo sapiens
ggctctgctaagaatgctgattata

SEQ ID NO: 37389 - DNA, 25 bp, Homo sapiens
gcctgtggtctgtctctaaattctc

SEQ ID NO: 37390 - DNA, 25 bp, Homo sapiens
ggtgcccatgctgtatcttaaaagg

SEQ ID NO: 37391 - DNA, 25 bp, Homo sapiens
cccagccctactcgatggaagatta

SEQ ID NO: 37392 - DNA, 25 bp, Homo sapiens
agtgcctgctcttcctatatgactg

SEQ ID NO: 37393 - DNA, 25 bp, Homo sapiens
aaggccctggcctggaaatcacctg

SEQ ID NO: 37394 - DNA, 25 bp, Homo sapiens
acaattctagtcttctgcctggaga

SEQ ID NO: 37395 - DNA, 25 bp, Homo sapiens
cccagtagctttcatggcccatgtg

SEQ ID NO: 37396 - DNA, 25 bp, Homo sapiens
gcctctgggaacactgggagcatta

SEQ ID NO: 37397 - DNA, 25 bp, Homo sapiens
ggatggctagcctcgcctcacagta

SEQ ID NO: 37398 - DNA, 25 bp, Homo sapiens
ctccgttggcaggtgtgaaccttct

SEQ ID NO: 37399 - DNA, 25 bp, Homo sapiens
tcttgcccagtgaatgatgtgtacc

SEQ ID NO: 37400 - DNA, 25 bp, Homo sapiens
gccggctcctcactacaaaggtatt

SEQ ID NO: 37401 - DNA, 25 bp, Homo sapiens
agccgaggcgttacatcagtctcta

SEQ ID NO: 37402 - DNA, 25 bp, Homo sapiens
cggcctcgtatcagtgcatccagac

SEQ ID NO: 37403 - DNA, 25 bp, Homo sapiens
ccttgagaccctggtgcagataatc

SEQ ID NO: 37404 - DNA, 25 bp, Homo sapiens
tcctttgcaggcgtgactttgttta

SEQ ID NO: 37405 - DNA, 25 bp, Homo sapiens
agtgactggtgcacgtcttcctcca

SEQ ID NO: 37406 - DNA, 25 bp, Homo sapiens
caaccgggaatgtgactgctgtgca

SEQ ID NO: 37407 - DNA, 25 bp, Homo sapiens
ggggcttcatcatctctcaaaactg

SEQ ID NO: 37408 - DNA, 25 bp, Homo sapiens
tgccacccttttgccaatgtgattg

SEQ ID NO: 37409 - DNA, 25 bp, Homo sapiens
ggtgttgaacttcctgggcattttg

SEQ ID NO: 37410 - DNA, 25 bp, Homo sapiens
tatcaggccttgtgacccttaggtc

SEQ ID NO: 37411 - DNA, 25 bp, Homo sapiens
atgccatgctcccatctgttcaagg

SEQ ID NO: 37412 - DNA, 25 bp, Homo sapiens
ggagatgctctcaaatccagagtca

SEQ ID NO: 37413 - DNA, 25 bp, Homo sapiens
ttaggaaggatggtaagcagagaga

SEQ ID NO: 37414 - DNA, 25 bp, Homo sapiens
aatttgttatttaatgtctgtcgtg

SEQ ID NO: 37415 - DNA, 25 bp, Homo sapiens
ccatagttcagcaaccgcggggaga

SEQ ID NO: 37416 - DNA, 25 bp, Homo sapiens
gaaactgtgtgcctacctgtggaaa

SEQ ID NO: 37417 - DNA, 25 bp, Homo sapiens
cattgaatttcaggccatacggtta

SEQ ID NO: 37418 - DNA, 25 bp, Homo sapiens
ctgctctgcgtacacaacctgaatg

SEQ ID NO: 37419 - DNA, 25 bp, Homo sapiens
ttcccagaactgtcccagaaagatg

SEQ ID NO: 37420 - DNA, 25 bp, Homo sapiens
cccttcctggggatatagaaaattc

SEQ ID NO: 37421 - DNA, 25 bp, Homo sapiens
ttcctccctaggcaagttaatcaga

SEQ ID NO: 37422 - DNA, 25 bp, Homo sapiens
gagtcctctctgttgcatcctattg

SEQ ID NO: 37423 - DNA, 25 bp, Homo sapiens
tgaggagtttgccatgccttgaata

SEQ ID NO: 37424 - DNA, 25 bp, Homo sapiens
ttctccaagtgcaacgccgaagctg

SEQ ID NO: 37425 - DNA, 25 bp, Homo sapiens
tacctctaacaaagattactaaggc

SEQ ID NO: 37426 - DNA, 25 bp, Homo sapiens
ggggttccttatacttggacagata

SEQ ID NO: 37427 - DNA, 25 bp, Homo sapiens
gtaccttcgacattctgatccttga

SEQ ID NO: 37428 - DNA, 25 bp, Homo sapiens
gggagggtccttcaaagctccttta

SEQ ID NO: 37429 - DNA, 25 bp, Homo sapiens
tgcctgagtgaggaaacagtcttca

SEQ ID NO: 37430 - DNA, 25 bp, Homo sapiens
ggtggactccacactgcctcacgga

SEQ ID NO: 37431 - DNA, 25 bp, Homo sapiens
tgacgcccttgcttccctattgtag

SEQ ID NO: 37432 - DNA, 25 bp, Homo sapiens
ctcttgtaaacctgtgggagggccc

SEQ ID NO: 37433 - DNA, 25 bp, Homo sapiens
acgtcaggatgcaggccacaagcca

SEQ ID NO: 37434 - DNA, 25 bp, Homo sapiens
ttgccatctctatgctgttatcagc

SEQ ID NO: 37435 - DNA, 25 bp, Homo sapiens
tgtgcaccggcaaacagcagctctc

SEQ ID NO: 37436 - DNA, 25 bp, Homo sapiens
aggctggtttctcttgacatctctg

SEQ ID NO: 37437 - DNA, 25 bp, Homo sapiens
tgggcaccctggatcaactcttctc

SEQ ID NO: 37438 - DNA, 25 bp, Homo sapiens
gggctgaactggagaacctcaaaca

SEQ ID NO: 37439 - DNA, 25 bp, Homo sapiens
cctcagctggggtttcctgaattta

SEQ ID NO: 37440 - DNA, 25 bp, Homo sapiens
caccagccggatattcatgtcgata

SEQ ID NO: 37441 - DNA, 25 bp, Homo sapiens
ggcctgcagtcccttgaaaaacttt

SEQ ID NO: 37442 - DNA, 25 bp, Homo sapiens
aacaggctgcttgcgttgatcaatg

SEQ ID NO: 37443 - DNA, 25 bp, Homo sapiens
ggcctgagcttccacccatgaaatg

SEQ ID NO: 37444 - DNA, 25 bp, Homo sapiens
gattcggctacccaaggcatttgca

SEQ ID NO: 37445 - DNA, 25 bp, Homo sapiens
ggctcttgtgtacctgcatatggca

SEQ ID NO: 37446 - DNA, 25 bp, Homo sapiens
tcccaggtagctttccattgacaca

SEQ ID NO: 37447 - DNA, 25 bp, Homo sapiens
ctcctcctaggaattggctttttac

SEQ ID NO: 37448 - DNA, 25 bp, Homo sapiens
gcccgtggctgatcttgctcacaga

SEQ ID NO: 37449 - DNA, 25 bp, Homo sapiens
ccacagctttgtaggtgaagagatc

SEQ ID NO: 37450 - DNA, 25 bp, Homo sapiens
gcatctgtggtctccctggtactta

SEQ ID NO: 37451 - DNA, 25 bp, Homo sapiens
gtagtctcttcttatccacccatgg

SEQ ID NO: 37452 - DNA, 25 bp, Homo sapiens
tcaccgtggcaaggggtacagatta

SEQ ID NO: 37453 - DNA, 25 bp, Homo sapiens
gtgttgacacagctcctggatctga

SEQ ID NO: 37454 - DNA, 25 bp, Homo sapiens
aggggcctttttcccggtagcttca

SEQ ID NO: 37455 - DNA, 25 bp, Homo sapiens
ttgatcccacgctgtctccactatg

SEQ ID NO: 37456 - DNA, 25 bp, Homo sapiens
aagcagcagttctctaggatttgac

SEQ ID NO: 37457 - DNA, 25 bp, Homo sapiens
tcatcgtgtctcaagcggcagctct

SEQ ID NO: 37458 - DNA, 25 bp, Homo sapiens
gcacgtgccctagtacctgggttca

(The sequence listing continues in the following parts.)
